United States Patent Application Publication US 2016/0319361 A1 - sequence listing, part 4

SEQ ID NO: 78556 - DNA, 30 bp, Artificial Sequence
  Synthetic oligonucleotide
gacgcaagggaaaatttggctgcacggagc

SEQ ID NO: 78557 - DNA, 30 bp, Artificial Sequence
  Synthetic oligonucleotide
ccgcggggcaacacgcacatcgtccggagc

SEQ ID NO: 78558 - DNA, 30 bp, Artificial Sequence
  Synthetic oligonucleotide
taggcagggccaaaccgaatcggtcggagc

SEQ ID NO: 78559 - DNA, 30 bp, Artificial Sequence
  Synthetic oligonucleotide
ggaccaaaagatggatccaacacatggagc

SEQ ID NO: 78560 - DNA, 30 bp, Artificial Sequence
  Synthetic oligonucleotide
gctaggtgacaattcggactttacatgagc

SEQ ID NO: 78561 - DNA, 30 bp, Artificial Sequence
  Synthetic oligonucleotide
cgtgctgggaactttctataactcatgagc

SEQ ID NO: 78562 - DNA, 30 bp, Artificial Sequence
  Synthetic oligonucleotide
aggtcaatgtcacagtcggccgttatgagc

SEQ ID NO: 78563 - DNA, 30 bp, Artificial Sequence
  Synthetic oligonucleotide
gcagggtaaggaggatctcggctactgagc

SEQ ID NO: 78564 - DNA, 30 bp, Artificial Sequence
  Synthetic oligonucleotide
gttcggggcccacgaaaggcggctgtgagc

SEQ ID NO: 78565 - DNA, 30 bp, Artificial Sequence
  Synthetic oligonucleotide
agcttataagaatggtaggggagtgtgagc

SEQ ID NO: 78566 - DNA, 30 bp, Artificial Sequence
  Synthetic oligonucleotide
cctgaaccttcaaacggctgaattgtgagc

SEQ ID NO: 78567 - DNA, 30 bp, Artificial Sequence
  Synthetic oligonucleotide
cgaccaccattgaaccataggttgaatagc

SEQ ID NO: 78568 - DNA, 30 bp, Artificial Sequence
  Synthetic oligonucleotide
cggggacaataggctattttctacgatagc

SEQ ID NO: 78569 - DNA, 30 bp, Artificial Sequence
  Synthetic oligonucleotide
ggttaaagcacataacacgagttcgatagc

SEQ ID NO: 78570 - DNA, 30 bp, Artificial Sequence
  Synthetic oligonucleotide
cgtagtggattaagcgcaaaactctatagc

SEQ ID NO: 78571 - DNA, 30 bp, Artificial Sequence
  Synthetic oligonucleotide
tacgtgttacggaccgtatcattctatagc

SEQ ID NO: 78572 - DNA, 30 bp, Artificial Sequence
  Synthetic oligonucleotide
gggggttacgcatttagagcgaattatagc

SEQ ID NO: 78573 - DNA, 30 bp, Artificial Sequence
  Synthetic oligonucleotide
tgaccgcgtctgataaacatcacagctagc

SEQ ID NO: 78574 - DNA, 30 bp, Artificial Sequence
  Synthetic oligonucleotide
cctggcacaaagcgagtggcacgggctagc

SEQ ID NO: 78575 - DNA, 30 bp, Artificial Sequence
  Synthetic oligonucleotide
taaagaaacctaaggaagcgagctgctagc

SEQ ID NO: 78576 - DNA, 30 bp, Artificial Sequence
  Synthetic oligonucleotide
ctactgccaacagcagttattcgaagtagc

SEQ ID NO: 78577 - DNA, 30 bp, Artificial Sequence
  Synthetic oligonucleotide
gtagggcgacgatactcgctctctcgtagc

SEQ ID NO: 78578 - DNA, 30 bp, Artificial Sequence
  Synthetic oligonucleotide
cctacactaagcgtcgatcacatgggtagc

SEQ ID NO: 78579 - DNA, 30 bp, Artificial Sequence
  Synthetic oligonucleotide
ctgggttaggtcagtcacgtctggtgtagc

SEQ ID NO: 78580 - DNA, 30 bp, Artificial Sequence
  Synthetic oligonucleotide
gcatcaccaaagtctgtaaacgtaattagc

SEQ ID NO: 78581 - DNA, 30 bp, Artificial Sequence
  Synthetic oligonucleotide
accagaactgatcatgccacaggtattagc

SEQ ID NO: 78582 - DNA, 30 bp, Artificial Sequence
  Synthetic oligonucleotide
atgcggtattgtataggtcatcacgttagc

SEQ ID NO: 78583 - DNA, 30 bp, Artificial Sequence
  Synthetic oligonucleotide
aaacatcgctaatgagtgcacccaaaacgc

SEQ ID NO: 78584 - DNA, 30 bp, Artificial Sequence
  Synthetic oligonucleotide
gatagttggacaaccgtggtacggaaacgc

SEQ ID NO: 78585 - DNA, 30 bp, Artificial Sequence
  Synthetic oligonucleotide
acgagggattaagaaattacgatgaaacgc

SEQ ID NO: 78586 - DNA, 30 bp, Artificial Sequence
  Synthetic oligonucleotide
actttaagaccctcacccggagaacaacgc

SEQ ID NO: 78587 - DNA, 30 bp, Artificial Sequence
  Synthetic oligonucleotide
ttagtcaggctgctacagaatcaggaacgc

SEQ ID NO: 78588 - DNA, 30 bp, Artificial Sequence
  Synthetic oligonucleotide
tgagggtagtagaagcggatatcttaacgc

SEQ ID NO: 78589 - DNA, 30 bp, Artificial Sequence
  Synthetic oligonucleotide
gctaccatgactgtcattagagagccacgc

SEQ ID NO: 78590 - DNA, 30 bp, Artificial Sequence
  Synthetic oligonucleotide
acggggatcaagtccgagggaaaggcacgc

SEQ ID NO: 78591 - DNA, 30 bp, Artificial Sequence
  Synthetic oligonucleotide
caagtcgtgcgactgtgcgcagaggcacgc

SEQ ID NO: 78592 - DNA, 30 bp, Artificial Sequence
  Synthetic oligonucleotide
gacggttacggtctggagcttacatcacgc

SEQ ID NO: 78593 - DNA, 30 bp, Artificial Sequence
  Synthetic oligonucleotide
gtgctctcgaactgaattaacatctcacgc

SEQ ID NO: 78594 - DNA, 30 bp, Artificial Sequence
  Synthetic oligonucleotide
catggagtagattgatatcgaacttcacgc

SEQ ID NO: 78595 - DNA, 30 bp, Artificial Sequence
  Synthetic oligonucleotide
agtggacatatgtacgtggggtcaatacgc

SEQ ID NO: 78596 - DNA, 30 bp, Artificial Sequence
  Synthetic oligonucleotide
cgtacaatgcgcaggaaaagacgaatacgc

SEQ ID NO: 78597 - DNA, 30 bp, Artificial Sequence
  Synthetic oligonucleotide
caggtacagggagagcaacgtacactacgc

SEQ ID NO: 78598 - DNA, 30 bp, Artificial Sequence
  Synthetic oligonucleotide
tcagaaaacatgctgatcaggataaaccgc

SEQ ID NO: 78599 - DNA, 30 bp, Artificial Sequence
  Synthetic oligonucleotide
gagttgggaacgaaacagtgatggcaccgc

SEQ ID NO: 78600 - DNA, 30 bp, Artificial Sequence
  Synthetic oligonucleotide
cggactatggcaggcggaatcagttaccgc

SEQ ID NO: 78601 - DNA, 30 bp, Artificial Sequence
  Synthetic oligonucleotide
gtcaatcgcgaagggaatacccagacccgc

SEQ ID NO: 78602 - DNA, 30 bp, Artificial Sequence
  Synthetic oligonucleotide
tccagcagaagaaggagttgggaagcccgc

SEQ ID NO: 78603 - DNA, 30 bp, Artificial Sequence
  Synthetic oligonucleotide
gagcgccgacatgtacgaactacgagccgc

SEQ ID NO: 78604 - DNA, 30 bp, Artificial Sequence
  Synthetic oligonucleotide
ctgcactatttaccagggagatcgggccgc

SEQ ID NO: 78605 - DNA, 30 bp, Artificial Sequence
  Synthetic oligonucleotide
agcacggggaggacgcggtaacagtgccgc

SEQ ID NO: 78606 - DNA, 30 bp, Artificial Sequence
  Synthetic oligonucleotide
tcttatcgataagaacgtatacccatccgc

SEQ ID NO: 78607 - DNA, 30 bp, Artificial Sequence
  Synthetic oligonucleotide
gtgatgtccatcaccggatcatgcctccgc

SEQ ID NO: 78608 - DNA, 30 bp, Artificial Sequence
  Synthetic oligonucleotide
aaggaagtcgctttaatcgtgctgctccgc

SEQ ID NO: 78609 - DNA, 30 bp, Artificial Sequence
  Synthetic oligonucleotide
ttaacatgttagagaacgaaataggtccgc

SEQ ID NO: 78610 - DNA, 30 bp, Artificial Sequence
  Synthetic oligonucleotide
tgtagaattccggtcaggtcaacggtccgc

SEQ ID NO: 78611 - DNA, 30 bp, Artificial Sequence
  Synthetic oligonucleotide
acaccaaaagcccattcaacgtcggtccgc

SEQ ID NO: 78612 - DNA, 30 bp, Artificial Sequence
  Synthetic oligonucleotide
tctcaatgtggtcatataatcggattccgc

SEQ ID NO: 78613 - DNA, 30 bp, Artificial Sequence
  Synthetic oligonucleotide
attcttccggaacaagcgaaaaagaagcgc

SEQ ID NO: 78614 - DNA, 30 bp, Artificial Sequence
  Synthetic oligonucleotide
tgagagtactggattactaccccgaagcgc

SEQ ID NO: 78615 - DNA, 30 bp, Artificial Sequence
  Synthetic oligonucleotide
gaaaccttgcatgatctgaacctacagcgc

SEQ ID NO: 78616 - DNA, 30 bp, Artificial Sequence
  Synthetic oligonucleotide
gcgtcaataacttgatccagcctatagcgc

SEQ ID NO: 78617 - DNA, 30 bp, Artificial Sequence
  Synthetic oligonucleotide
caggggtgttgcgattgaacgggttagcgc

SEQ ID NO: 78618 - DNA, 30 bp, Artificial Sequence
  Synthetic oligonucleotide
caagaatatagaaacatctagtccacgcgc

SEQ ID NO: 78619 - DNA, 30 bp, Artificial Sequence
  Synthetic oligonucleotide
gacagctgtcaagacacagtagaatcgcgc

SEQ ID NO: 78620 - DNA, 30 bp, Artificial Sequence
  Synthetic oligonucleotide
catacaagttagagaagaccaacgcggcgc

SEQ ID NO: 78621 - DNA, 30 bp, Artificial Sequence
  Synthetic oligonucleotide
gtaagagctgggaaatcaagtactcggcgc

SEQ ID NO: 78622 - DNA, 30 bp, Artificial Sequence
  Synthetic oligonucleotide
cctaagtcacagaggtatccattgtggcgc

SEQ ID NO: 78623 - DNA, 30 bp, Artificial Sequence
  Synthetic oligonucleotide
gcgatcgagaattgatcataaagaatgcgc

SEQ ID NO: 78624 - DNA, 30 bp, Artificial Sequence
  Synthetic oligonucleotide
ccctcgcgtttaaccgacatcagaatgcgc

SEQ ID NO: 78625 - DNA, 30 bp, Artificial Sequence
  Synthetic oligonucleotide
aggatagatcgtgatagcgggaagatgcgc

SEQ ID NO: 78626 - DNA, 30 bp, Artificial Sequence
  Synthetic oligonucleotide
caccactctagcacataatgaggattgcgc

SEQ ID NO: 78627 - DNA, 30 bp, Artificial Sequence
  Synthetic oligonucleotide
tccgacaactccatggaccgtgcccatcgc

SEQ ID NO: 78628 - DNA, 30 bp, Artificial Sequence
  Synthetic oligonucleotide
ccggttcgcggttaaaaacgtcgggatcgc

SEQ ID NO: 78629 - DNA, 30 bp, Artificial Sequence
  Synthetic oligonucleotide
aggcgtcgggatcagacttatgggtatcgc

SEQ ID NO: 78630 - DNA, 30 bp, Artificial Sequence
  Synthetic oligonucleotide
acacggcccttatacacgcatataactcgc

SEQ ID NO: 78631 - DNA, 30 bp, Artificial Sequence
  Synthetic oligonucleotide
aaaaaagaccgctcggatcgccatactcgc

SEQ ID NO: 78632 - DNA, 30 bp, Artificial Sequence
  Synthetic oligonucleotide
ggacactagtccttcgaaaatcatactcgc

SEQ ID NO: 78633 - DNA, 30 bp, Artificial Sequence
  Synthetic oligonucleotide
cgagttcacgtggcattgcaaacccctcgc

SEQ ID NO: 78634 - DNA, 30 bp, Artificial Sequence
  Synthetic oligonucleotide
gtaatgggtcgaaacacgagatttgctcgc

SEQ ID NO: 78635 - DNA, 30 bp, Artificial Sequence
  Synthetic oligonucleotide
ttggttccaggaagtacttgttgctctcgc

SEQ ID NO: 78636 - DNA, 30 bp, Artificial Sequence
  Synthetic oligonucleotide
cggagagaccagtcgattacaggttctcgc

SEQ ID NO: 78637 - DNA, 30 bp, Artificial Sequence
  Synthetic oligonucleotide
agtgccacgagataacgctgaccaagtcgc

SEQ ID NO: 78638 - DNA, 30 bp, Artificial Sequence
  Synthetic oligonucleotide
acatagagggattaggaaataccaagtcgc

SEQ ID NO: 78639 - DNA, 30 bp, Artificial Sequence
  Synthetic oligonucleotide
gggccgtggttcggtaacaactctcgtcgc

SEQ ID NO: 78640 - DNA, 30 bp, Artificial Sequence
  Synthetic oligonucleotide
atcacctattgggaacacaagtactgtcgc

SEQ ID NO: 78641 - DNA, 30 bp, Artificial Sequence
  Synthetic oligonucleotide
aaccatagaggtattcggagtcagtgtcgc

SEQ ID NO: 78642 - DNA, 30 bp, Artificial Sequence
  Synthetic oligonucleotide
cactgagtctcgtgtgtcaattagtgtcgc

SEQ ID NO: 78643 - DNA, 30 bp, Artificial Sequence
  Synthetic oligonucleotide
atcagacagcatacccaggggcaaattcgc

SEQ ID NO: 78644 - DNA, 30 bp, Artificial Sequence
  Synthetic oligonucleotide
aacggagacatcgaacatggattaattcgc

SEQ ID NO: 78645 - DNA, 30 bp, Artificial Sequence
  Synthetic oligonucleotide
cgtggaggctagtggcaagtgaattttcgc

SEQ ID NO: 78646 - DNA, 30 bp, Artificial Sequence
  Synthetic oligonucleotide
tgctcctaagggaaacggtgacaaaaaggc

SEQ ID NO: 78647 - DNA, 30 bp, Artificial Sequence
  Synthetic oligonucleotide
cccaacccgactatctacggcgtaaaaggc

SEQ ID NO: 78648 - DNA, 30 bp, Artificial Sequence
  Synthetic oligonucleotide
tgtcaattgagacaaaaaggaatgcaaggc

SEQ ID NO: 78649 - DNA, 30 bp, Artificial Sequence
  Synthetic oligonucleotide
aatacgtaggcataaccctaattagaaggc

SEQ ID NO: 78650 - DNA, 30 bp, Artificial Sequence
  Synthetic oligonucleotide
taggtgagcacatcgcttcagcgcgaaggc

SEQ ID NO: 78651 - DNA, 30 bp, Artificial Sequence
  Synthetic oligonucleotide
cacggtttcgaagaagcaacctctgaaggc

SEQ ID NO: 78652 - DNA, 30 bp, Artificial Sequence
  Synthetic oligonucleotide
agattaaatattgaatagtggacgtaaggc

SEQ ID NO: 78653 - DNA, 30 bp, Artificial Sequence
  Synthetic oligonucleotide
ggacacttcactaaaggtttagcgtaaggc

SEQ ID NO: 78654 - DNA, 30 bp, Artificial Sequence
  Synthetic oligonucleotide
agaccatttgaatgtaagtcagtagcaggc

SEQ ID NO: 78655 - DNA, 30 bp, Artificial Sequence
  Synthetic oligonucleotide
actagaacccagtgaacgctgatggcaggc

SEQ ID NO: 78656 - DNA, 30 bp, Artificial Sequence
  Synthetic oligonucleotide
ttatgaggaaccactccgactaaccgaggc

SEQ ID NO: 78657 - DNA, 31 bp, Artificial Sequence
  Synthetic oligonucleotide
cataagcgagctgctgacactacaatgaggc

SEQ ID NO: 78658 - DNA, 30 bp, Artificial Sequence
  Synthetic oligonucleotide
gctcactgaatagactagggaaactgaggc

SEQ ID NO: 78659 - DNA, 30 bp, Artificial Sequence
  Synthetic oligonucleotide
acgtccggacgagatgtgtgcgtgataggc

SEQ ID NO: 78660 - DNA, 30 bp, Artificial Sequence
  Synthetic oligonucleotide
gaacattgtcgataaggtaacggtgtaggc

SEQ ID NO: 78661 - DNA, 30 bp, Artificial Sequence
  Synthetic oligonucleotide
tacggcgaaggggttcaagttagattaggc

SEQ ID NO: 78662 - DNA, 30 bp, Artificial Sequence
  Synthetic oligonucleotide
gagctcacgtggtcggcactgggcttaggc

SEQ ID NO: 78663 - DNA, 30 bp, Artificial Sequence
  Synthetic oligonucleotide
catgatgaaaaacacaggttccaaaacggc

SEQ ID NO: 78664 - DNA, 30 bp, Artificial Sequence
  Synthetic oligonucleotide
cgttgaatctagaggtgcatatctaacggc

SEQ ID NO: 78665 - DNA, 30 bp, Artificial Sequence
  Synthetic oligonucleotide
gacgggtaatgtcatcgctcgagggacggc

SEQ ID NO: 78666 - DNA, 30 bp, Artificial Sequence
  Synthetic oligonucleotide
taggatcgtgtgggggcgtaactatacggc

SEQ ID NO: 78667 - DNA, 28 bp, Artificial Sequence
  Synthetic oligonucleotide
aggttggaaaattgcaaggtactacggc

SEQ ID NO: 78668 - DNA, 30 bp, Artificial Sequence
  Synthetic oligonucleotide
ttgctcgatggaggacatagggcctacggc

SEQ ID NO: 78669 - DNA, 30 bp, Artificial Sequence
  Synthetic oligonucleotide
caggaggctagatcatagttacttaccggc

SEQ ID NO: 78670 - DNA, 30 bp, Artificial Sequence
  Synthetic oligonucleotide
gaaaggttcaatatcttacgaggtcccggc

SEQ ID NO: 78671 - DNA, 30 bp, Artificial Sequence
  Synthetic oligonucleotide
gaccgtgaataatggtgacacttgtccggc

SEQ ID NO: 78672 - DNA, 30 bp, Artificial Sequence
  Synthetic oligonucleotide
cggagaagtctccttctagtacggcgcggc

SEQ ID NO: 78673 - DNA, 30 bp, Artificial Sequence
  Synthetic oligonucleotide
cgtaaattgtctgcattacgtataggcggc

SEQ ID NO: 78674 - DNA, 30 bp, Artificial Sequence
  Synthetic oligonucleotide
cggatggtattcctttacgaatcatgcggc

SEQ ID NO: 78675 - DNA, 30 bp, Artificial Sequence
  Synthetic oligonucleotide
ggtcatacctctaagtttcgactgtgcggc

SEQ ID NO: 78676 - DNA, 30 bp, Artificial Sequence
  Synthetic oligonucleotide
acggtaagccactaggccggcgcaatcggc

SEQ ID NO: 78677 - DNA, 30 bp, Artificial Sequence
  Synthetic oligonucleotide
aaacgcatccaagcatacggcatcctcggc

SEQ ID NO: 78678 - DNA, 30 bp, Artificial Sequence
  Synthetic oligonucleotide
acgggacaggcgtcgaatacatccgtcggc

SEQ ID NO: 78679 - DNA, 30 bp, Artificial Sequence
  Synthetic oligonucleotide
actccaggaaactgaacactataggtcggc

SEQ ID NO: 78680 - DNA, 30 bp, Artificial Sequence
  Synthetic oligonucleotide
ctgggcatttgcggtctctctattgtcggc

SEQ ID NO: 78681 - DNA, 30 bp, Artificial Sequence
  Synthetic oligonucleotide
ttcgcagacaaagggtgggtcgccttcggc

SEQ ID NO: 78682 - DNA, 30 bp, Artificial Sequence
  Synthetic oligonucleotide
gtattcaggtgcatgaggtgagacaagggc

SEQ ID NO: 78683 - DNA, 31 bp, Artificial Sequence
  Synthetic oligonucleotide
gaggtaatacgaaacacctctggggaagggc

SEQ ID NO: 78684 - DNA, 30 bp, Artificial Sequence
  Synthetic oligonucleotide
catgctgtaattcgggtttcgatgaagggc

SEQ ID NO: 78685 - DNA, 30 bp, Artificial Sequence
  Synthetic oligonucleotide
gcgtacggttgcgacattcagggtaagggc

SEQ ID NO: 78686 - DNA, 30 bp, Artificial Sequence
  Synthetic oligonucleotide
tactcgaagttgacaatgtgcgaggagggc

SEQ ID NO: 78687 - DNA, 30 bp, Artificial Sequence
  Synthetic oligonucleotide
cgacgttagggaccaagttgctcggagggc

SEQ ID NO: 78688 - DNA, 30 bp, Artificial Sequence
  Synthetic oligonucleotide
ccgaaacgattttgcggttatacctagggc

SEQ ID NO: 78689 - DNA, 30 bp, Artificial Sequence
  Synthetic oligonucleotide
aaacgtggattagctaagctgtctgcgggc

SEQ ID NO: 78690 - DNA, 30 bp, Artificial Sequence
  Synthetic oligonucleotide
acttcggacatgcttccttaccaatcgggc

SEQ ID NO: 78691 - DNA, 30 bp, Artificial Sequence
  Synthetic oligonucleotide
ggaaggtatattcgctaaagggggtcgggc

SEQ ID NO: 78692 - DNA, 30 bp, Artificial Sequence
  Synthetic oligonucleotide
tctcaggagaaaaaatatgtagcaaggggc

SEQ ID NO: 78693 - DNA, 30 bp, Artificial Sequence
  Synthetic oligonucleotide
tatgaggcgactaagttacattcgcggggc

SEQ ID NO: 78694 - DNA, 30 bp, Artificial Sequence
  Synthetic oligonucleotide
cagcaagtaaacgagtagtcattagggggc

SEQ ID NO: 78695 - DNA, 30 bp, Artificial Sequence
  Synthetic oligonucleotide
aatacaccaaccggagaccggtactggggc

SEQ ID NO: 78696 - DNA, 30 bp, Artificial Sequence
  Synthetic oligonucleotide
gaagtcacggtcttcagaaggtgctggggc

SEQ ID NO: 78697 - DNA, 30 bp, Artificial Sequence
  Synthetic oligonucleotide
cgtgggacgatagtgctccggtagtggggc

SEQ ID NO: 78698 - DNA, 30 bp, Artificial Sequence
  Synthetic oligonucleotide
cgtattgtgaacgatgttagaccttggggc

SEQ ID NO: 78699 - DNA, 30 bp, Artificial Sequence
  Synthetic oligonucleotide
actgacccgatgagcgcggattgaatgggc

SEQ ID NO: 78700 - DNA, 30 bp, Artificial Sequence
  Synthetic oligonucleotide
tcgaggcgtagacagacataattaatgggc

SEQ ID NO: 78701 - DNA, 30 bp, Artificial Sequence
  Synthetic oligonucleotide
ctacgcggggtacgagtaactagtatgggc

SEQ ID NO: 78702 - DNA, 30 bp, Artificial Sequence
  Synthetic oligonucleotide
actcatatcacatcagaacttggactgggc

SEQ ID NO: 78703 - DNA, 30 bp, Artificial Sequence
  Synthetic oligonucleotide
taaaccgcggtcaaacaacgagccgtgggc

SEQ ID NO: 78704 - DNA, 30 bp, Artificial Sequence
  Synthetic oligonucleotide
tgcaagtcggggtccgagggattgaatggc

SEQ ID NO: 78705 - DNA, 30 bp, Artificial Sequence
  Synthetic oligonucleotide
atcgagagggcccagatggggtctaatggc

SEQ ID NO: 78706 - DNA, 30 bp, Artificial Sequence
  Synthetic oligonucleotide
tcaatgtcgctagatagggagagaactggc

SEQ ID NO: 78707 - DNA, 30 bp, Artificial Sequence
  Synthetic oligonucleotide
gtgtatgtttaagagtgcgacccatctggc

SEQ ID NO: 78708 - DNA, 30 bp, Artificial Sequence
  Synthetic oligonucleotide
gcgttgtcccggtgcgatggatagagtggc

SEQ ID NO: 78709 - DNA, 30 bp, Artificial Sequence
  Synthetic oligonucleotide
catagtcggagaagtatctaaaagcgtggc

SEQ ID NO: 78710 - DNA, 30 bp, Artificial Sequence
  Synthetic oligonucleotide
ggagacacacccattggctgtgtaggtggc

SEQ ID NO: 78711 - DNA, 30 bp, Artificial Sequence
  Synthetic oligonucleotide
cacagagcgccggcaacgttaactggtggc

SEQ ID NO: 78712 - DNA, 30 bp, Artificial Sequence
  Synthetic oligonucleotide
acacgatagtagagtcgctcattctgtggc

SEQ ID NO: 78713 - DNA, 30 bp, Artificial Sequence
  Synthetic oligonucleotide
tcacattgcggcgcaagactgcagtgtggc

SEQ ID NO: 78714 - DNA, 30 bp, Artificial Sequence
  Synthetic oligonucleotide
aggtacgagggcagtgtaggcaaacttggc

SEQ ID NO: 78715 - DNA, 30 bp, Artificial Sequence
  Synthetic oligonucleotide
aggtgagggaccattactgggcaacttggc

SEQ ID NO: 78716 - DNA, 30 bp, Artificial Sequence
  Synthetic oligonucleotide
gcgtatatgagtcagacaagtacgcttggc

SEQ ID NO: 78717 - DNA, 30 bp, Artificial Sequence
  Synthetic oligonucleotide
gtacgtacctcagtggataccggtcttggc

SEQ ID NO: 78718 - DNA, 30 bp, Artificial Sequence
  Synthetic oligonucleotide
gacgtgttgagggtcttcccttgagttggc

SEQ ID NO: 78719 - DNA, 30 bp, Artificial Sequence
  Synthetic oligonucleotide
cgagaggttgatacaatcggccttgttggc

SEQ ID NO: 78720 - DNA, 30 bp, Artificial Sequence
  Synthetic oligonucleotide
tctggaagtgtaggctctaatgcgtttggc

SEQ ID NO: 78721 - DNA, 30 bp, Artificial Sequence
  Synthetic oligonucleotide
ccagaaatcgaggatcgaatcagttttggc

SEQ ID NO: 78722 - DNA, 30 bp, Artificial Sequence
  Synthetic oligonucleotide
cacggtagtcggttcagtttaaggaaatgc

SEQ ID NO: 78723 - DNA, 30 bp, Artificial Sequence
  Synthetic oligonucleotide
tcgaccaggaactaccgggtgcaacaatgc

SEQ ID NO: 78724 - DNA, 30 bp, Artificial Sequence
  Synthetic oligonucleotide
aaaacaggcggagatattaggagacaatgc

SEQ ID NO: 78725 - DNA, 30 bp, Artificial Sequence
  Synthetic oligonucleotide
agatccggcacggggaggtagctgcaatgc

SEQ ID NO: 78726 - DNA, 30 bp, Artificial Sequence
  Synthetic oligonucleotide
tgtgaatgaggactcgcggactaagaatgc

SEQ ID NO: 78727 - DNA, 30 bp, Artificial Sequence
  Synthetic oligonucleotide
cgtcaattcgggaagctattcacataatgc

SEQ ID NO: 78728 - DNA, 30 bp, Artificial Sequence
  Synthetic oligonucleotide
gccgttagaaacatatagcatcactaatgc

SEQ ID NO: 78729 - DNA, 30 bp, Artificial Sequence
  Synthetic oligonucleotide
ggtaccgattccttatgagggaccacatgc

SEQ ID NO: 78730 - DNA, 30 bp, Artificial Sequence
  Synthetic oligonucleotide
gagagttgacctggcaaaaggcgcacatgc

SEQ ID NO: 78731 - DNA, 30 bp, Artificial Sequence
  Synthetic oligonucleotide
gcgtcttaaatagcagattaccgaccatgc

SEQ ID NO: 78732 - DNA, 30 bp, Artificial Sequence
  Synthetic oligonucleotide
gtaatggagagaaactgtcaatgggcatgc

SEQ ID NO: 78733 - DNA, 30 bp, Artificial Sequence
  Synthetic oligonucleotide
gtacgggagcgatacgcagtgggcagatgc

SEQ ID NO: 78734 - DNA, 30 bp, Artificial Sequence
  Synthetic oligonucleotide
attggcggatccataaaggaagcgcgatgc

SEQ ID NO: 78735 - DNA, 30 bp, Artificial Sequence
  Synthetic oligonucleotide
gggcggagccgcaaccccagagcaggatgc

SEQ ID NO: 78736 - DNA, 30 bp, Artificial Sequence
  Synthetic oligonucleotide
agatcgccaaccgggacggatgaggtatgc

SEQ ID NO: 78737 - DNA, 30 bp, Artificial Sequence
  Synthetic oligonucleotide
cagatctagttccagtgcaactcggtatgc

SEQ ID NO: 78738 - DNA, 30 bp, Artificial Sequence
  Synthetic oligonucleotide
tggatccgggtccgcaaaaaaacttactgc

SEQ ID NO: 78739 - DNA, 30 bp, Artificial Sequence
  Synthetic oligonucleotide
accagggaaggcgtacgcaagttaacctgc

SEQ ID NO: 78740 - DNA, 30 bp, Artificial Sequence
  Synthetic oligonucleotide
ggatgtactcatggaagaaacgagacctgc

SEQ ID NO: 78741 - DNA, 30 bp, Artificial Sequence
  Synthetic oligonucleotide
cacgcggaaggggattaattcagtacctgc

SEQ ID NO: 78742 - DNA, 30 bp, Artificial Sequence
  Synthetic oligonucleotide
agagattatctaataggcacaattcgctgc

SEQ ID NO: 78743 - DNA, 30 bp, Artificial Sequence
  Synthetic oligonucleotide
acgacttataaaagaccattctccggctgc

SEQ ID NO: 78744 - DNA, 30 bp, Artificial Sequence
  Synthetic oligonucleotide
agccccgagtcctccgtaaaatatggctgc

SEQ ID NO: 78745 - DNA, 30 bp, Artificial Sequence
  Synthetic oligonucleotide
agagcacgacgagtgaccgcctcaatctgc

SEQ ID NO: 78746 - DNA, 30 bp, Artificial Sequence
  Synthetic oligonucleotide
cttgtaatctgggtcggatcacgtgtctgc

SEQ ID NO: 78747 - DNA, 30 bp, Artificial Sequence
  Synthetic oligonucleotide
tgatataagcggggactgagccgtgtctgc

SEQ ID NO: 78748 - DNA, 30 bp, Artificial Sequence
  Synthetic oligonucleotide
tgatacggatcatggattaaagagttctgc

SEQ ID NO: 78749 - DNA, 30 bp, Artificial Sequence
  Synthetic oligonucleotide
gaacaaggtaagctgggagtagcgttctgc

SEQ ID NO: 78750 - DNA, 30 bp, Artificial Sequence
  Synthetic oligonucleotide
tggatcgggtaagtaagacataacaagtgc

SEQ ID NO: 78751 - DNA, 30 bp, Artificial Sequence
  Synthetic oligonucleotide
catcgactgtacggtctgtgttgcaagtgc

SEQ ID NO: 78752 - DNA, 30 bp, Artificial Sequence
  Synthetic oligonucleotide
ccgagctagcgacatcgatatatcaagtgc

SEQ ID NO: 78753 - DNA, 30 bp, Artificial Sequence
  Synthetic oligonucleotide
ggcgtcatcatgagtagatggctcaagtgc

SEQ ID NO: 78754 - DNA, 30 bp, Artificial Sequence
  Synthetic oligonucleotide
cggtgaaagcagcggaaacgaacagagtgc

SEQ ID NO: 78755 - DNA, 30 bp, Artificial Sequence
  Synthetic oligonucleotide
acgccgccggataggaagaacgcggagtgc

SEQ ID NO: 78756 - DNA, 30 bp, Artificial Sequence
  Synthetic oligonucleotide
tcaatagccggaccgggtacgataacgtgc

SEQ ID NO: 78757 - DNA, 30 bp, Artificial Sequence
  Synthetic oligonucleotide
ggttcccaagggagcagggcaagatcgtgc

SEQ ID NO: 78758 - DNA, 30 bp, Artificial Sequence
  Synthetic oligonucleotide
gtcgaatatccattgggcccgaattcgtgc

SEQ ID NO: 78759 - DNA, 30 bp, Artificial Sequence
  Synthetic oligonucleotide
ggtccaggattgactgtcatccattcgtgc

SEQ ID NO: 78760 - DNA, 30 bp, Artificial Sequence
  Synthetic oligonucleotide
actagcaagggatgccacaaggttcggtgc

SEQ ID NO: 78761 - DNA, 30 bp, Artificial Sequence
  Synthetic oligonucleotide
cgagactgttatggctccaaggcggggtgc

SEQ ID NO: 78762 - DNA, 30 bp, Artificial Sequence
  Synthetic oligonucleotide
agagcaagtgacgcgttattctagtggtgc

SEQ ID NO: 78763 - DNA, 30 bp, Artificial Sequence
  Synthetic oligonucleotide
aagataaagttagtgcccatgttaaattgc

SEQ ID NO: 78764 - DNA, 30 bp, Artificial Sequence
  Synthetic oligonucleotide
tctgatagatttactcgaactatgcattgc

SEQ ID NO: 78765 - DNA, 30 bp, Artificial Sequence
  Synthetic oligonucleotide
ggacaacagtaggaggccagttatcattgc

SEQ ID NO: 78766 - DNA, 30 bp, Artificial Sequence
  Synthetic oligonucleotide
ggaagtcacgagaggaggactcttcattgc

SEQ ID NO: 78767 - DNA, 30 bp, Artificial Sequence
  Synthetic oligonucleotide
gagcataatcgtggcgcggggcgtgattgc

SEQ ID NO: 78768 - DNA, 30 bp, Artificial Sequence
  Synthetic oligonucleotide
gttaggacagcacctaagcgtggatattgc

SEQ ID NO: 78769 - DNA, 30 bp, Artificial Sequence
  Synthetic oligonucleotide
aagcttacgagagacgttggcgatacttgc

SEQ ID NO: 78770 - DNA, 30 bp, Artificial Sequence
  Synthetic oligonucleotide
gtaagacaagggctcattgctacagcttgc

SEQ ID NO: 78771 - DNA, 30 bp, Artificial Sequence
  Synthetic oligonucleotide
caaggtaacggttgtggaaagctttcttgc

SEQ ID NO: 78772 - DNA, 30 bp, Artificial Sequence
  Synthetic oligonucleotide
atgtacccccaagtagaccacgaaggttgc

SEQ ID NO: 78773 - DNA, 30 bp, Artificial Sequence
  Synthetic oligonucleotide
cgacgtccgggcgctatcggattatgttgc

SEQ ID NO: 78774 - DNA, 30 bp, Artificial Sequence
  Synthetic oligonucleotide
ggcacaataaatcaggattaacttatttgc

SEQ ID NO: 78775 - DNA, 30 bp, Artificial Sequence
  Synthetic oligonucleotide
tatcacacactagataaaatgacagtttgc

SEQ ID NO: 78776 - DNA, 30 bp, Artificial Sequence
  Synthetic oligonucleotide
agtgtgaggagcggcgcggaacgcgtttgc

SEQ ID NO: 78777 - DNA, 30 bp, Artificial Sequence
  Synthetic oligonucleotide
acaattacatcgaaaacaactgtcgtttgc

SEQ ID NO: 78778 - DNA, 30 bp, Artificial Sequence
  Synthetic oligonucleotide
cccgaaggatcacgcgtactgacaaaaatc

SEQ ID NO: 78779 - DNA, 30 bp, Artificial Sequence
  Synthetic oligonucleotide
tacggtaacatgactgcaaatatacaaatc

SEQ ID NO: 78780 - DNA, 30 bp, Artificial Sequence
  Synthetic oligonucleotide
gtctccagtgcgagaaaggaggtacaaatc

SEQ ID NO: 78781 - DNA, 30 bp, Artificial Sequence
  Synthetic oligonucleotide
agtagtgtgggcccgggagaaacgcaaatc

SEQ ID NO: 78782 - DNA, 30 bp, Artificial Sequence
  Synthetic oligonucleotide
ctgggcagacccaacgataactatcaaatc

SEQ ID NO: 78783 - DNA, 30 bp, Artificial Sequence
  Synthetic oligonucleotide
accatcttaacggtattacgaggagaaatc

SEQ ID NO: 78784 - DNA, 30 bp, Artificial Sequence
  Synthetic oligonucleotide
ggtaatgatgtgaagtgatagcagtaaatc

SEQ ID NO: 78785 - DNA, 30 bp, Artificial Sequence
  Synthetic oligonucleotide
tgccgtactacctattgaaaggagtaaatc

SEQ ID NO: 78786 - DNA, 30 bp, Artificial Sequence
  Synthetic oligonucleotide
tgcctccacattcgaaagagggaaacaatc

SEQ ID NO: 78787 - DNA, 30 bp, Artificial Sequence
  Synthetic oligonucleotide
tgcatggataaactaattgccggaacaatc

SEQ ID NO: 78788 - DNA, 30 bp, Artificial Sequence
  Synthetic oligonucleotide
gtagtaggtactatgtctggcgatacaatc

SEQ ID NO: 78789 - DNA, 30 bp, Artificial Sequence
  Synthetic oligonucleotide
acgcttcgatcatgctgagactcgccaatc

SEQ ID NO: 78790 - DNA, 30 bp, Artificial Sequence
  Synthetic oligonucleotide
ccgaattcaaggggggacagaaggccaatc

SEQ ID NO: 78791 - DNA, 30 bp, Artificial Sequence
  Synthetic oligonucleotide
ggagtctacaaggcgacgaagaacgcaatc

SEQ ID NO: 78792 - DNA, 30 bp, Artificial Sequence
  Synthetic oligonucleotide
caggttgttagtgaagggtccgaggcaatc

SEQ ID NO: 78793 - DNA, 30 bp, Artificial Sequence
  Synthetic oligonucleotide
gcgaagaccatgggtcgaagcggtgcaatc

SEQ ID NO: 78794 - DNA, 30 bp, Artificial Sequence
  Synthetic oligonucleotide
gctgcggcatgaacagagttggcccgaatc

SEQ ID NO: 78795 - DNA, 30 bp, Artificial Sequence
  Synthetic oligonucleotide
ctgacagtaaataggattcagtagcgaatc

SEQ ID NO: 78796 - DNA, 31 bp, Artificial Sequence
  Synthetic oligonucleotide
ttgtgaagtgctgcatgtaggggttcgaatc

SEQ ID NO: 78797 - DNA, 30 bp, Artificial Sequence
  Synthetic oligonucleotide
ggcaacttctaatccagaacgtggggaatc

SEQ ID NO: 78798 - DNA, 30 bp, Artificial Sequence
  Synthetic oligonucleotide
gcacggcacatcttaggcgggggtggaatc

SEQ ID NO: 78799 - DNA, 30 bp, Artificial Sequence
  Synthetic oligonucleotide
ataaccgctctaacgaggtgaacgtgaatc

SEQ ID NO: 78800 - DNA, 30 bp, Artificial Sequence
  Synthetic oligonucleotide
acgtggataagatcctgaagcaggtgaatc

SEQ ID NO: 78801 - DNA, 30 bp, Artificial Sequence
  Synthetic oligonucleotide
ggatggatatcgggacaccccttgtgaatc

SEQ ID NO: 78802 - DNA, 30 bp, Artificial Sequence
  Synthetic oligonucleotide
tgatgtccaatacattaacagatactaatc

SEQ ID NO: 78803 - DNA, 30 bp, Artificial Sequence
  Synthetic oligonucleotide
gttggaagtaagtggcgaggtgagctaatc

SEQ ID NO: 78804 - DNA, 31 bp, Artificial Sequence
  Synthetic oligonucleotide
gggtcagctatcctctctcaaacgtgtaatc

SEQ ID NO: 78805 - DNA, 30 bp, Artificial Sequence
  Synthetic oligonucleotide
ggcgtcagagcctctcgctctaaccacatc

SEQ ID NO: 78806 - DNA, 30 bp, Artificial Sequence
  Synthetic oligonucleotide
cctcgtatagaggggacatatgaagacatc

SEQ ID NO: 78807 - DNA, 30 bp, Artificial Sequence
  Synthetic oligonucleotide
caagatcgatagatttgactttaagacatc

SEQ ID NO: 78808 - DNA, 30 bp, Artificial Sequence
  Synthetic oligonucleotide
ttgacgtcggaggctgtatgcgaatacatc

SEQ ID NO: 78809 - DNA, 30 bp, Artificial Sequence
  Synthetic oligonucleotide
cgcacaggcgaatgcaaaagcaataccatc

SEQ ID NO: 78810 - DNA, 30 bp, Artificial Sequence
  Synthetic oligonucleotide
gtcaagcaccggcagggcgtcagtaccatc

SEQ ID NO: 78811 - DNA, 30 bp, Artificial Sequence
  Synthetic oligonucleotide
aggcacccgatatcgactgcttttaccatc

SEQ ID NO: 78812 - DNA, 30 bp, Artificial Sequence
  Synthetic oligonucleotide
aaggaagagctccgagagatggcacccatc

SEQ ID NO: 78813 - DNA, 30 bp, Artificial Sequence
  Synthetic oligonucleotide
gacgggagaggaagtgatcgaacaagcatc

SEQ ID NO: 78814 - DNA, 30 bp, Artificial Sequence
  Synthetic oligonucleotide
catcgggcgcgatggatcattacacgcatc

SEQ ID NO: 78815 - DNA, 30 bp, Artificial Sequence
  Synthetic oligonucleotide
tcacgaaaggaggtgtgacacgtccgcatc

SEQ ID NO: 78816 - DNA, 30 bp, Artificial Sequence
  Synthetic oligonucleotide
tgttactagtctgctaaagaaccgcgcatc

SEQ ID NO: 78817 - DNA, 30 bp, Artificial Sequence
  Synthetic oligonucleotide
gcgtcgtcatggaataataacaggcgcatc

SEQ ID NO: 78818 - DNA, 30 bp, Artificial Sequence
  Synthetic oligonucleotide
taatggtcgtgggaagcccatgggcgcatc

SEQ ID NO: 78819 - DNA, 30 bp, Artificial Sequence
  Synthetic oligonucleotide
ctgcaaagcggtttacaaagttgtggcatc

SEQ ID NO: 78820 - DNA, 30 bp, Artificial Sequence
  Synthetic oligonucleotide
cggatgatttgtgagcacacctagtgcatc

SEQ ID NO: 78821 - DNA, 30 bp, Artificial Sequence
  Synthetic oligonucleotide
aggtaccaatccggctcgtctgatctcatc

SEQ ID NO: 78822 - DNA, 30 bp, Artificial Sequence
  Synthetic oligonucleotide
aaggtgtgtcgggaacgtcggggggtcatc

SEQ ID NO: 78823 - DNA, 30 bp, Artificial Sequence
  Synthetic oligonucleotide
gggacggtagtgccgggcgtacgaaagatc

SEQ ID NO: 78824 - DNA, 30 bp, Artificial Sequence
  Synthetic oligonucleotide
aaggcaataataaatggttagtgaaagatc

SEQ ID NO: 78825 - DNA, 30 bp, Artificial Sequence
  Synthetic oligonucleotide
tgatcactacacttgggggcaaatgagatc

SEQ ID NO: 78826 - DNA, 30 bp, Artificial Sequence
  Synthetic oligonucleotide
cctcaaactgggcatgaaggggcatagatc

SEQ ID NO: 78827 - DNA, 30 bp, Artificial Sequence
  Synthetic oligonucleotide
cgcgtaaatcatcataatatgccatcgatc

SEQ ID NO: 78828 - DNA, 30 bp, Artificial Sequence
  Synthetic oligonucleotide
tagccgcggggcatgtaacacatgtcgatc

SEQ ID NO: 78829 - DNA, 30 bp, Artificial Sequence
  Synthetic oligonucleotide
atcggcgagggtgatgcacataccaggatc

SEQ ID NO: 78830 - DNA, 30 bp, Artificial Sequence
  Synthetic oligonucleotide
agtatatgggggagtgtaaggagtcggatc

SEQ ID NO: 78831 - DNA, 30 bp, Artificial Sequence
  Synthetic oligonucleotide
agagggaactagcaggtattgcttgggatc

SEQ ID NO: 78832 - DNA, 30 bp, Artificial Sequence
  Synthetic oligonucleotide
aacgaaggggggcctacgcacacctggatc

SEQ ID NO: 78833 - DNA, 30 bp, Artificial Sequence
  Synthetic oligonucleotide
ttacgtggacatccaaggctggcgatgatc

SEQ ID NO: 78834 - DNA, 30 bp, Artificial Sequence
  Synthetic oligonucleotide
tagtgatgtagtgtcgataaacgtctgatc

SEQ ID NO: 78835 - DNA, 30 bp, Artificial Sequence
  Synthetic oligonucleotide
ccggtacaaacatatagagcaagccatatc

SEQ ID NO: 78836 - DNA, 30 bp, Artificial Sequence
  Synthetic oligonucleotide
cattacccgctggtaaagtaagagcatatc

SEQ ID NO: 78837 - DNA, 30 bp, Artificial Sequence
  Synthetic oligonucleotide
gggcggcctcatttgatcagtagtgatatc

SEQ ID NO: 78838 - DNA, 30 bp, Artificial Sequence
  Synthetic oligonucleotide
gcggttaaccaacagcatatacgatatatc

SEQ ID NO: 78839 - DNA, 30 bp, Artificial Sequence
  Synthetic oligonucleotide
cacattggggtgctgtcgtacacctatatc

SEQ ID NO: 78840 - DNA, 30 bp, Artificial Sequence
  Synthetic oligonucleotide
tcagttgaaacgaatgggaccttgcctatc

SEQ ID NO: 78841 - DNA, 30 bp, Artificial Sequence
  Synthetic oligonucleotide
tcatcatgtcaacacgggcaaacgtctatc

SEQ ID NO: 78842 - DNA, 30 bp, Artificial Sequence
  Synthetic oligonucleotide
cggacggtgaagttatgcaactgtagtatc

SEQ ID NO: 78843 - DNA, 30 bp, Artificial Sequence
  Synthetic oligonucleotide
gagagcaatgggacagaaaacttgcgtatc

SEQ ID NO: 78844 - DNA, 30 bp, Artificial Sequence
  Synthetic oligonucleotide
agctgtgcgaacaacgtagctaacggtatc

SEQ ID NO: 78845 - DNA, 30 bp, Artificial Sequence
  Synthetic oligonucleotide
cgagagtacagcggtaacggttatggtatc

SEQ ID NO: 78846 - DNA, 30 bp, Artificial Sequence
  Synthetic oligonucleotide
gtgacgccgtaaggatctgaagagtgtatc

SEQ ID NO: 78847 - DNA, 30 bp, Artificial Sequence
  Synthetic oligonucleotide
acagaccggatcagttcatgcacccttatc

SEQ ID NO: 78848 - DNA, 31 bp, Artificial Sequence
  Synthetic oligonucleotide
gctcgaccagtgtaagtacatacccgttatc

SEQ ID NO: 78849 - DNA, 30 bp, Artificial Sequence
  Synthetic oligonucleotide
atagtagggaatctcgtcagaaagaaactc

SEQ ID NO: 78850 - DNA, 30 bp, Artificial Sequence
  Synthetic oligonucleotide
tgtggcactctacgaaataatgagaaactc

SEQ ID NO: 78851 - DNA, 30 bp, Artificial Sequence
  Synthetic oligonucleotide
gtgacccatatcctcggcctgacgaaactc

SEQ ID NO: 78852 - DNA, 30 bp, Artificial Sequence
  Synthetic oligonucleotide
cgacttcagcgaaagcggtagttagaactc

SEQ ID NO: 78853 - DNA, 30 bp, Artificial Sequence
  Synthetic oligonucleotide
tagggacatacactgctgaggttctaactc

SEQ ID NO: 78854 - DNA, 30 bp, Artificial Sequence
  Synthetic oligonucleotide
agccaataggactggtaatcctatgcactc

SEQ ID NO: 78855 - DNA, 30 bp, Artificial Sequence
  Synthetic oligonucleotide
ccaagtaaaataatgggcgcaggtgcactc

SEQ ID NO: 78856 - DNA, 29 bp, Artificial Sequence
  Synthetic oligonucleotide
tcagagaggcataggtggtatacagactc

SEQ ID NO: 78857 - DNA, 30 bp, Artificial Sequence
  Synthetic oligonucleotide
ctatttaggtggacgggggttgaccgactc

SEQ ID NO: 78858 - DNA, 30 bp, Artificial Sequence
  Synthetic oligonucleotide
gtcgggatgcattacaaggacggccgactc

SEQ ID NO: 78859 - DNA, 30 bp, Artificial Sequence
  Synthetic oligonucleotide
aggcgaatgacaaacacgatatgaggactc

SEQ ID NO: 78860 - DNA, 30 bp, Artificial Sequence
  Synthetic oligonucleotide
taggcgggtctcgtaaatgattccggactc

SEQ ID NO: 78861 - DNA, 30 bp, Artificial Sequence
  Synthetic oligonucleotide
ggtaaagtgggtatgctaatgggatgactc

SEQ ID NO: 78862 - DNA, 30 bp, Artificial Sequence
  Synthetic oligonucleotide
gctggaagcggtaggtaaactgccgtactc

SEQ ID NO: 78863 - DNA, 30 bp, Artificial Sequence
  Synthetic oligonucleotide
acgtactccttcacgaatgaacctaccctc

SEQ ID NO: 78864 - DNA, 30 bp, Artificial Sequence
  Synthetic oligonucleotide
cggcgaattaaggattgcagcctacccctc

SEQ ID NO: 78865 - DNA, 30 bp, Artificial Sequence
  Synthetic oligonucleotide
taacgatagatcggcaattactcggccctc

SEQ ID NO: 78866 - DNA, 30 bp, Artificial Sequence
  Synthetic oligonucleotide
gggtattaatccggtgacgagattgccctc

SEQ ID NO: 78867 - DNA, 30 bp, Artificial Sequence
  Synthetic oligonucleotide
ccttcatggttgttaggggtcttaagcctc

SEQ ID NO: 78868 - DNA, 30 bp, Artificial Sequence
  Synthetic oligonucleotide
aaccgtatgaccaatgaagggaccagcctc

SEQ ID NO: 78869 - DNA, 30 bp, Artificial Sequence
  Synthetic oligonucleotide
atggcggcacagacaagataatttcgcctc

SEQ ID NO: 78870 - DNA, 30 bp, Artificial Sequence
  Synthetic oligonucleotide
aacagagggggccaacagtcgagatgcctc

SEQ ID NO: 78871 - DNA, 30 bp, Artificial Sequence
  Synthetic oligonucleotide
cgaagtggattctgtcactcgcgctgcctc

SEQ ID NO: 78872 - DNA, 30 bp, Artificial Sequence
  Synthetic oligonucleotide
cgagatagcctcaccaagagaaaaatcctc

SEQ ID NO: 78873 - DNA, 30 bp, Artificial Sequence
  Synthetic oligonucleotide
agccgagtgcggtggatcaccagaatcctc

SEQ ID NO: 78874 - DNA, 30 bp, Artificial Sequence
  Synthetic oligonucleotide
gaagaaatgctacgttctgcatggatcctc

SEQ ID NO: 78875 - DNA, 30 bp, Artificial Sequence
  Synthetic oligonucleotide
cgtgcggtcaggactacaggaggattcctc

SEQ ID NO: 78876 - DNA, 30 bp, Artificial Sequence
  Synthetic oligonucleotide
aaggaggcacccctggatcgaaggttcctc

SEQ ID NO: 78877 - DNA, 30 bp, Artificial Sequence
  Synthetic oligonucleotide
gctagcaagaacagccatgtatgaaagctc

SEQ ID NO: 78878 - DNA, 30 bp, Artificial Sequence
  Synthetic oligonucleotide
tagggaggcgtgatatcctaagtcaagctc

SEQ ID NO: 78879 - DNA, 30 bp, Artificial Sequence
  Synthetic oligonucleotide
atcgtagatgagcctacgccatagaagctc

SEQ ID NO: 78880 - DNA, 30 bp, Artificial Sequence
  Synthetic oligonucleotide
agagaaagctaaattaaacatgttcagctc

SEQ ID NO: 78881 - DNA, 30 bp, Artificial Sequence
  Synthetic oligonucleotide
ctcgacggtgtccaacaagctaaagagctc

SEQ ID NO: 78882 - DNA, 31 bp, Artificial Sequence
  Synthetic oligonucleotide
tgaagatgaagtgggtttggatgaagagctc

SEQ ID NO: 78883 - DNA, 30 bp, Artificial Sequence
  Synthetic oligonucleotide
ggaaaaacggctctgtcataacgagagctc

SEQ ID NO: 78884 - DNA, 30 bp, Artificial Sequence
  Synthetic oligonucleotide
ccacgaaagagaactaatttgcgagagctc

SEQ ID NO: 78885 - DNA, 30 bp, Artificial Sequence
  Synthetic oligonucleotide
ccacatcagacatgctaggataacgagctc

SEQ ID NO: 78886 - DNA, 30 bp, Artificial Sequence
  Synthetic oligonucleotide
ccgctgggagcggggtgcttaagtgagctc

SEQ ID NO: 78887 - DNA, 30 bp, Artificial Sequence
  Synthetic oligonucleotide
gtggaacgaccttatgaagcatagccgctc

SEQ ID NO: 78888 - DNA, 30 bp, Artificial Sequence
  Synthetic oligonucleotide
aggaattggaacctttctacgaacaggctc

SEQ ID NO: 78889 - DNA, 30 bp, Artificial Sequence
  Synthetic oligonucleotide
gctcacttagctgcgggtgggattaggctc

SEQ ID NO: 78890 - DNA, 30 bp, Artificial Sequence
  Synthetic oligonucleotide
atgacctgtgtgttgtaggagctacggctc

SEQ ID NO: 78891 - DNA, 30 bp, Artificial Sequence
  Synthetic oligonucleotide
ggctcttgactaataacatctcgatggctc

SEQ ID NO: 78892 - DNA, 30 bp, Artificial Sequence
  Synthetic oligonucleotide
agtcatatttgtatggagacagagtggctc

SEQ ID NO: 78893 - DNA, 30 bp, Artificial Sequence
  Synthetic oligonucleotide
catggctcatgaatcggatcgtggtggctc

SEQ ID NO: 78894 - DNA, 30 bp, Artificial Sequence
  Synthetic oligonucleotide
agtagagtgaaagtcgggttagtgtggctc

SEQ ID NO: 78895 - DNA, 30 bp, Artificial Sequence
  Synthetic oligonucleotide
tcgattcgcgatagcttgatgggttggctc

SEQ ID NO: 78896 - DNA, 30 bp, Artificial Sequence
  Synthetic oligonucleotide
ggaggtcctacaacctgtagcggaatgctc

SEQ ID NO: 78897 - DNA, 30 bp, Artificial Sequence
  Synthetic oligonucleotide
tcaaccctccaaaacgtgacggggatgctc

SEQ ID NO: 78898 - DNA, 30 bp, Artificial Sequence
  Synthetic oligonucleotide
agaccaagatctgacggtggcctgatgctc

SEQ ID NO: 78899 - DNA, 30 bp, Artificial Sequence
  Synthetic oligonucleotide
cgaaccttaaggtaggtctgccatatgctc

SEQ ID NO: 78900 - DNA, 30 bp, Artificial Sequence
  Synthetic oligonucleotide
gaacgagaggttggacgtgcgaaactgctc

SEQ ID NO: 78901 - DNA, 30 bp, Artificial Sequence
  Synthetic oligonucleotide
cggaagctgcgcgcgatgctataactgctc

SEQ ID NO: 78902 - DNA, 30 bp, Artificial Sequence
  Synthetic oligonucleotide
cacgcaagctatcatataagccacctgctc

SEQ ID NO: 78903 - DNA, 30 bp, Artificial Sequence
  Synthetic oligonucleotide
ttcggcgagtcgacggtacagcacgtgctc

SEQ ID NO: 78904 - DNA, 30 bp, Artificial Sequence
  Synthetic oligonucleotide
tggcggatataacacagatatcacgtgctc

SEQ ID NO: 78905 - DNA, 32 bp, Artificial Sequence
  Synthetic oligonucleotide
atgaagaaaaccccaaaagtttgggcgtgctc

SEQ ID NO: 78906 - DNA, 30 bp, Artificial Sequence
  Synthetic oligonucleotide
ggggacgaatcgcgtgggcgatctgtgctc

SEQ ID NO: 78907 - DNA, 30 bp, Artificial Sequence
  Synthetic oligonucleotide
ttagcatgggaccggcacaaacgacatctc

SEQ ID NO: 78908 - DNA, 30 bp, Artificial Sequence
  Synthetic oligonucleotide
agggggacacgtaaacaaaacagttatctc

SEQ ID NO: 78909 - DNA, 30 bp, Artificial Sequence
  Synthetic oligonucleotide
ggtaacggtaggagacgtgaccagactctc

SEQ ID NO: 78910 - DNA, 30 bp, Artificial Sequence
  Synthetic oligonucleotide
aatggaaaaaatgtagggtcggggactctc

SEQ ID NO: 78911 - DNA, 30 bp, Artificial Sequence
  Synthetic oligonucleotide
tctatagaaaaggaatcattatcgcgtctc

SEQ ID NO: 78912 - DNA, 30 bp, Artificial Sequence
  Synthetic oligonucleotide
ggtaaagacgtaattccatcgagaaaagtc

SEQ ID NO: 78913 - DNA, 30 bp, Artificial Sequence
  Synthetic oligonucleotide
ccctcaatgcagtctcgaagatagaaagtc

SEQ ID NO: 78914 - DNA, 30 bp, Artificial Sequence
  Synthetic oligonucleotide
ttggtattctagagcttaaaatagcaagtc

SEQ ID NO: 78915 - DNA, 30 bp, Artificial Sequence
  Synthetic oligonucleotide
gtcatatgtacgaatctggagcggcaagtc

SEQ ID NO: 78916 - DNA, 30 bp, Artificial Sequence
  Synthetic oligonucleotide
taccatctctgcctagatcgagcggaagtc

SEQ ID NO: 78917 - DNA, 30 bp, Artificial Sequence
  Synthetic oligonucleotide
gaaacgtaccaacagcctcgtcgggaagtc

SEQ ID NO: 78918 - DNA, 30 bp, Artificial Sequence
  Synthetic oligonucleotide
acaccgaggcgctgtaaatccgtctaagtc

SEQ ID NO: 78919 - DNA, 30 bp, Artificial Sequence
  Synthetic oligonucleotide
gccacaggagcagttaggggcgggtaagtc

SEQ ID NO: 78920 - DNA, 30 bp, Artificial Sequence
  Synthetic oligonucleotide
gatcgaaattaattggcaccgtcgcgagtc

SEQ ID NO: 78921 - DNA, 30 bp, Artificial Sequence
  Synthetic oligonucleotide
cacgaagaaacacaaagaagtttaggagtc

SEQ ID NO: 78922 - DNA, 30 bp, Artificial Sequence
  Synthetic oligonucleotide
acagcgcactgacgaactttgaagggagtc

SEQ ID NO: 78923 - DNA, 30 bp, Artificial Sequence
  Synthetic oligonucleotide
aacgttacttagtattgactacaatgagtc

SEQ ID NO: 78924 - DNA, 30 bp, Artificial Sequence
  Synthetic oligonucleotide
tacgtgtcgaattacactaaagcctgagtc

SEQ ID NO: 78925 - DNA, 30 bp, Artificial Sequence
  Synthetic oligonucleotide
ttgtcgctaaatagagaagtgtagtgagtc

SEQ ID NO: 78926 - DNA, 30 bp, Artificial Sequence
  Synthetic oligonucleotide
agacaacgtttaaaacgaaagaattgagtc

SEQ ID NO: 78927 - DNA, 30 bp, Artificial Sequence
  Synthetic oligonucleotide
aagcttcaagagggtgtagtccaaatagtc

SEQ ID NO: 78928 - DNA, 30 bp, Artificial Sequence
  Synthetic oligonucleotide
cggcgtcttgaaaccatgattgtgctagtc

SEQ ID NO: 78929 - DNA, 30 bp, Artificial Sequence
  Synthetic oligonucleotide
gtcaggtgcaatgtacattcgaggcacgtc

SEQ ID NO: 78930 - DNA, 30 bp, Artificial Sequence
  Synthetic oligonucleotide
ccatgagaccgcgcggattgcacagacgtc

SEQ ID NO: 78931 - DNA, 30 bp, Artificial Sequence
  Synthetic oligonucleotide
atgatattatcccttcgtagagaacccgtc

SEQ ID NO: 78932 - DNA, 30 bp, Artificial Sequence
  Synthetic oligonucleotide
ctagaccatagctatgggccagacagcgtc

SEQ ID NO: 78933 - DNA, 30 bp, Artificial Sequence
  Synthetic oligonucleotide
tgctgtcggctaaaaaaggtgcggcgcgtc

SEQ ID NO: 78934 - DNA, 30 bp, Artificial Sequence
  Synthetic oligonucleotide
acgacgacggattgttctgggcaaatcgtc

SEQ ID NO: 78935 - DNA, 30 bp, Artificial Sequence
  Synthetic oligonucleotide
ctacgtggaaagtttgaacccgcgttcgtc

SEQ ID NO: 78936 - DNA, 30 bp, Artificial Sequence
  Synthetic oligonucleotide
atggactgcctcctgagtcgatgaaaggtc

SEQ ID NO: 78937 - DNA, 30 bp, Artificial Sequence
  Synthetic oligonucleotide
cgtaggctagagcccccatttgaacaggtc

SEQ ID NO: 78938 - DNA, 30 bp, Artificial Sequence
  Synthetic oligonucleotide
tggaagaacggtgcactgaagtcgcaggtc

SEQ ID NO: 78939 - DNA, 30 bp, Artificial Sequence
  Synthetic oligonucleotide
ttcacccaggaaggtcccgaaaacgaggtc

SEQ ID NO: 78940 - DNA, 30 bp, Artificial Sequence
  Synthetic oligonucleotide
cgactcagcggggacaaggatggaacggtc

SEQ ID NO: 78941 - DNA, 30 bp, Artificial Sequence
  Synthetic oligonucleotide
caacaaagagttaggaatccagttgcggtc

SEQ ID NO: 78942 - DNA, 30 bp, Artificial Sequence
  Synthetic oligonucleotide
ggacaaagatggggaagaactctttcggtc

SEQ ID NO: 78943 - DNA, 30 bp, Artificial Sequence
  Synthetic oligonucleotide
ggcctatgcgaaaattgctcgttcagggtc

SEQ ID NO: 78944 - DNA, 30 bp, Artificial Sequence
  Synthetic oligonucleotide
caatagcacaggatcatgattaaccgggtc

SEQ ID NO: 78945 - DNA, 30 bp, Artificial Sequence
  Synthetic oligonucleotide
taactcacgataaactgtgtggagatggtc

SEQ ID NO: 78946 - DNA, 30 bp, Artificial Sequence
  Synthetic oligonucleotide
acagtgatggcacaccacctatatatggtc

SEQ ID NO: 78947 - DNA, 30 bp, Artificial Sequence
  Synthetic oligonucleotide
tcggactatagtagcagatcagttatggtc

SEQ ID NO: 78948 - DNA, 30 bp, Artificial Sequence
  Synthetic oligonucleotide
cgatatactccgaaatactaaagtctggtc

SEQ ID NO: 78949 - DNA, 30 bp, Artificial Sequence
  Synthetic oligonucleotide
agtgtcccgacttaaggataggggaatgtc

SEQ ID NO: 78950 - DNA, 30 bp, Artificial Sequence
  Synthetic oligonucleotide
caacacacacgattatggtatcaacatgtc

SEQ ID NO: 78951 - DNA, 30 bp, Artificial Sequence
  Synthetic oligonucleotide
cagatatggcaaaccttcactagacatgtc

SEQ ID NO: 78952 - DNA, 30 bp, Artificial Sequence
  Synthetic oligonucleotide
atgccgtcaacttttagtgagaaagatgtc

SEQ ID NO: 78953 - DNA, 30 bp, Artificial Sequence
  Synthetic oligonucleotide
ttaagcggtagccagtatgtgggagatgtc

SEQ ID NO: 78954 - DNA, 30 bp, Artificial Sequence
  Synthetic oligonucleotide
agtactgagcagtctggggcggaagctgtc

SEQ ID NO: 78955 - DNA, 30 bp, Artificial Sequence
  Synthetic oligonucleotide
gggaggagtgtcgttgggaggctccgtgtc

SEQ ID NO: 78956 - DNA, 30 bp, Artificial Sequence
  Synthetic oligonucleotide
ataggggccctcggctcaagactaggtgtc

SEQ ID NO: 78957 - DNA, 30 bp, Artificial Sequence
  Synthetic oligonucleotide
gctaggtcgccgaaagcttaggagggtgtc

SEQ ID NO: 78958 - DNA, 30 bp, Artificial Sequence
  Synthetic oligonucleotide
tggaaagaagtggaaaagtacagctgtgtc

SEQ ID NO: 78959 - DNA, 30 bp, Artificial Sequence
  Synthetic oligonucleotide
cgggcgtgggaagtttcggacgaaattgtc

SEQ ID NO: 78960 - DNA, 30 bp, Artificial Sequence
  Synthetic oligonucleotide
aagtacggcgacataacaacgggtattgtc

SEQ ID NO: 78961 - DNA, 30 bp, Artificial Sequence
  Synthetic oligonucleotide
tccgtttagcaagagtgtagggaagttgtc

SEQ ID NO: 78962 - DNA, 30 bp, Artificial Sequence
  Synthetic oligonucleotide
agccaaagcaatgaaacaggaggaaaattc

SEQ ID NO: 78963 - DNA, 30 bp, Artificial Sequence
  Synthetic oligonucleotide
agtaagataacgatacggtcattcgcattc

SEQ ID NO: 78964 - DNA, 30 bp, Artificial Sequence
  Synthetic oligonucleotide
gtatagcgtcgagagtacttgctacgattc

SEQ ID NO: 78965 - DNA, 30 bp, Artificial Sequence
  Synthetic oligonucleotide
aaacgacgcgaaggggatatagaccgattc

SEQ ID NO: 78966 - DNA, 30 bp, Artificial Sequence
  Synthetic oligonucleotide
aggaagtctgaaaccagacacccctgattc

SEQ ID NO: 78967 - DNA, 31 bp, Artificial Sequence
  Synthetic oligonucleotide
ccatagcgatgccattgtaatgaaactattc

SEQ ID NO: 78968 - DNA, 30 bp, Artificial Sequence
  Synthetic oligonucleotide
aaggcgcggaatgcttatcccgtactattc

SEQ ID NO: 78969 - DNA, 30 bp, Artificial Sequence
  Synthetic oligonucleotide
agagaagcaaagactgccggtttgctattc

SEQ ID NO: 78970 - DNA, 30 bp, Artificial Sequence
  Synthetic oligonucleotide
cataatagaggaccaaagaacttggtattc

SEQ ID NO: 78971 - DNA, 30 bp, Artificial Sequence
  Synthetic oligonucleotide
accacccctatactaaacctcaaacacttc

SEQ ID NO: 78972 - DNA, 30 bp, Artificial Sequence
  Synthetic oligonucleotide
ggaacagagttcattgcagcatgacacttc

SEQ ID NO: 78973 - DNA, 30 bp, Artificial Sequence
  Synthetic oligonucleotide
tctagcacagcaataggatttcggcacttc

SEQ ID NO: 78974 - DNA, 30 bp, Artificial Sequence
  Synthetic oligonucleotide
gtataccaggaacgggcgtagtacaccttc

SEQ ID NO: 78975 - DNA, 30 bp, Artificial Sequence
  Synthetic oligonucleotide
ggatttagtgggaacagggggcgcaccttc

SEQ ID NO: 78976 - DNA, 30 bp, Artificial Sequence
  Synthetic oligonucleotide
acggcagggctcgaacaaaagtgtaccttc

SEQ ID NO: 78977 - DNA, 30 bp, Artificial Sequence
  Synthetic oligonucleotide
tcagagggatgatcccccaggcgagccttc

SEQ ID NO: 78978 - DNA, 30 bp, Artificial Sequence
  Synthetic oligonucleotide
cattaccaggctggaaaacattgcgccttc

SEQ ID NO: 78979 - DNA, 30 bp, Artificial Sequence
  Synthetic oligonucleotide
aggggtgagccgtgaaccatagctgccttc

SEQ ID NO: 78980 - DNA, 30 bp, Artificial Sequence
  Synthetic oligonucleotide
aaatgtggatagggccatagaaccagcttc

SEQ ID NO: 78981 - DNA, 30 bp, Artificial Sequence
  Synthetic oligonucleotide
tagtcgtaggcctatacgttaatcagcttc

SEQ ID NO: 78982 - DNA, 30 bp, Artificial Sequence
  Synthetic oligonucleotide
tgatatttaagattgagggggggtggcttc

SEQ ID NO: 78983 - DNA, 30 bp, Artificial Sequence
  Synthetic oligonucleotide
agggctgacttccgtcgactacactgcttc

SEQ ID NO: 78984 - DNA, 30 bp, Artificial Sequence
  Synthetic oligonucleotide
accggccaaagtacagcaataaagtgcttc

SEQ ID NO: 78985 - DNA, 30 bp, Artificial Sequence
  Synthetic oligonucleotide
gcggggtggcatgagaggcaaaaactcttc

SEQ ID NO: 78986 - DNA, 30 bp, Artificial Sequence
  Synthetic oligonucleotide
gaatcgcccagtggtaacagaaccgtcttc

SEQ ID NO: 78987 - DNA, 30 bp, Artificial Sequence
  Synthetic oligonucleotide
cgtcgtctgttcaagtcaagttaattcttc

SEQ ID NO: 78988 - DNA, 29 bp, Artificial Sequence
  Synthetic oligonucleotide
ggggaggatagatcagtgttgttttcttc

SEQ ID NO: 78989 - DNA, 30 bp, Artificial Sequence
  Synthetic oligonucleotide
taaatccatagtaaataccgagacaagttc

SEQ ID NO: 78990 - DNA, 30 bp, Artificial Sequence
  Synthetic oligonucleotide
gagagcaattgtaatatgtgatgccagttc

SEQ ID NO: 78991 - DNA, 30 bp, Artificial Sequence
  Synthetic oligonucleotide
acaggattgcgtgtgtggaggtttgagttc

SEQ ID NO: 78992 - DNA, 30 bp, Artificial Sequence
  Synthetic oligonucleotide
tggggtcttggaatcagccacgaaccgttc

SEQ ID NO: 78993 - DNA, 30 bp, Artificial Sequence
  Synthetic oligonucleotide
acatggtaccattcatcgatttcgccgttc

SEQ ID NO: 78994 - DNA, 30 bp, Artificial Sequence
  Synthetic oligonucleotide
tggcgttccgagttccggctacctccgttc

SEQ ID NO: 78995 - DNA, 30 bp, Artificial Sequence
  Synthetic oligonucleotide
tatggacgcggtccactccaggacgggttc

SEQ ID NO: 78996 - DNA, 30 bp, Artificial Sequence
  Synthetic oligonucleotide
gtgagccattcgcctggatataccgggttc

SEQ ID NO: 78997 - DNA, 30 bp, Artificial Sequence
  Synthetic oligonucleotide
aacagatacctggcttgcgtgaaatggttc

SEQ ID NO: 78998 - DNA, 30 bp, Artificial Sequence
  Synthetic oligonucleotide
ctaaaacgaaggcgaagtacgcaatggttc

SEQ ID NO: 78999 - DNA, 30 bp, Artificial Sequence
  Synthetic oligonucleotide
gagctcggaggacagaggggagactggttc

SEQ ID NO: 79000 - DNA, 30 bp, Artificial Sequence
  Synthetic oligonucleotide
tggaggtctatcgcgtagagccgctggttc

SEQ ID NO: 79001 - DNA, 30 bp, Artificial Sequence
  Synthetic oligonucleotide
agatccactatcaaaggacgtaagtggttc

SEQ ID NO: 79002 - DNA, 30 bp, Artificial Sequence
  Synthetic oligonucleotide
tgcaaacactagaaatgtactaaaatgttc

SEQ ID NO: 79003 - DNA, 30 bp, Artificial Sequence
  Synthetic oligonucleotide
tcaaggagaaggaatagtacaaagctgttc

SEQ ID NO: 79004 - DNA, 30 bp, Artificial Sequence
  Synthetic oligonucleotide
cacaagcaggtatggtcgaaggtgctgttc

SEQ ID NO: 79005 - DNA, 30 bp, Artificial Sequence
  Synthetic oligonucleotide
tcggaggttataggggaacattgagtgttc

SEQ ID NO: 79006 - DNA, 30 bp, Artificial Sequence
  Synthetic oligonucleotide
ctcgaagcatggtcttgtagaaacttgttc

SEQ ID NO: 79007 - DNA, 30 bp, Artificial Sequence
  Synthetic oligonucleotide
taccgcgttaccataacacgtgcgcatttc

SEQ ID NO: 79008 - DNA, 30 bp, Artificial Sequence
  Synthetic oligonucleotide
ctgcgccaatgagtatgtcaggaatatttc

SEQ ID NO: 79009 - DNA, 30 bp, Artificial Sequence
  Synthetic oligonucleotide
cacttatggactactagaggggccactttc

SEQ ID NO: 79010 - DNA, 30 bp, Artificial Sequence
  Synthetic oligonucleotide
atcggtcgtgtcacaagaaggcgacctttc

SEQ ID NO: 79011 - DNA, 30 bp, Artificial Sequence
  Synthetic oligonucleotide
aacaacatcgtaatcaattcggtagctttc

SEQ ID NO: 79012 - DNA, 30 bp, Artificial Sequence
  Synthetic oligonucleotide
gcgagtgcgaaatctcggaagtactctttc

SEQ ID NO: 79013 - DNA, 30 bp, Artificial Sequence
  Synthetic oligonucleotide
gcgtccgcatatggcagggtaaagagtttc

SEQ ID NO: 79014 - DNA, 30 bp, Artificial Sequence
  Synthetic oligonucleotide
tgtcataacagactggtggaggatagtttc

SEQ ID NO: 79015 - DNA, 30 bp, Artificial Sequence
  Synthetic oligonucleotide
tgacatgagggccaatatgtcgtacgtttc

SEQ ID NO: 79016 - DNA, 30 bp, Artificial Sequence
  Synthetic oligonucleotide
agatggggctggtcggtttggaagcgtttc

SEQ ID NO: 79017 - DNA, 30 bp, Artificial Sequence
  Synthetic oligonucleotide
cggttcatatgagatcggattacaattttc

SEQ ID NO: 79018 - DNA, 30 bp, Artificial Sequence
  Synthetic oligonucleotide
taaatcagcatcccgttaatgccaaaaaag

SEQ ID NO: 79019 - DNA, 30 bp, Artificial Sequence
  Synthetic oligonucleotide
tatgtttaggcaccgtcaagtgtaaaaaag

SEQ ID NO: 79020 - DNA, 30 bp, Artificial Sequence
  Synthetic oligonucleotide
caagaggaccgtctttgaagttagcaaaag

SEQ ID NO: 79021 - DNA, 30 bp, Artificial Sequence
  Synthetic oligonucleotide
atatctggtagagctcaggtgcggcaaaag

SEQ ID NO: 79022 - DNA, 30 bp, Artificial Sequence
  Synthetic oligonucleotide
ctggttgctcgataaaaactgcctcaaaag

SEQ ID NO: 79023 - DNA, 30 bp, Artificial Sequence
  Synthetic oligonucleotide
ctgggtccatcagccacttgagctcaaaag

SEQ ID NO: 79024 - DNA, 30 bp, Artificial Sequence
  Synthetic oligonucleotide
acggacctggggcgtaagagaggtcaaaag

SEQ ID NO: 79025 - DNA, 30 bp, Artificial Sequence
  Synthetic oligonucleotide
gtaagatcattcggttgtggtttagaaaag

SEQ ID NO: 79026 - DNA, 30 bp, Artificial Sequence
  Synthetic oligonucleotide
ctaacaaatctacgcttttggagtgaaaag

SEQ ID NO: 79027 - DNA, 30 bp, Artificial Sequence
  Synthetic oligonucleotide
caacaaacaaggtagaggcaagagtaaaag

SEQ ID NO: 79028 - DNA, 30 bp, Artificial Sequence
  Synthetic oligonucleotide
gaagggatcggattcgagggctaaacaaag

SEQ ID NO: 79029 - DNA, 30 bp, Artificial Sequence
  Synthetic oligonucleotide
tagacgtcagtccgatatgctacaacaaag

SEQ ID NO: 79030 - DNA, 30 bp, Artificial Sequence
  Synthetic oligonucleotide
agcgacaccaccagtgcttctgtaacaaag

SEQ ID NO: 79031 - DNA, 30 bp, Artificial Sequence
  Synthetic oligonucleotide
tagggtaacacgtgggattaaaccacaaag

SEQ ID NO: 79032 - DNA, 30 bp, Artificial Sequence
  Synthetic oligonucleotide
ctgatacagaagcacggacacgccacaaag

SEQ ID NO: 79033 - DNA, 30 bp, Artificial Sequence
  Synthetic oligonucleotide
aaggctagaaatttgaagggcatgacaaag

SEQ ID NO: 79034 - DNA, 30 bp, Artificial Sequence
  Synthetic oligonucleotide
catcggcaaccatcaactggcgctacaaag

SEQ ID NO: 79035 - DNA, 30 bp, Artificial Sequence
  Synthetic oligonucleotide
ttggaacagtgaatgcaagatcgtacaaag

SEQ ID NO: 79036 - DNA, 30 bp, Artificial Sequence
  Synthetic oligonucleotide
ccagggcttaagagcgcttcccacgcaaag

SEQ ID NO: 79037 - DNA, 30 bp, Artificial Sequence
  Synthetic oligonucleotide
accgccaggtgatcgaggcgtagggcaaag

SEQ ID NO: 79038 - DNA, 30 bp, Artificial Sequence
  Synthetic oligonucleotide
acgtaaggaggtgcgggctcccgggcaaag

SEQ ID NO: 79039 - DNA, 30 bp, Artificial Sequence
  Synthetic oligonucleotide
ctgcgacgtcctagatggtgggtatcaaag

SEQ ID NO: 79040 - DNA, 30 bp, Artificial Sequence
  Synthetic oligonucleotide
tgtggttccggtaactcctgtagctcaaag

SEQ ID NO: 79041 - DNA, 30 bp, Artificial Sequence
  Synthetic oligonucleotide
gcgtgcattggcgtacaccgggcaagaaag

SEQ ID NO: 79042 - DNA, 30 bp, Artificial Sequence
  Synthetic oligonucleotide
tgcagcgttagtaaaaactagcgaagaaag

SEQ ID NO: 79043 - DNA, 30 bp, Artificial Sequence
  Synthetic oligonucleotide
acgatgtcgatcctggaaaaattaagaaag

SEQ ID NO: 79044 - DNA, 30 bp, Artificial Sequence
  Synthetic oligonucleotide
atgggggtcaggcaattgctcagcagaaag

SEQ ID NO: 79045 - DNA, 30 bp, Artificial Sequence
  Synthetic oligonucleotide
aaagacgcgagatcgctatgtgtcagaaag

SEQ ID NO: 79046 - DNA, 30 bp, Artificial Sequence
  Synthetic oligonucleotide
caattctgcacacgctgatacgcgagaaag

SEQ ID NO: 79047 - DNA, 30 bp, Artificial Sequence
  Synthetic oligonucleotide
atggcagtgcgaggatatataaggagaaag

SEQ ID NO: 79048 - DNA, 30 bp, Artificial Sequence
  Synthetic oligonucleotide
gcgagatggatccggcgtaagcaacgaaag

SEQ ID NO: 79049 - DNA, 30 bp, Artificial Sequence
  Synthetic oligonucleotide
ctgggctacgagatttatggttgacgaaag

SEQ ID NO: 79050 - DNA, 30 bp, Artificial Sequence
  Synthetic oligonucleotide
acagaagtgagccacatatcgctacgaaag

SEQ ID NO: 79051 - DNA, 30 bp, Artificial Sequence
  Synthetic oligonucleotide
gcgagaaatacttactcgttaccaggaaag

SEQ ID NO: 79052 - DNA, 30 bp, Artificial Sequence
  Synthetic oligonucleotide
tcaaaaccatcgatgagcttccgcggaaag

SEQ ID NO: 79053 - DNA, 30 bp, Artificial Sequence
  Synthetic oligonucleotide
gcacgtgaaactacgatagagatgggaaag

SEQ ID NO: 79054 - DNA, 30 bp, Artificial Sequence
  Synthetic oligonucleotide
ccgcacgaacagaataacctaacatgaaag

SEQ ID NO: 79055 - DNA, 30 bp, Artificial Sequence
  Synthetic oligonucleotide
agcgcgattatagcaagaatggcctgaaag

SEQ ID NO: 79056 - DNA, 30 bp, Artificial Sequence
  Synthetic oligonucleotide
aggtagctcaaagtatacgcccggtgaaag

SEQ ID NO: 79057 - DNA, 30 bp, Artificial Sequence
  Synthetic oligonucleotide
cgttcagcggtcgcgcatgcttgttgaaag

SEQ ID NO: 79058 - DNA, 30 bp, Artificial Sequence
  Synthetic oligonucleotide
tactgaaacgtgtgtacgaggttttgaaag

SEQ ID NO: 79059 - DNA, 30 bp, Artificial Sequence
  Synthetic oligonucleotide
ctagtgagtgggggattacgtctaataaag

SEQ ID NO: 79060 - DNA, 30 bp, Artificial Sequence
  Synthetic oligonucleotide
ccacataaattatcgacaaactggataaag

SEQ ID NO: 79061 - DNA, 30 bp, Artificial Sequence
  Synthetic oligonucleotide
gtaactgcgataatctgcggagttataaag

SEQ ID NO: 79062 - DNA, 30 bp, Artificial Sequence
  Synthetic oligonucleotide
agccaagaccgagcaaggatgcaactaaag

SEQ ID NO: 79063 - DNA, 30 bp, Artificial Sequence
  Synthetic oligonucleotide
catatggcggagccggcggtttggctaaag

SEQ ID NO: 79064 - DNA, 30 bp, Artificial Sequence
  Synthetic oligonucleotide
gaggggtgcgggtacatcaatgtgctaaag

SEQ ID NO: 79065 - DNA, 30 bp, Artificial Sequence
  Synthetic oligonucleotide
agacagacatttccccacggtaccgtaaag

SEQ ID NO: 79066 - DNA, 30 bp, Artificial Sequence
  Synthetic oligonucleotide
acattataggagagggctcttagcgtaaag

SEQ ID NO: 79067 - DNA, 30 bp, Artificial Sequence
  Synthetic oligonucleotide
tggttggagtacagcgaggtaggcgtaaag

SEQ ID NO: 79068 - DNA, 30 bp, Artificial Sequence
  Synthetic oligonucleotide
tacgcctattagggtgaacttgtcgtaaag

SEQ ID NO: 79069 - DNA, 30 bp, Artificial Sequence
  Synthetic oligonucleotide
gttcgggtatgtagggagatgattgtaaag

SEQ ID NO: 79070 - DNA, 30 bp, Artificial Sequence
  Synthetic oligonucleotide
ctaactggccagaattgaacatttgtaaag

SEQ ID NO: 79071 - DNA, 30 bp, Artificial Sequence
  Synthetic oligonucleotide
tgtggatgtgcgcaccggaacggcttaaag

SEQ ID NO: 79072 - DNA, 30 bp, Artificial Sequence
  Synthetic oligonucleotide
ccaacagcagctgttatcaaatagttaaag

SEQ ID NO: 79073 - DNA, 30 bp, Artificial Sequence
  Synthetic oligonucleotide
gtctcacgcgagtgagattgctcaaacaag

SEQ ID NO: 79074 - DNA, 30 bp, Artificial Sequence
  Synthetic oligonucleotide
taccttaaagttaggtatgttgttcacaag

SEQ ID NO: 79075 - DNA, 30 bp, Artificial Sequence
  Synthetic oligonucleotide
aaatctacacaaggacggtattgcgacaag

SEQ ID NO: 79076 - DNA, 30 bp, Artificial Sequence
  Synthetic oligonucleotide
cgcgcaggtacagcttacgatgatgacaag

SEQ ID NO: 79077 - DNA, 30 bp, Artificial Sequence
  Synthetic oligonucleotide
ggacaaccgagagggcgcgatttatacaag

SEQ ID NO: 79078 - DNA, 30 bp, Artificial Sequence
  Synthetic oligonucleotide
ataggtcagaacctttccatcagctacaag

SEQ ID NO: 79079 - DNA, 30 bp, Artificial Sequence
  Synthetic oligonucleotide
aagcagtctgataggtaggggcattacaag

SEQ ID NO: 79080 - DNA, 30 bp, Artificial Sequence
  Synthetic oligonucleotide
agacatggcataggacaactgaaaaccaag

SEQ ID NO: 79081 - DNA, 30 bp, Artificial Sequence
  Synthetic oligonucleotide
tctttgttgctatcataggagataaccaag

SEQ ID NO: 79082 - DNA, 30 bp, Artificial Sequence
  Synthetic oligonucleotide
cggtttcctgtccttacaccgaccaccaag

SEQ ID NO: 79083 - DNA, 30 bp, Artificial Sequence
  Synthetic oligonucleotide
tcagggtgacttgccctggagaagaccaag

SEQ ID NO: 79084 - DNA, 30 bp, Artificial Sequence
  Synthetic oligonucleotide
cacgatccctcaatataagcaaataccaag

SEQ ID NO: 79085 - DNA, 30 bp, Artificial Sequence
  Synthetic oligonucleotide
catacgtggaattagtgtaggagtaccaag

SEQ ID NO: 79086 - DNA, 30 bp, Artificial Sequence
  Synthetic oligonucleotide
gccagtggtacctgcgtccttcctcccaag

SEQ ID NO: 79087 - DNA, 30 bp, Artificial Sequence
  Synthetic oligonucleotide
cttcttgtagccgagatgataaaagccaag

SEQ ID NO: 79088 - DNA, 30 bp, Artificial Sequence
  Synthetic oligonucleotide
tcctgtctatgggttaacaatggagccaag

SEQ ID NO: 79089 - DNA, 30 bp, Artificial Sequence
  Synthetic oligonucleotide
gtacggggtgctactgcgttggcatccaag

SEQ ID NO: 79090 - DNA, 30 bp, Artificial Sequence
  Synthetic oligonucleotide
gctgccgtatagatgtctgaagtttccaag

SEQ ID NO: 79091 - DNA, 28 bp, Artificial Sequence
  Synthetic oligonucleotide
agaggggttagggttgtacccaagcaag

SEQ ID NO: 79092 - DNA, 30 bp, Artificial Sequence
  Synthetic oligonucleotide
cagactggagtacgatggaataagcgcaag

SEQ ID NO: 79093 - DNA, 30 bp, Artificial Sequence
  Synthetic oligonucleotide
ggtcaatcgaatcatataacctgtcgcaag

SEQ ID NO: 79094 - DNA, 30 bp, Artificial Sequence
  Synthetic oligonucleotide
tgatccgagtcggtgtgtccatcaggcaag

SEQ ID NO: 79095 - DNA, 30 bp, Artificial Sequence
  Synthetic oligonucleotide
catccagtgaccatttggaagaacggcaag

SEQ ID NO: 79096 - DNA, 30 bp, Artificial Sequence
  Synthetic oligonucleotide
atgcactgggggtgacttttttcgggcaag

SEQ ID NO: 79097 - DNA, 30 bp, Artificial Sequence
  Synthetic oligonucleotide
ttaccatgctgggagccaccgagttgcaag

SEQ ID NO: 79098 - DNA, 30 bp, Artificial Sequence
  Synthetic oligonucleotide
gcaagttccaatgagaattgctccatcaag

SEQ ID NO: 79099 - DNA, 30 bp, Artificial Sequence
  Synthetic oligonucleotide
cagaccaactgtcacactaacatgatcaag

SEQ ID NO: 79100 - DNA, 30 bp, Artificial Sequence
  Synthetic oligonucleotide
gggccgacctttcataatagagtgatcaag

SEQ ID NO: 79101 - DNA, 30 bp, Artificial Sequence
  Synthetic oligonucleotide
ataagaagaactatgttgaataatatcaag

SEQ ID NO: 79102 - DNA, 30 bp, Artificial Sequence
  Synthetic oligonucleotide
ccgcccagagtagccaggaaggctatcaag

SEQ ID NO: 79103 - DNA, 30 bp, Artificial Sequence
  Synthetic oligonucleotide
gcttatggatcgcgggaggcaggtatcaag

SEQ ID NO: 79104 - DNA, 29 bp, Artificial Sequence
  Synthetic oligonucleotide
ataggtccggctgaaagactaggctcaag

SEQ ID NO: 79105 - DNA, 30 bp, Artificial Sequence
  Synthetic oligonucleotide
aatcgtaagtattcatagggctacgtcaag

SEQ ID NO: 79106 - DNA, 30 bp, Artificial Sequence
  Synthetic oligonucleotide
tcattcggtgccagtaaggagtttgtcaag

SEQ ID NO: 79107 - DNA, 30 bp, Artificial Sequence
  Synthetic oligonucleotide
cggttgccggttcaactgaaccaattcaag

SEQ ID NO: 79108 - DNA, 30 bp, Artificial Sequence
  Synthetic oligonucleotide
gacgggcgaaacggtcctatatagaagaag

SEQ ID NO: 79109 - DNA, 30 bp, Artificial Sequence
  Synthetic oligonucleotide
ttgatttatcatagagatcgccggaagaag

SEQ ID NO: 79110 - DNA, 30 bp, Artificial Sequence
  Synthetic oligonucleotide
taagtataatcacaatcaggggaacagaag

SEQ ID NO: 79111 - DNA, 30 bp, Artificial Sequence
  Synthetic oligonucleotide
ataactcaatgacatggtggtatacagaag

SEQ ID NO: 79112 - DNA, 30 bp, Artificial Sequence
  Synthetic oligonucleotide
tgcggccctcgttactccgcattacagaag

SEQ ID NO: 79113 - DNA, 30 bp, Artificial Sequence
  Synthetic oligonucleotide
acattaatgattagtggtccgacccagaag

SEQ ID NO: 79114 - DNA, 30 bp, Artificial Sequence
  Synthetic oligonucleotide
ggttcaacagcatgatgcttagggcagaag

SEQ ID NO: 79115 - DNA, 30 bp, Artificial Sequence
  Synthetic oligonucleotide
gtaggttggattttgctttacggagagaag

SEQ ID NO: 79116 - DNA, 30 bp, Artificial Sequence
  Synthetic oligonucleotide
tcgggaccgattagtgcgcacgacgagaag

SEQ ID NO: 79117 - DNA, 30 bp, Artificial Sequence
  Synthetic oligonucleotide
ggttaaatagggcgcgtggattcggagaag

SEQ ID NO: 79118 - DNA, 30 bp, Artificial Sequence
  Synthetic oligonucleotide
atgtccagcgcatggcgcggggcgtagaag

SEQ ID NO: 79119 - DNA, 30 bp, Artificial Sequence
  Synthetic oligonucleotide
caataaagagtccgtcatgctgggtagaag

SEQ ID NO: 79120 - DNA, 30 bp, Artificial Sequence
  Synthetic oligonucleotide
ccagaactttgctgagtaaactgaacgaag

SEQ ID NO: 79121 - DNA, 30 bp, Artificial Sequence
  Synthetic oligonucleotide
aatatataataaaacgcggtgcggacgaag

SEQ ID NO: 79122 - DNA, 30 bp, Artificial Sequence
  Synthetic oligonucleotide
aaggtgtcattcgaccttggggtgacgaag

SEQ ID NO: 79123 - DNA, 30 bp, Artificial Sequence
  Synthetic oligonucleotide
gctcctgccatagtaagttcgcgaccgaag

SEQ ID NO: 79124 - DNA, 30 bp, Artificial Sequence
  Synthetic oligonucleotide
tgcttacatgtacaaaaggggtgtccgaag

SEQ ID NO: 79125 - DNA, 30 bp, Artificial Sequence
  Synthetic oligonucleotide
tgccgcccgagggagaatgaaatcgcgaag

SEQ ID NO: 79126 - DNA, 30 bp, Artificial Sequence
  Synthetic oligonucleotide
gcatgactagattggcgcgacaaatcgaag

SEQ ID NO: 79127 - DNA, 30 bp, Artificial Sequence
  Synthetic oligonucleotide
tagcgtgctaaagatgccctaggctcgaag

SEQ ID NO: 79128 - DNA, 30 bp, Artificial Sequence
  Synthetic oligonucleotide
ctcggtacaagtctgtatttggggtcgaag

SEQ ID NO: 79129 - DNA, 30 bp, Artificial Sequence
  Synthetic oligonucleotide
gactggcgacgaattgtcggccgaaggaag

SEQ ID NO: 79130 - DNA, 30 bp, Artificial Sequence
  Synthetic oligonucleotide
agggagcgttgatccagaccctagaggaag

SEQ ID NO: 79131 - DNA, 30 bp, Artificial Sequence
  Synthetic oligonucleotide
ttgttctttgcggactctagaccgaggaag

SEQ ID NO: 79132 - DNA, 30 bp, Artificial Sequence
  Synthetic oligonucleotide
aaaccagatgcgaacatgaaatttaggaag

SEQ ID NO: 79133 - DNA, 31 bp, Artificial Sequence
  Synthetic oligonucleotide
ataattgaggtcgcatcccacagaagggaag

SEQ ID NO: 79134 - DNA, 30 bp, Artificial Sequence
  Synthetic oligonucleotide
tacaagactattactgttgatcaggggaag

SEQ ID NO: 79135 - DNA, 30 bp, Artificial Sequence
  Synthetic oligonucleotide
aggcgcaggcaaagagtacaaactgggaag

SEQ ID NO: 79136 - DNA, 30 bp, Artificial Sequence
  Synthetic oligonucleotide
gcgggcgtacatgcggcacgatctgggaag

SEQ ID NO: 79137 - DNA, 30 bp, Artificial Sequence
  Synthetic oligonucleotide
gtatacaacgggctagggtgaagatggaag

SEQ ID NO: 79138 - DNA, 30 bp, Artificial Sequence
  Synthetic oligonucleotide
gctcgctgagaaactagagttggttggaag

SEQ ID NO: 79139 - DNA, 30 bp, Artificial Sequence
  Synthetic oligonucleotide
ctgagcctagtcagaggtgtaaaaatgaag

SEQ ID NO: 79140 - DNA, 30 bp, Artificial Sequence
  Synthetic oligonucleotide
cgacggtacatgtgaatttaaggaatgaag

SEQ ID NO: 79141 - DNA, 30 bp, Artificial Sequence
  Synthetic oligonucleotide
cgcgcccagtactttttttggcacatgaag

SEQ ID NO: 79142 - DNA, 30 bp, Artificial Sequence
  Synthetic oligonucleotide
gaaagtcgcgcgaaccgcggatacatgaag

SEQ ID NO: 79143 - DNA, 30 bp, Artificial Sequence
  Synthetic oligonucleotide
agcagctgtaactacgatactggcatgaag

SEQ ID NO: 79144 - DNA, 30 bp, Artificial Sequence
  Synthetic oligonucleotide
aacggctttggtaagaagtcaccgatgaag

SEQ ID NO: 79145 - DNA, 30 bp, Artificial Sequence
  Synthetic oligonucleotide
gtccaccgcgggccgagagtcgcgatgaag

SEQ ID NO: 79146 - DNA, 30 bp, Artificial Sequence
  Synthetic oligonucleotide
ctaaaaggtcgaaccccagggggtatgaag

SEQ ID NO: 79147 - DNA, 30 bp, Artificial Sequence
  Synthetic oligonucleotide
gctaagactacaacaaggttcctagtgaag

SEQ ID NO: 79148 - DNA, 31 bp, Artificial Sequence
  Synthetic oligonucleotide
agagggtgcaaattcatgctgtggtgtgaag

SEQ ID NO: 79149 - DNA, 30 bp, Artificial Sequence
  Synthetic oligonucleotide
tggttaacaccaagaacttgaggattgaag

SEQ ID NO: 79150 - DNA, 30 bp, Artificial Sequence
  Synthetic oligonucleotide
gcgactggcactcttttaaggctattgaag

SEQ ID NO: 79151 - DNA, 30 bp, Artificial Sequence
  Synthetic oligonucleotide
cataagtcctcggatcgactgcgtttgaag

SEQ ID NO: 79152 - DNA, 30 bp, Artificial Sequence
  Synthetic oligonucleotide
acggtgaatgatcgaggattcggaaataag

SEQ ID NO: 79153 - DNA, 30 bp, Artificial Sequence
  Synthetic oligonucleotide
acgctactcacgcacctcgtagcgaataag

SEQ ID NO: 79154 - DNA, 30 bp, Artificial Sequence
  Synthetic oligonucleotide
ctgcttagtcacacctagacgaaagataag

SEQ ID NO: 79155 - DNA, 30 bp, Artificial Sequence
  Synthetic oligonucleotide
cgtcgcctaacgcacggcgtataagataag

SEQ ID NO: 79156 - DNA, 30 bp, Artificial Sequence
  Synthetic oligonucleotide
cataggatatcctttagacgaatcgataag

SEQ ID NO: 79157 - DNA, 30 bp, Artificial Sequence
  Synthetic oligonucleotide
catcatgatatagcagaggacttcgataag

SEQ ID NO: 79158 - DNA, 30 bp, Artificial Sequence
  Synthetic oligonucleotide
gtgcaccgcaagacccgacgcgaatataag

SEQ ID NO: 79159 - DNA, 30 bp, Artificial Sequence
  Synthetic oligonucleotide
tcgtggatggaaggagtcccttacactaag

SEQ ID NO: 79160 - DNA, 30 bp, Artificial Sequence
  Synthetic oligonucleotide
gatgcgattgtctttatcctatctactaag

SEQ ID NO: 79161 - DNA, 30 bp, Artificial Sequence
  Synthetic oligonucleotide
caggggggcagctacatcttggcccctaag

SEQ ID NO: 79162 - DNA, 30 bp, Artificial Sequence
  Synthetic oligonucleotide
tgtaatgatggcgcgggagacaatcctaag

SEQ ID NO: 79163 - DNA, 30 bp, Artificial Sequence
  Synthetic oligonucleotide
gccatccccaacccgtggaaagtagctaag

SEQ ID NO: 79164 - DNA, 30 bp, Artificial Sequence
  Synthetic oligonucleotide
ggagtacgcaaagggctattattcgctaag

SEQ ID NO: 79165 - DNA, 30 bp, Artificial Sequence
  Synthetic oligonucleotide
tggaacggagaggtgaactcgtgggctaag

SEQ ID NO: 79166 - DNA, 30 bp, Artificial Sequence
  Synthetic oligonucleotide
gcgagcatgacttccacttcagggtctaag

SEQ ID NO: 79167 - DNA, 30 bp, Artificial Sequence
  Synthetic oligonucleotide
tcgctgcaagattggcaacctatttctaag

SEQ ID NO: 79168 - DNA, 30 bp, Artificial Sequence
  Synthetic oligonucleotide
agcgacggcctagtgtgttgtcaaagtaag

SEQ ID NO: 79169 - DNA, 30 bp, Artificial Sequence
  Synthetic oligonucleotide
tgacaatggcggggtcggattactagtaag

SEQ ID NO: 79170 - DNA, 30 bp, Artificial Sequence
  Synthetic oligonucleotide
cagatcttgaacgattgctcatgtagtaag

SEQ ID NO: 79171 - DNA, 30 bp, Artificial Sequence
  Synthetic oligonucleotide
ggcactggagactctcactgtatccgtaag

SEQ ID NO: 79172 - DNA, 30 bp, Artificial Sequence
  Synthetic oligonucleotide
acgtgaattctcgggattggtcggcgtaag

SEQ ID NO: 79173 - DNA, 30 bp, Artificial Sequence
  Synthetic oligonucleotide
gtaaagaatgttgttagcggagtgggtaag

SEQ ID NO: 79174 - DNA, 30 bp, Artificial Sequence
  Synthetic oligonucleotide
ttgcctcgggtctaaggatgagagtgtaag

SEQ ID NO: 79175 - DNA, 30 bp, Artificial Sequence
  Synthetic oligonucleotide
aagagggacctaggctctcacgagtgtaag

SEQ ID NO: 79176 - DNA, 30 bp, Artificial Sequence
  Synthetic oligonucleotide
ttgaacgcaaagacggttgatgattgtaag

SEQ ID NO: 79177 - DNA, 30 bp, Artificial Sequence
  Synthetic oligonucleotide
gaataaatcgcacgacaacatgacattaag

SEQ ID NO: 79178 - DNA, 30 bp, Artificial Sequence
  Synthetic oligonucleotide
gagcggtctatcgtcaagagcggcattaag

SEQ ID NO: 79179 - DNA, 30 bp, Artificial Sequence
  Synthetic oligonucleotide
atcggttaaaaaaggtattgacatattaag

SEQ ID NO: 79180 - DNA, 30 bp, Artificial Sequence
  Synthetic oligonucleotide
taatggtcgaaataaaacctggcacttaag

SEQ ID NO: 79181 - DNA, 30 bp, Artificial Sequence
  Synthetic oligonucleotide
gcggtacgtaagaaaaatccattacttaag

SEQ ID NO: 79182 - DNA, 30 bp, Artificial Sequence
  Synthetic oligonucleotide
acattacaattcaatcctgcaaccgttaag

SEQ ID NO: 79183 - DNA, 30 bp, Artificial Sequence
  Synthetic oligonucleotide
ggacatcgtactcatccgaggtgttttaag

SEQ ID NO: 79184 - DNA, 30 bp, Artificial Sequence
  Synthetic oligonucleotide
tctgactagcgacatttcccaacaaaacag

SEQ ID NO: 79185 - DNA, 30 bp, Artificial Sequence
  Synthetic oligonucleotide
atggtgtgagaaaattgaaattgaaaacag

SEQ ID NO: 79186 - DNA, 30 bp, Artificial Sequence
  Synthetic oligonucleotide
caaaactagggctttaactccgtaaaacag

SEQ ID NO: 79187 - DNA, 30 bp, Artificial Sequence
  Synthetic oligonucleotide
aaggttaaacggaatagtttgagcaaacag

SEQ ID NO: 79188 - DNA, 30 bp, Artificial Sequence
  Synthetic oligonucleotide
gcttcaagagacctcattgtaacgaaacag

SEQ ID NO: 79189 - DNA, 30 bp, Artificial Sequence
  Synthetic oligonucleotide
tgaacacgatgacgtctattcacacaacag

SEQ ID NO: 79190 - DNA, 30 bp, Artificial Sequence
  Synthetic oligonucleotide
gtcaggctataagttaaacgcgcgcaacag

SEQ ID NO: 79191 - DNA, 30 bp, Artificial Sequence
  Synthetic oligonucleotide
tccgggttaagctaaaatcgtaggcaacag

SEQ ID NO: 79192 - DNA, 30 bp, Artificial Sequence
  Synthetic oligonucleotide
gtcgtactcataacgatattcaatcaacag

SEQ ID NO: 79193 - DNA, 30 bp, Artificial Sequence
  Synthetic oligonucleotide
tgcctcagctgtacggcgtgatatcaacag

SEQ ID NO: 79194 - DNA, 30 bp, Artificial Sequence
  Synthetic oligonucleotide
tacatcttgccgatgacaatgtgcgaacag

SEQ ID NO: 79195 - DNA, 30 bp, Artificial Sequence
  Synthetic oligonucleotide
gggtgggggacctactacggagattaacag

SEQ ID NO: 79196 - DNA, 30 bp, Artificial Sequence
  Synthetic oligonucleotide
acggtttgcgttgtcgacaaggattaacag

SEQ ID NO: 79197 - DNA, 30 bp, Artificial Sequence
  Synthetic oligonucleotide
actagctactaataggctggctccacacag

SEQ ID NO: 79198 - DNA, 30 bp, Artificial Sequence
  Synthetic oligonucleotide
ggatgcggtatagtgaggggacgtacacag

SEQ ID NO: 79199 - DNA, 30 bp, Artificial Sequence
  Synthetic oligonucleotide
ccgcgcagggtcgataggcaggatccacag

SEQ ID NO: 79200 - DNA, 30 bp, Artificial Sequence
  Synthetic oligonucleotide
ggtgggtaggcttgtgaggcgatttcacag

SEQ ID NO: 79201 - DNA, 30 bp, Artificial Sequence
  Synthetic oligonucleotide
agtggaacgttcatcttatgaggaagacag

SEQ ID NO: 79202 - DNA, 30 bp, Artificial Sequence
  Synthetic oligonucleotide
ggcaggtagagtagattggtcatcagacag

SEQ ID NO: 79203 - DNA, 30 bp, Artificial Sequence
  Synthetic oligonucleotide
agtacaaatgcctatgtgcgtaggagacag

SEQ ID NO: 79204 - DNA, 30 bp, Artificial Sequence
  Synthetic oligonucleotide
gaaggtcgaggagcccgtaattgacgacag

SEQ ID NO: 79205 - DNA, 30 bp, Artificial Sequence
  Synthetic oligonucleotide
caagggtatgcagcaaaagtagaccgacag

SEQ ID NO: 79206 - DNA, 30 bp, Artificial Sequence
  Synthetic oligonucleotide
ccggagtgggtagttaagcgtgcccgacag

SEQ ID NO: 79207 - DNA, 30 bp, Artificial Sequence
  Synthetic oligonucleotide
gtagttcaggccttaatactaagtcgacag

SEQ ID NO: 79208 - DNA, 30 bp, Artificial Sequence
  Synthetic oligonucleotide
cactgatcagattcaccggacattcgacag

SEQ ID NO: 79209 - DNA, 30 bp, Artificial Sequence
  Synthetic oligonucleotide
tcgaataacccgcgagatgggaggggacag

SEQ ID NO: 79210 - DNA, 30 bp, Artificial Sequence
  Synthetic oligonucleotide
agctcagtcccgaccactgcgactggacag

SEQ ID NO: 79211 - DNA, 30 bp, Artificial Sequence
  Synthetic oligonucleotide
acgagatcccaattggaggtcaaatgacag

SEQ ID NO: 79212 - DNA, 30 bp, Artificial Sequence
  Synthetic oligonucleotide
acctcatggatgggtttcatgcgctgacag

SEQ ID NO: 79213 - DNA, 30 bp, Artificial Sequence
  Synthetic oligonucleotide
ttccccaacgggatgaatgtaatcatacag

SEQ ID NO: 79214 - DNA, 30 bp, Artificial Sequence
  Synthetic oligonucleotide
ggtgcaagtagcggtttacccctcatacag

SEQ ID NO: 79215 - DNA, 30 bp, Artificial Sequence
  Synthetic oligonucleotide
ccatcgtgacgataaggggatacgatacag

SEQ ID NO: 79216 - DNA, 30 bp, Artificial Sequence
  Synthetic oligonucleotide
tgttaagtgtaagtacggatgtgtatacag

SEQ ID NO: 79217 - DNA, 30 bp, Artificial Sequence
  Synthetic oligonucleotide
gtgtcgatactgtacaataccatcctacag

SEQ ID NO: 79218 - DNA, 30 bp, Artificial Sequence
  Synthetic oligonucleotide
tgtcagaatggagcaaggaatcgagtacag

SEQ ID NO: 79219 - DNA, 30 bp, Artificial Sequence
  Synthetic oligonucleotide
atcggactcgacaactaaaatccggtacag

SEQ ID NO: 79220 - DNA, 30 bp, Artificial Sequence
  Synthetic oligonucleotide
ccgaatgggtaattctcctcgtgtgtacag

SEQ ID NO: 79221 - DNA, 30 bp, Artificial Sequence
  Synthetic oligonucleotide
cgtaatccgagatggcgacaggctttacag

SEQ ID NO: 79222 - DNA, 30 bp, Artificial Sequence
  Synthetic oligonucleotide
aaacaggggtgaatgggataaaacaaccag

SEQ ID NO: 79223 - DNA, 30 bp, Artificial Sequence
  Synthetic oligonucleotide
aaggggtatggtagaggtatcgtcaaccag

SEQ ID NO: 79224 - DNA, 30 bp, Artificial Sequence
  Synthetic oligonucleotide
gattacacacaatcttacgggcgtaaccag

SEQ ID NO: 79225 - DNA, 30 bp, Artificial Sequence
  Synthetic oligonucleotide
gactacaaaagcaaactatcgggtaaccag

SEQ ID NO: 79226 - DNA, 30 bp, Artificial Sequence
  Synthetic oligonucleotide
gggcattccgctttatggtctcttaaccag

SEQ ID NO: 79227 - DNA, 30 bp, Artificial Sequence
  Synthetic oligonucleotide
tgaagacagtagcctgaatactgccaccag

SEQ ID NO: 79228 - DNA, 30 bp, Artificial Sequence
  Synthetic oligonucleotide
aggtgtctcaagccgaaggtccgtcaccag

SEQ ID NO: 79229 - DNA, 30 bp, Artificial Sequence
  Synthetic oligonucleotide
ttaaagggcgcccttccgatgtaggaccag

SEQ ID NO: 79230 - DNA, 30 bp, Artificial Sequence
  Synthetic oligonucleotide
ttaaactccaaagatcacaaccgtgaccag

SEQ ID NO: 79231 - DNA, 30 bp, Artificial Sequence
  Synthetic oligonucleotide
gagacgtgcaataatagcgacgaataccag

SEQ ID NO: 79232 - DNA, 30 bp, Artificial Sequence
  Synthetic oligonucleotide
taggggtagtcatgaggggagggataccag

SEQ ID NO: 79233 - DNA, 30 bp, Artificial Sequence
  Synthetic oligonucleotide
atgctacgcgcccacgacggcacctaccag

SEQ ID NO: 79234 - DNA, 30 bp, Artificial Sequence
  Synthetic oligonucleotide
ctgccccagaaagttgttcaccgcacccag

SEQ ID NO: 79235 - DNA, 30 bp, Artificial Sequence
  Synthetic oligonucleotide
ggggggactaagcgagtacggaggccccag

SEQ ID NO: 79236 - DNA, 30 bp, Artificial Sequence
  Synthetic oligonucleotide
aactcataacttagcaccaactggccccag

SEQ ID NO: 79237 - DNA, 30 bp, Artificial Sequence
  Synthetic oligonucleotide
gcgtggttacctcagtcacgcgttccccag

SEQ ID NO: 79238 - DNA, 30 bp, Artificial Sequence
  Synthetic oligonucleotide
taaaggagttgataaaaaccgaaggcccag

SEQ ID NO: 79239 - DNA, 30 bp, Artificial Sequence
  Synthetic oligonucleotide
agcgcgtcgtttctaaactatgaaagccag

SEQ ID NO: 79240 - DNA, 30 bp, Artificial Sequence
  Synthetic oligonucleotide
cgcactgagagtctctcacaataaagccag

SEQ ID NO: 79241 - DNA, 30 bp, Artificial Sequence
  Synthetic oligonucleotide
atcgcccggaagccaaagcaggacagccag

SEQ ID NO: 79242 - DNA, 30 bp, Artificial Sequence
  Synthetic oligonucleotide
tacattagtgttgtcaggattaagagccag

SEQ ID NO: 79243 - DNA, 30 bp, Artificial Sequence
  Synthetic oligonucleotide
tcctccaggcgactataatagcaaggccag

SEQ ID NO: 79244 - DNA, 30 bp, Artificial Sequence
  Synthetic oligonucleotide
tgtatgtattcacgggattaagaaggccag

SEQ ID NO: 79245 - DNA, 30 bp, Artificial Sequence
  Synthetic oligonucleotide
ctacggttcgctatgtaacactgatgccag

SEQ ID NO: 79246 - DNA, 31 bp, Artificial Sequence
  Synthetic oligonucleotide
tgtgattgtaacgggtggcatttcgtgccag

SEQ ID NO: 79247 - DNA, 30 bp, Artificial Sequence
  Synthetic oligonucleotide
gctaggtaacgaggacaggtttcttgccag

SEQ ID NO: 79248 - DNA, 30 bp, Artificial Sequence
  Synthetic oligonucleotide
gggctatagaaatctgaaaacggaatccag

SEQ ID NO: 79249 - DNA, 30 bp, Artificial Sequence
  Synthetic oligonucleotide
ctgtcgtcttaaggacaatgaagtatccag

SEQ ID NO: 79250 - DNA, 30 bp, Artificial Sequence
  Synthetic oligonucleotide
aaggcgcggcgccaaaccagcggcctccag

SEQ ID NO: 79251 - DNA, 30 bp, Artificial Sequence
  Synthetic oligonucleotide
aggtgccttgacaaaagtggctacgtccag

SEQ ID NO: 79252 - DNA, 30 bp, Artificial Sequence
  Synthetic oligonucleotide
tcactctgtggaccgtagtgagttgtccag

SEQ ID NO: 79253 - DNA, 30 bp, Artificial Sequence
  Synthetic oligonucleotide
aatggacggtgctgaatctcgtttgtccag

SEQ ID NO: 79254 - DNA, 30 bp, Artificial Sequence
  Synthetic oligonucleotide
accaattcccgaatcatgaagagcttccag

SEQ ID NO: 79255 - DNA, 30 bp, Artificial Sequence
  Synthetic oligonucleotide
ctgagctctatctggagcttatcaaagcag

SEQ ID NO: 79256 - DNA, 30 bp, Artificial Sequence
  Synthetic oligonucleotide
cgaggtctgtgacgcttctccaacaagcag

SEQ ID NO: 79257 - DNA, 30 bp, Artificial Sequence
  Synthetic oligonucleotide
ccttatgcttaccgaggaatggccaagcag

SEQ ID NO: 79258 - DNA, 30 bp, Artificial Sequence
  Synthetic oligonucleotide
aaagtaacatgaagtgggcgactcaagcag

SEQ ID NO: 79259 - DNA, 30 bp, Artificial Sequence
  Synthetic oligonucleotide
agtggagtgcttgaggatcgatagaagcag

SEQ ID NO: 79260 - DNA, 30 bp, Artificial Sequence
  Synthetic oligonucleotide
taggtgcttgggaaggtcgacaggaagcag

SEQ ID NO: 79261 - DNA, 30 bp, Artificial Sequence
  Synthetic oligonucleotide
tggagaggtataataacgttacataagcag

SEQ ID NO: 79262 - DNA, 30 bp, Artificial Sequence
  Synthetic oligonucleotide
gatgcattaacagcgggcaatggtaagcag

SEQ ID NO: 79263 - DNA, 30 bp, Artificial Sequence
  Synthetic oligonucleotide
cgacgtgcgaaggacgtgtggtagcagcag

SEQ ID NO: 79264 - DNA, 30 bp, Artificial Sequence
  Synthetic oligonucleotide
tacgctagggaggctgttgcggaagagcag

SEQ ID NO: 79265 - DNA, 30 bp, Artificial Sequence
  Synthetic oligonucleotide
cagatcactgtctcaacacggacagagcag

SEQ ID NO: 79266 - DNA, 30 bp, Artificial Sequence
  Synthetic oligonucleotide
gaacctaaggaggacagggggtaggagcag

SEQ ID NO: 79267 - DNA, 30 bp, Artificial Sequence
  Synthetic oligonucleotide
agcgccaacgattattcggagtttgagcag

SEQ ID NO: 79268 - DNA, 30 bp, Artificial Sequence
  Synthetic oligonucleotide
ccgtgtagcagtgggcagaacatatagcag

SEQ ID NO: 79269 - DNA, 30 bp, Artificial Sequence
  Synthetic oligonucleotide
atgggtggctactttaaataaatcacgcag

SEQ ID NO: 79270 - DNA, 30 bp, Artificial Sequence
  Synthetic oligonucleotide
gcgtctacatgaagattatgagtgccgcag

SEQ ID NO: 79271 - DNA, 30 bp, Artificial Sequence
  Synthetic oligonucleotide
cttaacgtaagaaatgctgcgcaggcgcag

SEQ ID NO: 79272 - DNA, 30 bp, Artificial Sequence
  Synthetic oligonucleotide
cctgtgtcaagtttatcagtgcgaaggcag

SEQ ID NO: 79273 - DNA, 30 bp, Artificial Sequence
  Synthetic oligonucleotide
ggctaggccctccccaagaaccacaggcag

SEQ ID NO: 79274 - DNA, 30 bp, Artificial Sequence
  Synthetic oligonucleotide
tggggcgggtggccttcatcgcgcaggcag

SEQ ID NO: 79275 - DNA, 30 bp, Artificial Sequence
  Synthetic oligonucleotide
tgtcggtcggggtgtataagtttcaggcag

SEQ ID NO: 79276 - DNA, 30 bp, Artificial Sequence
  Synthetic oligonucleotide
ctccaggaacggtagagggcaaataggcag

SEQ ID NO: 79277 - DNA, 30 bp, Artificial Sequence
  Synthetic oligonucleotide
caaacacgttcatccccttagctccggcag

SEQ ID NO: 79278 - DNA, 30 bp, Artificial Sequence
  Synthetic oligonucleotide
cataggcagtaacgttacaccacgcggcag

SEQ ID NO: 79279 - DNA, 30 bp, Artificial Sequence
  Synthetic oligonucleotide
aggaaccaagaagcttgggttgctcggcag

SEQ ID NO: 79280 - DNA, 30 bp, Artificial Sequence
  Synthetic oligonucleotide
aacatactgtgcctgtaagggagtcggcag

SEQ ID NO: 79281 - DNA, 30 bp, Artificial Sequence
  Synthetic oligonucleotide
atacagattcatagcgagttgggagggcag

SEQ ID NO: 79282 - DNA, 30 bp, Artificial Sequence
  Synthetic oligonucleotide
ggacagaatcataagcacataatagggcag

SEQ ID NO: 79283 - DNA, 30 bp, Artificial Sequence
  Synthetic oligonucleotide
taagatctcgaaacgtttaatactgggcag

SEQ ID NO: 79284 - DNA, 30 bp, Artificial Sequence
  Synthetic oligonucleotide
gacgaagtcacttcttagaagcaatggcag

SEQ ID NO: 79285 - DNA, 30 bp, Artificial Sequence
  Synthetic oligonucleotide
ggtcagacgctattagattcacagtggcag

SEQ ID NO: 79286 - DNA, 30 bp, Artificial Sequence
  Synthetic oligonucleotide
atagtacttaactagaacaactggatgcag

SEQ ID NO: 79287 - DNA, 30 bp, Artificial Sequence
  Synthetic oligonucleotide
atgactcgattatgggagtgcatgctgcag

SEQ ID NO: 79288 - DNA, 30 bp, Artificial Sequence
  Synthetic oligonucleotide
gcgcagctgaacgtgtcttggttagtgcag

SEQ ID NO: 79289 - DNA, 30 bp, Artificial Sequence
  Synthetic oligonucleotide
acgcggcgcctcacgcccggtaaaaatcag

SEQ ID NO: 79290 - DNA, 30 bp, Artificial Sequence
  Synthetic oligonucleotide
actaggttcaatggcgggtcccaaaatcag

SEQ ID NO: 79291 - DNA, 30 bp, Artificial Sequence
  Synthetic oligonucleotide
tagaaacacggcggaacctgaatcaatcag

SEQ ID NO: 79292 - DNA, 30 bp, Artificial Sequence
  Synthetic oligonucleotide
acatctcgaccgcgtaacatgaagaatcag

SEQ ID NO: 79293 - DNA, 30 bp, Artificial Sequence
  Synthetic oligonucleotide
gatgctatggaaaggaccatagataatcag

SEQ ID NO: 79294 - DNA, 30 bp, Artificial Sequence
  Synthetic oligonucleotide
gtgcggggctcgtatgtgcgaactcatcag

SEQ ID NO: 79295 - DNA, 30 bp, Artificial Sequence
  Synthetic oligonucleotide
cttgagcatgataactcgaagacggatcag

SEQ ID NO: 79296 - DNA, 30 bp, Artificial Sequence
  Synthetic oligonucleotide
catgtctagtcacgtgtgacgaaatatcag

SEQ ID NO: 79297 - DNA, 30 bp, Artificial Sequence
  Synthetic oligonucleotide
gatcaacatcccgagtatgcgacctatcag

SEQ ID NO: 79298 - DNA, 30 bp, Artificial Sequence
  Synthetic oligonucleotide
cgctaaacaaacgaaacttgctgctatcag

SEQ ID NO: 79299 - DNA, 30 bp, Artificial Sequence
  Synthetic oligonucleotide
caaattgcgaagctaaggtgtatgtatcag

SEQ ID NO: 79300 - DNA, 30 bp, Artificial Sequence
  Synthetic oligonucleotide
tccgggacaagaactcagagtaaacctcag

SEQ ID NO: 79301 - DNA, 30 bp, Artificial Sequence
  Synthetic oligonucleotide
ccaccagcgacagtgaggaagaaccctcag

SEQ ID NO: 79302 - DNA, 30 bp, Artificial Sequence
  Synthetic oligonucleotide
tggagggattggttgcatcgactgcctcag

SEQ ID NO: 79303 - DNA, 30 bp, Artificial Sequence
  Synthetic oligonucleotide
ggattggtggtaatgacacgtaggtctcag

SEQ ID NO: 79304 - DNA, 30 bp, Artificial Sequence
  Synthetic oligonucleotide
ggcatacaatattattttcttatgagtcag

SEQ ID NO: 79305 - DNA, 30 bp, Artificial Sequence
  Synthetic oligonucleotide
ggctacaccactggaagggtatgccgtcag

SEQ ID NO: 79306 - DNA, 30 bp, Artificial Sequence
  Synthetic oligonucleotide
gttaattagcgagtgaacggggggcgtcag

SEQ ID NO: 79307 - DNA, 30 bp, Artificial Sequence
  Synthetic oligonucleotide
ccgaatcgactacaacggtatcgcggtcag

SEQ ID NO: 79308 - DNA, 30 bp, Artificial Sequence
  Synthetic oligonucleotide
gctaacaatggttgtccccctcgcggtcag

SEQ ID NO: 79309 - DNA, 30 bp, Artificial Sequence
  Synthetic oligonucleotide
cgcgatgaggtgtcttctgtaatcggtcag

SEQ ID NO: 79310 - DNA, 30 bp, Artificial Sequence
  Synthetic oligonucleotide
gtacatcgccggaacgaatatgcgattcag

SEQ ID NO: 79311 - DNA, 30 bp, Artificial Sequence
  Synthetic oligonucleotide
tgttaatgagtgggcgggaatatccttcag

SEQ ID NO: 79312 - DNA, 30 bp, Artificial Sequence
  Synthetic oligonucleotide
ggaactgcaaatcacgctaggctagttcag

SEQ ID NO: 79313 - DNA, 30 bp, Artificial Sequence
  Synthetic oligonucleotide
cgcgatggagtgtgaagcggtgcggttcag

SEQ ID NO: 79314 - DNA, 30 bp, Artificial Sequence
  Synthetic oligonucleotide
cgatgtgaaccgttacaaccttgggttcag

SEQ ID NO: 79315 - DNA, 30 bp, Artificial Sequence
  Synthetic oligonucleotide
acctccaagcaatggggaaagtatgttcag

SEQ ID NO: 79316 - DNA, 30 bp, Artificial Sequence
  Synthetic oligonucleotide
gtcgaatctccacgtacgaggacatttcag

SEQ ID NO: 79317 - DNA, 30 bp, Artificial Sequence
  Synthetic oligonucleotide
cgcttagccatttgtcccctcgacaaagag

SEQ ID NO: 79318 - DNA, 30 bp, Artificial Sequence
  Synthetic oligonucleotide
acgattatcgttgagttacgaggcaaagag

SEQ ID NO: 79319 - DNA, 30 bp, Artificial Sequence
  Synthetic oligonucleotide
acctcccaacagtacgatgaccagaaagag

SEQ ID NO: 79320 - DNA, 30 bp, Artificial Sequence
  Synthetic oligonucleotide
gcggatccacctatcgcggtgcgacaagag

SEQ ID NO: 79321 - DNA, 30 bp, Artificial Sequence
  Synthetic oligonucleotide
tgatcgacgaaaagtggatctggccaagag

SEQ ID NO: 79322 - DNA, 30 bp, Artificial Sequence
  Synthetic oligonucleotide
aaagtcaacactcgtccatacgggcaagag

SEQ ID NO: 79323 - DNA, 30 bp, Artificial Sequence
  Synthetic oligonucleotide
agttcgttatccgcgacatgatatcaagag

SEQ ID NO: 79324 - DNA, 30 bp, Artificial Sequence
  Synthetic oligonucleotide
cactcggatgactctagtgttcctcaagag

SEQ ID NO: 79325 - DNA, 30 bp, Artificial Sequence
  Synthetic oligonucleotide
gtaataggcatacgcgggtgtgttcaagag

SEQ ID NO: 79326 - DNA, 30 bp, Artificial Sequence
  Synthetic oligonucleotide
ttgcagtaggtacctatagtaggagaagag

SEQ ID NO: 79327 - DNA, 30 bp, Artificial Sequence
  Synthetic oligonucleotide
gcacgggtaacaatcgtggacagggaagag

SEQ ID NO: 79328 - DNA, 30 bp, Artificial Sequence
  Synthetic oligonucleotide
caactatcattcaatggaacattggaagag

SEQ ID NO: 79329 - DNA, 30 bp, Artificial Sequence
  Synthetic oligonucleotide
cggggattgcatcccggacatacgtaagag

SEQ ID NO: 79330 - DNA, 30 bp, Artificial Sequence
  Synthetic oligonucleotide
aaggccagcctatttctggagcggtaagag

SEQ ID NO: 79331 - DNA, 30 bp, Artificial Sequence
  Synthetic oligonucleotide
ccctggcccacgtggtacacatgttaagag

SEQ ID NO: 79332 - DNA, 30 bp, Artificial Sequence
  Synthetic oligonucleotide
gtcggaaccattgacgaccactgttaagag

SEQ ID NO: 79333 - DNA, 30 bp, Artificial Sequence
  Synthetic oligonucleotide
ggattatgtgtgagtgcaacgctttaagag

SEQ ID NO: 79334 - DNA, 30 bp, Artificial Sequence
  Synthetic oligonucleotide
gtgcggcggtagataactttaacaacagag

SEQ ID NO: 79335 - DNA, 30 bp, Artificial Sequence
  Synthetic oligonucleotide
tagttggagagctcgcaaatcggaacagag

SEQ ID NO: 79336 - DNA, 30 bp, Artificial Sequence
  Synthetic oligonucleotide
cagacaagagaaacacggcacaccacagag

SEQ ID NO: 79337 - DNA, 30 bp, Artificial Sequence
  Synthetic oligonucleotide
acacagaagactgctatacgtgcaagagag

SEQ ID NO: 79338 - DNA, 30 bp, Artificial Sequence
  Synthetic oligonucleotide
aggcaaactccccggttgggcttgagagag

SEQ ID NO: 79339 - DNA, 30 bp, Artificial Sequence
  Synthetic oligonucleotide
tgcgcccagaggtcaccgagttctagagag

SEQ ID NO: 79340 - DNA, 30 bp, Artificial Sequence
  Synthetic oligonucleotide
ctgggagcacatggaaatctatgtagagag

SEQ ID NO: 79341 - DNA, 30 bp, Artificial Sequence
  Synthetic oligonucleotide
cggattcgacatcaggccagcatgcgagag

SEQ ID NO: 79342 - DNA, 30 bp, Artificial Sequence
  Synthetic oligonucleotide
tcgcataccgcgaaggaagtcctaggagag

SEQ ID NO: 79343 - DNA, 30 bp, Artificial Sequence
  Synthetic oligonucleotide
cctttagcacacccaccccacgttggagag

SEQ ID NO: 79344 - DNA, 30 bp, Artificial Sequence
  Synthetic oligonucleotide
cattcggctacactgaaaaggacgtgagag

SEQ ID NO: 79345 - DNA, 30 bp, Artificial Sequence
  Synthetic oligonucleotide
aatgtaacaaacaatcaaaccccgtgagag

SEQ ID NO: 79346 - DNA, 30 bp, Artificial Sequence
  Synthetic oligonucleotide
agtcccgccgttctgtcccgtaattgagag

SEQ ID NO: 79347 - DNA, 30 bp, Artificial Sequence
  Synthetic oligonucleotide
agaggacagcaggcagccttcctttgagag

SEQ ID NO: 79348 - DNA, 30 bp, Artificial Sequence
  Synthetic oligonucleotide
gctagcccctcccggcaccattctatagag

SEQ ID NO: 79349 - DNA, 30 bp, Artificial Sequence
  Synthetic oligonucleotide
gctactgcgggatatccccatagcctagag

SEQ ID NO: 79350 - DNA, 30 bp, Artificial Sequence
  Synthetic oligonucleotide
aatcctgtccatgggtttgggttcctagag

SEQ ID NO: 79351 - DNA, 30 bp, Artificial Sequence
  Synthetic oligonucleotide
gcaaaacacacgaaagttgccgcgctagag

SEQ ID NO: 79352 - DNA, 30 bp, Artificial Sequence
  Synthetic oligonucleotide
tccaaaatggttacgtagaggctgctagag

SEQ ID NO: 79353 - DNA, 30 bp, Artificial Sequence
  Synthetic oligonucleotide
ccggcggcgcggaaagatacattgctagag

SEQ ID NO: 79354 - DNA, 30 bp, Artificial Sequence
  Synthetic oligonucleotide
agtcgatgagaacaagcccacactctagag

SEQ ID NO: 79355 - DNA, 29 bp, Artificial Sequence
  Synthetic oligonucleotide
agatgtccgataagctcgcactagtagag

SEQ ID NO: 79356 - DNA, 30 bp, Artificial Sequence
  Synthetic oligonucleotide
tggtatcgggaataagcagatattttagag

SEQ ID NO: 79357 - DNA, 30 bp, Artificial Sequence
  Synthetic oligonucleotide
ctgagctcccagcaatttaggtgaaacgag

SEQ ID NO: 79358 - DNA, 30 bp, Artificial Sequence
  Synthetic oligonucleotide
tacgccggcacgtgggattagaagaacgag

SEQ ID NO: 79359 - DNA, 30 bp, Artificial Sequence
  Synthetic oligonucleotide
aggcgcataatagttaggcactttcacgag

SEQ ID NO: 79360 - DNA, 30 bp, Artificial Sequence
  Synthetic oligonucleotide
tgtcgccatccgttacgagactcggacgag

SEQ ID NO: 79361 - DNA, 30 bp, Artificial Sequence
  Synthetic oligonucleotide
gacgggtgttcgttgtccggtcagtacgag

SEQ ID NO: 79362 - DNA, 30 bp, Artificial Sequence
  Synthetic oligonucleotide
gaagtaaagaaaagaactatcaggtacgag

SEQ ID NO: 79363 - DNA, 30 bp, Artificial Sequence
  Synthetic oligonucleotide
gtgtgctggcgaaacggcactgcttacgag

SEQ ID NO: 79364 - DNA, 30 bp, Artificial Sequence
  Synthetic oligonucleotide
cgtggacgactcgtatttaacgaaaccgag

SEQ ID NO: 79365 - DNA, 30 bp, Artificial Sequence
  Synthetic oligonucleotide
gtgaccctggtataggtgggccacaccgag

SEQ ID NO: 79366 - DNA, 30 bp, Artificial Sequence
  Synthetic oligonucleotide
ttcttcataatgtaagcgttgaggaccgag

SEQ ID NO: 79367 - DNA, 30 bp, Artificial Sequence
  Synthetic oligonucleotide
ccagattttctctgggctatgtctaccgag

SEQ ID NO: 79368 - DNA, 30 bp, Artificial Sequence
  Synthetic oligonucleotide
cgacagcggttgcacccaatgaaacccgag

SEQ ID NO: 79369 - DNA, 30 bp, Artificial Sequence
  Synthetic oligonucleotide
tcgcggattgtaacttctgtaacgcccgag

SEQ ID NO: 79370 - DNA, 30 bp, Artificial Sequence
  Synthetic oligonucleotide
gtaccactgagaaagtagagttaagccgag

SEQ ID NO: 79371 - DNA, 30 bp, Artificial Sequence
  Synthetic oligonucleotide
ggttcacagggatgaacaacactagccgag

SEQ ID NO: 79372 - DNA, 30 bp, Artificial Sequence
  Synthetic oligonucleotide
ggaccgggtagcgagtacttgtgcgccgag

SEQ ID NO: 79373 - DNA, 30 bp, Artificial Sequence
  Synthetic oligonucleotide
ggatgaaaattcatctgccgtacggccgag

SEQ ID NO: 79374 - DNA, 30 bp, Artificial Sequence
  Synthetic oligonucleotide
aaagtaacccaaaagggaaaaactgccgag

SEQ ID NO: 79375 - DNA, 30 bp, Artificial Sequence
  Synthetic oligonucleotide
tgaggccttgacatgccaagacctgccgag

SEQ ID NO: 79376 - DNA, 30 bp, Artificial Sequence
  Synthetic oligonucleotide
gatacgagccgccttcttcgacttgccgag

SEQ ID NO: 79377 - DNA, 30 bp, Artificial Sequence
  Synthetic oligonucleotide
aagaaacatgtaacgttcgcgaggtccgag

SEQ ID NO: 79378 - DNA, 30 bp, Artificial Sequence
  Synthetic oligonucleotide
gtagttgtggtaccagaacaaaccagcgag

SEQ ID NO: 79379 - DNA, 30 bp, Artificial Sequence
  Synthetic oligonucleotide
ttgtagggggtctcaaactcaggcagcgag

SEQ ID NO: 79380 - DNA, 30 bp, Artificial Sequence
  Synthetic oligonucleotide
aaactgggactaagggcggattgtcgcgag

SEQ ID NO: 79381 - DNA, 30 bp, Artificial Sequence
  Synthetic oligonucleotide
cttcaggctgacctattcagaaaaggcgag

SEQ ID NO: 79382 - DNA, 30 bp, Artificial Sequence
  Synthetic oligonucleotide
aatgcaggcccgtggaattggcattgcgag

SEQ ID NO: 79383 - DNA, 30 bp, Artificial Sequence
  Synthetic oligonucleotide
gtgacggtcccaaagggctatatttgcgag

SEQ ID NO: 79384 - DNA, 30 bp, Artificial Sequence
  Synthetic oligonucleotide
acagcaacacttcttgtagaaataatcgag

SEQ ID NO: 79385 - DNA, 30 bp, Artificial Sequence
  Synthetic oligonucleotide
aacaggcgtacacatccacctgtaatcgag

SEQ ID NO: 79386 - DNA, 30 bp, Artificial Sequence
  Synthetic oligonucleotide
cactcgccgagacattttaaggcgatcgag

SEQ ID NO: 79387 - DNA, 30 bp, Artificial Sequence
  Synthetic oligonucleotide
tcgatgatgtttattcaaaatcggatcgag

SEQ ID NO: 79388 - DNA, 30 bp, Artificial Sequence
  Synthetic oligonucleotide
aaccatcagtccggggccgatttgatcgag

SEQ ID NO: 79389 - DNA, 30 bp, Artificial Sequence
  Synthetic oligonucleotide
gggttaactcaattttctctgcacctcgag

SEQ ID NO: 79390 - DNA, 30 bp, Artificial Sequence
  Synthetic oligonucleotide
ataagatagactcgcctaatatggctcgag

SEQ ID NO: 79391 - DNA, 30 bp, Artificial Sequence
  Synthetic oligonucleotide
gagagcataatttagctttctagtgtcgag

SEQ ID NO: 79392 - DNA, 30 bp, Artificial Sequence
  Synthetic oligonucleotide
ccagaacgtgatgtttgaccgcttgtcgag

SEQ ID NO: 79393 - DNA, 30 bp, Artificial Sequence
  Synthetic oligonucleotide
agtaagccagtaagccaaaactcaaaggag

SEQ ID NO: 79394 - DNA, 30 bp, Artificial Sequence
  Synthetic oligonucleotide
ctcgggatttctaagtatagaggaaaggag

SEQ ID NO: 79395 - DNA, 30 bp, Artificial Sequence
  Synthetic oligonucleotide
gatacttgttggcatcgcatatggaaggag

SEQ ID NO: 79396 - DNA, 30 bp, Artificial Sequence
  Synthetic oligonucleotide
ataagataagtccttcaaccattgaaggag

SEQ ID NO: 79397 - DNA, 30 bp, Artificial Sequence
  Synthetic oligonucleotide
gcttgaaattattagcatacgcttaaggag

SEQ ID NO: 79398 - DNA, 30 bp, Artificial Sequence
  Synthetic oligonucleotide
tatgagtaggccggtgccggtacccaggag

SEQ ID NO: 79399 - DNA, 30 bp, Artificial Sequence
  Synthetic oligonucleotide
tactcggtccctcgaaaggggtatcaggag

SEQ ID NO: 79400 - DNA, 30 bp, Artificial Sequence
  Synthetic oligonucleotide
gagaacggtgtgtctcgacaggacgaggag

SEQ ID NO: 79401 - DNA, 30 bp, Artificial Sequence
  Synthetic oligonucleotide
acacacggcaattatcgtttaagcgaggag

SEQ ID NO: 79402 - DNA, 30 bp, Artificial Sequence
  Synthetic oligonucleotide
cctctaattcactgggctaggatataggag

SEQ ID NO: 79403 - DNA, 30 bp, Artificial Sequence
  Synthetic oligonucleotide
taaggtcggtattttcggaagccctaggag

SEQ ID NO: 79404 - DNA, 30 bp, Artificial Sequence
  Synthetic oligonucleotide
tccaatcaagtagattggtacaggtaggag

SEQ ID NO: 79405 - DNA, 30 bp, Artificial Sequence
  Synthetic oligonucleotide
cgaagataagaactcatgcacgggtaggag

SEQ ID NO: 79406 - DNA, 30 bp, Artificial Sequence
  Synthetic oligonucleotide
cgcaattaacacttgagtagcgggtaggag

SEQ ID NO: 79407 - DNA, 30 bp, Artificial Sequence
  Synthetic oligonucleotide
tcgaattgggacctgcctcagtgaacggag

SEQ ID NO: 79408 - DNA, 30 bp, Artificial Sequence
  Synthetic oligonucleotide
tgtctgtaacctatccagggtaatccggag

SEQ ID NO: 79409 - DNA, 30 bp, Artificial Sequence
  Synthetic oligonucleotide
agtcatagattacacactccggcagcggag

SEQ ID NO: 79410 - DNA, 30 bp, Artificial Sequence
  Synthetic oligonucleotide
ggcttattatgtctaaaagttgtagcggag

SEQ ID NO: 79411 - DNA, 30 bp, Artificial Sequence
  Synthetic oligonucleotide
cgtgcgatacatggtccatggaaggcggag

SEQ ID NO: 79412 - DNA, 30 bp, Artificial Sequence
  Synthetic oligonucleotide
gatagggggattatgtcaatcggtgcggag

SEQ ID NO: 79413 - DNA, 30 bp, Artificial Sequence
  Synthetic oligonucleotide
caccatagatacctcggtgattgtgcggag

SEQ ID NO: 79414 - DNA, 30 bp, Artificial Sequence
  Synthetic oligonucleotide
gacgctatggcagtatgtttgtattcggag

SEQ ID NO: 79415 - DNA, 30 bp, Artificial Sequence
  Synthetic oligonucleotide
ccatgagcctcttaacggatatgttcggag

SEQ ID NO: 79416 - DNA, 30 bp, Artificial Sequence
  Synthetic oligonucleotide
atgcgtagcgactcttgcgtgacaagggag

SEQ ID NO: 79417 - DNA, 30 bp, Artificial Sequence
  Synthetic oligonucleotide
gcgggccccggaaagtaaataagaagggag

SEQ ID NO: 79418 - DNA, 30 bp, Artificial Sequence
  Synthetic oligonucleotide
cgcatgaagagttttctagggataagggag

SEQ ID NO: 79419 - DNA, 30 bp, Artificial Sequence
  Synthetic oligonucleotide
aggtggatggctggtagtagggccagggag

SEQ ID NO: 79420 - DNA, 30 bp, Artificial Sequence
  Synthetic oligonucleotide
acactcgtccgaccggcccgcaagagggag

SEQ ID NO: 79421 - DNA, 30 bp, Artificial Sequence
  Synthetic oligonucleotide
aagtgcacgaagagggggccggcgagggag

SEQ ID NO: 79422 - DNA, 30 bp, Artificial Sequence
  Synthetic oligonucleotide
gggtgatgggttaacatggtgtctagggag

SEQ ID NO: 79423 - DNA, 30 bp, Artificial Sequence
  Synthetic oligonucleotide
tctacgcaccatgcggaacaaccacgggag

SEQ ID NO: 79424 - DNA, 30 bp, Artificial Sequence
  Synthetic oligonucleotide
tacttggtggagctactacacatacgggag

SEQ ID NO: 79425 - DNA, 30 bp, Artificial Sequence
  Synthetic oligonucleotide
attaaaatgggcgacggctagatacgggag

SEQ ID NO: 79426 - DNA, 30 bp, Artificial Sequence
  Synthetic oligonucleotide
gagaatcaggaatctttagttgtccgggag

SEQ ID NO: 79427 - DNA, 30 bp, Artificial Sequence
  Synthetic oligonucleotide
tcgaaggttgccgccagatggctaggggag

SEQ ID NO: 79428 - DNA, 30 bp, Artificial Sequence
  Synthetic oligonucleotide
tgtcagctattgggtgcgtacgacggggag

SEQ ID NO: 79429 - DNA, 30 bp, Artificial Sequence
  Synthetic oligonucleotide
taagttctatggactagatacgatggggag

SEQ ID NO: 79430 - DNA, 30 bp, Artificial Sequence
  Synthetic oligonucleotide
atgcgaacatatatgcctgaataatgggag

SEQ ID NO: 79431 - DNA, 30 bp, Artificial Sequence
  Synthetic oligonucleotide
agggtaaaaacccaagctctatgctgggag

SEQ ID NO: 79432 - DNA, 30 bp, Artificial Sequence
  Synthetic oligonucleotide
tatgctcacggaatcaatagtgtttgggag

SEQ ID NO: 79433 - DNA, 30 bp, Artificial Sequence
  Synthetic oligonucleotide
agtaaggcctgcttcccttcaaacatggag

SEQ ID NO: 79434 - DNA, 30 bp, Artificial Sequence
  Synthetic oligonucleotide
cacggtgaagtaacattttgacatatggag

SEQ ID NO: 79435 - DNA, 30 bp, Artificial Sequence
  Synthetic oligonucleotide
gtctaggaccaaatgtagtatgaactggag

SEQ ID NO: 79436 - DNA, 30 bp, Artificial Sequence
  Synthetic oligonucleotide
ccgacagaatagcttagtgaaccactggag

SEQ ID NO: 79437 - DNA, 30 bp, Artificial Sequence
  Synthetic oligonucleotide
acgtgtggtgaatacaggctagtactggag

SEQ ID NO: 79438 - DNA, 30 bp, Artificial Sequence
  Synthetic oligonucleotide
tatgcatcacgaccaaggggtgtggtggag

SEQ ID NO: 79439 - DNA, 30 bp, Artificial Sequence
  Synthetic oligonucleotide
atatgggagtattctccttgaggattggag

SEQ ID NO: 79440 - DNA, 30 bp, Artificial Sequence
  Synthetic oligonucleotide
gtgcacgcctggatttacgttactttggag

SEQ ID NO: 79441 - DNA, 30 bp, Artificial Sequence
  Synthetic oligonucleotide
accgcgagttctcagccgctagtgaatgag

SEQ ID NO: 79442 - DNA, 30 bp, Artificial Sequence
  Synthetic oligonucleotide
gatggtgggcggagaggtatgaaacatgag

SEQ ID NO: 79443 - DNA, 30 bp, Artificial Sequence
  Synthetic oligonucleotide
cccttagggatgactcgatcatgccatgag

SEQ ID NO: 79444 - DNA, 30 bp, Artificial Sequence
  Synthetic oligonucleotide
cactcctagatctccattgaagtccatgag

SEQ ID NO: 79445 - DNA, 31 bp, Artificial Sequence
  Synthetic oligonucleotide
ggccgtgcgacaaccctctaaacatgatgag

SEQ ID NO: 79446 - DNA, 30 bp, Artificial Sequence
  Synthetic oligonucleotide
tgatacgcacagatctgtatagatgatgag

SEQ ID NO: 79447 - DNA, 30 bp, Artificial Sequence
  Synthetic oligonucleotide
ttgaaaactactcagtgatcacaatatgag

SEQ ID NO: 79448 - DNA, 30 bp, Artificial Sequence
  Synthetic oligonucleotide
aagaggtagggtagaagcgtacgatatgag

SEQ ID NO: 79449 - DNA, 30 bp, Artificial Sequence
  Synthetic oligonucleotide
agaaaaaatcgtgtgcgtcctacctatgag

SEQ ID NO: 79450 - DNA, 30 bp, Artificial Sequence
  Synthetic oligonucleotide
gaggggcagtctagatatagagagtatgag

SEQ ID NO: 79451 - DNA, 30 bp, Artificial Sequence
  Synthetic oligonucleotide
gagactaagctttgatagaaaaagactgag

SEQ ID NO: 79452 - DNA, 30 bp, Artificial Sequence
  Synthetic oligonucleotide
ctgccgagtctattcactcgccttactgag

SEQ ID NO: 79453 - DNA, 30 bp, Artificial Sequence
  Synthetic oligonucleotide
gaagcatgggagttcacgatgcttactgag

SEQ ID NO: 79454 - DNA, 30 bp, Artificial Sequence
  Synthetic oligonucleotide
gcctgaggggcattaaattagacagctgag

SEQ ID NO: 79455 - DNA, 30 bp, Artificial Sequence
  Synthetic oligonucleotide
tagggtataaatagtactctgtgcgctgag

SEQ ID NO: 79456 - DNA, 30 bp, Artificial Sequence
  Synthetic oligonucleotide
gattgcatgctggacaatatcgatgctgag

SEQ ID NO: 79457 - DNA, 30 bp, Artificial Sequence
  Synthetic oligonucleotide
cgactaagtgtactgcacgcgggtgctgag

SEQ ID NO: 79458 - DNA, 30 bp, Artificial Sequence
  Synthetic oligonucleotide
gtaaatggatcaagacagtgccaatctgag

SEQ ID NO: 79459 - DNA, 30 bp, Artificial Sequence
  Synthetic oligonucleotide
aaacgtaattcaattgtatacagaagtgag

SEQ ID NO: 79460 - DNA, 30 bp, Artificial Sequence
  Synthetic oligonucleotide
actggggcactgttgtcgtaggggagtgag

SEQ ID NO: 79461 - DNA, 30 bp, Artificial Sequence
  Synthetic oligonucleotide
cagcttgtggtaagaccgtaatctagtgag

SEQ ID NO: 79462 - DNA, 30 bp, Artificial Sequence
  Synthetic oligonucleotide
ctacaacgatttagtatggttagtagtgag

SEQ ID NO: 79463 - DNA, 30 bp, Artificial Sequence
  Synthetic oligonucleotide
tatcaccaacgaagcgtcatgagtcgtgag

SEQ ID NO: 79464 - DNA, 30 bp, Artificial Sequence
  Synthetic oligonucleotide
acttgatgcagacataaattcgcaggtgag

SEQ ID NO: 79465 - DNA, 30 bp, Artificial Sequence
  Synthetic oligonucleotide
gatgcgcgtaaggccgcaatacgcggtgag

SEQ ID NO: 79466 - DNA, 30 bp, Artificial Sequence
  Synthetic oligonucleotide
gttacacgcatgttgcttaggcagggtgag

SEQ ID NO: 79467 - DNA, 30 bp, Artificial Sequence
  Synthetic oligonucleotide
ataagctcacattcgcgaggttagggtgag

SEQ ID NO: 79468 - DNA, 30 bp, Artificial Sequence
  Synthetic oligonucleotide
gaggctcgaaacgtcgaggcctggggtgag

SEQ ID NO: 79469 - DNA, 30 bp, Artificial Sequence
  Synthetic oligonucleotide
aatggggaatatgttcataaatgtggtgag

SEQ ID NO: 79470 - DNA, 30 bp, Artificial Sequence
  Synthetic oligonucleotide
attcaatgaaggaaccatcatcaatgtgag

SEQ ID NO: 79471 - DNA, 30 bp, Artificial Sequence
  Synthetic oligonucleotide
atcatcgccttagacgactttggatgtgag

SEQ ID NO: 79472 - DNA, 30 bp, Artificial Sequence
  Synthetic oligonucleotide
tagtgtttgaaagtgtccagttgatgtgag

SEQ ID NO: 79473 - DNA, 30 bp, Artificial Sequence
  Synthetic oligonucleotide
cacatgtaagccagcacgatgtcttgtgag

SEQ ID NO: 79474 - DNA, 30 bp, Artificial Sequence
  Synthetic oligonucleotide
gtagactatctactaaagacttcaattgag

SEQ ID NO: 79475 - DNA, 30 bp, Artificial Sequence
  Synthetic oligonucleotide
gccaacgttttcgcaccaggttcaattgag

SEQ ID NO: 79476 - DNA, 30 bp, Artificial Sequence
  Synthetic oligonucleotide
taacattagtcatcatgtttggccattgag

SEQ ID NO: 79477 - DNA, 30 bp, Artificial Sequence
  Synthetic oligonucleotide
caggtagctgcggggtggcagtgtattgag

SEQ ID NO: 79478 - DNA, 30 bp, Artificial Sequence
  Synthetic oligonucleotide
tagcgcgcctatcatcaaaagacacttgag

SEQ ID NO: 79479 - DNA, 30 bp, Artificial Sequence
  Synthetic oligonucleotide
ggctggcgtcagtgtttaaattaccttgag

SEQ ID NO: 79480 - DNA, 30 bp, Artificial Sequence
  Synthetic oligonucleotide
gactcagcgtggggttacatagatcttgag

SEQ ID NO: 79481 - DNA, 30 bp, Artificial Sequence
  Synthetic oligonucleotide
cgggaatgcgagtcccggatagcagttgag

SEQ ID NO: 79482 - DNA, 30 bp, Artificial Sequence
  Synthetic oligonucleotide
tccgcgagatgagtattcgtatcagttgag

SEQ ID NO: 79483 - DNA, 30 bp, Artificial Sequence
  Synthetic oligonucleotide
caaacatctgtgtaccgacaggtcgttgag

SEQ ID NO: 79484 - DNA, 30 bp, Artificial Sequence
  Synthetic oligonucleotide
agtagcgatagagagatgatttatgttgag

SEQ ID NO: 79485 - DNA, 30 bp, Artificial Sequence
  Synthetic oligonucleotide
caaaaggtgagatcacaacaccgtgttgag

SEQ ID NO: 79486 - DNA, 30 bp, Artificial Sequence
  Synthetic oligonucleotide
catgcgcaggaaggagtcgcaatatttgag

SEQ ID NO: 79487 - DNA, 30 bp, Artificial Sequence
  Synthetic oligonucleotide
agccaacgtacatgatttcgtccaaaatag

SEQ ID NO: 79488 - DNA, 30 bp, Artificial Sequence
  Synthetic oligonucleotide
ccccgacaaaatgcggtatcgtgaaaatag

SEQ ID NO: 79489 - DNA, 30 bp, Artificial Sequence
  Synthetic oligonucleotide
atctggcgcgcgggggtcagtatcaaatag

SEQ ID NO: 79490 - DNA, 30 bp, Artificial Sequence
  Synthetic oligonucleotide
atgccaggaggggctcaggtggagaaatag

SEQ ID NO: 79491 - DNA, 30 bp, Artificial Sequence
  Synthetic oligonucleotide
ctcgaagtcggtcgggttagctggaaatag

SEQ ID NO: 79492 - DNA, 30 bp, Artificial Sequence
  Synthetic oligonucleotide
cgtccactcgagtagacaaatgctaaatag

SEQ ID NO: 79493 - DNA, 30 bp, Artificial Sequence
  Synthetic oligonucleotide
gaggtttcacaaatactgcgttttaaatag

SEQ ID NO: 79494 - DNA, 30 bp, Artificial Sequence
  Synthetic oligonucleotide
agctgtgtaggcatagcccgagggcaatag

SEQ ID NO: 79495 - DNA, 30 bp, Artificial Sequence
  Synthetic oligonucleotide
cgaggggccgtgttgggattatggcaatag

SEQ ID NO: 79496 - DNA, 30 bp, Artificial Sequence
  Synthetic oligonucleotide
ttcataagacagaggcgtaattctcaatag

SEQ ID NO: 79497 - DNA, 30 bp, Artificial Sequence
  Synthetic oligonucleotide
ggattggtacgactgaaatatattcaatag

SEQ ID NO: 79498 - DNA, 30 bp, Artificial Sequence
  Synthetic oligonucleotide
atcggaaatgtgtacttcatgaaggaatag

SEQ ID NO: 79499 - DNA, 30 bp, Artificial Sequence
  Synthetic oligonucleotide
aagggtcacgaaacagcagactaataatag

SEQ ID NO: 79500 - DNA, 30 bp, Artificial Sequence
  Synthetic oligonucleotide
aggaatgccgatgacgttatagactaatag

SEQ ID NO: 79501 - DNA, 30 bp, Artificial Sequence
  Synthetic oligonucleotide
tagtggcaatagcgcggaggggagtaatag

SEQ ID NO: 79502 - DNA, 30 bp, Artificial Sequence
  Synthetic oligonucleotide
aaagaccaaatgggtggctgtttgtaatag

SEQ ID NO: 79503 - DNA, 30 bp, Artificial Sequence
  Synthetic oligonucleotide
cagtcatggtcacgatgacccacttaatag

SEQ ID NO: 79504 - DNA, 30 bp, Artificial Sequence
  Synthetic oligonucleotide
caaagcggatcctgccagagcctcacatag

SEQ ID NO: 79505 - DNA, 31 bp, Artificial Sequence
  Synthetic oligonucleotide
aggatggccgattgagcattagaggacatag

SEQ ID NO: 79506 - DNA, 30 bp, Artificial Sequence
  Synthetic oligonucleotide
ggaccaactgtgaaggggcgacggacatag

SEQ ID NO: 79507 - DNA, 30 bp, Artificial Sequence
  Synthetic oligonucleotide
gacaggacggtccaacgtttcacaccatag

SEQ ID NO: 79508 - DNA, 30 bp, Artificial Sequence
  Synthetic oligonucleotide
aactggggcgaaacttaatcactcccatag

SEQ ID NO: 79509 - DNA, 30 bp, Artificial Sequence
  Synthetic oligonucleotide
ataagagaagcgtgatagtcataggcatag

SEQ ID NO: 79510 - DNA, 30 bp, Artificial Sequence
  Synthetic oligonucleotide
aggaattgcacgcttagatcggtgtcatag

SEQ ID NO: 79511 - DNA, 30 bp, Artificial Sequence
  Synthetic oligonucleotide
acgtagtccagcgttagggctctttcatag

SEQ ID NO: 79512 - DNA, 30 bp, Artificial Sequence
  Synthetic oligonucleotide
ggaagcccataattgtgtaaccacagatag

SEQ ID NO: 79513 - DNA, 30 bp, Artificial Sequence
  Synthetic oligonucleotide
ttgcgcgcttggtcttacaccgggagatag

SEQ ID NO: 79514 - DNA, 30 bp, Artificial Sequence
  Synthetic oligonucleotide
tcgctgccggaaaagcgccttagtagatag

SEQ ID NO: 79515 - DNA, 30 bp, Artificial Sequence
  Synthetic oligonucleotide
gcacatatgtgtcgcaagaataaccgatag

SEQ ID NO: 79516 - DNA, 30 bp, Artificial Sequence
  Synthetic oligonucleotide
tgagtccctgccgataatcgttagcgatag

SEQ ID NO: 79517 - DNA, 30 bp, Artificial Sequence
  Synthetic oligonucleotide
tcaggttgctagtaagtagtagatcgatag

SEQ ID NO: 79518 - DNA, 30 bp, Artificial Sequence
  Synthetic oligonucleotide
gtatagcggggcacacacaaggatcgatag

SEQ ID NO: 79519 - DNA, 30 bp, Artificial Sequence
  Synthetic oligonucleotide
tcgttgtaaacgatatgtcttacgggatag

SEQ ID NO: 79520 - DNA, 30 bp, Artificial Sequence
  Synthetic oligonucleotide
aggttgtgtggatacaaccgatcctgatag

SEQ ID NO: 79521 - DNA, 30 bp, Artificial Sequence
  Synthetic oligonucleotide
ggatctcagatcaccctcgatttcatatag

SEQ ID NO: 79522 - DNA, 30 bp, Artificial Sequence
  Synthetic oligonucleotide
tcagagtggacttcggtcttaggactatag

SEQ ID NO: 79523 - DNA, 30 bp, Artificial Sequence
  Synthetic oligonucleotide
tggtagagcgccagagaggaagagctatag

SEQ ID NO: 79524 - DNA, 30 bp, Artificial Sequence
  Synthetic oligonucleotide
tcgacatcactagcgtcaatcgagctatag

SEQ ID NO: 79525 - DNA, 30 bp, Artificial Sequence
  Synthetic oligonucleotide
tggatagtaactgggcaaaggttcgtatag

SEQ ID NO: 79526 - DNA, 30 bp, Artificial Sequence
  Synthetic oligonucleotide
tgtcgcgtaagtgcatgagtaccggtatag

SEQ ID NO: 79527 - DNA, 29 bp, Artificial Sequence
  Synthetic oligonucleotide
gggactgaggatgcacaccgacattatag

SEQ ID NO: 79528 - DNA, 30 bp, Artificial Sequence
  Synthetic oligonucleotide
cgggaacgggactgatacccttgtttatag

SEQ ID NO: 79529 - DNA, 30 bp, Artificial Sequence
  Synthetic oligonucleotide
tccgtaaaataggtattagcggaaaactag

SEQ ID NO: 79530 - DNA, 30 bp, Artificial Sequence
  Synthetic oligonucleotide
cgagactatgtatgccagcaaaccaactag

SEQ ID NO: 79531 - DNA, 31 bp, Artificial Sequence
  Synthetic oligonucleotide
ttactacggagttgggtgcaacagccactag

SEQ ID NO: 79532 - DNA, 30 bp, Artificial Sequence
  Synthetic oligonucleotide
atgactcaagcctgttcaaggcacgactag

SEQ ID NO: 79533 - DNA, 30 bp, Artificial Sequence
  Synthetic oligonucleotide
catatcaagactagctggtgccaatactag

SEQ ID NO: 79534 - DNA, 30 bp, Artificial Sequence
  Synthetic oligonucleotide
tagcgacgggttgttagacatcaatactag

SEQ ID NO: 79535 - DNA, 30 bp, Artificial Sequence
  Synthetic oligonucleotide
catacaagtagccaactcatagagtactag

SEQ ID NO: 79536 - DNA, 30 bp, Artificial Sequence
  Synthetic oligonucleotide
gcaagcagggcttattacagagggacctag

SEQ ID NO: 79537 - DNA, 30 bp, Artificial Sequence
  Synthetic oligonucleotide
tcgtaatgaagactaatctcaactacctag

SEQ ID NO: 79538 - DNA, 30 bp, Artificial Sequence
  Synthetic oligonucleotide
caaccgtggggagccaaaattacggcctag

SEQ ID NO: 79539 - DNA, 30 bp, Artificial Sequence
  Synthetic oligonucleotide
taatgtgcgccaacggagggttgtgcctag

SEQ ID NO: 79540 - DNA, 30 bp, Artificial Sequence
  Synthetic oligonucleotide
ctaagagtgcaacatccggctgggtcctag

SEQ ID NO: 79541 - DNA, 30 bp, Artificial Sequence
  Synthetic oligonucleotide
aaccaacatgatccgactctccagagctag

SEQ ID NO: 79542 - DNA, 30 bp, Artificial Sequence
  Synthetic oligonucleotide
ctccaaacctcctcacgccctccgagctag

SEQ ID NO: 79543 - DNA, 30 bp, Artificial Sequence
  Synthetic oligonucleotide
gcatccattggtatcaatcatgatagctag

SEQ ID NO: 79544 - DNA, 30 bp, Artificial Sequence
  Synthetic oligonucleotide
gtaaggtgaagttgcactatagaaggctag

SEQ ID NO: 79545 - DNA, 30 bp, Artificial Sequence
  Synthetic oligonucleotide
atcgggcgactagaaattcactgtggctag

SEQ ID NO: 79546 - DNA, 30 bp, Artificial Sequence
  Synthetic oligonucleotide
cacgggcaggtgcgagatttgggctgctag

SEQ ID NO: 79547 - DNA, 30 bp, Artificial Sequence
  Synthetic oligonucleotide
caccggaaccatcgcaggccaccaatctag

SEQ ID NO: 79548 - DNA, 30 bp, Artificial Sequence
  Synthetic oligonucleotide
agggtcaacgtttttttagcatcaatctag

SEQ ID NO: 79549 - DNA, 30 bp, Artificial Sequence
  Synthetic oligonucleotide
gttgaggcgtgcatggtaagggggatctag

SEQ ID NO: 79550 - DNA, 30 bp, Artificial Sequence
  Synthetic oligonucleotide
cctactatttgcatcattgcggtgatctag

SEQ ID NO: 79551 - DNA, 30 bp, Artificial Sequence
  Synthetic oligonucleotide
gtcatgggctcggtagacctcaacctctag

SEQ ID NO: 79552 - DNA, 30 bp, Artificial Sequence
  Synthetic oligonucleotide
acacgtatgacgtcgtggctcgacctctag

SEQ ID NO: 79553 - DNA, 30 bp, Artificial Sequence
  Synthetic oligonucleotide
ccaccgccggcaaggcgcaggccagtctag

SEQ ID NO: 79554 - DNA, 30 bp, Artificial Sequence
  Synthetic oligonucleotide
agcggttcaatacccctatgttgagtctag

SEQ ID NO: 79555 - DNA, 30 bp, Artificial Sequence
  Synthetic oligonucleotide
caattgtacgcgatacaggtcgcattctag

SEQ ID NO: 79556 - DNA, 30 bp, Artificial Sequence
  Synthetic oligonucleotide
tgcgaatgatacctatgagctgccaagtag

SEQ ID NO: 79557 - DNA, 30 bp, Artificial Sequence
  Synthetic oligonucleotide
atgcaggtgaatggcccatgcctgaagtag

SEQ ID NO: 79558 - DNA, 30 bp, Artificial Sequence
  Synthetic oligonucleotide
agagtgcaagatagaccggaagataagtag

SEQ ID NO: 79559 - DNA, 30 bp, Artificial Sequence
  Synthetic oligonucleotide
gtaaacctgatatttcaaacctctaagtag

SEQ ID NO: 79560 - DNA, 30 bp, Artificial Sequence
  Synthetic oligonucleotide
caatggtcatgtccctttctgatagagtag

SEQ ID NO: 79561 - DNA, 30 bp, Artificial Sequence
  Synthetic oligonucleotide
ccacggaatgatccaagtccccactagtag

SEQ ID NO: 79562 - DNA, 30 bp, Artificial Sequence
  Synthetic oligonucleotide
tccctgtttatcgtcaaagagaattagtag

SEQ ID NO: 79563 - DNA, 30 bp, Artificial Sequence
  Synthetic oligonucleotide
ttgagcaatgtactgtagatggtaacgtag

SEQ ID NO: 79564 - DNA, 30 bp, Artificial Sequence
  Synthetic oligonucleotide
cgaggaaactgaataaatatgagcacgtag

SEQ ID NO: 79565 - DNA, 30 bp, Artificial Sequence
  Synthetic oligonucleotide
tatgattcacgggcaatatatccagcgtag

SEQ ID NO: 79566 - DNA, 30 bp, Artificial Sequence
  Synthetic oligonucleotide
gatgcacaattgatagtgggcagatcgtag

SEQ ID NO: 79567 - DNA, 30 bp, Artificial Sequence
  Synthetic oligonucleotide
gtccgatctaggaacgagaactgctcgtag

SEQ ID NO: 79568 - DNA, 30 bp, Artificial Sequence
  Synthetic oligonucleotide
acgatacaatcgtgacgtcaaaagtcgtag

SEQ ID NO: 79569 - DNA, 30 bp, Artificial Sequence
  Synthetic oligonucleotide
agactgaaaaatacgtgattgttgtcgtag

SEQ ID NO: 79570 - DNA, 30 bp, Artificial Sequence
  Synthetic oligonucleotide
tcgttcaagacgtgtgccttagaaaggtag

SEQ ID NO: 79571 - DNA, 30 bp, Artificial Sequence
  Synthetic oligonucleotide
gaaggtctaaagacgggtcaacggaggtag

SEQ ID NO: 79572 - DNA, 31 bp, Artificial Sequence
  Synthetic oligonucleotide
actgccaggcatcagtcgtcctatacggtag

SEQ ID NO: 79573 - DNA, 30 bp, Artificial Sequence
  Synthetic oligonucleotide
gggaggaaaggtagtttttgtacccggtag

SEQ ID NO: 79574 - DNA, 30 bp, Artificial Sequence
  Synthetic oligonucleotide
gtcgcctcaattcggggaagtattcggtag

SEQ ID NO: 79575 - DNA, 30 bp, Artificial Sequence
  Synthetic oligonucleotide
tcctcccgaaatgaagaactcgttcggtag

SEQ ID NO: 79576 - DNA, 30 bp, Artificial Sequence
  Synthetic oligonucleotide
gagctggacctgtaagcaatctaagggtag

SEQ ID NO: 79577 - DNA, 30 bp, Artificial Sequence
  Synthetic oligonucleotide
aggcggggccctcattataccacagggtag

SEQ ID NO: 79578 - DNA, 30 bp, Artificial Sequence
  Synthetic oligonucleotide
gaccaaaagcaccgtggactcatggggtag

SEQ ID NO: 79579 - DNA, 30 bp, Artificial Sequence
  Synthetic oligonucleotide
gaacgcttcgttacgcttggacatgggtag

SEQ ID NO: 79580 - DNA, 30 bp, Artificial Sequence
  Synthetic oligonucleotide
tgtcacaaagtggactctcgccatgggtag

SEQ ID NO: 79581 - DNA, 30 bp, Artificial Sequence
  Synthetic oligonucleotide
actgacagggtaaaaaaggtgtgtgggtag

SEQ ID NO: 79582 - DNA, 30 bp, Artificial Sequence
  Synthetic oligonucleotide
ttatgggcccgtgtagagatgaggatgtag

SEQ ID NO: 79583 - DNA, 30 bp, Artificial Sequence
  Synthetic oligonucleotide
gttcgagtgccgatccaagatcctatgtag

SEQ ID NO: 79584 - DNA, 30 bp, Artificial Sequence
  Synthetic oligonucleotide
gttctcactggtttctgaatagcgctgtag

SEQ ID NO: 79585 - DNA, 30 bp, Artificial Sequence
  Synthetic oligonucleotide
acctagggcacaatcggtcctcggctgtag

SEQ ID NO: 79586 - DNA, 30 bp, Artificial Sequence
  Synthetic oligonucleotide
aaacggcaaaagtttaattaggccgtgtag

SEQ ID NO: 79587 - DNA, 30 bp, Artificial Sequence
  Synthetic oligonucleotide
gatcggctgccaccacatttaggcgtgtag

SEQ ID NO: 79588 - DNA, 30 bp, Artificial Sequence
  Synthetic oligonucleotide
cggagcgggagacagcattgtctgaattag

SEQ ID NO: 79589 - DNA, 30 bp, Artificial Sequence
  Synthetic oligonucleotide
accatccttaggaaaacagaaagtaattag

SEQ ID NO: 79590 - DNA, 31 bp, Artificial Sequence
  Synthetic oligonucleotide
gggcgcttaggcgggagcggtccaacattag

SEQ ID NO: 79591 - DNA, 30 bp, Artificial Sequence
  Synthetic oligonucleotide
tacttacgcggaacatcttcagcacattag

SEQ ID NO: 79592 - DNA, 40 bp, Artificial Sequence
  Synthetic oligonucleotide
cacccctatttgaactttcgtcttaccatcatgccattag

SEQ ID NO: 79593 - DNA, 30 bp, Artificial Sequence
  Synthetic oligonucleotide
tgattaaggctggcattgtcaaggcattag

SEQ ID NO: 79594 - DNA, 29 bp, Artificial Sequence
  Synthetic oligonucleotide
atatgtggccatcatcctccgggcattag

SEQ ID NO: 79595 - DNA, 30 bp, Artificial Sequence
  Synthetic oligonucleotide
gacccatgcaacttggtaaatccagattag

SEQ ID NO: 79596 - DNA, 30 bp, Artificial Sequence
  Synthetic oligonucleotide
aagcgcgtaaaggtttaatcgtccgattag

SEQ ID NO: 79597 - DNA, 30 bp, Artificial Sequence
  Synthetic oligonucleotide
tggtgttctgaaggatcaggcagatattag

SEQ ID NO: 79598 - DNA, 30 bp, Artificial Sequence
  Synthetic oligonucleotide
gtgcgaaaccacaagccagaccgctattag

SEQ ID NO: 79599 - DNA, 30 bp, Artificial Sequence
  Synthetic oligonucleotide
agcaacgttttgtgcggtggaaccacttag

SEQ ID NO: 79600 - DNA, 30 bp, Artificial Sequence
  Synthetic oligonucleotide
atggcgtggttctatctgaatagcacttag

SEQ ID NO: 79601 - DNA, 31 bp, Artificial Sequence
  Synthetic oligonucleotide
aagcgctacaactgggtccgtctagacttag

SEQ ID NO: 79602 - DNA, 30 bp, Artificial Sequence
  Synthetic oligonucleotide
tcttaagcgacagaacatcgaagcccttag

SEQ ID NO: 79603 - DNA, 30 bp, Artificial Sequence
  Synthetic oligonucleotide
ccacggatatgcggcccatattttccttag

SEQ ID NO: 79604 - DNA, 30 bp, Artificial Sequence
  Synthetic oligonucleotide
ttgcatcaaggccacagtgagggtgcttag

SEQ ID NO: 79605 - DNA, 30 bp, Artificial Sequence
  Synthetic oligonucleotide
tgtcagcgtcaatatgcaactgaatcttag

SEQ ID NO: 79606 - DNA, 30 bp, Artificial Sequence
  Synthetic oligonucleotide
agctaaaagatgtagtagcaattcagttag

SEQ ID NO: 79607 - DNA, 30 bp, Artificial Sequence
  Synthetic oligonucleotide
ggtacggcgcgtcgaggtcacactagttag

SEQ ID NO: 79608 - DNA, 30 bp, Artificial Sequence
  Synthetic oligonucleotide
cttactcgtagtttaatggtcgaacgttag

SEQ ID NO: 79609 - DNA, 30 bp, Artificial Sequence
  Synthetic oligonucleotide
atggggatagtcgtaaaggccaagcgttag

SEQ ID NO: 79610 - DNA, 31 bp, Artificial Sequence
  Synthetic oligonucleotide
aaaggactatcaggtgaacgtattcggttag

SEQ ID NO: 79611 - DNA, 30 bp, Artificial Sequence
  Synthetic oligonucleotide
acaaatgtggtttatacaagagatggttag

SEQ ID NO: 79612 - DNA, 30 bp, Artificial Sequence
  Synthetic oligonucleotide
gtccacccaaccatagagagatacatttag

SEQ ID NO: 79613 - DNA, 30 bp, Artificial Sequence
  Synthetic oligonucleotide
taggtacctgctcaagctcaccggatttag

SEQ ID NO: 79614 - DNA, 30 bp, Artificial Sequence
  Synthetic oligonucleotide
tcactaggcgaaagactctgtggagtttag

SEQ ID NO: 79615 - DNA, 30 bp, Artificial Sequence
  Synthetic oligonucleotide
gccgaacatcaacagaggaacagattttag

SEQ ID NO: 79616 - DNA, 30 bp, Artificial Sequence
  Synthetic oligonucleotide
tgccgagaacaggaaaacgtgtgattttag

SEQ ID NO: 79617 - DNA, 30 bp, Artificial Sequence
  Synthetic oligonucleotide
aagagatacctaacgggctcataaaaaacg

SEQ ID NO: 79618 - DNA, 30 bp, Artificial Sequence
  Synthetic oligonucleotide
aggttataatatagccacggctcaaaaacg

SEQ ID NO: 79619 - DNA, 30 bp, Artificial Sequence
  Synthetic oligonucleotide
tgggccacgaaataacagatcaagaaaacg

SEQ ID NO: 79620 - DNA, 30 bp, Artificial Sequence
  Synthetic oligonucleotide
cgatgattcctgggagagaccgcgaaaacg

SEQ ID NO: 79621 - DNA, 30 bp, Artificial Sequence
  Synthetic oligonucleotide
tacttcacaggtgggtcttggaggaaaacg

SEQ ID NO: 79622 - DNA, 30 bp, Artificial Sequence
  Synthetic oligonucleotide
ggctcccatgcatcctccgttcggaaaacg

SEQ ID NO: 79623 - DNA, 30 bp, Artificial Sequence
  Synthetic oligonucleotide
gttccgattggaggtgtccaagggaaaacg

SEQ ID NO: 79624 - DNA, 30 bp, Artificial Sequence
  Synthetic oligonucleotide
agccagtataaagagagatgagataaaacg

SEQ ID NO: 79625 - DNA, 30 bp, Artificial Sequence
  Synthetic oligonucleotide
gaatgcgtcctcaggcccgtcgaacaaacg

SEQ ID NO: 79626 - DNA, 30 bp, Artificial Sequence
  Synthetic oligonucleotide
aagcgcagtagcaatgtatattgacaaacg

SEQ ID NO: 79627 - DNA, 30 bp, Artificial Sequence
  Synthetic oligonucleotide
aaagacctaatcgtactagttaggcaaacg

SEQ ID NO: 79628 - DNA, 30 bp, Artificial Sequence
  Synthetic oligonucleotide
acagaggtgttggtacgcggcgaagaaacg

SEQ ID NO: 79629 - DNA, 30 bp, Artificial Sequence
  Synthetic oligonucleotide
ctactcgtctagtactctcaagcagaaacg

SEQ ID NO: 79630 - DNA, 30 bp, Artificial Sequence
  Synthetic oligonucleotide
cgtagtgaacggtggtagggacgggaaacg

SEQ ID NO: 79631 - DNA, 30 bp, Artificial Sequence
  Synthetic oligonucleotide
attgtcgagagttaaacatatgcctaaacg

SEQ ID NO: 79632 - DNA, 30 bp, Artificial Sequence
  Synthetic oligonucleotide
gtaagcgggcaacatttgggctagtaaacg

SEQ ID NO: 79633 - DNA, 30 bp, Artificial Sequence
  Synthetic oligonucleotide
ataccgtggcatccagaaccaaggtaaacg

SEQ ID NO: 79634 - DNA, 30 bp, Artificial Sequence
  Synthetic oligonucleotide
agaagggtacgtctctaatggtattaaacg

SEQ ID NO: 79635 - DNA, 30 bp, Artificial Sequence
  Synthetic oligonucleotide
gaagtacagagaaggtaactacacacaacg

SEQ ID NO: 79636 - DNA, 30 bp, Artificial Sequence
  Synthetic oligonucleotide
atggacaagagacctatgcgcgtgacaacg

SEQ ID NO: 79637 - DNA, 30 bp, Artificial Sequence
  Synthetic oligonucleotide
attattaccgccaaagtaagtcgaccaacg

SEQ ID NO: 79638 - DNA, 30 bp, Artificial Sequence
  Synthetic oligonucleotide
ggaggctggaacgtccatatatctgcaacg

SEQ ID NO: 79639 - DNA, 30 bp, Artificial Sequence
  Synthetic oligonucleotide
tccggaatggcaatcttatttagttcaacg

SEQ ID NO: 79640 - DNA, 30 bp, Artificial Sequence
  Synthetic oligonucleotide
cctcattcagagcttccagctgggagaacg

SEQ ID NO: 79641 - DNA, 30 bp, Artificial Sequence
  Synthetic oligonucleotide
gtccgagacggggtattctaacacggaacg

SEQ ID NO: 79642 - DNA, 30 bp, Artificial Sequence
  Synthetic oligonucleotide
cactctgactaggttgggcttgagggaacg

SEQ ID NO: 79643 - DNA, 30 bp, Artificial Sequence
  Synthetic oligonucleotide
gcagggctatcagtgcccggttatggaacg

SEQ ID NO: 79644 - DNA, 30 bp, Artificial Sequence
  Synthetic oligonucleotide
gtaatcatcaatttaaacagcgacataacg

SEQ ID NO: 79645 - DNA, 30 bp, Artificial Sequence
  Synthetic oligonucleotide
gcatccgagtgcctagtgaactatataacg

SEQ ID NO: 79646 - DNA, 30 bp, Artificial Sequence
  Synthetic oligonucleotide
gtgagagaacacgcgtttattggactaacg

SEQ ID NO: 79647 - DNA, 30 bp, Artificial Sequence
  Synthetic oligonucleotide
ggtagtgatacattacacactcgcctaacg

SEQ ID NO: 79648 - DNA, 30 bp, Artificial Sequence
  Synthetic oligonucleotide
aaaaacaccagcgtaaaagtcaaagtaacg

SEQ ID NO: 79649 - DNA, 30 bp, Artificial Sequence
  Synthetic oligonucleotide
cgagcaacttacacgtcgttctggttaacg

SEQ ID NO: 79650 - DNA, 30 bp, Artificial Sequence
  Synthetic oligonucleotide
atactgaagggaacatagcgcagaaacacg

SEQ ID NO: 79651 - DNA, 29 bp, Artificial Sequence
  Synthetic oligonucleotide
tggtgagttcggcgtggccttgaaacacg

SEQ ID NO: 79652 - DNA, 30 bp, Artificial Sequence
  Synthetic oligonucleotide
gaccagatgagggcgagagaccgcaacacg

SEQ ID NO: 79653 - DNA, 30 bp, Artificial Sequence
  Synthetic oligonucleotide
ccatacagcccggaattagatactaacacg

SEQ ID NO: 79654 - DNA, 30 bp, Artificial Sequence
  Synthetic oligonucleotide
taaggctattcaaaaaaaaacagacacacg

SEQ ID NO: 79655 - DNA, 30 bp, Artificial Sequence
  Synthetic oligonucleotide
tgagtaggtgataaaggactaaatcacacg

SEQ ID NO: 79656 - DNA, 30 bp, Artificial Sequence
  Synthetic oligonucleotide
gcgtaagaacgaccagagttcaatcacacg

SEQ ID NO: 79657 - DNA, 30 bp, Artificial Sequence
  Synthetic oligonucleotide
ggccatggaatggcaaacgcattctacacg

SEQ ID NO: 79658 - DNA, 30 bp, Artificial Sequence
  Synthetic oligonucleotide
ggtgacgatggtagtaataaagtgtacacg

SEQ ID NO: 79659 - DNA, 30 bp, Artificial Sequence
  Synthetic oligonucleotide
caccttagggatagccaagttcattacacg

SEQ ID NO: 79660 - DNA, 30 bp, Artificial Sequence
  Synthetic oligonucleotide
aagtaccacatcgctatcattaaacccacg

SEQ ID NO: 79661 - DNA, 30 bp, Artificial Sequence
  Synthetic oligonucleotide
accagcgggcaatacaagtgtacacccacg

SEQ ID NO: 79662 - DNA, 30 bp, Artificial Sequence
  Synthetic oligonucleotide
aacgcgtacaagttaatagcgtaggccacg

SEQ ID NO: 79663 - DNA, 30 bp, Artificial Sequence
  Synthetic oligonucleotide
agaacagcggtcggttgcgattactccacg

SEQ ID NO: 79664 - DNA, 30 bp, Artificial Sequence
  Synthetic oligonucleotide
cctaaggccggggggcgatatgggtccacg

SEQ ID NO: 79665 - DNA, 30 bp, Artificial Sequence
  Synthetic oligonucleotide
ggctaataggcgtccgcaaccttgagcacg

SEQ ID NO: 79666 - DNA, 30 bp, Artificial Sequence
  Synthetic oligonucleotide
gcgaaagccaaaggtgaggaatgaggcacg

SEQ ID NO: 79667 - DNA, 30 bp, Artificial Sequence
  Synthetic oligonucleotide
gttcgaagataagacaccgtcatcggcacg

SEQ ID NO: 79668 - DNA, 30 bp, Artificial Sequence
  Synthetic oligonucleotide
tcataatgtcagctaagatgtaaatgcacg

SEQ ID NO: 79669 - DNA, 30 bp, Artificial Sequence
  Synthetic oligonucleotide
ttatgaagggtagcaggtcacccatgcacg

SEQ ID NO: 79670 - DNA, 30 bp, Artificial Sequence
  Synthetic oligonucleotide
gaccataggtacaggtaagggagatgcacg

SEQ ID NO: 79671 - DNA, 30 bp, Artificial Sequence
  Synthetic oligonucleotide
aactgcgataaggaaggagatatatgcacg

SEQ ID NO: 79672 - DNA, 30 bp, Artificial Sequence
  Synthetic oligonucleotide
caccttgagcgaatcataaattcaatcacg

SEQ ID NO: 79673 - DNA, 30 bp, Artificial Sequence
  Synthetic oligonucleotide
aagtatgtctagaaaggtcacacgatcacg

SEQ ID NO: 79674 - DNA, 30 bp, Artificial Sequence
  Synthetic oligonucleotide
tgctaaaccatcattcttaggatgctcacg

SEQ ID NO: 79675 - DNA, 29 bp, Artificial Sequence
  Synthetic oligonucleotide
gctatatgctccaggccaacagagtcacg

SEQ ID NO: 79676 - DNA, 30 bp, Artificial Sequence
  Synthetic oligonucleotide
aagagatttcctggtaggcgatgattcacg

SEQ ID NO: 79677 - DNA, 30 bp, Artificial Sequence
  Synthetic oligonucleotide
accgcataccgtacattgtgttaacagacg

SEQ ID NO: 79678 - DNA, 30 bp, Artificial Sequence
  Synthetic oligonucleotide
atgcgaggacaccaatggcatagtcagacg

SEQ ID NO: 79679 - DNA, 30 bp, Artificial Sequence
  Synthetic oligonucleotide
cataggtcacacgatattaacgttcagacg

SEQ ID NO: 79680 - DNA, 30 bp, Artificial Sequence
  Synthetic oligonucleotide
tgtcaaacatgatgactcctggaagagacg

SEQ ID NO: 79681 - DNA, 30 bp, Artificial Sequence
  Synthetic oligonucleotide
ggaccaacctaaatcctgttcgccgagacg

SEQ ID NO: 79682 - DNA, 30 bp, Artificial Sequence
  Synthetic oligonucleotide
taaacatcggaactacggtatgatgagacg

SEQ ID NO: 79683 - DNA, 30 bp, Artificial Sequence
  Synthetic oligonucleotide
cctagctaaagagttaaatcggactagacg

SEQ ID NO: 79684 - DNA, 30 bp, Artificial Sequence
  Synthetic oligonucleotide
gaatggtggggtgtacttattgcggcgacg

SEQ ID NO: 79685 - DNA, 30 bp, Artificial Sequence
  Synthetic oligonucleotide
taagggtgttaccgagagtactagtcgacg

SEQ ID NO: 79686 - DNA, 30 bp, Artificial Sequence
  Synthetic oligonucleotide
aatgcgagaggcacgagccctcggtcgacg

SEQ ID NO: 79687 - DNA, 30 bp, Artificial Sequence
  Synthetic oligonucleotide
acagggttaccagcacaaagcttccggacg

SEQ ID NO: 79688 - DNA, 30 bp, Artificial Sequence
  Synthetic oligonucleotide
ctggcaatcgcgtgaggagaacggcggacg

SEQ ID NO: 79689 - DNA, 30 bp, Artificial Sequence
  Synthetic oligonucleotide
gaacgcccacggataacgaggattcggacg

SEQ ID NO: 79690 - DNA, 30 bp, Artificial Sequence
  Synthetic oligonucleotide
ccaaaggcctcgctcaaacgctaagggacg

SEQ ID NO: 79691 - DNA, 30 bp, Artificial Sequence
  Synthetic oligonucleotide
tccgtccgtacgggcataaaataggggacg

SEQ ID NO: 79692 - DNA, 30 bp, Artificial Sequence
  Synthetic oligonucleotide
tacggggcgtatggtgctacccgtgggacg

SEQ ID NO: 79693 - DNA, 30 bp, Artificial Sequence
  Synthetic oligonucleotide
ctaaccaacatcagaattaccacggtgacg

SEQ ID NO: 79694 - DNA, 30 bp, Artificial Sequence
  Synthetic oligonucleotide
ctacggtgatcattcggcgatagcttgacg

SEQ ID NO: 79695 - DNA, 30 bp, Artificial Sequence
  Synthetic oligonucleotide
ggctcatgaatacacataaatctaaatacg

SEQ ID NO: 79696 - DNA, 30 bp, Artificial Sequence
  Synthetic oligonucleotide
ccgcggatgtggttggctaagtgtaatacg

SEQ ID NO: 79697 - DNA, 30 bp, Artificial Sequence
  Synthetic oligonucleotide
taggtacagataggagtcaactttaatacg

SEQ ID NO: 79698 - DNA, 30 bp, Artificial Sequence
  Synthetic oligonucleotide
caggactgaatcttaccgcccggacatacg

SEQ ID NO: 79699 - DNA, 30 bp, Artificial Sequence
  Synthetic oligonucleotide
tccgtcgcgaccataatggtgatacatacg

SEQ ID NO: 79700 - DNA, 30 bp, Artificial Sequence
  Synthetic oligonucleotide
tgtcagaatcggaactttctccctcatacg

SEQ ID NO: 79701 - DNA, 30 bp, Artificial Sequence
  Synthetic oligonucleotide
ccggggatagcatgctaactgccagatacg

SEQ ID NO: 79702 - DNA, 30 bp, Artificial Sequence
  Synthetic oligonucleotide
gtgtgcgaacgcgagtcaattgacgatacg

SEQ ID NO: 79703 - DNA, 30 bp, Artificial Sequence
  Synthetic oligonucleotide
gtgtaaagcatagacggtgtgatggatacg

SEQ ID NO: 79704 - DNA, 30 bp, Artificial Sequence
  Synthetic oligonucleotide
ccgcaactaatcgggaaatcattggatacg

SEQ ID NO: 79705 - DNA, 30 bp, Artificial Sequence
  Synthetic oligonucleotide
gcgcgggcggacacagacatcatagctacg

SEQ ID NO: 79706 - DNA, 30 bp, Artificial Sequence
  Synthetic oligonucleotide
taggcctcgggagagataaaaatggctacg

SEQ ID NO: 79707 - DNA, 30 bp, Artificial Sequence
  Synthetic oligonucleotide
taagggcagaataggggaaggtatgctacg

SEQ ID NO: 79708 - DNA, 30 bp, Artificial Sequence
  Synthetic oligonucleotide
tggaccagagtcgaatgtggatcaagtacg

SEQ ID NO: 79709 - DNA, 30 bp, Artificial Sequence
  Synthetic oligonucleotide
gggggtatagggcgtcatcaagacagtacg

SEQ ID NO: 79710 - DNA, 30 bp, Artificial Sequence
  Synthetic oligonucleotide
tgtcagatagggccaggccaaagcagtacg

SEQ ID NO: 79711 - DNA, 30 bp, Artificial Sequence
  Synthetic oligonucleotide
ggaacgtggtaagactagatcaaaggtacg

SEQ ID NO: 79712 - DNA, 30 bp, Artificial Sequence
  Synthetic oligonucleotide
cgaggcaatactagagacatgataggtacg

SEQ ID NO: 79713 - DNA, 30 bp, Artificial Sequence
  Synthetic oligonucleotide
ccgcaccaatttggaattctcgagggtacg

SEQ ID NO: 79714 - DNA, 30 bp, Artificial Sequence
  Synthetic oligonucleotide
gcgtatacactagtaaggtaaacgggtacg

SEQ ID NO: 79715 - DNA, 30 bp, Artificial Sequence
  Synthetic oligonucleotide
tgcatgtaattagcacggataggatgtacg

SEQ ID NO: 79716 - DNA, 30 bp, Artificial Sequence
  Synthetic oligonucleotide
acgtggtagtgaatgcctcggatatgtacg

SEQ ID NO: 79717 - DNA, 30 bp, Artificial Sequence
  Synthetic oligonucleotide
acgataagaggtcttaatctccactgtacg

SEQ ID NO: 79718 - DNA, 30 bp, Artificial Sequence
  Synthetic oligonucleotide
cgggatcggaggattacagcgccttgtacg

SEQ ID NO: 79719 - DNA, 30 bp, Artificial Sequence
  Synthetic oligonucleotide
gcggggcagtgctcaaggctaaggattacg

SEQ ID NO: 79720 - DNA, 30 bp, Artificial Sequence
  Synthetic oligonucleotide
tcagggcagaagacccaggtatatattacg

SEQ ID NO: 79721 - DNA, 30 bp, Artificial Sequence
  Synthetic oligonucleotide
taggaggagtagattggacaaaggtttacg

SEQ ID NO: 79722 - DNA, 30 bp, Artificial Sequence
  Synthetic oligonucleotide
tgtcggcacccccgagagaatcgaaaaccg

SEQ ID NO: 79723 - DNA, 30 bp, Artificial Sequence
  Synthetic oligonucleotide
tatcgagcagagcgtgagtttgtgaaaccg

SEQ ID NO: 79724 - DNA, 30 bp, Artificial Sequence
  Synthetic oligonucleotide
gattcgggtcgtaggcgatgagataaaccg

SEQ ID NO: 79725 - DNA, 30 bp, Artificial Sequence
  Synthetic oligonucleotide
catctgataggtggaacatcgggccaaccg

SEQ ID NO: 79726 - DNA, 30 bp, Artificial Sequence
  Synthetic oligonucleotide
aaccatagtaactgtcattagcctcaaccg

SEQ ID NO: 79727 - DNA, 30 bp, Artificial Sequence
  Synthetic oligonucleotide
gaggcccagttccgacttactaaagaaccg

SEQ ID NO: 79728 - DNA, 30 bp, Artificial Sequence
  Synthetic oligonucleotide
tactcaagtacgctaatactgcccgaaccg

SEQ ID NO: 79729 - DNA, 30 bp, Artificial Sequence
  Synthetic oligonucleotide
ccgataacccttaacaagggtactgaaccg

SEQ ID NO: 79730 - DNA, 30 bp, Artificial Sequence
  Synthetic oligonucleotide
tcgcgacacgcacggaaccagccataaccg

SEQ ID NO: 79731 - DNA, 30 bp, Artificial Sequence
  Synthetic oligonucleotide
cggcaatgtgtattcatctgcagataaccg

SEQ ID NO: 79732 - DNA, 30 bp, Artificial Sequence
  Synthetic oligonucleotide
ttcgaatgcgctaggatgactcgataaccg

SEQ ID NO: 79733 - DNA, 30 bp, Artificial Sequence
  Synthetic oligonucleotide
acgccaggctctaatattggtcgataaccg

SEQ ID NO: 79734 - DNA, 30 bp, Artificial Sequence
  Synthetic oligonucleotide
ttgtggaaaatagtcccttctaagtaaccg

SEQ ID NO: 79735 - DNA, 30 bp, Artificial Sequence
  Synthetic oligonucleotide
ggctaggcataagaagtcagcacgtaaccg

SEQ ID NO: 79736 - DNA, 30 bp, Artificial Sequence
  Synthetic oligonucleotide
ctgaggggtagaccgttagtttattaaccg

SEQ ID NO: 79737 - DNA, 30 bp, Artificial Sequence
  Synthetic oligonucleotide
agttgagactgagaaagagtgcccacaccg

SEQ ID NO: 79738 - DNA, 30 bp, Artificial Sequence
  Synthetic oligonucleotide
ggaatcaagaatttgcaacaaaatacaccg

SEQ ID NO: 79739 - DNA, 30 bp, Artificial Sequence
  Synthetic oligonucleotide
acgggggcctgtgcgtgatggagtacaccg

SEQ ID NO: 79740 - DNA, 30 bp, Artificial Sequence
  Synthetic oligonucleotide
acatatccgtctctgagggtgtacccaccg

SEQ ID NO: 79741 - DNA, 30 bp, Artificial Sequence
  Synthetic oligonucleotide
acgtcctctacggcaagttcagcgccaccg

SEQ ID NO: 79742 - DNA, 30 bp, Artificial Sequence
  Synthetic oligonucleotide
ctcaaaatgtgggtataacgagcgccaccg

SEQ ID NO: 79743 - DNA, 30 bp, Artificial Sequence
  Synthetic oligonucleotide
ttaggctcacatacccataaaaatccaccg

SEQ ID NO: 79744 - DNA, 30 bp, Artificial Sequence
  Synthetic oligonucleotide
aaccattgaaagtcgcccgtctatccaccg

SEQ ID NO: 79745 - DNA, 30 bp, Artificial Sequence
  Synthetic oligonucleotide
gaagacgtcatgagcgattgcgttccaccg

SEQ ID NO: 79746 - DNA, 30 bp, Artificial Sequence
  Synthetic oligonucleotide
gtgccggagaagaaagtcagaaattcaccg

SEQ ID NO: 79747 - DNA, 30 bp, Artificial Sequence
  Synthetic oligonucleotide
aaaggattgatgtccaaattcggttcaccg

SEQ ID NO: 79748 - DNA, 30 bp, Artificial Sequence
  Synthetic oligonucleotide
taccaagtcgtacctcaggtagacagaccg

SEQ ID NO: 79749 - DNA, 30 bp, Artificial Sequence
  Synthetic oligonucleotide
gtgtgctatggaatggtagttacgagaccg

SEQ ID NO: 79750 - DNA, 30 bp, Artificial Sequence
  Synthetic oligonucleotide
ctaggtagaaggcctgcacaactaggaccg

SEQ ID NO: 79751 - DNA, 30 bp, Artificial Sequence
  Synthetic oligonucleotide
aacgtaagcttctaatggtagaggtgaccg

SEQ ID NO: 79752 - DNA, 30 bp, Artificial Sequence
  Synthetic oligonucleotide
cgtgtcacaagctctgattagacgataccg

SEQ ID NO: 79753 - DNA, 30 bp, Artificial Sequence
  Synthetic oligonucleotide
agtacagctggggtcggagtctaactaccg

SEQ ID NO: 79754 - DNA, 30 bp, Artificial Sequence
  Synthetic oligonucleotide
atagagcccaactggcccacagatctaccg

SEQ ID NO: 79755 - DNA, 30 bp, Artificial Sequence
  Synthetic oligonucleotide
aaaacatcagttagtttgctacaaaccccg

SEQ ID NO: 79756 - DNA, 30 bp, Artificial Sequence
  Synthetic oligonucleotide
tagagtgactcgtggagacatgtcaccccg

SEQ ID NO: 79757 - DNA, 30 bp, Artificial Sequence
  Synthetic oligonucleotide
cggtcagtcacgcgatatacttggaccccg

SEQ ID NO: 79758 - DNA, 30 bp, Artificial Sequence
  Synthetic oligonucleotide
caaggtggaaacatgtcataagtacccccg

SEQ ID NO: 79759 - DNA, 29 bp, Artificial Sequence
  Synthetic oligonucleotide
atggagggtcgcgaaagaaaaatcccccg

SEQ ID NO: 79760 - DNA, 30 bp, Artificial Sequence
  Synthetic oligonucleotide
ggtctagggcccatgtcaaaagaagccccg

SEQ ID NO: 79761 - DNA, 30 bp, Artificial Sequence
  Synthetic oligonucleotide
acttcaccaagtgaaaggaacccagccccg

SEQ ID NO: 79762 - DNA, 30 bp, Artificial Sequence
  Synthetic oligonucleotide
acggtatcctaatcgcacgagtcagccccg

SEQ ID NO: 79763 - DNA, 30 bp, Artificial Sequence
  Synthetic oligonucleotide
cagtgggagtcactaccagtactccgcccg

SEQ ID NO: 79764 - DNA, 30 bp, Artificial Sequence
  Synthetic oligonucleotide
tcgtggagtaggggctacacgttgcgcccg

SEQ ID NO: 79765 - DNA, 30 bp, Artificial Sequence
  Synthetic oligonucleotide
gtggatatataattgagagacgaaggcccg

SEQ ID NO: 79766 - DNA, 30 bp, Artificial Sequence
  Synthetic oligonucleotide
ctggtcggaagaatgtaagcaactggcccg

SEQ ID NO: 79767 - DNA, 30 bp, Artificial Sequence
  Synthetic oligonucleotide
agtgtcaaccatatcgcctaacaatgcccg

SEQ ID NO: 79768 - DNA, 30 bp, Artificial Sequence
  Synthetic oligonucleotide
tatcgatctggatgtacgaattcttgcccg

SEQ ID NO: 79769 - DNA, 30 bp, Artificial Sequence
  Synthetic oligonucleotide
aagaccaatttgcggaacggagggatcccg

SEQ ID NO: 79770 - DNA, 30 bp, Artificial Sequence
  Synthetic oligonucleotide
cggggcgcgcaatgtctttctgctatcccg

SEQ ID NO: 79771 - DNA, 30 bp, Artificial Sequence
  Synthetic oligonucleotide
accaatccgcggtcgtgacgagtgctcccg

SEQ ID NO: 79772 - DNA, 30 bp, Artificial Sequence
  Synthetic oligonucleotide
acgggacagactaccagtgaagccttcccg

SEQ ID NO: 79773 - DNA, 30 bp, Artificial Sequence
  Synthetic oligonucleotide
cgttcagagtcggatagttgcctaaagccg

SEQ ID NO: 79774 - DNA, 30 bp, Artificial Sequence
  Synthetic oligonucleotide
caatggggactcagtatatctgtgaagccg

SEQ ID NO: 79775 - DNA, 30 bp, Artificial Sequence
  Synthetic oligonucleotide
agtggttagaggtgacatcggccccagccg

SEQ ID NO: 79776 - DNA, 30 bp, Artificial Sequence
  Synthetic oligonucleotide
aggaggcaggtgaatagtaagatttagccg

SEQ ID NO: 79777 - DNA, 30 bp, Artificial Sequence
  Synthetic oligonucleotide
tctaatgcaaacacgaaataacatacgccg

SEQ ID NO: 79778 - DNA, 30 bp, Artificial Sequence
  Synthetic oligonucleotide
aggatataaagtcagttctatcatacgccg

SEQ ID NO: 79779 - DNA, 30 bp, Artificial Sequence
  Synthetic oligonucleotide
gacggaaataaggtgactggaaattcgccg

SEQ ID NO: 79780 - DNA, 30 bp, Artificial Sequence
  Synthetic oligonucleotide
gctttccactgaatacaaaatcgacggccg

SEQ ID NO: 79781 - DNA, 30 bp, Artificial Sequence
  Synthetic oligonucleotide
taggtaagagttggagataggactcggccg

SEQ ID NO: 79782 - DNA, 30 bp, Artificial Sequence
  Synthetic oligonucleotide
atatgaaacataacggcgaccaatgggccg

SEQ ID NO: 79783 - DNA, 30 bp, Artificial Sequence
  Synthetic oligonucleotide
gtagcgatgtgactagtcgaataatggccg

SEQ ID NO: 79784 - DNA, 30 bp, Artificial Sequence
  Synthetic oligonucleotide
cgctaaatatatagtcggaggtaatggccg

SEQ ID NO: 79785 - DNA, 30 bp, Artificial Sequence
  Synthetic oligonucleotide
aagcaaacgtcgcattgcgcaacgtggccg

SEQ ID NO: 79786 - DNA, 30 bp, Artificial Sequence
  Synthetic oligonucleotide
cggaaaaaccccgacctatgaccttggccg

SEQ ID NO: 79787 - DNA, 30 bp, Artificial Sequence
  Synthetic oligonucleotide
tggaaacgcccactaatgactagaatgccg

SEQ ID NO: 79788 - DNA, 31 bp, Artificial Sequence
  Synthetic oligonucleotide
agtgtgaacccaatacgataagaacatgccg

SEQ ID NO: 79789 - DNA, 30 bp, Artificial Sequence
  Synthetic oligonucleotide
tatgcctggttcatggcgggagagatgccg

SEQ ID NO: 79790 - DNA, 30 bp, Artificial Sequence
  Synthetic oligonucleotide
tggcaataaaaaaaacagatcaacctgccg

SEQ ID NO: 79791 - DNA, 30 bp, Artificial Sequence
  Synthetic oligonucleotide
ccttggccatatgtgagatttctgctgccg

SEQ ID NO: 79792 - DNA, 30 bp, Artificial Sequence
  Synthetic oligonucleotide
ttaggatgatactggcgtataggagtgccg

SEQ ID NO: 79793 - DNA, 30 bp, Artificial Sequence
  Synthetic oligonucleotide
tacgcttagaaataaaaaagtactgtgccg

SEQ ID NO: 79794 - DNA, 30 bp, Artificial Sequence
  Synthetic oligonucleotide
cgtgtgactcggataggagtttagttgccg

SEQ ID NO: 79795 - DNA, 30 bp, Artificial Sequence
  Synthetic oligonucleotide
gcggtcacccgaaaggtatcaagaaatccg

SEQ ID NO: 79796 - DNA, 30 bp, Artificial Sequence
  Synthetic oligonucleotide
agctcgtgctggggaccactccggaatccg

SEQ ID NO: 79797 - DNA, 30 bp, Artificial Sequence
  Synthetic oligonucleotide
aactagctccagtggcaggtttaacatccg

SEQ ID NO: 79798 - DNA, 30 bp, Artificial Sequence
  Synthetic oligonucleotide
tcgtaaaaatttcggaatagttcacatccg

SEQ ID NO: 79799 - DNA, 30 bp, Artificial Sequence
  Synthetic oligonucleotide
gagccgtgggggatgagtgcagacgatccg

SEQ ID NO: 79800 - DNA, 30 bp, Artificial Sequence
  Synthetic oligonucleotide
acaagatgggggaggggcaaattatatccg

SEQ ID NO: 79801 - DNA, 30 bp, Artificial Sequence
  Synthetic oligonucleotide
ggtctaacgcataagaacctgccctatccg

SEQ ID NO: 79802 - DNA, 30 bp, Artificial Sequence
  Synthetic oligonucleotide
accgtacaatacgcttggtatgaaactccg

SEQ ID NO: 79803 - DNA, 30 bp, Artificial Sequence
  Synthetic oligonucleotide
cggccggaacacagaaaggggcatgctccg

SEQ ID NO: 79804 - DNA, 30 bp, Artificial Sequence
  Synthetic oligonucleotide
cccataggtaaagaccaccttgaaagtccg

SEQ ID NO: 79805 - DNA, 30 bp, Artificial Sequence
  Synthetic oligonucleotide
atcacaatgtatccacctaccacaagtccg

SEQ ID NO: 79806 - DNA, 30 bp, Artificial Sequence
  Synthetic oligonucleotide
ctggggacgaaaattgaatacttcagtccg

SEQ ID NO: 79807 - DNA, 30 bp, Artificial Sequence
  Synthetic oligonucleotide
gagcgaacagggaacgagacggggagtccg

SEQ ID NO: 79808 - DNA, 30 bp, Artificial Sequence
  Synthetic oligonucleotide
acttgtcacatcgggatatctaatagtccg

SEQ ID NO: 79809 - DNA, 30 bp, Artificial Sequence
  Synthetic oligonucleotide
tgggtgccgatgagagtattcgatagtccg

SEQ ID NO: 79810 - DNA, 30 bp, Artificial Sequence
  Synthetic oligonucleotide
ggaatagcacttcagggagtaatacgtccg

SEQ ID NO: 79811 - DNA, 30 bp, Artificial Sequence
  Synthetic oligonucleotide
aactcatggccaactcattttggaggtccg

SEQ ID NO: 79812 - DNA, 30 bp, Artificial Sequence
  Synthetic oligonucleotide
gggatcgcttcatcaagaccgacatgtccg

SEQ ID NO: 79813 - DNA, 30 bp, Artificial Sequence
  Synthetic oligonucleotide
gcaaccaccaatgctagaaatccaattccg

SEQ ID NO: 79814 - DNA, 30 bp, Artificial Sequence
  Synthetic oligonucleotide
gtggctgctaattgacaaatatacattccg

SEQ ID NO: 79815 - DNA, 30 bp, Artificial Sequence
  Synthetic oligonucleotide
gaccgcgcattaatagatcccgcccttccg

SEQ ID NO: 79816 - DNA, 30 bp, Artificial Sequence
  Synthetic oligonucleotide
ctgcatgtgtgaggtacccttaaagttccg

SEQ ID NO: 79817 - DNA, 30 bp, Artificial Sequence
  Synthetic oligonucleotide
ctgcatccccatgggaaaagttcagttccg

SEQ ID NO: 79818 - DNA, 30 bp, Artificial Sequence
  Synthetic oligonucleotide
tatagattcgaagtaagactacgggttccg

SEQ ID NO: 79819 - DNA, 30 bp, Artificial Sequence
  Synthetic oligonucleotide
gcggcaatatattatgagaggagtgttccg

SEQ ID NO: 79820 - DNA, 30 bp, Artificial Sequence
  Synthetic oligonucleotide
gcgccggctgtagcactagccacgaaagcg

SEQ ID NO: 79821 - DNA, 30 bp, Artificial Sequence
  Synthetic oligonucleotide
cctgggtgaaaaatgcgagcggtagaagcg

SEQ ID NO: 79822 - DNA, 30 bp, Artificial Sequence
  Synthetic oligonucleotide
tgcgcgatggtacgcaccccgacggaagcg

SEQ ID NO: 79823 - DNA, 30 bp, Artificial Sequence
  Synthetic oligonucleotide
aagttaccacgtactaatatagactaagcg

SEQ ID NO: 79824 - DNA, 30 bp, Artificial Sequence
  Synthetic oligonucleotide
tgtacaagcgaggcgactagtgtctaagcg

SEQ ID NO: 79825 - DNA, 30 bp, Artificial Sequence
  Synthetic oligonucleotide
gtataactaggcccattagaagggtaagcg

SEQ ID NO: 79826 - DNA, 30 bp, Artificial Sequence
  Synthetic oligonucleotide
ttagggcattaacacagcggtagttaagcg

SEQ ID NO: 79827 - DNA, 30 bp, Artificial Sequence
  Synthetic oligonucleotide
ctcgtacgacgacccagtgagataacagcg

SEQ ID NO: 79828 - DNA, 30 bp, Artificial Sequence
  Synthetic oligonucleotide
tggggaaacaccctagagctgctaacagcg

SEQ ID NO: 79829 - DNA, 30 bp, Artificial Sequence
  Synthetic oligonucleotide
aggaaaacaatgcgatcgcccggcacagcg

SEQ ID NO: 79830 - DNA, 30 bp, Artificial Sequence
  Synthetic oligonucleotide
atcagtgcagggcaacaccttcatacagcg

SEQ ID NO: 79831 - DNA, 30 bp, Artificial Sequence
  Synthetic oligonucleotide
tgatcaaataggtgataaaattgtacagcg

SEQ ID NO: 79832 - DNA, 30 bp, Artificial Sequence
  Synthetic oligonucleotide
gtatcaggaattcgtgtgagagcaccagcg

SEQ ID NO: 79833 - DNA, 30 bp, Artificial Sequence
  Synthetic oligonucleotide
tggaaggtcatcttttagccacagccagcg

SEQ ID NO: 79834 - DNA, 30 bp, Artificial Sequence
  Synthetic oligonucleotide
cacagacccccgtgccataaccgtccagcg

SEQ ID NO: 79835 - DNA, 30 bp, Artificial Sequence
  Synthetic oligonucleotide
gcgacctcattcccagccgcaccatcagcg

SEQ ID NO: 79836 - DNA, 30 bp, Artificial Sequence
  Synthetic oligonucleotide
gtgggatcccattacagaatgcactcagcg

SEQ ID NO: 79837 - DNA, 30 bp, Artificial Sequence
  Synthetic oligonucleotide
tgcgaggcatgcgggaggaccttctcagcg

SEQ ID NO: 79838 - DNA, 30 bp, Artificial Sequence
  Synthetic oligonucleotide
tctcgatatgcttacgccaggtagtcagcg

SEQ ID NO: 79839 - DNA, 30 bp, Artificial Sequence
  Synthetic oligonucleotide
tgcgacgcggatcgggtgcttgcgtcagcg

SEQ ID NO: 79840 - DNA, 30 bp, Artificial Sequence
  Synthetic oligonucleotide
taacctacgcattagacaccgtgaagagcg

SEQ ID NO: 79841 - DNA, 30 bp, Artificial Sequence
  Synthetic oligonucleotide
gtggagaagtacaaggcgtcaagacgagcg

SEQ ID NO: 79842 - DNA, 30 bp, Artificial Sequence
  Synthetic oligonucleotide
gcggaaaattggggctaaagttccggagcg

SEQ ID NO: 79843 - DNA, 30 bp, Artificial Sequence
  Synthetic oligonucleotide
atcccggctgcaaaatacatcttcggagcg

SEQ ID NO: 79844 - DNA, 30 bp, Artificial Sequence
  Synthetic oligonucleotide
gtgacctgcgaaataacaatgcagggagcg

SEQ ID NO: 79845 - DNA, 30 bp, Artificial Sequence
  Synthetic oligonucleotide
aacgaaatcagtcgttacgcgtatggagcg

SEQ ID NO: 79846 - DNA, 30 bp, Artificial Sequence
  Synthetic oligonucleotide
gcagagccccagagaataacggactgagcg

SEQ ID NO: 79847 - DNA, 30 bp, Artificial Sequence
  Synthetic oligonucleotide
agatgcctcggagttcgtggtgggtgagcg

SEQ ID NO: 79848 - DNA, 30 bp, Artificial Sequence
  Synthetic oligonucleotide
tcaacgggcagttcttcagaaacttgagcg

SEQ ID NO: 79849 - DNA, 30 bp, Artificial Sequence
  Synthetic oligonucleotide
tcgagtctgcaggtctgaccagtcttagcg

SEQ ID NO: 79850 - DNA, 30 bp, Artificial Sequence
  Synthetic oligonucleotide
cgaggcctatgatgccgttgcgtgttagcg

SEQ ID NO: 79851 - DNA, 30 bp, Artificial Sequence
  Synthetic oligonucleotide
ctaaaatccatgacatatgtcggaaacgcg

SEQ ID NO: 79852 - DNA, 30 bp, Artificial Sequence
  Synthetic oligonucleotide
ctgagagggacaaactcctaaagtaacgcg

SEQ ID NO: 79853 - DNA, 30 bp, Artificial Sequence
  Synthetic oligonucleotide
atgtaaatgcggactggtgaattacacgcg

SEQ ID NO: 79854 - DNA, 30 bp, Artificial Sequence
  Synthetic oligonucleotide
caggtgagtggactcaaacaaaagtacgcg

SEQ ID NO: 79855 - DNA, 30 bp, Artificial Sequence
  Synthetic oligonucleotide
tctcacattggacaggcggagagaaccgcg

SEQ ID NO: 79856 - DNA, 30 bp, Artificial Sequence
  Synthetic oligonucleotide
cgatcgttaaattatctcgtgataaccgcg

SEQ ID NO: 79857 - DNA, 30 bp, Artificial Sequence
  Synthetic oligonucleotide
catatcacaagatcggaacttaaggccgcg

SEQ ID NO: 79858 - DNA, 30 bp, Artificial Sequence
  Synthetic oligonucleotide
atgtaaggaatccgagacaagtaggccgcg

SEQ ID NO: 79859 - DNA, 30 bp, Artificial Sequence
  Synthetic oligonucleotide
gcgtacgtaagagcttcactgctggccgcg

SEQ ID NO: 79860 - DNA, 30 bp, Artificial Sequence
  Synthetic oligonucleotide
gtgctatgccagaatgagatatgcagcgcg

SEQ ID NO: 79861 - DNA, 30 bp, Artificial Sequence
  Synthetic oligonucleotide
ttgctgggcggattgatggcaaatagcgcg

SEQ ID NO: 79862 - DNA, 30 bp, Artificial Sequence
  Synthetic oligonucleotide
tgtaaactcggatccgagccaagacgcgcg

SEQ ID NO: 79863 - DNA, 30 bp, Artificial Sequence
  Synthetic oligonucleotide
cgcgatcaagcaaataagccacaccgcgcg

SEQ ID NO: 79864 - DNA, 30 bp, Artificial Sequence
  Synthetic oligonucleotide
aaacagaataggccagaaaaaaaaggcgcg

SEQ ID NO: 79865 - DNA, 30 bp, Artificial Sequence
  Synthetic oligonucleotide
tgcatgagttaaaatgatgaaggttgcgcg

SEQ ID NO: 79866 - DNA, 30 bp, Artificial Sequence
  Synthetic oligonucleotide
actacgggtttggtgcgaaagagcatcgcg

SEQ ID NO: 79867 - DNA, 30 bp, Artificial Sequence
  Synthetic oligonucleotide
ccggcggaccctactaagacacgtatcgcg

SEQ ID NO: 79868 - DNA, 30 bp, Artificial Sequence
  Synthetic oligonucleotide
tgaggggcgagctattggactagcgtcgcg

SEQ ID NO: 79869 - DNA, 30 bp, Artificial Sequence
  Synthetic oligonucleotide
accgtatccgtctcgaaatactgcgtcgcg

SEQ ID NO: 79870 - DNA, 30 bp, Artificial Sequence
  Synthetic oligonucleotide
cctgaaacgggggccaagaactaggtcgcg

SEQ ID NO: 79871 - DNA, 30 bp, Artificial Sequence
  Synthetic oligonucleotide
taattgaatatcgcaaaatgatcattcgcg

SEQ ID NO: 79872 - DNA, 30 bp, Artificial Sequence
  Synthetic oligonucleotide
tcgcagacccgatagaacgattataaggcg

SEQ ID NO: 79873 - DNA, 30 bp, Artificial Sequence
  Synthetic oligonucleotide
aggtccttgtaatggggaatatgccaggcg

SEQ ID NO: 79874 - DNA, 30 bp, Artificial Sequence
  Synthetic oligonucleotide
cggataggaaatgatatccagtagcaggcg

SEQ ID NO: 79875 - DNA, 30 bp, Artificial Sequence
  Synthetic oligonucleotide
acgagcggagggggagtgaccgtagaggcg

SEQ ID NO: 79876 - DNA, 30 bp, Artificial Sequence
  Synthetic oligonucleotide
tgacacggatagctcctacgaagtgaggcg

SEQ ID NO: 79877 - DNA, 30 bp, Artificial Sequence
  Synthetic oligonucleotide
taatccgagaacgaagtggatacataggcg

SEQ ID NO: 79878 - DNA, 30 bp, Artificial Sequence
  Synthetic oligonucleotide
aaaatgtgaagcgctcctcaccgaacggcg

SEQ ID NO: 79879 - DNA, 30 bp, Artificial Sequence
  Synthetic oligonucleotide
cagcgacgggtagatagcatggtaacggcg

SEQ ID NO: 79880 - DNA, 30 bp, Artificial Sequence
  Synthetic oligonucleotide
cttactaggggaatcaaagacccaccggcg

SEQ ID NO: 79881 - DNA, 30 bp, Artificial Sequence
  Synthetic oligonucleotide
atatagcacacatgcattacaaactcggcg

SEQ ID NO: 79882 - DNA, 30 bp, Artificial Sequence
  Synthetic oligonucleotide
cgtacatagggtttattcggaccgtcggcg

SEQ ID NO: 79883 - DNA, 30 bp, Artificial Sequence
  Synthetic oligonucleotide
acaaagtatcctaccagaacgtgaagggcg

SEQ ID NO: 79884 - DNA, 30 bp, Artificial Sequence
  Synthetic oligonucleotide
gatattagcgtatgcagaatgaaacgggcg

SEQ ID NO: 79885 - DNA, 30 bp, Artificial Sequence
  Synthetic oligonucleotide
cagtagtccaaagaagtggtaccacgggcg

SEQ ID NO: 79886 - DNA, 30 bp, Artificial Sequence
  Synthetic oligonucleotide
taccgcgggagtagaagggttcaccgggcg

SEQ ID NO: 79887 - DNA, 30 bp, Artificial Sequence
  Synthetic oligonucleotide
agcttacgggtgactcaatactcaggggcg

SEQ ID NO: 79888 - DNA, 30 bp, Artificial Sequence
  Synthetic oligonucleotide
ttttacagtgacagcgactgtcgaggggcg

SEQ ID NO: 79889 - DNA, 30 bp, Artificial Sequence
  Synthetic oligonucleotide
cgtacacagaccacttggtgattaggggcg

SEQ ID NO: 79890 - DNA, 30 bp, Artificial Sequence
  Synthetic oligonucleotide
agtgagtcaaggggacagcaactgggggcg

SEQ ID NO: 79891 - DNA, 30 bp, Artificial Sequence
  Synthetic oligonucleotide
ccaattagccaacaaggacggatctgggcg

SEQ ID NO: 79892 - DNA, 30 bp, Artificial Sequence
  Synthetic oligonucleotide
ggcggggaacagggctatcaatagtgggcg

SEQ ID NO: 79893 - DNA, 30 bp, Artificial Sequence
  Synthetic oligonucleotide
cacgggcgactggaatggtaccatatggcg

SEQ ID NO: 79894 - DNA, 30 bp, Artificial Sequence
  Synthetic oligonucleotide
aggtttagaaaagagagaccatgtatggcg

SEQ ID NO: 79895 - DNA, 30 bp, Artificial Sequence
  Synthetic oligonucleotide
cgagggttgcaggtagaaagctaagtggcg

SEQ ID NO: 79896 - DNA, 30 bp, Artificial Sequence
  Synthetic oligonucleotide
ctaaaccatacacgatcagtgagggtggcg

SEQ ID NO: 79897 - DNA, 30 bp, Artificial Sequence
  Synthetic oligonucleotide
acgaccaggtcgggagcatccgttgtggcg

SEQ ID NO: 79898 - DNA, 30 bp, Artificial Sequence
  Synthetic oligonucleotide
acaaccacactcaagagtgggtgcaatgcg

SEQ ID NO: 79899 - DNA, 30 bp, Artificial Sequence
  Synthetic oligonucleotide
tcgtataaagtgtactaagtgatacatgcg

SEQ ID NO: 79900 - DNA, 31 bp, Artificial Sequence
  Synthetic oligonucleotide
ctaggaggtgggctaatacctcagccatgcg

SEQ ID NO: 79901 - DNA, 30 bp, Artificial Sequence
  Synthetic oligonucleotide
cggctcagggagcattcataccgtcatgcg

SEQ ID NO: 79902 - DNA, 30 bp, Artificial Sequence
  Synthetic oligonucleotide
aaccggatgtaacgggcaacctgcgatgcg

SEQ ID NO: 79903 - DNA, 30 bp, Artificial Sequence
  Synthetic oligonucleotide
cgcgcatcgtcggtctacagggaggatgcg

SEQ ID NO: 79904 - DNA, 31 bp, Artificial Sequence
  Synthetic oligonucleotide
aataatacttcaagaggataaaacggatgcg

SEQ ID NO: 79905 - DNA, 30 bp, Artificial Sequence
  Synthetic oligonucleotide
tccatgtattacacctccagatctactgcg

SEQ ID NO: 79906 - DNA, 30 bp, Artificial Sequence
  Synthetic oligonucleotide
tgtttgcgtaaggcatgtaagaaagctgcg

SEQ ID NO: 79907 - DNA, 30 bp, Artificial Sequence
  Synthetic oligonucleotide
gaagtcgattcagggtgataaagttctgcg

SEQ ID NO: 79908 - DNA, 30 bp, Artificial Sequence
  Synthetic oligonucleotide
gggaagtatacggataccaatagttctgcg

SEQ ID NO: 79909 - DNA, 30 bp, Artificial Sequence
  Synthetic oligonucleotide
tggaggacccaatctgtgaaaacaagtgcg

SEQ ID NO: 79910 - DNA, 30 bp, Artificial Sequence
  Synthetic oligonucleotide
ctgtcaggagtgtggctataacggcgtgcg

SEQ ID NO: 79911 - DNA, 30 bp, Artificial Sequence
  Synthetic oligonucleotide
aagtcgggtaatcatatgtgcaatcgtgcg

SEQ ID NO: 79912 - DNA, 30 bp, Artificial Sequence
  Synthetic oligonucleotide
tgtcatccggtaaattaaaccgctcgtgcg

SEQ ID NO: 79913 - DNA, 30 bp, Artificial Sequence
  Synthetic oligonucleotide
ctgcccctggacatagaaacggcaggtgcg

SEQ ID NO: 79914 - DNA, 30 bp, Artificial Sequence
  Synthetic oligonucleotide
cgaatagggtacatcgcggttagcggtgcg

SEQ ID NO: 79915 - DNA, 30 bp, Artificial Sequence
  Synthetic oligonucleotide
cacagttaccgggtcaatagatcgggtgcg

SEQ ID NO: 79916 - DNA, 30 bp, Artificial Sequence
  Synthetic oligonucleotide
aagtagccggttgaatagctcgattgtgcg

SEQ ID NO: 79917 - DNA, 30 bp, Artificial Sequence
  Synthetic oligonucleotide
tcatgcaagggctccaggtgtaagattgcg

SEQ ID NO: 79918 - DNA, 30 bp, Artificial Sequence
  Synthetic oligonucleotide
gggatgaccaacattggacaagatattgcg

SEQ ID NO: 79919 - DNA, 30 bp, Artificial Sequence
  Synthetic oligonucleotide
atcgattatccagccattatttgagttgcg

SEQ ID NO: 79920 - DNA, 30 bp, Artificial Sequence
  Synthetic oligonucleotide
accattgatggagataccgtgcgtaaatcg

SEQ ID NO: 79921 - DNA, 30 bp, Artificial Sequence
  Synthetic oligonucleotide
ggggggctgctccagcttccctgccaatcg

SEQ ID NO: 79922 - DNA, 30 bp, Artificial Sequence
  Synthetic oligonucleotide
aatggttaatcacatgtgttaatcgaatcg

SEQ ID NO: 79923 - DNA, 30 bp, Artificial Sequence
  Synthetic oligonucleotide
gacccagtcacataaggggggtattaatcg

SEQ ID NO: 79924 - DNA, 30 bp, Artificial Sequence
  Synthetic oligonucleotide
ctggtcagttgagctagtggatctacatcg

SEQ ID NO: 79925 - DNA, 30 bp, Artificial Sequence
  Synthetic oligonucleotide
ccatagggcagtataacatctaccgcatcg

SEQ ID NO: 79926 - DNA, 30 bp, Artificial Sequence
  Synthetic oligonucleotide
tgaccctgcttgaatcaaccacttgcatcg

SEQ ID NO: 79927 - DNA, 30 bp, Artificial Sequence
  Synthetic oligonucleotide
cctcaagggacttcgcaataagaatcatcg

SEQ ID NO: 79928 - DNA, 30 bp, Artificial Sequence
  Synthetic oligonucleotide
cgctcgacttgtattacttgtccatcatcg

SEQ ID NO: 79929 - DNA, 30 bp, Artificial Sequence
  Synthetic oligonucleotide
aggaaattgaaaacgcgaacccgcagatcg

SEQ ID NO: 79930 - DNA, 30 bp, Artificial Sequence
  Synthetic oligonucleotide
ggtgagcgagctcagatattcatcagatcg

SEQ ID NO: 79931 - DNA, 30 bp, Artificial Sequence
  Synthetic oligonucleotide
ggctgtcatatttttataagtaagagatcg

SEQ ID NO: 79932 - DNA, 30 bp, Artificial Sequence
  Synthetic oligonucleotide
gcaatggtagtgagtttgtggcaccgatcg

SEQ ID NO: 79933 - DNA, 30 bp, Artificial Sequence
  Synthetic oligonucleotide
tggggccgtttaaattgtgctttccgatcg

SEQ ID NO: 79934 - DNA, 30 bp, Artificial Sequence
  Synthetic oligonucleotide
tgccgcaagaatattaatccggagcgatcg

SEQ ID NO: 79935 - DNA, 30 bp, Artificial Sequence
  Synthetic oligonucleotide
gatcggaccggagactgtttcacgcgatcg

SEQ ID NO: 79936 - DNA, 30 bp, Artificial Sequence
  Synthetic oligonucleotide
ttgctcactgagcgcttaagggatcgatcg

SEQ ID NO: 79937 - DNA, 30 bp, Artificial Sequence
  Synthetic oligonucleotide
tttagatacgtacccgtgggcggaggatcg

SEQ ID NO: 79938 - DNA, 30 bp, Artificial Sequence
  Synthetic oligonucleotide
gagtatcccttaagagcgcctagcggatcg

SEQ ID NO: 79939 - DNA, 30 bp, Artificial Sequence
  Synthetic oligonucleotide
acccacgtaatctgggagaagagctgatcg

SEQ ID NO: 79940 - DNA, 30 bp, Artificial Sequence
  Synthetic oligonucleotide
gggtcttcgtgcaagtaccggctgtgatcg

SEQ ID NO: 79941 - DNA, 30 bp, Artificial Sequence
  Synthetic oligonucleotide
ttaggacacaaagtgcccgatttcatatcg

SEQ ID NO: 79942 - DNA, 30 bp, Artificial Sequence
  Synthetic oligonucleotide
atggccgtgcagttcaagatcaagatatcg

SEQ ID NO: 79943 - DNA, 30 bp, Artificial Sequence
  Synthetic oligonucleotide
cacacacagacccgcagtagtcggatatcg

SEQ ID NO: 79944 - DNA, 30 bp, Artificial Sequence
  Synthetic oligonucleotide
agctctcgtcgaaatggatactgtatatcg

SEQ ID NO: 79945 - DNA, 30 bp, Artificial Sequence
  Synthetic oligonucleotide
tggagaacaaaacacttggtaacagtatcg

SEQ ID NO: 79946 - DNA, 30 bp, Artificial Sequence
  Synthetic oligonucleotide
ggtgcggagttcatcatgcgtcacgtatcg

SEQ ID NO: 79947 - DNA, 30 bp, Artificial Sequence
  Synthetic oligonucleotide
cacatgtttggcagttgggctgcggtatcg

SEQ ID NO: 79948 - DNA, 30 bp, Artificial Sequence
  Synthetic oligonucleotide
ctgcgaaattgcgtaaaggacctggtatcg

SEQ ID NO: 79949 - DNA, 30 bp, Artificial Sequence
  Synthetic oligonucleotide
tcgagctcactaacgcatgggggtgtatcg

SEQ ID NO: 79950 - DNA, 30 bp, Artificial Sequence
  Synthetic oligonucleotide
caatacgactaagcgccagcttccttatcg

SEQ ID NO: 79951 - DNA, 30 bp, Artificial Sequence
  Synthetic oligonucleotide
gtgcagtagaactagagttttacgttatcg

SEQ ID NO: 79952 - DNA, 30 bp, Artificial Sequence
  Synthetic oligonucleotide
ctaccgatctgctcatggagaaacaactcg

SEQ ID NO: 79953 - DNA, 30 bp, Artificial Sequence
  Synthetic oligonucleotide
gagggatatggagagggggcaggtaactcg

SEQ ID NO: 79954 - DNA, 30 bp, Artificial Sequence
  Synthetic oligonucleotide
ggaaccaatgtacgattcaggatcgactcg

SEQ ID NO: 79955 - DNA, 30 bp, Artificial Sequence
  Synthetic oligonucleotide
aatgacgccaaagcgaagccagatgactcg

SEQ ID NO: 79956 - DNA, 30 bp, Artificial Sequence
  Synthetic oligonucleotide
agaaggtcgccatgctaaagacactactcg

SEQ ID NO: 79957 - DNA, 30 bp, Artificial Sequence
  Synthetic oligonucleotide
cggacacccataggataatgctggtactcg

SEQ ID NO: 79958 - DNA, 30 bp, Artificial Sequence
  Synthetic oligonucleotide
gatgatccttagctcacttaattcgcctcg

SEQ ID NO: 79959 - DNA, 30 bp, Artificial Sequence
  Synthetic oligonucleotide
aagtaggcaacggaaaagggctaggcctcg

SEQ ID NO: 79960 - DNA, 30 bp, Artificial Sequence
  Synthetic oligonucleotide
tcgaatgcaactgatctaaatttggcctcg

SEQ ID NO: 79961 - DNA, 30 bp, Artificial Sequence
  Synthetic oligonucleotide
tcagtcctagtagtaactcgtcgaagctcg

SEQ ID NO: 79962 - DNA, 30 bp, Artificial Sequence
  Synthetic oligonucleotide
agcgtcgaatgatggtattggagacgctcg

SEQ ID NO: 79963 - DNA, 30 bp, Artificial Sequence
  Synthetic oligonucleotide
tgagtaacacggtccgtgacgaatggctcg

SEQ ID NO: 79964 - DNA, 30 bp, Artificial Sequence
  Synthetic oligonucleotide
cgcaaagctcaagtttctaaaggtggctcg

SEQ ID NO: 79965 - DNA, 30 bp, Artificial Sequence
  Synthetic oligonucleotide
tgtacaggaataggcgtgagagaatgctcg

SEQ ID NO: 79966 - DNA, 30 bp, Artificial Sequence
  Synthetic oligonucleotide
ccagagattgaacgtcgattaccctgctcg

SEQ ID NO: 79967 - DNA, 30 bp, Artificial Sequence
  Synthetic oligonucleotide
ggctgaggcggtcgataagctatcatctcg

SEQ ID NO: 79968 - DNA, 30 bp, Artificial Sequence
  Synthetic oligonucleotide
cgagcagcttttactatggcgtcactctcg

SEQ ID NO: 79969 - DNA, 30 bp, Artificial Sequence
  Synthetic oligonucleotide
tacattgtacaaagggccgaatacctctcg

SEQ ID NO: 79970 - DNA, 30 bp, Artificial Sequence
  Synthetic oligonucleotide
tttacatgctataagtaagtacccgtctcg

SEQ ID NO: 79971 - DNA, 30 bp, Artificial Sequence
  Synthetic oligonucleotide
ggaccccgtagatgaattcggtgcgtctcg

SEQ ID NO: 79972 - DNA, 30 bp, Artificial Sequence
  Synthetic oligonucleotide
gctgtgcatttaaaccggaggagaaagtcg

SEQ ID NO: 79973 - DNA, 30 bp, Artificial Sequence
  Synthetic oligonucleotide
ctagtaacccaggcatggttaccacagtcg

SEQ ID NO: 79974 - DNA, 30 bp, Artificial Sequence
  Synthetic oligonucleotide
ggcggagctagtacggtgcaaggccagtcg

SEQ ID NO: 79975 - DNA, 30 bp, Artificial Sequence
  Synthetic oligonucleotide
cgtcgtttagggaatgtgtggcatcagtcg

SEQ ID NO: 79976 - DNA, 30 bp, Artificial Sequence
  Synthetic oligonucleotide
gcgaactattaagggtgttacagtcagtcg

SEQ ID NO: 79977 - DNA, 30 bp, Artificial Sequence
  Synthetic oligonucleotide
gaagccccggagagatagaaccgtcagtcg

SEQ ID NO: 79978 - DNA, 30 bp, Artificial Sequence
  Synthetic oligonucleotide
aattaggagatgatcgacgtattcgagtcg

SEQ ID NO: 79979 - DNA, 30 bp, Artificial Sequence
  Synthetic oligonucleotide
catcgaaacttctgaggtaaagtggagtcg

SEQ ID NO: 79980 - DNA, 30 bp, Artificial Sequence
  Synthetic oligonucleotide
tcgctagacctaatggtctcacgttagtcg

SEQ ID NO: 79981 - DNA, 30 bp, Artificial Sequence
  Synthetic oligonucleotide
atcttaggtgtgtctgagggattcacgtcg

SEQ ID NO: 79982 - DNA, 30 bp, Artificial Sequence
  Synthetic oligonucleotide
tagatcacactgtttgcaaagattacgtcg

SEQ ID NO: 79983 - DNA, 30 bp, Artificial Sequence
  Synthetic oligonucleotide
agcttccacgtgtacatcggtagaccgtcg

SEQ ID NO: 79984 - DNA, 30 bp, Artificial Sequence
  Synthetic oligonucleotide
taggtgcaaagaggaccagagaccccgtcg

SEQ ID NO: 79985 - DNA, 30 bp, Artificial Sequence
  Synthetic oligonucleotide
gcctaagcgcgacaaggtgctgctgcgtcg

SEQ ID NO: 79986 - DNA, 30 bp, Artificial Sequence
  Synthetic oligonucleotide
gtcatagtgaacgcgcatgtaggaaggtcg

SEQ ID NO: 79987 - DNA, 30 bp, Artificial Sequence
  Synthetic oligonucleotide
atggattatgtgcttacagtaattaggtcg

SEQ ID NO: 79988 - DNA, 30 bp, Artificial Sequence
  Synthetic oligonucleotide
cacaggagacccaccagtaaccagcggtcg

SEQ ID NO: 79989 - DNA, 30 bp, Artificial Sequence
  Synthetic oligonucleotide
aaaaaggatgataatcaatggagagggtcg

SEQ ID NO: 79990 - DNA, 30 bp, Artificial Sequence
  Synthetic oligonucleotide
ggtcacatggagtgcggaagaaacgggtcg

SEQ ID NO: 79991 - DNA, 30 bp, Artificial Sequence
  Synthetic oligonucleotide
aatacgaccatagccaactactgggggtcg

SEQ ID NO: 79992 - DNA, 30 bp, Artificial Sequence
  Synthetic oligonucleotide
ttaggaacagacaacagttggtttgggtcg

SEQ ID NO: 79993 - DNA, 30 bp, Artificial Sequence
  Synthetic oligonucleotide
cagtgcctatatggcgaccgcgcttggtcg

SEQ ID NO: 79994 - DNA, 30 bp, Artificial Sequence
  Synthetic oligonucleotide
gtagttgcgccagtgaatagctcttggtcg

SEQ ID NO: 79995 - DNA, 30 bp, Artificial Sequence
  Synthetic oligonucleotide
tgagaaatgttctacctattggaaatgtcg

SEQ ID NO: 79996 - DNA, 30 bp, Artificial Sequence
  Synthetic oligonucleotide
tggagtttttggaacgatacaggcatgtcg

SEQ ID NO: 79997 - DNA, 30 bp, Artificial Sequence
  Synthetic oligonucleotide
agaaggttaaatgctttagagggtatgtcg

SEQ ID NO: 79998 - DNA, 30 bp, Artificial Sequence
  Synthetic oligonucleotide
acgctcacaaggatgaaggggatgctgtcg

SEQ ID NO: 79999 - DNA, 30 bp, Artificial Sequence
  Synthetic oligonucleotide
ttaatagcctgaacaaaactgtaggtgtcg

SEQ ID NO: 80000 - DNA, 30 bp, Artificial Sequence
  Synthetic oligonucleotide
tctcgcgctaagatgtgtcaaattttgtcg

SEQ ID NO: 80001 - DNA, 30 bp, Artificial Sequence
  Synthetic oligonucleotide
acaacggtcaactgacaaagcaacaattcg

SEQ ID NO: 80002 - DNA, 30 bp, Artificial Sequence
  Synthetic oligonucleotide
cgggtggattgtacgaaattggcgaattcg

SEQ ID NO: 80003 - DNA, 30 bp, Artificial Sequence
  Synthetic oligonucleotide
tctggacaccttcgcgaacccgcccattcg

SEQ ID NO: 80004 - DNA, 30 bp, Artificial Sequence
  Synthetic oligonucleotide
tgtgaatgaggcacgcaatttggtcattcg

SEQ ID NO: 80005 - DNA, 30 bp, Artificial Sequence
  Synthetic oligonucleotide
tgaggctgggttatcgcaccatgatattcg

SEQ ID NO: 80006 - DNA, 30 bp, Artificial Sequence
  Synthetic oligonucleotide
gttaaggactacatagataacgagtattcg

SEQ ID NO: 80007 - DNA, 30 bp, Artificial Sequence
  Synthetic oligonucleotide
cttgtggggcggggccaagcaggttattcg

SEQ ID NO: 80008 - DNA, 30 bp, Artificial Sequence
  Synthetic oligonucleotide
gatagagcccacaatagctaggagacttcg

SEQ ID NO: 80009 - DNA, 30 bp, Artificial Sequence
  Synthetic oligonucleotide
ttgtgatcttatgtaggcacctggacttcg

SEQ ID NO: 80010 - DNA, 30 bp, Artificial Sequence
  Synthetic oligonucleotide
gcgatggagacgacgtggcgtatgacttcg

SEQ ID NO: 80011 - DNA, 30 bp, Artificial Sequence
  Synthetic oligonucleotide
taggtggccaaccgtctagcgaaaccttcg

SEQ ID NO: 80012 - DNA, 30 bp, Artificial Sequence
  Synthetic oligonucleotide
tgctccgggcgagtcacttccccaccttcg

SEQ ID NO: 80013 - DNA, 30 bp, Artificial Sequence
  Synthetic oligonucleotide
ggaacctcatgcaggtcccgctgagcttcg

SEQ ID NO: 80014 - DNA, 30 bp, Artificial Sequence
  Synthetic oligonucleotide
caatagagtaggtcaaaatgtaccgcttcg

SEQ ID NO: 80015 - DNA, 30 bp, Artificial Sequence
  Synthetic oligonucleotide
cagagtgccgacagatgtttactgtcttcg

SEQ ID NO: 80016 - DNA, 30 bp, Artificial Sequence
  Synthetic oligonucleotide
aaggagctcccgacacgttccccttcttcg

SEQ ID NO: 80017 - DNA, 30 bp, Artificial Sequence
  Synthetic oligonucleotide
accactaagcaaacaccggcctcaagttcg

SEQ ID NO: 80018 - DNA, 30 bp, Artificial Sequence
  Synthetic oligonucleotide
aggcattagtatgccattatgcatagttcg

SEQ ID NO: 80019 - DNA, 30 bp, Artificial Sequence
  Synthetic oligonucleotide
caccgaagaccgcccgctggcccacgttcg

SEQ ID NO: 80020 - DNA, 30 bp, Artificial Sequence
  Synthetic oligonucleotide
aaaacgtgacccgtagaaagtgaccgttcg

SEQ ID NO: 80021 - DNA, 30 bp, Artificial Sequence
  Synthetic oligonucleotide
ttgatacgctcatctcgagagagtcgttcg

SEQ ID NO: 80022 - DNA, 30 bp, Artificial Sequence
  Synthetic oligonucleotide
gggataatagcgtagactcacggaggttcg

SEQ ID NO: 80023 - DNA, 30 bp, Artificial Sequence
  Synthetic oligonucleotide
aatgcagataatccggcaaaaatcggttcg

SEQ ID NO: 80024 - DNA, 30 bp, Artificial Sequence
  Synthetic oligonucleotide
gtggacgggaataactcccagaagggttcg

SEQ ID NO: 80025 - DNA, 30 bp, Artificial Sequence
  Synthetic oligonucleotide
gagatcgtgaggtgcggaacagtctgttcg

SEQ ID NO: 80026 - DNA, 30 bp, Artificial Sequence
  Synthetic oligonucleotide
caggtaatggaaaatcagtgtaattgttcg

SEQ ID NO: 80027 - DNA, 30 bp, Artificial Sequence
  Synthetic oligonucleotide
cgcgaactatggaaaacggactgactttcg

SEQ ID NO: 80028 - DNA, 30 bp, Artificial Sequence
  Synthetic oligonucleotide
aaaacaaggttccgagtagacctaaaaagg

SEQ ID NO: 80029 - DNA, 30 bp, Artificial Sequence
  Synthetic oligonucleotide
tgataaatacgcaatctcccaactaaaagg

SEQ ID NO: 80030 - DNA, 30 bp, Artificial Sequence
  Synthetic oligonucleotide
cgtaacattgccggtgctaatacgcaaagg

SEQ ID NO: 80031 - DNA, 30 bp, Artificial Sequence
  Synthetic oligonucleotide
cctacgcgtgtggtcccaagacacgaaagg

SEQ ID NO: 80032 - DNA, 30 bp, Artificial Sequence
  Synthetic oligonucleotide
gcatccgaactaacagacacaagggaaagg

SEQ ID NO: 80033 - DNA, 30 bp, Artificial Sequence
  Synthetic oligonucleotide
cggtgattgtactggtggtgttgggaaagg

SEQ ID NO: 80034 - DNA, 30 bp, Artificial Sequence
  Synthetic oligonucleotide
atggtggtagaatattctctagatgaaagg

SEQ ID NO: 80035 - DNA, 30 bp, Artificial Sequence
  Synthetic oligonucleotide
cgaagagtaaccttgggtcaaatctaaagg

SEQ ID NO: 80036 - DNA, 30 bp, Artificial Sequence
  Synthetic oligonucleotide
ggaggcaatggtaggctgacaacttaaagg

SEQ ID NO: 80037 - DNA, 30 bp, Artificial Sequence
  Synthetic oligonucleotide
tgtgagtagttccaaaaaagcgggacaagg

SEQ ID NO: 80038 - DNA, 30 bp, Artificial Sequence
  Synthetic oligonucleotide
ggggacaaacagtgtgtcgcacgtacaagg

SEQ ID NO: 80039 - DNA, 30 bp, Artificial Sequence
  Synthetic oligonucleotide
cacaggatgttcaacctccagtgtacaagg

SEQ ID NO: 80040 - DNA, 30 bp, Artificial Sequence
  Synthetic oligonucleotide
cggtgctgtatcgtggggagagaagcaagg

SEQ ID NO: 80041 - DNA, 30 bp, Artificial Sequence
  Synthetic oligonucleotide
tgatgggcgggcgaatgcgcagtagcaagg

SEQ ID NO: 80042 - DNA, 30 bp, Artificial Sequence
  Synthetic oligonucleotide
aggaagcaattcaatgataaggctgcaagg

SEQ ID NO: 80043 - DNA, 30 bp, Artificial Sequence
  Synthetic oligonucleotide
gccacataggtagcctaagaagcgtcaagg

SEQ ID NO: 80044 - DNA, 30 bp, Artificial Sequence
  Synthetic oligonucleotide
accagacagatcacacaagcctaaagaagg

SEQ ID NO: 80045 - DNA, 30 bp, Artificial Sequence
  Synthetic oligonucleotide
ttcatctcgtggcatacgtaagtaagaagg

SEQ ID NO: 80046 - DNA, 31 bp, Artificial Sequence
  Synthetic oligonucleotide
gcgagtatacgcgtcgtggccccacagaagg

SEQ ID NO: 80047 - DNA, 30 bp, Artificial Sequence
  Synthetic oligonucleotide
aagggagacggggctcaggttccccgaagg

SEQ ID NO: 80048 - DNA, 30 bp, Artificial Sequence
  Synthetic oligonucleotide
tctaactgtattagcgtagacgatcgaagg

SEQ ID NO: 80049 - DNA, 30 bp, Artificial Sequence
  Synthetic oligonucleotide
ctggtgtcgacaaagatagctctcggaagg

SEQ ID NO: 80050 - DNA, 30 bp, Artificial Sequence
  Synthetic oligonucleotide
actcaatcatcagccccataacagggaagg

SEQ ID NO: 80051 - DNA, 30 bp, Artificial Sequence
  Synthetic oligonucleotide
gtcccaaaaccaggtgcaaataactgaagg

SEQ ID NO: 80052 - DNA, 30 bp, Artificial Sequence
  Synthetic oligonucleotide
cgcgtatacaggggcctgattcactgaagg

SEQ ID NO: 80053 - DNA, 30 bp, Artificial Sequence
  Synthetic oligonucleotide
gggggagatcatcatataacgtagtgaagg

SEQ ID NO: 80054 - DNA, 30 bp, Artificial Sequence
  Synthetic oligonucleotide
cctgccaatcagtaaaaggtgcattgaagg

SEQ ID NO: 80055 - DNA, 30 bp, Artificial Sequence
  Synthetic oligonucleotide
tgagaccaatgtgcgacaacttagataagg

SEQ ID NO: 80056 - DNA, 30 bp, Artificial Sequence
  Synthetic oligonucleotide
cggggaaggggtctgcgttctgtgataagg

SEQ ID NO: 80057 - DNA, 30 bp, Artificial Sequence
  Synthetic oligonucleotide
ttgcctagcaatacttgcggagctataagg

SEQ ID NO: 80058 - DNA, 30 bp, Artificial Sequence
  Synthetic oligonucleotide
atcgtcaaaaacagaagactcggtataagg

SEQ ID NO: 80059 - DNA, 30 bp, Artificial Sequence
  Synthetic oligonucleotide
tacgaaatcggaaatttcgacacattaagg

SEQ ID NO: 80060 - DNA, 30 bp, Artificial Sequence
  Synthetic oligonucleotide
tactaagtttgctgccaggtcggattaagg

SEQ ID NO: 80061 - DNA, 30 bp, Artificial Sequence
  Synthetic oligonucleotide
aaccggcctagctaccagtgtaggttaagg

SEQ ID NO: 80062 - DNA, 30 bp, Artificial Sequence
  Synthetic oligonucleotide
actgccacaagtggaatcttgtagaacagg

SEQ ID NO: 80063 - DNA, 30 bp, Artificial Sequence
  Synthetic oligonucleotide
atgggctggccggcgtactccttgaacagg

SEQ ID NO: 80064 - DNA, 30 bp, Artificial Sequence
  Synthetic oligonucleotide
ccgggaattattggaaaatccgcacacagg

SEQ ID NO: 80065 - DNA, 30 bp, Artificial Sequence
  Synthetic oligonucleotide
ataaaagtgtggagtgcgacaagagacagg

SEQ ID NO: 80066 - DNA, 30 bp, Artificial Sequence
  Synthetic oligonucleotide
aggacgtgcctagtatggtggctagacagg

SEQ ID NO: 80067 - DNA, 30 bp, Artificial Sequence
  Synthetic oligonucleotide
gcgaagtggagctgagcggggcatgacagg

SEQ ID NO: 80068 - DNA, 30 bp, Artificial Sequence
  Synthetic oligonucleotide
cggctgtcctgcgtccctgaagtatacagg

SEQ ID NO: 80069 - DNA, 30 bp, Artificial Sequence
  Synthetic oligonucleotide
aagacacaagatctatgggacggttacagg

SEQ ID NO: 80070 - DNA, 30 bp, Artificial Sequence
  Synthetic oligonucleotide
atacatgcattctaggcgccgggaaccagg

SEQ ID NO: 80071 - DNA, 30 bp, Artificial Sequence
  Synthetic oligonucleotide
tccggtagggtggttgttcgcttaaccagg

SEQ ID NO: 80072 - DNA, 30 bp, Artificial Sequence
  Synthetic oligonucleotide
cgtacgatggaataaatcctggccaccagg

SEQ ID NO: 80073 - DNA, 30 bp, Artificial Sequence
  Synthetic oligonucleotide
tctctaagaaacgataaggatttacccagg

SEQ ID NO: 80074 - DNA, 30 bp, Artificial Sequence
  Synthetic oligonucleotide
taaaaacttcgtacatacgcaagtgccagg

SEQ ID NO: 80075 - DNA, 30 bp, Artificial Sequence
  Synthetic oligonucleotide
acgaaaggagtaaaagttgtttaatccagg

SEQ ID NO: 80076 - DNA, 30 bp, Artificial Sequence
  Synthetic oligonucleotide
ccgcaacaactctaggccaacggatccagg

SEQ ID NO: 80077 - DNA, 30 bp, Artificial Sequence
  Synthetic oligonucleotide
gggcaaaatagctggccggaatattccagg

SEQ ID NO: 80078 - DNA, 30 bp, Artificial Sequence
  Synthetic oligonucleotide
cgacaagtttatatgcactgtgcaagcagg

SEQ ID NO: 80079 - DNA, 30 bp, Artificial Sequence
  Synthetic oligonucleotide
agacattggcgatatggtaagggcggcagg

SEQ ID NO: 80080 - DNA, 30 bp, Artificial Sequence
  Synthetic oligonucleotide
gggtcactcagagtgtccagtcgtggcagg

SEQ ID NO: 80081 - DNA, 30 bp, Artificial Sequence
  Synthetic oligonucleotide
ataacgttcgcgcggttagcccaatgcagg

SEQ ID NO: 80082 - DNA, 30 bp, Artificial Sequence
  Synthetic oligonucleotide
cccatggaacgaaccggagaacaaatcagg

SEQ ID NO: 80083 - DNA, 30 bp, Artificial Sequence
  Synthetic oligonucleotide
gacatgacgacgggaagagaacggatcagg

SEQ ID NO: 80084 - DNA, 30 bp, Artificial Sequence
  Synthetic oligonucleotide
gaagatacaatgcgagggtcgcaactcagg

SEQ ID NO: 80085 - DNA, 30 bp, Artificial Sequence
  Synthetic oligonucleotide
gaggtgtagtaaaggggttacatgctcagg

SEQ ID NO: 80086 - DNA, 30 bp, Artificial Sequence
  Synthetic oligonucleotide
tcgagtaatatcgagacggtcgctctcagg

SEQ ID NO: 80087 - DNA, 30 bp, Artificial Sequence
  Synthetic oligonucleotide
acaagaaattgtctgtaaaacacagtcagg

SEQ ID NO: 80088 - DNA, 30 bp, Artificial Sequence
  Synthetic oligonucleotide
ttaacacacagcggagttccgctcgtcagg

SEQ ID NO: 80089 - DNA, 31 bp, Artificial Sequence
  Synthetic oligonucleotide
ggcaaagagtgtgaggttgttctaattcagg

SEQ ID NO: 80090 - DNA, 30 bp, Artificial Sequence
  Synthetic oligonucleotide
ggcatacgtcatacagttccgcccttcagg

SEQ ID NO: 80091 - DNA, 30 bp, Artificial Sequence
  Synthetic oligonucleotide
gttggcttccgtgctgccgactttttcagg

SEQ ID NO: 80092 - DNA, 30 bp, Artificial Sequence
  Synthetic oligonucleotide
cttaaactacgttcggaccgtatacagagg

SEQ ID NO: 80093 - DNA, 30 bp, Artificial Sequence
  Synthetic oligonucleotide
acgtattaaacgtgtttggaatcgcagagg

SEQ ID NO: 80094 - DNA, 30 bp, Artificial Sequence
  Synthetic oligonucleotide
ttaagtcacagcttatcaacgactcagagg

SEQ ID NO: 80095 - DNA, 30 bp, Artificial Sequence
  Synthetic oligonucleotide
tttcgaacaagcaagggcgatgatgagagg

SEQ ID NO: 80096 - DNA, 30 bp, Artificial Sequence
  Synthetic oligonucleotide
tgtgagtctaccagtaggcgaaaatagagg

SEQ ID NO: 80097 - DNA, 30 bp, Artificial Sequence
  Synthetic oligonucleotide
taagattgccttgccaatagatcatagagg

SEQ ID NO: 80098 - DNA, 30 bp, Artificial Sequence
  Synthetic oligonucleotide
ataataaaaatgtcgcaaccagggtagagg

SEQ ID NO: 80099 - DNA, 29 bp, Artificial Sequence
  Synthetic oligonucleotide
ggcctatgtcagtaatgagttcaacgagg

SEQ ID NO: 80100 - DNA, 30 bp, Artificial Sequence
  Synthetic oligonucleotide
taaggtaatcaaagtgtccattgaacgagg

SEQ ID NO: 80101 - DNA, 30 bp, Artificial Sequence
  Synthetic oligonucleotide
acgtagagaaggtataacactcttacgagg

SEQ ID NO: 80102 - DNA, 30 bp, Artificial Sequence
  Synthetic oligonucleotide
agtgcggtctgggagatgtcgtaaccgagg

SEQ ID NO: 80103 - DNA, 30 bp, Artificial Sequence
  Synthetic oligonucleotide
tgaatcatagcaggtgtacgtagaccgagg

SEQ ID NO: 80104 - DNA, 30 bp, Artificial Sequence
  Synthetic oligonucleotide
agaaatctcgccatggctaccgttccgagg

SEQ ID NO: 80105 - DNA, 30 bp, Artificial Sequence
  Synthetic oligonucleotide
ggcacgtacttcctgattctagtcgcgagg

SEQ ID NO: 80106 - DNA, 30 bp, Artificial Sequence
  Synthetic oligonucleotide
cctgaggctaatcgaaaggtgtcggcgagg

SEQ ID NO: 80107 - DNA, 30 bp, Artificial Sequence
  Synthetic oligonucleotide
acctgcggacctaaacgagactatgcgagg

SEQ ID NO: 80108 - DNA, 30 bp, Artificial Sequence
  Synthetic oligonucleotide
gccaatgacaatctcttcaatgattcgagg

SEQ ID NO: 80109 - DNA, 30 bp, Artificial Sequence
  Synthetic oligonucleotide
gtgaacgtctggtgcaatcaaataaggagg

SEQ ID NO: 80110 - DNA, 30 bp, Artificial Sequence
  Synthetic oligonucleotide
gggggaactctaaagaccctctggaggagg

SEQ ID NO: 80111 - DNA, 30 bp, Artificial Sequence
  Synthetic oligonucleotide
gtgatagacatgggcaggtaagttaggagg

SEQ ID NO: 80112 - DNA, 30 bp, Artificial Sequence
  Synthetic oligonucleotide
cacagaattggcaacgtaaaagcacggagg

SEQ ID NO: 80113 - DNA, 30 bp, Artificial Sequence
  Synthetic oligonucleotide
agtaagagatgaaggtctacgcgatggagg

SEQ ID NO: 80114 - DNA, 30 bp, Artificial Sequence
  Synthetic oligonucleotide
agggaacaaatctatatcaattcctggagg

SEQ ID NO: 80115 - DNA, 30 bp, Artificial Sequence
  Synthetic oligonucleotide
agtaacacagtggcggcgaagaagtggagg

SEQ ID NO: 80116 - DNA, 30 bp, Artificial Sequence
  Synthetic oligonucleotide
gtccctataaaaaggactgagaagtggagg

SEQ ID NO: 80117 - DNA, 30 bp, Artificial Sequence
  Synthetic oligonucleotide
atggccgaccagtaaaaagggaagtggagg

SEQ ID NO: 80118 - DNA, 30 bp, Artificial Sequence
  Synthetic oligonucleotide
ggattacaggacgtcaggggagattggagg

SEQ ID NO: 80119 - DNA, 30 bp, Artificial Sequence
  Synthetic oligonucleotide
aaacggttcctagttccggatagttggagg

SEQ ID NO: 80120 - DNA, 30 bp, Artificial Sequence
  Synthetic oligonucleotide
aacccgcgtgatgatgaaggggcgatgagg

SEQ ID NO: 80121 - DNA, 30 bp, Artificial Sequence
  Synthetic oligonucleotide
ttgtgaggaaaatcggtgcttggagtgagg

SEQ ID NO: 80122 - DNA, 30 bp, Artificial Sequence
  Synthetic oligonucleotide
tatcgcctcgagtctaacagaaccgtgagg

SEQ ID NO: 80123 - DNA, 30 bp, Artificial Sequence
  Synthetic oligonucleotide
catactccagacttagagatggaaaatagg

SEQ ID NO: 80124 - DNA, 30 bp, Artificial Sequence
  Synthetic oligonucleotide
aggggtgaattagtttgaggcgagcatagg

SEQ ID NO: 80125 - DNA, 30 bp, Artificial Sequence
  Synthetic oligonucleotide
agaagtaactcgctaacaaatatcgatagg

SEQ ID NO: 80126 - DNA, 30 bp, Artificial Sequence
  Synthetic oligonucleotide
ggcttaaataagtctcctgccttggatagg

SEQ ID NO: 80127 - DNA, 30 bp, Artificial Sequence
  Synthetic oligonucleotide
aatagcacaacgaaattggtgtggtatagg

SEQ ID NO: 80128 - DNA, 30 bp, Artificial Sequence
  Synthetic oligonucleotide
tcaggtccatattgagaagttccttatagg

SEQ ID NO: 80129 - DNA, 30 bp, Artificial Sequence
  Synthetic oligonucleotide
cagactcgcctaatgtcctctagcactagg

SEQ ID NO: 80130 - DNA, 30 bp, Artificial Sequence
  Synthetic oligonucleotide
tagggcagtataagagtatgatttactagg

SEQ ID NO: 80131 - DNA, 30 bp, Artificial Sequence
  Synthetic oligonucleotide
attcaaactacaacatcttgaaaagctagg

SEQ ID NO: 80132 - DNA, 30 bp, Artificial Sequence
  Synthetic oligonucleotide
atagggccgccaatccagattaaagctagg

SEQ ID NO: 80133 - DNA, 30 bp, Artificial Sequence
  Synthetic oligonucleotide
tgcgggctactggccagtgagcatgctagg

SEQ ID NO: 80134 - DNA, 30 bp, Artificial Sequence
  Synthetic oligonucleotide
agtaaaatacctgttaagggctgaagtagg

SEQ ID NO: 80135 - DNA, 30 bp, Artificial Sequence
  Synthetic oligonucleotide
cgtcgctatgtggcgggatcagtgagtagg

SEQ ID NO: 80136 - DNA, 30 bp, Artificial Sequence
  Synthetic oligonucleotide
tgataagaggatgaggtccgaaaacgtagg

SEQ ID NO: 80137 - DNA, 30 bp, Artificial Sequence
  Synthetic oligonucleotide
cacgacgttcatcttagcatctcacgtagg

SEQ ID NO: 80138 - DNA, 30 bp, Artificial Sequence
  Synthetic oligonucleotide
cggaaccataaataaacgagttgccgtagg

SEQ ID NO: 80139 - DNA, 30 bp, Artificial Sequence
  Synthetic oligonucleotide
caggagtgaaacctctcgcatgggcgtagg

SEQ ID NO: 80140 - DNA, 30 bp, Artificial Sequence
  Synthetic oligonucleotide
aagtgcgggtctgatcggcaaattcgtagg

SEQ ID NO: 80141 - DNA, 30 bp, Artificial Sequence
  Synthetic oligonucleotide
gtcggggggacacgaacatcacttcgtagg

SEQ ID NO: 80142 - DNA, 30 bp, Artificial Sequence
  Synthetic oligonucleotide
aaatgcgaaaggattctcgaacggggtagg

SEQ ID NO: 80143 - DNA, 30 bp, Artificial Sequence
  Synthetic oligonucleotide
cttggttaacagctggctgctcggggtagg

SEQ ID NO: 80144 - DNA, 30 bp, Artificial Sequence
  Synthetic oligonucleotide
aacaggctgactatgcggaagtcgtgtagg

SEQ ID NO: 80145 - DNA, 30 bp, Artificial Sequence
  Synthetic oligonucleotide
cgctcctctgggagagatcaaccttgtagg

SEQ ID NO: 80146 - DNA, 30 bp, Artificial Sequence
  Synthetic oligonucleotide
agggctgcccatagtgtggtgcgttgtagg

SEQ ID NO: 80147 - DNA, 30 bp, Artificial Sequence
  Synthetic oligonucleotide
cagcctggcacttgtgtagccacaattagg

SEQ ID NO: 80148 - DNA, 30 bp, Artificial Sequence
  Synthetic oligonucleotide
caaagatggtgacctaggtacagaattagg

SEQ ID NO: 80149 - DNA, 30 bp, Artificial Sequence
  Synthetic oligonucleotide
aatgaccatcacgcgaagaaattaattagg

SEQ ID NO: 80150 - DNA, 30 bp, Artificial Sequence
  Synthetic oligonucleotide
agcctcagatcttatgtaccacagattagg

SEQ ID NO: 80151 - DNA, 30 bp, Artificial Sequence
  Synthetic oligonucleotide
cgtaggacggatgacttctcgtctattagg

SEQ ID NO: 80152 - DNA, 30 bp, Artificial Sequence
  Synthetic oligonucleotide
atggataaaaggctaagtacataagttagg

SEQ ID NO: 80153 - DNA, 30 bp, Artificial Sequence
  Synthetic oligonucleotide
taagcatgttcgtgaatggtctgcgttagg

SEQ ID NO: 80154 - DNA, 30 bp, Artificial Sequence
  Synthetic oligonucleotide
tgcaatcccagaagacaatcacgggttagg

SEQ ID NO: 80155 - DNA, 30 bp, Artificial Sequence
  Synthetic oligonucleotide
agataaagcgtctagtcatccatggttagg

SEQ ID NO: 80156 - DNA, 30 bp, Artificial Sequence
  Synthetic oligonucleotide
aaaaccgtgttaagggaggacgtgtttagg

SEQ ID NO: 80157 - DNA, 30 bp, Artificial Sequence
  Synthetic oligonucleotide
gatgcctacgatggagattttagtaaacgg

SEQ ID NO: 80158 - DNA, 30 bp, Artificial Sequence
  Synthetic oligonucleotide
acggggccaaatagatgttagggtaaacgg

SEQ ID NO: 80159 - DNA, 30 bp, Artificial Sequence
  Synthetic oligonucleotide
gagctgccaagcgacaaggaagtgcaacgg

SEQ ID NO: 80160 - DNA, 30 bp, Artificial Sequence
  Synthetic oligonucleotide
agcttgggaactatcgtataacaataacgg

SEQ ID NO: 80161 - DNA, 30 bp, Artificial Sequence
  Synthetic oligonucleotide
atgtgaatccggattgttcggttataacgg

SEQ ID NO: 80162 - DNA, 30 bp, Artificial Sequence
  Synthetic oligonucleotide
agggccaaaaagtactggcaaggctaacgg

SEQ ID NO: 80163 - DNA, 30 bp, Artificial Sequence
  Synthetic oligonucleotide
tccaagagaaaaaagagggatgtaccacgg

SEQ ID NO: 80164 - DNA, 30 bp, Artificial Sequence
  Synthetic oligonucleotide
cctgtgtcgaatacagtaacagtaagacgg

SEQ ID NO: 80165 - DNA, 30 bp, Artificial Sequence
  Synthetic oligonucleotide
cacgatcaggcagcaggaggcgacagacgg

SEQ ID NO: 80166 - DNA, 30 bp, Artificial Sequence
  Synthetic oligonucleotide
ggaaagccaatctagggacgcccgcgacgg

SEQ ID NO: 80167 - DNA, 30 bp, Artificial Sequence
  Synthetic oligonucleotide
tccggcgaagtcgggagagccaatcgacgg

SEQ ID NO: 80168 - DNA, 30 bp, Artificial Sequence
  Synthetic oligonucleotide
agcaggctttagcgaggaaagctaatacgg

SEQ ID NO: 80169 - DNA, 30 bp, Artificial Sequence
  Synthetic oligonucleotide
tgattggacattctatcggaaagagtacgg

SEQ ID NO: 80170 - DNA, 30 bp, Artificial Sequence
  Synthetic oligonucleotide
cgggagccgggcaaacgccaaatagtacgg

SEQ ID NO: 80171 - DNA, 30 bp, Artificial Sequence
  Synthetic oligonucleotide
cagtagtttgtgtcggtagggatagaccgg

SEQ ID NO: 80172 - DNA, 30 bp, Artificial Sequence
  Synthetic oligonucleotide
actcgtggaaattgacctttaagcgaccgg

SEQ ID NO: 80173 - DNA, 30 bp, Artificial Sequence
  Synthetic oligonucleotide
ggcagctataagcgccaactcaatgaccgg

SEQ ID NO: 80174 - DNA, 30 bp, Artificial Sequence
  Synthetic oligonucleotide
cccggtgctggacgaaaaggatcaacccgg

SEQ ID NO: 80175 - DNA, 30 bp, Artificial Sequence
  Synthetic oligonucleotide
gggaaaataacggagatgcgaccaccccgg

SEQ ID NO: 80176 - DNA, 30 bp, Artificial Sequence
  Synthetic oligonucleotide
aacaaggtagctgcttagggaatgccccgg

SEQ ID NO: 80177 - DNA, 30 bp, Artificial Sequence
  Synthetic oligonucleotide
agcggaaaacgggattaaaacactccccgg

SEQ ID NO: 80178 - DNA, 30 bp, Artificial Sequence
  Synthetic oligonucleotide
gcgaggatagggtgagttttgttcgcccgg

SEQ ID NO: 80179 - DNA, 30 bp, Artificial Sequence
  Synthetic oligonucleotide
ataagggatgacacaagtaaccatgcccgg

SEQ ID NO: 80180 - DNA, 30 bp, Artificial Sequence
  Synthetic oligonucleotide
gctcgaagagagcacaaagacacctcccgg

SEQ ID NO: 80181 - DNA, 30 bp, Artificial Sequence
  Synthetic oligonucleotide
acgcagtgaattgaacaactgacaagccgg

SEQ ID NO: 80182 - DNA, 30 bp, Artificial Sequence
  Synthetic oligonucleotide
ctccgaaaaaacctggccaagtgaagccgg

SEQ ID NO: 80183 - DNA, 30 bp, Artificial Sequence
  Synthetic oligonucleotide
atggtagatcgttctagtctcgtgcgccgg

SEQ ID NO: 80184 - DNA, 30 bp, Artificial Sequence
  Synthetic oligonucleotide
atggtcagaaacgtgtctgctcacggccgg

SEQ ID NO: 80185 - DNA, 30 bp, Artificial Sequence
  Synthetic oligonucleotide
tagcgggttgagttagctccaacgggccgg

SEQ ID NO: 80186 - DNA, 30 bp, Artificial Sequence
  Synthetic oligonucleotide
tgtgttacattagatccactggctggccgg

SEQ ID NO: 80187 - DNA, 30 bp, Artificial Sequence
  Synthetic oligonucleotide
cggcacgccagagtcgagtacagctgccgg

SEQ ID NO: 80188 - DNA, 30 bp, Artificial Sequence
  Synthetic oligonucleotide
agatcaactgcgctctacgacgtcctccgg

SEQ ID NO: 80189 - DNA, 30 bp, Artificial Sequence
  Synthetic oligonucleotide
taaagacgatccacttggttgtgtctccgg

SEQ ID NO: 80190 - DNA, 30 bp, Artificial Sequence
  Synthetic oligonucleotide
aggagatctagagaatccgcctttctccgg

SEQ ID NO: 80191 - DNA, 30 bp, Artificial Sequence
  Synthetic oligonucleotide
atattaagttccgttgatcgacccgtccgg

SEQ ID NO: 80192 - DNA, 30 bp, Artificial Sequence
  Synthetic oligonucleotide
cttccgcatagaatggtctggggattccgg

SEQ ID NO: 80193 - DNA, 30 bp, Artificial Sequence
  Synthetic oligonucleotide
aatcgagcgacatatcctatcagcaagcgg

SEQ ID NO: 80194 - DNA, 30 bp, Artificial Sequence
  Synthetic oligonucleotide
cctgaattaaggacgtgggtgaataagcgg

SEQ ID NO: 80195 - DNA, 30 bp, Artificial Sequence
  Synthetic oligonucleotide
ggtacgagaaccttttacctttcacagcgg

SEQ ID NO: 80196 - DNA, 30 bp, Artificial Sequence
  Synthetic oligonucleotide
ggtaatataaccatgacgtgccgacagcgg

SEQ ID NO: 80197 - DNA, 30 bp, Artificial Sequence
  Synthetic oligonucleotide
acgaaaagcatgctatggagttgccagcgg

SEQ ID NO: 80198 - DNA, 30 bp, Artificial Sequence
  Synthetic oligonucleotide
agtaacaggccacgtgctaatgctcagcgg

SEQ ID NO: 80199 - DNA, 30 bp, Artificial Sequence
  Synthetic oligonucleotide
tgtccggtcactggcgtgctaatcgagcgg

SEQ ID NO: 80200 - DNA, 30 bp, Artificial Sequence
  Synthetic oligonucleotide
ccggtgtccctcatgagagaagttgagcgg

SEQ ID NO: 80201 - DNA, 30 bp, Artificial Sequence
  Synthetic oligonucleotide
ctcaggatcgggtagacgagagaaacgcgg

SEQ ID NO: 80202 - DNA, 30 bp, Artificial Sequence
  Synthetic oligonucleotide
cgtaccaatagggagtctatggtcccgcgg

SEQ ID NO: 80203 - DNA, 30 bp, Artificial Sequence
  Synthetic oligonucleotide
atgttagctaacttagtctcatgcgcgcgg

SEQ ID NO: 80204 - DNA, 30 bp, Artificial Sequence
  Synthetic oligonucleotide
gctatgaatgtcgaaggaactaagtcgcgg

SEQ ID NO: 80205 - DNA, 30 bp, Artificial Sequence
  Synthetic oligonucleotide
tccaccgtgtaagagtcacagcagtcgcgg

SEQ ID NO: 80206 - DNA, 31 bp, Artificial Sequence
  Synthetic oligonucleotide
gtaagggtccaaagcggatattacgaggcgg

SEQ ID NO: 80207 - DNA, 30 bp, Artificial Sequence
  Synthetic oligonucleotide
acgctacactaaggggtatacagacggcgg

SEQ ID NO: 80208 - DNA, 30 bp, Artificial Sequence
  Synthetic oligonucleotide
tgcccagtaccgcttcaagagtgccggcgg

SEQ ID NO: 80209 - DNA, 30 bp, Artificial Sequence
  Synthetic oligonucleotide
caaacgtgggacccaaatatcgtcgggcgg

SEQ ID NO: 80210 - DNA, 30 bp, Artificial Sequence
  Synthetic oligonucleotide
gaatgtgctgaagtgggcaacggggggcgg

SEQ ID NO: 80211 - DNA, 30 bp, Artificial Sequence
  Synthetic oligonucleotide
caggacgtgttaccaaacacatgggggcgg

SEQ ID NO: 80212 - DNA, 30 bp, Artificial Sequence
  Synthetic oligonucleotide
aggacttagtcgagtagaaagtattggcgg

SEQ ID NO: 80213 - DNA, 30 bp, Artificial Sequence
  Synthetic oligonucleotide
cagaatagtgcaacgacgtgacggatgcgg

SEQ ID NO: 80214 - DNA, 30 bp, Artificial Sequence
  Synthetic oligonucleotide
agatactggtggtgttaattttgagtgcgg

SEQ ID NO: 80215 - DNA, 30 bp, Artificial Sequence
  Synthetic oligonucleotide
ggcactcgtgcaatgggtaacgctgtgcgg

SEQ ID NO: 80216 - DNA, 30 bp, Artificial Sequence
  Synthetic oligonucleotide
acgtcatatcactagggaaattgattgcgg

SEQ ID NO: 80217 - DNA, 30 bp, Artificial Sequence
  Synthetic oligonucleotide
agcataagaacaaggattcacagcttgcgg

SEQ ID NO: 80218 - DNA, 30 bp, Artificial Sequence
  Synthetic oligonucleotide
gatgatcccatagctgtaaacggtttgcgg

SEQ ID NO: 80219 - DNA, 30 bp, Artificial Sequence
  Synthetic oligonucleotide
gttcgtctccgacaataattaagcaatcgg

SEQ ID NO: 80220 - DNA, 30 bp, Artificial Sequence
  Synthetic oligonucleotide
acgcaagtgtctagagtgcgactcaatcgg

SEQ ID NO: 80221 - DNA, 30 bp, Artificial Sequence
  Synthetic oligonucleotide
cgggattagtcggagaggagcctgaatcgg

SEQ ID NO: 80222 - DNA, 30 bp, Artificial Sequence
  Synthetic oligonucleotide
ggagtagatggagtgccgtcgaaacatcgg

SEQ ID NO: 80223 - DNA, 30 bp, Artificial Sequence
  Synthetic oligonucleotide
tcgacttgatgtcgggatataaaccatcgg

SEQ ID NO: 80224 - DNA, 30 bp, Artificial Sequence
  Synthetic oligonucleotide
ctcagacagcaagagtcggtcgctcatcgg

SEQ ID NO: 80225 - DNA, 30 bp, Artificial Sequence
  Synthetic oligonucleotide
gttagaccacaacaggacgaccaggatcgg

SEQ ID NO: 80226 - DNA, 30 bp, Artificial Sequence
  Synthetic oligonucleotide
ggataagggagtcacccacaataggatcgg

SEQ ID NO: 80227 - DNA, 30 bp, Artificial Sequence
  Synthetic oligonucleotide
acgtaaagtagtaagcctacgagttatcgg

SEQ ID NO: 80228 - DNA, 30 bp, Artificial Sequence
  Synthetic oligonucleotide
caaagaaagcccacggtcgaattgactcgg

SEQ ID NO: 80229 - DNA, 30 bp, Artificial Sequence
  Synthetic oligonucleotide
cttaataagaatccgccatatacgcctcgg

SEQ ID NO: 80230 - DNA, 30 bp, Artificial Sequence
  Synthetic oligonucleotide
gagacctacttgatgttcgctccagctcgg

SEQ ID NO: 80231 - DNA, 30 bp, Artificial Sequence
  Synthetic oligonucleotide
gtaggatgttactaaggacttgccgctcgg

SEQ ID NO: 80232 - DNA, 30 bp, Artificial Sequence
  Synthetic oligonucleotide
taacgtatccacagtagatacactgctcgg

SEQ ID NO: 80233 - DNA, 30 bp, Artificial Sequence
  Synthetic oligonucleotide
cgaagcggggtcgaaagccgtatgtctcgg

SEQ ID NO: 80234 - DNA, 30 bp, Artificial Sequence
  Synthetic oligonucleotide
tagaagtggtcgggggagaaagtgagtcgg

SEQ ID NO: 80235 - DNA, 30 bp, Artificial Sequence
  Synthetic oligonucleotide
atacataagtgggacatggcgtcacgtcgg

SEQ ID NO: 80236 - DNA, 30 bp, Artificial Sequence
  Synthetic oligonucleotide
agttcactaggggtactatagatgcgtcgg

SEQ ID NO: 80237 - DNA, 30 bp, Artificial Sequence
  Synthetic oligonucleotide
ggtatgtacaaaggtactttgctaggtcgg

SEQ ID NO: 80238 - DNA, 30 bp, Artificial Sequence
  Synthetic oligonucleotide
taacttacgggtatcgtgaaagagggtcgg

SEQ ID NO: 80239 - DNA, 30 bp, Artificial Sequence
  Synthetic oligonucleotide
cgtatttggatcaacagctatggatgtcgg

SEQ ID NO: 80240 - DNA, 30 bp, Artificial Sequence
  Synthetic oligonucleotide
tacccgatttgaggccaaaacaagattcgg

SEQ ID NO: 80241 - DNA, 30 bp, Artificial Sequence
  Synthetic oligonucleotide
caatcatcggatttgaacgaagttattcgg

SEQ ID NO: 80242 - DNA, 30 bp, Artificial Sequence
  Synthetic oligonucleotide
gaacactgggcgcggaactactcccttcgg

SEQ ID NO: 80243 - DNA, 30 bp, Artificial Sequence
  Synthetic oligonucleotide
acaacagagatgccgcttgccgtagttcgg

SEQ ID NO: 80244 - DNA, 30 bp, Artificial Sequence
  Synthetic oligonucleotide
ggacagaatgcacgggcggcatagtttcgg

SEQ ID NO: 80245 - DNA, 30 bp, Artificial Sequence
  Synthetic oligonucleotide
cggaacttagtctgactaaggcgcaaaggg

SEQ ID NO: 80246 - DNA, 30 bp, Artificial Sequence
  Synthetic oligonucleotide
atgataattgcttgaactccccgtaaaggg

SEQ ID NO: 80247 - DNA, 30 bp, Artificial Sequence
  Synthetic oligonucleotide
cattcggcatacacttggatgaaggaaggg

SEQ ID NO: 80248 - DNA, 30 bp, Artificial Sequence
  Synthetic oligonucleotide
aaagggatgtagcgccgtgttctggaaggg

SEQ ID NO: 80249 - DNA, 30 bp, Artificial Sequence
  Synthetic oligonucleotide
agaccccacacgatgaccgggtaataaggg

SEQ ID NO: 80250 - DNA, 30 bp, Artificial Sequence
  Synthetic oligonucleotide
ctgagtttctcaaaaacaaggggctaaggg

SEQ ID NO: 80251 - DNA, 30 bp, Artificial Sequence
  Synthetic oligonucleotide
gtggcaatagtccagcacactgggtaaggg

SEQ ID NO: 80252 - DNA, 30 bp, Artificial Sequence
  Synthetic oligonucleotide
ccacaatgataccatgcagggtggtaaggg

SEQ ID NO: 80253 - DNA, 30 bp, Artificial Sequence
  Synthetic oligonucleotide
ggttagaccgtagggtaacgggtgtaaggg

SEQ ID NO: 80254 - DNA, 30 bp, Artificial Sequence
  Synthetic oligonucleotide
ttagaggtcctgatctggccaaccacaggg

SEQ ID NO: 80255 - DNA, 30 bp, Artificial Sequence
  Synthetic oligonucleotide
gacctttgtcgcaacctttcaatcacaggg

SEQ ID NO: 80256 - DNA, 30 bp, Artificial Sequence
  Synthetic oligonucleotide
taagtactccgcctatcaacgataccaggg

SEQ ID NO: 80257 - DNA, 30 bp, Artificial Sequence
  Synthetic oligonucleotide
aataatcgaaggcctgaaacgtcagcaggg

SEQ ID NO: 80258 - DNA, 30 bp, Artificial Sequence
  Synthetic oligonucleotide
taatgaagtatattgaaggagagcgcaggg

SEQ ID NO: 80259 - DNA, 30 bp, Artificial Sequence
  Synthetic oligonucleotide
gtggcagtctgtggaccctcatttgcaggg

SEQ ID NO: 80260 - DNA, 30 bp, Artificial Sequence
  Synthetic oligonucleotide
ccgaattaaataaggtgggtgtactcaggg

SEQ ID NO: 80261 - DNA, 30 bp, Artificial Sequence
  Synthetic oligonucleotide
aaccatcggggatttcaccgtcagtcaggg

SEQ ID NO: 80262 - DNA, 30 bp, Artificial Sequence
  Synthetic oligonucleotide
ccacactcgcaatttagcaagcgtagaggg

SEQ ID NO: 80263 - DNA, 30 bp, Artificial Sequence
  Synthetic oligonucleotide
gaacgcccatgtcaagtgacatttagaggg

SEQ ID NO: 80264 - DNA, 30 bp, Artificial Sequence
  Synthetic oligonucleotide
tacttgggcttgaaagtctaacgccgaggg

SEQ ID NO: 80265 - DNA, 30 bp, Artificial Sequence
  Synthetic oligonucleotide
caggtcaaggccgacggtctactttgaggg

SEQ ID NO: 80266 - DNA, 30 bp, Artificial Sequence
  Synthetic oligonucleotide
ggaataacgtatatgaagacgaaaataggg

SEQ ID NO: 80267 - DNA, 30 bp, Artificial Sequence
  Synthetic oligonucleotide
gtggcattgtgggcactcgtccttataggg

SEQ ID NO: 80268 - DNA, 30 bp, Artificial Sequence
  Synthetic oligonucleotide
ggggcataggatcagccaactctcctaggg

SEQ ID NO: 80269 - DNA, 30 bp, Artificial Sequence
  Synthetic oligonucleotide
gttggacgcgacgaggcaatgtagctaggg

SEQ ID NO: 80270 - DNA, 30 bp, Artificial Sequence
  Synthetic oligonucleotide
cacaggcgcggagcggtatgtctcgtaggg

SEQ ID NO: 80271 - DNA, 30 bp, Artificial Sequence
  Synthetic oligonucleotide
agatgggctatactgggctcaaaggtaggg

SEQ ID NO: 80272 - DNA, 30 bp, Artificial Sequence
  Synthetic oligonucleotide
ggtacgtgttaaaatctaagaagattaggg

SEQ ID NO: 80273 - DNA, 30 bp, Artificial Sequence
  Synthetic oligonucleotide
gcagggggaggtccaaacggcttcttaggg

SEQ ID NO: 80274 - DNA, 30 bp, Artificial Sequence
  Synthetic oligonucleotide
catcctgagcgtacgtcacgatcaaacggg

SEQ ID NO: 80275 - DNA, 30 bp, Artificial Sequence
  Synthetic oligonucleotide
ttgccacgaagtaaaaggagcgtacacggg

SEQ ID NO: 80276 - DNA, 30 bp, Artificial Sequence
  Synthetic oligonucleotide
aggataaaggtgtcggcttcgactcacggg

SEQ ID NO: 80277 - DNA, 30 bp, Artificial Sequence
  Synthetic oligonucleotide
agggacttgtctagagactcaaatgacggg

SEQ ID NO: 80278 - DNA, 30 bp, Artificial Sequence
  Synthetic oligonucleotide
agccaactcccggtcagcctcaaatacggg

SEQ ID NO: 80279 - DNA, 30 bp, Artificial Sequence
  Synthetic oligonucleotide
caccggatgatcttcgaacgcccctacggg

SEQ ID NO: 80280 - DNA, 30 bp, Artificial Sequence
  Synthetic oligonucleotide
cgacggttgaagtgtcaatcccattacggg

SEQ ID NO: 80281 - DNA, 30 bp, Artificial Sequence
  Synthetic oligonucleotide
ggtgcgtcgttacccttggaagtttacggg

SEQ ID NO: 80282 - DNA, 30 bp, Artificial Sequence
  Synthetic oligonucleotide
gacacaaagcgcgacagcgaaagaaccggg

SEQ ID NO: 80283 - DNA, 30 bp, Artificial Sequence
  Synthetic oligonucleotide
gagcatacgaccgggatggcgttgaccggg

SEQ ID NO: 80284 - DNA, 30 bp, Artificial Sequence
  Synthetic oligonucleotide
aaatgacgagataatttataccagcccggg

SEQ ID NO: 80285 - DNA, 30 bp, Artificial Sequence
  Synthetic oligonucleotide
cgatcggatgctcaagggacatagcccggg

SEQ ID NO: 80286 - DNA, 30 bp, Artificial Sequence
  Synthetic oligonucleotide
gaggtgcacaatcgccattgaccatccggg

SEQ ID NO: 80287 - DNA, 30 bp, Artificial Sequence
  Synthetic oligonucleotide
ctgtagttcgcgacctgcatgtgatccggg

SEQ ID NO: 80288 - DNA, 30 bp, Artificial Sequence
  Synthetic oligonucleotide
ggtccagttagcttgagataggcttccggg

SEQ ID NO: 80289 - DNA, 30 bp, Artificial Sequence
  Synthetic oligonucleotide
gggcaggggccagcgaaacccaaaagcggg

SEQ ID NO: 80290 - DNA, 30 bp, Artificial Sequence
  Synthetic oligonucleotide
acggacctacctggaccaatggaaagcggg

SEQ ID NO: 80291 - DNA, 30 bp, Artificial Sequence
  Synthetic oligonucleotide
ccggctcgtcccggcacgaaacccagcggg

SEQ ID NO: 80292 - DNA, 31 bp, Artificial Sequence
  Synthetic oligonucleotide
aaggcgctttggcggaatataatgcagcggg

SEQ ID NO: 80293 - DNA, 30 bp, Artificial Sequence
  Synthetic oligonucleotide
tcagttgacgtcgaatataacgctagcggg

SEQ ID NO: 80294 - DNA, 30 bp, Artificial Sequence
  Synthetic oligonucleotide
agtataaaagaaataataacattacgcggg

SEQ ID NO: 80295 - DNA, 30 bp, Artificial Sequence
  Synthetic oligonucleotide
gcttccgaggcatgtggaaacaatcgcggg

SEQ ID NO: 80296 - DNA, 30 bp, Artificial Sequence
  Synthetic oligonucleotide
tgttaagcgggtaatacggaaagaggcggg

SEQ ID NO: 80297 - DNA, 30 bp, Artificial Sequence
  Synthetic oligonucleotide
cgcatttaatccctttcatcatccggcggg

SEQ ID NO: 80298 - DNA, 30 bp, Artificial Sequence
  Synthetic oligonucleotide
agagacaacggcctgcgcgtgtgtggcggg

SEQ ID NO: 80299 - DNA, 30 bp, Artificial Sequence
  Synthetic oligonucleotide
cgacttttttgggatgaatgtacatgcggg

SEQ ID NO: 80300 - DNA, 30 bp, Artificial Sequence
  Synthetic oligonucleotide
ggcaagtagcgtggcagagaattaatcggg

SEQ ID NO: 80301 - DNA, 30 bp, Artificial Sequence
  Synthetic oligonucleotide
tgggtgccgggagattacagtgtcatcggg

SEQ ID NO: 80302 - DNA, 30 bp, Artificial Sequence
  Synthetic oligonucleotide
cgacagaggcgccttgcagctattctcggg

SEQ ID NO: 80303 - DNA, 30 bp, Artificial Sequence
  Synthetic oligonucleotide
ttatgcgcatctaggtggacttcaaagggg

SEQ ID NO: 80304 - DNA, 30 bp, Artificial Sequence
  Synthetic oligonucleotide
tcaagtagtgagtcccgcgttagcaagggg

SEQ ID NO: 80305 - DNA, 30 bp, Artificial Sequence
  Synthetic oligonucleotide
tctgcagtgtgaataggcccaaagaagggg

SEQ ID NO: 80306 - DNA, 30 bp, Artificial Sequence
  Synthetic oligonucleotide
tacccagcgcgtacaagtgttatgaagggg

SEQ ID NO: 80307 - DNA, 30 bp, Artificial Sequence
  Synthetic oligonucleotide
tttgcaaggttagcgtaacagaataagggg

SEQ ID NO: 80308 - DNA, 30 bp, Artificial Sequence
  Synthetic oligonucleotide
agtgccatcttataaatcaggtatcagggg

SEQ ID NO: 80309 - DNA, 30 bp, Artificial Sequence
  Synthetic oligonucleotide
ctgtagtacatagccaggttcggcgagggg

SEQ ID NO: 80310 - DNA, 30 bp, Artificial Sequence
  Synthetic oligonucleotide
aggcgggttggcgctgtggtatgggagggg

SEQ ID NO: 80311 - DNA, 30 bp, Artificial Sequence
  Synthetic oligonucleotide
cggcagccagaagaggatctgtgggagggg

SEQ ID NO: 80312 - DNA, 30 bp, Artificial Sequence
  Synthetic oligonucleotide
gcgcgccgtgacgaactcactcttgagggg

SEQ ID NO: 80313 - DNA, 30 bp, Artificial Sequence
  Synthetic oligonucleotide
cattgaggccaaccttttagaagatagggg

SEQ ID NO: 80314 - DNA, 30 bp, Artificial Sequence
  Synthetic oligonucleotide
cacgtcgtctaggagacaagtatctagggg

SEQ ID NO: 80315 - DNA, 30 bp, Artificial Sequence
  Synthetic oligonucleotide
gggttaagctgtcttgcccgcaatacgggg

SEQ ID NO: 80316 - DNA, 30 bp, Artificial Sequence
  Synthetic oligonucleotide
ctccaattgaatgcaagtaggcaggcgggg

SEQ ID NO: 80317 - DNA, 31 bp, Artificial Sequence
  Synthetic oligonucleotide
actgcgaggatttacgagggaaggtgcgggg

SEQ ID NO: 80318 - DNA, 30 bp, Artificial Sequence
  Synthetic oligonucleotide
gtattggagccagtgagggttgaatcgggg

SEQ ID NO: 80319 - DNA, 30 bp, Artificial Sequence
  Synthetic oligonucleotide
gtgccctacacgcataacgtatgatcgggg

SEQ ID NO: 80320 - DNA, 30 bp, Artificial Sequence
  Synthetic oligonucleotide
ttacgcatattcaagagtctgagtcggggg

SEQ ID NO: 80321 - DNA, 30 bp, Artificial Sequence
  Synthetic oligonucleotide
atgtcgaggcaaaccatgggggagtggggg

SEQ ID NO: 80322 - DNA, 30 bp, Artificial Sequence
  Synthetic oligonucleotide
ccgaatgctagagaagatgtgttgtggggg

SEQ ID NO: 80323 - DNA, 30 bp, Artificial Sequence
  Synthetic oligonucleotide
catggtataacgcgagcgagagacatgggg

SEQ ID NO: 80324 - DNA, 30 bp, Artificial Sequence
  Synthetic oligonucleotide
cagattagacaggcagttggcgacctgggg

SEQ ID NO: 80325 - DNA, 30 bp, Artificial Sequence
  Synthetic oligonucleotide
ctgatgccttgatactatagactcctgggg

SEQ ID NO: 80326 - DNA, 29 bp, Artificial Sequence
  Synthetic oligonucleotide
catcaagttgaacgacagacgtggtgggg

SEQ ID NO: 80327 - DNA, 30 bp, Artificial Sequence
  Synthetic oligonucleotide
cggggatattggaatgcgctgcctgtgggg

SEQ ID NO: 80328 - DNA, 30 bp, Artificial Sequence
  Synthetic oligonucleotide
cacgagttaccgcggaagtacacattgggg

SEQ ID NO: 80329 - DNA, 30 bp, Artificial Sequence
  Synthetic oligonucleotide
cgaatcagtatggtccggtaataaaatggg

SEQ ID NO: 80330 - DNA, 30 bp, Artificial Sequence
  Synthetic oligonucleotide
tttagtctgagagaagacatactcaatggg

SEQ ID NO: 80331 - DNA, 30 bp, Artificial Sequence
  Synthetic oligonucleotide
ttcccttacgacaggggttcaaagaatggg

SEQ ID NO: 80332 - DNA, 30 bp, Artificial Sequence
  Synthetic oligonucleotide
cagccgggccgtaggcaacaccataatggg

SEQ ID NO: 80333 - DNA, 30 bp, Artificial Sequence
  Synthetic oligonucleotide
gtactcgacgtaataaaagtccttaatggg

SEQ ID NO: 80334 - DNA, 30 bp, Artificial Sequence
  Synthetic oligonucleotide
gcggttacttctcacaggctcgaacatggg

SEQ ID NO: 80335 - DNA, 31 bp, Artificial Sequence
  Synthetic oligonucleotide
acgagcagggaaaaattcacgcagccatggg

SEQ ID NO: 80336 - DNA, 30 bp, Artificial Sequence
  Synthetic oligonucleotide
taggaccctaattcgctgttagtccatggg

SEQ ID NO: 80337 - DNA, 30 bp, Artificial Sequence
  Synthetic oligonucleotide
aagttcaattttacatactaactgcatggg

SEQ ID NO: 80338 - DNA, 30 bp, Artificial Sequence
  Synthetic oligonucleotide
cactaacaggtcactcctgtacgtcatggg

SEQ ID NO: 80339 - DNA, 30 bp, Artificial Sequence
  Synthetic oligonucleotide
tcagacgacgctccggaaaaggtagatggg

SEQ ID NO: 80340 - DNA, 30 bp, Artificial Sequence
  Synthetic oligonucleotide
tccttgttcaagtacagccgatgggatggg

SEQ ID NO: 80341 - DNA, 30 bp, Artificial Sequence
  Synthetic oligonucleotide
ttgtggatcggtcaaacctttgtttatggg

SEQ ID NO: 80342 - DNA, 30 bp, Artificial Sequence
  Synthetic oligonucleotide
aggacttgtattacacgagggtacactggg

SEQ ID NO: 80343 - DNA, 30 bp, Artificial Sequence
  Synthetic oligonucleotide
aagtcgaatatagttgcctaccggcctggg

SEQ ID NO: 80344 - DNA, 30 bp, Artificial Sequence
  Synthetic oligonucleotide
tcttgagataaaatgttcctgagtcctggg

SEQ ID NO: 80345 - DNA, 30 bp, Artificial Sequence
  Synthetic oligonucleotide
agctgtaagagctacgaaagtcgtcctggg

SEQ ID NO: 80346 - DNA, 30 bp, Artificial Sequence
  Synthetic oligonucleotide
caggcacacgggcccaggaaccatgctggg

SEQ ID NO: 80347 - DNA, 30 bp, Artificial Sequence
  Synthetic oligonucleotide
caagggaggtatgtcattaagggatctggg

SEQ ID NO: 80348 - DNA, 30 bp, Artificial Sequence
  Synthetic oligonucleotide
gctaccaaatcaggtttacggatgtctggg

SEQ ID NO: 80349 - DNA, 30 bp, Artificial Sequence
  Synthetic oligonucleotide
acgtcttggtcggagtcctggagttctggg

SEQ ID NO: 80350 - DNA, 30 bp, Artificial Sequence
  Synthetic oligonucleotide
cgccgtttgatcgcacgattatgttctggg

SEQ ID NO: 80351 - DNA, 30 bp, Artificial Sequence
  Synthetic oligonucleotide
ccggcccatatccataaaattctaagtggg

SEQ ID NO: 80352 - DNA, 30 bp, Artificial Sequence
  Synthetic oligonucleotide
acatgatctcatcattctgggcaaggtggg

SEQ ID NO: 80353 - DNA, 30 bp, Artificial Sequence
  Synthetic oligonucleotide
ggtacatacccaagccaaacctggggtggg

SEQ ID NO: 80354 - DNA, 30 bp, Artificial Sequence
  Synthetic oligonucleotide
cggaaagtcctgaggggatattggggtggg

SEQ ID NO: 80355 - DNA, 30 bp, Artificial Sequence
  Synthetic oligonucleotide
cggctgacattcgcccgaacttggggtggg

SEQ ID NO: 80356 - DNA, 30 bp, Artificial Sequence
  Synthetic oligonucleotide
tggtaatcgtgggcaaagtcgtttggtggg

SEQ ID NO: 80357 - DNA, 30 bp, Artificial Sequence
  Synthetic oligonucleotide
ccactagagtatttgctccgggaatgtggg

SEQ ID NO: 80358 - DNA, 30 bp, Artificial Sequence
  Synthetic oligonucleotide
gtgcagtaacttgcactacagatttgtggg

SEQ ID NO: 80359 - DNA, 30 bp, Artificial Sequence
  Synthetic oligonucleotide
ctcatggaatctcggtcgaagggcattggg

SEQ ID NO: 80360 - DNA, 30 bp, Artificial Sequence
  Synthetic oligonucleotide
ctgggttcataccggaagaccaggattggg

SEQ ID NO: 80361 - DNA, 30 bp, Artificial Sequence
  Synthetic oligonucleotide
ggcttatgagactgccgactcaatcttggg

SEQ ID NO: 80362 - DNA, 30 bp, Artificial Sequence
  Synthetic oligonucleotide
agtcactctcggtcagaggaggatcttggg

SEQ ID NO: 80363 - DNA, 30 bp, Artificial Sequence
  Synthetic oligonucleotide
ctgaaacgcaattgtaaacgaaaggttggg

SEQ ID NO: 80364 - DNA, 30 bp, Artificial Sequence
  Synthetic oligonucleotide
gtggtagcttagtaaccttgcggtgttggg

SEQ ID NO: 80365 - DNA, 30 bp, Artificial Sequence
  Synthetic oligonucleotide
aagtacggaaaacaatgcggggaatttggg

SEQ ID NO: 80366 - DNA, 30 bp, Artificial Sequence
  Synthetic oligonucleotide
gagccgtgagagtagtacagattatttggg

SEQ ID NO: 80367 - DNA, 30 bp, Artificial Sequence
  Synthetic oligonucleotide
ttgaaaaacggacctacaatgcgaaaatgg

SEQ ID NO: 80368 - DNA, 30 bp, Artificial Sequence
  Synthetic oligonucleotide
gaagctatgacatccgcggaattgaaatgg

SEQ ID NO: 80369 - DNA, 30 bp, Artificial Sequence
  Synthetic oligonucleotide
gtcgatctgaacccgaacaggaataaatgg

SEQ ID NO: 80370 - DNA, 30 bp, Artificial Sequence
  Synthetic oligonucleotide
catgccagaccgggcctgccaattaaatgg

SEQ ID NO: 80371 - DNA, 30 bp, Artificial Sequence
  Synthetic oligonucleotide
caaggggggagcatgggtggtactcaatgg

SEQ ID NO: 80372 - DNA, 30 bp, Artificial Sequence
  Synthetic oligonucleotide
tcgacacgtatttgtcggggatacgaatgg

SEQ ID NO: 80373 - DNA, 30 bp, Artificial Sequence
  Synthetic oligonucleotide
acattagtatcgggacctctaggcgaatgg

SEQ ID NO: 80374 - DNA, 30 bp, Artificial Sequence
  Synthetic oligonucleotide
acgagacaagataagggtcgacgtgaatgg

SEQ ID NO: 80375 - DNA, 30 bp, Artificial Sequence
  Synthetic oligonucleotide
ggagaataatccattggtacgacctaatgg

SEQ ID NO: 80376 - DNA, 30 bp, Artificial Sequence
  Synthetic oligonucleotide
agtgggctaccagagtgccacaagtaatgg

SEQ ID NO: 80377 - DNA, 30 bp, Artificial Sequence
  Synthetic oligonucleotide
gaaaggatagccgcctaacatggttaatgg

SEQ ID NO: 80378 - DNA, 30 bp, Artificial Sequence
  Synthetic oligonucleotide
ttagttcctcatcaagaggggttaacatgg

SEQ ID NO: 80379 - DNA, 30 bp, Artificial Sequence
  Synthetic oligonucleotide
ccgcagcaaactgcagaagaaagcacatgg

SEQ ID NO: 80380 - DNA, 30 bp, Artificial Sequence
  Synthetic oligonucleotide
ggggtccagagagaacaaattagcacatgg

SEQ ID NO: 80381 - DNA, 30 bp, Artificial Sequence
  Synthetic oligonucleotide
tgacacggattgtaaatcggtcgcacatgg

SEQ ID NO: 80382 - DNA, 30 bp, Artificial Sequence
  Synthetic oligonucleotide
accatacgcataagcctggtggacccatgg

SEQ ID NO: 80383 - DNA, 30 bp, Artificial Sequence
  Synthetic oligonucleotide
tatgcgcgaatgccctactaatatccatgg

SEQ ID NO: 80384 - DNA, 30 bp, Artificial Sequence
  Synthetic oligonucleotide
ggtatttcgatcagcagttgagcgtcatgg

SEQ ID NO: 80385 - DNA, 30 bp, Artificial Sequence
  Synthetic oligonucleotide
ctcaacttagaataacgctcgatgtcatgg

SEQ ID NO: 80386 - DNA, 30 bp, Artificial Sequence
  Synthetic oligonucleotide
ggtgcactaatctgctactcaccgagatgg

SEQ ID NO: 80387 - DNA, 30 bp, Artificial Sequence
  Synthetic oligonucleotide
cgtccatgaaaaattggcatgcgacgatgg

SEQ ID NO: 80388 - DNA, 30 bp, Artificial Sequence
  Synthetic oligonucleotide
cctaacacgactattatccggggacgatgg

SEQ ID NO: 80389 - DNA, 30 bp, Artificial Sequence
  Synthetic oligonucleotide
gtcagccagagatacggtcgcgagcgatgg

SEQ ID NO: 80390 - DNA, 30 bp, Artificial Sequence
  Synthetic oligonucleotide
ggaaagcgtccactatcctaagtaggatgg

SEQ ID NO: 80391 - DNA, 30 bp, Artificial Sequence
  Synthetic oligonucleotide
tctcgggtatagcgataaaattacggatgg

SEQ ID NO: 80392 - DNA, 30 bp, Artificial Sequence
  Synthetic oligonucleotide
cacaaggagctactcgtttatgactgatgg

SEQ ID NO: 80393 - DNA, 30 bp, Artificial Sequence
  Synthetic oligonucleotide
tacggaaccctgaacggaaataagatatgg

SEQ ID NO: 80394 - DNA, 30 bp, Artificial Sequence
  Synthetic oligonucleotide
ataagtgtcaccagtgacaccttgatatgg

SEQ ID NO: 80395 - DNA, 30 bp, Artificial Sequence
  Synthetic oligonucleotide
agatatgtcaaaacgcaggtaagtctatgg

SEQ ID NO: 80396 - DNA, 30 bp, Artificial Sequence
  Synthetic oligonucleotide
tgtggagcggggttagagtaaatggtatgg

SEQ ID NO: 80397 - DNA, 30 bp, Artificial Sequence
  Synthetic oligonucleotide
atgagtagggtatgacacgtcaatttatgg

SEQ ID NO: 80398 - DNA, 30 bp, Artificial Sequence
  Synthetic oligonucleotide
agaaccttcactccaattaggcaagactgg

SEQ ID NO: 80399 - DNA, 30 bp, Artificial Sequence
  Synthetic oligonucleotide
gagcggagatcaggcgactaaagttactgg

SEQ ID NO: 80400 - DNA, 30 bp, Artificial Sequence
  Synthetic oligonucleotide
ccatggatacattcatctatccagacctgg

SEQ ID NO: 80401 - DNA, 30 bp, Artificial Sequence
  Synthetic oligonucleotide
cggacgggggataacaaacctgagccctgg

SEQ ID NO: 80402 - DNA, 30 bp, Artificial Sequence
  Synthetic oligonucleotide
ctcgtataatggtctacttaatcgccctgg

SEQ ID NO: 80403 - DNA, 30 bp, Artificial Sequence
  Synthetic oligonucleotide
gggcgttataagcttatggataagagctgg

SEQ ID NO: 80404 - DNA, 30 bp, Artificial Sequence
  Synthetic oligonucleotide
cacagaacgaatgtcatctacagtcgctgg

SEQ ID NO: 80405 - DNA, 30 bp, Artificial Sequence
  Synthetic oligonucleotide
ccatcacatgtattttccttcattcgctgg

SEQ ID NO: 80406 - DNA, 30 bp, Artificial Sequence
  Synthetic oligonucleotide
aaggaactaaccgagaggccagacggctgg

SEQ ID NO: 80407 - DNA, 30 bp, Artificial Sequence
  Synthetic oligonucleotide
tcagattccccataatcatctaccggctgg

SEQ ID NO: 80408 - DNA, 30 bp, Artificial Sequence
  Synthetic oligonucleotide
cggcatttgagccaccccataccatgctgg

SEQ ID NO: 80409 - DNA, 30 bp, Artificial Sequence
  Synthetic oligonucleotide
cccgagccaaaagcaacaatcgactgctgg

SEQ ID NO: 80410 - DNA, 30 bp, Artificial Sequence
  Synthetic oligonucleotide
agcacgaattatgccgaagagggtatctgg

SEQ ID NO: 80411 - DNA, 30 bp, Artificial Sequence
  Synthetic oligonucleotide
aggacgagaagtttcagccttatactctgg

SEQ ID NO: 80412 - DNA, 30 bp, Artificial Sequence
  Synthetic oligonucleotide
tgagtggaagggcagtccatgttagtctgg

SEQ ID NO: 80413 - DNA, 30 bp, Artificial Sequence
  Synthetic oligonucleotide
taccaaaatgaatacgcgttagtggtctgg

SEQ ID NO: 80414 - DNA, 30 bp, Artificial Sequence
  Synthetic oligonucleotide
tcgtagtgtatgcatggacgtaccttctgg

SEQ ID NO: 80415 - DNA, 30 bp, Artificial Sequence
  Synthetic oligonucleotide
tccctagagcgcgagagtatatgaaagtgg

SEQ ID NO: 80416 - DNA, 30 bp, Artificial Sequence
  Synthetic oligonucleotide
gcatcagcaagttagtgatatctgaagtgg

SEQ ID NO: 80417 - DNA, 30 bp, Artificial Sequence
  Synthetic oligonucleotide
tggcattaagttggagtattaagtaagtgg

SEQ ID NO: 80418 - DNA, 30 bp, Artificial Sequence
  Synthetic oligonucleotide
cagtgccacgtgatacaggtgctccagtgg

SEQ ID NO: 80419 - DNA, 30 bp, Artificial Sequence
  Synthetic oligonucleotide
cgaaagggcaaatcgcgtacagcagagtgg

SEQ ID NO: 80420 - DNA, 30 bp, Artificial Sequence
  Synthetic oligonucleotide
acgtatggggtatagcgcagggatgagtgg

SEQ ID NO: 80421 - DNA, 30 bp, Artificial Sequence
  Synthetic oligonucleotide
acggcccaccgaccagtggctaggtagtgg

SEQ ID NO: 80422 - DNA, 30 bp, Artificial Sequence
  Synthetic oligonucleotide
gtctgggcagtatggaaggaggagccgtgg

SEQ ID NO: 80423 - DNA, 30 bp, Artificial Sequence
  Synthetic oligonucleotide
atcctgaaccagatcaaatcaacgccgtgg

SEQ ID NO: 80424 - DNA, 30 bp, Artificial Sequence
  Synthetic oligonucleotide
tgccagcgtggttctcaagtagtgccgtgg

SEQ ID NO: 80425 - DNA, 30 bp, Artificial Sequence
  Synthetic oligonucleotide
gggacagcgagtgtaaatccgtctccgtgg

SEQ ID NO: 80426 - DNA, 30 bp, Artificial Sequence
  Synthetic oligonucleotide
caagcggaggaccggtacgctcgtccgtgg

SEQ ID NO: 80427 - DNA, 30 bp, Artificial Sequence
  Synthetic oligonucleotide
acgaggtgcaacgtcacatgttccgcgtgg

SEQ ID NO: 80428 - DNA, 30 bp, Artificial Sequence
  Synthetic oligonucleotide
acctaataggtgatccgacgttaggcgtgg

SEQ ID NO: 80429 - DNA, 30 bp, Artificial Sequence
  Synthetic oligonucleotide
cgtcgtagaaggttatctgctgcggcgtgg

SEQ ID NO: 80430 - DNA, 30 bp, Artificial Sequence
  Synthetic oligonucleotide
gtgatgttgcgcataaattaacgttcgtgg

SEQ ID NO: 80431 - DNA, 30 bp, Artificial Sequence
  Synthetic oligonucleotide
agtggttttccgtagtgtgcgagaaggtgg

SEQ ID NO: 80432 - DNA, 30 bp, Artificial Sequence
  Synthetic oligonucleotide
ccgtatatcgtctagccttcgttcaggtgg

SEQ ID NO: 80433 - DNA, 30 bp, Artificial Sequence
  Synthetic oligonucleotide
ggtgggggaattgtggacaaagaggggtgg

SEQ ID NO: 80434 - DNA, 30 bp, Artificial Sequence
  Synthetic oligonucleotide
gtgagctgcgttaaattgtatagtgggtgg

SEQ ID NO: 80435 - DNA, 30 bp, Artificial Sequence
  Synthetic oligonucleotide
agacgtgagtatccaggccacggatggtgg

SEQ ID NO: 80436 - DNA, 30 bp, Artificial Sequence
  Synthetic oligonucleotide
cactaacaaggtgtagctagacacatgtgg

SEQ ID NO: 80437 - DNA, 30 bp, Artificial Sequence
  Synthetic oligonucleotide
gatggttccggcaacaaagttgcgatgtgg

SEQ ID NO: 80438 - DNA, 30 bp, Artificial Sequence
  Synthetic oligonucleotide
tgaaacgagaatcagcgttcatatatgtgg

SEQ ID NO: 80439 - DNA, 30 bp, Artificial Sequence
  Synthetic oligonucleotide
atgcgtgagcctgcttgacatatactgtgg

SEQ ID NO: 80440 - DNA, 30 bp, Artificial Sequence
  Synthetic oligonucleotide
ggcggtcatgggttaaccagaatcctgtgg

SEQ ID NO: 80441 - DNA, 30 bp, Artificial Sequence
  Synthetic oligonucleotide
ggaatgtggggtggttgagcttgtctgtgg

SEQ ID NO: 80442 - DNA, 30 bp, Artificial Sequence
  Synthetic oligonucleotide
gtagaatgacacaggtgttaggatgtgtgg

SEQ ID NO: 80443 - DNA, 30 bp, Artificial Sequence
  Synthetic oligonucleotide
gggagaatgtcgaggatagaagttgtgtgg

SEQ ID NO: 80444 - DNA, 30 bp, Artificial Sequence
  Synthetic oligonucleotide
gcataacagtagaggcgtcttgacttgtgg

SEQ ID NO: 80445 - DNA, 29 bp, Artificial Sequence
  Synthetic oligonucleotide
gaaagcacaaagcaacgctagtaaattgg

SEQ ID NO: 80446 - DNA, 30 bp, Artificial Sequence
  Synthetic oligonucleotide
catgaagggcgacggtgttcacgtaattgg

SEQ ID NO: 80447 - DNA, 31 bp, Artificial Sequence
  Synthetic oligonucleotide
ccctaacccaggtatatttgaagagtattgg

SEQ ID NO: 80448 - DNA, 30 bp, Artificial Sequence
  Synthetic oligonucleotide
ggatggctgtatatagggaaccagacttgg

SEQ ID NO: 80449 - DNA, 30 bp, Artificial Sequence
  Synthetic oligonucleotide
gggatagagctgagtttctgtcacccttgg

SEQ ID NO: 80450 - DNA, 30 bp, Artificial Sequence
  Synthetic oligonucleotide
ctggaattcaggaagtaggaaaagtcttgg

SEQ ID NO: 80451 - DNA, 30 bp, Artificial Sequence
  Synthetic oligonucleotide
ggctcccgttcgttctcacaaataagttgg

SEQ ID NO: 80452 - DNA, 30 bp, Artificial Sequence
  Synthetic oligonucleotide
tggtggtgttactaaataacaggcagttgg

SEQ ID NO: 80453 - DNA, 30 bp, Artificial Sequence
  Synthetic oligonucleotide
acatgcgaatagggtgcgcgcactagttgg

SEQ ID NO: 80454 - DNA, 30 bp, Artificial Sequence
  Synthetic oligonucleotide
tctcgccgagaaaaggtgccagtacgttgg

SEQ ID NO: 80455 - DNA, 30 bp, Artificial Sequence
  Synthetic oligonucleotide
tgattcggagaagtcggcacggttcgttgg

SEQ ID NO: 80456 - DNA, 30 bp, Artificial Sequence
  Synthetic oligonucleotide
gggacggacgaaacgcggatgacaggttgg

SEQ ID NO: 80457 - DNA, 30 bp, Artificial Sequence
  Synthetic oligonucleotide
caggtgtttggcgagacttgaacgggttgg

SEQ ID NO: 80458 - DNA, 30 bp, Artificial Sequence
  Synthetic oligonucleotide
aatggtggcgatgcggcgcagattggttgg

SEQ ID NO: 80459 - DNA, 30 bp, Artificial Sequence
  Synthetic oligonucleotide
aagacagcggtatcggggtggttctgttgg

SEQ ID NO: 80460 - DNA, 30 bp, Artificial Sequence
  Synthetic oligonucleotide
aggagtcataacaggggtaatcagtgttgg

SEQ ID NO: 80461 - DNA, 30 bp, Artificial Sequence
  Synthetic oligonucleotide
acacaaccggtgtacaggtacaattgttgg

SEQ ID NO: 80462 - DNA, 30 bp, Artificial Sequence
  Synthetic oligonucleotide
ccacatgaagcaacgggtggttacctttgg

SEQ ID NO: 80463 - DNA, 30 bp, Artificial Sequence
  Synthetic oligonucleotide
gtaacagtatcgaacggccaccggctttgg

SEQ ID NO: 80464 - DNA, 30 bp, Artificial Sequence
  Synthetic oligonucleotide
ggtcagtagatgataattagaggggtttgg

SEQ ID NO: 80465 - DNA, 30 bp, Artificial Sequence
  Synthetic oligonucleotide
taaggagagccagcagaattaatggtttgg

SEQ ID NO: 80466 - DNA, 30 bp, Artificial Sequence
  Synthetic oligonucleotide
gtgtgaaaggacggaattagtatggtttgg

SEQ ID NO: 80467 - DNA, 30 bp, Artificial Sequence
  Synthetic oligonucleotide
tatgggccgaaggaactgtgagtattttgg

SEQ ID NO: 80468 - DNA, 30 bp, Artificial Sequence
  Synthetic oligonucleotide
gtgtgctcccccacacacgtaataaaaatg

SEQ ID NO: 80469 - DNA, 30 bp, Artificial Sequence
  Synthetic oligonucleotide
cagttgcctgctaatcgtagcataaaaatg

SEQ ID NO: 80470 - DNA, 30 bp, Artificial Sequence
  Synthetic oligonucleotide
caaggtgaccaatacgattgggtgaaaatg

SEQ ID NO: 80471 - DNA, 30 bp, Artificial Sequence
  Synthetic oligonucleotide
gctgtcagggccggacaccgtaataaaatg

SEQ ID NO: 80472 - DNA, 30 bp, Artificial Sequence
  Synthetic oligonucleotide
atactctgaaaacaggtggcgcgtcaaatg

SEQ ID NO: 80473 - DNA, 30 bp, Artificial Sequence
  Synthetic oligonucleotide
caggctaggatccgggatagataggaaatg

SEQ ID NO: 80474 - DNA, 30 bp, Artificial Sequence
  Synthetic oligonucleotide
tcgggaaaaatgaatgggaggcatgaaatg

SEQ ID NO: 80475 - DNA, 30 bp, Artificial Sequence
  Synthetic oligonucleotide
tacggttcagagactgtggatgtataaatg

SEQ ID NO: 80476 - DNA, 30 bp, Artificial Sequence
  Synthetic oligonucleotide
tccaaagtagatgacatcaaacggtaaatg

SEQ ID NO: 80477 - DNA, 30 bp, Artificial Sequence
  Synthetic oligonucleotide
gcctaatgcgtagcgtgcttcttgtaaatg

SEQ ID NO: 80478 - DNA, 30 bp, Artificial Sequence
  Synthetic oligonucleotide
tgggtaagctgcgatgcgattcgttaaatg

SEQ ID NO: 80479 - DNA, 30 bp, Artificial Sequence
  Synthetic oligonucleotide
acgagcgattgaagggttcaggaaccaatg

SEQ ID NO: 80480 - DNA, 30 bp, Artificial Sequence
  Synthetic oligonucleotide
gcgctcgcccttgatcacacgatcccaatg

SEQ ID NO: 80481 - DNA, 30 bp, Artificial Sequence
  Synthetic oligonucleotide
aaggtacagtgtgcggctcgcgcgccaatg

SEQ ID NO: 80482 - DNA, 30 bp, Artificial Sequence
  Synthetic oligonucleotide
acgcctccgtccaaatgaggacggccaatg

SEQ ID NO: 80483 - DNA, 31 bp, Artificial Sequence
  Synthetic oligonucleotide
tgatagacatgtggcttgcggatcagcaatg

SEQ ID NO: 80484 - DNA, 30 bp, Artificial Sequence
  Synthetic oligonucleotide
gtgacctaggtcacaccactgccatcaatg

SEQ ID NO: 80485 - DNA, 30 bp, Artificial Sequence
  Synthetic oligonucleotide
tcgagagggtgtgcagcagaggtgtcaatg

SEQ ID NO: 80486 - DNA, 30 bp, Artificial Sequence
  Synthetic oligonucleotide
ggcactggagctggtgggggtatttcaatg

SEQ ID NO: 80487 - DNA, 30 bp, Artificial Sequence
  Synthetic oligonucleotide
agtgacacgttcgaaaaacattacagaatg

SEQ ID NO: 80488 - DNA, 30 bp, Artificial Sequence
  Synthetic oligonucleotide
atgtggaacccatagagcgtggtcagaatg

SEQ ID NO: 80489 - DNA, 30 bp, Artificial Sequence
  Synthetic oligonucleotide
aaggcatcccggctgaatcagcagagaatg

SEQ ID NO: 80490 - DNA, 30 bp, Artificial Sequence
  Synthetic oligonucleotide
ctacggtccataatagaggtccctagaatg

SEQ ID NO: 80491 - DNA, 30 bp, Artificial Sequence
  Synthetic oligonucleotide
cgcccaatctgtggtccaaacggccgaatg

SEQ ID NO: 80492 - DNA, 30 bp, Artificial Sequence
  Synthetic oligonucleotide
tgagtgtgagactgacgccaaaagcgaatg

SEQ ID NO: 80493 - DNA, 30 bp, Artificial Sequence
  Synthetic oligonucleotide
agtgggaggggcgccaagcatggtcgaatg

SEQ ID NO: 80494 - DNA, 30 bp, Artificial Sequence
  Synthetic oligonucleotide
gagactgcgcactgtgggcggaccggaatg

SEQ ID NO: 80495 - DNA, 30 bp, Artificial Sequence
  Synthetic oligonucleotide
ccgcgggctggtcggtgataactcggaatg

SEQ ID NO: 80496 - DNA, 30 bp, Artificial Sequence
  Synthetic oligonucleotide
atataaaaattagttccactaaagggaatg

SEQ ID NO: 80497 - DNA, 30 bp, Artificial Sequence
  Synthetic oligonucleotide
tacgagtagggcgctgcaggaaatggaatg

SEQ ID NO: 80498 - DNA, 30 bp, Artificial Sequence
  Synthetic oligonucleotide
aacagttagacgcgaagtggtattggaatg

SEQ ID NO: 80499 - DNA, 30 bp, Artificial Sequence
  Synthetic oligonucleotide
aaacggggcgggcacgacatctactgaatg

SEQ ID NO: 80500 - DNA, 30 bp, Artificial Sequence
  Synthetic oligonucleotide
ggagagcaatcggctgttaatcagtgaatg

SEQ ID NO: 80501 - DNA, 30 bp, Artificial Sequence
  Synthetic oligonucleotide
cggagtctaacagaagtttcgagaataatg

SEQ ID NO: 80502 - DNA, 30 bp, Artificial Sequence
  Synthetic oligonucleotide
ggccgacgggaatcggaggggtacataatg

SEQ ID NO: 80503 - DNA, 30 bp, Artificial Sequence
  Synthetic oligonucleotide
ggtgattcacatgcattgacacccataatg

SEQ ID NO: 80504 - DNA, 30 bp, Artificial Sequence
  Synthetic oligonucleotide
gtagtacccagaaagatagccgtcataatg

SEQ ID NO: 80505 - DNA, 30 bp, Artificial Sequence
  Synthetic oligonucleotide
tcgggagactaggtatgggtggcgataatg

SEQ ID NO: 80506 - DNA, 30 bp, Artificial Sequence
  Synthetic oligonucleotide
taaaaaactatactgccaacgaggataatg

SEQ ID NO: 80507 - DNA, 30 bp, Artificial Sequence
  Synthetic oligonucleotide
acgccggtatcccaatttggaaatataatg

SEQ ID NO: 80508 - DNA, 30 bp, Artificial Sequence
  Synthetic oligonucleotide
caacaaaccgcctccatttggtagctaatg

SEQ ID NO: 80509 - DNA, 30 bp, Artificial Sequence
  Synthetic oligonucleotide
cgaaaagcttggcctcgcacgggagtaatg

SEQ ID NO: 80510 - DNA, 30 bp, Artificial Sequence
  Synthetic oligonucleotide
ggacggtcaccaggggatagcatagtaatg

SEQ ID NO: 80511 - DNA, 30 bp, Artificial Sequence
  Synthetic oligonucleotide
actggccgtaccacgatctacatcgtaatg

SEQ ID NO: 80512 - DNA, 30 bp, Artificial Sequence
  Synthetic oligonucleotide
ccgtgcataatttgtcgactatcgttaatg

SEQ ID NO: 80513 - DNA, 30 bp, Artificial Sequence
  Synthetic oligonucleotide
atggcctaagaggtgtacagaggtttaatg

SEQ ID NO: 80514 - DNA, 30 bp, Artificial Sequence
  Synthetic oligonucleotide
gtgaatccgtctcgtgtattagcaaacatg

SEQ ID NO: 80515 - DNA, 30 bp, Artificial Sequence
  Synthetic oligonucleotide
tgctcaagggcactgtcctgctcaaacatg

SEQ ID NO: 80516 - DNA, 30 bp, Artificial Sequence
  Synthetic oligonucleotide
tggtgacaccaaatggcccctataaacatg

SEQ ID NO: 80517 - DNA, 30 bp, Artificial Sequence
  Synthetic oligonucleotide
cgtgtccatggagcagaaaagtagaacatg

SEQ ID NO: 80518 - DNA, 30 bp, Artificial Sequence
  Synthetic oligonucleotide
cagcggcgaggcaccaatcagcgacacatg

SEQ ID NO: 80519 - DNA, 30 bp, Artificial Sequence
  Synthetic oligonucleotide
ttagtatcccggggatacgaggcccacatg

SEQ ID NO: 80520 - DNA, 30 bp, Artificial Sequence
  Synthetic oligonucleotide
gacctcaagggggaaattggtaagcacatg

SEQ ID NO: 80521 - DNA, 30 bp, Artificial Sequence
  Synthetic oligonucleotide
gcaggcgctgataggccaagtctagacatg

SEQ ID NO: 80522 - DNA, 30 bp, Artificial Sequence
  Synthetic oligonucleotide
gaaggtagggtccagttcaaccctgacatg

SEQ ID NO: 80523 - DNA, 31 bp, Artificial Sequence
  Synthetic oligonucleotide
caccaaagtgtggccatagcacgagaccatg

SEQ ID NO: 80524 - DNA, 30 bp, Artificial Sequence
  Synthetic oligonucleotide
ggtaagagtctctcctgtagcaggaccatg

SEQ ID NO: 80525 - DNA, 30 bp, Artificial Sequence
  Synthetic oligonucleotide
ttgggctgtagaacggtcagatttaccatg

SEQ ID NO: 80526 - DNA, 30 bp, Artificial Sequence
  Synthetic oligonucleotide
taaagaaccacaataacgtgacaccccatg

SEQ ID NO: 80527 - DNA, 30 bp, Artificial Sequence
  Synthetic oligonucleotide
gcctcggtgcatgtatctcggatcgccatg

SEQ ID NO: 80528 - DNA, 30 bp, Artificial Sequence
  Synthetic oligonucleotide
gagtccaacacgaacctcaagcctgccatg

SEQ ID NO: 80529 - DNA, 30 bp, Artificial Sequence
  Synthetic oligonucleotide
tccgattcgccctactaattcaattccatg

SEQ ID NO: 80530 - DNA, 30 bp, Artificial Sequence
  Synthetic oligonucleotide
taggctaaacggtacactcgcgcttccatg

SEQ ID NO: 80531 - DNA, 30 bp, Artificial Sequence
  Synthetic oligonucleotide
accaagcattccggcagattggcttccatg

SEQ ID NO: 80532 - DNA, 30 bp, Artificial Sequence
  Synthetic oligonucleotide
atgaatcccaacttattactgggaagcatg

SEQ ID NO: 80533 - DNA, 30 bp, Artificial Sequence
  Synthetic oligonucleotide
ctcgataccaacataaagtgcacgagcatg

SEQ ID NO: 80534 - DNA, 30 bp, Artificial Sequence
  Synthetic oligonucleotide
aactaaaagtccaggtgccgtacaggcatg

SEQ ID NO: 80535 - DNA, 30 bp, Artificial Sequence
  Synthetic oligonucleotide
ggacagacgagcgtagtttgtgacggcatg

SEQ ID NO: 80536 - DNA, 30 bp, Artificial Sequence
  Synthetic oligonucleotide
agggcacagatatttagcggacggatcatg

SEQ ID NO: 80537 - DNA, 30 bp, Artificial Sequence
  Synthetic oligonucleotide
ctagtgctaactaccgcgagggatatcatg

SEQ ID NO: 80538 - DNA, 30 bp, Artificial Sequence
  Synthetic oligonucleotide
ctagacttcctattaacagcggctatcatg

SEQ ID NO: 80539 - DNA, 30 bp, Artificial Sequence
  Synthetic oligonucleotide
ggatcacccactatcgccaatacactcatg

SEQ ID NO: 80540 - DNA, 30 bp, Artificial Sequence
  Synthetic oligonucleotide
tggattcaagggcgtgtatgagcactcatg

SEQ ID NO: 80541 - DNA, 30 bp, Artificial Sequence
  Synthetic oligonucleotide
gcaacgtaagaccattagcgagggctcatg

SEQ ID NO: 80542 - DNA, 30 bp, Artificial Sequence
  Synthetic oligonucleotide
tcaccagggaaggcccgcaaatacttcatg

SEQ ID NO: 80543 - DNA, 30 bp, Artificial Sequence
  Synthetic oligonucleotide
acaaattgtatcaatcaagcacagttcatg

SEQ ID NO: 80544 - DNA, 30 bp, Artificial Sequence
  Synthetic oligonucleotide
ccgacataggagctacccagcgtaaagatg

SEQ ID NO: 80545 - DNA, 30 bp, Artificial Sequence
  Synthetic oligonucleotide
taaagcatcagctcaaatcgctcacagatg

SEQ ID NO: 80546 - DNA, 30 bp, Artificial Sequence
  Synthetic oligonucleotide
tgggtagtctcagacattataaaccagatg

SEQ ID NO: 80547 - DNA, 30 bp, Artificial Sequence
  Synthetic oligonucleotide
actaaggtacgtgatttacataaagagatg

SEQ ID NO: 80548 - DNA, 30 bp, Artificial Sequence
  Synthetic oligonucleotide
atgcaacgcgacccgtttcgtggagagatg

SEQ ID NO: 80549 - DNA, 30 bp, Artificial Sequence
  Synthetic oligonucleotide
gtgaggttagaagtgacattacgcgagatg

SEQ ID NO: 80550 - DNA, 30 bp, Artificial Sequence
  Synthetic oligonucleotide
cgcgaggatgtaacgcatgtaagggagatg

SEQ ID NO: 80551 - DNA, 30 bp, Artificial Sequence
  Synthetic oligonucleotide
acggggcacaagtttctagcccgggagatg

SEQ ID NO: 80552 - DNA, 30 bp, Artificial Sequence
  Synthetic oligonucleotide
cggattcccaaatctcaacgtcgatagatg

SEQ ID NO: 80553 - DNA, 30 bp, Artificial Sequence
  Synthetic oligonucleotide
caggagcgcgtgcgcctaatccactagatg

SEQ ID NO: 80554 - DNA, 30 bp, Artificial Sequence
  Synthetic oligonucleotide
actccgtactgtgaaagaacctattagatg

SEQ ID NO: 80555 - DNA, 30 bp, Artificial Sequence
  Synthetic oligonucleotide
cataatctacagtgcgcgctctaaacgatg

SEQ ID NO: 80556 - DNA, 30 bp, Artificial Sequence
  Synthetic oligonucleotide
ttgcagaaacattggtaatggccaacgatg

SEQ ID NO: 80557 - DNA, 30 bp, Artificial Sequence
  Synthetic oligonucleotide
gtgtagttcggggggaacgatcgcacgatg

SEQ ID NO: 80558 - DNA, 30 bp, Artificial Sequence
  Synthetic oligonucleotide
gctacctgtacgctggaaagagtcacgatg

SEQ ID NO: 80559 - DNA, 30 bp, Artificial Sequence
  Synthetic oligonucleotide
caacctagctatctctactggcctacgatg

SEQ ID NO: 80560 - DNA, 30 bp, Artificial Sequence
  Synthetic oligonucleotide
aacggtgttcccggtcatgttaagccgatg

SEQ ID NO: 80561 - DNA, 30 bp, Artificial Sequence
  Synthetic oligonucleotide
tatgctagtattccgatttagggagcgatg

SEQ ID NO: 80562 - DNA, 30 bp, Artificial Sequence
  Synthetic oligonucleotide
tgcggcacaaacgatgggtggggcgcgatg

SEQ ID NO: 80563 - DNA, 30 bp, Artificial Sequence
  Synthetic oligonucleotide
aatagatcggatgggacggttatcgcgatg

SEQ ID NO: 80564 - DNA, 30 bp, Artificial Sequence
  Synthetic oligonucleotide
ccataggttatgtgggtcttgatggcgatg

SEQ ID NO: 80565 - DNA, 30 bp, Artificial Sequence
  Synthetic oligonucleotide
caggattaaagcaagtcaataaatgcgatg

SEQ ID NO: 80566 - DNA, 30 bp, Artificial Sequence
  Synthetic oligonucleotide
acagcacgtataacggcgggcgatgcgatg

SEQ ID NO: 80567 - DNA, 30 bp, Artificial Sequence
  Synthetic oligonucleotide
actggctttggcagcaaagaatgtgcgatg

SEQ ID NO: 80568 - DNA, 30 bp, Artificial Sequence
  Synthetic oligonucleotide
gcaggtgttcgccagccaagagtctcgatg

SEQ ID NO: 80569 - DNA, 30 bp, Artificial Sequence
  Synthetic oligonucleotide
tgtgtagctcaaaaagtgggtctgtcgatg

SEQ ID NO: 80570 - DNA, 30 bp, Artificial Sequence
  Synthetic oligonucleotide
gcgcgacgtgcaccgtctatagtccggatg

SEQ ID NO: 80571 - DNA, 30 bp, Artificial Sequence
  Synthetic oligonucleotide
cagttctctagggttaggtccgtccggatg

SEQ ID NO: 80572 - DNA, 30 bp, Artificial Sequence
  Synthetic oligonucleotide
atagtttaaccgctacaatgaagtcggatg

SEQ ID NO: 80573 - DNA, 30 bp, Artificial Sequence
  Synthetic oligonucleotide
gctgccttaaccgaccgattgctggggatg

SEQ ID NO: 80574 - DNA, 30 bp, Artificial Sequence
  Synthetic oligonucleotide
acttgtgctcctgcttacactccctggatg

SEQ ID NO: 80575 - DNA, 30 bp, Artificial Sequence
  Synthetic oligonucleotide
agatcgtgacgtcaggggtggaattggatg

SEQ ID NO: 80576 - DNA, 30 bp, Artificial Sequence
  Synthetic oligonucleotide
gcgaggttagaggcgattgtataaatgatg

SEQ ID NO: 80577 - DNA, 30 bp, Artificial Sequence
  Synthetic oligonucleotide
cccctaagactctggctgcaaaccatgatg

SEQ ID NO: 80578 - DNA, 30 bp, Artificial Sequence
  Synthetic oligonucleotide
gtatacggggggtccatacaaaacctgatg

SEQ ID NO: 80579 - DNA, 30 bp, Artificial Sequence
  Synthetic oligonucleotide
aaaggaggcaactacgtaagagccctgatg

SEQ ID NO: 80580 - DNA, 30 bp, Artificial Sequence
  Synthetic oligonucleotide
atctcgagttgctgcaaaagacggctgatg

SEQ ID NO: 80581 - DNA, 30 bp, Artificial Sequence
  Synthetic oligonucleotide
cagcgcgggttatagaatgggaccgtgatg

SEQ ID NO: 80582 - DNA, 30 bp, Artificial Sequence
  Synthetic oligonucleotide
ggtaaatgtctcacaaaacgtatggtgatg

SEQ ID NO: 80583 - DNA, 30 bp, Artificial Sequence
  Synthetic oligonucleotide
atatcgaccggagtgctggatggtgtgatg

SEQ ID NO: 80584 - DNA, 30 bp, Artificial Sequence
  Synthetic oligonucleotide
acatgttgctcaacggccacaccattgatg

SEQ ID NO: 80585 - DNA, 30 bp, Artificial Sequence
  Synthetic oligonucleotide
aataggcaaatgaggccccgtaacttgatg

SEQ ID NO: 80586 - DNA, 30 bp, Artificial Sequence
  Synthetic oligonucleotide
agaaagcaggtcttgccttccagaaatatg

SEQ ID NO: 80587 - DNA, 30 bp, Artificial Sequence
  Synthetic oligonucleotide
cgaggttgggaaagtgttgggagaaatatg

SEQ ID NO: 80588 - DNA, 30 bp, Artificial Sequence
  Synthetic oligonucleotide
tataagtacgctgagaacctacgaaatatg

SEQ ID NO: 80589 - DNA, 30 bp, Artificial Sequence
  Synthetic oligonucleotide
caggccgaatgctaggcttaagcgaatatg

SEQ ID NO: 80590 - DNA, 40 bp, Artificial Sequence
  Synthetic oligonucleotide
catagcggaaatttcatcgtacgctaagtattcgaatatg

SEQ ID NO: 80591 - DNA, 30 bp, Artificial Sequence
  Synthetic oligonucleotide
cgcgttccatccaacctgtgcaataatatg

SEQ ID NO: 80592 - DNA, 30 bp, Artificial Sequence
  Synthetic oligonucleotide
tcgggcaaagaaggatcgacgcataatatg

SEQ ID NO: 80593 - DNA, 30 bp, Artificial Sequence
  Synthetic oligonucleotide
gacaagcttcagcagtgaatgcgctatatg

SEQ ID NO: 80594 - DNA, 30 bp, Artificial Sequence
  Synthetic oligonucleotide
ggtgtaagattgaagtttagttgctatatg

SEQ ID NO: 80595 - DNA, 30 bp, Artificial Sequence
  Synthetic oligonucleotide
cctcaacgcatgggagagatgaagtatatg

SEQ ID NO: 80596 - DNA, 30 bp, Artificial Sequence
  Synthetic oligonucleotide
gcgtatttcaacgattatccctcccctatg

SEQ ID NO: 80597 - DNA, 30 bp, Artificial Sequence
  Synthetic oligonucleotide
gtaggataagttggaatggattaagctatg

SEQ ID NO: 80598 - DNA, 30 bp, Artificial Sequence
  Synthetic oligonucleotide
cgtcaaaacttgtctcaaataacggctatg

SEQ ID NO: 80599 - DNA, 30 bp, Artificial Sequence
  Synthetic oligonucleotide
cggcggtggatatcggtaatgtgttctatg

SEQ ID NO: 80600 - DNA, 30 bp, Artificial Sequence
  Synthetic oligonucleotide
gtgctcccaaggacaggcgtggtaagtatg

SEQ ID NO: 80601 - DNA, 30 bp, Artificial Sequence
  Synthetic oligonucleotide
tgaaggtcgtgctagaagggagacagtatg

SEQ ID NO: 80602 - DNA, 30 bp, Artificial Sequence
  Synthetic oligonucleotide
gatcgcacggcggggatactatccagtatg

SEQ ID NO: 80603 - DNA, 30 bp, Artificial Sequence
  Synthetic oligonucleotide
ggcgcactcggaaatctgcctacgagtatg

SEQ ID NO: 80604 - DNA, 30 bp, Artificial Sequence
  Synthetic oligonucleotide
ctctacacataatcgcaaaggccacgtatg

SEQ ID NO: 80605 - DNA, 30 bp, Artificial Sequence
  Synthetic oligonucleotide
cgacgcctgacttttagtgtgcaccgtatg

SEQ ID NO: 80606 - DNA, 30 bp, Artificial Sequence
  Synthetic oligonucleotide
actcacgcggctagaggtagacttcgtatg

SEQ ID NO: 80607 - DNA, 30 bp, Artificial Sequence
  Synthetic oligonucleotide
acctcagcgtgaatgggttggatcggtatg

SEQ ID NO: 80608 - DNA, 30 bp, Artificial Sequence
  Synthetic oligonucleotide
agaccggaaagtgctcgacgttcgtgtatg

SEQ ID NO: 80609 - DNA, 30 bp, Artificial Sequence
  Synthetic oligonucleotide
gtggagaaaatgagtccggtgttcattatg

SEQ ID NO: 80610 - DNA, 30 bp, Artificial Sequence
  Synthetic oligonucleotide
ctgcgtaatcgggcgaattgatcggttatg

SEQ ID NO: 80611 - DNA, 30 bp, Artificial Sequence
  Synthetic oligonucleotide
taatgcatcataggaaaggggacatttatg

SEQ ID NO: 80612 - DNA, 30 bp, Artificial Sequence
  Synthetic oligonucleotide
gcctatcgaaacagcgcgacaagctttatg

SEQ ID NO: 80613 - DNA, 31 bp, Artificial Sequence
  Synthetic oligonucleotide
acgcggaataattgaggcgcgctcacaactg

SEQ ID NO: 80614 - DNA, 30 bp, Artificial Sequence
  Synthetic oligonucleotide
tttactgggtattatcgacccgggcaactg

SEQ ID NO: 80615 - DNA, 30 bp, Artificial Sequence
  Synthetic oligonucleotide
cagaatgctagatgcgtgttacctcaactg

SEQ ID NO: 80616 - DNA, 30 bp, Artificial Sequence
  Synthetic oligonucleotide
gatcctataacatcaattatggcggaactg

SEQ ID NO: 80617 - DNA, 30 bp, Artificial Sequence
  Synthetic oligonucleotide
cgtcacgcctatttacaatctgtaacactg

SEQ ID NO: 80618 - DNA, 30 bp, Artificial Sequence
  Synthetic oligonucleotide
gggtcatacgattaaggaaatactgcactg

SEQ ID NO: 80619 - DNA, 30 bp, Artificial Sequence
  Synthetic oligonucleotide
tgcaccaggttgagagaatgaccttcactg

SEQ ID NO: 80620 - DNA, 30 bp, Artificial Sequence
  Synthetic oligonucleotide
gcgtaactggaacgacacagggacagactg

SEQ ID NO: 80621 - DNA, 30 bp, Artificial Sequence
  Synthetic oligonucleotide
gtgtatgacaccaaaacactgattagactg

SEQ ID NO: 80622 - DNA, 30 bp, Artificial Sequence
  Synthetic oligonucleotide
agtaatatctgatattaagtatgccgactg

SEQ ID NO: 80623 - DNA, 30 bp, Artificial Sequence
  Synthetic oligonucleotide
atggggttttatcagaggagggggcgactg

SEQ ID NO: 80624 - DNA, 30 bp, Artificial Sequence
  Synthetic oligonucleotide
agcagccctaagaaaagtgggagaggactg

SEQ ID NO: 80625 - DNA, 30 bp, Artificial Sequence
  Synthetic oligonucleotide
gaggcttgatgagccaattaggagggactg

SEQ ID NO: 80626 - DNA, 30 bp, Artificial Sequence
  Synthetic oligonucleotide
acagatctaactacatagggatattgactg

SEQ ID NO: 80627 - DNA, 30 bp, Artificial Sequence
  Synthetic oligonucleotide
catgtgtttgggtaagatgaacgtatactg

SEQ ID NO: 80628 - DNA, 30 bp, Artificial Sequence
  Synthetic oligonucleotide
cgaacatactatttaggcttaagcctactg

SEQ ID NO: 80629 - DNA, 30 bp, Artificial Sequence
  Synthetic oligonucleotide
atgcatggccgaggcgaaaatggcctactg

SEQ ID NO: 80630 - DNA, 30 bp, Artificial Sequence
  Synthetic oligonucleotide
gcaaccgactgagtgcgccaccgggtactg

SEQ ID NO: 80631 - DNA, 30 bp, Artificial Sequence
  Synthetic oligonucleotide
acacgggtacagcgttacgtggcgaacctg

SEQ ID NO: 80632 - DNA, 30 bp, Artificial Sequence
  Synthetic oligonucleotide
atgctggcaataagcatgctgtcgaacctg

SEQ ID NO: 80633 - DNA, 30 bp, Artificial Sequence
  Synthetic oligonucleotide
aggcgttaagcgcacagtcggcataacctg

SEQ ID NO: 80634 - DNA, 30 bp, Artificial Sequence
  Synthetic oligonucleotide
accttaaagcattgaaggctacaacacctg

SEQ ID NO: 80635 - DNA, 30 bp, Artificial Sequence
  Synthetic oligonucleotide
aggtacaagggcactctctctgaacacctg

SEQ ID NO: 80636 - DNA, 30 bp, Artificial Sequence
  Synthetic oligonucleotide
ggggttgcttcggctgttaagaaccacctg

SEQ ID NO: 80637 - DNA, 30 bp, Artificial Sequence
  Synthetic oligonucleotide
gaagattacacatccggtgctcgtcacctg

SEQ ID NO: 80638 - DNA, 30 bp, Artificial Sequence
  Synthetic oligonucleotide
gcgccggcgagcagggcaaattaggacctg

SEQ ID NO: 80639 - DNA, 30 bp, Artificial Sequence
  Synthetic oligonucleotide
agccagtgaaacgtttatagaaaatacctg

SEQ ID NO: 80640 - DNA, 30 bp, Artificial Sequence
  Synthetic oligonucleotide
gccaaagaagggtatccatactcatacctg

SEQ ID NO: 80641 - DNA, 30 bp, Artificial Sequence
  Synthetic oligonucleotide
cggaatcaacctgcgccacgaaacaccctg

SEQ ID NO: 80642 - DNA, 30 bp, Artificial Sequence
  Synthetic oligonucleotide
tacgcgggtaccgttactgtttgcaccctg

SEQ ID NO: 80643 - DNA, 30 bp, Artificial Sequence
  Synthetic oligonucleotide
gctcggtggtcgtgggaacgtcagtccctg

SEQ ID NO: 80644 - DNA, 30 bp, Artificial Sequence
  Synthetic oligonucleotide
tgggtagtcggtacccgcaaacgttccctg

SEQ ID NO: 80645 - DNA, 30 bp, Artificial Sequence
  Synthetic oligonucleotide
agccggacctcagccattgaagaaagcctg

SEQ ID NO: 80646 - DNA, 30 bp, Artificial Sequence
  Synthetic oligonucleotide
cggagggccgcgaaccacacagatagcctg

SEQ ID NO: 80647 - DNA, 30 bp, Artificial Sequence
  Synthetic oligonucleotide
cgggggagtagggaacaatcaatccgcctg

SEQ ID NO: 80648 - DNA, 30 bp, Artificial Sequence
  Synthetic oligonucleotide
cttcgccgacccatgtaggcaatctgcctg

SEQ ID NO: 80649 - DNA, 30 bp, Artificial Sequence
  Synthetic oligonucleotide
acagagcaacaacgaattaccttgtgcctg

SEQ ID NO: 80650 - DNA, 30 bp, Artificial Sequence
  Synthetic oligonucleotide
aaggaacgatcttccacacgggtaatcctg

SEQ ID NO: 80651 - DNA, 30 bp, Artificial Sequence
  Synthetic oligonucleotide
ctccccaccctaagactgtatggcatcctg

SEQ ID NO: 80652 - DNA, 30 bp, Artificial Sequence
  Synthetic oligonucleotide
gatgaacagagcagcgttccgatgatcctg

SEQ ID NO: 80653 - DNA, 30 bp, Artificial Sequence
  Synthetic oligonucleotide
ctatgttaaggtcgccaagggaccgtcctg

SEQ ID NO: 80654 - DNA, 30 bp, Artificial Sequence
  Synthetic oligonucleotide
acggcaaagggtgggcagggggaggtcctg

SEQ ID NO: 80655 - DNA, 30 bp, Artificial Sequence
  Synthetic oligonucleotide
tcctacaaatgtgggacggatgcgttcctg

SEQ ID NO: 80656 - DNA, 30 bp, Artificial Sequence
  Synthetic oligonucleotide
agcaggtctagctgaactttcggagagctg

SEQ ID NO: 80657 - DNA, 30 bp, Artificial Sequence
  Synthetic oligonucleotide
ctacgtacgaattaaaattaaatctagctg

SEQ ID NO: 80658 - DNA, 30 bp, Artificial Sequence
  Synthetic oligonucleotide
cagtaatccaaccaggcttaagagtagctg

SEQ ID NO: 80659 - DNA, 30 bp, Artificial Sequence
  Synthetic oligonucleotide
ataggaagaggtatagttaatccttagctg

SEQ ID NO: 80660 - DNA, 30 bp, Artificial Sequence
  Synthetic oligonucleotide
acgtaccgcaaggttatagatccaacgctg

SEQ ID NO: 80661 - DNA, 30 bp, Artificial Sequence
  Synthetic oligonucleotide
aagttgagtaaaatgagcatatgcacgctg

SEQ ID NO: 80662 - DNA, 30 bp, Artificial Sequence
  Synthetic oligonucleotide
gggcatgaatttgccgtccagactccgctg

SEQ ID NO: 80663 - DNA, 30 bp, Artificial Sequence
  Synthetic oligonucleotide
tagaaaggttgaattgtatgcattgcgctg

SEQ ID NO: 80664 - DNA, 30 bp, Artificial Sequence
  Synthetic oligonucleotide
atagtatgcgtcctcacaagatttgcgctg

SEQ ID NO: 80665 - DNA, 30 bp, Artificial Sequence
  Synthetic oligonucleotide
cgacggccgggcggactcgattgcaggctg

SEQ ID NO: 80666 - DNA, 30 bp, Artificial Sequence
  Synthetic oligonucleotide
accaaagggaactttgcaacttgtaggctg

SEQ ID NO: 80667 - DNA, 30 bp, Artificial Sequence
  Synthetic oligonucleotide
tactatgaaatgaggcagagaacgcggctg

SEQ ID NO: 80668 - DNA, 30 bp, Artificial Sequence
  Synthetic oligonucleotide
cggggggtcgtaggtcgggcggaggggctg

SEQ ID NO: 80669 - DNA, 30 bp, Artificial Sequence
  Synthetic oligonucleotide
tcgcgaaaatagcgtgaactattggggctg

SEQ ID NO: 80670 - DNA, 30 bp, Artificial Sequence
  Synthetic oligonucleotide
ccttgaagtaacatttaagacgtgtggctg

SEQ ID NO: 80671 - DNA, 30 bp, Artificial Sequence
  Synthetic oligonucleotide
ggcctgtagctcggaccatttcgtatgctg

SEQ ID NO: 80672 - DNA, 30 bp, Artificial Sequence
  Synthetic oligonucleotide
gataagcctagcgatgaaccgatggtgctg

SEQ ID NO: 80673 - DNA, 30 bp, Artificial Sequence
  Synthetic oligonucleotide
ataatcaggatagagggcattgtggtgctg

SEQ ID NO: 80674 - DNA, 30 bp, Artificial Sequence
  Synthetic oligonucleotide
ttgaaaccgatacacaatagataattgctg

SEQ ID NO: 80675 - DNA, 30 bp, Artificial Sequence
  Synthetic oligonucleotide
aggccaaactgtgaccggtcgatcttgctg

SEQ ID NO: 80676 - DNA, 30 bp, Artificial Sequence
  Synthetic oligonucleotide
actgcaatactactcatatagcataatctg

SEQ ID NO: 80677 - DNA, 30 bp, Artificial Sequence
  Synthetic oligonucleotide
acgtggtcaataaggccatgagataatctg

SEQ ID NO: 80678 - DNA, 30 bp, Artificial Sequence
  Synthetic oligonucleotide
gtgaaagattagtcacgtatgggccatctg

SEQ ID NO: 80679 - DNA, 30 bp, Artificial Sequence
  Synthetic oligonucleotide
tgggataggtacgtcatagacgaagatctg

SEQ ID NO: 80680 - DNA, 30 bp, Artificial Sequence
  Synthetic oligonucleotide
tgcgagttgcctaatggaggcatagatctg

SEQ ID NO: 80681 - DNA, 30 bp, Artificial Sequence
  Synthetic oligonucleotide
aggaaggggttaatttataaggaggatctg

SEQ ID NO: 80682 - DNA, 30 bp, Artificial Sequence
  Synthetic oligonucleotide
tgcgagacccctcgggaggagacttatctg

SEQ ID NO: 80683 - DNA, 30 bp, Artificial Sequence
  Synthetic oligonucleotide
cattactacggctaagggcacggttatctg

SEQ ID NO: 80684 - DNA, 30 bp, Artificial Sequence
  Synthetic oligonucleotide
aagcactggtgtagcggagtactgactctg

SEQ ID NO: 80685 - DNA, 30 bp, Artificial Sequence
  Synthetic oligonucleotide
acgctagcgtgatgttagcaccaccctctg

SEQ ID NO: 80686 - DNA, 30 bp, Artificial Sequence
  Synthetic oligonucleotide
ctgactgtcggtagcaaaaggttgtctctg

SEQ ID NO: 80687 - DNA, 30 bp, Artificial Sequence
  Synthetic oligonucleotide
atgctgaatatcgggtttcggaggagtctg

SEQ ID NO: 80688 - DNA, 30 bp, Artificial Sequence
  Synthetic oligonucleotide
ctctcgcagaagaaaaaatgtacccgtctg

SEQ ID NO: 80689 - DNA, 30 bp, Artificial Sequence
  Synthetic oligonucleotide
acgtctgcgtatgccccgaatttcggtctg

SEQ ID NO: 80690 - DNA, 30 bp, Artificial Sequence
  Synthetic oligonucleotide
atgagcgacagagtgaaatccgggattctg

SEQ ID NO: 80691 - DNA, 30 bp, Artificial Sequence
  Synthetic oligonucleotide
agtaaaagattaaggcggcccaaacttctg

SEQ ID NO: 80692 - DNA, 30 bp, Artificial Sequence
  Synthetic oligonucleotide
gaagtaaactcataaccacatggacttctg

SEQ ID NO: 80693 - DNA, 30 bp, Artificial Sequence
  Synthetic oligonucleotide
atgctgggtagaggtgattatcatcttctg

SEQ ID NO: 80694 - DNA, 30 bp, Artificial Sequence
  Synthetic oligonucleotide
tctgcatgggctgggatacaatgcgttctg

SEQ ID NO: 80695 - DNA, 30 bp, Artificial Sequence
  Synthetic oligonucleotide
catcctcgattggaatggtgaaagtttctg

SEQ ID NO: 80696 - DNA, 30 bp, Artificial Sequence
  Synthetic oligonucleotide
taagcatgaggagaagtctatcattttctg

SEQ ID NO: 80697 - DNA, 30 bp, Artificial Sequence
  Synthetic oligonucleotide
gttggtagaagctagaaggtaataaaagtg

SEQ ID NO: 80698 - DNA, 30 bp, Artificial Sequence
  Synthetic oligonucleotide
catgatgcattaaaaggcaagttcaaagtg

SEQ ID NO: 80699 - DNA, 30 bp, Artificial Sequence
  Synthetic oligonucleotide
aacgtagtaacggtggtttggtggaaagtg

SEQ ID NO: 80700 - DNA, 30 bp, Artificial Sequence
  Synthetic oligonucleotide
tccctatgccgagctacccgcaaccaagtg

SEQ ID NO: 80701 - DNA, 30 bp, Artificial Sequence
  Synthetic oligonucleotide
gtggagatcggctatattacttgccaagtg

SEQ ID NO: 80702 - DNA, 30 bp, Artificial Sequence
  Synthetic oligonucleotide
cacgatatccaacgttcggttctgcaagtg

SEQ ID NO: 80703 - DNA, 30 bp, Artificial Sequence
  Synthetic oligonucleotide
cgtcattactgaagtaacaccgatcaagtg

SEQ ID NO: 80704 - DNA, 30 bp, Artificial Sequence
  Synthetic oligonucleotide
gcctgtataacagagaaggttctagaagtg

SEQ ID NO: 80705 - DNA, 30 bp, Artificial Sequence
  Synthetic oligonucleotide
tcggggcaacataagggcgaggaataagtg

SEQ ID NO: 80706 - DNA, 30 bp, Artificial Sequence
  Synthetic oligonucleotide
tggagtatcaccgacactcgtctataagtg

SEQ ID NO: 80707 - DNA, 30 bp, Artificial Sequence
  Synthetic oligonucleotide
agcatacaagcgcggacccaagtataagtg

SEQ ID NO: 80708 - DNA, 30 bp, Artificial Sequence
  Synthetic oligonucleotide
cagagaatagaccatgttatttactaagtg

SEQ ID NO: 80709 - DNA, 30 bp, Artificial Sequence
  Synthetic oligonucleotide
gtattgggaacacgattttagccctaagtg

SEQ ID NO: 80710 - DNA, 30 bp, Artificial Sequence
  Synthetic oligonucleotide
aatacgacaagggcgtagcttgcctaagtg

SEQ ID NO: 80711 - DNA, 30 bp, Artificial Sequence
  Synthetic oligonucleotide
tcgacaccctttgattagttcaagtaagtg

SEQ ID NO: 80712 - DNA, 30 bp, Artificial Sequence
  Synthetic oligonucleotide
ggcttccgatctaatcgatgtgcgtaagtg

SEQ ID NO: 80713 - DNA, 30 bp, Artificial Sequence
  Synthetic oligonucleotide
ggcttgtattcattgacgaggtggtaagtg

SEQ ID NO: 80714 - DNA, 30 bp, Artificial Sequence
  Synthetic oligonucleotide
gtctcaagctaactagggtactaaccagtg

SEQ ID NO: 80715 - DNA, 30 bp, Artificial Sequence
  Synthetic oligonucleotide
tacacgtgaccaccggatacaagtccagtg

SEQ ID NO: 80716 - DNA, 30 bp, Artificial Sequence
  Synthetic oligonucleotide
tggaacttcaggtacatggagtccgcagtg

SEQ ID NO: 80717 - DNA, 30 bp, Artificial Sequence
  Synthetic oligonucleotide
tcggatcttggactttggtaatcggcagtg

SEQ ID NO: 80718 - DNA, 30 bp, Artificial Sequence
  Synthetic oligonucleotide
gtggcgatgacgcctcgtattgtggcagtg

SEQ ID NO: 80719 - DNA, 30 bp, Artificial Sequence
  Synthetic oligonucleotide
gcctggtgaaaccatgtaacagctgcagtg

SEQ ID NO: 80720 - DNA, 30 bp, Artificial Sequence
  Synthetic oligonucleotide
ttactgccgaagcattggtgttcaagagtg

SEQ ID NO: 80721 - DNA, 30 bp, Artificial Sequence
  Synthetic oligonucleotide
atgcaagctcaatgcgcatctgacagagtg

SEQ ID NO: 80722 - DNA, 30 bp, Artificial Sequence
  Synthetic oligonucleotide
cataccagccatatagctgacgtgcgagtg

SEQ ID NO: 80723 - DNA, 30 bp, Artificial Sequence
  Synthetic oligonucleotide
gcactgggaacgacatgggactgcggagtg

SEQ ID NO: 80724 - DNA, 30 bp, Artificial Sequence
  Synthetic oligonucleotide
ataggttgagaccgagaaattgtgggagtg

SEQ ID NO: 80725 - DNA, 30 bp, Artificial Sequence
  Synthetic oligonucleotide
atcaacatggagtgtagctctccaatagtg

SEQ ID NO: 80726 - DNA, 30 bp, Artificial Sequence
  Synthetic oligonucleotide
gcttaatctgaggtattaccagtaatagtg

SEQ ID NO: 80727 - DNA, 30 bp, Artificial Sequence
  Synthetic oligonucleotide
tatgaccaggaatgagttgtcttaatagtg

SEQ ID NO: 80728 - DNA, 30 bp, Artificial Sequence
  Synthetic oligonucleotide
tgcaccaggacgaatacgcgttccatagtg

SEQ ID NO: 80729 - DNA, 30 bp, Artificial Sequence
  Synthetic oligonucleotide
cagtagttcgagttaacactaaggatagtg

SEQ ID NO: 80730 - DNA, 30 bp, Artificial Sequence
  Synthetic oligonucleotide
ggatcacttattatgccctaaatactagtg

SEQ ID NO: 80731 - DNA, 30 bp, Artificial Sequence
  Synthetic oligonucleotide
aatgagaaagaaatgtggtgaaacctagtg

SEQ ID NO: 80732 - DNA, 30 bp, Artificial Sequence
  Synthetic oligonucleotide
ggggataacacgtatccatcccggctagtg

SEQ ID NO: 80733 - DNA, 30 bp, Artificial Sequence
  Synthetic oligonucleotide
catagacccattgctctgagacctctagtg

SEQ ID NO: 80734 - DNA, 30 bp, Artificial Sequence
  Synthetic oligonucleotide
taggaaacgtaaccaggtagtatcgtagtg

SEQ ID NO: 80735 - DNA, 30 bp, Artificial Sequence
  Synthetic oligonucleotide
ggcccgcggatcgtgttctataaggtagtg

SEQ ID NO: 80736 - DNA, 30 bp, Artificial Sequence
  Synthetic oligonucleotide
gtgtacccatatagtagagtcggtgtagtg

SEQ ID NO: 80737 - DNA, 30 bp, Artificial Sequence
  Synthetic oligonucleotide
ttgacgtacgcgatgctgaaggcattagtg

SEQ ID NO: 80738 - DNA, 30 bp, Artificial Sequence
  Synthetic oligonucleotide
gacataggccgcgaaacttacacgttagtg

SEQ ID NO: 80739 - DNA, 30 bp, Artificial Sequence
  Synthetic oligonucleotide
agaactaccagcggtcggttgcaaaacgtg

SEQ ID NO: 80740 - DNA, 30 bp, Artificial Sequence
  Synthetic oligonucleotide
tccgccaagataaacaatgcaatgcacgtg

SEQ ID NO: 80741 - DNA, 25 bp, Artificial Sequence
  Synthetic oligonucleotide
cggaagagaaaacgtgagatacgtg

SEQ ID NO: 80742 - DNA, 30 bp, Artificial Sequence
  Synthetic oligonucleotide
agtaattaatgtagagcaccaggatacgtg

SEQ ID NO: 80743 - DNA, 30 bp, Artificial Sequence
  Synthetic oligonucleotide
gagcgaatctatttcgaaggagtgtacgtg

SEQ ID NO: 80744 - DNA, 30 bp, Artificial Sequence
  Synthetic oligonucleotide
ccgctccatcggaagtttgggcaaaccgtg

SEQ ID NO: 80745 - DNA, 30 bp, Artificial Sequence
  Synthetic oligonucleotide
tcacaggttcgtcattgcctcgaaaccgtg

SEQ ID NO: 80746 - DNA, 30 bp, Artificial Sequence
  Synthetic oligonucleotide
cggatatgctctactaccaagcgagccgtg

SEQ ID NO: 80747 - DNA, 30 bp, Artificial Sequence
  Synthetic oligonucleotide
cagtgccagagttgaacgaacactgccgtg

SEQ ID NO: 80748 - DNA, 30 bp, Artificial Sequence
  Synthetic oligonucleotide
tccccattgcaagaaagaggcggaagcgtg

SEQ ID NO: 80749 - DNA, 30 bp, Artificial Sequence
  Synthetic oligonucleotide
ctggaagttatagacagtaaagcacgcgtg

SEQ ID NO: 80750 - DNA, 30 bp, Artificial Sequence
  Synthetic oligonucleotide
tggtaaatcgataatcgaggttaccgcgtg

SEQ ID NO: 80751 - DNA, 30 bp, Artificial Sequence
  Synthetic oligonucleotide
gaatatatgactgagggctgcgatggcgtg

SEQ ID NO: 80752 - DNA, 30 bp, Artificial Sequence
  Synthetic oligonucleotide
catcggctataatcatactgtatcatcgtg

SEQ ID NO: 80753 - DNA, 30 bp, Artificial Sequence
  Synthetic oligonucleotide
gcacaaaaacacgtgacgtataaactcgtg

SEQ ID NO: 80754 - DNA, 30 bp, Artificial Sequence
  Synthetic oligonucleotide
agtgctccattaaaatggcaagatctcgtg

SEQ ID NO: 80755 - DNA, 30 bp, Artificial Sequence
  Synthetic oligonucleotide
gttggaaccaaagttagtggattggtcgtg

SEQ ID NO: 80756 - DNA, 30 bp, Artificial Sequence
  Synthetic oligonucleotide
tctgagcaatcttcgtatgcctaattcgtg

SEQ ID NO: 80757 - DNA, 30 bp, Artificial Sequence
  Synthetic oligonucleotide
aaacacctatcagggagtaggaacttcgtg

SEQ ID NO: 80758 - DNA, 30 bp, Artificial Sequence
  Synthetic oligonucleotide
gtcgaaacaccagtgttcgtaaacaaggtg

SEQ ID NO: 80759 - DNA, 30 bp, Artificial Sequence
  Synthetic oligonucleotide
cctcgccgagcgaattcaaactacaaggtg

SEQ ID NO: 80760 - DNA, 30 bp, Artificial Sequence
  Synthetic oligonucleotide
gccgtgaattaaccagtacttaccaaggtg

SEQ ID NO: 80761 - DNA, 30 bp, Artificial Sequence
  Synthetic oligonucleotide
attaacgatgtgatagaatgtaggaaggtg

SEQ ID NO: 80762 - DNA, 30 bp, Artificial Sequence
  Synthetic oligonucleotide
ggtgtaaatgctgtaggggcctaccaggtg

SEQ ID NO: 80763 - DNA, 30 bp, Artificial Sequence
  Synthetic oligonucleotide
aacgctggttccgaaagaaaacggcaggtg

SEQ ID NO: 80764 - DNA, 30 bp, Artificial Sequence
  Synthetic oligonucleotide
cctaaacaacaaatgacacctgaagaggtg

SEQ ID NO: 80765 - DNA, 30 bp, Artificial Sequence
  Synthetic oligonucleotide
tccaaaaagttacgagggtagagagaggtg

SEQ ID NO: 80766 - DNA, 30 bp, Artificial Sequence
  Synthetic oligonucleotide
gagggcggacggaaaccatggaaggaggtg

SEQ ID NO: 80767 - DNA, 30 bp, Artificial Sequence
  Synthetic oligonucleotide
gttgcgatggtgttagtctagttggaggtg

SEQ ID NO: 80768 - DNA, 30 bp, Artificial Sequence
  Synthetic oligonucleotide
gcgtttctaggtaataaaagggtataggtg

SEQ ID NO: 80769 - DNA, 30 bp, Artificial Sequence
  Synthetic oligonucleotide
ccttgtaaacagcgcacattggggacggtg

SEQ ID NO: 80770 - DNA, 30 bp, Artificial Sequence
  Synthetic oligonucleotide
caaagccggcctgaaccagtcccagcggtg

SEQ ID NO: 80771 - DNA, 30 bp, Artificial Sequence
  Synthetic oligonucleotide
gagcgacaatggtatatgtgagattcggtg

SEQ ID NO: 80772 - DNA, 30 bp, Artificial Sequence
  Synthetic oligonucleotide
tgagtgatcgaaaacgacgatacaggggtg

SEQ ID NO: 80773 - DNA, 30 bp, Artificial Sequence
  Synthetic oligonucleotide
ctaaacaaggcaggaccagacaaatgggtg

SEQ ID NO: 80774 - DNA, 31 bp, Artificial Sequence
  Synthetic oligonucleotide
aatgccgtatgccaaaatgctgcgatgggtg

SEQ ID NO: 80775 - DNA, 30 bp, Artificial Sequence
  Synthetic oligonucleotide
tcctaagtatcaagacagaaggactgggtg

SEQ ID NO: 80776 - DNA, 30 bp, Artificial Sequence
  Synthetic oligonucleotide
gatggagggggactctaggcatccatggtg

SEQ ID NO: 80777 - DNA, 30 bp, Artificial Sequence
  Synthetic oligonucleotide
cacacatgacccataacgctaatactggtg

SEQ ID NO: 80778 - DNA, 30 bp, Artificial Sequence
  Synthetic oligonucleotide
ttatggtgcgacgggggagtatctgtggtg

SEQ ID NO: 80779 - DNA, 30 bp, Artificial Sequence
  Synthetic oligonucleotide
catgcgcaatttgatgaaatggcattggtg

SEQ ID NO: 80780 - DNA, 30 bp, Artificial Sequence
  Synthetic oligonucleotide
gctgtgcagtgaccgcatccaggcttggtg

SEQ ID NO: 80781 - DNA, 30 bp, Artificial Sequence
  Synthetic oligonucleotide
ggaccactctcccatagccggatcaatgtg

SEQ ID NO: 80782 - DNA, 30 bp, Artificial Sequence
  Synthetic oligonucleotide
agacgtaaggtgattcaccgagagaatgtg

SEQ ID NO: 80783 - DNA, 30 bp, Artificial Sequence
  Synthetic oligonucleotide
ttacagctgcgtaccgacaaggggaatgtg

SEQ ID NO: 80784 - DNA, 30 bp, Artificial Sequence
  Synthetic oligonucleotide
cggaggtgtagtcacacgggttaagatgtg

SEQ ID NO: 80785 - DNA, 30 bp, Artificial Sequence
  Synthetic oligonucleotide
agtacgggccggaggcgcaacggagatgtg

SEQ ID NO: 80786 - DNA, 30 bp, Artificial Sequence
  Synthetic oligonucleotide
tcatccaggacctgagattctaacgatgtg

SEQ ID NO: 80787 - DNA, 30 bp, Artificial Sequence
  Synthetic oligonucleotide
ccaagtatgatgtaatagtgtgaggatgtg

SEQ ID NO: 80788 - DNA, 30 bp, Artificial Sequence
  Synthetic oligonucleotide
cactgtgaaaggtggcgaattaaatatgtg

SEQ ID NO: 80789 - DNA, 31 bp, Artificial Sequence
  Synthetic oligonucleotide
aggtctacaatcaatatgggtgacgtatgtg

SEQ ID NO: 80790 - DNA, 30 bp, Artificial Sequence
  Synthetic oligonucleotide
tactatcggaacatctggggtatgtatgtg

SEQ ID NO: 80791 - DNA, 30 bp, Artificial Sequence
  Synthetic oligonucleotide
aaaagaataagacgaggtggcgccactgtg

SEQ ID NO: 80792 - DNA, 30 bp, Artificial Sequence
  Synthetic oligonucleotide
gtagggcaaagtaaacatgaaggcactgtg

SEQ ID NO: 80793 - DNA, 30 bp, Artificial Sequence
  Synthetic oligonucleotide
ttacgcgttgctgtcaaatatgtgcctgtg

SEQ ID NO: 80794 - DNA, 30 bp, Artificial Sequence
  Synthetic oligonucleotide
acacgaatggtcttaaataaaagtcctgtg

SEQ ID NO: 80795 - DNA, 30 bp, Artificial Sequence
  Synthetic oligonucleotide
agggcatcatatagtccgtcagttcctgtg

SEQ ID NO: 80796 - DNA, 30 bp, Artificial Sequence
  Synthetic oligonucleotide
tctccgttagaagaggagggtatggctgtg

SEQ ID NO: 80797 - DNA, 30 bp, Artificial Sequence
  Synthetic oligonucleotide
cggcctggcctacctggttatgagagtgtg

SEQ ID NO: 80798 - DNA, 30 bp, Artificial Sequence
  Synthetic oligonucleotide
tgggcgacaatataataaaccaagcgtgtg

SEQ ID NO: 80799 - DNA, 30 bp, Artificial Sequence
  Synthetic oligonucleotide
acccagggggatagccgcctaatgcgtgtg

SEQ ID NO: 80800 - DNA, 30 bp, Artificial Sequence
  Synthetic oligonucleotide
ccagagagaaaaccgcgggtcgtgtgtgtg

SEQ ID NO: 80801 - DNA, 31 bp, Artificial Sequence
  Synthetic oligonucleotide
ctgtagagagggtgaggacaaatattgtgtg

SEQ ID NO: 80802 - DNA, 30 bp, Artificial Sequence
  Synthetic oligonucleotide
ggaaacctcgcatgatagcgtgcaattgtg

SEQ ID NO: 80803 - DNA, 30 bp, Artificial Sequence
  Synthetic oligonucleotide
aatcgcggaatagtgcgctatcgcattgtg

SEQ ID NO: 80804 - DNA, 30 bp, Artificial Sequence
  Synthetic oligonucleotide
aggaaatcacgttctctgcgcccacttgtg

SEQ ID NO: 80805 - DNA, 30 bp, Artificial Sequence
  Synthetic oligonucleotide
tcaggcttatctgaatttgagaagcttgtg

SEQ ID NO: 80806 - DNA, 30 bp, Artificial Sequence
  Synthetic oligonucleotide
ttcgtggatgagttatcgaatagtcttgtg

SEQ ID NO: 80807 - DNA, 30 bp, Artificial Sequence
  Synthetic oligonucleotide
gcatgctgcggctgaataggagggtttgtg

SEQ ID NO: 80808 - DNA, 30 bp, Artificial Sequence
  Synthetic oligonucleotide
cactagaatcctgcctcgattgaaaaattg

SEQ ID NO: 80809 - DNA, 30 bp, Artificial Sequence
  Synthetic oligonucleotide
ggtgagtctcggactcacgtgataaaattg

SEQ ID NO: 80810 - DNA, 30 bp, Artificial Sequence
  Synthetic oligonucleotide
cccaaacaagcgtattatgtggtaaaattg

SEQ ID NO: 80811 - DNA, 30 bp, Artificial Sequence
  Synthetic oligonucleotide
gtgtcaaagtctgactcaactcggcaattg

SEQ ID NO: 80812 - DNA, 30 bp, Artificial Sequence
  Synthetic oligonucleotide
ccggaacactaaatagtactgcccgaattg

SEQ ID NO: 80813 - DNA, 30 bp, Artificial Sequence
  Synthetic oligonucleotide
agtaggcttcgtaccggtagctgggaattg

SEQ ID NO: 80814 - DNA, 30 bp, Artificial Sequence
  Synthetic oligonucleotide
gggaagtcttgtatatgctctcctgaattg

SEQ ID NO: 80815 - DNA, 30 bp, Artificial Sequence
  Synthetic oligonucleotide
gaacagtgtccgcgaaatggcatataattg

SEQ ID NO: 80816 - DNA, 30 bp, Artificial Sequence
  Synthetic oligonucleotide
ccttgcctcagtattgaaacacggtaattg

SEQ ID NO: 80817 - DNA, 30 bp, Artificial Sequence
  Synthetic oligonucleotide
tatcatgaaaatgagcacattcgttaattg

SEQ ID NO: 80818 - DNA, 30 bp, Artificial Sequence
  Synthetic oligonucleotide
agtgagtcggatccgacttaataaacattg

SEQ ID NO: 80819 - DNA, 30 bp, Artificial Sequence
  Synthetic oligonucleotide
aggaggacaggttgcccagaagaaccattg

SEQ ID NO: 80820 - DNA, 30 bp, Artificial Sequence
  Synthetic oligonucleotide
gtcaaccagggacagtgcggtagagcattg

SEQ ID NO: 80821 - DNA, 30 bp, Artificial Sequence
  Synthetic oligonucleotide
gcctcagtcccatcattcaaagaggcattg

SEQ ID NO: 80822 - DNA, 30 bp, Artificial Sequence
  Synthetic oligonucleotide
taggcccgtggtttacgaaaggcgtcattg

SEQ ID NO: 80823 - DNA, 30 bp, Artificial Sequence
  Synthetic oligonucleotide
atggctgaaggaaacagcagcggcagattg

SEQ ID NO: 80824 - DNA, 30 bp, Artificial Sequence
  Synthetic oligonucleotide
cggggtgatcggacctcaggtggacgattg

SEQ ID NO: 80825 - DNA, 30 bp, Artificial Sequence
  Synthetic oligonucleotide
ggtaggaggcatagttcaccggaaggattg

SEQ ID NO: 80826 - DNA, 30 bp, Artificial Sequence
  Synthetic oligonucleotide
acagcggaatcgattatcgaaggcggattg

SEQ ID NO: 80827 - DNA, 30 bp, Artificial Sequence
  Synthetic oligonucleotide
atattagtcgactccggtacctcgggattg

SEQ ID NO: 80828 - DNA, 30 bp, Artificial Sequence
  Synthetic oligonucleotide
tgctctccaatatacatgtcgcgatgattg

SEQ ID NO: 80829 - DNA, 30 bp, Artificial Sequence
  Synthetic oligonucleotide
acgcagtattccaggcgggggaactgattg

SEQ ID NO: 80830 - DNA, 30 bp, Artificial Sequence
  Synthetic oligonucleotide
gcaatgattcaacccagagttcagtgattg

SEQ ID NO: 80831 - DNA, 30 bp, Artificial Sequence
  Synthetic oligonucleotide
cgcgaatagcctgggcgcccgtcgtgattg

SEQ ID NO: 80832 - DNA, 30 bp, Artificial Sequence
  Synthetic oligonucleotide
ccatagtttgcgccgtccgtacccatattg

SEQ ID NO: 80833 - DNA, 30 bp, Artificial Sequence
  Synthetic oligonucleotide
ttgaaggctactggatcatgggtcatattg

SEQ ID NO: 80834 - DNA, 30 bp, Artificial Sequence
  Synthetic oligonucleotide
gtctggagtaagggatctgctgtgatattg

SEQ ID NO: 80835 - DNA, 30 bp, Artificial Sequence
  Synthetic oligonucleotide
ggcgattataagactgccggcgatatattg

SEQ ID NO: 80836 - DNA, 30 bp, Artificial Sequence
  Synthetic oligonucleotide
ataacgggacatttgagaaaaaaactattg

SEQ ID NO: 80837 - DNA, 30 bp, Artificial Sequence
  Synthetic oligonucleotide
gaaagagcttaggcaacagtctctctattg

SEQ ID NO: 80838 - DNA, 30 bp, Artificial Sequence
  Synthetic oligonucleotide
acgccaataaaatgcgaagtcagattattg

SEQ ID NO: 80839 - DNA, 30 bp, Artificial Sequence
  Synthetic oligonucleotide
tatgcagctttgcgagaggaatagaacttg

SEQ ID NO: 80840 - DNA, 30 bp, Artificial Sequence
  Synthetic oligonucleotide
aaggaattggcttgaagcgagcctaacttg

SEQ ID NO: 80841 - DNA, 30 bp, Artificial Sequence
  Synthetic oligonucleotide
ggtggtgatgctagtatttttcctaacttg

SEQ ID NO: 80842 - DNA, 30 bp, Artificial Sequence
  Synthetic oligonucleotide
ttcgtgcggaggcccagtattcgtcacttg

SEQ ID NO: 80843 - DNA, 30 bp, Artificial Sequence
  Synthetic oligonucleotide
gaaagatcagaaataacgcggccagacttg

SEQ ID NO: 80844 - DNA, 30 bp, Artificial Sequence
  Synthetic oligonucleotide
gaaagaagtatagttctatcgagagacttg

SEQ ID NO: 80845 - DNA, 30 bp, Artificial Sequence
  Synthetic oligonucleotide
ttactacgttaggatactgaaagatacttg

SEQ ID NO: 80846 - DNA, 30 bp, Artificial Sequence
  Synthetic oligonucleotide
gtagtgaatacggaggttggcacaaccttg

SEQ ID NO: 80847 - DNA, 30 bp, Artificial Sequence
  Synthetic oligonucleotide
cggaggaaagttgtattctctttgaccttg

SEQ ID NO: 80848 - DNA, 30 bp, Artificial Sequence
  Synthetic oligonucleotide
ttcgcgtaggctggccgcgcttgagccttg

SEQ ID NO: 80849 - DNA, 30 bp, Artificial Sequence
  Synthetic oligonucleotide
ctactcggaaattctagagaccatgccttg

SEQ ID NO: 80850 - DNA, 30 bp, Artificial Sequence
  Synthetic oligonucleotide
gagggggtgactagatcaagtcatgccttg

SEQ ID NO: 80851 - DNA, 30 bp, Artificial Sequence
  Synthetic oligonucleotide
ccagacagaccggaggtctgacctgccttg

SEQ ID NO: 80852 - DNA, 30 bp, Artificial Sequence
  Synthetic oligonucleotide
acgcccctgcgacgttcatcaaaatccttg

SEQ ID NO: 80853 - DNA, 30 bp, Artificial Sequence
  Synthetic oligonucleotide
accagcaatatcttgggaataataagcttg

SEQ ID NO: 80854 - DNA, 30 bp, Artificial Sequence
  Synthetic oligonucleotide
aagcgagatgactagtaaaactaacgcttg

SEQ ID NO: 80855 - DNA, 30 bp, Artificial Sequence
  Synthetic oligonucleotide
ctgtagggcgggtatgacccaaatggcttg

SEQ ID NO: 80856 - DNA, 30 bp, Artificial Sequence
  Synthetic oligonucleotide
tgcgcaaacatctggttcaagctgtgcttg

SEQ ID NO: 80857 - DNA, 30 bp, Artificial Sequence
  Synthetic oligonucleotide
caattcacagaggattgtgggagcatcttg

SEQ ID NO: 80858 - DNA, 30 bp, Artificial Sequence
  Synthetic oligonucleotide
cttgcattcgtttgggctggtcgtatcttg

SEQ ID NO: 80859 - DNA, 30 bp, Artificial Sequence
  Synthetic oligonucleotide
acgagaaaagtcctatatccagaactcttg

SEQ ID NO: 80860 - DNA, 30 bp, Artificial Sequence
  Synthetic oligonucleotide
cagcaggtgccaaatctcaatctcaagttg

SEQ ID NO: 80861 - DNA, 30 bp, Artificial Sequence
  Synthetic oligonucleotide
ttgtacaggatttggataagccctcagttg

SEQ ID NO: 80862 - DNA, 30 bp, Artificial Sequence
  Synthetic oligonucleotide
aaacagcgcgtccaaggctatcgggagttg

SEQ ID NO: 80863 - DNA, 30 bp, Artificial Sequence
  Synthetic oligonucleotide
acagacgagtcaacaacttcgtatgagttg

SEQ ID NO: 80864 - DNA, 30 bp, Artificial Sequence
  Synthetic oligonucleotide
ggtcaaatcagaccattgtgattatagttg

SEQ ID NO: 80865 - DNA, 30 bp, Artificial Sequence
  Synthetic oligonucleotide
tgccgggtcttagtgctagataggtagttg

SEQ ID NO: 80866 - DNA, 30 bp, Artificial Sequence
  Synthetic oligonucleotide
agtgaggaactgaggctttgacattagttg

SEQ ID NO: 80867 - DNA, 30 bp, Artificial Sequence
  Synthetic oligonucleotide
acaacagagagtttggactaggtgacgttg

SEQ ID NO: 80868 - DNA, 30 bp, Artificial Sequence
  Synthetic oligonucleotide
tcgcccctggcaacacttaggaatacgttg

SEQ ID NO: 80869 - DNA, 30 bp, Artificial Sequence
  Synthetic oligonucleotide
cgtctctctgatcggtccgagaaagcgttg

SEQ ID NO: 80870 - DNA, 30 bp, Artificial Sequence
  Synthetic oligonucleotide
gcaataatgggtgaacgggaagcaaggttg

SEQ ID NO: 80871 - DNA, 30 bp, Artificial Sequence
  Synthetic oligonucleotide
atagaggcaataggcgggtgaaacaggttg

SEQ ID NO: 80872 - DNA, 30 bp, Artificial Sequence
  Synthetic oligonucleotide
tgaatgtcggcggtgatatacatagggttg

SEQ ID NO: 80873 - DNA, 30 bp, Artificial Sequence
  Synthetic oligonucleotide
attagactaaaggtggttcaagaatggttg

SEQ ID NO: 80874 - DNA, 30 bp, Artificial Sequence
  Synthetic oligonucleotide
cagtaaaatggctgtgatttattgtggttg

SEQ ID NO: 80875 - DNA, 30 bp, Artificial Sequence
  Synthetic oligonucleotide
cgttcctatcagtccaaattcatcgtgttg

SEQ ID NO: 80876 - DNA, 30 bp, Artificial Sequence
  Synthetic oligonucleotide
cattacgcgactaatgatgtacgggtgttg

SEQ ID NO: 80877 - DNA, 30 bp, Artificial Sequence
  Synthetic oligonucleotide
cagttggaagcttcacatccaggcttgttg

SEQ ID NO: 80878 - DNA, 30 bp, Artificial Sequence
  Synthetic oligonucleotide
gaagaattaggtaagcgtacatgaaatttg

SEQ ID NO: 80879 - DNA, 30 bp, Artificial Sequence
  Synthetic oligonucleotide
gtacgtcttctgataggaaggaacgatttg

SEQ ID NO: 80880 - DNA, 30 bp, Artificial Sequence
  Synthetic oligonucleotide
cgagcaaacacataagcagtattcgatttg

SEQ ID NO: 80881 - DNA, 30 bp, Artificial Sequence
  Synthetic oligonucleotide
gtagactcgggccaagcatgcgggtatttg

SEQ ID NO: 80882 - DNA, 30 bp, Artificial Sequence
  Synthetic oligonucleotide
gcggtcctcgagaagaatcgagcttatttg

SEQ ID NO: 80883 - DNA, 30 bp, Artificial Sequence
  Synthetic oligonucleotide
cagggtgggatccttgggctcaagcctttg

SEQ ID NO: 80884 - DNA, 30 bp, Artificial Sequence
  Synthetic oligonucleotide
aggaaggaacagatggtatcgttggctttg

SEQ ID NO: 80885 - DNA, 30 bp, Artificial Sequence
  Synthetic oligonucleotide
tgctgacgacttgttacagttagtgctttg

SEQ ID NO: 80886 - DNA, 30 bp, Artificial Sequence
  Synthetic oligonucleotide
ccacgataccgggaaacattttcgtctttg

SEQ ID NO: 80887 - DNA, 30 bp, Artificial Sequence
  Synthetic oligonucleotide
gggacgttacgagccagttaacggtctttg

SEQ ID NO: 80888 - DNA, 30 bp, Artificial Sequence
  Synthetic oligonucleotide
ggggctagggattacgactaagggtctttg

SEQ ID NO: 80889 - DNA, 30 bp, Artificial Sequence
  Synthetic oligonucleotide
agctgcaatctggaaattcctatgtctttg

SEQ ID NO: 80890 - DNA, 30 bp, Artificial Sequence
  Synthetic oligonucleotide
aggccggattctggccgtaagaaacgtttg

SEQ ID NO: 80891 - DNA, 30 bp, Artificial Sequence
  Synthetic oligonucleotide
acgtaacatattcattactacaaaggtttg

SEQ ID NO: 80892 - DNA, 30 bp, Artificial Sequence
  Synthetic oligonucleotide
acggagatgagacaaaaaactgacggtttg

SEQ ID NO: 80893 - DNA, 30 bp, Artificial Sequence
  Synthetic oligonucleotide
tcggtcaaatttcagatacagttgggtttg

SEQ ID NO: 80894 - DNA, 30 bp, Artificial Sequence
  Synthetic oligonucleotide
tgtcgatgagtcaagatgacagctggtttg

SEQ ID NO: 80895 - DNA, 30 bp, Artificial Sequence
  Synthetic oligonucleotide
acgagcatgttcaaggtggtacgatttttg

SEQ ID NO: 80896 - DNA, 30 bp, Artificial Sequence
  Synthetic oligonucleotide
taggcccgcgtatgtatccgaccaaaaaat

SEQ ID NO: 80897 - DNA, 30 bp, Artificial Sequence
  Synthetic oligonucleotide
accggaaaccgcgatcacgaacgcaaaaat

SEQ ID NO: 80898 - DNA, 30 bp, Artificial Sequence
  Synthetic oligonucleotide
ctaaattgcatgtgacccgagggacaaaat

SEQ ID NO: 80899 - DNA, 30 bp, Artificial Sequence
  Synthetic oligonucleotide
ctgcgataagattccactcaccgtcaaaat

SEQ ID NO: 80900 - DNA, 30 bp, Artificial Sequence
  Synthetic oligonucleotide
cacatggaatacgggaaacacatcgaaaat

SEQ ID NO: 80901 - DNA, 30 bp, Artificial Sequence
  Synthetic oligonucleotide
gatgcaagcagggaagcgtgcttggaaaat

SEQ ID NO: 80902 - DNA, 30 bp, Artificial Sequence
  Synthetic oligonucleotide
ctatcacggacatgcgaggtatatgaaaat

SEQ ID NO: 80903 - DNA, 30 bp, Artificial Sequence
  Synthetic oligonucleotide
cgaaggcgccagtcccgaacagcctaaaat

SEQ ID NO: 80904 - DNA, 30 bp, Artificial Sequence
  Synthetic oligonucleotide
agcgggagtcggtttgggaccgggtaaaat

SEQ ID NO: 80905 - DNA, 30 bp, Artificial Sequence
  Synthetic oligonucleotide
agtggcagtccaaatttttgcggcacaaat

SEQ ID NO: 80906 - DNA, 30 bp, Artificial Sequence
  Synthetic oligonucleotide
cgtaaccttcaatgttatgtagtcacaaat

SEQ ID NO: 80907 - DNA, 30 bp, Artificial Sequence
  Synthetic oligonucleotide
tggcgagtccgcgtgaaacgatatacaaat

SEQ ID NO: 80908 - DNA, 30 bp, Artificial Sequence
  Synthetic oligonucleotide
cggctggggagctaatcgggagctacaaat

SEQ ID NO: 80909 - DNA, 30 bp, Artificial Sequence
  Synthetic oligonucleotide
tctaccacggttagatgaagtgtaccaaat

SEQ ID NO: 80910 - DNA, 30 bp, Artificial Sequence
  Synthetic oligonucleotide
cggaactacaaattaagagagttgccaaat

SEQ ID NO: 80911 - DNA, 30 bp, Artificial Sequence
  Synthetic oligonucleotide
ggaataactgactatgaatcaaaggcaaat

SEQ ID NO: 80912 - DNA, 30 bp, Artificial Sequence
  Synthetic oligonucleotide
tatgcgatccttggcgcgagacaggcaaat

SEQ ID NO: 80913 - DNA, 30 bp, Artificial Sequence
  Synthetic oligonucleotide
aggaaagcatcaagaaacgcctcggcaaat

SEQ ID NO: 80914 - DNA, 30 bp, Artificial Sequence
  Synthetic oligonucleotide
cgtcgtaaaggatagcgtggttatgcaaat

SEQ ID NO: 80915 - DNA, 30 bp, Artificial Sequence
  Synthetic oligonucleotide
acaagataaattgccggtgcgctatcaaat

SEQ ID NO: 80916 - DNA, 30 bp, Artificial Sequence
  Synthetic oligonucleotide
ggctggaatagtctattaaggtcctcaaat

SEQ ID NO: 80917 - DNA, 31 bp, Artificial Sequence
  Synthetic oligonucleotide
ccccaggcaattaatggaggcgtagtcaaat

SEQ ID NO: 80918 - DNA, 30 bp, Artificial Sequence
  Synthetic oligonucleotide
tgcatcataggtgagatatgacatagaaat

SEQ ID NO: 80919 - DNA, 30 bp, Artificial Sequence
  Synthetic oligonucleotide
cggaaggaatccgtgatatgttctagaaat

SEQ ID NO: 80920 - DNA, 30 bp, Artificial Sequence
  Synthetic oligonucleotide
cgacacggacggggtgatgtgtatggaaat

SEQ ID NO: 80921 - DNA, 30 bp, Artificial Sequence
  Synthetic oligonucleotide
acgtaggagggctcgcatgtaaaatgaaat

SEQ ID NO: 80922 - DNA, 30 bp, Artificial Sequence
  Synthetic oligonucleotide
tcttcgactaggttaatcagagggtgaaat

SEQ ID NO: 80923 - DNA, 30 bp, Artificial Sequence
  Synthetic oligonucleotide
agcgaactaccgtcgaaaaacttgtgaaat

SEQ ID NO: 80924 - DNA, 30 bp, Artificial Sequence
  Synthetic oligonucleotide
ataaggaagggcacgaatcattgactaaat

SEQ ID NO: 80925 - DNA, 30 bp, Artificial Sequence
  Synthetic oligonucleotide
agggcagatgtgctacggtgcaacctaaat

SEQ ID NO: 80926 - DNA, 30 bp, Artificial Sequence
  Synthetic oligonucleotide
acgtgctgtcacaaggaggtgagtgtaaat

SEQ ID NO: 80927 - DNA, 30 bp, Artificial Sequence
  Synthetic oligonucleotide
cagagcgtctggaagggagcgggattaaat

SEQ ID NO: 80928 - DNA, 30 bp, Artificial Sequence
  Synthetic oligonucleotide
ggagcccggctgaacgttcctgtattaaat

SEQ ID NO: 80929 - DNA, 30 bp, Artificial Sequence
  Synthetic oligonucleotide
cgaagtaggtgaacgatgaatcttttaaat

SEQ ID NO: 80930 - DNA, 30 bp, Artificial Sequence
  Synthetic oligonucleotide
aaacgagtgtccccatagcgtcaaaacaat

SEQ ID NO: 80931 - DNA, 30 bp, Artificial Sequence
  Synthetic oligonucleotide
gaatgcccgagcaggccaactctgaacaat

SEQ ID NO: 80932 - DNA, 30 bp, Artificial Sequence
  Synthetic oligonucleotide
cctgccatctgtggccgcgtgggagacaat

SEQ ID NO: 80933 - DNA, 30 bp, Artificial Sequence
  Synthetic oligonucleotide
cggggaggggtgttctcccatagttacaat

SEQ ID NO: 80934 - DNA, 30 bp, Artificial Sequence
  Synthetic oligonucleotide
gcgtggtgaggacgacgcaattacaccaat

SEQ ID NO: 80935 - DNA, 30 bp, Artificial Sequence
  Synthetic oligonucleotide
gcaagagggcaggtaacacaacttaccaat

SEQ ID NO: 80936 - DNA, 30 bp, Artificial Sequence
  Synthetic oligonucleotide
ggggcggatcccgatgagataggacccaat

SEQ ID NO: 80937 - DNA, 30 bp, Artificial Sequence
  Synthetic oligonucleotide
acgtgcgtaaacagtgttggcggacccaat

SEQ ID NO: 80938 - DNA, 30 bp, Artificial Sequence
  Synthetic oligonucleotide
cctccgaatccagtagcggcacacgccaat

SEQ ID NO: 80939 - DNA, 30 bp, Artificial Sequence
  Synthetic oligonucleotide
tgtctgccggctgaaggataccgatccaat

SEQ ID NO: 80940 - DNA, 30 bp, Artificial Sequence
  Synthetic oligonucleotide
gaactacagggcttgcccggagcccgcaat

SEQ ID NO: 80941 - DNA, 30 bp, Artificial Sequence
  Synthetic oligonucleotide
cagctcgggggctggcgaaaactcggcaat

SEQ ID NO: 80942 - DNA, 30 bp, Artificial Sequence
  Synthetic oligonucleotide
ctccggcggcaagatagagtgaagggcaat

SEQ ID NO: 80943 - DNA, 30 bp, Artificial Sequence
  Synthetic oligonucleotide
gcggagagttaactcagtgcgcctggcaat

SEQ ID NO: 80944 - DNA, 30 bp, Artificial Sequence
  Synthetic oligonucleotide
aatagcgtaagcgcgggagtggagctcaat

SEQ ID NO: 80945 - DNA, 30 bp, Artificial Sequence
  Synthetic oligonucleotide
gcgtgtgacaaacggtttagaatagtcaat

SEQ ID NO: 80946 - DNA, 30 bp, Artificial Sequence
  Synthetic oligonucleotide
ttggggagaaccctatcattgagcgtcaat

SEQ ID NO: 80947 - DNA, 30 bp, Artificial Sequence
  Synthetic oligonucleotide
cgtacactacctggggatctggtcaagaat

SEQ ID NO: 80948 - DNA, 30 bp, Artificial Sequence
  Synthetic oligonucleotide
acggagcagtggtgtaaagtatggaagaat

SEQ ID NO: 80949 - DNA, 30 bp, Artificial Sequence
  Synthetic oligonucleotide
cagcgctcattagcattaggaactaagaat

SEQ ID NO: 80950 - DNA, 30 bp, Artificial Sequence
  Synthetic oligonucleotide
ctcggggacgaggcactgtgaactaagaat

SEQ ID NO: 80951 - DNA, 30 bp, Artificial Sequence
  Synthetic oligonucleotide
tcagggcatgtgttggtgcggcgtaagaat

SEQ ID NO: 80952 - DNA, 30 bp, Artificial Sequence
  Synthetic oligonucleotide
caagaatcggataaaggagaaggtaagaat

SEQ ID NO: 80953 - DNA, 30 bp, Artificial Sequence
  Synthetic oligonucleotide
ccggagaagaagaacaacgtatcgcagaat

SEQ ID NO: 80954 - DNA, 30 bp, Artificial Sequence
  Synthetic oligonucleotide
atccggcacagacccaaatcattcgagaat

SEQ ID NO: 80955 - DNA, 30 bp, Artificial Sequence
  Synthetic oligonucleotide
agtgcaagttcgcaaagtagtgttgagaat

SEQ ID NO: 80956 - DNA, 30 bp, Artificial Sequence
  Synthetic oligonucleotide
atgatcacaatcgttcggagacactagaat

SEQ ID NO: 80957 - DNA, 30 bp, Artificial Sequence
  Synthetic oligonucleotide
agcttaggtattcagagggggttgtagaat

SEQ ID NO: 80958 - DNA, 30 bp, Artificial Sequence
  Synthetic oligonucleotide
agcggcgaacggtggagaggaggaacgaat

SEQ ID NO: 80959 - DNA, 30 bp, Artificial Sequence
  Synthetic oligonucleotide
tcacccggacatgacaccgaacacacgaat

SEQ ID NO: 80960 - DNA, 30 bp, Artificial Sequence
  Synthetic oligonucleotide
cagtaggggctgaaaagagtacgcacgaat

SEQ ID NO: 80961 - DNA, 30 bp, Artificial Sequence
  Synthetic oligonucleotide
tgctgccgataaggctcgctcattccgaat

SEQ ID NO: 80962 - DNA, 30 bp, Artificial Sequence
  Synthetic oligonucleotide
agatcgagccttaaggcgctgatcgcgaat

SEQ ID NO: 80963 - DNA, 30 bp, Artificial Sequence
  Synthetic oligonucleotide
gcatagcataacttcatatttacatcgaat

SEQ ID NO: 80964 - DNA, 30 bp, Artificial Sequence
  Synthetic oligonucleotide
tcatcccgagtaccataatgctacaggaat

SEQ ID NO: 80965 - DNA, 30 bp, Artificial Sequence
  Synthetic oligonucleotide
aggacgaccaagcttggtcaacagaggaat

SEQ ID NO: 80966 - DNA, 30 bp, Artificial Sequence
  Synthetic oligonucleotide
caaaaatgcaacgaaagtccgatacggaat

SEQ ID NO: 80967 - DNA, 30 bp, Artificial Sequence
  Synthetic oligonucleotide
gtagtacgggatagtgtcaatacctggaat

SEQ ID NO: 80968 - DNA, 30 bp, Artificial Sequence
  Synthetic oligonucleotide
tggatagtccaagcgggtcacataatgaat

SEQ ID NO: 80969 - DNA, 30 bp, Artificial Sequence
  Synthetic oligonucleotide
agtaaggtcggtgttcggaaagagatgaat

SEQ ID NO: 80970 - DNA, 30 bp, Artificial Sequence
  Synthetic oligonucleotide
tcacactaaagcgtaccgagacctatgaat

SEQ ID NO: 80971 - DNA, 30 bp, Artificial Sequence
  Synthetic oligonucleotide
aggagtttagaataaagccggaccctgaat

SEQ ID NO: 80972 - DNA, 30 bp, Artificial Sequence
  Synthetic oligonucleotide
cgtccatgtgcggtcaggatatgcgtgaat

SEQ ID NO: 80973 - DNA, 30 bp, Artificial Sequence
  Synthetic oligonucleotide
tttcggcgtgaacaactgcgagatgtgaat

SEQ ID NO: 80974 - DNA, 30 bp, Artificial Sequence
  Synthetic oligonucleotide
agcttaagggtacagggcgcgcgtgtgaat

SEQ ID NO: 80975 - DNA, 30 bp, Artificial Sequence
  Synthetic oligonucleotide
cgctatcgccagggaacggactcacataat

SEQ ID NO: 80976 - DNA, 30 bp, Artificial Sequence
  Synthetic oligonucleotide
tcgatgtacaagcccgaatactgacataat

SEQ ID NO: 80977 - DNA, 30 bp, Artificial Sequence
  Synthetic oligonucleotide
cctccagataatcacggtaggcaagataat

SEQ ID NO: 80978 - DNA, 30 bp, Artificial Sequence
  Synthetic oligonucleotide
tcatgtccagcacgtaccgggggcgataat

SEQ ID NO: 80979 - DNA, 30 bp, Artificial Sequence
  Synthetic oligonucleotide
caagggagcatagcatgtgttgatgataat

SEQ ID NO: 80980 - DNA, 30 bp, Artificial Sequence
  Synthetic oligonucleotide
ggtgaaggacaaggtgataacgctgataat

SEQ ID NO: 80981 - DNA, 30 bp, Artificial Sequence
  Synthetic oligonucleotide
cagcgacctgcactaaaggtaacatataat

SEQ ID NO: 80982 - DNA, 30 bp, Artificial Sequence
  Synthetic oligonucleotide
cccagaacagagatacacgcatgttataat

SEQ ID NO: 80983 - DNA, 30 bp, Artificial Sequence
  Synthetic oligonucleotide
gacagggggaagttcgtcgacgagcctaat

SEQ ID NO: 80984 - DNA, 30 bp, Artificial Sequence
  Synthetic oligonucleotide
cgcgaataggaggataagtctgatgctaat

SEQ ID NO: 80985 - DNA, 30 bp, Artificial Sequence
  Synthetic oligonucleotide
gaaccaacagcaggattgcggccgtctaat

SEQ ID NO: 80986 - DNA, 30 bp, Artificial Sequence
  Synthetic oligonucleotide
cgtgtaaattgaggtattaggaccagtaat

SEQ ID NO: 80987 - DNA, 30 bp, Artificial Sequence
  Synthetic oligonucleotide
tgtagggtcatctaaaatggagctagtaat

SEQ ID NO: 80988 - DNA, 30 bp, Artificial Sequence
  Synthetic oligonucleotide
tgtgctaatgatcacaagaatgaacgtaat

SEQ ID NO: 80989 - DNA, 30 bp, Artificial Sequence
  Synthetic oligonucleotide
atcaatcgatacagcactggatagcgtaat

SEQ ID NO: 80990 - DNA, 30 bp, Artificial Sequence
  Synthetic oligonucleotide
tagacagtattagacggaaggtaaggtaat

SEQ ID NO: 80991 - DNA, 30 bp, Artificial Sequence
  Synthetic oligonucleotide
gaggtactggattcaggattccgaggtaat

SEQ ID NO: 80992 - DNA, 30 bp, Artificial Sequence
  Synthetic oligonucleotide
aaggccggtaatgtgagatccaagggtaat

SEQ ID NO: 80993 - DNA, 30 bp, Artificial Sequence
  Synthetic oligonucleotide
ggggggttagctcgacgagaagtacttaat

SEQ ID NO: 80994 - DNA, 30 bp, Artificial Sequence
  Synthetic oligonucleotide
ccgattcaggaagcacacggccacaaacat

SEQ ID NO: 80995 - DNA, 30 bp, Artificial Sequence
  Synthetic oligonucleotide
attcgactatcttgtgaacatgcgaaacat

SEQ ID NO: 80996 - DNA, 30 bp, Artificial Sequence
  Synthetic oligonucleotide
gcgtagtcctgtgccaaatgtatgaaacat

SEQ ID NO: 80997 - DNA, 30 bp, Artificial Sequence
  Synthetic oligonucleotide
aaaggatgagccatgcattcaggacaacat

SEQ ID NO: 80998 - DNA, 30 bp, Artificial Sequence
  Synthetic oligonucleotide
tcggtctcaaaggagtagaatgcgcaacat

SEQ ID NO: 80999 - DNA, 30 bp, Artificial Sequence
  Synthetic oligonucleotide
cggtctccttgaatctaagcgaggcaacat

SEQ ID NO: 81000 - DNA, 30 bp, Artificial Sequence
  Synthetic oligonucleotide
ggcttcccattcgtgggagggttgcaacat

SEQ ID NO: 81001 - DNA, 30 bp, Artificial Sequence
  Synthetic oligonucleotide
ccagcctgatagcaaataacagctcaacat

SEQ ID NO: 81002 - DNA, 30 bp, Artificial Sequence
  Synthetic oligonucleotide
ttaggaacgacggacctactcaaagaacat

SEQ ID NO: 81003 - DNA, 30 bp, Artificial Sequence
  Synthetic oligonucleotide
cgtacatcataattaattaatcgcgaacat

SEQ ID NO: 81004 - DNA, 30 bp, Artificial Sequence
  Synthetic oligonucleotide
tcggcctagtggtggtatgaaacgtaacat

SEQ ID NO: 81005 - DNA, 30 bp, Artificial Sequence
  Synthetic oligonucleotide
tgcagactccggattatcgtgatgtaacat

SEQ ID NO: 81006 - DNA, 30 bp, Artificial Sequence
  Synthetic oligonucleotide
ggcggacccggactatagtggaattaacat

SEQ ID NO: 81007 - DNA, 30 bp, Artificial Sequence
  Synthetic oligonucleotide
gggtaaggagcgacctactttgagacacat

SEQ ID NO: 81008 - DNA, 30 bp, Artificial Sequence
  Synthetic oligonucleotide
cggagccaaaggctaatggggtcgacacat

SEQ ID NO: 81009 - DNA, 30 bp, Artificial Sequence
  Synthetic oligonucleotide
ttacgtaacgtcctattcgcaaatacacat

SEQ ID NO: 81010 - DNA, 30 bp, Artificial Sequence
  Synthetic oligonucleotide
ccgaatcccgggagtaataatgatacacat

SEQ ID NO: 81011 - DNA, 30 bp, Artificial Sequence
  Synthetic oligonucleotide
atcggtgtgtaggcgaatcagcatccacat

SEQ ID NO: 81012 - DNA, 30 bp, Artificial Sequence
  Synthetic oligonucleotide
ggcaaaagaaatcaacacagtcaggcacat

SEQ ID NO: 81013 - DNA, 30 bp, Artificial Sequence
  Synthetic oligonucleotide
gtggatagcggggcacatgggtactcacat

SEQ ID NO: 81014 - DNA, 30 bp, Artificial Sequence
  Synthetic oligonucleotide
cactgattcgaatgaggtaccatttcacat

SEQ ID NO: 81015 - DNA, 30 bp, Artificial Sequence
  Synthetic oligonucleotide
accgacccggtattgttgagagtaagacat

SEQ ID NO: 81016 - DNA, 30 bp, Artificial Sequence
  Synthetic oligonucleotide
ggtcctgcgtcagcgaacaccgccagacat

SEQ ID NO: 81017 - DNA, 30 bp, Artificial Sequence
  Synthetic oligonucleotide
cgtaggactgagattgaactcccccgacat

SEQ ID NO: 81018 - DNA, 30 bp, Artificial Sequence
  Synthetic oligonucleotide
caacaacattaccaagctgctgggggacat

SEQ ID NO: 81019 - DNA, 31 bp, Artificial Sequence
  Synthetic oligonucleotide
caaaaccttgcctgtgtggaaacaatgacat

SEQ ID NO: 81020 - DNA, 30 bp, Artificial Sequence
  Synthetic oligonucleotide
gggacggggtagagaagtagtcactgacat

SEQ ID NO: 81021 - DNA, 30 bp, Artificial Sequence
  Synthetic oligonucleotide
acctcggtggggcgcacgcacgagtgacat

SEQ ID NO: 81022 - DNA, 30 bp, Artificial Sequence
  Synthetic oligonucleotide
ccgttgcaagaaaccaaaacccaactacat

SEQ ID NO: 81023 - DNA, 30 bp, Artificial Sequence
  Synthetic oligonucleotide
aggtgggattaattgagtgcggacgtacat

SEQ ID NO: 81024 - DNA, 30 bp, Artificial Sequence
  Synthetic oligonucleotide
tcacaccatggactcattctctgcgtacat

SEQ ID NO: 81025 - DNA, 30 bp, Artificial Sequence
  Synthetic oligonucleotide
cgggcagatccgcggtaaagattggtacat

SEQ ID NO: 81026 - DNA, 30 bp, Artificial Sequence
  Synthetic oligonucleotide
accggcttgcaaccaacgcaataaaaccat

SEQ ID NO: 81027 - DNA, 30 bp, Artificial Sequence
  Synthetic oligonucleotide
cggttgcggtgggtttaagtaacgaaccat

SEQ ID NO: 81028 - DNA, 30 bp, Artificial Sequence
  Synthetic oligonucleotide
cggtaactccagtcctcctgttgccaccat

SEQ ID NO: 81029 - DNA, 30 bp, Artificial Sequence
  Synthetic oligonucleotide
gctgagtgtacagctgtagggtcctaccat

SEQ ID NO: 81030 - DNA, 30 bp, Artificial Sequence
  Synthetic oligonucleotide
taatcaacacatcgtatttcggcaacccat

SEQ ID NO: 81031 - DNA, 30 bp, Artificial Sequence
  Synthetic oligonucleotide
cctacaactaagcaaatagtcaatacccat

SEQ ID NO: 81032 - DNA, 30 bp, Artificial Sequence
  Synthetic oligonucleotide
aagagaggcaaccgagtaggttagtcccat

SEQ ID NO: 81033 - DNA, 30 bp, Artificial Sequence
  Synthetic oligonucleotide
atgggggaacagaagtggaacattggccat

SEQ ID NO: 81034 - DNA, 30 bp, Artificial Sequence
  Synthetic oligonucleotide
acacaatttagcgcaccacgaatgtgccat

SEQ ID NO: 81035 - DNA, 30 bp, Artificial Sequence
  Synthetic oligonucleotide
agcgtgaaaagaatggggggtttttgccat

SEQ ID NO: 81036 - DNA, 30 bp, Artificial Sequence
  Synthetic oligonucleotide
taagggttgatcacttccgagctggtccat

SEQ ID NO: 81037 - DNA, 30 bp, Artificial Sequence
  Synthetic oligonucleotide
aggcaaagcttttggcgatcgcgtgtccat

SEQ ID NO: 81038 - DNA, 30 bp, Artificial Sequence
  Synthetic oligonucleotide
ggtgcaactatatcatcaaggctattccat

SEQ ID NO: 81039 - DNA, 30 bp, Artificial Sequence
  Synthetic oligonucleotide
cgacagttcgcgtttcgccctatcttccat

SEQ ID NO: 81040 - DNA, 30 bp, Artificial Sequence
  Synthetic oligonucleotide
gaggtgccgggaattagcgtttagaagcat

SEQ ID NO: 81041 - DNA, 30 bp, Artificial Sequence
  Synthetic oligonucleotide
ggggctacaccggatgaaatcgtacagcat

SEQ ID NO: 81042 - DNA, 30 bp, Artificial Sequence
  Synthetic oligonucleotide
acctcacagggtaggagacttacccagcat

SEQ ID NO: 81043 - DNA, 30 bp, Artificial Sequence
  Synthetic oligonucleotide
gttgaacggtagttggctgtaacagagcat

SEQ ID NO: 81044 - DNA, 30 bp, Artificial Sequence
  Synthetic oligonucleotide
tggtactcgggtacatcgctgagagcgcat

SEQ ID NO: 81045 - DNA, 30 bp, Artificial Sequence
  Synthetic oligonucleotide
gagaaagtctgagtagaagttgtagcgcat

SEQ ID NO: 81046 - DNA, 30 bp, Artificial Sequence
  Synthetic oligonucleotide
cgaggagaatagtccttctatggctcgcat

SEQ ID NO: 81047 - DNA, 30 bp, Artificial Sequence
  Synthetic oligonucleotide
tacaaaatcaagtatctacaggtgcggcat

SEQ ID NO: 81048 - DNA, 30 bp, Artificial Sequence
  Synthetic oligonucleotide
ccgaaacccgttatcaagaagatagggcat

SEQ ID NO: 81049 - DNA, 30 bp, Artificial Sequence
  Synthetic oligonucleotide
tagggcgaataggttatatcagtggggcat

SEQ ID NO: 81050 - DNA, 30 bp, Artificial Sequence
  Synthetic oligonucleotide
ggatatagctgcttaagggaaggtgggcat

SEQ ID NO: 81051 - DNA, 30 bp, Artificial Sequence
  Synthetic oligonucleotide
catcactatgctgaatcggagacctggcat

SEQ ID NO: 81052 - DNA, 30 bp, Artificial Sequence
  Synthetic oligonucleotide
tgggctcttgatcagatgcgtagttggcat

SEQ ID NO: 81053 - DNA, 30 bp, Artificial Sequence
  Synthetic oligonucleotide
atactagcgccgactgggcccaggatgcat

SEQ ID NO: 81054 - DNA, 30 bp, Artificial Sequence
  Synthetic oligonucleotide
atacaaagtgtggactcgataatgctgcat

SEQ ID NO: 81055 - DNA, 30 bp, Artificial Sequence
  Synthetic oligonucleotide
cataactcgtggcaatgagagatcgtgcat

SEQ ID NO: 81056 - DNA, 30 bp, Artificial Sequence
  Synthetic oligonucleotide
aggtagattgcgtattacagctgcttgcat

SEQ ID NO: 81057 - DNA, 30 bp, Artificial Sequence
  Synthetic oligonucleotide
tgaatgggcactggtacgtgcgaacatcat

SEQ ID NO: 81058 - DNA, 30 bp, Artificial Sequence
  Synthetic oligonucleotide
tatgaggcgaaacacgttattttagatcat

SEQ ID NO: 81059 - DNA, 30 bp, Artificial Sequence
  Synthetic oligonucleotide
caacgtcccgagtctgtacacttgtatcat

SEQ ID NO: 81060 - DNA, 30 bp, Artificial Sequence
  Synthetic oligonucleotide
cacgggacataggcaggcggaggaactcat

SEQ ID NO: 81061 - DNA, 30 bp, Artificial Sequence
  Synthetic oligonucleotide
gcgataggtgatcctcaaaggtttgctcat

SEQ ID NO: 81062 - DNA, 30 bp, Artificial Sequence
  Synthetic oligonucleotide
agagcgctcgtcataacagagagttctcat

SEQ ID NO: 81063 - DNA, 30 bp, Artificial Sequence
  Synthetic oligonucleotide
gggaacatacctgagtgaacagacagtcat

SEQ ID NO: 81064 - DNA, 30 bp, Artificial Sequence
  Synthetic oligonucleotide
ggacatacgcggatagaatctggccgtcat

SEQ ID NO: 81065 - DNA, 30 bp, Artificial Sequence
  Synthetic oligonucleotide
gtccgtcttatgctctagtcgtcctgtcat

SEQ ID NO: 81066 - DNA, 30 bp, Artificial Sequence
  Synthetic oligonucleotide
acctcgaactaatggaaacttaaaattcat

SEQ ID NO: 81067 - DNA, 30 bp, Artificial Sequence
  Synthetic oligonucleotide
atcaaggaaatagcgatagtgtccattcat

SEQ ID NO: 81068 - DNA, 30 bp, Artificial Sequence
  Synthetic oligonucleotide
cgacaaccgtgtataaaacgtctcattcat

SEQ ID NO: 81069 - DNA, 30 bp, Artificial Sequence
  Synthetic oligonucleotide
tgacatccagacgggaagtcgcagattcat

SEQ ID NO: 81070 - DNA, 30 bp, Artificial Sequence
  Synthetic oligonucleotide
caggtagggcgcatccctcctgcgattcat

SEQ ID NO: 81071 - DNA, 31 bp, Artificial Sequence
  Synthetic oligonucleotide
atcgtgattctgcacgggagactaccttcat

SEQ ID NO: 81072 - DNA, 30 bp, Artificial Sequence
  Synthetic oligonucleotide
ataattcgtccggagtcgctgaagcttcat

SEQ ID NO: 81073 - DNA, 30 bp, Artificial Sequence
  Synthetic oligonucleotide
atgccgagtaagtaacatccatcttttcat

SEQ ID NO: 81074 - DNA, 30 bp, Artificial Sequence
  Synthetic oligonucleotide
accgggagaaactttatcgtaccaaaagat

SEQ ID NO: 81075 - DNA, 30 bp, Artificial Sequence
  Synthetic oligonucleotide
agtgggcagtcgtactgtccgtcccaagat

SEQ ID NO: 81076 - DNA, 30 bp, Artificial Sequence
  Synthetic oligonucleotide
aagagatgtaacatgctcgaaggccaagat

SEQ ID NO: 81077 - DNA, 30 bp, Artificial Sequence
  Synthetic oligonucleotide
ccaaagtaacaagaagtgcgctcgcaagat

SEQ ID NO: 81078 - DNA, 30 bp, Artificial Sequence
  Synthetic oligonucleotide
gcgggcatagtgtcaaaactggaggaagat

SEQ ID NO: 81079 - DNA, 30 bp, Artificial Sequence
  Synthetic oligonucleotide
ccaggtacgcggattatgcgacactaagat

SEQ ID NO: 81080 - DNA, 30 bp, Artificial Sequence
  Synthetic oligonucleotide
agaagccaccgggaacacgtatcaacagat

SEQ ID NO: 81081 - DNA, 30 bp, Artificial Sequence
  Synthetic oligonucleotide
ttactaatgaaatataaacttatcacagat

SEQ ID NO: 81082 - DNA, 30 bp, Artificial Sequence
  Synthetic oligonucleotide
ttaaaggttaatgtccgggagaccccagat

SEQ ID NO: 81083 - DNA, 30 bp, Artificial Sequence
  Synthetic oligonucleotide
gccagagcgcggataaacgggccgccagat

SEQ ID NO: 81084 - DNA, 30 bp, Artificial Sequence
  Synthetic oligonucleotide
acgcgatgatgataacgactggctccagat

SEQ ID NO: 81085 - DNA, 30 bp, Artificial Sequence
  Synthetic oligonucleotide
taggtccgtgtgtccgtgcagtctccagat

SEQ ID NO: 81086 - DNA, 30 bp, Artificial Sequence
  Synthetic oligonucleotide
tgtggcgtgtaatactagcagttcgcagat

SEQ ID NO: 81087 - DNA, 30 bp, Artificial Sequence
  Synthetic oligonucleotide
ggtgagcggtaacctatcattcgggcagat

SEQ ID NO: 81088 - DNA, 30 bp, Artificial Sequence
  Synthetic oligonucleotide
ctggtcttccccagactacaagtggcagat

SEQ ID NO: 81089 - DNA, 30 bp, Artificial Sequence
  Synthetic oligonucleotide
ggaggctggtaaggacccgagtatgcagat

SEQ ID NO: 81090 - DNA, 30 bp, Artificial Sequence
  Synthetic oligonucleotide
aatagttggcacgggatgctcagatcagat

SEQ ID NO: 81091 - DNA, 30 bp, Artificial Sequence
  Synthetic oligonucleotide
cgacataggtttatggagagtgtatcagat

SEQ ID NO: 81092 - DNA, 30 bp, Artificial Sequence
  Synthetic oligonucleotide
tcatgtacatggcatgtgccggtaagagat

SEQ ID NO: 81093 - DNA, 30 bp, Artificial Sequence
  Synthetic oligonucleotide
ccaagaagcagagcatatccgttcagagat

SEQ ID NO: 81094 - DNA, 30 bp, Artificial Sequence
  Synthetic oligonucleotide
tgcaggcttagaatttttacgtagagagat

SEQ ID NO: 81095 - DNA, 30 bp, Artificial Sequence
  Synthetic oligonucleotide
acttctgaagaggcttcgcgtacaatagat

SEQ ID NO: 81096 - DNA, 30 bp, Artificial Sequence
  Synthetic oligonucleotide
cagaaaggctatcttgcaatccgaatagat

SEQ ID NO: 81097 - DNA, 30 bp, Artificial Sequence
  Synthetic oligonucleotide
agcggtggaataagcgacagcaacatagat

SEQ ID NO: 81098 - DNA, 30 bp, Artificial Sequence
  Synthetic oligonucleotide
tataagtccatggtagaggagggactagat

SEQ ID NO: 81099 - DNA, 30 bp, Artificial Sequence
  Synthetic oligonucleotide
gtatgtagcacagggcaggccgaagtagat

SEQ ID NO: 81100 - DNA, 30 bp, Artificial Sequence
  Synthetic oligonucleotide
aggtctggacagagtatcgagaccgtagat

SEQ ID NO: 81101 - DNA, 30 bp, Artificial Sequence
  Synthetic oligonucleotide
gcaacactggccttacaaattaatgtagat

SEQ ID NO: 81102 - DNA, 30 bp, Artificial Sequence
  Synthetic oligonucleotide
cgtcgtgagcagtgaccataagtattagat

SEQ ID NO: 81103 - DNA, 30 bp, Artificial Sequence
  Synthetic oligonucleotide
atccacggaattagcagcggtgaacacgat

SEQ ID NO: 81104 - DNA, 30 bp, Artificial Sequence
  Synthetic oligonucleotide
tgtcacggtaatcttctgagcccccacgat

SEQ ID NO: 81105 - DNA, 30 bp, Artificial Sequence
  Synthetic oligonucleotide
ctacggacggaaaagcttaactgccacgat

SEQ ID NO: 81106 - DNA, 30 bp, Artificial Sequence
  Synthetic oligonucleotide
aaggagcaatagaatggatagcttgacgat

SEQ ID NO: 81107 - DNA, 30 bp, Artificial Sequence
  Synthetic oligonucleotide
gaggaggagcccttagcaagcgattacgat

SEQ ID NO: 81108 - DNA, 30 bp, Artificial Sequence
  Synthetic oligonucleotide
ctaagtagagaccgatcaatgatttacgat

SEQ ID NO: 81109 - DNA, 30 bp, Artificial Sequence
  Synthetic oligonucleotide
caaatagtcggtggaacggcagagtccgat

SEQ ID NO: 81110 - DNA, 30 bp, Artificial Sequence
  Synthetic oligonucleotide
ttgttgtgttctctttttgtgttttccgat

SEQ ID NO: 81111 - DNA, 30 bp, Artificial Sequence
  Synthetic oligonucleotide
gacgtgttcatcagacaactaaagagcgat

SEQ ID NO: 81112 - DNA, 30 bp, Artificial Sequence
  Synthetic oligonucleotide
acttcgctttgagcggggagttggagcgat

SEQ ID NO: 81113 - DNA, 30 bp, Artificial Sequence
  Synthetic oligonucleotide
gacatggttacggacattaagaagcgcgat

SEQ ID NO: 81114 - DNA, 30 bp, Artificial Sequence
  Synthetic oligonucleotide
caagtccaagtcgttctccgcgtctgcgat

SEQ ID NO: 81115 - DNA, 30 bp, Artificial Sequence
  Synthetic oligonucleotide
aaaacccatgacggcctaaagatgtgcgat

SEQ ID NO: 81116 - DNA, 30 bp, Artificial Sequence
  Synthetic oligonucleotide
tggtaaaaaggataaggtagataaatcgat

SEQ ID NO: 81117 - DNA, 30 bp, Artificial Sequence
  Synthetic oligonucleotide
atggagaagcaagggcaatcgcgactcgat

SEQ ID NO: 81118 - DNA, 30 bp, Artificial Sequence
  Synthetic oligonucleotide
agggacgcgtaccaatatctcgagctcgat

SEQ ID NO: 81119 - DNA, 30 bp, Artificial Sequence
  Synthetic oligonucleotide
cacgttagacttagacaacggccgctcgat

SEQ ID NO: 81120 - DNA, 30 bp, Artificial Sequence
  Synthetic oligonucleotide
cattacagtttggatggtgcgtcgctcgat

SEQ ID NO: 81121 - DNA, 30 bp, Artificial Sequence
  Synthetic oligonucleotide
tggttgctcgaggcataacaagtgctcgat

SEQ ID NO: 81122 - DNA, 30 bp, Artificial Sequence
  Synthetic oligonucleotide
ggaaaaagccaacgtggtgataatctcgat

SEQ ID NO: 81123 - DNA, 30 bp, Artificial Sequence
  Synthetic oligonucleotide
tacggaaacataacttctattttagtcgat

SEQ ID NO: 81124 - DNA, 30 bp, Artificial Sequence
  Synthetic oligonucleotide
acgaatacaccgcaggacggtatggtcgat

SEQ ID NO: 81125 - DNA, 29 bp, Artificial Sequence
  Synthetic oligonucleotide
agccgtctgacaatacaagaccattcgat

SEQ ID NO: 81126 - DNA, 30 bp, Artificial Sequence
  Synthetic oligonucleotide
tctacccgagcagggaaggaatagttcgat

SEQ ID NO: 81127 - DNA, 30 bp, Artificial Sequence
  Synthetic oligonucleotide
cgtgcatgatccgttaatcagtatttcgat

SEQ ID NO: 81128 - DNA, 30 bp, Artificial Sequence
  Synthetic oligonucleotide
gatccaggaaagcaacggtaattcaaggat

SEQ ID NO: 81129 - DNA, 30 bp, Artificial Sequence
  Synthetic oligonucleotide
ggattagatcacagcaggggtaagaaggat

SEQ ID NO: 81130 - DNA, 30 bp, Artificial Sequence
  Synthetic oligonucleotide
aagtgcatatagtccaagctagcgaaggat

SEQ ID NO: 81131 - DNA, 30 bp, Artificial Sequence
  Synthetic oligonucleotide
acatcgcaaggaaggggaaaggataaggat

SEQ ID NO: 81132 - DNA, 30 bp, Artificial Sequence
  Synthetic oligonucleotide
ctgccagattactagagaagggataaggat

SEQ ID NO: 81133 - DNA, 30 bp, Artificial Sequence
  Synthetic oligonucleotide
tggtacacaaccgtgggagttcctaaggat

SEQ ID NO: 81134 - DNA, 30 bp, Artificial Sequence
  Synthetic oligonucleotide
gtcacccagacattgcaataggagcaggat

SEQ ID NO: 81135 - DNA, 30 bp, Artificial Sequence
  Synthetic oligonucleotide
agacaaaggcgacagtttgcagcagaggat

SEQ ID NO: 81136 - DNA, 30 bp, Artificial Sequence
  Synthetic oligonucleotide
agtaagggcggggcatggaggagcgaggat

SEQ ID NO: 81137 - DNA, 30 bp, Artificial Sequence
  Synthetic oligonucleotide
aaagtcgacgaataaacggatgtcgaggat

SEQ ID NO: 81138 - DNA, 30 bp, Artificial Sequence
  Synthetic oligonucleotide
agcatgtgagatctgttagattttgaggat

SEQ ID NO: 81139 - DNA, 30 bp, Artificial Sequence
  Synthetic oligonucleotide
ggagatggagtccaatcaaagcgataggat

SEQ ID NO: 81140 - DNA, 30 bp, Artificial Sequence
  Synthetic oligonucleotide
gtagcatagtcgtgtgggggatattaggat

SEQ ID NO: 81141 - DNA, 30 bp, Artificial Sequence
  Synthetic oligonucleotide
cttgatggattggtaacgaattaggcggat

SEQ ID NO: 81142 - DNA, 30 bp, Artificial Sequence
  Synthetic oligonucleotide
atgtaaatatcagaaattgaatccagggat

SEQ ID NO: 81143 - DNA, 30 bp, Artificial Sequence
  Synthetic oligonucleotide
caaagccgagtccggcgtgcgagccgggat

SEQ ID NO: 81144 - DNA, 30 bp, Artificial Sequence
  Synthetic oligonucleotide
tctcgcccaattaccatccaacagcgggat

SEQ ID NO: 81145 - DNA, 30 bp, Artificial Sequence
  Synthetic oligonucleotide
tggtgatgatcaccacaagcatatcgggat

SEQ ID NO: 81146 - DNA, 30 bp, Artificial Sequence
  Synthetic oligonucleotide
ggataatgcaactttgtcggtaaaggggat

SEQ ID NO: 81147 - DNA, 30 bp, Artificial Sequence
  Synthetic oligonucleotide
atagtaagttgagtagggctgagtggggat

SEQ ID NO: 81148 - DNA, 30 bp, Artificial Sequence
  Synthetic oligonucleotide
aactgggcgcgagtaatgcaccaatgggat

SEQ ID NO: 81149 - DNA, 31 bp, Artificial Sequence
  Synthetic oligonucleotide
tcgtagtaagatgcgcacaagaccatgggat

SEQ ID NO: 81150 - DNA, 30 bp, Artificial Sequence
  Synthetic oligonucleotide
gtcgagaatctaggaggagaggtctgggat

SEQ ID NO: 81151 - DNA, 30 bp, Artificial Sequence
  Synthetic oligonucleotide
aaatgccgaggcaactgaaggatgctggat

SEQ ID NO: 81152 - DNA, 30 bp, Artificial Sequence
  Synthetic oligonucleotide
cggacgggttagcgtctaaaaattgtggat

SEQ ID NO: 81153 - DNA, 30 bp, Artificial Sequence
  Synthetic oligonucleotide
atgttaagcattaatagggcagttgtggat

SEQ ID NO: 81154 - DNA, 30 bp, Artificial Sequence
  Synthetic oligonucleotide
gagggtaatgggaatgtgcggaaattggat

SEQ ID NO: 81155 - DNA, 30 bp, Artificial Sequence
  Synthetic oligonucleotide
actcactgccataaggaactacgcaatgat

SEQ ID NO: 81156 - DNA, 30 bp, Artificial Sequence
  Synthetic oligonucleotide
gcatgcggacataaactcggcagccatgat

SEQ ID NO: 81157 - DNA, 30 bp, Artificial Sequence
  Synthetic oligonucleotide
agaccaccaccccacgagaagcaggatgat

SEQ ID NO: 81158 - DNA, 30 bp, Artificial Sequence
  Synthetic oligonucleotide
gcgtgatcgagactttgtgagcgctatgat

SEQ ID NO: 81159 - DNA, 30 bp, Artificial Sequence
  Synthetic oligonucleotide
aatggacagaaatgcacgcgatattatgat

SEQ ID NO: 81160 - DNA, 30 bp, Artificial Sequence
  Synthetic oligonucleotide
cgagagtccactagagaagataaagctgat

SEQ ID NO: 81161 - DNA, 30 bp, Artificial Sequence
  Synthetic oligonucleotide
ccaaacatgtgaatagggaattcgagtgat

SEQ ID NO: 81162 - DNA, 30 bp, Artificial Sequence
  Synthetic oligonucleotide
atcggtggggaacgccacacatccggtgat

SEQ ID NO: 81163 - DNA, 30 bp, Artificial Sequence
  Synthetic oligonucleotide
tgaagaggtgaatcaggcactgtctgtgat

SEQ ID NO: 81164 - DNA, 30 bp, Artificial Sequence
  Synthetic oligonucleotide
tgcagggaggaacgctgggagttttgtgat

SEQ ID NO: 81165 - DNA, 30 bp, Artificial Sequence
  Synthetic oligonucleotide
tcggagggaataaggaagaagtaaattgat

SEQ ID NO: 81166 - DNA, 30 bp, Artificial Sequence
  Synthetic oligonucleotide
caccggtaagcgatctatgtggccattgat

SEQ ID NO: 81167 - DNA, 30 bp, Artificial Sequence
  Synthetic oligonucleotide
ggcaagagcctgagggagaccaagattgat

SEQ ID NO: 81168 - DNA, 29 bp, Artificial Sequence
  Synthetic oligonucleotide
tcagttacctagaatccagggtgtttgat

SEQ ID NO: 81169 - DNA, 30 bp, Artificial Sequence
  Synthetic oligonucleotide
gtcgataaggggcttcacataacacaatat

SEQ ID NO: 81170 - DNA, 30 bp, Artificial Sequence
  Synthetic oligonucleotide
cacgtgtccccagattgaaagcgtcaatat

SEQ ID NO: 81171 - DNA, 30 bp, Artificial Sequence
  Synthetic oligonucleotide
gtcagcgccagagataagttgggcgaatat

SEQ ID NO: 81172 - DNA, 30 bp, Artificial Sequence
  Synthetic oligonucleotide
gaggtgaaccaaagtgtacatctggaatat

SEQ ID NO: 81173 - DNA, 30 bp, Artificial Sequence
  Synthetic oligonucleotide
ggagaattgcagcgcaatcttagcacatat

SEQ ID NO: 81174 - DNA, 30 bp, Artificial Sequence
  Synthetic oligonucleotide
cgacaacggtagctataaggagagacatat

SEQ ID NO: 81175 - DNA, 30 bp, Artificial Sequence
  Synthetic oligonucleotide
aaacgagcttacaacgagttgcgtacatat

SEQ ID NO: 81176 - DNA, 30 bp, Artificial Sequence
  Synthetic oligonucleotide
agcgcgaatgagtcctggcgatgcccatat

SEQ ID NO: 81177 - DNA, 30 bp, Artificial Sequence
  Synthetic oligonucleotide
accgtcaggcaggcacagagtagtccatat

SEQ ID NO: 81178 - DNA, 30 bp, Artificial Sequence
  Synthetic oligonucleotide
aagaggaccgcgcgggacaatggggcatat

SEQ ID NO: 81179 - DNA, 30 bp, Artificial Sequence
  Synthetic oligonucleotide
gcacgcacaaaaaatcgagtaaatgcatat

SEQ ID NO: 81180 - DNA, 30 bp, Artificial Sequence
  Synthetic oligonucleotide
gcaaagaagatgagaaccccctaatcatat

SEQ ID NO: 81181 - DNA, 30 bp, Artificial Sequence
  Synthetic oligonucleotide
cacgtccccgcatagaaggagacaagatat

SEQ ID NO: 81182 - DNA, 30 bp, Artificial Sequence
  Synthetic oligonucleotide
ggaagaactggagagcagtctggcagatat

SEQ ID NO: 81183 - DNA, 30 bp, Artificial Sequence
  Synthetic oligonucleotide
agctgtgccaggcaatgctacggacgatat

SEQ ID NO: 81184 - DNA, 31 bp, Artificial Sequence
  Synthetic oligonucleotide
agctggtgagtggacttacgctgaccgatat

SEQ ID NO: 81185 - DNA, 30 bp, Artificial Sequence
  Synthetic oligonucleotide
gtgcacgaatggtctgtggcttacggatat

SEQ ID NO: 81186 - DNA, 30 bp, Artificial Sequence
  Synthetic oligonucleotide
acaggggtaaaggattcatttaggggatat

SEQ ID NO: 81187 - DNA, 30 bp, Artificial Sequence
  Synthetic oligonucleotide
agtcaaacgactttttgaccagagtgatat

SEQ ID NO: 81188 - DNA, 30 bp, Artificial Sequence
  Synthetic oligonucleotide
tgaatgcggtgacctacgcaccggtgatat

SEQ ID NO: 81189 - DNA, 30 bp, Artificial Sequence
  Synthetic oligonucleotide
ctggaaggtagtgggctccataattgatat

SEQ ID NO: 81190 - DNA, 30 bp, Artificial Sequence
  Synthetic oligonucleotide
gaggggggagatgactctaccgtcatatat

SEQ ID NO: 81191 - DNA, 30 bp, Artificial Sequence
  Synthetic oligonucleotide
cacggtcccagacacacggtccccctatat

SEQ ID NO: 81192 - DNA, 30 bp, Artificial Sequence
  Synthetic oligonucleotide
tgagaaaggtagggatatatgcgcgtatat

SEQ ID NO: 81193 - DNA, 30 bp, Artificial Sequence
  Synthetic oligonucleotide
gtagggcggctgactggtgagtgggtatat

SEQ ID NO: 81194 - DNA, 30 bp, Artificial Sequence
  Synthetic oligonucleotide
aaacgggaaaaagcgagggtgcaaaactat

SEQ ID NO: 81195 - DNA, 30 bp, Artificial Sequence
  Synthetic oligonucleotide
caccctatcggaagtctcgaaaagaactat

SEQ ID NO: 81196 - DNA, 30 bp, Artificial Sequence
  Synthetic oligonucleotide
ctatctgaaggaacaggagtctcgaactat

SEQ ID NO: 81197 - DNA, 30 bp, Artificial Sequence
  Synthetic oligonucleotide
tgatcgatcctttgaacaagattggactat

SEQ ID NO: 81198 - DNA, 30 bp, Artificial Sequence
  Synthetic oligonucleotide
ccctacgcatacactctagcgaactactat

SEQ ID NO: 81199 - DNA, 30 bp, Artificial Sequence
  Synthetic oligonucleotide
atagaggctagagtaggcccagcttactat

SEQ ID NO: 81200 - DNA, 30 bp, Artificial Sequence
  Synthetic oligonucleotide
acggaagggtcaagagcggactagccctat

SEQ ID NO: 81201 - DNA, 30 bp, Artificial Sequence
  Synthetic oligonucleotide
gcagagagcaagcggttgggcttagcctat

SEQ ID NO: 81202 - DNA, 30 bp, Artificial Sequence
  Synthetic oligonucleotide
gctgggggttgggaaccggaagctgcctat

SEQ ID NO: 81203 - DNA, 30 bp, Artificial Sequence
  Synthetic oligonucleotide
agagctcggttagttaaaagcagtgcctat

SEQ ID NO: 81204 - DNA, 30 bp, Artificial Sequence
  Synthetic oligonucleotide
tgagccatgcgaccaggacctggatcctat

SEQ ID NO: 81205 - DNA, 30 bp, Artificial Sequence
  Synthetic oligonucleotide
tttttgtgttctctttttgtgttttcctat

SEQ ID NO: 81206 - DNA, 30 bp, Artificial Sequence
  Synthetic oligonucleotide
agctaccaagttgcgtggatattcagctat

SEQ ID NO: 81207 - DNA, 30 bp, Artificial Sequence
  Synthetic oligonucleotide
cggcgcgatccgcatgagacacaccgctat

SEQ ID NO: 81208 - DNA, 30 bp, Artificial Sequence
  Synthetic oligonucleotide
tgctcgatacagaagcatttattgcgctat

SEQ ID NO: 81209 - DNA, 30 bp, Artificial Sequence
  Synthetic oligonucleotide
tcgcgagcatgcgtggatgccatgatctat

SEQ ID NO: 81210 - DNA, 30 bp, Artificial Sequence
  Synthetic oligonucleotide
gacaccaaacttatacacgaagacgtctat

SEQ ID NO: 81211 - DNA, 30 bp, Artificial Sequence
  Synthetic oligonucleotide
taagggcatcccaagcataatgtcaagtat

SEQ ID NO: 81212 - DNA, 30 bp, Artificial Sequence
  Synthetic oligonucleotide
acacggcaagtttgacattgtgtgaagtat

SEQ ID NO: 81213 - DNA, 30 bp, Artificial Sequence
  Synthetic oligonucleotide
ccctcggcacaggtaacgtgggctaagtat

SEQ ID NO: 81214 - DNA, 30 bp, Artificial Sequence
  Synthetic oligonucleotide
gaagggcagcacttatcgtcaaaagagtat

SEQ ID NO: 81215 - DNA, 30 bp, Artificial Sequence
  Synthetic oligonucleotide
cggtgcgtagatataggacagacagagtat

SEQ ID NO: 81216 - DNA, 30 bp, Artificial Sequence
  Synthetic oligonucleotide
aagaatagggacgccatgcgggtagagtat

SEQ ID NO: 81217 - DNA, 30 bp, Artificial Sequence
  Synthetic oligonucleotide
actaaactgagtagcttgcggcacgagtat

SEQ ID NO: 81218 - DNA, 30 bp, Artificial Sequence
  Synthetic oligonucleotide
aactaaatgacgtgttggtcaagcgagtat

SEQ ID NO: 81219 - DNA, 30 bp, Artificial Sequence
  Synthetic oligonucleotide
gagcggatcgttctaggatagggatagtat

SEQ ID NO: 81220 - DNA, 30 bp, Artificial Sequence
  Synthetic oligonucleotide
ctcgttcgcctgcagaggagaagtacgtat

SEQ ID NO: 81221 - DNA, 30 bp, Artificial Sequence
  Synthetic oligonucleotide
aggtgtgtatacgaggaattcggtacgtat

SEQ ID NO: 81222 - DNA, 30 bp, Artificial Sequence
  Synthetic oligonucleotide
catgaggaatcggttattctgcgaccgtat

SEQ ID NO: 81223 - DNA, 30 bp, Artificial Sequence
  Synthetic oligonucleotide
tgttcataaagagggtggattgagccgtat

SEQ ID NO: 81224 - DNA, 30 bp, Artificial Sequence
  Synthetic oligonucleotide
aacctgcggtctcgaggagttgggccgtat

SEQ ID NO: 81225 - DNA, 30 bp, Artificial Sequence
  Synthetic oligonucleotide
agattgatgagcaaagcagaaagcgcgtat

SEQ ID NO: 81226 - DNA, 30 bp, Artificial Sequence
  Synthetic oligonucleotide
ctggcacgaccaagaggtgggtcaaggtat

SEQ ID NO: 81227 - DNA, 30 bp, Artificial Sequence
  Synthetic oligonucleotide
tatgaggaccccctcgagcggagaaggtat

SEQ ID NO: 81228 - DNA, 30 bp, Artificial Sequence
  Synthetic oligonucleotide
gatacgttgtcgcccatgaaacgaaggtat

SEQ ID NO: 81229 - DNA, 30 bp, Artificial Sequence
  Synthetic oligonucleotide
gctatgtaccagcgagatcgaaacaggtat

SEQ ID NO: 81230 - DNA, 30 bp, Artificial Sequence
  Synthetic oligonucleotide
caacattacggttgtgtcgaggacaggtat

SEQ ID NO: 81231 - DNA, 30 bp, Artificial Sequence
  Synthetic oligonucleotide
ccgaggacaaatgatacatttgtgaggtat

SEQ ID NO: 81232 - DNA, 30 bp, Artificial Sequence
  Synthetic oligonucleotide
ggtagcgccgcgcgcgggtacaaaatgtat

SEQ ID NO: 81233 - DNA, 30 bp, Artificial Sequence
  Synthetic oligonucleotide
acagggccacatacactgctcagcatgtat

SEQ ID NO: 81234 - DNA, 30 bp, Artificial Sequence
  Synthetic oligonucleotide
aggtgaaagtaaagcatgactacactgtat

SEQ ID NO: 81235 - DNA, 30 bp, Artificial Sequence
  Synthetic oligonucleotide
acaaggaaacactagggaatggtagtgtat

SEQ ID NO: 81236 - DNA, 30 bp, Artificial Sequence
  Synthetic oligonucleotide
atgaaggaaagtacgattatcagggtgtat

SEQ ID NO: 81237 - DNA, 30 bp, Artificial Sequence
  Synthetic oligonucleotide
tctgatctgttgtgttttcctcttgtgtat

SEQ ID NO: 81238 - DNA, 30 bp, Artificial Sequence
  Synthetic oligonucleotide
tcttatctgttttgttttcctcttgtgtat

SEQ ID NO: 81239 - DNA, 30 bp, Artificial Sequence
  Synthetic oligonucleotide
acgagatcaggtcgttccccggacttgtat

SEQ ID NO: 81240 - DNA, 30 bp, Artificial Sequence
  Synthetic oligonucleotide
gggaaaagcgagacgcccatatacgattat

SEQ ID NO: 81241 - DNA, 30 bp, Artificial Sequence
  Synthetic oligonucleotide
atctgccgactacacaacattacaacttat

SEQ ID NO: 81242 - DNA, 30 bp, Artificial Sequence
  Synthetic oligonucleotide
ccgagcccaaacagtggattaaaaccttat

SEQ ID NO: 81243 - DNA, 30 bp, Artificial Sequence
  Synthetic oligonucleotide
tcggacaaacggtttacacaggacccttat

SEQ ID NO: 81244 - DNA, 30 bp, Artificial Sequence
  Synthetic oligonucleotide
atgggtattcgaactttgcactagtcttat

SEQ ID NO: 81245 - DNA, 30 bp, Artificial Sequence
  Synthetic oligonucleotide
cgggcagcgctacgtacttaccacagttat

SEQ ID NO: 81246 - DNA, 30 bp, Artificial Sequence
  Synthetic oligonucleotide
cgttcacagctgacgtgcaagcgtagttat

SEQ ID NO: 81247 - DNA, 30 bp, Artificial Sequence
  Synthetic oligonucleotide
agacagggcatgaaatctacatgatgttat

SEQ ID NO: 81248 - DNA, 30 bp, Artificial Sequence
  Synthetic oligonucleotide
cttaggactctcggtgtggagtgctgttat

SEQ ID NO: 81249 - DNA, 30 bp, Artificial Sequence
  Synthetic oligonucleotide
gtcacggaactgggcatcggaatactttat

SEQ ID NO: 81250 - DNA, 30 bp, Artificial Sequence
  Synthetic oligonucleotide
gtagggggggacggcgattccttcgtttat

SEQ ID NO: 81251 - DNA, 30 bp, Artificial Sequence
  Synthetic oligonucleotide
agcggaccagaatttgtagtgtgcaaaact

SEQ ID NO: 81252 - DNA, 30 bp, Artificial Sequence
  Synthetic oligonucleotide
accaaatctaaatcaatctaaagtaaaact

SEQ ID NO: 81253 - DNA, 30 bp, Artificial Sequence
  Synthetic oligonucleotide
tggtccccagggtagagcacaagccaaact

SEQ ID NO: 81254 - DNA, 30 bp, Artificial Sequence
  Synthetic oligonucleotide
gtggcgggcgcgaacgactaccgccaaact

SEQ ID NO: 81255 - DNA, 30 bp, Artificial Sequence
  Synthetic oligonucleotide
gtagcggtaacaatgcggacaactcaaact

SEQ ID NO: 81256 - DNA, 30 bp, Artificial Sequence
  Synthetic oligonucleotide
taggcgcaagctgagggtcatagagaaact

SEQ ID NO: 81257 - DNA, 30 bp, Artificial Sequence
  Synthetic oligonucleotide
gtgtggagttcatccgatgggcgagaaact

SEQ ID NO: 81258 - DNA, 30 bp, Artificial Sequence
  Synthetic oligonucleotide
tcccggagagttccaagggttagggaaact

SEQ ID NO: 81259 - DNA, 30 bp, Artificial Sequence
  Synthetic oligonucleotide
catcgcacaaattacattgtgcgaacaact

SEQ ID NO: 81260 - DNA, 30 bp, Artificial Sequence
  Synthetic oligonucleotide
caacgtgtactaatcaggtctgtcccaact

SEQ ID NO: 81261 - DNA, 30 bp, Artificial Sequence
  Synthetic oligonucleotide
cagttcaaatgtgtggagggcatgccaact

SEQ ID NO: 81262 - DNA, 30 bp, Artificial Sequence
  Synthetic oligonucleotide
ctgaggttcactacaacaaattacgcaact

SEQ ID NO: 81263 - DNA, 30 bp, Artificial Sequence
  Synthetic oligonucleotide
aacaggtcactaccgtgtatgagtgcaact

SEQ ID NO: 81264 - DNA, 30 bp, Artificial Sequence
  Synthetic oligonucleotide
catgcacctgggacgtacgagagaagaact

SEQ ID NO: 81265 - DNA, 30 bp, Artificial Sequence
  Synthetic oligonucleotide
taggtagatacgagactcgcgctccgaact

SEQ ID NO: 81266 - DNA, 30 bp, Artificial Sequence
  Synthetic oligonucleotide
atcgtggggtgtcctcttacaacaggaact

SEQ ID NO: 81267 - DNA, 30 bp, Artificial Sequence
  Synthetic oligonucleotide
cgtggcagctaacgatttcggaacggaact

SEQ ID NO: 81268 - DNA, 30 bp, Artificial Sequence
  Synthetic oligonucleotide
atacgagttgccgaggagatggagtgaact

SEQ ID NO: 81269 - DNA, 30 bp, Artificial Sequence
  Synthetic oligonucleotide
gtcgactgggcggcgaatgtgtggtgaact

SEQ ID NO: 81270 - DNA, 30 bp, Artificial Sequence
  Synthetic oligonucleotide
gccgaagaaattgtcaactactagctaact

SEQ ID NO: 81271 - DNA, 30 bp, Artificial Sequence
  Synthetic oligonucleotide
ataaccaagggcagtggcagctacgacact

SEQ ID NO: 81272 - DNA, 30 bp, Artificial Sequence
  Synthetic oligonucleotide
ttcacgaacaatcccaagatcggggacact

SEQ ID NO: 81273 - DNA, 30 bp, Artificial Sequence
  Synthetic oligonucleotide
cgtagtgaatcttgagcttctgcctacact

SEQ ID NO: 81274 - DNA, 30 bp, Artificial Sequence
  Synthetic oligonucleotide
tagggacacaaagttccgggaacgtacact

SEQ ID NO: 81275 - DNA, 30 bp, Artificial Sequence
  Synthetic oligonucleotide
gctagaagggccaggacaaactcttacact

SEQ ID NO: 81276 - DNA, 30 bp, Artificial Sequence
  Synthetic oligonucleotide
cttgagcactgagacacaggtctgcccact

SEQ ID NO: 81277 - DNA, 30 bp, Artificial Sequence
  Synthetic oligonucleotide
cacggacaaagtctaccaatttttgccact

SEQ ID NO: 81278 - DNA, 30 bp, Artificial Sequence
  Synthetic oligonucleotide
cgatcggccgacctgtgaccctcccgcact

SEQ ID NO: 81279 - DNA, 30 bp, Artificial Sequence
  Synthetic oligonucleotide
taacggcccattagaaagctagatcgcact

SEQ ID NO: 81280 - DNA, 30 bp, Artificial Sequence
  Synthetic oligonucleotide
aagtagagactcattcgacatcgaatcact

SEQ ID NO: 81281 - DNA, 30 bp, Artificial Sequence
  Synthetic oligonucleotide
gcgactgtgcggaggtggcgcaaactcact

SEQ ID NO: 81282 - DNA, 30 bp, Artificial Sequence
  Synthetic oligonucleotide
tcacaggctagggtgatcagatcactcact

SEQ ID NO: 81283 - DNA, 30 bp, Artificial Sequence
  Synthetic oligonucleotide
aagggaagtgcgaggcatggaacacagact

SEQ ID NO: 81284 - DNA, 30 bp, Artificial Sequence
  Synthetic oligonucleotide
aatgagcaaagtgtggattgtccggcgact

SEQ ID NO: 81285 - DNA, 30 bp, Artificial Sequence
  Synthetic oligonucleotide
gggccattcgaactaacaaccggtaggact

SEQ ID NO: 81286 - DNA, 30 bp, Artificial Sequence
  Synthetic oligonucleotide
gggcggaggagatgactggtcaagtggact

SEQ ID NO: 81287 - DNA, 30 bp, Artificial Sequence
  Synthetic oligonucleotide
acgactatgtattacccgtgagtgtggact

SEQ ID NO: 81288 - DNA, 30 bp, Artificial Sequence
  Synthetic oligonucleotide
ggaaccgcaatgagaaggcactaaatgact

SEQ ID NO: 81289 - DNA, 30 bp, Artificial Sequence
  Synthetic oligonucleotide
cacagtatacaacactactaacatctgact

SEQ ID NO: 81290 - DNA, 30 bp, Artificial Sequence
  Synthetic oligonucleotide
tctaaaggtgtggcggtatgggtcgtgact

SEQ ID NO: 81291 - DNA, 30 bp, Artificial Sequence
  Synthetic oligonucleotide
ctgcagccatcacggaatcaactaaatact

SEQ ID NO: 81292 - DNA, 30 bp, Artificial Sequence
  Synthetic oligonucleotide
aaatcgagtggcagcacacgcgtgaatact

SEQ ID NO: 81293 - DNA, 30 bp, Artificial Sequence
  Synthetic oligonucleotide
agaaataacaatcaatatgttcaagatact

SEQ ID NO: 81294 - DNA, 30 bp, Artificial Sequence
  Synthetic oligonucleotide
ccttagcagattaaggaacgacctcctact

SEQ ID NO: 81295 - DNA, 30 bp, Artificial Sequence
  Synthetic oligonucleotide
gagctaggcactggtccgtgttaagctact

SEQ ID NO: 81296 - DNA, 30 bp, Artificial Sequence
  Synthetic oligonucleotide
gggccgacggatcttacccgtgatagtact

SEQ ID NO: 81297 - DNA, 30 bp, Artificial Sequence
  Synthetic oligonucleotide
actacaaataacacagccgagcctagtact

SEQ ID NO: 81298 - DNA, 30 bp, Artificial Sequence
  Synthetic oligonucleotide
ataagttgcgggcagggttcgcgccgtact

SEQ ID NO: 81299 - DNA, 30 bp, Artificial Sequence
  Synthetic oligonucleotide
gcgatgagtcaatgggtcaccggtcgtact

SEQ ID NO: 81300 - DNA, 30 bp, Artificial Sequence
  Synthetic oligonucleotide
tgtgaggggcttcggatacaaaatggtact

SEQ ID NO: 81301 - DNA, 30 bp, Artificial Sequence
  Synthetic oligonucleotide
agcaattgatacgagtaaagacgtggtact

SEQ ID NO: 81302 - DNA, 30 bp, Artificial Sequence
  Synthetic oligonucleotide
atacgaggtcggagggggaccatcattact

SEQ ID NO: 81303 - DNA, 30 bp, Artificial Sequence
  Synthetic oligonucleotide
ataggccgtcatatcccatgtaagaaacct

SEQ ID NO: 81304 - DNA, 30 bp, Artificial Sequence
  Synthetic oligonucleotide
tccggagaaatcaatggactagagaaacct

SEQ ID NO: 81305 - DNA, 30 bp, Artificial Sequence
  Synthetic oligonucleotide
ctggcatgtcactccggaactgagcaacct

SEQ ID NO: 81306 - DNA, 30 bp, Artificial Sequence
  Synthetic oligonucleotide
ttgctaatcgtcggtggtacctttgcacct

SEQ ID NO: 81307 - DNA, 30 bp, Artificial Sequence
  Synthetic oligonucleotide
gacaacgatcctgccagacggaactcacct

SEQ ID NO: 81308 - DNA, 30 bp, Artificial Sequence
  Synthetic oligonucleotide
ctccccaaataaaccaagggactccgacct

SEQ ID NO: 81309 - DNA, 30 bp, Artificial Sequence
  Synthetic oligonucleotide
acagctcgagcggtgctgtgcgaatgacct

SEQ ID NO: 81310 - DNA, 30 bp, Artificial Sequence
  Synthetic oligonucleotide
cgtgtggtgaagggcgaccggtagtgacct

SEQ ID NO: 81311 - DNA, 30 bp, Artificial Sequence
  Synthetic oligonucleotide
gaacgggaatttcagtaattcatgtgacct

SEQ ID NO: 81312 - DNA, 30 bp, Artificial Sequence
  Synthetic oligonucleotide
aggggggtggcgaaccccgtgttgtgacct

SEQ ID NO: 81313 - DNA, 30 bp, Artificial Sequence
  Synthetic oligonucleotide
aagactaacgaacccgtcctgcaactacct

SEQ ID NO: 81314 - DNA, 30 bp, Artificial Sequence
  Synthetic oligonucleotide
acaatcggtgcatagccgtccatagtacct

SEQ ID NO: 81315 - DNA, 30 bp, Artificial Sequence
  Synthetic oligonucleotide
cgtattggatcggaattcaatattgtacct

SEQ ID NO: 81316 - DNA, 30 bp, Artificial Sequence
  Synthetic oligonucleotide
gctgacggaggccggagaacgttgaaccct

SEQ ID NO: 81317 - DNA, 30 bp, Artificial Sequence
  Synthetic oligonucleotide
ccgtgggctgcgagttccgccaaacaccct

SEQ ID NO: 81318 - DNA, 30 bp, Artificial Sequence
  Synthetic oligonucleotide
tgatccaagaacagggagcccccccaccct

SEQ ID NO: 81319 - DNA, 30 bp, Artificial Sequence
  Synthetic oligonucleotide
gggtcggacatgtcacattgaaaggaccct

SEQ ID NO: 81320 - DNA, 30 bp, Artificial Sequence
  Synthetic oligonucleotide
cgtagacctatagaacgttcctatgaccct

SEQ ID NO: 81321 - DNA, 30 bp, Artificial Sequence
  Synthetic oligonucleotide
gtgaaggctagcggatcgtaaactgaccct

SEQ ID NO: 81322 - DNA, 30 bp, Artificial Sequence
  Synthetic oligonucleotide
gtgatggctaaaccaccacagagctaccct

SEQ ID NO: 81323 - DNA, 30 bp, Artificial Sequence
  Synthetic oligonucleotide
gcctaaggtgaagtggaatcctcgtaccct

SEQ ID NO: 81324 - DNA, 30 bp, Artificial Sequence
  Synthetic oligonucleotide
gcggcagttaacctaaatctttagcgccct

SEQ ID NO: 81325 - DNA, 30 bp, Artificial Sequence
  Synthetic oligonucleotide
cagcatgaaatatcataagtcgaaggccct

SEQ ID NO: 81326 - DNA, 30 bp, Artificial Sequence
  Synthetic oligonucleotide
ccagcgaatatggcggaagtccgtggccct

SEQ ID NO: 81327 - DNA, 30 bp, Artificial Sequence
  Synthetic oligonucleotide
ggtccacgtcaagtcaccaatcaatgccct

SEQ ID NO: 81328 - DNA, 30 bp, Artificial Sequence
  Synthetic oligonucleotide
acgccgaataatctaccatagttcgtccct

SEQ ID NO: 81329 - DNA, 30 bp, Artificial Sequence
  Synthetic oligonucleotide
tgtgagttcagaacaagggagtggaagcct

SEQ ID NO: 81330 - DNA, 30 bp, Artificial Sequence
  Synthetic oligonucleotide
ccgagaccaggggcgttgcattagcagcct

SEQ ID NO: 81331 - DNA, 30 bp, Artificial Sequence
  Synthetic oligonucleotide
tcgacagggatagatcgccgccttcagcct

SEQ ID NO: 81332 - DNA, 30 bp, Artificial Sequence
  Synthetic oligonucleotide
gcactgttaaacgaacatcatgtggagcct

SEQ ID NO: 81333 - DNA, 30 bp, Artificial Sequence
  Synthetic oligonucleotide
cgacggaagtgtgttccgaatcaatagcct

SEQ ID NO: 81334 - DNA, 30 bp, Artificial Sequence
  Synthetic oligonucleotide
atctagacctcacactggtcgaattagcct

SEQ ID NO: 81335 - DNA, 30 bp, Artificial Sequence
  Synthetic oligonucleotide
aggacatgcgggttcatgctaataacgcct

SEQ ID NO: 81336 - DNA, 30 bp, Artificial Sequence
  Synthetic oligonucleotide
agacactaatctccggttaaggattcgcct

SEQ ID NO: 81337 - DNA, 30 bp, Artificial Sequence
  Synthetic oligonucleotide
ggtgaaatgtacttcgacgaaaagaggcct

SEQ ID NO: 81338 - DNA, 30 bp, Artificial Sequence
  Synthetic oligonucleotide
cagcggataggattatgagtgactatgcct

SEQ ID NO: 81339 - DNA, 30 bp, Artificial Sequence
  Synthetic oligonucleotide
atgggggatggaatgagagataacgtgcct

SEQ ID NO: 81340 - DNA, 30 bp, Artificial Sequence
  Synthetic oligonucleotide
gtggataggttggtggggcagaatcatcct

SEQ ID NO: 81341 - DNA, 30 bp, Artificial Sequence
  Synthetic oligonucleotide
cacgtcccctccattgcatgtgactatcct

SEQ ID NO: 81342 - DNA, 30 bp, Artificial Sequence
  Synthetic oligonucleotide
agaagtcactcctatacaaggacaactcct

SEQ ID NO: 81343 - DNA, 29 bp, Artificial Sequence
  Synthetic oligonucleotide
ggaaggcaatccttctaaacgagactcct

SEQ ID NO: 81344 - DNA, 30 bp, Artificial Sequence
  Synthetic oligonucleotide
gggccagaactactaggcaaaccgcgtcct

SEQ ID NO: 81345 - DNA, 30 bp, Artificial Sequence
  Synthetic oligonucleotide
aggctagtcttgtcgataaatgtcggtcct

SEQ ID NO: 81346 - DNA, 30 bp, Artificial Sequence
  Synthetic oligonucleotide
ccacatgtcgttacataggcacagtgtcct

SEQ ID NO: 81347 - DNA, 30 bp, Artificial Sequence
  Synthetic oligonucleotide
ctaagaaatgtgggagaaaatctgtgtcct

SEQ ID NO: 81348 - DNA, 30 bp, Artificial Sequence
  Synthetic oligonucleotide
tgcaagcgataatgcaactcttgatttcct

SEQ ID NO: 81349 - DNA, 30 bp, Artificial Sequence
  Synthetic oligonucleotide
tgcgactagcacgttacaagttaaaaagct

SEQ ID NO: 81350 - DNA, 30 bp, Artificial Sequence
  Synthetic oligonucleotide
caggttgtagctcagccctagagtaaagct

SEQ ID NO: 81351 - DNA, 30 bp, Artificial Sequence
  Synthetic oligonucleotide
gatagctgaaaggcaactggacagcaagct

SEQ ID NO: 81352 - DNA, 30 bp, Artificial Sequence
  Synthetic oligonucleotide
tggacatggcttgggaagttgttgcaagct

SEQ ID NO: 81353 - DNA, 30 bp, Artificial Sequence
  Synthetic oligonucleotide
gggttggaattcaaggttgcataggaagct

SEQ ID NO: 81354 - DNA, 30 bp, Artificial Sequence
  Synthetic oligonucleotide
tggtaaattgaggctagaactatttaagct

SEQ ID NO: 81355 - DNA, 30 bp, Artificial Sequence
  Synthetic oligonucleotide
ctgcacggggttcaaaggaaataaacagct

SEQ ID NO: 81356 - DNA, 30 bp, Artificial Sequence
  Synthetic oligonucleotide
tacggccgggacccagttcagagcacagct

SEQ ID NO: 81357 - DNA, 30 bp, Artificial Sequence
  Synthetic oligonucleotide
caatgtaggatacaaatgtgatgcacagct

SEQ ID NO: 81358 - DNA, 30 bp, Artificial Sequence
  Synthetic oligonucleotide
caagacccatcgctcctgtgctgtacagct

SEQ ID NO: 81359 - DNA, 30 bp, Artificial Sequence
  Synthetic oligonucleotide
caagatttaaggccacaaaatcctgcagct

SEQ ID NO: 81360 - DNA, 30 bp, Artificial Sequence
  Synthetic oligonucleotide
cctgtgtaacgttgggtagttgagtcagct

SEQ ID NO: 81361 - DNA, 30 bp, Artificial Sequence
  Synthetic oligonucleotide
aacgcgaccgatatttgcacacaccgagct

SEQ ID NO: 81362 - DNA, 30 bp, Artificial Sequence
  Synthetic oligonucleotide
accaaagatccgggcgtatccaggggagct

SEQ ID NO: 81363 - DNA, 30 bp, Artificial Sequence
  Synthetic oligonucleotide
gggaaagaactataccttacgaaatgagct

SEQ ID NO: 81364 - DNA, 31 bp, Artificial Sequence
  Synthetic oligonucleotide
agtcaacttttggccggtcttacgagtagct

SEQ ID NO: 81365 - DNA, 30 bp, Artificial Sequence
  Synthetic oligonucleotide
ccgtacggaagaacaactcaatacaacgct

SEQ ID NO: 81366 - DNA, 30 bp, Artificial Sequence
  Synthetic oligonucleotide
aagataaagtacagaccataacttaacgct

SEQ ID NO: 81367 - DNA, 30 bp, Artificial Sequence
  Synthetic oligonucleotide
tcgggacattgatcggaatgaagctacgct

SEQ ID NO: 81368 - DNA, 30 bp, Artificial Sequence
  Synthetic oligonucleotide
acacaacttaacctgacataagccatcgct

SEQ ID NO: 81369 - DNA, 30 bp, Artificial Sequence
  Synthetic oligonucleotide
cgtataactaagtgctacctcactctcgct

SEQ ID NO: 81370 - DNA, 30 bp, Artificial Sequence
  Synthetic oligonucleotide
atcaaaggcaaggaggtgcgtgtggtcgct

SEQ ID NO: 81371 - DNA, 30 bp, Artificial Sequence
  Synthetic oligonucleotide
taagaatgggccgatagcctgatcttcgct

SEQ ID NO: 81372 - DNA, 30 bp, Artificial Sequence
  Synthetic oligonucleotide
ccgacacgatcaataagctggggcaaggct

SEQ ID NO: 81373 - DNA, 30 bp, Artificial Sequence
  Synthetic oligonucleotide
agcaatggatggaggatatgtaggcaggct

SEQ ID NO: 81374 - DNA, 30 bp, Artificial Sequence
  Synthetic oligonucleotide
atggagaccccgtttacgacgagcgaggct

SEQ ID NO: 81375 - DNA, 30 bp, Artificial Sequence
  Synthetic oligonucleotide
ccaagcggtgctgcctaagtacatgaggct

SEQ ID NO: 81376 - DNA, 30 bp, Artificial Sequence
  Synthetic oligonucleotide
tggcagagaccagttgatttggcttaggct

SEQ ID NO: 81377 - DNA, 30 bp, Artificial Sequence
  Synthetic oligonucleotide
atcgcgggaatggatggtggcataacggct

SEQ ID NO: 81378 - DNA, 30 bp, Artificial Sequence
  Synthetic oligonucleotide
aggatgaccaaagacctctatttcacggct

SEQ ID NO: 81379 - DNA, 30 bp, Artificial Sequence
  Synthetic oligonucleotide
atatgtgtcgactggatcctctacccggct

SEQ ID NO: 81380 - DNA, 30 bp, Artificial Sequence
  Synthetic oligonucleotide
cttgcttggataccctagcactaggcggct

SEQ ID NO: 81381 - DNA, 30 bp, Artificial Sequence
  Synthetic oligonucleotide
tcggggtaggtactctcagtcagcagggct

SEQ ID NO: 81382 - DNA, 30 bp, Artificial Sequence
  Synthetic oligonucleotide
accctgcagggttatagattggagagggct

SEQ ID NO: 81383 - DNA, 30 bp, Artificial Sequence
  Synthetic oligonucleotide
cccacagtgtaacgagagtgattacgggct

SEQ ID NO: 81384 - DNA, 30 bp, Artificial Sequence
  Synthetic oligonucleotide
ctcatgtttgcaatcagctgggagcgggct

SEQ ID NO: 81385 - DNA, 30 bp, Artificial Sequence
  Synthetic oligonucleotide
catcagggggatcctcatgagtagggggct

SEQ ID NO: 81386 - DNA, 30 bp, Artificial Sequence
  Synthetic oligonucleotide
tggtgaattggcttgggataaaatctggct

SEQ ID NO: 81387 - DNA, 30 bp, Artificial Sequence
  Synthetic oligonucleotide
tgcgggacggggtagtgtgcctacgtggct

SEQ ID NO: 81388 - DNA, 30 bp, Artificial Sequence
  Synthetic oligonucleotide
acgccagttggtgacaaggatgtcttggct

SEQ ID NO: 81389 - DNA, 30 bp, Artificial Sequence
  Synthetic oligonucleotide
ataacaagtctggccggcaaagggaatgct

SEQ ID NO: 81390 - DNA, 30 bp, Artificial Sequence
  Synthetic oligonucleotide
gtcctatggagattcaggcgaactaatgct

SEQ ID NO: 81391 - DNA, 30 bp, Artificial Sequence
  Synthetic oligonucleotide
tgggatcatttatgtgggaccaggcatgct

SEQ ID NO: 81392 - DNA, 30 bp, Artificial Sequence
  Synthetic oligonucleotide
tcgtgcgcccccgaaggcggagcggatgct

SEQ ID NO: 81393 - DNA, 30 bp, Artificial Sequence
  Synthetic oligonucleotide
gaacatacaagacactcggattcgtctgct

SEQ ID NO: 81394 - DNA, 30 bp, Artificial Sequence
  Synthetic oligonucleotide
gggaacgagaccattgtcttggttagtgct

SEQ ID NO: 81395 - DNA, 30 bp, Artificial Sequence
  Synthetic oligonucleotide
ccgaacgtaactctgactaataaccgtgct

SEQ ID NO: 81396 - DNA, 30 bp, Artificial Sequence
  Synthetic oligonucleotide
cgggtacctcgggcagattctcctcgtgct

SEQ ID NO: 81397 - DNA, 30 bp, Artificial Sequence
  Synthetic oligonucleotide
gttaggaaacaatctgggattcgatgtgct

SEQ ID NO: 81398 - DNA, 30 bp, Artificial Sequence
  Synthetic oligonucleotide
tggggtgggaaaggtgggatgtgctgtgct

SEQ ID NO: 81399 - DNA, 30 bp, Artificial Sequence
  Synthetic oligonucleotide
agattaattgaacagaactgcgaatttgct

SEQ ID NO: 81400 - DNA, 30 bp, Artificial Sequence
  Synthetic oligonucleotide
aggaaggactgggtcgtacgccattttgct

SEQ ID NO: 81401 - DNA, 30 bp, Artificial Sequence
  Synthetic oligonucleotide
cccgtataggtcaatgggagaggaaaatct

SEQ ID NO: 81402 - DNA, 30 bp, Artificial Sequence
  Synthetic oligonucleotide
ggagagcgccaatccaatcgacataaatct

SEQ ID NO: 81403 - DNA, 30 bp, Artificial Sequence
  Synthetic oligonucleotide
ctgataatcgctgtagttagcagtcaatct

SEQ ID NO: 81404 - DNA, 30 bp, Artificial Sequence
  Synthetic oligonucleotide
gcgaacgcggccggagctttagtcgaatct

SEQ ID NO: 81405 - DNA, 31 bp, Artificial Sequence
  Synthetic oligonucleotide
cagcacatgaaagtatcgaatgcaggaatct

SEQ ID NO: 81406 - DNA, 30 bp, Artificial Sequence
  Synthetic oligonucleotide
ggtagttcggggatgatgagagcggaatct

SEQ ID NO: 81407 - DNA, 30 bp, Artificial Sequence
  Synthetic oligonucleotide
ctaaccataccggactgaggtggataatct

SEQ ID NO: 81408 - DNA, 30 bp, Artificial Sequence
  Synthetic oligonucleotide
ccaaacagggagtccaagactgctcgatct

SEQ ID NO: 81409 - DNA, 30 bp, Artificial Sequence
  Synthetic oligonucleotide
gagtcgaaaatcttacacaatcttcgatct

SEQ ID NO: 81410 - DNA, 30 bp, Artificial Sequence
  Synthetic oligonucleotide
atgcgttacgtgaggactggtagaggatct

SEQ ID NO: 81411 - DNA, 30 bp, Artificial Sequence
  Synthetic oligonucleotide
ggctcatcaacgtctgagtcgaagggatct

SEQ ID NO: 81412 - DNA, 30 bp, Artificial Sequence
  Synthetic oligonucleotide
ggcgaaagaactgtcaaagactctggatct

SEQ ID NO: 81413 - DNA, 30 bp, Artificial Sequence
  Synthetic oligonucleotide
cgggtttagtgataagggtggagtggatct

SEQ ID NO: 81414 - DNA, 30 bp, Artificial Sequence
  Synthetic oligonucleotide
tgaaattcgatattaatggtgaagtgatct

SEQ ID NO: 81415 - DNA, 30 bp, Artificial Sequence
  Synthetic oligonucleotide
caccggcaaagggtgtcaaatttaatatct

SEQ ID NO: 81416 - DNA, 30 bp, Artificial Sequence
  Synthetic oligonucleotide
acgacagttataaatgttgctaccaactct

SEQ ID NO: 81417 - DNA, 30 bp, Artificial Sequence
  Synthetic oligonucleotide
gattgtgaagggacgtctggagggaactct

SEQ ID NO: 81418 - DNA, 30 bp, Artificial Sequence
  Synthetic oligonucleotide
tcagggtacaaatcaaagacacaaacctct

SEQ ID NO: 81419 - DNA, 30 bp, Artificial Sequence
  Synthetic oligonucleotide
aggagacgcgtaaccacactcgacacctct

SEQ ID NO: 81420 - DNA, 30 bp, Artificial Sequence
  Synthetic oligonucleotide
cggttagctagcgaatgccttaccacctct

SEQ ID NO: 81421 - DNA, 30 bp, Artificial Sequence
  Synthetic oligonucleotide
ggaccttgggggacttaaaaatcaagctct

SEQ ID NO: 81422 - DNA, 30 bp, Artificial Sequence
  Synthetic oligonucleotide
gacttagttcggacgtaaacgatatgctct

SEQ ID NO: 81423 - DNA, 30 bp, Artificial Sequence
  Synthetic oligonucleotide
ggagaccgtaacgagttacgcacctgctct

SEQ ID NO: 81424 - DNA, 30 bp, Artificial Sequence
  Synthetic oligonucleotide
tagttcatatgtcagacggatggtgtctct

SEQ ID NO: 81425 - DNA, 30 bp, Artificial Sequence
  Synthetic oligonucleotide
aggtaacacgaagcaatgagcacgaagtct

SEQ ID NO: 81426 - DNA, 30 bp, Artificial Sequence
  Synthetic oligonucleotide
cacttaagaaactattacagtttacagtct

SEQ ID NO: 81427 - DNA, 30 bp, Artificial Sequence
  Synthetic oligonucleotide
agtgcgtgcataaatcagtagggccagtct

SEQ ID NO: 81428 - DNA, 30 bp, Artificial Sequence
  Synthetic oligonucleotide
tcaacggtcgacatcaccggactccagtct

SEQ ID NO: 81429 - DNA, 30 bp, Artificial Sequence
  Synthetic oligonucleotide
gtgacgtgggtgagagggaatcatcagtct

SEQ ID NO: 81430 - DNA, 30 bp, Artificial Sequence
  Synthetic oligonucleotide
taaaatcgaacttctacggaccagtagtct

SEQ ID NO: 81431 - DNA, 30 bp, Artificial Sequence
  Synthetic oligonucleotide
tcgggataggtattctattaaccaacgtct

SEQ ID NO: 81432 - DNA, 30 bp, Artificial Sequence
  Synthetic oligonucleotide
acggatagttgagatttgcgactctcgtct

SEQ ID NO: 81433 - DNA, 30 bp, Artificial Sequence
  Synthetic oligonucleotide
cagtaattgggggtcatcaccgggaggtct

SEQ ID NO: 81434 - DNA, 30 bp, Artificial Sequence
  Synthetic oligonucleotide
taacgaaatgcgtctttgttgccccggtct

SEQ ID NO: 81435 - DNA, 30 bp, Artificial Sequence
  Synthetic oligonucleotide
ttactaccaatctccagagactcatggtct

SEQ ID NO: 81436 - DNA, 30 bp, Artificial Sequence
  Synthetic oligonucleotide
atacggacgagatccctgcagctctggtct

SEQ ID NO: 81437 - DNA, 30 bp, Artificial Sequence
  Synthetic oligonucleotide
cgggagggagttgtgaagtatgtctggtct

SEQ ID NO: 81438 - DNA, 30 bp, Artificial Sequence
  Synthetic oligonucleotide
aggagcctcagatccctatcaaaagtgtct

SEQ ID NO: 81439 - DNA, 30 bp, Artificial Sequence
  Synthetic oligonucleotide
atgagaaagcaaagagacagaaaagtgtct

SEQ ID NO: 81440 - DNA, 30 bp, Artificial Sequence
  Synthetic oligonucleotide
tgaatcgagacgggattttaccagttgtct

SEQ ID NO: 81441 - DNA, 30 bp, Artificial Sequence
  Synthetic oligonucleotide
ccaccgaaacttcaagaaagtcaaaattct

SEQ ID NO: 81442 - DNA, 30 bp, Artificial Sequence
  Synthetic oligonucleotide
gacagagcaacacggagtctggaaaattct

SEQ ID NO: 81443 - DNA, 30 bp, Artificial Sequence
  Synthetic oligonucleotide
catggagggcatcgacacaatccgcattct

SEQ ID NO: 81444 - DNA, 30 bp, Artificial Sequence
  Synthetic oligonucleotide
gggtcagatggtgcacgaactgatcattct

SEQ ID NO: 81445 - DNA, 30 bp, Artificial Sequence
  Synthetic oligonucleotide
ccgtaacaataatgctttcttcgcgattct

SEQ ID NO: 81446 - DNA, 30 bp, Artificial Sequence
  Synthetic oligonucleotide
gcggcaattacgttcaactatgagccttct

SEQ ID NO: 81447 - DNA, 30 bp, Artificial Sequence
  Synthetic oligonucleotide
aggagtaggtccgtagagtgctatgcttct

SEQ ID NO: 81448 - DNA, 30 bp, Artificial Sequence
  Synthetic oligonucleotide
taggaggataaaagtatccagcgatcttct

SEQ ID NO: 81449 - DNA, 30 bp, Artificial Sequence
  Synthetic oligonucleotide
tggacaggactgcttcatactgctcgttct

SEQ ID NO: 81450 - DNA, 30 bp, Artificial Sequence
  Synthetic oligonucleotide
gctaaaggaattacagagctatacggttct

SEQ ID NO: 81451 - DNA, 30 bp, Artificial Sequence
  Synthetic oligonucleotide
tatctgagctacggcccagagcagggttct

SEQ ID NO: 81452 - DNA, 30 bp, Artificial Sequence
  Synthetic oligonucleotide
taagagaacgtgcgattgatatgtgtttct

SEQ ID NO: 81453 - DNA, 30 bp, Artificial Sequence
  Synthetic oligonucleotide
ggcgtgatgagtcgatttcccacgttttct

SEQ ID NO: 81454 - DNA, 30 bp, Artificial Sequence
  Synthetic oligonucleotide
aagtcgcgaaacgcgagataaataaaaagt

SEQ ID NO: 81455 - DNA, 30 bp, Artificial Sequence
  Synthetic oligonucleotide
atatgaacacatggagacagtaacaaaagt

SEQ ID NO: 81456 - DNA, 30 bp, Artificial Sequence
  Synthetic oligonucleotide
gcgtatatgcgttgtctcgtgggcgaaagt

SEQ ID NO: 81457 - DNA, 30 bp, Artificial Sequence
  Synthetic oligonucleotide
ccacctgactcctgaagcctatcggaaagt

SEQ ID NO: 81458 - DNA, 30 bp, Artificial Sequence
  Synthetic oligonucleotide
agctccgtttgcgacaagtgcgtcccaagt

SEQ ID NO: 81459 - DNA, 30 bp, Artificial Sequence
  Synthetic oligonucleotide
gtggccatagacgtcaaagattggccaagt

SEQ ID NO: 81460 - DNA, 30 bp, Artificial Sequence
  Synthetic oligonucleotide
atgctggggaccgcccaagttgtggcaagt

SEQ ID NO: 81461 - DNA, 30 bp, Artificial Sequence
  Synthetic oligonucleotide
cccaaaaacaggacaagagagtcatcaagt

SEQ ID NO: 81462 - DNA, 30 bp, Artificial Sequence
  Synthetic oligonucleotide
tggatcgataacacgaggcgtctctcaagt

SEQ ID NO: 81463 - DNA, 30 bp, Artificial Sequence
  Synthetic oligonucleotide
gtactaggataggggtggcctctacgaagt

SEQ ID NO: 81464 - DNA, 30 bp, Artificial Sequence
  Synthetic oligonucleotide
tggtattaccataatgaagtgtcaggaagt

SEQ ID NO: 81465 - DNA, 30 bp, Artificial Sequence
  Synthetic oligonucleotide
cggaacagaattgaaaggcgtcgaggaagt

SEQ ID NO: 81466 - DNA, 30 bp, Artificial Sequence
  Synthetic oligonucleotide
gtagtactaaccacactagtcagcggaagt

SEQ ID NO: 81467 - DNA, 30 bp, Artificial Sequence
  Synthetic oligonucleotide
aggggttaccgtgagcgaagaccatgaagt

SEQ ID NO: 81468 - DNA, 30 bp, Artificial Sequence
  Synthetic oligonucleotide
gaaccatgcctgtcaaacagtacctgaagt

SEQ ID NO: 81469 - DNA, 30 bp, Artificial Sequence
  Synthetic oligonucleotide
cgaaaataccatccgtgtccaaggtgaagt

SEQ ID NO: 81470 - DNA, 30 bp, Artificial Sequence
  Synthetic oligonucleotide
atgacaatgagatagttgcatggcataagt

SEQ ID NO: 81471 - DNA, 30 bp, Artificial Sequence
  Synthetic oligonucleotide
agacggctattgggatccttgcgtataagt

SEQ ID NO: 81472 - DNA, 30 bp, Artificial Sequence
  Synthetic oligonucleotide
gagaggcaatgctgtctcgtccgcctaagt

SEQ ID NO: 81473 - DNA, 30 bp, Artificial Sequence
  Synthetic oligonucleotide
taaaacttgatgaaaaggtggacggtaagt

SEQ ID NO: 81474 - DNA, 30 bp, Artificial Sequence
  Synthetic oligonucleotide
ctagattgggatgtgtacggtagggtaagt

SEQ ID NO: 81475 - DNA, 30 bp, Artificial Sequence
  Synthetic oligonucleotide
tcggctaaaggactacaaaagatattaagt

SEQ ID NO: 81476 - DNA, 30 bp, Artificial Sequence
  Synthetic oligonucleotide
tatggagatgatcaactaacaatacacagt

SEQ ID NO: 81477 - DNA, 30 bp, Artificial Sequence
  Synthetic oligonucleotide
gcagcgcgacgatattctcataaccacagt

SEQ ID NO: 81478 - DNA, 30 bp, Artificial Sequence
  Synthetic oligonucleotide
gagggaatcgtcgatgacaaccgatacagt

SEQ ID NO: 81479 - DNA, 30 bp, Artificial Sequence
  Synthetic oligonucleotide
aaagcgccgtctagaagtacaatatacagt

SEQ ID NO: 81480 - DNA, 30 bp, Artificial Sequence
  Synthetic oligonucleotide
gggcggtttcgcaagcagcgatcgtacagt

SEQ ID NO: 81481 - DNA, 30 bp, Artificial Sequence
  Synthetic oligonucleotide
cccggtcaaccatcaaataaacccaccagt

SEQ ID NO: 81482 - DNA, 30 bp, Artificial Sequence
  Synthetic oligonucleotide
agagcagacgtgacctcgcccgtagccagt

SEQ ID NO: 81483 - DNA, 30 bp, Artificial Sequence
  Synthetic oligonucleotide
ctagtctcgcctcacactacgttagccagt

SEQ ID NO: 81484 - DNA, 30 bp, Artificial Sequence
  Synthetic oligonucleotide
ccaatacatgtacgtaccctcgggtccagt

SEQ ID NO: 81485 - DNA, 30 bp, Artificial Sequence
  Synthetic oligonucleotide
agatatagatgcgatggtgataattccagt

SEQ ID NO: 81486 - DNA, 30 bp, Artificial Sequence
  Synthetic oligonucleotide
caaaagcacgttcctcaacgagaaagcagt

SEQ ID NO: 81487 - DNA, 30 bp, Artificial Sequence
  Synthetic oligonucleotide
tcttaaacagagggtatatctagaagcagt

SEQ ID NO: 81488 - DNA, 30 bp, Artificial Sequence
  Synthetic oligonucleotide
tggtcggggagattctaaaagaacagcagt

SEQ ID NO: 81489 - DNA, 30 bp, Artificial Sequence
  Synthetic oligonucleotide
cagggaaaatgagttcggagtgagagcagt

SEQ ID NO: 81490 - DNA, 30 bp, Artificial Sequence
  Synthetic oligonucleotide
aagcgcgtggaataatcttccattcgcagt

SEQ ID NO: 81491 - DNA, 30 bp, Artificial Sequence
  Synthetic oligonucleotide
acgcactctcacggagaggagtgaatcagt

SEQ ID NO: 81492 - DNA, 30 bp, Artificial Sequence
  Synthetic oligonucleotide
ccagccctccagaactagtgcaggatcagt

SEQ ID NO: 81493 - DNA, 30 bp, Artificial Sequence
  Synthetic oligonucleotide
taatcaataaggccacctagagtactcagt

SEQ ID NO: 81494 - DNA, 30 bp, Artificial Sequence
  Synthetic oligonucleotide
tgattagaccaggtaatgggcaacctcagt

SEQ ID NO: 81495 - DNA, 30 bp, Artificial Sequence
  Synthetic oligonucleotide
cgtagtacatcctggtaaaacagcttcagt

SEQ ID NO: 81496 - DNA, 30 bp, Artificial Sequence
  Synthetic oligonucleotide
aagatcttcacgaacgacctagcacagagt

SEQ ID NO: 81497 - DNA, 30 bp, Artificial Sequence
  Synthetic oligonucleotide
ctaccatacaatcttacatcaacccagagt

SEQ ID NO: 81498 - DNA, 30 bp, Artificial Sequence
  Synthetic oligonucleotide
agccaaggctctaaggtgctcttgcagagt

SEQ ID NO: 81499 - DNA, 30 bp, Artificial Sequence
  Synthetic oligonucleotide
caagctggacgtaatcggcccgttcagagt

SEQ ID NO: 81500 - DNA, 30 bp, Artificial Sequence
  Synthetic oligonucleotide
acctcgtaataaaaaaaactatccgagagt

SEQ ID NO: 81501 - DNA, 30 bp, Artificial Sequence
  Synthetic oligonucleotide
agcttgagccgtcgagtccacccatagagt

SEQ ID NO: 81502 - DNA, 30 bp, Artificial Sequence
  Synthetic oligonucleotide
gccgggaaagaatcagtcctcagctagagt

SEQ ID NO: 81503 - DNA, 30 bp, Artificial Sequence
  Synthetic oligonucleotide
cttcgtatacagctggaacatggctagagt

SEQ ID NO: 81504 - DNA, 30 bp, Artificial Sequence
  Synthetic oligonucleotide
aaagactgttacgtaaggtataattagagt

SEQ ID NO: 81505 - DNA, 30 bp, Artificial Sequence
  Synthetic oligonucleotide
tgcgtctaagttaaaacaatatcaacgagt

SEQ ID NO: 81506 - DNA, 30 bp, Artificial Sequence
  Synthetic oligonucleotide
atgctggcgtcaaacatagatgtcacgagt

SEQ ID NO: 81507 - DNA, 30 bp, Artificial Sequence
  Synthetic oligonucleotide
gatcccgtgacagtgcggcgaaagacgagt

SEQ ID NO: 81508 - DNA, 30 bp, Artificial Sequence
  Synthetic oligonucleotide
gttctgctcaatcacctctacctgccgagt

SEQ ID NO: 81509 - DNA, 31 bp, Artificial Sequence
  Synthetic oligonucleotide
tggatcgggtggatcaggggattgtccgagt

SEQ ID NO: 81510 - DNA, 30 bp, Artificial Sequence
  Synthetic oligonucleotide
tggggcgtctgctaggaattttcggcgagt

SEQ ID NO: 81511 - DNA, 30 bp, Artificial Sequence
  Synthetic oligonucleotide
tctcgaacgcgatacagcattggctcgagt

SEQ ID NO: 81512 - DNA, 30 bp, Artificial Sequence
  Synthetic oligonucleotide
cgcactggagaatacgtgtcgttaaggagt

SEQ ID NO: 81513 - DNA, 30 bp, Artificial Sequence
  Synthetic oligonucleotide
aacgcaacatctcgtaaaaaccacaggagt

SEQ ID NO: 81514 - DNA, 30 bp, Artificial Sequence
  Synthetic oligonucleotide
aatcaaggctatacgcgataagagaggagt

SEQ ID NO: 81515 - DNA, 30 bp, Artificial Sequence
  Synthetic oligonucleotide
accactaataaacaccggagggttaggagt

SEQ ID NO: 81516 - DNA, 30 bp, Artificial Sequence
  Synthetic oligonucleotide
gcactaaagagggaaatgcttaggcggagt

SEQ ID NO: 81517 - DNA, 30 bp, Artificial Sequence
  Synthetic oligonucleotide
tatgaaagaatggaattgcctgtagggagt

SEQ ID NO: 81518 - DNA, 30 bp, Artificial Sequence
  Synthetic oligonucleotide
cgcttgaggagtctctagagcaacgggagt

SEQ ID NO: 81519 - DNA, 30 bp, Artificial Sequence
  Synthetic oligonucleotide
aagtgtgatagatgccgtcgggaatggagt

SEQ ID NO: 81520 - DNA, 30 bp, Artificial Sequence
  Synthetic oligonucleotide
cctgagggtactgcgccgaattagtggagt

SEQ ID NO: 81521 - DNA, 30 bp, Artificial Sequence
  Synthetic oligonucleotide
aaaagccccgactaaacgactaggtggagt

SEQ ID NO: 81522 - DNA, 30 bp, Artificial Sequence
  Synthetic oligonucleotide
cacgtcctgtcttcggtttggtaaatgagt

SEQ ID NO: 81523 - DNA, 30 bp, Artificial Sequence
  Synthetic oligonucleotide
aggttacaagcgtgctttggggtcatgagt

SEQ ID NO: 81524 - DNA, 30 bp, Artificial Sequence
  Synthetic oligonucleotide
cggcgccgtcgatgcgggttaccgatgagt

SEQ ID NO: 81525 - DNA, 30 bp, Artificial Sequence
  Synthetic oligonucleotide
agctaaattgatggctaaaacgcgatgagt

SEQ ID NO: 81526 - DNA, 30 bp, Artificial Sequence
  Synthetic oligonucleotide
caccatcggaaccgtgagatcacactgagt

SEQ ID NO: 81527 - DNA, 30 bp, Artificial Sequence
  Synthetic oligonucleotide
tgacaatgtgtgataagcctttcactgagt

SEQ ID NO: 81528 - DNA, 30 bp, Artificial Sequence
  Synthetic oligonucleotide
gttacagtaggcacggtaggacgactgagt

SEQ ID NO: 81529 - DNA, 30 bp, Artificial Sequence
  Synthetic oligonucleotide
gtcgctagcattgatagacatcaagtgagt

SEQ ID NO: 81530 - DNA, 30 bp, Artificial Sequence
  Synthetic oligonucleotide
agtgcatgaaatctatgaggtagggtgagt

SEQ ID NO: 81531 - DNA, 30 bp, Artificial Sequence
  Synthetic oligonucleotide
aaggggtatctcagcaagcgaacattgagt

SEQ ID NO: 81532 - DNA, 31 bp, Artificial Sequence
  Synthetic oligonucleotide
ggaaagaggtaatgaatggagagctttgagt

SEQ ID NO: 81533 - DNA, 30 bp, Artificial Sequence
  Synthetic oligonucleotide
tacgcttgcgtttgggtacaaagtttgagt

SEQ ID NO: 81534 - DNA, 30 bp, Artificial Sequence
  Synthetic oligonucleotide
atgtaagtatatccaggatagagaaatagt

SEQ ID NO: 81535 - DNA, 30 bp, Artificial Sequence
  Synthetic oligonucleotide
agtccagttaatgaacttgacataaatagt

SEQ ID NO: 81536 - DNA, 30 bp, Artificial Sequence
  Synthetic oligonucleotide
atcgaggaggaatgattcctcataaatagt

SEQ ID NO: 81537 - DNA, 30 bp, Artificial Sequence
  Synthetic oligonucleotide
cgcgggcatggaatgatcgcggtgaatagt

SEQ ID NO: 81538 - DNA, 30 bp, Artificial Sequence
  Synthetic oligonucleotide
ccgaaccctggcatgtgagattaccatagt

SEQ ID NO: 81539 - DNA, 30 bp, Artificial Sequence
  Synthetic oligonucleotide
cagaattacacatcgggcaagaggcatagt

SEQ ID NO: 81540 - DNA, 30 bp, Artificial Sequence
  Synthetic oligonucleotide
aacgacatagattagcactgtactcatagt

SEQ ID NO: 81541 - DNA, 30 bp, Artificial Sequence
  Synthetic oligonucleotide
acgtaagcacgtcagatggttaacgatagt

SEQ ID NO: 81542 - DNA, 30 bp, Artificial Sequence
  Synthetic oligonucleotide
gaggttgaatggagattagctagcgatagt

SEQ ID NO: 81543 - DNA, 30 bp, Artificial Sequence
  Synthetic oligonucleotide
actacagtgagttggtggtcctgggatagt

SEQ ID NO: 81544 - DNA, 30 bp, Artificial Sequence
  Synthetic oligonucleotide
agggaggcacatttgatatgatggtatagt

SEQ ID NO: 81545 - DNA, 30 bp, Artificial Sequence
  Synthetic oligonucleotide
ggatgcaaggccgacgatccgatacctagt

SEQ ID NO: 81546 - DNA, 30 bp, Artificial Sequence
  Synthetic oligonucleotide
ggataaacggtagcgacgaggttccctagt

SEQ ID NO: 81547 - DNA, 30 bp, Artificial Sequence
  Synthetic oligonucleotide
ctaaggcacgggatttgcctcacgcctagt

SEQ ID NO: 81548 - DNA, 30 bp, Artificial Sequence
  Synthetic oligonucleotide
tcaaatagcgccgagcttccataagctagt

SEQ ID NO: 81549 - DNA, 30 bp, Artificial Sequence
  Synthetic oligonucleotide
ggggtgcccaggcatagaaatggggctagt

SEQ ID NO: 81550 - DNA, 30 bp, Artificial Sequence
  Synthetic oligonucleotide
catgtatcaatcctccgagaacagcgtagt

SEQ ID NO: 81551 - DNA, 30 bp, Artificial Sequence
  Synthetic oligonucleotide
tggagaagataggggtatctgtgaggtagt

SEQ ID NO: 81552 - DNA, 30 bp, Artificial Sequence
  Synthetic oligonucleotide
tgacattgaccaaacttcttagcgggtagt

SEQ ID NO: 81553 - DNA, 30 bp, Artificial Sequence
  Synthetic oligonucleotide
cgtggggtctcaaccctaaaacagtgtagt

SEQ ID NO: 81554 - DNA, 30 bp, Artificial Sequence
  Synthetic oligonucleotide
agtagaccgtagaggtagacggcaattagt

SEQ ID NO: 81555 - DNA, 30 bp, Artificial Sequence
  Synthetic oligonucleotide
agaaagcgtacggaaacacttgggattagt

SEQ ID NO: 81556 - DNA, 30 bp, Artificial Sequence
  Synthetic oligonucleotide
taggtcgtaaatcaccagcgtagtcttagt

SEQ ID NO: 81557 - DNA, 30 bp, Artificial Sequence
  Synthetic oligonucleotide
acgaaattagtgcggggcgggagaaaacgt

SEQ ID NO: 81558 - DNA, 30 bp, Artificial Sequence
  Synthetic oligonucleotide
cgtactaggatatatagaattacggaacgt

SEQ ID NO: 81559 - DNA, 30 bp, Artificial Sequence
  Synthetic oligonucleotide
gcatctgagagaggcttgatgtgggaacgt

SEQ ID NO: 81560 - DNA, 30 bp, Artificial Sequence
  Synthetic oligonucleotide
tatgataaattcgaaatcctcgagtaacgt

SEQ ID NO: 81561 - DNA, 30 bp, Artificial Sequence
  Synthetic oligonucleotide
ccgataaaaagcgggcgaggacggtaacgt

SEQ ID NO: 81562 - DNA, 30 bp, Artificial Sequence
  Synthetic oligonucleotide
aggagctcacgtcaacaaactgatacacgt

SEQ ID NO: 81563 - DNA, 30 bp, Artificial Sequence
  Synthetic oligonucleotide
cagatgtataagccatgagcgagcagacgt

SEQ ID NO: 81564 - DNA, 30 bp, Artificial Sequence
  Synthetic oligonucleotide
ggtgcagtcgtcgaagtagagccaggacgt

SEQ ID NO: 81565 - DNA, 30 bp, Artificial Sequence
  Synthetic oligonucleotide
atggttagcacggtaatatgggacggacgt

SEQ ID NO: 81566 - DNA, 30 bp, Artificial Sequence
  Synthetic oligonucleotide
agcacgaagagctaaaatccgcggggacgt

SEQ ID NO: 81567 - DNA, 30 bp, Artificial Sequence
  Synthetic oligonucleotide
catgaaggccatatcgaggcgatatgacgt

SEQ ID NO: 81568 - DNA, 30 bp, Artificial Sequence
  Synthetic oligonucleotide
ttataaagcgttgggggcaggtgcatacgt

SEQ ID NO: 81569 - DNA, 30 bp, Artificial Sequence
  Synthetic oligonucleotide
ctgaagagtgtattcagacaatcagtacgt

SEQ ID NO: 81570 - DNA, 30 bp, Artificial Sequence
  Synthetic oligonucleotide
gcgccaatactcgcacagattgggacccgt

SEQ ID NO: 81571 - DNA, 30 bp, Artificial Sequence
  Synthetic oligonucleotide
ctcatccgtagattacttctacctacccgt

SEQ ID NO: 81572 - DNA, 30 bp, Artificial Sequence
  Synthetic oligonucleotide
agggcgacaatatctgtcaataacagccgt

SEQ ID NO: 81573 - DNA, 30 bp, Artificial Sequence
  Synthetic oligonucleotide
agtaagtgtgaatgttaacaaggtagccgt

SEQ ID NO: 81574 - DNA, 30 bp, Artificial Sequence
  Synthetic oligonucleotide
agcttccaaattggggacgtggtccgccgt

SEQ ID NO: 81575 - DNA, 30 bp, Artificial Sequence
  Synthetic oligonucleotide
tgcgttgggaatattgtcaaggggcgccgt

SEQ ID NO: 81576 - DNA, 30 bp, Artificial Sequence
  Synthetic oligonucleotide
cgcgatcatactatgtaagtaaagggccgt

SEQ ID NO: 81577 - DNA, 30 bp, Artificial Sequence
  Synthetic oligonucleotide
taggctccacactgtgcaacagagggccgt

SEQ ID NO: 81578 - DNA, 30 bp, Artificial Sequence
  Synthetic oligonucleotide
gtaagtcaaggtaaatagtctgagggccgt

SEQ ID NO: 81579 - DNA, 30 bp, Artificial Sequence
  Synthetic oligonucleotide
caggagagatgttatgctcagggatgccgt

SEQ ID NO: 81580 - DNA, 30 bp, Artificial Sequence
  Synthetic oligonucleotide
aacgctccgttaaataggcagtgatgccgt

SEQ ID NO: 81581 - DNA, 30 bp, Artificial Sequence
  Synthetic oligonucleotide
tcgagcctaatgtcaacaaaatagatccgt

SEQ ID NO: 81582 - DNA, 30 bp, Artificial Sequence
  Synthetic oligonucleotide
tcagggctacagattgcgagggaattccgt

SEQ ID NO: 81583 - DNA, 30 bp, Artificial Sequence
  Synthetic oligonucleotide
gggcagaacgtggcatattgaacaaagcgt

SEQ ID NO: 81584 - DNA, 30 bp, Artificial Sequence
  Synthetic oligonucleotide
ggcatcagtaacataagcagtctgaagcgt

SEQ ID NO: 81585 - DNA, 30 bp, Artificial Sequence
  Synthetic oligonucleotide
cgagtgtgtgaaataagtagaggtccgcgt

SEQ ID NO: 81586 - DNA, 30 bp, Artificial Sequence
  Synthetic oligonucleotide
ggtccagcacaaaaggggtaactacggcgt

SEQ ID NO: 81587 - DNA, 30 bp, Artificial Sequence
  Synthetic oligonucleotide
tctacgagagatttgacaaaacggcggcgt

SEQ ID NO: 81588 - DNA, 30 bp, Artificial Sequence
  Synthetic oligonucleotide
aataaacgaaaggacacgtgacgtgggcgt

SEQ ID NO: 81589 - DNA, 30 bp, Artificial Sequence
  Synthetic oligonucleotide
tggatgtcgaaaggggactatgaaatgcgt

SEQ ID NO: 81590 - DNA, 30 bp, Artificial Sequence
  Synthetic oligonucleotide
gagagcagcacaaagcgacttaatatgcgt

SEQ ID NO: 81591 - DNA, 30 bp, Artificial Sequence
  Synthetic oligonucleotide
cttaacctgaaggctgggcagccagtgcgt

SEQ ID NO: 81592 - DNA, 30 bp, Artificial Sequence
  Synthetic oligonucleotide
tctaggagttactcgcatcgctcggtgcgt

SEQ ID NO: 81593 - DNA, 30 bp, Artificial Sequence
  Synthetic oligonucleotide
aggacatcataactatatcgaatggtgcgt

SEQ ID NO: 81594 - DNA, 30 bp, Artificial Sequence
  Synthetic oligonucleotide
gcggatggtataggcctggtcaatgtgcgt

SEQ ID NO: 81595 - DNA, 30 bp, Artificial Sequence
  Synthetic oligonucleotide
cctgagtgtggtgaaatccaaactgtgcgt

SEQ ID NO: 81596 - DNA, 30 bp, Artificial Sequence
  Synthetic oligonucleotide
tgtaaccacagacccacaagttctgtgcgt

SEQ ID NO: 81597 - DNA, 30 bp, Artificial Sequence
  Synthetic oligonucleotide
gatgagttgtgactagggtacgtaaatcgt

SEQ ID NO: 81598 - DNA, 30 bp, Artificial Sequence
  Synthetic oligonucleotide
acatctgccgaggggctatgccaacatcgt

SEQ ID NO: 81599 - DNA, 30 bp, Artificial Sequence
  Synthetic oligonucleotide
tgaacatcgacttgtcatggaacgcatcgt

SEQ ID NO: 81600 - DNA, 30 bp, Artificial Sequence
  Synthetic oligonucleotide
ttacacatgcgtctaagaaatctgcatcgt

SEQ ID NO: 81601 - DNA, 30 bp, Artificial Sequence
  Synthetic oligonucleotide
ggatgccggtgattgattaagcttactcgt

SEQ ID NO: 81602 - DNA, 30 bp, Artificial Sequence
  Synthetic oligonucleotide
actatcactcaaagtccaagaactgctcgt

SEQ ID NO: 81603 - DNA, 30 bp, Artificial Sequence
  Synthetic oligonucleotide
cgctctgaagcccgataacaggatagtcgt

SEQ ID NO: 81604 - DNA, 30 bp, Artificial Sequence
  Synthetic oligonucleotide
agggccaatcaatctcggtaccagggtcgt

SEQ ID NO: 81605 - DNA, 30 bp, Artificial Sequence
  Synthetic oligonucleotide
cagaagaaaaagtgtagggcttgtggtcgt

SEQ ID NO: 81606 - DNA, 30 bp, Artificial Sequence
  Synthetic oligonucleotide
tctaaacgctagagagtcagcaagtgtcgt

SEQ ID NO: 81607 - DNA, 30 bp, Artificial Sequence
  Synthetic oligonucleotide
tacgttcacgtcgcccagtctagttgtcgt

SEQ ID NO: 81608 - DNA, 30 bp, Artificial Sequence
  Synthetic oligonucleotide
agcactgggatgtgttccttcggcattcgt

SEQ ID NO: 81609 - DNA, 30 bp, Artificial Sequence
  Synthetic oligonucleotide
ggcttggacaaattgttaccgaaacttcgt

SEQ ID NO: 81610 - DNA, 30 bp, Artificial Sequence
  Synthetic oligonucleotide
gttagaacgacggcggagagggtggttcgt

SEQ ID NO: 81611 - DNA, 30 bp, Artificial Sequence
  Synthetic oligonucleotide
ctggtttgaaacagatgtcgctatgttcgt

SEQ ID NO: 81612 - DNA, 30 bp, Artificial Sequence
  Synthetic oligonucleotide
atgttctgagggatcgggtgtacaaaaggt

SEQ ID NO: 81613 - DNA, 30 bp, Artificial Sequence
  Synthetic oligonucleotide
acaacacaacaagctcttactcaccaaggt

SEQ ID NO: 81614 - DNA, 30 bp, Artificial Sequence
  Synthetic oligonucleotide
tagtgaggtaaggcgacaccaccggaaggt

SEQ ID NO: 81615 - DNA, 30 bp, Artificial Sequence
  Synthetic oligonucleotide
ccactagaatgcaggtggtacgtaccaggt

SEQ ID NO: 81616 - DNA, 30 bp, Artificial Sequence
  Synthetic oligonucleotide
atacgtacactggaatttccgcaggcaggt

SEQ ID NO: 81617 - DNA, 30 bp, Artificial Sequence
  Synthetic oligonucleotide
ctatcggtaggcgtgtcaccgtgctcaggt

SEQ ID NO: 81618 - DNA, 30 bp, Artificial Sequence
  Synthetic oligonucleotide
agagaaagctgcataagtgaaccgtcaggt

SEQ ID NO: 81619 - DNA, 30 bp, Artificial Sequence
  Synthetic oligonucleotide
gggaaaaagacaagggcatttgacagaggt

SEQ ID NO: 81620 - DNA, 30 bp, Artificial Sequence
  Synthetic oligonucleotide
tgagagacgctgagttttgggccacgaggt

SEQ ID NO: 81621 - DNA, 30 bp, Artificial Sequence
  Synthetic oligonucleotide
ctggaggaatatacttggcaatcacgaggt

SEQ ID NO: 81622 - DNA, 30 bp, Artificial Sequence
  Synthetic oligonucleotide
cgggaaccaggatattcaatagttcgaggt

SEQ ID NO: 81623 - DNA, 30 bp, Artificial Sequence
  Synthetic oligonucleotide
gacaaaccgaagttaggacgagtaggaggt

SEQ ID NO: 81624 - DNA, 30 bp, Artificial Sequence
  Synthetic oligonucleotide
ccagtggttctaaccaagactcccggaggt

SEQ ID NO: 81625 - DNA, 30 bp, Artificial Sequence
  Synthetic oligonucleotide
gctccatcgaggggaaagtactcaataggt

SEQ ID NO: 81626 - DNA, 30 bp, Artificial Sequence
  Synthetic oligonucleotide
ctagcaagagaggcaaattaggctctaggt

SEQ ID NO: 81627 - DNA, 30 bp, Artificial Sequence
  Synthetic oligonucleotide
cgctcgaaaaggaacatacccattctaggt

SEQ ID NO: 81628 - DNA, 30 bp, Artificial Sequence
  Synthetic oligonucleotide
gctgaagcgtcggcacgtaacgttctaggt

SEQ ID NO: 81629 - DNA, 30 bp, Artificial Sequence
  Synthetic oligonucleotide
ggcaaatatagatcgtcaagaaatgtaggt

SEQ ID NO: 81630 - DNA, 30 bp, Artificial Sequence
  Synthetic oligonucleotide
gtgccgtaccgtatgccggaacgattaggt

SEQ ID NO: 81631 - DNA, 30 bp, Artificial Sequence
  Synthetic oligonucleotide
ggagagtgtcatcttataacagacaacggt

SEQ ID NO: 81632 - DNA, 30 bp, Artificial Sequence
  Synthetic oligonucleotide
aagtgaactacacacatgatctaacacggt

SEQ ID NO: 81633 - DNA, 30 bp, Artificial Sequence
  Synthetic oligonucleotide
gggtgcatggaactttcagcgatacacggt

SEQ ID NO: 81634 - DNA, 30 bp, Artificial Sequence
  Synthetic oligonucleotide
caaagaagggttatacaaaagcctcacggt

SEQ ID NO: 81635 - DNA, 30 bp, Artificial Sequence
  Synthetic oligonucleotide
aaggcaccgtttagtgcggagctccccggt

SEQ ID NO: 81636 - DNA, 30 bp, Artificial Sequence
  Synthetic oligonucleotide
acggtcaatctttcgcatagtaagtccggt

SEQ ID NO: 81637 - DNA, 30 bp, Artificial Sequence
  Synthetic oligonucleotide
aggatgaagagtgactagtaactgtccggt

SEQ ID NO: 81638 - DNA, 30 bp, Artificial Sequence
  Synthetic oligonucleotide
gaggaagaatgaagacttgcaattagcggt

SEQ ID NO: 81639 - DNA, 30 bp, Artificial Sequence
  Synthetic oligonucleotide
attaggaggacgtaaggtgagactcgcggt

SEQ ID NO: 81640 - DNA, 30 bp, Artificial Sequence
  Synthetic oligonucleotide
tactccccatgttcacgtggaagtcgcggt

SEQ ID NO: 81641 - DNA, 30 bp, Artificial Sequence
  Synthetic oligonucleotide
cgttcgcgatgaggtgtcaggcacggcggt

SEQ ID NO: 81642 - DNA, 30 bp, Artificial Sequence
  Synthetic oligonucleotide
gggacagaaccaacatacatacatggcggt

SEQ ID NO: 81643 - DNA, 30 bp, Artificial Sequence
  Synthetic oligonucleotide
cgagtattgttaggagcaagtaagtgcggt

SEQ ID NO: 81644 - DNA, 30 bp, Artificial Sequence
  Synthetic oligonucleotide
cagatcgttgacttgagattcagggtcggt

SEQ ID NO: 81645 - DNA, 30 bp, Artificial Sequence
  Synthetic oligonucleotide
cccaaattaggaacacgcgtgaaacagggt

SEQ ID NO: 81646 - DNA, 30 bp, Artificial Sequence
  Synthetic oligonucleotide
ataagtcagtaggtatgccgaccacagggt

SEQ ID NO: 81647 - DNA, 30 bp, Artificial Sequence
  Synthetic oligonucleotide
agagggaattctcggggtgatgcccagggt

SEQ ID NO: 81648 - DNA, 30 bp, Artificial Sequence
  Synthetic oligonucleotide
ttgaagattggagacgtttctaatcagggt

SEQ ID NO: 81649 - DNA, 30 bp, Artificial Sequence
  Synthetic oligonucleotide
aacggtacagagcgcaaaatccacgagggt

SEQ ID NO: 81650 - DNA, 30 bp, Artificial Sequence
  Synthetic oligonucleotide
tgcttaacagatagcatcatcacggagggt

SEQ ID NO: 81651 - DNA, 30 bp, Artificial Sequence
  Synthetic oligonucleotide
atggtatagtttgctgaaatgaatgagggt

SEQ ID NO: 81652 - DNA, 30 bp, Artificial Sequence
  Synthetic oligonucleotide
ttgaggtccaactaccggtaaatatagggt

SEQ ID NO: 81653 - DNA, 30 bp, Artificial Sequence
  Synthetic oligonucleotide
ctaagtttggtaataaaggcgatctagggt

SEQ ID NO: 81654 - DNA, 30 bp, Artificial Sequence
  Synthetic oligonucleotide
gcgggactatgaaaactcttggcttagggt

SEQ ID NO: 81655 - DNA, 30 bp, Artificial Sequence
  Synthetic oligonucleotide
catgggagtatgctcacacagctcacgggt

SEQ ID NO: 81656 - DNA, 30 bp, Artificial Sequence
  Synthetic oligonucleotide
gcgcatttcgggtggtaaggagctccgggt

SEQ ID NO: 81657 - DNA, 30 bp, Artificial Sequence
  Synthetic oligonucleotide
gggactcccaaggtatatcgcgaagcgggt

SEQ ID NO: 81658 - DNA, 30 bp, Artificial Sequence
  Synthetic oligonucleotide
tggatagtaagagggactctagcggcgggt

SEQ ID NO: 81659 - DNA, 30 bp, Artificial Sequence
  Synthetic oligonucleotide
gcgaccatacaagtggcgaacaggtcgggt

SEQ ID NO: 81660 - DNA, 30 bp, Artificial Sequence
  Synthetic oligonucleotide
catgaaaggacaggctgggtagcaaggggt

SEQ ID NO: 81661 - DNA, 30 bp, Artificial Sequence
  Synthetic oligonucleotide
ttcaagcattggcgagtggacttaaggggt

SEQ ID NO: 81662 - DNA, 30 bp, Artificial Sequence
  Synthetic oligonucleotide
cggttgagcacaaaagagaaggtgaggggt

SEQ ID NO: 81663 - DNA, 30 bp, Artificial Sequence
  Synthetic oligonucleotide
ggcatagcgcctcacaaaacgaaccggggt

SEQ ID NO: 81664 - DNA, 30 bp, Artificial Sequence
  Synthetic oligonucleotide
ggttacggagttctactaaagacagggggt

SEQ ID NO: 81665 - DNA, 30 bp, Artificial Sequence
  Synthetic oligonucleotide
ggtcgattccctgaaaagacaataatgggt

SEQ ID NO: 81666 - DNA, 30 bp, Artificial Sequence
  Synthetic oligonucleotide
ctgacgagcggtaggcctgcgttgatgggt

SEQ ID NO: 81667 - DNA, 30 bp, Artificial Sequence
  Synthetic oligonucleotide
tccactgatctcggcggcacatgcgtgggt

SEQ ID NO: 81668 - DNA, 30 bp, Artificial Sequence
  Synthetic oligonucleotide
gctaaacaacgcgatatcttttaggtgggt

SEQ ID NO: 81669 - DNA, 30 bp, Artificial Sequence
  Synthetic oligonucleotide
ggcagacaggtttagtttgctaatgtgggt

SEQ ID NO: 81670 - DNA, 30 bp, Artificial Sequence
  Synthetic oligonucleotide
ggccagggaggtcgtctgcctcaattgggt

SEQ ID NO: 81671 - DNA, 30 bp, Artificial Sequence
  Synthetic oligonucleotide
ggtaggcacttacgcacaaaggtagatggt

SEQ ID NO: 81672 - DNA, 30 bp, Artificial Sequence
  Synthetic oligonucleotide
atcgaccaaagattgctaatagcggatggt

SEQ ID NO: 81673 - DNA, 30 bp, Artificial Sequence
  Synthetic oligonucleotide
agcattggaaacgttcgccgtcgatatggt

SEQ ID NO: 81674 - DNA, 30 bp, Artificial Sequence
  Synthetic oligonucleotide
gaggcaacgtagaaagaaggggcgactggt

SEQ ID NO: 81675 - DNA, 30 bp, Artificial Sequence
  Synthetic oligonucleotide
gtcgggagcgcggcgtatgcgcagcctggt

SEQ ID NO: 81676 - DNA, 30 bp, Artificial Sequence
  Synthetic oligonucleotide
tcgttgcggtaagtagcgcataggcctggt

SEQ ID NO: 81677 - DNA, 30 bp, Artificial Sequence
  Synthetic oligonucleotide
gtggaaggacaaacgcaaactagtcctggt

SEQ ID NO: 81678 - DNA, 30 bp, Artificial Sequence
  Synthetic oligonucleotide
tgataaagatcggcgtcacggccctctggt

SEQ ID NO: 81679 - DNA, 30 bp, Artificial Sequence
  Synthetic oligonucleotide
tcactacccaaattctgagatctctctggt

SEQ ID NO: 81680 - DNA, 30 bp, Artificial Sequence
  Synthetic oligonucleotide
cacgcgcagttgacaggaccatagtctggt

SEQ ID NO: 81681 - DNA, 30 bp, Artificial Sequence
  Synthetic oligonucleotide
gttaacaattgggttgcttgaaagagtggt

SEQ ID NO: 81682 - DNA, 30 bp, Artificial Sequence
  Synthetic oligonucleotide
acagtgggacggataatcgatacgcgtggt

SEQ ID NO: 81683 - DNA, 31 bp, Artificial Sequence
  Synthetic oligonucleotide
cgatacaaaggacggatgcattcgcggtggt

SEQ ID NO: 81684 - DNA, 30 bp, Artificial Sequence
  Synthetic oligonucleotide
atcacgaaaggatgaattgtaaagtgtggt

SEQ ID NO: 81685 - DNA, 30 bp, Artificial Sequence
  Synthetic oligonucleotide
ttcggcttgtaaaacgatagtcggtttggt

SEQ ID NO: 81686 - DNA, 30 bp, Artificial Sequence
  Synthetic oligonucleotide
tcgatccgtaaaacaaaagatggaaaatgt

SEQ ID NO: 81687 - DNA, 30 bp, Artificial Sequence
  Synthetic oligonucleotide
acagcctatacaattcctccgaagcaatgt

SEQ ID NO: 81688 - DNA, 30 bp, Artificial Sequence
  Synthetic oligonucleotide
ttgtgaaacgaccaggagaggatttaatgt

SEQ ID NO: 81689 - DNA, 30 bp, Artificial Sequence
  Synthetic oligonucleotide
agaagcagtccagatttttcgagaacatgt

SEQ ID NO: 81690 - DNA, 30 bp, Artificial Sequence
  Synthetic oligonucleotide
tacgttgagctgcgggtcctggtaacatgt

SEQ ID NO: 81691 - DNA, 30 bp, Artificial Sequence
  Synthetic oligonucleotide
ttacagtaaacaattgctaagatcacatgt

SEQ ID NO: 81692 - DNA, 30 bp, Artificial Sequence
  Synthetic oligonucleotide
gcgtgggatgtaccgaataaatctacatgt

SEQ ID NO: 81693 - DNA, 30 bp, Artificial Sequence
  Synthetic oligonucleotide
ttcaaagccaacttgacagagtacccatgt

SEQ ID NO: 81694 - DNA, 30 bp, Artificial Sequence
  Synthetic oligonucleotide
gctggagggcaggtcgaaagcatgtcatgt

SEQ ID NO: 81695 - DNA, 30 bp, Artificial Sequence
  Synthetic oligonucleotide
tcgaaggcgattaaaacaaagtaaagatgt

SEQ ID NO: 81696 - DNA, 30 bp, Artificial Sequence
  Synthetic oligonucleotide
taactacaaactagtggaacctgaagatgt

SEQ ID NO: 81697 - DNA, 30 bp, Artificial Sequence
  Synthetic oligonucleotide
gaggttcaatagcaggcgacaaacagatgt

SEQ ID NO: 81698 - DNA, 30 bp, Artificial Sequence
  Synthetic oligonucleotide
cagacctggtacgcttcaagagccagatgt

SEQ ID NO: 81699 - DNA, 30 bp, Artificial Sequence
  Synthetic oligonucleotide
aggggcagaatccgtagccagacccgatgt

SEQ ID NO: 81700 - DNA, 30 bp, Artificial Sequence
  Synthetic oligonucleotide
aggtcgggtagggatagattttgccgatgt

SEQ ID NO: 81701 - DNA, 30 bp, Artificial Sequence
  Synthetic oligonucleotide
tggggcactataatgcatccacggcgatgt

SEQ ID NO: 81702 - DNA, 31 bp, Artificial Sequence
  Synthetic oligonucleotide
caagtgtggagccggatctaaggggggatgt

SEQ ID NO: 81703 - DNA, 30 bp, Artificial Sequence
  Synthetic oligonucleotide
ccatcggattaaaatctagccgactgatgt

SEQ ID NO: 81704 - DNA, 30 bp, Artificial Sequence
  Synthetic oligonucleotide
cggagcctgatatatgatacatcctgatgt

SEQ ID NO: 81705 - DNA, 30 bp, Artificial Sequence
  Synthetic oligonucleotide
cgttggtcgaactcaattcagctaatatgt

SEQ ID NO: 81706 - DNA, 30 bp, Artificial Sequence
  Synthetic oligonucleotide
caccacgaaagggttgacatctacctatgt

SEQ ID NO: 81707 - DNA, 30 bp, Artificial Sequence
  Synthetic oligonucleotide
ggtgcgtcactgaattacataggagtatgt

SEQ ID NO: 81708 - DNA, 30 bp, Artificial Sequence
  Synthetic oligonucleotide
cgggacatacggcaaagagagacattatgt

SEQ ID NO: 81709 - DNA, 30 bp, Artificial Sequence
  Synthetic oligonucleotide
aaacgcgttatgtagcacggaaccttatgt

SEQ ID NO: 81710 - DNA, 30 bp, Artificial Sequence
  Synthetic oligonucleotide
ccagtaagtaaccctaaagccgagtactgt

SEQ ID NO: 81711 - DNA, 30 bp, Artificial Sequence
  Synthetic oligonucleotide
gacactagctacgttaagcgtaaaacctgt

SEQ ID NO: 81712 - DNA, 30 bp, Artificial Sequence
  Synthetic oligonucleotide
cgatacaacgcgctaattgcgacatcctgt

SEQ ID NO: 81713 - DNA, 30 bp, Artificial Sequence
  Synthetic oligonucleotide
tatggaaggatggtagtccaatgtggctgt

SEQ ID NO: 81714 - DNA, 31 bp, Artificial Sequence
  Synthetic oligonucleotide
atcctgtgcctggcacgcccctgtatgctgt

SEQ ID NO: 81715 - DNA, 30 bp, Artificial Sequence
  Synthetic oligonucleotide
ggggggaaatttagctacgagataatctgt

SEQ ID NO: 81716 - DNA, 30 bp, Artificial Sequence
  Synthetic oligonucleotide
caagtcaggctggtaaacacgatcatctgt

SEQ ID NO: 81717 - DNA, 30 bp, Artificial Sequence
  Synthetic oligonucleotide
aaggcgggagatggtcagaaggcaaagtgt

SEQ ID NO: 81718 - DNA, 30 bp, Artificial Sequence
  Synthetic oligonucleotide
accgagcgaacgacaaacccctttaagtgt

SEQ ID NO: 81719 - DNA, 30 bp, Artificial Sequence
  Synthetic oligonucleotide
accgaaactctctgaggcacaggtcagtgt

SEQ ID NO: 81720 - DNA, 30 bp, Artificial Sequence
  Synthetic oligonucleotide
ggaccaatttacaagtcatgaatagagtgt

SEQ ID NO: 81721 - DNA, 30 bp, Artificial Sequence
  Synthetic oligonucleotide
cgattggcttctcctctaaacactgagtgt

SEQ ID NO: 81722 - DNA, 30 bp, Artificial Sequence
  Synthetic oligonucleotide
caaatgctaaggcccgcgaatgtcccgtgt

SEQ ID NO: 81723 - DNA, 30 bp, Artificial Sequence
  Synthetic oligonucleotide
tggaagatggatggtccaaatacgccgtgt

SEQ ID NO: 81724 - DNA, 30 bp, Artificial Sequence
  Synthetic oligonucleotide
agtgaagaaaacggtcacatgacagcgtgt

SEQ ID NO: 81725 - DNA, 30 bp, Artificial Sequence
  Synthetic oligonucleotide
ctgactgaaatctctaggccgaatgcgtgt

SEQ ID NO: 81726 - DNA, 31 bp, Artificial Sequence
  Synthetic oligonucleotide
caagcatgacatgggcccgtacgagtcgtgt

SEQ ID NO: 81727 - DNA, 30 bp, Artificial Sequence
  Synthetic oligonucleotide
cgggcggtgctgaggagcgtcgcgtcgtgt

SEQ ID NO: 81728 - DNA, 30 bp, Artificial Sequence
  Synthetic oligonucleotide
catggccgtggataattgtcactcaggtgt

SEQ ID NO: 81729 - DNA, 30 bp, Artificial Sequence
  Synthetic oligonucleotide
tcttgaagcaagtagtgaggtcataggtgt

SEQ ID NO: 81730 - DNA, 30 bp, Artificial Sequence
  Synthetic oligonucleotide
agatcgtcggcccatagtacagatcggtgt

SEQ ID NO: 81731 - DNA, 30 bp, Artificial Sequence
  Synthetic oligonucleotide
cgacgcgatacgggagatggcctggggtgt

SEQ ID NO: 81732 - DNA, 30 bp, Artificial Sequence
  Synthetic oligonucleotide
tcattaatcagatataacgcgaggtggtgt

SEQ ID NO: 81733 - DNA, 30 bp, Artificial Sequence
  Synthetic oligonucleotide
ggcgccagtgaataagtcagcctgatgtgt

SEQ ID NO: 81734 - DNA, 30 bp, Artificial Sequence
  Synthetic oligonucleotide
agcaggaagtggtaaagtagctatatgtgt

SEQ ID NO: 81735 - DNA, 30 bp, Artificial Sequence
  Synthetic oligonucleotide
gtgcgctaatgggggtctttgcaactgtgt

SEQ ID NO: 81736 - DNA, 30 bp, Artificial Sequence
  Synthetic oligonucleotide
caggcacagttaaagcgtaaggcagtgtgt

SEQ ID NO: 81737 - DNA, 30 bp, Artificial Sequence
  Synthetic oligonucleotide
atactcaagatctctgttgccaatgtgtgt

SEQ ID NO: 81738 - DNA, 30 bp, Artificial Sequence
  Synthetic oligonucleotide
gggctgctatatcgaaaattcccattgtgt

SEQ ID NO: 81739 - DNA, 30 bp, Artificial Sequence
  Synthetic oligonucleotide
cggcacctgatgagcacggtaacgttgtgt

SEQ ID NO: 81740 - DNA, 30 bp, Artificial Sequence
  Synthetic oligonucleotide
tcggtgagatattggaattgccgaaattgt

SEQ ID NO: 81741 - DNA, 30 bp, Artificial Sequence
  Synthetic oligonucleotide
ggaggaacgacacagagtggtgttcattgt

SEQ ID NO: 81742 - DNA, 30 bp, Artificial Sequence
  Synthetic oligonucleotide
ggcaccacaggggctggagctatggattgt

SEQ ID NO: 81743 - DNA, 30 bp, Artificial Sequence
  Synthetic oligonucleotide
ccgaatggaaatacaagtgtgtgtgattgt

SEQ ID NO: 81744 - DNA, 29 bp, Artificial Sequence
  Synthetic oligonucleotide
caaagtgaacgggaggggggttctattgt

SEQ ID NO: 81745 - DNA, 30 bp, Artificial Sequence
  Synthetic oligonucleotide
ctgtggccaaaaaaaatggtcacttattgt

SEQ ID NO: 81746 - DNA, 30 bp, Artificial Sequence
  Synthetic oligonucleotide
gttaccgtgtcccagaaggggccagcttgt

SEQ ID NO: 81747 - DNA, 30 bp, Artificial Sequence
  Synthetic oligonucleotide
cgaatttggaaagcgagcaagagggcttgt

SEQ ID NO: 81748 - DNA, 30 bp, Artificial Sequence
  Synthetic oligonucleotide
ttgtctgtcgagaatccccctaaacgttgt

SEQ ID NO: 81749 - DNA, 31 bp, Artificial Sequence
  Synthetic oligonucleotide
tcgttggactatcggttgtagatacggttgt

SEQ ID NO: 81750 - DNA, 30 bp, Artificial Sequence
  Synthetic oligonucleotide
aggtatcataaagtggggcgtcggggttgt

SEQ ID NO: 81751 - DNA, 30 bp, Artificial Sequence
  Synthetic oligonucleotide
accgaagaccatgtaggtgccaaatgttgt

SEQ ID NO: 81752 - DNA, 30 bp, Artificial Sequence
  Synthetic oligonucleotide
tctaggataaacagacgggcgggttgttgt

SEQ ID NO: 81753 - DNA, 30 bp, Artificial Sequence
  Synthetic oligonucleotide
cgggcctgttcggattaggggtgcatttgt

SEQ ID NO: 81754 - DNA, 30 bp, Artificial Sequence
  Synthetic oligonucleotide
gctaagcaggacgatgaattggcactttgt

SEQ ID NO: 81755 - DNA, 30 bp, Artificial Sequence
  Synthetic oligonucleotide
tagacgtggaatgcgatacccgacttttgt

SEQ ID NO: 81756 - DNA, 30 bp, Artificial Sequence
  Synthetic oligonucleotide
cacaggaatccataggaagaaaccttttgt

SEQ ID NO: 81757 - DNA, 30 bp, Artificial Sequence
  Synthetic oligonucleotide
tggtagtggcgagtcgcatgcaggttttgt

SEQ ID NO: 81758 - DNA, 30 bp, Artificial Sequence
  Synthetic oligonucleotide
gacaaatcacggactcgacatcagaaaatt

SEQ ID NO: 81759 - DNA, 31 bp, Artificial Sequence
  Synthetic oligonucleotide
cagaccaggtttcgggcgatggttgaaaatt

SEQ ID NO: 81760 - DNA, 30 bp, Artificial Sequence
  Synthetic oligonucleotide
gaagatacaagaaaggtcgggggtaaaatt

SEQ ID NO: 81761 - DNA, 30 bp, Artificial Sequence
  Synthetic oligonucleotide
acggctatgacaccggtaactggccaaatt

SEQ ID NO: 81762 - DNA, 30 bp, Artificial Sequence
  Synthetic oligonucleotide
agcagactgtcggaaataactggtcaaatt

SEQ ID NO: 81763 - DNA, 30 bp, Artificial Sequence
  Synthetic oligonucleotide
cgaagagcccgtatcagatctggtcaaatt

SEQ ID NO: 81764 - DNA, 30 bp, Artificial Sequence
  Synthetic oligonucleotide
cgacaccaaacgagtagggcccgagaaatt

SEQ ID NO: 81765 - DNA, 30 bp, Artificial Sequence
  Synthetic oligonucleotide
ctccgacacccatcgtgcgcaaaggaaatt

SEQ ID NO: 81766 - DNA, 30 bp, Artificial Sequence
  Synthetic oligonucleotide
gattcccaacccagaagtcaagaggaaatt

SEQ ID NO: 81767 - DNA, 30 bp, Artificial Sequence
  Synthetic oligonucleotide
aggctagaagcgaatgttctacgctaaatt

SEQ ID NO: 81768 - DNA, 30 bp, Artificial Sequence
  Synthetic oligonucleotide
gcgtaggcaacgtgcgggaacaggacaatt

SEQ ID NO: 81769 - DNA, 30 bp, Artificial Sequence
  Synthetic oligonucleotide
ccagggattcgccagatcctcactacaatt

SEQ ID NO: 81770 - DNA, 30 bp, Artificial Sequence
  Synthetic oligonucleotide
aggaaattaggatgctacgccgatagaatt

SEQ ID NO: 81771 - DNA, 30 bp, Artificial Sequence
  Synthetic oligonucleotide
ctagacctagggtcgggctccaaacgaatt

SEQ ID NO: 81772 - DNA, 30 bp, Artificial Sequence
  Synthetic oligonucleotide
cgagatcaagactcgttgttatcgcgaatt

SEQ ID NO: 81773 - DNA, 30 bp, Artificial Sequence
  Synthetic oligonucleotide
gctggcgatcacactgttatttccggaatt

SEQ ID NO: 81774 - DNA, 30 bp, Artificial Sequence
  Synthetic oligonucleotide
ggcagacgtggggaggcaaaaagcggaatt

SEQ ID NO: 81775 - DNA, 30 bp, Artificial Sequence
  Synthetic oligonucleotide
gagcgggagaccggttgggcaaaatgaatt

SEQ ID NO: 81776 - DNA, 30 bp, Artificial Sequence
  Synthetic oligonucleotide
aaagagggtcgtctggcgcataagtgaatt

SEQ ID NO: 81777 - DNA, 30 bp, Artificial Sequence
  Synthetic oligonucleotide
gtggaagcgaacctgccgagaggcctaatt

SEQ ID NO: 81778 - DNA, 30 bp, Artificial Sequence
  Synthetic oligonucleotide
taggtcgagctagaggtaccagtggtaatt

SEQ ID NO: 81779 - DNA, 30 bp, Artificial Sequence
  Synthetic oligonucleotide
agcgcgactgaacttgaaatacaaaacatt

SEQ ID NO: 81780 - DNA, 30 bp, Artificial Sequence
  Synthetic oligonucleotide
tgacgggtgctcgtcgtatggctcaacatt

SEQ ID NO: 81781 - DNA, 30 bp, Artificial Sequence
  Synthetic oligonucleotide
gcgagcaggtcccagcagagcagccacatt

SEQ ID NO: 81782 - DNA, 30 bp, Artificial Sequence
  Synthetic oligonucleotide
ggcaccgtggggttgagtatatatcacatt

SEQ ID NO: 81783 - DNA, 30 bp, Artificial Sequence
  Synthetic oligonucleotide
taaaggaagagagtgaagccttttcacatt

SEQ ID NO: 81784 - DNA, 30 bp, Artificial Sequence
  Synthetic oligonucleotide
agtacacgaccccaaacggcaagttacatt

SEQ ID NO: 81785 - DNA, 30 bp, Artificial Sequence
  Synthetic oligonucleotide
ctgagggacgtgcctcttcagtacaccatt

SEQ ID NO: 81786 - DNA, 30 bp, Artificial Sequence
  Synthetic oligonucleotide
tatgctcggcaacgcgggtgcgccaccatt

SEQ ID NO: 81787 - DNA, 40 bp, Artificial Sequence
  Synthetic oligonucleotide
tctgacaattgaaccatcaacacaccaataatgcaccatt

SEQ ID NO: 81788 - DNA, 30 bp, Artificial Sequence
  Synthetic oligonucleotide
agactcaggccaagtattagcagccccatt

SEQ ID NO: 81789 - DNA, 30 bp, Artificial Sequence
  Synthetic oligonucleotide
gacggcaggcatccattactgtcatccatt

SEQ ID NO: 81790 - DNA, 30 bp, Artificial Sequence
  Synthetic oligonucleotide
atgtggaccatgggccatagcaacagcatt

SEQ ID NO: 81791 - DNA, 30 bp, Artificial Sequence
  Synthetic oligonucleotide
gagggggccaccgtgagaatgaatcgcatt

SEQ ID NO: 81792 - DNA, 30 bp, Artificial Sequence
  Synthetic oligonucleotide
gcgaccagaacgcgcagaatcacgctcatt

SEQ ID NO: 81793 - DNA, 30 bp, Artificial Sequence
  Synthetic oligonucleotide
gtatgccaacgacaaaatgcaagattcatt

SEQ ID NO: 81794 - DNA, 30 bp, Artificial Sequence
  Synthetic oligonucleotide
cggccactcaattcaaggtgcacgttcatt

SEQ ID NO: 81795 - DNA, 30 bp, Artificial Sequence
  Synthetic oligonucleotide
caagacgcaaaaccagcgttatcgaagatt

SEQ ID NO: 81796 - DNA, 30 bp, Artificial Sequence
  Synthetic oligonucleotide
gccccgaatatcaagttaccatgccagatt

SEQ ID NO: 81797 - DNA, 30 bp, Artificial Sequence
  Synthetic oligonucleotide
tcttgtgaggtggaccaaatgctccagatt

SEQ ID NO: 81798 - DNA, 30 bp, Artificial Sequence
  Synthetic oligonucleotide
ttacagaaccaacaaactaatctccagatt

SEQ ID NO: 81799 - DNA, 30 bp, Artificial Sequence
  Synthetic oligonucleotide
ccgttatattcggcgggtgaccatcagatt

SEQ ID NO: 81800 - DNA, 30 bp, Artificial Sequence
  Synthetic oligonucleotide
cgttaagaaatagtctactctgattcgatt

SEQ ID NO: 81801 - DNA, 30 bp, Artificial Sequence
  Synthetic oligonucleotide
cagaggccgaacatggtcatgtgaaggatt

SEQ ID NO: 81802 - DNA, 30 bp, Artificial Sequence
  Synthetic oligonucleotide
cttaccgggagcaagagggtatatgggatt

SEQ ID NO: 81803 - DNA, 30 bp, Artificial Sequence
  Synthetic oligonucleotide
agggcgagttagaagtccagtgtatggatt

SEQ ID NO: 81804 - DNA, 30 bp, Artificial Sequence
  Synthetic oligonucleotide
ggagtaatgaaatgtaagccggcagtgatt

SEQ ID NO: 81805 - DNA, 30 bp, Artificial Sequence
  Synthetic oligonucleotide
cgacgtgagagtaacaagcgcttaaatatt

SEQ ID NO: 81806 - DNA, 30 bp, Artificial Sequence
  Synthetic oligonucleotide
tctgcgtcaaacagcttacttgagaatatt

SEQ ID NO: 81807 - DNA, 30 bp, Artificial Sequence
  Synthetic oligonucleotide
cgagatcatcgctcgcgaaaagcgaatatt

SEQ ID NO: 81808 - DNA, 30 bp, Artificial Sequence
  Synthetic oligonucleotide
attccgggaaggcgatgagttcatgatatt

SEQ ID NO: 81809 - DNA, 30 bp, Artificial Sequence
  Synthetic oligonucleotide
ggtagtacaaaaagtgatcctagatatatt

SEQ ID NO: 81810 - DNA, 30 bp, Artificial Sequence
  Synthetic oligonucleotide
acgggcttgtagaatggataactgactatt

SEQ ID NO: 81811 - DNA, 30 bp, Artificial Sequence
  Synthetic oligonucleotide
cccacgcgattaaaaaactatctgactatt

SEQ ID NO: 81812 - DNA, 30 bp, Artificial Sequence
  Synthetic oligonucleotide
gataaggtggagggttaagtcaacgctatt

SEQ ID NO: 81813 - DNA, 30 bp, Artificial Sequence
  Synthetic oligonucleotide
ggcattacgaatatcaaaacagccagtatt

SEQ ID NO: 81814 - DNA, 30 bp, Artificial Sequence
  Synthetic oligonucleotide
aacgaggtctgacagtgaggtcttagtatt

SEQ ID NO: 81815 - DNA, 30 bp, Artificial Sequence
  Synthetic oligonucleotide
cgaatagctgctgttataagagtaggtatt

SEQ ID NO: 81816 - DNA, 30 bp, Artificial Sequence
  Synthetic oligonucleotide
agccaacgaagacggacctgaaggtgtatt

SEQ ID NO: 81817 - DNA, 30 bp, Artificial Sequence
  Synthetic oligonucleotide
cgcggagagttcccaatgtgactgtgtatt

SEQ ID NO: 81818 - DNA, 30 bp, Artificial Sequence
  Synthetic oligonucleotide
ggctgagcgacggggcagagtcaaattatt

SEQ ID NO: 81819 - DNA, 30 bp, Artificial Sequence
  Synthetic oligonucleotide
agattggacatgaactagaggagacttatt

SEQ ID NO: 81820 - DNA, 30 bp, Artificial Sequence
  Synthetic oligonucleotide
tccgaggatgctagagtgaggatccttatt

SEQ ID NO: 81821 - DNA, 30 bp, Artificial Sequence
  Synthetic oligonucleotide
cacgtgcacgttgggggaggctaggttatt

SEQ ID NO: 81822 - DNA, 30 bp, Artificial Sequence
  Synthetic oligonucleotide
gggacgaaatgggtgaaagtcgttgttatt

SEQ ID NO: 81823 - DNA, 30 bp, Artificial Sequence
  Synthetic oligonucleotide
gcggccgaagtatactagcacaattttatt

SEQ ID NO: 81824 - DNA, 30 bp, Artificial Sequence
  Synthetic oligonucleotide
tctgcaggtagatctgtcctgatgaaactt

SEQ ID NO: 81825 - DNA, 30 bp, Artificial Sequence
  Synthetic oligonucleotide
ccacagttaagggtgtatgggcataaactt

SEQ ID NO: 81826 - DNA, 30 bp, Artificial Sequence
  Synthetic oligonucleotide
aaacgcggggagtaggggtactaacaactt

SEQ ID NO: 81827 - DNA, 30 bp, Artificial Sequence
  Synthetic oligonucleotide
ggcgttgaatactagactggatggcaactt

SEQ ID NO: 81828 - DNA, 30 bp, Artificial Sequence
  Synthetic oligonucleotide
tgtggaagcctgtgatacctgaaagaactt

SEQ ID NO: 81829 - DNA, 30 bp, Artificial Sequence
  Synthetic oligonucleotide
ttgggacggtgagaagtgagcggtgaactt

SEQ ID NO: 81830 - DNA, 30 bp, Artificial Sequence
  Synthetic oligonucleotide
gggagactgtaacgccctcaaaagacactt

SEQ ID NO: 81831 - DNA, 30 bp, Artificial Sequence
  Synthetic oligonucleotide
aagaatgacttgacgacaagggaggcactt

SEQ ID NO: 81832 - DNA, 30 bp, Artificial Sequence
  Synthetic oligonucleotide
cagagataaagcgaccaacccgacagactt

SEQ ID NO: 81833 - DNA, 30 bp, Artificial Sequence
  Synthetic oligonucleotide
caacgactagtaatgacgacaggcagactt

SEQ ID NO: 81834 - DNA, 30 bp, Artificial Sequence
  Synthetic oligonucleotide
gtgagtaatcccaggggcagaagtagactt

SEQ ID NO: 81835 - DNA, 30 bp, Artificial Sequence
  Synthetic oligonucleotide
gtgcgatgtcatacatcttgcaaccgactt

SEQ ID NO: 81836 - DNA, 30 bp, Artificial Sequence
  Synthetic oligonucleotide
aacacccgacggatggggaggcccttactt

SEQ ID NO: 81837 - DNA, 30 bp, Artificial Sequence
  Synthetic oligonucleotide
aggtcatatgggaagtcaagataccacctt

SEQ ID NO: 81838 - DNA, 30 bp, Artificial Sequence
  Synthetic oligonucleotide
tcagttggatacatagatggtcttgacctt

SEQ ID NO: 81839 - DNA, 30 bp, Artificial Sequence
  Synthetic oligonucleotide
gatgccggctacgagtaggcagacagcctt

SEQ ID NO: 81840 - DNA, 30 bp, Artificial Sequence
  Synthetic oligonucleotide
tcgtgcgaagcaatcttcctaaggtgcctt

SEQ ID NO: 81841 - DNA, 30 bp, Artificial Sequence
  Synthetic oligonucleotide
gacgtagaactcgagtcacggtaattcctt

SEQ ID NO: 81842 - DNA, 30 bp, Artificial Sequence
  Synthetic oligonucleotide
gcgtaaaaccgctcggaatctgcaacgctt

SEQ ID NO: 81843 - DNA, 30 bp, Artificial Sequence
  Synthetic oligonucleotide
atgagggaagaacaagacgcctcgttgctt

SEQ ID NO: 81844 - DNA, 30 bp, Artificial Sequence
  Synthetic oligonucleotide
cttccagaaaacacctaaccctcgaatctt

SEQ ID NO: 81845 - DNA, 30 bp, Artificial Sequence
  Synthetic oligonucleotide
agacgacaagtactacagacacttcatctt

SEQ ID NO: 81846 - DNA, 30 bp, Artificial Sequence
  Synthetic oligonucleotide
tgatttagggcataaggcgtcatcgatctt

SEQ ID NO: 81847 - DNA, 30 bp, Artificial Sequence
  Synthetic oligonucleotide
catgagaagcgtctacagtatgactatctt

SEQ ID NO: 81848 - DNA, 30 bp, Artificial Sequence
  Synthetic oligonucleotide
cggtaattcgagacaaatagccatactctt

SEQ ID NO: 81849 - DNA, 30 bp, Artificial Sequence
  Synthetic oligonucleotide
gcgtaaattcacctatctacactgggtctt

SEQ ID NO: 81850 - DNA, 30 bp, Artificial Sequence
  Synthetic oligonucleotide
ggtgacctatagataaacagtggatgtctt

SEQ ID NO: 81851 - DNA, 30 bp, Artificial Sequence
  Synthetic oligonucleotide
ttgacatctcgtaaggctgagaattgtctt

SEQ ID NO: 81852 - DNA, 30 bp, Artificial Sequence
  Synthetic oligonucleotide
cacggcgagaaggtcttgggtagcattctt

SEQ ID NO: 81853 - DNA, 30 bp, Artificial Sequence
  Synthetic oligonucleotide
ggtggaccaatccaattaggaagtattctt

SEQ ID NO: 81854 - DNA, 30 bp, Artificial Sequence
  Synthetic oligonucleotide
tctcggtgcatacgatgttttgcctttctt

SEQ ID NO: 81855 - DNA, 30 bp, Artificial Sequence
  Synthetic oligonucleotide
cgactctagaaagggactggacgaaaagtt

SEQ ID NO: 81856 - DNA, 30 bp, Artificial Sequence
  Synthetic oligonucleotide
tcacgtcccttatgggtactcaagaaagtt

SEQ ID NO: 81857 - DNA, 30 bp, Artificial Sequence
  Synthetic oligonucleotide
aacaggggctgtgccgagccagtgcaagtt

SEQ ID NO: 81858 - DNA, 30 bp, Artificial Sequence
  Synthetic oligonucleotide
aggcctgatccacagagtaagaatcaagtt

SEQ ID NO: 81859 - DNA, 30 bp, Artificial Sequence
  Synthetic oligonucleotide
accgtggtagaatggtgagaggttcaagtt

SEQ ID NO: 81860 - DNA, 30 bp, Artificial Sequence
  Synthetic oligonucleotide
ggaagaagaccggacggcccgccagaagtt

SEQ ID NO: 81861 - DNA, 30 bp, Artificial Sequence
  Synthetic oligonucleotide
gaacgtcaccgtcaaagcaaatctgaagtt

SEQ ID NO: 81862 - DNA, 30 bp, Artificial Sequence
  Synthetic oligonucleotide
caccgcaacgcgcgctgtgcggtataagtt

SEQ ID NO: 81863 - DNA, 30 bp, Artificial Sequence
  Synthetic oligonucleotide
gaataggggtcaataggggcagagtaagtt

SEQ ID NO: 81864 - DNA, 30 bp, Artificial Sequence
  Synthetic oligonucleotide
ggaaggcattcccagaacggggtcacagtt

SEQ ID NO: 81865 - DNA, 30 bp, Artificial Sequence
  Synthetic oligonucleotide
attggatagaaaccagaactcgcgacagtt

SEQ ID NO: 81866 - DNA, 30 bp, Artificial Sequence
  Synthetic oligonucleotide
acaaggtccagtgatggtagggcgacagtt

SEQ ID NO: 81867 - DNA, 30 bp, Artificial Sequence
  Synthetic oligonucleotide
atcgaaaaatggaacaatgctatgccagtt

SEQ ID NO: 81868 - DNA, 30 bp, Artificial Sequence
  Synthetic oligonucleotide
tgggcatcactattcggtcattaagcagtt

SEQ ID NO: 81869 - DNA, 30 bp, Artificial Sequence
  Synthetic oligonucleotide
taacaagcccgggacggggggctgagagtt

SEQ ID NO: 81870 - DNA, 30 bp, Artificial Sequence
  Synthetic oligonucleotide
ataacctgccagataagtcacgtgagagtt

SEQ ID NO: 81871 - DNA, 30 bp, Artificial Sequence
  Synthetic oligonucleotide
acctaatcgaatcagaactgaagacgagtt

SEQ ID NO: 81872 - DNA, 30 bp, Artificial Sequence
  Synthetic oligonucleotide
agacacctcagctagatctgaattggagtt

SEQ ID NO: 81873 - DNA, 30 bp, Artificial Sequence
  Synthetic oligonucleotide
cagtgtctgtggaaggaatagtctgtagtt

SEQ ID NO: 81874 - DNA, 30 bp, Artificial Sequence
  Synthetic oligonucleotide
tattgtgcagaagggtcggcgaggttagtt

SEQ ID NO: 81875 - DNA, 30 bp, Artificial Sequence
  Synthetic oligonucleotide
aagggagtgactagactagttaagaacgtt

SEQ ID NO: 81876 - DNA, 30 bp, Artificial Sequence
  Synthetic oligonucleotide
acacgggctggtgctacctaggcatacgtt

SEQ ID NO: 81877 - DNA, 30 bp, Artificial Sequence
  Synthetic oligonucleotide
ttcggcctccgcaatacaaagaagtacgtt

SEQ ID NO: 81878 - DNA, 30 bp, Artificial Sequence
  Synthetic oligonucleotide
ctgaatgccgacatgagagacgggcccgtt

SEQ ID NO: 81879 - DNA, 30 bp, Artificial Sequence
  Synthetic oligonucleotide
acctagtcggggtaagcacggcaacgcgtt

SEQ ID NO: 81880 - DNA, 30 bp, Artificial Sequence
  Synthetic oligonucleotide
ttagcgtccacatctcggtcacaatgcgtt

SEQ ID NO: 81881 - DNA, 30 bp, Artificial Sequence
  Synthetic oligonucleotide
tgacgatgaggacggggcaaatgatgcgtt

SEQ ID NO: 81882 - DNA, 30 bp, Artificial Sequence
  Synthetic oligonucleotide
caagacaaaaaaatgaaaggcggactcgtt

SEQ ID NO: 81883 - DNA, 30 bp, Artificial Sequence
  Synthetic oligonucleotide
actccacactttcagattaatcatgtcgtt

SEQ ID NO: 81884 - DNA, 30 bp, Artificial Sequence
  Synthetic oligonucleotide
ctaagcccggaggtgaaactgtatgtcgtt

SEQ ID NO: 81885 - DNA, 30 bp, Artificial Sequence
  Synthetic oligonucleotide
ccactaggcaacccatgggcgaaaaaggtt

SEQ ID NO: 81886 - DNA, 30 bp, Artificial Sequence
  Synthetic oligonucleotide
ccacagtgcgttattatgcgattgaaggtt

SEQ ID NO: 81887 - DNA, 30 bp, Artificial Sequence
  Synthetic oligonucleotide
ccgagtcacgtgaattgcgatatacaggtt

SEQ ID NO: 81888 - DNA, 30 bp, Artificial Sequence
  Synthetic oligonucleotide
cgctagacaactacgaggcatgaagaggtt

SEQ ID NO: 81889 - DNA, 30 bp, Artificial Sequence
  Synthetic oligonucleotide
ggacgttacgaacagagcctacgagaggtt

SEQ ID NO: 81890 - DNA, 30 bp, Artificial Sequence
  Synthetic oligonucleotide
gggtcccagagagcttagcccatggaggtt

SEQ ID NO: 81891 - DNA, 30 bp, Artificial Sequence
  Synthetic oligonucleotide
gggcggaaagtcatagacagcctggaggtt

SEQ ID NO: 81892 - DNA, 30 bp, Artificial Sequence
  Synthetic oligonucleotide
cgtaacagagagccaatagacgtctaggtt

SEQ ID NO: 81893 - DNA, 30 bp, Artificial Sequence
  Synthetic oligonucleotide
ttaggtcacagggttgatctccgaacggtt

SEQ ID NO: 81894 - DNA, 30 bp, Artificial Sequence
  Synthetic oligonucleotide
tgcgtcacgatgacgggaatggggacggtt

SEQ ID NO: 81895 - DNA, 30 bp, Artificial Sequence
  Synthetic oligonucleotide
gcaggaggtgcacaccaaggtcgaccggtt

SEQ ID NO: 81896 - DNA, 30 bp, Artificial Sequence
  Synthetic oligonucleotide
acggggcattgcgacaaaaatacaagggtt

SEQ ID NO: 81897 - DNA, 30 bp, Artificial Sequence
  Synthetic oligonucleotide
agccaagatcgcgggctgttatacggggtt

SEQ ID NO: 81898 - DNA, 30 bp, Artificial Sequence
  Synthetic oligonucleotide
gcgtgcatgatgaggggggcgtactgggtt

SEQ ID NO: 81899 - DNA, 30 bp, Artificial Sequence
  Synthetic oligonucleotide
acgggctcatcctcgaaaatcagctgggtt

SEQ ID NO: 81900 - DNA, 30 bp, Artificial Sequence
  Synthetic oligonucleotide
tcaaaaggctaaggtggtctagcttgggtt

SEQ ID NO: 81901 - DNA, 30 bp, Artificial Sequence
  Synthetic oligonucleotide
gagccagatactggggaataatatatggtt

SEQ ID NO: 81902 - DNA, 30 bp, Artificial Sequence
  Synthetic oligonucleotide
ttagggaaacagtatgagctaaatgtggtt

SEQ ID NO: 81903 - DNA, 30 bp, Artificial Sequence
  Synthetic oligonucleotide
gaaggtggcaaagaagaacgataattggtt

SEQ ID NO: 81904 - DNA, 30 bp, Artificial Sequence
  Synthetic oligonucleotide
cctgggtaaggtgaagcaagtgaagatgtt

SEQ ID NO: 81905 - DNA, 30 bp, Artificial Sequence
  Synthetic oligonucleotide
tggacaaacgaggtatctaagcactatgtt

SEQ ID NO: 81906 - DNA, 30 bp, Artificial Sequence
  Synthetic oligonucleotide
tagccccagaattagacctagagttatgtt

SEQ ID NO: 81907 - DNA, 30 bp, Artificial Sequence
  Synthetic oligonucleotide
taatagcaccgaccattgctccaagctgtt

SEQ ID NO: 81908 - DNA, 30 bp, Artificial Sequence
  Synthetic oligonucleotide
ggacgcatcgatgaatcacgtattgctgtt

SEQ ID NO: 81909 - DNA, 30 bp, Artificial Sequence
  Synthetic oligonucleotide
agaggtcgtgggggttgtcaatccagtgtt

SEQ ID NO: 81910 - DNA, 30 bp, Artificial Sequence
  Synthetic oligonucleotide
tgctaaaagtcagaaattccgcgcagtgtt

SEQ ID NO: 81911 - DNA, 30 bp, Artificial Sequence
  Synthetic oligonucleotide
aagagtgagttgcccgacttgctcagtgtt

SEQ ID NO: 81912 - DNA, 30 bp, Artificial Sequence
  Synthetic oligonucleotide
cgggaacaagaaagttaagtcttgcgtgtt

SEQ ID NO: 81913 - DNA, 30 bp, Artificial Sequence
  Synthetic oligonucleotide
ggggggaaaattagtgaatgaatcggtgtt

SEQ ID NO: 81914 - DNA, 30 bp, Artificial Sequence
  Synthetic oligonucleotide
ccgaggggacgatctttgtaagaaattgtt

SEQ ID NO: 81915 - DNA, 30 bp, Artificial Sequence
  Synthetic oligonucleotide
cacatacgaatagcataataaaccattgtt

SEQ ID NO: 81916 - DNA, 30 bp, Artificial Sequence
  Synthetic oligonucleotide
gcactatactaaaaaagcggctaacttgtt

SEQ ID NO: 81917 - DNA, 30 bp, Artificial Sequence
  Synthetic oligonucleotide
tagagtccatgacgtgtaggggaggttgtt

SEQ ID NO: 81918 - DNA, 30 bp, Artificial Sequence
  Synthetic oligonucleotide
tcgagtctaaataaagaaagtgtctttgtt

SEQ ID NO: 81919 - DNA, 30 bp, Artificial Sequence
  Synthetic oligonucleotide
agcctacgttcaaaggggggccacaaattt

SEQ ID NO: 81920 - DNA, 30 bp, Artificial Sequence
  Synthetic oligonucleotide
accaaattaccaacgccatagagcaaattt

SEQ ID NO: 81921 - DNA, 30 bp, Artificial Sequence
  Synthetic oligonucleotide
catccttgcacgaatcgtagggtgaaattt

SEQ ID NO: 81922 - DNA, 30 bp, Artificial Sequence
  Synthetic oligonucleotide
tcaggcgctagagagtactaagctaaattt

SEQ ID NO: 81923 - DNA, 30 bp, Artificial Sequence
  Synthetic oligonucleotide
acgtgtcctgtcgtaatcccgattaaattt

SEQ ID NO: 81924 - DNA, 30 bp, Artificial Sequence
  Synthetic oligonucleotide
taggtgtaagatcaagtcaggctccaattt

SEQ ID NO: 81925 - DNA, 30 bp, Artificial Sequence
  Synthetic oligonucleotide
gggaggcgaaagttcgtgtagtatgaattt

SEQ ID NO: 81926 - DNA, 30 bp, Artificial Sequence
  Synthetic oligonucleotide
acgatcgggggttgcacctttaggacattt

SEQ ID NO: 81927 - DNA, 30 bp, Artificial Sequence
  Synthetic oligonucleotide
ggcgtcttcacatatcagaaagtatcattt

SEQ ID NO: 81928 - DNA, 30 bp, Artificial Sequence
  Synthetic oligonucleotide
gacacaagccgaagactatctcgaagattt

SEQ ID NO: 81929 - DNA, 30 bp, Artificial Sequence
  Synthetic oligonucleotide
aagaaggaggtctcacgacaacacagattt

SEQ ID NO: 81930 - DNA, 30 bp, Artificial Sequence
  Synthetic oligonucleotide
ctaggtgacaggcattccggtgacagattt

SEQ ID NO: 81931 - DNA, 30 bp, Artificial Sequence
  Synthetic oligonucleotide
agcgaattggcgacgcaagggtaccgattt

SEQ ID NO: 81932 - DNA, 30 bp, Artificial Sequence
  Synthetic oligonucleotide
cagtgtgatatcggaaggttgagttgattt

SEQ ID NO: 81933 - DNA, 30 bp, Artificial Sequence
  Synthetic oligonucleotide
gcacgctgatgcgagcgcggatggatattt

SEQ ID NO: 81934 - DNA, 30 bp, Artificial Sequence
  Synthetic oligonucleotide
tcgaagtttcattgtacccgagaagtattt

SEQ ID NO: 81935 - DNA, 30 bp, Artificial Sequence
  Synthetic oligonucleotide
agtgaagggacttgctaccggtgcgtattt

SEQ ID NO: 81936 - DNA, 30 bp, Artificial Sequence
  Synthetic oligonucleotide
ccaaggtacaacctttcgagagcggtattt

SEQ ID NO: 81937 - DNA, 30 bp, Artificial Sequence
  Synthetic oligonucleotide
gggacgacgtgactgaagaagcagcacttt

SEQ ID NO: 81938 - DNA, 30 bp, Artificial Sequence
  Synthetic oligonucleotide
ggagacgtgtagtagcatctgtaagacttt

SEQ ID NO: 81939 - DNA, 30 bp, Artificial Sequence
  Synthetic oligonucleotide
agaaacgtgggtcgaccttaatgcaagttt

SEQ ID NO: 81940 - DNA, 30 bp, Artificial Sequence
  Synthetic oligonucleotide
aagatgaccagagtgcttaaggctcagttt

SEQ ID NO: 81941 - DNA, 30 bp, Artificial Sequence
  Synthetic oligonucleotide
ataacgggtgtcagtctagcgagagagttt

SEQ ID NO: 81942 - DNA, 30 bp, Artificial Sequence
  Synthetic oligonucleotide
gaaccggaaggtaaaatgggtggtgagttt

SEQ ID NO: 81943 - DNA, 30 bp, Artificial Sequence
  Synthetic oligonucleotide
tgatgtggtatcggttagtgaattgcgttt

SEQ ID NO: 81944 - DNA, 30 bp, Artificial Sequence
  Synthetic oligonucleotide
catcatgtagcatgtcgaacaagtaggttt

SEQ ID NO: 81945 - DNA, 30 bp, Artificial Sequence
  Synthetic oligonucleotide
ctgaaaaaactagccactcacatccggttt

SEQ ID NO: 81946 - DNA, 30 bp, Artificial Sequence
  Synthetic oligonucleotide
tgcaatgcaggggcatacaagattatgttt

SEQ ID NO: 81947 - DNA, 30 bp, Artificial Sequence
  Synthetic oligonucleotide
ccattcatacgaatgtgctctggagtgttt

SEQ ID NO: 81948 - DNA, 30 bp, Artificial Sequence
  Synthetic oligonucleotide
gggaatacggaccgacaggacaacaatttt

SEQ ID NO: 81949 - DNA, 30 bp, Artificial Sequence
  Synthetic oligonucleotide
cgagctaaaacatccagtgaatctaatttt

SEQ ID NO: 81950 - DNA, 30 bp, Artificial Sequence
  Synthetic oligonucleotide
ggtaacgcaattacggggagaactcatttt

SEQ ID NO: 81951 - DNA, 30 bp, Artificial Sequence
  Synthetic oligonucleotide
agcagaacacaggaagtcgacgacgatttt

SEQ ID NO: 81952 - DNA, 30 bp, Artificial Sequence
  Synthetic oligonucleotide
gatggatgtgcgtgacgagactagtatttt

SEQ ID NO: 81953 - DNA, 30 bp, Artificial Sequence
  Synthetic oligonucleotide
gacgagacggttaggggtgccaagtctttt

SEQ ID NO: 81954 - DNA, 30 bp, Artificial Sequence
  Synthetic oligonucleotide
gcggcggaaattgagtagcaggttggtttt

SEQ ID NO: 81955 - DNA, 30 bp, Artificial Sequence
  Synthetic oligonucleotide
cgcaagctcccagaaagcagaaaaattttt

SEQ ID NO: 81956 - DNA, 30 bp, Artificial Sequence
  Synthetic oligonucleotide
tgggcagcttgcactgagaccagcaaaaaa

SEQ ID NO: 81957 - DNA, 30 bp, Artificial Sequence
  Synthetic oligonucleotide
ccagagagggcatacttgaaggtgcaaaaa

SEQ ID NO: 81958 - DNA, 30 bp, Artificial Sequence
  Synthetic oligonucleotide
tataagaggtgggagtcacgaagggaaaaa

SEQ ID NO: 81959 - DNA, 30 bp, Artificial Sequence
  Synthetic oligonucleotide
gcgcgcaatacctgtgaagtctctgaaaaa

SEQ ID NO: 81960 - DNA, 30 bp, Artificial Sequence
  Synthetic oligonucleotide
tgaactgaccgaaccgtaaccgcctaaaaa

SEQ ID NO: 81961 - DNA, 30 bp, Artificial Sequence
  Synthetic oligonucleotide
cggagcactgcgaactctgaaagaacaaaa

SEQ ID NO: 81962 - DNA, 30 bp, Artificial Sequence
  Synthetic oligonucleotide
caagtccccagttgggcgtatggaacaaaa

SEQ ID NO: 81963 - DNA, 30 bp, Artificial Sequence
  Synthetic oligonucleotide
tgtgccgaggagaattactaagagacaaaa

SEQ ID NO: 81964 - DNA, 30 bp, Artificial Sequence
  Synthetic oligonucleotide
atggaagatggcagaaaatgccctacaaaa

SEQ ID NO: 81965 - DNA, 30 bp, Artificial Sequence
  Synthetic oligonucleotide
cggtgctaagatggggctcaacgcccaaaa

SEQ ID NO: 81966 - DNA, 30 bp, Artificial Sequence
  Synthetic oligonucleotide
gggaatgagtccgatatgactgtcccaaaa

SEQ ID NO: 81967 - DNA, 30 bp, Artificial Sequence
  Synthetic oligonucleotide
tcggaacacggacaggataccgctccaaaa

SEQ ID NO: 81968 - DNA, 30 bp, Artificial Sequence
  Synthetic oligonucleotide
gggctcatatgggcatgcgtttcggcaaaa

SEQ ID NO: 81969 - DNA, 30 bp, Artificial Sequence
  Synthetic oligonucleotide
tacgcacaaagggatcctgatactgcaaaa

SEQ ID NO: 81970 - DNA, 30 bp, Artificial Sequence
  Synthetic oligonucleotide
ctgtcatgatgtgcaacacgatcttcaaaa

SEQ ID NO: 81971 - DNA, 30 bp, Artificial Sequence
  Synthetic oligonucleotide
gccatatacgatatgccccccaacagaaaa

SEQ ID NO: 81972 - DNA, 30 bp, Artificial Sequence
  Synthetic oligonucleotide
tcttgccatgattccccgaggaccagaaaa

SEQ ID NO: 81973 - DNA, 30 bp, Artificial Sequence
  Synthetic oligonucleotide
acagtttcgaccgaaaagggtatcagaaaa

SEQ ID NO: 81974 - DNA, 30 bp, Artificial Sequence
  Synthetic oligonucleotide
atgatcgtaacacggcaactcggtagaaaa

SEQ ID NO: 81975 - DNA, 30 bp, Artificial Sequence
  Synthetic oligonucleotide
tcgcaaatgacccccataaaatcgcgaaaa

SEQ ID NO: 81976 - DNA, 30 bp, Artificial Sequence
  Synthetic oligonucleotide
agtgattgcgtcacccaagcagcaggaaaa

SEQ ID NO: 81977 - DNA, 30 bp, Artificial Sequence
  Synthetic oligonucleotide
taggactctgtcccggagggtgtgggaaaa

SEQ ID NO: 81978 - DNA, 30 bp, Artificial Sequence
  Synthetic oligonucleotide
atgattgcaccatgaaagaacaggtgaaaa

SEQ ID NO: 81979 - DNA, 30 bp, Artificial Sequence
  Synthetic oligonucleotide
tcgttaagcgaggtagactataggtgaaaa

SEQ ID NO: 81980 - DNA, 30 bp, Artificial Sequence
  Synthetic oligonucleotide
tacgtaaacgaggaaggctactattgaaaa

SEQ ID NO: 81981 - DNA, 30 bp, Artificial Sequence
  Synthetic oligonucleotide
cagggaacggagggagagagaaagataaaa

SEQ ID NO: 81982 - DNA, 30 bp, Artificial Sequence
  Synthetic oligonucleotide
agtgttgagccatcgagcgcggtagtaaaa

SEQ ID NO: 81983 - DNA, 30 bp, Artificial Sequence
  Synthetic oligonucleotide
cgatgtactcgcgcgactcgattcgtaaaa

SEQ ID NO: 81984 - DNA, 30 bp, Artificial Sequence
  Synthetic oligonucleotide
agagtcacgatcgcgtgttgtcgggtaaaa

SEQ ID NO: 81985 - DNA, 30 bp, Artificial Sequence
  Synthetic oligonucleotide
ggaagagagccgacagctaagcgtgtaaaa

SEQ ID NO: 81986 - DNA, 30 bp, Artificial Sequence
  Synthetic oligonucleotide
atatggtacaaatccaccagagacttaaaa

SEQ ID NO: 81987 - DNA, 30 bp, Artificial Sequence
  Synthetic oligonucleotide
aaagatgacacggatacaatctgcttaaaa

SEQ ID NO: 81988 - DNA, 30 bp, Artificial Sequence
  Synthetic oligonucleotide
ccatgcccgacgaaaagaaacatgttaaaa

SEQ ID NO: 81989 - DNA, 30 bp, Artificial Sequence
  Synthetic oligonucleotide
atccgacacagccccaagacccaaaacaaa

SEQ ID NO: 81990 - DNA, 30 bp, Artificial Sequence
  Synthetic oligonucleotide
gatgtgtttagtgcataggttgaaaacaaa

SEQ ID NO: 81991 - DNA, 31 bp, Artificial Sequence
  Synthetic oligonucleotide
tttagtcggacaacatggagcgtaaaacaaa

SEQ ID NO: 81992 - DNA, 30 bp, Artificial Sequence
  Synthetic oligonucleotide
gggctagccaacagctggtgatgaaacaaa

SEQ ID NO: 81993 - DNA, 30 bp, Artificial Sequence
  Synthetic oligonucleotide
tgcctaacctcgatatacccgtccaacaaa

SEQ ID NO: 81994 - DNA, 30 bp, Artificial Sequence
  Synthetic oligonucleotide
ggagcaagcgcctgcaagggggataacaaa

SEQ ID NO: 81995 - DNA, 30 bp, Artificial Sequence
  Synthetic oligonucleotide
cgcacaacggcagatatcgatcgtaacaaa

SEQ ID NO: 81996 - DNA, 30 bp, Artificial Sequence
  Synthetic oligonucleotide
aacaacggtataccgccgggcgcgcacaaa

SEQ ID NO: 81997 - DNA, 30 bp, Artificial Sequence
  Synthetic oligonucleotide
cacgttataaccaattgaccgtgagacaaa

SEQ ID NO: 81998 - DNA, 30 bp, Artificial Sequence
  Synthetic oligonucleotide
ccctcaactctcgattctgaattagacaaa

SEQ ID NO: 81999 - DNA, 30 bp, Artificial Sequence
  Synthetic oligonucleotide
caaaagttttggcaacggacgggcgacaaa

SEQ ID NO: 82000 - DNA, 30 bp, Artificial Sequence
  Synthetic oligonucleotide
acgggccgacgtcaccgtttttgcgacaaa

SEQ ID NO: 82001 - DNA, 30 bp, Artificial Sequence
  Synthetic oligonucleotide
cagtagcggttttaggtggcaccggacaaa

SEQ ID NO: 82002 - DNA, 30 bp, Artificial Sequence
  Synthetic oligonucleotide
gcaaaggatgcgcaaaggcagcctgacaaa

SEQ ID NO: 82003 - DNA, 30 bp, Artificial Sequence
  Synthetic oligonucleotide
ttatggatggcgaaaaagatcggtgacaaa

SEQ ID NO: 82004 - DNA, 30 bp, Artificial Sequence
  Synthetic oligonucleotide
ggccaaaatgcaaattacttaacatacaaa

SEQ ID NO: 82005 - DNA, 30 bp, Artificial Sequence
  Synthetic oligonucleotide
acgcgttttgacgggagtggtgaccccaaa

SEQ ID NO: 82006 - DNA, 30 bp, Artificial Sequence
  Synthetic oligonucleotide
agacgggaagctcgaggtgagagccccaaa

SEQ ID NO: 82007 - DNA, 30 bp, Artificial Sequence
  Synthetic oligonucleotide
cacatatgaggcttaagggtcgtgcccaaa

SEQ ID NO: 82008 - DNA, 30 bp, Artificial Sequence
  Synthetic oligonucleotide
atcacgagggccagttgatactacgccaaa

SEQ ID NO: 82009 - DNA, 30 bp, Artificial Sequence
  Synthetic oligonucleotide
gagagttaaatgcatcccggcaccgccaaa

SEQ ID NO: 82010 - DNA, 30 bp, Artificial Sequence
  Synthetic oligonucleotide
ctgtcaagcgggcccacacggggaagcaaa

SEQ ID NO: 82011 - DNA, 30 bp, Artificial Sequence
  Synthetic oligonucleotide
ggacgacaggaaggtagtaatcgcagcaaa

SEQ ID NO: 82012 - DNA, 30 bp, Artificial Sequence
  Synthetic oligonucleotide
gcgacgtacaccaggaccgatgggagcaaa

SEQ ID NO: 82013 - DNA, 30 bp, Artificial Sequence
  Synthetic oligonucleotide
tgaagaatctgggatttcccacgtagcaaa

SEQ ID NO: 82014 - DNA, 30 bp, Artificial Sequence
  Synthetic oligonucleotide
cacatcgaaaacaatgcttgtaagggcaaa

SEQ ID NO: 82015 - DNA, 30 bp, Artificial Sequence
  Synthetic oligonucleotide
aaaggtggtcagttagctaagcgatgcaaa

SEQ ID NO: 82016 - DNA, 30 bp, Artificial Sequence
  Synthetic oligonucleotide
gtatcggctggcaataatgagcgatgcaaa

SEQ ID NO: 82017 - DNA, 30 bp, Artificial Sequence
  Synthetic oligonucleotide
agatttcaaaagtgcgcaagtctttgcaaa

SEQ ID NO: 82018 - DNA, 30 bp, Artificial Sequence
  Synthetic oligonucleotide
atactccaaaaagcaacattttacatcaaa

SEQ ID NO: 82019 - DNA, 30 bp, Artificial Sequence
  Synthetic oligonucleotide
gtactattagagtcgtaacaccacctcaaa

SEQ ID NO: 82020 - DNA, 30 bp, Artificial Sequence
  Synthetic oligonucleotide
aacaacaggcaccgactagcacgcctcaaa

SEQ ID NO: 82021 - DNA, 30 bp, Artificial Sequence
  Synthetic oligonucleotide
tcagaaccttgattgtatcatctcctcaaa

SEQ ID NO: 82022 - DNA, 30 bp, Artificial Sequence
  Synthetic oligonucleotide
ccacattcagaacagaccttcggagtcaaa

SEQ ID NO: 82023 - DNA, 30 bp, Artificial Sequence
  Synthetic oligonucleotide
accgcccaactccccataatttaggtcaaa

SEQ ID NO: 82024 - DNA, 30 bp, Artificial Sequence
  Synthetic oligonucleotide
acctgcaggcggcctcaacgagtggtcaaa

SEQ ID NO: 82025 - DNA, 30 bp, Artificial Sequence
  Synthetic oligonucleotide
aggtattacgagtgtgccggacatgtcaaa

SEQ ID NO: 82026 - DNA, 30 bp, Artificial Sequence
  Synthetic oligonucleotide
ccttcaaggccagtaccgacccacttcaaa

SEQ ID NO: 82027 - DNA, 30 bp, Artificial Sequence
  Synthetic oligonucleotide
acgaagactgaccggtctgttgctaagaaa

SEQ ID NO: 82028 - DNA, 30 bp, Artificial Sequence
  Synthetic oligonucleotide
tggatgacgaggtcactaccaagagagaaa

SEQ ID NO: 82029 - DNA, 30 bp, Artificial Sequence
  Synthetic oligonucleotide
gctggctcggcaggtgggcgggcggagaaa

SEQ ID NO: 82030 - DNA, 30 bp, Artificial Sequence
  Synthetic oligonucleotide
tactataaccgtggctctgggtcggagaaa

SEQ ID NO: 82031 - DNA, 30 bp, Artificial Sequence
  Synthetic oligonucleotide
cagaaatatccttactccagtctggagaaa

SEQ ID NO: 82032 - DNA, 30 bp, Artificial Sequence
  Synthetic oligonucleotide
aaggctatacccgggaagggggactagaaa

SEQ ID NO: 82033 - DNA, 30 bp, Artificial Sequence
  Synthetic oligonucleotide
tctatcgagcaggccaaccatttctagaaa

SEQ ID NO: 82034 - DNA, 31 bp, Artificial Sequence
  Synthetic oligonucleotide
cttgagtaagaaaaaatcaatgatgtagaaa

SEQ ID NO: 82035 - DNA, 30 bp, Artificial Sequence
  Synthetic oligonucleotide
atgcaaatattaggacccctagattagaaa

SEQ ID NO: 82036 - DNA, 30 bp, Artificial Sequence
  Synthetic oligonucleotide
ggctgtggcataactcaactggttacgaaa

SEQ ID NO: 82037 - DNA, 30 bp, Artificial Sequence
  Synthetic oligonucleotide
gtataactcccttacgtcaacaatccgaaa

SEQ ID NO: 82038 - DNA, 30 bp, Artificial Sequence
  Synthetic oligonucleotide
tgttgcgcggtgagaatcctgttagcgaaa

SEQ ID NO: 82039 - DNA, 30 bp, Artificial Sequence
  Synthetic oligonucleotide
tagaacggttcacagattgtgaatgcgaaa

SEQ ID NO: 82040 - DNA, 30 bp, Artificial Sequence
  Synthetic oligonucleotide
gttggctgggtaatggatctatatgcgaaa

SEQ ID NO: 82041 - DNA, 30 bp, Artificial Sequence
  Synthetic oligonucleotide
ggggaatcacccagtaagcaatactcgaaa

SEQ ID NO: 82042 - DNA, 30 bp, Artificial Sequence
  Synthetic oligonucleotide
ccgagagggctgcgatatcaaagctcgaaa

SEQ ID NO: 82043 - DNA, 30 bp, Artificial Sequence
  Synthetic oligonucleotide
taactacattaccgattatatgtctcgaaa

SEQ ID NO: 82044 - DNA, 30 bp, Artificial Sequence
  Synthetic oligonucleotide
cgcatgacattacgcatgagctaaaggaaa

SEQ ID NO: 82045 - DNA, 30 bp, Artificial Sequence
  Synthetic oligonucleotide
tctggagggtggaatgaatgcgcaaggaaa

SEQ ID NO: 82046 - DNA, 30 bp, Artificial Sequence
  Synthetic oligonucleotide
aacgtgaacgtggcgcatgtgagaaggaaa

SEQ ID NO: 82047 - DNA, 30 bp, Artificial Sequence
  Synthetic oligonucleotide
gctcagcgtactgcgcaacgcataaggaaa

SEQ ID NO: 82048 - DNA, 30 bp, Artificial Sequence
  Synthetic oligonucleotide
caacgagctcgcggggccaacaagaggaaa

SEQ ID NO: 82049 - DNA, 30 bp, Artificial Sequence
  Synthetic oligonucleotide
tgtgcgattagtgagggtgcggcgaggaaa

SEQ ID NO: 82050 - DNA, 30 bp, Artificial Sequence
  Synthetic oligonucleotide
gggtcgcaccggccgaacgggatgaggaaa

SEQ ID NO: 82051 - DNA, 30 bp, Artificial Sequence
  Synthetic oligonucleotide
agaacaggaagaaactagttcctacggaaa

SEQ ID NO: 82052 - DNA, 30 bp, Artificial Sequence
  Synthetic oligonucleotide
cagtcaaaaccggctagaagcgttcggaaa

SEQ ID NO: 82053 - DNA, 30 bp, Artificial Sequence
  Synthetic oligonucleotide
agtgagtatgtaaacgcatataaagggaaa

SEQ ID NO: 82054 - DNA, 30 bp, Artificial Sequence
  Synthetic oligonucleotide
gcggttaggtgaattagacaaaccgggaaa

SEQ ID NO: 82055 - DNA, 30 bp, Artificial Sequence
  Synthetic oligonucleotide
acacgatacttacgaatttacatggggaaa

SEQ ID NO: 82056 - DNA, 30 bp, Artificial Sequence
  Synthetic oligonucleotide
aagccaatagccagtcaataacctgggaaa

SEQ ID NO: 82057 - DNA, 30 bp, Artificial Sequence
  Synthetic oligonucleotide
agctacggcacgtttcggaatatgtggaaa

SEQ ID NO: 82058 - DNA, 30 bp, Artificial Sequence
  Synthetic oligonucleotide
ggatcactcaccaaacggttagccctgaaa

SEQ ID NO: 82059 - DNA, 30 bp, Artificial Sequence
  Synthetic oligonucleotide
gtcaacacggtacttcaagtctaggtgaaa

SEQ ID NO: 82060 - DNA, 30 bp, Artificial Sequence
  Synthetic oligonucleotide
ggcgggacaacgataattcaccagttgaaa

SEQ ID NO: 82061 - DNA, 30 bp, Artificial Sequence
  Synthetic oligonucleotide
caagactaccagagaggctttcagttgaaa

SEQ ID NO: 82062 - DNA, 30 bp, Artificial Sequence
  Synthetic oligonucleotide
atcggatgattccaaccacatgatttgaaa

SEQ ID NO: 82063 - DNA, 30 bp, Artificial Sequence
  Synthetic oligonucleotide
cagtaaggcagggactcagattcaaataaa

SEQ ID NO: 82064 - DNA, 30 bp, Artificial Sequence
  Synthetic oligonucleotide
ataggaaaacaatccattgcgtagaataaa

SEQ ID NO: 82065 - DNA, 30 bp, Artificial Sequence
  Synthetic oligonucleotide
gacgacatctaattcagacctccgaataaa

SEQ ID NO: 82066 - DNA, 31 bp, Artificial Sequence
  Synthetic oligonucleotide
aaagcctaaaagatccatacctaggaataaa

SEQ ID NO: 82067 - DNA, 30 bp, Artificial Sequence
  Synthetic oligonucleotide
agtcgctgaagcactctcacgccacataaa

SEQ ID NO: 82068 - DNA, 30 bp, Artificial Sequence
  Synthetic oligonucleotide
gagggttgcgttacctgtgagaagcataaa

SEQ ID NO: 82069 - DNA, 30 bp, Artificial Sequence
  Synthetic oligonucleotide
agcgtaagtatatgcggatatgaagataaa

SEQ ID NO: 82070 - DNA, 30 bp, Artificial Sequence
  Synthetic oligonucleotide
gctcaggaagtcagaagaccttcagataaa

SEQ ID NO: 82071 - DNA, 30 bp, Artificial Sequence
  Synthetic oligonucleotide
ggtggtagtacgcgaggatgaggagataaa

SEQ ID NO: 82072 - DNA, 30 bp, Artificial Sequence
  Synthetic oligonucleotide
tgtctagaggagggcggccactcggataaa

SEQ ID NO: 82073 - DNA, 30 bp, Artificial Sequence
  Synthetic oligonucleotide
agttagagaatgcctcgtctggaatataaa

SEQ ID NO: 82074 - DNA, 30 bp, Artificial Sequence
  Synthetic oligonucleotide
gcagagcaagcaagggaaggtcactataaa

SEQ ID NO: 82075 - DNA, 30 bp, Artificial Sequence
  Synthetic oligonucleotide
agcagtggaaggcaactgaaaagcactaaa

SEQ ID NO: 82076 - DNA, 30 bp, Artificial Sequence
  Synthetic oligonucleotide
aggtacgccagagcgagcaagacacctaaa

SEQ ID NO: 82077 - DNA, 30 bp, Artificial Sequence
  Synthetic oligonucleotide
ttaaggtaggtgaggggtggtaaggctaaa

SEQ ID NO: 82078 - DNA, 30 bp, Artificial Sequence
  Synthetic oligonucleotide
gaagctactgaggatcgtcgagttgctaaa

SEQ ID NO: 82079 - DNA, 30 bp, Artificial Sequence
  Synthetic oligonucleotide
cgcaagtccggcggctcaactgcatctaaa

SEQ ID NO: 82080 - DNA, 30 bp, Artificial Sequence
  Synthetic oligonucleotide
ggggatgtctagtaggcattctacagtaaa

SEQ ID NO: 82081 - DNA, 30 bp, Artificial Sequence
  Synthetic oligonucleotide
acgaaagcttatccagagagtctcagtaaa

SEQ ID NO: 82082 - DNA, 30 bp, Artificial Sequence
  Synthetic oligonucleotide
tcatggcctctgtaaaggggagagagtaaa

SEQ ID NO: 82083 - DNA, 30 bp, Artificial Sequence
  Synthetic oligonucleotide
ccgtcaccccccggtggagctgagggtaaa

SEQ ID NO: 82084 - DNA, 30 bp, Artificial Sequence
  Synthetic oligonucleotide
agcgattgaacaggatctgagagctgtaaa

SEQ ID NO: 82085 - DNA, 30 bp, Artificial Sequence
  Synthetic oligonucleotide
atactgcaccgaccatacaacgggattaaa

SEQ ID NO: 82086 - DNA, 30 bp, Artificial Sequence
  Synthetic oligonucleotide
gcgacaaatttcaccgttgacaagcttaaa

SEQ ID NO: 82087 - DNA, 30 bp, Artificial Sequence
  Synthetic oligonucleotide
catcgcgtaacgagtcgagcgtggcttaaa

SEQ ID NO: 82088 - DNA, 30 bp, Artificial Sequence
  Synthetic oligonucleotide
aggaagggcgcaacgcactccaaggttaaa

SEQ ID NO: 82089 - DNA, 30 bp, Artificial Sequence
  Synthetic oligonucleotide
gtgacaggtagcaagttatctcggtttaaa

SEQ ID NO: 82090 - DNA, 30 bp, Artificial Sequence
  Synthetic oligonucleotide
aggacagtaggcttgtcccatgtaaaacaa

SEQ ID NO: 82091 - DNA, 30 bp, Artificial Sequence
  Synthetic oligonucleotide
cattcaaactatatgggtatagcgaaacaa

SEQ ID NO: 82092 - DNA, 30 bp, Artificial Sequence
  Synthetic oligonucleotide
cacagtcgccaagggctatatgataaacaa

SEQ ID NO: 82093 - DNA, 30 bp, Artificial Sequence
  Synthetic oligonucleotide
agagtaagagtaggttccttatctaaacaa

SEQ ID NO: 82094 - DNA, 30 bp, Artificial Sequence
  Synthetic oligonucleotide
gcggctccgaggaagattcagagtaaacaa

SEQ ID NO: 82095 - DNA, 30 bp, Artificial Sequence
  Synthetic oligonucleotide
tagacatctgtaaccacgcgcctacaacaa

SEQ ID NO: 82096 - DNA, 30 bp, Artificial Sequence
  Synthetic oligonucleotide
aaataggcttgaacattaaggttgcaacaa

SEQ ID NO: 82097 - DNA, 30 bp, Artificial Sequence
  Synthetic oligonucleotide
agagtgaggtagatatagtaactcgaacaa

SEQ ID NO: 82098 - DNA, 30 bp, Artificial Sequence
  Synthetic oligonucleotide
gaggtattaatccctaagtttgttgaacaa

SEQ ID NO: 82099 - DNA, 30 bp, Artificial Sequence
  Synthetic oligonucleotide
ccgtgcgtatgtcaaagacaagcataacaa

SEQ ID NO: 82100 - DNA, 30 bp, Artificial Sequence
  Synthetic oligonucleotide
aaagccaggacggggaaaacagcataacaa

SEQ ID NO: 82101 - DNA, 30 bp, Artificial Sequence
  Synthetic oligonucleotide
tgaaccgaaagtttgagtgacttataacaa

SEQ ID NO: 82102 - DNA, 30 bp, Artificial Sequence
  Synthetic oligonucleotide
gctgcttggaaatggtggatcaagtaacaa

SEQ ID NO: 82103 - DNA, 30 bp, Artificial Sequence
  Synthetic oligonucleotide
ggggcagggggtacctcttttgcttaacaa

SEQ ID NO: 82104 - DNA, 30 bp, Artificial Sequence
  Synthetic oligonucleotide
catacgacacttgtgccaaacggttaacaa

SEQ ID NO: 82105 - DNA, 30 bp, Artificial Sequence
  Synthetic oligonucleotide
gcgagcaggggcttcagaaagtgtacacaa

SEQ ID NO: 82106 - DNA, 30 bp, Artificial Sequence
  Synthetic oligonucleotide
atgctacaaacctatggacattgaccacaa

SEQ ID NO: 82107 - DNA, 30 bp, Artificial Sequence
  Synthetic oligonucleotide
tgagagtgaatgaggaactctagtccacaa

SEQ ID NO: 82108 - DNA, 30 bp, Artificial Sequence
  Synthetic oligonucleotide
gcactcataacggtgagggtacgggcacaa

SEQ ID NO: 82109 - DNA, 30 bp, Artificial Sequence
  Synthetic oligonucleotide
acgaatgttagataatagctgaattcacaa

SEQ ID NO: 82110 - DNA, 30 bp, Artificial Sequence
  Synthetic oligonucleotide
tagatgaccttcgggtcaagatgttcacaa

SEQ ID NO: 82111 - DNA, 30 bp, Artificial Sequence
  Synthetic oligonucleotide
tgtggatgctatacggcttaagacagacaa

SEQ ID NO: 82112 - DNA, 31 bp, Artificial Sequence
  Synthetic oligonucleotide
tgtgagtgagttcgggaaaaataagagacaa

SEQ ID NO: 82113 - DNA, 30 bp, Artificial Sequence
  Synthetic oligonucleotide
ggtgacaatcttatagtcggcgagcgacaa

SEQ ID NO: 82114 - DNA, 30 bp, Artificial Sequence
  Synthetic oligonucleotide
catgactggcatggatccaaatggcgacaa

SEQ ID NO: 82115 - DNA, 30 bp, Artificial Sequence
  Synthetic oligonucleotide
cgcccggtcatggttaagcacatcggacaa

SEQ ID NO: 82116 - DNA, 30 bp, Artificial Sequence
  Synthetic oligonucleotide
taataatcgaaaagccggattgcgggacaa

SEQ ID NO: 82117 - DNA, 30 bp, Artificial Sequence
  Synthetic oligonucleotide
tcgcagggatgtaggccagtagcatgacaa

SEQ ID NO: 82118 - DNA, 30 bp, Artificial Sequence
  Synthetic oligonucleotide
cgtgacctcaaattgccgttgctaatacaa

SEQ ID NO: 82119 - DNA, 30 bp, Artificial Sequence
  Synthetic oligonucleotide
gacaaccactcagttggaaatagcatacaa

SEQ ID NO: 82120 - DNA, 30 bp, Artificial Sequence
  Synthetic oligonucleotide
aactagcgaaagcggcgcgccttgatacaa

SEQ ID NO: 82121 - DNA, 30 bp, Artificial Sequence
  Synthetic oligonucleotide
cagaacccaaagtgccaccagtgagtacaa

SEQ ID NO: 82122 - DNA, 30 bp, Artificial Sequence
  Synthetic oligonucleotide
gtagtaaactaactccacacatatttacaa

SEQ ID NO: 82123 - DNA, 30 bp, Artificial Sequence
  Synthetic oligonucleotide
gggtagatgaacatggccattggaaaccaa

SEQ ID NO: 82124 - DNA, 30 bp, Artificial Sequence
  Synthetic oligonucleotide
gggtccgaaccagcttcttggcccgaccaa

SEQ ID NO: 82125 - DNA, 30 bp, Artificial Sequence
  Synthetic oligonucleotide
ccataaacgagccaatcataataataccaa

SEQ ID NO: 82126 - DNA, 30 bp, Artificial Sequence
  Synthetic oligonucleotide
tctgaacaaaaagtaaataggctataccaa

SEQ ID NO: 82127 - DNA, 30 bp, Artificial Sequence
  Synthetic oligonucleotide
cgaagaagtaaagtacctcgtatgtaccaa

SEQ ID NO: 82128 - DNA, 30 bp, Artificial Sequence
  Synthetic oligonucleotide
acgcgagacgcctttgaggagaccacccaa

SEQ ID NO: 82129 - DNA, 30 bp, Artificial Sequence
  Synthetic oligonucleotide
tcaatacgaacgagtatttacaatgcccaa

SEQ ID NO: 82130 - DNA, 30 bp, Artificial Sequence
  Synthetic oligonucleotide
ggatcgagtccgtctgaaatcgacagccaa

SEQ ID NO: 82131 - DNA, 30 bp, Artificial Sequence
  Synthetic oligonucleotide
gtcaaacgtggggggaagatccgcagccaa

SEQ ID NO: 82132 - DNA, 30 bp, Artificial Sequence
  Synthetic oligonucleotide
atcgggggcaccagaggtgcagaaggccaa

SEQ ID NO: 82133 - DNA, 30 bp, Artificial Sequence
  Synthetic oligonucleotide
agtcgataggaatgttctagcactggccaa

SEQ ID NO: 82134 - DNA, 30 bp, Artificial Sequence
  Synthetic oligonucleotide
tgcggaaacgtttgtaagcatctatgccaa

SEQ ID NO: 82135 - DNA, 30 bp, Artificial Sequence
  Synthetic oligonucleotide
tgtcaatgtagccgaggcaaatgaatccaa

SEQ ID NO: 82136 - DNA, 30 bp, Artificial Sequence
  Synthetic oligonucleotide
atatcgaaatatagatgggcgataatccaa

SEQ ID NO: 82137 - DNA, 30 bp, Artificial Sequence
  Synthetic oligonucleotide
gctcagggaccttagaactcgagcatccaa

SEQ ID NO: 82138 - DNA, 30 bp, Artificial Sequence
  Synthetic oligonucleotide
gcacataaactcggagagaatatcatccaa

SEQ ID NO: 82139 - DNA, 30 bp, Artificial Sequence
  Synthetic oligonucleotide
cgctcacatcggtaggaggtcgagatccaa

SEQ ID NO: 82140 - DNA, 30 bp, Artificial Sequence
  Synthetic oligonucleotide
agtaaacgaattgattgcgctgttatccaa

SEQ ID NO: 82141 - DNA, 30 bp, Artificial Sequence
  Synthetic oligonucleotide
tgaagacgatcggtaaagcaactagtccaa

SEQ ID NO: 82142 - DNA, 30 bp, Artificial Sequence
  Synthetic oligonucleotide
aacagcgcagtttacgagtgggagttccaa

SEQ ID NO: 82143 - DNA, 30 bp, Artificial Sequence
  Synthetic oligonucleotide
gctgaaaatatatttgaaagatggttccaa

SEQ ID NO: 82144 - DNA, 31 bp, Artificial Sequence
  Synthetic oligonucleotide
cagtaaaggggcacgtcccggaactaagcaa

SEQ ID NO: 82145 - DNA, 30 bp, Artificial Sequence
  Synthetic oligonucleotide
tcatccgatgcggtacatgatggagagcaa

SEQ ID NO: 82146 - DNA, 30 bp, Artificial Sequence
  Synthetic oligonucleotide
ggctttgtgggaaagtcgaatgtagagcaa

SEQ ID NO: 82147 - DNA, 30 bp, Artificial Sequence
  Synthetic oligonucleotide
agcagagatggctggctatcgcccgagcaa

SEQ ID NO: 82148 - DNA, 30 bp, Artificial Sequence
  Synthetic oligonucleotide
tacggatcatagagacctgaagccgagcaa

SEQ ID NO: 82149 - DNA, 30 bp, Artificial Sequence
  Synthetic oligonucleotide
gtcacctaacatagccgcattgccgagcaa

SEQ ID NO: 82150 - DNA, 30 bp, Artificial Sequence
  Synthetic oligonucleotide
tcgacgctgtgcaagtaactgatcgagcaa

SEQ ID NO: 82151 - DNA, 30 bp, Artificial Sequence
  Synthetic oligonucleotide
aagccacaggactcgggtaactttgagcaa

SEQ ID NO: 82152 - DNA, 30 bp, Artificial Sequence
  Synthetic oligonucleotide
acctcattagaattgtatccaacatagcaa

SEQ ID NO: 82153 - DNA, 30 bp, Artificial Sequence
  Synthetic oligonucleotide
actgatgaaacgtcccagacctgatagcaa

SEQ ID NO: 82154 - DNA, 30 bp, Artificial Sequence
  Synthetic oligonucleotide
atgccatcccagacgagtggaacaacgcaa

SEQ ID NO: 82155 - DNA, 30 bp, Artificial Sequence
  Synthetic oligonucleotide
cgtgatgcgcactttccgtggcgtccgcaa

SEQ ID NO: 82156 - DNA, 30 bp, Artificial Sequence
  Synthetic oligonucleotide
gactggtgttcagaggtgtctcacgcgcaa

SEQ ID NO: 82157 - DNA, 30 bp, Artificial Sequence
  Synthetic oligonucleotide
gtaatagacaataaatggcacggctcgcaa

SEQ ID NO: 82158 - DNA, 30 bp, Artificial Sequence
  Synthetic oligonucleotide
gagatgctgagggtagtcaaggcgtcgcaa

SEQ ID NO: 82159 - DNA, 30 bp, Artificial Sequence
  Synthetic oligonucleotide
agtcacgtgtactacaaaagggcgaggcaa

SEQ ID NO: 82160 - DNA, 30 bp, Artificial Sequence
  Synthetic oligonucleotide
ctataacttggtgaagaagattgtaggcaa

SEQ ID NO: 82161 - DNA, 30 bp, Artificial Sequence
  Synthetic oligonucleotide
cggagattcgtgcgggtgacacgccggcaa

SEQ ID NO: 82162 - DNA, 30 bp, Artificial Sequence
  Synthetic oligonucleotide
tcgatgacccatccgaggctaatccggcaa

SEQ ID NO: 82163 - DNA, 30 bp, Artificial Sequence
  Synthetic oligonucleotide
acacgcaggttagtggaatgttagcggcaa

SEQ ID NO: 82164 - DNA, 30 bp, Artificial Sequence
  Synthetic oligonucleotide
accgtaagacagcgcggtcgcactcggcaa

SEQ ID NO: 82165 - DNA, 30 bp, Artificial Sequence
  Synthetic oligonucleotide
acaaacgtagttccaagctgtctctggcaa

SEQ ID NO: 82166 - DNA, 30 bp, Artificial Sequence
  Synthetic oligonucleotide
caggtcacgaacgagcttatatgttggcaa

SEQ ID NO: 82167 - DNA, 30 bp, Artificial Sequence
  Synthetic oligonucleotide
tggtggaaggattacaaacgaaaaatgcaa

SEQ ID NO: 82168 - DNA, 30 bp, Artificial Sequence
  Synthetic oligonucleotide
gcgcatacgagtcgagtcgattcaatgcaa

SEQ ID NO: 82169 - DNA, 30 bp, Artificial Sequence
  Synthetic oligonucleotide
ctagggagttccgaaacatgacacatgcaa

SEQ ID NO: 82170 - DNA, 30 bp, Artificial Sequence
  Synthetic oligonucleotide
cacaatggcaagtattggaccccactgcaa

SEQ ID NO: 82171 - DNA, 30 bp, Artificial Sequence
  Synthetic oligonucleotide
tggatacatatgtatagtagtagcgtgcaa

SEQ ID NO: 82172 - DNA, 30 bp, Artificial Sequence
  Synthetic oligonucleotide
tgacataggtacaataactgcctcgtgcaa

SEQ ID NO: 82173 - DNA, 30 bp, Artificial Sequence
  Synthetic oligonucleotide
ggggcctaaattggatcgtatgtcgtgcaa

SEQ ID NO: 82174 - DNA, 30 bp, Artificial Sequence
  Synthetic oligonucleotide
aaaaggaaggtagagtatcgaaatgtgcaa

SEQ ID NO: 82175 - DNA, 30 bp, Artificial Sequence
  Synthetic oligonucleotide
agggaccttaatcactgcgcgcgtgtgcaa

SEQ ID NO: 82176 - DNA, 30 bp, Artificial Sequence
  Synthetic oligonucleotide
tgacatagggcactctactggcgtgtgcaa

SEQ ID NO: 82177 - DNA, 30 bp, Artificial Sequence
  Synthetic oligonucleotide
agttctaactaaaggctaatcgacttgcaa

SEQ ID NO: 82178 - DNA, 30 bp, Artificial Sequence
  Synthetic oligonucleotide
agttagccacatcgctttacaaccttgcaa

SEQ ID NO: 82179 - DNA, 30 bp, Artificial Sequence
  Synthetic oligonucleotide
ccaaaacgtaatgtctacctcctgttgcaa

SEQ ID NO: 82180 - DNA, 30 bp, Artificial Sequence
  Synthetic oligonucleotide
cggcgaccttacctcccaaaacacaatcaa

SEQ ID NO: 82181 - DNA, 30 bp, Artificial Sequence
  Synthetic oligonucleotide
tccaaacgcggtgctcctgaccagcatcaa

SEQ ID NO: 82182 - DNA, 30 bp, Artificial Sequence
  Synthetic oligonucleotide
aggagcggggttatcaaatgggagcatcaa

SEQ ID NO: 82183 - DNA, 30 bp, Artificial Sequence
  Synthetic oligonucleotide
gtcaatcatgacgtaaaatgtcgctatcaa

SEQ ID NO: 82184 - DNA, 30 bp, Artificial Sequence
  Synthetic oligonucleotide
gggaggtgaggggttaggtatcagtatcaa

SEQ ID NO: 82185 - DNA, 30 bp, Artificial Sequence
  Synthetic oligonucleotide
cctagtcgcgctcgaaaggtgtattatcaa

SEQ ID NO: 82186 - DNA, 30 bp, Artificial Sequence
  Synthetic oligonucleotide
agtgtcatggagaggagtatggaaactcaa

SEQ ID NO: 82187 - DNA, 30 bp, Artificial Sequence
  Synthetic oligonucleotide
gataagggaaacatttagcattacactcaa

SEQ ID NO: 82188 - DNA, 30 bp, Artificial Sequence
  Synthetic oligonucleotide
ggatggagtaagtcaaatgactagactcaa

SEQ ID NO: 82189 - DNA, 30 bp, Artificial Sequence
  Synthetic oligonucleotide
ggcgggtagtctcaaccccgctaagctcaa

SEQ ID NO: 82190 - DNA, 30 bp, Artificial Sequence
  Synthetic oligonucleotide
cctcggtgaatctctaaattctgggctcaa

SEQ ID NO: 82191 - DNA, 30 bp, Artificial Sequence
  Synthetic oligonucleotide
accctgtagagctccatgaatcggtctcaa

SEQ ID NO: 82192 - DNA, 30 bp, Artificial Sequence
  Synthetic oligonucleotide
acccagagcgggcgtggaaacatgtctcaa

SEQ ID NO: 82193 - DNA, 30 bp, Artificial Sequence
  Synthetic oligonucleotide
cgcgtccgaacatactcaaatgaaagtcaa

SEQ ID NO: 82194 - DNA, 30 bp, Artificial Sequence
  Synthetic oligonucleotide
tagtgtagttaagtcttggtcgtaagtcaa

SEQ ID NO: 82195 - DNA, 30 bp, Artificial Sequence
  Synthetic oligonucleotide
acgccctcacgtacttcaaccaccagtcaa

SEQ ID NO: 82196 - DNA, 30 bp, Artificial Sequence
  Synthetic oligonucleotide
cggtagtagagagcggccctaccgagtcaa

SEQ ID NO: 82197 - DNA, 31 bp, Artificial Sequence
  Synthetic oligonucleotide
caaaatagttgcatgatcagaagtgagtcaa

SEQ ID NO: 82198 - DNA, 30 bp, Artificial Sequence
  Synthetic oligonucleotide
ccgcgattcaacatcgggactatacgtcaa

SEQ ID NO: 82199 - DNA, 30 bp, Artificial Sequence
  Synthetic oligonucleotide
ggaaattgtaacgtgaacgtgacccgtcaa

SEQ ID NO: 82200 - DNA, 30 bp, Artificial Sequence
  Synthetic oligonucleotide
cgagtacgagtggcgagaaccacgtgtcaa

SEQ ID NO: 82201 - DNA, 30 bp, Artificial Sequence
  Synthetic oligonucleotide
tgaatgccacaagtcaaaaagcattgtcaa

SEQ ID NO: 82202 - DNA, 30 bp, Artificial Sequence
  Synthetic oligonucleotide
catcgggcgtgtagtgggcgagcgattcaa

SEQ ID NO: 82203 - DNA, 30 bp, Artificial Sequence
  Synthetic oligonucleotide
ctgccgtaagccaggcatggaagagttcaa

SEQ ID NO: 82204 - DNA, 30 bp, Artificial Sequence
  Synthetic oligonucleotide
gacgggaagcaatgttctaggcccgttcaa

SEQ ID NO: 82205 - DNA, 30 bp, Artificial Sequence
  Synthetic oligonucleotide
taggtgcggagatgtcatctggatgttcaa

SEQ ID NO: 82206 - DNA, 30 bp, Artificial Sequence
  Synthetic oligonucleotide
tttggcgaccactggcaacagcgtgttcaa

SEQ ID NO: 82207 - DNA, 30 bp, Artificial Sequence
  Synthetic oligonucleotide
ttaggtgtgcgggctcactagaagtttcaa

SEQ ID NO: 82208 - DNA, 30 bp, Artificial Sequence
  Synthetic oligonucleotide
tgagggcgtatataatacacatcgaaagaa

SEQ ID NO: 82209 - DNA, 30 bp, Artificial Sequence
  Synthetic oligonucleotide
aaggaggtgtcatgagtttatattaaagaa

SEQ ID NO: 82210 - DNA, 30 bp, Artificial Sequence
  Synthetic oligonucleotide
gcatgggcatatcaggttcgagcacaagaa

SEQ ID NO: 82211 - DNA, 30 bp, Artificial Sequence
  Synthetic oligonucleotide
ctggctcaagtgtcaccgcgctagcaagaa

SEQ ID NO: 82212 - DNA, 30 bp, Artificial Sequence
  Synthetic oligonucleotide
ttataggacatagggcagttgtcgcaagaa

SEQ ID NO: 82213 - DNA, 30 bp, Artificial Sequence
  Synthetic oligonucleotide
gtcggtgtatagcgggcctactatcaagaa

SEQ ID NO: 82214 - DNA, 30 bp, Artificial Sequence
  Synthetic oligonucleotide
ttcgaagaggataccagacaagcataagaa

SEQ ID NO: 82215 - DNA, 30 bp, Artificial Sequence
  Synthetic oligonucleotide
agaagcctacctccttcatgggggacagaa

SEQ ID NO: 82216 - DNA, 30 bp, Artificial Sequence
  Synthetic oligonucleotide
acggatgtatctgcttacagggtgacagaa

SEQ ID NO: 82217 - DNA, 30 bp, Artificial Sequence
  Synthetic oligonucleotide
atggtacgacaccgcaagtttgacccagaa

SEQ ID NO: 82218 - DNA, 30 bp, Artificial Sequence
  Synthetic oligonucleotide
ctcgagggggttgataatgggaagccagaa

SEQ ID NO: 82219 - DNA, 30 bp, Artificial Sequence
  Synthetic oligonucleotide
ctggagggccggattggacgaacgccagaa

SEQ ID NO: 82220 - DNA, 30 bp, Artificial Sequence
  Synthetic oligonucleotide
agtgtttgatgtcaccgagagaacgcagaa

SEQ ID NO: 82221 - DNA, 30 bp, Artificial Sequence
  Synthetic oligonucleotide
gcaattatgtgggaacaggaatccgcagaa

SEQ ID NO: 82222 - DNA, 31 bp, Artificial Sequence
  Synthetic oligonucleotide
gtagcagagttcgttggtctcgggatcagaa

SEQ ID NO: 82223 - DNA, 30 bp, Artificial Sequence
  Synthetic oligonucleotide
tcgtcaggaaggcacctcgggctaagagaa

SEQ ID NO: 82224 - DNA, 30 bp, Artificial Sequence
  Synthetic oligonucleotide
aggcggattgtgtactctaacgacagagaa

SEQ ID NO: 82225 - DNA, 30 bp, Artificial Sequence
  Synthetic oligonucleotide
tcggtcatgtatgtgggctgctagagagaa

SEQ ID NO: 82226 - DNA, 30 bp, Artificial Sequence
  Synthetic oligonucleotide
aagatttgtccagccagaagtgggagagaa

SEQ ID NO: 82227 - DNA, 30 bp, Artificial Sequence
  Synthetic oligonucleotide
ctgataatgacgatgtaatatgcacgagaa

SEQ ID NO: 82228 - DNA, 30 bp, Artificial Sequence
  Synthetic oligonucleotide
tcatcatcgaagaatttacagccccgagaa

SEQ ID NO: 82229 - DNA, 30 bp, Artificial Sequence
  Synthetic oligonucleotide
accggagatacgagccttacactccgagaa

SEQ ID NO: 82230 - DNA, 30 bp, Artificial Sequence
  Synthetic oligonucleotide
tggctgggcttcctgaggtgaaagcgagaa

SEQ ID NO: 82231 - DNA, 30 bp, Artificial Sequence
  Synthetic oligonucleotide
cgattggaagcagaagtccagatcggagaa

SEQ ID NO: 82232 - DNA, 30 bp, Artificial Sequence
  Synthetic oligonucleotide
gacgaaaacatgcacagttcatcgggagaa

SEQ ID NO: 82233 - DNA, 30 bp, Artificial Sequence
  Synthetic oligonucleotide
cgatgtggctttcgcataccaattggagaa

SEQ ID NO: 82234 - DNA, 30 bp, Artificial Sequence
  Synthetic oligonucleotide
ggaactaactaaaaaccatcgacgtgagaa

SEQ ID NO: 82235 - DNA, 30 bp, Artificial Sequence
  Synthetic oligonucleotide
aatagtaatgacgtcaatagaccaatagaa

SEQ ID NO: 82236 - DNA, 30 bp, Artificial Sequence
  Synthetic oligonucleotide
tgtacaggcgatggccattgggtcatagaa

SEQ ID NO: 82237 - DNA, 30 bp, Artificial Sequence
  Synthetic oligonucleotide
cgcacttcgttgacaggtcctaggatagaa

SEQ ID NO: 82238 - DNA, 30 bp, Artificial Sequence
  Synthetic oligonucleotide
actagttcacagaacgacaaaggtctagaa

SEQ ID NO: 82239 - DNA, 30 bp, Artificial Sequence
  Synthetic oligonucleotide
cgaatactcctgatgtgggacactgtagaa

SEQ ID NO: 82240 - DNA, 30 bp, Artificial Sequence
  Synthetic oligonucleotide
agcgcacccaaaacacgcgatatcttagaa

SEQ ID NO: 82241 - DNA, 30 bp, Artificial Sequence
  Synthetic oligonucleotide
cgtagaccatcgagaaattgtctaaacgaa

SEQ ID NO: 82242 - DNA, 30 bp, Artificial Sequence
  Synthetic oligonucleotide
ggctggaaaaagtgccggccgagcaacgaa

SEQ ID NO: 82243 - DNA, 30 bp, Artificial Sequence
  Synthetic oligonucleotide
aatgcatagtggcacatggccatcaacgaa

SEQ ID NO: 82244 - DNA, 30 bp, Artificial Sequence
  Synthetic oligonucleotide
agactcgttgaagaggtgctgattaacgaa

SEQ ID NO: 82245 - DNA, 30 bp, Artificial Sequence
  Synthetic oligonucleotide
ccggtttgagtagatcaccagccacacgaa

SEQ ID NO: 82246 - DNA, 30 bp, Artificial Sequence
  Synthetic oligonucleotide
cgttcctaggagtcgaacataggccacgaa

SEQ ID NO: 82247 - DNA, 30 bp, Artificial Sequence
  Synthetic oligonucleotide
aggaattgccaccgcatatcaaatcacgaa

SEQ ID NO: 82248 - DNA, 30 bp, Artificial Sequence
  Synthetic oligonucleotide
aacgagcgggcagatacctgactagacgaa

SEQ ID NO: 82249 - DNA, 30 bp, Artificial Sequence
  Synthetic oligonucleotide
ggtgttaagagttgagtgcatgaatacgaa

SEQ ID NO: 82250 - DNA, 30 bp, Artificial Sequence
  Synthetic oligonucleotide
ctagtcagtttattaccctacaactacgaa

SEQ ID NO: 82251 - DNA, 30 bp, Artificial Sequence
  Synthetic oligonucleotide
gtcaggtaccaagaccaacagaattacgaa

SEQ ID NO: 82252 - DNA, 30 bp, Artificial Sequence
  Synthetic oligonucleotide
gaagagggatctaattcaccgcgcaccgaa

SEQ ID NO: 82253 - DNA, 30 bp, Artificial Sequence
  Synthetic oligonucleotide
ttaacacgcgaaagagaaccgtagaccgaa

SEQ ID NO: 82254 - DNA, 30 bp, Artificial Sequence
  Synthetic oligonucleotide
ccgtccactacgtaaatcgaaattaccgaa

SEQ ID NO: 82255 - DNA, 30 bp, Artificial Sequence
  Synthetic oligonucleotide
taaggccatagcaattaaatcgaacccgaa

SEQ ID NO: 82256 - DNA, 30 bp, Artificial Sequence
  Synthetic oligonucleotide
cgtaatcaagggccgaatcacatgcccgaa

SEQ ID NO: 82257 - DNA, 30 bp, Artificial Sequence
  Synthetic oligonucleotide
gcataacgttgaccatcaggggaagccgaa

SEQ ID NO: 82258 - DNA, 30 bp, Artificial Sequence
  Synthetic oligonucleotide
gactgtgcgggccgagggacaaatgccgaa

SEQ ID NO: 82259 - DNA, 30 bp, Artificial Sequence
  Synthetic oligonucleotide
tgataaatagagggggatccagcatccgaa

SEQ ID NO: 82260 - DNA, 30 bp, Artificial Sequence
  Synthetic oligonucleotide
cacttggtcaagtgatatgttagctccgaa

SEQ ID NO: 82261 - DNA, 30 bp, Artificial Sequence
  Synthetic oligonucleotide
agctggcagcagcatcaatcagaaagcgaa

SEQ ID NO: 82262 - DNA, 30 bp, Artificial Sequence
  Synthetic oligonucleotide
catcgaacgcgcaaaaagaacgcaagcgaa

SEQ ID NO: 82263 - DNA, 30 bp, Artificial Sequence
  Synthetic oligonucleotide
gcccaatcctcaccaggataccatagcgaa

SEQ ID NO: 82264 - DNA, 30 bp, Artificial Sequence
  Synthetic oligonucleotide
cactttcgttacctagtccaagcccgcgaa

SEQ ID NO: 82265 - DNA, 30 bp, Artificial Sequence
  Synthetic oligonucleotide
gaagtttagcggggaacggggatcggcgaa

SEQ ID NO: 82266 - DNA, 30 bp, Artificial Sequence
  Synthetic oligonucleotide
tcgttgactagacctaatggtatgggcgaa

SEQ ID NO: 82267 - DNA, 30 bp, Artificial Sequence
  Synthetic oligonucleotide
taatatggcgtggacaatcaactgggcgaa

SEQ ID NO: 82268 - DNA, 30 bp, Artificial Sequence
  Synthetic oligonucleotide
agccaggacgactttccacagacatgcgaa

SEQ ID NO: 82269 - DNA, 30 bp, Artificial Sequence
  Synthetic oligonucleotide
acgtggatacatagtaagtatacatgcgaa

SEQ ID NO: 82270 - DNA, 30 bp, Artificial Sequence
  Synthetic oligonucleotide
ctttcctcgcgagagaagataatatgcgaa

SEQ ID NO: 82271 - DNA, 30 bp, Artificial Sequence
  Synthetic oligonucleotide
agatcaaacttcggcgaggtctcctgcgaa

SEQ ID NO: 82272 - DNA, 30 bp, Artificial Sequence
  Synthetic oligonucleotide
agaatgtagtggatgtagtcaaggtgcgaa

SEQ ID NO: 82273 - DNA, 30 bp, Artificial Sequence
  Synthetic oligonucleotide
ataaagcctacgtgttcatagcgaatcgaa

SEQ ID NO: 82274 - DNA, 30 bp, Artificial Sequence
  Synthetic oligonucleotide
taagacgaactcgcgaataggatgatcgaa

SEQ ID NO: 82275 - DNA, 31 bp, Artificial Sequence
  Synthetic oligonucleotide
tatcgcggtcgagtgcgctatcggtatcgaa

SEQ ID NO: 82276 - DNA, 30 bp, Artificial Sequence
  Synthetic oligonucleotide
tgcataccgacgagtccgtatgagctcgaa

SEQ ID NO: 82277 - DNA, 30 bp, Artificial Sequence
  Synthetic oligonucleotide
gggtgtgttccctcgagtgggtaagtcgaa

SEQ ID NO: 82278 - DNA, 30 bp, Artificial Sequence
  Synthetic oligonucleotide
ataaatggcactgttaagccgccagtcgaa

SEQ ID NO: 82279 - DNA, 30 bp, Artificial Sequence
  Synthetic oligonucleotide
tggagtttagatagtataacgaacttcgaa

SEQ ID NO: 82280 - DNA, 30 bp, Artificial Sequence
  Synthetic oligonucleotide
acatgcgtagataggccaagcgtgttcgaa

SEQ ID NO: 82281 - DNA, 30 bp, Artificial Sequence
  Synthetic oligonucleotide
agtgaagcctagtgtacaagacgaaaggaa

SEQ ID NO: 82282 - DNA, 30 bp, Artificial Sequence
  Synthetic oligonucleotide
ttggtggtgatgacagctataggaaaggaa

SEQ ID NO: 82283 - DNA, 30 bp, Artificial Sequence
  Synthetic oligonucleotide
ccgtcttgctgctgcaaagtacagaaggaa

SEQ ID NO: 82284 - DNA, 30 bp, Artificial Sequence
  Synthetic oligonucleotide
tgctatagtatattgctaagcgcgaaggaa

SEQ ID NO: 82285 - DNA, 30 bp, Artificial Sequence
  Synthetic oligonucleotide
aagaagggcaggtcgacgatggcgaaggaa

SEQ ID NO: 82286 - DNA, 30 bp, Artificial Sequence
  Synthetic oligonucleotide
atgcacggctgcggccatcatcgtaaggaa

SEQ ID NO: 82287 - DNA, 30 bp, Artificial Sequence
  Synthetic oligonucleotide
cgagcttatgcggagcagtcctaccaggaa

SEQ ID NO: 82288 - DNA, 30 bp, Artificial Sequence
  Synthetic oligonucleotide
aggtcgcgatgggctcatattatgcaggaa

SEQ ID NO: 82289 - DNA, 31 bp, Artificial Sequence
  Synthetic oligonucleotide
gggagagccgtcggccgtgctctatcaggaa

SEQ ID NO: 82290 - DNA, 30 bp, Artificial Sequence
  Synthetic oligonucleotide
gccacaggccagatagggattgctcaggaa

SEQ ID NO: 82291 - DNA, 30 bp, Artificial Sequence
  Synthetic oligonucleotide
cgactcctgctccgttatatctgcgaggaa

SEQ ID NO: 82292 - DNA, 30 bp, Artificial Sequence
  Synthetic oligonucleotide
agtatatgggagcgcgtgcgtgtggaggaa

SEQ ID NO: 82293 - DNA, 30 bp, Artificial Sequence
  Synthetic oligonucleotide
atctgtggtaagatctagtacgatgaggaa

SEQ ID NO: 82294 - DNA, 30 bp, Artificial Sequence
  Synthetic oligonucleotide
cgggggacacgaaaaaattaagcataggaa

SEQ ID NO: 82295 - DNA, 30 bp, Artificial Sequence
  Synthetic oligonucleotide
cggcccatacggccttctgctacctaggaa

SEQ ID NO: 82296 - DNA, 30 bp, Artificial Sequence
  Synthetic oligonucleotide
tctgaaacaattcctgccattccgtaggaa

SEQ ID NO: 82297 - DNA, 30 bp, Artificial Sequence
  Synthetic oligonucleotide
ataaaaagtgtacgtgtatcgtcgacggaa

SEQ ID NO: 82298 - DNA, 30 bp, Artificial Sequence
  Synthetic oligonucleotide
atactacgcgcaaagggacgcgatacggaa

SEQ ID NO: 82299 - DNA, 30 bp, Artificial Sequence
  Synthetic oligonucleotide
gaggggcaaccgacaactactgtaccggaa

SEQ ID NO: 82300 - DNA, 30 bp, Artificial Sequence
  Synthetic oligonucleotide
gtctggcaaggaatttagcacacggcggaa

SEQ ID NO: 82301 - DNA, 30 bp, Artificial Sequence
  Synthetic oligonucleotide
cgtatgagaggtccatcgatcaaatcggaa

SEQ ID NO: 82302 - DNA, 30 bp, Artificial Sequence
  Synthetic oligonucleotide
gcatcgccagatctagcgaactaatcggaa

SEQ ID NO: 82303 - DNA, 31 bp, Artificial Sequence
  Synthetic oligonucleotide
atctcgacaccgacgagctcagggctcggaa

SEQ ID NO: 82304 - DNA, 30 bp, Artificial Sequence
  Synthetic oligonucleotide
ctataactgaggggcgaagttcgttcggaa

SEQ ID NO: 82305 - DNA, 30 bp, Artificial Sequence
  Synthetic oligonucleotide
gatcggtatacataaagctcttcaagggaa

SEQ ID NO: 82306 - DNA, 30 bp, Artificial Sequence
  Synthetic oligonucleotide
cccggcgatactgaaagcatctacagggaa

SEQ ID NO: 82307 - DNA, 30 bp, Artificial Sequence
  Synthetic oligonucleotide
gtacggtagcgtggagtggggctcagggaa

SEQ ID NO: 82308 - DNA, 30 bp, Artificial Sequence
  Synthetic oligonucleotide
tcgtagcctttaacgtaaacggcgagggaa

SEQ ID NO: 82309 - DNA, 30 bp, Artificial Sequence
  Synthetic oligonucleotide
tacacttacgtacaacaatcatgtagggaa

SEQ ID NO: 82310 - DNA, 30 bp, Artificial Sequence
  Synthetic oligonucleotide
gtcctagaaaagttcgtaccaaagcgggaa

SEQ ID NO: 82311 - DNA, 30 bp, Artificial Sequence
  Synthetic oligonucleotide
cagtacacatcaggtaaaccactaggggaa

SEQ ID NO: 82312 - DNA, 30 bp, Artificial Sequence
  Synthetic oligonucleotide
tcagctcttaaacactagtcaatatgggaa

SEQ ID NO: 82313 - DNA, 30 bp, Artificial Sequence
  Synthetic oligonucleotide
cagataaggctttgtcgttaaggttgggaa

SEQ ID NO: 82314 - DNA, 30 bp, Artificial Sequence
  Synthetic oligonucleotide
tgcaacacaatatcacatgtgaagatggaa

SEQ ID NO: 82315 - DNA, 30 bp, Artificial Sequence
  Synthetic oligonucleotide
cattaacatgcgtcactatgaacgatggaa

SEQ ID NO: 82316 - DNA, 31 bp, Artificial Sequence
  Synthetic oligonucleotide
cctacactagaaatgtgacagctaactggaa

SEQ ID NO: 82317 - DNA, 30 bp, Artificial Sequence
  Synthetic oligonucleotide
gagtcgcaatcgtaaggcgggcaagtggaa

SEQ ID NO: 82318 - DNA, 30 bp, Artificial Sequence
  Synthetic oligonucleotide
agagctgaccaagggatccagtcagtggaa

SEQ ID NO: 82319 - DNA, 30 bp, Artificial Sequence
  Synthetic oligonucleotide
tagccacccaacatcgagcaatgcgtggaa

SEQ ID NO: 82320 - DNA, 30 bp, Artificial Sequence
  Synthetic oligonucleotide
tgtcaaacactatacaaagacgaggtggaa

SEQ ID NO: 82321 - DNA, 30 bp, Artificial Sequence
  Synthetic oligonucleotide
aaataggacatagacgaactttaggtggaa

SEQ ID NO: 82322 - DNA, 30 bp, Artificial Sequence
  Synthetic oligonucleotide
cacgctgcggatatatgtaattgcttggaa

SEQ ID NO: 82323 - DNA, 30 bp, Artificial Sequence
  Synthetic oligonucleotide
caataagcctgcgaaagtagggtgttggaa

SEQ ID NO: 82324 - DNA, 30 bp, Artificial Sequence
  Synthetic oligonucleotide
aaacaaattacatcttagaacggaaatgaa

SEQ ID NO: 82325 - DNA, 30 bp, Artificial Sequence
  Synthetic oligonucleotide
aaccgccgatgccaagtccataacaatgaa

SEQ ID NO: 82326 - DNA, 30 bp, Artificial Sequence
  Synthetic oligonucleotide
agacagagcgcgaaattgcgattgaatgaa

SEQ ID NO: 82327 - DNA, 30 bp, Artificial Sequence
  Synthetic oligonucleotide
gacgttctaaaccattatccgaaccatgaa

SEQ ID NO: 82328 - DNA, 30 bp, Artificial Sequence
  Synthetic oligonucleotide
acaggataatctaggatcttacccgatgaa

SEQ ID NO: 82329 - DNA, 30 bp, Artificial Sequence
  Synthetic oligonucleotide
gagtccaagaggaattgacgatgggatgaa

SEQ ID NO: 82330 - DNA, 30 bp, Artificial Sequence
  Synthetic oligonucleotide
gagggtataggcaccggatcatgtgatgaa

SEQ ID NO: 82331 - DNA, 30 bp, Artificial Sequence
  Synthetic oligonucleotide
caacacctcctagtacagcacattgatgaa

SEQ ID NO: 82332 - DNA, 30 bp, Artificial Sequence
  Synthetic oligonucleotide
ggcacaatgaaagttatacaatcgtatgaa

SEQ ID NO: 82333 - DNA, 30 bp, Artificial Sequence
  Synthetic oligonucleotide
ccaatgaacgtaggagccgcctattatgaa

SEQ ID NO: 82334 - DNA, 30 bp, Artificial Sequence
  Synthetic oligonucleotide
ataaagtatcgagttcacttgtggactgaa

SEQ ID NO: 82335 - DNA, 30 bp, Artificial Sequence
  Synthetic oligonucleotide
tgcttaagaacggatgtaagtctggctgaa

SEQ ID NO: 82336 - DNA, 30 bp, Artificial Sequence
  Synthetic oligonucleotide
aaaacgggtactggaccccaaccatctgaa

SEQ ID NO: 82337 - DNA, 30 bp, Artificial Sequence
  Synthetic oligonucleotide
cggggcaggcgttacatagtaaactctgaa

SEQ ID NO: 82338 - DNA, 30 bp, Artificial Sequence
  Synthetic oligonucleotide
gcggtctgcacgagagcggttaaaagtgaa

SEQ ID NO: 82339 - DNA, 30 bp, Artificial Sequence
  Synthetic oligonucleotide
aagggttgagggatttccagcgaaagtgaa

SEQ ID NO: 82340 - DNA, 30 bp, Artificial Sequence
  Synthetic oligonucleotide
tacgacaacgtaatatagcttgtgagtgaa

SEQ ID NO: 82341 - DNA, 30 bp, Artificial Sequence
  Synthetic oligonucleotide
aggggtgagattttactgaggtatagtgaa

SEQ ID NO: 82342 - DNA, 30 bp, Artificial Sequence
  Synthetic oligonucleotide
ggaacgggaaacgatcctcagggtagtgaa

SEQ ID NO: 82343 - DNA, 30 bp, Artificial Sequence
  Synthetic oligonucleotide
aagcgcacaaaaggatttagctagcgtgaa

SEQ ID NO: 82344 - DNA, 30 bp, Artificial Sequence
  Synthetic oligonucleotide
aggcacatatcccgtgcggcactcggtgaa

SEQ ID NO: 82345 - DNA, 30 bp, Artificial Sequence
  Synthetic oligonucleotide
gcataaggggcgctcatttaaaagggtgaa

SEQ ID NO: 82346 - DNA, 30 bp, Artificial Sequence
  Synthetic oligonucleotide
tgcgctaccgaagaattgtgtgttggtgaa

SEQ ID NO: 82347 - DNA, 30 bp, Artificial Sequence
  Synthetic oligonucleotide
tgaagaagaaaaatagtccaaaagtgtgaa

SEQ ID NO: 82348 - DNA, 30 bp, Artificial Sequence
  Synthetic oligonucleotide
aagcaacattagttagtgccgtagtgtgaa

SEQ ID NO: 82349 - DNA, 30 bp, Artificial Sequence
  Synthetic oligonucleotide
ccactactgttgtggcgattacgaattgaa

SEQ ID NO: 82350 - DNA, 30 bp, Artificial Sequence
  Synthetic oligonucleotide
cagtagaagggaagacgggttccgattgaa

SEQ ID NO: 82351 - DNA, 30 bp, Artificial Sequence
  Synthetic oligonucleotide
cgtgtgccacaggtaggtcaaacagttgaa

SEQ ID NO: 82352 - DNA, 30 bp, Artificial Sequence
  Synthetic oligonucleotide
gctagttggccggatggagaaccggttgaa

SEQ ID NO: 82353 - DNA, 30 bp, Artificial Sequence
  Synthetic oligonucleotide
ccagttacagcataaagacactctgttgaa

SEQ ID NO: 82354 - DNA, 30 bp, Artificial Sequence
  Synthetic oligonucleotide
aggatccaacatagcacaagaggttttgaa

SEQ ID NO: 82355 - DNA, 30 bp, Artificial Sequence
  Synthetic oligonucleotide
actaacgactacaggtagtgcttcaaataa

SEQ ID NO: 82356 - DNA, 30 bp, Artificial Sequence
  Synthetic oligonucleotide
gtaacaataccgggcgaataaaataaataa

SEQ ID NO: 82357 - DNA, 30 bp, Artificial Sequence
  Synthetic oligonucleotide
gcgttacctcgcgggggcttgaaacaataa

SEQ ID NO: 82358 - DNA, 30 bp, Artificial Sequence
  Synthetic oligonucleotide
agcggacccgggacaacattcgaccaataa

SEQ ID NO: 82359 - DNA, 30 bp, Artificial Sequence
  Synthetic oligonucleotide
aggcacgcgggttcaagagtctcgcaataa

SEQ ID NO: 82360 - DNA, 30 bp, Artificial Sequence
  Synthetic oligonucleotide
accacgccctcggaattctggcgtcaataa

SEQ ID NO: 82361 - DNA, 30 bp, Artificial Sequence
  Synthetic oligonucleotide
aggataggttggcaaactagcagggaataa

SEQ ID NO: 82362 - DNA, 30 bp, Artificial Sequence
  Synthetic oligonucleotide
ggatgaggttaatagcatagcagtgaataa

SEQ ID NO: 82363 - DNA, 30 bp, Artificial Sequence
  Synthetic oligonucleotide
ctcgctcgaattgagggatgccgtgaataa

SEQ ID NO: 82364 - DNA, 30 bp, Artificial Sequence
  Synthetic oligonucleotide
cgagcctatttacaggcattatgctaataa

SEQ ID NO: 82365 - DNA, 30 bp, Artificial Sequence
  Synthetic oligonucleotide
acacactctgagatttgtcgagtaacataa

SEQ ID NO: 82366 - DNA, 30 bp, Artificial Sequence
  Synthetic oligonucleotide
ctcatgggtgttggaaggcacaagacataa

SEQ ID NO: 82367 - DNA, 30 bp, Artificial Sequence
  Synthetic oligonucleotide
taccgctcggtgcaaaccgaaagcccataa

SEQ ID NO: 82368 - DNA, 30 bp, Artificial Sequence
  Synthetic oligonucleotide
agcaacaacatttgtggcttcggtccataa

SEQ ID NO: 82369 - DNA, 30 bp, Artificial Sequence
  Synthetic oligonucleotide
gtgtagtagacaagttcaggacttccataa

SEQ ID NO: 82370 - DNA, 30 bp, Artificial Sequence
  Synthetic oligonucleotide
agggtacattacgaaatggcgaccgcataa

SEQ ID NO: 82371 - DNA, 30 bp, Artificial Sequence
  Synthetic oligonucleotide
ggaatattctgcagacaacaaatcgcataa

SEQ ID NO: 82372 - DNA, 30 bp, Artificial Sequence
  Synthetic oligonucleotide
gaacaaagaattcatggaaatgtcgcataa

SEQ ID NO: 82373 - DNA, 30 bp, Artificial Sequence
  Synthetic oligonucleotide
tattcagcggtgaaacatagtgtcgcataa

SEQ ID NO: 82374 - DNA, 30 bp, Artificial Sequence
  Synthetic oligonucleotide
tgggggtcggcacaaggtcaggaatcataa

SEQ ID NO: 82375 - DNA, 30 bp, Artificial Sequence
  Synthetic oligonucleotide
ccagccatcgtgccaggtgaccgaagataa

SEQ ID NO: 82376 - DNA, 30 bp, Artificial Sequence
  Synthetic oligonucleotide
cacaccgcgtagcgggagaataacagataa

SEQ ID NO: 82377 - DNA, 30 bp, Artificial Sequence
  Synthetic oligonucleotide
cgcgcctgatacataacataaaaccgataa

SEQ ID NO: 82378 - DNA, 30 bp, Artificial Sequence
  Synthetic oligonucleotide
cacgccttcacgattattcaggttcgataa

SEQ ID NO: 82379 - DNA, 30 bp, Artificial Sequence
  Synthetic oligonucleotide
gtgaagtacgtgatctacgtcaactgataa

SEQ ID NO: 82380 - DNA, 30 bp, Artificial Sequence
  Synthetic oligonucleotide
gccgtcgaccaagctaaggacttctgataa

SEQ ID NO: 82381 - DNA, 30 bp, Artificial Sequence
  Synthetic oligonucleotide
tcgcaggttccactatagaaagcaatataa

SEQ ID NO: 82382 - DNA, 30 bp, Artificial Sequence
  Synthetic oligonucleotide
tctggaaaagatttagaaggatgactataa

SEQ ID NO: 82383 - DNA, 30 bp, Artificial Sequence
  Synthetic oligonucleotide
ggcgcatgaaactgaatcctcggcctataa

SEQ ID NO: 82384 - DNA, 30 bp, Artificial Sequence
  Synthetic oligonucleotide
cctggacataggagaggtgactgcctataa

SEQ ID NO: 82385 - DNA, 30 bp, Artificial Sequence
  Synthetic oligonucleotide
aggcacaaggtggggtagagccggctataa

SEQ ID NO: 82386 - DNA, 30 bp, Artificial Sequence
  Synthetic oligonucleotide
cggtactcggacgcttatggagatgtataa

SEQ ID NO: 82387 - DNA, 30 bp, Artificial Sequence
  Synthetic oligonucleotide
acgatgtgtcacaaaatgtcatgtgtataa

SEQ ID NO: 82388 - DNA, 30 bp, Artificial Sequence
  Synthetic oligonucleotide
tgccgtgtgggattagcatagtagttataa

SEQ ID NO: 82389 - DNA, 30 bp, Artificial Sequence
  Synthetic oligonucleotide
tataaggaagccagtaaacacagcaactaa

SEQ ID NO: 82390 - DNA, 30 bp, Artificial Sequence
  Synthetic oligonucleotide
gtctgggcaccggtcactcaacagaactaa

SEQ ID NO: 82391 - DNA, 30 bp, Artificial Sequence
  Synthetic oligonucleotide
aaggaccatatctgttctttaaggcactaa

SEQ ID NO: 82392 - DNA, 30 bp, Artificial Sequence
  Synthetic oligonucleotide
agtccaggcacctaattgtaacttcactaa

SEQ ID NO: 82393 - DNA, 30 bp, Artificial Sequence
  Synthetic oligonucleotide
ccgcggtagggcaccaagtctgccgactaa

SEQ ID NO: 82394 - DNA, 30 bp, Artificial Sequence
  Synthetic oligonucleotide
ttggacgcgaaagctgcttctaaggactaa

SEQ ID NO: 82395 - DNA, 30 bp, Artificial Sequence
  Synthetic oligonucleotide
ggcgtccattaaccctctagagtcacctaa

SEQ ID NO: 82396 - DNA, 30 bp, Artificial Sequence
  Synthetic oligonucleotide
tggcgaggataccggtgacacattacctaa

SEQ ID NO: 82397 - DNA, 30 bp, Artificial Sequence
  Synthetic oligonucleotide
attggcgtccaagagagtggctactcctaa

SEQ ID NO: 82398 - DNA, 30 bp, Artificial Sequence
  Synthetic oligonucleotide
agggtgaagcaaacacaccgagacagctaa

SEQ ID NO: 82399 - DNA, 30 bp, Artificial Sequence
  Synthetic oligonucleotide
agctgtgattgagtgttagcaaaccgctaa

SEQ ID NO: 82400 - DNA, 30 bp, Artificial Sequence
  Synthetic oligonucleotide
gagttgacctgaactcgaaaactgcgctaa

SEQ ID NO: 82401 - DNA, 30 bp, Artificial Sequence
  Synthetic oligonucleotide
cattcgaaactgcaagctagattgcgctaa

SEQ ID NO: 82402 - DNA, 30 bp, Artificial Sequence
  Synthetic oligonucleotide
ccgagagtatgcgaactaggctgaggctaa

SEQ ID NO: 82403 - DNA, 30 bp, Artificial Sequence
  Synthetic oligonucleotide
caatgccggcgatctgcgctgctatgctaa

SEQ ID NO: 82404 - DNA, 30 bp, Artificial Sequence
  Synthetic oligonucleotide
tcggtgttaacaaagatggacccaatctaa

SEQ ID NO: 82405 - DNA, 30 bp, Artificial Sequence
  Synthetic oligonucleotide
caactcgtcgaaagtgccggcaagatctaa

SEQ ID NO: 82406 - DNA, 30 bp, Artificial Sequence
  Synthetic oligonucleotide
gtgcggtgagtgactcgagacgcgatctaa

SEQ ID NO: 82407 - DNA, 30 bp, Artificial Sequence
  Synthetic oligonucleotide
tgcggaccagcttagcctactgcgatctaa

SEQ ID NO: 82408 - DNA, 30 bp, Artificial Sequence
  Synthetic oligonucleotide
atcgtgtcaataagacctttccatatctaa

SEQ ID NO: 82409 - DNA, 30 bp, Artificial Sequence
  Synthetic oligonucleotide
gaagggaacatagtactgagtaaagtctaa

SEQ ID NO: 82410 - DNA, 30 bp, Artificial Sequence
  Synthetic oligonucleotide
aatcacccaccatgagtgcctggagtctaa

SEQ ID NO: 82411 - DNA, 30 bp, Artificial Sequence
  Synthetic oligonucleotide
gggcgcgggggcgcatagagaaacgtctaa

SEQ ID NO: 82412 - DNA, 30 bp, Artificial Sequence
  Synthetic oligonucleotide
agaagacgtctgtagcgagcgcgattctaa

SEQ ID NO: 82413 - DNA, 30 bp, Artificial Sequence
  Synthetic oligonucleotide
cggcaaggctttaaataagagcgccagtaa

SEQ ID NO: 82414 - DNA, 30 bp, Artificial Sequence
  Synthetic oligonucleotide
ccggctggcgaccaacggcccgagcagtaa

SEQ ID NO: 82415 - DNA, 30 bp, Artificial Sequence
  Synthetic oligonucleotide
ccgagatccttagcgaactctacgtagtaa

SEQ ID NO: 82416 - DNA, 30 bp, Artificial Sequence
  Synthetic oligonucleotide
ttttggaagacaggaacggagtgcacgtaa

SEQ ID NO: 82417 - DNA, 30 bp, Artificial Sequence
  Synthetic oligonucleotide
ggggaatgctgtccagtgtttgatacgtaa

SEQ ID NO: 82418 - DNA, 30 bp, Artificial Sequence
  Synthetic oligonucleotide
gactaactggacaacctcggcaaagcgtaa

SEQ ID NO: 82419 - DNA, 30 bp, Artificial Sequence
  Synthetic oligonucleotide
cgaacgttcaaatggtgggtcaacgcgtaa

SEQ ID NO: 82420 - DNA, 30 bp, Artificial Sequence
  Synthetic oligonucleotide
ggaaggatacagatcttaattaagtcgtaa

SEQ ID NO: 82421 - DNA, 30 bp, Artificial Sequence
  Synthetic oligonucleotide
gacgagggacgagtatcttccttgtcgtaa

SEQ ID NO: 82422 - DNA, 30 bp, Artificial Sequence
  Synthetic oligonucleotide
cggaagtggagagatggagttttaaggtaa

SEQ ID NO: 82423 - DNA, 30 bp, Artificial Sequence
  Synthetic oligonucleotide
aacgctgtgtgacactatacctgcaggtaa

SEQ ID NO: 82424 - DNA, 30 bp, Artificial Sequence
  Synthetic oligonucleotide
caaattgggtcggacgaagttatcaggtaa

SEQ ID NO: 82425 - DNA, 30 bp, Artificial Sequence
  Synthetic oligonucleotide
tatgctggggcatggctggaacagaggtaa

SEQ ID NO: 82426 - DNA, 30 bp, Artificial Sequence
  Synthetic oligonucleotide
gctagaaaagagggaggtactacacggtaa

SEQ ID NO: 82427 - DNA, 30 bp, Artificial Sequence
  Synthetic oligonucleotide
ttgacaagtagatccaacgacgctcggtaa

SEQ ID NO: 82428 - DNA, 30 bp, Artificial Sequence
  Synthetic oligonucleotide
aggtacgaaccggcggtgaaaaaagggtaa

SEQ ID NO: 82429 - DNA, 30 bp, Artificial Sequence
  Synthetic oligonucleotide
cgcaattgtactatgtcaaagtgagggtaa

SEQ ID NO: 82430 - DNA, 30 bp, Artificial Sequence
  Synthetic oligonucleotide
gcatacttcggctcaggaatagtagggtaa

SEQ ID NO: 82431 - DNA, 30 bp, Artificial Sequence
  Synthetic oligonucleotide
cgcctcaaagcgtctttggtcagcgggtaa

SEQ ID NO: 82432 - DNA, 30 bp, Artificial Sequence
  Synthetic oligonucleotide
ggtggagtttgatgggtgcgcatggggtaa

SEQ ID NO: 82433 - DNA, 30 bp, Artificial Sequence
  Synthetic oligonucleotide
cattgaagttgtcacggggggactgggtaa

SEQ ID NO: 82434 - DNA, 30 bp, Artificial Sequence
  Synthetic oligonucleotide
caatatcgaaaggttaattccccatggtaa

SEQ ID NO: 82435 - DNA, 30 bp, Artificial Sequence
  Synthetic oligonucleotide
gaataaacatcacgagaaggtgtctggtaa

SEQ ID NO: 82436 - DNA, 30 bp, Artificial Sequence
  Synthetic oligonucleotide
aggttgttaaacgggcacaacgagtggtaa

SEQ ID NO: 82437 - DNA, 30 bp, Artificial Sequence
  Synthetic oligonucleotide
gaggcctgggagtatggtttatcgatgtaa

SEQ ID NO: 82438 - DNA, 30 bp, Artificial Sequence
  Synthetic oligonucleotide
atgcgggaaaggatgtatcgaaatatgtaa

SEQ ID NO: 82439 - DNA, 30 bp, Artificial Sequence
  Synthetic oligonucleotide
ctgatcacttcggtaagggtctatatgtaa

SEQ ID NO: 82440 - DNA, 30 bp, Artificial Sequence
  Synthetic oligonucleotide
acggaaatgtttagaaagtgaaatctgtaa

SEQ ID NO: 82441 - DNA, 30 bp, Artificial Sequence
  Synthetic oligonucleotide
agccttggacatgtgtgatccagtctgtaa

SEQ ID NO: 82442 - DNA, 30 bp, Artificial Sequence
  Synthetic oligonucleotide
cgaataatcccaggccaattcggtctgtaa

SEQ ID NO: 82443 - DNA, 30 bp, Artificial Sequence
  Synthetic oligonucleotide
tggggatgtcagtgctcgtaggaggtgtaa

SEQ ID NO: 82444 - DNA, 30 bp, Artificial Sequence
  Synthetic oligonucleotide
ccatggtactgtcgtaacaggcgtgtgtaa

SEQ ID NO: 82445 - DNA, 30 bp, Artificial Sequence
  Synthetic oligonucleotide
gaagatagctagttgcaataacaaaattaa

SEQ ID NO: 82446 - DNA, 30 bp, Artificial Sequence
  Synthetic oligonucleotide
gcgacagtgccccgtccgcctcaaaattaa

SEQ ID NO: 82447 - DNA, 30 bp, Artificial Sequence
  Synthetic oligonucleotide
agagtggccagtgccgggagatgacattaa

SEQ ID NO: 82448 - DNA, 30 bp, Artificial Sequence
  Synthetic oligonucleotide
cgtcggctagtaccgatagcacagcattaa

SEQ ID NO: 82449 - DNA, 30 bp, Artificial Sequence
  Synthetic oligonucleotide
agggcaatagctaaagactaccagcattaa

SEQ ID NO: 82450 - DNA, 30 bp, Artificial Sequence
  Synthetic oligonucleotide
gagaccgaggacatcttggaagcgccttaa

SEQ ID NO: 82451 - DNA, 30 bp, Artificial Sequence
  Synthetic oligonucleotide
ggccgtactggcaccaatcgggagtcttaa

SEQ ID NO: 82452 - DNA, 30 bp, Artificial Sequence
  Synthetic oligonucleotide
ggagctaggccgtggggtaagtggtcttaa

SEQ ID NO: 82453 - DNA, 30 bp, Artificial Sequence
  Synthetic oligonucleotide
aaaggttagactacggcggaagtcagttaa

SEQ ID NO: 82454 - DNA, 30 bp, Artificial Sequence
  Synthetic oligonucleotide
ccggagagccctagcgtaagcaggagttaa

SEQ ID NO: 82455 - DNA, 30 bp, Artificial Sequence
  Synthetic oligonucleotide
cagaatgacgctcgagtaagcagcggttaa

SEQ ID NO: 82456 - DNA, 30 bp, Artificial Sequence
  Synthetic oligonucleotide
ccggtactggttagtataagaccatgttaa

SEQ ID NO: 82457 - DNA, 30 bp, Artificial Sequence
  Synthetic oligonucleotide
tgcgtaatgacataagataaaagatgttaa

SEQ ID NO: 82458 - DNA, 30 bp, Artificial Sequence
  Synthetic oligonucleotide
cgaggttcagcagtctcggcgcgagtttaa

SEQ ID NO: 82459 - DNA, 30 bp, Artificial Sequence
  Synthetic oligonucleotide
tacactaagatatgctcgtaaaccttttaa

SEQ ID NO: 82460 - DNA, 30 bp, Artificial Sequence
  Synthetic oligonucleotide
tccgtttaccaaatcagcgcattaaaaaca

SEQ ID NO: 82461 - DNA, 30 bp, Artificial Sequence
  Synthetic oligonucleotide
gggtcttccagacagggtcgcaagaaaaca

SEQ ID NO: 82462 - DNA, 30 bp, Artificial Sequence
  Synthetic oligonucleotide
aagctcagacggcaagctgtgccccaaaca

SEQ ID NO: 82463 - DNA, 30 bp, Artificial Sequence
  Synthetic oligonucleotide
aaataatcaagggggacaaacgcagaaaca

SEQ ID NO: 82464 - DNA, 30 bp, Artificial Sequence
  Synthetic oligonucleotide
caccaatacatatggagaaggagggaaaca

SEQ ID NO: 82465 - DNA, 30 bp, Artificial Sequence
  Synthetic oligonucleotide
tggaatttggcgaattgcatatcataaaca

SEQ ID NO: 82466 - DNA, 30 bp, Artificial Sequence
  Synthetic oligonucleotide
ccggtggactacagtacccacgtctaaaca

SEQ ID NO: 82467 - DNA, 30 bp, Artificial Sequence
  Synthetic oligonucleotide
catgagggcgcgataagctgcaattaaaca

SEQ ID NO: 82468 - DNA, 30 bp, Artificial Sequence
  Synthetic oligonucleotide
ccctatataaatcctagagactgttaaaca

SEQ ID NO: 82469 - DNA, 30 bp, Artificial Sequence
  Synthetic oligonucleotide
cgagtaattttaagttcgtataacacaaca

SEQ ID NO: 82470 - DNA, 30 bp, Artificial Sequence
  Synthetic oligonucleotide
aaaacaaccatatagtccatggacacaaca

SEQ ID NO: 82471 - DNA, 30 bp, Artificial Sequence
  Synthetic oligonucleotide
cgcaggactacgtttatgtgccagacaaca

SEQ ID NO: 82472 - DNA, 30 bp, Artificial Sequence
  Synthetic oligonucleotide
agtgtggtttgagaggaactagtaccaaca

SEQ ID NO: 82473 - DNA, 30 bp, Artificial Sequence
  Synthetic oligonucleotide
atcggctaatccagaacgtcagacccaaca

SEQ ID NO: 82474 - DNA, 30 bp, Artificial Sequence
  Synthetic oligonucleotide
cgctaaggaaaggtactggcgtgcgcaaca

SEQ ID NO: 82475 - DNA, 30 bp, Artificial Sequence
  Synthetic oligonucleotide
taagaatactcaacagggccaagttcaaca

SEQ ID NO: 82476 - DNA, 30 bp, Artificial Sequence
  Synthetic oligonucleotide
ctaaggtacataaccgctatgagaagaaca

SEQ ID NO: 82477 - DNA, 30 bp, Artificial Sequence
  Synthetic oligonucleotide
tagcggtaaacgtaggaattgtgaagaaca

SEQ ID NO: 82478 - DNA, 30 bp, Artificial Sequence
  Synthetic oligonucleotide
cttcgacattcagagcgacacaaccgaaca

SEQ ID NO: 82479 - DNA, 30 bp, Artificial Sequence
  Synthetic oligonucleotide
gaagtgggccaaccagcttgtgcaggaaca

SEQ ID NO: 82480 - DNA, 30 bp, Artificial Sequence
  Synthetic oligonucleotide
cgtggagaccgaagccccttaacgggaaca

SEQ ID NO: 82481 - DNA, 30 bp, Artificial Sequence
  Synthetic oligonucleotide
cgtctgtatcgggtacagcgcgcgggaaca

SEQ ID NO: 82482 - DNA, 30 bp, Artificial Sequence
  Synthetic oligonucleotide
cagacgtactatagtgcaaatgcatgaaca

SEQ ID NO: 82483 - DNA, 30 bp, Artificial Sequence
  Synthetic oligonucleotide
cttgaccggagggctcaccttatatgaaca

SEQ ID NO: 82484 - DNA, 30 bp, Artificial Sequence
  Synthetic oligonucleotide
tgataatgaagaaacaggcagctctgaaca

SEQ ID NO: 82485 - DNA, 30 bp, Artificial Sequence
  Synthetic oligonucleotide
caatgcccctagtgttggcgagggtgaaca

SEQ ID NO: 82486 - DNA, 30 bp, Artificial Sequence
  Synthetic oligonucleotide
gggtagcatcgtgaagggcgcggtataaca

SEQ ID NO: 82487 - DNA, 30 bp, Artificial Sequence
  Synthetic oligonucleotide
cacgaaccagttgcgtatgggactctaaca

SEQ ID NO: 82488 - DNA, 30 bp, Artificial Sequence
  Synthetic oligonucleotide
ggggcacccccgtgtcgacggaaagtaaca

SEQ ID NO: 82489 - DNA, 30 bp, Artificial Sequence
  Synthetic oligonucleotide
aacgatcgggccgagacggccacagtaaca

SEQ ID NO: 82490 - DNA, 30 bp, Artificial Sequence
  Synthetic oligonucleotide
tcggacattcgacgggacgcattagtaaca

SEQ ID NO: 82491 - DNA, 30 bp, Artificial Sequence
  Synthetic oligonucleotide
gatgaggtaagtaagcttgcttgggtaaca

SEQ ID NO: 82492 - DNA, 30 bp, Artificial Sequence
  Synthetic oligonucleotide
tagagtggcagtggaaatagtcaaaacaca

SEQ ID NO: 82493 - DNA, 30 bp, Artificial Sequence
  Synthetic oligonucleotide
tttagatcaagggcagccaccctaaacaca

SEQ ID NO: 82494 - DNA, 30 bp, Artificial Sequence
  Synthetic oligonucleotide
ctgaaagcaggaatattacagcaacacaca

SEQ ID NO: 82495 - DNA, 30 bp, Artificial Sequence
  Synthetic oligonucleotide
ggctcgggctacccgaagctcgcacacaca

SEQ ID NO: 82496 - DNA, 30 bp, Artificial Sequence
  Synthetic oligonucleotide
cagtgagaaccatgaatgtaatgccacaca

SEQ ID NO: 82497 - DNA, 30 bp, Artificial Sequence
  Synthetic oligonucleotide
catgtgacattgctgagagcggttcacaca

SEQ ID NO: 82498 - DNA, 30 bp, Artificial Sequence
  Synthetic oligonucleotide
aaacacggggggagagcgacgaggtacaca

SEQ ID NO: 82499 - DNA, 30 bp, Artificial Sequence
  Synthetic oligonucleotide
cgaacaacttaattatcatctcattacaca

SEQ ID NO: 82500 - DNA, 30 bp, Artificial Sequence
  Synthetic oligonucleotide
acgtactagaggcatttattaggttacaca

SEQ ID NO: 82501 - DNA, 30 bp, Artificial Sequence
  Synthetic oligonucleotide
tcacggttatatgacttaacgatttacaca

SEQ ID NO: 82502 - DNA, 30 bp, Artificial Sequence
  Synthetic oligonucleotide
caacagatagggtgaacgtgacaagccaca

SEQ ID NO: 82503 - DNA, 30 bp, Artificial Sequence
  Synthetic oligonucleotide
agaatacgaggagttcagcttaacgccaca

SEQ ID NO: 82504 - DNA, 30 bp, Artificial Sequence
  Synthetic oligonucleotide
ccgcgacaggaagcattaagattcgccaca

SEQ ID NO: 82505 - DNA, 30 bp, Artificial Sequence
  Synthetic oligonucleotide
tactgacttatgaagagtccccatgccaca

SEQ ID NO: 82506 - DNA, 30 bp, Artificial Sequence
  Synthetic oligonucleotide
acccacttcaatgatccatctcgtgccaca

SEQ ID NO: 82507 - DNA, 30 bp, Artificial Sequence
  Synthetic oligonucleotide
ctgcgaaactgttcgcagggttcaagcaca

SEQ ID NO: 82508 - DNA, 30 bp, Artificial Sequence
  Synthetic oligonucleotide
aaaaggtgattggggtcacagtttagcaca

SEQ ID NO: 82509 - DNA, 30 bp, Artificial Sequence
  Synthetic oligonucleotide
ttacgtcgtcctacaaccagtgcgcgcaca

SEQ ID NO: 82510 - DNA, 30 bp, Artificial Sequence
  Synthetic oligonucleotide
cacggcacacggtaccccgagggatgcaca

SEQ ID NO: 82511 - DNA, 30 bp, Artificial Sequence
  Synthetic oligonucleotide
cggagctaggtatatctgacctcctgcaca

SEQ ID NO: 82512 - DNA, 30 bp, Artificial Sequence
  Synthetic oligonucleotide
ctgagtggcatagtgtcccagagctgcaca

SEQ ID NO: 82513 - DNA, 30 bp, Artificial Sequence
  Synthetic oligonucleotide
taccggcaatgtacgtactgaaagtgcaca

SEQ ID NO: 82514 - DNA, 30 bp, Artificial Sequence
  Synthetic oligonucleotide
cggtaatgatagcacgttggcgagtgcaca

SEQ ID NO: 82515 - DNA, 30 bp, Artificial Sequence
  Synthetic oligonucleotide
gtaaagcatttaggaaggtgtgagtgcaca

SEQ ID NO: 82516 - DNA, 30 bp, Artificial Sequence
  Synthetic oligonucleotide
tgcgtggacactcagtcacatacttgcaca

SEQ ID NO: 82517 - DNA, 30 bp, Artificial Sequence
  Synthetic oligonucleotide
ttacagtaagttagctaagaaaacatcaca

SEQ ID NO: 82518 - DNA, 30 bp, Artificial Sequence
  Synthetic oligonucleotide
ccggatctgggtaaattggcattcatcaca

SEQ ID NO: 82519 - DNA, 30 bp, Artificial Sequence
  Synthetic oligonucleotide
tgtgatggcctacggaaattaacactcaca

SEQ ID NO: 82520 - DNA, 30 bp, Artificial Sequence
  Synthetic oligonucleotide
acatagctgttccacaatgaatcagtcaca

SEQ ID NO: 82521 - DNA, 30 bp, Artificial Sequence
  Synthetic oligonucleotide
gacttgaatggccttacaatgcgagtcaca

SEQ ID NO: 82522 - DNA, 30 bp, Artificial Sequence
  Synthetic oligonucleotide
tcacgttaaacgcgaactgcagcattcaca

SEQ ID NO: 82523 - DNA, 30 bp, Artificial Sequence
  Synthetic oligonucleotide
caacgtttggcgcctaccgacgtattcaca

SEQ ID NO: 82524 - DNA, 30 bp, Artificial Sequence
  Synthetic oligonucleotide
ggtagggccaaatcggcaaaattaaagaca

SEQ ID NO: 82525 - DNA, 30 bp, Artificial Sequence
  Synthetic oligonucleotide
aaacgcggattactagttaaatgcaagaca

SEQ ID NO: 82526 - DNA, 30 bp, Artificial Sequence
  Synthetic oligonucleotide
cgagggcaatcgccctgcaaacggaagaca

SEQ ID NO: 82527 - DNA, 30 bp, Artificial Sequence
  Synthetic oligonucleotide
tctggggccacaatgtgcaagcataagaca

SEQ ID NO: 82528 - DNA, 30 bp, Artificial Sequence
  Synthetic oligonucleotide
actggcaatgccggtgcgcaccttaagaca

SEQ ID NO: 82529 - DNA, 30 bp, Artificial Sequence
  Synthetic oligonucleotide
gacgacaatccctgccatgcgcatcagaca

SEQ ID NO: 82530 - DNA, 30 bp, Artificial Sequence
  Synthetic oligonucleotide
taagacaattccaaaatcggtgcagagaca

SEQ ID NO: 82531 - DNA, 30 bp, Artificial Sequence
  Synthetic oligonucleotide
atggcgggggtgattcctgagtacgagaca

SEQ ID NO: 82532 - DNA, 30 bp, Artificial Sequence
  Synthetic oligonucleotide
actaggggctccaacctctaagaggagaca

SEQ ID NO: 82533 - DNA, 30 bp, Artificial Sequence
  Synthetic oligonucleotide
gagggcagtacgaaaacgcgcttctagaca

SEQ ID NO: 82534 - DNA, 30 bp, Artificial Sequence
  Synthetic oligonucleotide
tgctgaatcaagaggttcgagtagtagaca

SEQ ID NO: 82535 - DNA, 30 bp, Artificial Sequence
  Synthetic oligonucleotide
gggcagcggatactttagaactggccgaca

SEQ ID NO: 82536 - DNA, 30 bp, Artificial Sequence
  Synthetic oligonucleotide
acggcgctatcctaaactatggtgccgaca

SEQ ID NO: 82537 - DNA, 30 bp, Artificial Sequence
  Synthetic oligonucleotide
atcagtatcgaagtgatttgcaatccgaca

SEQ ID NO: 82538 - DNA, 30 bp, Artificial Sequence
  Synthetic oligonucleotide
tggcagagaaacaagttcattatcgcgaca

SEQ ID NO: 82539 - DNA, 30 bp, Artificial Sequence
  Synthetic oligonucleotide
acgatgatatcgtttaaggttaaatcgaca

SEQ ID NO: 82540 - DNA, 30 bp, Artificial Sequence
  Synthetic oligonucleotide
taagtgcacagatgaaagcgatcatcgaca

SEQ ID NO: 82541 - DNA, 30 bp, Artificial Sequence
  Synthetic oligonucleotide
tacagatacggagttccctaaatatcgaca

SEQ ID NO: 82542 - DNA, 30 bp, Artificial Sequence
  Synthetic oligonucleotide
gcacgtgtcgatcattgagagacaaggaca

SEQ ID NO: 82543 - DNA, 30 bp, Artificial Sequence
  Synthetic oligonucleotide
ccgaccaatagacattcatttcacaggaca

SEQ ID NO: 82544 - DNA, 30 bp, Artificial Sequence
  Synthetic oligonucleotide
cgtctgctgacacacacgcgggcgaggaca

SEQ ID NO: 82545 - DNA, 30 bp, Artificial Sequence
  Synthetic oligonucleotide
ccgagatttgtacaaggcaggaaagggaca

SEQ ID NO: 82546 - DNA, 30 bp, Artificial Sequence
  Synthetic oligonucleotide
agcaaggtaggtagagggcccggggggaca

SEQ ID NO: 82547 - DNA, 30 bp, Artificial Sequence
  Synthetic oligonucleotide
gtaagcgtgattacaccgcaatgggggaca

SEQ ID NO: 82548 - DNA, 30 bp, Artificial Sequence
  Synthetic oligonucleotide
actgcgggacggatccattagatggggaca

SEQ ID NO: 82549 - DNA, 30 bp, Artificial Sequence
  Synthetic oligonucleotide
tggtccggttctaccacaaaagctgggaca

SEQ ID NO: 82550 - DNA, 30 bp, Artificial Sequence
  Synthetic oligonucleotide
acgttggagtgaagatgctagtacatgaca

SEQ ID NO: 82551 - DNA, 30 bp, Artificial Sequence
  Synthetic oligonucleotide
ctcgcgggtcaagtatcaccatcgatgaca

SEQ ID NO: 82552 - DNA, 30 bp, Artificial Sequence
  Synthetic oligonucleotide
aggtgttagctcctcagactaagcctgaca

SEQ ID NO: 82553 - DNA, 30 bp, Artificial Sequence
  Synthetic oligonucleotide
gaactggcaaacatttgtatcaagctgaca

SEQ ID NO: 82554 - DNA, 30 bp, Artificial Sequence
  Synthetic oligonucleotide
gtaagtctagggctggagttccgcgtgaca

SEQ ID NO: 82555 - DNA, 30 bp, Artificial Sequence
  Synthetic oligonucleotide
atatgccctttacgggaaaacatcgtgaca

SEQ ID NO: 82556 - DNA, 30 bp, Artificial Sequence
  Synthetic oligonucleotide
tacttaaccccggtaatcctaggggtgaca

SEQ ID NO: 82557 - DNA, 30 bp, Artificial Sequence
  Synthetic oligonucleotide
tgaggttcccatacaatagacagcttgaca

SEQ ID NO: 82558 - DNA, 30 bp, Artificial Sequence
  Synthetic oligonucleotide
gtaccaaaatggctgaacaaaagaaataca

SEQ ID NO: 82559 - DNA, 30 bp, Artificial Sequence
  Synthetic oligonucleotide
ggaacaactgcgtggctaaagcggaataca

SEQ ID NO: 82560 - DNA, 30 bp, Artificial Sequence
  Synthetic oligonucleotide
ggtggtgatgcggaaactttgtggcataca

SEQ ID NO: 82561 - DNA, 30 bp, Artificial Sequence
  Synthetic oligonucleotide
agagtcctagagcgtgttaaacgagataca

SEQ ID NO: 82562 - DNA, 30 bp, Artificial Sequence
  Synthetic oligonucleotide
tatgggagagggaaacgggacatatataca

SEQ ID NO: 82563 - DNA, 30 bp, Artificial Sequence
  Synthetic oligonucleotide
gccaggagggactctaacctgcaaactaca

SEQ ID NO: 82564 - DNA, 30 bp, Artificial Sequence
  Synthetic oligonucleotide
acacattgctcacaggattgataaactaca

SEQ ID NO: 82565 - DNA, 30 bp, Artificial Sequence
  Synthetic oligonucleotide
gtaagaactaatcacaaacacataactaca

SEQ ID NO: 82566 - DNA, 30 bp, Artificial Sequence
  Synthetic oligonucleotide
agcaagacgtacgtgagactccctactaca

SEQ ID NO: 82567 - DNA, 30 bp, Artificial Sequence
  Synthetic oligonucleotide
ggctgggattgcatctcgaaaatacctaca

SEQ ID NO: 82568 - DNA, 30 bp, Artificial Sequence
  Synthetic oligonucleotide
aagaaagggtgtacagctcagaatcctaca

SEQ ID NO: 82569 - DNA, 30 bp, Artificial Sequence
  Synthetic oligonucleotide
agcgatcagcatcacaccggatacgctaca

SEQ ID NO: 82570 - DNA, 30 bp, Artificial Sequence
  Synthetic oligonucleotide
gtgggaaactgggagactgcataggctaca

SEQ ID NO: 82571 - DNA, 30 bp, Artificial Sequence
  Synthetic oligonucleotide
gcgaggttaatgaaacgtcttccatctaca

SEQ ID NO: 82572 - DNA, 30 bp, Artificial Sequence
  Synthetic oligonucleotide
gtaggggcaaaggccgaggggtgatctaca

SEQ ID NO: 82573 - DNA, 30 bp, Artificial Sequence
  Synthetic oligonucleotide
aatggcgtagctaaggggaacaactctaca

SEQ ID NO: 82574 - DNA, 30 bp, Artificial Sequence
  Synthetic oligonucleotide
atcacgacctgtctaaccaaagagtctaca

SEQ ID NO: 82575 - DNA, 30 bp, Artificial Sequence
  Synthetic oligonucleotide
gaggccggataggacatagagacgtctaca

SEQ ID NO: 82576 - DNA, 30 bp, Artificial Sequence
  Synthetic oligonucleotide
caacaagcatgtcaatcattacaccttaca

SEQ ID NO: 82577 - DNA, 30 bp, Artificial Sequence
  Synthetic oligonucleotide
atgaaaggtggacgaaacgccgatgttaca

SEQ ID NO: 82578 - DNA, 30 bp, Artificial Sequence
  Synthetic oligonucleotide
caccctggatggcaggaaacagctgttaca

SEQ ID NO: 82579 - DNA, 30 bp, Artificial Sequence
  Synthetic oligonucleotide
cgtccatagccagtgcacaaggaaaaacca

SEQ ID NO: 82580 - DNA, 30 bp, Artificial Sequence
  Synthetic oligonucleotide
atgaggaagcccggtgatgttgtgaaacca

SEQ ID NO: 82581 - DNA, 30 bp, Artificial Sequence
  Synthetic oligonucleotide
gccggagactgcacgagattggctaaacca

SEQ ID NO: 82582 - DNA, 30 bp, Artificial Sequence
  Synthetic oligonucleotide
tgatctctactttgataacggctacaacca

SEQ ID NO: 82583 - DNA, 30 bp, Artificial Sequence
  Synthetic oligonucleotide
aaagcacagactacctccgacacggaacca

SEQ ID NO: 82584 - DNA, 30 bp, Artificial Sequence
  Synthetic oligonucleotide
ttggattgaggtaaaatccgggctgaacca

SEQ ID NO: 82585 - DNA, 30 bp, Artificial Sequence
  Synthetic oligonucleotide
ctgacagaatgtgtagctcaacgataacca

SEQ ID NO: 82586 - DNA, 30 bp, Artificial Sequence
  Synthetic oligonucleotide
gctcacgggcgcaacaagcctacttaacca

SEQ ID NO: 82587 - DNA, 30 bp, Artificial Sequence
  Synthetic oligonucleotide
tggccaagggtatggcctgtagcaacacca

SEQ ID NO: 82588 - DNA, 30 bp, Artificial Sequence
  Synthetic oligonucleotide
cgatacgctgtagtcacggattacccacca

SEQ ID NO: 82589 - DNA, 30 bp, Artificial Sequence
  Synthetic oligonucleotide
atgtgctatagaagggatgcaccagcacca

SEQ ID NO: 82590 - DNA, 30 bp, Artificial Sequence
  Synthetic oligonucleotide
gggtaattgcactgtgacttcaaggcacca

SEQ ID NO: 82591 - DNA, 30 bp, Artificial Sequence
  Synthetic oligonucleotide
cctggattccctgtgtaagcgtgggcacca

SEQ ID NO: 82592 - DNA, 30 bp, Artificial Sequence
  Synthetic oligonucleotide
tacgaccggaggcaattcgaccactcacca

SEQ ID NO: 82593 - DNA, 30 bp, Artificial Sequence
  Synthetic oligonucleotide
gctcaactccagttgattgtgtaacgacca

SEQ ID NO: 82594 - DNA, 30 bp, Artificial Sequence
  Synthetic oligonucleotide
tccgaatgccgcactgtactcaggtgacca

SEQ ID NO: 82595 - DNA, 30 bp, Artificial Sequence
  Synthetic oligonucleotide
gtacagggcggagtttcccgaagcctacca

SEQ ID NO: 82596 - DNA, 30 bp, Artificial Sequence
  Synthetic oligonucleotide
cgggaagcacgattaggctacgataaccca

SEQ ID NO: 82597 - DNA, 30 bp, Artificial Sequence
  Synthetic oligonucleotide
atgtgacggtgggtagcccgagctaaccca

SEQ ID NO: 82598 - DNA, 30 bp, Artificial Sequence
  Synthetic oligonucleotide
atcccggtgctcccatcatgcctacaccca

SEQ ID NO: 82599 - DNA, 30 bp, Artificial Sequence
  Synthetic oligonucleotide
caaagttaataaagatcaggtttacaccca

SEQ ID NO: 82600 - DNA, 30 bp, Artificial Sequence
  Synthetic oligonucleotide
taatggacgatgggcaatgcgtcggaccca

SEQ ID NO: 82601 - DNA, 30 bp, Artificial Sequence
  Synthetic oligonucleotide
aggtgcctcccgtggagcgaccgcccccca

SEQ ID NO: 82602 - DNA, 30 bp, Artificial Sequence
  Synthetic oligonucleotide
cacgatacttctctggcatcctaagcccca

SEQ ID NO: 82603 - DNA, 30 bp, Artificial Sequence
  Synthetic oligonucleotide
tcaaggggtcgggtatcgcatagagcccca

SEQ ID NO: 82604 - DNA, 30 bp, Artificial Sequence
  Synthetic oligonucleotide
agtataccgggtacgagatgcaaggcccca

SEQ ID NO: 82605 - DNA, 30 bp, Artificial Sequence
  Synthetic oligonucleotide
caagcattcgccgaaaaaaaagatcgccca

SEQ ID NO: 82606 - DNA, 30 bp, Artificial Sequence
  Synthetic oligonucleotide
ttggaaccgcaagtgaaaaatattcgccca

SEQ ID NO: 82607 - DNA, 30 bp, Artificial Sequence
  Synthetic oligonucleotide
cgaatgtcataacatgctggagtaggccca

SEQ ID NO: 82608 - DNA, 30 bp, Artificial Sequence
  Synthetic oligonucleotide
caccctagagcgatacctgctacgggccca

SEQ ID NO: 82609 - DNA, 30 bp, Artificial Sequence
  Synthetic oligonucleotide
aacgaaagcggcggtacatgccggggccca

SEQ ID NO: 82610 - DNA, 30 bp, Artificial Sequence
  Synthetic oligonucleotide
atgatacgcgtaagataagctagtggccca

SEQ ID NO: 82611 - DNA, 30 bp, Artificial Sequence
  Synthetic oligonucleotide
ccaacatcaagcgtggcgacccttggccca

SEQ ID NO: 82612 - DNA, 30 bp, Artificial Sequence
  Synthetic oligonucleotide
attgcggggttagacggctgtaagtgccca

SEQ ID NO: 82613 - DNA, 30 bp, Artificial Sequence
  Synthetic oligonucleotide
gcacgtgcgctgtccaatatcgcgatccca

SEQ ID NO: 82614 - DNA, 30 bp, Artificial Sequence
  Synthetic oligonucleotide
gagagtgaaaaatggccgtttgggatccca

SEQ ID NO: 82615 - DNA, 30 bp, Artificial Sequence
  Synthetic oligonucleotide
gtcggcgttctggtccaggtatcactccca

SEQ ID NO: 82616 - DNA, 30 bp, Artificial Sequence
  Synthetic oligonucleotide
tggaccacgctaacctcgttgttcctccca

SEQ ID NO: 82617 - DNA, 30 bp, Artificial Sequence
  Synthetic oligonucleotide
agatgacggagagtcgattaatgattccca

SEQ ID NO: 82618 - DNA, 28 bp, Artificial Sequence
  Synthetic oligonucleotide
aagagcatagttgttgctggtcaagcca

SEQ ID NO: 82619 - DNA, 30 bp, Artificial Sequence
  Synthetic oligonucleotide
taagatgggctagcagtgggggctcagcca

SEQ ID NO: 82620 - DNA, 30 bp, Artificial Sequence
  Synthetic oligonucleotide
acttacgtgggagtatcaatgatctagcca

SEQ ID NO: 82621 - DNA, 30 bp, Artificial Sequence
  Synthetic oligonucleotide
atatgttgtaattaatgcaatagagcgcca

SEQ ID NO: 82622 - DNA, 30 bp, Artificial Sequence
  Synthetic oligonucleotide
taatccgcgaagtactaactctacgcgcca

SEQ ID NO: 82623 - DNA, 30 bp, Artificial Sequence
  Synthetic oligonucleotide
ggcatgtagaactatcttcgagaggcgcca

SEQ ID NO: 82624 - DNA, 30 bp, Artificial Sequence
  Synthetic oligonucleotide
tatagcatctaggccgtgcgtcgtgcgcca

SEQ ID NO: 82625 - DNA, 30 bp, Artificial Sequence
  Synthetic oligonucleotide
taaaacaatggtaatgattcatgatcgcca

SEQ ID NO: 82626 - DNA, 30 bp, Artificial Sequence
  Synthetic oligonucleotide
tgaaaggaaaataactataacgtatcgcca

SEQ ID NO: 82627 - DNA, 30 bp, Artificial Sequence
  Synthetic oligonucleotide
catagacaacgggctacccggggctcgcca

SEQ ID NO: 82628 - DNA, 30 bp, Artificial Sequence
  Synthetic oligonucleotide
agcgaggcaaggtaggctacctagaggcca

SEQ ID NO: 82629 - DNA, 30 bp, Artificial Sequence
  Synthetic oligonucleotide
agggttcgggcgcgtatagtatataggcca

SEQ ID NO: 82630 - DNA, 30 bp, Artificial Sequence
  Synthetic oligonucleotide
caaacaggaagcattaacaaccaacggcca

SEQ ID NO: 82631 - DNA, 30 bp, Artificial Sequence
  Synthetic oligonucleotide
ggacaaggatgctgccatcctgaggggcca

SEQ ID NO: 82632 - DNA, 30 bp, Artificial Sequence
  Synthetic oligonucleotide
gcctctgacagcgtagttgaagggtggcca

SEQ ID NO: 82633 - DNA, 30 bp, Artificial Sequence
  Synthetic oligonucleotide
aggaacccccgactcaggtggtcgatgcca

SEQ ID NO: 82634 - DNA, 30 bp, Artificial Sequence
  Synthetic oligonucleotide
tcggtctgttgaagggatggaagtatgcca

SEQ ID NO: 82635 - DNA, 30 bp, Artificial Sequence
  Synthetic oligonucleotide
aagatacaggtgtcggtttggctactgcca

SEQ ID NO: 82636 - DNA, 30 bp, Artificial Sequence
  Synthetic oligonucleotide
gtgggctgggtagtccaccatgaggtgcca

SEQ ID NO: 82637 - DNA, 30 bp, Artificial Sequence
  Synthetic oligonucleotide
tcctaaattcattggcggtctggggtgcca

SEQ ID NO: 82638 - DNA, 30 bp, Artificial Sequence
  Synthetic oligonucleotide
gtacgtagggtatactagcaagttgtgcca

SEQ ID NO: 82639 - DNA, 30 bp, Artificial Sequence
  Synthetic oligonucleotide
ggccaaaacctgggatgttcagcgttgcca

SEQ ID NO: 82640 - DNA, 30 bp, Artificial Sequence
  Synthetic oligonucleotide
acgcgagacgaacgctgtagtcctttgcca

SEQ ID NO: 82641 - DNA, 30 bp, Artificial Sequence
  Synthetic oligonucleotide
ggtgagtcagtgacgaacgagggcaatcca

SEQ ID NO: 82642 - DNA, 30 bp, Artificial Sequence
  Synthetic oligonucleotide
gggtcgtagttaaatccaaggattaatcca

SEQ ID NO: 82643 - DNA, 30 bp, Artificial Sequence
  Synthetic oligonucleotide
aattggaaaacatattcgtctcgagatcca

SEQ ID NO: 82644 - DNA, 30 bp, Artificial Sequence
  Synthetic oligonucleotide
ggtcgcacacagaggaaagcccaggatcca

SEQ ID NO: 82645 - DNA, 30 bp, Artificial Sequence
  Synthetic oligonucleotide
gtcgtacaagctataggcgaatgggatcca

SEQ ID NO: 82646 - DNA, 30 bp, Artificial Sequence
  Synthetic oligonucleotide
gcctacctgagtaatgggacaatatatcca

SEQ ID NO: 82647 - DNA, 30 bp, Artificial Sequence
  Synthetic oligonucleotide
gatcaccactcaccggacctgaactatcca

SEQ ID NO: 82648 - DNA, 30 bp, Artificial Sequence
  Synthetic oligonucleotide
tcgtgtagcggcgtcggagtacagtatcca

SEQ ID NO: 82649 - DNA, 30 bp, Artificial Sequence
  Synthetic oligonucleotide
agcacatacataaaggtagaatagtatcca

SEQ ID NO: 82650 - DNA, 30 bp, Artificial Sequence
  Synthetic oligonucleotide
aggactgcagaatttaaatttagcactcca

SEQ ID NO: 82651 - DNA, 30 bp, Artificial Sequence
  Synthetic oligonucleotide
aatgggctggcaccaagctagtgctctcca

SEQ ID NO: 82652 - DNA, 30 bp, Artificial Sequence
  Synthetic oligonucleotide
tacagagatgtacaggtttgggacgttcca

SEQ ID NO: 82653 - DNA, 30 bp, Artificial Sequence
  Synthetic oligonucleotide
aagctcaccctgaccaaaaggcatgttcca

SEQ ID NO: 82654 - DNA, 30 bp, Artificial Sequence
  Synthetic oligonucleotide
gtttcaaatactagaactctccttaaagca

SEQ ID NO: 82655 - DNA, 30 bp, Artificial Sequence
  Synthetic oligonucleotide
ataggcttacagccactagcgagacaagca

SEQ ID NO: 82656 - DNA, 30 bp, Artificial Sequence
  Synthetic oligonucleotide
cgattgccagggcgtacacacatccaagca

SEQ ID NO: 82657 - DNA, 30 bp, Artificial Sequence
  Synthetic oligonucleotide
acagggtctaaggaatgcacagctcaagca

SEQ ID NO: 82658 - DNA, 30 bp, Artificial Sequence
  Synthetic oligonucleotide
gacaagctccatcaccgccactaggaagca

SEQ ID NO: 82659 - DNA, 30 bp, Artificial Sequence
  Synthetic oligonucleotide
ctccacactggagggtgtcattaggaagca

SEQ ID NO: 82660 - DNA, 30 bp, Artificial Sequence
  Synthetic oligonucleotide
cgccgtgaatctgtcgactggattgaagca

SEQ ID NO: 82661 - DNA, 30 bp, Artificial Sequence
  Synthetic oligonucleotide
ggcggtatgataaattagaagatgtaagca

SEQ ID NO: 82662 - DNA, 30 bp, Artificial Sequence
  Synthetic oligonucleotide
agccagctcgcaggggcgggagtttaagca

SEQ ID NO: 82663 - DNA, 30 bp, Artificial Sequence
  Synthetic oligonucleotide
gtaagcctctagaatccggaaagaccagca

SEQ ID NO: 82664 - DNA, 30 bp, Artificial Sequence
  Synthetic oligonucleotide
cagccctgcgcaaaggtgctcatcccagca

SEQ ID NO: 82665 - DNA, 30 bp, Artificial Sequence
  Synthetic oligonucleotide
acgggtaaaacaacatgagcgggtccagca

SEQ ID NO: 82666 - DNA, 30 bp, Artificial Sequence
  Synthetic oligonucleotide
agacaggtgcgggatcagtatacctcagca

SEQ ID NO: 82667 - DNA, 30 bp, Artificial Sequence
  Synthetic oligonucleotide
ctctgttcagtcgtaaaattgggctcagca

SEQ ID NO: 82668 - DNA, 30 bp, Artificial Sequence
  Synthetic oligonucleotide
ggggccgggtgcctacatacctaaagagca

SEQ ID NO: 82669 - DNA, 40 bp, Artificial Sequence
  Synthetic oligonucleotide
cctctggaaatcggtcgacccatttcctttttcgagagca

SEQ ID NO: 82670 - DNA, 30 bp, Artificial Sequence
  Synthetic oligonucleotide
tatcccggtgatacctcacggaaaggagca

SEQ ID NO: 82671 - DNA, 30 bp, Artificial Sequence
  Synthetic oligonucleotide
cgataaaacgtacggtgactacaaggagca

SEQ ID NO: 82672 - DNA, 30 bp, Artificial Sequence
  Synthetic oligonucleotide
tagaactgagttgatgtccggaacggagca

SEQ ID NO: 82673 - DNA, 30 bp, Artificial Sequence
  Synthetic oligonucleotide
ataaccgctgcagccggtaaagggggagca

SEQ ID NO: 82674 - DNA, 30 bp, Artificial Sequence
  Synthetic oligonucleotide
tcggtgtgaattagggccttcggtggagca

SEQ ID NO: 82675 - DNA, 30 bp, Artificial Sequence
  Synthetic oligonucleotide
gtgcaacaagtctcgtatatggaatgagca

SEQ ID NO: 82676 - DNA, 30 bp, Artificial Sequence
  Synthetic oligonucleotide
gacgagttacagcagccatcacggtgagca

SEQ ID NO: 82677 - DNA, 30 bp, Artificial Sequence
  Synthetic oligonucleotide
aacgaccacgcgcaatggagccggtgagca

SEQ ID NO: 82678 - DNA, 30 bp, Artificial Sequence
  Synthetic oligonucleotide
gtcgatacaaggagctaccaatcttgagca

SEQ ID NO: 82679 - DNA, 30 bp, Artificial Sequence
  Synthetic oligonucleotide
gcaggagtgcactaattttgtaacatagca

SEQ ID NO: 82680 - DNA, 30 bp, Artificial Sequence
  Synthetic oligonucleotide
gtaacctcttctggaacgtaagggatagca

SEQ ID NO: 82681 - DNA, 30 bp, Artificial Sequence
  Synthetic oligonucleotide
agttgtcacgtgagaggggtatgcctagca

SEQ ID NO: 82682 - DNA, 30 bp, Artificial Sequence
  Synthetic oligonucleotide
ggataacacatcctgttggaaccgctagca

SEQ ID NO: 82683 - DNA, 30 bp, Artificial Sequence
  Synthetic oligonucleotide
ccgcggagtaaaaagatcgtggctctagca

SEQ ID NO: 82684 - DNA, 30 bp, Artificial Sequence
  Synthetic oligonucleotide
tagacatctacgcgttcctcatgggtagca

SEQ ID NO: 82685 - DNA, 30 bp, Artificial Sequence
  Synthetic oligonucleotide
aacatacgcgaggatctccaaatcttagca

SEQ ID NO: 82686 - DNA, 30 bp, Artificial Sequence
  Synthetic oligonucleotide
tagatacgttatctgcgtgcgtctttagca

SEQ ID NO: 82687 - DNA, 30 bp, Artificial Sequence
  Synthetic oligonucleotide
gacaggcagttatagatgagatgtttagca

SEQ ID NO: 82688 - DNA, 30 bp, Artificial Sequence
  Synthetic oligonucleotide
acagaggtcacagaaccgattcttttagca

SEQ ID NO: 82689 - DNA, 30 bp, Artificial Sequence
  Synthetic oligonucleotide
ttcgaataaaccgtatgacaggttaacgca

SEQ ID NO: 82690 - DNA, 30 bp, Artificial Sequence
  Synthetic oligonucleotide
gttgtgagggtacggaagagagaacacgca

SEQ ID NO: 82691 - DNA, 30 bp, Artificial Sequence
  Synthetic oligonucleotide
gatcctgacgaacgtgttggcggacacgca

SEQ ID NO: 82692 - DNA, 30 bp, Artificial Sequence
  Synthetic oligonucleotide
acactccaagttacggtatcgtggcacgca

SEQ ID NO: 82693 - DNA, 30 bp, Artificial Sequence
  Synthetic oligonucleotide
cacaccaaggggtagggtcgtctgcacgca

SEQ ID NO: 82694 - DNA, 30 bp, Artificial Sequence
  Synthetic oligonucleotide
aggattcggtgccgatgcgacgtgcccgca

SEQ ID NO: 82695 - DNA, 30 bp, Artificial Sequence
  Synthetic oligonucleotide
gcaagatcggagtcataaacacgtcccgca

SEQ ID NO: 82696 - DNA, 30 bp, Artificial Sequence
  Synthetic oligonucleotide
tgccaggattggtcataggattacgccgca

SEQ ID NO: 82697 - DNA, 30 bp, Artificial Sequence
  Synthetic oligonucleotide
ttacgaaccccaggacataaatctgccgca

SEQ ID NO: 82698 - DNA, 30 bp, Artificial Sequence
  Synthetic oligonucleotide
tcggacaagcgtctcgtgtagcacagcgca

SEQ ID NO: 82699 - DNA, 30 bp, Artificial Sequence
  Synthetic oligonucleotide
tgtgtaagccacgaggtaggggggagcgca

SEQ ID NO: 82700 - DNA, 30 bp, Artificial Sequence
  Synthetic oligonucleotide
cagaattaatgtctcagaccaacacgcgca

SEQ ID NO: 82701 - DNA, 30 bp, Artificial Sequence
  Synthetic oligonucleotide
gtgttattgaatccacatgcgagccgcgca

SEQ ID NO: 82702 - DNA, 30 bp, Artificial Sequence
  Synthetic oligonucleotide
gtcgcaggggaggcacggggaaatcgcgca

SEQ ID NO: 82703 - DNA, 30 bp, Artificial Sequence
  Synthetic oligonucleotide
tggtgtttgaccaccgtataaattcgcgca

SEQ ID NO: 82704 - DNA, 30 bp, Artificial Sequence
  Synthetic oligonucleotide
gggaactgaattgtaacaagataaggcgca

SEQ ID NO: 82705 - DNA, 30 bp, Artificial Sequence
  Synthetic oligonucleotide
acgatccagtaggccggattgatctgcgca

SEQ ID NO: 82706 - DNA, 30 bp, Artificial Sequence
  Synthetic oligonucleotide
attgcggaagggcctcttacgaagtgcgca

SEQ ID NO: 82707 - DNA, 30 bp, Artificial Sequence
  Synthetic oligonucleotide
cgtgatggtaatgaggataggatttgcgca

SEQ ID NO: 82708 - DNA, 30 bp, Artificial Sequence
  Synthetic oligonucleotide
agagtgaaaggtgcaaagcatcaaatcgca

SEQ ID NO: 82709 - DNA, 30 bp, Artificial Sequence
  Synthetic oligonucleotide
tgtaagaggaagggtacattaccaatcgca

SEQ ID NO: 82710 - DNA, 30 bp, Artificial Sequence
  Synthetic oligonucleotide
agttgaacggctgttgggacctcgctcgca

SEQ ID NO: 82711 - DNA, 30 bp, Artificial Sequence
  Synthetic oligonucleotide
tgtaagcattacattctcacgaggctcgca

SEQ ID NO: 82712 - DNA, 30 bp, Artificial Sequence
  Synthetic oligonucleotide
gattggccgatgaaatctcctatgctcgca

SEQ ID NO: 82713 - DNA, 30 bp, Artificial Sequence
  Synthetic oligonucleotide
acctctaacatacgtggtagacttctcgca

SEQ ID NO: 82714 - DNA, 30 bp, Artificial Sequence
  Synthetic oligonucleotide
catgggcactcagtcaattacggggtcgca

SEQ ID NO: 82715 - DNA, 30 bp, Artificial Sequence
  Synthetic oligonucleotide
tgagccgaggacaatcccacggccaaggca

SEQ ID NO: 82716 - DNA, 30 bp, Artificial Sequence
  Synthetic oligonucleotide
agatcggagtagcagccatccctcaaggca

SEQ ID NO: 82717 - DNA, 30 bp, Artificial Sequence
  Synthetic oligonucleotide
attggtcggggtcaggaatacagtaaggca

SEQ ID NO: 82718 - DNA, 30 bp, Artificial Sequence
  Synthetic oligonucleotide
acactaagctcacgaaggccgggtaaggca

SEQ ID NO: 82719 - DNA, 31 bp, Artificial Sequence
  Synthetic oligonucleotide
atttgcacatatcaagctataaccccaggca

SEQ ID NO: 82720 - DNA, 30 bp, Artificial Sequence
  Synthetic oligonucleotide
agaagccatggcctcggaatacgtcaggca

SEQ ID NO: 82721 - DNA, 30 bp, Artificial Sequence
  Synthetic oligonucleotide
aaatgtgcactgggaagcactgtggaggca

SEQ ID NO: 82722 - DNA, 30 bp, Artificial Sequence
  Synthetic oligonucleotide
tcagctgaaagatgtagagataatgaggca

SEQ ID NO: 82723 - DNA, 30 bp, Artificial Sequence
  Synthetic oligonucleotide
gttcgcgtaggaccttgaaccgaataggca

SEQ ID NO: 82724 - DNA, 30 bp, Artificial Sequence
  Synthetic oligonucleotide
ccgatgcgtaagtgggattcacgataggca

SEQ ID NO: 82725 - DNA, 30 bp, Artificial Sequence
  Synthetic oligonucleotide
atgcgcaatgtgaaatatggcggataggca

SEQ ID NO: 82726 - DNA, 30 bp, Artificial Sequence
  Synthetic oligonucleotide
cgaataacattgtttctggactggtaggca

SEQ ID NO: 82727 - DNA, 30 bp, Artificial Sequence
  Synthetic oligonucleotide
ccaacgggtgggtaggtggtctgtacggca

SEQ ID NO: 82728 - DNA, 30 bp, Artificial Sequence
  Synthetic oligonucleotide
agtttgaatgtcaggaagatagaaccggca

SEQ ID NO: 82729 - DNA, 30 bp, Artificial Sequence
  Synthetic oligonucleotide
gcgacttcgtagtcctgagcatgagcggca

SEQ ID NO: 82730 - DNA, 30 bp, Artificial Sequence
  Synthetic oligonucleotide
gggaagatcgcgtaaaaccgaaacgcggca

SEQ ID NO: 82731 - DNA, 30 bp, Artificial Sequence
  Synthetic oligonucleotide
ccaactcgatgatctacccaactcgcggca

SEQ ID NO: 82732 - DNA, 30 bp, Artificial Sequence
  Synthetic oligonucleotide
agatgctagcagtataggacaaactcggca

SEQ ID NO: 82733 - DNA, 30 bp, Artificial Sequence
  Synthetic oligonucleotide
gtacaactaatggttctcagagcctcggca

SEQ ID NO: 82734 - DNA, 30 bp, Artificial Sequence
  Synthetic oligonucleotide
aggctgaatggtctaggtatcatgtcggca

SEQ ID NO: 82735 - DNA, 30 bp, Artificial Sequence
  Synthetic oligonucleotide
aaaagcccatgaaagaggaatataagggca

SEQ ID NO: 82736 - DNA, 30 bp, Artificial Sequence
  Synthetic oligonucleotide
ttatgcgggagcgactaaaggcggcgggca

SEQ ID NO: 82737 - DNA, 30 bp, Artificial Sequence
  Synthetic oligonucleotide
acaagctgtgactggaccatatgtcgggca

SEQ ID NO: 82738 - DNA, 30 bp, Artificial Sequence
  Synthetic oligonucleotide
agacatcgccgattccaaatgcacggggca

SEQ ID NO: 82739 - DNA, 30 bp, Artificial Sequence
  Synthetic oligonucleotide
ggtacattcgcacagacagttggcggggca

SEQ ID NO: 82740 - DNA, 30 bp, Artificial Sequence
  Synthetic oligonucleotide
cgttccttcaatacacattaccactgggca

SEQ ID NO: 82741 - DNA, 30 bp, Artificial Sequence
  Synthetic oligonucleotide
tggttaatagtctcgtcattagccatggca

SEQ ID NO: 82742 - DNA, 30 bp, Artificial Sequence
  Synthetic oligonucleotide
gctagtacttagtccaggtagcaagtggca

SEQ ID NO: 82743 - DNA, 30 bp, Artificial Sequence
  Synthetic oligonucleotide
tacgggctgtcggaagaggaaattgtggca

SEQ ID NO: 82744 - DNA, 30 bp, Artificial Sequence
  Synthetic oligonucleotide
agtcagtcttatagagggctgctgttggca

SEQ ID NO: 82745 - DNA, 30 bp, Artificial Sequence
  Synthetic oligonucleotide
cccagcagtacgccgagagacaggaatgca

SEQ ID NO: 82746 - DNA, 30 bp, Artificial Sequence
  Synthetic oligonucleotide
aaggaaatgccacgggccaagaataatgca

SEQ ID NO: 82747 - DNA, 30 bp, Artificial Sequence
  Synthetic oligonucleotide
agacagcacctcccaacaggctgcgatgca

SEQ ID NO: 82748 - DNA, 30 bp, Artificial Sequence
  Synthetic oligonucleotide
acattcgcaagaaatcgccgtggtgatgca

SEQ ID NO: 82749 - DNA, 31 bp, Artificial Sequence
  Synthetic oligonucleotide
cagagctcctgagatacgatattggtatgca

SEQ ID NO: 82750 - DNA, 30 bp, Artificial Sequence
  Synthetic oligonucleotide
actggcaaaggtctactctacgacactgca

SEQ ID NO: 82751 - DNA, 30 bp, Artificial Sequence
  Synthetic oligonucleotide
agactattcacgcaaaggggggtcactgca

SEQ ID NO: 82752 - DNA, 30 bp, Artificial Sequence
  Synthetic oligonucleotide
cggacctacggctggtccagcgcgactgca

SEQ ID NO: 82753 - DNA, 30 bp, Artificial Sequence
  Synthetic oligonucleotide
ttgaggggcgttgataagggcgtcgctgca

SEQ ID NO: 82754 - DNA, 30 bp, Artificial Sequence
  Synthetic oligonucleotide
acggttaggtcagttacagttttcgctgca

SEQ ID NO: 82755 - DNA, 30 bp, Artificial Sequence
  Synthetic oligonucleotide
agaggcattactgcgttttttccggctgca

SEQ ID NO: 82756 - DNA, 30 bp, Artificial Sequence
  Synthetic oligonucleotide
aaaagagacatacgagaagtgaggagtgca

SEQ ID NO: 82757 - DNA, 30 bp, Artificial Sequence
  Synthetic oligonucleotide
ccgagtcctgggatctcaggggggagtgca

SEQ ID NO: 82758 - DNA, 30 bp, Artificial Sequence
  Synthetic oligonucleotide
taacttcattaagaggataccaggcgtgca

SEQ ID NO: 82759 - DNA, 30 bp, Artificial Sequence
  Synthetic oligonucleotide
ataccccaaccgtgattgcgactgcgtgca

SEQ ID NO: 82760 - DNA, 30 bp, Artificial Sequence
  Synthetic oligonucleotide
tcaatatatgggacggcattgtttcgtgca

SEQ ID NO: 82761 - DNA, 30 bp, Artificial Sequence
  Synthetic oligonucleotide
ttcctgcacagtcggtgagtgtcaggtgca

SEQ ID NO: 82762 - DNA, 30 bp, Artificial Sequence
  Synthetic oligonucleotide
ggtaagaagagacggaattgtatgggtgca

SEQ ID NO: 82763 - DNA, 30 bp, Artificial Sequence
  Synthetic oligonucleotide
tccgtgccaattaggatacattctggtgca

SEQ ID NO: 82764 - DNA, 30 bp, Artificial Sequence
  Synthetic oligonucleotide
tgtcagagtatgaggccgacgacatgtgca

SEQ ID NO: 82765 - DNA, 30 bp, Artificial Sequence
  Synthetic oligonucleotide
ggcagggcgcctaacacagttcaaattgca

SEQ ID NO: 82766 - DNA, 30 bp, Artificial Sequence
  Synthetic oligonucleotide
agagacgggacgaccagaatatcaattgca

SEQ ID NO: 82767 - DNA, 30 bp, Artificial Sequence
  Synthetic oligonucleotide
ctatgcaggctaccagaagtctaacttgca

SEQ ID NO: 82768 - DNA, 30 bp, Artificial Sequence
  Synthetic oligonucleotide
aggtgttgagaacttggaacgggacttgca

SEQ ID NO: 82769 - DNA, 30 bp, Artificial Sequence
  Synthetic oligonucleotide
aggtgcacaaaaagccatcgggatcttgca

SEQ ID NO: 82770 - DNA, 30 bp, Artificial Sequence
  Synthetic oligonucleotide
tcggagtcctcgtacatttggtatcttgca

SEQ ID NO: 82771 - DNA, 30 bp, Artificial Sequence
  Synthetic oligonucleotide
agggagccagcggcccactacgaagttgca

SEQ ID NO: 82772 - DNA, 30 bp, Artificial Sequence
  Synthetic oligonucleotide
tgtcactttaggcatgaggacaacgttgca

SEQ ID NO: 82773 - DNA, 30 bp, Artificial Sequence
  Synthetic oligonucleotide
aggtgtgttgatatccaagacatggttgca

SEQ ID NO: 82774 - DNA, 30 bp, Artificial Sequence
  Synthetic oligonucleotide
gggctccacatatgtcctgatagtgttgca

SEQ ID NO: 82775 - DNA, 30 bp, Artificial Sequence
  Synthetic oligonucleotide
gcgactcatgtcacggaactagtatttgca

SEQ ID NO: 82776 - DNA, 30 bp, Artificial Sequence
  Synthetic oligonucleotide
agccaggcctattttcaataactaaaatca

SEQ ID NO: 82777 - DNA, 30 bp, Artificial Sequence
  Synthetic oligonucleotide
gaacataaggtcggatcttagtctaaatca

SEQ ID NO: 82778 - DNA, 30 bp, Artificial Sequence
  Synthetic oligonucleotide
gttacggactccatcgaaggcgttaaatca

SEQ ID NO: 82779 - DNA, 30 bp, Artificial Sequence
  Synthetic oligonucleotide
gacctactcccgaaccaggggcaccaatca

SEQ ID NO: 82780 - DNA, 30 bp, Artificial Sequence
  Synthetic oligonucleotide
tcgaaatatagagtggaggtggcagaatca

SEQ ID NO: 82781 - DNA, 30 bp, Artificial Sequence
  Synthetic oligonucleotide
cgtttcacgtcagggtacgatcgggaatca

SEQ ID NO: 82782 - DNA, 30 bp, Artificial Sequence
  Synthetic oligonucleotide
tacacacaccaaacagatagtgcataatca

SEQ ID NO: 82783 - DNA, 30 bp, Artificial Sequence
  Synthetic oligonucleotide
gatccgtacgggacattaataataacatca

SEQ ID NO: 82784 - DNA, 30 bp, Artificial Sequence
  Synthetic oligonucleotide
cagccgaaagatacctacacgagaccatca

SEQ ID NO: 82785 - DNA, 30 bp, Artificial Sequence
  Synthetic oligonucleotide
gtgacttaggctctatcggaaaaagcatca

SEQ ID NO: 82786 - DNA, 30 bp, Artificial Sequence
  Synthetic oligonucleotide
accggtatcgcggagtgcgtcacagcatca

SEQ ID NO: 82787 - DNA, 30 bp, Artificial Sequence
  Synthetic oligonucleotide
cacggccgtaaagctggatggcacgcatca

SEQ ID NO: 82788 - DNA, 30 bp, Artificial Sequence
  Synthetic oligonucleotide
tgatcacgacttaaaattagattggcatca

SEQ ID NO: 82789 - DNA, 30 bp, Artificial Sequence
  Synthetic oligonucleotide
gcgttgtcagtgcgtcgtgtaatttcatca

SEQ ID NO: 82790 - DNA, 30 bp, Artificial Sequence
  Synthetic oligonucleotide
ggcccagtctcggtaatatgtcgaagatca

SEQ ID NO: 82791 - DNA, 30 bp, Artificial Sequence
  Synthetic oligonucleotide
gatggcccatccccttcatcaaccagatca

SEQ ID NO: 82792 - DNA, 30 bp, Artificial Sequence
  Synthetic oligonucleotide
catattggtgagttaccacgagagagatca

SEQ ID NO: 82793 - DNA, 30 bp, Artificial Sequence
  Synthetic oligonucleotide
cgaatcagctaatggtggggattacgatca

SEQ ID NO: 82794 - DNA, 30 bp, Artificial Sequence
  Synthetic oligonucleotide
gggttgccatagagacccagtcagcgatca

SEQ ID NO: 82795 - DNA, 30 bp, Artificial Sequence
  Synthetic oligonucleotide
cgcccataagaaggcaggggtcaaggatca

SEQ ID NO: 82796 - DNA, 30 bp, Artificial Sequence
  Synthetic oligonucleotide
ctaagctttatactatatgagtgaggatca

SEQ ID NO: 82797 - DNA, 30 bp, Artificial Sequence
  Synthetic oligonucleotide
gagcgtagtgtattgagaaattgcggatca

SEQ ID NO: 82798 - DNA, 30 bp, Artificial Sequence
  Synthetic oligonucleotide
tccgagcttataatacccaccgaatgatca

SEQ ID NO: 82799 - DNA, 30 bp, Artificial Sequence
  Synthetic oligonucleotide
aaagaaggagcggtgtgagtgtgatgatca

SEQ ID NO: 82800 - DNA, 30 bp, Artificial Sequence
  Synthetic oligonucleotide
cttaaagatcaatcagcttgcgccatatca

SEQ ID NO: 82801 - DNA, 30 bp, Artificial Sequence
  Synthetic oligonucleotide
tgggcgtacaagtgcgtaagatccatatca

SEQ ID NO: 82802 - DNA, 30 bp, Artificial Sequence
  Synthetic oligonucleotide
tatcgccgattaagacctccctatatatca

SEQ ID NO: 82803 - DNA, 30 bp, Artificial Sequence
  Synthetic oligonucleotide
ttgaatcgttacaacccagtcgacctatca

SEQ ID NO: 82804 - DNA, 30 bp, Artificial Sequence
  Synthetic oligonucleotide
taacagcggttggtcagagaacagctatca

SEQ ID NO: 82805 - DNA, 30 bp, Artificial Sequence
  Synthetic oligonucleotide
taccacaggattaacagtcaacggctatca

SEQ ID NO: 82806 - DNA, 30 bp, Artificial Sequence
  Synthetic oligonucleotide
acaaggtacattagcacagggtggctatca

SEQ ID NO: 82807 - DNA, 30 bp, Artificial Sequence
  Synthetic oligonucleotide
cggaaagtgctaggcctctcacttctatca

SEQ ID NO: 82808 - DNA, 30 bp, Artificial Sequence
  Synthetic oligonucleotide
acggcagttagccagaatgaggcggtatca

SEQ ID NO: 82809 - DNA, 30 bp, Artificial Sequence
  Synthetic oligonucleotide
gcacgctacagtgtagcagtcttggtatca

SEQ ID NO: 82810 - DNA, 30 bp, Artificial Sequence
  Synthetic oligonucleotide
caacaagtttgggtgaaggtacacttatca

SEQ ID NO: 82811 - DNA, 30 bp, Artificial Sequence
  Synthetic oligonucleotide
aggaattaacacaagaattcctatttatca

SEQ ID NO: 82812 - DNA, 30 bp, Artificial Sequence
  Synthetic oligonucleotide
atcgaattgggttaagcgtggaataactca

SEQ ID NO: 82813 - DNA, 30 bp, Artificial Sequence
  Synthetic oligonucleotide
gaactgccacagactagaacggttaactca

SEQ ID NO: 82814 - DNA, 30 bp, Artificial Sequence
  Synthetic oligonucleotide
gcatacgctacaacgagtgggcgccactca

SEQ ID NO: 82815 - DNA, 30 bp, Artificial Sequence
  Synthetic oligonucleotide
aagcaaaggaatggtcacaaagatcactca

SEQ ID NO: 82816 - DNA, 30 bp, Artificial Sequence
  Synthetic oligonucleotide
gttacggcagaaagaggccatcgcgactca

SEQ ID NO: 82817 - DNA, 30 bp, Artificial Sequence
  Synthetic oligonucleotide
aaagacagatatcactccccctgctactca

SEQ ID NO: 82818 - DNA, 30 bp, Artificial Sequence
  Synthetic oligonucleotide
taggaaatggatcacaggaagccgacctca

SEQ ID NO: 82819 - DNA, 30 bp, Artificial Sequence
  Synthetic oligonucleotide
gctccatgagtaacgtaaacttcaagctca

SEQ ID NO: 82820 - DNA, 30 bp, Artificial Sequence
  Synthetic oligonucleotide
cgaaaccgcataaagtgagtattcagctca

SEQ ID NO: 82821 - DNA, 29 bp, Artificial Sequence
  Synthetic oligonucleotide
gcaagtgcggtagcacgatgagacgctca

SEQ ID NO: 82822 - DNA, 30 bp, Artificial Sequence
  Synthetic oligonucleotide
atttaccataaggaggaccgaaagcgctca

SEQ ID NO: 82823 - DNA, 30 bp, Artificial Sequence
  Synthetic oligonucleotide
ccagactaagtcagctaaaacgagcgctca

SEQ ID NO: 82824 - DNA, 30 bp, Artificial Sequence
  Synthetic oligonucleotide
ggaatgaatacgtcgctaaaccgaggctca

SEQ ID NO: 82825 - DNA, 30 bp, Artificial Sequence
  Synthetic oligonucleotide
catgcactgattcgtgcgagttcgggctca

SEQ ID NO: 82826 - DNA, 30 bp, Artificial Sequence
  Synthetic oligonucleotide
agctcaaggcctcaaaccttaggactctca

SEQ ID NO: 82827 - DNA, 30 bp, Artificial Sequence
  Synthetic oligonucleotide
gtacaaactggatcctggaaacccgtctca

SEQ ID NO: 82828 - DNA, 30 bp, Artificial Sequence
  Synthetic oligonucleotide
ccggccgatcggacggcacctcgtgtctca

SEQ ID NO: 82829 - DNA, 30 bp, Artificial Sequence
  Synthetic oligonucleotide
atgaccggggatttccacaacataaagtca

SEQ ID NO: 82830 - DNA, 30 bp, Artificial Sequence
  Synthetic oligonucleotide
ctatttgcaggacacaactcgaaccagtca

SEQ ID NO: 82831 - DNA, 30 bp, Artificial Sequence
  Synthetic oligonucleotide
caccctgaaaggggaggcggcctccagtca

SEQ ID NO: 82832 - DNA, 30 bp, Artificial Sequence
  Synthetic oligonucleotide
agatgcccttggccggtcatcaacgagtca

SEQ ID NO: 82833 - DNA, 30 bp, Artificial Sequence
  Synthetic oligonucleotide
tgcagtacgagaacaagaacactggagtca

SEQ ID NO: 82834 - DNA, 30 bp, Artificial Sequence
  Synthetic oligonucleotide
gatggtgccccacctagctcaattgagtca

SEQ ID NO: 82835 - DNA, 30 bp, Artificial Sequence
  Synthetic oligonucleotide
gttaggggaggtaccgatcggattgagtca

SEQ ID NO: 82836 - DNA, 30 bp, Artificial Sequence
  Synthetic oligonucleotide
ggcacatcccggggaagtagaaaatagtca

SEQ ID NO: 82837 - DNA, 30 bp, Artificial Sequence
  Synthetic oligonucleotide
cacaacctataattacaatgagtttagtca

SEQ ID NO: 82838 - DNA, 30 bp, Artificial Sequence
  Synthetic oligonucleotide
acatactccccggtgaggcacgtcacgtca

SEQ ID NO: 82839 - DNA, 30 bp, Artificial Sequence
  Synthetic oligonucleotide
tagaggtggcacgcgtggtagaggccgtca

SEQ ID NO: 82840 - DNA, 30 bp, Artificial Sequence
  Synthetic oligonucleotide
gaacttgaggtgggttccgtgatgccgtca

SEQ ID NO: 82841 - DNA, 29 bp, Artificial Sequence
  Synthetic oligonucleotide
ttaacaacccagatagcgacctagcgtca

SEQ ID NO: 82842 - DNA, 30 bp, Artificial Sequence
  Synthetic oligonucleotide
aacagaatgccaagctaaaaaatggcgtca

SEQ ID NO: 82843 - DNA, 30 bp, Artificial Sequence
  Synthetic oligonucleotide
taaacactaagtaacttgaatgttgcgtca

SEQ ID NO: 82844 - DNA, 30 bp, Artificial Sequence
  Synthetic oligonucleotide
aaaaaaggaagtccaagatacatgtcgtca

SEQ ID NO: 82845 - DNA, 30 bp, Artificial Sequence
  Synthetic oligonucleotide
gattactccgcctcgaaagcacaaaggtca

SEQ ID NO: 82846 - DNA, 30 bp, Artificial Sequence
  Synthetic oligonucleotide
acgtcccgagtcctaaataggcagaggtca

SEQ ID NO: 82847 - DNA, 30 bp, Artificial Sequence
  Synthetic oligonucleotide
caagcatagtatacgaggggcacgcggtca

SEQ ID NO: 82848 - DNA, 30 bp, Artificial Sequence
  Synthetic oligonucleotide
atagaccccgaaaccataaagaatcggtca

SEQ ID NO: 82849 - DNA, 30 bp, Artificial Sequence
  Synthetic oligonucleotide
cactaagtgaggttattttcaagggggtca

SEQ ID NO: 82850 - DNA, 30 bp, Artificial Sequence
  Synthetic oligonucleotide
tggacctgacgtccggggatcagttggtca

SEQ ID NO: 82851 - DNA, 30 bp, Artificial Sequence
  Synthetic oligonucleotide
taagatcatcgattagggacaggaatgtca

SEQ ID NO: 82852 - DNA, 30 bp, Artificial Sequence
  Synthetic oligonucleotide
cgctgacaccgagacggtagggagatgtca

SEQ ID NO: 82853 - DNA, 30 bp, Artificial Sequence
  Synthetic oligonucleotide
ccgtcgtgaacacaagtacttgcactgtca

SEQ ID NO: 82854 - DNA, 30 bp, Artificial Sequence
  Synthetic oligonucleotide
aggagttcacattaatctagggccgtgtca

SEQ ID NO: 82855 - DNA, 30 bp, Artificial Sequence
  Synthetic oligonucleotide
ttaaactctataccgcgatcccaggtgtca

SEQ ID NO: 82856 - DNA, 30 bp, Artificial Sequence
  Synthetic oligonucleotide
aacgcatcgggtatatatatagaattgtca

SEQ ID NO: 82857 - DNA, 30 bp, Artificial Sequence
  Synthetic oligonucleotide
cgcaaagtgtagtggacggatccgaattca

SEQ ID NO: 82858 - DNA, 30 bp, Artificial Sequence
  Synthetic oligonucleotide
cagacacgtgcagtactggagggacattca

SEQ ID NO: 82859 - DNA, 30 bp, Artificial Sequence
  Synthetic oligonucleotide
agcgtgacaatcacaggtagttcccattca

SEQ ID NO: 82860 - DNA, 30 bp, Artificial Sequence
  Synthetic oligonucleotide
gggtttgtgcgctatgtaaaaaaagattca

SEQ ID NO: 82861 - DNA, 30 bp, Artificial Sequence
  Synthetic oligonucleotide
aagagtacagagtaggcagtaaacgattca

SEQ ID NO: 82862 - DNA, 30 bp, Artificial Sequence
  Synthetic oligonucleotide
tgggcaatcttgggtaatgtggctgattca

SEQ ID NO: 82863 - DNA, 30 bp, Artificial Sequence
  Synthetic oligonucleotide
ggactaaggatgaacagctggagtacttca

SEQ ID NO: 82864 - DNA, 30 bp, Artificial Sequence
  Synthetic oligonucleotide
gctcacggtacgactatgagctcgccttca

SEQ ID NO: 82865 - DNA, 30 bp, Artificial Sequence
  Synthetic oligonucleotide
tcgataccgtgaggactgaggactccttca

SEQ ID NO: 82866 - DNA, 30 bp, Artificial Sequence
  Synthetic oligonucleotide
ggcaatatgagttgggtatgcctgtcttca

SEQ ID NO: 82867 - DNA, 30 bp, Artificial Sequence
  Synthetic oligonucleotide
ccggggcgagtagtataagtgagaagttca

SEQ ID NO: 82868 - DNA, 30 bp, Artificial Sequence
  Synthetic oligonucleotide
agaccggagttcctatactcgatccgttca

SEQ ID NO: 82869 - DNA, 30 bp, Artificial Sequence
  Synthetic oligonucleotide
tggggatatggtggctgtctatcgcgttca

SEQ ID NO: 82870 - DNA, 30 bp, Artificial Sequence
  Synthetic oligonucleotide
gcaaggagtgggccacatagtcattgttca

SEQ ID NO: 82871 - DNA, 30 bp, Artificial Sequence
  Synthetic oligonucleotide
caagccaagcgtatgagtatttgaatttca

SEQ ID NO: 82872 - DNA, 30 bp, Artificial Sequence
  Synthetic oligonucleotide
ctgctaactagctggcatcaagtcatttca

SEQ ID NO: 82873 - DNA, 30 bp, Artificial Sequence
  Synthetic oligonucleotide
aaacgtaaagctcgttatagtgaagtttca

SEQ ID NO: 82874 - DNA, 30 bp, Artificial Sequence
  Synthetic oligonucleotide
gtatgcaggagttaactcattatcaaaaga

SEQ ID NO: 82875 - DNA, 30 bp, Artificial Sequence
  Synthetic oligonucleotide
atacgcaaggggtccgcctcgacgaaaaga

SEQ ID NO: 82876 - DNA, 30 bp, Artificial Sequence
  Synthetic oligonucleotide
gcctaatgggtgcggatagtcggtaaaaga

SEQ ID NO: 82877 - DNA, 30 bp, Artificial Sequence
  Synthetic oligonucleotide
agcaagccagccctagcgctctgtaaaaga

SEQ ID NO: 82878 - DNA, 30 bp, Artificial Sequence
  Synthetic oligonucleotide
cctcctaactaagaggtgtaaatgcaaaga

SEQ ID NO: 82879 - DNA, 30 bp, Artificial Sequence
  Synthetic oligonucleotide
acgtcgagccagttcaaatagctagaaaga

SEQ ID NO: 82880 - DNA, 30 bp, Artificial Sequence
  Synthetic oligonucleotide
ctcaaaggcctcgaagacaatatcgaaaga

SEQ ID NO: 82881 - DNA, 30 bp, Artificial Sequence
  Synthetic oligonucleotide
aagaacgatatcaccgctcgtccggaaaga

SEQ ID NO: 82882 - DNA, 30 bp, Artificial Sequence
  Synthetic oligonucleotide
cagggcttactttggcctctcgatgaaaga

SEQ ID NO: 82883 - DNA, 30 bp, Artificial Sequence
  Synthetic oligonucleotide
attgtcaatacagcgggggggattgaaaga

SEQ ID NO: 82884 - DNA, 30 bp, Artificial Sequence
  Synthetic oligonucleotide
gcactacgcccggaattgaaagttgaaaga

SEQ ID NO: 82885 - DNA, 30 bp, Artificial Sequence
  Synthetic oligonucleotide
acgtactccggggtttcatttacgtaaaga

SEQ ID NO: 82886 - DNA, 30 bp, Artificial Sequence
  Synthetic oligonucleotide
tccaggctccgacagcaatgaggttaaaga

SEQ ID NO: 82887 - DNA, 30 bp, Artificial Sequence
  Synthetic oligonucleotide
ggatgttgaccgaccggggctagtacaaga

SEQ ID NO: 82888 - DNA, 30 bp, Artificial Sequence
  Synthetic oligonucleotide
caggatatcctggatctttaccttacaaga

SEQ ID NO: 82889 - DNA, 30 bp, Artificial Sequence
  Synthetic oligonucleotide
gcacaagcggagccgacaccgaggccaaga

SEQ ID NO: 82890 - DNA, 30 bp, Artificial Sequence
  Synthetic oligonucleotide
gcacgtgggcaggtacgcaagattccaaga

SEQ ID NO: 82891 - DNA, 30 bp, Artificial Sequence
  Synthetic oligonucleotide
tagagacgtaccgtccggcggattccaaga

SEQ ID NO: 82892 - DNA, 30 bp, Artificial Sequence
  Synthetic oligonucleotide
agaggggaaagggaatacaggtacgcaaga

SEQ ID NO: 82893 - DNA, 30 bp, Artificial Sequence
  Synthetic oligonucleotide
gactaaaatagagagatatcctgggcaaga

SEQ ID NO: 82894 - DNA, 30 bp, Artificial Sequence
  Synthetic oligonucleotide
ctactatcaggggaagtactagtatcaaga

SEQ ID NO: 82895 - DNA, 30 bp, Artificial Sequence
  Synthetic oligonucleotide
gcatgcgtactctaaccaagggtgtcaaga

SEQ ID NO: 82896 - DNA, 30 bp, Artificial Sequence
  Synthetic oligonucleotide
aggctataatgatctgagactttgtcaaga

SEQ ID NO: 82897 - DNA, 30 bp, Artificial Sequence
  Synthetic oligonucleotide
gccacgccgctcgaattacggccttcaaga

SEQ ID NO: 82898 - DNA, 30 bp, Artificial Sequence
  Synthetic oligonucleotide
tcgatagagtaactggtaacgtaaagaaga

SEQ ID NO: 82899 - DNA, 30 bp, Artificial Sequence
  Synthetic oligonucleotide
gccggtagaatgtacagctgcccaagaaga

SEQ ID NO: 82900 - DNA, 30 bp, Artificial Sequence
  Synthetic oligonucleotide
cctaaaatcactttgcttaagatgagaaga

SEQ ID NO: 82901 - DNA, 30 bp, Artificial Sequence
  Synthetic oligonucleotide
cgctcagcgggataggagcattaacgaaga

SEQ ID NO: 82902 - DNA, 30 bp, Artificial Sequence
  Synthetic oligonucleotide
acatagggcaagtccacttctacccgaaga

SEQ ID NO: 82903 - DNA, 30 bp, Artificial Sequence
  Synthetic oligonucleotide
gacggtcgtcgaatctgaaccaaaggaaga

SEQ ID NO: 82904 - DNA, 30 bp, Artificial Sequence
  Synthetic oligonucleotide
agtcagcagagccatcattaagtaggaaga

SEQ ID NO: 82905 - DNA, 30 bp, Artificial Sequence
  Synthetic oligonucleotide
accgtacgatagaatcaagtatggggaaga

SEQ ID NO: 82906 - DNA, 30 bp, Artificial Sequence
  Synthetic oligonucleotide
agaacggtttttgcacagtggttgggaaga

SEQ ID NO: 82907 - DNA, 30 bp, Artificial Sequence
  Synthetic oligonucleotide
atcgcgccccacgggaagaggtctggaaga

SEQ ID NO: 82908 - DNA, 30 bp, Artificial Sequence
  Synthetic oligonucleotide
cagtgaaaaggaacaatggcatgtggaaga

SEQ ID NO: 82909 - DNA, 30 bp, Artificial Sequence
  Synthetic oligonucleotide
tgcagtggccactgtcgccaaacatgaaga

SEQ ID NO: 82910 - DNA, 30 bp, Artificial Sequence
  Synthetic oligonucleotide
cttctcctgggtaaggggatatcgtgaaga

SEQ ID NO: 82911 - DNA, 30 bp, Artificial Sequence
  Synthetic oligonucleotide
aaggctccactaacacggatatgttgaaga

SEQ ID NO: 82912 - DNA, 30 bp, Artificial Sequence
  Synthetic oligonucleotide
gctgcggctgaaacgtatgctatcataaga

SEQ ID NO: 82913 - DNA, 30 bp, Artificial Sequence
  Synthetic oligonucleotide
gcccggatgagctcataaggcaccgtaaga

SEQ ID NO: 82914 - DNA, 30 bp, Artificial Sequence
  Synthetic oligonucleotide
aagtgcgcagtgaccagtgatccattaaga

SEQ ID NO: 82915 - DNA, 30 bp, Artificial Sequence
  Synthetic oligonucleotide
actcatccaacgaccccccactgaaacaga

SEQ ID NO: 82916 - DNA, 30 bp, Artificial Sequence
  Synthetic oligonucleotide
caccacgtccaccggcatgtttacaacaga

SEQ ID NO: 82917 - DNA, 30 bp, Artificial Sequence
  Synthetic oligonucleotide
ctcgagaacctgcaatgtaggcttaacaga

SEQ ID NO: 82918 - DNA, 30 bp, Artificial Sequence
  Synthetic oligonucleotide
aggaaggtgcgaggggccacggtccacaga

SEQ ID NO: 82919 - DNA, 30 bp, Artificial Sequence
  Synthetic oligonucleotide
agatggtgaagggatgccaaatagcacaga

SEQ ID NO: 82920 - DNA, 30 bp, Artificial Sequence
  Synthetic oligonucleotide
acctgagggatatcaatgtttgggcacaga

SEQ ID NO: 82921 - DNA, 30 bp, Artificial Sequence
  Synthetic oligonucleotide
cacttgcccatatctttacacggtcacaga

SEQ ID NO: 82922 - DNA, 30 bp, Artificial Sequence
  Synthetic oligonucleotide
gcaagagttcagcggctactaattcacaga

SEQ ID NO: 82923 - DNA, 30 bp, Artificial Sequence
  Synthetic oligonucleotide
ctacgaatcaacacaaggcagcttgacaga

SEQ ID NO: 82924 - DNA, 30 bp, Artificial Sequence
  Synthetic oligonucleotide
caaactgtaatcatgggacccggctacaga

SEQ ID NO: 82925 - DNA, 30 bp, Artificial Sequence
  Synthetic oligonucleotide
acccgggaatccctaagcatagtctacaga

SEQ ID NO: 82926 - DNA, 30 bp, Artificial Sequence
  Synthetic oligonucleotide
gccaaaagtaacacttaacatagttacaga

SEQ ID NO: 82927 - DNA, 30 bp, Artificial Sequence
  Synthetic oligonucleotide
tagaggcgcctgcaatgagcggtttacaga

SEQ ID NO: 82928 - DNA, 30 bp, Artificial Sequence
  Synthetic oligonucleotide
tccgacctgaaaccataggaggaaaccaga

SEQ ID NO: 82929 - DNA, 30 bp, Artificial Sequence
  Synthetic oligonucleotide
gtgtcgaattttacagaattgcctaccaga

SEQ ID NO: 82930 - DNA, 30 bp, Artificial Sequence
  Synthetic oligonucleotide
aacgatgctcgacgtgaatcttcacccaga

SEQ ID NO: 82931 - DNA, 30 bp, Artificial Sequence
  Synthetic oligonucleotide
cagtgctcggcaatatgtttgtgacccaga

SEQ ID NO: 82932 - DNA, 30 bp, Artificial Sequence
  Synthetic oligonucleotide
gagtaccttaaaggcaatcattaagccaga

SEQ ID NO: 82933 - DNA, 30 bp, Artificial Sequence
  Synthetic oligonucleotide
gacgaatcggacaagtcattgtcagccaga

SEQ ID NO: 82934 - DNA, 30 bp, Artificial Sequence
  Synthetic oligonucleotide
gtatagagtatagtggatgaggatgccaga

SEQ ID NO: 82935 - DNA, 30 bp, Artificial Sequence
  Synthetic oligonucleotide
cgttagctaaatcggggtgtgacgtccaga

SEQ ID NO: 82936 - DNA, 30 bp, Artificial Sequence
  Synthetic oligonucleotide
aactggaccgatcgttcgtgccaaggcaga

SEQ ID NO: 82937 - DNA, 30 bp, Artificial Sequence
  Synthetic oligonucleotide
ttgtgatcttaccacgaaaaatcgggcaga

SEQ ID NO: 82938 - DNA, 30 bp, Artificial Sequence
  Synthetic oligonucleotide
agtggcgtcaccatgtgacctattggcaga

SEQ ID NO: 82939 - DNA, 30 bp, Artificial Sequence
  Synthetic oligonucleotide
acgcccttcctataccccaccacaatcaga

SEQ ID NO: 82940 - DNA, 30 bp, Artificial Sequence
  Synthetic oligonucleotide
agtcgagacatgagtgctatgcggatcaga

SEQ ID NO: 82941 - DNA, 30 bp, Artificial Sequence
  Synthetic oligonucleotide
tgtatgtccaaatgtagatgagtgatcaga

SEQ ID NO: 82942 - DNA, 30 bp, Artificial Sequence
  Synthetic oligonucleotide
ggggtgagacgtcttactggtccactcaga

SEQ ID NO: 82943 - DNA, 30 bp, Artificial Sequence
  Synthetic oligonucleotide
accataccagataacttaagccccgtcaga

SEQ ID NO: 82944 - DNA, 30 bp, Artificial Sequence
  Synthetic oligonucleotide
agaggagactttgctgcgcctcgcgtcaga

SEQ ID NO: 82945 - DNA, 30 bp, Artificial Sequence
  Synthetic oligonucleotide
gtgggttaaataaagagaacaaaattcaga

SEQ ID NO: 82946 - DNA, 30 bp, Artificial Sequence
  Synthetic oligonucleotide
gggtctaactggaagcggtagcaattcaga

SEQ ID NO: 82947 - DNA, 30 bp, Artificial Sequence
  Synthetic oligonucleotide
aggcttgggttgagtaggtcaccattcaga

SEQ ID NO: 82948 - DNA, 30 bp, Artificial Sequence
  Synthetic oligonucleotide
gtggtaggtccgaggtgttggttattcaga

SEQ ID NO: 82949 - DNA, 30 bp, Artificial Sequence
  Synthetic oligonucleotide
gcccatgcaacaatcccactcattttcaga

SEQ ID NO: 82950 - DNA, 30 bp, Artificial Sequence
  Synthetic oligonucleotide
atgctcgaaatgggattaggcacgaagaga

SEQ ID NO: 82951 - DNA, 30 bp, Artificial Sequence
  Synthetic oligonucleotide
ggttgagagtcactgataagacggaagaga

SEQ ID NO: 82952 - DNA, 30 bp, Artificial Sequence
  Synthetic oligonucleotide
cttacgctagacagtggtcgctataagaga

SEQ ID NO: 82953 - DNA, 30 bp, Artificial Sequence
  Synthetic oligonucleotide
aatcgaaccgggataatacatcgtaagaga

SEQ ID NO: 82954 - DNA, 30 bp, Artificial Sequence
  Synthetic oligonucleotide
gttaatactgtcggtgtgtgcgcacagaga

SEQ ID NO: 82955 - DNA, 30 bp, Artificial Sequence
  Synthetic oligonucleotide
ccgcatggtaagaactggggcgaccagaga

SEQ ID NO: 82956 - DNA, 30 bp, Artificial Sequence
  Synthetic oligonucleotide
cgaataaatggactgtgctcttcccagaga

SEQ ID NO: 82957 - DNA, 30 bp, Artificial Sequence
  Synthetic oligonucleotide
agacattcattggaggctaccgtccagaga

SEQ ID NO: 82958 - DNA, 30 bp, Artificial Sequence
  Synthetic oligonucleotide
ccccggccggcataaacaaaaaaagagaga

SEQ ID NO: 82959 - DNA, 30 bp, Artificial Sequence
  Synthetic oligonucleotide
agaaatgcataatgttaaaagcaagagaga

SEQ ID NO: 82960 - DNA, 30 bp, Artificial Sequence
  Synthetic oligonucleotide
gttatcgatgacaaacagccgttagagaga

SEQ ID NO: 82961 - DNA, 30 bp, Artificial Sequence
  Synthetic oligonucleotide
gtgcgttagagctctgacatatccgagaga

SEQ ID NO: 82962 - DNA, 30 bp, Artificial Sequence
  Synthetic oligonucleotide
ccgacaacggaaacacttaacgcggagaga

SEQ ID NO: 82963 - DNA, 30 bp, Artificial Sequence
  Synthetic oligonucleotide
cgcctgataaactcgatataccgggagaga

SEQ ID NO: 82964 - DNA, 30 bp, Artificial Sequence
  Synthetic oligonucleotide
aacagccaggcctagatgcccttggagaga

SEQ ID NO: 82965 - DNA, 30 bp, Artificial Sequence
  Synthetic oligonucleotide
tcattgcgtgttataaaacaagctgagaga

SEQ ID NO: 82966 - DNA, 30 bp, Artificial Sequence
  Synthetic oligonucleotide
gaccggtctgagggcaagcttggtgagaga

SEQ ID NO: 82967 - DNA, 30 bp, Artificial Sequence
  Synthetic oligonucleotide
gggctgggcggagtacttcacacgtagaga

SEQ ID NO: 82968 - DNA, 30 bp, Artificial Sequence
  Synthetic oligonucleotide
gataaaaatggcttcactcggccgtagaga

SEQ ID NO: 82969 - DNA, 30 bp, Artificial Sequence
  Synthetic oligonucleotide
cgtgcagcgttgtagtgtctggaaacgaga

SEQ ID NO: 82970 - DNA, 31 bp, Artificial Sequence
  Synthetic oligonucleotide
gttgacttaagaaaccgaaatatccccgaga

SEQ ID NO: 82971 - DNA, 30 bp, Artificial Sequence
  Synthetic oligonucleotide
agtagaaacacgtataggacacgcccgaga

SEQ ID NO: 82972 - DNA, 30 bp, Artificial Sequence
  Synthetic oligonucleotide
taatcgagaagaataccggtgagggcgaga

SEQ ID NO: 82973 - DNA, 30 bp, Artificial Sequence
  Synthetic oligonucleotide
acggctgctattaggcagtcaatgtcgaga

SEQ ID NO: 82974 - DNA, 30 bp, Artificial Sequence
  Synthetic oligonucleotide
cgctaccccgttagtgtacccttcaggaga

SEQ ID NO: 82975 - DNA, 30 bp, Artificial Sequence
  Synthetic oligonucleotide
cagttgagacattcggctgagatacggaga

SEQ ID NO: 82976 - DNA, 30 bp, Artificial Sequence
  Synthetic oligonucleotide
atctccaatactacgaaccccatgcggaga

SEQ ID NO: 82977 - DNA, 30 bp, Artificial Sequence
  Synthetic oligonucleotide
gtggaagttacacctgtaacataagggaga

SEQ ID NO: 82978 - DNA, 30 bp, Artificial Sequence
  Synthetic oligonucleotide
agtagggaactgtgcggaagagacgggaga

SEQ ID NO: 82979 - DNA, 30 bp, Artificial Sequence
  Synthetic oligonucleotide
ctgtcgaaggtctgcttagaaagcgggaga

SEQ ID NO: 82980 - DNA, 30 bp, Artificial Sequence
  Synthetic oligonucleotide
gggtagctaagatgctgataagagtggaga

SEQ ID NO: 82981 - DNA, 30 bp, Artificial Sequence
  Synthetic oligonucleotide
gatcaatgtgctccatgagaaacgatgaga

SEQ ID NO: 82982 - DNA, 30 bp, Artificial Sequence
  Synthetic oligonucleotide
gggttaactaattggatccttactatgaga

SEQ ID NO: 82983 - DNA, 30 bp, Artificial Sequence
  Synthetic oligonucleotide
aggtcaaacccggcgcgcgcaagactgaga

SEQ ID NO: 82984 - DNA, 30 bp, Artificial Sequence
  Synthetic oligonucleotide
tcatagttgcggtccttcggtgagctgaga

SEQ ID NO: 82985 - DNA, 30 bp, Artificial Sequence
  Synthetic oligonucleotide
ctgtaaccgtgacaggtgtatgtgctgaga

SEQ ID NO: 82986 - DNA, 30 bp, Artificial Sequence
  Synthetic oligonucleotide
gatgtagcggacagatttcatggagtgaga

SEQ ID NO: 82987 - DNA, 30 bp, Artificial Sequence
  Synthetic oligonucleotide
ttcgtacgaacacgagattacttattgaga

SEQ ID NO: 82988 - DNA, 30 bp, Artificial Sequence
  Synthetic oligonucleotide
cacgccccacgaatagggcgttgcttgaga

SEQ ID NO: 82989 - DNA, 30 bp, Artificial Sequence
  Synthetic oligonucleotide
tttggcgaggtagtggctaacagtttgaga

SEQ ID NO: 82990 - DNA, 30 bp, Artificial Sequence
  Synthetic oligonucleotide
aaagagcgcacgccggattgtgcaaataga

SEQ ID NO: 82991 - DNA, 30 bp, Artificial Sequence
  Synthetic oligonucleotide
cccagcaagcaagacttcattatgaataga

SEQ ID NO: 82992 - DNA, 30 bp, Artificial Sequence
  Synthetic oligonucleotide
aggtggatactaacccctgacggccataga

SEQ ID NO: 82993 - DNA, 30 bp, Artificial Sequence
  Synthetic oligonucleotide
tgagtcagggactgagcggagctgcataga

SEQ ID NO: 82994 - DNA, 30 bp, Artificial Sequence
  Synthetic oligonucleotide
ctagcgcctcatagtgggatcattcataga

SEQ ID NO: 82995 - DNA, 30 bp, Artificial Sequence
  Synthetic oligonucleotide
ggcgattactgtatcgcaaagtaggataga

SEQ ID NO: 82996 - DNA, 30 bp, Artificial Sequence
  Synthetic oligonucleotide
acgtaccagaatacatgggggtaggataga

SEQ ID NO: 82997 - DNA, 30 bp, Artificial Sequence
  Synthetic oligonucleotide
tccagttcggggtagactgggccggataga

SEQ ID NO: 82998 - DNA, 30 bp, Artificial Sequence
  Synthetic oligonucleotide
gctgaacttcatgggactcggaaatataga

SEQ ID NO: 82999 - DNA, 30 bp, Artificial Sequence
  Synthetic oligonucleotide
gtcggaggtagagggaatcgagcctataga

SEQ ID NO: 83000 - DNA, 30 bp, Artificial Sequence
  Synthetic oligonucleotide
atgcgttcctcgcaatttaggtcgactaga

SEQ ID NO: 83001 - DNA, 30 bp, Artificial Sequence
  Synthetic oligonucleotide
cgcacggcgttcgtctaccaagtgactaga

SEQ ID NO: 83002 - DNA, 30 bp, Artificial Sequence
  Synthetic oligonucleotide
cggcctgagagagcaaatttaccacctaga

SEQ ID NO: 83003 - DNA, 30 bp, Artificial Sequence
  Synthetic oligonucleotide
gctctgctatagaataaggcgtcccctaga

SEQ ID NO: 83004 - DNA, 30 bp, Artificial Sequence
  Synthetic oligonucleotide
aggcacagggcacgtctcattccgcctaga

SEQ ID NO: 83005 - DNA, 30 bp, Artificial Sequence
  Synthetic oligonucleotide
tgcttgaaatacagatcgtgaagctctaga

SEQ ID NO: 83006 - DNA, 30 bp, Artificial Sequence
  Synthetic oligonucleotide
gtaacgggggaaattctttcaggtagtaga

SEQ ID NO: 83007 - DNA, 30 bp, Artificial Sequence
  Synthetic oligonucleotide
atagtcactgcacaatggggacgacgtaga

SEQ ID NO: 83008 - DNA, 30 bp, Artificial Sequence
  Synthetic oligonucleotide
cgatagagaggacatgtgctctctggtaga

SEQ ID NO: 83009 - DNA, 30 bp, Artificial Sequence
  Synthetic oligonucleotide
accaaggccatggtgtcctgctaatgtaga

SEQ ID NO: 83010 - DNA, 31 bp, Artificial Sequence
  Synthetic oligonucleotide
tatgtacatataaaggggatcggggtgtaga

SEQ ID NO: 83011 - DNA, 30 bp, Artificial Sequence
  Synthetic oligonucleotide
atgagggggctgtacaatattgtgtgtaga

SEQ ID NO: 83012 - DNA, 30 bp, Artificial Sequence
  Synthetic oligonucleotide
ctgatgggcctaatacaggggataattaga

SEQ ID NO: 83013 - DNA, 30 bp, Artificial Sequence
  Synthetic oligonucleotide
atgtaagagagcgttgggagagcacttaga

SEQ ID NO: 83014 - DNA, 30 bp, Artificial Sequence
  Synthetic oligonucleotide
tcggtaggcttaccagttacgactcttaga

SEQ ID NO: 83015 - DNA, 30 bp, Artificial Sequence
  Synthetic oligonucleotide
tgggggactggttgcgagtaggttcttaga

SEQ ID NO: 83016 - DNA, 30 bp, Artificial Sequence
  Synthetic oligonucleotide
atgttgggaacacacacagagtgagttaga

SEQ ID NO: 83017 - DNA, 30 bp, Artificial Sequence
  Synthetic oligonucleotide
gggaaaccatgttcaaaaagagcatttaga

SEQ ID NO: 83018 - DNA, 30 bp, Artificial Sequence
  Synthetic oligonucleotide
ccaagctgaccagcacgaccactatttaga

SEQ ID NO: 83019 - DNA, 30 bp, Artificial Sequence
  Synthetic oligonucleotide
atatggatcaagaaacccatctgctttaga

SEQ ID NO: 83020 - DNA, 30 bp, Artificial Sequence
  Synthetic oligonucleotide
gacaagctggtcagagtctggctcaaacga

SEQ ID NO: 83021 - DNA, 30 bp, Artificial Sequence
  Synthetic oligonucleotide
cgtgatgggttcacgcgagtagtccaacga

SEQ ID NO: 83022 - DNA, 30 bp, Artificial Sequence
  Synthetic oligonucleotide
aaaatcaacggttcgccaggaaagcaacga

SEQ ID NO: 83023 - DNA, 30 bp, Artificial Sequence
  Synthetic oligonucleotide
cgctatggggtaatgcgatttcaagaacga

SEQ ID NO: 83024 - DNA, 30 bp, Artificial Sequence
  Synthetic oligonucleotide
gcagtctgcccagagacaatgtcagaacga

SEQ ID NO: 83025 - DNA, 30 bp, Artificial Sequence
  Synthetic oligonucleotide
ggtgcggaaatgatctgcgcagctgaacga

SEQ ID NO: 83026 - DNA, 30 bp, Artificial Sequence
  Synthetic oligonucleotide
gggcggtgtcaagttggagaggtaacacga

SEQ ID NO: 83027 - DNA, 30 bp, Artificial Sequence
  Synthetic oligonucleotide
agacgtgatccggatcgcgtgaggccacga

SEQ ID NO: 83028 - DNA, 30 bp, Artificial Sequence
  Synthetic oligonucleotide
tgaggagcactcatcatgacttatgcacga

SEQ ID NO: 83029 - DNA, 30 bp, Artificial Sequence
  Synthetic oligonucleotide
taacgcccctgagtctgacagccatcacga

SEQ ID NO: 83030 - DNA, 30 bp, Artificial Sequence
  Synthetic oligonucleotide
cggacgatggccctgaaatacgtatcacga

SEQ ID NO: 83031 - DNA, 30 bp, Artificial Sequence
  Synthetic oligonucleotide
gtcgaaaatttaaattttggtgagtcacga

SEQ ID NO: 83032 - DNA, 30 bp, Artificial Sequence
  Synthetic oligonucleotide
taatgtcgaccgccacgagatcggtcacga

SEQ ID NO: 83033 - DNA, 30 bp, Artificial Sequence
  Synthetic oligonucleotide
agaagttaagacaaagtaggcacttcacga

SEQ ID NO: 83034 - DNA, 30 bp, Artificial Sequence
  Synthetic oligonucleotide
acgccttagtacgtcgagactgtttcacga

SEQ ID NO: 83035 - DNA, 30 bp, Artificial Sequence
  Synthetic oligonucleotide
ttccgtacaaaatagtgtgcgaagagacga

SEQ ID NO: 83036 - DNA, 30 bp, Artificial Sequence
  Synthetic oligonucleotide
ttggagcacacccacgcctgaacgagacga

SEQ ID NO: 83037 - DNA, 30 bp, Artificial Sequence
  Synthetic oligonucleotide
tagatatgcgcgacagtcaacctgggacga

SEQ ID NO: 83038 - DNA, 30 bp, Artificial Sequence
  Synthetic oligonucleotide
agcgcacttccggttgcttgccagtgacga

SEQ ID NO: 83039 - DNA, 30 bp, Artificial Sequence
  Synthetic oligonucleotide
gtgatctactcaataaaggaggcgtgacga

SEQ ID NO: 83040 - DNA, 30 bp, Artificial Sequence
  Synthetic oligonucleotide
acgacgacttcttcagtgcacagttgacga

SEQ ID NO: 83041 - DNA, 30 bp, Artificial Sequence
  Synthetic oligonucleotide
tcaggggagacttatatccatagaatacga

SEQ ID NO: 83042 - DNA, 30 bp, Artificial Sequence
  Synthetic oligonucleotide
ggtctgtgaaggaagaccttacggatacga

SEQ ID NO: 83043 - DNA, 30 bp, Artificial Sequence
  Synthetic oligonucleotide
actgggaacgggttatatacgactatacga

SEQ ID NO: 83044 - DNA, 30 bp, Artificial Sequence
  Synthetic oligonucleotide
cgctagatatccggtagtctgtccgtacga

SEQ ID NO: 83045 - DNA, 30 bp, Artificial Sequence
  Synthetic oligonucleotide
cgtcggaccattaggggaaaacggttacga

SEQ ID NO: 83046 - DNA, 30 bp, Artificial Sequence
  Synthetic oligonucleotide
tacggctgggaagctgtgcaggggttacga

SEQ ID NO: 83047 - DNA, 30 bp, Artificial Sequence
  Synthetic oligonucleotide
tcagagcaaatgccgcgattggctttacga

SEQ ID NO: 83048 - DNA, 30 bp, Artificial Sequence
  Synthetic oligonucleotide
tgaagcgagggactgacgggcggcaaccga

SEQ ID NO: 83049 - DNA, 30 bp, Artificial Sequence
  Synthetic oligonucleotide
tcaatgcgcctcagatctaatgtctaccga

SEQ ID NO: 83050 - DNA, 30 bp, Artificial Sequence
  Synthetic oligonucleotide
ccaccgtccagaactagcccaggaacccga

SEQ ID NO: 83051 - DNA, 30 bp, Artificial Sequence
  Synthetic oligonucleotide
ggggtgaatgactggccacaaagaccccga

SEQ ID NO: 83052 - DNA, 30 bp, Artificial Sequence
  Synthetic oligonucleotide
ggagcattgtatgcgatccctcagccccga

SEQ ID NO: 83053 - DNA, 30 bp, Artificial Sequence
  Synthetic oligonucleotide
ggctgacggtaagcctcaagtttgccccga

SEQ ID NO: 83054 - DNA, 30 bp, Artificial Sequence
  Synthetic oligonucleotide
cgagttggctatcagtcgtaacttgcccga

SEQ ID NO: 83055 - DNA, 30 bp, Artificial Sequence
  Synthetic oligonucleotide
acaggtaaatttaagctccggctaagccga

SEQ ID NO: 83056 - DNA, 30 bp, Artificial Sequence
  Synthetic oligonucleotide
gactacgaaggtacatgtaaggtcagccga

SEQ ID NO: 83057 - DNA, 30 bp, Artificial Sequence
  Synthetic oligonucleotide
ccatcagattcaataacatactggagccga

SEQ ID NO: 83058 - DNA, 30 bp, Artificial Sequence
  Synthetic oligonucleotide
agctgaaatactgctaggtggctgagccga

SEQ ID NO: 83059 - DNA, 30 bp, Artificial Sequence
  Synthetic oligonucleotide
gtaggaagaatcagaagttcacatagccga

SEQ ID NO: 83060 - DNA, 30 bp, Artificial Sequence
  Synthetic oligonucleotide
acaggtgacttatccacacggcatcgccga

SEQ ID NO: 83061 - DNA, 30 bp, Artificial Sequence
  Synthetic oligonucleotide
catataagttgggttagactcgtcggccga

SEQ ID NO: 83062 - DNA, 30 bp, Artificial Sequence
  Synthetic oligonucleotide
tagatagcaatagtgggactaaagggccga

SEQ ID NO: 83063 - DNA, 30 bp, Artificial Sequence
  Synthetic oligonucleotide
gaatgtaggagcgcttaagcagagggccga

SEQ ID NO: 83064 - DNA, 30 bp, Artificial Sequence
  Synthetic oligonucleotide
accagggatgagagacccccttgtggccga

SEQ ID NO: 83065 - DNA, 30 bp, Artificial Sequence
  Synthetic oligonucleotide
taaatcaccaacattaaagaccacctccga

SEQ ID NO: 83066 - DNA, 30 bp, Artificial Sequence
  Synthetic oligonucleotide
tgcaaggtcacggcaaattttggcgtccga

SEQ ID NO: 83067 - DNA, 30 bp, Artificial Sequence
  Synthetic oligonucleotide
cataggttcaggtcacattcaaatttccga

SEQ ID NO: 83068 - DNA, 30 bp, Artificial Sequence
  Synthetic oligonucleotide
cacgccggaatggcatagcacagaaagcga

SEQ ID NO: 83069 - DNA, 30 bp, Artificial Sequence
  Synthetic oligonucleotide
cagcccccgatttaggtccaaagcaagcga

SEQ ID NO: 83070 - DNA, 30 bp, Artificial Sequence
  Synthetic oligonucleotide
ggcatatgaaccggctgaaatagagagcga

SEQ ID NO: 83071 - DNA, 30 bp, Artificial Sequence
  Synthetic oligonucleotide
ctggccgaatccccctgctaaagcgagcga

SEQ ID NO: 83072 - DNA, 30 bp, Artificial Sequence
  Synthetic oligonucleotide
aaacgtcaacgggttgcttaaagcgagcga

SEQ ID NO: 83073 - DNA, 30 bp, Artificial Sequence
  Synthetic oligonucleotide
tgtaagtaacccggccattatcaatagcga

SEQ ID NO: 83074 - DNA, 30 bp, Artificial Sequence
  Synthetic oligonucleotide
gcaagctgcaaggctccgagtaggccgcga

SEQ ID NO: 83075 - DNA, 30 bp, Artificial Sequence
  Synthetic oligonucleotide
cgtcattcatttgttcgaatctcagcgcga

SEQ ID NO: 83076 - DNA, 30 bp, Artificial Sequence
  Synthetic oligonucleotide
acatgtcaagaggttggccttggcgcgcga

SEQ ID NO: 83077 - DNA, 30 bp, Artificial Sequence
  Synthetic oligonucleotide
caaagacaacatgtgagcagcccggcgcga

SEQ ID NO: 83078 - DNA, 30 bp, Artificial Sequence
  Synthetic oligonucleotide
gctttgcatcccgtcattagagttgcgcga

SEQ ID NO: 83079 - DNA, 30 bp, Artificial Sequence
  Synthetic oligonucleotide
cgtggactgtaggtgtggataccctcgcga

SEQ ID NO: 83080 - DNA, 30 bp, Artificial Sequence
  Synthetic oligonucleotide
cgaacttctggcgtcagtgtctggtcgcga

SEQ ID NO: 83081 - DNA, 30 bp, Artificial Sequence
  Synthetic oligonucleotide
ggtacacctcataagccgaagccgaggcga

SEQ ID NO: 83082 - DNA, 30 bp, Artificial Sequence
  Synthetic oligonucleotide
aggttaagtccaaaatgctgaaaccggcga

SEQ ID NO: 83083 - DNA, 30 bp, Artificial Sequence
  Synthetic oligonucleotide
tagtcatagtttctcaagaggttccggcga

SEQ ID NO: 83084 - DNA, 30 bp, Artificial Sequence
  Synthetic oligonucleotide
cggcgggttgtcctggactataaagggcga

SEQ ID NO: 83085 - DNA, 30 bp, Artificial Sequence
  Synthetic oligonucleotide
catcggttagcaatcacaattccggggcga

SEQ ID NO: 83086 - DNA, 30 bp, Artificial Sequence
  Synthetic oligonucleotide
gtcagaatatgggagcgactactggggcga

SEQ ID NO: 83087 - DNA, 30 bp, Artificial Sequence
  Synthetic oligonucleotide
agttagcagacaagttgaatattggggcga

SEQ ID NO: 83088 - DNA, 30 bp, Artificial Sequence
  Synthetic oligonucleotide
agtcgtaggtgagtgaaacctctgtggcga

SEQ ID NO: 83089 - DNA, 30 bp, Artificial Sequence
  Synthetic oligonucleotide
agggttgttgaacacgtgctaggaatgcga

SEQ ID NO: 83090 - DNA, 30 bp, Artificial Sequence
  Synthetic oligonucleotide
gagagtcgaaacgtaacaaaaacgatgcga

SEQ ID NO: 83091 - DNA, 30 bp, Artificial Sequence
  Synthetic oligonucleotide
tgatgagtggcgccgagaccttagctgcga

SEQ ID NO: 83092 - DNA, 30 bp, Artificial Sequence
  Synthetic oligonucleotide
ggaagtggtcttggggaaccctgcgtgcga

SEQ ID NO: 83093 - DNA, 30 bp, Artificial Sequence
  Synthetic oligonucleotide
gaacagaatgcgtcgtattgcccgttgcga

SEQ ID NO: 83094 - DNA, 30 bp, Artificial Sequence
  Synthetic oligonucleotide
cctcaactggatcttctgactaaaaatcga

SEQ ID NO: 83095 - DNA, 30 bp, Artificial Sequence
  Synthetic oligonucleotide
gtgctagccagtttgagtatagcaaatcga

SEQ ID NO: 83096 - DNA, 30 bp, Artificial Sequence
  Synthetic oligonucleotide
taccaaaggatctcgattgtggtaaatcga

SEQ ID NO: 83097 - DNA, 30 bp, Artificial Sequence
  Synthetic oligonucleotide
tataaagcgcctaatagctgcattaatcga

SEQ ID NO: 83098 - DNA, 30 bp, Artificial Sequence
  Synthetic oligonucleotide
ggcatccgcgtacaactaagtcacgatcga

SEQ ID NO: 83099 - DNA, 30 bp, Artificial Sequence
  Synthetic oligonucleotide
gtgcattgtaggactgacccattatatcga

SEQ ID NO: 83100 - DNA, 30 bp, Artificial Sequence
  Synthetic oligonucleotide
ctaccgctaggaaatgtaccaagttatcga

SEQ ID NO: 83101 - DNA, 30 bp, Artificial Sequence
  Synthetic oligonucleotide
tacgagtcgacggtcggaaatatgcctcga

SEQ ID NO: 83102 - DNA, 30 bp, Artificial Sequence
  Synthetic oligonucleotide
ccgcgaaaacgggcgggagctcacgctcga

SEQ ID NO: 83103 - DNA, 30 bp, Artificial Sequence
  Synthetic oligonucleotide
agtaaaacgagattaaacagattggctcga

SEQ ID NO: 83104 - DNA, 30 bp, Artificial Sequence
  Synthetic oligonucleotide
tcacgaagttctatcgcgagtcgtgctcga

SEQ ID NO: 83105 - DNA, 30 bp, Artificial Sequence
  Synthetic oligonucleotide
gtaggtcggaaacgtgatttcggatctcga

SEQ ID NO: 83106 - DNA, 30 bp, Artificial Sequence
  Synthetic oligonucleotide
gaacgggtgcacaagtcgggtagttctcga

SEQ ID NO: 83107 - DNA, 30 bp, Artificial Sequence
  Synthetic oligonucleotide
ttagaacaggttgctgaaaggatcagtcga

SEQ ID NO: 83108 - DNA, 30 bp, Artificial Sequence
  Synthetic oligonucleotide
ctgtacagaaagatcagaaggtaacgtcga

SEQ ID NO: 83109 - DNA, 30 bp, Artificial Sequence
  Synthetic oligonucleotide
ccctcacgcgtggcaccaccggatcgtcga

SEQ ID NO: 83110 - DNA, 30 bp, Artificial Sequence
  Synthetic oligonucleotide
gaggcaatagagaggacggcgacgggtcga

SEQ ID NO: 83111 - DNA, 30 bp, Artificial Sequence
  Synthetic oligonucleotide
cgacttgggatttatctcgtaaggtgtcga

SEQ ID NO: 83112 - DNA, 30 bp, Artificial Sequence
  Synthetic oligonucleotide
cgtcagagggtattgacacaccccattcga

SEQ ID NO: 83113 - DNA, 30 bp, Artificial Sequence
  Synthetic oligonucleotide
ggatgggattaatcgaaggtgaggattcga

SEQ ID NO: 83114 - DNA, 30 bp, Artificial Sequence
  Synthetic oligonucleotide
tgcagggacagtcttgttttcagtattcga

SEQ ID NO: 83115 - DNA, 30 bp, Artificial Sequence
  Synthetic oligonucleotide
agccaagtgcgctcggactaaacggttcga

SEQ ID NO: 83116 - DNA, 30 bp, Artificial Sequence
  Synthetic oligonucleotide
tccgtcggtccagggacaaaatgcaaagga

SEQ ID NO: 83117 - DNA, 30 bp, Artificial Sequence
  Synthetic oligonucleotide
gagctggcggtatcgggaattgttaaagga

SEQ ID NO: 83118 - DNA, 30 bp, Artificial Sequence
  Synthetic oligonucleotide
agggagatcttgacaaggtatagacaagga

SEQ ID NO: 83119 - DNA, 30 bp, Artificial Sequence
  Synthetic oligonucleotide
gactgaatatccactaatatgaaccaagga

SEQ ID NO: 83120 - DNA, 30 bp, Artificial Sequence
  Synthetic oligonucleotide
ccccacgtacctacgttacaacaccaagga

SEQ ID NO: 83121 - DNA, 30 bp, Artificial Sequence
  Synthetic oligonucleotide
cccaatccaacgcaagtatttcaagaagga

SEQ ID NO: 83122 - DNA, 30 bp, Artificial Sequence
  Synthetic oligonucleotide
caagtaaccggattagtagttgaagaagga

SEQ ID NO: 83123 - DNA, 30 bp, Artificial Sequence
  Synthetic oligonucleotide
ttgggaaggagttaaggaataatagaagga

SEQ ID NO: 83124 - DNA, 30 bp, Artificial Sequence
  Synthetic oligonucleotide
ggcggagagaaacgtaagaacgtagaagga

SEQ ID NO: 83125 - DNA, 30 bp, Artificial Sequence
  Synthetic oligonucleotide
aggaacgacccaggggagtgttccgaagga

SEQ ID NO: 83126 - DNA, 30 bp, Artificial Sequence
  Synthetic oligonucleotide
caagggtacggctaattcttaccataagga

SEQ ID NO: 83127 - DNA, 30 bp, Artificial Sequence
  Synthetic oligonucleotide
ggttgctcctaactgagttgctactaagga

SEQ ID NO: 83128 - DNA, 30 bp, Artificial Sequence
  Synthetic oligonucleotide
cgttgaagttggagttcagtttgtacagga

SEQ ID NO: 83129 - DNA, 30 bp, Artificial Sequence
  Synthetic oligonucleotide
ccaggacgcggttgcgaccttagttcagga

SEQ ID NO: 83130 - DNA, 30 bp, Artificial Sequence
  Synthetic oligonucleotide
ctcaaatcaatgagggtctaacacagagga

SEQ ID NO: 83131 - DNA, 30 bp, Artificial Sequence
  Synthetic oligonucleotide
tcctacactgatgccgtcttcaggcgagga

SEQ ID NO: 83132 - DNA, 30 bp, Artificial Sequence
  Synthetic oligonucleotide
aaaaacgatgtaagacataaaaaaggagga

SEQ ID NO: 83133 - DNA, 30 bp, Artificial Sequence
  Synthetic oligonucleotide
tcgattacgttagcgttatctaccggagga

SEQ ID NO: 83134 - DNA, 30 bp, Artificial Sequence
  Synthetic oligonucleotide
taaaagcggaatctgtcaccagggggagga

SEQ ID NO: 83135 - DNA, 30 bp, Artificial Sequence
  Synthetic oligonucleotide
cccacacgggagcaaaatcacccctgagga

SEQ ID NO: 83136 - DNA, 30 bp, Artificial Sequence
  Synthetic oligonucleotide
accatacaatgtttaagcatgcgttgagga

SEQ ID NO: 83137 - DNA, 30 bp, Artificial Sequence
  Synthetic oligonucleotide
gtatatacccaggtccactaacacatagga

SEQ ID NO: 83138 - DNA, 30 bp, Artificial Sequence
  Synthetic oligonucleotide
atgataggaaacccgcggtcttgcatagga

SEQ ID NO: 83139 - DNA, 30 bp, Artificial Sequence
  Synthetic oligonucleotide
cgagcctaggggagttattatgcgatagga

SEQ ID NO: 83140 - DNA, 30 bp, Artificial Sequence
  Synthetic oligonucleotide
gtggttcacatcaaaccgccgtctatagga

SEQ ID NO: 83141 - DNA, 30 bp, Artificial Sequence
  Synthetic oligonucleotide
ggtagtcagagcatgtgtcggcgtatagga

SEQ ID NO: 83142 - DNA, 30 bp, Artificial Sequence
  Synthetic oligonucleotide
agagaaacgtggtcccgcaagctagtagga

SEQ ID NO: 83143 - DNA, 30 bp, Artificial Sequence
  Synthetic oligonucleotide
caccggtcaggctaggggtggctagtagga

SEQ ID NO: 83144 - DNA, 30 bp, Artificial Sequence
  Synthetic oligonucleotide
atgtaagccagcccatcacatacggtagga

SEQ ID NO: 83145 - DNA, 30 bp, Artificial Sequence
  Synthetic oligonucleotide
cagcatatagagcgtgagtagtgggtagga

SEQ ID NO: 83146 - DNA, 30 bp, Artificial Sequence
  Synthetic oligonucleotide
gcctttggttgggggcacaagagtgtagga

SEQ ID NO: 83147 - DNA, 30 bp, Artificial Sequence
  Synthetic oligonucleotide
ggggagaaatctccctcgaaaccattagga

SEQ ID NO: 83148 - DNA, 30 bp, Artificial Sequence
  Synthetic oligonucleotide
atctaaaggatagcgaagtagtgcaacgga

SEQ ID NO: 83149 - DNA, 30 bp, Artificial Sequence
  Synthetic oligonucleotide
agaaggttaattggttaagttacacacgga

SEQ ID NO: 83150 - DNA, 30 bp, Artificial Sequence
  Synthetic oligonucleotide
ggctatgagagttgccacgtcgtacacgga

SEQ ID NO: 83151 - DNA, 30 bp, Artificial Sequence
  Synthetic oligonucleotide
atgtaagtatattgactaaagaaagacgga

SEQ ID NO: 83152 - DNA, 30 bp, Artificial Sequence
  Synthetic oligonucleotide
aggtaatgccacgtgcctggccaggacgga

SEQ ID NO: 83153 - DNA, 30 bp, Artificial Sequence
  Synthetic oligonucleotide
cgtggtcctaagcagagtgttggggacgga

SEQ ID NO: 83154 - DNA, 30 bp, Artificial Sequence
  Synthetic oligonucleotide
aactgacagatcgccaaatgcggtgacgga

SEQ ID NO: 83155 - DNA, 30 bp, Artificial Sequence
  Synthetic oligonucleotide
cgagttaggaatgcggtagaaggatacgga

SEQ ID NO: 83156 - DNA, 30 bp, Artificial Sequence
  Synthetic oligonucleotide
taccaacattggcatcaggcagtgtacgga

SEQ ID NO: 83157 - DNA, 30 bp, Artificial Sequence
  Synthetic oligonucleotide
aagtcggtcaccatacacctggaaaccgga

SEQ ID NO: 83158 - DNA, 30 bp, Artificial Sequence
  Synthetic oligonucleotide
acatagcatctcattcagggaataaccgga

SEQ ID NO: 83159 - DNA, 30 bp, Artificial Sequence
  Synthetic oligonucleotide
tcacaacaattcacacactactttaccgga

SEQ ID NO: 83160 - DNA, 30 bp, Artificial Sequence
  Synthetic oligonucleotide
ccggcgaactgagaccaggtaaagcccgga

SEQ ID NO: 83161 - DNA, 30 bp, Artificial Sequence
  Synthetic oligonucleotide
cctcactcgaactgaggagtcggggccgga

SEQ ID NO: 83162 - DNA, 30 bp, Artificial Sequence
  Synthetic oligonucleotide
tttacgtatcacatgccattcggggccgga

SEQ ID NO: 83163 - DNA, 30 bp, Artificial Sequence
  Synthetic oligonucleotide
atacgggcatgctttaactcggatgccgga

SEQ ID NO: 83164 - DNA, 30 bp, Artificial Sequence
  Synthetic oligonucleotide
cgactatttccgtatccgaagttgtccgga

SEQ ID NO: 83165 - DNA, 30 bp, Artificial Sequence
  Synthetic oligonucleotide
acgagccggcacacagacatggattccgga

SEQ ID NO: 83166 - DNA, 30 bp, Artificial Sequence
  Synthetic oligonucleotide
ataaaaaggacgtaactggacaagagcgga

SEQ ID NO: 83167 - DNA, 29 bp, Artificial Sequence
  Synthetic oligonucleotide
tcttgtccacaattatctaagtgagcgga

SEQ ID NO: 83168 - DNA, 30 bp, Artificial Sequence
  Synthetic oligonucleotide
tctggacagactgaacctaaagtgtgcgga

SEQ ID NO: 83169 - DNA, 30 bp, Artificial Sequence
  Synthetic oligonucleotide
accttctggcgttagaaaatagtaatcgga

SEQ ID NO: 83170 - DNA, 30 bp, Artificial Sequence
  Synthetic oligonucleotide
atacctggacgtgtggagtgggagatcgga

SEQ ID NO: 83171 - DNA, 30 bp, Artificial Sequence
  Synthetic oligonucleotide
cttatacaaaagaggtacgtccgcctcgga

SEQ ID NO: 83172 - DNA, 30 bp, Artificial Sequence
  Synthetic oligonucleotide
ttacaaggcgggacacagtgtgtcgtcgga

SEQ ID NO: 83173 - DNA, 30 bp, Artificial Sequence
  Synthetic oligonucleotide
cactccatacccccgtctacaccattcgga

SEQ ID NO: 83174 - DNA, 30 bp, Artificial Sequence
  Synthetic oligonucleotide
ggcctagtggcagggagggagacgttcgga

SEQ ID NO: 83175 - DNA, 30 bp, Artificial Sequence
  Synthetic oligonucleotide
agactagtggtttatgggatccctttcgga

SEQ ID NO: 83176 - DNA, 30 bp, Artificial Sequence
  Synthetic oligonucleotide
tatgcctgctttaagaagacatgtttcgga

SEQ ID NO: 83177 - DNA, 30 bp, Artificial Sequence
  Synthetic oligonucleotide
gtaatggtggttaactgttgtctaaaggga

SEQ ID NO: 83178 - DNA, 30 bp, Artificial Sequence
  Synthetic oligonucleotide
gaagctgcaagggggcagaatttgcaggga

SEQ ID NO: 83179 - DNA, 30 bp, Artificial Sequence
  Synthetic oligonucleotide
gcgaaggtagttagagatacagttcaggga

SEQ ID NO: 83180 - DNA, 31 bp, Artificial Sequence
  Synthetic oligonucleotide
ggtagacaggagaatctccacgtgcgaggga

SEQ ID NO: 83181 - DNA, 30 bp, Artificial Sequence
  Synthetic oligonucleotide
tagcgcgggggccagagcgcactcgaggga

SEQ ID NO: 83182 - DNA, 30 bp, Artificial Sequence
  Synthetic oligonucleotide
gtcaggcctaaatgtcgagggatggaggga

SEQ ID NO: 83183 - DNA, 30 bp, Artificial Sequence
  Synthetic oligonucleotide
tcgaatgggtgcaaaacaacgcaataggga

SEQ ID NO: 83184 - DNA, 30 bp, Artificial Sequence
  Synthetic oligonucleotide
ataagcctaggtgagaaagcttcctaggga

SEQ ID NO: 83185 - DNA, 30 bp, Artificial Sequence
  Synthetic oligonucleotide
ggatagaaaaaataaggcgtcaggtaggga

SEQ ID NO: 83186 - DNA, 30 bp, Artificial Sequence
  Synthetic oligonucleotide
ggtgaacgcctcaatgggtagaaaacggga

SEQ ID NO: 83187 - DNA, 30 bp, Artificial Sequence
  Synthetic oligonucleotide
aacgtctaacgaagtgccccttaaacggga

SEQ ID NO: 83188 - DNA, 30 bp, Artificial Sequence
  Synthetic oligonucleotide
ggaacatcaacactacgaatcttaacggga

SEQ ID NO: 83189 - DNA, 30 bp, Artificial Sequence
  Synthetic oligonucleotide
gccaaggtggagaaactggctaggtcggga

SEQ ID NO: 83190 - DNA, 30 bp, Artificial Sequence
  Synthetic oligonucleotide
tctcaagctcagctcattaaaaagagggga

SEQ ID NO: 83191 - DNA, 30 bp, Artificial Sequence
  Synthetic oligonucleotide
gtacgtggcgcgcaatgcagacaccgggga

SEQ ID NO: 83192 - DNA, 30 bp, Artificial Sequence
  Synthetic oligonucleotide
taaggaccaccgcaagagcttcgtcgggga

SEQ ID NO: 83193 - DNA, 30 bp, Artificial Sequence
  Synthetic oligonucleotide
tatgcttggaaaaattaaaattaaggggga

SEQ ID NO: 83194 - DNA, 39 bp, Artificial Sequence
  Synthetic oligonucleotide
aagtaatacattcatggtatggtcggggatcggggggga

SEQ ID NO: 83195 - DNA, 40 bp, Artificial Sequence
  Synthetic oligonucleotide
aagataatacattcatggtatggttggggatcggggggga

SEQ ID NO: 83196 - DNA, 30 bp, Artificial Sequence
  Synthetic oligonucleotide
taactgatatcccccaagagtggttgggga

SEQ ID NO: 83197 - DNA, 31 bp, Artificial Sequence
  Synthetic oligonucleotide
aaggggtgccggtagctgaatgctactggga

SEQ ID NO: 83198 - DNA, 30 bp, Artificial Sequence
  Synthetic oligonucleotide
cgttgactggaagcggaccgagtcgtggga

SEQ ID NO: 83199 - DNA, 30 bp, Artificial Sequence
  Synthetic oligonucleotide
agccgtggagaggaataatatagcttggga

SEQ ID NO: 83200 - DNA, 30 bp, Artificial Sequence
  Synthetic oligonucleotide
ccaagggctggcagaaacccacaaaatgga

SEQ ID NO: 83201 - DNA, 30 bp, Artificial Sequence
  Synthetic oligonucleotide
caagccctcagttagcgcgattccaatgga

SEQ ID NO: 83202 - DNA, 30 bp, Artificial Sequence
  Synthetic oligonucleotide
ggaacccgcgtgattcgtggtaaacatgga

SEQ ID NO: 83203 - DNA, 30 bp, Artificial Sequence
  Synthetic oligonucleotide
gcttcagatatagagtgcagccaacatgga

SEQ ID NO: 83204 - DNA, 30 bp, Artificial Sequence
  Synthetic oligonucleotide
acagggctagcttacgggcggtgacatgga

SEQ ID NO: 83205 - DNA, 30 bp, Artificial Sequence
  Synthetic oligonucleotide
tggcatacggttggagcatacactcatgga

SEQ ID NO: 83206 - DNA, 30 bp, Artificial Sequence
  Synthetic oligonucleotide
agtccagacgaacaggagctcgctcatgga

SEQ ID NO: 83207 - DNA, 30 bp, Artificial Sequence
  Synthetic oligonucleotide
ggctacagacaaaagcgtgaaaacgatgga

SEQ ID NO: 83208 - DNA, 30 bp, Artificial Sequence
  Synthetic oligonucleotide
aacgattcacacaaagatcgatacgatgga

SEQ ID NO: 83209 - DNA, 30 bp, Artificial Sequence
  Synthetic oligonucleotide
tttagcataaccagggaagcaaactatgga

SEQ ID NO: 83210 - DNA, 30 bp, Artificial Sequence
  Synthetic oligonucleotide
gcgtagctggggcctgcaaacgcttatgga

SEQ ID NO: 83211 - DNA, 30 bp, Artificial Sequence
  Synthetic oligonucleotide
ccttaaacggtgtgattgcttcaaactgga

SEQ ID NO: 83212 - DNA, 30 bp, Artificial Sequence
  Synthetic oligonucleotide
cagctcaacggagtagaaatgctaactgga

SEQ ID NO: 83213 - DNA, 30 bp, Artificial Sequence
  Synthetic oligonucleotide
agtttgggagcggaaaaagggacccctgga

SEQ ID NO: 83214 - DNA, 30 bp, Artificial Sequence
  Synthetic oligonucleotide
ggcttccgaattcatgcgaacccgcctgga

SEQ ID NO: 83215 - DNA, 30 bp, Artificial Sequence
  Synthetic oligonucleotide
acagtaatggttggtgagacactcgctgga

SEQ ID NO: 83216 - DNA, 30 bp, Artificial Sequence
  Synthetic oligonucleotide
gacgataactccgattctatagaggctgga

SEQ ID NO: 83217 - DNA, 30 bp, Artificial Sequence
  Synthetic oligonucleotide
ggcaataggtatccctgaaggacggctgga

SEQ ID NO: 83218 - DNA, 30 bp, Artificial Sequence
  Synthetic oligonucleotide
ggtgaagaatagagcggtgtagaatctgga

SEQ ID NO: 83219 - DNA, 30 bp, Artificial Sequence
  Synthetic oligonucleotide
ccacgagaaacacaccatcatgcatctgga

SEQ ID NO: 83220 - DNA, 30 bp, Artificial Sequence
  Synthetic oligonucleotide
caccctatgtacggtttgattggctctgga

SEQ ID NO: 83221 - DNA, 31 bp, Artificial Sequence
  Synthetic oligonucleotide
tgagtagaagagcatgtactgtgtgagtgga

SEQ ID NO: 83222 - DNA, 30 bp, Artificial Sequence
  Synthetic oligonucleotide
agaagacagatttgcggttatatccgtgga

SEQ ID NO: 83223 - DNA, 30 bp, Artificial Sequence
  Synthetic oligonucleotide
taggttgtggccagaactcggcgtcgtgga

SEQ ID NO: 83224 - DNA, 30 bp, Artificial Sequence
  Synthetic oligonucleotide
tgggatgtgagaacgtggaggtgaggtgga

SEQ ID NO: 83225 - DNA, 30 bp, Artificial Sequence
  Synthetic oligonucleotide
cagaggtcagtcaagacagaccagggtgga

SEQ ID NO: 83226 - DNA, 30 bp, Artificial Sequence
  Synthetic oligonucleotide
agctataagcgccctaacggggggggtgga

SEQ ID NO: 83227 - DNA, 30 bp, Artificial Sequence
  Synthetic oligonucleotide
cttcattgagtcgaataagattaatgtgga

SEQ ID NO: 83228 - DNA, 30 bp, Artificial Sequence
  Synthetic oligonucleotide
aagcgtagataagaacgtgtatatcttgga

SEQ ID NO: 83229 - DNA, 30 bp, Artificial Sequence
  Synthetic oligonucleotide
ccgaccacaccaacacatgaaccagttgga

SEQ ID NO: 83230 - DNA, 30 bp, Artificial Sequence
  Synthetic oligonucleotide
gagaccgggatttgggcaagcatagttgga

SEQ ID NO: 83231 - DNA, 30 bp, Artificial Sequence
  Synthetic oligonucleotide
tcatgcccaaaacattccgacaccgttgga

SEQ ID NO: 83232 - DNA, 30 bp, Artificial Sequence
  Synthetic oligonucleotide
tctacaagctgggagccgtcctgggttgga

SEQ ID NO: 83233 - DNA, 30 bp, Artificial Sequence
  Synthetic oligonucleotide
atcatcagaatcatgagaatctgggttgga

SEQ ID NO: 83234 - DNA, 30 bp, Artificial Sequence
  Synthetic oligonucleotide
tcgtaagaagtatgtttggcccgttttgga

SEQ ID NO: 83235 - DNA, 30 bp, Artificial Sequence
  Synthetic oligonucleotide
catgcgattggagagttactatcaaaatga

SEQ ID NO: 83236 - DNA, 30 bp, Artificial Sequence
  Synthetic oligonucleotide
ctctagcgacttcgctgaaaaagcaaatga

SEQ ID NO: 83237 - DNA, 30 bp, Artificial Sequence
  Synthetic oligonucleotide
cctgtgaaggattctccgtgattcaaatga

SEQ ID NO: 83238 - DNA, 30 bp, Artificial Sequence
  Synthetic oligonucleotide
tcgttgggacaaaaaactgatttcaaatga

SEQ ID NO: 83239 - DNA, 30 bp, Artificial Sequence
  Synthetic oligonucleotide
ggagattgcgtgtgtacagacgcgaaatga

SEQ ID NO: 83240 - DNA, 30 bp, Artificial Sequence
  Synthetic oligonucleotide
attaggatagatcgcgccagaagtaaatga

SEQ ID NO: 83241 - DNA, 30 bp, Artificial Sequence
  Synthetic oligonucleotide
gtgatacatagcaaaagtgaaaggcaatga

SEQ ID NO: 83242 - DNA, 30 bp, Artificial Sequence
  Synthetic oligonucleotide
gcgcggcgggaattctcgagcgggcaatga

SEQ ID NO: 83243 - DNA, 30 bp, Artificial Sequence
  Synthetic oligonucleotide
tgatggggggcaacattggacgctgaatga

SEQ ID NO: 83244 - DNA, 30 bp, Artificial Sequence
  Synthetic oligonucleotide
gttaggtgtcaccagtgtggggcctaatga

SEQ ID NO: 83245 - DNA, 30 bp, Artificial Sequence
  Synthetic oligonucleotide
tgcacaccgagatggagtcgaatttaatga

SEQ ID NO: 83246 - DNA, 30 bp, Artificial Sequence
  Synthetic oligonucleotide
tggtcgggcggttcggcgagaacaacatga

SEQ ID NO: 83247 - DNA, 30 bp, Artificial Sequence
  Synthetic oligonucleotide
cgctcagtcaacgctaggagagccacatga

SEQ ID NO: 83248 - DNA, 30 bp, Artificial Sequence
  Synthetic oligonucleotide
tcgagactagctactgggtgttccacatga

SEQ ID NO: 83249 - DNA, 30 bp, Artificial Sequence
  Synthetic oligonucleotide
tggggttctcagaatgaaacaaatacatga

SEQ ID NO: 83250 - DNA, 30 bp, Artificial Sequence
  Synthetic oligonucleotide
aaagcttgaagaggaccaaatgtaccatga

SEQ ID NO: 83251 - DNA, 30 bp, Artificial Sequence
  Synthetic oligonucleotide
tggtaccgacactgaatccccgctccatga

SEQ ID NO: 83252 - DNA, 30 bp, Artificial Sequence
  Synthetic oligonucleotide
cctacaagttcaagatggacaccatcatga

SEQ ID NO: 83253 - DNA, 30 bp, Artificial Sequence
  Synthetic oligonucleotide
tacccgcgtcgagtacgagcataaagatga

SEQ ID NO: 83254 - DNA, 30 bp, Artificial Sequence
  Synthetic oligonucleotide
gtggaaatttgactgcgcggaataagatga

SEQ ID NO: 83255 - DNA, 30 bp, Artificial Sequence
  Synthetic oligonucleotide
ccgtcaatatactaaccgtcgttacgatga

SEQ ID NO: 83256 - DNA, 30 bp, Artificial Sequence
  Synthetic oligonucleotide
gtcacatggaggggcagcaaatgccgatga

SEQ ID NO: 83257 - DNA, 30 bp, Artificial Sequence
  Synthetic oligonucleotide
accgtccgtaccagataaaagtcatgatga

SEQ ID NO: 83258 - DNA, 30 bp, Artificial Sequence
  Synthetic oligonucleotide
aatggtcaaataaacatagtggcgatatga

SEQ ID NO: 83259 - DNA, 30 bp, Artificial Sequence
  Synthetic oligonucleotide
ggctgcatggacatgaattggcgtctatga

SEQ ID NO: 83260 - DNA, 30 bp, Artificial Sequence
  Synthetic oligonucleotide
acagtatggcttaccggttcataagtatga

SEQ ID NO: 83261 - DNA, 30 bp, Artificial Sequence
  Synthetic oligonucleotide
tccaaccggggatggtgcccaacagtatga

SEQ ID NO: 83262 - DNA, 30 bp, Artificial Sequence
  Synthetic oligonucleotide
gaaggttagattccgccagaggccgtatga

SEQ ID NO: 83263 - DNA, 30 bp, Artificial Sequence
  Synthetic oligonucleotide
agaacaccttagtcctaccgagatttatga

SEQ ID NO: 83264 - DNA, 30 bp, Artificial Sequence
  Synthetic oligonucleotide
cacaatcaagatgggataccttatttatga

SEQ ID NO: 83265 - DNA, 30 bp, Artificial Sequence
  Synthetic oligonucleotide
ggggctaccccagtgcttcatgacaactga

SEQ ID NO: 83266 - DNA, 30 bp, Artificial Sequence
  Synthetic oligonucleotide
ggaaaggtacttagcgcctacacgaactga

SEQ ID NO: 83267 - DNA, 30 bp, Artificial Sequence
  Synthetic oligonucleotide
ggctcatttggtagaatgaaggggaactga

SEQ ID NO: 83268 - DNA, 30 bp, Artificial Sequence
  Synthetic oligonucleotide
gagcataaactgagggcttcaagacactga

SEQ ID NO: 83269 - DNA, 30 bp, Artificial Sequence
  Synthetic oligonucleotide
agcgtaaccatcgccgccggatgacactga

SEQ ID NO: 83270 - DNA, 30 bp, Artificial Sequence
  Synthetic oligonucleotide
ttggggggaataggtcccgagtgagactga

SEQ ID NO: 83271 - DNA, 30 bp, Artificial Sequence
  Synthetic oligonucleotide
tcacgagtggatgctcgggatcaatactga

SEQ ID NO: 83272 - DNA, 30 bp, Artificial Sequence
  Synthetic oligonucleotide
acaggctaatcttgagggctcagaccctga

SEQ ID NO: 83273 - DNA, 30 bp, Artificial Sequence
  Synthetic oligonucleotide
cgacgacaaagttagatgctgtagtcctga

SEQ ID NO: 83274 - DNA, 30 bp, Artificial Sequence
  Synthetic oligonucleotide
agccctggctacgaatatgttccgtcctga

SEQ ID NO: 83275 - DNA, 30 bp, Artificial Sequence
  Synthetic oligonucleotide
ttaaatcaacgagttctaattcaccgctga

SEQ ID NO: 83276 - DNA, 30 bp, Artificial Sequence
  Synthetic oligonucleotide
aaggtcaaaccgggctgtggtttaggctga

SEQ ID NO: 83277 - DNA, 30 bp, Artificial Sequence
  Synthetic oligonucleotide
caaagcatatgtgacaggggatatggctga

SEQ ID NO: 83278 - DNA, 30 bp, Artificial Sequence
  Synthetic oligonucleotide
aggtcatcgcactgtggtcattgatgctga

SEQ ID NO: 83279 - DNA, 30 bp, Artificial Sequence
  Synthetic oligonucleotide
cgcgaggttgcgtcagaagtggcgtgctga

SEQ ID NO: 83280 - DNA, 30 bp, Artificial Sequence
  Synthetic oligonucleotide
atgagatacaaggtgataggattttgctga

SEQ ID NO: 83281 - DNA, 30 bp, Artificial Sequence
  Synthetic oligonucleotide
caagtaaatcgattctataggccaatctga

SEQ ID NO: 83282 - DNA, 30 bp, Artificial Sequence
  Synthetic oligonucleotide
acatggacctgaacgtacgcttagatctga

SEQ ID NO: 83283 - DNA, 30 bp, Artificial Sequence
  Synthetic oligonucleotide
aagtcgcgaagctgcgtctacactatctga

SEQ ID NO: 83284 - DNA, 30 bp, Artificial Sequence
  Synthetic oligonucleotide
aaagacaaccaataatcgtgggttatctga

SEQ ID NO: 83285 - DNA, 30 bp, Artificial Sequence
  Synthetic oligonucleotide
atgatcagggatgacagtagcaaactctga

SEQ ID NO: 83286 - DNA, 30 bp, Artificial Sequence
  Synthetic oligonucleotide
ggataggacaagttgttcctagcactctga

SEQ ID NO: 83287 - DNA, 30 bp, Artificial Sequence
  Synthetic oligonucleotide
tctgggacatcacaacgagataacctctga

SEQ ID NO: 83288 - DNA, 30 bp, Artificial Sequence
  Synthetic oligonucleotide
cgggtccattagagccacgcgactgtctga

SEQ ID NO: 83289 - DNA, 30 bp, Artificial Sequence
  Synthetic oligonucleotide
agaagaaggtttaaggtgattactttctga

SEQ ID NO: 83290 - DNA, 30 bp, Artificial Sequence
  Synthetic oligonucleotide
agtaagctgagccacaaaaagtcaaagtga

SEQ ID NO: 83291 - DNA, 30 bp, Artificial Sequence
  Synthetic oligonucleotide
agcgcccctggtataacatacgaacagtga

SEQ ID NO: 83292 - DNA, 30 bp, Artificial Sequence
  Synthetic oligonucleotide
atgctcaatgattccccaacagcgcagtga

SEQ ID NO: 83293 - DNA, 30 bp, Artificial Sequence
  Synthetic oligonucleotide
cccatagattgggagtcaacaaaagagtga

SEQ ID NO: 83294 - DNA, 30 bp, Artificial Sequence
  Synthetic oligonucleotide
tggcaccgtggccgataggcttccgagtga

SEQ ID NO: 83295 - DNA, 30 bp, Artificial Sequence
  Synthetic oligonucleotide
gtctaggggaagccattgagaagggagtga

SEQ ID NO: 83296 - DNA, 30 bp, Artificial Sequence
  Synthetic oligonucleotide
gttagccagattaagaatttatgatagtga

SEQ ID NO: 83297 - DNA, 30 bp, Artificial Sequence
  Synthetic oligonucleotide
agagatcacacagtaacgggacaaacgtga

SEQ ID NO: 83298 - DNA, 30 bp, Artificial Sequence
  Synthetic oligonucleotide
cggacagtacaccgttcggaccaaacgtga

SEQ ID NO: 83299 - DNA, 30 bp, Artificial Sequence
  Synthetic oligonucleotide
gatggtgggaacccacaacaggcaacgtga

SEQ ID NO: 83300 - DNA, 30 bp, Artificial Sequence
  Synthetic oligonucleotide
aactggccctaaaggtcatgtgtaacgtga

SEQ ID NO: 83301 - DNA, 30 bp, Artificial Sequence
  Synthetic oligonucleotide
ccagttcgcaagatgataggacttacgtga

SEQ ID NO: 83302 - DNA, 30 bp, Artificial Sequence
  Synthetic oligonucleotide
aaggggtgatagttctgtgtcaatccgtga

SEQ ID NO: 83303 - DNA, 30 bp, Artificial Sequence
  Synthetic oligonucleotide
gcgagttgcaagcattacatccaagcgtga

SEQ ID NO: 83304 - DNA, 30 bp, Artificial Sequence
  Synthetic oligonucleotide
atcaactggcagtgagaaatgtttgcgtga

SEQ ID NO: 83305 - DNA, 30 bp, Artificial Sequence
  Synthetic oligonucleotide
ggtggaaaccagcccttgtggtaatcgtga

SEQ ID NO: 83306 - DNA, 30 bp, Artificial Sequence
  Synthetic oligonucleotide
gacagggacggtggagtgtggccgtcgtga

SEQ ID NO: 83307 - DNA, 30 bp, Artificial Sequence
  Synthetic oligonucleotide
caagtattaccacagttgctgaagaggtga

SEQ ID NO: 83308 - DNA, 30 bp, Artificial Sequence
  Synthetic oligonucleotide
gataccgcgtgaagccggttgggtaggtga

SEQ ID NO: 83309 - DNA, 30 bp, Artificial Sequence
  Synthetic oligonucleotide
tcgtcggacctcgaaattgtcatcgggtga

SEQ ID NO: 83310 - DNA, 30 bp, Artificial Sequence
  Synthetic oligonucleotide
tgccgggtcactatagtcgcaacggggtga

SEQ ID NO: 83311 - DNA, 30 bp, Artificial Sequence
  Synthetic oligonucleotide
cacatataaccgcgacccatcaatgggtga

SEQ ID NO: 83312 - DNA, 30 bp, Artificial Sequence
  Synthetic oligonucleotide
atagtccacttgatagaacgcgatgggtga

SEQ ID NO: 83313 - DNA, 30 bp, Artificial Sequence
  Synthetic oligonucleotide
tcagactaacagaactagaattaatggtga

SEQ ID NO: 83314 - DNA, 30 bp, Artificial Sequence
  Synthetic oligonucleotide
gtatgtaagctgaggtggagtctgatgtga

SEQ ID NO: 83315 - DNA, 30 bp, Artificial Sequence
  Synthetic oligonucleotide
taaggtagcggagtcgacaaagatgtgtga

SEQ ID NO: 83316 - DNA, 30 bp, Artificial Sequence
  Synthetic oligonucleotide
gaagtgaggaccatcaagtaaattttgtga

SEQ ID NO: 83317 - DNA, 30 bp, Artificial Sequence
  Synthetic oligonucleotide
ggcaattcaatactcggtggaatcaattga

SEQ ID NO: 83318 - DNA, 30 bp, Artificial Sequence
  Synthetic oligonucleotide
atcataaaatgggtcaccgaaaggaattga

SEQ ID NO: 83319 - DNA, 30 bp, Artificial Sequence
  Synthetic oligonucleotide
cacgcataacattccgtggctcctaattga

SEQ ID NO: 83320 - DNA, 30 bp, Artificial Sequence
  Synthetic oligonucleotide
tgaacctcgcgaaggtagatactacattga

SEQ ID NO: 83321 - DNA, 30 bp, Artificial Sequence
  Synthetic oligonucleotide
taagggcgcgttggcatgcaggcgcattga

SEQ ID NO: 83322 - DNA, 30 bp, Artificial Sequence
  Synthetic oligonucleotide
agataacagtaaaatctttaagggcattga

SEQ ID NO: 83323 - DNA, 30 bp, Artificial Sequence
  Synthetic oligonucleotide
gtgcggagctgtgtacaaccccgtcattga

SEQ ID NO: 83324 - DNA, 30 bp, Artificial Sequence
  Synthetic oligonucleotide
aggggaggtgaaactgagcgtttatattga

SEQ ID NO: 83325 - DNA, 30 bp, Artificial Sequence
  Synthetic oligonucleotide
cgctgcgtgaatagtgcatctatgtattga

SEQ ID NO: 83326 - DNA, 30 bp, Artificial Sequence
  Synthetic oligonucleotide
tggacactcttaatggcaagaggcacttga

SEQ ID NO: 83327 - DNA, 30 bp, Artificial Sequence
  Synthetic oligonucleotide
tatcggtgaatacgcccaacgactccttga

SEQ ID NO: 83328 - DNA, 30 bp, Artificial Sequence
  Synthetic oligonucleotide
acaagtagggaacatcgaaagaacgcttga

SEQ ID NO: 83329 - DNA, 30 bp, Artificial Sequence
  Synthetic oligonucleotide
ggtacacatcattagaaaacgtggtcttga

SEQ ID NO: 83330 - DNA, 30 bp, Artificial Sequence
  Synthetic oligonucleotide
gaccagttgtgaggcagggtatgcagttga

SEQ ID NO: 83331 - DNA, 30 bp, Artificial Sequence
  Synthetic oligonucleotide
gcgatttaggattgaaggtggatcagttga

SEQ ID NO: 83332 - DNA, 30 bp, Artificial Sequence
  Synthetic oligonucleotide
gaagagaaggggattcaattagggagttga

SEQ ID NO: 83333 - DNA, 30 bp, Artificial Sequence
  Synthetic oligonucleotide
gtgctaatgtgaggtgagagcgagcgttga

SEQ ID NO: 83334 - DNA, 30 bp, Artificial Sequence
  Synthetic oligonucleotide
acttctgagttcgagccagcaaggcgttga

SEQ ID NO: 83335 - DNA, 30 bp, Artificial Sequence
  Synthetic oligonucleotide
cattggagtaaagggacgagttgaggttga

SEQ ID NO: 83336 - DNA, 30 bp, Artificial Sequence
  Synthetic oligonucleotide
acccgaacaaaagcagatctcgacggttga

SEQ ID NO: 83337 - DNA, 30 bp, Artificial Sequence
  Synthetic oligonucleotide
gttcggattgaaatggatctcgtgggttga

SEQ ID NO: 83338 - DNA, 30 bp, Artificial Sequence
  Synthetic oligonucleotide
taacagatcgacccaatcctaacgtgttga

SEQ ID NO: 83339 - DNA, 30 bp, Artificial Sequence
  Synthetic oligonucleotide
tgatgaactacagtgagaataaaaatttga

SEQ ID NO: 83340 - DNA, 30 bp, Artificial Sequence
  Synthetic oligonucleotide
agtgttacgacggatcggggtatcatttga

SEQ ID NO: 83341 - DNA, 30 bp, Artificial Sequence
  Synthetic oligonucleotide
tatgcgggcacgatagagaccatgatttga

SEQ ID NO: 83342 - DNA, 30 bp, Artificial Sequence
  Synthetic oligonucleotide
atgacaaggatcgatgatgagcgtctttga

SEQ ID NO: 83343 - DNA, 30 bp, Artificial Sequence
  Synthetic oligonucleotide
cagagaagcataatggaagaactggtttga

SEQ ID NO: 83344 - DNA, 30 bp, Artificial Sequence
  Synthetic oligonucleotide
agggattggcgctgcgagatgtagttttga

SEQ ID NO: 83345 - DNA, 30 bp, Artificial Sequence
  Synthetic oligonucleotide
tgttaaaaccatcgctttattacgaaaata

SEQ ID NO: 83346 - DNA, 30 bp, Artificial Sequence
  Synthetic oligonucleotide
gggcgtagacaaagaacgaatttacaaata

SEQ ID NO: 83347 - DNA, 30 bp, Artificial Sequence
  Synthetic oligonucleotide
gaactgaagcgtacgcaaagttgccaaata

SEQ ID NO: 83348 - DNA, 30 bp, Artificial Sequence
  Synthetic oligonucleotide
tcctgaactaggtcagtagtgagggaaata

SEQ ID NO: 83349 - DNA, 30 bp, Artificial Sequence
  Synthetic oligonucleotide
gcatagcgcttagacgtgagttcctaaata

SEQ ID NO: 83350 - DNA, 30 bp, Artificial Sequence
  Synthetic oligonucleotide
agctaaggcatcgcacgacggcagtaaata

SEQ ID NO: 83351 - DNA, 30 bp, Artificial Sequence
  Synthetic oligonucleotide
ctgtttgacatgagtgtgcagacgtaaata

SEQ ID NO: 83352 - DNA, 30 bp, Artificial Sequence
  Synthetic oligonucleotide
ggtacggcggacgacacgacatgttaaata

SEQ ID NO: 83353 - DNA, 30 bp, Artificial Sequence
  Synthetic oligonucleotide
atgattaaggtaaagagtacgaggacaata

SEQ ID NO: 83354 - DNA, 30 bp, Artificial Sequence
  Synthetic oligonucleotide
atcccgtggccccgaaatggagaaccaata

SEQ ID NO: 83355 - DNA, 31 bp, Artificial Sequence
  Synthetic oligonucleotide
gcgcatatcccagaaaactagctcaccaata

SEQ ID NO: 83356 - DNA, 30 bp, Artificial Sequence
  Synthetic oligonucleotide
agacagccacacgtccgaaacatggcaata

SEQ ID NO: 83357 - DNA, 30 bp, Artificial Sequence
  Synthetic oligonucleotide
aaaagaaacaaactaggcaggccaagaata

SEQ ID NO: 83358 - DNA, 30 bp, Artificial Sequence
  Synthetic oligonucleotide
cgccgactcaacgaaagtatgtgtagaata

SEQ ID NO: 83359 - DNA, 30 bp, Artificial Sequence
  Synthetic oligonucleotide
gagggcctgaccagaataaccagccgaata

SEQ ID NO: 83360 - DNA, 30 bp, Artificial Sequence
  Synthetic oligonucleotide
agagtaaagtgacccccttgcatgcgaata

SEQ ID NO: 83361 - DNA, 30 bp, Artificial Sequence
  Synthetic oligonucleotide
gccatagctcaacattgacatgatcgaata

SEQ ID NO: 83362 - DNA, 30 bp, Artificial Sequence
  Synthetic oligonucleotide
aactatgcacaagggcgtagccaaggaata

SEQ ID NO: 83363 - DNA, 30 bp, Artificial Sequence
  Synthetic oligonucleotide
tgcatacggccaagtcgagcaagaggaata

SEQ ID NO: 83364 - DNA, 30 bp, Artificial Sequence
  Synthetic oligonucleotide
tagtaccgaaggagaaacgaacgaggaata

SEQ ID NO: 83365 - DNA, 30 bp, Artificial Sequence
  Synthetic oligonucleotide
acgtgttaagcaggacccctgtttggaata

SEQ ID NO: 83366 - DNA, 30 bp, Artificial Sequence
  Synthetic oligonucleotide
ccgtgcgtggtgtgaggccacacatgaata

SEQ ID NO: 83367 - DNA, 30 bp, Artificial Sequence
  Synthetic oligonucleotide
gtaaggcaatgaatttatacgacgtgaata

SEQ ID NO: 83368 - DNA, 30 bp, Artificial Sequence
  Synthetic oligonucleotide
gctaagcttaatacgggcgcccggtgaata

SEQ ID NO: 83369 - DNA, 30 bp, Artificial Sequence
  Synthetic oligonucleotide
aataacactagccgaacacttggttgaata

SEQ ID NO: 83370 - DNA, 30 bp, Artificial Sequence
  Synthetic oligonucleotide
acataaccgcgaacgcgatgcggaataata

SEQ ID NO: 83371 - DNA, 30 bp, Artificial Sequence
  Synthetic oligonucleotide
agcgtatgacgacttgagccagaactaata

SEQ ID NO: 83372 - DNA, 30 bp, Artificial Sequence
  Synthetic oligonucleotide
cactagcggaggatctacatacgtctaata

SEQ ID NO: 83373 - DNA, 30 bp, Artificial Sequence
  Synthetic oligonucleotide
agaaatgccggggggttacctccagtaata

SEQ ID NO: 83374 - DNA, 30 bp, Artificial Sequence
  Synthetic oligonucleotide
tcgcgaggacaacagggcatatgattaata

SEQ ID NO: 83375 - DNA, 30 bp, Artificial Sequence
  Synthetic oligonucleotide
gtatggaggggtcgggttagccaaaacata

SEQ ID NO: 83376 - DNA, 30 bp, Artificial Sequence
  Synthetic oligonucleotide
cgatattgtccttgtaaaccgggtaacata

SEQ ID NO: 83377 - DNA, 30 bp, Artificial Sequence
  Synthetic oligonucleotide
cagtagaagatgatcataagtgcagacata

SEQ ID NO: 83378 - DNA, 30 bp, Artificial Sequence
  Synthetic oligonucleotide
accatgaaagagaatgtgatttcagacata

SEQ ID NO: 83379 - DNA, 30 bp, Artificial Sequence
  Synthetic oligonucleotide
ggctagtcatcagtgacactgctagacata

SEQ ID NO: 83380 - DNA, 30 bp, Artificial Sequence
  Synthetic oligonucleotide
cattgagaccggtgactgagcttagacata

SEQ ID NO: 83381 - DNA, 30 bp, Artificial Sequence
  Synthetic oligonucleotide
ttatccaccctgaacagagggctcgacata

SEQ ID NO: 83382 - DNA, 30 bp, Artificial Sequence
  Synthetic oligonucleotide
agcagaaccaagcgtactggggatgacata

SEQ ID NO: 83383 - DNA, 30 bp, Artificial Sequence
  Synthetic oligonucleotide
ccgagatcaggggcgcaccgcatatacata

SEQ ID NO: 83384 - DNA, 30 bp, Artificial Sequence
  Synthetic oligonucleotide
tacagaaaggcggagcgtggagcaaccata

SEQ ID NO: 83385 - DNA, 30 bp, Artificial Sequence
  Synthetic oligonucleotide
ggtccagactatcgaccatgcaaggccata

SEQ ID NO: 83386 - DNA, 30 bp, Artificial Sequence
  Synthetic oligonucleotide
atgtcatgcctagtaccaccgatctccata

SEQ ID NO: 83387 - DNA, 30 bp, Artificial Sequence
  Synthetic oligonucleotide
agggtaggtggatggagagggtggtccata

SEQ ID NO: 83388 - DNA, 30 bp, Artificial Sequence
  Synthetic oligonucleotide
agatggattagggttgccgacccccgcata

SEQ ID NO: 83389 - DNA, 30 bp, Artificial Sequence
  Synthetic oligonucleotide
cgataaggcacatttacgcattcccgcata

SEQ ID NO: 83390 - DNA, 30 bp, Artificial Sequence
  Synthetic oligonucleotide
cgttacaacgggattgaacattcgcgcata

SEQ ID NO: 83391 - DNA, 30 bp, Artificial Sequence
  Synthetic oligonucleotide
agggtgtttcgagcgaccagattcatcata

SEQ ID NO: 83392 - DNA, 30 bp, Artificial Sequence
  Synthetic oligonucleotide
gggttcaaaccagaggatacgaagatcata

SEQ ID NO: 83393 - DNA, 30 bp, Artificial Sequence
  Synthetic oligonucleotide
tgcatggaaatgcgtggaattaggatcata

SEQ ID NO: 83394 - DNA, 30 bp, Artificial Sequence
  Synthetic oligonucleotide
ggggtttaatactcgaatagcacagtcata

SEQ ID NO: 83395 - DNA, 30 bp, Artificial Sequence
  Synthetic oligonucleotide
cagagcgattagtgatgttgagtcttcata

SEQ ID NO: 83396 - DNA, 30 bp, Artificial Sequence
  Synthetic oligonucleotide
gaaatcgtgaggcatccgagaacaaagata

SEQ ID NO: 83397 - DNA, 30 bp, Artificial Sequence
  Synthetic oligonucleotide
tgttcatctagctcgtgcgaggtaaagata

SEQ ID NO: 83398 - DNA, 30 bp, Artificial Sequence
  Synthetic oligonucleotide
atgctgagataaatatgtacctacaagata

SEQ ID NO: 83399 - DNA, 30 bp, Artificial Sequence
  Synthetic oligonucleotide
tgtccgcggtgagtgcgtgaggtccagata

SEQ ID NO: 83400 - DNA, 30 bp, Artificial Sequence
  Synthetic oligonucleotide
tcatgcgatacagaataaattattgagata

SEQ ID NO: 83401 - DNA, 30 bp, Artificial Sequence
  Synthetic oligonucleotide
atcggccgaaatcacagcgctcttgagata

SEQ ID NO: 83402 - DNA, 30 bp, Artificial Sequence
  Synthetic oligonucleotide
attggagaggtccgctaaaggttgtagata

SEQ ID NO: 83403 - DNA, 30 bp, Artificial Sequence
  Synthetic oligonucleotide
gtaagcggcaggcgatatgctgaaacgata

SEQ ID NO: 83404 - DNA, 30 bp, Artificial Sequence
  Synthetic oligonucleotide
gctggaagcgaatcgctcgataacacgata

SEQ ID NO: 83405 - DNA, 30 bp, Artificial Sequence
  Synthetic oligonucleotide
ggaaaacaaattgctgctcatgccacgata

SEQ ID NO: 83406 - DNA, 30 bp, Artificial Sequence
  Synthetic oligonucleotide
tgcccagatagctaagatagcacaccgata

SEQ ID NO: 83407 - DNA, 30 bp, Artificial Sequence
  Synthetic oligonucleotide
gccgtgatgcaggttgaggaaactgcgata

SEQ ID NO: 83408 - DNA, 30 bp, Artificial Sequence
  Synthetic oligonucleotide
atcgatagagcgtgggcgacatgaaggata

SEQ ID NO: 83409 - DNA, 30 bp, Artificial Sequence
  Synthetic oligonucleotide
ggaggcagagaccaccatgcggtcaggata

SEQ ID NO: 83410 - DNA, 30 bp, Artificial Sequence
  Synthetic oligonucleotide
gcgaggaggtaagattgcgcggataggata

SEQ ID NO: 83411 - DNA, 30 bp, Artificial Sequence
  Synthetic oligonucleotide
ggtctcaaaggggtaagcaacgaccggata

SEQ ID NO: 83412 - DNA, 30 bp, Artificial Sequence
  Synthetic oligonucleotide
gaggcaatcgagtgaaaacgatcgcggata

SEQ ID NO: 83413 - DNA, 30 bp, Artificial Sequence
  Synthetic oligonucleotide
cgtcaaaccataattcgtgctgcagggata

SEQ ID NO: 83414 - DNA, 30 bp, Artificial Sequence
  Synthetic oligonucleotide
ttcgcaggtggggcaacatggggcgggata

SEQ ID NO: 83415 - DNA, 30 bp, Artificial Sequence
  Synthetic oligonucleotide
aggggcacccccacaagcttctcggggata

SEQ ID NO: 83416 - DNA, 30 bp, Artificial Sequence
  Synthetic oligonucleotide
ctgcggcgtgggctgcttcgcaagtggata

SEQ ID NO: 83417 - DNA, 30 bp, Artificial Sequence
  Synthetic oligonucleotide
ggatccaggaatactttaatggcaatgata

SEQ ID NO: 83418 - DNA, 30 bp, Artificial Sequence
  Synthetic oligonucleotide
ccaccaaggccaacggattatggaatgata

SEQ ID NO: 83419 - DNA, 30 bp, Artificial Sequence
  Synthetic oligonucleotide
cacgtatccagctaaaagtataacatgata

SEQ ID NO: 83420 - DNA, 30 bp, Artificial Sequence
  Synthetic oligonucleotide
aggtatggtggacccgacaatatcatgata

SEQ ID NO: 83421 - DNA, 30 bp, Artificial Sequence
  Synthetic oligonucleotide
caatggaccgaggcgaaggagcacctgata

SEQ ID NO: 83422 - DNA, 30 bp, Artificial Sequence
  Synthetic oligonucleotide
ggctagggtggattatttgcaaaagtgata

SEQ ID NO: 83423 - DNA, 30 bp, Artificial Sequence
  Synthetic oligonucleotide
attcaggatagagaattacaagcagtgata

SEQ ID NO: 83424 - DNA, 30 bp, Artificial Sequence
  Synthetic oligonucleotide
acacataagcaagctcctaggcatgtgata

SEQ ID NO: 83425 - DNA, 30 bp, Artificial Sequence
  Synthetic oligonucleotide
agggacagggctcagcaagcaacgttgata

SEQ ID NO: 83426 - DNA, 30 bp, Artificial Sequence
  Synthetic oligonucleotide
ggagagacacatcaggagatcgtaaatata

SEQ ID NO: 83427 - DNA, 30 bp, Artificial Sequence
  Synthetic oligonucleotide
aaacctgaaaccaccagcaggaacaatata

SEQ ID NO: 83428 - DNA, 30 bp, Artificial Sequence
  Synthetic oligonucleotide
actgagtgacaaccatctgacacgaatata

SEQ ID NO: 83429 - DNA, 30 bp, Artificial Sequence
  Synthetic oligonucleotide
agatcctgacccacgggtaacaacgatata

SEQ ID NO: 83430 - DNA, 30 bp, Artificial Sequence
  Synthetic oligonucleotide
atatgggacatggtaatcgaccactatata

SEQ ID NO: 83431 - DNA, 30 bp, Artificial Sequence
  Synthetic oligonucleotide
aaaggggaataacagtccaacgggtatata

SEQ ID NO: 83432 - DNA, 30 bp, Artificial Sequence
  Synthetic oligonucleotide
taatacgacgggagtaggaaaccaactata

SEQ ID NO: 83433 - DNA, 30 bp, Artificial Sequence
  Synthetic oligonucleotide
agtgtgcgccagctacatgtgcgcactata

SEQ ID NO: 83434 - DNA, 30 bp, Artificial Sequence
  Synthetic oligonucleotide
tcttgatctaaagctatccgagtgactata

SEQ ID NO: 83435 - DNA, 30 bp, Artificial Sequence
  Synthetic oligonucleotide
tacggagtaagcgtctggtaccgtactata

SEQ ID NO: 83436 - DNA, 27 bp, Artificial Sequence
  Synthetic oligonucleotide
gtggcagaacgagtgatcgggcctata

SEQ ID NO: 83437 - DNA, 30 bp, Artificial Sequence
  Synthetic oligonucleotide
gtggatgtgtgaaatctaggcagtgctata

SEQ ID NO: 83438 - DNA, 30 bp, Artificial Sequence
  Synthetic oligonucleotide
acggcagcaaccaaggcagtcggtgctata

SEQ ID NO: 83439 - DNA, 30 bp, Artificial Sequence
  Synthetic oligonucleotide
caacaaggtagacataagaccaactctata

SEQ ID NO: 83440 - DNA, 30 bp, Artificial Sequence
  Synthetic oligonucleotide
aaacggtataaaggtaacatgaacagtata

SEQ ID NO: 83441 - DNA, 30 bp, Artificial Sequence
  Synthetic oligonucleotide
cgatgacaatagtccactgtatgtagtata

SEQ ID NO: 83442 - DNA, 30 bp, Artificial Sequence
  Synthetic oligonucleotide
tgtaggtggcgacgctgctggcagggtata

SEQ ID NO: 83443 - DNA, 30 bp, Artificial Sequence
  Synthetic oligonucleotide
gaactggccgggtgcactctcaaccttata

SEQ ID NO: 83444 - DNA, 30 bp, Artificial Sequence
  Synthetic oligonucleotide
acatcaagtacccccatcacaagccttata

SEQ ID NO: 83445 - DNA, 30 bp, Artificial Sequence
  Synthetic oligonucleotide
agcaccacatattagacgaaccgcaaacta

SEQ ID NO: 83446 - DNA, 30 bp, Artificial Sequence
  Synthetic oligonucleotide
atcgaggagcgataaagcgtgccacaacta

SEQ ID NO: 83447 - DNA, 30 bp, Artificial Sequence
  Synthetic oligonucleotide
aggtcatgacctcacaccgagtgccaacta

SEQ ID NO: 83448 - DNA, 30 bp, Artificial Sequence
  Synthetic oligonucleotide
gcgacagtagccatccatcccacgcaacta

SEQ ID NO: 83449 - DNA, 30 bp, Artificial Sequence
  Synthetic oligonucleotide
gcaaggagaactatcatatattgtcaacta

SEQ ID NO: 83450 - DNA, 30 bp, Artificial Sequence
  Synthetic oligonucleotide
gcatggattgtacccatgggtgaagaacta

SEQ ID NO: 83451 - DNA, 30 bp, Artificial Sequence
  Synthetic oligonucleotide
tcaagatcacttcgatttaagctcgaacta

SEQ ID NO: 83452 - DNA, 30 bp, Artificial Sequence
  Synthetic oligonucleotide
tcaagggcagtggtatagacaggctaacta

SEQ ID NO: 83453 - DNA, 30 bp, Artificial Sequence
  Synthetic oligonucleotide
ccggacgcatatgaagtggaagtctaacta

SEQ ID NO: 83454 - DNA, 30 bp, Artificial Sequence
  Synthetic oligonucleotide
aacgtcctcccgacaatcagttcgtaacta

SEQ ID NO: 83455 - DNA, 30 bp, Artificial Sequence
  Synthetic oligonucleotide
aggatactgtaaacagagtcgtacacacta

SEQ ID NO: 83456 - DNA, 30 bp, Artificial Sequence
  Synthetic oligonucleotide
gggcgcgaacatcatccatagaagacacta

SEQ ID NO: 83457 - DNA, 30 bp, Artificial Sequence
  Synthetic oligonucleotide
tgaagaggtaagaagatgagagagacacta

SEQ ID NO: 83458 - DNA, 30 bp, Artificial Sequence
  Synthetic oligonucleotide
tcgtctacttatgttaaatgtcatacacta

SEQ ID NO: 83459 - DNA, 30 bp, Artificial Sequence
  Synthetic oligonucleotide
ctcatatgactagagtgcccgattacacta

SEQ ID NO: 83460 - DNA, 30 bp, Artificial Sequence
  Synthetic oligonucleotide
tgctgttatgctgtactggagtgtgcacta

SEQ ID NO: 83461 - DNA, 30 bp, Artificial Sequence
  Synthetic oligonucleotide
tgagtagtggttaccacaacggaatcacta

SEQ ID NO: 83462 - DNA, 30 bp, Artificial Sequence
  Synthetic oligonucleotide
aaggaggggggcaaggtgtgcgcatcacta

SEQ ID NO: 83463 - DNA, 30 bp, Artificial Sequence
  Synthetic oligonucleotide
agtcgaagccaaatccggcaatccagacta

SEQ ID NO: 83464 - DNA, 30 bp, Artificial Sequence
  Synthetic oligonucleotide
gggataaatcgacatcacatgctcagacta

SEQ ID NO: 83465 - DNA, 30 bp, Artificial Sequence
  Synthetic oligonucleotide
acggccgttcggaagaataaatcgagacta

SEQ ID NO: 83466 - DNA, 30 bp, Artificial Sequence
  Synthetic oligonucleotide
tcctaagttcacaagtctggtcgccgacta

SEQ ID NO: 83467 - DNA, 30 bp, Artificial Sequence
  Synthetic oligonucleotide
aggctgacgctacaagcacatcttcgacta

SEQ ID NO: 83468 - DNA, 30 bp, Artificial Sequence
  Synthetic oligonucleotide
gggcgggaggagaggacggagtaaggacta

SEQ ID NO: 83469 - DNA, 30 bp, Artificial Sequence
  Synthetic oligonucleotide
ggggcaggctaagctcagcgggtaggacta

SEQ ID NO: 83470 - DNA, 30 bp, Artificial Sequence
  Synthetic oligonucleotide
gtaagtgcccagggtgtaaccacatgacta

SEQ ID NO: 83471 - DNA, 30 bp, Artificial Sequence
  Synthetic oligonucleotide
gcgaacaaagagtacgataccgcaatacta

SEQ ID NO: 83472 - DNA, 30 bp, Artificial Sequence
  Synthetic oligonucleotide
cacaaactaagagagcgggccaaagtacta

SEQ ID NO: 83473 - DNA, 30 bp, Artificial Sequence
  Synthetic oligonucleotide
catcacgggcgattgatctaaaaggtacta

SEQ ID NO: 83474 - DNA, 30 bp, Artificial Sequence
  Synthetic oligonucleotide
caatggtaatgatgttccacccggaaccta

SEQ ID NO: 83475 - DNA, 30 bp, Artificial Sequence
  Synthetic oligonucleotide
aagtaagcgatctcctgggtcaccgaccta

SEQ ID NO: 83476 - DNA, 30 bp, Artificial Sequence
  Synthetic oligonucleotide
agaagcaccaacttacgacgcttcgaccta

SEQ ID NO: 83477 - DNA, 30 bp, Artificial Sequence
  Synthetic oligonucleotide
gccgatatccgaagcaacttaagtgaccta

SEQ ID NO: 83478 - DNA, 30 bp, Artificial Sequence
  Synthetic oligonucleotide
gtagagtgggcaatcggaaataactaccta

SEQ ID NO: 83479 - DNA, 30 bp, Artificial Sequence
  Synthetic oligonucleotide
agggtgaaaacttgcgaaaacgtgtaccta

SEQ ID NO: 83480 - DNA, 30 bp, Artificial Sequence
  Synthetic oligonucleotide
aggcaatggatcgtagtttcataaacccta

SEQ ID NO: 83481 - DNA, 30 bp, Artificial Sequence
  Synthetic oligonucleotide
cggggagttcggtggaaaaattggccccta

SEQ ID NO: 83482 - DNA, 30 bp, Artificial Sequence
  Synthetic oligonucleotide
agttatccaatagaacatcgttgcgcccta

SEQ ID NO: 83483 - DNA, 30 bp, Artificial Sequence
  Synthetic oligonucleotide
atgggggtcagccctgcttacagtggccta

SEQ ID NO: 83484 - DNA, 30 bp, Artificial Sequence
  Synthetic oligonucleotide
cgtcctttaagagtagtagcgtgctgccta

SEQ ID NO: 83485 - DNA, 30 bp, Artificial Sequence
  Synthetic oligonucleotide
atgtaaagataaccgtcattgacgatccta

SEQ ID NO: 83486 - DNA, 30 bp, Artificial Sequence
  Synthetic oligonucleotide
gaagaaggagaatgcactgggaatatccta

SEQ ID NO: 83487 - DNA, 30 bp, Artificial Sequence
  Synthetic oligonucleotide
tcaacggttgatggaaggaaagggctccta

SEQ ID NO: 83488 - DNA, 30 bp, Artificial Sequence
  Synthetic oligonucleotide
aaggactcttgaaataatggtgttctccta

SEQ ID NO: 83489 - DNA, 30 bp, Artificial Sequence
  Synthetic oligonucleotide
cgatgccatatgtttatccataatcagcta

SEQ ID NO: 83490 - DNA, 30 bp, Artificial Sequence
  Synthetic oligonucleotide
gcaggacctttaaatcaacatatcgagcta

SEQ ID NO: 83491 - DNA, 30 bp, Artificial Sequence
  Synthetic oligonucleotide
ctggtaagcattcaccaaatcaacccgcta

SEQ ID NO: 83492 - DNA, 30 bp, Artificial Sequence
  Synthetic oligonucleotide
accaagggggaccacgagttttacgcgcta

SEQ ID NO: 83493 - DNA, 30 bp, Artificial Sequence
  Synthetic oligonucleotide
aaggggcgcgctagactcagtttggcgcta

SEQ ID NO: 83494 - DNA, 30 bp, Artificial Sequence
  Synthetic oligonucleotide
accaacagggttaaattagcatttgcgcta

SEQ ID NO: 83495 - DNA, 30 bp, Artificial Sequence
  Synthetic oligonucleotide
aggaaaacgacgtagactcgcatctcgcta

SEQ ID NO: 83496 - DNA, 30 bp, Artificial Sequence
  Synthetic oligonucleotide
ggtctacgattccaatgatataagaggcta

SEQ ID NO: 83497 - DNA, 30 bp, Artificial Sequence
  Synthetic oligonucleotide
cgaggaatatgagccacgcgtagtaggcta

SEQ ID NO: 83498 - DNA, 30 bp, Artificial Sequence
  Synthetic oligonucleotide
acacgcaacaaatagtttccatcgcggcta

SEQ ID NO: 83499 - DNA, 30 bp, Artificial Sequence
  Synthetic oligonucleotide
ggcatgagggattacagtaccaatcggcta

SEQ ID NO: 83500 - DNA, 30 bp, Artificial Sequence
  Synthetic oligonucleotide
agcggaggtcaacagaagaagtctcggcta

SEQ ID NO: 83501 - DNA, 30 bp, Artificial Sequence
  Synthetic oligonucleotide
tgcaagagcgaatagctatgataagggcta

SEQ ID NO: 83502 - DNA, 30 bp, Artificial Sequence
  Synthetic oligonucleotide
gtgacgaaagtctctcaaataaccgggcta

SEQ ID NO: 83503 - DNA, 30 bp, Artificial Sequence
  Synthetic oligonucleotide
acgcactctggtgacaaaaccctcgggcta

SEQ ID NO: 83504 - DNA, 31 bp, Artificial Sequence
  Synthetic oligonucleotide
agacgcgaagcgtagaatacgtggggggcta

SEQ ID NO: 83505 - DNA, 30 bp, Artificial Sequence
  Synthetic oligonucleotide
aacttatttgccttgatagaaaatgggcta

SEQ ID NO: 83506 - DNA, 30 bp, Artificial Sequence
  Synthetic oligonucleotide
gaagaatgttcatcaaatggcggatggcta

SEQ ID NO: 83507 - DNA, 30 bp, Artificial Sequence
  Synthetic oligonucleotide
gggtgtaagacagtgttgactttttggcta

SEQ ID NO: 83508 - DNA, 30 bp, Artificial Sequence
  Synthetic oligonucleotide
taggacgccaatctctatgggtcaatgcta

SEQ ID NO: 83509 - DNA, 30 bp, Artificial Sequence
  Synthetic oligonucleotide
gcggcggcacgtgcagtgctacgaatgcta

SEQ ID NO: 83510 - DNA, 30 bp, Artificial Sequence
  Synthetic oligonucleotide
ctggtagtttgacgaaagtgaaacatgcta

SEQ ID NO: 83511 - DNA, 30 bp, Artificial Sequence
  Synthetic oligonucleotide
gggcaaggaggttcctttcgcggtatgcta

SEQ ID NO: 83512 - DNA, 30 bp, Artificial Sequence
  Synthetic oligonucleotide
ccagctaacccgtattaaagtcctctgcta

SEQ ID NO: 83513 - DNA, 30 bp, Artificial Sequence
  Synthetic oligonucleotide
ataggtgtggcggataagtcagctctgcta

SEQ ID NO: 83514 - DNA, 30 bp, Artificial Sequence
  Synthetic oligonucleotide
aagaacgaaccaggcattgggaaggtgcta

SEQ ID NO: 83515 - DNA, 30 bp, Artificial Sequence
  Synthetic oligonucleotide
gcatgtgccgcgagaaaacactaggtgcta

SEQ ID NO: 83516 - DNA, 30 bp, Artificial Sequence
  Synthetic oligonucleotide
gcgtgtgccgagtaacggaaagtattgcta

SEQ ID NO: 83517 - DNA, 30 bp, Artificial Sequence
  Synthetic oligonucleotide
agcgagttggtagaattaatgtacaatcta

SEQ ID NO: 83518 - DNA, 30 bp, Artificial Sequence
  Synthetic oligonucleotide
aggctggggtggtactcatcctgcaatcta

SEQ ID NO: 83519 - DNA, 30 bp, Artificial Sequence
  Synthetic oligonucleotide
tcgtgtggtctagctcttaccccacatcta

SEQ ID NO: 83520 - DNA, 30 bp, Artificial Sequence
  Synthetic oligonucleotide
agggtgtgaatataaaagcgtcaccatcta

SEQ ID NO: 83521 - DNA, 30 bp, Artificial Sequence
  Synthetic oligonucleotide
cagagcgtaagatcttcatgatgtcatcta

SEQ ID NO: 83522 - DNA, 30 bp, Artificial Sequence
  Synthetic oligonucleotide
cggaggttagtattcccaagaaaagatcta

SEQ ID NO: 83523 - DNA, 30 bp, Artificial Sequence
  Synthetic oligonucleotide
gtggaagggacgctcagatgttcggatcta

SEQ ID NO: 83524 - DNA, 30 bp, Artificial Sequence
  Synthetic oligonucleotide
ttgatggggcccatctacacgagggatcta

SEQ ID NO: 83525 - DNA, 30 bp, Artificial Sequence
  Synthetic oligonucleotide
cgacgactgcgggaggtatcgctggatcta

SEQ ID NO: 83526 - DNA, 30 bp, Artificial Sequence
  Synthetic oligonucleotide
ggactaagccacgtgggaccagtttatcta

SEQ ID NO: 83527 - DNA, 30 bp, Artificial Sequence
  Synthetic oligonucleotide
ttcgaggcagatgcgtcggtgcctgctcta

SEQ ID NO: 83528 - DNA, 30 bp, Artificial Sequence
  Synthetic oligonucleotide
ggcatccaaacaggagtgaatcaaagtcta

SEQ ID NO: 83529 - DNA, 30 bp, Artificial Sequence
  Synthetic oligonucleotide
gcgcaatgtgctattgcatagttgcgtcta

SEQ ID NO: 83530 - DNA, 30 bp, Artificial Sequence
  Synthetic oligonucleotide
atgggagagcaaatgtcggttcgaggtcta

SEQ ID NO: 83531 - DNA, 30 bp, Artificial Sequence
  Synthetic oligonucleotide
atcgaaccaaaacactcggaatagggtcta

SEQ ID NO: 83532 - DNA, 30 bp, Artificial Sequence
  Synthetic oligonucleotide
ggcttccaacactagaagggaaactgtcta

SEQ ID NO: 83533 - DNA, 30 bp, Artificial Sequence
  Synthetic oligonucleotide
acaggacgccaacgggagtctacctgtcta

SEQ ID NO: 83534 - DNA, 30 bp, Artificial Sequence
  Synthetic oligonucleotide
cagtggggctagtataacgcgacacttcta

SEQ ID NO: 83535 - DNA, 30 bp, Artificial Sequence
  Synthetic oligonucleotide
agagcacaactaaagctatgaaaccttcta

SEQ ID NO: 83536 - DNA, 30 bp, Artificial Sequence
  Synthetic oligonucleotide
tgcggtccactagtgagaagcatgcttcta

SEQ ID NO: 83537 - DNA, 30 bp, Artificial Sequence
  Synthetic oligonucleotide
ctctgtagaaaatgcatggtgccaaaagta

SEQ ID NO: 83538 - DNA, 30 bp, Artificial Sequence
  Synthetic oligonucleotide
taggcagcagggacctacagcgcaaaagta

SEQ ID NO: 83539 - DNA, 30 bp, Artificial Sequence
  Synthetic oligonucleotide
aggctcaacaatctgtccttcaccaaagta

SEQ ID NO: 83540 - DNA, 30 bp, Artificial Sequence
  Synthetic oligonucleotide
agcaaggctggcccatcactgggcaaagta

SEQ ID NO: 83541 - DNA, 30 bp, Artificial Sequence
  Synthetic oligonucleotide
aaatcggtacctacgtgacagaaccaagta

SEQ ID NO: 83542 - DNA, 30 bp, Artificial Sequence
  Synthetic oligonucleotide
tcgcgggtcaaatatggtatgactcaagta

SEQ ID NO: 83543 - DNA, 30 bp, Artificial Sequence
  Synthetic oligonucleotide
tatcactggctgatacaacggtacgaagta

SEQ ID NO: 83544 - DNA, 30 bp, Artificial Sequence
  Synthetic oligonucleotide
tcattgtaagtgggattcgatatcgaagta

SEQ ID NO: 83545 - DNA, 30 bp, Artificial Sequence
  Synthetic oligonucleotide
tgaaaactgggtacaaaacatgatgaagta

SEQ ID NO: 83546 - DNA, 30 bp, Artificial Sequence
  Synthetic oligonucleotide
ggctcaaagggtaagggttctcgtgaagta

SEQ ID NO: 83547 - DNA, 30 bp, Artificial Sequence
  Synthetic oligonucleotide
tagtcggagcgggacctctcagcgtaagta

SEQ ID NO: 83548 - DNA, 30 bp, Artificial Sequence
  Synthetic oligonucleotide
aggagtgcataaaaccaacacgtttaagta

SEQ ID NO: 83549 - DNA, 30 bp, Artificial Sequence
  Synthetic oligonucleotide
cgtccaaggtatgtttctcacctcacagta

SEQ ID NO: 83550 - DNA, 30 bp, Artificial Sequence
  Synthetic oligonucleotide
ggtgatttggggattacgattgggacagta

SEQ ID NO: 83551 - DNA, 30 bp, Artificial Sequence
  Synthetic oligonucleotide
ggtcccaagagcgacaggatctaaccagta

SEQ ID NO: 83552 - DNA, 30 bp, Artificial Sequence
  Synthetic oligonucleotide
gcgctagtagcaagggcaagaccaccagta

SEQ ID NO: 83553 - DNA, 30 bp, Artificial Sequence
  Synthetic oligonucleotide
cgtactcaccccaccgggtccagaccagta

SEQ ID NO: 83554 - DNA, 30 bp, Artificial Sequence
  Synthetic oligonucleotide
cagctggtcgcggttaagcgttctccagta

SEQ ID NO: 83555 - DNA, 30 bp, Artificial Sequence
  Synthetic oligonucleotide
cgttcaacaccacggactggaatcgcagta

SEQ ID NO: 83556 - DNA, 30 bp, Artificial Sequence
  Synthetic oligonucleotide
tagtcatacggagatatggggggggcagta

SEQ ID NO: 83557 - DNA, 30 bp, Artificial Sequence
  Synthetic oligonucleotide
gagcgcgggacagtaataccagggtcagta

SEQ ID NO: 83558 - DNA, 30 bp, Artificial Sequence
  Synthetic oligonucleotide
tcggtaagaaaccagagataacgcagagta

SEQ ID NO: 83559 - DNA, 30 bp, Artificial Sequence
  Synthetic oligonucleotide
ccaagggactgccgaagtgtttgcagagta

SEQ ID NO: 83560 - DNA, 30 bp, Artificial Sequence
  Synthetic oligonucleotide
aagactgggtccagcttgcctgcgagagta

SEQ ID NO: 83561 - DNA, 30 bp, Artificial Sequence
  Synthetic oligonucleotide
ctgtggatatgtctattttcgagtagagta

SEQ ID NO: 83562 - DNA, 30 bp, Artificial Sequence
  Synthetic oligonucleotide
atggcaattgtgtgcgttgtgattagagta

SEQ ID NO: 83563 - DNA, 30 bp, Artificial Sequence
  Synthetic oligonucleotide
ctcggtattgaagagatgagtcaacgagta

SEQ ID NO: 83564 - DNA, 30 bp, Artificial Sequence
  Synthetic oligonucleotide
aagcaaataactgcgctagactcgcgagta

SEQ ID NO: 83565 - DNA, 30 bp, Artificial Sequence
  Synthetic oligonucleotide
gcccacgcatgacgtcagaacagtcgagta

SEQ ID NO: 83566 - DNA, 30 bp, Artificial Sequence
  Synthetic oligonucleotide
ttgcgatccgataatgattggctaggagta

SEQ ID NO: 83567 - DNA, 30 bp, Artificial Sequence
  Synthetic oligonucleotide
ctggacgtgaacaattggctgtagggagta

SEQ ID NO: 83568 - DNA, 30 bp, Artificial Sequence
  Synthetic oligonucleotide
acacggcggacgaaagacggtgaatgagta

SEQ ID NO: 83569 - DNA, 30 bp, Artificial Sequence
  Synthetic oligonucleotide
tcagatacattcgtgacaaatcacatagta

SEQ ID NO: 83570 - DNA, 30 bp, Artificial Sequence
  Synthetic oligonucleotide
tgagtcctagctaatcgacaataactagta

SEQ ID NO: 83571 - DNA, 30 bp, Artificial Sequence
  Synthetic oligonucleotide
tcgacctgattacgttcagtacaagtagta

SEQ ID NO: 83572 - DNA, 30 bp, Artificial Sequence
  Synthetic oligonucleotide
gcaagtccattgacagggaaaatcgtagta

SEQ ID NO: 83573 - DNA, 30 bp, Artificial Sequence
  Synthetic oligonucleotide
ctgggacgtacacacaacgaccaggtagta

SEQ ID NO: 83574 - DNA, 30 bp, Artificial Sequence
  Synthetic oligonucleotide
agtccatacagggacgagggcagggtagta

SEQ ID NO: 83575 - DNA, 30 bp, Artificial Sequence
  Synthetic oligonucleotide
caatacgttgaatcctaggaaagcttagta

SEQ ID NO: 83576 - DNA, 30 bp, Artificial Sequence
  Synthetic oligonucleotide
cgtgtgctacacgccacgtgcaagttagta

SEQ ID NO: 83577 - DNA, 30 bp, Artificial Sequence
  Synthetic oligonucleotide
cacacggcaatgaacacatgaactttagta

SEQ ID NO: 83578 - DNA, 30 bp, Artificial Sequence
  Synthetic oligonucleotide
aggccccactcagctaaaagcctaaacgta

SEQ ID NO: 83579 - DNA, 30 bp, Artificial Sequence
  Synthetic oligonucleotide
ccgtacacacaaggaaggtcatcgaacgta

SEQ ID NO: 83580 - DNA, 30 bp, Artificial Sequence
  Synthetic oligonucleotide
gcacctcatgaaagtacaagaatccacgta

SEQ ID NO: 83581 - DNA, 30 bp, Artificial Sequence
  Synthetic oligonucleotide
gtaagctcagagatatgagaactccacgta

SEQ ID NO: 83582 - DNA, 30 bp, Artificial Sequence
  Synthetic oligonucleotide
gagtccagggactcgccggaagatcacgta

SEQ ID NO: 83583 - DNA, 30 bp, Artificial Sequence
  Synthetic oligonucleotide
cgggtatgatctcgttaaaagtgcgacgta

SEQ ID NO: 83584 - DNA, 30 bp, Artificial Sequence
  Synthetic oligonucleotide
ggtcatgttgcttgtagccgaagggacgta

SEQ ID NO: 83585 - DNA, 30 bp, Artificial Sequence
  Synthetic oligonucleotide
cgggagagcaacgtaccaagaacatacgta

SEQ ID NO: 83586 - DNA, 30 bp, Artificial Sequence
  Synthetic oligonucleotide
gggcattccgtataagggttccaaaccgta

SEQ ID NO: 83587 - DNA, 30 bp, Artificial Sequence
  Synthetic oligonucleotide
acgaacacgactttgacctcgctcaccgta

SEQ ID NO: 83588 - DNA, 30 bp, Artificial Sequence
  Synthetic oligonucleotide
agtgaaagagaaggcttaaaagggcccgta

SEQ ID NO: 83589 - DNA, 30 bp, Artificial Sequence
  Synthetic oligonucleotide
agcctcatgcgaacataagttatgcccgta

SEQ ID NO: 83590 - DNA, 30 bp, Artificial Sequence
  Synthetic oligonucleotide
cgtagttaaaagtcacgttagcctcccgta

SEQ ID NO: 83591 - DNA, 30 bp, Artificial Sequence
  Synthetic oligonucleotide
actcaacgggaaatcaggataagggccgta

SEQ ID NO: 83592 - DNA, 30 bp, Artificial Sequence
  Synthetic oligonucleotide
tcacacctaacgtgatatacaaatgccgta

SEQ ID NO: 83593 - DNA, 30 bp, Artificial Sequence
  Synthetic oligonucleotide
gatggtgtcagacaccaggtcatatccgta

SEQ ID NO: 83594 - DNA, 30 bp, Artificial Sequence
  Synthetic oligonucleotide
tcgggacggtttgtagctttgatatccgta

SEQ ID NO: 83595 - DNA, 30 bp, Artificial Sequence
  Synthetic oligonucleotide
gtctagaaccggagaccagcgttgtccgta

SEQ ID NO: 83596 - DNA, 30 bp, Artificial Sequence
  Synthetic oligonucleotide
aacgggtcggtattacttaaaatccgcgta

SEQ ID NO: 83597 - DNA, 30 bp, Artificial Sequence
  Synthetic oligonucleotide
tctgatcggaaagtaggccatcaaggcgta

SEQ ID NO: 83598 - DNA, 30 bp, Artificial Sequence
  Synthetic oligonucleotide
cgtagggcgtgcaaccattggataggcgta

SEQ ID NO: 83599 - DNA, 30 bp, Artificial Sequence
  Synthetic oligonucleotide
tcgcaagccaaagcgtaatcccagggcgta

SEQ ID NO: 83600 - DNA, 30 bp, Artificial Sequence
  Synthetic oligonucleotide
tacttgcgagataccgcaatatctggcgta

SEQ ID NO: 83601 - DNA, 30 bp, Artificial Sequence
  Synthetic oligonucleotide
aaggcatcagcagtgcctgacattggcgta

SEQ ID NO: 83602 - DNA, 30 bp, Artificial Sequence
  Synthetic oligonucleotide
gggcggtgtggagtctgcaacaagtgcgta

SEQ ID NO: 83603 - DNA, 30 bp, Artificial Sequence
  Synthetic oligonucleotide
tcgttcgcgtaaagcttcaatctaatcgta

SEQ ID NO: 83604 - DNA, 30 bp, Artificial Sequence
  Synthetic oligonucleotide
atcgagtaccaataggtacaccgcatcgta

SEQ ID NO: 83605 - DNA, 30 bp, Artificial Sequence
  Synthetic oligonucleotide
acggcccctaattgacaactatgcatcgta

SEQ ID NO: 83606 - DNA, 30 bp, Artificial Sequence
  Synthetic oligonucleotide
ttaggcgtagatagcgccatctcactcgta

SEQ ID NO: 83607 - DNA, 31 bp, Artificial Sequence
  Synthetic oligonucleotide
acgtcattgagaaatctgaatctatttcgta

SEQ ID NO: 83608 - DNA, 30 bp, Artificial Sequence
  Synthetic oligonucleotide
tcgaaacaattagctctcatagctttcgta

SEQ ID NO: 83609 - DNA, 30 bp, Artificial Sequence
  Synthetic oligonucleotide
ggctaaggggggttaactcattctttcgta

SEQ ID NO: 83610 - DNA, 30 bp, Artificial Sequence
  Synthetic oligonucleotide
acggtgaacctcatcacaggtacaaaggta

SEQ ID NO: 83611 - DNA, 30 bp, Artificial Sequence
  Synthetic oligonucleotide
tacacctggtaccgccgtaaccacaaggta

SEQ ID NO: 83612 - DNA, 30 bp, Artificial Sequence
  Synthetic oligonucleotide
gcggacctcgtgatatagggctcacaggta

SEQ ID NO: 83613 - DNA, 30 bp, Artificial Sequence
  Synthetic oligonucleotide
gcgcgatacagtgggtgagatttcgaggta

SEQ ID NO: 83614 - DNA, 30 bp, Artificial Sequence
  Synthetic oligonucleotide
ggcctggctaacgtaagagataaataggta

SEQ ID NO: 83615 - DNA, 30 bp, Artificial Sequence
  Synthetic oligonucleotide
gtacgagcacgttccacacggcaataggta

SEQ ID NO: 83616 - DNA, 30 bp, Artificial Sequence
  Synthetic oligonucleotide
tacgaaagacagtccgagcatgcctaggta

SEQ ID NO: 83617 - DNA, 30 bp, Artificial Sequence
  Synthetic oligonucleotide
tgaggaaccaaaatacccaaacattaggta

SEQ ID NO: 83618 - DNA, 30 bp, Artificial Sequence
  Synthetic oligonucleotide
atgggaacttcaactggctcatgaacggta

SEQ ID NO: 83619 - DNA, 30 bp, Artificial Sequence
  Synthetic oligonucleotide
cgagccccgttgccaagacaatttacggta

SEQ ID NO: 83620 - DNA, 30 bp, Artificial Sequence
  Synthetic oligonucleotide
ataacctggtggtggccgtgcatgccggta

SEQ ID NO: 83621 - DNA, 30 bp, Artificial Sequence
  Synthetic oligonucleotide
aggcgagtgcacgcgggtccagtcgcggta

SEQ ID NO: 83622 - DNA, 30 bp, Artificial Sequence
  Synthetic oligonucleotide
gcttaagggaggttcaaaggtgaatcggta

SEQ ID NO: 83623 - DNA, 30 bp, Artificial Sequence
  Synthetic oligonucleotide
gcaagatccgcgaaagtgggttaatcggta

SEQ ID NO: 83624 - DNA, 30 bp, Artificial Sequence
  Synthetic oligonucleotide
cgtctcacgtaatactcgttaaagtcggta

SEQ ID NO: 83625 - DNA, 30 bp, Artificial Sequence
  Synthetic oligonucleotide
caatagtactaaaggagtgttgcaagggta

SEQ ID NO: 83626 - DNA, 30 bp, Artificial Sequence
  Synthetic oligonucleotide
taggcatgagcctctcacgtgactagggta

SEQ ID NO: 83627 - DNA, 30 bp, Artificial Sequence
  Synthetic oligonucleotide
cgtagatgtccagagggtggctcgcgggta

SEQ ID NO: 83628 - DNA, 30 bp, Artificial Sequence
  Synthetic oligonucleotide
cacgtcgtaactctgtaatgaaatcgggta

SEQ ID NO: 83629 - DNA, 30 bp, Artificial Sequence
  Synthetic oligonucleotide
cgactatcgagcggctaaaatattcgggta

SEQ ID NO: 83630 - DNA, 30 bp, Artificial Sequence
  Synthetic oligonucleotide
tgggggcccttcaactgaggatcaggggta

SEQ ID NO: 83631 - DNA, 30 bp, Artificial Sequence
  Synthetic oligonucleotide
gcgagggggggaaaagataggggaggggta

SEQ ID NO: 83632 - DNA, 31 bp, Artificial Sequence
  Synthetic oligonucleotide
cggttataacaacccgcttggccgatgggta

SEQ ID NO: 83633 - DNA, 30 bp, Artificial Sequence
  Synthetic oligonucleotide
agggcagatcatgcgtgatccggttgggta

SEQ ID NO: 83634 - DNA, 30 bp, Artificial Sequence
  Synthetic oligonucleotide
ccacaagcggtgtagtacctgcaaatggta

SEQ ID NO: 83635 - DNA, 30 bp, Artificial Sequence
  Synthetic oligonucleotide
gggcgcttggctgtgatccacaggatggta

SEQ ID NO: 83636 - DNA, 30 bp, Artificial Sequence
  Synthetic oligonucleotide
tggtaaggtaagaggaggcgttggatggta

SEQ ID NO: 83637 - DNA, 30 bp, Artificial Sequence
  Synthetic oligonucleotide
accatcaacggtagagctggccgtatggta

SEQ ID NO: 83638 - DNA, 30 bp, Artificial Sequence
  Synthetic oligonucleotide
acatcggtggaagccaggatcggtatggta

SEQ ID NO: 83639 - DNA, 30 bp, Artificial Sequence
  Synthetic oligonucleotide
agccgcgcgaaggagaaagacctactggta

SEQ ID NO: 83640 - DNA, 30 bp, Artificial Sequence
  Synthetic oligonucleotide
gctcgcaaaagtgcgaacacacatctggta

SEQ ID NO: 83641 - DNA, 30 bp, Artificial Sequence
  Synthetic oligonucleotide
tagcgtaggcactcgaaacgttatttggta

SEQ ID NO: 83642 - DNA, 30 bp, Artificial Sequence
  Synthetic oligonucleotide
gcaggaagtaagtcgcctctagctttggta

SEQ ID NO: 83643 - DNA, 30 bp, Artificial Sequence
  Synthetic oligonucleotide
tctgcagttcggcgagggtgtattaatgta

SEQ ID NO: 83644 - DNA, 30 bp, Artificial Sequence
  Synthetic oligonucleotide
acgcaacaggagggtactcatgtgcatgta

SEQ ID NO: 83645 - DNA, 30 bp, Artificial Sequence
  Synthetic oligonucleotide
ccattatagacaagaagggaccgtcatgta

SEQ ID NO: 83646 - DNA, 30 bp, Artificial Sequence
  Synthetic oligonucleotide
agttacagtgcacaaaacgacggcgatgta

SEQ ID NO: 83647 - DNA, 30 bp, Artificial Sequence
  Synthetic oligonucleotide
gtagggggacagggggcaattagtgatgta

SEQ ID NO: 83648 - DNA, 30 bp, Artificial Sequence
  Synthetic oligonucleotide
ccacgacttccccgtcaatgttaatatgta

SEQ ID NO: 83649 - DNA, 30 bp, Artificial Sequence
  Synthetic oligonucleotide
acgggtatagtccctacattcgtatatgta

SEQ ID NO: 83650 - DNA, 30 bp, Artificial Sequence
  Synthetic oligonucleotide
cttagagaaaaggcagatcccgcttatgta

SEQ ID NO: 83651 - DNA, 30 bp, Artificial Sequence
  Synthetic oligonucleotide
cggcacacccgacgaaaatggataactgta

SEQ ID NO: 83652 - DNA, 30 bp, Artificial Sequence
  Synthetic oligonucleotide
ttcgtaaggtcataatgagtggagactgta

SEQ ID NO: 83653 - DNA, 30 bp, Artificial Sequence
  Synthetic oligonucleotide
ccaaaggaagcgactcctctacgtcctgta

SEQ ID NO: 83654 - DNA, 30 bp, Artificial Sequence
  Synthetic oligonucleotide
ggcatatacgtgtcctggcatacgtctgta

SEQ ID NO: 83655 - DNA, 30 bp, Artificial Sequence
  Synthetic oligonucleotide
agggtaggttcagactgattcagacgtgta

SEQ ID NO: 83656 - DNA, 30 bp, Artificial Sequence
  Synthetic oligonucleotide
cgtgagttcaaattgtgtacccatggtgta

SEQ ID NO: 83657 - DNA, 30 bp, Artificial Sequence
  Synthetic oligonucleotide
atacgaaccggagagcctacgaaatgtgta

SEQ ID NO: 83658 - DNA, 30 bp, Artificial Sequence
  Synthetic oligonucleotide
gcgtagtggcaggcatttttaatatgtgta

SEQ ID NO: 83659 - DNA, 30 bp, Artificial Sequence
  Synthetic oligonucleotide
caagctatgggttgggggccaactattgta

SEQ ID NO: 83660 - DNA, 30 bp, Artificial Sequence
  Synthetic oligonucleotide
agtcacaggtgcctccagacaggagttgta

SEQ ID NO: 83661 - DNA, 30 bp, Artificial Sequence
  Synthetic oligonucleotide
tcgactccaaaaccttatgaaacggttgta

SEQ ID NO: 83662 - DNA, 30 bp, Artificial Sequence
  Synthetic oligonucleotide
acataatgacgacagacaacatctaaatta

SEQ ID NO: 83663 - DNA, 30 bp, Artificial Sequence
  Synthetic oligonucleotide
ttagacgcactggagtgcgccagacaatta

SEQ ID NO: 83664 - DNA, 30 bp, Artificial Sequence
  Synthetic oligonucleotide
agcggacgtattaaacaagagaaagcatta

SEQ ID NO: 83665 - DNA, 30 bp, Artificial Sequence
  Synthetic oligonucleotide
gcagtacaagagggacagtgcacagcatta

SEQ ID NO: 83666 - DNA, 30 bp, Artificial Sequence
  Synthetic oligonucleotide
tcgaggttacgggctgcaggcccagcatta

SEQ ID NO: 83667 - DNA, 30 bp, Artificial Sequence
  Synthetic oligonucleotide
tcttgtaaatcccacggacatatcgcatta

SEQ ID NO: 83668 - DNA, 30 bp, Artificial Sequence
  Synthetic oligonucleotide
cttagtcgaaagataactgattgtgcatta

SEQ ID NO: 83669 - DNA, 30 bp, Artificial Sequence
  Synthetic oligonucleotide
catcgatctgattgaatattgggaagatta

SEQ ID NO: 83670 - DNA, 30 bp, Artificial Sequence
  Synthetic oligonucleotide
gagctctaagtaaactccagaaccagatta

SEQ ID NO: 83671 - DNA, 30 bp, Artificial Sequence
  Synthetic oligonucleotide
attgggtgccgcaaggctagagaacgatta

SEQ ID NO: 83672 - DNA, 30 bp, Artificial Sequence
  Synthetic oligonucleotide
tgagcctatagccatacctcgtgacgatta

SEQ ID NO: 83673 - DNA, 30 bp, Artificial Sequence
  Synthetic oligonucleotide
actgcagaaatggaacgcgccacaggatta

SEQ ID NO: 83674 - DNA, 30 bp, Artificial Sequence
  Synthetic oligonucleotide
taatgggcgaataaaagacagcgcggatta

SEQ ID NO: 83675 - DNA, 30 bp, Artificial Sequence
  Synthetic oligonucleotide
cataagacaacttggtagattcggggatta

SEQ ID NO: 83676 - DNA, 30 bp, Artificial Sequence
  Synthetic oligonucleotide
caagatgtggataaactttaatggggatta

SEQ ID NO: 83677 - DNA, 30 bp, Artificial Sequence
  Synthetic oligonucleotide
tgcaatggagaagatggtggacatggatta

SEQ ID NO: 83678 - DNA, 30 bp, Artificial Sequence
  Synthetic oligonucleotide
ggctgggaattgtgttcgatctgctgatta

SEQ ID NO: 83679 - DNA, 30 bp, Artificial Sequence
  Synthetic oligonucleotide
catggcgcgtagaatatgacccgaatatta

SEQ ID NO: 83680 - DNA, 30 bp, Artificial Sequence
  Synthetic oligonucleotide
taagatcggaactgtgggatcgtgctatta

SEQ ID NO: 83681 - DNA, 30 bp, Artificial Sequence
  Synthetic oligonucleotide
cgaggggaaagaagaagaatgatattatta

SEQ ID NO: 83682 - DNA, 30 bp, Artificial Sequence
  Synthetic oligonucleotide
cgtgcctcaaatcgaccgacggtattatta

SEQ ID NO: 83683 - DNA, 30 bp, Artificial Sequence
  Synthetic oligonucleotide
taggctcgattctgttcggaagaaaactta

SEQ ID NO: 83684 - DNA, 30 bp, Artificial Sequence
  Synthetic oligonucleotide
ttgtcctatagatactcgaaagccaactta

SEQ ID NO: 83685 - DNA, 30 bp, Artificial Sequence
  Synthetic oligonucleotide
agaagagcgagaggtaacataggcaactta

SEQ ID NO: 83686 - DNA, 30 bp, Artificial Sequence
  Synthetic oligonucleotide
aggaaagttatcactaaccatcggaactta

SEQ ID NO: 83687 - DNA, 30 bp, Artificial Sequence
  Synthetic oligonucleotide
ggtcgggaaggtcagtctaaacaccactta

SEQ ID NO: 83688 - DNA, 30 bp, Artificial Sequence
  Synthetic oligonucleotide
tcgtaaagcgatccttatgtgaggcactta

SEQ ID NO: 83689 - DNA, 30 bp, Artificial Sequence
  Synthetic oligonucleotide
gaaggtcattgtcattccttaaagcgctta

SEQ ID NO: 83690 - DNA, 30 bp, Artificial Sequence
  Synthetic oligonucleotide
tcaagaggtgggcgtaatggaaatcgctta

SEQ ID NO: 83691 - DNA, 30 bp, Artificial Sequence
  Synthetic oligonucleotide
aatgggacgaagtttgacagggtcggctta

SEQ ID NO: 83692 - DNA, 30 bp, Artificial Sequence
  Synthetic oligonucleotide
agtactacagattggaaggacaagctctta

SEQ ID NO: 83693 - DNA, 30 bp, Artificial Sequence
  Synthetic oligonucleotide
acgtcggagcggtggaacaactagttctta

SEQ ID NO: 83694 - DNA, 30 bp, Artificial Sequence
  Synthetic oligonucleotide
agcggcttgcggtcagtgttgcataagtta

SEQ ID NO: 83695 - DNA, 30 bp, Artificial Sequence
  Synthetic oligonucleotide
actggttcggtgaggtctaagagacagtta

SEQ ID NO: 83696 - DNA, 30 bp, Artificial Sequence
  Synthetic oligonucleotide
ggtgcgagcttgaacgaacctgtacagtta

SEQ ID NO: 83697 - DNA, 30 bp, Artificial Sequence
  Synthetic oligonucleotide
gcacgtgcgagatactcgaatgggcagtta

SEQ ID NO: 83698 - DNA, 30 bp, Artificial Sequence
  Synthetic oligonucleotide
gcctcgaagtggattacgaaagtgcagtta

SEQ ID NO: 83699 - DNA, 30 bp, Artificial Sequence
  Synthetic oligonucleotide
cggggtttgagaatacgtccatctcagtta

SEQ ID NO: 83700 - DNA, 30 bp, Artificial Sequence
  Synthetic oligonucleotide
gcacaatcggggacatactaagcgtagtta

SEQ ID NO: 83701 - DNA, 30 bp, Artificial Sequence
  Synthetic oligonucleotide
cgctagtgatatttaccacaaacttagtta

SEQ ID NO: 83702 - DNA, 30 bp, Artificial Sequence
  Synthetic oligonucleotide
aacagcggcattctctaagcaacaacgtta

SEQ ID NO: 83703 - DNA, 30 bp, Artificial Sequence
  Synthetic oligonucleotide
gcaatgagccaaagtattgtggcaacgtta

SEQ ID NO: 83704 - DNA, 30 bp, Artificial Sequence
  Synthetic oligonucleotide
ggggctgacgacaagctgggtgtcacgtta

SEQ ID NO: 83705 - DNA, 30 bp, Artificial Sequence
  Synthetic oligonucleotide
gcgccgatcattaaaaaaccacgtacgtta

SEQ ID NO: 83706 - DNA, 30 bp, Artificial Sequence
  Synthetic oligonucleotide
acaaaaaaaaaggtaaaggtttgcccgtta

SEQ ID NO: 83707 - DNA, 30 bp, Artificial Sequence
  Synthetic oligonucleotide
cggggatagtagtgaacagctcacgcgtta

SEQ ID NO: 83708 - DNA, 30 bp, Artificial Sequence
  Synthetic oligonucleotide
agctcggagtatgccggggcctgcgcgtta

SEQ ID NO: 83709 - DNA, 30 bp, Artificial Sequence
  Synthetic oligonucleotide
tataaagagggcgcgaatacgtctgcgtta

SEQ ID NO: 83710 - DNA, 30 bp, Artificial Sequence
  Synthetic oligonucleotide
aactaaggtttacgaacgaaaatcgggtta

SEQ ID NO: 83711 - DNA, 30 bp, Artificial Sequence
  Synthetic oligonucleotide
cgatgatggcccgttagtgataccatgtta

SEQ ID NO: 83712 - DNA, 30 bp, Artificial Sequence
  Synthetic oligonucleotide
cgcattaagcgcgagttggactgcctgtta

SEQ ID NO: 83713 - DNA, 30 bp, Artificial Sequence
  Synthetic oligonucleotide
caaccaagcgggggattacgagatgtgtta

SEQ ID NO: 83714 - DNA, 30 bp, Artificial Sequence
  Synthetic oligonucleotide
tcgtgcaaaaaattttgagctcttgtgtta

SEQ ID NO: 83715 - DNA, 30 bp, Artificial Sequence
  Synthetic oligonucleotide
ctgggcgtgaacactcgcaataggaattta

SEQ ID NO: 83716 - DNA, 30 bp, Artificial Sequence
  Synthetic oligonucleotide
aaacggtgaagggcgaagcattgtcattta

SEQ ID NO: 83717 - DNA, 30 bp, Artificial Sequence
  Synthetic oligonucleotide
catggtatgatagcgcgggccaggtattta

SEQ ID NO: 83718 - DNA, 30 bp, Artificial Sequence
  Synthetic oligonucleotide
acgagagtccggcccgggggcaatccttta

SEQ ID NO: 83719 - DNA, 30 bp, Artificial Sequence
  Synthetic oligonucleotide
aacggaagtttatcgatactcggtgcttta

SEQ ID NO: 83720 - DNA, 30 bp, Artificial Sequence
  Synthetic oligonucleotide
gctaatcggactcgaacagaagaaagttta

SEQ ID NO: 83721 - DNA, 30 bp, Artificial Sequence
  Synthetic oligonucleotide
ggctacaaatccgcaatggactgatgttta

SEQ ID NO: 83722 - DNA, 30 bp, Artificial Sequence
  Synthetic oligonucleotide
catagatagtgttagtgggttgagctttta

SEQ ID NO: 83723 - DNA, 40 bp, Artificial Sequence
  Synthetic oligonucleotide
agaaactaaaatctgcaagtatcaaaggtcacacaaaaac

SEQ ID NO: 83724 - DNA, 30 bp, Artificial Sequence
  Synthetic oligonucleotide
ctcaccgcgtctaagtactgcaaacaaaac

SEQ ID NO: 83725 - DNA, 30 bp, Artificial Sequence
  Synthetic oligonucleotide
ggtcaaatgagccttcaagaagaccaaaac

SEQ ID NO: 83726 - DNA, 30 bp, Artificial Sequence
  Synthetic oligonucleotide
tgctcccagaacaggccccggctccaaaac

SEQ ID NO: 83727 - DNA, 30 bp, Artificial Sequence
  Synthetic oligonucleotide
agaggcaaatgcagagcaactccagaaaac

SEQ ID NO: 83728 - DNA, 30 bp, Artificial Sequence
  Synthetic oligonucleotide
ctaaacggtgaggtggttccgcgcgaaaac

SEQ ID NO: 83729 - DNA, 30 bp, Artificial Sequence
  Synthetic oligonucleotide
ctcatctggagagaaatcagagaggaaaac

SEQ ID NO: 83730 - DNA, 30 bp, Artificial Sequence
  Synthetic oligonucleotide
taatgggtcatcaggacgatcgatgaaaac

SEQ ID NO: 83731 - DNA, 30 bp, Artificial Sequence
  Synthetic oligonucleotide
tcgccgatcttcgtgcgaactgcctaaaac

SEQ ID NO: 83732 - DNA, 30 bp, Artificial Sequence
  Synthetic oligonucleotide
gggggtcgattcgaatggaactggtaaaac

SEQ ID NO: 83733 - DNA, 30 bp, Artificial Sequence
  Synthetic oligonucleotide
agaatccagaggcatgaaaactgtccaaac

SEQ ID NO: 83734 - DNA, 30 bp, Artificial Sequence
  Synthetic oligonucleotide
ctgaaggtaccccgacttacgtaagcaaac

SEQ ID NO: 83735 - DNA, 30 bp, Artificial Sequence
  Synthetic oligonucleotide
cggtttgctcctgaccagaataacgcaaac

SEQ ID NO: 83736 - DNA, 30 bp, Artificial Sequence
  Synthetic oligonucleotide
catttacaggcggactaacatgcgtcaaac

SEQ ID NO: 83737 - DNA, 30 bp, Artificial Sequence
  Synthetic oligonucleotide
atgcaatggagcaatcttatctattcaaac

SEQ ID NO: 83738 - DNA, 30 bp, Artificial Sequence
  Synthetic oligonucleotide
gtgctgcaagtcacggtgatcgcttcaaac

SEQ ID NO: 83739 - DNA, 30 bp, Artificial Sequence
  Synthetic oligonucleotide
ccacgaggagatgcaaaggatgacagaaac

SEQ ID NO: 83740 - DNA, 30 bp, Artificial Sequence
  Synthetic oligonucleotide
ccgcccgtagaatgctatagaatgagaaac

SEQ ID NO: 83741 - DNA, 30 bp, Artificial Sequence
  Synthetic oligonucleotide
gaattggtcggaagcaaaaaactgagaaac

SEQ ID NO: 83742 - DNA, 30 bp, Artificial Sequence
  Synthetic oligonucleotide
gcgtatctagaacctggagaagttcgaaac

SEQ ID NO: 83743 - DNA, 30 bp, Artificial Sequence
  Synthetic oligonucleotide
tgaaggtggtgaaccatacttgtcggaaac

SEQ ID NO: 83744 - DNA, 30 bp, Artificial Sequence
  Synthetic oligonucleotide
cgactacaaggaaaggcacgctcgggaaac

SEQ ID NO: 83745 - DNA, 30 bp, Artificial Sequence
  Synthetic oligonucleotide
tgctgtgagacaatgggcgaaactggaaac

SEQ ID NO: 83746 - DNA, 30 bp, Artificial Sequence
  Synthetic oligonucleotide
aaataggaataaggaatgttctgtggaaac

SEQ ID NO: 83747 - DNA, 30 bp, Artificial Sequence
  Synthetic oligonucleotide
ggagaacaggatgtggacacgtactgaaac

SEQ ID NO: 83748 - DNA, 30 bp, Artificial Sequence
  Synthetic oligonucleotide
tcctctaaactctggaatacatattgaaac

SEQ ID NO: 83749 - DNA, 30 bp, Artificial Sequence
  Synthetic oligonucleotide
ttgtaagggaagatttgggtgggttgaaac

SEQ ID NO: 83750 - DNA, 30 bp, Artificial Sequence
  Synthetic oligonucleotide
agtaaaccacaggatttgttgtagataaac

SEQ ID NO: 83751 - DNA, 30 bp, Artificial Sequence
  Synthetic oligonucleotide
caaataggatagaacagtctaggcctaaac

SEQ ID NO: 83752 - DNA, 30 bp, Artificial Sequence
  Synthetic oligonucleotide
tgacgcctaagcaggcacaaatgtgtaaac

SEQ ID NO: 83753 - DNA, 30 bp, Artificial Sequence
  Synthetic oligonucleotide
cgcaccataagggtatactaaacattaaac

SEQ ID NO: 83754 - DNA, 30 bp, Artificial Sequence
  Synthetic oligonucleotide
atgaccgcccacctcctttcgacgaacaac

SEQ ID NO: 83755 - DNA, 30 bp, Artificial Sequence
  Synthetic oligonucleotide
caatagaccgagctaagacgcattaacaac

SEQ ID NO: 83756 - DNA, 30 bp, Artificial Sequence
  Synthetic oligonucleotide
atcgatcggggcaacctgtcatggcacaac

SEQ ID NO: 83757 - DNA, 30 bp, Artificial Sequence
  Synthetic oligonucleotide
caggacatttgctattacggatggcacaac

SEQ ID NO: 83758 - DNA, 30 bp, Artificial Sequence
  Synthetic oligonucleotide
ccatgcgaagtggtggtacttcgtcacaac

SEQ ID NO: 83759 - DNA, 30 bp, Artificial Sequence
  Synthetic oligonucleotide
catcccctgggcattccgatgaactacaac

SEQ ID NO: 83760 - DNA, 30 bp, Artificial Sequence
  Synthetic oligonucleotide
gattaaaccaagcaggacggtaactacaac

SEQ ID NO: 83761 - DNA, 30 bp, Artificial Sequence
  Synthetic oligonucleotide
gccaatgcatgtccgaaccgtgtagccaac

SEQ ID NO: 83762 - DNA, 30 bp, Artificial Sequence
  Synthetic oligonucleotide
ggaggagcacgagggttgagaggtgccaac

SEQ ID NO: 83763 - DNA, 30 bp, Artificial Sequence
  Synthetic oligonucleotide
atacaatgatggcacattacaccgtccaac

SEQ ID NO: 83764 - DNA, 30 bp, Artificial Sequence
  Synthetic oligonucleotide
gaaagcaccgtgatggacgtcaattccaac

SEQ ID NO: 83765 - DNA, 30 bp, Artificial Sequence
  Synthetic oligonucleotide
gtggggcgtctactctacacgtattccaac

SEQ ID NO: 83766 - DNA, 30 bp, Artificial Sequence
  Synthetic oligonucleotide
attgcttcacatctaaccaacagttccaac

SEQ ID NO: 83767 - DNA, 30 bp, Artificial Sequence
  Synthetic oligonucleotide
catcaccgcaaagtggaagtctgatgcaac

SEQ ID NO: 83768 - DNA, 30 bp, Artificial Sequence
  Synthetic oligonucleotide
tgcagatgcatttgaatgggcgactgcaac

SEQ ID NO: 83769 - DNA, 30 bp, Artificial Sequence
  Synthetic oligonucleotide
cgagtcggacgatctgatatcaaaatcaac

SEQ ID NO: 83770 - DNA, 30 bp, Artificial Sequence
  Synthetic oligonucleotide
gtcgttaaccagtcagtgtacgcaatcaac

SEQ ID NO: 83771 - DNA, 30 bp, Artificial Sequence
  Synthetic oligonucleotide
aaacacgtagcctaactaacatgaatcaac

SEQ ID NO: 83772 - DNA, 30 bp, Artificial Sequence
  Synthetic oligonucleotide
aagttgaagacatcacgtgtccggatcaac

SEQ ID NO: 83773 - DNA, 30 bp, Artificial Sequence
  Synthetic oligonucleotide
gaacaaccataaaatccgtgatgactcaac

SEQ ID NO: 83774 - DNA, 30 bp, Artificial Sequence
  Synthetic oligonucleotide
gtgggtcatacggtgtcaaatatactcaac

SEQ ID NO: 83775 - DNA, 30 bp, Artificial Sequence
  Synthetic oligonucleotide
gagaaacctgagtcgcgaccgaggctcaac

SEQ ID NO: 83776 - DNA, 30 bp, Artificial Sequence
  Synthetic oligonucleotide
cacttcacagcgctggcacataatctcaac

SEQ ID NO: 83777 - DNA, 30 bp, Artificial Sequence
  Synthetic oligonucleotide
cactcgagtaccgtacacgtggaagtcaac

SEQ ID NO: 83778 - DNA, 30 bp, Artificial Sequence
  Synthetic oligonucleotide
ggtgaactaggcagccaatgtgccgtcaac

SEQ ID NO: 83779 - DNA, 30 bp, Artificial Sequence
  Synthetic oligonucleotide
tggacaaaggtcagtgctagattcgtcaac

SEQ ID NO: 83780 - DNA, 30 bp, Artificial Sequence
  Synthetic oligonucleotide
gtgcggcgacgtcgatataagggggtcaac

SEQ ID NO: 83781 - DNA, 30 bp, Artificial Sequence
  Synthetic oligonucleotide
ctcgtatgtcggagaattcacggattcaac

SEQ ID NO: 83782 - DNA, 29 bp, Artificial Sequence
  Synthetic oligonucleotide
acgaaggtaaccatcatgacttaaagaac

SEQ ID NO: 83783 - DNA, 30 bp, Artificial Sequence
  Synthetic oligonucleotide
cgtggctgcagggggttcataggcaagaac

SEQ ID NO: 83784 - DNA, 30 bp, Artificial Sequence
  Synthetic oligonucleotide
taagagtaaccgggtccaggccaccagaac

SEQ ID NO: 83785 - DNA, 30 bp, Artificial Sequence
  Synthetic oligonucleotide
tgagcaaattctgggggtggacagcagaac

SEQ ID NO: 83786 - DNA, 30 bp, Artificial Sequence
  Synthetic oligonucleotide
cctgtggacatgttaaagtggactcagaac

SEQ ID NO: 83787 - DNA, 30 bp, Artificial Sequence
  Synthetic oligonucleotide
tagtacagatatagtgcaggaagtcagaac

SEQ ID NO: 83788 - DNA, 30 bp, Artificial Sequence
  Synthetic oligonucleotide
cggctcaagagcgtgtatccaggtcagaac

SEQ ID NO: 83789 - DNA, 30 bp, Artificial Sequence
  Synthetic oligonucleotide
cgtgttggtggactgtgcacgatgtagaac

SEQ ID NO: 83790 - DNA, 30 bp, Artificial Sequence
  Synthetic oligonucleotide
cgtaatagcacttataccgtgataacgaac

SEQ ID NO: 83791 - DNA, 30 bp, Artificial Sequence
  Synthetic oligonucleotide
gcatcccattacggttaatgaacgacgaac

SEQ ID NO: 83792 - DNA, 30 bp, Artificial Sequence
  Synthetic oligonucleotide
tcatgtcaacggttaggaaagcaggcgaac

SEQ ID NO: 83793 - DNA, 30 bp, Artificial Sequence
  Synthetic oligonucleotide
gggccggggttagtacttcgagaatcgaac

SEQ ID NO: 83794 - DNA, 30 bp, Artificial Sequence
  Synthetic oligonucleotide
ggcgcttcgccgagtggggaacaaaggaac

SEQ ID NO: 83795 - DNA, 31 bp, Artificial Sequence
  Synthetic oligonucleotide
ggctgagacgactctccaagtacccaggaac

SEQ ID NO: 83796 - DNA, 30 bp, Artificial Sequence
  Synthetic oligonucleotide
gacgtatattgcaagatagcgcaccggaac

SEQ ID NO: 83797 - DNA, 30 bp, Artificial Sequence
  Synthetic oligonucleotide
gtgatgcggggcggcatgctaaatcggaac

SEQ ID NO: 83798 - DNA, 30 bp, Artificial Sequence
  Synthetic oligonucleotide
cggacattagccccccaatgcgttcggaac

SEQ ID NO: 83799 - DNA, 30 bp, Artificial Sequence
  Synthetic oligonucleotide
caacctccatatgtgaagtaagaggggaac

SEQ ID NO: 83800 - DNA, 31 bp, Artificial Sequence
  Synthetic oligonucleotide
tgccgaattctacgtgtcaggtgtggggaac

SEQ ID NO: 83801 - DNA, 30 bp, Artificial Sequence
  Synthetic oligonucleotide
gcaggaaaaagtgcaatatctcgctggaac

SEQ ID NO: 83802 - DNA, 30 bp, Artificial Sequence
  Synthetic oligonucleotide
ataagatatgcaaatcgagcagcactgaac

SEQ ID NO: 83803 - DNA, 30 bp, Artificial Sequence
  Synthetic oligonucleotide
ggttcaggccactacagcctacaagtgaac

SEQ ID NO: 83804 - DNA, 30 bp, Artificial Sequence
  Synthetic oligonucleotide
ccagtaaagcgacgggagagactagtgaac

SEQ ID NO: 83805 - DNA, 30 bp, Artificial Sequence
  Synthetic oligonucleotide
acaagtcggggagacaacttgctcttgaac

SEQ ID NO: 83806 - DNA, 30 bp, Artificial Sequence
  Synthetic oligonucleotide
ctgtgaactgatcaagtgtcgtagttgaac

SEQ ID NO: 83807 - DNA, 30 bp, Artificial Sequence
  Synthetic oligonucleotide
acgtccaggggccccagaaccggtttgaac

SEQ ID NO: 83808 - DNA, 30 bp, Artificial Sequence
  Synthetic oligonucleotide
caatggcggactaagactcctaaagataac

SEQ ID NO: 83809 - DNA, 30 bp, Artificial Sequence
  Synthetic oligonucleotide
tcgatattgggggacaagtgatactataac

SEQ ID NO: 83810 - DNA, 30 bp, Artificial Sequence
  Synthetic oligonucleotide
tggaaactctcaaggagtacgttgtataac

SEQ ID NO: 83811 - DNA, 30 bp, Artificial Sequence
  Synthetic oligonucleotide
taaaccaggcagggctcaatgcaacctaac

SEQ ID NO: 83812 - DNA, 30 bp, Artificial Sequence
  Synthetic oligonucleotide
cacgctagagagggcgattgtctagctaac

SEQ ID NO: 83813 - DNA, 30 bp, Artificial Sequence
  Synthetic oligonucleotide
cacctaacgcaaggctggatatcggctaac

SEQ ID NO: 83814 - DNA, 30 bp, Artificial Sequence
  Synthetic oligonucleotide
tagagtcgcaccaagaagggtaattctaac

SEQ ID NO: 83815 - DNA, 30 bp, Artificial Sequence
  Synthetic oligonucleotide
taaggcacaggttatgtagagccttctaac

SEQ ID NO: 83816 - DNA, 30 bp, Artificial Sequence
  Synthetic oligonucleotide
cgaacgatcccgatgacgaatcagcgtaac

SEQ ID NO: 83817 - DNA, 30 bp, Artificial Sequence
  Synthetic oligonucleotide
gaagataaaaacccgcttgtcataggtaac

SEQ ID NO: 83818 - DNA, 30 bp, Artificial Sequence
  Synthetic oligonucleotide
cgtattacccagtagccgtcataatgtaac

SEQ ID NO: 83819 - DNA, 30 bp, Artificial Sequence
  Synthetic oligonucleotide
aagcgtcatgggtcgcaagaaaactgtaac

SEQ ID NO: 83820 - DNA, 30 bp, Artificial Sequence
  Synthetic oligonucleotide
ggtatagtggtatcaccgtacaactgtaac

SEQ ID NO: 83821 - DNA, 30 bp, Artificial Sequence
  Synthetic oligonucleotide
tcgtgacaaggcccaaagggcgcgtgtaac

SEQ ID NO: 83822 - DNA, 30 bp, Artificial Sequence
  Synthetic oligonucleotide
gggagggatgaaccaggcagaggaattaac

SEQ ID NO: 83823 - DNA, 30 bp, Artificial Sequence
  Synthetic oligonucleotide
tgggattcaccaagaattaaacccattaac

SEQ ID NO: 83824 - DNA, 30 bp, Artificial Sequence
  Synthetic oligonucleotide
gcacgcgtaacgggcatatatcgtattaac

SEQ ID NO: 83825 - DNA, 30 bp, Artificial Sequence
  Synthetic oligonucleotide
tcggacgagaaggactcggcaagttttaac

SEQ ID NO: 83826 - DNA, 30 bp, Artificial Sequence
  Synthetic oligonucleotide
tgacacccatagagacttgtgccaaaacac

SEQ ID NO: 83827 - DNA, 30 bp, Artificial Sequence
  Synthetic oligonucleotide
gtaccaggagtgggcaagagtctcaaacac

SEQ ID NO: 83828 - DNA, 30 bp, Artificial Sequence
  Synthetic oligonucleotide
cacctagtacaaagaaacgaggcccaacac

SEQ ID NO: 83829 - DNA, 30 bp, Artificial Sequence
  Synthetic oligonucleotide
gggaatacgagtcacccagcaattcaacac

SEQ ID NO: 83830 - DNA, 29 bp, Artificial Sequence
  Synthetic oligonucleotide
ggcacgtctaaaaagaggtttaggaacac

SEQ ID NO: 83831 - DNA, 30 bp, Artificial Sequence
  Synthetic oligonucleotide
agacaccctgcctgtccagttcgctaacac

SEQ ID NO: 83832 - DNA, 30 bp, Artificial Sequence
  Synthetic oligonucleotide
ccggaaacaagctcacaggcaaatacacac

SEQ ID NO: 83833 - DNA, 30 bp, Artificial Sequence
  Synthetic oligonucleotide
ataaagtgagaaacgaaatagcctacacac

SEQ ID NO: 83834 - DNA, 30 bp, Artificial Sequence
  Synthetic oligonucleotide
gggtcagcgaccgtgacacatcgtacacac

SEQ ID NO: 83835 - DNA, 30 bp, Artificial Sequence
  Synthetic oligonucleotide
caaggaccctcatggggtacagttacacac

SEQ ID NO: 83836 - DNA, 30 bp, Artificial Sequence
  Synthetic oligonucleotide
atcgtctctagggcatcccgaggagcacac

SEQ ID NO: 83837 - DNA, 30 bp, Artificial Sequence
  Synthetic oligonucleotide
aagaaaggaagtcattaggccctcgcacac

SEQ ID NO: 83838 - DNA, 30 bp, Artificial Sequence
  Synthetic oligonucleotide
aaccatagaatggcgaaaatagttgcacac

SEQ ID NO: 83839 - DNA, 30 bp, Artificial Sequence
  Synthetic oligonucleotide
cagcaaagggttacagagtatacgtcacac

SEQ ID NO: 83840 - DNA, 30 bp, Artificial Sequence
  Synthetic oligonucleotide
cgtgtatacacgtactggataatgtcacac

SEQ ID NO: 83841 - DNA, 30 bp, Artificial Sequence
  Synthetic oligonucleotide
tgcctcccgcgcaaaatcgagggcagacac

SEQ ID NO: 83842 - DNA, 30 bp, Artificial Sequence
  Synthetic oligonucleotide
ggtagagaaagtcagaaagatagaggacac

SEQ ID NO: 83843 - DNA, 30 bp, Artificial Sequence
  Synthetic oligonucleotide
gactgacagcttcgaagattatggggacac

SEQ ID NO: 83844 - DNA, 30 bp, Artificial Sequence
  Synthetic oligonucleotide
acgtgcacgttattcgtccctagatgacac

SEQ ID NO: 83845 - DNA, 30 bp, Artificial Sequence
  Synthetic oligonucleotide
cgagtcctaaggtgataatgggcctgacac

SEQ ID NO: 83846 - DNA, 30 bp, Artificial Sequence
  Synthetic oligonucleotide
catcgattcgttatccactagaaactacac

SEQ ID NO: 83847 - DNA, 30 bp, Artificial Sequence
  Synthetic oligonucleotide
acggacctgtcagctactgtgaccaaccac

SEQ ID NO: 83848 - DNA, 31 bp, Artificial Sequence
  Synthetic oligonucleotide
gagcccatcttggggcaaagaacgcaaccac

SEQ ID NO: 83849 - DNA, 30 bp, Artificial Sequence
  Synthetic oligonucleotide
ggcagggcaggtagaacctacggcaaccac

SEQ ID NO: 83850 - DNA, 30 bp, Artificial Sequence
  Synthetic oligonucleotide
caggccggctcatgggtagctatccaccac

SEQ ID NO: 83851 - DNA, 30 bp, Artificial Sequence
  Synthetic oligonucleotide
gaaggtttggagattgttaggtacgaccac

SEQ ID NO: 83852 - DNA, 30 bp, Artificial Sequence
  Synthetic oligonucleotide
ccggaatagtccaggtcgtggacttaccac

SEQ ID NO: 83853 - DNA, 30 bp, Artificial Sequence
  Synthetic oligonucleotide
cgctaagtcttaaacacaagtgattcccac

SEQ ID NO: 83854 - DNA, 30 bp, Artificial Sequence
  Synthetic oligonucleotide
accttgtcaccttcgaggagctcaagccac

SEQ ID NO: 83855 - DNA, 30 bp, Artificial Sequence
  Synthetic oligonucleotide
aaaaccggcacagcgatcgatcagagccac

SEQ ID NO: 83856 - DNA, 30 bp, Artificial Sequence
  Synthetic oligonucleotide
gaaaacagtgcagattccacccgtagccac

SEQ ID NO: 83857 - DNA, 30 bp, Artificial Sequence
  Synthetic oligonucleotide
tgctaaaaggataaaggatgtataggccac

SEQ ID NO: 83858 - DNA, 30 bp, Artificial Sequence
  Synthetic oligonucleotide
cgagaaagtagttcagggcggtggggccac

SEQ ID NO: 83859 - DNA, 30 bp, Artificial Sequence
  Synthetic oligonucleotide
gtcaggaactatagtcatgtcggatgccac

SEQ ID NO: 83860 - DNA, 30 bp, Artificial Sequence
  Synthetic oligonucleotide
ctgcgtgagaagatacaattccagtgccac

SEQ ID NO: 83861 - DNA, 30 bp, Artificial Sequence
  Synthetic oligonucleotide
tgatcttgatcatatgcgcgaaaaatccac

SEQ ID NO: 83862 - DNA, 30 bp, Artificial Sequence
  Synthetic oligonucleotide
tgtagattaagacaggtaccgcggatccac

SEQ ID NO: 83863 - DNA, 30 bp, Artificial Sequence
  Synthetic oligonucleotide
tgagcgacaagctcccgatagtacctccac

SEQ ID NO: 83864 - DNA, 30 bp, Artificial Sequence
  Synthetic oligonucleotide
attgccgacgtggaaaccaatagaaagcac

SEQ ID NO: 83865 - DNA, 30 bp, Artificial Sequence
  Synthetic oligonucleotide
taagaacatcgtcaactatgagtaaagcac

SEQ ID NO: 83866 - DNA, 30 bp, Artificial Sequence
  Synthetic oligonucleotide
atgtgagcattaatgcgtgagtataagcac

SEQ ID NO: 83867 - DNA, 30 bp, Artificial Sequence
  Synthetic oligonucleotide
tcagacacgacaacaccttgttaacagcac

SEQ ID NO: 83868 - DNA, 30 bp, Artificial Sequence
  Synthetic oligonucleotide
cgttgcagcgttaggaggtacttgcagcac

SEQ ID NO: 83869 - DNA, 30 bp, Artificial Sequence
  Synthetic oligonucleotide
cttgggactgaagggcacttcgccgagcac

SEQ ID NO: 83870 - DNA, 30 bp, Artificial Sequence
  Synthetic oligonucleotide
gtacaggacagtagccgttgagaggagcac

SEQ ID NO: 83871 - DNA, 30 bp, Artificial Sequence
  Synthetic oligonucleotide
cggggataacaaatcccaagaccatagcac

SEQ ID NO: 83872 - DNA, 30 bp, Artificial Sequence
  Synthetic oligonucleotide
tcgtcgttcagaagtcaatactatccgcac

SEQ ID NO: 83873 - DNA, 30 bp, Artificial Sequence
  Synthetic oligonucleotide
aagtggcgcgtaggataaatgggtccgcac

SEQ ID NO: 83874 - DNA, 30 bp, Artificial Sequence
  Synthetic oligonucleotide
aggctatggcggattcagttactcgcgcac

SEQ ID NO: 83875 - DNA, 30 bp, Artificial Sequence
  Synthetic oligonucleotide
tctgaataccagaaccagaatcaatcgcac

SEQ ID NO: 83876 - DNA, 30 bp, Artificial Sequence
  Synthetic oligonucleotide
gcaccggcgtgatcaaatggggaatcgcac

SEQ ID NO: 83877 - DNA, 30 bp, Artificial Sequence
  Synthetic oligonucleotide
catcccggtggaacggaactgttctcgcac

SEQ ID NO: 83878 - DNA, 30 bp, Artificial Sequence
  Synthetic oligonucleotide
ttgtcgctctcgaggggacaccaaaggcac

SEQ ID NO: 83879 - DNA, 30 bp, Artificial Sequence
  Synthetic oligonucleotide
acaatcatgggcggcatcgttgtacggcac

SEQ ID NO: 83880 - DNA, 30 bp, Artificial Sequence
  Synthetic oligonucleotide
tcataaggtggagtcgccaaggtcgggcac

SEQ ID NO: 83881 - DNA, 30 bp, Artificial Sequence
  Synthetic oligonucleotide
ggccccagcgaacctacgccgttatggcac

SEQ ID NO: 83882 - DNA, 30 bp, Artificial Sequence
  Synthetic oligonucleotide
atgcagtacaacgctcagggtgactggcac

SEQ ID NO: 83883 - DNA, 30 bp, Artificial Sequence
  Synthetic oligonucleotide
ctgtgagaaggaattcagaagtagtggcac

SEQ ID NO: 83884 - DNA, 30 bp, Artificial Sequence
  Synthetic oligonucleotide
gcggtaacggtgggtgacatgtattggcac

SEQ ID NO: 83885 - DNA, 30 bp, Artificial Sequence
  Synthetic oligonucleotide
gggggatggatgcgttaaagggtaatgcac

SEQ ID NO: 83886 - DNA, 30 bp, Artificial Sequence
  Synthetic oligonucleotide
ttggtaatctaggaagataacgaggtgcac

SEQ ID NO: 83887 - DNA, 30 bp, Artificial Sequence
  Synthetic oligonucleotide
tagacgcggacagatagtgaggtggtgcac

SEQ ID NO: 83888 - DNA, 30 bp, Artificial Sequence
  Synthetic oligonucleotide
agttaaaacggaatgacaggcggtttgcac

SEQ ID NO: 83889 - DNA, 30 bp, Artificial Sequence
  Synthetic oligonucleotide
tccagttggcgtccacatgaccccaatcac

SEQ ID NO: 83890 - DNA, 30 bp, Artificial Sequence
  Synthetic oligonucleotide
aatgcgactagagtctcgtcgggcaatcac

SEQ ID NO: 83891 - DNA, 30 bp, Artificial Sequence
  Synthetic oligonucleotide
ggggcgcctccaaaggttatgagtcatcac

SEQ ID NO: 83892 - DNA, 30 bp, Artificial Sequence
  Synthetic oligonucleotide
gtcgaggcgggccagcgagtattcgatcac

SEQ ID NO: 83893 - DNA, 30 bp, Artificial Sequence
  Synthetic oligonucleotide
cgaattgaaacgttgagtaagagtgatcac

SEQ ID NO: 83894 - DNA, 30 bp, Artificial Sequence
  Synthetic oligonucleotide
acgcgcgattggagctagggtggatatcac

SEQ ID NO: 83895 - DNA, 30 bp, Artificial Sequence
  Synthetic oligonucleotide
gcaaatataaggtcgaatgtccacgctcac

SEQ ID NO: 83896 - DNA, 30 bp, Artificial Sequence
  Synthetic oligonucleotide
acgagtccgatggggggccatctggctcac

SEQ ID NO: 83897 - DNA, 30 bp, Artificial Sequence
  Synthetic oligonucleotide
aggtgcgagccggctaggaggggatctcac

SEQ ID NO: 83898 - DNA, 30 bp, Artificial Sequence
  Synthetic oligonucleotide
tgcgagttcaatgtggaccaccgaggtcac

SEQ ID NO: 83899 - DNA, 30 bp, Artificial Sequence
  Synthetic oligonucleotide
gagtaatgggctaaaacaggagctggtcac

SEQ ID NO: 83900 - DNA, 30 bp, Artificial Sequence
  Synthetic oligonucleotide
agatcgtggttagagtcagtaccatgtcac

SEQ ID NO: 83901 - DNA, 30 bp, Artificial Sequence
  Synthetic oligonucleotide
cgctacgacatgggataaacagcctgtcac

SEQ ID NO: 83902 - DNA, 30 bp, Artificial Sequence
  Synthetic oligonucleotide
cgcgtatatggggaccagcgtaatgttcac

SEQ ID NO: 83903 - DNA, 30 bp, Artificial Sequence
  Synthetic oligonucleotide
atggttgagagcgtgagaacctcctttcac

SEQ ID NO: 83904 - DNA, 30 bp, Artificial Sequence
  Synthetic oligonucleotide
taagtcggcgtgaacgaggtataaaaagac

SEQ ID NO: 83905 - DNA, 33 bp, Artificial Sequence
  Synthetic oligonucleotide
gatactagaccaccactgtccatcagaaaagac

SEQ ID NO: 83906 - DNA, 34 bp, Artificial Sequence
  Synthetic oligonucleotide
aatactagaccaccacgtgtccatgagaaaagac

SEQ ID NO: 83907 - DNA, 35 bp, Artificial Sequence
  Synthetic oligonucleotide
gatacttagaccaccacgtgtccattagaaaagac

SEQ ID NO: 83908 - DNA, 30 bp, Artificial Sequence
  Synthetic oligonucleotide
attgaggcaagagcctagtgaaagaaagac

SEQ ID NO: 83909 - DNA, 30 bp, Artificial Sequence
  Synthetic oligonucleotide
acaagtgtgtgtgataaaaagttccaagac

SEQ ID NO: 83910 - DNA, 30 bp, Artificial Sequence
  Synthetic oligonucleotide
tcattatgcgatctccgccaagcgcaagac

SEQ ID NO: 83911 - DNA, 30 bp, Artificial Sequence
  Synthetic oligonucleotide
gataaagtgaagcagttgatatcagaagac

SEQ ID NO: 83912 - DNA, 30 bp, Artificial Sequence
  Synthetic oligonucleotide
ttcgtaaggttgtggggaagcattgaagac

SEQ ID NO: 83913 - DNA, 30 bp, Artificial Sequence
  Synthetic oligonucleotide
catgggcttgaggacgactggtcgtaagac

SEQ ID NO: 83914 - DNA, 30 bp, Artificial Sequence
  Synthetic oligonucleotide
caatatgccagaggtgtctggtaaacagac

SEQ ID NO: 83915 - DNA, 30 bp, Artificial Sequence
  Synthetic oligonucleotide
aacaaggcaattaacttgggaaccacagac

SEQ ID NO: 83916 - DNA, 30 bp, Artificial Sequence
  Synthetic oligonucleotide
acatcccaaagttgaaaagagtccacagac

SEQ ID NO: 83917 - DNA, 30 bp, Artificial Sequence
  Synthetic oligonucleotide
cgattatgataaccaacacggtccccagac

SEQ ID NO: 83918 - DNA, 30 bp, Artificial Sequence
  Synthetic oligonucleotide
cctagcgaggagcggaccatggtgccagac

SEQ ID NO: 83919 - DNA, 30 bp, Artificial Sequence
  Synthetic oligonucleotide
gctacgcattaacagctatatcaagcagac

SEQ ID NO: 83920 - DNA, 30 bp, Artificial Sequence
  Synthetic oligonucleotide
ttgatgaatggccatgggtgggtagcagac

SEQ ID NO: 83921 - DNA, 30 bp, Artificial Sequence
  Synthetic oligonucleotide
atggtctagaataagagttgggaggcagac

SEQ ID NO: 83922 - DNA, 30 bp, Artificial Sequence
  Synthetic oligonucleotide
catgtcagtgcgggcctgtgaatatcagac

SEQ ID NO: 83923 - DNA, 30 bp, Artificial Sequence
  Synthetic oligonucleotide
agcaagtgatggtgatttacaacaagagac

SEQ ID NO: 83924 - DNA, 30 bp, Artificial Sequence
  Synthetic oligonucleotide
ggggcgcgatgtatacgaggatccagagac

SEQ ID NO: 83925 - DNA, 30 bp, Artificial Sequence
  Synthetic oligonucleotide
gctgtacgagatgaggttgtagtacgagac

SEQ ID NO: 83926 - DNA, 30 bp, Artificial Sequence
  Synthetic oligonucleotide
agtgctaaccggctaggagaggatcgagac

SEQ ID NO: 83927 - DNA, 30 bp, Artificial Sequence
  Synthetic oligonucleotide
cactgaagaatacataattggaaaggagac

SEQ ID NO: 83928 - DNA, 30 bp, Artificial Sequence
  Synthetic oligonucleotide
ctagagaccttcaggctaacaaactgagac

SEQ ID NO: 83929 - DNA, 30 bp, Artificial Sequence
  Synthetic oligonucleotide
cggtacgagtacggtccccccaggtgagac

SEQ ID NO: 83930 - DNA, 30 bp, Artificial Sequence
  Synthetic oligonucleotide
gctatcagcggacagcgtgctccaatagac

SEQ ID NO: 83931 - DNA, 30 bp, Artificial Sequence
  Synthetic oligonucleotide
gtgtcaagatctatcgtttgaaaagtagac

SEQ ID NO: 83932 - DNA, 30 bp, Artificial Sequence
  Synthetic oligonucleotide
aaaggggaccatcataatacccgagtagac

SEQ ID NO: 83933 - DNA, 30 bp, Artificial Sequence
  Synthetic oligonucleotide
ttcgacataatggggaaatcatgtgtagac

SEQ ID NO: 83934 - DNA, 30 bp, Artificial Sequence
  Synthetic oligonucleotide
ccacccattgggacttgtgaacggaacgac

SEQ ID NO: 83935 - DNA, 30 bp, Artificial Sequence
  Synthetic oligonucleotide
acatttcgtctgtaagaggtgggtaacgac

SEQ ID NO: 83936 - DNA, 30 bp, Artificial Sequence
  Synthetic oligonucleotide
accgggtaacaaaacgtggcacttcacgac

SEQ ID NO: 83937 - DNA, 30 bp, Artificial Sequence
  Synthetic oligonucleotide
taggatcggtaccgactgcttccagacgac

SEQ ID NO: 83938 - DNA, 30 bp, Artificial Sequence
  Synthetic oligonucleotide
acagcttggtgggcatcagaatgagacgac

SEQ ID NO: 83939 - DNA, 30 bp, Artificial Sequence
  Synthetic oligonucleotide
taggaggtggactacgatagaggcgacgac

SEQ ID NO: 83940 - DNA, 30 bp, Artificial Sequence
  Synthetic oligonucleotide
ggacctcccttaagacaaaccaaggacgac

SEQ ID NO: 83941 - DNA, 30 bp, Artificial Sequence
  Synthetic oligonucleotide
gtaagttttcagattgcagggagggacgac

SEQ ID NO: 83942 - DNA, 30 bp, Artificial Sequence
  Synthetic oligonucleotide
tgggtgggtattctgcacaatcgggacgac

SEQ ID NO: 83943 - DNA, 30 bp, Artificial Sequence
  Synthetic oligonucleotide
ggtaggccataaagcagatgtattgacgac

SEQ ID NO: 83944 - DNA, 30 bp, Artificial Sequence
  Synthetic oligonucleotide
ttcgcgatttagaggggtagcggctacgac

SEQ ID NO: 83945 - DNA, 30 bp, Artificial Sequence
  Synthetic oligonucleotide
gcgtgacagcaagataaggggtcttacgac

SEQ ID NO: 83946 - DNA, 30 bp, Artificial Sequence
  Synthetic oligonucleotide
agatagtcagaagagaagcccagcaccgac

SEQ ID NO: 83947 - DNA, 30 bp, Artificial Sequence
  Synthetic oligonucleotide
gctcgccactgcgaacaattctagaccgac

SEQ ID NO: 83948 - DNA, 30 bp, Artificial Sequence
  Synthetic oligonucleotide
tgcttacagcacaacggcctcaaacccgac

SEQ ID NO: 83949 - DNA, 30 bp, Artificial Sequence
  Synthetic oligonucleotide
ctaagaggtaagagtggtccctaacccgac

SEQ ID NO: 83950 - DNA, 30 bp, Artificial Sequence
  Synthetic oligonucleotide
ctcaatggatcgagaaggcctgaagccgac

SEQ ID NO: 83951 - DNA, 30 bp, Artificial Sequence
  Synthetic oligonucleotide
gggtggaagaagtcatctgccactgccgac

SEQ ID NO: 83952 - DNA, 30 bp, Artificial Sequence
  Synthetic oligonucleotide
ggggaagcactaggttagcacttatccgac

SEQ ID NO: 83953 - DNA, 30 bp, Artificial Sequence
  Synthetic oligonucleotide
aacacgatcatatattcgccatactccgac

SEQ ID NO: 83954 - DNA, 30 bp, Artificial Sequence
  Synthetic oligonucleotide
cgcagatccaagtggatgcttaagagcgac

SEQ ID NO: 83955 - DNA, 30 bp, Artificial Sequence
  Synthetic oligonucleotide
ccatcagtgaccgaatgccaatgtagcgac

SEQ ID NO: 83956 - DNA, 30 bp, Artificial Sequence
  Synthetic oligonucleotide
ctgcccgggcttgtggcgagagtaatcgac

SEQ ID NO: 83957 - DNA, 30 bp, Artificial Sequence
  Synthetic oligonucleotide
agggagatccggagacaaaaggtgatcgac

SEQ ID NO: 83958 - DNA, 30 bp, Artificial Sequence
  Synthetic oligonucleotide
tctcggatagcttgatggcgaagactcgac

SEQ ID NO: 83959 - DNA, 30 bp, Artificial Sequence
  Synthetic oligonucleotide
cacaaaacctagacgtaagtgtgcctcgac

SEQ ID NO: 83960 - DNA, 30 bp, Artificial Sequence
  Synthetic oligonucleotide
tcaaaccgagtgtagcgcactttcgtcgac

SEQ ID NO: 83961 - DNA, 30 bp, Artificial Sequence
  Synthetic oligonucleotide
aggtaggatgaagatcctcggaacttcgac

SEQ ID NO: 83962 - DNA, 30 bp, Artificial Sequence
  Synthetic oligonucleotide
tgcgagcgtaagccatgaatataaaaggac

SEQ ID NO: 83963 - DNA, 30 bp, Artificial Sequence
  Synthetic oligonucleotide
tagggacccccctcatcagctgggaaggac

SEQ ID NO: 83964 - DNA, 30 bp, Artificial Sequence
  Synthetic oligonucleotide
gcatagcaagaaggccatgaaggtaaggac

SEQ ID NO: 83965 - DNA, 30 bp, Artificial Sequence
  Synthetic oligonucleotide
tccgtctacaaagtcgcggggcacgaggac

SEQ ID NO: 83966 - DNA, 30 bp, Artificial Sequence
  Synthetic oligonucleotide
aacacttgcaattagtgggggggcgaggac

SEQ ID NO: 83967 - DNA, 30 bp, Artificial Sequence
  Synthetic oligonucleotide
caaggtaaagggatactcgtgcattaggac

SEQ ID NO: 83968 - DNA, 30 bp, Artificial Sequence
  Synthetic oligonucleotide
ccaaaagcgtaaggacgacatccaccggac

SEQ ID NO: 83969 - DNA, 30 bp, Artificial Sequence
  Synthetic oligonucleotide
agcggcgactttgccaaggagatcgcggac

SEQ ID NO: 83970 - DNA, 30 bp, Artificial Sequence
  Synthetic oligonucleotide
gaggcgttacacatgccgtgacggtcggac

SEQ ID NO: 83971 - DNA, 30 bp, Artificial Sequence
  Synthetic oligonucleotide
ggggtgatcaccggtcaacatccttcggac

SEQ ID NO: 83972 - DNA, 30 bp, Artificial Sequence
  Synthetic oligonucleotide
gaacagacatcagatgaaccttacagggac

SEQ ID NO: 83973 - DNA, 30 bp, Artificial Sequence
  Synthetic oligonucleotide
gtactctagagttacgactagaaaggggac

SEQ ID NO: 83974 - DNA, 30 bp, Artificial Sequence
  Synthetic oligonucleotide
agccattatatatacgggtgagaaggggac

SEQ ID NO: 83975 - DNA, 30 bp, Artificial Sequence
  Synthetic oligonucleotide
gctgcaaagtaagctgagttaaggggggac

SEQ ID NO: 83976 - DNA, 30 bp, Artificial Sequence
  Synthetic oligonucleotide
caaggtatgttttctgtaagataatgggac

SEQ ID NO: 83977 - DNA, 30 bp, Artificial Sequence
  Synthetic oligonucleotide
ttggcgactacgagaggtgcagaaatggac

SEQ ID NO: 83978 - DNA, 31 bp, Artificial Sequence
  Synthetic oligonucleotide
atatgtcacaccatgtgagtgagtaatggac

SEQ ID NO: 83979 - DNA, 30 bp, Artificial Sequence
  Synthetic oligonucleotide
gtgccatcacgaggacagtcagacatggac

SEQ ID NO: 83980 - DNA, 30 bp, Artificial Sequence
  Synthetic oligonucleotide
acgccaatgggcgctctgtgggacgtggac

SEQ ID NO: 83981 - DNA, 30 bp, Artificial Sequence
  Synthetic oligonucleotide
acctgtccagggccgaactaccgggtggac

SEQ ID NO: 83982 - DNA, 30 bp, Artificial Sequence
  Synthetic oligonucleotide
cagtgggcggaggaagcacctatattggac

SEQ ID NO: 83983 - DNA, 30 bp, Artificial Sequence
  Synthetic oligonucleotide
gccaggcgaaacaatggcgccgagttggac

SEQ ID NO: 83984 - DNA, 30 bp, Artificial Sequence
  Synthetic oligonucleotide
agcgcgatacacttacatgtgtctcatgac

SEQ ID NO: 83985 - DNA, 30 bp, Artificial Sequence
  Synthetic oligonucleotide
cgctcatgacaagtaacctagcaagatgac

SEQ ID NO: 83986 - DNA, 30 bp, Artificial Sequence
  Synthetic oligonucleotide
tacagtgtgaggcccaggggacacgatgac

SEQ ID NO: 83987 - DNA, 30 bp, Artificial Sequence
  Synthetic oligonucleotide
ccaacgctaatgctagagatggatgatgac

SEQ ID NO: 83988 - DNA, 30 bp, Artificial Sequence
  Synthetic oligonucleotide
tattaagggtggggattagtgtcttatgac

SEQ ID NO: 83989 - DNA, 30 bp, Artificial Sequence
  Synthetic oligonucleotide
cgtaacattccaacttatgataactctgac

SEQ ID NO: 83990 - DNA, 30 bp, Artificial Sequence
  Synthetic oligonucleotide
tcacattgggcaggtgatatgtactctgac

SEQ ID NO: 83991 - DNA, 30 bp, Artificial Sequence
  Synthetic oligonucleotide
catcgaataagagaaaaagcagaaagtgac

SEQ ID NO: 83992 - DNA, 30 bp, Artificial Sequence
  Synthetic oligonucleotide
ttataaaacgcgaagagccatttaagtgac

SEQ ID NO: 83993 - DNA, 30 bp, Artificial Sequence
  Synthetic oligonucleotide
cagagcatccgagtgtgccgttggagtgac

SEQ ID NO: 83994 - DNA, 30 bp, Artificial Sequence
  Synthetic oligonucleotide
ttgggacgcctgggtgaaacggatcgtgac

SEQ ID NO: 83995 - DNA, 30 bp, Artificial Sequence
  Synthetic oligonucleotide
cagggatgaagctctgtaggcgtcggtgac

SEQ ID NO: 83996 - DNA, 30 bp, Artificial Sequence
  Synthetic oligonucleotide
gtcacacagcgagaatcatatccgggtgac

SEQ ID NO: 83997 - DNA, 30 bp, Artificial Sequence
  Synthetic oligonucleotide
gaagggacgctaattcgcaacgggggtgac

SEQ ID NO: 83998 - DNA, 30 bp, Artificial Sequence
  Synthetic oligonucleotide
ggcaaagtaaaacgcagattatctggtgac

SEQ ID NO: 83999 - DNA, 30 bp, Artificial Sequence
  Synthetic oligonucleotide
aaatgggctgaataaacactaatatgtgac

SEQ ID NO: 84000 - DNA, 30 bp, Artificial Sequence
  Synthetic oligonucleotide
aggaagccgggtctgtggcgaaagattgac

SEQ ID NO: 84001 - DNA, 30 bp, Artificial Sequence
  Synthetic oligonucleotide
aggccaaagatcgggttagtatttgttgac

SEQ ID NO: 84002 - DNA, 30 bp, Artificial Sequence
  Synthetic oligonucleotide
gtgcccaatagagcgggaaagaaatttgac

SEQ ID NO: 84003 - DNA, 30 bp, Artificial Sequence
  Synthetic oligonucleotide
tgtagcggcctgcgagagtggaactttgac

SEQ ID NO: 84004 - DNA, 30 bp, Artificial Sequence
  Synthetic oligonucleotide
caccgggaagtgaaggttctaaggtttgac

SEQ ID NO: 84005 - DNA, 30 bp, Artificial Sequence
  Synthetic oligonucleotide
gcaagctagtgctgttgcgagtaaaaatac

SEQ ID NO: 84006 - DNA, 30 bp, Artificial Sequence
  Synthetic oligonucleotide
gggggaaagtagcagataaggtagaaatac

SEQ ID NO: 84007 - DNA, 30 bp, Artificial Sequence
  Synthetic oligonucleotide
gtacttaggagacacggagattcgaaatac

SEQ ID NO: 84008 - DNA, 30 bp, Artificial Sequence
  Synthetic oligonucleotide
ggggagaacacttgtaattttcttcaatac

SEQ ID NO: 84009 - DNA, 31 bp, Artificial Sequence
  Synthetic oligonucleotide
cggtgcgaaaggtaaacataggtaagaatac

SEQ ID NO: 84010 - DNA, 30 bp, Artificial Sequence
  Synthetic oligonucleotide
actcaacgttgaaacgagtgcgacgaatac

SEQ ID NO: 84011 - DNA, 30 bp, Artificial Sequence
  Synthetic oligonucleotide
tggataacgtatagagttgggaagtaatac

SEQ ID NO: 84012 - DNA, 30 bp, Artificial Sequence
  Synthetic oligonucleotide
cgtttgcgaatgttttatggtctgtaatac

SEQ ID NO: 84013 - DNA, 30 bp, Artificial Sequence
  Synthetic oligonucleotide
catatgatgtcggtaaagggctgttaatac

SEQ ID NO: 84014 - DNA, 30 bp, Artificial Sequence
  Synthetic oligonucleotide
acatccttatcagaatagattgacacatac

SEQ ID NO: 84015 - DNA, 30 bp, Artificial Sequence
  Synthetic oligonucleotide
aaaggtggcaaatactagggtggcacatac

SEQ ID NO: 84016 - DNA, 30 bp, Artificial Sequence
  Synthetic oligonucleotide
gcatagacacacggaaagccggttacatac

SEQ ID NO: 84017 - DNA, 30 bp, Artificial Sequence
  Synthetic oligonucleotide
cgcgcgcaatatcgtggggggataccatac

SEQ ID NO: 84018 - DNA, 30 bp, Artificial Sequence
  Synthetic oligonucleotide
ggttatagaacgagtgagcggttcccatac

SEQ ID NO: 84019 - DNA, 30 bp, Artificial Sequence
  Synthetic oligonucleotide
gtctccggagggcttaaggacaacgcatac

SEQ ID NO: 84020 - DNA, 30 bp, Artificial Sequence
  Synthetic oligonucleotide
aacgggaagttatgtaattttcacgcatac

SEQ ID NO: 84021 - DNA, 30 bp, Artificial Sequence
  Synthetic oligonucleotide
gtcgttaagcggagctactcagaggcatac

SEQ ID NO: 84022 - DNA, 30 bp, Artificial Sequence
  Synthetic oligonucleotide
taaagcacgcgatcgtcaccacttgcatac

SEQ ID NO: 84023 - DNA, 30 bp, Artificial Sequence
  Synthetic oligonucleotide
ctgctgtgggtaaaacgcaaccactcatac

SEQ ID NO: 84024 - DNA, 30 bp, Artificial Sequence
  Synthetic oligonucleotide
acaacgccgggcaaggttgcttgctcatac

SEQ ID NO: 84025 - DNA, 30 bp, Artificial Sequence
  Synthetic oligonucleotide
agtggccgctttccgaggggtggcagatac

SEQ ID NO: 84026 - DNA, 30 bp, Artificial Sequence
  Synthetic oligonucleotide
aagagctagcttccgcgaacgtcacgatac

SEQ ID NO: 84027 - DNA, 30 bp, Artificial Sequence
  Synthetic oligonucleotide
ttaatgaacaacaaaaatagaagcggatac

SEQ ID NO: 84028 - DNA, 30 bp, Artificial Sequence
  Synthetic oligonucleotide
cggaatgactgaagtagatcacaatgatac

SEQ ID NO: 84029 - DNA, 30 bp, Artificial Sequence
  Synthetic oligonucleotide
gcggcaacgcacgtctaggatatttgatac

SEQ ID NO: 84030 - DNA, 30 bp, Artificial Sequence
  Synthetic oligonucleotide
aggccacaatgagacaaatggaacatatac

SEQ ID NO: 84031 - DNA, 30 bp, Artificial Sequence
  Synthetic oligonucleotide
ctatgagcgacaggccactggcgtatatac

SEQ ID NO: 84032 - DNA, 31 bp, Artificial Sequence
  Synthetic oligonucleotide
acctggtcgagaccgattacacacactatac

SEQ ID NO: 84033 - DNA, 30 bp, Artificial Sequence
  Synthetic oligonucleotide
tgaacaagcaaacgggatcgcgggctatac

SEQ ID NO: 84034 - DNA, 30 bp, Artificial Sequence
  Synthetic oligonucleotide
ccgcaatgtgcgtcagagatgttgttatac

SEQ ID NO: 84035 - DNA, 30 bp, Artificial Sequence
  Synthetic oligonucleotide
atacgcgtcacaagggagatctacaactac

SEQ ID NO: 84036 - DNA, 30 bp, Artificial Sequence
  Synthetic oligonucleotide
gttatgtgagggaagaaatggatcaactac

SEQ ID NO: 84037 - DNA, 30 bp, Artificial Sequence
  Synthetic oligonucleotide
aatcgacgtgaggtgagcgtcctcaactac

SEQ ID NO: 84038 - DNA, 30 bp, Artificial Sequence
  Synthetic oligonucleotide
agcctaaggacccgcgtggttgagcactac

SEQ ID NO: 84039 - DNA, 30 bp, Artificial Sequence
  Synthetic oligonucleotide
ccttagggtggtacgtaatatgcggactac

SEQ ID NO: 84040 - DNA, 30 bp, Artificial Sequence
  Synthetic oligonucleotide
gcgtgatgtagtaagtccgtgaccacctac

SEQ ID NO: 84041 - DNA, 30 bp, Artificial Sequence
  Synthetic oligonucleotide
taagacaatgggctaatttcatcctcctac

SEQ ID NO: 84042 - DNA, 30 bp, Artificial Sequence
  Synthetic oligonucleotide
agcacactgaatgtgcgtttccgttcctac

SEQ ID NO: 84043 - DNA, 30 bp, Artificial Sequence
  Synthetic oligonucleotide
ggaagtaagggcgtgcatgcggtaagctac

SEQ ID NO: 84044 - DNA, 30 bp, Artificial Sequence
  Synthetic oligonucleotide
aggcggtccgcaaaccagggtgccagctac

SEQ ID NO: 84045 - DNA, 30 bp, Artificial Sequence
  Synthetic oligonucleotide
gccataatggaaggggactatttacgctac

SEQ ID NO: 84046 - DNA, 30 bp, Artificial Sequence
  Synthetic oligonucleotide
caacgattgggacagatacttcaccgctac

SEQ ID NO: 84047 - DNA, 30 bp, Artificial Sequence
  Synthetic oligonucleotide
attgaaaagcgcaagtcggcgtgcggctac

SEQ ID NO: 84048 - DNA, 30 bp, Artificial Sequence
  Synthetic oligonucleotide
ccaagaagatggtctagcttgttcatctac

SEQ ID NO: 84049 - DNA, 30 bp, Artificial Sequence
  Synthetic oligonucleotide
catggacagtgcttagcgagcaacctctac

SEQ ID NO: 84050 - DNA, 30 bp, Artificial Sequence
  Synthetic oligonucleotide
ctcacgaagtcagggatcgacgatttctac

SEQ ID NO: 84051 - DNA, 30 bp, Artificial Sequence
  Synthetic oligonucleotide
ataatcacggctgaaccgtccgaaaagtac

SEQ ID NO: 84052 - DNA, 30 bp, Artificial Sequence
  Synthetic oligonucleotide
acacacgtttatcgtcgagctaaagagtac

SEQ ID NO: 84053 - DNA, 30 bp, Artificial Sequence
  Synthetic oligonucleotide
tgcacgcaggatatgaaggtgagagagtac

SEQ ID NO: 84054 - DNA, 30 bp, Artificial Sequence
  Synthetic oligonucleotide
aggggtggcaagcaagtcgtctaggagtac

SEQ ID NO: 84055 - DNA, 30 bp, Artificial Sequence
  Synthetic oligonucleotide
cctgataagactattgctaaccgtgagtac

SEQ ID NO: 84056 - DNA, 30 bp, Artificial Sequence
  Synthetic oligonucleotide
aagacgtgtaaaaggactctccagacgtac

SEQ ID NO: 84057 - DNA, 30 bp, Artificial Sequence
  Synthetic oligonucleotide
cagcgcaagcgggataaaatctctacgtac

SEQ ID NO: 84058 - DNA, 30 bp, Artificial Sequence
  Synthetic oligonucleotide
agctcaaaaggagtctggtgcggtacgtac

SEQ ID NO: 84059 - DNA, 30 bp, Artificial Sequence
  Synthetic oligonucleotide
tgggtcacagcccgctaaaactcctcgtac

SEQ ID NO: 84060 - DNA, 30 bp, Artificial Sequence
  Synthetic oligonucleotide
gtgagctgtcataggtaacaatgttcgtac

SEQ ID NO: 84061 - DNA, 30 bp, Artificial Sequence
  Synthetic oligonucleotide
tatgggcagtatggaagggaagacaggtac

SEQ ID NO: 84062 - DNA, 30 bp, Artificial Sequence
  Synthetic oligonucleotide
agtatgagtgcgaccggcaccaaacggtac

SEQ ID NO: 84063 - DNA, 30 bp, Artificial Sequence
  Synthetic oligonucleotide
aagggcgttgattggtcatgctcccggtac

SEQ ID NO: 84064 - DNA, 30 bp, Artificial Sequence
  Synthetic oligonucleotide
aagcccatgcctccgaaaaaacggcggtac

SEQ ID NO: 84065 - DNA, 30 bp, Artificial Sequence
  Synthetic oligonucleotide
aaatgggtccgaactagtcaacgggggtac

SEQ ID NO: 84066 - DNA, 30 bp, Artificial Sequence
  Synthetic oligonucleotide
acttactgatagggttacaagctggggtac

SEQ ID NO: 84067 - DNA, 30 bp, Artificial Sequence
  Synthetic oligonucleotide
gtcgctggttgaagggcacttagaatgtac

SEQ ID NO: 84068 - DNA, 30 bp, Artificial Sequence
  Synthetic oligonucleotide
cgacgcgtggaagacaccggtactctgtac

SEQ ID NO: 84069 - DNA, 30 bp, Artificial Sequence
  Synthetic oligonucleotide
tcgtcctgttcataagtatccaaagtgtac

SEQ ID NO: 84070 - DNA, 30 bp, Artificial Sequence
  Synthetic oligonucleotide
taatcaggggatctcagtcaccaagtgtac

SEQ ID NO: 84071 - DNA, 31 bp, Artificial Sequence
  Synthetic oligonucleotide
ataggtgcggggtaaagagtcgacggtgtac

SEQ ID NO: 84072 - DNA, 30 bp, Artificial Sequence
  Synthetic oligonucleotide
atcttagaaagggggccgaatagtgtgtac

SEQ ID NO: 84073 - DNA, 30 bp, Artificial Sequence
  Synthetic oligonucleotide
taaccgacaacacactggtggtgagattac

SEQ ID NO: 84074 - DNA, 30 bp, Artificial Sequence
  Synthetic oligonucleotide
tcgacatggattctcccgaacataacttac

SEQ ID NO: 84075 - DNA, 30 bp, Artificial Sequence
  Synthetic oligonucleotide
caagggccagtccttgcttcagtagcttac

SEQ ID NO: 84076 - DNA, 30 bp, Artificial Sequence
  Synthetic oligonucleotide
ccttgatgccgtctttcgttttgctcttac

SEQ ID NO: 84077 - DNA, 30 bp, Artificial Sequence
  Synthetic oligonucleotide
acatgtggctaccttccctagtatagttac

SEQ ID NO: 84078 - DNA, 30 bp, Artificial Sequence
  Synthetic oligonucleotide
tgatgtagtccacataagaagctcggttac

SEQ ID NO: 84079 - DNA, 30 bp, Artificial Sequence
  Synthetic oligonucleotide
ccgtgcctaggtaaggacagcaatggttac

SEQ ID NO: 84080 - DNA, 30 bp, Artificial Sequence
  Synthetic oligonucleotide
tgatcatggctccgaagaacctttggttac

SEQ ID NO: 84081 - DNA, 30 bp, Artificial Sequence
  Synthetic oligonucleotide
ctcagaggagggcatgaagaagattgttac

SEQ ID NO: 84082 - DNA, 30 bp, Artificial Sequence
  Synthetic oligonucleotide
agggggggcacgataccactagacgtttac

SEQ ID NO: 84083 - DNA, 30 bp, Artificial Sequence
  Synthetic oligonucleotide
ggtcgtaagccgttagacaagggccaaacc

SEQ ID NO: 84084 - DNA, 30 bp, Artificial Sequence
  Synthetic oligonucleotide
tgctcaaatcatgccatagtcaatcaaacc

SEQ ID NO: 84085 - DNA, 30 bp, Artificial Sequence
  Synthetic oligonucleotide
gctcggatccagtttagagctccggaaacc

SEQ ID NO: 84086 - DNA, 30 bp, Artificial Sequence
  Synthetic oligonucleotide
actccaagggataccactgtgggataaacc

SEQ ID NO: 84087 - DNA, 30 bp, Artificial Sequence
  Synthetic oligonucleotide
cacgaccatggataactgggcgattaaacc

SEQ ID NO: 84088 - DNA, 30 bp, Artificial Sequence
  Synthetic oligonucleotide
acaaacagggtaacaaagcaacctacaacc

SEQ ID NO: 84089 - DNA, 30 bp, Artificial Sequence
  Synthetic oligonucleotide
gcgggtgatgctagtcaaagaggtacaacc

SEQ ID NO: 84090 - DNA, 30 bp, Artificial Sequence
  Synthetic oligonucleotide
aagatcagattcgcttaacattgtacaacc

SEQ ID NO: 84091 - DNA, 30 bp, Artificial Sequence
  Synthetic oligonucleotide
accgctcccagaactggcatcataccaacc

SEQ ID NO: 84092 - DNA, 30 bp, Artificial Sequence
  Synthetic oligonucleotide
aggctgccgcgcagaccagatgaagcaacc

SEQ ID NO: 84093 - DNA, 30 bp, Artificial Sequence
  Synthetic oligonucleotide
tggaggacaaacgaaaagtgaccggcaacc

SEQ ID NO: 84094 - DNA, 30 bp, Artificial Sequence
  Synthetic oligonucleotide
ggtagaataggcagttgggatactagaacc

SEQ ID NO: 84095 - DNA, 30 bp, Artificial Sequence
  Synthetic oligonucleotide
cgtaccgaaaaagatctgtgttctagaacc

SEQ ID NO: 84096 - DNA, 30 bp, Artificial Sequence
  Synthetic oligonucleotide
atcgatacaagactacctggactccgaacc

SEQ ID NO: 84097 - DNA, 30 bp, Artificial Sequence
  Synthetic oligonucleotide
catggctgccaaaactgggtggacggaacc

SEQ ID NO: 84098 - DNA, 30 bp, Artificial Sequence
  Synthetic oligonucleotide
acgcgccgtatacaacatctcgactgaacc

SEQ ID NO: 84099 - DNA, 30 bp, Artificial Sequence
  Synthetic oligonucleotide
gactgtgtggggagtcgacggaggtgaacc

SEQ ID NO: 84100 - DNA, 30 bp, Artificial Sequence
  Synthetic oligonucleotide
gataaaggggaaatcgttagatacataacc

SEQ ID NO: 84101 - DNA, 30 bp, Artificial Sequence
  Synthetic oligonucleotide
ggttgcagtcaaaggggactatacataacc

SEQ ID NO: 84102 - DNA, 30 bp, Artificial Sequence
  Synthetic oligonucleotide
gacggggtgaggcacgtgttgagcataacc

SEQ ID NO: 84103 - DNA, 30 bp, Artificial Sequence
  Synthetic oligonucleotide
ggacatgtaaggggcttactggatttaacc

SEQ ID NO: 84104 - DNA, 30 bp, Artificial Sequence
  Synthetic oligonucleotide
gaggttccacctgggcactagaaaaacacc

SEQ ID NO: 84105 - DNA, 30 bp, Artificial Sequence
  Synthetic oligonucleotide
tcacctaagtgctgttccggaaagaacacc

SEQ ID NO: 84106 - DNA, 30 bp, Artificial Sequence
  Synthetic oligonucleotide
aatcgtctccaaacggcaaaatgacacacc

SEQ ID NO: 84107 - DNA, 30 bp, Artificial Sequence
  Synthetic oligonucleotide
ggccaaaagacttggtgggacatccacacc

SEQ ID NO: 84108 - DNA, 30 bp, Artificial Sequence
  Synthetic oligonucleotide
aagttagttcactgagggatgtgggacacc

SEQ ID NO: 84109 - DNA, 30 bp, Artificial Sequence
  Synthetic oligonucleotide
aatggctacgggaggacatcggatgacacc

SEQ ID NO: 84110 - DNA, 30 bp, Artificial Sequence
  Synthetic oligonucleotide
ttacgtgttccgggtggattcggtgacacc

SEQ ID NO: 84111 - DNA, 30 bp, Artificial Sequence
  Synthetic oligonucleotide
caccgtaagtcgatgggcacggcatacacc

SEQ ID NO: 84112 - DNA, 30 bp, Artificial Sequence
  Synthetic oligonucleotide
ctcactaaataatgtcaaggggcatacacc

SEQ ID NO: 84113 - DNA, 30 bp, Artificial Sequence
  Synthetic oligonucleotide
acttgagccgataggcaagcgccctacacc

SEQ ID NO: 84114 - DNA, 30 bp, Artificial Sequence
  Synthetic oligonucleotide
cgtaccaaggccttctgacaatgctacacc

SEQ ID NO: 84115 - DNA, 30 bp, Artificial Sequence
  Synthetic oligonucleotide
gcgcagagataccacaagttgatctacacc

SEQ ID NO: 84116 - DNA, 30 bp, Artificial Sequence
  Synthetic oligonucleotide
gggggctgcatacatggcagacattacacc

SEQ ID NO: 84117 - DNA, 30 bp, Artificial Sequence
  Synthetic oligonucleotide
ttgcaattcgaaaacgtgtcgctcaccacc

SEQ ID NO: 84118 - DNA, 30 bp, Artificial Sequence
  Synthetic oligonucleotide
ctcgatggaatatatttgcaccctgccacc

SEQ ID NO: 84119 - DNA, 30 bp, Artificial Sequence
  Synthetic oligonucleotide
ggctgacatgagcgatgtgatcggggcacc

SEQ ID NO: 84120 - DNA, 30 bp, Artificial Sequence
  Synthetic oligonucleotide
tgccagaagaggttacattaggtttgcacc

SEQ ID NO: 84121 - DNA, 30 bp, Artificial Sequence
  Synthetic oligonucleotide
atgaaagtataggtcggtaatccaatcacc

SEQ ID NO: 84122 - DNA, 30 bp, Artificial Sequence
  Synthetic oligonucleotide
gtcgttcatacgttcgagggctggatcacc

SEQ ID NO: 84123 - DNA, 30 bp, Artificial Sequence
  Synthetic oligonucleotide
cacaaacagacaaaggggatgcacctcacc

SEQ ID NO: 84124 - DNA, 30 bp, Artificial Sequence
  Synthetic oligonucleotide
cattcattaagcgccgatatgctcgtcacc

SEQ ID NO: 84125 - DNA, 30 bp, Artificial Sequence
  Synthetic oligonucleotide
aagttaacggggaatgtttgggatgtcacc

SEQ ID NO: 84126 - DNA, 30 bp, Artificial Sequence
  Synthetic oligonucleotide
actgatattccaaaatattggcaaaagacc

SEQ ID NO: 84127 - DNA, 30 bp, Artificial Sequence
  Synthetic oligonucleotide
agcataaaacaatgtgataccggcaagacc

SEQ ID NO: 84128 - DNA, 30 bp, Artificial Sequence
  Synthetic oligonucleotide
aagagagagcttgagagcaaggaagagacc

SEQ ID NO: 84129 - DNA, 30 bp, Artificial Sequence
  Synthetic oligonucleotide
catcccagacaatctagtgtgtcagagacc

SEQ ID NO: 84130 - DNA, 30 bp, Artificial Sequence
  Synthetic oligonucleotide
acgaaccgtgataaaagatcaaatgagacc

SEQ ID NO: 84131 - DNA, 30 bp, Artificial Sequence
  Synthetic oligonucleotide
gggatcaaggagcattaaacttattagacc

SEQ ID NO: 84132 - DNA, 30 bp, Artificial Sequence
  Synthetic oligonucleotide
gtcgattaaacattaaaactgtcttagacc

SEQ ID NO: 84133 - DNA, 30 bp, Artificial Sequence
  Synthetic oligonucleotide
tctgcgaatctaagctataccccaccgacc

SEQ ID NO: 84134 - DNA, 30 bp, Artificial Sequence
  Synthetic oligonucleotide
aacatcgaccgtaacaaaagtataccgacc

SEQ ID NO: 84135 - DNA, 30 bp, Artificial Sequence
  Synthetic oligonucleotide
ttgaggagcgcgaaagcatctgcgccgacc

SEQ ID NO: 84136 - DNA, 30 bp, Artificial Sequence
  Synthetic oligonucleotide
aatcatcgccgaatgaatcctaaggcgacc

SEQ ID NO: 84137 - DNA, 30 bp, Artificial Sequence
  Synthetic oligonucleotide
caatgagagcaggtaactcagctggcgacc

SEQ ID NO: 84138 - DNA, 30 bp, Artificial Sequence
  Synthetic oligonucleotide
tcgatagatattacagcatagtgcaggacc

SEQ ID NO: 84139 - DNA, 30 bp, Artificial Sequence
  Synthetic oligonucleotide
gactgtgcacataagaggggattgcggacc

SEQ ID NO: 84140 - DNA, 30 bp, Artificial Sequence
  Synthetic oligonucleotide
gtagagcactaactaatagaggaagggacc

SEQ ID NO: 84141 - DNA, 30 bp, Artificial Sequence
  Synthetic oligonucleotide
tgagttgccgtaaacttaccgggctggacc

SEQ ID NO: 84142 - DNA, 30 bp, Artificial Sequence
  Synthetic oligonucleotide
caggacaatcgttggaattatcgttggacc

SEQ ID NO: 84143 - DNA, 30 bp, Artificial Sequence
  Synthetic oligonucleotide
cgatttccggagatttcatgagggatgacc

SEQ ID NO: 84144 - DNA, 30 bp, Artificial Sequence
  Synthetic oligonucleotide
ggcctccccatgacgaagggctgactgacc

SEQ ID NO: 84145 - DNA, 30 bp, Artificial Sequence
  Synthetic oligonucleotide
agaccaggatgtccaatcacacaagtgacc

SEQ ID NO: 84146 - DNA, 30 bp, Artificial Sequence
  Synthetic oligonucleotide
ataccaggattggtgatagggtcattgacc

SEQ ID NO: 84147 - DNA, 30 bp, Artificial Sequence
  Synthetic oligonucleotide
ctaagaaggattacatatgtagacttgacc

SEQ ID NO: 84148 - DNA, 30 bp, Artificial Sequence
  Synthetic oligonucleotide
acacaggaaaaagatgattcggcaaatacc

SEQ ID NO: 84149 - DNA, 30 bp, Artificial Sequence
  Synthetic oligonucleotide
aggtaataacagagcggtcgcaaggatacc

SEQ ID NO: 84150 - DNA, 30 bp, Artificial Sequence
  Synthetic oligonucleotide
agacttgtgcaagtcccagggaaagctacc

SEQ ID NO: 84151 - DNA, 30 bp, Artificial Sequence
  Synthetic oligonucleotide
acgaggaagagaatgaggctgttatctacc

SEQ ID NO: 84152 - DNA, 30 bp, Artificial Sequence
  Synthetic oligonucleotide
cgagcatcataagcactagcgaacagtacc

SEQ ID NO: 84153 - DNA, 30 bp, Artificial Sequence
  Synthetic oligonucleotide
aggcgagagatatgtagtcgccctcgtacc

SEQ ID NO: 84154 - DNA, 30 bp, Artificial Sequence
  Synthetic oligonucleotide
gttagaagggctgggatcctagttggtacc

SEQ ID NO: 84155 - DNA, 30 bp, Artificial Sequence
  Synthetic oligonucleotide
acgtcaagcatatgtagtgagacgtgtacc

SEQ ID NO: 84156 - DNA, 30 bp, Artificial Sequence
  Synthetic oligonucleotide
aaccagagaggagaaatgcaaccgcttacc

SEQ ID NO: 84157 - DNA, 30 bp, Artificial Sequence
  Synthetic oligonucleotide
gggatcattcaatcaaaagccaaggaaccc

SEQ ID NO: 84158 - DNA, 30 bp, Artificial Sequence
  Synthetic oligonucleotide
acttggtggagatctaaacggggtgaaccc

SEQ ID NO: 84159 - DNA, 30 bp, Artificial Sequence
  Synthetic oligonucleotide
atctggtgacaaatgtggatggaataaccc

SEQ ID NO: 84160 - DNA, 30 bp, Artificial Sequence
  Synthetic oligonucleotide
gagccggaaaggacgattgtggtctaaccc

SEQ ID NO: 84161 - DNA, 30 bp, Artificial Sequence
  Synthetic oligonucleotide
gcaatcgcgaatatactaccaaaaccaccc

SEQ ID NO: 84162 - DNA, 30 bp, Artificial Sequence
  Synthetic oligonucleotide
accagtcatggatgggatgttcgatcaccc

SEQ ID NO: 84163 - DNA, 30 bp, Artificial Sequence
  Synthetic oligonucleotide
cctaacgttactggccaaacaattcgaccc

SEQ ID NO: 84164 - DNA, 30 bp, Artificial Sequence
  Synthetic oligonucleotide
tcaaatggaggcgtcaattcatgaggaccc

SEQ ID NO: 84165 - DNA, 30 bp, Artificial Sequence
  Synthetic oligonucleotide
cggaccactgaggttaagcgaaactgaccc

SEQ ID NO: 84166 - DNA, 30 bp, Artificial Sequence
  Synthetic oligonucleotide
cggttgacctgaagcattaacacgtgaccc

SEQ ID NO: 84167 - DNA, 30 bp, Artificial Sequence
  Synthetic oligonucleotide
tcaggctaactctcacgtcgagcgataccc

SEQ ID NO: 84168 - DNA, 30 bp, Artificial Sequence
  Synthetic oligonucleotide
ctaaaagactgtgcaaatcgatatataccc

SEQ ID NO: 84169 - DNA, 30 bp, Artificial Sequence
  Synthetic oligonucleotide
ggttaatcaggcagtgggagaaagctaccc

SEQ ID NO: 84170 - DNA, 30 bp, Artificial Sequence
  Synthetic oligonucleotide
cgctcccacccagaaccattatggctaccc

SEQ ID NO: 84171 - DNA, 30 bp, Artificial Sequence
  Synthetic oligonucleotide
agacctctgagaatgaccacattggtaccc

SEQ ID NO: 84172 - DNA, 30 bp, Artificial Sequence
  Synthetic oligonucleotide
gagattcagacagacttggaaattaacccc

SEQ ID NO: 84173 - DNA, 30 bp, Artificial Sequence
  Synthetic oligonucleotide
gcctaccacaaatggcacgaattccacccc

SEQ ID NO: 84174 - DNA, 30 bp, Artificial Sequence
  Synthetic oligonucleotide
atggagagacgtgtagagactcatcacccc

SEQ ID NO: 84175 - DNA, 30 bp, Artificial Sequence
  Synthetic oligonucleotide
tgtgaaatacctagctaatgcggcgacccc

SEQ ID NO: 84176 - DNA, 30 bp, Artificial Sequence
  Synthetic oligonucleotide
ctaagcaatgaagttacctacgcgtacccc

SEQ ID NO: 84177 - DNA, 30 bp, Artificial Sequence
  Synthetic oligonucleotide
ctgacaggccatcaaggtacttcgagcccc

SEQ ID NO: 84178 - DNA, 30 bp, Artificial Sequence
  Synthetic oligonucleotide
tgtgggtctccactaacataaccatgcccc

SEQ ID NO: 84179 - DNA, 30 bp, Artificial Sequence
  Synthetic oligonucleotide
tgaaggaacaacacccaatatgcctgcccc

SEQ ID NO: 84180 - DNA, 30 bp, Artificial Sequence
  Synthetic oligonucleotide
gtaagtagaccatggagatactcaatcccc

SEQ ID NO: 84181 - DNA, 30 bp, Artificial Sequence
  Synthetic oligonucleotide
cgaatcggtggcaatcctagggagatcccc

SEQ ID NO: 84182 - DNA, 30 bp, Artificial Sequence
  Synthetic oligonucleotide
tcggcatgtaggacaaactcaggtatcccc

SEQ ID NO: 84183 - DNA, 30 bp, Artificial Sequence
  Synthetic oligonucleotide
gctagcggatgacacggcctcatactcccc

SEQ ID NO: 84184 - DNA, 30 bp, Artificial Sequence
  Synthetic oligonucleotide
gtaaatagaaattaacattaaggaaagccc

SEQ ID NO: 84185 - DNA, 30 bp, Artificial Sequence
  Synthetic oligonucleotide
cgatgtctacagtgcttagaacagaagccc

SEQ ID NO: 84186 - DNA, 30 bp, Artificial Sequence
  Synthetic oligonucleotide
acttatgtggcaagaacaacaatgcagccc

SEQ ID NO: 84187 - DNA, 30 bp, Artificial Sequence
  Synthetic oligonucleotide
atgagccgcctcaagcataactccgagccc

SEQ ID NO: 84188 - DNA, 30 bp, Artificial Sequence
  Synthetic oligonucleotide
atgtagatgttggcacacgcgggaccgccc

SEQ ID NO: 84189 - DNA, 30 bp, Artificial Sequence
  Synthetic oligonucleotide
aagagtatgaagaaatctcgctccccgccc

SEQ ID NO: 84190 - DNA, 30 bp, Artificial Sequence
  Synthetic oligonucleotide
cagagcagtagatgactgggaagggcgccc

SEQ ID NO: 84191 - DNA, 30 bp, Artificial Sequence
  Synthetic oligonucleotide
gttgcaggctaaggcacacgtaaatcgccc

SEQ ID NO: 84192 - DNA, 30 bp, Artificial Sequence
  Synthetic oligonucleotide
tatgatgcgcgttagaaagtcacccggccc

SEQ ID NO: 84193 - DNA, 30 bp, Artificial Sequence
  Synthetic oligonucleotide
aagaaagtcaatggattcagtgctcggccc

SEQ ID NO: 84194 - DNA, 30 bp, Artificial Sequence
  Synthetic oligonucleotide
cacaatagacgatagtcatcgcacatgccc

SEQ ID NO: 84195 - DNA, 30 bp, Artificial Sequence
  Synthetic oligonucleotide
gaaggagatggggtcggacgcctgatgccc

SEQ ID NO: 84196 - DNA, 30 bp, Artificial Sequence
  Synthetic oligonucleotide
gggggcgaggtaagcatctatttccctccc

SEQ ID NO: 84197 - DNA, 30 bp, Artificial Sequence
  Synthetic oligonucleotide
cactaaactatatggtcaaagggggctccc

SEQ ID NO: 84198 - DNA, 30 bp, Artificial Sequence
  Synthetic oligonucleotide
ggagtacaagtggcgggaccaactagtccc

SEQ ID NO: 84199 - DNA, 30 bp, Artificial Sequence
  Synthetic oligonucleotide
ggtggggtcgattgcaaagcgcacattccc

SEQ ID NO: 84200 - DNA, 30 bp, Artificial Sequence
  Synthetic oligonucleotide
tcgcacgccccccactgttagaatattccc

SEQ ID NO: 84201 - DNA, 30 bp, Artificial Sequence
  Synthetic oligonucleotide
ccgaaccggatatgcggcgaacgtattccc

SEQ ID NO: 84202 - DNA, 30 bp, Artificial Sequence
  Synthetic oligonucleotide
caggcactgtgcgtggcagtggatcttccc

SEQ ID NO: 84203 - DNA, 30 bp, Artificial Sequence
  Synthetic oligonucleotide
cctgagaagcggacatgccttgagtttccc

SEQ ID NO: 84204 - DNA, 30 bp, Artificial Sequence
  Synthetic oligonucleotide
ttggtggcgggtttggtccatacataagcc

SEQ ID NO: 84205 - DNA, 30 bp, Artificial Sequence
  Synthetic oligonucleotide
ggaatacccgaaccacccgaatagtaagcc

SEQ ID NO: 84206 - DNA, 30 bp, Artificial Sequence
  Synthetic oligonucleotide
ggtaattagggcgtagaagagcaaacagcc

SEQ ID NO: 84207 - DNA, 30 bp, Artificial Sequence
  Synthetic oligonucleotide
caaggccctactctatgttgagaaacagcc

SEQ ID NO: 84208 - DNA, 30 bp, Artificial Sequence
  Synthetic oligonucleotide
tcgaaaatgctttgtaatagaggcccagcc

SEQ ID NO: 84209 - DNA, 30 bp, Artificial Sequence
  Synthetic oligonucleotide
gtgggagaagacagaggcctgtgcgcagcc

SEQ ID NO: 84210 - DNA, 30 bp, Artificial Sequence
  Synthetic oligonucleotide
gacagggaaaaatttctagcattggcagcc

SEQ ID NO: 84211 - DNA, 30 bp, Artificial Sequence
  Synthetic oligonucleotide
atcatcctgtggagacccaccgaacgagcc

SEQ ID NO: 84212 - DNA, 30 bp, Artificial Sequence
  Synthetic oligonucleotide
atggccacctgtctcttacatccacgagcc

SEQ ID NO: 84213 - DNA, 30 bp, Artificial Sequence
  Synthetic oligonucleotide
gtaaattggagatgatcacatagttgagcc

SEQ ID NO: 84214 - DNA, 30 bp, Artificial Sequence
  Synthetic oligonucleotide
gagtccggttcagatgagggaccaatagcc

SEQ ID NO: 84215 - DNA, 30 bp, Artificial Sequence
  Synthetic oligonucleotide
taacgtcggaaggccgtaaaggaactagcc

SEQ ID NO: 84216 - DNA, 31 bp, Artificial Sequence
  Synthetic oligonucleotide
gcactgagagggcagtttaatcatagtagcc

SEQ ID NO: 84217 - DNA, 30 bp, Artificial Sequence
  Synthetic oligonucleotide
cattgaacattgggaaaatgaactgtagcc

SEQ ID NO: 84218 - DNA, 30 bp, Artificial Sequence
  Synthetic oligonucleotide
ggggggcatgagaagtataggcctgtagcc

SEQ ID NO: 84219 - DNA, 30 bp, Artificial Sequence
  Synthetic oligonucleotide
tgcaggagtcacacatatcggaacaacgcc

SEQ ID NO: 84220 - DNA, 30 bp, Artificial Sequence
  Synthetic oligonucleotide
acgcattatagaggagattgacatcacgcc

SEQ ID NO: 84221 - DNA, 30 bp, Artificial Sequence
  Synthetic oligonucleotide
gaccgcaaatgaaaaacgaggtcatacgcc

SEQ ID NO: 84222 - DNA, 30 bp, Artificial Sequence
  Synthetic oligonucleotide
aaggaagatggtcccaactcaccttacgcc

SEQ ID NO: 84223 - DNA, 30 bp, Artificial Sequence
  Synthetic oligonucleotide
agcatcctaatgaactctgagggttacgcc

SEQ ID NO: 84224 - DNA, 30 bp, Artificial Sequence
  Synthetic oligonucleotide
actggaaaagagccaattcccgaaaccgcc

SEQ ID NO: 84225 - DNA, 30 bp, Artificial Sequence
  Synthetic oligonucleotide
agatgaacactccgattcaataagcccgcc

SEQ ID NO: 84226 - DNA, 30 bp, Artificial Sequence
  Synthetic oligonucleotide
cgagatacagcgcaggggttgaagtccgcc

SEQ ID NO: 84227 - DNA, 30 bp, Artificial Sequence
  Synthetic oligonucleotide
gttgaacatttgttaccagatcaccgcgcc

SEQ ID NO: 84228 - DNA, 30 bp, Artificial Sequence
  Synthetic oligonucleotide
tctaggacgccgtgaaaagttactcgcgcc

SEQ ID NO: 84229 - DNA, 30 bp, Artificial Sequence
  Synthetic oligonucleotide
agaagacgtgagtgtaacatctaagtcgcc

SEQ ID NO: 84230 - DNA, 30 bp, Artificial Sequence
  Synthetic oligonucleotide
ttagggaaggtataaagttctgaggtcgcc

SEQ ID NO: 84231 - DNA, 30 bp, Artificial Sequence
  Synthetic oligonucleotide
ggagaggtttttggcggagaagtggtcgcc

SEQ ID NO: 84232 - DNA, 30 bp, Artificial Sequence
  Synthetic oligonucleotide
tagcgtatgaggtagtggtaggctgtcgcc

SEQ ID NO: 84233 - DNA, 30 bp, Artificial Sequence
  Synthetic oligonucleotide
ggaggggggcgataagaatgacgtaaggcc

SEQ ID NO: 84234 - DNA, 30 bp, Artificial Sequence
  Synthetic oligonucleotide
accccaagctcaggacaatttcaccaggcc

SEQ ID NO: 84235 - DNA, 30 bp, Artificial Sequence
  Synthetic oligonucleotide
ccgaggagctagatccataagggtgaggcc

SEQ ID NO: 84236 - DNA, 30 bp, Artificial Sequence
  Synthetic oligonucleotide
aatggcagaactaccgattacaggtaggcc

SEQ ID NO: 84237 - DNA, 30 bp, Artificial Sequence
  Synthetic oligonucleotide
agtgcgggagggaactagaataggtaggcc

SEQ ID NO: 84238 - DNA, 30 bp, Artificial Sequence
  Synthetic oligonucleotide
agtccattgcgaagagatgccacaacggcc

SEQ ID NO: 84239 - DNA, 30 bp, Artificial Sequence
  Synthetic oligonucleotide
tctaatcaaccgaactacacgcccacggcc

SEQ ID NO: 84240 - DNA, 30 bp, Artificial Sequence
  Synthetic oligonucleotide
cacaaacgtattcgctcggctggagcggcc

SEQ ID NO: 84241 - DNA, 30 bp, Artificial Sequence
  Synthetic oligonucleotide
agatttgtaacgtcgaagattggtgcggcc

SEQ ID NO: 84242 - DNA, 30 bp, Artificial Sequence
  Synthetic oligonucleotide
atttgaacccacgggggaggagcatcggcc

SEQ ID NO: 84243 - DNA, 30 bp, Artificial Sequence
  Synthetic oligonucleotide
tgacaacctctttccgcttcgaggagggcc

SEQ ID NO: 84244 - DNA, 30 bp, Artificial Sequence
  Synthetic oligonucleotide
tgcttaagaaaggagattgacttgagggcc

SEQ ID NO: 84245 - DNA, 30 bp, Artificial Sequence
  Synthetic oligonucleotide
gagctctgatacaggagcggcatgggggcc

SEQ ID NO: 84246 - DNA, 30 bp, Artificial Sequence
  Synthetic oligonucleotide
ccaatcatggaactactagaaaaatgggcc

SEQ ID NO: 84247 - DNA, 30 bp, Artificial Sequence
  Synthetic oligonucleotide
caaccgagtctgccgaacacagaatgggcc

SEQ ID NO: 84248 - DNA, 30 bp, Artificial Sequence
  Synthetic oligonucleotide
tgatccgaaagaagatcatttacctgggcc

SEQ ID NO: 84249 - DNA, 30 bp, Artificial Sequence
  Synthetic oligonucleotide
ccaaaacatggcatgtgacaaaagtgggcc

SEQ ID NO: 84250 - DNA, 30 bp, Artificial Sequence
  Synthetic oligonucleotide
aaggatgggatgtagatatcatacatggcc

SEQ ID NO: 84251 - DNA, 30 bp, Artificial Sequence
  Synthetic oligonucleotide
cgtccgcactgcattgcatccacagtggcc

SEQ ID NO: 84252 - DNA, 30 bp, Artificial Sequence
  Synthetic oligonucleotide
gtggttggtaatctaagcggtttagtggcc

SEQ ID NO: 84253 - DNA, 30 bp, Artificial Sequence
  Synthetic oligonucleotide
catcgtgggtatgggcgttagatgaatgcc

SEQ ID NO: 84254 - DNA, 30 bp, Artificial Sequence
  Synthetic oligonucleotide
cacaggaacagcacaaggaggacaactgcc

SEQ ID NO: 84255 - DNA, 30 bp, Artificial Sequence
  Synthetic oligonucleotide
cggtgcgatgcctaggaaaggaggactgcc

SEQ ID NO: 84256 - DNA, 30 bp, Artificial Sequence
  Synthetic oligonucleotide
tcacggggacgatgtatacacatacctgcc

SEQ ID NO: 84257 - DNA, 30 bp, Artificial Sequence
  Synthetic oligonucleotide
attacaacaagtgtagtgcgcaatcctgcc

SEQ ID NO: 84258 - DNA, 30 bp, Artificial Sequence
  Synthetic oligonucleotide
cgaacatttgggggctgttcaagggctgcc

SEQ ID NO: 84259 - DNA, 30 bp, Artificial Sequence
  Synthetic oligonucleotide
actcgtgcgtgaaggaactggactgctgcc

SEQ ID NO: 84260 - DNA, 30 bp, Artificial Sequence
  Synthetic oligonucleotide
gtgcatgaatgctgacaatagtggagtgcc

SEQ ID NO: 84261 - DNA, 30 bp, Artificial Sequence
  Synthetic oligonucleotide
ctgtctaaaatcgaacattctcgtcgtgcc

SEQ ID NO: 84262 - DNA, 30 bp, Artificial Sequence
  Synthetic oligonucleotide
tagtggtcgactttgtgtagggacggtgcc

SEQ ID NO: 84263 - DNA, 30 bp, Artificial Sequence
  Synthetic oligonucleotide
acgggccattaagatgtggagcctggtgcc

SEQ ID NO: 84264 - DNA, 30 bp, Artificial Sequence
  Synthetic oligonucleotide
ttcgataagatggcgtatgtacaatgtgcc

SEQ ID NO: 84265 - DNA, 30 bp, Artificial Sequence
  Synthetic oligonucleotide
gtagtggctcgtgaaggccaatactgtgcc

SEQ ID NO: 84266 - DNA, 30 bp, Artificial Sequence
  Synthetic oligonucleotide
cctaagggatgtgggttaaatccaattgcc

SEQ ID NO: 84267 - DNA, 30 bp, Artificial Sequence
  Synthetic oligonucleotide
aagaaaaagctggacaccgtcactattgcc

SEQ ID NO: 84268 - DNA, 30 bp, Artificial Sequence
  Synthetic oligonucleotide
aggaaagcgggtggagacgacggtattgcc

SEQ ID NO: 84269 - DNA, 30 bp, Artificial Sequence
  Synthetic oligonucleotide
accgagacactcatgtctagggcccttgcc

SEQ ID NO: 84270 - DNA, 31 bp, Artificial Sequence
  Synthetic oligonucleotide
cggcacacaccggtgagcggtatcgaaatcc

SEQ ID NO: 84271 - DNA, 30 bp, Artificial Sequence
  Synthetic oligonucleotide
agcagactcgtcgccatgctacataaatcc

SEQ ID NO: 84272 - DNA, 30 bp, Artificial Sequence
  Synthetic oligonucleotide
gatcgagctgtaagatatacatctaaatcc

SEQ ID NO: 84273 - DNA, 30 bp, Artificial Sequence
  Synthetic oligonucleotide
tcggaacgacccagaaagaatggccaatcc

SEQ ID NO: 84274 - DNA, 30 bp, Artificial Sequence
  Synthetic oligonucleotide
tcacgtcggctctaacgggaaaggcaatcc

SEQ ID NO: 84275 - DNA, 30 bp, Artificial Sequence
  Synthetic oligonucleotide
ggacgcggggtatgaggtaattgcgaatcc

SEQ ID NO: 84276 - DNA, 30 bp, Artificial Sequence
  Synthetic oligonucleotide
tggacagcatgggcaatttatcttgaatcc

SEQ ID NO: 84277 - DNA, 30 bp, Artificial Sequence
  Synthetic oligonucleotide
ggtgactagatcagtaatgtgcactcatcc

SEQ ID NO: 84278 - DNA, 30 bp, Artificial Sequence
  Synthetic oligonucleotide
ggagacaccacatttgtgtattactcatcc

SEQ ID NO: 84279 - DNA, 30 bp, Artificial Sequence
  Synthetic oligonucleotide
attagggtccaacggttacgaaagtcatcc

SEQ ID NO: 84280 - DNA, 30 bp, Artificial Sequence
  Synthetic oligonucleotide
agtacattgaaacaaataaactcccgatcc

SEQ ID NO: 84281 - DNA, 30 bp, Artificial Sequence
  Synthetic oligonucleotide
agaaggaagttacaactctacataggatcc

SEQ ID NO: 84282 - DNA, 30 bp, Artificial Sequence
  Synthetic oligonucleotide
tcgacgaaacgttatgtatcattcggatcc

SEQ ID NO: 84283 - DNA, 30 bp, Artificial Sequence
  Synthetic oligonucleotide
tcgtaggggtttgttggcggcacatgatcc

SEQ ID NO: 84284 - DNA, 30 bp, Artificial Sequence
  Synthetic oligonucleotide
tcaacgatagaactatgcaaaaggtactcc

SEQ ID NO: 84285 - DNA, 30 bp, Artificial Sequence
  Synthetic oligonucleotide
agcattcgaagtcagctgaggcgaacctcc

SEQ ID NO: 84286 - DNA, 30 bp, Artificial Sequence
  Synthetic oligonucleotide
agatggtggataacataacggtatgcctcc

SEQ ID NO: 84287 - DNA, 30 bp, Artificial Sequence
  Synthetic oligonucleotide
aacagaagtaaacaagcgtccggtgcctcc

SEQ ID NO: 84288 - DNA, 30 bp, Artificial Sequence
  Synthetic oligonucleotide
aggagtggagctgtgtcttatctatcctcc

SEQ ID NO: 84289 - DNA, 30 bp, Artificial Sequence
  Synthetic oligonucleotide
agaacgcaacactatgttctacaaagctcc

SEQ ID NO: 84290 - DNA, 30 bp, Artificial Sequence
  Synthetic oligonucleotide
tctagcccggtggatacgtatatgagctcc

SEQ ID NO: 84291 - DNA, 30 bp, Artificial Sequence
  Synthetic oligonucleotide
cgataggacgataaacacagatggcgctcc

SEQ ID NO: 84292 - DNA, 30 bp, Artificial Sequence
  Synthetic oligonucleotide
ctgccggaccaatctccagaactgcgctcc

SEQ ID NO: 84293 - DNA, 30 bp, Artificial Sequence
  Synthetic oligonucleotide
tgctcacacagatcaaaacttgccggctcc

SEQ ID NO: 84294 - DNA, 30 bp, Artificial Sequence
  Synthetic oligonucleotide
atacaagggcaacagtcaaattccggctcc

SEQ ID NO: 84295 - DNA, 30 bp, Artificial Sequence
  Synthetic oligonucleotide
cgtaggcaaccctggggcaacgcgttctcc

SEQ ID NO: 84296 - DNA, 30 bp, Artificial Sequence
  Synthetic oligonucleotide
acacatttcggccaagtaggatgcgagtcc

SEQ ID NO: 84297 - DNA, 30 bp, Artificial Sequence
  Synthetic oligonucleotide
ggcaatcataaatgccggcaagctgagtcc

SEQ ID NO: 84298 - DNA, 30 bp, Artificial Sequence
  Synthetic oligonucleotide
agctccctagatagcgaaaagtatccgtcc

SEQ ID NO: 84299 - DNA, 30 bp, Artificial Sequence
  Synthetic oligonucleotide
ctctcgacgtggtcatataggaagtcgtcc

SEQ ID NO: 84300 - DNA, 30 bp, Artificial Sequence
  Synthetic oligonucleotide
taaggaagtagcggagcgcatgaccggtcc

SEQ ID NO: 84301 - DNA, 30 bp, Artificial Sequence
  Synthetic oligonucleotide
catcaagatctccctgtgcattagcggtcc

SEQ ID NO: 84302 - DNA, 30 bp, Artificial Sequence
  Synthetic oligonucleotide
gtcaaacgcgggtcatcatcgttagggtcc

SEQ ID NO: 84303 - DNA, 30 bp, Artificial Sequence
  Synthetic oligonucleotide
tagagagttcgccacatcacggtctggtcc

SEQ ID NO: 84304 - DNA, 30 bp, Artificial Sequence
  Synthetic oligonucleotide
aggcccatgataagcggtcgagcgtggtcc

SEQ ID NO: 84305 - DNA, 30 bp, Artificial Sequence
  Synthetic oligonucleotide
tgagaacccgacgttatgagatccatgtcc

SEQ ID NO: 84306 - DNA, 30 bp, Artificial Sequence
  Synthetic oligonucleotide
acatatggatataggtggggtggcatgtcc

SEQ ID NO: 84307 - DNA, 30 bp, Artificial Sequence
  Synthetic oligonucleotide
tctgacagcgtgttttttgagtgactgtcc

SEQ ID NO: 84308 - DNA, 30 bp, Artificial Sequence
  Synthetic oligonucleotide
cgagcactgcaacgcgatcttagtgtgtcc

SEQ ID NO: 84309 - DNA, 30 bp, Artificial Sequence
  Synthetic oligonucleotide
cggagcactgtcgagcaacacggattgtcc

SEQ ID NO: 84310 - DNA, 30 bp, Artificial Sequence
  Synthetic oligonucleotide
cctgatgggggtgtataaggggcgttgtcc

SEQ ID NO: 84311 - DNA, 30 bp, Artificial Sequence
  Synthetic oligonucleotide
acggactgacctgagagaagcttaaattcc

SEQ ID NO: 84312 - DNA, 30 bp, Artificial Sequence
  Synthetic oligonucleotide
tgctctcgccacacaatgacgaggaattcc

SEQ ID NO: 84313 - DNA, 30 bp, Artificial Sequence
  Synthetic oligonucleotide
gcgtaaatcagggcgagcgttcagcattcc

SEQ ID NO: 84314 - DNA, 30 bp, Artificial Sequence
  Synthetic oligonucleotide
tcggtagaagtgatcatgcttacaacttcc

SEQ ID NO: 84315 - DNA, 31 bp, Artificial Sequence
  Synthetic oligonucleotide
cagagcatctacagctcctcagcatccttcc

SEQ ID NO: 84316 - DNA, 30 bp, Artificial Sequence
  Synthetic oligonucleotide
cgatcctaagctatgaccgaacctccttcc

SEQ ID NO: 84317 - DNA, 30 bp, Artificial Sequence
  Synthetic oligonucleotide
ggtggtcactaaaaactgctcatctcttcc

SEQ ID NO: 84318 - DNA, 30 bp, Artificial Sequence
  Synthetic oligonucleotide
gggtcgtaaaggccgtaagatcacggttcc

SEQ ID NO: 84319 - DNA, 30 bp, Artificial Sequence
  Synthetic oligonucleotide
agcgtaatgcggtgcctgattacgatttcc

SEQ ID NO: 84320 - DNA, 30 bp, Artificial Sequence
  Synthetic oligonucleotide
ccgatgaattgcacatcagcacaactttcc

SEQ ID NO: 84321 - DNA, 30 bp, Artificial Sequence
  Synthetic oligonucleotide
gagaccaaaaacaaaagatgtcgtctttcc

SEQ ID NO: 84322 - DNA, 30 bp, Artificial Sequence
  Synthetic oligonucleotide
ctgttaccgggcgacaggttgaacaaaagc

SEQ ID NO: 84323 - DNA, 30 bp, Artificial Sequence
  Synthetic oligonucleotide
tcagtaggtggggggattcccggacaaagc

SEQ ID NO: 84324 - DNA, 30 bp, Artificial Sequence
  Synthetic oligonucleotide
agacttaacgaggtacgagtggcagaaagc

SEQ ID NO: 84325 - DNA, 30 bp, Artificial Sequence
  Synthetic oligonucleotide
tgaccatttatcggtcaacacgccgaaagc

SEQ ID NO: 84326 - DNA, 30 bp, Artificial Sequence
  Synthetic oligonucleotide
gcgagtttgcggggtacctaaccggaaagc

SEQ ID NO: 84327 - DNA, 30 bp, Artificial Sequence
  Synthetic oligonucleotide
aggagtgtagcccttgtggccggtgaaagc

SEQ ID NO: 84328 - DNA, 30 bp, Artificial Sequence
  Synthetic oligonucleotide
acgcgtgtcgttctgcaaatggtctaaagc

SEQ ID NO: 84329 - DNA, 30 bp, Artificial Sequence
  Synthetic oligonucleotide
acccaaggcaggctgcgacgttgttaaagc

SEQ ID NO: 84330 - DNA, 30 bp, Artificial Sequence
  Synthetic oligonucleotide
atacctaaagagaacacagcgacaacaagc

SEQ ID NO: 84331 - DNA, 30 bp, Artificial Sequence
  Synthetic oligonucleotide
aggaaggaaggtcgctcagctggaacaagc

SEQ ID NO: 84332 - DNA, 30 bp, Artificial Sequence
  Synthetic oligonucleotide
tctcaacggttttagtagtagagcacaagc

SEQ ID NO: 84333 - DNA, 30 bp, Artificial Sequence
  Synthetic oligonucleotide
tcccctgagagaggtatgcggatcacaagc

SEQ ID NO: 84334 - DNA, 30 bp, Artificial Sequence
  Synthetic oligonucleotide
tatgtacggtatcggacggtcaatacaagc

SEQ ID NO: 84335 - DNA, 30 bp, Artificial Sequence
  Synthetic oligonucleotide
cctaggcatcacggctgggtataatcaagc

SEQ ID NO: 84336 - DNA, 30 bp, Artificial Sequence
  Synthetic oligonucleotide
ctgaccacttggaaaatggaacgttcaagc

SEQ ID NO: 84337 - DNA, 30 bp, Artificial Sequence
  Synthetic oligonucleotide
ttcgcgcgttgtaaacagtgattgagaagc

SEQ ID NO: 84338 - DNA, 30 bp, Artificial Sequence
  Synthetic oligonucleotide
cccagttgacataaagaaggaagtcgaagc

SEQ ID NO: 84339 - DNA, 30 bp, Artificial Sequence
  Synthetic oligonucleotide
gggcacttgtcaagttatgtaatgggaagc

SEQ ID NO: 84340 - DNA, 30 bp, Artificial Sequence
  Synthetic oligonucleotide
caaggaaaccgattatgtctctgttgaagc

SEQ ID NO: 84341 - DNA, 30 bp, Artificial Sequence
  Synthetic oligonucleotide
agatatagagtgttggcgcaagcgataagc

SEQ ID NO: 84342 - DNA, 30 bp, Artificial Sequence
  Synthetic oligonucleotide
taagtaacggtcaaactgtctcatataagc

SEQ ID NO: 84343 - DNA, 30 bp, Artificial Sequence
  Synthetic oligonucleotide
tgaggaacaacgcgtggacaatgactaagc

SEQ ID NO: 84344 - DNA, 30 bp, Artificial Sequence
  Synthetic oligonucleotide
caaggggcgaccataatacagggcctaagc

SEQ ID NO: 84345 - DNA, 30 bp, Artificial Sequence
  Synthetic oligonucleotide
tggtagacggactccaaagcgtaggtaagc

SEQ ID NO: 84346 - DNA, 30 bp, Artificial Sequence
  Synthetic oligonucleotide
gggcgaattgtctagtggtatagattaagc

SEQ ID NO: 84347 - DNA, 30 bp, Artificial Sequence
  Synthetic oligonucleotide
cacgaaactctggttcgaccaagaaacagc

SEQ ID NO: 84348 - DNA, 30 bp, Artificial Sequence
  Synthetic oligonucleotide
attggatcataaatgaaatatgaacacagc

SEQ ID NO: 84349 - DNA, 30 bp, Artificial Sequence
  Synthetic oligonucleotide
agatggcgaggcggttgttgtaaagacagc

SEQ ID NO: 84350 - DNA, 30 bp, Artificial Sequence
  Synthetic oligonucleotide
catcacccgttagcggaccaaccagacagc

SEQ ID NO: 84351 - DNA, 30 bp, Artificial Sequence
  Synthetic oligonucleotide
acaagaaacaaggttgtaggaagcgacagc

SEQ ID NO: 84352 - DNA, 30 bp, Artificial Sequence
  Synthetic oligonucleotide
acataattgggagtggcacgacgtgacagc

SEQ ID NO: 84353 - DNA, 30 bp, Artificial Sequence
  Synthetic oligonucleotide
acgccgccgttgacggaatgagattacagc

SEQ ID NO: 84354 - DNA, 30 bp, Artificial Sequence
  Synthetic oligonucleotide
aagccgacttccccattaaggtaaaccagc

SEQ ID NO: 84355 - DNA, 30 bp, Artificial Sequence
  Synthetic oligonucleotide
gatccggcggaatctcaacgcgttaccagc

SEQ ID NO: 84356 - DNA, 30 bp, Artificial Sequence
  Synthetic oligonucleotide
ggataaaatgaagcaaaacgggaagccagc

SEQ ID NO: 84357 - DNA, 30 bp, Artificial Sequence
  Synthetic oligonucleotide
gagaagaatgcgggcgggccgtgtgccagc

SEQ ID NO: 84358 - DNA, 30 bp, Artificial Sequence
  Synthetic oligonucleotide
gacaattggtggagttcgtattttgccagc

SEQ ID NO: 84359 - DNA, 30 bp, Artificial Sequence
  Synthetic oligonucleotide
aggtgacgacggacgaccttaaaaagcagc

SEQ ID NO: 84360 - DNA, 30 bp, Artificial Sequence
  Synthetic oligonucleotide
acagaagagtaagaatttatggatagcagc

SEQ ID NO: 84361 - DNA, 30 bp, Artificial Sequence
  Synthetic oligonucleotide
cgtccgatcaacatcgtatatccccgcagc

SEQ ID NO: 84362 - DNA, 30 bp, Artificial Sequence
  Synthetic oligonucleotide
agtgctcaaccgtaacataggacaggcagc

SEQ ID NO: 84363 - DNA, 30 bp, Artificial Sequence
  Synthetic oligonucleotide
gcacgagccatgaaactaacagcatgcagc

SEQ ID NO: 84364 - DNA, 30 bp, Artificial Sequence
  Synthetic oligonucleotide
tcagaagggggtgagttaacgaagatcagc

SEQ ID NO: 84365 - DNA, 30 bp, Artificial Sequence
  Synthetic oligonucleotide
ggacgactggtgcgggacgaacctatcagc

SEQ ID NO: 84366 - DNA, 30 bp, Artificial Sequence
  Synthetic oligonucleotide
aaccatgagtgtcctaggcaaggtatcagc

SEQ ID NO: 84367 - DNA, 30 bp, Artificial Sequence
  Synthetic oligonucleotide
tacaagataaccgtcgagtcgacgctcagc

SEQ ID NO: 84368 - DNA, 30 bp, Artificial Sequence
  Synthetic oligonucleotide
ccaaacgatggccaggaacgggaattcagc

SEQ ID NO: 84369 - DNA, 30 bp, Artificial Sequence
  Synthetic oligonucleotide
agcaggacgccacctgttccgagattcagc

SEQ ID NO: 84370 - DNA, 30 bp, Artificial Sequence
  Synthetic oligonucleotide
cgaagacttctatacatgtatctcttcagc

SEQ ID NO: 84371 - DNA, 30 bp, Artificial Sequence
  Synthetic oligonucleotide
agtgtaagcgcgatatcctgtttgaagagc

SEQ ID NO: 84372 - DNA, 30 bp, Artificial Sequence
  Synthetic oligonucleotide
cttagatctagacaggaggtaagacagagc

SEQ ID NO: 84373 - DNA, 30 bp, Artificial Sequence
  Synthetic oligonucleotide
cggtaagccgctccgcggggaggacagagc

SEQ ID NO: 84374 - DNA, 30 bp, Artificial Sequence
  Synthetic oligonucleotide
gttcggagtgtcttacagtttaaagagagc

SEQ ID NO: 84375 - DNA, 30 bp, Artificial Sequence
  Synthetic oligonucleotide
caacttaagggcagatgcgtgggagagagc

SEQ ID NO: 84376 - DNA, 30 bp, Artificial Sequence
  Synthetic oligonucleotide
aaatggagaggttagaatcccgcggagagc

SEQ ID NO: 84377 - DNA, 30 bp, Artificial Sequence
  Synthetic oligonucleotide
agtaggtggttagtcggggcgctggagagc

SEQ ID NO: 84378 - DNA, 30 bp, Artificial Sequence
  Synthetic oligonucleotide
ccacggcacgtcgggcaaattacaccgagc

SEQ ID NO: 84379 - DNA, 30 bp, Artificial Sequence
  Synthetic oligonucleotide
tgtaaacaacggttgcgcaaattaccgagc

SEQ ID NO: 84380 - DNA, 30 bp, Artificial Sequence
  Synthetic oligonucleotide
atagagtgacaacagatattaataaggagc

SEQ ID NO: 84381 - DNA, 30 bp, Artificial Sequence
  Synthetic oligonucleotide
gggtaactcgttcttgaaccaaataggagc

SEQ ID NO: 84382 - DNA, 30 bp, Artificial Sequence
  Synthetic oligonucleotide
tgaatgggagagcgctcagagcgacggagc

SEQ ID NO: 84383 - DNA, 30 bp, Artificial Sequence
  Synthetic oligonucleotide
cgcggttcctaggtatatcatcaatggagc

SEQ ID NO: 84384 - DNA, 30 bp, Artificial Sequence
  Synthetic oligonucleotide
tggtaacactagggtgtagatggatggagc

SEQ ID NO: 84385 - DNA, 30 bp, Artificial Sequence
  Synthetic oligonucleotide
atgcccatagcaatacataaacattggagc

SEQ ID NO: 84386 - DNA, 30 bp, Artificial Sequence
  Synthetic oligonucleotide
tcaggaaaccatccatagcggcagatgagc

SEQ ID NO: 84387 - DNA, 30 bp, Artificial Sequence
  Synthetic oligonucleotide
gcgcactggtcccataaaacggagatgagc

SEQ ID NO: 84388 - DNA, 30 bp, Artificial Sequence
  Synthetic oligonucleotide
gtcaccggatagctaaattgcacgatgagc

SEQ ID NO: 84389 - DNA, 30 bp, Artificial Sequence
  Synthetic oligonucleotide
ctcgagaacggcacccagaggaccctgagc

SEQ ID NO: 84390 - DNA, 30 bp, Artificial Sequence
  Synthetic oligonucleotide
cccgtaagagtgcatgcgcttaccctgagc

SEQ ID NO: 84391 - DNA, 30 bp, Artificial Sequence
  Synthetic oligonucleotide
gaaagctgctaaaaatgacgtggcttgagc

SEQ ID NO: 84392 - DNA, 30 bp, Artificial Sequence
  Synthetic oligonucleotide
tgcggtagtaatagctaacgagaaaatagc

SEQ ID NO: 84393 - DNA, 30 bp, Artificial Sequence
  Synthetic oligonucleotide
cagttggagagatatattgtgcaagatagc

SEQ ID NO: 84394 - DNA, 30 bp, Artificial Sequence
  Synthetic oligonucleotide
tgggcactcatcgaccagagggcagatagc

SEQ ID NO: 84395 - DNA, 30 bp, Artificial Sequence
  Synthetic oligonucleotide
agcgtcaattcgaaatcagccgctgatagc

SEQ ID NO: 84396 - DNA, 30 bp, Artificial Sequence
  Synthetic oligonucleotide
agacaggctaaagcgtatttagagtatagc

SEQ ID NO: 84397 - DNA, 30 bp, Artificial Sequence
  Synthetic oligonucleotide
cgtgttgcaagagagtggggaaggtatagc

SEQ ID NO: 84398 - DNA, 30 bp, Artificial Sequence
  Synthetic oligonucleotide
agggggtgtatgtccgagggcaattatagc

SEQ ID NO: 84399 - DNA, 30 bp, Artificial Sequence
  Synthetic oligonucleotide
aaggctcaagggggctgacctagttatagc

SEQ ID NO: 84400 - DNA, 30 bp, Artificial Sequence
  Synthetic oligonucleotide
tgcaatgcagcgcattagcaaggacctagc

SEQ ID NO: 84401 - DNA, 30 bp, Artificial Sequence
  Synthetic oligonucleotide
taatatgaaagagactgtcagtacgctagc

SEQ ID NO: 84402 - DNA, 30 bp, Artificial Sequence
  Synthetic oligonucleotide
tcaattaagtgtgtctacataagtgctagc

SEQ ID NO: 84403 - DNA, 30 bp, Artificial Sequence
  Synthetic oligonucleotide
tcagcaaggagtacgttaatagaatctagc

SEQ ID NO: 84404 - DNA, 30 bp, Artificial Sequence
  Synthetic oligonucleotide
ggacagaataggagtccgtgagtttctagc

SEQ ID NO: 84405 - DNA, 30 bp, Artificial Sequence
  Synthetic oligonucleotide
caaaggtagccttgcgtgagagagcgtagc

SEQ ID NO: 84406 - DNA, 30 bp, Artificial Sequence
  Synthetic oligonucleotide
ccaaagagtgggaaaccgaggcgcggtagc

SEQ ID NO: 84407 - DNA, 30 bp, Artificial Sequence
  Synthetic oligonucleotide
acgggtctccaaagcagcacgatcggtagc

SEQ ID NO: 84408 - DNA, 30 bp, Artificial Sequence
  Synthetic oligonucleotide
tacagtctataggacacaagattgggtagc

SEQ ID NO: 84409 - DNA, 30 bp, Artificial Sequence
  Synthetic oligonucleotide
ttagtcaaaacgattgactagggatgtagc

SEQ ID NO: 84410 - DNA, 30 bp, Artificial Sequence
  Synthetic oligonucleotide
cacgggactgcaaacacataaacttgtagc

SEQ ID NO: 84411 - DNA, 30 bp, Artificial Sequence
  Synthetic oligonucleotide
tgtaatacgatacggatactaccaattagc

SEQ ID NO: 84412 - DNA, 30 bp, Artificial Sequence
  Synthetic oligonucleotide
ttcggaggaaaaaatggtctgctgattagc

SEQ ID NO: 84413 - DNA, 30 bp, Artificial Sequence
  Synthetic oligonucleotide
ggatgcattggaatacagaggtttattagc

SEQ ID NO: 84414 - DNA, 30 bp, Artificial Sequence
  Synthetic oligonucleotide
cgggtctaccgtaggtcatggtgagttagc

SEQ ID NO: 84415 - DNA, 30 bp, Artificial Sequence
  Synthetic oligonucleotide
gcggacacgatcctagtaggtgtagttagc

SEQ ID NO: 84416 - DNA, 30 bp, Artificial Sequence
  Synthetic oligonucleotide
agtaaaggggaagatctgccttgcaaacgc

SEQ ID NO: 84417 - DNA, 30 bp, Artificial Sequence
  Synthetic oligonucleotide
ctacaccggttagtaagagtcatgcaacgc

SEQ ID NO: 84418 - DNA, 30 bp, Artificial Sequence
  Synthetic oligonucleotide
actgatgggcatactcacagttcctaacgc

SEQ ID NO: 84419 - DNA, 30 bp, Artificial Sequence
  Synthetic oligonucleotide
accacaatcgggctggggacgacgtaacgc

SEQ ID NO: 84420 - DNA, 30 bp, Artificial Sequence
  Synthetic oligonucleotide
tggagcgcaaggtaacgtcaaggcccacgc

SEQ ID NO: 84421 - DNA, 30 bp, Artificial Sequence
  Synthetic oligonucleotide
acgtcgaggcgacgggtcgtggtgccacgc

SEQ ID NO: 84422 - DNA, 30 bp, Artificial Sequence
  Synthetic oligonucleotide
caaaatgatagtaaggacagttctccacgc

SEQ ID NO: 84423 - DNA, 30 bp, Artificial Sequence
  Synthetic oligonucleotide
ggcgtggatgtggatgccaagaatgcacgc

SEQ ID NO: 84424 - DNA, 30 bp, Artificial Sequence
  Synthetic oligonucleotide
caattgacaagtgaagatcagaatgcacgc

SEQ ID NO: 84425 - DNA, 30 bp, Artificial Sequence
  Synthetic oligonucleotide
caacgggccaaagagtgagtggcaagacgc

SEQ ID NO: 84426 - DNA, 30 bp, Artificial Sequence
  Synthetic oligonucleotide
gcgggggttgatgagcaaggcttactacgc

SEQ ID NO: 84427 - DNA, 30 bp, Artificial Sequence
  Synthetic oligonucleotide
attaggggtgagacgagacaactcctacgc

SEQ ID NO: 84428 - DNA, 30 bp, Artificial Sequence
  Synthetic oligonucleotide
gacactagggtatggtaaatacaggtacgc

SEQ ID NO: 84429 - DNA, 30 bp, Artificial Sequence
  Synthetic oligonucleotide
aaggggggaataaacttatcctcattacgc

SEQ ID NO: 84430 - DNA, 30 bp, Artificial Sequence
  Synthetic oligonucleotide
gagactccccaaagaatgggtgtgaaccgc

SEQ ID NO: 84431 - DNA, 30 bp, Artificial Sequence
  Synthetic oligonucleotide
attaacgcacatcccaccgccggacaccgc

SEQ ID NO: 84432 - DNA, 30 bp, Artificial Sequence
  Synthetic oligonucleotide
tgggaatcgagcctaaactacaattaccgc

SEQ ID NO: 84433 - DNA, 30 bp, Artificial Sequence
  Synthetic oligonucleotide
agctcggttgctataagtaagagaacccgc

SEQ ID NO: 84434 - DNA, 30 bp, Artificial Sequence
  Synthetic oligonucleotide
gagacatcgttgaaagccggggcgacccgc

SEQ ID NO: 84435 - DNA, 29 bp, Artificial Sequence
  Synthetic oligonucleotide
tccggggcgagaagatctactcaagccgc

SEQ ID NO: 84436 - DNA, 30 bp, Artificial Sequence
  Synthetic oligonucleotide
aagcttaagacaaatacagacccgcgccgc

SEQ ID NO: 84437 - DNA, 30 bp, Artificial Sequence
  Synthetic oligonucleotide
gtttgccatgcgaacaaagagtggtgccgc

SEQ ID NO: 84438 - DNA, 30 bp, Artificial Sequence
  Synthetic oligonucleotide
agtgacataactaggagtaacgtgtgccgc

SEQ ID NO: 84439 - DNA, 30 bp, Artificial Sequence
  Synthetic oligonucleotide
aagatgccgactgtatgatctttcatccgc

SEQ ID NO: 84440 - DNA, 30 bp, Artificial Sequence
  Synthetic oligonucleotide
cactacagaaggtttgcggtggtgatccgc

SEQ ID NO: 84441 - DNA, 30 bp, Artificial Sequence
  Synthetic oligonucleotide
ttgataaggttggcaaccacgtctatccgc

SEQ ID NO: 84442 - DNA, 30 bp, Artificial Sequence
  Synthetic oligonucleotide
agaagcaaatgacaaaatgaacttatccgc

SEQ ID NO: 84443 - DNA, 30 bp, Artificial Sequence
  Synthetic oligonucleotide
agagatgaatctatacgaatgggtttccgc

SEQ ID NO: 84444 - DNA, 30 bp, Artificial Sequence
  Synthetic oligonucleotide
aggcgaaaggaagtaggaggtatgaagcgc

SEQ ID NO: 84445 - DNA, 30 bp, Artificial Sequence
  Synthetic oligonucleotide
gatcttgaactcacagccccaactaagcgc

SEQ ID NO: 84446 - DNA, 30 bp, Artificial Sequence
  Synthetic oligonucleotide
gggtaaactaattaaaaactcgcccagcgc

SEQ ID NO: 84447 - DNA, 30 bp, Artificial Sequence
  Synthetic oligonucleotide
tactaggggtaaatgctatacgatcagcgc

SEQ ID NO: 84448 - DNA, 30 bp, Artificial Sequence
  Synthetic oligonucleotide
aacaccccagtctagttaagtggtcagcgc

SEQ ID NO: 84449 - DNA, 30 bp, Artificial Sequence
  Synthetic oligonucleotide
cgtgccaaccctaggatgcatggatagcgc

SEQ ID NO: 84450 - DNA, 30 bp, Artificial Sequence
  Synthetic oligonucleotide
catgacacgtagaaagatgattgatagcgc

SEQ ID NO: 84451 - DNA, 30 bp, Artificial Sequence
  Synthetic oligonucleotide
aggattggtacaatatgtgtaatatagcgc

SEQ ID NO: 84452 - DNA, 30 bp, Artificial Sequence
  Synthetic oligonucleotide
ttaaggggatgtgaacctatctcgtagcgc

SEQ ID NO: 84453 - DNA, 30 bp, Artificial Sequence
  Synthetic oligonucleotide
gtcggcaagcacatcgaattctgttagcgc

SEQ ID NO: 84454 - DNA, 30 bp, Artificial Sequence
  Synthetic oligonucleotide
atcggacaggtgggggcgaacttgccgcgc

SEQ ID NO: 84455 - DNA, 30 bp, Artificial Sequence
  Synthetic oligonucleotide
aatcatcacatttcatacctgagtgcgcgc

SEQ ID NO: 84456 - DNA, 30 bp, Artificial Sequence
  Synthetic oligonucleotide
agtaatgcgcaagcaacatgcggtgcgcgc

SEQ ID NO: 84457 - DNA, 30 bp, Artificial Sequence
  Synthetic oligonucleotide
aggtctaccttgaggtgtgtacggtcgcgc

SEQ ID NO: 84458 - DNA, 30 bp, Artificial Sequence
  Synthetic oligonucleotide
tgctgtacggggtggcggatgcacaggcgc

SEQ ID NO: 84459 - DNA, 30 bp, Artificial Sequence
  Synthetic oligonucleotide
ggacctgactggccacaaatacaccggcgc

SEQ ID NO: 84460 - DNA, 30 bp, Artificial Sequence
  Synthetic oligonucleotide
gacacaacaaaatgcgcgcgggggatgcgc

SEQ ID NO: 84461 - DNA, 30 bp, Artificial Sequence
  Synthetic oligonucleotide
cagaagcctcttaggcacagaaacctgcgc

SEQ ID NO: 84462 - DNA, 30 bp, Artificial Sequence
  Synthetic oligonucleotide
tagtagtttagggggtaaatggcagtgcgc

SEQ ID NO: 84463 - DNA, 30 bp, Artificial Sequence
  Synthetic oligonucleotide
ggcggaaagtaggtcacatgaatattgcgc

SEQ ID NO: 84464 - DNA, 30 bp, Artificial Sequence
  Synthetic oligonucleotide
acgccatgctaaattcgtgcaaatgatcgc

SEQ ID NO: 84465 - DNA, 30 bp, Artificial Sequence
  Synthetic oligonucleotide
gaccattcatgcaagaactgctcatatcgc

SEQ ID NO: 84466 - DNA, 30 bp, Artificial Sequence
  Synthetic oligonucleotide
tcagagtgactaacggctattgactatcgc

SEQ ID NO: 84467 - DNA, 30 bp, Artificial Sequence
  Synthetic oligonucleotide
agaggtaagggtaacacgtcacagtatcgc

SEQ ID NO: 84468 - DNA, 30 bp, Artificial Sequence
  Synthetic oligonucleotide
caagtaaagtcacttaatagctagtatcgc

SEQ ID NO: 84469 - DNA, 30 bp, Artificial Sequence
  Synthetic oligonucleotide
agagtacaacagagctagcgcatgactcgc

SEQ ID NO: 84470 - DNA, 30 bp, Artificial Sequence
  Synthetic oligonucleotide
gcccgtacggacaaacctaggagtactcgc

SEQ ID NO: 84471 - DNA, 30 bp, Artificial Sequence
  Synthetic oligonucleotide
tgagaccaaggctaattgatcgttactcgc

SEQ ID NO: 84472 - DNA, 31 bp, Artificial Sequence
  Synthetic oligonucleotide
taccgcttccatgtctcaattgctccctcgc

SEQ ID NO: 84473 - DNA, 30 bp, Artificial Sequence
  Synthetic oligonucleotide
aggcggcgtgcttgttcaaaggtccctcgc

SEQ ID NO: 84474 - DNA, 30 bp, Artificial Sequence
  Synthetic oligonucleotide
gttaaagtaacgtgggaattaaatcctcgc

SEQ ID NO: 84475 - DNA, 30 bp, Artificial Sequence
  Synthetic oligonucleotide
gttactacaagtcagctaggattagctcgc

SEQ ID NO: 84476 - DNA, 30 bp, Artificial Sequence
  Synthetic oligonucleotide
cgttgagctggttatctaagttctgctcgc

SEQ ID NO: 84477 - DNA, 30 bp, Artificial Sequence
  Synthetic oligonucleotide
gtcatatacccaacgtaagatagaagtcgc

SEQ ID NO: 84478 - DNA, 30 bp, Artificial Sequence
  Synthetic oligonucleotide
cgagatctgtagcgggggtaattaagtcgc

SEQ ID NO: 84479 - DNA, 30 bp, Artificial Sequence
  Synthetic oligonucleotide
cagttggtcggggcagactatcgaggtcgc

SEQ ID NO: 84480 - DNA, 31 bp, Artificial Sequence
  Synthetic oligonucleotide
agatgtcccgtaagcgtgccgtaacggtcgc

SEQ ID NO: 84481 - DNA, 30 bp, Artificial Sequence
  Synthetic oligonucleotide
gaggacgagaatagaggcattgggggtcgc

SEQ ID NO: 84482 - DNA, 30 bp, Artificial Sequence
  Synthetic oligonucleotide
agccgtggaggtcccaaaacactaattcgc

SEQ ID NO: 84483 - DNA, 30 bp, Artificial Sequence
  Synthetic oligonucleotide
gtcagtagtatagaacatccgaagattcgc

SEQ ID NO: 84484 - DNA, 30 bp, Artificial Sequence
  Synthetic oligonucleotide
tagttacactaggtcgtacgctacgttcgc

SEQ ID NO: 84485 - DNA, 30 bp, Artificial Sequence
  Synthetic oligonucleotide
ggtgtaggtcatattgcttggtaaaaaggc

SEQ ID NO: 84486 - DNA, 30 bp, Artificial Sequence
  Synthetic oligonucleotide
cacggcgctaggagcaccgcggccaaaggc

SEQ ID NO: 84487 - DNA, 30 bp, Artificial Sequence
  Synthetic oligonucleotide
gcgtaccgtaagtgtcttgttttgaaaggc

SEQ ID NO: 84488 - DNA, 30 bp, Artificial Sequence
  Synthetic oligonucleotide
agggacagttcggctgtagccaaccaaggc

SEQ ID NO: 84489 - DNA, 30 bp, Artificial Sequence
  Synthetic oligonucleotide
tccctgaataaagtttgcgcgcctcaaggc

SEQ ID NO: 84490 - DNA, 30 bp, Artificial Sequence
  Synthetic oligonucleotide
gctggcgttgtgcatacgaaggtagaaggc

SEQ ID NO: 84491 - DNA, 30 bp, Artificial Sequence
  Synthetic oligonucleotide
ggaatctacgaatattggcggtctgaaggc

SEQ ID NO: 84492 - DNA, 30 bp, Artificial Sequence
  Synthetic oligonucleotide
cccacgtaagaacaggagacaaaataaggc

SEQ ID NO: 84493 - DNA, 30 bp, Artificial Sequence
  Synthetic oligonucleotide
tggataatgcacgtgtggtgtatgtaaggc

SEQ ID NO: 84494 - DNA, 30 bp, Artificial Sequence
  Synthetic oligonucleotide
cctagcgtacactttcatttgcattaaggc

SEQ ID NO: 84495 - DNA, 30 bp, Artificial Sequence
  Synthetic oligonucleotide
caggtacttcacattatgccaccgacaggc

SEQ ID NO: 84496 - DNA, 30 bp, Artificial Sequence
  Synthetic oligonucleotide
acattatcgtcctattcagattgggcaggc

SEQ ID NO: 84497 - DNA, 30 bp, Artificial Sequence
  Synthetic oligonucleotide
gtcaaagatgtgcaacgtgatccccgaggc

SEQ ID NO: 84498 - DNA, 30 bp, Artificial Sequence
  Synthetic oligonucleotide
agtatacgcgagttcatagataagggaggc

SEQ ID NO: 84499 - DNA, 30 bp, Artificial Sequence
  Synthetic oligonucleotide
acacagagtttcgtaacaattgagggaggc

SEQ ID NO: 84500 - DNA, 30 bp, Artificial Sequence
  Synthetic oligonucleotide
gggggaacactcctggattggatgggaggc

SEQ ID NO: 84501 - DNA, 30 bp, Artificial Sequence
  Synthetic oligonucleotide
acggtgccataagggcgcattaatggaggc

SEQ ID NO: 84502 - DNA, 30 bp, Artificial Sequence
  Synthetic oligonucleotide
gcgtgccagtgtgcacggattatgtgaggc

SEQ ID NO: 84503 - DNA, 30 bp, Artificial Sequence
  Synthetic oligonucleotide
tgaacattcgggaatggcgtaacactaggc

SEQ ID NO: 84504 - DNA, 30 bp, Artificial Sequence
  Synthetic oligonucleotide
caagccaggacgtataatgcatagctaggc

SEQ ID NO: 84505 - DNA, 30 bp, Artificial Sequence
  Synthetic oligonucleotide
aggcctgaacgagtaaggggtgggctaggc

SEQ ID NO: 84506 - DNA, 30 bp, Artificial Sequence
  Synthetic oligonucleotide
agtcagaaatgtaaagacattacattaggc

SEQ ID NO: 84507 - DNA, 30 bp, Artificial Sequence
  Synthetic oligonucleotide
gagatcgaaagctggaaacgaatcttaggc

SEQ ID NO: 84508 - DNA, 30 bp, Artificial Sequence
  Synthetic oligonucleotide
tctcggcaggagaataagggatggttaggc

SEQ ID NO: 84509 - DNA, 30 bp, Artificial Sequence
  Synthetic oligonucleotide
gataatctctccaggagggtgatgaacggc

SEQ ID NO: 84510 - DNA, 30 bp, Artificial Sequence
  Synthetic oligonucleotide
cagtcaagctcgaacccctacagagacggc

SEQ ID NO: 84511 - DNA, 30 bp, Artificial Sequence
  Synthetic oligonucleotide
ttctaagactaagcgtaacccggtgacggc

SEQ ID NO: 84512 - DNA, 30 bp, Artificial Sequence
  Synthetic oligonucleotide
aaggccgatgtataggcagggattgacggc

SEQ ID NO: 84513 - DNA, 30 bp, Artificial Sequence
  Synthetic oligonucleotide
cactgaagaattacatgcggaaagtacggc

SEQ ID NO: 84514 - DNA, 30 bp, Artificial Sequence
  Synthetic oligonucleotide
acgctaacctccgatcttaacgggtacggc

SEQ ID NO: 84515 - DNA, 30 bp, Artificial Sequence
  Synthetic oligonucleotide
gggacatgagtacgaacgatttcttacggc

SEQ ID NO: 84516 - DNA, 30 bp, Artificial Sequence
  Synthetic oligonucleotide
gagtattcgaaagaacatccaggttacggc

SEQ ID NO: 84517 - DNA, 30 bp, Artificial Sequence
  Synthetic oligonucleotide
cgtcatactaaacggcaaccacgtaccggc

SEQ ID NO: 84518 - DNA, 30 bp, Artificial Sequence
  Synthetic oligonucleotide
cactcaataacatggaataacatccccggc

SEQ ID NO: 84519 - DNA, 30 bp, Artificial Sequence
  Synthetic oligonucleotide
aactggacatataccaggtaaaatcccggc

SEQ ID NO: 84520 - DNA, 30 bp, Artificial Sequence
  Synthetic oligonucleotide
gagatagagatcacgtcacaacctcccggc

SEQ ID NO: 84521 - DNA, 30 bp, Artificial Sequence
  Synthetic oligonucleotide
ttctagggtaggtgtactgactgagccggc

SEQ ID NO: 84522 - DNA, 30 bp, Artificial Sequence
  Synthetic oligonucleotide
ccacgtaaactatgcgggtctcaggccggc

SEQ ID NO: 84523 - DNA, 30 bp, Artificial Sequence
  Synthetic oligonucleotide
gcagggtcaggccaatattaacactccggc

SEQ ID NO: 84524 - DNA, 30 bp, Artificial Sequence
  Synthetic oligonucleotide
gtacggacagagactccaaggaaccgcggc

SEQ ID NO: 84525 - DNA, 30 bp, Artificial Sequence
  Synthetic oligonucleotide
tcacgttagcacaaagccgtattcggcggc

SEQ ID NO: 84526 - DNA, 30 bp, Artificial Sequence
  Synthetic oligonucleotide
cgtatcatttgcctgtggaagtagatcggc

SEQ ID NO: 84527 - DNA, 30 bp, Artificial Sequence
  Synthetic oligonucleotide
ggaggtggggttgggactgggcggatcggc

SEQ ID NO: 84528 - DNA, 30 bp, Artificial Sequence
  Synthetic oligonucleotide
ataaaacggcatgatcatggatatatcggc

SEQ ID NO: 84529 - DNA, 30 bp, Artificial Sequence
  Synthetic oligonucleotide
atcggtgtgtaatctaggctcttactcggc

SEQ ID NO: 84530 - DNA, 30 bp, Artificial Sequence
  Synthetic oligonucleotide
gaacggcgttctgcctgtacgcatctcggc

SEQ ID NO: 84531 - DNA, 30 bp, Artificial Sequence
  Synthetic oligonucleotide
acgacattaaaggctaaaagcttggtcggc

SEQ ID NO: 84532 - DNA, 30 bp, Artificial Sequence
  Synthetic oligonucleotide
tgtaagtacatacttattcaaggattcggc

SEQ ID NO: 84533 - DNA, 30 bp, Artificial Sequence
  Synthetic oligonucleotide
tcataaggttatgagttcgtttggttcggc

SEQ ID NO: 84534 - DNA, 30 bp, Artificial Sequence
  Synthetic oligonucleotide
caagctggtaatagtgactatactttcggc

SEQ ID NO: 84535 - DNA, 30 bp, Artificial Sequence
  Synthetic oligonucleotide
tgaagacaacaacgcgaacaccaaaagggc

SEQ ID NO: 84536 - DNA, 30 bp, Artificial Sequence
  Synthetic oligonucleotide
aaggacctttatcgagcatcgcacaagggc

SEQ ID NO: 84537 - DNA, 30 bp, Artificial Sequence
  Synthetic oligonucleotide
cagggaaaacctgctcaataggccgagggc

SEQ ID NO: 84538 - DNA, 30 bp, Artificial Sequence
  Synthetic oligonucleotide
atataaatgctcatgcgaagggaggagggc

SEQ ID NO: 84539 - DNA, 30 bp, Artificial Sequence
  Synthetic oligonucleotide
tacggtctattcaaggcggatgcggagggc

SEQ ID NO: 84540 - DNA, 30 bp, Artificial Sequence
  Synthetic oligonucleotide
tactcggtaaagtcacgtggaacaccgggc

SEQ ID NO: 84541 - DNA, 30 bp, Artificial Sequence
  Synthetic oligonucleotide
cgtcaatgtccttcctcttatctgccgggc

SEQ ID NO: 84542 - DNA, 30 bp, Artificial Sequence
  Synthetic oligonucleotide
ctggcggtaccgagttcatggctagcgggc

SEQ ID NO: 84543 - DNA, 30 bp, Artificial Sequence
  Synthetic oligonucleotide
ggtgatcgaaattcaagtgctgatgcgggc

SEQ ID NO: 84544 - DNA, 30 bp, Artificial Sequence
  Synthetic oligonucleotide
actaggccgggtaggcgtctcagatcgggc

SEQ ID NO: 84545 - DNA, 30 bp, Artificial Sequence
  Synthetic oligonucleotide
gttgcaggggcgcaacgtaaatcaaggggc

SEQ ID NO: 84546 - DNA, 30 bp, Artificial Sequence
  Synthetic oligonucleotide
cgtattggggcgcatgatagttggaggggc

SEQ ID NO: 84547 - DNA, 30 bp, Artificial Sequence
  Synthetic oligonucleotide
aaggaagtacaatgaacctatcaagggggc

SEQ ID NO: 84548 - DNA, 30 bp, Artificial Sequence
  Synthetic oligonucleotide
aagaatacaacaccgagcatccacgggggc

SEQ ID NO: 84549 - DNA, 30 bp, Artificial Sequence
  Synthetic oligonucleotide
actgcgcctgttagtggcaagtgtgggggc

SEQ ID NO: 84550 - DNA, 30 bp, Artificial Sequence
  Synthetic oligonucleotide
gcatacgttatagagagataggtctggggc

SEQ ID NO: 84551 - DNA, 30 bp, Artificial Sequence
  Synthetic oligonucleotide
agattaggtattgcagtttaaacgtggggc

SEQ ID NO: 84552 - DNA, 30 bp, Artificial Sequence
  Synthetic oligonucleotide
aacgggatactagataggataggtatgggc

SEQ ID NO: 84553 - DNA, 30 bp, Artificial Sequence
  Synthetic oligonucleotide
ggtagtcaaactagtcctcattaagtgggc

SEQ ID NO: 84554 - DNA, 30 bp, Artificial Sequence
  Synthetic oligonucleotide
tgcttgcacacttatgattggcacgtgggc

SEQ ID NO: 84555 - DNA, 30 bp, Artificial Sequence
  Synthetic oligonucleotide
tcataaacttagtaccgagcaaatgtgggc

SEQ ID NO: 84556 - DNA, 30 bp, Artificial Sequence
  Synthetic oligonucleotide
gtgcgtaataggcgtactggggttgtgggc

SEQ ID NO: 84557 - DNA, 30 bp, Artificial Sequence
  Synthetic oligonucleotide
cgaaatgacccacgagtgtttgatttgggc

SEQ ID NO: 84558 - DNA, 30 bp, Artificial Sequence
  Synthetic oligonucleotide
ccaaactcattgatttgggtgggaaatggc

SEQ ID NO: 84559 - DNA, 30 bp, Artificial Sequence
  Synthetic oligonucleotide
ctagattatcagatgtctgaccagaatggc

SEQ ID NO: 84560 - DNA, 30 bp, Artificial Sequence
  Synthetic oligonucleotide
ccccaaaaagtatatgccgtagatgatggc

SEQ ID NO: 84561 - DNA, 30 bp, Artificial Sequence
  Synthetic oligonucleotide
tgggtaagtgcaagtaagtgcacatatggc

SEQ ID NO: 84562 - DNA, 30 bp, Artificial Sequence
  Synthetic oligonucleotide
ggtaaacaggtcaaagatagtgcaactggc

SEQ ID NO: 84563 - DNA, 30 bp, Artificial Sequence
  Synthetic oligonucleotide
atacgaactgatcgtactaaactgactggc

SEQ ID NO: 84564 - DNA, 30 bp, Artificial Sequence
  Synthetic oligonucleotide
ctaatagggctaccagaatcaacccctggc

SEQ ID NO: 84565 - DNA, 30 bp, Artificial Sequence
  Synthetic oligonucleotide
gctggctaaaggcggtcgaacttagctggc

SEQ ID NO: 84566 - DNA, 30 bp, Artificial Sequence
  Synthetic oligonucleotide
accctgtggaccatcgataatccggctggc

SEQ ID NO: 84567 - DNA, 30 bp, Artificial Sequence
  Synthetic oligonucleotide
acttcagaacatggcgtcagctattctggc

SEQ ID NO: 84568 - DNA, 30 bp, Artificial Sequence
  Synthetic oligonucleotide
aacatcataggcaccagatgatatagtggc

SEQ ID NO: 84569 - DNA, 30 bp, Artificial Sequence
  Synthetic oligonucleotide
agggtagaaataggtaagtcacgatgtggc

SEQ ID NO: 84570 - DNA, 30 bp, Artificial Sequence
  Synthetic oligonucleotide
cgcttcagtgtagacggtcggggatgtggc

SEQ ID NO: 84571 - DNA, 30 bp, Artificial Sequence
  Synthetic oligonucleotide
catctcgaacgtggaagaacgtatattggc

SEQ ID NO: 84572 - DNA, 30 bp, Artificial Sequence
  Synthetic oligonucleotide
aaaggccatggatagattggagcccttggc

SEQ ID NO: 84573 - DNA, 30 bp, Artificial Sequence
  Synthetic oligonucleotide
gttcgtcgcacgccgagaactgcagttggc

SEQ ID NO: 84574 - DNA, 30 bp, Artificial Sequence
  Synthetic oligonucleotide
tgcaggacttgggcatgtttagctgttggc

SEQ ID NO: 84575 - DNA, 30 bp, Artificial Sequence
  Synthetic oligonucleotide
tctcgttagcaaatatcacattgctttggc

SEQ ID NO: 84576 - DNA, 30 bp, Artificial Sequence
  Synthetic oligonucleotide
cgtgacccgtgcgattcaatcgtgtttggc

SEQ ID NO: 84577 - DNA, 30 bp, Artificial Sequence
  Synthetic oligonucleotide
cgtttcggaaggtactggactcggaaatgc

SEQ ID NO: 84578 - DNA, 30 bp, Artificial Sequence
  Synthetic oligonucleotide
tcgaactaaaccggggtcggcctacaatgc

SEQ ID NO: 84579 - DNA, 30 bp, Artificial Sequence
  Synthetic oligonucleotide
tggagagccaggaccgccgagcaagaatgc

SEQ ID NO: 84580 - DNA, 30 bp, Artificial Sequence
  Synthetic oligonucleotide
ccgggaacttggtgggtcggacccgaatgc

SEQ ID NO: 84581 - DNA, 30 bp, Artificial Sequence
  Synthetic oligonucleotide
gtacgggaaagccaacgctccatcgaatgc

SEQ ID NO: 84582 - DNA, 30 bp, Artificial Sequence
  Synthetic oligonucleotide
tctcaaaaattaactatagtctcggaatgc

SEQ ID NO: 84583 - DNA, 30 bp, Artificial Sequence
  Synthetic oligonucleotide
aacatccccaagtcagactaatcctaatgc

SEQ ID NO: 84584 - DNA, 30 bp, Artificial Sequence
  Synthetic oligonucleotide
gtcactcaatcagtaccgcatcgaacatgc

SEQ ID NO: 84585 - DNA, 30 bp, Artificial Sequence
  Synthetic oligonucleotide
aagctagctcaagctgtagacggcacatgc

SEQ ID NO: 84586 - DNA, 30 bp, Artificial Sequence
  Synthetic oligonucleotide
cgtggttgagtattatttcgtatcacatgc

SEQ ID NO: 84587 - DNA, 30 bp, Artificial Sequence
  Synthetic oligonucleotide
gctataagtcattgtgcgtacaaaccatgc

SEQ ID NO: 84588 - DNA, 30 bp, Artificial Sequence
  Synthetic oligonucleotide
tgacgaagatttgcctttatgagggcatgc

SEQ ID NO: 84589 - DNA, 30 bp, Artificial Sequence
  Synthetic oligonucleotide
atggtgaggcagaaataagccagatcatgc

SEQ ID NO: 84590 - DNA, 30 bp, Artificial Sequence
  Synthetic oligonucleotide
gatgtggctcgcggatagtctcactcatgc

SEQ ID NO: 84591 - DNA, 30 bp, Artificial Sequence
  Synthetic oligonucleotide
cgagatttatctaacatggtagtgtcatgc

SEQ ID NO: 84592 - DNA, 30 bp, Artificial Sequence
  Synthetic oligonucleotide
atcgagtatagcggcgccgacccaagatgc

SEQ ID NO: 84593 - DNA, 30 bp, Artificial Sequence
  Synthetic oligonucleotide
tgggatatggactgaccgcacgcgagatgc

SEQ ID NO: 84594 - DNA, 30 bp, Artificial Sequence
  Synthetic oligonucleotide
taaatgtcagatagttaaaggtgacgatgc

SEQ ID NO: 84595 - DNA, 30 bp, Artificial Sequence
  Synthetic oligonucleotide
aatagaacggttgagataaatgatcgatgc

SEQ ID NO: 84596 - DNA, 30 bp, Artificial Sequence
  Synthetic oligonucleotide
tgacgtgccgttgacgtgcacaagggatgc

SEQ ID NO: 84597 - DNA, 30 bp, Artificial Sequence
  Synthetic oligonucleotide
ggtggggtagtacgtttttcaccctgatgc

SEQ ID NO: 84598 - DNA, 30 bp, Artificial Sequence
  Synthetic oligonucleotide
actaggtaagaataccatgcgggaatatgc

SEQ ID NO: 84599 - DNA, 30 bp, Artificial Sequence
  Synthetic oligonucleotide
gtcagggggttacggaatcgaacgatatgc

SEQ ID NO: 84600 - DNA, 30 bp, Artificial Sequence
  Synthetic oligonucleotide
acgctgtaccaagatgatcatctactatgc

SEQ ID NO: 84601 - DNA, 30 bp, Artificial Sequence
  Synthetic oligonucleotide
catacacgtaggtgagagatttcggtatgc

SEQ ID NO: 84602 - DNA, 30 bp, Artificial Sequence
  Synthetic oligonucleotide
tgcagcgtatctatctcccagagtaactgc

SEQ ID NO: 84603 - DNA, 30 bp, Artificial Sequence
  Synthetic oligonucleotide
ccgtttgtgcggtaaatcatctctcactgc

SEQ ID NO: 84604 - DNA, 30 bp, Artificial Sequence
  Synthetic oligonucleotide
aacggaaccgaaatgcataggattgactgc

SEQ ID NO: 84605 - DNA, 30 bp, Artificial Sequence
  Synthetic oligonucleotide
tcgcgtcgaaacaaatatagtattgactgc

SEQ ID NO: 84606 - DNA, 30 bp, Artificial Sequence
  Synthetic oligonucleotide
ccatggtccgtcaccacttcttacacctgc

SEQ ID NO: 84607 - DNA, 30 bp, Artificial Sequence
  Synthetic oligonucleotide
cgaattgcatagatcactgtgtatacctgc

SEQ ID NO: 84608 - DNA, 30 bp, Artificial Sequence
  Synthetic oligonucleotide
tcaccatgtgatcctttcgagagaccctgc

SEQ ID NO: 84609 - DNA, 30 bp, Artificial Sequence
  Synthetic oligonucleotide
aaagagtgcctagctgaaatccccgcctgc

SEQ ID NO: 84610 - DNA, 30 bp, Artificial Sequence
  Synthetic oligonucleotide
agcgtaagccggaaaagttaaaaggcctgc

SEQ ID NO: 84611 - DNA, 30 bp, Artificial Sequence
  Synthetic oligonucleotide
tagggcagtgatcatgtttcaattgcctgc

SEQ ID NO: 84612 - DNA, 30 bp, Artificial Sequence
  Synthetic oligonucleotide
aagcgcgttcgtcgttcattgctatcctgc

SEQ ID NO: 84613 - DNA, 30 bp, Artificial Sequence
  Synthetic oligonucleotide
agctagaacaggaaggcggccacgtcctgc

SEQ ID NO: 84614 - DNA, 30 bp, Artificial Sequence
  Synthetic oligonucleotide
atggttttacagaccacgatgggttcctgc

SEQ ID NO: 84615 - DNA, 30 bp, Artificial Sequence
  Synthetic oligonucleotide
acgctaagctgaataccgaaatgttcctgc

SEQ ID NO: 84616 - DNA, 30 bp, Artificial Sequence
  Synthetic oligonucleotide
tctggaggtagacgtatttaaagtggctgc

SEQ ID NO: 84617 - DNA, 30 bp, Artificial Sequence
  Synthetic oligonucleotide
tgaactcgttacagatgaattgtatgctgc

SEQ ID NO: 84618 - DNA, 31 bp, Artificial Sequence
  Synthetic oligonucleotide
tgcacctcgcgtacaacggtgttacatctgc

SEQ ID NO: 84619 - DNA, 30 bp, Artificial Sequence
  Synthetic oligonucleotide
gcacggcaaaccatctgacataacctctgc

SEQ ID NO: 84620 - DNA, 30 bp, Artificial Sequence
  Synthetic oligonucleotide
tcggcacgggagcattgacgtatgttctgc

SEQ ID NO: 84621 - DNA, 30 bp, Artificial Sequence
  Synthetic oligonucleotide
cgctctgttaatccgttgtagagaaagtgc

SEQ ID NO: 84622 - DNA, 30 bp, Artificial Sequence
  Synthetic oligonucleotide
ggtaccgactcatcactccatgtccagtgc

SEQ ID NO: 84623 - DNA, 30 bp, Artificial Sequence
  Synthetic oligonucleotide
tttcactgaaataaaaatggactgcagtgc

SEQ ID NO: 84624 - DNA, 30 bp, Artificial Sequence
  Synthetic oligonucleotide
tgctaaaatcaactaaataaagttcagtgc

SEQ ID NO: 84625 - DNA, 30 bp, Artificial Sequence
  Synthetic oligonucleotide
cgacacatctgtttgaagcacaccgagtgc

SEQ ID NO: 84626 - DNA, 30 bp, Artificial Sequence
  Synthetic oligonucleotide
gtacgggcacacagttggtgcaagccgtgc

SEQ ID NO: 84627 - DNA, 29 bp, Artificial Sequence
  Synthetic oligonucleotide
ccaaatgtgcgacagtcacccgtgcgtgc

SEQ ID NO: 84628 - DNA, 30 bp, Artificial Sequence
  Synthetic oligonucleotide
tagttcagagaacaacgaagagcacggtgc

SEQ ID NO: 84629 - DNA, 30 bp, Artificial Sequence
  Synthetic oligonucleotide
cccaagagaagatctgggcctcaagggtgc

SEQ ID NO: 84630 - DNA, 30 bp, Artificial Sequence
  Synthetic oligonucleotide
tggtcatataccattgccccagtagggtgc

SEQ ID NO: 84631 - DNA, 30 bp, Artificial Sequence
  Synthetic oligonucleotide
ccattgcaggtttgagaaaacaaatggtgc

SEQ ID NO: 84632 - DNA, 30 bp, Artificial Sequence
  Synthetic oligonucleotide
gcggggaacccccagaatttagtcatgtgc

SEQ ID NO: 84633 - DNA, 30 bp, Artificial Sequence
  Synthetic oligonucleotide
ggggcgatatggtagaaaatgggtatgtgc

SEQ ID NO: 84634 - DNA, 40 bp, Artificial Sequence
  Synthetic oligonucleotide
acccgaaggtgcaccctggattacaagctgtgtagtgtgc

SEQ ID NO: 84635 - DNA, 30 bp, Artificial Sequence
  Synthetic oligonucleotide
acatcagtgtacgttataatcgttgtgtgc

SEQ ID NO: 84636 - DNA, 30 bp, Artificial Sequence
  Synthetic oligonucleotide
catcggcgtcggagaaataaatgcttgtgc

SEQ ID NO: 84637 - DNA, 30 bp, Artificial Sequence
  Synthetic oligonucleotide
tacggaacgcctaacacaagaacaaattgc

SEQ ID NO: 84638 - DNA, 30 bp, Artificial Sequence
  Synthetic oligonucleotide
actatgaaaggcaaccgcatagaccattgc

SEQ ID NO: 84639 - DNA, 30 bp, Artificial Sequence
  Synthetic oligonucleotide
cgaatcgccatgtgtggactgctggattgc

SEQ ID NO: 84640 - DNA, 30 bp, Artificial Sequence
  Synthetic oligonucleotide
aaggttacgcttaaaggcgagttaacttgc

SEQ ID NO: 84641 - DNA, 30 bp, Artificial Sequence
  Synthetic oligonucleotide
acctgactggggtgatttagggtgacttgc

SEQ ID NO: 84642 - DNA, 28 bp, Artificial Sequence
  Synthetic oligonucleotide
agtaaagtcggcctgatgatggtcttgc

SEQ ID NO: 84643 - DNA, 30 bp, Artificial Sequence
  Synthetic oligonucleotide
gatcctggagtagagctattcagaagttgc

SEQ ID NO: 84644 - DNA, 30 bp, Artificial Sequence
  Synthetic oligonucleotide
ggtgtatgaaggcatggtgcacgatgttgc

SEQ ID NO: 84645 - DNA, 30 bp, Artificial Sequence
  Synthetic oligonucleotide
ggcagagagaacattatcgaggactgttgc

SEQ ID NO: 84646 - DNA, 30 bp, Artificial Sequence
  Synthetic oligonucleotide
ccaagtactgaaacatattcccccatttgc

SEQ ID NO: 84647 - DNA, 30 bp, Artificial Sequence
  Synthetic oligonucleotide
cagcgcgcggattcgagtagagaactttgc

SEQ ID NO: 84648 - DNA, 30 bp, Artificial Sequence
  Synthetic oligonucleotide
taccgcacttttgtactagataacttttgc

SEQ ID NO: 84649 - DNA, 30 bp, Artificial Sequence
  Synthetic oligonucleotide
gtaacaacctgtcacactccgtccttttgc

SEQ ID NO: 84650 - DNA, 30 bp, Artificial Sequence
  Synthetic oligonucleotide
gttcgtgaaggcgggcaccttgaccaaatc

SEQ ID NO: 84651 - DNA, 30 bp, Artificial Sequence
  Synthetic oligonucleotide
ggcgggtcctgatgaaaggcttacgaaatc

SEQ ID NO: 84652 - DNA, 30 bp, Artificial Sequence
  Synthetic oligonucleotide
tcgctgccattgctagcttgaagataaatc

SEQ ID NO: 84653 - DNA, 30 bp, Artificial Sequence
  Synthetic oligonucleotide
cgtagatgtcactactgccaaacaacaatc

SEQ ID NO: 84654 - DNA, 30 bp, Artificial Sequence
  Synthetic oligonucleotide
agccttgaagaaattggcaaagcaacaatc

SEQ ID NO: 84655 - DNA, 30 bp, Artificial Sequence
  Synthetic oligonucleotide
agccaacgtttaggcgtctcgcgaacaatc

SEQ ID NO: 84656 - DNA, 30 bp, Artificial Sequence
  Synthetic oligonucleotide
gtcaaatgacgaactggagattagacaatc

SEQ ID NO: 84657 - DNA, 30 bp, Artificial Sequence
  Synthetic oligonucleotide
ccgggggtgctcaggcccgaattaccaatc

SEQ ID NO: 84658 - DNA, 30 bp, Artificial Sequence
  Synthetic oligonucleotide
aggcggttggggcgtgccttcaacgcaatc

SEQ ID NO: 84659 - DNA, 30 bp, Artificial Sequence
  Synthetic oligonucleotide
aaactggtgaatagcaaaaaagacgcaatc

SEQ ID NO: 84660 - DNA, 30 bp, Artificial Sequence
  Synthetic oligonucleotide
gaaagtctcaagagcacaaaggctgcaatc

SEQ ID NO: 84661 - DNA, 30 bp, Artificial Sequence
  Synthetic oligonucleotide
atgcctcatcccagagtagaagcctcaatc

SEQ ID NO: 84662 - DNA, 30 bp, Artificial Sequence
  Synthetic oligonucleotide
agtgcactcgagtaccacggagtcagaatc

SEQ ID NO: 84663 - DNA, 30 bp, Artificial Sequence
  Synthetic oligonucleotide
cttcaataataatagaggggcgggcgaatc

SEQ ID NO: 84664 - DNA, 30 bp, Artificial Sequence
  Synthetic oligonucleotide
aaggacgtgctaagcacgacgggaggaatc

SEQ ID NO: 84665 - DNA, 30 bp, Artificial Sequence
  Synthetic oligonucleotide
aatcgatacgagtgtgtgcaataaataatc

SEQ ID NO: 84666 - DNA, 30 bp, Artificial Sequence
  Synthetic oligonucleotide
tgtacataagcattagagactggcataatc

SEQ ID NO: 84667 - DNA, 30 bp, Artificial Sequence
  Synthetic oligonucleotide
gcataggtataggggacaattggtataatc

SEQ ID NO: 84668 - DNA, 30 bp, Artificial Sequence
  Synthetic oligonucleotide
accgacgggaatacgaatacgtgcctaatc

SEQ ID NO: 84669 - DNA, 30 bp, Artificial Sequence
  Synthetic oligonucleotide
ctaaggcccgggaatcaaaagagattaatc

SEQ ID NO: 84670 - DNA, 30 bp, Artificial Sequence
  Synthetic oligonucleotide
tgcagggcggtactcagggcccgtcacatc

SEQ ID NO: 84671 - DNA, 30 bp, Artificial Sequence
  Synthetic oligonucleotide
agagcctgcatggaacatcgcggtcacatc

SEQ ID NO: 84672 - DNA, 30 bp, Artificial Sequence
  Synthetic oligonucleotide
ctagactccacaagcataccgatcgacatc

SEQ ID NO: 84673 - DNA, 30 bp, Artificial Sequence
  Synthetic oligonucleotide
tgaagatagcgtcccacatggtaatacatc

SEQ ID NO: 84674 - DNA, 30 bp, Artificial Sequence
  Synthetic oligonucleotide
cagctgttggacgagtgccgcatatacatc

SEQ ID NO: 84675 - DNA, 30 bp, Artificial Sequence
  Synthetic oligonucleotide
gaaaggagggatatagttaaagtatacatc

SEQ ID NO: 84676 - DNA, 30 bp, Artificial Sequence
  Synthetic oligonucleotide
gccgactaagggcacctataattgtacatc

SEQ ID NO: 84677 - DNA, 30 bp, Artificial Sequence
  Synthetic oligonucleotide
ctgatcactatggtcgagactagaaccatc

SEQ ID NO: 84678 - DNA, 30 bp, Artificial Sequence
  Synthetic oligonucleotide
gcgctgcgttgactctaaaaggggaccatc

SEQ ID NO: 84679 - DNA, 30 bp, Artificial Sequence
  Synthetic oligonucleotide
cgaagatataggccacacccatgcgccatc

SEQ ID NO: 84680 - DNA, 30 bp, Artificial Sequence
  Synthetic oligonucleotide
ggcgggtagacatggtctatcgtggccatc

SEQ ID NO: 84681 - DNA, 30 bp, Artificial Sequence
  Synthetic oligonucleotide
caccacgcttactagggattctcaggcatc

SEQ ID NO: 84682 - DNA, 30 bp, Artificial Sequence
  Synthetic oligonucleotide
catcactatcggggctagggcccaatcatc

SEQ ID NO: 84683 - DNA, 30 bp, Artificial Sequence
  Synthetic oligonucleotide
caagacaaacggataaggaggttaatcatc

SEQ ID NO: 84684 - DNA, 30 bp, Artificial Sequence
  Synthetic oligonucleotide
cgaggcgaagacatgagttcgtggatcatc

SEQ ID NO: 84685 - DNA, 30 bp, Artificial Sequence
  Synthetic oligonucleotide
cagcgggagtaagagtcgacctacgtcatc

SEQ ID NO: 84686 - DNA, 30 bp, Artificial Sequence
  Synthetic oligonucleotide
acggcctcagggtgggcatgctgattcatc

SEQ ID NO: 84687 - DNA, 30 bp, Artificial Sequence
  Synthetic oligonucleotide
cgaacggggtagttatagagttctaagatc

SEQ ID NO: 84688 - DNA, 30 bp, Artificial Sequence
  Synthetic oligonucleotide
cggtatctcgcttaactgaaccgacagatc

SEQ ID NO: 84689 - DNA, 30 bp, Artificial Sequence
  Synthetic oligonucleotide
caggggagtaaaggcttatccggccagatc

SEQ ID NO: 84690 - DNA, 30 bp, Artificial Sequence
  Synthetic oligonucleotide
atactagcatagacgacttgtgagcagatc

SEQ ID NO: 84691 - DNA, 30 bp, Artificial Sequence
  Synthetic oligonucleotide
cgctcccatgacgatggtcaagctcagatc

SEQ ID NO: 84692 - DNA, 30 bp, Artificial Sequence
  Synthetic oligonucleotide
agaaggcaggcgattccaacagtatagatc

SEQ ID NO: 84693 - DNA, 30 bp, Artificial Sequence
  Synthetic oligonucleotide
aaggacgtttagtagtcgagcatttagatc

SEQ ID NO: 84694 - DNA, 30 bp, Artificial Sequence
  Synthetic oligonucleotide
cgtgcacttccggagatccaaccagcgatc

SEQ ID NO: 84695 - DNA, 30 bp, Artificial Sequence
  Synthetic oligonucleotide
ggcacgctacgtggcatggtacctgcgatc

SEQ ID NO: 84696 - DNA, 30 bp, Artificial Sequence
  Synthetic oligonucleotide
acaaacgtatcggtaggatatgcttcgatc

SEQ ID NO: 84697 - DNA, 30 bp, Artificial Sequence
  Synthetic oligonucleotide
caataatagtgggagcgccctagcaggatc

SEQ ID NO: 84698 - DNA, 30 bp, Artificial Sequence
  Synthetic oligonucleotide
tacggatagaatagaaggccattcaggatc

SEQ ID NO: 84699 - DNA, 30 bp, Artificial Sequence
  Synthetic oligonucleotide
ggcctcactgggagccaagtatgacggatc

SEQ ID NO: 84700 - DNA, 30 bp, Artificial Sequence
  Synthetic oligonucleotide
gtgaagaaggcaggctataaggttcggatc

SEQ ID NO: 84701 - DNA, 30 bp, Artificial Sequence
  Synthetic oligonucleotide
tatcacacgaaagaaacgacccgagggatc

SEQ ID NO: 84702 - DNA, 30 bp, Artificial Sequence
  Synthetic oligonucleotide
gctgaacgtgtcgagtgattaagggggatc

SEQ ID NO: 84703 - DNA, 30 bp, Artificial Sequence
  Synthetic oligonucleotide
gaaagagtataacagggtcgacactggatc

SEQ ID NO: 84704 - DNA, 30 bp, Artificial Sequence
  Synthetic oligonucleotide
aagcgctaggcaagcagtggaagctggatc

SEQ ID NO: 84705 - DNA, 30 bp, Artificial Sequence
  Synthetic oligonucleotide
acaagaccaaagggatagcgagattggatc

SEQ ID NO: 84706 - DNA, 30 bp, Artificial Sequence
  Synthetic oligonucleotide
ttacacctgcaatgggccgacggaatgatc

SEQ ID NO: 84707 - DNA, 30 bp, Artificial Sequence
  Synthetic oligonucleotide
gtagataacttagggaggactaaactgatc

SEQ ID NO: 84708 - DNA, 30 bp, Artificial Sequence
  Synthetic oligonucleotide
taaaaggcgaaggtagtttcggacctgatc

SEQ ID NO: 84709 - DNA, 30 bp, Artificial Sequence
  Synthetic oligonucleotide
agtcggacctatgttggggacctcgtgatc

SEQ ID NO: 84710 - DNA, 30 bp, Artificial Sequence
  Synthetic oligonucleotide
cgccctaagtgctgttcccgtattgtgatc

SEQ ID NO: 84711 - DNA, 30 bp, Artificial Sequence
  Synthetic oligonucleotide
agtgcatgaccaagctggcgatacaatatc

SEQ ID NO: 84712 - DNA, 30 bp, Artificial Sequence
  Synthetic oligonucleotide
ggcgtaggtgagccgattggttacaatatc

SEQ ID NO: 84713 - DNA, 30 bp, Artificial Sequence
  Synthetic oligonucleotide
cctaaagaccaccaaatacggatcaatatc

SEQ ID NO: 84714 - DNA, 30 bp, Artificial Sequence
  Synthetic oligonucleotide
gtgtaaggaacgacattgatggcgaatatc

SEQ ID NO: 84715 - DNA, 30 bp, Artificial Sequence
  Synthetic oligonucleotide
ctgagcaagagggctacacgcgaagatatc

SEQ ID NO: 84716 - DNA, 30 bp, Artificial Sequence
  Synthetic oligonucleotide
gtgaacaaagaattcaatctcaaggatatc

SEQ ID NO: 84717 - DNA, 30 bp, Artificial Sequence
  Synthetic oligonucleotide
acattaacgaggttaccgcctggtgatatc

SEQ ID NO: 84718 - DNA, 30 bp, Artificial Sequence
  Synthetic oligonucleotide
cgctatccaacaggttgagagaactatatc

SEQ ID NO: 84719 - DNA, 30 bp, Artificial Sequence
  Synthetic oligonucleotide
catgaagccaagggagtcgcgttttatatc

SEQ ID NO: 84720 - DNA, 30 bp, Artificial Sequence
  Synthetic oligonucleotide
ttaaaaagcaaagagtatattgtagctatc

SEQ ID NO: 84721 - DNA, 30 bp, Artificial Sequence
  Synthetic oligonucleotide
tgaagggagaatgtgagcgaaaaatctatc

SEQ ID NO: 84722 - DNA, 30 bp, Artificial Sequence
  Synthetic oligonucleotide
acgggtcggaagaatatggggagatctatc

SEQ ID NO: 84723 - DNA, 30 bp, Artificial Sequence
  Synthetic oligonucleotide
tgagagagagaggacggtatcgtctctatc

SEQ ID NO: 84724 - DNA, 30 bp, Artificial Sequence
  Synthetic oligonucleotide
tgtcaattcaaccatgaagaaaagcgtatc

SEQ ID NO: 84725 - DNA, 30 bp, Artificial Sequence
  Synthetic oligonucleotide
gcgaaaacactgcctgacaaaaaatgtatc

SEQ ID NO: 84726 - DNA, 30 bp, Artificial Sequence
  Synthetic oligonucleotide
tgagcgcgatttcggcaataggactgtatc

SEQ ID NO: 84727 - DNA, 30 bp, Artificial Sequence
  Synthetic oligonucleotide
gcgggtatgtctaattgtatagcgtgtatc

SEQ ID NO: 84728 - DNA, 30 bp, Artificial Sequence
  Synthetic oligonucleotide
gggaaaaggaactcgcagccatggtgtatc

SEQ ID NO: 84729 - DNA, 30 bp, Artificial Sequence
  Synthetic oligonucleotide
gaatgcggcgaagcgagaaggcagcttatc

SEQ ID NO: 84730 - DNA, 30 bp, Artificial Sequence
  Synthetic oligonucleotide
tgcgcaggtgccctggaggtggagaaactc

SEQ ID NO: 84731 - DNA, 30 bp, Artificial Sequence
  Synthetic oligonucleotide
aaatcgagatgacgggtgggatggaaactc

SEQ ID NO: 84732 - DNA, 30 bp, Artificial Sequence
  Synthetic oligonucleotide
ccgctaatactagaggtcgtaagccaactc

SEQ ID NO: 84733 - DNA, 30 bp, Artificial Sequence
  Synthetic oligonucleotide
ccataatgttagaccacaccaatgcaactc

SEQ ID NO: 84734 - DNA, 30 bp, Artificial Sequence
  Synthetic oligonucleotide
aagctggggccggtcagacgtatcgaactc

SEQ ID NO: 84735 - DNA, 30 bp, Artificial Sequence
  Synthetic oligonucleotide
tctgttaggacaatcggctagggtgaactc

SEQ ID NO: 84736 - DNA, 30 bp, Artificial Sequence
  Synthetic oligonucleotide
acgggatcccccctatagacggaataactc

SEQ ID NO: 84737 - DNA, 30 bp, Artificial Sequence
  Synthetic oligonucleotide
taagagccaacgccctttgtgagataactc

SEQ ID NO: 84738 - DNA, 30 bp, Artificial Sequence
  Synthetic oligonucleotide
aaggagaagtcatttgaaagtcgataactc

SEQ ID NO: 84739 - DNA, 30 bp, Artificial Sequence
  Synthetic oligonucleotide
ggctaataaccggtttggctactataactc

SEQ ID NO: 84740 - DNA, 30 bp, Artificial Sequence
  Synthetic oligonucleotide
agagaccgataatgtccgggcgtataactc

SEQ ID NO: 84741 - DNA, 30 bp, Artificial Sequence
  Synthetic oligonucleotide
tagcggtacggtcgcgttccatccacactc

SEQ ID NO: 84742 - DNA, 30 bp, Artificial Sequence
  Synthetic oligonucleotide
gggtggcacaaaccaacgcggatcacactc

SEQ ID NO: 84743 - DNA, 30 bp, Artificial Sequence
  Synthetic oligonucleotide
cttgctcaaagagtacgaaaaaatgcactc

SEQ ID NO: 84744 - DNA, 30 bp, Artificial Sequence
  Synthetic oligonucleotide
aatggggcagaacaaatccggtatgcactc

SEQ ID NO: 84745 - DNA, 30 bp, Artificial Sequence
  Synthetic oligonucleotide
gttgatggtaataccggggatcctgcactc

SEQ ID NO: 84746 - DNA, 30 bp, Artificial Sequence
  Synthetic oligonucleotide
ggcaagattcaacacgaatcagagtcactc

SEQ ID NO: 84747 - DNA, 30 bp, Artificial Sequence
  Synthetic oligonucleotide
gctagcaaacacacagatccgctttcactc

SEQ ID NO: 84748 - DNA, 30 bp, Artificial Sequence
  Synthetic oligonucleotide
ggttctttccaaagcgaagagatgagactc

SEQ ID NO: 84749 - DNA, 30 bp, Artificial Sequence
  Synthetic oligonucleotide
cacataatacagcaccctccgtctagactc

SEQ ID NO: 84750 - DNA, 30 bp, Artificial Sequence
  Synthetic oligonucleotide
atcgcctaagtggtcacaacaatacgactc

SEQ ID NO: 84751 - DNA, 30 bp, Artificial Sequence
  Synthetic oligonucleotide
gtaggcgggtagcctagcgaaacaatactc

SEQ ID NO: 84752 - DNA, 30 bp, Artificial Sequence
  Synthetic oligonucleotide
ccacgccttggaataccgtaaagtctactc

SEQ ID NO: 84753 - DNA, 30 bp, Artificial Sequence
  Synthetic oligonucleotide
gaaggcagccacaactaagtctgagtactc

SEQ ID NO: 84754 - DNA, 30 bp, Artificial Sequence
  Synthetic oligonucleotide
gtaatttcccggcacacacgatctaacctc

SEQ ID NO: 84755 - DNA, 30 bp, Artificial Sequence
  Synthetic oligonucleotide
cgtttgagcaaaaattaactcgccgacctc

SEQ ID NO: 84756 - DNA, 30 bp, Artificial Sequence
  Synthetic oligonucleotide
ggaaaggaccaaagtgagacgcacaccctc

SEQ ID NO: 84757 - DNA, 30 bp, Artificial Sequence
  Synthetic oligonucleotide
agaagcaacacgaggctaggaacacccctc

SEQ ID NO: 84758 - DNA, 30 bp, Artificial Sequence
  Synthetic oligonucleotide
acgtgccctgacctccaggcggatgccctc

SEQ ID NO: 84759 - DNA, 30 bp, Artificial Sequence
  Synthetic oligonucleotide
caccaccgaaggaaaacttccgcaagcctc

SEQ ID NO: 84760 - DNA, 30 bp, Artificial Sequence
  Synthetic oligonucleotide
tggcacagaacttcattatactctagcctc

SEQ ID NO: 84761 - DNA, 30 bp, Artificial Sequence
  Synthetic oligonucleotide
actactcgtgaaccatactccaaatgcctc

SEQ ID NO: 84762 - DNA, 30 bp, Artificial Sequence
  Synthetic oligonucleotide
tctacaggggtaaaaaatgtagggtgcctc

SEQ ID NO: 84763 - DNA, 30 bp, Artificial Sequence
  Synthetic oligonucleotide
tcctaatagaagggtgccaggtgtgtcctc

SEQ ID NO: 84764 - DNA, 30 bp, Artificial Sequence
  Synthetic oligonucleotide
agcgatcaagatgacgacgaaggtttcctc

SEQ ID NO: 84765 - DNA, 30 bp, Artificial Sequence
  Synthetic oligonucleotide
tgatgatatctataaaactgataaaagctc

SEQ ID NO: 84766 - DNA, 30 bp, Artificial Sequence
  Synthetic oligonucleotide
caatcaggggacacctgagcatcaaagctc

SEQ ID NO: 84767 - DNA, 30 bp, Artificial Sequence
  Synthetic oligonucleotide
gaacctaagccttaggaggactagaagctc

SEQ ID NO: 84768 - DNA, 30 bp, Artificial Sequence
  Synthetic oligonucleotide
tcgacccattaagacggaatgctagagctc

SEQ ID NO: 84769 - DNA, 30 bp, Artificial Sequence
  Synthetic oligonucleotide
tgtgtccgggaaagtaaggaggtttagctc

SEQ ID NO: 84770 - DNA, 30 bp, Artificial Sequence
  Synthetic oligonucleotide
aatcacgtgaaagcaagtgggaccccgctc

SEQ ID NO: 84771 - DNA, 30 bp, Artificial Sequence
  Synthetic oligonucleotide
cctccggggctggacccaacttgagcgctc

SEQ ID NO: 84772 - DNA, 30 bp, Artificial Sequence
  Synthetic oligonucleotide
atgggcgggataagtgcaacccaatcgctc

SEQ ID NO: 84773 - DNA, 30 bp, Artificial Sequence
  Synthetic oligonucleotide
aagccagccgtggtaaagtccgaatcgctc

SEQ ID NO: 84774 - DNA, 30 bp, Artificial Sequence
  Synthetic oligonucleotide
acagcactaagcccaaacaaccagtcgctc

SEQ ID NO: 84775 - DNA, 30 bp, Artificial Sequence
  Synthetic oligonucleotide
cactaagtcttacaatgagtctcttcgctc

SEQ ID NO: 84776 - DNA, 30 bp, Artificial Sequence
  Synthetic oligonucleotide
tctgcgtgtccgtaaagagggagatggctc

SEQ ID NO: 84777 - DNA, 30 bp, Artificial Sequence
  Synthetic oligonucleotide
gagcgtgttgcataccgcgattatatgctc

SEQ ID NO: 84778 - DNA, 30 bp, Artificial Sequence
  Synthetic oligonucleotide
tccggatagtgaccgggacgaaaagtgctc

SEQ ID NO: 84779 - DNA, 30 bp, Artificial Sequence
  Synthetic oligonucleotide
actagattgtcattggggccaagagtgctc

SEQ ID NO: 84780 - DNA, 30 bp, Artificial Sequence
  Synthetic oligonucleotide
gtagacatcccgtcggaggattgagtgctc

SEQ ID NO: 84781 - DNA, 30 bp, Artificial Sequence
  Synthetic oligonucleotide
taagacagggtctgatagacggtaaatctc

SEQ ID NO: 84782 - DNA, 30 bp, Artificial Sequence
  Synthetic oligonucleotide
caaacaatgtgatcggttgtgactcatctc

SEQ ID NO: 84783 - DNA, 30 bp, Artificial Sequence
  Synthetic oligonucleotide
gcgggggggagatagtacattcggactctc

SEQ ID NO: 84784 - DNA, 30 bp, Artificial Sequence
  Synthetic oligonucleotide
atgaaggggttaagtgttgaactccctctc

SEQ ID NO: 84785 - DNA, 30 bp, Artificial Sequence
  Synthetic oligonucleotide
ataggagagtgctgagagttacacgctctc

SEQ ID NO: 84786 - DNA, 30 bp, Artificial Sequence
  Synthetic oligonucleotide
gtcaagggcggaaatgtactgcgggctctc

SEQ ID NO: 84787 - DNA, 30 bp, Artificial Sequence
  Synthetic oligonucleotide
tcctcactaaggcttacaaattagtctctc

SEQ ID NO: 84788 - DNA, 30 bp, Artificial Sequence
  Synthetic oligonucleotide
atgtgcgcgagagttgtaaggtatcgtctc

SEQ ID NO: 84789 - DNA, 30 bp, Artificial Sequence
  Synthetic oligonucleotide
acagaaacagaaccgactgtgaaaggtctc

SEQ ID NO: 84790 - DNA, 30 bp, Artificial Sequence
  Synthetic oligonucleotide
acttgtgtcgatgggacgggcggaggtctc

SEQ ID NO: 84791 - DNA, 30 bp, Artificial Sequence
  Synthetic oligonucleotide
ccgagacctgggcacactgcgcatgttctc

SEQ ID NO: 84792 - DNA, 30 bp, Artificial Sequence
  Synthetic oligonucleotide
ggattgaacactgtgcaaccgaaaaaagtc

SEQ ID NO: 84793 - DNA, 30 bp, Artificial Sequence
  Synthetic oligonucleotide
gatgcggcggaagcggttgtagacaaagtc

SEQ ID NO: 84794 - DNA, 30 bp, Artificial Sequence
  Synthetic oligonucleotide
cgttaccaccgtgaaagataacctaaagtc

SEQ ID NO: 84795 - DNA, 30 bp, Artificial Sequence
  Synthetic oligonucleotide
ggcaacacggcgttaaaacggtttaaagtc

SEQ ID NO: 84796 - DNA, 30 bp, Artificial Sequence
  Synthetic oligonucleotide
gtgttcggggcgggcatcgcgaatcaagtc

SEQ ID NO: 84797 - DNA, 30 bp, Artificial Sequence
  Synthetic oligonucleotide
gaaagatcctaaagactcccatgagaagtc

SEQ ID NO: 84798 - DNA, 30 bp, Artificial Sequence
  Synthetic oligonucleotide
ttaagctctcgaagtgcaccagccgaagtc

SEQ ID NO: 84799 - DNA, 30 bp, Artificial Sequence
  Synthetic oligonucleotide
ttggaaggcggttcgaaaggtctggaagtc

SEQ ID NO: 84800 - DNA, 30 bp, Artificial Sequence
  Synthetic oligonucleotide
actgtaggcgctaagtatggggtggaagtc

SEQ ID NO: 84801 - DNA, 29 bp, Artificial Sequence
  Synthetic oligonucleotide
acgaagacatccggaaaggccatgaagtc

SEQ ID NO: 84802 - DNA, 30 bp, Artificial Sequence
  Synthetic oligonucleotide
actgctcgtgacatagggataggtgaagtc

SEQ ID NO: 84803 - DNA, 30 bp, Artificial Sequence
  Synthetic oligonucleotide
cacaaatgagctaattgaaaaggtacagtc

SEQ ID NO: 84804 - DNA, 30 bp, Artificial Sequence
  Synthetic oligonucleotide
attgttacccgtcaaattgctaagccagtc

SEQ ID NO: 84805 - DNA, 30 bp, Artificial Sequence
  Synthetic oligonucleotide
ggataagtaattagatagtcaatgccagtc

SEQ ID NO: 84806 - DNA, 30 bp, Artificial Sequence
  Synthetic oligonucleotide
acaatggtgctgtcgcgtaagagtccagtc

SEQ ID NO: 84807 - DNA, 30 bp, Artificial Sequence
  Synthetic oligonucleotide
aaaagggtgctatgcagtcagcgagcagtc

SEQ ID NO: 84808 - DNA, 30 bp, Artificial Sequence
  Synthetic oligonucleotide
tgttgctgcgaccaacgacgcactgcagtc

SEQ ID NO: 84809 - DNA, 30 bp, Artificial Sequence
  Synthetic oligonucleotide
catctggcgtttgcgggctcgcactcagtc

SEQ ID NO: 84810 - DNA, 30 bp, Artificial Sequence
  Synthetic oligonucleotide
taggggtgttgtcatcacgaactgtcagtc

SEQ ID NO: 84811 - DNA, 30 bp, Artificial Sequence
  Synthetic oligonucleotide
atgtcaggcatttattctatcacaagagtc

SEQ ID NO: 84812 - DNA, 30 bp, Artificial Sequence
  Synthetic oligonucleotide
ctagccttgagtcaaacacagttcagagtc

SEQ ID NO: 84813 - DNA, 30 bp, Artificial Sequence
  Synthetic oligonucleotide
tcttctgcaactgtgccatcgatacgagtc

SEQ ID NO: 84814 - DNA, 30 bp, Artificial Sequence
  Synthetic oligonucleotide
ggccaggggaaaaatgtgtatgatcgagtc

SEQ ID NO: 84815 - DNA, 30 bp, Artificial Sequence
  Synthetic oligonucleotide
aaaggaatagggccacacacgcctcgagtc

SEQ ID NO: 84816 - DNA, 30 bp, Artificial Sequence
  Synthetic oligonucleotide
ttgccgaccgagggcccagcaacgggagtc

SEQ ID NO: 84817 - DNA, 30 bp, Artificial Sequence
  Synthetic oligonucleotide
agatgaattacgccgttgaattcctgagtc

SEQ ID NO: 84818 - DNA, 30 bp, Artificial Sequence
  Synthetic oligonucleotide
cattccgtaacgttccgagttcattgagtc

SEQ ID NO: 84819 - DNA, 30 bp, Artificial Sequence
  Synthetic oligonucleotide
aggactcatagaacagcatcgagaatagtc

SEQ ID NO: 84820 - DNA, 30 bp, Artificial Sequence
  Synthetic oligonucleotide
acgtgaaagagttatagaagcctcatagtc

SEQ ID NO: 84821 - DNA, 30 bp, Artificial Sequence
  Synthetic oligonucleotide
ggaggcgaacgagctgtagctgcgctagtc

SEQ ID NO: 84822 - DNA, 30 bp, Artificial Sequence
  Synthetic oligonucleotide
ctagcgcgatgggcatggaccttgctagtc

SEQ ID NO: 84823 - DNA, 30 bp, Artificial Sequence
  Synthetic oligonucleotide
aggaggcaatctcctgactgggcagtagtc

SEQ ID NO: 84824 - DNA, 30 bp, Artificial Sequence
  Synthetic oligonucleotide
tagaaccgggagtaactatcatgagtagtc

SEQ ID NO: 84825 - DNA, 30 bp, Artificial Sequence
  Synthetic oligonucleotide
gcgggtagagtaccactgaatacattagtc

SEQ ID NO: 84826 - DNA, 30 bp, Artificial Sequence
  Synthetic oligonucleotide
ggaccagcgggctgaggcaacattaacgtc

SEQ ID NO: 84827 - DNA, 30 bp, Artificial Sequence
  Synthetic oligonucleotide
aacaagctcggcagattaataggccacgtc

SEQ ID NO: 84828 - DNA, 30 bp, Artificial Sequence
  Synthetic oligonucleotide
taagaccatccaagtaataggcgtgacgtc

SEQ ID NO: 84829 - DNA, 30 bp, Artificial Sequence
  Synthetic oligonucleotide
agacggcggaactacagtactatttacgtc

SEQ ID NO: 84830 - DNA, 30 bp, Artificial Sequence
  Synthetic oligonucleotide
acgaatgggtatgaaatgaccaagcccgtc

SEQ ID NO: 84831 - DNA, 30 bp, Artificial Sequence
  Synthetic oligonucleotide
aattgtaaatactaaggatgccctcccgtc

SEQ ID NO: 84832 - DNA, 30 bp, Artificial Sequence
  Synthetic oligonucleotide
catcctctgtaatggatcaggtgcgccgtc

SEQ ID NO: 84833 - DNA, 30 bp, Artificial Sequence
  Synthetic oligonucleotide
cagcctcactccatgcggtgatgtgccgtc

SEQ ID NO: 84834 - DNA, 30 bp, Artificial Sequence
  Synthetic oligonucleotide
tcggcgagatctcgatcccacggatccgtc

SEQ ID NO: 84835 - DNA, 30 bp, Artificial Sequence
  Synthetic oligonucleotide
ttaggggttcgtaaggcttgaccccgcgtc

SEQ ID NO: 84836 - DNA, 30 bp, Artificial Sequence
  Synthetic oligonucleotide
taccggagaattgtaaaagaaccgcgcgtc

SEQ ID NO: 84837 - DNA, 30 bp, Artificial Sequence
  Synthetic oligonucleotide
acaaccagacaacaataggtcgaatgcgtc

SEQ ID NO: 84838 - DNA, 30 bp, Artificial Sequence
  Synthetic oligonucleotide
aaagctagagaccgtaaatctcgatgcgtc

SEQ ID NO: 84839 - DNA, 30 bp, Artificial Sequence
  Synthetic oligonucleotide
tggaggtccgtggtcaaatagatctgcgtc

SEQ ID NO: 84840 - DNA, 30 bp, Artificial Sequence
  Synthetic oligonucleotide
cgcattactggaccgtatgatcaaatcgtc

SEQ ID NO: 84841 - DNA, 30 bp, Artificial Sequence
  Synthetic oligonucleotide
ggggaggcacatgtccacggaaacatcgtc

SEQ ID NO: 84842 - DNA, 30 bp, Artificial Sequence
  Synthetic oligonucleotide
gctagataaagcggcttagtcagactcgtc

SEQ ID NO: 84843 - DNA, 30 bp, Artificial Sequence
  Synthetic oligonucleotide
tcgctcccacgccgtccctacaatctcgtc

SEQ ID NO: 84844 - DNA, 30 bp, Artificial Sequence
  Synthetic oligonucleotide
gacggagggttgatacggacgtcagtcgtc

SEQ ID NO: 84845 - DNA, 30 bp, Artificial Sequence
  Synthetic oligonucleotide
gtcgtactgacctacaaggcatacgtcgtc

SEQ ID NO: 84846 - DNA, 30 bp, Artificial Sequence
  Synthetic oligonucleotide
aggtaaaggaaaatataggacatcttcgtc

SEQ ID NO: 84847 - DNA, 30 bp, Artificial Sequence
  Synthetic oligonucleotide
accaggagactgggcacgtacataaaggtc

SEQ ID NO: 84848 - DNA, 30 bp, Artificial Sequence
  Synthetic oligonucleotide
ggacatggtacaacacgtagtacacaggtc

SEQ ID NO: 84849 - DNA, 30 bp, Artificial Sequence
  Synthetic oligonucleotide
tgaacagtgcctaggaaagttacacaggtc

SEQ ID NO: 84850 - DNA, 30 bp, Artificial Sequence
  Synthetic oligonucleotide
aatcaatcaaggcggtacgtttgcgaggtc

SEQ ID NO: 84851 - DNA, 30 bp, Artificial Sequence
  Synthetic oligonucleotide
acaggtgtggctagctcatatatgtaggtc

SEQ ID NO: 84852 - DNA, 30 bp, Artificial Sequence
  Synthetic oligonucleotide
agccattagccacctattgtaagcccggtc

SEQ ID NO: 84853 - DNA, 30 bp, Artificial Sequence
  Synthetic oligonucleotide
ctaaagcgaactacaataaggatagcggtc

SEQ ID NO: 84854 - DNA, 30 bp, Artificial Sequence
  Synthetic oligonucleotide
agactgggtgtattgcatgactctgcggtc

SEQ ID NO: 84855 - DNA, 30 bp, Artificial Sequence
  Synthetic oligonucleotide
accggcatgcaaaaggcacggtcatcggtc

SEQ ID NO: 84856 - DNA, 30 bp, Artificial Sequence
  Synthetic oligonucleotide
gtaagtaaatcgtatacgggatcctcggtc

SEQ ID NO: 84857 - DNA, 30 bp, Artificial Sequence
  Synthetic oligonucleotide
ataggagagaagcgagatgaaaaaagggtc

SEQ ID NO: 84858 - DNA, 30 bp, Artificial Sequence
  Synthetic oligonucleotide
atcaagttaccagcggagctatagcgggtc

SEQ ID NO: 84859 - DNA, 30 bp, Artificial Sequence
  Synthetic oligonucleotide
aacgggttcacatacaagcacaatggggtc

SEQ ID NO: 84860 - DNA, 30 bp, Artificial Sequence
  Synthetic oligonucleotide
ctcacgggtaagttaatattcagtggggtc

SEQ ID NO: 84861 - DNA, 30 bp, Artificial Sequence
  Synthetic oligonucleotide
aaagatcgtcttccgataacgacttgggtc

SEQ ID NO: 84862 - DNA, 30 bp, Artificial Sequence
  Synthetic oligonucleotide
tccgcacagggcgggtatccgacaatggtc

SEQ ID NO: 84863 - DNA, 30 bp, Artificial Sequence
  Synthetic oligonucleotide
attgacatacccaatcgcgtgagcatggtc

SEQ ID NO: 84864 - DNA, 30 bp, Artificial Sequence
  Synthetic oligonucleotide
taccggtcgagagtaatgaaagggatggtc

SEQ ID NO: 84865 - DNA, 30 bp, Artificial Sequence
  Synthetic oligonucleotide
acggtatgccgtatagctaaagtgctggtc

SEQ ID NO: 84866 - DNA, 30 bp, Artificial Sequence
  Synthetic oligonucleotide
tcagaccctcggaaaatacccaaattggtc

SEQ ID NO: 84867 - DNA, 30 bp, Artificial Sequence
  Synthetic oligonucleotide
ggccgggcttgcgaaaaacaaaagaatgtc

SEQ ID NO: 84868 - DNA, 30 bp, Artificial Sequence
  Synthetic oligonucleotide
agtaaccaggaggtgcgagagggacatgtc

SEQ ID NO: 84869 - DNA, 30 bp, Artificial Sequence
  Synthetic oligonucleotide
gcggaatttcgggcgaacgaggtccatgtc

SEQ ID NO: 84870 - DNA, 30 bp, Artificial Sequence
  Synthetic oligonucleotide
atacaaatcagagatggcctacatcatgtc

SEQ ID NO: 84871 - DNA, 30 bp, Artificial Sequence
  Synthetic oligonucleotide
ttagtcatagcaacaaaattgatgtatgtc

SEQ ID NO: 84872 - DNA, 30 bp, Artificial Sequence
  Synthetic oligonucleotide
catcgcgctggagggcgtaacttgactgtc

SEQ ID NO: 84873 - DNA, 30 bp, Artificial Sequence
  Synthetic oligonucleotide
gacagtcggaagagatataaaagtactgtc

SEQ ID NO: 84874 - DNA, 30 bp, Artificial Sequence
  Synthetic oligonucleotide
gggtaacgagacgttcctgcccaggctgtc

SEQ ID NO: 84875 - DNA, 30 bp, Artificial Sequence
  Synthetic oligonucleotide
agcctaggtccatagggatgtcttgctgtc

SEQ ID NO: 84876 - DNA, 30 bp, Artificial Sequence
  Synthetic oligonucleotide
cgacaattccttttgcacagcggtcgtgtc

SEQ ID NO: 84877 - DNA, 30 bp, Artificial Sequence
  Synthetic oligonucleotide
gtgggaagtagatgtatgttggctggtgtc

SEQ ID NO: 84878 - DNA, 30 bp, Artificial Sequence
  Synthetic oligonucleotide
aaggaagtgtctacccctaggaattgtgtc

SEQ ID NO: 84879 - DNA, 30 bp, Artificial Sequence
  Synthetic oligonucleotide
acaaaagagcccggcgagggtcgtattgtc

SEQ ID NO: 84880 - DNA, 30 bp, Artificial Sequence
  Synthetic oligonucleotide
ataccccacgaactactccgggtacttgtc

SEQ ID NO: 84881 - DNA, 30 bp, Artificial Sequence
  Synthetic oligonucleotide
cgccagagcagagacatgggtctggttgtc

SEQ ID NO: 84882 - DNA, 30 bp, Artificial Sequence
  Synthetic oligonucleotide
cgagtccacgggtaagcggaagagtttgtc

SEQ ID NO: 84883 - DNA, 30 bp, Artificial Sequence
  Synthetic oligonucleotide
caaggaaaagcagaagaactgttagaattc

SEQ ID NO: 84884 - DNA, 30 bp, Artificial Sequence
  Synthetic oligonucleotide
ggcttatcggaaccgtgattatcgacattc

SEQ ID NO: 84885 - DNA, 30 bp, Artificial Sequence
  Synthetic oligonucleotide
gaatggcaacaactgagataaccaccattc

SEQ ID NO: 84886 - DNA, 30 bp, Artificial Sequence
  Synthetic oligonucleotide
ggttgcgcacatagaggagtgtatgcattc

SEQ ID NO: 84887 - DNA, 30 bp, Artificial Sequence
  Synthetic oligonucleotide
aatggcggctgatagaggcgagggtcattc

SEQ ID NO: 84888 - DNA, 30 bp, Artificial Sequence
  Synthetic oligonucleotide
tactgtaatgaggaaggcaagagtcgattc

SEQ ID NO: 84889 - DNA, 30 bp, Artificial Sequence
  Synthetic oligonucleotide
acagagaaactagttaggagtaacggattc

SEQ ID NO: 84890 - DNA, 30 bp, Artificial Sequence
  Synthetic oligonucleotide
ttaagttaggcgacaattaggtggggattc

SEQ ID NO: 84891 - DNA, 30 bp, Artificial Sequence
  Synthetic oligonucleotide
cgaaaaagtccggtcccagcatttggattc

SEQ ID NO: 84892 - DNA, 30 bp, Artificial Sequence
  Synthetic oligonucleotide
gcttcgaacactcacaaataaacgtgattc

SEQ ID NO: 84893 - DNA, 30 bp, Artificial Sequence
  Synthetic oligonucleotide
agttacgtaaggtgagagcggtgtatattc

SEQ ID NO: 84894 - DNA, 30 bp, Artificial Sequence
  Synthetic oligonucleotide
caagcgtgagtcggtcaccaggcactattc

SEQ ID NO: 84895 - DNA, 30 bp, Artificial Sequence
  Synthetic oligonucleotide
ggatcaaggaactcgagcttaggggtattc

SEQ ID NO: 84896 - DNA, 30 bp, Artificial Sequence
  Synthetic oligonucleotide
gacgtaagaggcctcaatgtaagtttattc

SEQ ID NO: 84897 - DNA, 30 bp, Artificial Sequence
  Synthetic oligonucleotide
tggcttaggtggccagagaaacacaacttc

SEQ ID NO: 84898 - DNA, 30 bp, Artificial Sequence
  Synthetic oligonucleotide
gaaagatagagaacagccctgcccaacttc

SEQ ID NO: 84899 - DNA, 30 bp, Artificial Sequence
  Synthetic oligonucleotide
ttcgattgccaataagctacctgccacttc

SEQ ID NO: 84900 - DNA, 30 bp, Artificial Sequence
  Synthetic oligonucleotide
aacaaagtgttgacaggatcaaccgacttc

SEQ ID NO: 84901 - DNA, 30 bp, Artificial Sequence
  Synthetic oligonucleotide
cactggctgttaatgccgtaactcgacttc

SEQ ID NO: 84902 - DNA, 30 bp, Artificial Sequence
  Synthetic oligonucleotide
atggggagaacttcagtgtatggttacttc

SEQ ID NO: 84903 - DNA, 30 bp, Artificial Sequence
  Synthetic oligonucleotide
atggccacataggcggtcatatgaaccttc

SEQ ID NO: 84904 - DNA, 30 bp, Artificial Sequence
  Synthetic oligonucleotide
agcaatatcttactagcattcaccaccttc

SEQ ID NO: 84905 - DNA, 30 bp, Artificial Sequence
  Synthetic oligonucleotide
acacggttcagtccggtacgtttcgccttc

SEQ ID NO: 84906 - DNA, 30 bp, Artificial Sequence
  Synthetic oligonucleotide
acgtgtaacggtaaagcgtaagtaagcttc

SEQ ID NO: 84907 - DNA, 30 bp, Artificial Sequence
  Synthetic oligonucleotide
taatgacaagaaccgcgacccaatagcttc

SEQ ID NO: 84908 - DNA, 30 bp, Artificial Sequence
  Synthetic oligonucleotide
cggcgaggtcgtgagtctttagctagcttc

SEQ ID NO: 84909 - DNA, 30 bp, Artificial Sequence
  Synthetic oligonucleotide
gggctggcactaaggaaactaataggcttc

SEQ ID NO: 84910 - DNA, 30 bp, Artificial Sequence
  Synthetic oligonucleotide
ggcaggccgcgagtcaaagtaacgatcttc

SEQ ID NO: 84911 - DNA, 30 bp, Artificial Sequence
  Synthetic oligonucleotide
cgggccatgggtaatatcaagatgatcttc

SEQ ID NO: 84912 - DNA, 30 bp, Artificial Sequence
  Synthetic oligonucleotide
accagcaacagaaacacaaattcactcttc

SEQ ID NO: 84913 - DNA, 30 bp, Artificial Sequence
  Synthetic oligonucleotide
ttacacatagggggtaatcttcaggtcttc

SEQ ID NO: 84914 - DNA, 30 bp, Artificial Sequence
  Synthetic oligonucleotide
ctgacaaagaaacgacattagatggtcttc

SEQ ID NO: 84915 - DNA, 30 bp, Artificial Sequence
  Synthetic oligonucleotide
cgcataatgcgattttgggcccagttcttc

SEQ ID NO: 84916 - DNA, 30 bp, Artificial Sequence
  Synthetic oligonucleotide
taagatggcgtcaacacagaccctttcttc

SEQ ID NO: 84917 - DNA, 30 bp, Artificial Sequence
  Synthetic oligonucleotide
aggacatctgctatggctgttaacaagttc

SEQ ID NO: 84918 - DNA, 30 bp, Artificial Sequence
  Synthetic oligonucleotide
tcggcgcccgaatactaacacgttaagttc

SEQ ID NO: 84919 - DNA, 30 bp, Artificial Sequence
  Synthetic oligonucleotide
acgatgaaaaaacgcaagtcgaacgagttc

SEQ ID NO: 84920 - DNA, 30 bp, Artificial Sequence
  Synthetic oligonucleotide
cgatcagccaccctaaaccaggccgagttc

SEQ ID NO: 84921 - DNA, 30 bp, Artificial Sequence
  Synthetic oligonucleotide
acagtggtttagaccatggcaaaggagttc

SEQ ID NO: 84922 - DNA, 30 bp, Artificial Sequence
  Synthetic oligonucleotide
aatggtggtttgataacagagcgggagttc

SEQ ID NO: 84923 - DNA, 30 bp, Artificial Sequence
  Synthetic oligonucleotide
ctaaggaggaggtgatatctgaagtagttc

SEQ ID NO: 84924 - DNA, 30 bp, Artificial Sequence
  Synthetic oligonucleotide
tagggggacagaattttatctagcacgttc

SEQ ID NO: 84925 - DNA, 30 bp, Artificial Sequence
  Synthetic oligonucleotide
cttcacatggtgtaagcgggacgctcgttc

SEQ ID NO: 84926 - DNA, 30 bp, Artificial Sequence
  Synthetic oligonucleotide
cggacagataatacttgattgaataggttc

SEQ ID NO: 84927 - DNA, 30 bp, Artificial Sequence
  Synthetic oligonucleotide
atggacagataacgggatatcgggcggttc

SEQ ID NO: 84928 - DNA, 30 bp, Artificial Sequence
  Synthetic oligonucleotide
gagccggagggtaacaatgattgatggttc

SEQ ID NO: 84929 - DNA, 30 bp, Artificial Sequence
  Synthetic oligonucleotide
gctgcgagggctctagatggctactggttc

SEQ ID NO: 84930 - DNA, 30 bp, Artificial Sequence
  Synthetic oligonucleotide
cacgtgatactcaagaagaaagtgtggttc

SEQ ID NO: 84931 - DNA, 30 bp, Artificial Sequence
  Synthetic oligonucleotide
ccgagaccgttccgtatcgcattgtggttc

SEQ ID NO: 84932 - DNA, 30 bp, Artificial Sequence
  Synthetic oligonucleotide
cgtaattttagactataatgaagtatgttc

SEQ ID NO: 84933 - DNA, 30 bp, Artificial Sequence
  Synthetic oligonucleotide
ataggaatgtgacaagtacagttcctgttc

SEQ ID NO: 84934 - DNA, 30 bp, Artificial Sequence
  Synthetic oligonucleotide
ccaccatgagtgggcaattctcggctgttc

SEQ ID NO: 84935 - DNA, 30 bp, Artificial Sequence
  Synthetic oligonucleotide
caccatcataccgggaggccaggagtgttc

SEQ ID NO: 84936 - DNA, 30 bp, Artificial Sequence
  Synthetic oligonucleotide
tccgagtcacgcccctaccctggtgtgttc

SEQ ID NO: 84937 - DNA, 30 bp, Artificial Sequence
  Synthetic oligonucleotide
agactcaacaaccaatgctagttagatttc

SEQ ID NO: 84938 - DNA, 30 bp, Artificial Sequence
  Synthetic oligonucleotide
aggtaggggccaccaaaaccgagggatttc

SEQ ID NO: 84939 - DNA, 30 bp, Artificial Sequence
  Synthetic oligonucleotide
cgtggtgtccatgcaggtgggtgatctttc

SEQ ID NO: 84940 - DNA, 30 bp, Artificial Sequence
  Synthetic oligonucleotide
acattgtgaagaagagagtgggacagtttc

SEQ ID NO: 84941 - DNA, 30 bp, Artificial Sequence
  Synthetic oligonucleotide
actcatcgaaacctagggacctgcattttc

SEQ ID NO: 84942 - DNA, 30 bp, Artificial Sequence
  Synthetic oligonucleotide
agcaggataacggtatagatcgaacttttc

SEQ ID NO: 84943 - DNA, 30 bp, Artificial Sequence
  Synthetic oligonucleotide
gacttgaccccaaatctacagacaaaaaag

SEQ ID NO: 84944 - DNA, 30 bp, Artificial Sequence
  Synthetic oligonucleotide
aagtaccctgtagagtttgggtgcaaaaag

SEQ ID NO: 84945 - DNA, 30 bp, Artificial Sequence
  Synthetic oligonucleotide
tcagggtatatcagggagtatacgaaaaag

SEQ ID NO: 84946 - DNA, 30 bp, Artificial Sequence
  Synthetic oligonucleotide
ctcctaatcggtggacagtcccctaaaaag

SEQ ID NO: 84947 - DNA, 30 bp, Artificial Sequence
  Synthetic oligonucleotide
gtagacaccctagagacacggcttaaaaag

SEQ ID NO: 84948 - DNA, 30 bp, Artificial Sequence
  Synthetic oligonucleotide
gtttgggccaaccgatcttgatcagaaaag

SEQ ID NO: 84949 - DNA, 30 bp, Artificial Sequence
  Synthetic oligonucleotide
agccgcggtaattcgcgcaggttcgaaaag

SEQ ID NO: 84950 - DNA, 30 bp, Artificial Sequence
  Synthetic oligonucleotide
tcacgccgccgctctgtttgagaggaaaag

SEQ ID NO: 84951 - DNA, 30 bp, Artificial Sequence
  Synthetic oligonucleotide
acggttcacgatgctaacagacgtgaaaag

SEQ ID NO: 84952 - DNA, 30 bp, Artificial Sequence
  Synthetic oligonucleotide
gtggctcgagcagttgctgactactaaaag

SEQ ID NO: 84953 - DNA, 30 bp, Artificial Sequence
  Synthetic oligonucleotide
ttcgcaaagacgatagacgctccaacaaag

SEQ ID NO: 84954 - DNA, 30 bp, Artificial Sequence
  Synthetic oligonucleotide
tagtgtccccattcagacaattagccaaag

SEQ ID NO: 84955 - DNA, 30 bp, Artificial Sequence
  Synthetic oligonucleotide
tggtcgcaggctaaggggatcaggccaaag

SEQ ID NO: 84956 - DNA, 30 bp, Artificial Sequence
  Synthetic oligonucleotide
gttcgaaaaatgtcagggcttcctccaaag

SEQ ID NO: 84957 - DNA, 30 bp, Artificial Sequence
  Synthetic oligonucleotide
ccggaaatgtcttgtctgctgcgggcaaag

SEQ ID NO: 84958 - DNA, 30 bp, Artificial Sequence
  Synthetic oligonucleotide
aaggactgaatcatggtaccctcctcaaag

SEQ ID NO: 84959 - DNA, 30 bp, Artificial Sequence
  Synthetic oligonucleotide
tgcaaccagactcaagaacaactctcaaag

SEQ ID NO: 84960 - DNA, 30 bp, Artificial Sequence
  Synthetic oligonucleotide
cactacccgtaacgggatggtgattcaaag

SEQ ID NO: 84961 - DNA, 30 bp, Artificial Sequence
  Synthetic oligonucleotide
tgcttcgctccgggtcatcctagcagaaag

SEQ ID NO: 84962 - DNA, 30 bp, Artificial Sequence
  Synthetic oligonucleotide
gtgggtacttggaagcaactttcgagaaag

SEQ ID NO: 84963 - DNA, 30 bp, Artificial Sequence
  Synthetic oligonucleotide
gagagtaatatggttgttgacaggagaaag

SEQ ID NO: 84964 - DNA, 30 bp, Artificial Sequence
  Synthetic oligonucleotide
ggcagccgtgtttacatccggatacgaaag

SEQ ID NO: 84965 - DNA, 30 bp, Artificial Sequence
  Synthetic oligonucleotide
ccatgtcgcgctaggccgtccctacgaaag

SEQ ID NO: 84966 - DNA, 30 bp, Artificial Sequence
  Synthetic oligonucleotide
ttaaagcccactccatcagccaagcgaaag

SEQ ID NO: 84967 - DNA, 30 bp, Artificial Sequence
  Synthetic oligonucleotide
ccaatcgtgaagcggggcttaaatcgaaag

SEQ ID NO: 84968 - DNA, 30 bp, Artificial Sequence
  Synthetic oligonucleotide
aacgagcgaaggtgatgtctccttcgaaag

SEQ ID NO: 84969 - DNA, 30 bp, Artificial Sequence
  Synthetic oligonucleotide
atggggcaaatctttggtgcctaaggaaag

SEQ ID NO: 84970 - DNA, 30 bp, Artificial Sequence
  Synthetic oligonucleotide
accgaaaatttataaaccatggtaggaaag

SEQ ID NO: 84971 - DNA, 30 bp, Artificial Sequence
  Synthetic oligonucleotide
tacatctgcagaattggttggcccggaaag

SEQ ID NO: 84972 - DNA, 30 bp, Artificial Sequence
  Synthetic oligonucleotide
ttcattcacaggtggggccgcaagggaaag

SEQ ID NO: 84973 - DNA, 30 bp, Artificial Sequence
  Synthetic oligonucleotide
ataacaacacttctacgtaataatggaaag

SEQ ID NO: 84974 - DNA, 30 bp, Artificial Sequence
  Synthetic oligonucleotide
aatatttagccggaggggttccgatgaaag

SEQ ID NO: 84975 - DNA, 30 bp, Artificial Sequence
  Synthetic oligonucleotide
aagggggcgacaccagcaaagggctgaaag

SEQ ID NO: 84976 - DNA, 30 bp, Artificial Sequence
  Synthetic oligonucleotide
gctccacctagggggcacgagacgtgaaag

SEQ ID NO: 84977 - DNA, 30 bp, Artificial Sequence
  Synthetic oligonucleotide
ctttgggagcgtcgggcccgtatgtgaaag

SEQ ID NO: 84978 - DNA, 30 bp, Artificial Sequence
  Synthetic oligonucleotide
accagcgtgattagctctgtttacataaag

SEQ ID NO: 84979 - DNA, 30 bp, Artificial Sequence
  Synthetic oligonucleotide
tagggcgggctagttcttcacagtctaaag

SEQ ID NO: 84980 - DNA, 30 bp, Artificial Sequence
  Synthetic oligonucleotide
cagacaacatacgactatctataagtaaag

SEQ ID NO: 84981 - DNA, 30 bp, Artificial Sequence
  Synthetic oligonucleotide
gggttctcaggacggtgtcttcgagtaaag

SEQ ID NO: 84982 - DNA, 30 bp, Artificial Sequence
  Synthetic oligonucleotide
gtacttattgtggtcgcgatgtaggtaaag

SEQ ID NO: 84983 - DNA, 30 bp, Artificial Sequence
  Synthetic oligonucleotide
gtttagacggaagaagttgagcggttaaag

SEQ ID NO: 84984 - DNA, 30 bp, Artificial Sequence
  Synthetic oligonucleotide
acgagattttcagggggttgacttttaaag

SEQ ID NO: 84985 - DNA, 30 bp, Artificial Sequence
  Synthetic oligonucleotide
ggcgtgttccgggacctgttttcaaacaag

SEQ ID NO: 84986 - DNA, 30 bp, Artificial Sequence
  Synthetic oligonucleotide
tctcaatgtacatcagagaatcccgacaag

SEQ ID NO: 84987 - DNA, 30 bp, Artificial Sequence
  Synthetic oligonucleotide
ccgaggatgatagttcacttataggacaag

SEQ ID NO: 84988 - DNA, 30 bp, Artificial Sequence
  Synthetic oligonucleotide
cggacaaggacgcggaatggttcatacaag

SEQ ID NO: 84989 - DNA, 30 bp, Artificial Sequence
  Synthetic oligonucleotide
cctttgacactacaaggaactgaaaccaag

SEQ ID NO: 84990 - DNA, 30 bp, Artificial Sequence
  Synthetic oligonucleotide
ggtatgaaatggtcgccgagtaccaccaag

SEQ ID NO: 84991 - DNA, 30 bp, Artificial Sequence
  Synthetic oligonucleotide
ctcttaagggttaaatccaaccagaccaag

SEQ ID NO: 84992 - DNA, 30 bp, Artificial Sequence
  Synthetic oligonucleotide
gttgtagaacgattcggacccattaccaag

SEQ ID NO: 84993 - DNA, 30 bp, Artificial Sequence
  Synthetic oligonucleotide
catccacggtaacgttcttatgtacccaag

SEQ ID NO: 84994 - DNA, 30 bp, Artificial Sequence
  Synthetic oligonucleotide
atgggtcgtggcgaaggctcaagccccaag

SEQ ID NO: 84995 - DNA, 30 bp, Artificial Sequence
  Synthetic oligonucleotide
caacagtcgagtgttcggtcgtctcccaag

SEQ ID NO: 84996 - DNA, 30 bp, Artificial Sequence
  Synthetic oligonucleotide
tggctgcctcgtggagttagaaacgccaag

SEQ ID NO: 84997 - DNA, 30 bp, Artificial Sequence
  Synthetic oligonucleotide
ttattccgtatgcatcggggctaggccaag

SEQ ID NO: 84998 - DNA, 30 bp, Artificial Sequence
  Synthetic oligonucleotide
aactcccgggcagaagcagtcatggccaag

SEQ ID NO: 84999 - DNA, 30 bp, Artificial Sequence
  Synthetic oligonucleotide
cttactgccaacgtagtaagcctggccaag

SEQ ID NO: 85000 - DNA, 30 bp, Artificial Sequence
  Synthetic oligonucleotide
ggggcaaacggacacaagtcccgtgccaag

SEQ ID NO: 85001 - DNA, 30 bp, Artificial Sequence
  Synthetic oligonucleotide
gggagaggcttccctgaaaatacttccaag

SEQ ID NO: 85002 - DNA, 30 bp, Artificial Sequence
  Synthetic oligonucleotide
cattgggatatatttcagggtcacagcaag

SEQ ID NO: 85003 - DNA, 31 bp, Artificial Sequence
  Synthetic oligonucleotide
agacaagggtccgagtgtgttagccagcaag

SEQ ID NO: 85004 - DNA, 30 bp, Artificial Sequence
  Synthetic oligonucleotide
aagtgaccccagaaacaagtcgggagcaag

SEQ ID NO: 85005 - DNA, 30 bp, Artificial Sequence
  Synthetic oligonucleotide
aagcaagaactgatagattgatctcgcaag

SEQ ID NO: 85006 - DNA, 30 bp, Artificial Sequence
  Synthetic oligonucleotide
acagcgagaggtaaattattcgtaggcaag

SEQ ID NO: 85007 - DNA, 30 bp, Artificial Sequence
  Synthetic oligonucleotide
ggtggagaatttgtctatggggacggcaag

SEQ ID NO: 85008 - DNA, 30 bp, Artificial Sequence
  Synthetic oligonucleotide
gtaatcagcgaatgctatgataatggcaag

SEQ ID NO: 85009 - DNA, 30 bp, Artificial Sequence
  Synthetic oligonucleotide
tgcgacgggattagctggcgtagatgcaag

SEQ ID NO: 85010 - DNA, 30 bp, Artificial Sequence
  Synthetic oligonucleotide
aggcagaaagttcgtgtacattactgcaag

SEQ ID NO: 85011 - DNA, 30 bp, Artificial Sequence
  Synthetic oligonucleotide
aaggtacgtcgggcgtaaagccattgcaag

SEQ ID NO: 85012 - DNA, 30 bp, Artificial Sequence
  Synthetic oligonucleotide
acctatagatctacgggtaaggcttgcaag

SEQ ID NO: 85013 - DNA, 30 bp, Artificial Sequence
  Synthetic oligonucleotide
tcgctaactgtgggaacaagtatcatcaag

SEQ ID NO: 85014 - DNA, 30 bp, Artificial Sequence
  Synthetic oligonucleotide
cggcgaggctgacggagaattcaagtcaag

SEQ ID NO: 85015 - DNA, 30 bp, Artificial Sequence
  Synthetic oligonucleotide
gatcaagtggagaagtcgttagtagtcaag

SEQ ID NO: 85016 - DNA, 30 bp, Artificial Sequence
  Synthetic oligonucleotide
caacgcattgggagagcagtcggcgtcaag

SEQ ID NO: 85017 - DNA, 30 bp, Artificial Sequence
  Synthetic oligonucleotide
acactgtgtgctaaccaaagtcaggtcaag

SEQ ID NO: 85018 - DNA, 30 bp, Artificial Sequence
  Synthetic oligonucleotide
aagaaactgctacacactgcagctgtcaag

SEQ ID NO: 85019 - DNA, 30 bp, Artificial Sequence
  Synthetic oligonucleotide
atcaagttcgctaatgcgagctcgttcaag

SEQ ID NO: 85020 - DNA, 30 bp, Artificial Sequence
  Synthetic oligonucleotide
gaattggcaacttgtcaatgtaggcagaag

SEQ ID NO: 85021 - DNA, 30 bp, Artificial Sequence
  Synthetic oligonucleotide
ggacacagcataataggatggcaagagaag

SEQ ID NO: 85022 - DNA, 30 bp, Artificial Sequence
  Synthetic oligonucleotide
ggcaacccatcggtgccgttaggagagaag

SEQ ID NO: 85023 - DNA, 30 bp, Artificial Sequence
  Synthetic oligonucleotide
ccttcaattgctttatatcgctccgagaag

SEQ ID NO: 85024 - DNA, 30 bp, Artificial Sequence
  Synthetic oligonucleotide
ctggacacgaagaaatgaccaaatgagaag

SEQ ID NO: 85025 - DNA, 30 bp, Artificial Sequence
  Synthetic oligonucleotide
gctcatcactcaagcagaataacctagaag

SEQ ID NO: 85026 - DNA, 30 bp, Artificial Sequence
  Synthetic oligonucleotide
ccttgggctgggaaagcaaaggtctagaag

SEQ ID NO: 85027 - DNA, 30 bp, Artificial Sequence
  Synthetic oligonucleotide
tctaggcacacaggataaaggcattagaag

SEQ ID NO: 85028 - DNA, 30 bp, Artificial Sequence
  Synthetic oligonucleotide
gcccacctgacttccggaacattttagaag

SEQ ID NO: 85029 - DNA, 30 bp, Artificial Sequence
  Synthetic oligonucleotide
ttatcgacacaggaaccccaacccacgaag

SEQ ID NO: 85030 - DNA, 30 bp, Artificial Sequence
  Synthetic oligonucleotide
cgtgtaatcggtgggccgaactcaccgaag

SEQ ID NO: 85031 - DNA, 30 bp, Artificial Sequence
  Synthetic oligonucleotide
cgaagcccagcgaattgattttgcccgaag

SEQ ID NO: 85032 - DNA, 30 bp, Artificial Sequence
  Synthetic oligonucleotide
gacagtaatgttaatcccgacaagccgaag

SEQ ID NO: 85033 - DNA, 30 bp, Artificial Sequence
  Synthetic oligonucleotide
cgtggaaaatgctcataaagtccgccgaag

SEQ ID NO: 85034 - DNA, 30 bp, Artificial Sequence
  Synthetic oligonucleotide
ggtttagcacagctgtcacgaactccgaag

SEQ ID NO: 85035 - DNA, 30 bp, Artificial Sequence
  Synthetic oligonucleotide
attctagaaatacagacccatcaagcgaag

SEQ ID NO: 85036 - DNA, 30 bp, Artificial Sequence
  Synthetic oligonucleotide
gtgatgatttagcagcgtagcggggcgaag

SEQ ID NO: 85037 - DNA, 30 bp, Artificial Sequence
  Synthetic oligonucleotide
atgatatcgctgcggaccgtagaatcgaag

SEQ ID NO: 85038 - DNA, 30 bp, Artificial Sequence
  Synthetic oligonucleotide
tgtgtaattacctctgattcgagatcgaag

SEQ ID NO: 85039 - DNA, 30 bp, Artificial Sequence
  Synthetic oligonucleotide
gaactaaccgtaatcatcgtagtatcgaag

SEQ ID NO: 85040 - DNA, 30 bp, Artificial Sequence
  Synthetic oligonucleotide
attgatacccacgtgcagggacactcgaag

SEQ ID NO: 85041 - DNA, 30 bp, Artificial Sequence
  Synthetic oligonucleotide
gactcaagggcaagagcattaacctcgaag

SEQ ID NO: 85042 - DNA, 30 bp, Artificial Sequence
  Synthetic oligonucleotide
cgggcgtatgtgcgttgaagcctgtcgaag

SEQ ID NO: 85043 - DNA, 30 bp, Artificial Sequence
  Synthetic oligonucleotide
ttaccgccgcattttgggtgcgacaggaag

SEQ ID NO: 85044 - DNA, 30 bp, Artificial Sequence
  Synthetic oligonucleotide
ttgataaaaaagggtgatctcaagaggaag

SEQ ID NO: 85045 - DNA, 29 bp, Artificial Sequence
  Synthetic oligonucleotide
atatgtacagtgaaatgagacggaggaag

SEQ ID NO: 85046 - DNA, 30 bp, Artificial Sequence
  Synthetic oligonucleotide
ggcaggggagacggagcgatacttaggaag

SEQ ID NO: 85047 - DNA, 30 bp, Artificial Sequence
  Synthetic oligonucleotide
ttcacgaatgtgtgaggttagcttaggaag

SEQ ID NO: 85048 - DNA, 30 bp, Artificial Sequence
  Synthetic oligonucleotide
cgacaaacctagggcatagttaaacggaag

SEQ ID NO: 85049 - DNA, 30 bp, Artificial Sequence
  Synthetic oligonucleotide
gcgaggactgtgtccgtgtgcgggcggaag

SEQ ID NO: 85050 - DNA, 30 bp, Artificial Sequence
  Synthetic oligonucleotide
ggccgcaaattccccagtgcaattcggaag

SEQ ID NO: 85051 - DNA, 30 bp, Artificial Sequence
  Synthetic oligonucleotide
gacaatccgggttcgcggactgttcggaag

SEQ ID NO: 85052 - DNA, 30 bp, Artificial Sequence
  Synthetic oligonucleotide
aggtcagcgaacgaatctggacgagggaag

SEQ ID NO: 85053 - DNA, 30 bp, Artificial Sequence
  Synthetic oligonucleotide
taagttacggcaataaattggcgcgggaag

SEQ ID NO: 85054 - DNA, 30 bp, Artificial Sequence
  Synthetic oligonucleotide
aactactgggccgtgcagacagcggggaag

SEQ ID NO: 85055 - DNA, 30 bp, Artificial Sequence
  Synthetic oligonucleotide
gtacaaagatcaaggtcatctttatggaag

SEQ ID NO: 85056 - DNA, 30 bp, Artificial Sequence
  Synthetic oligonucleotide
gcgggaatgcgaatagatttttactggaag

SEQ ID NO: 85057 - DNA, 30 bp, Artificial Sequence
  Synthetic oligonucleotide
gatgggtctgttagaatagttgtctggaag

SEQ ID NO: 85058 - DNA, 30 bp, Artificial Sequence
  Synthetic oligonucleotide
caggcgtattgtcgacgtaaaaatatgaag

SEQ ID NO: 85059 - DNA, 30 bp, Artificial Sequence
  Synthetic oligonucleotide
taggtatgaattaacgttccgcgtctgaag

SEQ ID NO: 85060 - DNA, 30 bp, Artificial Sequence
  Synthetic oligonucleotide
acattcgtattggagtcgtatgaggtgaag

SEQ ID NO: 85061 - DNA, 30 bp, Artificial Sequence
  Synthetic oligonucleotide
cgcatggatgtgctacatggactggtgaag

SEQ ID NO: 85062 - DNA, 30 bp, Artificial Sequence
  Synthetic oligonucleotide
cgacaatgtgagtggtcaggtccattgaag

SEQ ID NO: 85063 - DNA, 30 bp, Artificial Sequence
  Synthetic oligonucleotide
gcggcatataatatcatattctgcttgaag

SEQ ID NO: 85064 - DNA, 30 bp, Artificial Sequence
  Synthetic oligonucleotide
agaaaaggcgtcagaccaactttaaataag

SEQ ID NO: 85065 - DNA, 30 bp, Artificial Sequence
  Synthetic oligonucleotide
atcccgccgtacagcattaagtgacataag

SEQ ID NO: 85066 - DNA, 30 bp, Artificial Sequence
  Synthetic oligonucleotide
ctccaaagcaccattggtgggcatcataag

SEQ ID NO: 85067 - DNA, 30 bp, Artificial Sequence
  Synthetic oligonucleotide
cacgagttagacaaccgctttaaagataag

SEQ ID NO: 85068 - DNA, 30 bp, Artificial Sequence
  Synthetic oligonucleotide
acagtgtgtggattaaattatgcagataag

SEQ ID NO: 85069 - DNA, 30 bp, Artificial Sequence
  Synthetic oligonucleotide
gccgccaggatggaaaaaattcgagataag

SEQ ID NO: 85070 - DNA, 30 bp, Artificial Sequence
  Synthetic oligonucleotide
gctacgagaatgcgaggcaatctcgataag

SEQ ID NO: 85071 - DNA, 30 bp, Artificial Sequence
  Synthetic oligonucleotide
cccgggaaacatgaagctggaccggataag

SEQ ID NO: 85072 - DNA, 30 bp, Artificial Sequence
  Synthetic oligonucleotide
tattgtacacgatagttcataggggataag

SEQ ID NO: 85073 - DNA, 30 bp, Artificial Sequence
  Synthetic oligonucleotide
taagcagaatggtaataagcctcatataag

SEQ ID NO: 85074 - DNA, 30 bp, Artificial Sequence
  Synthetic oligonucleotide
gagatagtgaacaagtcaccctgatataag

SEQ ID NO: 85075 - DNA, 30 bp, Artificial Sequence
  Synthetic oligonucleotide
cctccacggaccgctaggggtagctataag

SEQ ID NO: 85076 - DNA, 30 bp, Artificial Sequence
  Synthetic oligonucleotide
ggtccgggagacttactactagtaactaag

SEQ ID NO: 85077 - DNA, 30 bp, Artificial Sequence
  Synthetic oligonucleotide
aactctgcgggggatagcgggtttactaag

SEQ ID NO: 85078 - DNA, 30 bp, Artificial Sequence
  Synthetic oligonucleotide
tagagccggcaaggttgaatagcacctaag

SEQ ID NO: 85079 - DNA, 30 bp, Artificial Sequence
  Synthetic oligonucleotide
cctagtacgtgatcttgtcaatatcctaag

SEQ ID NO: 85080 - DNA, 29 bp, Artificial Sequence
  Synthetic oligonucleotide
ctatcgcaatggtagacgaatatcctaag

SEQ ID NO: 85081 - DNA, 30 bp, Artificial Sequence
  Synthetic oligonucleotide
aaccaaacaccgcaccctcttgctcctaag

SEQ ID NO: 85082 - DNA, 30 bp, Artificial Sequence
  Synthetic oligonucleotide
cgagtagaaagctatgttcggccagctaag

SEQ ID NO: 85083 - DNA, 30 bp, Artificial Sequence
  Synthetic oligonucleotide
ttacatcgagaagccccgagtggagctaag

SEQ ID NO: 85084 - DNA, 30 bp, Artificial Sequence
  Synthetic oligonucleotide
ccacaggacctatctcgtgggatcgctaag

SEQ ID NO: 85085 - DNA, 30 bp, Artificial Sequence
  Synthetic oligonucleotide
gaccaatcagtgaattttcttgagtctaag

SEQ ID NO: 85086 - DNA, 30 bp, Artificial Sequence
  Synthetic oligonucleotide
aacactaaggtggtggacaagttgtctaag

SEQ ID NO: 85087 - DNA, 30 bp, Artificial Sequence
  Synthetic oligonucleotide
cgcgtgtagagccctatcaacgcaagtaag

SEQ ID NO: 85088 - DNA, 30 bp, Artificial Sequence
  Synthetic oligonucleotide
agacacgtgatgcaaaggtacgtaagtaag

SEQ ID NO: 85089 - DNA, 30 bp, Artificial Sequence
  Synthetic oligonucleotide
acatggcgatagtaggaatgagagagtaag

SEQ ID NO: 85090 - DNA, 30 bp, Artificial Sequence
  Synthetic oligonucleotide
ccgcaatgacttgaaggtcgttagcgtaag

SEQ ID NO: 85091 - DNA, 30 bp, Artificial Sequence
  Synthetic oligonucleotide
tggttcacaaaggacagaccgcctcgtaag

SEQ ID NO: 85092 - DNA, 30 bp, Artificial Sequence
  Synthetic oligonucleotide
tcctcagtgataccggtgatttgtcgtaag

SEQ ID NO: 85093 - DNA, 30 bp, Artificial Sequence
  Synthetic oligonucleotide
ttagaagtcctcggtcataagggaggtaag

SEQ ID NO: 85094 - DNA, 30 bp, Artificial Sequence
  Synthetic oligonucleotide
ccataagtggacggaaatatcgggggtaag

SEQ ID NO: 85095 - DNA, 30 bp, Artificial Sequence
  Synthetic oligonucleotide
ccgtgaagttagcttaatacgtttggtaag

SEQ ID NO: 85096 - DNA, 30 bp, Artificial Sequence
  Synthetic oligonucleotide
agagggggtgaaacctccgaacaatgtaag

SEQ ID NO: 85097 - DNA, 30 bp, Artificial Sequence
  Synthetic oligonucleotide
ctaaccgaatccagaggcccaaattgtaag

SEQ ID NO: 85098 - DNA, 30 bp, Artificial Sequence
  Synthetic oligonucleotide
ttgactagaaaggtgccaatgtcaattaag

SEQ ID NO: 85099 - DNA, 30 bp, Artificial Sequence
  Synthetic oligonucleotide
caaaatcccaatagtcccacatgcattaag

SEQ ID NO: 85100 - DNA, 30 bp, Artificial Sequence
  Synthetic oligonucleotide
gaggataacggcctgtagattcggattaag

SEQ ID NO: 85101 - DNA, 30 bp, Artificial Sequence
  Synthetic oligonucleotide
ggcttgactgtacaatagtgggtgcttaag

SEQ ID NO: 85102 - DNA, 30 bp, Artificial Sequence
  Synthetic oligonucleotide
cagtatacacgttatagatatctagttaag

SEQ ID NO: 85103 - DNA, 30 bp, Artificial Sequence
  Synthetic oligonucleotide
aacgggacctggacacagagagtggttaag

SEQ ID NO: 85104 - DNA, 30 bp, Artificial Sequence
  Synthetic oligonucleotide
caaggtacagtaccgcacttatactttaag

SEQ ID NO: 85105 - DNA, 30 bp, Artificial Sequence
  Synthetic oligonucleotide
gatagtcacggcctggaaactatgtttaag

SEQ ID NO: 85106 - DNA, 30 bp, Artificial Sequence
  Synthetic oligonucleotide
acgtgtgtaagagtcattaccgattttaag

SEQ ID NO: 85107 - DNA, 30 bp, Artificial Sequence
  Synthetic oligonucleotide
tagaactgcaacggtaggcgcggaaaacag

SEQ ID NO: 85108 - DNA, 30 bp, Artificial Sequence
  Synthetic oligonucleotide
gggcggaggtcaccggaattgtacaaacag

SEQ ID NO: 85109 - DNA, 30 bp, Artificial Sequence
  Synthetic oligonucleotide
gcaaatggaacttctgcagtgcgcaaacag

SEQ ID NO: 85110 - DNA, 30 bp, Artificial Sequence
  Synthetic oligonucleotide
ccgatctcaacgagatctattaataaacag

SEQ ID NO: 85111 - DNA, 30 bp, Artificial Sequence
  Synthetic oligonucleotide
gctgtggccccaactcctctcggagaacag

SEQ ID NO: 85112 - DNA, 30 bp, Artificial Sequence
  Synthetic oligonucleotide
accggcgccgacggcgtattgctagaacag

SEQ ID NO: 85113 - DNA, 30 bp, Artificial Sequence
  Synthetic oligonucleotide
gggggagtagactgccgtgccgacgaacag

SEQ ID NO: 85114 - DNA, 30 bp, Artificial Sequence
  Synthetic oligonucleotide
ctgctccgtcaaaataaaaagctcgaacag

SEQ ID NO: 85115 - DNA, 30 bp, Artificial Sequence
  Synthetic oligonucleotide
gtcaaaggcgagcacggagtattggaacag

SEQ ID NO: 85116 - DNA, 30 bp, Artificial Sequence
  Synthetic oligonucleotide
tctgcactcatctccaggtacagctaacag

SEQ ID NO: 85117 - DNA, 30 bp, Artificial Sequence
  Synthetic oligonucleotide
tccgtctcaacacaggagcggtcaacacag

SEQ ID NO: 85118 - DNA, 30 bp, Artificial Sequence
  Synthetic oligonucleotide
cgcagagagcaacacgcccggtccccacag

SEQ ID NO: 85119 - DNA, 30 bp, Artificial Sequence
  Synthetic oligonucleotide
ttgtatggagcgcgtcccgccaggccacag

SEQ ID NO: 85120 - DNA, 30 bp, Artificial Sequence
  Synthetic oligonucleotide
catcggctgagaagaaaagcgttagcacag

SEQ ID NO: 85121 - DNA, 30 bp, Artificial Sequence
  Synthetic oligonucleotide
atagagttcccgaatcaaacacaggcacag

SEQ ID NO: 85122 - DNA, 30 bp, Artificial Sequence
  Synthetic oligonucleotide
atgcggagagcgatataccgcgtggcacag

SEQ ID NO: 85123 - DNA, 30 bp, Artificial Sequence
  Synthetic oligonucleotide
agtgacaggcaacagttggtcactgcacag

SEQ ID NO: 85124 - DNA, 30 bp, Artificial Sequence
  Synthetic oligonucleotide
atacttaagccagtttatgaaaggagacag

SEQ ID NO: 85125 - DNA, 30 bp, Artificial Sequence
  Synthetic oligonucleotide
cacataaatacaatttttctaaatagacag

SEQ ID NO: 85126 - DNA, 30 bp, Artificial Sequence
  Synthetic oligonucleotide
gcgcattttataagggaaattacaggacag

SEQ ID NO: 85127 - DNA, 30 bp, Artificial Sequence
  Synthetic oligonucleotide
gtggctatgaaaccgtcaaatgcaggacag

SEQ ID NO: 85128 - DNA, 30 bp, Artificial Sequence
  Synthetic oligonucleotide
ggtgcaatcaaaaccaatgtattctgacag

SEQ ID NO: 85129 - DNA, 30 bp, Artificial Sequence
  Synthetic oligonucleotide
cgctgttccgtagaataaagtacgtgacag

SEQ ID NO: 85130 - DNA, 30 bp, Artificial Sequence
  Synthetic oligonucleotide
agccgaggccacctgaagcgtgacatacag

SEQ ID NO: 85131 - DNA, 30 bp, Artificial Sequence
  Synthetic oligonucleotide
ctaggttcagtacaactcgggtatatacag

SEQ ID NO: 85132 - DNA, 30 bp, Artificial Sequence
  Synthetic oligonucleotide
atgggggtgagagttatacaaactatacag

SEQ ID NO: 85133 - DNA, 30 bp, Artificial Sequence
  Synthetic oligonucleotide
ccgcatacaattgtaatggattcgctacag

SEQ ID NO: 85134 - DNA, 30 bp, Artificial Sequence
  Synthetic oligonucleotide
gccatctaaggggagtcaggatggctacag

SEQ ID NO: 85135 - DNA, 30 bp, Artificial Sequence
  Synthetic oligonucleotide
ccgggaaattgaccgggaatgctggtacag

SEQ ID NO: 85136 - DNA, 30 bp, Artificial Sequence
  Synthetic oligonucleotide
atgctgatcagccttaatgcaaaattacag

SEQ ID NO: 85137 - DNA, 30 bp, Artificial Sequence
  Synthetic oligonucleotide
acatgctgattgaattgagggacacaccag

SEQ ID NO: 85138 - DNA, 30 bp, Artificial Sequence
  Synthetic oligonucleotide
cagtgtactcctatttcctatatgcaccag

SEQ ID NO: 85139 - DNA, 30 bp, Artificial Sequence
  Synthetic oligonucleotide
atagttccgtaagtaagcgcggacgaccag

SEQ ID NO: 85140 - DNA, 30 bp, Artificial Sequence
  Synthetic oligonucleotide
cggcaggtggctagatgcatgtacgaccag

SEQ ID NO: 85141 - DNA, 30 bp, Artificial Sequence
  Synthetic oligonucleotide
ggcgcggttcaactctgcgtgtgcgaccag

SEQ ID NO: 85142 - DNA, 30 bp, Artificial Sequence
  Synthetic oligonucleotide
taatcgttgctctcctatggaagggaccag

SEQ ID NO: 85143 - DNA, 30 bp, Artificial Sequence
  Synthetic oligonucleotide
cgtggcagaaagggcggctccctggaccag

SEQ ID NO: 85144 - DNA, 30 bp, Artificial Sequence
  Synthetic oligonucleotide
gggtgagtggttatccgatcatttgaccag

SEQ ID NO: 85145 - DNA, 30 bp, Artificial Sequence
  Synthetic oligonucleotide
gccgactaaagcctcattgcgtatacccag

SEQ ID NO: 85146 - DNA, 30 bp, Artificial Sequence
  Synthetic oligonucleotide
agcccatgagaatagccgtttttgccccag

SEQ ID NO: 85147 - DNA, 30 bp, Artificial Sequence
  Synthetic oligonucleotide
aacataatccaaggtatgtctcatccccag

SEQ ID NO: 85148 - DNA, 30 bp, Artificial Sequence
  Synthetic oligonucleotide
aacgttcccgttatacgaaacggcgcccag

SEQ ID NO: 85149 - DNA, 30 bp, Artificial Sequence
  Synthetic oligonucleotide
ggcgtgctatgctggcaatctaatgcccag

SEQ ID NO: 85150 - DNA, 30 bp, Artificial Sequence
  Synthetic oligonucleotide
gccgtagttcggttacaaatgggtgcccag

SEQ ID NO: 85151 - DNA, 30 bp, Artificial Sequence
  Synthetic oligonucleotide
tacgactcctagtaatagtaatattcccag

SEQ ID NO: 85152 - DNA, 30 bp, Artificial Sequence
  Synthetic oligonucleotide
gattcgtttaaacaacatcatcgaagccag

SEQ ID NO: 85153 - DNA, 30 bp, Artificial Sequence
  Synthetic oligonucleotide
acgaacattatgaccttgcaggatagccag

SEQ ID NO: 85154 - DNA, 30 bp, Artificial Sequence
  Synthetic oligonucleotide
gtatccggtatataatccttggcacgccag

SEQ ID NO: 85155 - DNA, 30 bp, Artificial Sequence
  Synthetic oligonucleotide
aacattcaatacaacggcattccccgccag

SEQ ID NO: 85156 - DNA, 30 bp, Artificial Sequence
  Synthetic oligonucleotide
ctgcggcgggaaaaatataagctccgccag

SEQ ID NO: 85157 - DNA, 30 bp, Artificial Sequence
  Synthetic oligonucleotide
acctaaaggctagtttagtccgagcgccag

SEQ ID NO: 85158 - DNA, 30 bp, Artificial Sequence
  Synthetic oligonucleotide
atatgggtgtattggctgagatggcgccag

SEQ ID NO: 85159 - DNA, 30 bp, Artificial Sequence
  Synthetic oligonucleotide
tgccgttgattccagacgagaatcggccag

SEQ ID NO: 85160 - DNA, 30 bp, Artificial Sequence
  Synthetic oligonucleotide
ctcataaaaaaagtgacatataagggccag

SEQ ID NO: 85161 - DNA, 30 bp, Artificial Sequence
  Synthetic oligonucleotide
tgaagagctgccgcatctgagatctgccag

SEQ ID NO: 85162 - DNA, 30 bp, Artificial Sequence
  Synthetic oligonucleotide
accgtgttctgtggacggttaataatccag

SEQ ID NO: 85163 - DNA, 30 bp, Artificial Sequence
  Synthetic oligonucleotide
gttacattgcgcataggggtaagtatccag

SEQ ID NO: 85164 - DNA, 30 bp, Artificial Sequence
  Synthetic oligonucleotide
gggtgcgttttcagggtgcgttaagtccag

SEQ ID NO: 85165 - DNA, 30 bp, Artificial Sequence
  Synthetic oligonucleotide
aggaatatccgagaaacccaggtagtccag

SEQ ID NO: 85166 - DNA, 30 bp, Artificial Sequence
  Synthetic oligonucleotide
ctgaataagacccggtaactcaatgtccag

SEQ ID NO: 85167 - DNA, 30 bp, Artificial Sequence
  Synthetic oligonucleotide
aattaggtgcgaatgctgtgcaagttccag

SEQ ID NO: 85168 - DNA, 30 bp, Artificial Sequence
  Synthetic oligonucleotide
gcaatggagtacgagattctccagttccag

SEQ ID NO: 85169 - DNA, 30 bp, Artificial Sequence
  Synthetic oligonucleotide
agccatggggatcatcgcgactcgttccag

SEQ ID NO: 85170 - DNA, 30 bp, Artificial Sequence
  Synthetic oligonucleotide
tcagtagggtatagttatcgtgcaaagcag

SEQ ID NO: 85171 - DNA, 30 bp, Artificial Sequence
  Synthetic oligonucleotide
tcgccttctcaatggataataaagaagcag

SEQ ID NO: 85172 - DNA, 30 bp, Artificial Sequence
  Synthetic oligonucleotide
agtcgcatgtgagtctggacacgccagcag

SEQ ID NO: 85173 - DNA, 30 bp, Artificial Sequence
  Synthetic oligonucleotide
accatgtgcggtttcgccctatacgagcag

SEQ ID NO: 85174 - DNA, 30 bp, Artificial Sequence
  Synthetic oligonucleotide
taccacgggcggcaaacatagatcgagcag

SEQ ID NO: 85175 - DNA, 30 bp, Artificial Sequence
  Synthetic oligonucleotide
tacaaagaggtagaacagtagggggagcag

SEQ ID NO: 85176 - DNA, 30 bp, Artificial Sequence
  Synthetic oligonucleotide
gctgcgatcctgagaccagtaaatgagcag

SEQ ID NO: 85177 - DNA, 30 bp, Artificial Sequence
  Synthetic oligonucleotide
tacagcctacaggcggaaccggattagcag

SEQ ID NO: 85178 - DNA, 30 bp, Artificial Sequence
  Synthetic oligonucleotide
agcttggggaccaacgggcaagcttagcag

SEQ ID NO: 85179 - DNA, 30 bp, Artificial Sequence
  Synthetic oligonucleotide
accatatcatacgacagtgtatacgcgcag

SEQ ID NO: 85180 - DNA, 30 bp, Artificial Sequence
  Synthetic oligonucleotide
acgcgatgagtatgcccggcctacgcgcag

SEQ ID NO: 85181 - DNA, 30 bp, Artificial Sequence
  Synthetic oligonucleotide
ggtggagatatattaacgcaatgcgcgcag

SEQ ID NO: 85182 - DNA, 30 bp, Artificial Sequence
  Synthetic oligonucleotide
aaggaccacatggttaatcggttcgcgcag

SEQ ID NO: 85183 - DNA, 30 bp, Artificial Sequence
  Synthetic oligonucleotide
tcaaggcaattttgcgctgtagaaaggcag

SEQ ID NO: 85184 - DNA, 30 bp, Artificial Sequence
  Synthetic oligonucleotide
atggttatattgggcttcacaacaaggcag

SEQ ID NO: 85185 - DNA, 30 bp, Artificial Sequence
  Synthetic oligonucleotide
ctacagtagcacactagtattgtcaggcag

SEQ ID NO: 85186 - DNA, 30 bp, Artificial Sequence
  Synthetic oligonucleotide
tgtgtgtgagatggtacccatccgaggcag

SEQ ID NO: 85187 - DNA, 30 bp, Artificial Sequence
  Synthetic oligonucleotide
cagttaacgacaaacctaacaaagcggcag

SEQ ID NO: 85188 - DNA, 30 bp, Artificial Sequence
  Synthetic oligonucleotide
acgtttgcgttgcacagaggacagcggcag

SEQ ID NO: 85189 - DNA, 30 bp, Artificial Sequence
  Synthetic oligonucleotide
aggaactgtgtagaagtcctaaactggcag

SEQ ID NO: 85190 - DNA, 30 bp, Artificial Sequence
  Synthetic oligonucleotide
gcatcagcggataaataaacaacgtggcag

SEQ ID NO: 85191 - DNA, 30 bp, Artificial Sequence
  Synthetic oligonucleotide
atcaaactagaccgtgtcccatgactgcag

SEQ ID NO: 85192 - DNA, 30 bp, Artificial Sequence
  Synthetic oligonucleotide
gaaactcaattatcagcggtatcagtgcag

SEQ ID NO: 85193 - DNA, 30 bp, Artificial Sequence
  Synthetic oligonucleotide
agttaacaagcagaggcaacgccgttgcag

SEQ ID NO: 85194 - DNA, 30 bp, Artificial Sequence
  Synthetic oligonucleotide
actagctatgacatcccaagcttaaatcag

SEQ ID NO: 85195 - DNA, 30 bp, Artificial Sequence
  Synthetic oligonucleotide
ggcatggtcctaggcatgatggagaatcag

SEQ ID NO: 85196 - DNA, 30 bp, Artificial Sequence
  Synthetic oligonucleotide
caatggctcgggataggtggaacgaatcag

SEQ ID NO: 85197 - DNA, 30 bp, Artificial Sequence
  Synthetic oligonucleotide
aaatggacgcatgaaacagtatgccatcag

SEQ ID NO: 85198 - DNA, 30 bp, Artificial Sequence
  Synthetic oligonucleotide
cgggtatcatgcggcaatatgcggcatcag

SEQ ID NO: 85199 - DNA, 30 bp, Artificial Sequence
  Synthetic oligonucleotide
tcaggcgcgttattttaacctagggatcag

SEQ ID NO: 85200 - DNA, 30 bp, Artificial Sequence
  Synthetic oligonucleotide
tcggataataagctcggcagagactatcag

SEQ ID NO: 85201 - DNA, 30 bp, Artificial Sequence
  Synthetic oligonucleotide
gttaatttcaaaaccagattgatgtatcag

SEQ ID NO: 85202 - DNA, 30 bp, Artificial Sequence
  Synthetic oligonucleotide
gcttagccataacgtgtagatctgtatcag

SEQ ID NO: 85203 - DNA, 30 bp, Artificial Sequence
  Synthetic oligonucleotide
cgatatatagataagcagtatggttatcag

SEQ ID NO: 85204 - DNA, 30 bp, Artificial Sequence
  Synthetic oligonucleotide
gttacagcattaaaaagatctacaactcag

SEQ ID NO: 85205 - DNA, 30 bp, Artificial Sequence
  Synthetic oligonucleotide
agtcggcaccgggtcgcaaaacggactcag

SEQ ID NO: 85206 - DNA, 30 bp, Artificial Sequence
  Synthetic oligonucleotide
atcagcaccagcatagctcgctaacctcag

SEQ ID NO: 85207 - DNA, 30 bp, Artificial Sequence
  Synthetic oligonucleotide
catgtgactgaattttgtagcacccctcag

SEQ ID NO: 85208 - DNA, 30 bp, Artificial Sequence
  Synthetic oligonucleotide
ccgggtgctaaaattggaacgtcagctcag

SEQ ID NO: 85209 - DNA, 30 bp, Artificial Sequence
  Synthetic oligonucleotide
ggaacccgcgaccagagaaactggtctcag

SEQ ID NO: 85210 - DNA, 30 bp, Artificial Sequence
  Synthetic oligonucleotide
tcgccggagggttgtattgagaaaagtcag

SEQ ID NO: 85211 - DNA, 30 bp, Artificial Sequence
  Synthetic oligonucleotide
tggggtctagactggcgtgaatttagtcag

SEQ ID NO: 85212 - DNA, 30 bp, Artificial Sequence
  Synthetic oligonucleotide
agcaaacggggatcgacctatgaccgtcag

SEQ ID NO: 85213 - DNA, 30 bp, Artificial Sequence
  Synthetic oligonucleotide
ggcgctataaaaggcgataaggtgcgtcag

SEQ ID NO: 85214 - DNA, 30 bp, Artificial Sequence
  Synthetic oligonucleotide
tcagcttgctgtcagactcccttgcgtcag

SEQ ID NO: 85215 - DNA, 30 bp, Artificial Sequence
  Synthetic oligonucleotide
gcaaaggtacgtcctttcgtcattcgtcag

SEQ ID NO: 85216 - DNA, 30 bp, Artificial Sequence
  Synthetic oligonucleotide
gttcgcgatcaagtaataagcacaggtcag

SEQ ID NO: 85217 - DNA, 30 bp, Artificial Sequence
  Synthetic oligonucleotide
aacggaggaaagtaccccgtatccggtcag

SEQ ID NO: 85218 - DNA, 30 bp, Artificial Sequence
  Synthetic oligonucleotide
atactcgatctccgactaatatcatgtcag

SEQ ID NO: 85219 - DNA, 30 bp, Artificial Sequence
  Synthetic oligonucleotide
caccggttgaatgtttgatgcctatgtcag

SEQ ID NO: 85220 - DNA, 30 bp, Artificial Sequence
  Synthetic oligonucleotide
ttccgcggaagcgtattgaagagcattcag

SEQ ID NO: 85221 - DNA, 30 bp, Artificial Sequence
  Synthetic oligonucleotide
acactgtggagtgtgccataagggattcag

SEQ ID NO: 85222 - DNA, 30 bp, Artificial Sequence
  Synthetic oligonucleotide
cggaaagtatagagcccggtctatattcag

SEQ ID NO: 85223 - DNA, 30 bp, Artificial Sequence
  Synthetic oligonucleotide
ttaacggtggaacattccgattcccttcag

SEQ ID NO: 85224 - DNA, 30 bp, Artificial Sequence
  Synthetic oligonucleotide
ggtggagggaaagtaagaattccagttcag

SEQ ID NO: 85225 - DNA, 30 bp, Artificial Sequence
  Synthetic oligonucleotide
aagaccagcaaggcaactgtggacgttcag

SEQ ID NO: 85226 - DNA, 30 bp, Artificial Sequence
  Synthetic oligonucleotide
tagctttaaatcgaggattcaccgtttcag

SEQ ID NO: 85227 - DNA, 30 bp, Artificial Sequence
  Synthetic oligonucleotide
aactcgcggaacggatacggtgattttcag

SEQ ID NO: 85228 - DNA, 30 bp, Artificial Sequence
  Synthetic oligonucleotide
cgagtaactcctaggcggaaggcttttcag

SEQ ID NO: 85229 - DNA, 30 bp, Artificial Sequence
  Synthetic oligonucleotide
ttcatcggtcaacggaaaattttaaaagag

SEQ ID NO: 85230 - DNA, 30 bp, Artificial Sequence
  Synthetic oligonucleotide
atacggtcagaaagaaagtcaaacaaagag

SEQ ID NO: 85231 - DNA, 30 bp, Artificial Sequence
  Synthetic oligonucleotide
tcatgggatctccgtctatgaagcaaagag

SEQ ID NO: 85232 - DNA, 30 bp, Artificial Sequence
  Synthetic oligonucleotide
aaggtcatgctggatccgagcctgaaagag

SEQ ID NO: 85233 - DNA, 30 bp, Artificial Sequence
  Synthetic oligonucleotide
tagcagatagcaaaaattggaccacaagag

SEQ ID NO: 85234 - DNA, 30 bp, Artificial Sequence
  Synthetic oligonucleotide
attgaacattagagatcgtgagaccaagag

SEQ ID NO: 85235 - DNA, 30 bp, Artificial Sequence
  Synthetic oligonucleotide
ccggtaggacacagagtctatcggcaagag

SEQ ID NO: 85236 - DNA, 30 bp, Artificial Sequence
  Synthetic oligonucleotide
tgggtctgggcaaatgcgacatggcaagag

SEQ ID NO: 85237 - DNA, 30 bp, Artificial Sequence
  Synthetic oligonucleotide
taggggatagagtggctaaaagccgaagag

SEQ ID NO: 85238 - DNA, 30 bp, Artificial Sequence
  Synthetic oligonucleotide
accgctctctatcagctctgggtggaagag

SEQ ID NO: 85239 - DNA, 30 bp, Artificial Sequence
  Synthetic oligonucleotide
cgattatcggtgatattctgttttgaagag

SEQ ID NO: 85240 - DNA, 30 bp, Artificial Sequence
  Synthetic oligonucleotide
tttgcaacgaaactgtcggtagcataagag

SEQ ID NO: 85241 - DNA, 30 bp, Artificial Sequence
  Synthetic oligonucleotide
gccaaagtccgaacttatggcagataagag

SEQ ID NO: 85242 - DNA, 30 bp, Artificial Sequence
  Synthetic oligonucleotide
atggttcagtcaacgccataaatataagag

SEQ ID NO: 85243 - DNA, 30 bp, Artificial Sequence
  Synthetic oligonucleotide
cagtagtactagtggcagtaatactaagag

SEQ ID NO: 85244 - DNA, 30 bp, Artificial Sequence
  Synthetic oligonucleotide
tcgggaattctgactttgtaagcgtaagag

SEQ ID NO: 85245 - DNA, 30 bp, Artificial Sequence
  Synthetic oligonucleotide
gtcactattgcattcgaggaggacacagag

SEQ ID NO: 85246 - DNA, 30 bp, Artificial Sequence
  Synthetic oligonucleotide
gcagtaaatagctgtgaacgtgagacagag

SEQ ID NO: 85247 - DNA, 30 bp, Artificial Sequence
  Synthetic oligonucleotide
ctaataccatgttggcttacccaatcagag

SEQ ID NO: 85248 - DNA, 30 bp, Artificial Sequence
  Synthetic oligonucleotide
ataagctgggcatagcggttgctaagagag

SEQ ID NO: 85249 - DNA, 30 bp, Artificial Sequence
  Synthetic oligonucleotide
accaataggctttgacaaaccgacagagag

SEQ ID NO: 85250 - DNA, 30 bp, Artificial Sequence
  Synthetic oligonucleotide
aaaaaggaaggggcccaggccacgagagag

SEQ ID NO: 85251 - DNA, 30 bp, Artificial Sequence
  Synthetic oligonucleotide
ttacggatccgcaattctaaacctagagag

SEQ ID NO: 85252 - DNA, 30 bp, Artificial Sequence
  Synthetic oligonucleotide
tgggcagaaccttcatatcacattagagag

SEQ ID NO: 85253 - DNA, 30 bp, Artificial Sequence
  Synthetic oligonucleotide
accaaaattgaatgaggcctaaagcgagag

SEQ ID NO: 85254 - DNA, 30 bp, Artificial Sequence
  Synthetic oligonucleotide
gcgaaatattcacaggaaaggcagcgagag

SEQ ID NO: 85255 - DNA, 30 bp, Artificial Sequence
  Synthetic oligonucleotide
gaagcacccttggtaacagacaatcgagag

SEQ ID NO: 85256 - DNA, 30 bp, Artificial Sequence
  Synthetic oligonucleotide
agcttggagaacacgtgggaaactcgagag

SEQ ID NO: 85257 - DNA, 30 bp, Artificial Sequence
  Synthetic oligonucleotide
gaatctcataaaacaagaatatccggagag

SEQ ID NO: 85258 - DNA, 30 bp, Artificial Sequence
  Synthetic oligonucleotide
ccaccaatattggagttgtcctccggagag

SEQ ID NO: 85259 - DNA, 30 bp, Artificial Sequence
  Synthetic oligonucleotide
atgtaaacatagtcggttatcatgggagag

SEQ ID NO: 85260 - DNA, 30 bp, Artificial Sequence
  Synthetic oligonucleotide
cgccattgcgtcgtagtcttgactggagag

SEQ ID NO: 85261 - DNA, 30 bp, Artificial Sequence
  Synthetic oligonucleotide
acactcaaaccggtggtcaatgctggagag

SEQ ID NO: 85262 - DNA, 30 bp, Artificial Sequence
  Synthetic oligonucleotide
cgcgtgtgacagtcgaattgaaaatgagag

SEQ ID NO: 85263 - DNA, 30 bp, Artificial Sequence
  Synthetic oligonucleotide
cgtggtattattgatagatatgggtgagag

SEQ ID NO: 85264 - DNA, 30 bp, Artificial Sequence
  Synthetic oligonucleotide
ataatgcgttcagctagaatagcttgagag

SEQ ID NO: 85265 - DNA, 30 bp, Artificial Sequence
  Synthetic oligonucleotide
agtataaatgagcaatgattaatgatagag

SEQ ID NO: 85266 - DNA, 30 bp, Artificial Sequence
  Synthetic oligonucleotide
gtgaaacttctaacatcggaaggtatagag

SEQ ID NO: 85267 - DNA, 30 bp, Artificial Sequence
  Synthetic oligonucleotide
catcttagggggtcgatccgtagcgtagag

SEQ ID NO: 85268 - DNA, 30 bp, Artificial Sequence
  Synthetic oligonucleotide
tgcttggactaagtatctattgcggtagag

SEQ ID NO: 85269 - DNA, 30 bp, Artificial Sequence
  Synthetic oligonucleotide
atgccattgacgacgtttcgtgacttagag

SEQ ID NO: 85270 - DNA, 30 bp, Artificial Sequence
  Synthetic oligonucleotide
ataggatagtacacaggaccattgttagag

SEQ ID NO: 85271 - DNA, 30 bp, Artificial Sequence
  Synthetic oligonucleotide
cagtggttctaactatccacgactttagag

SEQ ID NO: 85272 - DNA, 30 bp, Artificial Sequence
  Synthetic oligonucleotide
gacttgtaacgtgacagctttgaaaacgag

SEQ ID NO: 85273 - DNA, 30 bp, Artificial Sequence
  Synthetic oligonucleotide
taggaagttcgtcccgcagaggtaaacgag

SEQ ID NO: 85274 - DNA, 30 bp, Artificial Sequence
  Synthetic oligonucleotide
cggcatttaccatatgttggattaaacgag

SEQ ID NO: 85275 - DNA, 30 bp, Artificial Sequence
  Synthetic oligonucleotide
atatagcgcaccaaaaatggtagcaacgag

SEQ ID NO: 85276 - DNA, 30 bp, Artificial Sequence
  Synthetic oligonucleotide
ttcgatggcctgacaaggttaagccacgag

SEQ ID NO: 85277 - DNA, 30 bp, Artificial Sequence
  Synthetic oligonucleotide
gcgcacaacttaacagtaagggagcacgag

SEQ ID NO: 85278 - DNA, 30 bp, Artificial Sequence
  Synthetic oligonucleotide
ccacctgcttaagggccaatttttcacgag

SEQ ID NO: 85279 - DNA, 30 bp, Artificial Sequence
  Synthetic oligonucleotide
gaacaaatataatcggaatagtccgacgag

SEQ ID NO: 85280 - DNA, 30 bp, Artificial Sequence
  Synthetic oligonucleotide
gtcccggatattggcaatgaccgggacgag

SEQ ID NO: 85281 - DNA, 30 bp, Artificial Sequence
  Synthetic oligonucleotide
agtgcggtttcctttccttagtggtacgag

SEQ ID NO: 85282 - DNA, 30 bp, Artificial Sequence
  Synthetic oligonucleotide
tgaagttcaaaattggatgcaaaaaccgag

SEQ ID NO: 85283 - DNA, 30 bp, Artificial Sequence
  Synthetic oligonucleotide
ttaacagttaggccgatgaaagggaccgag

SEQ ID NO: 85284 - DNA, 30 bp, Artificial Sequence
  Synthetic oligonucleotide
tgtcagatttgaataggggcgggggccgag

SEQ ID NO: 85285 - DNA, 30 bp, Artificial Sequence
  Synthetic oligonucleotide
ggtagaggagcgaggtattcacatagcgag

SEQ ID NO: 85286 - DNA, 30 bp, Artificial Sequence
  Synthetic oligonucleotide
aaacgacacggaaagttaatataccgcgag

SEQ ID NO: 85287 - DNA, 30 bp, Artificial Sequence
  Synthetic oligonucleotide
agagaatcacttcaaatgactttcggcgag

SEQ ID NO: 85288 - DNA, 30 bp, Artificial Sequence
  Synthetic oligonucleotide
cacagggtgctttcgaggacccagggcgag

SEQ ID NO: 85289 - DNA, 30 bp, Artificial Sequence
  Synthetic oligonucleotide
tgcggggggatcctaggaacaaggggcgag

SEQ ID NO: 85290 - DNA, 30 bp, Artificial Sequence
  Synthetic oligonucleotide
agcatggtaccccatggtgagtgtggcgag

SEQ ID NO: 85291 - DNA, 30 bp, Artificial Sequence
  Synthetic oligonucleotide
agtccgtctccgtgtaacaaagttggcgag

SEQ ID NO: 85292 - DNA, 30 bp, Artificial Sequence
  Synthetic oligonucleotide
gccatagcgcaatcattcagatcatgcgag

SEQ ID NO: 85293 - DNA, 30 bp, Artificial Sequence
  Synthetic oligonucleotide
tgcgcgcccgatcgtcgggatttatgcgag

SEQ ID NO: 85294 - DNA, 30 bp, Artificial Sequence
  Synthetic oligonucleotide
acggtcgctaataaaatatagcgttgcgag

SEQ ID NO: 85295 - DNA, 30 bp, Artificial Sequence
  Synthetic oligonucleotide
ttccacagcgtgcgtggactcaaaatcgag

SEQ ID NO: 85296 - DNA, 30 bp, Artificial Sequence
  Synthetic oligonucleotide
agcgacccataacagagaaaaccaatcgag

SEQ ID NO: 85297 - DNA, 30 bp, Artificial Sequence
  Synthetic oligonucleotide
catgaggtgaaggttaggtgtgccatcgag

SEQ ID NO: 85298 - DNA, 30 bp, Artificial Sequence
  Synthetic oligonucleotide
tagggtgcttgtgaagcctgccgcatcgag

SEQ ID NO: 85299 - DNA, 30 bp, Artificial Sequence
  Synthetic oligonucleotide
tcctaggcaggttatacaaaaggcatcgag

SEQ ID NO: 85300 - DNA, 30 bp, Artificial Sequence
  Synthetic oligonucleotide
gacttaataagttgttcgaacttcatcgag

SEQ ID NO: 85301 - DNA, 30 bp, Artificial Sequence
  Synthetic oligonucleotide
tggcgttaccatgtaaccttcacgatcgag

SEQ ID NO: 85302 - DNA, 30 bp, Artificial Sequence
  Synthetic oligonucleotide
gtcgatttcacttgtgcttaggaactcgag

SEQ ID NO: 85303 - DNA, 30 bp, Artificial Sequence
  Synthetic oligonucleotide
ctactgggaaaccgtgagtcaaacctcgag

SEQ ID NO: 85304 - DNA, 30 bp, Artificial Sequence
  Synthetic oligonucleotide
ccacggtcattcatctcggaaatcctcgag

SEQ ID NO: 85305 - DNA, 30 bp, Artificial Sequence
  Synthetic oligonucleotide
cagggacatttgttttctacgaacgtcgag

SEQ ID NO: 85306 - DNA, 30 bp, Artificial Sequence
  Synthetic oligonucleotide
acgttgagcccacgaatgggtcaggtcgag

SEQ ID NO: 85307 - DNA, 30 bp, Artificial Sequence
  Synthetic oligonucleotide
atgcttagctagacgtcagatccgttcgag

SEQ ID NO: 85308 - DNA, 30 bp, Artificial Sequence
  Synthetic oligonucleotide
cgaactgtaccacggtataaactgttcgag

SEQ ID NO: 85309 - DNA, 30 bp, Artificial Sequence
  Synthetic oligonucleotide
cctatacagccctgttgaacgcttttcgag

SEQ ID NO: 85310 - DNA, 30 bp, Artificial Sequence
  Synthetic oligonucleotide
cgatctgtaggaatctcgtgaaacaaggag

SEQ ID NO: 85311 - DNA, 30 bp, Artificial Sequence
  Synthetic oligonucleotide
cttggcgtgtgtgctctgataaccaaggag

SEQ ID NO: 85312 - DNA, 30 bp, Artificial Sequence
  Synthetic oligonucleotide
cgcaggtggatgcacttccatgtgaaggag

SEQ ID NO: 85313 - DNA, 30 bp, Artificial Sequence
  Synthetic oligonucleotide
gacattgtatcaccttccaatcaacaggag

SEQ ID NO: 85314 - DNA, 30 bp, Artificial Sequence
  Synthetic oligonucleotide
catcaacttgctcggtgcgactaacaggag

SEQ ID NO: 85315 - DNA, 30 bp, Artificial Sequence
  Synthetic oligonucleotide
cagatcactacaagaatcaaggtacaggag

SEQ ID NO: 85316 - DNA, 30 bp, Artificial Sequence
  Synthetic oligonucleotide
cgcgcggtcggcccaacaacaggtcaggag

SEQ ID NO: 85317 - DNA, 30 bp, Artificial Sequence
  Synthetic oligonucleotide
attagtccctacgagcgaagccttcaggag

SEQ ID NO: 85318 - DNA, 30 bp, Artificial Sequence
  Synthetic oligonucleotide
cagtattccacccagagcccccgcgaggag

SEQ ID NO: 85319 - DNA, 30 bp, Artificial Sequence
  Synthetic oligonucleotide
tcatatactgttatgcaacgactcgaggag

SEQ ID NO: 85320 - DNA, 30 bp, Artificial Sequence
  Synthetic oligonucleotide
ctagctggcggattggtataacgggaggag

SEQ ID NO: 85321 - DNA, 30 bp, Artificial Sequence
  Synthetic oligonucleotide
tgttcaacagttacgaactagcttgaggag

SEQ ID NO: 85322 - DNA, 30 bp, Artificial Sequence
  Synthetic oligonucleotide
aggttccgtggggaggtgggcttctaggag

SEQ ID NO: 85323 - DNA, 30 bp, Artificial Sequence
  Synthetic oligonucleotide
ccgtgagtatagctctgggcagtcacggag

SEQ ID NO: 85324 - DNA, 30 bp, Artificial Sequence
  Synthetic oligonucleotide
aaggtcaacgctacagagcgcacgacggag

SEQ ID NO: 85325 - DNA, 30 bp, Artificial Sequence
  Synthetic oligonucleotide
ttaagtaagccaaaatctgatgcgacggag

SEQ ID NO: 85326 - DNA, 30 bp, Artificial Sequence
  Synthetic oligonucleotide
ctatttgtaaggacgtccatcggagcggag

SEQ ID NO: 85327 - DNA, 30 bp, Artificial Sequence
  Synthetic oligonucleotide
cagggcgatgtaattactctcaacgcggag

SEQ ID NO: 85328 - DNA, 30 bp, Artificial Sequence
  Synthetic oligonucleotide
tttcagttcagcaggggcctagctgcggag

SEQ ID NO: 85329 - DNA, 30 bp, Artificial Sequence
  Synthetic oligonucleotide
attcgggaagatcgggtcgtgtcctcggag

SEQ ID NO: 85330 - DNA, 30 bp, Artificial Sequence
  Synthetic oligonucleotide
ctggagcttctcttgttgcggagaagggag

SEQ ID NO: 85331 - DNA, 30 bp, Artificial Sequence
  Synthetic oligonucleotide
aaaggtggttataaacttgtattaagggag

SEQ ID NO: 85332 - DNA, 30 bp, Artificial Sequence
  Synthetic oligonucleotide
caatgtccagagctagaaatcctcagggag

SEQ ID NO: 85333 - DNA, 30 bp, Artificial Sequence
  Synthetic oligonucleotide
ggctccaagtgcggacttagtgagagggag

SEQ ID NO: 85334 - DNA, 30 bp, Artificial Sequence
  Synthetic oligonucleotide
ataggttgtaaaggatggaaattgagggag

SEQ ID NO: 85335 - DNA, 30 bp, Artificial Sequence
  Synthetic oligonucleotide
gggaaaccaagattgcgcaaccatagggag

SEQ ID NO: 85336 - DNA, 30 bp, Artificial Sequence
  Synthetic oligonucleotide
tccacgagtggtcgagtcgggcatagggag

SEQ ID NO: 85337 - DNA, 30 bp, Artificial Sequence
  Synthetic oligonucleotide
gtctaaacgggcggaagaatagaacgggag

SEQ ID NO: 85338 - DNA, 30 bp, Artificial Sequence
  Synthetic oligonucleotide
caggcgtctctcttcattaaataccgggag

SEQ ID NO: 85339 - DNA, 30 bp, Artificial Sequence
  Synthetic oligonucleotide
agaaaaggtgccagagggtaaagtcgggag

SEQ ID NO: 85340 - DNA, 30 bp, Artificial Sequence
  Synthetic oligonucleotide
atgaggtgaacctatcacggcggtcgggag

SEQ ID NO: 85341 - DNA, 30 bp, Artificial Sequence
  Synthetic oligonucleotide
cagatgaaattaaaccgaaaaagcggggag

SEQ ID NO: 85342 - DNA, 30 bp, Artificial Sequence
  Synthetic oligonucleotide
agggaacaaggttttctttcgttcggggag

SEQ ID NO: 85343 - DNA, 30 bp, Artificial Sequence
  Synthetic oligonucleotide
gtgggacgcacgaaaggtatgtatggggag

SEQ ID NO: 85344 - DNA, 30 bp, Artificial Sequence
  Synthetic oligonucleotide
tgcagtgagaggcagaggatcattggggag

SEQ ID NO: 85345 - DNA, 30 bp, Artificial Sequence
  Synthetic oligonucleotide
gcgggggagtggggattcggtgttggggag

SEQ ID NO: 85346 - DNA, 30 bp, Artificial Sequence
  Synthetic oligonucleotide
atcggtagcccgtcatagcggaaatgggag

SEQ ID NO: 85347 - DNA, 30 bp, Artificial Sequence
  Synthetic oligonucleotide
gagaaagaggaggtaacggcaccctgggag

SEQ ID NO: 85348 - DNA, 30 bp, Artificial Sequence
  Synthetic oligonucleotide
ttaacgccagtcctttcgtcctcgtgggag

SEQ ID NO: 85349 - DNA, 30 bp, Artificial Sequence
  Synthetic oligonucleotide
ttgacgaggcgcgtgtctataccttgggag

SEQ ID NO: 85350 - DNA, 30 bp, Artificial Sequence
  Synthetic oligonucleotide
ttcgaaggccgtcatatgcctccgatggag

SEQ ID NO: 85351 - DNA, 30 bp, Artificial Sequence
  Synthetic oligonucleotide
acgcatctgcccgcagccgtgtggatggag

SEQ ID NO: 85352 - DNA, 30 bp, Artificial Sequence
  Synthetic oligonucleotide
cagatttagattgggatagagcatatggag

SEQ ID NO: 85353 - DNA, 30 bp, Artificial Sequence
  Synthetic oligonucleotide
gagcccgtccttctggtgaagtctatggag

SEQ ID NO: 85354 - DNA, 30 bp, Artificial Sequence
  Synthetic oligonucleotide
agcgtctagcccggctgcggtgcactggag

SEQ ID NO: 85355 - DNA, 30 bp, Artificial Sequence
  Synthetic oligonucleotide
cagctcaatgtggaaccgtaaatactggag

SEQ ID NO: 85356 - DNA, 30 bp, Artificial Sequence
  Synthetic oligonucleotide
gcgcgtttgccactcgaatccatactggag

SEQ ID NO: 85357 - DNA, 30 bp, Artificial Sequence
  Synthetic oligonucleotide
agaaatagttgctgaacacgttagctggag

SEQ ID NO: 85358 - DNA, 30 bp, Artificial Sequence
  Synthetic oligonucleotide
tatggttccctaacacggcacaaagtggag

SEQ ID NO: 85359 - DNA, 30 bp, Artificial Sequence
  Synthetic oligonucleotide
agttgccgctaaattcagggcaacgtggag

SEQ ID NO: 85360 - DNA, 30 bp, Artificial Sequence
  Synthetic oligonucleotide
acaaaagggcctggggggagagcggtggag

SEQ ID NO: 85361 - DNA, 30 bp, Artificial Sequence
  Synthetic oligonucleotide
agattactaggtttcttcatcgacttggag

SEQ ID NO: 85362 - DNA, 30 bp, Artificial Sequence
  Synthetic oligonucleotide
tgatatactagataaacctggaccaatgag

SEQ ID NO: 85363 - DNA, 30 bp, Artificial Sequence
  Synthetic oligonucleotide
ttagaggatgacccccgtcccatcaatgag

SEQ ID NO: 85364 - DNA, 30 bp, Artificial Sequence
  Synthetic oligonucleotide
ggtcgtagggtagagtttttagagaatgag

SEQ ID NO: 85365 - DNA, 30 bp, Artificial Sequence
  Synthetic oligonucleotide
ttcagaggatttgccgaagtttcgaatgag

SEQ ID NO: 85366 - DNA, 30 bp, Artificial Sequence
  Synthetic oligonucleotide
ccattttgtacttatagaaatgtacatgag

SEQ ID NO: 85367 - DNA, 30 bp, Artificial Sequence
  Synthetic oligonucleotide
gagactaacctgatgccccgagcccatgag

SEQ ID NO: 85368 - DNA, 30 bp, Artificial Sequence
  Synthetic oligonucleotide
ggtgtttagagtgaaaaaacgaggcatgag

SEQ ID NO: 85369 - DNA, 30 bp, Artificial Sequence
  Synthetic oligonucleotide
actcggaacgagtctattaaagtgcatgag

SEQ ID NO: 85370 - DNA, 30 bp, Artificial Sequence
  Synthetic oligonucleotide
cgactcgaacacgtcatatccggcgatgag

SEQ ID NO: 85371 - DNA, 30 bp, Artificial Sequence
  Synthetic oligonucleotide
cccgtaggaacttgctccacaatctatgag

SEQ ID NO: 85372 - DNA, 30 bp, Artificial Sequence
  Synthetic oligonucleotide
tgtcaagagctaggtgttcccaaaactgag

SEQ ID NO: 85373 - DNA, 30 bp, Artificial Sequence
  Synthetic oligonucleotide
gtgcagcctgtcattgggtctcaaactgag

SEQ ID NO: 85374 - DNA, 30 bp, Artificial Sequence
  Synthetic oligonucleotide
gatgtatttgcgccaacgtagctaactgag

SEQ ID NO: 85375 - DNA, 30 bp, Artificial Sequence
  Synthetic oligonucleotide
ttgtaaaccattgccactggcttaactgag

SEQ ID NO: 85376 - DNA, 30 bp, Artificial Sequence
  Synthetic oligonucleotide
cgggaagaaaagcttacaaatgatactgag

SEQ ID NO: 85377 - DNA, 30 bp, Artificial Sequence
  Synthetic oligonucleotide
actaagtttggccgtgaatcacaggctgag

SEQ ID NO: 85378 - DNA, 30 bp, Artificial Sequence
  Synthetic oligonucleotide
gcaaagacttgaatgatatgcgaggctgag

SEQ ID NO: 85379 - DNA, 30 bp, Artificial Sequence
  Synthetic oligonucleotide
gggaactgtgacctctcaaattttgctgag

SEQ ID NO: 85380 - DNA, 30 bp, Artificial Sequence
  Synthetic oligonucleotide
tcatttcatcggggttagaggtactctgag

SEQ ID NO: 85381 - DNA, 30 bp, Artificial Sequence
  Synthetic oligonucleotide
cgaccccttccctgctcttaaggctctgag

SEQ ID NO: 85382 - DNA, 30 bp, Artificial Sequence
  Synthetic oligonucleotide
agtaattcatagctcgagaccgtgtctgag

SEQ ID NO: 85383 - DNA, 30 bp, Artificial Sequence
  Synthetic oligonucleotide
accctggaatcgcgcacaagtggttctgag

SEQ ID NO: 85384 - DNA, 30 bp, Artificial Sequence
  Synthetic oligonucleotide
cattatggcgggcatctgagtgcaagtgag

SEQ ID NO: 85385 - DNA, 30 bp, Artificial Sequence
  Synthetic oligonucleotide
tggttacaagacagagggcattacagtgag

SEQ ID NO: 85386 - DNA, 30 bp, Artificial Sequence
  Synthetic oligonucleotide
gaaataggaaacccaagagtaatcagtgag

SEQ ID NO: 85387 - DNA, 30 bp, Artificial Sequence
  Synthetic oligonucleotide
gacgtacagataacgatcgtcactagtgag

SEQ ID NO: 85388 - DNA, 30 bp, Artificial Sequence
  Synthetic oligonucleotide
tgtaaagcggcagaatgggactttagtgag

SEQ ID NO: 85389 - DNA, 30 bp, Artificial Sequence
  Synthetic oligonucleotide
acggccagtcgctgaggaccagtacgtgag

SEQ ID NO: 85390 - DNA, 30 bp, Artificial Sequence
  Synthetic oligonucleotide
ggagacgtgatagcccgccgatgccgtgag

SEQ ID NO: 85391 - DNA, 30 bp, Artificial Sequence
  Synthetic oligonucleotide
gttgatgtgtcctataatagtaatcgtgag

SEQ ID NO: 85392 - DNA, 30 bp, Artificial Sequence
  Synthetic oligonucleotide
tatgggagaatgctcgaatcaaagggtgag

SEQ ID NO: 85393 - DNA, 30 bp, Artificial Sequence
  Synthetic oligonucleotide
aggcgttcggaaatgcgattgaagggtgag

SEQ ID NO: 85394 - DNA, 30 bp, Artificial Sequence
  Synthetic oligonucleotide
gacaatgcaacgaacggacacaggggtgag

SEQ ID NO: 85395 - DNA, 30 bp, Artificial Sequence
  Synthetic oligonucleotide
acaagctctaacactttttggggatgtgag

SEQ ID NO: 85396 - DNA, 30 bp, Artificial Sequence
  Synthetic oligonucleotide
aatacggcgtggagacaacgctgatgtgag

SEQ ID NO: 85397 - DNA, 29 bp, Artificial Sequence
  Synthetic oligonucleotide
agcccacataagtggactctggctgtgag

SEQ ID NO: 85398 - DNA, 30 bp, Artificial Sequence
  Synthetic oligonucleotide
ggcgtctgatgagaaggatcggtgtgtgag

SEQ ID NO: 85399 - DNA, 30 bp, Artificial Sequence
  Synthetic oligonucleotide
cgactcgcgaggacatacgcggcttgtgag

SEQ ID NO: 85400 - DNA, 30 bp, Artificial Sequence
  Synthetic oligonucleotide
caggtatcccacttccagctaccaattgag

SEQ ID NO: 85401 - DNA, 30 bp, Artificial Sequence
  Synthetic oligonucleotide
ggtgatgattacaccgattaagccattgag

SEQ ID NO: 85402 - DNA, 30 bp, Artificial Sequence
  Synthetic oligonucleotide
tctcgtactccacgtcagacagtcattgag

SEQ ID NO: 85403 - DNA, 30 bp, Artificial Sequence
  Synthetic oligonucleotide
taataatcgacccgcggtgaaacgattgag

SEQ ID NO: 85404 - DNA, 30 bp, Artificial Sequence
  Synthetic oligonucleotide
ggcgtggagtgccgtgccaatagtattgag

SEQ ID NO: 85405 - DNA, 30 bp, Artificial Sequence
  Synthetic oligonucleotide
gggtcggttcacttaaataaatgacttgag

SEQ ID NO: 85406 - DNA, 30 bp, Artificial Sequence
  Synthetic oligonucleotide
gacctcatacagacaaatcgtatagttgag

SEQ ID NO: 85407 - DNA, 30 bp, Artificial Sequence
  Synthetic oligonucleotide
tgaccaaccagtggctggacgagggttgag

SEQ ID NO: 85408 - DNA, 30 bp, Artificial Sequence
  Synthetic oligonucleotide
aacacgcgggtcggttaggaacgtgttgag

SEQ ID NO: 85409 - DNA, 30 bp, Artificial Sequence
  Synthetic oligonucleotide
agcgcacatcggttcagtgacgaatttgag

SEQ ID NO: 85410 - DNA, 30 bp, Artificial Sequence
  Synthetic oligonucleotide
tgcatagggtacccatttaatgaatttgag

SEQ ID NO: 85411 - DNA, 30 bp, Artificial Sequence
  Synthetic oligonucleotide
gacaatctagagacgatgatggcatttgag

SEQ ID NO: 85412 - DNA, 30 bp, Artificial Sequence
  Synthetic oligonucleotide
tgagtccttacagctcaaagcctgtttgag

SEQ ID NO: 85413 - DNA, 30 bp, Artificial Sequence
  Synthetic oligonucleotide
ggagtgatcgcagagaacgatccaaaatag

SEQ ID NO: 85414 - DNA, 30 bp, Artificial Sequence
  Synthetic oligonucleotide
cgagggtgttacgtggatatactcaaatag

SEQ ID NO: 85415 - DNA, 30 bp, Artificial Sequence
  Synthetic oligonucleotide
gggcagcgctcaaactagaagttcaaatag

SEQ ID NO: 85416 - DNA, 30 bp, Artificial Sequence
  Synthetic oligonucleotide
caaatcctgggggcatggcataggaaatag

SEQ ID NO: 85417 - DNA, 30 bp, Artificial Sequence
  Synthetic oligonucleotide
ccctggtccgtaatgcgagccccacaatag

SEQ ID NO: 85418 - DNA, 30 bp, Artificial Sequence
  Synthetic oligonucleotide
atgtgtgcggaaggatcgaccaaagaatag

SEQ ID NO: 85419 - DNA, 30 bp, Artificial Sequence
  Synthetic oligonucleotide
atgacgtcacggaccggagatgttgaatag

SEQ ID NO: 85420 - DNA, 30 bp, Artificial Sequence
  Synthetic oligonucleotide
accgttcccgattgatgtgaatgataatag

SEQ ID NO: 85421 - DNA, 30 bp, Artificial Sequence
  Synthetic oligonucleotide
cgattcacgtctggaaggggcgtttaatag

SEQ ID NO: 85422 - DNA, 30 bp, Artificial Sequence
  Synthetic oligonucleotide
tgcaactttcctggttccaccataacatag

SEQ ID NO: 85423 - DNA, 30 bp, Artificial Sequence
  Synthetic oligonucleotide
tgttgaaagtgcgcaaaccccgccacatag

SEQ ID NO: 85424 - DNA, 30 bp, Artificial Sequence
  Synthetic oligonucleotide
attagatgtacgtgggccgccgagacatag

SEQ ID NO: 85425 - DNA, 30 bp, Artificial Sequence
  Synthetic oligonucleotide
ctcgtcattgccaccctgggtccgacatag

SEQ ID NO: 85426 - DNA, 30 bp, Artificial Sequence
  Synthetic oligonucleotide
tcaaaatgcctgaatgctcggaggacatag

SEQ ID NO: 85427 - DNA, 30 bp, Artificial Sequence
  Synthetic oligonucleotide
ccaggagacgaagtgcaaattgtgacatag

SEQ ID NO: 85428 - DNA, 30 bp, Artificial Sequence
  Synthetic oligonucleotide
agctattcgtgcaggaagtcagatacatag

SEQ ID NO: 85429 - DNA, 30 bp, Artificial Sequence
  Synthetic oligonucleotide
aaatatcgacgagccctcaggcatccatag

SEQ ID NO: 85430 - DNA, 30 bp, Artificial Sequence
  Synthetic oligonucleotide
ggccgttggaggcaatagatatatccatag

SEQ ID NO: 85431 - DNA, 30 bp, Artificial Sequence
  Synthetic oligonucleotide
aacggaaaactccgatgacccggagcatag

SEQ ID NO: 85432 - DNA, 30 bp, Artificial Sequence
  Synthetic oligonucleotide
gctgttatgaagtagtatcgaaaggcatag

SEQ ID NO: 85433 - DNA, 30 bp, Artificial Sequence
  Synthetic oligonucleotide
tgcgccccctaatgcaaacgcctgtcatag

SEQ ID NO: 85434 - DNA, 30 bp, Artificial Sequence
  Synthetic oligonucleotide
aagttcagaggatacgatggtagaagatag

SEQ ID NO: 85435 - DNA, 30 bp, Artificial Sequence
  Synthetic oligonucleotide
acctggagacgtcttaggataagcagatag

SEQ ID NO: 85436 - DNA, 30 bp, Artificial Sequence
  Synthetic oligonucleotide
tcggtgcttatagcggcgagttcgagatag

SEQ ID NO: 85437 - DNA, 30 bp, Artificial Sequence
  Synthetic oligonucleotide
gcattgcccagcaaaccggatgggagatag

SEQ ID NO: 85438 - DNA, 30 bp, Artificial Sequence
  Synthetic oligonucleotide
tgcgattgaccgagcgttacatagcgatag

SEQ ID NO: 85439 - DNA, 30 bp, Artificial Sequence
  Synthetic oligonucleotide
ggctgagttggtatcgaatcctggcgatag

SEQ ID NO: 85440 - DNA, 30 bp, Artificial Sequence
  Synthetic oligonucleotide
atggactttactgttaataaaatgcgatag

SEQ ID NO: 85441 - DNA, 30 bp, Artificial Sequence
  Synthetic oligonucleotide
tggagtaacttaatctccccacaaggatag

SEQ ID NO: 85442 - DNA, 30 bp, Artificial Sequence
  Synthetic oligonucleotide
ggtaagagtagcaggtgtcgaagaggatag

SEQ ID NO: 85443 - DNA, 30 bp, Artificial Sequence
  Synthetic oligonucleotide
atggcacctcatatatgggcaacgggatag

SEQ ID NO: 85444 - DNA, 30 bp, Artificial Sequence
  Synthetic oligonucleotide
gaagatgaactgtggtgtcagcggtgatag

SEQ ID NO: 85445 - DNA, 30 bp, Artificial Sequence
  Synthetic oligonucleotide
gtcgaatatgcgcgtcggtattgaatatag

SEQ ID NO: 85446 - DNA, 30 bp, Artificial Sequence
  Synthetic oligonucleotide
tacggtctgcgcaattggcaatgtatatag

SEQ ID NO: 85447 - DNA, 30 bp, Artificial Sequence
  Synthetic oligonucleotide
gcacaacaagcgtgctaccttagactatag

SEQ ID NO: 85448 - DNA, 30 bp, Artificial Sequence
  Synthetic oligonucleotide
gcgacattgaaaatgatttcggccctatag

SEQ ID NO: 85449 - DNA, 30 bp, Artificial Sequence
  Synthetic oligonucleotide
atgatgtgtatcagggcttcgagcctatag

SEQ ID NO: 85450 - DNA, 30 bp, Artificial Sequence
  Synthetic oligonucleotide
acccactgccccaggatacaaaagctatag

SEQ ID NO: 85451 - DNA, 30 bp, Artificial Sequence
  Synthetic oligonucleotide
ataagcagccgactttgaaaatcgctatag

SEQ ID NO: 85452 - DNA, 30 bp, Artificial Sequence
  Synthetic oligonucleotide
tacgggacgattatttgaagtgctctatag

SEQ ID NO: 85453 - DNA, 30 bp, Artificial Sequence
  Synthetic oligonucleotide
tgactgagagtagtaagcctaattctatag

SEQ ID NO: 85454 - DNA, 30 bp, Artificial Sequence
  Synthetic oligonucleotide
ggggccatctgaagtatggcaatagtatag

SEQ ID NO: 85455 - DNA, 30 bp, Artificial Sequence
  Synthetic oligonucleotide
acttgaaataggcagagccgtgacgtatag

SEQ ID NO: 85456 - DNA, 30 bp, Artificial Sequence
  Synthetic oligonucleotide
gggcaatcaatcggaaacccgctcgtatag

SEQ ID NO: 85457 - DNA, 30 bp, Artificial Sequence
  Synthetic oligonucleotide
cggcgttaggtgacgttgaggaatgtatag

SEQ ID NO: 85458 - DNA, 30 bp, Artificial Sequence
  Synthetic oligonucleotide
cataaacgtatggtactgtattatttatag

SEQ ID NO: 85459 - DNA, 30 bp, Artificial Sequence
  Synthetic oligonucleotide
gtgcgtgcgttcgagacagaaactttatag

SEQ ID NO: 85460 - DNA, 30 bp, Artificial Sequence
  Synthetic oligonucleotide
atcgtcatgaggcattttagtaggaactag

SEQ ID NO: 85461 - DNA, 30 bp, Artificial Sequence
  Synthetic oligonucleotide
ggcaacggcccacgtgtcttgaaacactag

SEQ ID NO: 85462 - DNA, 30 bp, Artificial Sequence
  Synthetic oligonucleotide
tccgtgtcaggagggacgggctttcactag

SEQ ID NO: 85463 - DNA, 30 bp, Artificial Sequence
  Synthetic oligonucleotide
catatgtaaatgaatcagtaggccgactag

SEQ ID NO: 85464 - DNA, 30 bp, Artificial Sequence
  Synthetic oligonucleotide
cccgtaatgcggacgaacgtgctcgactag

SEQ ID NO: 85465 - DNA, 30 bp, Artificial Sequence
  Synthetic oligonucleotide
tcggctatggcgggatattcgccggactag

SEQ ID NO: 85466 - DNA, 30 bp, Artificial Sequence
  Synthetic oligonucleotide
atactcgtgcccggggggatggcatactag

SEQ ID NO: 85467 - DNA, 30 bp, Artificial Sequence
  Synthetic oligonucleotide
gggatgaccttaaatgaagagcgctactag

SEQ ID NO: 85468 - DNA, 30 bp, Artificial Sequence
  Synthetic oligonucleotide
cgcgaaggcaggatccgggcttaagcctag

SEQ ID NO: 85469 - DNA, 30 bp, Artificial Sequence
  Synthetic oligonucleotide
gaggctgtcgctatctggggtagggcctag

SEQ ID NO: 85470 - DNA, 30 bp, Artificial Sequence
  Synthetic oligonucleotide
tctacggttaaacaggggaatcgatcctag

SEQ ID NO: 85471 - DNA, 30 bp, Artificial Sequence
  Synthetic oligonucleotide
cggctgcaaggtagtcctaaattctcctag

SEQ ID NO: 85472 - DNA, 30 bp, Artificial Sequence
  Synthetic oligonucleotide
aggagggatctcctggcagtcaggtcctag

SEQ ID NO: 85473 - DNA, 30 bp, Artificial Sequence
  Synthetic oligonucleotide
taccgtcggagccaataccgcgattcctag

SEQ ID NO: 85474 - DNA, 30 bp, Artificial Sequence
  Synthetic oligonucleotide
aagaccgtaaccggaggagagcaaagctag

SEQ ID NO: 85475 - DNA, 30 bp, Artificial Sequence
  Synthetic oligonucleotide
ggtatgtgccgtcggcattgaaccagctag

SEQ ID NO: 85476 - DNA, 30 bp, Artificial Sequence
  Synthetic oligonucleotide
gggtttggcttgagtaaacagcggagctag

SEQ ID NO: 85477 - DNA, 30 bp, Artificial Sequence
  Synthetic oligonucleotide
accagctaggttagggaaggtatgagctag

SEQ ID NO: 85478 - DNA, 30 bp, Artificial Sequence
  Synthetic oligonucleotide
ctattcgaaatcgcttagagtttccgctag

SEQ ID NO: 85479 - DNA, 30 bp, Artificial Sequence
  Synthetic oligonucleotide
tacggaggattagcatcgtgtgaaggctag

SEQ ID NO: 85480 - DNA, 30 bp, Artificial Sequence
  Synthetic oligonucleotide
gaccacacttcaaagatcacctgcggctag

SEQ ID NO: 85481 - DNA, 30 bp, Artificial Sequence
  Synthetic oligonucleotide
cgttgggttagtccaatctgttgatgctag

SEQ ID NO: 85482 - DNA, 30 bp, Artificial Sequence
  Synthetic oligonucleotide
gatgtcacttgacgaaagacgataatctag

SEQ ID NO: 85483 - DNA, 30 bp, Artificial Sequence
  Synthetic oligonucleotide
ccgtataatagaaacagctggtagatctag

SEQ ID NO: 85484 - DNA, 30 bp, Artificial Sequence
  Synthetic oligonucleotide
cagcacaacgattctgcgtcactactctag

SEQ ID NO: 85485 - DNA, 30 bp, Artificial Sequence
  Synthetic oligonucleotide
aaaacacgcgacccgccgaggtccctctag

SEQ ID NO: 85486 - DNA, 30 bp, Artificial Sequence
  Synthetic oligonucleotide
gggcgtgagacactaactgcgggcctctag

SEQ ID NO: 85487 - DNA, 30 bp, Artificial Sequence
  Synthetic oligonucleotide
tcgcgcgaattcagtccgtggcatctctag

SEQ ID NO: 85488 - DNA, 30 bp, Artificial Sequence
  Synthetic oligonucleotide
taaaaaaaacatgaccacagcgtggtctag

SEQ ID NO: 85489 - DNA, 30 bp, Artificial Sequence
  Synthetic oligonucleotide
agaaagtatggtgaaaggatcggcttctag

SEQ ID NO: 85490 - DNA, 30 bp, Artificial Sequence
  Synthetic oligonucleotide
atgtaaacatgcgtagttcagggtaagtag

SEQ ID NO: 85491 - DNA, 30 bp, Artificial Sequence
  Synthetic oligonucleotide
tgtaaaagcatgcgaggatcacaacagtag

SEQ ID NO: 85492 - DNA, 30 bp, Artificial Sequence
  Synthetic oligonucleotide
gttgtcgagtacatggaatgtgcacagtag

SEQ ID NO: 85493 - DNA, 30 bp, Artificial Sequence
  Synthetic oligonucleotide
atgaaagacattaatatcgcgattcagtag

SEQ ID NO: 85494 - DNA, 30 bp, Artificial Sequence
  Synthetic oligonucleotide
gttatgggcttcggtatgtaagttcagtag

SEQ ID NO: 85495 - DNA, 30 bp, Artificial Sequence
  Synthetic oligonucleotide
ttaagatggcgatcgaggttcgaagagtag

SEQ ID NO: 85496 - DNA, 30 bp, Artificial Sequence
  Synthetic oligonucleotide
gggtatagggctgtaataccacgcgagtag

SEQ ID NO: 85497 - DNA, 30 bp, Artificial Sequence
  Synthetic oligonucleotide
aagaatggttgggggtccaaggtggagtag

SEQ ID NO: 85498 - DNA, 30 bp, Artificial Sequence
  Synthetic oligonucleotide
tcccaaccagtcgaaccagcgcatgagtag

SEQ ID NO: 85499 - DNA, 30 bp, Artificial Sequence
  Synthetic oligonucleotide
gaaatgagcatacgctacgggactgagtag

SEQ ID NO: 85500 - DNA, 30 bp, Artificial Sequence
  Synthetic oligonucleotide
tccgagtgaataaccgaacagggatagtag

SEQ ID NO: 85501 - DNA, 30 bp, Artificial Sequence
  Synthetic oligonucleotide
ccattcaaaaggtagcaggtatcttagtag

SEQ ID NO: 85502 - DNA, 30 bp, Artificial Sequence
  Synthetic oligonucleotide
tatcccatagacgaatcgggattaacgtag

SEQ ID NO: 85503 - DNA, 30 bp, Artificial Sequence
  Synthetic oligonucleotide
gtacccaacaaacattaaggaacgacgtag

SEQ ID NO: 85504 - DNA, 30 bp, Artificial Sequence
  Synthetic oligonucleotide
catactaacgagtgaattcaatgtacgtag

SEQ ID NO: 85505 - DNA, 30 bp, Artificial Sequence
  Synthetic oligonucleotide
acaacatcgtcactcattacgatgccgtag

SEQ ID NO: 85506 - DNA, 30 bp, Artificial Sequence
  Synthetic oligonucleotide
atacaggcgctacgaaataggcgtgcgtag

SEQ ID NO: 85507 - DNA, 30 bp, Artificial Sequence
  Synthetic oligonucleotide
taaaaaggaatacggtgctcgacatcgtag

SEQ ID NO: 85508 - DNA, 30 bp, Artificial Sequence
  Synthetic oligonucleotide
tcaaatttgtgcagtgcgagaataaggtag

SEQ ID NO: 85509 - DNA, 30 bp, Artificial Sequence
  Synthetic oligonucleotide
atcacccggattcacgtacagggagggtag

SEQ ID NO: 85510 - DNA, 30 bp, Artificial Sequence
  Synthetic oligonucleotide
ggccggtagacctccaaaaggatcgggtag

SEQ ID NO: 85511 - DNA, 30 bp, Artificial Sequence
  Synthetic oligonucleotide
gtataagcggattgttaagcttctgggtag

SEQ ID NO: 85512 - DNA, 30 bp, Artificial Sequence
  Synthetic oligonucleotide
agtaccaacgggtcacggaattgatggtag

SEQ ID NO: 85513 - DNA, 30 bp, Artificial Sequence
  Synthetic oligonucleotide
aaagagatcagtgaatagaagtagtggtag

SEQ ID NO: 85514 - DNA, 30 bp, Artificial Sequence
  Synthetic oligonucleotide
gttcggcggacaccctaagcgacgtggtag

SEQ ID NO: 85515 - DNA, 30 bp, Artificial Sequence
  Synthetic oligonucleotide
cttgaaaaaccattcgcgctcaccctgtag

SEQ ID NO: 85516 - DNA, 30 bp, Artificial Sequence
  Synthetic oligonucleotide
taaacagtcggtgccgtataggtcctgtag

SEQ ID NO: 85517 - DNA, 30 bp, Artificial Sequence
  Synthetic oligonucleotide
aaaagggcattgctttacgctctgctgtag

SEQ ID NO: 85518 - DNA, 30 bp, Artificial Sequence
  Synthetic oligonucleotide
ggaatgaaaactcttggcggaacggtgtag

SEQ ID NO: 85519 - DNA, 30 bp, Artificial Sequence
  Synthetic oligonucleotide
cgggggaaaccaacccgcatctttgtgtag

SEQ ID NO: 85520 - DNA, 30 bp, Artificial Sequence
  Synthetic oligonucleotide
tgggtagaacttgcaccaagttgattgtag

SEQ ID NO: 85521 - DNA, 30 bp, Artificial Sequence
  Synthetic oligonucleotide
cgggggctcgggcaaaacgagggaaattag

SEQ ID NO: 85522 - DNA, 30 bp, Artificial Sequence
  Synthetic oligonucleotide
aaagttactaacacacacgtcaataattag

SEQ ID NO: 85523 - DNA, 30 bp, Artificial Sequence
  Synthetic oligonucleotide
aggggagtcgtcagacttgtgcttaattag

SEQ ID NO: 85524 - DNA, 30 bp, Artificial Sequence
  Synthetic oligonucleotide
acgggatgtccgcacatttagacacattag

SEQ ID NO: 85525 - DNA, 30 bp, Artificial Sequence
  Synthetic oligonucleotide
gcagattagtcaacattatggccatattag

SEQ ID NO: 85526 - DNA, 30 bp, Artificial Sequence
  Synthetic oligonucleotide
agtgaggacccaggaggttgcttctattag

SEQ ID NO: 85527 - DNA, 30 bp, Artificial Sequence
  Synthetic oligonucleotide
gtctcactagcaagaatcacaacttattag

SEQ ID NO: 85528 - DNA, 30 bp, Artificial Sequence
  Synthetic oligonucleotide
catggtacgttttaagtcgcctgttattag

SEQ ID NO: 85529 - DNA, 30 bp, Artificial Sequence
  Synthetic oligonucleotide
cgtgttccatctcttagcaccggaacttag

SEQ ID NO: 85530 - DNA, 30 bp, Artificial Sequence
  Synthetic oligonucleotide
gtaagctgggagactgcgacgtggacttag

SEQ ID NO: 85531 - DNA, 30 bp, Artificial Sequence
  Synthetic oligonucleotide
cggcgagtcatgcgtcaccgaagatcttag

SEQ ID NO: 85532 - DNA, 30 bp, Artificial Sequence
  Synthetic oligonucleotide
gaagcgtgagcatacaaacttctgagttag

SEQ ID NO: 85533 - DNA, 30 bp, Artificial Sequence
  Synthetic oligonucleotide
atgacgaacaaaaactggcttcctagttag

SEQ ID NO: 85534 - DNA, 30 bp, Artificial Sequence
  Synthetic oligonucleotide
gcggtcacgtggcaagcccgagttagttag

SEQ ID NO: 85535 - DNA, 30 bp, Artificial Sequence
  Synthetic oligonucleotide
gagaataggtgtgaataatttgcccgttag

SEQ ID NO: 85536 - DNA, 30 bp, Artificial Sequence
  Synthetic oligonucleotide
cggatgtcctgttgaactacccgtcgttag

SEQ ID NO: 85537 - DNA, 30 bp, Artificial Sequence
  Synthetic oligonucleotide
cagcaagccaacaactatcggggaggttag

SEQ ID NO: 85538 - DNA, 30 bp, Artificial Sequence
  Synthetic oligonucleotide
gtggtctcagactatctggctctcggttag

SEQ ID NO: 85539 - DNA, 30 bp, Artificial Sequence
  Synthetic oligonucleotide
tccataccaatgcttcggagacagggttag

SEQ ID NO: 85540 - DNA, 30 bp, Artificial Sequence
  Synthetic oligonucleotide
gtaggaattcggatcaggttgggctgttag

SEQ ID NO: 85541 - DNA, 30 bp, Artificial Sequence
  Synthetic oligonucleotide
gttgcaaggcatactggctaatattgttag

SEQ ID NO: 85542 - DNA, 30 bp, Artificial Sequence
  Synthetic oligonucleotide
tgactccatgctggcatggtggtaatttag

SEQ ID NO: 85543 - DNA, 30 bp, Artificial Sequence
  Synthetic oligonucleotide
gtttgaggcgggggggcgccgaacatttag

SEQ ID NO: 85544 - DNA, 30 bp, Artificial Sequence
  Synthetic oligonucleotide
gcagagccgggtcacagatggtgcatttag

SEQ ID NO: 85545 - DNA, 30 bp, Artificial Sequence
  Synthetic oligonucleotide
cgacatagggccctagatataagtatttag

SEQ ID NO: 85546 - DNA, 30 bp, Artificial Sequence
  Synthetic oligonucleotide
cgcaagtgtacttacaagtagggactttag

SEQ ID NO: 85547 - DNA, 30 bp, Artificial Sequence
  Synthetic oligonucleotide
tctagattaaggggtagcgtcaacctttag

SEQ ID NO: 85548 - DNA, 30 bp, Artificial Sequence
  Synthetic oligonucleotide
cgaggatgtcctttatcacaacgcctttag

SEQ ID NO: 85549 - DNA, 30 bp, Artificial Sequence
  Synthetic oligonucleotide
gaggccgagagtcgagcagcgtaagtttag

SEQ ID NO: 85550 - DNA, 30 bp, Artificial Sequence
  Synthetic oligonucleotide
catggagcaaggctgataggggacgtttag

SEQ ID NO: 85551 - DNA, 30 bp, Artificial Sequence
  Synthetic oligonucleotide
tgtcgaggtgttgggcgaccacctgtttag

SEQ ID NO: 85552 - DNA, 30 bp, Artificial Sequence
  Synthetic oligonucleotide
gagagcccagagtcgggtgaaattttttag

SEQ ID NO: 85553 - DNA, 30 bp, Artificial Sequence
  Synthetic oligonucleotide
gcatgaaatttaaacaacgcgataaaaacg

SEQ ID NO: 85554 - DNA, 30 bp, Artificial Sequence
  Synthetic oligonucleotide
tcaaaaggggatggccagagtaacaaaacg

SEQ ID NO: 85555 - DNA, 30 bp, Artificial Sequence
  Synthetic oligonucleotide
ggttcatccaaaaagaggcatcctaaaacg

SEQ ID NO: 85556 - DNA, 30 bp, Artificial Sequence
  Synthetic oligonucleotide
cagtagaaaatatcaggtggataccaaacg

SEQ ID NO: 85557 - DNA, 30 bp, Artificial Sequence
  Synthetic oligonucleotide
gcatcaagaacggaagggacacggcaaacg

SEQ ID NO: 85558 - DNA, 30 bp, Artificial Sequence
  Synthetic oligonucleotide
ggttgggccgctcagaatgacacggaaacg

SEQ ID NO: 85559 - DNA, 30 bp, Artificial Sequence
  Synthetic oligonucleotide
aataagggaatacttcgaacacgggaaacg

SEQ ID NO: 85560 - DNA, 30 bp, Artificial Sequence
  Synthetic oligonucleotide
cgaaatccggatgactaactatgataaacg

SEQ ID NO: 85561 - DNA, 30 bp, Artificial Sequence
  Synthetic oligonucleotide
ggcttaggtagggtttacaggataacaacg

SEQ ID NO: 85562 - DNA, 30 bp, Artificial Sequence
  Synthetic oligonucleotide
gtagggtgagagatactatattcgacaacg

SEQ ID NO: 85563 - DNA, 30 bp, Artificial Sequence
  Synthetic oligonucleotide
catcattatgatatcacatcttggacaacg

SEQ ID NO: 85564 - DNA, 30 bp, Artificial Sequence
  Synthetic oligonucleotide
tgagaaaggttcttgtccttaatgacaacg

SEQ ID NO: 85565 - DNA, 30 bp, Artificial Sequence
  Synthetic oligonucleotide
ggtgacgtcatacatacctaaggcgcaacg

SEQ ID NO: 85566 - DNA, 30 bp, Artificial Sequence
  Synthetic oligonucleotide
ggcaaatgctgggaggcatcccaggcaacg

SEQ ID NO: 85567 - DNA, 30 bp, Artificial Sequence
  Synthetic oligonucleotide
gagattagaatgtagctagtgtcggcaacg

SEQ ID NO: 85568 - DNA, 30 bp, Artificial Sequence
  Synthetic oligonucleotide
acagttggagcacgggttaagattgcaacg

SEQ ID NO: 85569 - DNA, 30 bp, Artificial Sequence
  Synthetic oligonucleotide
gtacctgacgggagggtgattcagtcaacg

SEQ ID NO: 85570 - DNA, 30 bp, Artificial Sequence
  Synthetic oligonucleotide
acaggtatggtcgtccagtcctcgtcaacg

SEQ ID NO: 85571 - DNA, 30 bp, Artificial Sequence
  Synthetic oligonucleotide
accccgttgtaatcgtataatgcgcgaacg

SEQ ID NO: 85572 - DNA, 30 bp, Artificial Sequence
  Synthetic oligonucleotide
tgtcacgaaagatcgtgttacaatcgaacg

SEQ ID NO: 85573 - DNA, 30 bp, Artificial Sequence
  Synthetic oligonucleotide
cccgcttcgcctaagacaaactgaggaacg

SEQ ID NO: 85574 - DNA, 30 bp, Artificial Sequence
  Synthetic oligonucleotide
ggaaggaatgtagaatatattgccggaacg

SEQ ID NO: 85575 - DNA, 30 bp, Artificial Sequence
  Synthetic oligonucleotide
tgcaataacggcagtatcaccatgggaacg

SEQ ID NO: 85576 - DNA, 30 bp, Artificial Sequence
  Synthetic oligonucleotide
actagccacctgcacgagaaacatggaacg

SEQ ID NO: 85577 - DNA, 30 bp, Artificial Sequence
  Synthetic oligonucleotide
gggaaaatgaaatatagtgcgtggtgaacg

SEQ ID NO: 85578 - DNA, 30 bp, Artificial Sequence
  Synthetic oligonucleotide
ggaccaaatgttgatcgggtgagaataacg

SEQ ID NO: 85579 - DNA, 30 bp, Artificial Sequence
  Synthetic oligonucleotide
gcattaccggaactgttagataagataacg

SEQ ID NO: 85580 - DNA, 30 bp, Artificial Sequence
  Synthetic oligonucleotide
gtatgccatacgtaactaagtagtataacg

SEQ ID NO: 85581 - DNA, 30 bp, Artificial Sequence
  Synthetic oligonucleotide
cggcacaagggacaactcctattagtaacg

SEQ ID NO: 85582 - DNA, 30 bp, Artificial Sequence
  Synthetic oligonucleotide
agggtcgcagaccaggtcacaccattaacg

SEQ ID NO: 85583 - DNA, 30 bp, Artificial Sequence
  Synthetic oligonucleotide
catacgatgggcaaccaactccaaaacacg

SEQ ID NO: 85584 - DNA, 30 bp, Artificial Sequence
  Synthetic oligonucleotide
cctcgctcgaacaaagtattgacgaacacg

SEQ ID NO: 85585 - DNA, 30 bp, Artificial Sequence
  Synthetic oligonucleotide
cccataacgaaccagaagctacttaacacg

SEQ ID NO: 85586 - DNA, 30 bp, Artificial Sequence
  Synthetic oligonucleotide
ccggggttgttcagagaggccaggcacacg

SEQ ID NO: 85587 - DNA, 30 bp, Artificial Sequence
  Synthetic oligonucleotide
ggcgcaggctgcgcaagtagtcctcacacg

SEQ ID NO: 85588 - DNA, 30 bp, Artificial Sequence
  Synthetic oligonucleotide
gcgggggtaagtagttcatctgacgacacg

SEQ ID NO: 85589 - DNA, 30 bp, Artificial Sequence
  Synthetic oligonucleotide
gtgtgttacgagagggacaacctatacacg

SEQ ID NO: 85590 - DNA, 30 bp, Artificial Sequence
  Synthetic oligonucleotide
aaatgtatttgaacgttcgaaatgtacacg

SEQ ID NO: 85591 - DNA, 30 bp, Artificial Sequence
  Synthetic oligonucleotide
aatcagaacaaccttcggtaccaaaccacg

SEQ ID NO: 85592 - DNA, 30 bp, Artificial Sequence
  Synthetic oligonucleotide
acacacgtttaccataaggccgtaaccacg

SEQ ID NO: 85593 - DNA, 30 bp, Artificial Sequence
  Synthetic oligonucleotide
gtccatagaccgggggaatatcacaccacg

SEQ ID NO: 85594 - DNA, 30 bp, Artificial Sequence
  Synthetic oligonucleotide
cgaggtgctagcactattactacgaccacg

SEQ ID NO: 85595 - DNA, 30 bp, Artificial Sequence
  Synthetic oligonucleotide
tgacggtatattgaaacgggggataccacg

SEQ ID NO: 85596 - DNA, 30 bp, Artificial Sequence
  Synthetic oligonucleotide
ttggactagggaggcaatacaggtaccacg

SEQ ID NO: 85597 - DNA, 30 bp, Artificial Sequence
  Synthetic oligonucleotide
aaactattgggcattgggcggtgtaccacg

SEQ ID NO: 85598 - DNA, 30 bp, Artificial Sequence
  Synthetic oligonucleotide
cgagggagtttcattggcgcacaacccacg

SEQ ID NO: 85599 - DNA, 30 bp, Artificial Sequence
  Synthetic oligonucleotide
gcactatccgacgtaaactcgacacccacg

SEQ ID NO: 85600 - DNA, 30 bp, Artificial Sequence
  Synthetic oligonucleotide
ggtaccgccagtaccacccataatcccacg

SEQ ID NO: 85601 - DNA, 30 bp, Artificial Sequence
  Synthetic oligonucleotide
tagaggattgaacagtgaggggtagccacg

SEQ ID NO: 85602 - DNA, 30 bp, Artificial Sequence
  Synthetic oligonucleotide
cgaacgtggggcgcgtttcactgatccacg

SEQ ID NO: 85603 - DNA, 30 bp, Artificial Sequence
  Synthetic oligonucleotide
aacagaacagcaagttaggcgaaaagcacg

SEQ ID NO: 85604 - DNA, 30 bp, Artificial Sequence
  Synthetic oligonucleotide
gcgaccacaacatgagctaccgaaagcacg

SEQ ID NO: 85605 - DNA, 30 bp, Artificial Sequence
  Synthetic oligonucleotide
agactcgtaacaggcactgtcaccagcacg

SEQ ID NO: 85606 - DNA, 30 bp, Artificial Sequence
  Synthetic oligonucleotide
cgtcccacccggatgtcgggtatcagcacg

SEQ ID NO: 85607 - DNA, 30 bp, Artificial Sequence
  Synthetic oligonucleotide
ggaggctcgtctgtatccgactcgagcacg

SEQ ID NO: 85608 - DNA, 30 bp, Artificial Sequence
  Synthetic oligonucleotide
tgtaattgaatccgaagagaagcccgcacg

SEQ ID NO: 85609 - DNA, 30 bp, Artificial Sequence
  Synthetic oligonucleotide
tgtaaaccccccgtaatttaatagggcacg

SEQ ID NO: 85610 - DNA, 30 bp, Artificial Sequence
  Synthetic oligonucleotide
tcgcgagttgtgtgaagccttaatggcacg

SEQ ID NO: 85611 - DNA, 30 bp, Artificial Sequence
  Synthetic oligonucleotide
gaattgagcgccgaagggaaaatctgcacg

SEQ ID NO: 85612 - DNA, 30 bp, Artificial Sequence
  Synthetic oligonucleotide
acgtcagttggtgactttctagattgcacg

SEQ ID NO: 85613 - DNA, 30 bp, Artificial Sequence
  Synthetic oligonucleotide
caaaagaagtgtgccgaagtgggttgcacg

SEQ ID NO: 85614 - DNA, 30 bp, Artificial Sequence
  Synthetic oligonucleotide
tgacgcgttgggttgttaacgttaatcacg

SEQ ID NO: 85615 - DNA, 30 bp, Artificial Sequence
  Synthetic oligonucleotide
taagcgtccgggaattgataccagatcacg

SEQ ID NO: 85616 - DNA, 30 bp, Artificial Sequence
  Synthetic oligonucleotide
cgccgatgcgggttcaactgaacgatcacg

SEQ ID NO: 85617 - DNA, 30 bp, Artificial Sequence
  Synthetic oligonucleotide
taaggggcggacatctgctgaatgatcacg

SEQ ID NO: 85618 - DNA, 30 bp, Artificial Sequence
  Synthetic oligonucleotide
ggtgctgagcatctttgtaccactatcacg

SEQ ID NO: 85619 - DNA, 30 bp, Artificial Sequence
  Synthetic oligonucleotide
cgccacgggatggaaaacatatagctcacg

SEQ ID NO: 85620 - DNA, 30 bp, Artificial Sequence
  Synthetic oligonucleotide
cctatctccagaacggatcgtatcgtcacg

SEQ ID NO: 85621 - DNA, 30 bp, Artificial Sequence
  Synthetic oligonucleotide
tcgccaaatgccagagaacaataggtcacg

SEQ ID NO: 85622 - DNA, 30 bp, Artificial Sequence
  Synthetic oligonucleotide
tggattaagcgtccaatgtctacggtcacg

SEQ ID NO: 85623 - DNA, 30 bp, Artificial Sequence
  Synthetic oligonucleotide
ttgcagagcattatagactgcgcggtcacg

SEQ ID NO: 85624 - DNA, 30 bp, Artificial Sequence
  Synthetic oligonucleotide
agtgcgcagaggatttcatattacttcacg

SEQ ID NO: 85625 - DNA, 30 bp, Artificial Sequence
  Synthetic oligonucleotide
cgattgaaatacggttcggtatataagacg

SEQ ID NO: 85626 - DNA, 30 bp, Artificial Sequence
  Synthetic oligonucleotide
taggggagaataagcagatcgggtaagacg

SEQ ID NO: 85627 - DNA, 31 bp, Artificial Sequence
  Synthetic oligonucleotide
tagcgcacaggaacaaccagccttacagacg

SEQ ID NO: 85628 - DNA, 30 bp, Artificial Sequence
  Synthetic oligonucleotide
tgcaacagctcctcgtaacgaaaccagacg

SEQ ID NO: 85629 - DNA, 30 bp, Artificial Sequence
  Synthetic oligonucleotide
ttatcatacaagcgggttgataaccagacg

SEQ ID NO: 85630 - DNA, 30 bp, Artificial Sequence
  Synthetic oligonucleotide
ggggtactgagttgtattcaacgtcagacg

SEQ ID NO: 85631 - DNA, 30 bp, Artificial Sequence
  Synthetic oligonucleotide
cggttgggagtaccgagaagacttgagacg

SEQ ID NO: 85632 - DNA, 30 bp, Artificial Sequence
  Synthetic oligonucleotide
taaggtataagatctcaggtaacctagacg

SEQ ID NO: 85633 - DNA, 30 bp, Artificial Sequence
  Synthetic oligonucleotide
caggcgagggtacgattatctgtaacgacg

SEQ ID NO: 85634 - DNA, 30 bp, Artificial Sequence
  Synthetic oligonucleotide
gaaagacgggctaaaagtgcattcacgacg

SEQ ID NO: 85635 - DNA, 30 bp, Artificial Sequence
  Synthetic oligonucleotide
atcaaacagcatcaggcctacgtaccgacg

SEQ ID NO: 85636 - DNA, 30 bp, Artificial Sequence
  Synthetic oligonucleotide
ggtaccaccggcaaagtttgggcagcgacg

SEQ ID NO: 85637 - DNA, 30 bp, Artificial Sequence
  Synthetic oligonucleotide
accctataacaggtaagcggtacatcgacg

SEQ ID NO: 85638 - DNA, 30 bp, Artificial Sequence
  Synthetic oligonucleotide
acgtgaatgcattcaggattaagatcgacg

SEQ ID NO: 85639 - DNA, 30 bp, Artificial Sequence
  Synthetic oligonucleotide
cttaacggcgtatatattcccaagaggacg

SEQ ID NO: 85640 - DNA, 30 bp, Artificial Sequence
  Synthetic oligonucleotide
agcctacgtagataaatggtgaggcggacg

SEQ ID NO: 85641 - DNA, 30 bp, Artificial Sequence
  Synthetic oligonucleotide
acgggtgagtaaacgtaatcctggcggacg

SEQ ID NO: 85642 - DNA, 30 bp, Artificial Sequence
  Synthetic oligonucleotide
ctctgagaagatctcgggtaaagcgggacg

SEQ ID NO: 85643 - DNA, 30 bp, Artificial Sequence
  Synthetic oligonucleotide
tacggtcaagtgaaagactgagaggggacg

SEQ ID NO: 85644 - DNA, 30 bp, Artificial Sequence
  Synthetic oligonucleotide
gtaggtaggccatttcaattgagctggacg

SEQ ID NO: 85645 - DNA, 30 bp, Artificial Sequence
  Synthetic oligonucleotide
catatacataatatatgaaaacgctggacg

SEQ ID NO: 85646 - DNA, 30 bp, Artificial Sequence
  Synthetic oligonucleotide
atgtgagtagtaacgaacagcagtatgacg

SEQ ID NO: 85647 - DNA, 30 bp, Artificial Sequence
  Synthetic oligonucleotide
cgagacggtatacgctagttgtatctgacg

SEQ ID NO: 85648 - DNA, 30 bp, Artificial Sequence
  Synthetic oligonucleotide
cgaatacagccgggtgtttcacctgtgacg

SEQ ID NO: 85649 - DNA, 30 bp, Artificial Sequence
  Synthetic oligonucleotide
agcatcagatagatatccagcgccaatacg

SEQ ID NO: 85650 - DNA, 30 bp, Artificial Sequence
  Synthetic oligonucleotide
gaccatcatctcagcggttacggcaatacg

SEQ ID NO: 85651 - DNA, 30 bp, Artificial Sequence
  Synthetic oligonucleotide
ggggttatactgtcagagacatagaatacg

SEQ ID NO: 85652 - DNA, 30 bp, Artificial Sequence
  Synthetic oligonucleotide
gtgggcactcatgacaatccatcgaatacg

SEQ ID NO: 85653 - DNA, 30 bp, Artificial Sequence
  Synthetic oligonucleotide
ccagacagaaaacggtaagatagtcatacg

SEQ ID NO: 85654 - DNA, 30 bp, Artificial Sequence
  Synthetic oligonucleotide
caggattgtccgcataggtagacagatacg

SEQ ID NO: 85655 - DNA, 30 bp, Artificial Sequence
  Synthetic oligonucleotide
attaggtaggccaactacgcaactgatacg

SEQ ID NO: 85656 - DNA, 30 bp, Artificial Sequence
  Synthetic oligonucleotide
ccgagtccatccctcatctaaaggtatacg

SEQ ID NO: 85657 - DNA, 30 bp, Artificial Sequence
  Synthetic oligonucleotide
aaccgatgacacacgagcaaacctactacg

SEQ ID NO: 85658 - DNA, 30 bp, Artificial Sequence
  Synthetic oligonucleotide
tatgtcaaactgcgatagtacagtactacg

SEQ ID NO: 85659 - DNA, 30 bp, Artificial Sequence
  Synthetic oligonucleotide
actgaaacctacttgggagctatgcctacg

SEQ ID NO: 85660 - DNA, 30 bp, Artificial Sequence
  Synthetic oligonucleotide
acatttaccaaaggcggatccggtcctacg

SEQ ID NO: 85661 - DNA, 30 bp, Artificial Sequence
  Synthetic oligonucleotide
aggatatgtggcagacctcacgcagctacg

SEQ ID NO: 85662 - DNA, 30 bp, Artificial Sequence
  Synthetic oligonucleotide
ataatacggaataggtgaaataaatctacg

SEQ ID NO: 85663 - DNA, 30 bp, Artificial Sequence
  Synthetic oligonucleotide
aggctacttgtagacatcgcgatatctacg

SEQ ID NO: 85664 - DNA, 30 bp, Artificial Sequence
  Synthetic oligonucleotide
tcgcccggcgtgattcatgaaggttctacg

SEQ ID NO: 85665 - DNA, 30 bp, Artificial Sequence
  Synthetic oligonucleotide
cttccgggtgattcaacaaggaaaagtacg

SEQ ID NO: 85666 - DNA, 30 bp, Artificial Sequence
  Synthetic oligonucleotide
ggatggtacaaacctggacctctaagtacg

SEQ ID NO: 85667 - DNA, 30 bp, Artificial Sequence
  Synthetic oligonucleotide
gcataagtgcacagtacggaccctagtacg

SEQ ID NO: 85668 - DNA, 30 bp, Artificial Sequence
  Synthetic oligonucleotide
aaccctccgcaaacaagcaagtagggtacg

SEQ ID NO: 85669 - DNA, 30 bp, Artificial Sequence
  Synthetic oligonucleotide
tgtgatacctgtcgggttagacctggtacg

SEQ ID NO: 85670 - DNA, 30 bp, Artificial Sequence
  Synthetic oligonucleotide
cggccatccaaatgggggtgcctatgtacg

SEQ ID NO: 85671 - DNA, 30 bp, Artificial Sequence
  Synthetic oligonucleotide
cgtccattccaatacagtactaacaaaccg

SEQ ID NO: 85672 - DNA, 31 bp, Artificial Sequence
  Synthetic oligonucleotide
ccgatcagtgccggcggatgtgagcaaaccg

SEQ ID NO: 85673 - DNA, 30 bp, Artificial Sequence
  Synthetic oligonucleotide
cgggtactctggttggaacttccacaaccg

SEQ ID NO: 85674 - DNA, 30 bp, Artificial Sequence
  Synthetic oligonucleotide
gtcaagcgaaaaaaggtgccgccccaaccg

SEQ ID NO: 85675 - DNA, 30 bp, Artificial Sequence
  Synthetic oligonucleotide
agggaaaaaggccggggctaaccagaaccg

SEQ ID NO: 85676 - DNA, 30 bp, Artificial Sequence
  Synthetic oligonucleotide
aaaacggagacttcacaatttcgcgaaccg

SEQ ID NO: 85677 - DNA, 30 bp, Artificial Sequence
  Synthetic oligonucleotide
cggagacggacgtgaacgatgaaggaaccg

SEQ ID NO: 85678 - DNA, 30 bp, Artificial Sequence
  Synthetic oligonucleotide
aaacgcgcgttaggaaaggtcagggaaccg

SEQ ID NO: 85679 - DNA, 30 bp, Artificial Sequence
  Synthetic oligonucleotide
cacagtaactgaagcatgcgttcgtaaccg

SEQ ID NO: 85680 - DNA, 30 bp, Artificial Sequence
  Synthetic oligonucleotide
ggcccacagcgtctaggccaagtcacaccg

SEQ ID NO: 85681 - DNA, 30 bp, Artificial Sequence
  Synthetic oligonucleotide
tctgatcgcacgtattagatcgggacaccg

SEQ ID NO: 85682 - DNA, 30 bp, Artificial Sequence
  Synthetic oligonucleotide
gagtattaaagagggttgtaaggtacaccg

SEQ ID NO: 85683 - DNA, 30 bp, Artificial Sequence
  Synthetic oligonucleotide
tggaactaacgcgacctttggtggtcaccg

SEQ ID NO: 85684 - DNA, 30 bp, Artificial Sequence
  Synthetic oligonucleotide
tactgtggcataatcaggacaaaacgaccg

SEQ ID NO: 85685 - DNA, 30 bp, Artificial Sequence
  Synthetic oligonucleotide
aggacatctagaccaaagctggaacgaccg

SEQ ID NO: 85686 - DNA, 30 bp, Artificial Sequence
  Synthetic oligonucleotide
caggttaccaatggagcctctggaggaccg

SEQ ID NO: 85687 - DNA, 30 bp, Artificial Sequence
  Synthetic oligonucleotide
atgttcacagcgtgaatgctcacgggaccg

SEQ ID NO: 85688 - DNA, 30 bp, Artificial Sequence
  Synthetic oligonucleotide
cactcataaaaatacgcggtttcgggaccg

SEQ ID NO: 85689 - DNA, 30 bp, Artificial Sequence
  Synthetic oligonucleotide
tatcataccgaattcgtacaaatgggaccg

SEQ ID NO: 85690 - DNA, 30 bp, Artificial Sequence
  Synthetic oligonucleotide
tcagatacggctcacgtttatacctgaccg

SEQ ID NO: 85691 - DNA, 30 bp, Artificial Sequence
  Synthetic oligonucleotide
ttcaaagtccgtcgtgagcaaggctgaccg

SEQ ID NO: 85692 - DNA, 30 bp, Artificial Sequence
  Synthetic oligonucleotide
cggaacgcccatataagggggagttgaccg

SEQ ID NO: 85693 - DNA, 30 bp, Artificial Sequence
  Synthetic oligonucleotide
tgaaccaaggcgaactatcttaagataccg

SEQ ID NO: 85694 - DNA, 30 bp, Artificial Sequence
  Synthetic oligonucleotide
tggcaccaaccgtatactggccagataccg

SEQ ID NO: 85695 - DNA, 30 bp, Artificial Sequence
  Synthetic oligonucleotide
tgtatgaaacgtgtatgtattaagctaccg

SEQ ID NO: 85696 - DNA, 30 bp, Artificial Sequence
  Synthetic oligonucleotide
acaagttgatgccggcatattaggctaccg

SEQ ID NO: 85697 - DNA, 30 bp, Artificial Sequence
  Synthetic oligonucleotide
taagtaggcatgttaaactatgacttaccg

SEQ ID NO: 85698 - DNA, 30 bp, Artificial Sequence
  Synthetic oligonucleotide
gctctggggaacggcagttgagtaaacccg

SEQ ID NO: 85699 - DNA, 30 bp, Artificial Sequence
  Synthetic oligonucleotide
ctacgtcagatgaaatttcctgacaacccg

SEQ ID NO: 85700 - DNA, 30 bp, Artificial Sequence
  Synthetic oligonucleotide
tccgacagaccacaaggcggacgcaacccg

SEQ ID NO: 85701 - DNA, 30 bp, Artificial Sequence
  Synthetic oligonucleotide
cattcctgcttaacatttccaagccacccg

SEQ ID NO: 85702 - DNA, 30 bp, Artificial Sequence
  Synthetic oligonucleotide
cgattcaagaatacaagcatgaaggacccg

SEQ ID NO: 85703 - DNA, 30 bp, Artificial Sequence
  Synthetic oligonucleotide
ctatactaggagggggaatgaagaaccccg

SEQ ID NO: 85704 - DNA, 30 bp, Artificial Sequence
  Synthetic oligonucleotide
atcggtccctgtcaatgtagaatagccccg

SEQ ID NO: 85705 - DNA, 30 bp, Artificial Sequence
  Synthetic oligonucleotide
aacgttcacgtggtcgtaagaagtgccccg

SEQ ID NO: 85706 - DNA, 30 bp, Artificial Sequence
  Synthetic oligonucleotide
gtggccccactagtggtgatagtgtccccg

SEQ ID NO: 85707 - DNA, 30 bp, Artificial Sequence
  Synthetic oligonucleotide
caccgacataagctctcatcatgcagcccg

SEQ ID NO: 85708 - DNA, 30 bp, Artificial Sequence
  Synthetic oligonucleotide
ctataacacccgtccggcgatactagcccg

SEQ ID NO: 85709 - DNA, 30 bp, Artificial Sequence
  Synthetic oligonucleotide
gagcgcataggtagtagtaggggtagcccg

SEQ ID NO: 85710 - DNA, 30 bp, Artificial Sequence
  Synthetic oligonucleotide
cgctcatgtatattggtttcgtaatgcccg

SEQ ID NO: 85711 - DNA, 30 bp, Artificial Sequence
  Synthetic oligonucleotide
ataaatgaacatgccagttttacgtgcccg

SEQ ID NO: 85712 - DNA, 30 bp, Artificial Sequence
  Synthetic oligonucleotide
ggaagagggcgtctttgacctcgaatcccg

SEQ ID NO: 85713 - DNA, 30 bp, Artificial Sequence
  Synthetic oligonucleotide
aggaagctttacccccacaccaggatcccg

SEQ ID NO: 85714 - DNA, 30 bp, Artificial Sequence
  Synthetic oligonucleotide
gacggtaccgatcaggagctggccctcccg

SEQ ID NO: 85715 - DNA, 30 bp, Artificial Sequence
  Synthetic oligonucleotide
taagatacgtcggcctcctccttgctcccg

SEQ ID NO: 85716 - DNA, 30 bp, Artificial Sequence
  Synthetic oligonucleotide
ggctaaccgtgaggcatgctttcattcccg

SEQ ID NO: 85717 - DNA, 30 bp, Artificial Sequence
  Synthetic oligonucleotide
acgaacggggctgacagcgtatttttcccg

SEQ ID NO: 85718 - DNA, 30 bp, Artificial Sequence
  Synthetic oligonucleotide
gtgcttccagtcgactaacctagtgagccg

SEQ ID NO: 85719 - DNA, 30 bp, Artificial Sequence
  Synthetic oligonucleotide
gacgcgtcatgcgtagcatcaggatagccg

SEQ ID NO: 85720 - DNA, 30 bp, Artificial Sequence
  Synthetic oligonucleotide
actaggatgcggactactttcccaacgccg

SEQ ID NO: 85721 - DNA, 30 bp, Artificial Sequence
  Synthetic oligonucleotide
taatgtactccacaagcgcactaaaggccg

SEQ ID NO: 85722 - DNA, 30 bp, Artificial Sequence
  Synthetic oligonucleotide
tatgcttaggcaaagcaggaaggaaggccg

SEQ ID NO: 85723 - DNA, 30 bp, Artificial Sequence
  Synthetic oligonucleotide
gtcagaagtccgcgatagatgaggtggccg

SEQ ID NO: 85724 - DNA, 30 bp, Artificial Sequence
  Synthetic oligonucleotide
cgttaggcggtatggcgatactattggccg

SEQ ID NO: 85725 - DNA, 30 bp, Artificial Sequence
  Synthetic oligonucleotide
ctgacactggcgaccgcggccacaatgccg

SEQ ID NO: 85726 - DNA, 30 bp, Artificial Sequence
  Synthetic oligonucleotide
gggccccaacaggctccaagattaatgccg

SEQ ID NO: 85727 - DNA, 30 bp, Artificial Sequence
  Synthetic oligonucleotide
ttaggccgatcggagatctcgaccatgccg

SEQ ID NO: 85728 - DNA, 30 bp, Artificial Sequence
  Synthetic oligonucleotide
ccactatgaagtctgtttcgaaggatgccg

SEQ ID NO: 85729 - DNA, 30 bp, Artificial Sequence
  Synthetic oligonucleotide
cacatggttttatcatcgttcgttatgccg

SEQ ID NO: 85730 - DNA, 30 bp, Artificial Sequence
  Synthetic oligonucleotide
gcagtcgtacaatcagactatgccctgccg

SEQ ID NO: 85731 - DNA, 30 bp, Artificial Sequence
  Synthetic oligonucleotide
ctcgtctaatccaaccaaataggcgtgccg

SEQ ID NO: 85732 - DNA, 30 bp, Artificial Sequence
  Synthetic oligonucleotide
ctaagtccgaaacacaattcgtaggtgccg

SEQ ID NO: 85733 - DNA, 30 bp, Artificial Sequence
  Synthetic oligonucleotide
atgggtggagtatccattgtcggggtgccg

SEQ ID NO: 85734 - DNA, 30 bp, Artificial Sequence
  Synthetic oligonucleotide
cctccggataataaggttcgcattgtgccg

SEQ ID NO: 85735 - DNA, 30 bp, Artificial Sequence
  Synthetic oligonucleotide
atcaaaggcacgctacatataccgaatccg

SEQ ID NO: 85736 - DNA, 30 bp, Artificial Sequence
  Synthetic oligonucleotide
ctacaattggcaaaacaatgtcggaatccg

SEQ ID NO: 85737 - DNA, 30 bp, Artificial Sequence
  Synthetic oligonucleotide
cgttctaaaataataaaccaatcgcatccg

SEQ ID NO: 85738 - DNA, 30 bp, Artificial Sequence
  Synthetic oligonucleotide
taagaggtcaggatctccaataatgatccg

SEQ ID NO: 85739 - DNA, 30 bp, Artificial Sequence
  Synthetic oligonucleotide
gtctacgttaccagaggtacatcgtatccg

SEQ ID NO: 85740 - DNA, 30 bp, Artificial Sequence
  Synthetic oligonucleotide
ccttggccagaccggctccagataactccg

SEQ ID NO: 85741 - DNA, 30 bp, Artificial Sequence
  Synthetic oligonucleotide
agtaacgacctctagtcttaccctactccg

SEQ ID NO: 85742 - DNA, 30 bp, Artificial Sequence
  Synthetic oligonucleotide
actgcctaacaagactgtgacgggcctccg

SEQ ID NO: 85743 - DNA, 30 bp, Artificial Sequence
  Synthetic oligonucleotide
tctctgtgggataaaagatctggagctccg

SEQ ID NO: 85744 - DNA, 30 bp, Artificial Sequence
  Synthetic oligonucleotide
ggttcaagtcatggcgtgccattagctccg

SEQ ID NO: 85745 - DNA, 30 bp, Artificial Sequence
  Synthetic oligonucleotide
gaaatagagggagcaacagagaagagtccg

SEQ ID NO: 85746 - DNA, 30 bp, Artificial Sequence
  Synthetic oligonucleotide
tgccccggcgactcccggtataaacgtccg

SEQ ID NO: 85747 - DNA, 30 bp, Artificial Sequence
  Synthetic oligonucleotide
agactcatctaaagacagataagacgtccg

SEQ ID NO: 85748 - DNA, 31 bp, Artificial Sequence
  Synthetic oligonucleotide
tatcaagttagcattgaagtactgatgtccg

SEQ ID NO: 85749 - DNA, 30 bp, Artificial Sequence
  Synthetic oligonucleotide
gatgacggtatctgttgggggctgtgtccg

SEQ ID NO: 85750 - DNA, 30 bp, Artificial Sequence
  Synthetic oligonucleotide
agaccgtggtagaggataactctgtgtccg

SEQ ID NO: 85751 - DNA, 30 bp, Artificial Sequence
  Synthetic oligonucleotide
ggcactggatacgttgcaaaagcgaaagcg

SEQ ID NO: 85752 - DNA, 30 bp, Artificial Sequence
  Synthetic oligonucleotide
cctgctggaaatgtgttcggcaggaaagcg

SEQ ID NO: 85753 - DNA, 30 bp, Artificial Sequence
  Synthetic oligonucleotide
ggagtcgggtcagaaagtttagtacaagcg

SEQ ID NO: 85754 - DNA, 30 bp, Artificial Sequence
  Synthetic oligonucleotide
gataatcccactaaaccctccgcgcaagcg

SEQ ID NO: 85755 - DNA, 30 bp, Artificial Sequence
  Synthetic oligonucleotide
atacgacaaaaacgggtgatataagaagcg

SEQ ID NO: 85756 - DNA, 30 bp, Artificial Sequence
  Synthetic oligonucleotide
tggtcggtcacttctaccatatccgaagcg

SEQ ID NO: 85757 - DNA, 30 bp, Artificial Sequence
  Synthetic oligonucleotide
atcggtgtggttagtgttcatcgtgaagcg

SEQ ID NO: 85758 - DNA, 30 bp, Artificial Sequence
  Synthetic oligonucleotide
tcttgaagatcagtgttgtggagataagcg

SEQ ID NO: 85759 - DNA, 30 bp, Artificial Sequence
  Synthetic oligonucleotide
cagtgtagcaacttccaattgcgataagcg

SEQ ID NO: 85760 - DNA, 30 bp, Artificial Sequence
  Synthetic oligonucleotide
taaccttaaaagagctgcagccggtaagcg

SEQ ID NO: 85761 - DNA, 30 bp, Artificial Sequence
  Synthetic oligonucleotide
tcgagagtagaagctcttaacgattaagcg

SEQ ID NO: 85762 - DNA, 30 bp, Artificial Sequence
  Synthetic oligonucleotide
tgggcgtcaatcattagtgcgtctacagcg

SEQ ID NO: 85763 - DNA, 30 bp, Artificial Sequence
  Synthetic oligonucleotide
tggagtcgcgactaccgcaacgaaccagcg

SEQ ID NO: 85764 - DNA, 30 bp, Artificial Sequence
  Synthetic oligonucleotide
aactaggtgtgcgagggcttatcaccagcg

SEQ ID NO: 85765 - DNA, 30 bp, Artificial Sequence
  Synthetic oligonucleotide
aaggggaagcatactggccgaggagcagcg

SEQ ID NO: 85766 - DNA, 30 bp, Artificial Sequence
  Synthetic oligonucleotide
gttcggctatggagtgagcctcgctcagcg

SEQ ID NO: 85767 - DNA, 30 bp, Artificial Sequence
  Synthetic oligonucleotide
aagagtgatgtgtatagactgctctcagcg

SEQ ID NO: 85768 - DNA, 30 bp, Artificial Sequence
  Synthetic oligonucleotide
ctgatgcctataagcccggaaccttcagcg

SEQ ID NO: 85769 - DNA, 30 bp, Artificial Sequence
  Synthetic oligonucleotide
acgtgggttcaggcgaatccttacagagcg

SEQ ID NO: 85770 - DNA, 30 bp, Artificial Sequence
  Synthetic oligonucleotide
aaaaccgttatttgccgttatcccagagcg

SEQ ID NO: 85771 - DNA, 30 bp, Artificial Sequence
  Synthetic oligonucleotide
ggacattaaggaactaacgctaatagagcg

SEQ ID NO: 85772 - DNA, 30 bp, Artificial Sequence
  Synthetic oligonucleotide
gcgcatacccaaatgaggagaagacgagcg

SEQ ID NO: 85773 - DNA, 30 bp, Artificial Sequence
  Synthetic oligonucleotide
cgtctaacacaagggttagagatccgagcg

SEQ ID NO: 85774 - DNA, 30 bp, Artificial Sequence
  Synthetic oligonucleotide
tatataaagttaactaactcacaaggagcg

SEQ ID NO: 85775 - DNA, 30 bp, Artificial Sequence
  Synthetic oligonucleotide
agtggtctggctgcccacataaacggagcg

SEQ ID NO: 85776 - DNA, 30 bp, Artificial Sequence
  Synthetic oligonucleotide
acattcaccggtcacgagtgagttggagcg

SEQ ID NO: 85777 - DNA, 30 bp, Artificial Sequence
  Synthetic oligonucleotide
ggcgccagatcggcgacgttcaactgagcg

SEQ ID NO: 85778 - DNA, 30 bp, Artificial Sequence
  Synthetic oligonucleotide
gctgtaacgtgccacagggcatgctgagcg

SEQ ID NO: 85779 - DNA, 30 bp, Artificial Sequence
  Synthetic oligonucleotide
atgattccaacggcaggatattcgtgagcg

SEQ ID NO: 85780 - DNA, 30 bp, Artificial Sequence
  Synthetic oligonucleotide
cgagcccgagcccagggcggtataatagcg

SEQ ID NO: 85781 - DNA, 30 bp, Artificial Sequence
  Synthetic oligonucleotide
attcagatacaaaggtgaggcaccatagcg

SEQ ID NO: 85782 - DNA, 30 bp, Artificial Sequence
  Synthetic oligonucleotide
atcagtgaaggtgggcatagtatactagcg

SEQ ID NO: 85783 - DNA, 30 bp, Artificial Sequence
  Synthetic oligonucleotide
gtccaaaaactacacccaaacagcctagcg

SEQ ID NO: 85784 - DNA, 30 bp, Artificial Sequence
  Synthetic oligonucleotide
aagccataagagatcggaggggcagtagcg

SEQ ID NO: 85785 - DNA, 31 bp, Artificial Sequence
  Synthetic oligonucleotide
aatgagggaccacagcgacatatcaaacgcg

SEQ ID NO: 85786 - DNA, 30 bp, Artificial Sequence
  Synthetic oligonucleotide
ctagccgtgtcacaccaaatctataacgcg

SEQ ID NO: 85787 - DNA, 29 bp, Artificial Sequence
  Synthetic oligonucleotide
agggttcggattagtactgatagcacgcg

SEQ ID NO: 85788 - DNA, 30 bp, Artificial Sequence
  Synthetic oligonucleotide
ggttgctgaactcagattgcagaggacgcg

SEQ ID NO: 85789 - DNA, 30 bp, Artificial Sequence
  Synthetic oligonucleotide
gggatcaaatgagcccccttaagatacgcg

SEQ ID NO: 85790 - DNA, 30 bp, Artificial Sequence
  Synthetic oligonucleotide
cggataagtaggtcagaacccgagtacgcg

SEQ ID NO: 85791 - DNA, 30 bp, Artificial Sequence
  Synthetic oligonucleotide
cggtcagcgtgaggcgtcccagaacccgcg

SEQ ID NO: 85792 - DNA, 30 bp, Artificial Sequence
  Synthetic oligonucleotide
cgatgcggttccgtaccagttcgagccgcg

SEQ ID NO: 85793 - DNA, 30 bp, Artificial Sequence
  Synthetic oligonucleotide
acttaggcgtatagactaccgaccgccgcg

SEQ ID NO: 85794 - DNA, 30 bp, Artificial Sequence
  Synthetic oligonucleotide
accatccgacgggagttctagtcaagcgcg

SEQ ID NO: 85795 - DNA, 30 bp, Artificial Sequence
  Synthetic oligonucleotide
tcgggctaaagattatagcattcaagcgcg

SEQ ID NO: 85796 - DNA, 30 bp, Artificial Sequence
  Synthetic oligonucleotide
ttagaccggaacgtattttagcagcgcgcg

SEQ ID NO: 85797 - DNA, 30 bp, Artificial Sequence
  Synthetic oligonucleotide
tgagtagagtaactagggggagaaggcgcg

SEQ ID NO: 85798 - DNA, 31 bp, Artificial Sequence
  Synthetic oligonucleotide
tgaaaaagccccgcctgggaactagggcgcg

SEQ ID NO: 85799 - DNA, 30 bp, Artificial Sequence
  Synthetic oligonucleotide
aaggggaggctgaggcgaagccggggcgcg

SEQ ID NO: 85800 - DNA, 30 bp, Artificial Sequence
  Synthetic oligonucleotide
taggggcatgcaatagttccggggggcgcg

SEQ ID NO: 85801 - DNA, 30 bp, Artificial Sequence
  Synthetic oligonucleotide
ccgcacctacatacctcaggccaaatcgcg

SEQ ID NO: 85802 - DNA, 30 bp, Artificial Sequence
  Synthetic oligonucleotide
gaaatgtgggtcacgattgatcaaatcgcg

SEQ ID NO: 85803 - DNA, 30 bp, Artificial Sequence
  Synthetic oligonucleotide
acggtctggatgtcactctcggaaatcgcg

SEQ ID NO: 85804 - DNA, 30 bp, Artificial Sequence
  Synthetic oligonucleotide
gatgtcgttacgcaaatggtagacatcgcg

SEQ ID NO: 85805 - DNA, 30 bp, Artificial Sequence
  Synthetic oligonucleotide
tgtgagcgtggactgccaccaggggtcgcg

SEQ ID NO: 85806 - DNA, 30 bp, Artificial Sequence
  Synthetic oligonucleotide
aggagctgtcaacacacccaaatggtcgcg

SEQ ID NO: 85807 - DNA, 30 bp, Artificial Sequence
  Synthetic oligonucleotide
gtctaaacacatgggcgactgccaaaggcg

SEQ ID NO: 85808 - DNA, 30 bp, Artificial Sequence
  Synthetic oligonucleotide
gcggtccacaggcatacagacacgaaggcg

SEQ ID NO: 85809 - DNA, 30 bp, Artificial Sequence
  Synthetic oligonucleotide
atacagtccccctacgcgcgttcgaaggcg

SEQ ID NO: 85810 - DNA, 30 bp, Artificial Sequence
  Synthetic oligonucleotide
gaagaaccgctacctttttagtggaaggcg

SEQ ID NO: 85811 - DNA, 30 bp, Artificial Sequence
  Synthetic oligonucleotide
tctccagtagtgggtcaacgaagacaggcg

SEQ ID NO: 85812 - DNA, 30 bp, Artificial Sequence
  Synthetic oligonucleotide
acgcgtattgcctagagcgggtttgaggcg

SEQ ID NO: 85813 - DNA, 30 bp, Artificial Sequence
  Synthetic oligonucleotide
tgattgacacaatgtacttacgtataggcg

SEQ ID NO: 85814 - DNA, 30 bp, Artificial Sequence
  Synthetic oligonucleotide
aaacgatgattgatgtcgaatagctaggcg

SEQ ID NO: 85815 - DNA, 30 bp, Artificial Sequence
  Synthetic oligonucleotide
ctgggggtcacttaggtgtagtaaacggcg

SEQ ID NO: 85816 - DNA, 30 bp, Artificial Sequence
  Synthetic oligonucleotide
ggcgacgctagtcctcacacgtgcacggcg

SEQ ID NO: 85817 - DNA, 30 bp, Artificial Sequence
  Synthetic oligonucleotide
agagcacgtaagagagaagacgagacggcg

SEQ ID NO: 85818 - DNA, 30 bp, Artificial Sequence
  Synthetic oligonucleotide
aagagacaacctgcgcgagagtctacggcg

SEQ ID NO: 85819 - DNA, 30 bp, Artificial Sequence
  Synthetic oligonucleotide
ctcggcggagagcataatagctaaccggcg

SEQ ID NO: 85820 - DNA, 30 bp, Artificial Sequence
  Synthetic oligonucleotide
tcgtcctaatcttgcatctgtcacccggcg

SEQ ID NO: 85821 - DNA, 30 bp, Artificial Sequence
  Synthetic oligonucleotide
aggactaatgcaataggtcttatcccggcg

SEQ ID NO: 85822 - DNA, 30 bp, Artificial Sequence
  Synthetic oligonucleotide
ttcccaaacccacgaacttggcttgcggcg

SEQ ID NO: 85823 - DNA, 30 bp, Artificial Sequence
  Synthetic oligonucleotide
gggcaggcggattgaccgaccgttgcggcg

SEQ ID NO: 85824 - DNA, 30 bp, Artificial Sequence
  Synthetic oligonucleotide
gcattcgggatggttcaaggtatgtcggcg

SEQ ID NO: 85825 - DNA, 30 bp, Artificial Sequence
  Synthetic oligonucleotide
ggattcaacgccagattgatctccagggcg

SEQ ID NO: 85826 - DNA, 30 bp, Artificial Sequence
  Synthetic oligonucleotide
gcgattagcatgactctatttacgagggcg

SEQ ID NO: 85827 - DNA, 30 bp, Artificial Sequence
  Synthetic oligonucleotide
atagtccggtggagtaggagagatagggcg

SEQ ID NO: 85828 - DNA, 30 bp, Artificial Sequence
  Synthetic oligonucleotide
gtcaagttggaatgcacatcacctagggcg

SEQ ID NO: 85829 - DNA, 30 bp, Artificial Sequence
  Synthetic oligonucleotide
ttggtgacaagaagtactatagtgcgggcg

SEQ ID NO: 85830 - DNA, 30 bp, Artificial Sequence
  Synthetic oligonucleotide
ggtattagcttggaatgaacagcgtgggcg

SEQ ID NO: 85831 - DNA, 30 bp, Artificial Sequence
  Synthetic oligonucleotide
gtaagtcaccctgatggtccaaaaatggcg

SEQ ID NO: 85832 - DNA, 30 bp, Artificial Sequence
  Synthetic oligonucleotide
gtacagtgtaactcctctggtgacatggcg

SEQ ID NO: 85833 - DNA, 30 bp, Artificial Sequence
  Synthetic oligonucleotide
gatacaaggagcaagtgctggtggatggcg

SEQ ID NO: 85834 - DNA, 30 bp, Artificial Sequence
  Synthetic oligonucleotide
tgcttctgcgtagcaagaatgtccctggcg

SEQ ID NO: 85835 - DNA, 30 bp, Artificial Sequence
  Synthetic oligonucleotide
caaaaaggggggaccggtcactcagtggcg

SEQ ID NO: 85836 - DNA, 30 bp, Artificial Sequence
  Synthetic oligonucleotide
cccggagtgagtgagtcgatcggtgtggcg

SEQ ID NO: 85837 - DNA, 30 bp, Artificial Sequence
  Synthetic oligonucleotide
taggatgtaacactgtgcaacaccttggcg

SEQ ID NO: 85838 - DNA, 30 bp, Artificial Sequence
  Synthetic oligonucleotide
agcaccactgggaaggataaacgtttggcg

SEQ ID NO: 85839 - DNA, 30 bp, Artificial Sequence
  Synthetic oligonucleotide
acgattacgatctgtaaacgctacaatgcg

SEQ ID NO: 85840 - DNA, 30 bp, Artificial Sequence
  Synthetic oligonucleotide
taaagatcggctatcactcttgtgaatgcg

SEQ ID NO: 85841 - DNA, 30 bp, Artificial Sequence
  Synthetic oligonucleotide
tcacaggtctacgttggtgggggtaatgcg

SEQ ID NO: 85842 - DNA, 30 bp, Artificial Sequence
  Synthetic oligonucleotide
acaaggattctcaccccccgttttaatgcg

SEQ ID NO: 85843 - DNA, 30 bp, Artificial Sequence
  Synthetic oligonucleotide
agatgtcgcaacgtgtataatgatcatgcg

SEQ ID NO: 85844 - DNA, 30 bp, Artificial Sequence
  Synthetic oligonucleotide
cggggaacgtccggcggttggtgctatgcg

SEQ ID NO: 85845 - DNA, 30 bp, Artificial Sequence
  Synthetic oligonucleotide
gggcaaccgagtgacttccgcccttatgcg

SEQ ID NO: 85846 - DNA, 30 bp, Artificial Sequence
  Synthetic oligonucleotide
gttgcaacgggtgcccgtaagaaaactgcg

SEQ ID NO: 85847 - DNA, 30 bp, Artificial Sequence
  Synthetic oligonucleotide
aggtagcaaatgacaaccgtcatcactgcg

SEQ ID NO: 85848 - DNA, 30 bp, Artificial Sequence
  Synthetic oligonucleotide
tggtggagtacaactcctggatatcctgcg

SEQ ID NO: 85849 - DNA, 30 bp, Artificial Sequence
  Synthetic oligonucleotide
tcatgggacatccgcgggaattaagctgcg

SEQ ID NO: 85850 - DNA, 30 bp, Artificial Sequence
  Synthetic oligonucleotide
acactacgccaagcgattaaaacagctgcg

SEQ ID NO: 85851 - DNA, 30 bp, Artificial Sequence
  Synthetic oligonucleotide
tgcgcgagacggcattataccaaggctgcg

SEQ ID NO: 85852 - DNA, 30 bp, Artificial Sequence
  Synthetic oligonucleotide
acgccaagtcatctttggcgccctgctgcg

SEQ ID NO: 85853 - DNA, 30 bp, Artificial Sequence
  Synthetic oligonucleotide
ggatctgcctcacaacttcggtagtctgcg

SEQ ID NO: 85854 - DNA, 30 bp, Artificial Sequence
  Synthetic oligonucleotide
cagatcataagctgatgtcacataagtgcg

SEQ ID NO: 85855 - DNA, 30 bp, Artificial Sequence
  Synthetic oligonucleotide
ccaacatcagcaaacgggaataacagtgcg

SEQ ID NO: 85856 - DNA, 30 bp, Artificial Sequence
  Synthetic oligonucleotide
accggtaagcgcggggcatagccgagtgcg

SEQ ID NO: 85857 - DNA, 30 bp, Artificial Sequence
  Synthetic oligonucleotide
tcaactgatgatctttgagtctcacgtgcg

SEQ ID NO: 85858 - DNA, 30 bp, Artificial Sequence
  Synthetic oligonucleotide
tttgcggagaccgatagtagagtcggtgcg

SEQ ID NO: 85859 - DNA, 30 bp, Artificial Sequence
  Synthetic oligonucleotide
tagctcacttggaaaattgatatatgtgcg

SEQ ID NO: 85860 - DNA, 30 bp, Artificial Sequence
  Synthetic oligonucleotide
tactataaggaggaaaaaggtttatgtgcg

SEQ ID NO: 85861 - DNA, 30 bp, Artificial Sequence
  Synthetic oligonucleotide
ctgcagcgaggaccatacgatcactgtgcg

SEQ ID NO: 85862 - DNA, 30 bp, Artificial Sequence
  Synthetic oligonucleotide
tacccagcgtgttaagctatgtcctgtgcg

SEQ ID NO: 85863 - DNA, 30 bp, Artificial Sequence
  Synthetic oligonucleotide
cgcgaccatcgcgaaaggatagggtgtgcg

SEQ ID NO: 85864 - DNA, 30 bp, Artificial Sequence
  Synthetic oligonucleotide
cgtgagaagtttaaaaggcaaaaaattgcg

SEQ ID NO: 85865 - DNA, 30 bp, Artificial Sequence
  Synthetic oligonucleotide
ccaagtagtcgaagtggcatctgaattgcg

SEQ ID NO: 85866 - DNA, 30 bp, Artificial Sequence
  Synthetic oligonucleotide
acggtgccagtatgtaactcagagattgcg

SEQ ID NO: 85867 - DNA, 30 bp, Artificial Sequence
  Synthetic oligonucleotide
atacaactgaggaataacgagcgcgttgcg

SEQ ID NO: 85868 - DNA, 30 bp, Artificial Sequence
  Synthetic oligonucleotide
cggtgctaggacctgtgggttgccaaatcg

SEQ ID NO: 85869 - DNA, 30 bp, Artificial Sequence
  Synthetic oligonucleotide
tgataggtgcctggtttggctctcaaatcg

SEQ ID NO: 85870 - DNA, 30 bp, Artificial Sequence
  Synthetic oligonucleotide
tacctactgccaatggcatatttcaaatcg

SEQ ID NO: 85871 - DNA, 30 bp, Artificial Sequence
  Synthetic oligonucleotide
cgaggatacgatcgaggcccccagaaatcg

SEQ ID NO: 85872 - DNA, 30 bp, Artificial Sequence
  Synthetic oligonucleotide
gtgttacccagtaaggaagtcgaacaatcg

SEQ ID NO: 85873 - DNA, 30 bp, Artificial Sequence
  Synthetic oligonucleotide
ggaaagagcttcagaactcggaacgaatcg

SEQ ID NO: 85874 - DNA, 30 bp, Artificial Sequence
  Synthetic oligonucleotide
agggggagtcagagccaggcgagataatcg

SEQ ID NO: 85875 - DNA, 30 bp, Artificial Sequence
  Synthetic oligonucleotide
tcgactccaaagctcgcttacggctaatcg

SEQ ID NO: 85876 - DNA, 30 bp, Artificial Sequence
  Synthetic oligonucleotide
cgcctcctgtcctagtaaaggggctaatcg

SEQ ID NO: 85877 - DNA, 30 bp, Artificial Sequence
  Synthetic oligonucleotide
cttgaaacatggcttagtagcgacccatcg

SEQ ID NO: 85878 - DNA, 30 bp, Artificial Sequence
  Synthetic oligonucleotide
cagagtaattgctcgttatgagtggcatcg

SEQ ID NO: 85879 - DNA, 30 bp, Artificial Sequence
  Synthetic oligonucleotide
agcttcgtagttttaaaggtggaatcatcg

SEQ ID NO: 85880 - DNA, 30 bp, Artificial Sequence
  Synthetic oligonucleotide
aataaggaggaggcggccattagctcatcg

SEQ ID NO: 85881 - DNA, 30 bp, Artificial Sequence
  Synthetic oligonucleotide
aggctagtagtggaacaccattcgtcatcg

SEQ ID NO: 85882 - DNA, 30 bp, Artificial Sequence
  Synthetic oligonucleotide
gcgctataactcgagagttaaggttcatcg

SEQ ID NO: 85883 - DNA, 30 bp, Artificial Sequence
  Synthetic oligonucleotide
cttcgtaggatataccaatagcgaagatcg

SEQ ID NO: 85884 - DNA, 30 bp, Artificial Sequence
  Synthetic oligonucleotide
cgcgatcactaggcgtatgcaacgagatcg

SEQ ID NO: 85885 - DNA, 30 bp, Artificial Sequence
  Synthetic oligonucleotide
cggtagttcgcggatacaacggttagatcg

SEQ ID NO: 85886 - DNA, 30 bp, Artificial Sequence
  Synthetic oligonucleotide
cattggttcgagatccggctagcccgatcg

SEQ ID NO: 85887 - DNA, 30 bp, Artificial Sequence
  Synthetic oligonucleotide
cccgcatagaaggcaaccactcatggatcg

SEQ ID NO: 85888 - DNA, 30 bp, Artificial Sequence
  Synthetic oligonucleotide
atcaggcatcaacggccagcagaatgatcg

SEQ ID NO: 85889 - DNA, 30 bp, Artificial Sequence
  Synthetic oligonucleotide
gtgagaaatgggataacagtgacctgatcg

SEQ ID NO: 85890 - DNA, 30 bp, Artificial Sequence
  Synthetic oligonucleotide
acccgagagcgtagctcctttagcatatcg

SEQ ID NO: 85891 - DNA, 30 bp, Artificial Sequence
  Synthetic oligonucleotide
gccaggacagggacacaggctcctatatcg

SEQ ID NO: 85892 - DNA, 30 bp, Artificial Sequence
  Synthetic oligonucleotide
agatactgacaacgtcattcatccctatcg

SEQ ID NO: 85893 - DNA, 30 bp, Artificial Sequence
  Synthetic oligonucleotide
gtcgagtacgtgaaacactcacacgtatcg

SEQ ID NO: 85894 - DNA, 30 bp, Artificial Sequence
  Synthetic oligonucleotide
gcaacctcaacgagcgggtaatctttatcg

SEQ ID NO: 85895 - DNA, 30 bp, Artificial Sequence
  Synthetic oligonucleotide
ctcggctcacttggaaacacgcttttatcg

SEQ ID NO: 85896 - DNA, 30 bp, Artificial Sequence
  Synthetic oligonucleotide
catagtaatttgtggtcatttgggaactcg

SEQ ID NO: 85897 - DNA, 30 bp, Artificial Sequence
  Synthetic oligonucleotide
gaacattacagccaggcttcccatcactcg

SEQ ID NO: 85898 - DNA, 30 bp, Artificial Sequence
  Synthetic oligonucleotide
ggcaccaacatgaccgactcctatcactcg

SEQ ID NO: 85899 - DNA, 30 bp, Artificial Sequence
  Synthetic oligonucleotide
ctgccgtcagtgaatttactccaagactcg

SEQ ID NO: 85900 - DNA, 30 bp, Artificial Sequence
  Synthetic oligonucleotide
accagagggcattagtcacgagccgactcg

SEQ ID NO: 85901 - DNA, 30 bp, Artificial Sequence
  Synthetic oligonucleotide
tccacacacgtgacaatgagataggactcg

SEQ ID NO: 85902 - DNA, 30 bp, Artificial Sequence
  Synthetic oligonucleotide
tgcctagaagttcaagagacacaatactcg

SEQ ID NO: 85903 - DNA, 30 bp, Artificial Sequence
  Synthetic oligonucleotide
tacttctgtcggcattatctctcaacctcg

SEQ ID NO: 85904 - DNA, 30 bp, Artificial Sequence
  Synthetic oligonucleotide
acgaataagagttttcgtaatataacctcg

SEQ ID NO: 85905 - DNA, 30 bp, Artificial Sequence
  Synthetic oligonucleotide
tgtcactgccagtccaactgcgccacctcg

SEQ ID NO: 85906 - DNA, 30 bp, Artificial Sequence
  Synthetic oligonucleotide
gtctcaaaggagcgagttgcatctacctcg

SEQ ID NO: 85907 - DNA, 30 bp, Artificial Sequence
  Synthetic oligonucleotide
ggtcaagataccccatgaactattccctcg

SEQ ID NO: 85908 - DNA, 30 bp, Artificial Sequence
  Synthetic oligonucleotide
gacttgatgggaatggactcgagagcctcg

SEQ ID NO: 85909 - DNA, 30 bp, Artificial Sequence
  Synthetic oligonucleotide
aaaatcgtaggaaaaacgacctccgcctcg

SEQ ID NO: 85910 - DNA, 30 bp, Artificial Sequence
  Synthetic oligonucleotide
tgcaacagttgcagagggttcacggcctcg

SEQ ID NO: 85911 - DNA, 30 bp, Artificial Sequence
  Synthetic oligonucleotide
cgcggttttgcttgttgcctagagtcctcg

SEQ ID NO: 85912 - DNA, 30 bp, Artificial Sequence
  Synthetic oligonucleotide
cggtaaagaatgcatggcgcgacttcctcg

SEQ ID NO: 85913 - DNA, 30 bp, Artificial Sequence
  Synthetic oligonucleotide
atcgtgacaaacgagttagcagccagctcg

SEQ ID NO: 85914 - DNA, 30 bp, Artificial Sequence
  Synthetic oligonucleotide
tggatcagcgggctcaaaggtgctggctcg

SEQ ID NO: 85915 - DNA, 30 bp, Artificial Sequence
  Synthetic oligonucleotide
gacatagagcaaccaaagtcaaagtgctcg

SEQ ID NO: 85916 - DNA, 30 bp, Artificial Sequence
  Synthetic oligonucleotide
tagtgtcccacgaatagcattgtgatctcg

SEQ ID NO: 85917 - DNA, 30 bp, Artificial Sequence
  Synthetic oligonucleotide
acgcgggagggaacaccgcgagggctctcg

SEQ ID NO: 85918 - DNA, 30 bp, Artificial Sequence
  Synthetic oligonucleotide
tgagcgattgttcgctgaagccttgtctcg

SEQ ID NO: 85919 - DNA, 30 bp, Artificial Sequence
  Synthetic oligonucleotide
ggatgggcagagagtcacaaactattctcg

SEQ ID NO: 85920 - DNA, 30 bp, Artificial Sequence
  Synthetic oligonucleotide
agactgcagtatggggatcaactaaagtcg

SEQ ID NO: 85921 - DNA, 30 bp, Artificial Sequence
  Synthetic oligonucleotide
ggcgtcagacttaatatcacaggcaagtcg

SEQ ID NO: 85922 - DNA, 30 bp, Artificial Sequence
  Synthetic oligonucleotide
ccgaaaccacggtattccgtgccacagtcg

SEQ ID NO: 85923 - DNA, 30 bp, Artificial Sequence
  Synthetic oligonucleotide
tgtgaacggatgttgtgtgatccgcagtcg

SEQ ID NO: 85924 - DNA, 30 bp, Artificial Sequence
  Synthetic oligonucleotide
ggaaattctgtttgaacaggtgccgagtcg

SEQ ID NO: 85925 - DNA, 30 bp, Artificial Sequence
  Synthetic oligonucleotide
cttgtaatttcgtggaacccccgcgagtcg

SEQ ID NO: 85926 - DNA, 30 bp, Artificial Sequence
  Synthetic oligonucleotide
aggagccctgcaaaaatccacctggagtcg

SEQ ID NO: 85927 - DNA, 30 bp, Artificial Sequence
  Synthetic oligonucleotide
cttatagcgctgtcgaaaaacggtgagtcg

SEQ ID NO: 85928 - DNA, 30 bp, Artificial Sequence
  Synthetic oligonucleotide
caagactaacggctcagcatgcggtagtcg

SEQ ID NO: 85929 - DNA, 30 bp, Artificial Sequence
  Synthetic oligonucleotide
accggacatgtgctgtaaataaacacgtcg

SEQ ID NO: 85930 - DNA, 30 bp, Artificial Sequence
  Synthetic oligonucleotide
cgggaggagaatcttccgtaaatcacgtcg

SEQ ID NO: 85931 - DNA, 30 bp, Artificial Sequence
  Synthetic oligonucleotide
acctcaagagaagccatatacaatacgtcg

SEQ ID NO: 85932 - DNA, 30 bp, Artificial Sequence
  Synthetic oligonucleotide
tcgagcgagcctgtcctcacggatacgtcg

SEQ ID NO: 85933 - DNA, 30 bp, Artificial Sequence
  Synthetic oligonucleotide
aagcgggactgagtacttccatatacgtcg

SEQ ID NO: 85934 - DNA, 30 bp, Artificial Sequence
  Synthetic oligonucleotide
ttataagcgcgtgagtgaagtccaccgtcg

SEQ ID NO: 85935 - DNA, 30 bp, Artificial Sequence
  Synthetic oligonucleotide
atatgacacctagatttcggactaccgtcg

SEQ ID NO: 85936 - DNA, 30 bp, Artificial Sequence
  Synthetic oligonucleotide
ataattaagggtcgagtaatatcgccgtcg

SEQ ID NO: 85937 - DNA, 30 bp, Artificial Sequence
  Synthetic oligonucleotide
gacggcatcagaacaaacgtgcaagcgtcg

SEQ ID NO: 85938 - DNA, 30 bp, Artificial Sequence
  Synthetic oligonucleotide
ttgtcaaaaaaattaaacgtaagaaggtcg

SEQ ID NO: 85939 - DNA, 31 bp, Artificial Sequence
  Synthetic oligonucleotide
ataaggggctcatacaacctccagcaggtcg

SEQ ID NO: 85940 - DNA, 30 bp, Artificial Sequence
  Synthetic oligonucleotide
cgggttgccgctcagtataactcgaggtcg

SEQ ID NO: 85941 - DNA, 30 bp, Artificial Sequence
  Synthetic oligonucleotide
atgtcgaggaatgaaggtattagacggtcg

SEQ ID NO: 85942 - DNA, 30 bp, Artificial Sequence
  Synthetic oligonucleotide
actaacggggtcattaccttaagccggtcg

SEQ ID NO: 85943 - DNA, 30 bp, Artificial Sequence
  Synthetic oligonucleotide
acgtatgggtatgttatggagaaagggtcg

SEQ ID NO: 85944 - DNA, 30 bp, Artificial Sequence
  Synthetic oligonucleotide
cggctaatcaaccataaggttatagggtcg

SEQ ID NO: 85945 - DNA, 30 bp, Artificial Sequence
  Synthetic oligonucleotide
agaaaaaaggaatcgtggaggcgcgggtcg

SEQ ID NO: 85946 - DNA, 30 bp, Artificial Sequence
  Synthetic oligonucleotide
tccgtgtgtgaggggcgtagtctcgggtcg

SEQ ID NO: 85947 - DNA, 30 bp, Artificial Sequence
  Synthetic oligonucleotide
taacaatgtcgggaaaatatcttcgggtcg

SEQ ID NO: 85948 - DNA, 30 bp, Artificial Sequence
  Synthetic oligonucleotide
taaggcacttcaggtgagcggggggggtcg

SEQ ID NO: 85949 - DNA, 30 bp, Artificial Sequence
  Synthetic oligonucleotide
gaggtctgaaggggttaacaaaattggtcg

SEQ ID NO: 85950 - DNA, 30 bp, Artificial Sequence
  Synthetic oligonucleotide
cagagcctgatggatagtgtttatatgtcg

SEQ ID NO: 85951 - DNA, 30 bp, Artificial Sequence
  Synthetic oligonucleotide
tacccatcgtttccgcctggaatactgtcg

SEQ ID NO: 85952 - DNA, 30 bp, Artificial Sequence
  Synthetic oligonucleotide
taacgcataggggtaatagccatactgtcg

SEQ ID NO: 85953 - DNA, 30 bp, Artificial Sequence
  Synthetic oligonucleotide
gctgacgtgttgacgggcgaaacggtgtcg

SEQ ID NO: 85954 - DNA, 30 bp, Artificial Sequence
  Synthetic oligonucleotide
agatatagagaggttaagccggaattgtcg

SEQ ID NO: 85955 - DNA, 30 bp, Artificial Sequence
  Synthetic oligonucleotide
tacacgtgtcaaagcaagacagacttgtcg

SEQ ID NO: 85956 - DNA, 30 bp, Artificial Sequence
  Synthetic oligonucleotide
agtccccacggcacagggggctaaaattcg

SEQ ID NO: 85957 - DNA, 30 bp, Artificial Sequence
  Synthetic oligonucleotide
cgagaggttttgttaaggcaccaagattcg

SEQ ID NO: 85958 - DNA, 30 bp, Artificial Sequence
  Synthetic oligonucleotide
atacacatagaaatatatcgagaagattcg

SEQ ID NO: 85959 - DNA, 30 bp, Artificial Sequence
  Synthetic oligonucleotide
gattcgtcaaagctcgtgtgggcagattcg

SEQ ID NO: 85960 - DNA, 30 bp, Artificial Sequence
  Synthetic oligonucleotide
attgactgaattcaaaccatactagattcg

SEQ ID NO: 85961 - DNA, 30 bp, Artificial Sequence
  Synthetic oligonucleotide
ggaccacaggtgtatcttcggagcgattcg

SEQ ID NO: 85962 - DNA, 30 bp, Artificial Sequence
  Synthetic oligonucleotide
atgttaccgtagagaggagctaccacttcg

SEQ ID NO: 85963 - DNA, 30 bp, Artificial Sequence
  Synthetic oligonucleotide
agggatccaaaagattagggatcgccttcg

SEQ ID NO: 85964 - DNA, 30 bp, Artificial Sequence
  Synthetic oligonucleotide
cacccggctaaggcggagacccgtgcttcg

SEQ ID NO: 85965 - DNA, 30 bp, Artificial Sequence
  Synthetic oligonucleotide
gaacggtcgccacaccatggtcaatcttcg

SEQ ID NO: 85966 - DNA, 30 bp, Artificial Sequence
  Synthetic oligonucleotide
tgtcgcgacaagcttcgaacaacatcttcg

SEQ ID NO: 85967 - DNA, 30 bp, Artificial Sequence
  Synthetic oligonucleotide
cgggtaattgtaagattgtctcgaagttcg

SEQ ID NO: 85968 - DNA, 30 bp, Artificial Sequence
  Synthetic oligonucleotide
catcgctgtagtagtaaagaattaagttcg

SEQ ID NO: 85969 - DNA, 30 bp, Artificial Sequence
  Synthetic oligonucleotide
cacaagcacattacatactagtacagttcg

SEQ ID NO: 85970 - DNA, 30 bp, Artificial Sequence
  Synthetic oligonucleotide
ttgagttaactggaatgatgagtcagttcg

SEQ ID NO: 85971 - DNA, 30 bp, Artificial Sequence
  Synthetic oligonucleotide
ccaagtacaggggcgagcgcgtgtagttcg

SEQ ID NO: 85972 - DNA, 30 bp, Artificial Sequence
  Synthetic oligonucleotide
tatcggtaaatcggtgttactaaaggttcg

SEQ ID NO: 85973 - DNA, 30 bp, Artificial Sequence
  Synthetic oligonucleotide
ggcagatggagtagttcatgtcgaggttcg

SEQ ID NO: 85974 - DNA, 30 bp, Artificial Sequence
  Synthetic oligonucleotide
cagagaattacaccaatccagatcggttcg

SEQ ID NO: 85975 - DNA, 30 bp, Artificial Sequence
  Synthetic oligonucleotide
tcgggagttagcgggcaacaaaagggttcg

SEQ ID NO: 85976 - DNA, 30 bp, Artificial Sequence
  Synthetic oligonucleotide
gggttgggagaaagacacttttcatgttcg

SEQ ID NO: 85977 - DNA, 30 bp, Artificial Sequence
  Synthetic oligonucleotide
cggctcgggtcatgtgaaacgttctgttcg

SEQ ID NO: 85978 - DNA, 30 bp, Artificial Sequence
  Synthetic oligonucleotide
cgggtgctccatgaaatgctaaagtgttcg

SEQ ID NO: 85979 - DNA, 30 bp, Artificial Sequence
  Synthetic oligonucleotide
tgataggacattagaataacctcttgttcg

SEQ ID NO: 85980 - DNA, 30 bp, Artificial Sequence
  Synthetic oligonucleotide
cgggatgtagggcagtatcaataaatttcg

SEQ ID NO: 85981 - DNA, 30 bp, Artificial Sequence
  Synthetic oligonucleotide
cggcgatggaacagggcgagaaccctttcg

SEQ ID NO: 85982 - DNA, 30 bp, Artificial Sequence
  Synthetic oligonucleotide
tcctagaatcaaataagaaacggcgtttcg

SEQ ID NO: 85983 - DNA, 30 bp, Artificial Sequence
  Synthetic oligonucleotide
caggcctgcgcccatcgcgatttcaaaagg

SEQ ID NO: 85984 - DNA, 30 bp, Artificial Sequence
  Synthetic oligonucleotide
tgcatcgctgctaaatgaggcgggaaaagg

SEQ ID NO: 85985 - DNA, 30 bp, Artificial Sequence
  Synthetic oligonucleotide
gggaattcgatcaacgagtctattaaaagg

SEQ ID NO: 85986 - DNA, 30 bp, Artificial Sequence
  Synthetic oligonucleotide
agcgacatatgctagaacaaagtgcaaagg

SEQ ID NO: 85987 - DNA, 30 bp, Artificial Sequence
  Synthetic oligonucleotide
catgaataaactcgaccagtcagtcaaagg

SEQ ID NO: 85988 - DNA, 30 bp, Artificial Sequence
  Synthetic oligonucleotide
caaggcttgcacttgtatctgccagaaagg

SEQ ID NO: 85989 - DNA, 30 bp, Artificial Sequence
  Synthetic oligonucleotide
gtaacaatggccggagaaggggccgaaagg

SEQ ID NO: 85990 - DNA, 30 bp, Artificial Sequence
  Synthetic oligonucleotide
gcgtacgtcgtacggtattagcaggaaagg

SEQ ID NO: 85991 - DNA, 30 bp, Artificial Sequence
  Synthetic oligonucleotide
gcgtaagccccgcagaggttaactgaaagg

SEQ ID NO: 85992 - DNA, 30 bp, Artificial Sequence
  Synthetic oligonucleotide
gtcaacggaacaaatacgccggctgaaagg

SEQ ID NO: 85993 - DNA, 30 bp, Artificial Sequence
  Synthetic oligonucleotide
gcaagcaaagtacgaaccccgagctaaagg

SEQ ID NO: 85994 - DNA, 30 bp, Artificial Sequence
  Synthetic oligonucleotide
tacggtgtagcagaagcgaacccgtaaagg

SEQ ID NO: 85995 - DNA, 30 bp, Artificial Sequence
  Synthetic oligonucleotide
gtaataatataactttccgaaaccacaagg

SEQ ID NO: 85996 - DNA, 30 bp, Artificial Sequence
  Synthetic oligonucleotide
ttacgtgaatcgatgagtctcttcacaagg

SEQ ID NO: 85997 - DNA, 30 bp, Artificial Sequence
  Synthetic oligonucleotide
gtcaggatccacgtatcgtgcttgacaagg

SEQ ID NO: 85998 - DNA, 30 bp, Artificial Sequence
  Synthetic oligonucleotide
tggtgaagggtagaaggccacggtacaagg

SEQ ID NO: 85999 - DNA, 30 bp, Artificial Sequence
  Synthetic oligonucleotide
ggtgtaaaagcccaacgagggcttacaagg

SEQ ID NO: 86000 - DNA, 30 bp, Artificial Sequence
  Synthetic oligonucleotide
gggacgaggcgttaatgccaacgagcaagg

SEQ ID NO: 86001 - DNA, 30 bp, Artificial Sequence
  Synthetic oligonucleotide
ggaaggtttagtaatgtgacattcgcaagg

SEQ ID NO: 86002 - DNA, 30 bp, Artificial Sequence
  Synthetic oligonucleotide
gaggacagggggatagtacccatatcaagg

SEQ ID NO: 86003 - DNA, 30 bp, Artificial Sequence
  Synthetic oligonucleotide
agatcgcaacatagtatgcaaaacagaagg

SEQ ID NO: 86004 - DNA, 30 bp, Artificial Sequence
  Synthetic oligonucleotide
tcgctagggctaccgatacggccgagaagg

SEQ ID NO: 86005 - DNA, 30 bp, Artificial Sequence
  Synthetic oligonucleotide
gctgggatggacgacggagggaaccgaagg

SEQ ID NO: 86006 - DNA, 30 bp, Artificial Sequence
  Synthetic oligonucleotide
gattgcccatcaaccgactccaggcgaagg

SEQ ID NO: 86007 - DNA, 30 bp, Artificial Sequence
  Synthetic oligonucleotide
gtcgaccgaccactacgtgggtctcgaagg

SEQ ID NO: 86008 - DNA, 30 bp, Artificial Sequence
  Synthetic oligonucleotide
cagggcggctatagtctgcgaataggaagg

SEQ ID NO: 86009 - DNA, 30 bp, Artificial Sequence
  Synthetic oligonucleotide
ggagtagtaaacggtcgtgttgccggaagg

SEQ ID NO: 86010 - DNA, 30 bp, Artificial Sequence
  Synthetic oligonucleotide
cgctaacagggacaaggtcggtccggaagg

SEQ ID NO: 86011 - DNA, 30 bp, Artificial Sequence
  Synthetic oligonucleotide
gagcacccctagtagcaatatacgggaagg

SEQ ID NO: 86012 - DNA, 30 bp, Artificial Sequence
  Synthetic oligonucleotide
atgatacgtgctatgagatgttatggaagg

SEQ ID NO: 86013 - DNA, 30 bp, Artificial Sequence
  Synthetic oligonucleotide
cgtattgtgaatccaaagcctattggaagg

SEQ ID NO: 86014 - DNA, 30 bp, Artificial Sequence
  Synthetic oligonucleotide
gcgcagggagaacactgtcacttatgaagg

SEQ ID NO: 86015 - DNA, 30 bp, Artificial Sequence
  Synthetic oligonucleotide
cagaaagcgtttcgaatgcggacgtgaagg

SEQ ID NO: 86016 - DNA, 30 bp, Artificial Sequence
  Synthetic oligonucleotide
gggtacccgttaatcacattcaggtgaagg

SEQ ID NO: 86017 - DNA, 30 bp, Artificial Sequence
  Synthetic oligonucleotide
acataactaaattcaggtgtacgcataagg

SEQ ID NO: 86018 - DNA, 30 bp, Artificial Sequence
  Synthetic oligonucleotide
cgacacgcagggcatcaagtctggctaagg

SEQ ID NO: 86019 - DNA, 30 bp, Artificial Sequence
  Synthetic oligonucleotide
tgcctccaaacaactatgcgtgtagtaagg

SEQ ID NO: 86020 - DNA, 30 bp, Artificial Sequence
  Synthetic oligonucleotide
aataacgcgtgagcgtacggaaacgtaagg

SEQ ID NO: 86021 - DNA, 30 bp, Artificial Sequence
  Synthetic oligonucleotide
ttgaggattggcctccactgtcgcgtaagg

SEQ ID NO: 86022 - DNA, 30 bp, Artificial Sequence
  Synthetic oligonucleotide
cacggtaggcgctacttaaacgaggtaagg

SEQ ID NO: 86023 - DNA, 29 bp, Artificial Sequence
  Synthetic oligonucleotide
gcgctgcggatgatattgaccaattaagg

SEQ ID NO: 86024 - DNA, 30 bp, Artificial Sequence
  Synthetic oligonucleotide
gctgcaaggagatggattccgtcattaagg

SEQ ID NO: 86025 - DNA, 30 bp, Artificial Sequence
  Synthetic oligonucleotide
atataaactccgtccctctgcttcaacagg

SEQ ID NO: 86026 - DNA, 30 bp, Artificial Sequence
  Synthetic oligonucleotide
tttagacgtcacatcatcattaagaacagg

SEQ ID NO: 86027 - DNA, 30 bp, Artificial Sequence
  Synthetic oligonucleotide
aacgtgcactcttggaactgcgctaacagg

SEQ ID NO: 86028 - DNA, 30 bp, Artificial Sequence
  Synthetic oligonucleotide
ggggatttaacggcctaggtgcaacacagg

SEQ ID NO: 86029 - DNA, 30 bp, Artificial Sequence
  Synthetic oligonucleotide
catatctcacaaggtaaggaagcgcacagg

SEQ ID NO: 86030 - DNA, 30 bp, Artificial Sequence
  Synthetic oligonucleotide
agtgctggttggtaaccagaagggcacagg

SEQ ID NO: 86031 - DNA, 30 bp, Artificial Sequence
  Synthetic oligonucleotide
cacacaggactcgcgtgtaacacagacagg

SEQ ID NO: 86032 - DNA, 30 bp, Artificial Sequence
  Synthetic oligonucleotide
actgagcagcaatgctggctgcgatacagg

SEQ ID NO: 86033 - DNA, 30 bp, Artificial Sequence
  Synthetic oligonucleotide
ggttgagagatgattaatgaacagaccagg

SEQ ID NO: 86034 - DNA, 30 bp, Artificial Sequence
  Synthetic oligonucleotide
atcgaacttgcgtacacgtggggacccagg

SEQ ID NO: 86035 - DNA, 30 bp, Artificial Sequence
  Synthetic oligonucleotide
gcggaaatgcttcatggccgaggtcccagg

SEQ ID NO: 86036 - DNA, 30 bp, Artificial Sequence
  Synthetic oligonucleotide
cttcgcgcggtcggttgcgtatcagccagg

SEQ ID NO: 86037 - DNA, 30 bp, Artificial Sequence
  Synthetic oligonucleotide
gtggagtttttcatcgcttttttatccagg

SEQ ID NO: 86038 - DNA, 30 bp, Artificial Sequence
  Synthetic oligonucleotide
ttacatcagccccgtagttgaaggtccagg

SEQ ID NO: 86039 - DNA, 30 bp, Artificial Sequence
  Synthetic oligonucleotide
aaataatataccaaactcagagattccagg

SEQ ID NO: 86040 - DNA, 30 bp, Artificial Sequence
  Synthetic oligonucleotide
ctgtccgggtcatcctaagccagaagcagg

SEQ ID NO: 86041 - DNA, 30 bp, Artificial Sequence
  Synthetic oligonucleotide
ggttgagcgggcactgaacccataagcagg

SEQ ID NO: 86042 - DNA, 30 bp, Artificial Sequence
  Synthetic oligonucleotide
ggaggtggcacgtgccacaatatccgcagg

SEQ ID NO: 86043 - DNA, 30 bp, Artificial Sequence
  Synthetic oligonucleotide
cggaaaatagggcaagaggaggtgcgcagg

SEQ ID NO: 86044 - DNA, 30 bp, Artificial Sequence
  Synthetic oligonucleotide
ggcctcacgaagcgcatgcgcaaaggcagg

SEQ ID NO: 86045 - DNA, 30 bp, Artificial Sequence
  Synthetic oligonucleotide
gcaatcggggaagcctgttagataggcagg

SEQ ID NO: 86046 - DNA, 30 bp, Artificial Sequence
  Synthetic oligonucleotide
gaggaaagtaatataccgcgagctggcagg

SEQ ID NO: 86047 - DNA, 30 bp, Artificial Sequence
  Synthetic oligonucleotide
acggggcatctacgctcccggatgtgcagg

SEQ ID NO: 86048 - DNA, 30 bp, Artificial Sequence
  Synthetic oligonucleotide
tgctaatgccggtcttgtttggggctcagg

SEQ ID NO: 86049 - DNA, 30 bp, Artificial Sequence
  Synthetic oligonucleotide
atggccccaaatgggtacagtcaagtcagg

SEQ ID NO: 86050 - DNA, 30 bp, Artificial Sequence
  Synthetic oligonucleotide
catgtacaaaacagtgaccaaagagtcagg

SEQ ID NO: 86051 - DNA, 30 bp, Artificial Sequence
  Synthetic oligonucleotide
tgggtcacgacgtcacgccgaaaggtcagg

SEQ ID NO: 86052 - DNA, 30 bp, Artificial Sequence
  Synthetic oligonucleotide
ttcttatgaattgacgaaaggataaagagg

SEQ ID NO: 86053 - DNA, 30 bp, Artificial Sequence
  Synthetic oligonucleotide
taatgagggacatccctcttacggaagagg

SEQ ID NO: 86054 - DNA, 30 bp, Artificial Sequence
  Synthetic oligonucleotide
agctgtgcgaagccaatcatggcgcagagg

SEQ ID NO: 86055 - DNA, 30 bp, Artificial Sequence
  Synthetic oligonucleotide
acaatcgcgtagttgtggaatcatcagagg

SEQ ID NO: 86056 - DNA, 30 bp, Artificial Sequence
  Synthetic oligonucleotide
ctgcggtagcgttacgttgcaggagagagg

SEQ ID NO: 86057 - DNA, 30 bp, Artificial Sequence
  Synthetic oligonucleotide
tcgaggataggatgcccagcctacgagagg

SEQ ID NO: 86058 - DNA, 30 bp, Artificial Sequence
  Synthetic oligonucleotide
gtagagttcaggagagagtagtactagagg

SEQ ID NO: 86059 - DNA, 30 bp, Artificial Sequence
  Synthetic oligonucleotide
tccgaaactcgctttgtagatccctagagg

SEQ ID NO: 86060 - DNA, 30 bp, Artificial Sequence
  Synthetic oligonucleotide
gcagacagtgcacaggacatttcctagagg

SEQ ID NO: 86061 - DNA, 30 bp, Artificial Sequence
  Synthetic oligonucleotide
ataagacggacaggaagttctcattagagg

SEQ ID NO: 86062 - DNA, 30 bp, Artificial Sequence
  Synthetic oligonucleotide
cacgaattcgggtacatggggacaacgagg

SEQ ID NO: 86063 - DNA, 30 bp, Artificial Sequence
  Synthetic oligonucleotide
cgcggaggtagtctcgctcattcaacgagg

SEQ ID NO: 86064 - DNA, 30 bp, Artificial Sequence
  Synthetic oligonucleotide
tccgcggatgggagatattgcgtgacgagg

SEQ ID NO: 86065 - DNA, 30 bp, Artificial Sequence
  Synthetic oligonucleotide
cggcgtcaaatgaacaggtgaggcccgagg

SEQ ID NO: 86066 - DNA, 30 bp, Artificial Sequence
  Synthetic oligonucleotide
tcgcagtacaaaatagcagtagctccgagg

SEQ ID NO: 86067 - DNA, 30 bp, Artificial Sequence
  Synthetic oligonucleotide
agtccggaataataggcatccgcatcgagg

SEQ ID NO: 86068 - DNA, 30 bp, Artificial Sequence
  Synthetic oligonucleotide
agcaaatcgggtacttccttggcgtcgagg

SEQ ID NO: 86069 - DNA, 30 bp, Artificial Sequence
  Synthetic oligonucleotide
gaagaagtggacatgatccctcggtcgagg

SEQ ID NO: 86070 - DNA, 30 bp, Artificial Sequence
  Synthetic oligonucleotide
ttgtggaaaccacgcctattgatttcgagg

SEQ ID NO: 86071 - DNA, 30 bp, Artificial Sequence
  Synthetic oligonucleotide
acttgacaggccgtcttgaattacaggagg

SEQ ID NO: 86072 - DNA, 30 bp, Artificial Sequence
  Synthetic oligonucleotide
tggagcactacactgtctcccaagaggagg

SEQ ID NO: 86073 - DNA, 30 bp, Artificial Sequence
  Synthetic oligonucleotide
tgacctaagatgagctaatggaataggagg

SEQ ID NO: 86074 - DNA, 30 bp, Artificial Sequence
  Synthetic oligonucleotide
gcggacggctgacttgtatagatctggagg

SEQ ID NO: 86075 - DNA, 30 bp, Artificial Sequence
  Synthetic oligonucleotide
gcaaacggtccgctggtgtcttcaatgagg

SEQ ID NO: 86076 - DNA, 30 bp, Artificial Sequence
  Synthetic oligonucleotide
ttggagggatcggtattggtcataatgagg

SEQ ID NO: 86077 - DNA, 30 bp, Artificial Sequence
  Synthetic oligonucleotide
gcagggtcagatgaagaatggataatgagg

SEQ ID NO: 86078 - DNA, 30 bp, Artificial Sequence
  Synthetic oligonucleotide
ctagaacctcggtagttagcaaggatgagg

SEQ ID NO: 86079 - DNA, 30 bp, Artificial Sequence
  Synthetic oligonucleotide
tcgtttgagttctcgatccggatgatgagg

SEQ ID NO: 86080 - DNA, 30 bp, Artificial Sequence
  Synthetic oligonucleotide
ttcgaccgaccatgtttgatcatactgagg

SEQ ID NO: 86081 - DNA, 30 bp, Artificial Sequence
  Synthetic oligonucleotide
gcaacatgcaagagttttgccccgctgagg

SEQ ID NO: 86082 - DNA, 30 bp, Artificial Sequence
  Synthetic oligonucleotide
gtagaacttctattccagagtggggtgagg

SEQ ID NO: 86083 - DNA, 30 bp, Artificial Sequence
  Synthetic oligonucleotide
cgtctagtgggcccgcgagtacggttgagg

SEQ ID NO: 86084 - DNA, 30 bp, Artificial Sequence
  Synthetic oligonucleotide
actggcagaagaaacccaactgggttgagg

SEQ ID NO: 86085 - DNA, 30 bp, Artificial Sequence
  Synthetic oligonucleotide
aaatcagctgtctcctgtgcgaagaatagg

SEQ ID NO: 86086 - DNA, 30 bp, Artificial Sequence
  Synthetic oligonucleotide
tagaaagttaattcgagtcgcctgaatagg

SEQ ID NO: 86087 - DNA, 30 bp, Artificial Sequence
  Synthetic oligonucleotide
cggattaccggcgggtgtagtcgacatagg

SEQ ID NO: 86088 - DNA, 30 bp, Artificial Sequence
  Synthetic oligonucleotide
gcatgtcggtggtccgtaacgttccatagg

SEQ ID NO: 86089 - DNA, 30 bp, Artificial Sequence
  Synthetic oligonucleotide
cgacatgcggtgggattttgggttcatagg

SEQ ID NO: 86090 - DNA, 30 bp, Artificial Sequence
  Synthetic oligonucleotide
caagctcagatagaattcataacggatagg

SEQ ID NO: 86091 - DNA, 30 bp, Artificial Sequence
  Synthetic oligonucleotide
acggatatatcgtcggttagctgggatagg

SEQ ID NO: 86092 - DNA, 30 bp, Artificial Sequence
  Synthetic oligonucleotide
gcttcagatggtacagaactatgtgatagg

SEQ ID NO: 86093 - DNA, 30 bp, Artificial Sequence
  Synthetic oligonucleotide
taggcaaagtgccggcgagctcgctatagg

SEQ ID NO: 86094 - DNA, 30 bp, Artificial Sequence
  Synthetic oligonucleotide
taacagaaaaaagaaaaacgtatctatagg

SEQ ID NO: 86095 - DNA, 30 bp, Artificial Sequence
  Synthetic oligonucleotide
gggtctggtgagtttagccgtgtgtatagg

SEQ ID NO: 86096 - DNA, 30 bp, Artificial Sequence
  Synthetic oligonucleotide
ctgttgcagggaggctaccatgaacctagg

SEQ ID NO: 86097 - DNA, 30 bp, Artificial Sequence
  Synthetic oligonucleotide
tcatgtcaaaactggatcggaagcgctagg

SEQ ID NO: 86098 - DNA, 30 bp, Artificial Sequence
  Synthetic oligonucleotide
ccgagccatacataccaccggtattctagg

SEQ ID NO: 86099 - DNA, 30 bp, Artificial Sequence
  Synthetic oligonucleotide
acagggatgaccgttaatctgtcttctagg

SEQ ID NO: 86100 - DNA, 30 bp, Artificial Sequence
  Synthetic oligonucleotide
ctaattgcacataattgtttgaaaagtagg

SEQ ID NO: 86101 - DNA, 30 bp, Artificial Sequence
  Synthetic oligonucleotide
attcaggataacatgttctgtgggagtagg

SEQ ID NO: 86102 - DNA, 31 bp, Artificial Sequence
  Synthetic oligonucleotide
agcgtatgcggtgtccacaccgatatgtagg

SEQ ID NO: 86103 - DNA, 30 bp, Artificial Sequence
  Synthetic oligonucleotide
caagaactatagtcacaagtttaacttagg

SEQ ID NO: 86104 - DNA, 30 bp, Artificial Sequence
  Synthetic oligonucleotide
gcgtacatcccccgccttaccggacttagg

SEQ ID NO: 86105 - DNA, 30 bp, Artificial Sequence
  Synthetic oligonucleotide
gtcgcggaggcggagtgggagatacttagg

SEQ ID NO: 86106 - DNA, 30 bp, Artificial Sequence
  Synthetic oligonucleotide
ccgacacaccaaccgtatgcatagcttagg

SEQ ID NO: 86107 - DNA, 30 bp, Artificial Sequence
  Synthetic oligonucleotide
ggtcattgttggaacagcgacttagttagg

SEQ ID NO: 86108 - DNA, 30 bp, Artificial Sequence
  Synthetic oligonucleotide
acgaacttccatttatgtacccgggttagg

SEQ ID NO: 86109 - DNA, 30 bp, Artificial Sequence
  Synthetic oligonucleotide
aaggtaaaagtacagcaagcagcgtttagg

SEQ ID NO: 86110 - DNA, 30 bp, Artificial Sequence
  Synthetic oligonucleotide
tagtacgtactacaaatgtgcgacaaacgg

SEQ ID NO: 86111 - DNA, 30 bp, Artificial Sequence
  Synthetic oligonucleotide
ggagagaaggcccatcctttccgtaaacgg

SEQ ID NO: 86112 - DNA, 30 bp, Artificial Sequence
  Synthetic oligonucleotide
acacatcgaaaattacaagtcgggcaacgg

SEQ ID NO: 86113 - DNA, 30 bp, Artificial Sequence
  Synthetic oligonucleotide
tacgattaggagcctgtaacggttcaacgg

SEQ ID NO: 86114 - DNA, 30 bp, Artificial Sequence
  Synthetic oligonucleotide
gccatgtgtgtaatggacaaaagagaacgg

SEQ ID NO: 86115 - DNA, 30 bp, Artificial Sequence
  Synthetic oligonucleotide
atgcctgcaatggatcaatcaaactaacgg

SEQ ID NO: 86116 - DNA, 30 bp, Artificial Sequence
  Synthetic oligonucleotide
gtctaaaaatcacgggggtcgagttaacgg

SEQ ID NO: 86117 - DNA, 30 bp, Artificial Sequence
  Synthetic oligonucleotide
ccctgctgcatgggatctaaaagcacacgg

SEQ ID NO: 86118 - DNA, 30 bp, Artificial Sequence
  Synthetic oligonucleotide
aggtagtaggaccgcgaattacgtacacgg

SEQ ID NO: 86119 - DNA, 30 bp, Artificial Sequence
  Synthetic oligonucleotide
ttggtggcgaaatcggaggtggcggcacgg

SEQ ID NO: 86120 - DNA, 30 bp, Artificial Sequence
  Synthetic oligonucleotide
taacgataccctgcgagctgcccgtcacgg

SEQ ID NO: 86121 - DNA, 30 bp, Artificial Sequence
  Synthetic oligonucleotide
acctgtgtaccgcaaaaaatatcaagacgg

SEQ ID NO: 86122 - DNA, 30 bp, Artificial Sequence
  Synthetic oligonucleotide
catgggggatgcctaaaaagcgtatgacgg

SEQ ID NO: 86123 - DNA, 30 bp, Artificial Sequence
  Synthetic oligonucleotide
ttgattcatcagctaacggaggggtgacgg

SEQ ID NO: 86124 - DNA, 30 bp, Artificial Sequence
  Synthetic oligonucleotide
atggaaaagcctagagcagcattgtgacgg

SEQ ID NO: 86125 - DNA, 30 bp, Artificial Sequence
  Synthetic oligonucleotide
cctagctgctcgaaataacttttgatacgg

SEQ ID NO: 86126 - DNA, 29 bp, Artificial Sequence
  Synthetic oligonucleotide
cggactggccataactgaagatcgtacgg

SEQ ID NO: 86127 - DNA, 30 bp, Artificial Sequence
  Synthetic oligonucleotide
acaaaacggctaaattggactacggtacgg

SEQ ID NO: 86128 - DNA, 30 bp, Artificial Sequence
  Synthetic oligonucleotide
agaatgactcaactcgcggaacgggtacgg

SEQ ID NO: 86129 - DNA, 30 bp, Artificial Sequence
  Synthetic oligonucleotide
atgaagagatgccgtgaggccatggtacgg

SEQ ID NO: 86130 - DNA, 31 bp, Artificial Sequence
  Synthetic oligonucleotide
acacatcctagcacaccgattataacaccgg

SEQ ID NO: 86131 - DNA, 30 bp, Artificial Sequence
  Synthetic oligonucleotide
tgagtaacgacatgtaactttcgagaccgg

SEQ ID NO: 86132 - DNA, 30 bp, Artificial Sequence
  Synthetic oligonucleotide
atatgtgtccgagtcagggagggggaccgg

SEQ ID NO: 86133 - DNA, 30 bp, Artificial Sequence
  Synthetic oligonucleotide
gctagcgatagatgtaaatggtggtaccgg

SEQ ID NO: 86134 - DNA, 30 bp, Artificial Sequence
  Synthetic oligonucleotide
aagccctttgaccaaaaaatcgacacccgg

SEQ ID NO: 86135 - DNA, 30 bp, Artificial Sequence
  Synthetic oligonucleotide
aagtagaaaaagcagatataacaaccccgg

SEQ ID NO: 86136 - DNA, 30 bp, Artificial Sequence
  Synthetic oligonucleotide
attgaaatagcattgaaaaccgccccccgg

SEQ ID NO: 86137 - DNA, 30 bp, Artificial Sequence
  Synthetic oligonucleotide
gagctacaacgatagttacttctagcccgg

SEQ ID NO: 86138 - DNA, 30 bp, Artificial Sequence
  Synthetic oligonucleotide
tgaagctaaaggcctagaaaacccgcccgg

SEQ ID NO: 86139 - DNA, 30 bp, Artificial Sequence
  Synthetic oligonucleotide
agggtccacatagtcgaataaaacagccgg

SEQ ID NO: 86140 - DNA, 30 bp, Artificial Sequence
  Synthetic oligonucleotide
tcaagggcgatgatcaagagaggtagccgg

SEQ ID NO: 86141 - DNA, 30 bp, Artificial Sequence
  Synthetic oligonucleotide
cacggggctaaaacttcgataaaacgccgg

SEQ ID NO: 86142 - DNA, 30 bp, Artificial Sequence
  Synthetic oligonucleotide
tcggaacatcatcttgtagaggcacgccgg

SEQ ID NO: 86143 - DNA, 30 bp, Artificial Sequence
  Synthetic oligonucleotide
tataaccctcccgtaggaaacatacgccgg

SEQ ID NO: 86144 - DNA, 30 bp, Artificial Sequence
  Synthetic oligonucleotide
ggcatacatcggaactccgtataaggccgg

SEQ ID NO: 86145 - DNA, 30 bp, Artificial Sequence
  Synthetic oligonucleotide
aagagcacaattggaaaatgctagggccgg

SEQ ID NO: 86146 - DNA, 30 bp, Artificial Sequence
  Synthetic oligonucleotide
tctactcagctaccttagccaacaatccgg

SEQ ID NO: 86147 - DNA, 30 bp, Artificial Sequence
  Synthetic oligonucleotide
gatcctgcgcaaaagaagatgatactccgg

SEQ ID NO: 86148 - DNA, 30 bp, Artificial Sequence
  Synthetic oligonucleotide
atgctgggcgcgccctcccgttaagtccgg

SEQ ID NO: 86149 - DNA, 29 bp, Artificial Sequence
  Synthetic oligonucleotide
gtaagaccgaatgttacaataacgtccgg

SEQ ID NO: 86150 - DNA, 30 bp, Artificial Sequence
  Synthetic oligonucleotide
aaactcaacacatcgaccgttgacttccgg

SEQ ID NO: 86151 - DNA, 30 bp, Artificial Sequence
  Synthetic oligonucleotide
agtgaaattggtgtgccaccatagaagcgg

SEQ ID NO: 86152 - DNA, 30 bp, Artificial Sequence
  Synthetic oligonucleotide
tgtaactcagaccacccgaagaggaagcgg

SEQ ID NO: 86153 - DNA, 30 bp, Artificial Sequence
  Synthetic oligonucleotide
ggtggcaagcggtatagaagctaccagcgg

SEQ ID NO: 86154 - DNA, 30 bp, Artificial Sequence
  Synthetic oligonucleotide
atgtctaataagctcataatagtccagcgg

SEQ ID NO: 86155 - DNA, 30 bp, Artificial Sequence
  Synthetic oligonucleotide
cgatgtgataaagtcggcgtcgttcagcgg

SEQ ID NO: 86156 - DNA, 30 bp, Artificial Sequence
  Synthetic oligonucleotide
gggggggatttagtgaggacacgagagcgg

SEQ ID NO: 86157 - DNA, 30 bp, Artificial Sequence
  Synthetic oligonucleotide
agagggatcaagttccatttcggcgagcgg

SEQ ID NO: 86158 - DNA, 30 bp, Artificial Sequence
  Synthetic oligonucleotide
acctaataataatacgcgctcaaggagcgg

SEQ ID NO: 86159 - DNA, 30 bp, Artificial Sequence
  Synthetic oligonucleotide
taccgtccatcaagactgctcgaggagcgg

SEQ ID NO: 86160 - DNA, 30 bp, Artificial Sequence
  Synthetic oligonucleotide
aatcggatcgcctacatactgcaatagcgg

SEQ ID NO: 86161 - DNA, 30 bp, Artificial Sequence
  Synthetic oligonucleotide
ataggaatacgccctacatgaaactagcgg

SEQ ID NO: 86162 - DNA, 30 bp, Artificial Sequence
  Synthetic oligonucleotide
gtaataggcttgggatcagcgtccacgcgg

SEQ ID NO: 86163 - DNA, 30 bp, Artificial Sequence
  Synthetic oligonucleotide
aggaagataacttggacgaccttcccgcgg

SEQ ID NO: 86164 - DNA, 30 bp, Artificial Sequence
  Synthetic oligonucleotide
gtgttgtgggtgaggagaatcgagccgcgg

SEQ ID NO: 86165 - DNA, 30 bp, Artificial Sequence
  Synthetic oligonucleotide
caagacttcatgtccttaagcgatccgcgg

SEQ ID NO: 86166 - DNA, 30 bp, Artificial Sequence
  Synthetic oligonucleotide
gtatggtacagatgcaatcctgcatcgcgg

SEQ ID NO: 86167 - DNA, 30 bp, Artificial Sequence
  Synthetic oligonucleotide
ctaaaggtacatgttgcgtcgaggtcgcgg

SEQ ID NO: 86168 - DNA, 30 bp, Artificial Sequence
  Synthetic oligonucleotide
tccaagctgcaacatgtccaacggtcgcgg

SEQ ID NO: 86169 - DNA, 31 bp, Artificial Sequence
  Synthetic oligonucleotide
acattaccacattagtagtcctataaggcgg

SEQ ID NO: 86170 - DNA, 30 bp, Artificial Sequence
  Synthetic oligonucleotide
gtcgtagccgattccgtctgaaagaggcgg

SEQ ID NO: 86171 - DNA, 30 bp, Artificial Sequence
  Synthetic oligonucleotide
aacataaacaaggtctacgatacgaggcgg

SEQ ID NO: 86172 - DNA, 30 bp, Artificial Sequence
  Synthetic oligonucleotide
tcatagaggtaagactaagggtatcggcgg

SEQ ID NO: 86173 - DNA, 30 bp, Artificial Sequence
  Synthetic oligonucleotide
aggtcaggtccccggtgaaagaaatggcgg

SEQ ID NO: 86174 - DNA, 30 bp, Artificial Sequence
  Synthetic oligonucleotide
gtcggctgactaaggagaaagaagtggcgg

SEQ ID NO: 86175 - DNA, 30 bp, Artificial Sequence
  Synthetic oligonucleotide
atatcttggaaacagtaaacgaagtggcgg

SEQ ID NO: 86176 - DNA, 30 bp, Artificial Sequence
  Synthetic oligonucleotide
acgtatcgaatctagtttacttagtggcgg

SEQ ID NO: 86177 - DNA, 30 bp, Artificial Sequence
  Synthetic oligonucleotide
ttgcaatcatagttggaggtggcttggcgg

SEQ ID NO: 86178 - DNA, 30 bp, Artificial Sequence
  Synthetic oligonucleotide
caccgagctaatcgttctccctccatgcgg

SEQ ID NO: 86179 - DNA, 30 bp, Artificial Sequence
  Synthetic oligonucleotide
gtggtcattcgagctggtagagagatgcgg

SEQ ID NO: 86180 - DNA, 30 bp, Artificial Sequence
  Synthetic oligonucleotide
ccgaggtgcggtgaagtacggtagatgcgg

SEQ ID NO: 86181 - DNA, 30 bp, Artificial Sequence
  Synthetic oligonucleotide
tctctggaccaacgttacgacagggtgcgg

SEQ ID NO: 86182 - DNA, 30 bp, Artificial Sequence
  Synthetic oligonucleotide
aatggaggatgaaagtcttatagggtgcgg

SEQ ID NO: 86183 - DNA, 30 bp, Artificial Sequence
  Synthetic oligonucleotide
cacgtgggtgcatctcgctgaaacttgcgg

SEQ ID NO: 86184 - DNA, 30 bp, Artificial Sequence
  Synthetic oligonucleotide
tatgtccccagtcagaatatgggtttgcgg

SEQ ID NO: 86185 - DNA, 30 bp, Artificial Sequence
  Synthetic oligonucleotide
cagtgtgtgtacaacccctgacataatcgg

SEQ ID NO: 86186 - DNA, 30 bp, Artificial Sequence
  Synthetic oligonucleotide
ttcgggtttatgaccaacgagcaggatcgg

SEQ ID NO: 86187 - DNA, 30 bp, Artificial Sequence
  Synthetic oligonucleotide
atagcgttggaacgatgcctttgggatcgg

SEQ ID NO: 86188 - DNA, 30 bp, Artificial Sequence
  Synthetic oligonucleotide
tagagttgcgaacgaagctaatctgatcgg

SEQ ID NO: 86189 - DNA, 30 bp, Artificial Sequence
  Synthetic oligonucleotide
gtaaacgggcacaccacatgatgatatcgg

SEQ ID NO: 86190 - DNA, 30 bp, Artificial Sequence
  Synthetic oligonucleotide
tgcgataggcttcaccataacctgtctcgg

SEQ ID NO: 86191 - DNA, 30 bp, Artificial Sequence
  Synthetic oligonucleotide
tgccgatggtgtatatccttcagcagtcgg

SEQ ID NO: 86192 - DNA, 30 bp, Artificial Sequence
  Synthetic oligonucleotide
tcaggactatagcgaactttgctgagtcgg

SEQ ID NO: 86193 - DNA, 30 bp, Artificial Sequence
  Synthetic oligonucleotide
cgacgcgttagttaggtgttggggcgtcgg

SEQ ID NO: 86194 - DNA, 30 bp, Artificial Sequence
  Synthetic oligonucleotide
cgccagtggagtcatcggtgacctcgtcgg

SEQ ID NO: 86195 - DNA, 30 bp, Artificial Sequence
  Synthetic oligonucleotide
cgacccgtgcagaaggctaataaaggtcgg

SEQ ID NO: 86196 - DNA, 30 bp, Artificial Sequence
  Synthetic oligonucleotide
caagaacacttgtaccaagaaattggtcgg

SEQ ID NO: 86197 - DNA, 30 bp, Artificial Sequence
  Synthetic oligonucleotide
aaaggccggtgctctcgctagagctgtcgg

SEQ ID NO: 86198 - DNA, 30 bp, Artificial Sequence
  Synthetic oligonucleotide
gaatgcgagtttgacacaaggctctgtcgg

SEQ ID NO: 86199 - DNA, 30 bp, Artificial Sequence
  Synthetic oligonucleotide
cgtatacgtccgcggagaaatgtacttcgg

SEQ ID NO: 86200 - DNA, 30 bp, Artificial Sequence
  Synthetic oligonucleotide
aggatcaatggtgaaggctacttccttcgg

SEQ ID NO: 86201 - DNA, 30 bp, Artificial Sequence
  Synthetic oligonucleotide
ggcgtatctatgtaagcatgtaaagttcgg

SEQ ID NO: 86202 - DNA, 30 bp, Artificial Sequence
  Synthetic oligonucleotide
agtcaatgaatagcttatccacattttcgg

SEQ ID NO: 86203 - DNA, 30 bp, Artificial Sequence
  Synthetic oligonucleotide
atcgggcaatttctccacagtgtacaaggg

SEQ ID NO: 86204 - DNA, 30 bp, Artificial Sequence
  Synthetic oligonucleotide
tgcagtagctcgggaacctggtacgaaggg

SEQ ID NO: 86205 - DNA, 30 bp, Artificial Sequence
  Synthetic oligonucleotide
cccataaacttataaggaccatctgaaggg

SEQ ID NO: 86206 - DNA, 30 bp, Artificial Sequence
  Synthetic oligonucleotide
tggctgcattcctgaggtctctaataaggg

SEQ ID NO: 86207 - DNA, 30 bp, Artificial Sequence
  Synthetic oligonucleotide
acccagttatgatccgaataaccataaggg

SEQ ID NO: 86208 - DNA, 30 bp, Artificial Sequence
  Synthetic oligonucleotide
gggcccacacgggatcgttacctataaggg

SEQ ID NO: 86209 - DNA, 30 bp, Artificial Sequence
  Synthetic oligonucleotide
gcatcgggattgaacacttttccgtaaggg

SEQ ID NO: 86210 - DNA, 30 bp, Artificial Sequence
  Synthetic oligonucleotide
ggacgcggaacgaggtattttagcacaggg

SEQ ID NO: 86211 - DNA, 30 bp, Artificial Sequence
  Synthetic oligonucleotide
tgatggataaataggcgaccagtcacaggg

SEQ ID NO: 86212 - DNA, 30 bp, Artificial Sequence
  Synthetic oligonucleotide
aggactcaatcgacggaccgcctaccaggg

SEQ ID NO: 86213 - DNA, 30 bp, Artificial Sequence
  Synthetic oligonucleotide
tttaagaacagcgtcaagccaaagccaggg

SEQ ID NO: 86214 - DNA, 30 bp, Artificial Sequence
  Synthetic oligonucleotide
ctaaccatgtacctagaaagaaagccaggg

SEQ ID NO: 86215 - DNA, 30 bp, Artificial Sequence
  Synthetic oligonucleotide
tatcgagaggtgacagataaagatccaggg

SEQ ID NO: 86216 - DNA, 30 bp, Artificial Sequence
  Synthetic oligonucleotide
cctacaaaaggacttagtattttagcaggg

SEQ ID NO: 86217 - DNA, 30 bp, Artificial Sequence
  Synthetic oligonucleotide
tggaacggaagctgggaatgctaggcaggg

SEQ ID NO: 86218 - DNA, 30 bp, Artificial Sequence
  Synthetic oligonucleotide
ggtggctggggcgttcagtgaaagtcaggg

SEQ ID NO: 86219 - DNA, 30 bp, Artificial Sequence
  Synthetic oligonucleotide
taaaccaaaggggtggtataactgtcaggg

SEQ ID NO: 86220 - DNA, 30 bp, Artificial Sequence
  Synthetic oligonucleotide
tgagacgatcagcaagttaagtattcaggg

SEQ ID NO: 86221 - DNA, 30 bp, Artificial Sequence
  Synthetic oligonucleotide
aggtgacctcatttgctggccgtttcaggg

SEQ ID NO: 86222 - DNA, 30 bp, Artificial Sequence
  Synthetic oligonucleotide
tgcccaaatgggtgtctcgggttaagaggg

SEQ ID NO: 86223 - DNA, 30 bp, Artificial Sequence
  Synthetic oligonucleotide
gcgtggatggaactttaaatcgaacgaggg

SEQ ID NO: 86224 - DNA, 30 bp, Artificial Sequence
  Synthetic oligonucleotide
aggttccttagtgcagcgttataacgaggg

SEQ ID NO: 86225 - DNA, 30 bp, Artificial Sequence
  Synthetic oligonucleotide
tgggctagtcggtcacaggtgtagcgaggg

SEQ ID NO: 86226 - DNA, 30 bp, Artificial Sequence
  Synthetic oligonucleotide
ctagcgaatacacaacggctggcgcgaggg

SEQ ID NO: 86227 - DNA, 30 bp, Artificial Sequence
  Synthetic oligonucleotide
agagcgatctgttgggccatttatcgaggg

SEQ ID NO: 86228 - DNA, 30 bp, Artificial Sequence
  Synthetic oligonucleotide
ggctactgttttaatgtaagtaccggaggg

SEQ ID NO: 86229 - DNA, 30 bp, Artificial Sequence
  Synthetic oligonucleotide
tcgtgcgtactacaggtggtgttatgaggg

SEQ ID NO: 86230 - DNA, 30 bp, Artificial Sequence
  Synthetic oligonucleotide
ttgtttgccgtactataactgacttgaggg

SEQ ID NO: 86231 - DNA, 30 bp, Artificial Sequence
  Synthetic oligonucleotide
aggtcgtgtggagcgttactaaccataggg

SEQ ID NO: 86232 - DNA, 30 bp, Artificial Sequence
  Synthetic oligonucleotide
agcgaacaaataagttggcgatctataggg

SEQ ID NO: 86233 - DNA, 30 bp, Artificial Sequence
  Synthetic oligonucleotide
tacggtatattcgggggctaaattataggg

SEQ ID NO: 86234 - DNA, 30 bp, Artificial Sequence
  Synthetic oligonucleotide
gatgtgaattctacagggggggacctaggg

SEQ ID NO: 86235 - DNA, 30 bp, Artificial Sequence
  Synthetic oligonucleotide
acggcgaggagatgagaatggaatctaggg

SEQ ID NO: 86236 - DNA, 30 bp, Artificial Sequence
  Synthetic oligonucleotide
agagcatttatgtaggacataggagtaggg

SEQ ID NO: 86237 - DNA, 30 bp, Artificial Sequence
  Synthetic oligonucleotide
tcaatgagttctggatacccgaatgtaggg

SEQ ID NO: 86238 - DNA, 30 bp, Artificial Sequence
  Synthetic oligonucleotide
gtgcatcgtgtgctacgttgccgattaggg

SEQ ID NO: 86239 - DNA, 30 bp, Artificial Sequence
  Synthetic oligonucleotide
actagggcagggcgtgaaactgtcttaggg

SEQ ID NO: 86240 - DNA, 30 bp, Artificial Sequence
  Synthetic oligonucleotide
ccgaagtaccactcgttaccgcctttaggg

SEQ ID NO: 86241 - DNA, 31 bp, Artificial Sequence
  Synthetic oligonucleotide
ggaaggttcgatcgtttgagggattaacggg

SEQ ID NO: 86242 - DNA, 30 bp, Artificial Sequence
  Synthetic oligonucleotide
tatcaccaccactctctagtataacacggg

SEQ ID NO: 86243 - DNA, 30 bp, Artificial Sequence
  Synthetic oligonucleotide
ggaaaacgacattcaggcggaccgcacggg

SEQ ID NO: 86244 - DNA, 30 bp, Artificial Sequence
  Synthetic oligonucleotide
gggagaacttgagacataacattcgacggg

SEQ ID NO: 86245 - DNA, 30 bp, Artificial Sequence
  Synthetic oligonucleotide
agccgagaatgtagtcgccgttgggacggg

SEQ ID NO: 86246 - DNA, 30 bp, Artificial Sequence
  Synthetic oligonucleotide
taaagagtcgagaactccgtgcaatacggg

SEQ ID NO: 86247 - DNA, 30 bp, Artificial Sequence
  Synthetic oligonucleotide
aacaccgatcagtaacatctgggatacggg

SEQ ID NO: 86248 - DNA, 30 bp, Artificial Sequence
  Synthetic oligonucleotide
cgcttgccctgggctagataagataccggg

SEQ ID NO: 86249 - DNA, 30 bp, Artificial Sequence
  Synthetic oligonucleotide
caataaagcgagcaggtaacctttcccggg

SEQ ID NO: 86250 - DNA, 30 bp, Artificial Sequence
  Synthetic oligonucleotide
agacgagaactatggtttttaggagccggg

SEQ ID NO: 86251 - DNA, 30 bp, Artificial Sequence
  Synthetic oligonucleotide
ctagacagttattggtcgccacacgccggg

SEQ ID NO: 86252 - DNA, 30 bp, Artificial Sequence
  Synthetic oligonucleotide
ttcaaggcgtaacagattcattcatccggg

SEQ ID NO: 86253 - DNA, 30 bp, Artificial Sequence
  Synthetic oligonucleotide
gtgtctgcgttgctaagaatcggatccggg

SEQ ID NO: 86254 - DNA, 30 bp, Artificial Sequence
  Synthetic oligonucleotide
tttacagtaggatcgtacaacacgtccggg

SEQ ID NO: 86255 - DNA, 30 bp, Artificial Sequence
  Synthetic oligonucleotide
ccttgtgcgaacagacgtgtaaaaagcggg

SEQ ID NO: 86256 - DNA, 30 bp, Artificial Sequence
  Synthetic oligonucleotide
cagagaaccgtttactaccggacaagcggg

SEQ ID NO: 86257 - DNA, 30 bp, Artificial Sequence
  Synthetic oligonucleotide
ctcgtagcgaacaatgtcgccaggagcggg

SEQ ID NO: 86258 - DNA, 30 bp, Artificial Sequence
  Synthetic oligonucleotide
cgcttggcgaactctaccgagtggagcggg

SEQ ID NO: 86259 - DNA, 30 bp, Artificial Sequence
  Synthetic oligonucleotide
tcggcatgcgatttaaacgttgctggcggg

SEQ ID NO: 86260 - DNA, 30 bp, Artificial Sequence
  Synthetic oligonucleotide
aagcaagttgcctgatcttgatcttgcggg

SEQ ID NO: 86261 - DNA, 30 bp, Artificial Sequence
  Synthetic oligonucleotide
tggctaagattgcactagacaaaaatcggg

SEQ ID NO: 86262 - DNA, 30 bp, Artificial Sequence
  Synthetic oligonucleotide
acagtaagcgcgtggatcggtcggatcggg

SEQ ID NO: 86263 - DNA, 30 bp, Artificial Sequence
  Synthetic oligonucleotide
ttagggtcaggtatgatttttatgatcggg

SEQ ID NO: 86264 - DNA, 30 bp, Artificial Sequence
  Synthetic oligonucleotide
ggaaggtgtaaaaatcttcctatactcggg

SEQ ID NO: 86265 - DNA, 30 bp, Artificial Sequence
  Synthetic oligonucleotide
agtgtagtcctatgcattcacatgctcggg

SEQ ID NO: 86266 - DNA, 30 bp, Artificial Sequence
  Synthetic oligonucleotide
tcgttcggagctagaataccttgcgtcggg

SEQ ID NO: 86267 - DNA, 30 bp, Artificial Sequence
  Synthetic oligonucleotide
cgagttggagctacatccgcgaacttcggg

SEQ ID NO: 86268 - DNA, 30 bp, Artificial Sequence
  Synthetic oligonucleotide
atgaactagggctagggaaaatgcttcggg

SEQ ID NO: 86269 - DNA, 30 bp, Artificial Sequence
  Synthetic oligonucleotide
gagactaaaagcgagcgacgtgcgttcggg

SEQ ID NO: 86270 - DNA, 30 bp, Artificial Sequence
  Synthetic oligonucleotide
ctctgaacggcctgaactatgcacaagggg

SEQ ID NO: 86271 - DNA, 30 bp, Artificial Sequence
  Synthetic oligonucleotide
catcttgcaggttgcacatttgaacagggg

SEQ ID NO: 86272 - DNA, 30 bp, Artificial Sequence
  Synthetic oligonucleotide
ccacggcgaaccttggggcataagcagggg

SEQ ID NO: 86273 - DNA, 30 bp, Artificial Sequence
  Synthetic oligonucleotide
atgagagatcacctatcttagcgtgagggg

SEQ ID NO: 86274 - DNA, 30 bp, Artificial Sequence
  Synthetic oligonucleotide
ggcgataaggtaatgctgggagcgtagggg

SEQ ID NO: 86275 - DNA, 30 bp, Artificial Sequence
  Synthetic oligonucleotide
cttagttctggaagtacacacggaacgggg

SEQ ID NO: 86276 - DNA, 30 bp, Artificial Sequence
  Synthetic oligonucleotide
atggatgggcggagtcagacagtaacgggg

SEQ ID NO: 86277 - DNA, 30 bp, Artificial Sequence
  Synthetic oligonucleotide
ggtatagtgaagatcggcgagcgtacgggg

SEQ ID NO: 86278 - DNA, 30 bp, Artificial Sequence
  Synthetic oligonucleotide
actacgtaatacatcaggggtttaccgggg

SEQ ID NO: 86279 - DNA, 30 bp, Artificial Sequence
  Synthetic oligonucleotide
gggtacgtaagacaatataggcacccgggg

SEQ ID NO: 86280 - DNA, 30 bp, Artificial Sequence
  Synthetic oligonucleotide
actatcgtaggctgctttacaagtccgggg

SEQ ID NO: 86281 - DNA, 30 bp, Artificial Sequence
  Synthetic oligonucleotide
gacggcgcggttttaaactttaactcgggg

SEQ ID NO: 86282 - DNA, 30 bp, Artificial Sequence
  Synthetic oligonucleotide
agatccggtcatgcaggtttatactcgggg

SEQ ID NO: 86283 - DNA, 30 bp, Artificial Sequence
  Synthetic oligonucleotide
aaggtaatctacgaagctgtaagctcgggg

SEQ ID NO: 86284 - DNA, 30 bp, Artificial Sequence
  Synthetic oligonucleotide
cgttagtaaatagggccaacgtggtcgggg

SEQ ID NO: 86285 - DNA, 30 bp, Artificial Sequence
  Synthetic oligonucleotide
cacggcgctcaaggtcatgcaatttcgggg

SEQ ID NO: 86286 - DNA, 30 bp, Artificial Sequence
  Synthetic oligonucleotide
atacatcgaaactaatccttcttaaggggg

SEQ ID NO: 86287 - DNA, 30 bp, Artificial Sequence
  Synthetic oligonucleotide
taggaacggctcgctctcgtcttgaggggg

SEQ ID NO: 86288 - DNA, 30 bp, Artificial Sequence
  Synthetic oligonucleotide
ctggatcagcacgcgttggtcactaggggg

SEQ ID NO: 86289 - DNA, 30 bp, Artificial Sequence
  Synthetic oligonucleotide
tacgggcttattgcaatcatgcaacggggg

SEQ ID NO: 86290 - DNA, 30 bp, Artificial Sequence
  Synthetic oligonucleotide
ctcgagtatagtagtaaagcgagagggggg

SEQ ID NO: 86291 - DNA, 30 bp, Artificial Sequence
  Synthetic oligonucleotide
gccaggacgaaaccctggataacatggggg

SEQ ID NO: 86292 - DNA, 30 bp, Artificial Sequence
  Synthetic oligonucleotide
accgcacagtaacgttcgtggatatggggg

SEQ ID NO: 86293 - DNA, 30 bp, Artificial Sequence
  Synthetic oligonucleotide
ggtacttgagtgcaggaggagaggtggggg

SEQ ID NO: 86294 - DNA, 30 bp, Artificial Sequence
  Synthetic oligonucleotide
attctggcagaaacgtatataccaatgggg

SEQ ID NO: 86295 - DNA, 30 bp, Artificial Sequence
  Synthetic oligonucleotide
tcaactacctctctataattcacactgggg

SEQ ID NO: 86296 - DNA, 29 bp, Artificial Sequence
  Synthetic oligonucleotide
catcgcaatgcaagcgcagacctgtgggg

SEQ ID NO: 86297 - DNA, 30 bp, Artificial Sequence
  Synthetic oligonucleotide
gcaggggggttctatgcgtttaacaatggg

SEQ ID NO: 86298 - DNA, 30 bp, Artificial Sequence
  Synthetic oligonucleotide
ctgagtgaaacggacttcgatagcaatggg

SEQ ID NO: 86299 - DNA, 30 bp, Artificial Sequence
  Synthetic oligonucleotide
cgtaagtccgagtcgacacggtttaatggg

SEQ ID NO: 86300 - DNA, 30 bp, Artificial Sequence
  Synthetic oligonucleotide
aataaaacatctgtcgggtatgcacatggg

SEQ ID NO: 86301 - DNA, 30 bp, Artificial Sequence
  Synthetic oligonucleotide
tccacttgagtcagcccggaaaagcatggg

SEQ ID NO: 86302 - DNA, 30 bp, Artificial Sequence
  Synthetic oligonucleotide
gatcaacggcccgtccttcgaatgcatggg

SEQ ID NO: 86303 - DNA, 30 bp, Artificial Sequence
  Synthetic oligonucleotide
caccccacggcccactcagaaacagatggg

SEQ ID NO: 86304 - DNA, 30 bp, Artificial Sequence
  Synthetic oligonucleotide
caatctaggatactaacacaaaccactggg

SEQ ID NO: 86305 - DNA, 30 bp, Artificial Sequence
  Synthetic oligonucleotide
acttcgctacaggattccgcgtgcgctggg

SEQ ID NO: 86306 - DNA, 31 bp, Artificial Sequence
  Synthetic oligonucleotide
acaaatagtaggttggtcgtgcagatctggg

SEQ ID NO: 86307 - DNA, 30 bp, Artificial Sequence
  Synthetic oligonucleotide
agggagatttcaggacccgcagtatctggg

SEQ ID NO: 86308 - DNA, 30 bp, Artificial Sequence
  Synthetic oligonucleotide
cctatatggctggaacgaggtgtgtctggg

SEQ ID NO: 86309 - DNA, 30 bp, Artificial Sequence
  Synthetic oligonucleotide
agcaattactacggttaaaataggagtggg

SEQ ID NO: 86310 - DNA, 30 bp, Artificial Sequence
  Synthetic oligonucleotide
gggccaccggataacatagactcccgtggg

SEQ ID NO: 86311 - DNA, 30 bp, Artificial Sequence
  Synthetic oligonucleotide
aagttaggtaacggcaggggtgaaattggg

SEQ ID NO: 86312 - DNA, 31 bp, Artificial Sequence
  Synthetic oligonucleotide
ggtgtaatcggactacatgatcgcaattggg

SEQ ID NO: 86313 - DNA, 30 bp, Artificial Sequence
  Synthetic oligonucleotide
cacgttgaatacgtaaggttcccccttggg

SEQ ID NO: 86314 - DNA, 30 bp, Artificial Sequence
  Synthetic oligonucleotide
agccggaagttatcgtcaccatatcttggg

SEQ ID NO: 86315 - DNA, 30 bp, Artificial Sequence
  Synthetic oligonucleotide
tgagccgattaggcgccaactgacgttggg

SEQ ID NO: 86316 - DNA, 30 bp, Artificial Sequence
  Synthetic oligonucleotide
attatgatctaaggcaaaccagaatttggg

SEQ ID NO: 86317 - DNA, 30 bp, Artificial Sequence
  Synthetic oligonucleotide
cgacttaaaaggtagtgtgtcggatttggg

SEQ ID NO: 86318 - DNA, 30 bp, Artificial Sequence
  Synthetic oligonucleotide
tcctcagtgtccaggcatgtcaaaaaatgg

SEQ ID NO: 86319 - DNA, 30 bp, Artificial Sequence
  Synthetic oligonucleotide
aaagctaaaggaggcttggatgaaaaatgg

SEQ ID NO: 86320 - DNA, 30 bp, Artificial Sequence
  Synthetic oligonucleotide
gaggggacaaatcagtacccgccgaaatgg

SEQ ID NO: 86321 - DNA, 30 bp, Artificial Sequence
  Synthetic oligonucleotide
cagggttccccgaaggaatttactaaatgg

SEQ ID NO: 86322 - DNA, 30 bp, Artificial Sequence
  Synthetic oligonucleotide
cgcctcattagtaggcataagatccaatgg

SEQ ID NO: 86323 - DNA, 30 bp, Artificial Sequence
  Synthetic oligonucleotide
tgagattctggataagcaatacgataatgg

SEQ ID NO: 86324 - DNA, 30 bp, Artificial Sequence
  Synthetic oligonucleotide
taaagggtcgagaaaagcaccccgtaatgg

SEQ ID NO: 86325 - DNA, 30 bp, Artificial Sequence
  Synthetic oligonucleotide
tgcatcagaggcgtgagcgcaagaacatgg

SEQ ID NO: 86326 - DNA, 30 bp, Artificial Sequence
  Synthetic oligonucleotide
tcggcggtcactatggagccacccacatgg

SEQ ID NO: 86327 - DNA, 30 bp, Artificial Sequence
  Synthetic oligonucleotide
aggacggaacaaaaattatacaaaccatgg

SEQ ID NO: 86328 - DNA, 30 bp, Artificial Sequence
  Synthetic oligonucleotide
cgtgttgtgtgtgccatcttaataccatgg

SEQ ID NO: 86329 - DNA, 30 bp, Artificial Sequence
  Synthetic oligonucleotide
acatgtcgtgcagacgtgggtacgccatgg

SEQ ID NO: 86330 - DNA, 30 bp, Artificial Sequence
  Synthetic oligonucleotide
taacatcagtaaaatgttagaaccgcatgg

SEQ ID NO: 86331 - DNA, 30 bp, Artificial Sequence
  Synthetic oligonucleotide
tggcaaatggtctctgtgtacccttcatgg

SEQ ID NO: 86332 - DNA, 30 bp, Artificial Sequence
  Synthetic oligonucleotide
gtacccgagggcatgtgcgtgtgttcatgg

SEQ ID NO: 86333 - DNA, 30 bp, Artificial Sequence
  Synthetic oligonucleotide
actatccggacctgccagaacaaaagatgg

SEQ ID NO: 86334 - DNA, 30 bp, Artificial Sequence
  Synthetic oligonucleotide
aagcgcgctaactgccagcacctcagatgg

SEQ ID NO: 86335 - DNA, 30 bp, Artificial Sequence
  Synthetic oligonucleotide
cctacctatatacagtctgctactagatgg

SEQ ID NO: 86336 - DNA, 31 bp, Artificial Sequence
  Synthetic oligonucleotide
cacacatcccttagatcgtaactaacgatgg

SEQ ID NO: 86337 - DNA, 30 bp, Artificial Sequence
  Synthetic oligonucleotide
ctgtacatcttcctgaataagtaacgatgg

SEQ ID NO: 86338 - DNA, 30 bp, Artificial Sequence
  Synthetic oligonucleotide
catatgaaaattgctatgccagcacgatgg

SEQ ID NO: 86339 - DNA, 30 bp, Artificial Sequence
  Synthetic oligonucleotide
cacaagggtgatagaaggaacccatgatgg

SEQ ID NO: 86340 - DNA, 30 bp, Artificial Sequence
  Synthetic oligonucleotide
agaggtttgcacgcgactgtggcgtgatgg

SEQ ID NO: 86341 - DNA, 30 bp, Artificial Sequence
  Synthetic oligonucleotide
acgtttgtaacaaatggctgatcaatatgg

SEQ ID NO: 86342 - DNA, 30 bp, Artificial Sequence
  Synthetic oligonucleotide
ggaaaaggtgcgaatgtgtctaaactatgg

SEQ ID NO: 86343 - DNA, 30 bp, Artificial Sequence
  Synthetic oligonucleotide
tcacaggatcgagccggggaccgactatgg

SEQ ID NO: 86344 - DNA, 30 bp, Artificial Sequence
  Synthetic oligonucleotide
ctagcggaactaacacagatgcatctatgg

SEQ ID NO: 86345 - DNA, 30 bp, Artificial Sequence
  Synthetic oligonucleotide
aaccgcaggatgaaactgtcagttctatgg

SEQ ID NO: 86346 - DNA, 30 bp, Artificial Sequence
  Synthetic oligonucleotide
acaagttggtcgcgacttcgaatagtatgg

SEQ ID NO: 86347 - DNA, 30 bp, Artificial Sequence
  Synthetic oligonucleotide
aactgggtaaatatcagtggtcgcgtatgg

SEQ ID NO: 86348 - DNA, 30 bp, Artificial Sequence
  Synthetic oligonucleotide
gcagggatgaggttctgccaattcgtatgg

SEQ ID NO: 86349 - DNA, 30 bp, Artificial Sequence
  Synthetic oligonucleotide
gcaaattgcgcggtttcgataagggtatgg

SEQ ID NO: 86350 - DNA, 30 bp, Artificial Sequence
  Synthetic oligonucleotide
ccgaggggtgcccaggtacaccgattatgg

SEQ ID NO: 86351 - DNA, 30 bp, Artificial Sequence
  Synthetic oligonucleotide
catagcgggcctgccacgtcgccgaactgg

SEQ ID NO: 86352 - DNA, 30 bp, Artificial Sequence
  Synthetic oligonucleotide
acatcactttaataccaaattcataactgg

SEQ ID NO: 86353 - DNA, 30 bp, Artificial Sequence
  Synthetic oligonucleotide
ccggagtatcattgttgggggttacactgg

SEQ ID NO: 86354 - DNA, 30 bp, Artificial Sequence
  Synthetic oligonucleotide
cctgccagaagggtaaggaagtgccactgg

SEQ ID NO: 86355 - DNA, 30 bp, Artificial Sequence
  Synthetic oligonucleotide
atatgggggaatcagaatcaccatcactgg

SEQ ID NO: 86356 - DNA, 30 bp, Artificial Sequence
  Synthetic oligonucleotide
acaagataccccaattaatagcctcactgg

SEQ ID NO: 86357 - DNA, 30 bp, Artificial Sequence
  Synthetic oligonucleotide
gaggcatcggttcctcccaagatcgactgg

SEQ ID NO: 86358 - DNA, 30 bp, Artificial Sequence
  Synthetic oligonucleotide
agaaaatgttttacgtcgcccgcgtactgg

SEQ ID NO: 86359 - DNA, 30 bp, Artificial Sequence
  Synthetic oligonucleotide
gggagtcgatatggtcgaccgtattactgg

SEQ ID NO: 86360 - DNA, 30 bp, Artificial Sequence
  Synthetic oligonucleotide
ggcgagctatcgtagtaatcacgttactgg

SEQ ID NO: 86361 - DNA, 30 bp, Artificial Sequence
  Synthetic oligonucleotide
agcgtgcaaggctctaaggggtatgcctgg

SEQ ID NO: 86362 - DNA, 30 bp, Artificial Sequence
  Synthetic oligonucleotide
gaggcggctgggaatatccgacgttcctgg

SEQ ID NO: 86363 - DNA, 30 bp, Artificial Sequence
  Synthetic oligonucleotide
gtaatgagagtatcggaactcattcgctgg

SEQ ID NO: 86364 - DNA, 30 bp, Artificial Sequence
  Synthetic oligonucleotide
gagagaatcctataccctgggggaggctgg

SEQ ID NO: 86365 - DNA, 30 bp, Artificial Sequence
  Synthetic oligonucleotide
cgatgcttatggtcacacaagagtggctgg

SEQ ID NO: 86366 - DNA, 30 bp, Artificial Sequence
  Synthetic oligonucleotide
ctgaacgaggtgcatgctagcgtttgctgg

SEQ ID NO: 86367 - DNA, 30 bp, Artificial Sequence
  Synthetic oligonucleotide
ggggtaatggttgcatgtttattagtctgg

SEQ ID NO: 86368 - DNA, 30 bp, Artificial Sequence
  Synthetic oligonucleotide
gagggcaacactaaaaaagcacacttctgg

SEQ ID NO: 86369 - DNA, 30 bp, Artificial Sequence
  Synthetic oligonucleotide
cagtcctacgcggattcagagtacaagtgg

SEQ ID NO: 86370 - DNA, 30 bp, Artificial Sequence
  Synthetic oligonucleotide
caagtcaaccgggggacctagaaacagtgg

SEQ ID NO: 86371 - DNA, 30 bp, Artificial Sequence
  Synthetic oligonucleotide
cccaaggcgttcaaacaaacagaacagtgg

SEQ ID NO: 86372 - DNA, 30 bp, Artificial Sequence
  Synthetic oligonucleotide
aaggtcttggagcgcggtttatcacagtgg

SEQ ID NO: 86373 - DNA, 30 bp, Artificial Sequence
  Synthetic oligonucleotide
cgggtagctggaaggtcataataccagtgg

SEQ ID NO: 86374 - DNA, 30 bp, Artificial Sequence
  Synthetic oligonucleotide
agggtctagaacaagcacagagcgcagtgg

SEQ ID NO: 86375 - DNA, 30 bp, Artificial Sequence
  Synthetic oligonucleotide
taaagtaagtgtcaagcgttccgagagtgg

SEQ ID NO: 86376 - DNA, 30 bp, Artificial Sequence
  Synthetic oligonucleotide
tacataacatgaaacaacttcgttgagtgg

SEQ ID NO: 86377 - DNA, 30 bp, Artificial Sequence
  Synthetic oligonucleotide
tcccaacccatgatagggaccacaccgtgg

SEQ ID NO: 86378 - DNA, 30 bp, Artificial Sequence
  Synthetic oligonucleotide
cggagtaaggtcctgtacgacaatccgtgg

SEQ ID NO: 86379 - DNA, 30 bp, Artificial Sequence
  Synthetic oligonucleotide
tgctatcggctcagtcgtcgttttccgtgg

SEQ ID NO: 86380 - DNA, 30 bp, Artificial Sequence
  Synthetic oligonucleotide
tgcctaggcgttcaaggaaaatctgcgtgg

SEQ ID NO: 86381 - DNA, 30 bp, Artificial Sequence
  Synthetic oligonucleotide
aacacaagaccgggacattgataatcgtgg

SEQ ID NO: 86382 - DNA, 30 bp, Artificial Sequence
  Synthetic oligonucleotide
caacagttcggtgactgatcatcatcgtgg

SEQ ID NO: 86383 - DNA, 30 bp, Artificial Sequence
  Synthetic oligonucleotide
cctgaacttgctgagaccttaggatcgtgg

SEQ ID NO: 86384 - DNA, 30 bp, Artificial Sequence
  Synthetic oligonucleotide
tggctaaagggtaactgttgttgttcgtgg

SEQ ID NO: 86385 - DNA, 30 bp, Artificial Sequence
  Synthetic oligonucleotide
cattaaggcaaaacttagggagccaggtgg

SEQ ID NO: 86386 - DNA, 30 bp, Artificial Sequence
  Synthetic oligonucleotide
attgggaatacctgtagtccacaagggtgg

SEQ ID NO: 86387 - DNA, 30 bp, Artificial Sequence
  Synthetic oligonucleotide
catgtggcggcaggtcatcagggagggtgg

SEQ ID NO: 86388 - DNA, 30 bp, Artificial Sequence
  Synthetic oligonucleotide
agagcactttttctattactcaccgggtgg

SEQ ID NO: 86389 - DNA, 30 bp, Artificial Sequence
  Synthetic oligonucleotide
gaggggacgggcgagtcaatgggcgggtgg

SEQ ID NO: 86390 - DNA, 30 bp, Artificial Sequence
  Synthetic oligonucleotide
gataaaacgcgtgattgtcactaatggtgg

SEQ ID NO: 86391 - DNA, 30 bp, Artificial Sequence
  Synthetic oligonucleotide
gcggagatacgcgtggtgttgtgctggtgg

SEQ ID NO: 86392 - DNA, 30 bp, Artificial Sequence
  Synthetic oligonucleotide
cttgcaatgtcgaataacggcttctggtgg

SEQ ID NO: 86393 - DNA, 30 bp, Artificial Sequence
  Synthetic oligonucleotide
tcgtacgatctggcaacggggggttggtgg

SEQ ID NO: 86394 - DNA, 30 bp, Artificial Sequence
  Synthetic oligonucleotide
tggtaacagcttggttaaaagctttggtgg

SEQ ID NO: 86395 - DNA, 30 bp, Artificial Sequence
  Synthetic oligonucleotide
ttgaagtgagtgtagcgactgtaaatgtgg

SEQ ID NO: 86396 - DNA, 30 bp, Artificial Sequence
  Synthetic oligonucleotide
gcattatccaagtgtgaatatgtaatgtgg

SEQ ID NO: 86397 - DNA, 30 bp, Artificial Sequence
  Synthetic oligonucleotide
tgatatgaggaagtcggggttcctatgtgg

SEQ ID NO: 86398 - DNA, 30 bp, Artificial Sequence
  Synthetic oligonucleotide
agtataatagggggaagagggaaactgtgg

SEQ ID NO: 86399 - DNA, 30 bp, Artificial Sequence
  Synthetic oligonucleotide
ggcacccttgggcaaaatgacagattgtgg

SEQ ID NO: 86400 - DNA, 30 bp, Artificial Sequence
  Synthetic oligonucleotide
atcgaagtcgtctagttcgcgggaaattgg

SEQ ID NO: 86401 - DNA, 30 bp, Artificial Sequence
  Synthetic oligonucleotide
agcacgagtgtacaaattcgttggaattgg

SEQ ID NO: 86402 - DNA, 30 bp, Artificial Sequence
  Synthetic oligonucleotide
gagggaaagtggagtataattggccattgg

SEQ ID NO: 86403 - DNA, 30 bp, Artificial Sequence
  Synthetic oligonucleotide
gacctgcatagggcatatataggggattgg

SEQ ID NO: 86404 - DNA, 30 bp, Artificial Sequence
  Synthetic oligonucleotide
agcagcagtgatatatgcacttactattgg

SEQ ID NO: 86405 - DNA, 30 bp, Artificial Sequence
  Synthetic oligonucleotide
ggtacagggccggggagttaccacacttgg

SEQ ID NO: 86406 - DNA, 30 bp, Artificial Sequence
  Synthetic oligonucleotide
tcgcagacgtgtgggtgcgtgggcacttgg

SEQ ID NO: 86407 - DNA, 30 bp, Artificial Sequence
  Synthetic oligonucleotide
cacggagctaattatcagagtggaccttgg

SEQ ID NO: 86408 - DNA, 30 bp, Artificial Sequence
  Synthetic oligonucleotide
cacggcataaaggtaccaagatctccttgg

SEQ ID NO: 86409 - DNA, 30 bp, Artificial Sequence
  Synthetic oligonucleotide
acgcgagtacagggggttgtgcaagcttgg

SEQ ID NO: 86410 - DNA, 30 bp, Artificial Sequence
  Synthetic oligonucleotide
cgcattatctcaggatatccgtaggcttgg

SEQ ID NO: 86411 - DNA, 30 bp, Artificial Sequence
  Synthetic oligonucleotide
catcgaagatggcttcgagccaacagttgg

SEQ ID NO: 86412 - DNA, 30 bp, Artificial Sequence
  Synthetic oligonucleotide
gtagccgtctaggccgaaaacgaaggttgg

SEQ ID NO: 86413 - DNA, 30 bp, Artificial Sequence
  Synthetic oligonucleotide
ccaaggacatacaactgaatggatggttgg

SEQ ID NO: 86414 - DNA, 30 bp, Artificial Sequence
  Synthetic oligonucleotide
taaagcatcacactgtaaaaatctggttgg

SEQ ID NO: 86415 - DNA, 30 bp, Artificial Sequence
  Synthetic oligonucleotide
cattgaactcgacacaatacgatatgttgg

SEQ ID NO: 86416 - DNA, 30 bp, Artificial Sequence
  Synthetic oligonucleotide
tggggatccgcatgaactgacctctgttgg

SEQ ID NO: 86417 - DNA, 30 bp, Artificial Sequence
  Synthetic oligonucleotide
actgtacgcaaggtggagcgcaagtgttgg

SEQ ID NO: 86418 - DNA, 30 bp, Artificial Sequence
  Synthetic oligonucleotide
atggagcgcacattaagactccattgttgg

SEQ ID NO: 86419 - DNA, 30 bp, Artificial Sequence
  Synthetic oligonucleotide
actcgacgtataggtggttatatagtttgg

SEQ ID NO: 86420 - DNA, 30 bp, Artificial Sequence
  Synthetic oligonucleotide
gtcaagtaatctgaccttcgtccaaaaatg

SEQ ID NO: 86421 - DNA, 30 bp, Artificial Sequence
  Synthetic oligonucleotide
taccgggccggtcgagtccggaacaaaatg

SEQ ID NO: 86422 - DNA, 30 bp, Artificial Sequence
  Synthetic oligonucleotide
gaggatctggaaaactggattttcaaaatg

SEQ ID NO: 86423 - DNA, 30 bp, Artificial Sequence
  Synthetic oligonucleotide
gtggaatgtcgttggtgagaagttcaaatg

SEQ ID NO: 86424 - DNA, 30 bp, Artificial Sequence
  Synthetic oligonucleotide
agcgcacccccatcacccaatagggaaatg

SEQ ID NO: 86425 - DNA, 30 bp, Artificial Sequence
  Synthetic oligonucleotide
atggacgtacatgactttaagatggaaatg

SEQ ID NO: 86426 - DNA, 30 bp, Artificial Sequence
  Synthetic oligonucleotide
gtcggaagtccgcggagttaaatataaatg

SEQ ID NO: 86427 - DNA, 30 bp, Artificial Sequence
  Synthetic oligonucleotide
aggagaatttacagtcatcgtgaaacaatg

SEQ ID NO: 86428 - DNA, 30 bp, Artificial Sequence
  Synthetic oligonucleotide
gcgccggcgtggaaacgatcgtgaacaatg

SEQ ID NO: 86429 - DNA, 30 bp, Artificial Sequence
  Synthetic oligonucleotide
ggggggggcaacgcgaggaaggtgacaatg

SEQ ID NO: 86430 - DNA, 30 bp, Artificial Sequence
  Synthetic oligonucleotide
gcgctggtaagactagtaaaaggaccaatg

SEQ ID NO: 86431 - DNA, 30 bp, Artificial Sequence
  Synthetic oligonucleotide
ggacacaaaacggaaatcatattcccaatg

SEQ ID NO: 86432 - DNA, 30 bp, Artificial Sequence
  Synthetic oligonucleotide
ctcgaaacacgggtgcatacggcagcaatg

SEQ ID NO: 86433 - DNA, 30 bp, Artificial Sequence
  Synthetic oligonucleotide
atgtgatgaggcaagagaacgagagcaatg

SEQ ID NO: 86434 - DNA, 30 bp, Artificial Sequence
  Synthetic oligonucleotide
ggccaaaaggaaagtacgaacgcggcaatg

SEQ ID NO: 86435 - DNA, 30 bp, Artificial Sequence
  Synthetic oligonucleotide
cggtgcgaatcaggaagatttcatgcaatg

SEQ ID NO: 86436 - DNA, 30 bp, Artificial Sequence
  Synthetic oligonucleotide
acagtgctaagaaaagccaataaatcaatg

SEQ ID NO: 86437 - DNA, 29 bp, Artificial Sequence
  Synthetic oligonucleotide
aaaacgaatccttcaaagttgtatcaatg

SEQ ID NO: 86438 - DNA, 30 bp, Artificial Sequence
  Synthetic oligonucleotide
gtagtccggcttactgcgattcgaagaatg

SEQ ID NO: 86439 - DNA, 30 bp, Artificial Sequence
  Synthetic oligonucleotide
gaatgcccatgattgtgctctcccagaatg

SEQ ID NO: 86440 - DNA, 30 bp, Artificial Sequence
  Synthetic oligonucleotide
tccctgaaataaacagcaagcgccagaatg

SEQ ID NO: 86441 - DNA, 30 bp, Artificial Sequence
  Synthetic oligonucleotide
cggaactggcccttgaagccacctagaatg

SEQ ID NO: 86442 - DNA, 30 bp, Artificial Sequence
  Synthetic oligonucleotide
cgcgttggagaacataatttaggacgaatg

SEQ ID NO: 86443 - DNA, 30 bp, Artificial Sequence
  Synthetic oligonucleotide
tcatctgtgcaacctaggggatatcgaatg

SEQ ID NO: 86444 - DNA, 30 bp, Artificial Sequence
  Synthetic oligonucleotide
tacaatgggccgtcaaatttcgctcgaatg

SEQ ID NO: 86445 - DNA, 30 bp, Artificial Sequence
  Synthetic oligonucleotide
ctcacaagtgctgtcggaattaaaggaatg

SEQ ID NO: 86446 - DNA, 30 bp, Artificial Sequence
  Synthetic oligonucleotide
cctgtctcgccgatatctagggaaggaatg

SEQ ID NO: 86447 - DNA, 30 bp, Artificial Sequence
  Synthetic oligonucleotide
taggcaactgagtcgcacaacacaggaatg

SEQ ID NO: 86448 - DNA, 30 bp, Artificial Sequence
  Synthetic oligonucleotide
tgatcgtcaatattcaatagacacggaatg

SEQ ID NO: 86449 - DNA, 30 bp, Artificial Sequence
  Synthetic oligonucleotide
ctttaagggaggaaaaacgccaccggaatg

SEQ ID NO: 86450 - DNA, 30 bp, Artificial Sequence
  Synthetic oligonucleotide
atgtagtggttcaacatgcaaatgggaatg

SEQ ID NO: 86451 - DNA, 30 bp, Artificial Sequence
  Synthetic oligonucleotide
acttcaaagaaagaacgtgtaagtggaatg

SEQ ID NO: 86452 - DNA, 30 bp, Artificial Sequence
  Synthetic oligonucleotide
tctactctgaatgttgagtcgcttggaatg

SEQ ID NO: 86453 - DNA, 30 bp, Artificial Sequence
  Synthetic oligonucleotide
aagggggatgtaaatccgcactttggaatg

SEQ ID NO: 86454 - DNA, 30 bp, Artificial Sequence
  Synthetic oligonucleotide
atcagggcctcgagtaaagcggaatgaatg

SEQ ID NO: 86455 - DNA, 30 bp, Artificial Sequence
  Synthetic oligonucleotide
gacgaattgtgtccccactcgtcatgaatg

SEQ ID NO: 86456 - DNA, 30 bp, Artificial Sequence
  Synthetic oligonucleotide
tgggtaaggctatgccaatactccataatg

SEQ ID NO: 86457 - DNA, 30 bp, Artificial Sequence
  Synthetic oligonucleotide
tctggtgtgtctacgctgggagggataatg

SEQ ID NO: 86458 - DNA, 30 bp, Artificial Sequence
  Synthetic oligonucleotide
gtacagctgggaccgggtagcgcactaatg

SEQ ID NO: 86459 - DNA, 30 bp, Artificial Sequence
  Synthetic oligonucleotide
aggaacgggggcgtaatagccatgctaatg

SEQ ID NO: 86460 - DNA, 30 bp, Artificial Sequence
  Synthetic oligonucleotide
actggcagctaggcgacgtaaactctaatg

SEQ ID NO: 86461 - DNA, 30 bp, Artificial Sequence
  Synthetic oligonucleotide
gatcgtgagttattcgtaaagcaagtaatg

SEQ ID NO: 86462 - DNA, 30 bp, Artificial Sequence
  Synthetic oligonucleotide
agtaagagcaggtacaagcagggagtaatg

SEQ ID NO: 86463 - DNA, 30 bp, Artificial Sequence
  Synthetic oligonucleotide
taactccagtatgggactcagggggtaatg

SEQ ID NO: 86464 - DNA, 30 bp, Artificial Sequence
  Synthetic oligonucleotide
acaacgagtgtgtccggatcccatgtaatg

SEQ ID NO: 86465 - DNA, 30 bp, Artificial Sequence
  Synthetic oligonucleotide
taggatacattctgagatcgtcatgtaatg

SEQ ID NO: 86466 - DNA, 30 bp, Artificial Sequence
  Synthetic oligonucleotide
tgcgaagtatagtcactgcaaagtgtaatg

SEQ ID NO: 86467 - DNA, 30 bp, Artificial Sequence
  Synthetic oligonucleotide
atcgtgggacaattttattcatttgtaatg

SEQ ID NO: 86468 - DNA, 30 bp, Artificial Sequence
  Synthetic oligonucleotide
gttgtagaggtcgtctgtaagcgcttaatg

SEQ ID NO: 86469 - DNA, 30 bp, Artificial Sequence
  Synthetic oligonucleotide
acattcttagtacagtaaatccgatacatg

SEQ ID NO: 86470 - DNA, 30 bp, Artificial Sequence
  Synthetic oligonucleotide
caggaccatagactgtatattacctacatg

SEQ ID NO: 86471 - DNA, 30 bp, Artificial Sequence
  Synthetic oligonucleotide
gttggctgagaaatagcataaacttacatg

SEQ ID NO: 86472 - DNA, 30 bp, Artificial Sequence
  Synthetic oligonucleotide
ggacatggcgtataattctaagcttacatg

SEQ ID NO: 86473 - DNA, 30 bp, Artificial Sequence
  Synthetic oligonucleotide
attaggaactaagaggagatacgcaccatg

SEQ ID NO: 86474 - DNA, 30 bp, Artificial Sequence
  Synthetic oligonucleotide
gtaaatccgcttaaattactaaagaccatg

SEQ ID NO: 86475 - DNA, 30 bp, Artificial Sequence
  Synthetic oligonucleotide
ttgactcaccaaataacgggcatgaccatg

SEQ ID NO: 86476 - DNA, 30 bp, Artificial Sequence
  Synthetic oligonucleotide
gtaacagtgctagatggttgaggtaccatg

SEQ ID NO: 86477 - DNA, 30 bp, Artificial Sequence
  Synthetic oligonucleotide
taagatagaagtgtatatggaaatcccatg

SEQ ID NO: 86478 - DNA, 30 bp, Artificial Sequence
  Synthetic oligonucleotide
tatataggacgacttcaagtgatagccatg

SEQ ID NO: 86479 - DNA, 30 bp, Artificial Sequence
  Synthetic oligonucleotide
gttgaagcactaataacacaagtggccatg

SEQ ID NO: 86480 - DNA, 30 bp, Artificial Sequence
  Synthetic oligonucleotide
gggaccacatccaaattcaaccggtccatg

SEQ ID NO: 86481 - DNA, 30 bp, Artificial Sequence
  Synthetic oligonucleotide
cagctagcagaaaggcaatcgtctagcatg

SEQ ID NO: 86482 - DNA, 30 bp, Artificial Sequence
  Synthetic oligonucleotide
ctgttaatacacataatcgggaaccgcatg

SEQ ID NO: 86483 - DNA, 30 bp, Artificial Sequence
  Synthetic oligonucleotide
actacggcgtaccgcccagtagatcgcatg

SEQ ID NO: 86484 - DNA, 30 bp, Artificial Sequence
  Synthetic oligonucleotide
agatacgtaaggtcacctttgtgaggcatg

SEQ ID NO: 86485 - DNA, 30 bp, Artificial Sequence
  Synthetic oligonucleotide
tgtaaggaaggctctccaagtcacggcatg

SEQ ID NO: 86486 - DNA, 30 bp, Artificial Sequence
  Synthetic oligonucleotide
aacacaataatggttattttgctatgcatg

SEQ ID NO: 86487 - DNA, 30 bp, Artificial Sequence
  Synthetic oligonucleotide
aatcatattaaggggagtgactagtgcatg

SEQ ID NO: 86488 - DNA, 30 bp, Artificial Sequence
  Synthetic oligonucleotide
accacaaagggggcttcccaaagaatcatg

SEQ ID NO: 86489 - DNA, 30 bp, Artificial Sequence
  Synthetic oligonucleotide
ccgtgagaagaccctaaatttggcatcatg

SEQ ID NO: 86490 - DNA, 30 bp, Artificial Sequence
  Synthetic oligonucleotide
tcgaattgggagggggttcatcagatcatg

SEQ ID NO: 86491 - DNA, 30 bp, Artificial Sequence
  Synthetic oligonucleotide
ttagggttacggtatgcgatgacgatcatg

SEQ ID NO: 86492 - DNA, 30 bp, Artificial Sequence
  Synthetic oligonucleotide
cagtgaactaccagcggtataaatatcatg

SEQ ID NO: 86493 - DNA, 30 bp, Artificial Sequence
  Synthetic oligonucleotide
aaacttggtaagacctcaacgaatatcatg

SEQ ID NO: 86494 - DNA, 30 bp, Artificial Sequence
  Synthetic oligonucleotide
gtgagggggacgtgaagtatgggcctcatg

SEQ ID NO: 86495 - DNA, 30 bp, Artificial Sequence
  Synthetic oligonucleotide
tacggctacgcggtgctcattgtgctcatg

SEQ ID NO: 86496 - DNA, 30 bp, Artificial Sequence
  Synthetic oligonucleotide
ggggggactcaccgtgacggaatagtcatg

SEQ ID NO: 86497 - DNA, 30 bp, Artificial Sequence
  Synthetic oligonucleotide
agtagcaagatgatcttattacgtgtcatg

SEQ ID NO: 86498 - DNA, 30 bp, Artificial Sequence
  Synthetic oligonucleotide
accgcagatcgggaattatgtggtgtcatg

SEQ ID NO: 86499 - DNA, 30 bp, Artificial Sequence
  Synthetic oligonucleotide
agggtggacctcgcgcattgtaccttcatg

SEQ ID NO: 86500 - DNA, 30 bp, Artificial Sequence
  Synthetic oligonucleotide
aatgagtgagataatgttaacccgttcatg

SEQ ID NO: 86501 - DNA, 30 bp, Artificial Sequence
  Synthetic oligonucleotide
taagactgcaacagtagtccggtaaagatg

SEQ ID NO: 86502 - DNA, 30 bp, Artificial Sequence
  Synthetic oligonucleotide
ataacccatcttttaacagcgcggaagatg

SEQ ID NO: 86503 - DNA, 30 bp, Artificial Sequence
  Synthetic oligonucleotide
cgtacgagtacaagggtgaccaataagatg

SEQ ID NO: 86504 - DNA, 30 bp, Artificial Sequence
  Synthetic oligonucleotide
ctacgagcgtagttcctcttgtcacagatg

SEQ ID NO: 86505 - DNA, 30 bp, Artificial Sequence
  Synthetic oligonucleotide
gcatcgtatcagaaatcaacctagcagatg

SEQ ID NO: 86506 - DNA, 30 bp, Artificial Sequence
  Synthetic oligonucleotide
attgagactggaacagggggttatcagatg

SEQ ID NO: 86507 - DNA, 30 bp, Artificial Sequence
  Synthetic oligonucleotide
atagcgatcctgagtcatcatttggagatg

SEQ ID NO: 86508 - DNA, 30 bp, Artificial Sequence
  Synthetic oligonucleotide
ttggttgtgtgtcaggttggcactgagatg

SEQ ID NO: 86509 - DNA, 30 bp, Artificial Sequence
  Synthetic oligonucleotide
cgggcattcggcgggaggttccctgagatg

SEQ ID NO: 86510 - DNA, 30 bp, Artificial Sequence
  Synthetic oligonucleotide
acgtacctgtactatgtatcataatagatg

SEQ ID NO: 86511 - DNA, 30 bp, Artificial Sequence
  Synthetic oligonucleotide
ggggtaaaacggtgaatagccacctagatg

SEQ ID NO: 86512 - DNA, 31 bp, Artificial Sequence
  Synthetic oligonucleotide
catgtcggaactgtgggacggttattagatg

SEQ ID NO: 86513 - DNA, 30 bp, Artificial Sequence
  Synthetic oligonucleotide
cgtggtagtcaaataccttacctcccgatg

SEQ ID NO: 86514 - DNA, 30 bp, Artificial Sequence
  Synthetic oligonucleotide
tctaggtatatacctaaaaaggaagcgatg

SEQ ID NO: 86515 - DNA, 30 bp, Artificial Sequence
  Synthetic oligonucleotide
tggtccctagtatcaatcatccgcgcgatg

SEQ ID NO: 86516 - DNA, 30 bp, Artificial Sequence
  Synthetic oligonucleotide
tgttgacatcttagcgtgtacagggcgatg

SEQ ID NO: 86517 - DNA, 30 bp, Artificial Sequence
  Synthetic oligonucleotide
gcaaaattgggcccgagtcgctgtgcgatg

SEQ ID NO: 86518 - DNA, 30 bp, Artificial Sequence
  Synthetic oligonucleotide
tgataaggattgcccgcccattgtgcgatg

SEQ ID NO: 86519 - DNA, 30 bp, Artificial Sequence
  Synthetic oligonucleotide
tataacaggttgaccagggggtgctcgatg

SEQ ID NO: 86520 - DNA, 30 bp, Artificial Sequence
  Synthetic oligonucleotide
ccaacatattcaaaagaaaaagagaggatg

SEQ ID NO: 86521 - DNA, 30 bp, Artificial Sequence
  Synthetic oligonucleotide
gcagtcgactgtccacgttagaaacggatg

SEQ ID NO: 86522 - DNA, 30 bp, Artificial Sequence
  Synthetic oligonucleotide
tcgccttaactgaaagggctaacacggatg

SEQ ID NO: 86523 - DNA, 30 bp, Artificial Sequence
  Synthetic oligonucleotide
ggaactgcatcagtaaattttcgccggatg

SEQ ID NO: 86524 - DNA, 30 bp, Artificial Sequence
  Synthetic oligonucleotide
tacttcactgttgtatggaaaatggggatg

SEQ ID NO: 86525 - DNA, 30 bp, Artificial Sequence
  Synthetic oligonucleotide
tcataggacttctatcttactatatggatg

SEQ ID NO: 86526 - DNA, 30 bp, Artificial Sequence
  Synthetic oligonucleotide
cgcctatttcttaacgttaactagtggatg

SEQ ID NO: 86527 - DNA, 30 bp, Artificial Sequence
  Synthetic oligonucleotide
tcaggacccgcctcatacgtaaaaatgatg

SEQ ID NO: 86528 - DNA, 30 bp, Artificial Sequence
  Synthetic oligonucleotide
agtctagcccttctcgcgccgaaaatgatg

SEQ ID NO: 86529 - DNA, 30 bp, Artificial Sequence
  Synthetic oligonucleotide
atcagcagtgcgggcgccccgcagatgatg

SEQ ID NO: 86530 - DNA, 30 bp, Artificial Sequence
  Synthetic oligonucleotide
tcgtggggagacaaggtgtatactctgatg

SEQ ID NO: 86531 - DNA, 30 bp, Artificial Sequence
  Synthetic oligonucleotide
tcgtacatagagggcgaacggaacttgatg

SEQ ID NO: 86532 - DNA, 30 bp, Artificial Sequence
  Synthetic oligonucleotide
actgattgccaccccaatcgcgacttgatg

SEQ ID NO: 86533 - DNA, 30 bp, Artificial Sequence
  Synthetic oligonucleotide
cctgcattaaggagcggacgggctttgatg

SEQ ID NO: 86534 - DNA, 30 bp, Artificial Sequence
  Synthetic oligonucleotide
taccgccagtcggtgtccagctaaaatatg

SEQ ID NO: 86535 - DNA, 30 bp, Artificial Sequence
  Synthetic oligonucleotide
tacacgatataaagttgtcagcgaaatatg

SEQ ID NO: 86536 - DNA, 30 bp, Artificial Sequence
  Synthetic oligonucleotide
ggttcaagggataatatgggctacaatatg

SEQ ID NO: 86537 - DNA, 30 bp, Artificial Sequence
  Synthetic oligonucleotide
tagcgtacgaacatatagggcgagaatatg

SEQ ID NO: 86538 - DNA, 30 bp, Artificial Sequence
  Synthetic oligonucleotide
gttccagggtccagagcgacagataatatg

SEQ ID NO: 86539 - DNA, 30 bp, Artificial Sequence
  Synthetic oligonucleotide
aacggtctcgatgagagttatgcgcatatg

SEQ ID NO: 86540 - DNA, 30 bp, Artificial Sequence
  Synthetic oligonucleotide
cgaaagaataaagataaaacatcgcatatg

SEQ ID NO: 86541 - DNA, 30 bp, Artificial Sequence
  Synthetic oligonucleotide
cacgggctgaaggatagatcttaggatatg

SEQ ID NO: 86542 - DNA, 30 bp, Artificial Sequence
  Synthetic oligonucleotide
cacgcaagggctggagcagcaacctatatg

SEQ ID NO: 86543 - DNA, 30 bp, Artificial Sequence
  Synthetic oligonucleotide
agcggaattgcgctctgatcggttactatg

SEQ ID NO: 86544 - DNA, 30 bp, Artificial Sequence
  Synthetic oligonucleotide
gacagaaccggcgtatggatgtcccctatg

SEQ ID NO: 86545 - DNA, 30 bp, Artificial Sequence
  Synthetic oligonucleotide
cgaccggtcgatggaatcaatcttcctatg

SEQ ID NO: 86546 - DNA, 30 bp, Artificial Sequence
  Synthetic oligonucleotide
ggtccgccctaccgcaagaaggttagtatg

SEQ ID NO: 86547 - DNA, 30 bp, Artificial Sequence
  Synthetic oligonucleotide
tcgcattgcacgacagggccgggcggtatg

SEQ ID NO: 86548 - DNA, 30 bp, Artificial Sequence
  Synthetic oligonucleotide
tagagtagagctcagttggtgggcggtatg

SEQ ID NO: 86549 - DNA, 30 bp, Artificial Sequence
  Synthetic oligonucleotide
cattacttttagcataacccgatcggtatg

SEQ ID NO: 86550 - DNA, 30 bp, Artificial Sequence
  Synthetic oligonucleotide
ccaagcgttgtctgagtgctgatcggtatg

SEQ ID NO: 86551 - DNA, 30 bp, Artificial Sequence
  Synthetic oligonucleotide
ctgtggacgagagaatgccgaaccattatg

SEQ ID NO: 86552 - DNA, 30 bp, Artificial Sequence
  Synthetic oligonucleotide
acgccgagttccagcaccacgggcattatg

SEQ ID NO: 86553 - DNA, 30 bp, Artificial Sequence
  Synthetic oligonucleotide
cgagcacagtgactttaccgcacagttatg

SEQ ID NO: 86554 - DNA, 30 bp, Artificial Sequence
  Synthetic oligonucleotide
cgtactataattagctaaagcagtgttatg

SEQ ID NO: 86555 - DNA, 30 bp, Artificial Sequence
  Synthetic oligonucleotide
tggacgccacggtcccatcattgctttatg

SEQ ID NO: 86556 - DNA, 30 bp, Artificial Sequence
  Synthetic oligonucleotide
gtcgcaactgggtagtgcgatccacaactg

SEQ ID NO: 86557 - DNA, 30 bp, Artificial Sequence
  Synthetic oligonucleotide
cggtcactgtgtttagttcgagcggaactg

SEQ ID NO: 86558 - DNA, 30 bp, Artificial Sequence
  Synthetic oligonucleotide
ggcggctctcgcaacgccaagcgataactg

SEQ ID NO: 86559 - DNA, 30 bp, Artificial Sequence
  Synthetic oligonucleotide
tcgtgtgtccgtattagtcggacgtaactg

SEQ ID NO: 86560 - DNA, 30 bp, Artificial Sequence
  Synthetic oligonucleotide
aggaaggttagagtggggtaggtaccactg

SEQ ID NO: 86561 - DNA, 30 bp, Artificial Sequence
  Synthetic oligonucleotide
gtggatcggggcaaaccgaacataagactg

SEQ ID NO: 86562 - DNA, 30 bp, Artificial Sequence
  Synthetic oligonucleotide
ggtacgcattttatgaacattctcagactg

SEQ ID NO: 86563 - DNA, 30 bp, Artificial Sequence
  Synthetic oligonucleotide
ccttgtacgagcgggtaaagtcagagactg

SEQ ID NO: 86564 - DNA, 30 bp, Artificial Sequence
  Synthetic oligonucleotide
agcgatataaaggagattccctatagactg

SEQ ID NO: 86565 - DNA, 30 bp, Artificial Sequence
  Synthetic oligonucleotide
ccgggtgtcaatacttgtcagagtagactg

SEQ ID NO: 86566 - DNA, 30 bp, Artificial Sequence
  Synthetic oligonucleotide
aagcgcgagtgagacatttgcggtagactg

SEQ ID NO: 86567 - DNA, 30 bp, Artificial Sequence
  Synthetic oligonucleotide
ccaagtcagagccatcttcgatacggactg

SEQ ID NO: 86568 - DNA, 30 bp, Artificial Sequence
  Synthetic oligonucleotide
atgacaataaccgtcgtaacgacatgactg

SEQ ID NO: 86569 - DNA, 30 bp, Artificial Sequence
  Synthetic oligonucleotide
accagcgattaacaagaatgtgactgactg

SEQ ID NO: 86570 - DNA, 30 bp, Artificial Sequence
  Synthetic oligonucleotide
acggataccgtgtcactgaacgtgtgactg

SEQ ID NO: 86571 - DNA, 30 bp, Artificial Sequence
  Synthetic oligonucleotide
gcaggcgcggggtttaatcatggagtactg

SEQ ID NO: 86572 - DNA, 30 bp, Artificial Sequence
  Synthetic oligonucleotide
ttgcgcgtggagatcgtcgtagttttactg

SEQ ID NO: 86573 - DNA, 30 bp, Artificial Sequence
  Synthetic oligonucleotide
agtccgacggcgaggtatgtatgaaacctg

SEQ ID NO: 86574 - DNA, 30 bp, Artificial Sequence
  Synthetic oligonucleotide
cgataaccagtgttcgaataatataacctg

SEQ ID NO: 86575 - DNA, 30 bp, Artificial Sequence
  Synthetic oligonucleotide
aagatcgcactcttgtatagcacccacctg

SEQ ID NO: 86576 - DNA, 30 bp, Artificial Sequence
  Synthetic oligonucleotide
agatgacccaaatctaaatcagggcacctg

SEQ ID NO: 86577 - DNA, 30 bp, Artificial Sequence
  Synthetic oligonucleotide
tgtgaattaatgatgggcgagcccgacctg

SEQ ID NO: 86578 - DNA, 30 bp, Artificial Sequence
  Synthetic oligonucleotide
ttgagcggatgatccgttaaaatggacctg

SEQ ID NO: 86579 - DNA, 30 bp, Artificial Sequence
  Synthetic oligonucleotide
acatggcgtaactgaaattagcgtgacctg

SEQ ID NO: 86580 - DNA, 30 bp, Artificial Sequence
  Synthetic oligonucleotide
tatgggaggaggaccaacccaacatacctg

SEQ ID NO: 86581 - DNA, 30 bp, Artificial Sequence
  Synthetic oligonucleotide
gtgaacaggtacaacggtcactgatacctg

SEQ ID NO: 86582 - DNA, 30 bp, Artificial Sequence
  Synthetic oligonucleotide
accttgacatcatcgatccagtgttacctg

SEQ ID NO: 86583 - DNA, 30 bp, Artificial Sequence
  Synthetic oligonucleotide
ctgataggtgtaaatgtgccctcaaccctg

SEQ ID NO: 86584 - DNA, 30 bp, Artificial Sequence
  Synthetic oligonucleotide
tgaatggaagaatgacggaatcaagccctg

SEQ ID NO: 86585 - DNA, 30 bp, Artificial Sequence
  Synthetic oligonucleotide
cacgtcatagcaaacgacttaatctccctg

SEQ ID NO: 86586 - DNA, 30 bp, Artificial Sequence
  Synthetic oligonucleotide
ccaggtctagtggcacctcagagacgcctg

SEQ ID NO: 86587 - DNA, 30 bp, Artificial Sequence
  Synthetic oligonucleotide
ctggtcggggtaggcattgacaaccgcctg

SEQ ID NO: 86588 - DNA, 30 bp, Artificial Sequence
  Synthetic oligonucleotide
aaaggatcctggcacctaagggcgggcctg

SEQ ID NO: 86589 - DNA, 30 bp, Artificial Sequence
  Synthetic oligonucleotide
cgaagagggggtgccgcgcctaatggcctg

SEQ ID NO: 86590 - DNA, 30 bp, Artificial Sequence
  Synthetic oligonucleotide
tgcgttatacatggggtgaagattggcctg

SEQ ID NO: 86591 - DNA, 30 bp, Artificial Sequence
  Synthetic oligonucleotide
caaataggctagtatgcccgcaattgcctg

SEQ ID NO: 86592 - DNA, 30 bp, Artificial Sequence
  Synthetic oligonucleotide
cttgcatctcgcaaaacctagtggatcctg

SEQ ID NO: 86593 - DNA, 30 bp, Artificial Sequence
  Synthetic oligonucleotide
ttgcggtgtccggcgggcgatagactcctg

SEQ ID NO: 86594 - DNA, 30 bp, Artificial Sequence
  Synthetic oligonucleotide
cgggcgagtaagcgtgcggccgtactcctg

SEQ ID NO: 86595 - DNA, 30 bp, Artificial Sequence
  Synthetic oligonucleotide
ctagaatcgcgtattttggctatgctcctg

SEQ ID NO: 86596 - DNA, 30 bp, Artificial Sequence
  Synthetic oligonucleotide
cataagatcccgaagggaatgcatctcctg

SEQ ID NO: 86597 - DNA, 30 bp, Artificial Sequence
  Synthetic oligonucleotide
aggacatagagctatagataaggagtcctg

SEQ ID NO: 86598 - DNA, 30 bp, Artificial Sequence
  Synthetic oligonucleotide
gaatgccggaattgtatcctttcggtcctg

SEQ ID NO: 86599 - DNA, 30 bp, Artificial Sequence
  Synthetic oligonucleotide
aatacaactcagagtaaatgacacttcctg

SEQ ID NO: 86600 - DNA, 30 bp, Artificial Sequence
  Synthetic oligonucleotide
ctgcggtggacgctaataagtattttcctg

SEQ ID NO: 86601 - DNA, 30 bp, Artificial Sequence
  Synthetic oligonucleotide
cgtattagaacatgatagtgatggaagctg

SEQ ID NO: 86602 - DNA, 30 bp, Artificial Sequence
  Synthetic oligonucleotide
agacgagttaagccacacgtatgtaagctg

SEQ ID NO: 86603 - DNA, 30 bp, Artificial Sequence
  Synthetic oligonucleotide
agccatgcacctaaccaggccacccagctg

SEQ ID NO: 86604 - DNA, 30 bp, Artificial Sequence
  Synthetic oligonucleotide
gagcctgagggaacgcaaaccccgcagctg

SEQ ID NO: 86605 - DNA, 30 bp, Artificial Sequence
  Synthetic oligonucleotide
agctacactagcttcaaccggcccgagctg

SEQ ID NO: 86606 - DNA, 30 bp, Artificial Sequence
  Synthetic oligonucleotide
cagatcattaaactacacagcctcgagctg

SEQ ID NO: 86607 - DNA, 30 bp, Artificial Sequence
  Synthetic oligonucleotide
gacaaaggtagtatgaccataggtgagctg

SEQ ID NO: 86608 - DNA, 30 bp, Artificial Sequence
  Synthetic oligonucleotide
ggaggcaaggctaggatcgttcgatagctg

SEQ ID NO: 86609 - DNA, 30 bp, Artificial Sequence
  Synthetic oligonucleotide
agaggcactggggacccgctcgcaccgctg

SEQ ID NO: 86610 - DNA, 30 bp, Artificial Sequence
  Synthetic oligonucleotide
aaggatgtagttacattggtcggaccgctg

SEQ ID NO: 86611 - DNA, 30 bp, Artificial Sequence
  Synthetic oligonucleotide
ttaaagcattcgtgtccgaaccccccgctg

SEQ ID NO: 86612 - DNA, 30 bp, Artificial Sequence
  Synthetic oligonucleotide
cttcggaggttggacagggtttcagcgctg

SEQ ID NO: 86613 - DNA, 30 bp, Artificial Sequence
  Synthetic oligonucleotide
gcaaccagtagtcccacgggaggtgcgctg

SEQ ID NO: 86614 - DNA, 30 bp, Artificial Sequence
  Synthetic oligonucleotide
ggatacatagaaacttagtaggaatcgctg

SEQ ID NO: 86615 - DNA, 30 bp, Artificial Sequence
  Synthetic oligonucleotide
aatgaaacatagcgaagtatggggtcgctg

SEQ ID NO: 86616 - DNA, 30 bp, Artificial Sequence
  Synthetic oligonucleotide
atggaacggataagtggatcttcacggctg

SEQ ID NO: 86617 - DNA, 30 bp, Artificial Sequence
  Synthetic oligonucleotide
agcagcttgcttaagcatgaactacggctg

SEQ ID NO: 86618 - DNA, 30 bp, Artificial Sequence
  Synthetic oligonucleotide
accgtggaagtttccagctggtggcggctg

SEQ ID NO: 86619 - DNA, 30 bp, Artificial Sequence
  Synthetic oligonucleotide
tatggtaccgtgtttgctagagatcggctg

SEQ ID NO: 86620 - DNA, 30 bp, Artificial Sequence
  Synthetic oligonucleotide
tcccaaagccaaaagaagaggggagggctg

SEQ ID NO: 86621 - DNA, 30 bp, Artificial Sequence
  Synthetic oligonucleotide
caaagcagaatggggtcttcggccgggctg

SEQ ID NO: 86622 - DNA, 30 bp, Artificial Sequence
  Synthetic oligonucleotide
tcgttgtcgtaccgggtgcatcctgggctg

SEQ ID NO: 86623 - DNA, 30 bp, Artificial Sequence
  Synthetic oligonucleotide
cgctcacgtttgtacagatttgcttggctg

SEQ ID NO: 86624 - DNA, 30 bp, Artificial Sequence
  Synthetic oligonucleotide
cggaagaaaggctcgagataaagcatgctg

SEQ ID NO: 86625 - DNA, 30 bp, Artificial Sequence
  Synthetic oligonucleotide
atcaaagctcaggataaagacaggatgctg

SEQ ID NO: 86626 - DNA, 30 bp, Artificial Sequence
  Synthetic oligonucleotide
ctcctatcaatgagttatcagcaattgctg

SEQ ID NO: 86627 - DNA, 30 bp, Artificial Sequence
  Synthetic oligonucleotide
gctaacgtaactgctgttgttgccttgctg

SEQ ID NO: 86628 - DNA, 30 bp, Artificial Sequence
  Synthetic oligonucleotide
ggccgtaagactgatcgaaggctcttgctg

SEQ ID NO: 86629 - DNA, 30 bp, Artificial Sequence
  Synthetic oligonucleotide
taaatcctgggaccaaacgggtgaaatctg

SEQ ID NO: 86630 - DNA, 30 bp, Artificial Sequence
  Synthetic oligonucleotide
ggtggaagcatacggttaaaccacaatctg

SEQ ID NO: 86631 - DNA, 30 bp, Artificial Sequence
  Synthetic oligonucleotide
atgagtacggacgcgcgaggcaccaatctg

SEQ ID NO: 86632 - DNA, 30 bp, Artificial Sequence
  Synthetic oligonucleotide
catctttagggggggaaaagagatcatctg

SEQ ID NO: 86633 - DNA, 30 bp, Artificial Sequence
  Synthetic oligonucleotide
aggaactcgggccaaataaatccggatctg

SEQ ID NO: 86634 - DNA, 30 bp, Artificial Sequence
  Synthetic oligonucleotide
actttggggggctgggacacaacgtatctg

SEQ ID NO: 86635 - DNA, 30 bp, Artificial Sequence
  Synthetic oligonucleotide
tgtggcccggaaatcatcagggttactctg

SEQ ID NO: 86636 - DNA, 30 bp, Artificial Sequence
  Synthetic oligonucleotide
gtagcataagatcagagcgcgggacctctg

SEQ ID NO: 86637 - DNA, 30 bp, Artificial Sequence
  Synthetic oligonucleotide
accgaaaacattaggtaatgatacgctctg

SEQ ID NO: 86638 - DNA, 30 bp, Artificial Sequence
  Synthetic oligonucleotide
ccgtcatgtttgggagtgacaaattctctg

SEQ ID NO: 86639 - DNA, 30 bp, Artificial Sequence
  Synthetic oligonucleotide
ttggacaaaaaatgtagtccagtaagtctg

SEQ ID NO: 86640 - DNA, 30 bp, Artificial Sequence
  Synthetic oligonucleotide
aagctcgggccgtgtgttagaaccagtctg

SEQ ID NO: 86641 - DNA, 30 bp, Artificial Sequence
  Synthetic oligonucleotide
gtggcgggttatctatcaaaagctagtctg

SEQ ID NO: 86642 - DNA, 30 bp, Artificial Sequence
  Synthetic oligonucleotide
ggtctagaaaggcacgctcggtaccgtctg

SEQ ID NO: 86643 - DNA, 30 bp, Artificial Sequence
  Synthetic oligonucleotide
ccgctagagtccagagagggtgtccgtctg

SEQ ID NO: 86644 - DNA, 30 bp, Artificial Sequence
  Synthetic oligonucleotide
taagggtcacacgtcatgccaacgggtctg

SEQ ID NO: 86645 - DNA, 30 bp, Artificial Sequence
  Synthetic oligonucleotide
aagcgggggctaagttacgatgctggtctg

SEQ ID NO: 86646 - DNA, 30 bp, Artificial Sequence
  Synthetic oligonucleotide
cttcagagggagaagaattatgcatgtctg

SEQ ID NO: 86647 - DNA, 30 bp, Artificial Sequence
  Synthetic oligonucleotide
aggtatacgagtgttataacaggaattctg

SEQ ID NO: 86648 - DNA, 30 bp, Artificial Sequence
  Synthetic oligonucleotide
gtgatggggttgtaatcgagagtagttctg

SEQ ID NO: 86649 - DNA, 30 bp, Artificial Sequence
  Synthetic oligonucleotide
tgaccaacgagacgacactaaaattttctg

SEQ ID NO: 86650 - DNA, 30 bp, Artificial Sequence
  Synthetic oligonucleotide
acgcgttaatgtcgggcagggaattttctg

SEQ ID NO: 86651 - DNA, 30 bp, Artificial Sequence
  Synthetic oligonucleotide
cgtggaacgtcactcatgggcggttttctg

SEQ ID NO: 86652 - DNA, 30 bp, Artificial Sequence
  Synthetic oligonucleotide
atatcacttggctttaatcggcacaaagtg

SEQ ID NO: 86653 - DNA, 30 bp, Artificial Sequence
  Synthetic oligonucleotide
tataggtcaattgcgtcactgtggaaagtg

SEQ ID NO: 86654 - DNA, 30 bp, Artificial Sequence
  Synthetic oligonucleotide
agccaacaggtgatggactaggttaaagtg

SEQ ID NO: 86655 - DNA, 30 bp, Artificial Sequence
  Synthetic oligonucleotide
gtatgagagaacaagttgagcggacaagtg

SEQ ID NO: 86656 - DNA, 30 bp, Artificial Sequence
  Synthetic oligonucleotide
accgtcagattacgtgacttccagcaagtg

SEQ ID NO: 86657 - DNA, 30 bp, Artificial Sequence
  Synthetic oligonucleotide
agcacggtgttatctaaccagcagcaagtg

SEQ ID NO: 86658 - DNA, 31 bp, Artificial Sequence
  Synthetic oligonucleotide
aatggtgtaggcgggaacgatagggcaagtg

SEQ ID NO: 86659 - DNA, 30 bp, Artificial Sequence
  Synthetic oligonucleotide
aaacggtaactagcgtctggcctgcaagtg

SEQ ID NO: 86660 - DNA, 30 bp, Artificial Sequence
  Synthetic oligonucleotide
tgtgaggcctggttagccagtgtgcaagtg

SEQ ID NO: 86661 - DNA, 30 bp, Artificial Sequence
  Synthetic oligonucleotide
acctccgttcgagttatctgtaaagaagtg

SEQ ID NO: 86662 - DNA, 30 bp, Artificial Sequence
  Synthetic oligonucleotide
ccactagagcgtagctacggggggtaagtg

SEQ ID NO: 86663 - DNA, 30 bp, Artificial Sequence
  Synthetic oligonucleotide
tagttaaacagcaaccgcctttggtaagtg

SEQ ID NO: 86664 - DNA, 30 bp, Artificial Sequence
  Synthetic oligonucleotide
catatcaaggtgtgccaggcccatacagtg

SEQ ID NO: 86665 - DNA, 30 bp, Artificial Sequence
  Synthetic oligonucleotide
gggtgtcaaatgaggcgtatctatacagtg

SEQ ID NO: 86666 - DNA, 30 bp, Artificial Sequence
  Synthetic oligonucleotide
atcagaaaaaacagaacagatttaccagtg

SEQ ID NO: 86667 - DNA, 30 bp, Artificial Sequence
  Synthetic oligonucleotide
acaacataagataggtataacggtccagtg

SEQ ID NO: 86668 - DNA, 30 bp, Artificial Sequence
  Synthetic oligonucleotide
aagggggtggtgtactatgaaggcgcagtg

SEQ ID NO: 86669 - DNA, 30 bp, Artificial Sequence
  Synthetic oligonucleotide
agaccggggttcgggtctatatgggcagtg

SEQ ID NO: 86670 - DNA, 30 bp, Artificial Sequence
  Synthetic oligonucleotide
gccccaccagaatgttacggcaaatcagtg

SEQ ID NO: 86671 - DNA, 30 bp, Artificial Sequence
  Synthetic oligonucleotide
agcctggagtacagtacatgtgcctcagtg

SEQ ID NO: 86672 - DNA, 30 bp, Artificial Sequence
  Synthetic oligonucleotide
cagagtggtatgtttgaaacagtctcagtg

SEQ ID NO: 86673 - DNA, 30 bp, Artificial Sequence
  Synthetic oligonucleotide
ttgctgacctccattgggtgagtaagagtg

SEQ ID NO: 86674 - DNA, 30 bp, Artificial Sequence
  Synthetic oligonucleotide
ccaacagaaggggcccttattggcagagtg

SEQ ID NO: 86675 - DNA, 30 bp, Artificial Sequence
  Synthetic oligonucleotide
ttaggatcggtcgaattttcaatcagagtg

SEQ ID NO: 86676 - DNA, 30 bp, Artificial Sequence
  Synthetic oligonucleotide
ccacgctcggcttcatacgtaatcagagtg

SEQ ID NO: 86677 - DNA, 30 bp, Artificial Sequence
  Synthetic oligonucleotide
caggaagagagtggcccatatatcagagtg

SEQ ID NO: 86678 - DNA, 30 bp, Artificial Sequence
  Synthetic oligonucleotide
gggtattgcgtaagctgagcagctagagtg

SEQ ID NO: 86679 - DNA, 30 bp, Artificial Sequence
  Synthetic oligonucleotide
tgccaggtcgtggtaaggttttgacgagtg

SEQ ID NO: 86680 - DNA, 30 bp, Artificial Sequence
  Synthetic oligonucleotide
ctgttgcggaggaggggcggatccggagtg

SEQ ID NO: 86681 - DNA, 30 bp, Artificial Sequence
  Synthetic oligonucleotide
ggcgtttctcaataataaaagcgtggagtg

SEQ ID NO: 86682 - DNA, 31 bp, Artificial Sequence
  Synthetic oligonucleotide
tgaaccgtcgagccagctctttgttggagtg

SEQ ID NO: 86683 - DNA, 30 bp, Artificial Sequence
  Synthetic oligonucleotide
gagggtgtgtcggcacagatcgaatgagtg

SEQ ID NO: 86684 - DNA, 30 bp, Artificial Sequence
  Synthetic oligonucleotide
gggcgactcaaggtcacactgtaatgagtg

SEQ ID NO: 86685 - DNA, 30 bp, Artificial Sequence
  Synthetic oligonucleotide
cacatacatcatgggagttgttgatgagtg

SEQ ID NO: 86686 - DNA, 30 bp, Artificial Sequence
  Synthetic oligonucleotide
ttgaaggccgcgggcccacgccaaatagtg

SEQ ID NO: 86687 - DNA, 30 bp, Artificial Sequence
  Synthetic oligonucleotide
cgaatatggagggttgtgccaggaatagtg

SEQ ID NO: 86688 - DNA, 30 bp, Artificial Sequence
  Synthetic oligonucleotide
ccagatagaaaagggcatctatgaatagtg

SEQ ID NO: 86689 - DNA, 31 bp, Artificial Sequence
  Synthetic oligonucleotide
cagacatgtgggttcagagatcttcatagtg

SEQ ID NO: 86690 - DNA, 30 bp, Artificial Sequence
  Synthetic oligonucleotide
cacaggaatgagaactctggtgtgatagtg

SEQ ID NO: 86691 - DNA, 30 bp, Artificial Sequence
  Synthetic oligonucleotide
ctcgatttgtcggcacgttatcgtatagtg

SEQ ID NO: 86692 - DNA, 30 bp, Artificial Sequence
  Synthetic oligonucleotide
taacgatggtttctggaaaacattatagtg

SEQ ID NO: 86693 - DNA, 30 bp, Artificial Sequence
  Synthetic oligonucleotide
aaaacaggcaattaagcatactaactagtg

SEQ ID NO: 86694 - DNA, 30 bp, Artificial Sequence
  Synthetic oligonucleotide
gcgggagagggcagacgcatagctctagtg

SEQ ID NO: 86695 - DNA, 30 bp, Artificial Sequence
  Synthetic oligonucleotide
ccagcaatggtataatatactgctctagtg

SEQ ID NO: 86696 - DNA, 30 bp, Artificial Sequence
  Synthetic oligonucleotide
tcgtttgcatggaatctgatccgcgtagtg

SEQ ID NO: 86697 - DNA, 30 bp, Artificial Sequence
  Synthetic oligonucleotide
ggccttgatccagcctaggcatgcgtagtg

SEQ ID NO: 86698 - DNA, 30 bp, Artificial Sequence
  Synthetic oligonucleotide
gaacttctcgcgcgagggaagggggtagtg

SEQ ID NO: 86699 - DNA, 30 bp, Artificial Sequence
  Synthetic oligonucleotide
tacgactacagcttagttattggtgtagtg

SEQ ID NO: 86700 - DNA, 30 bp, Artificial Sequence
  Synthetic oligonucleotide
caggaattctttagcgagtaaggattagtg

SEQ ID NO: 86701 - DNA, 30 bp, Artificial Sequence
  Synthetic oligonucleotide
tcaggcggtcgttacgactagaagttagtg

SEQ ID NO: 86702 - DNA, 30 bp, Artificial Sequence
  Synthetic oligonucleotide
gtggaagaaagtagacaatcgcgaaacgtg

SEQ ID NO: 86703 - DNA, 30 bp, Artificial Sequence
  Synthetic oligonucleotide
ttaaccgatgggggaggtcacaacaacgtg

SEQ ID NO: 86704 - DNA, 30 bp, Artificial Sequence
  Synthetic oligonucleotide
tctgtaagcgtacccaattaagcgaacgtg

SEQ ID NO: 86705 - DNA, 30 bp, Artificial Sequence
  Synthetic oligonucleotide
cgcgagcagagatctgtcaaaagacacgtg

SEQ ID NO: 86706 - DNA, 30 bp, Artificial Sequence
  Synthetic oligonucleotide
gcagggggggctatcgagggatgacacgtg

SEQ ID NO: 86707 - DNA, 30 bp, Artificial Sequence
  Synthetic oligonucleotide
tctcgacgaaccgacggactagttcacgtg

SEQ ID NO: 86708 - DNA, 30 bp, Artificial Sequence
  Synthetic oligonucleotide
cggcaacgtcagtcggtagatgcctacgtg

SEQ ID NO: 86709 - DNA, 30 bp, Artificial Sequence
  Synthetic oligonucleotide
gcactgagaacgggtaaaatagggtacgtg

SEQ ID NO: 86710 - DNA, 30 bp, Artificial Sequence
  Synthetic oligonucleotide
atatgcaaatagactggcaatcttaccgtg

SEQ ID NO: 86711 - DNA, 30 bp, Artificial Sequence
  Synthetic oligonucleotide
agaactggaagggtgctctttcaacccgtg

SEQ ID NO: 86712 - DNA, 30 bp, Artificial Sequence
  Synthetic oligonucleotide
ggcgagacatacgtgctttcagtacccgtg

SEQ ID NO: 86713 - DNA, 30 bp, Artificial Sequence
  Synthetic oligonucleotide
accggacgccaaagtctacggacagccgtg

SEQ ID NO: 86714 - DNA, 30 bp, Artificial Sequence
  Synthetic oligonucleotide
aaacggaaaaacgctaagttaccatccgtg

SEQ ID NO: 86715 - DNA, 30 bp, Artificial Sequence
  Synthetic oligonucleotide
cccgcggagcaagcggcaggtgtcagcgtg

SEQ ID NO: 86716 - DNA, 30 bp, Artificial Sequence
  Synthetic oligonucleotide
catacggtttcaggagatcaccggcgcgtg

SEQ ID NO: 86717 - DNA, 30 bp, Artificial Sequence
  Synthetic oligonucleotide
tatagggagactgatttagagcggcgcgtg

SEQ ID NO: 86718 - DNA, 30 bp, Artificial Sequence
  Synthetic oligonucleotide
tcgtgattcaactagcgtttcaccggcgtg

SEQ ID NO: 86719 - DNA, 31 bp, Artificial Sequence
  Synthetic oligonucleotide
ggggactgatgcgttacgtaagcggggcgtg

SEQ ID NO: 86720 - DNA, 30 bp, Artificial Sequence
  Synthetic oligonucleotide
ggcggagtggatccgggttgaattggcgtg

SEQ ID NO: 86721 - DNA, 30 bp, Artificial Sequence
  Synthetic oligonucleotide
gacataataggaaagcgcgaagcttgcgtg

SEQ ID NO: 86722 - DNA, 30 bp, Artificial Sequence
  Synthetic oligonucleotide
tacgcgagtcggtcgcgacattggatcgtg

SEQ ID NO: 86723 - DNA, 30 bp, Artificial Sequence
  Synthetic oligonucleotide
tgtttgatccaatcagtaatgatgatcgtg

SEQ ID NO: 86724 - DNA, 30 bp, Artificial Sequence
  Synthetic oligonucleotide
gtgggcctatgtaccaacgactcgctcgtg

SEQ ID NO: 86725 - DNA, 30 bp, Artificial Sequence
  Synthetic oligonucleotide
cacaattgcggtaacagcacatgtctcgtg

SEQ ID NO: 86726 - DNA, 30 bp, Artificial Sequence
  Synthetic oligonucleotide
gttgtcccgtgagattccgtatcagtcgtg

SEQ ID NO: 86727 - DNA, 30 bp, Artificial Sequence
  Synthetic oligonucleotide
cattgcgggaccaataaagattaggtcgtg

SEQ ID NO: 86728 - DNA, 30 bp, Artificial Sequence
  Synthetic oligonucleotide
tacgattgtacaaggtccaccgccttcgtg

SEQ ID NO: 86729 - DNA, 30 bp, Artificial Sequence
  Synthetic oligonucleotide
cggtatcgcgattgattggattatttcgtg

SEQ ID NO: 86730 - DNA, 30 bp, Artificial Sequence
  Synthetic oligonucleotide
gggctagagggcagtcctgacttgaaggtg

SEQ ID NO: 86731 - DNA, 30 bp, Artificial Sequence
  Synthetic oligonucleotide
atggaccgtctcccgctggccaaccaggtg

SEQ ID NO: 86732 - DNA, 30 bp, Artificial Sequence
  Synthetic oligonucleotide
acaatgaatggcaaacgaacgttccaggtg

SEQ ID NO: 86733 - DNA, 30 bp, Artificial Sequence
  Synthetic oligonucleotide
ccctgaacatcgcctagttttaagcaggtg

SEQ ID NO: 86734 - DNA, 30 bp, Artificial Sequence
  Synthetic oligonucleotide
agatgtcaacaactgcgtcgtgaagaggtg

SEQ ID NO: 86735 - DNA, 30 bp, Artificial Sequence
  Synthetic oligonucleotide
cggctgaaacagtcgacccccaccgaggtg

SEQ ID NO: 86736 - DNA, 30 bp, Artificial Sequence
  Synthetic oligonucleotide
tctattgctatcataaaaataattgaggtg

SEQ ID NO: 86737 - DNA, 30 bp, Artificial Sequence
  Synthetic oligonucleotide
cgatggagtatgttctcacaataaacggtg

SEQ ID NO: 86738 - DNA, 30 bp, Artificial Sequence
  Synthetic oligonucleotide
catgacatcggcaactgaaggctcgcggtg

SEQ ID NO: 86739 - DNA, 30 bp, Artificial Sequence
  Synthetic oligonucleotide
cctggatgctctagcggtgagagggcggtg

SEQ ID NO: 86740 - DNA, 30 bp, Artificial Sequence
  Synthetic oligonucleotide
agctcatagtcaacgttcgagatggcggtg

SEQ ID NO: 86741 - DNA, 30 bp, Artificial Sequence
  Synthetic oligonucleotide
cgcctagctgagtctcccgagctggcggtg

SEQ ID NO: 86742 - DNA, 30 bp, Artificial Sequence
  Synthetic oligonucleotide
atcacgtaggatgcggagagtaatgcggtg

SEQ ID NO: 86743 - DNA, 30 bp, Artificial Sequence
  Synthetic oligonucleotide
gtgcaaagcgcgtaattgtcactgtcggtg

SEQ ID NO: 86744 - DNA, 30 bp, Artificial Sequence
  Synthetic oligonucleotide
cggcaagaaatcgagctatattcgagggtg

SEQ ID NO: 86745 - DNA, 30 bp, Artificial Sequence
  Synthetic oligonucleotide
aggaaatgctatgtatgtgagatgagggtg

SEQ ID NO: 86746 - DNA, 30 bp, Artificial Sequence
  Synthetic oligonucleotide
gtgacttaggatctgacgaatgcgggggtg

SEQ ID NO: 86747 - DNA, 30 bp, Artificial Sequence
  Synthetic oligonucleotide
cggaaatagtacgaagggctttcgggggtg

SEQ ID NO: 86748 - DNA, 30 bp, Artificial Sequence
  Synthetic oligonucleotide
cgtgggaacatctgaacagactttatggtg

SEQ ID NO: 86749 - DNA, 30 bp, Artificial Sequence
  Synthetic oligonucleotide
ccgaacacgtattaagtccacagcctggtg

SEQ ID NO: 86750 - DNA, 30 bp, Artificial Sequence
  Synthetic oligonucleotide
gccgagattaagaatcagctagggctggtg

SEQ ID NO: 86751 - DNA, 30 bp, Artificial Sequence
  Synthetic oligonucleotide
ctcatcctaactctagaacgtgatgtggtg

SEQ ID NO: 86752 - DNA, 30 bp, Artificial Sequence
  Synthetic oligonucleotide
ccccgaaaggccgtgaacagcattgtggtg

SEQ ID NO: 86753 - DNA, 30 bp, Artificial Sequence
  Synthetic oligonucleotide
agcgtatatctcgtgttatggattgtggtg

SEQ ID NO: 86754 - DNA, 30 bp, Artificial Sequence
  Synthetic oligonucleotide
tggatcgcatgtaaatggtagggcttggtg

SEQ ID NO: 86755 - DNA, 30 bp, Artificial Sequence
  Synthetic oligonucleotide
tacggccctcacgataaagggaatttggtg

SEQ ID NO: 86756 - DNA, 30 bp, Artificial Sequence
  Synthetic oligonucleotide
agggggtaacaatacaacacgtatttggtg

SEQ ID NO: 86757 - DNA, 30 bp, Artificial Sequence
  Synthetic oligonucleotide
agcgtcatcgtggcctaatggtatttggtg

SEQ ID NO: 86758 - DNA, 30 bp, Artificial Sequence
  Synthetic oligonucleotide
tcgcgctaaagaaggactttgtctttggtg

SEQ ID NO: 86759 - DNA, 30 bp, Artificial Sequence
  Synthetic oligonucleotide
agacgtggggcaccacgtgcactcaatgtg

SEQ ID NO: 86760 - DNA, 30 bp, Artificial Sequence
  Synthetic oligonucleotide
tgtgaatataaacggcgtaggaagaatgtg

SEQ ID NO: 86761 - DNA, 30 bp, Artificial Sequence
  Synthetic oligonucleotide
cctccctcggtatggtgagtagggaatgtg

SEQ ID NO: 86762 - DNA, 30 bp, Artificial Sequence
  Synthetic oligonucleotide
tgccgaataacgttctcgcccgtgcatgtg

SEQ ID NO: 86763 - DNA, 30 bp, Artificial Sequence
  Synthetic oligonucleotide
ccagttgatactcgagataggatagatgtg

SEQ ID NO: 86764 - DNA, 30 bp, Artificial Sequence
  Synthetic oligonucleotide
ataaaccggattgagtcaagtatcgatgtg

SEQ ID NO: 86765 - DNA, 30 bp, Artificial Sequence
  Synthetic oligonucleotide
caggacagtatagaggggcaatatgatgtg

SEQ ID NO: 86766 - DNA, 30 bp, Artificial Sequence
  Synthetic oligonucleotide
ggtgcaatttaaaaagacatacgtgatgtg

SEQ ID NO: 86767 - DNA, 30 bp, Artificial Sequence
  Synthetic oligonucleotide
acaggttctattgaacaatagcattatgtg

SEQ ID NO: 86768 - DNA, 30 bp, Artificial Sequence
  Synthetic oligonucleotide
ctagcggaacggagaactgatcattatgtg

SEQ ID NO: 86769 - DNA, 30 bp, Artificial Sequence
  Synthetic oligonucleotide
atgcacggtattgagctggcctggactgtg

SEQ ID NO: 86770 - DNA, 30 bp, Artificial Sequence
  Synthetic oligonucleotide
acaagagcgcgtgcggatttatatactgtg

SEQ ID NO: 86771 - DNA, 30 bp, Artificial Sequence
  Synthetic oligonucleotide
tgtgggatgatgggcacgtaaatacctgtg

SEQ ID NO: 86772 - DNA, 30 bp, Artificial Sequence
  Synthetic oligonucleotide
ggccttcgtcaagaatcaattacctctgtg

SEQ ID NO: 86773 - DNA, 30 bp, Artificial Sequence
  Synthetic oligonucleotide
tggtggacattgtcattcttgctaagtgtg

SEQ ID NO: 86774 - DNA, 30 bp, Artificial Sequence
  Synthetic oligonucleotide
cgattacgtagtaacgggatccgcagtgtg

SEQ ID NO: 86775 - DNA, 30 bp, Artificial Sequence
  Synthetic oligonucleotide
gccgaaaataaccgagatgtgcagagtgtg

SEQ ID NO: 86776 - DNA, 30 bp, Artificial Sequence
  Synthetic oligonucleotide
gcgtaagtgagtgactagctgtctagtgtg

SEQ ID NO: 86777 - DNA, 30 bp, Artificial Sequence
  Synthetic oligonucleotide
aaagttgtcgatggagacgtggagtgtgtg

SEQ ID NO: 86778 - DNA, 30 bp, Artificial Sequence
  Synthetic oligonucleotide
cgcatcgtcgtgtgcggttggtcttgtgtg

SEQ ID NO: 86779 - DNA, 30 bp, Artificial Sequence
  Synthetic oligonucleotide
tcttgcagcttagtaccgtgatcaattgtg

SEQ ID NO: 86780 - DNA, 30 bp, Artificial Sequence
  Synthetic oligonucleotide
aaccctaccaagggatgaggtaagattgtg

SEQ ID NO: 86781 - DNA, 30 bp, Artificial Sequence
  Synthetic oligonucleotide
ccctaggcaaatagattacaaagccttgtg

SEQ ID NO: 86782 - DNA, 30 bp, Artificial Sequence
  Synthetic oligonucleotide
ggaagcaagccgattatctattatgttgtg

SEQ ID NO: 86783 - DNA, 30 bp, Artificial Sequence
  Synthetic oligonucleotide
aacggctccagaggcgtcctcatgtttgtg

SEQ ID NO: 86784 - DNA, 30 bp, Artificial Sequence
  Synthetic oligonucleotide
caaacggagcgcaggggatgttgaaaattg

SEQ ID NO: 86785 - DNA, 30 bp, Artificial Sequence
  Synthetic oligonucleotide
ttgggggcaccgagacatcacctaaaattg

SEQ ID NO: 86786 - DNA, 30 bp, Artificial Sequence
  Synthetic oligonucleotide
acgaccggaatgaccttagggtcacaattg

SEQ ID NO: 86787 - DNA, 30 bp, Artificial Sequence
  Synthetic oligonucleotide
atacctgttaccaagataagctaggaattg

SEQ ID NO: 86788 - DNA, 30 bp, Artificial Sequence
  Synthetic oligonucleotide
tacggagatcttatagttagaacctaattg

SEQ ID NO: 86789 - DNA, 30 bp, Artificial Sequence
  Synthetic oligonucleotide
acgtgtgataacacattttaacagtaattg

SEQ ID NO: 86790 - DNA, 30 bp, Artificial Sequence
  Synthetic oligonucleotide
gacggaacgataacttaaaatctgacattg

SEQ ID NO: 86791 - DNA, 30 bp, Artificial Sequence
  Synthetic oligonucleotide
ttgacagacaccccggtaggaattgcattg

SEQ ID NO: 86792 - DNA, 30 bp, Artificial Sequence
  Synthetic oligonucleotide
cctcataagactcgctggttagttgcattg

SEQ ID NO: 86793 - DNA, 30 bp, Artificial Sequence
  Synthetic oligonucleotide
tcctatcgggcccccagttacagatcattg

SEQ ID NO: 86794 - DNA, 30 bp, Artificial Sequence
  Synthetic oligonucleotide
agtaaatgtcgttggtaagctcgatcattg

SEQ ID NO: 86795 - DNA, 30 bp, Artificial Sequence
  Synthetic oligonucleotide
gtagaaagcacctcattaaattcctcattg

SEQ ID NO: 86796 - DNA, 30 bp, Artificial Sequence
  Synthetic oligonucleotide
gtgggtgagtacgggacgataacaagattg

SEQ ID NO: 86797 - DNA, 30 bp, Artificial Sequence
  Synthetic oligonucleotide
ggcctgatcgtaagtgtgtgatacagattg

SEQ ID NO: 86798 - DNA, 30 bp, Artificial Sequence
  Synthetic oligonucleotide
gggctgagaggcaagcgccgatttagattg

SEQ ID NO: 86799 - DNA, 30 bp, Artificial Sequence
  Synthetic oligonucleotide
ctcccgacaatgctcatgcaaaaacgattg

SEQ ID NO: 86800 - DNA, 30 bp, Artificial Sequence
  Synthetic oligonucleotide
caatcccttacgtcacggaagaaccgattg

SEQ ID NO: 86801 - DNA, 30 bp, Artificial Sequence
  Synthetic oligonucleotide
taactcgaactcggtgctaaaatccgattg

SEQ ID NO: 86802 - DNA, 30 bp, Artificial Sequence
  Synthetic oligonucleotide
cacttagcacgaggcgtcaccaagcgattg

SEQ ID NO: 86803 - DNA, 30 bp, Artificial Sequence
  Synthetic oligonucleotide
ctgctgaccatgattgttcaatcgggattg

SEQ ID NO: 86804 - DNA, 30 bp, Artificial Sequence
  Synthetic oligonucleotide
cactaatggcgacgagagggatatggattg

SEQ ID NO: 86805 - DNA, 30 bp, Artificial Sequence
  Synthetic oligonucleotide
aagatgcttgttgccattacgaaatgattg

SEQ ID NO: 86806 - DNA, 30 bp, Artificial Sequence
  Synthetic oligonucleotide
attgagcctcggcggtctgtctgttgattg

SEQ ID NO: 86807 - DNA, 30 bp, Artificial Sequence
  Synthetic oligonucleotide
aacataaatcatcttgctcgcccaatattg

SEQ ID NO: 86808 - DNA, 30 bp, Artificial Sequence
  Synthetic oligonucleotide
gggctggaagggggttaaggagtcatattg

SEQ ID NO: 86809 - DNA, 30 bp, Artificial Sequence
  Synthetic oligonucleotide
atgagagatcggcagttctcacgactattg

SEQ ID NO: 86810 - DNA, 30 bp, Artificial Sequence
  Synthetic oligonucleotide
agggcgtatcggtagatctgattactattg

SEQ ID NO: 86811 - DNA, 30 bp, Artificial Sequence
  Synthetic oligonucleotide
ccattacagggggttcaggtgtgtctattg

SEQ ID NO: 86812 - DNA, 31 bp, Artificial Sequence
  Synthetic oligonucleotide
aaatagagtgcacacagaatatcacgtattg

SEQ ID NO: 86813 - DNA, 30 bp, Artificial Sequence
  Synthetic oligonucleotide
tgaaggaaaattggggaacaactcgtattg

SEQ ID NO: 86814 - DNA, 30 bp, Artificial Sequence
  Synthetic oligonucleotide
tggaacacaaaggatgttaggatggtattg

SEQ ID NO: 86815 - DNA, 30 bp, Artificial Sequence
  Synthetic oligonucleotide
gtcataagagtagttgctgagaaattattg

SEQ ID NO: 86816 - DNA, 30 bp, Artificial Sequence
  Synthetic oligonucleotide
atgaacatcagcctgatccgtcaaaacttg

SEQ ID NO: 86817 - DNA, 30 bp, Artificial Sequence
  Synthetic oligonucleotide
aagcccgctcgaattggtagactaaacttg

SEQ ID NO: 86818 - DNA, 30 bp, Artificial Sequence
  Synthetic oligonucleotide
tgcgttactccagccatgaaatcgaacttg

SEQ ID NO: 86819 - DNA, 30 bp, Artificial Sequence
  Synthetic oligonucleotide
cgcacgaggaatattttttgacataacttg

SEQ ID NO: 86820 - DNA, 30 bp, Artificial Sequence
  Synthetic oligonucleotide
ctaacggactctagggggcaggataacttg

SEQ ID NO: 86821 - DNA, 30 bp, Artificial Sequence
  Synthetic oligonucleotide
agtgtacgtcggaattagcgaaaacacttg

SEQ ID NO: 86822 - DNA, 30 bp, Artificial Sequence
  Synthetic oligonucleotide
tgattaagcgtatctcagtggctgcacttg

SEQ ID NO: 86823 - DNA, 31 bp, Artificial Sequence
  Synthetic oligonucleotide
agcataaaccttagaaagtatgaaggacttg

SEQ ID NO: 86824 - DNA, 30 bp, Artificial Sequence
  Synthetic oligonucleotide
cagggtgcgtcgcaatcacgaacatacttg

SEQ ID NO: 86825 - DNA, 30 bp, Artificial Sequence
  Synthetic oligonucleotide
tgtgctaatgggatcgatagtccatacttg

SEQ ID NO: 86826 - DNA, 30 bp, Artificial Sequence
  Synthetic oligonucleotide
tcgcacagattgataataggccattacttg

SEQ ID NO: 86827 - DNA, 30 bp, Artificial Sequence
  Synthetic oligonucleotide
atccggactaacgaaatatcagaaaccttg

SEQ ID NO: 86828 - DNA, 30 bp, Artificial Sequence
  Synthetic oligonucleotide
tagcgacaggtcctaccctcgccatccttg

SEQ ID NO: 86829 - DNA, 30 bp, Artificial Sequence
  Synthetic oligonucleotide
tgagacatgttatagcgtgttacctccttg

SEQ ID NO: 86830 - DNA, 30 bp, Artificial Sequence
  Synthetic oligonucleotide
tcatcccagagtcatcgctgcggtagcttg

SEQ ID NO: 86831 - DNA, 30 bp, Artificial Sequence
  Synthetic oligonucleotide
cgagtaccaggaggtcagtgcggaggcttg

SEQ ID NO: 86832 - DNA, 30 bp, Artificial Sequence
  Synthetic oligonucleotide
atccatggctgaattggcggaggatgcttg

SEQ ID NO: 86833 - DNA, 30 bp, Artificial Sequence
  Synthetic oligonucleotide
cgatccatatgccttacgaagaatatcttg

SEQ ID NO: 86834 - DNA, 30 bp, Artificial Sequence
  Synthetic oligonucleotide
aacatcatactaaaatgtccatatatcttg

SEQ ID NO: 86835 - DNA, 30 bp, Artificial Sequence
  Synthetic oligonucleotide
gcggataattcagatttctgaaaggtcttg

SEQ ID NO: 86836 - DNA, 30 bp, Artificial Sequence
  Synthetic oligonucleotide
gcgacggcggtacagacaagtcctaagttg

SEQ ID NO: 86837 - DNA, 30 bp, Artificial Sequence
  Synthetic oligonucleotide
ttaccagacgtgtacggggctaaggagttg

SEQ ID NO: 86838 - DNA, 30 bp, Artificial Sequence
  Synthetic oligonucleotide
tctgagcgaagtgtgctcgcattggagttg

SEQ ID NO: 86839 - DNA, 30 bp, Artificial Sequence
  Synthetic oligonucleotide
gaaaggatgaggggatgctcactatagttg

SEQ ID NO: 86840 - DNA, 30 bp, Artificial Sequence
  Synthetic oligonucleotide
gaagtacgccatagtctgcaatcgtagttg

SEQ ID NO: 86841 - DNA, 30 bp, Artificial Sequence
  Synthetic oligonucleotide
agagtactccttcacgtacaaagttagttg

SEQ ID NO: 86842 - DNA, 30 bp, Artificial Sequence
  Synthetic oligonucleotide
acaaaagtgcaacaatgctgaccaacgttg

SEQ ID NO: 86843 - DNA, 30 bp, Artificial Sequence
  Synthetic oligonucleotide
agctaataaggcactggggcataaccgttg

SEQ ID NO: 86844 - DNA, 30 bp, Artificial Sequence
  Synthetic oligonucleotide
caacttaatcggtcaaggctatctccgttg

SEQ ID NO: 86845 - DNA, 30 bp, Artificial Sequence
  Synthetic oligonucleotide
tacgggcagcattgcgttgtggattcgttg

SEQ ID NO: 86846 - DNA, 30 bp, Artificial Sequence
  Synthetic oligonucleotide
gcggaaccaggaacctgggcacgttcgttg

SEQ ID NO: 86847 - DNA, 30 bp, Artificial Sequence
  Synthetic oligonucleotide
atcggtccgagatgaacacgaccaaggttg

SEQ ID NO: 86848 - DNA, 30 bp, Artificial Sequence
  Synthetic oligonucleotide
cctatgctccagaagcaacgttacaggttg

SEQ ID NO: 86849 - DNA, 30 bp, Artificial Sequence
  Synthetic oligonucleotide
aactttgatagaaagacaggggagaggttg

SEQ ID NO: 86850 - DNA, 30 bp, Artificial Sequence
  Synthetic oligonucleotide
atcggagggcctatcccaatgaataggttg

SEQ ID NO: 86851 - DNA, 30 bp, Artificial Sequence
  Synthetic oligonucleotide
ctaggagggagtttcccaagtcaacggttg

SEQ ID NO: 86852 - DNA, 30 bp, Artificial Sequence
  Synthetic oligonucleotide
ttctcgtcaggagcaagtcaatatcggttg

SEQ ID NO: 86853 - DNA, 30 bp, Artificial Sequence
  Synthetic oligonucleotide
cgcctataaggatataaaggcaatgggttg

SEQ ID NO: 86854 - DNA, 30 bp, Artificial Sequence
  Synthetic oligonucleotide
aggcttgtagaggatgcctagacatggttg

SEQ ID NO: 86855 - DNA, 27 bp, Artificial Sequence
  Synthetic oligonucleotide
tcgaaatcgtagttggtacgtatgttg

SEQ ID NO: 86856 - DNA, 30 bp, Artificial Sequence
  Synthetic oligonucleotide
ggggaataagtatgccggacattcctgttg

SEQ ID NO: 86857 - DNA, 30 bp, Artificial Sequence
  Synthetic oligonucleotide
aagcaggcgtaatctgattgccaattgttg

SEQ ID NO: 86858 - DNA, 30 bp, Artificial Sequence
  Synthetic oligonucleotide
aagcatcaaaagggggcggccggaaatttg

SEQ ID NO: 86859 - DNA, 30 bp, Artificial Sequence
  Synthetic oligonucleotide
ggccacacgggacgagcttaatgacatttg

SEQ ID NO: 86860 - DNA, 30 bp, Artificial Sequence
  Synthetic oligonucleotide
attagcggggcatggagtactgagcatttg

SEQ ID NO: 86861 - DNA, 30 bp, Artificial Sequence
  Synthetic oligonucleotide
gatcggaaaaatcgacttccgcggcatttg

SEQ ID NO: 86862 - DNA, 30 bp, Artificial Sequence
  Synthetic oligonucleotide
aactaccgctacgggcagatagtgcatttg

SEQ ID NO: 86863 - DNA, 30 bp, Artificial Sequence
  Synthetic oligonucleotide
agagcatttcccgagctcagtgtagatttg

SEQ ID NO: 86864 - DNA, 30 bp, Artificial Sequence
  Synthetic oligonucleotide
ctgggaaggcagaaatcggaaatatatttg

SEQ ID NO: 86865 - DNA, 30 bp, Artificial Sequence
  Synthetic oligonucleotide
atgtcaatagtggacagtggctagtatttg

SEQ ID NO: 86866 - DNA, 30 bp, Artificial Sequence
  Synthetic oligonucleotide
ctcctgcgcggtggtagagagcatactttg

SEQ ID NO: 86867 - DNA, 30 bp, Artificial Sequence
  Synthetic oligonucleotide
caggaggcgtactaacatcgcttagctttg

SEQ ID NO: 86868 - DNA, 30 bp, Artificial Sequence
  Synthetic oligonucleotide
taggccgagacagtcaatagactatctttg

SEQ ID NO: 86869 - DNA, 30 bp, Artificial Sequence
  Synthetic oligonucleotide
atcaccggtcataaaggtagatcctctttg

SEQ ID NO: 86870 - DNA, 30 bp, Artificial Sequence
  Synthetic oligonucleotide
acttggtcggctcgaatctgaattagtttg

SEQ ID NO: 86871 - DNA, 30 bp, Artificial Sequence
  Synthetic oligonucleotide
ttgagcggtagatcgcacgttccacgtttg

SEQ ID NO: 86872 - DNA, 30 bp, Artificial Sequence
  Synthetic oligonucleotide
agttagatggtatggtaaccacgacgtttg

SEQ ID NO: 86873 - DNA, 31 bp, Artificial Sequence
  Synthetic oligonucleotide
aagtacccagatgatagttgacgtccgtttg

SEQ ID NO: 86874 - DNA, 30 bp, Artificial Sequence
  Synthetic oligonucleotide
tacggaggaggtacgaacctccgaggtttg

SEQ ID NO: 86875 - DNA, 30 bp, Artificial Sequence
  Synthetic oligonucleotide
agggtccaaactagttatggaccgattttg

SEQ ID NO: 86876 - DNA, 30 bp, Artificial Sequence
  Synthetic oligonucleotide
caagggctcaagacgtactgttgacttttg

SEQ ID NO: 86877 - DNA, 30 bp, Artificial Sequence
  Synthetic oligonucleotide
ataatacgttcagtggggagttgaaaaaat

SEQ ID NO: 86878 - DNA, 30 bp, Artificial Sequence
  Synthetic oligonucleotide
ggacattccactcaaggtcagtgacaaaat

SEQ ID NO: 86879 - DNA, 30 bp, Artificial Sequence
  Synthetic oligonucleotide
ctaattagacgaggagctagatccgaaaat

SEQ ID NO: 86880 - DNA, 30 bp, Artificial Sequence
  Synthetic oligonucleotide
agggatctgtattgcgactcctccgaaaat

SEQ ID NO: 86881 - DNA, 29 bp, Artificial Sequence
  Synthetic oligonucleotide
tgtcgatcaattcatcagggacgacaaat

SEQ ID NO: 86882 - DNA, 30 bp, Artificial Sequence
  Synthetic oligonucleotide
cgctaagagatcaaccgatccccgccaaat

SEQ ID NO: 86883 - DNA, 30 bp, Artificial Sequence
  Synthetic oligonucleotide
gcgtagaaggatgtgcactatcgtccaaat

SEQ ID NO: 86884 - DNA, 30 bp, Artificial Sequence
  Synthetic oligonucleotide
aatagccacagacactcaactccagcaaat

SEQ ID NO: 86885 - DNA, 30 bp, Artificial Sequence
  Synthetic oligonucleotide
tagttacaggaccacgtactccccagaaat

SEQ ID NO: 86886 - DNA, 30 bp, Artificial Sequence
  Synthetic oligonucleotide
caagagcgtatacaaatgattgccagaaat

SEQ ID NO: 86887 - DNA, 30 bp, Artificial Sequence
  Synthetic oligonucleotide
gatacgtaagaacagttagaggcacgaaat

SEQ ID NO: 86888 - DNA, 30 bp, Artificial Sequence
  Synthetic oligonucleotide
tcatgtaggagaaccgaaaagggccgaaat

SEQ ID NO: 86889 - DNA, 30 bp, Artificial Sequence
  Synthetic oligonucleotide
cataaaacgagtaagccgatacttcgaaat

SEQ ID NO: 86890 - DNA, 30 bp, Artificial Sequence
  Synthetic oligonucleotide
tcgtgcacatgacgtggtatagtaggaaat

SEQ ID NO: 86891 - DNA, 30 bp, Artificial Sequence
  Synthetic oligonucleotide
aagtagcgtggagattagcagaactgaaat

SEQ ID NO: 86892 - DNA, 30 bp, Artificial Sequence
  Synthetic oligonucleotide
cgattcgtgatgacaagctcgtgttgaaat

SEQ ID NO: 86893 - DNA, 30 bp, Artificial Sequence
  Synthetic oligonucleotide
actcgtcaaggctgttcaatgggcataaat

SEQ ID NO: 86894 - DNA, 30 bp, Artificial Sequence
  Synthetic oligonucleotide
gacggtaacaaatcacgttgttcgataaat

SEQ ID NO: 86895 - DNA, 30 bp, Artificial Sequence
  Synthetic oligonucleotide
gggtgctcacccgaacatagcatgataaat

SEQ ID NO: 86896 - DNA, 30 bp, Artificial Sequence
  Synthetic oligonucleotide
gggccccgcgaaaaattacaagagctaaat

SEQ ID NO: 86897 - DNA, 30 bp, Artificial Sequence
  Synthetic oligonucleotide
ggtcaatgtgttaagggtgatagcgtaaat

SEQ ID NO: 86898 - DNA, 30 bp, Artificial Sequence
  Synthetic oligonucleotide
gcgatgtcgtaccagagaaagaatttaaat

SEQ ID NO: 86899 - DNA, 30 bp, Artificial Sequence
  Synthetic oligonucleotide
gagatgggcgtatgctgacacgaaaacaat

SEQ ID NO: 86900 - DNA, 30 bp, Artificial Sequence
  Synthetic oligonucleotide
catagacatcttcctggctgaataaacaat

SEQ ID NO: 86901 - DNA, 30 bp, Artificial Sequence
  Synthetic oligonucleotide
tacgcgggccaaggatagatcacgaacaat

SEQ ID NO: 86902 - DNA, 30 bp, Artificial Sequence
  Synthetic oligonucleotide
aattaactgtagatcaggtataaggacaat

SEQ ID NO: 86903 - DNA, 30 bp, Artificial Sequence
  Synthetic oligonucleotide
agataccgaacgttctcgagaatctacaat

SEQ ID NO: 86904 - DNA, 30 bp, Artificial Sequence
  Synthetic oligonucleotide
taaggagggtaagcgcactcagtgtacaat

SEQ ID NO: 86905 - DNA, 30 bp, Artificial Sequence
  Synthetic oligonucleotide
tgagctcgtgcacactcagaaaaaaccaat

SEQ ID NO: 86906 - DNA, 30 bp, Artificial Sequence
  Synthetic oligonucleotide
cacgaaggaacgtccgaaggctgaaccaat

SEQ ID NO: 86907 - DNA, 30 bp, Artificial Sequence
  Synthetic oligonucleotide
gagacagaaaagtttaaattacgcgccaat

SEQ ID NO: 86908 - DNA, 30 bp, Artificial Sequence
  Synthetic oligonucleotide
ttaaggataggccgattgaattgttccaat

SEQ ID NO: 86909 - DNA, 30 bp, Artificial Sequence
  Synthetic oligonucleotide
gtgctgggactgctaacgtgataaagcaat

SEQ ID NO: 86910 - DNA, 30 bp, Artificial Sequence
  Synthetic oligonucleotide
ctgggctagccaggcgacgggaggagcaat

SEQ ID NO: 86911 - DNA, 30 bp, Artificial Sequence
  Synthetic oligonucleotide
cggagtgctgaggcactgcacgaaggcaat

SEQ ID NO: 86912 - DNA, 30 bp, Artificial Sequence
  Synthetic oligonucleotide
catagtctgagtagcacgcgatcatgcaat

SEQ ID NO: 86913 - DNA, 30 bp, Artificial Sequence
  Synthetic oligonucleotide
gcagaatccagaaacacataccagtgcaat

SEQ ID NO: 86914 - DNA, 30 bp, Artificial Sequence
  Synthetic oligonucleotide
ggtagtacctcgggaggaaccgcgatcaat

SEQ ID NO: 86915 - DNA, 30 bp, Artificial Sequence
  Synthetic oligonucleotide
gatcagacatgaatatgcagtgacctcaat

SEQ ID NO: 86916 - DNA, 30 bp, Artificial Sequence
  Synthetic oligonucleotide
actacatataaactactaagaaaggtcaat

SEQ ID NO: 86917 - DNA, 30 bp, Artificial Sequence
  Synthetic oligonucleotide
cgcgtgtcgaaggcacgtcaagcaaagaat

SEQ ID NO: 86918 - DNA, 30 bp, Artificial Sequence
  Synthetic oligonucleotide
gggtcggaaggccgtcgggtcaaacagaat

SEQ ID NO: 86919 - DNA, 30 bp, Artificial Sequence
  Synthetic oligonucleotide
gctcaggcccctacgaaaaaacggcagaat

SEQ ID NO: 86920 - DNA, 30 bp, Artificial Sequence
  Synthetic oligonucleotide
ggagggtagagtcacaaatattatgagaat

SEQ ID NO: 86921 - DNA, 30 bp, Artificial Sequence
  Synthetic oligonucleotide
tctgcagaactcatcagcagattgtagaat

SEQ ID NO: 86922 - DNA, 30 bp, Artificial Sequence
  Synthetic oligonucleotide
tgatctacgagtgattggcttgccacgaat

SEQ ID NO: 86923 - DNA, 30 bp, Artificial Sequence
  Synthetic oligonucleotide
ggatagtgaaggtaggacttacatccgaat

SEQ ID NO: 86924 - DNA, 30 bp, Artificial Sequence
  Synthetic oligonucleotide
cagagcccagtgactatccggagtccgaat

SEQ ID NO: 86925 - DNA, 30 bp, Artificial Sequence
  Synthetic oligonucleotide
cgtccccgcgtggaagatgggtccgcgaat

SEQ ID NO: 86926 - DNA, 30 bp, Artificial Sequence
  Synthetic oligonucleotide
tcagggcacgggggaacgatagggcggaat

SEQ ID NO: 86927 - DNA, 30 bp, Artificial Sequence
  Synthetic oligonucleotide
aagagtgtctgatccgattctgatcggaat

SEQ ID NO: 86928 - DNA, 29 bp, Artificial Sequence
  Synthetic oligonucleotide
gcgcgggtaaccgtgctaggttcgggaat

SEQ ID NO: 86929 - DNA, 30 bp, Artificial Sequence
  Synthetic oligonucleotide
aggagtattatacaatgatctatggggaat

SEQ ID NO: 86930 - DNA, 30 bp, Artificial Sequence
  Synthetic oligonucleotide
caaagggtagagtcgttcggaaatgggaat

SEQ ID NO: 86931 - DNA, 30 bp, Artificial Sequence
  Synthetic oligonucleotide
accggaagggagcattaagccgatgggaat

SEQ ID NO: 86932 - DNA, 30 bp, Artificial Sequence
  Synthetic oligonucleotide
catcgagtgccaccttcggcctatgggaat

SEQ ID NO: 86933 - DNA, 30 bp, Artificial Sequence
  Synthetic oligonucleotide
cctaggaaaacggccgatcaaaaatggaat

SEQ ID NO: 86934 - DNA, 30 bp, Artificial Sequence
  Synthetic oligonucleotide
gctcgtcctaagtctataatctgctggaat

SEQ ID NO: 86935 - DNA, 30 bp, Artificial Sequence
  Synthetic oligonucleotide
ggaagatgggaggcttgcaaattagtgaat

SEQ ID NO: 86936 - DNA, 30 bp, Artificial Sequence
  Synthetic oligonucleotide
tgaaatacattaggcggagaccagttgaat

SEQ ID NO: 86937 - DNA, 30 bp, Artificial Sequence
  Synthetic oligonucleotide
ttgtcaaggcatagctcagactctttgaat

SEQ ID NO: 86938 - DNA, 30 bp, Artificial Sequence
  Synthetic oligonucleotide
agccctgggaagtcgaagacaagcaataat

SEQ ID NO: 86939 - DNA, 30 bp, Artificial Sequence
  Synthetic oligonucleotide
ggaaaaccgtcgacgaggtgcgcgcataat

SEQ ID NO: 86940 - DNA, 30 bp, Artificial Sequence
  Synthetic oligonucleotide
gccagatggtccagtccaccctaggataat

SEQ ID NO: 86941 - DNA, 30 bp, Artificial Sequence
  Synthetic oligonucleotide
tggctaccgagcgggcacatgtgatataat

SEQ ID NO: 86942 - DNA, 30 bp, Artificial Sequence
  Synthetic oligonucleotide
aagcgtgctaattggtgggggcactataat

SEQ ID NO: 86943 - DNA, 30 bp, Artificial Sequence
  Synthetic oligonucleotide
ttgtgggtgtaagtaagcgggacgactaat

SEQ ID NO: 86944 - DNA, 30 bp, Artificial Sequence
  Synthetic oligonucleotide
ccggtaaacacagggtaaggtaaagctaat

SEQ ID NO: 86945 - DNA, 30 bp, Artificial Sequence
  Synthetic oligonucleotide
gcgtcgcacgagctttatcttgactctaat

SEQ ID NO: 86946 - DNA, 31 bp, Artificial Sequence
  Synthetic oligonucleotide
acaggagcggaaaccctttaagtcaagtaat

SEQ ID NO: 86947 - DNA, 30 bp, Artificial Sequence
  Synthetic oligonucleotide
tcatggtgggcccaagctgtttggagtaat

SEQ ID NO: 86948 - DNA, 30 bp, Artificial Sequence
  Synthetic oligonucleotide
agacgtattccagaatgagagggtagtaat

SEQ ID NO: 86949 - DNA, 30 bp, Artificial Sequence
  Synthetic oligonucleotide
cattgtgataatgtactaagcttgcgtaat

SEQ ID NO: 86950 - DNA, 30 bp, Artificial Sequence
  Synthetic oligonucleotide
aggcttagtctatgagagtcatgaggtaat

SEQ ID NO: 86951 - DNA, 30 bp, Artificial Sequence
  Synthetic oligonucleotide
gctgggatagttcatgacaggattggtaat

SEQ ID NO: 86952 - DNA, 30 bp, Artificial Sequence
  Synthetic oligonucleotide
gacaggagattatgcgcgaaaaagcttaat

SEQ ID NO: 86953 - DNA, 30 bp, Artificial Sequence
  Synthetic oligonucleotide
atgagtctggcgtacgatgtgagagttaat

SEQ ID NO: 86954 - DNA, 30 bp, Artificial Sequence
  Synthetic oligonucleotide
acacaaaaggcttatacaggacgagttaat

SEQ ID NO: 86955 - DNA, 30 bp, Artificial Sequence
  Synthetic oligonucleotide
atagagcgtgctcccaccctcacatttaat

SEQ ID NO: 86956 - DNA, 30 bp, Artificial Sequence
  Synthetic oligonucleotide
ctaggttccactcggtaattggcaaaacat

SEQ ID NO: 86957 - DNA, 30 bp, Artificial Sequence
  Synthetic oligonucleotide
ttccgaaaacagaggaaggataagaaacat

SEQ ID NO: 86958 - DNA, 30 bp, Artificial Sequence
  Synthetic oligonucleotide
ggggcgtgtcaggatctgattcgacaacat

SEQ ID NO: 86959 - DNA, 30 bp, Artificial Sequence
  Synthetic oligonucleotide
aggttaggcaacataggcagtcgccaacat

SEQ ID NO: 86960 - DNA, 30 bp, Artificial Sequence
  Synthetic oligonucleotide
gtaagcctggcacccgccaaacgtcaacat

SEQ ID NO: 86961 - DNA, 30 bp, Artificial Sequence
  Synthetic oligonucleotide
agggaggcaatagctgtctggagggaacat

SEQ ID NO: 86962 - DNA, 30 bp, Artificial Sequence
  Synthetic oligonucleotide
cagcgtgaggccttacgagggaaataacat

SEQ ID NO: 86963 - DNA, 30 bp, Artificial Sequence
  Synthetic oligonucleotide
ccgagggaagttatgccaactttataacat

SEQ ID NO: 86964 - DNA, 30 bp, Artificial Sequence
  Synthetic oligonucleotide
agtcgagaatcttatcttcgggcctaacat

SEQ ID NO: 86965 - DNA, 30 bp, Artificial Sequence
  Synthetic oligonucleotide
cacgggacacacactataacatgctaacat

SEQ ID NO: 86966 - DNA, 30 bp, Artificial Sequence
  Synthetic oligonucleotide
ccgatttgggacaagcgctggtagtaacat

SEQ ID NO: 86967 - DNA, 30 bp, Artificial Sequence
  Synthetic oligonucleotide
ggagggattcgtcggtattacggaacacat

SEQ ID NO: 86968 - DNA, 30 bp, Artificial Sequence
  Synthetic oligonucleotide
ggaagaacttacgggaaggtaatgacacat

SEQ ID NO: 86969 - DNA, 30 bp, Artificial Sequence
  Synthetic oligonucleotide
aacgtccatagtacacttcgtcttacacat

SEQ ID NO: 86970 - DNA, 30 bp, Artificial Sequence
  Synthetic oligonucleotide
ggaacatgaggacaaaggccctgagcacat

SEQ ID NO: 86971 - DNA, 30 bp, Artificial Sequence
  Synthetic oligonucleotide
gacagtttcacagagtatgtagccgcacat

SEQ ID NO: 86972 - DNA, 30 bp, Artificial Sequence
  Synthetic oligonucleotide
caaggaggcgggtcggcaggtgatgcacat

SEQ ID NO: 86973 - DNA, 30 bp, Artificial Sequence
  Synthetic oligonucleotide
ttatcatcgtgagtgaatcattatgcacat

SEQ ID NO: 86974 - DNA, 30 bp, Artificial Sequence
  Synthetic oligonucleotide
ggtggtgcaatgggaccgagattctcacat

SEQ ID NO: 86975 - DNA, 30 bp, Artificial Sequence
  Synthetic oligonucleotide
tccgggcgtggatatctttacgtgtcacat

SEQ ID NO: 86976 - DNA, 30 bp, Artificial Sequence
  Synthetic oligonucleotide
gtcgcgaaggtatctaaagatcgttcacat

SEQ ID NO: 86977 - DNA, 30 bp, Artificial Sequence
  Synthetic oligonucleotide
cgcctgtgagcgtgctaacatgagtgacat

SEQ ID NO: 86978 - DNA, 30 bp, Artificial Sequence
  Synthetic oligonucleotide
agtggtggggaggtccgttaggcttgacat

SEQ ID NO: 86979 - DNA, 30 bp, Artificial Sequence
  Synthetic oligonucleotide
gggcagctggattaccgtagggccatacat

SEQ ID NO: 86980 - DNA, 30 bp, Artificial Sequence
  Synthetic oligonucleotide
acgccccgttacggacctcatcagctacat

SEQ ID NO: 86981 - DNA, 30 bp, Artificial Sequence
  Synthetic oligonucleotide
acggtattcgccataacgacggcgctacat

SEQ ID NO: 86982 - DNA, 30 bp, Artificial Sequence
  Synthetic oligonucleotide
agttaattaaaaggagttcaaggcgtacat

SEQ ID NO: 86983 - DNA, 30 bp, Artificial Sequence
  Synthetic oligonucleotide
tctggctaggcgtgtgggatatgcgtacat

SEQ ID NO: 86984 - DNA, 30 bp, Artificial Sequence
  Synthetic oligonucleotide
cggatatcgttacaggaagtataggtacat

SEQ ID NO: 86985 - DNA, 30 bp, Artificial Sequence
  Synthetic oligonucleotide
tgatatacgcgcgtgggaagaatggtacat

SEQ ID NO: 86986 - DNA, 30 bp, Artificial Sequence
  Synthetic oligonucleotide
gttgaagtaaaagtatggctgatattacat

SEQ ID NO: 86987 - DNA, 30 bp, Artificial Sequence
  Synthetic oligonucleotide
tagtacacaactcgaagctaaacgttacat

SEQ ID NO: 86988 - DNA, 30 bp, Artificial Sequence
  Synthetic oligonucleotide
ggttgagcggggagcgggctgactttacat

SEQ ID NO: 86989 - DNA, 30 bp, Artificial Sequence
  Synthetic oligonucleotide
aatcgaacctaatacctactcgaacaccat

SEQ ID NO: 86990 - DNA, 30 bp, Artificial Sequence
  Synthetic oligonucleotide
caagctcgtaagccctgaatcaagcaccat

SEQ ID NO: 86991 - DNA, 30 bp, Artificial Sequence
  Synthetic oligonucleotide
gtgaccgatggaaattgacctgtataccat

SEQ ID NO: 86992 - DNA, 30 bp, Artificial Sequence
  Synthetic oligonucleotide
tcgaactaccgcacgtaaatagactaccat

SEQ ID NO: 86993 - DNA, 30 bp, Artificial Sequence
  Synthetic oligonucleotide
gcgcgggaagaacgactccaaggctaccat

SEQ ID NO: 86994 - DNA, 30 bp, Artificial Sequence
  Synthetic oligonucleotide
atcgaggttgaccagagttagggagcccat

SEQ ID NO: 86995 - DNA, 30 bp, Artificial Sequence
  Synthetic oligonucleotide
gaaggcttgaacagcttaaatctagcccat

SEQ ID NO: 86996 - DNA, 30 bp, Artificial Sequence
  Synthetic oligonucleotide
gtgcaaactatctcaaaagcacgatcccat

SEQ ID NO: 86997 - DNA, 30 bp, Artificial Sequence
  Synthetic oligonucleotide
acgcattgaggcgtctcggagtcaagccat

SEQ ID NO: 86998 - DNA, 30 bp, Artificial Sequence
  Synthetic oligonucleotide
cgtacgtattaaaacgtataagtaggccat

SEQ ID NO: 86999 - DNA, 30 bp, Artificial Sequence
  Synthetic oligonucleotide
aggttcagaagaaggaagaaaagatgccat

SEQ ID NO: 87000 - DNA, 30 bp, Artificial Sequence
  Synthetic oligonucleotide
tgcggaccgaatccttgtatgagctgccat

SEQ ID NO: 87001 - DNA, 30 bp, Artificial Sequence
  Synthetic oligonucleotide
aaagggcatagtctaatccacagaatccat

SEQ ID NO: 87002 - DNA, 30 bp, Artificial Sequence
  Synthetic oligonucleotide
tccggatcgggagtggcgtcgaagctccat

SEQ ID NO: 87003 - DNA, 30 bp, Artificial Sequence
  Synthetic oligonucleotide
agtactacgggcgggaaatctctcgtccat

SEQ ID NO: 87004 - DNA, 30 bp, Artificial Sequence
  Synthetic oligonucleotide
gttgtcacgaatctactccgaaaaaagcat

SEQ ID NO: 87005 - DNA, 30 bp, Artificial Sequence
  Synthetic oligonucleotide
gagacatgatgagtgccgctagagaagcat

SEQ ID NO: 87006 - DNA, 30 bp, Artificial Sequence
  Synthetic oligonucleotide
cggaggcatcgcatcgcgctacataagcat

SEQ ID NO: 87007 - DNA, 30 bp, Artificial Sequence
  Synthetic oligonucleotide
gaggtcaagcttaacggtcgtactaagcat

SEQ ID NO: 87008 - DNA, 30 bp, Artificial Sequence
  Synthetic oligonucleotide
cgggcgtgtcgagtcataaagggccagcat

SEQ ID NO: 87009 - DNA, 30 bp, Artificial Sequence
  Synthetic oligonucleotide
gcagatgtgttaatcctattagggcagcat

SEQ ID NO: 87010 - DNA, 30 bp, Artificial Sequence
  Synthetic oligonucleotide
tcagtcgcgaaagggtagagagcggagcat

SEQ ID NO: 87011 - DNA, 30 bp, Artificial Sequence
  Synthetic oligonucleotide
caatgacagcacgaacgaaggaggtagcat

SEQ ID NO: 87012 - DNA, 30 bp, Artificial Sequence
  Synthetic oligonucleotide
tacaccatggatgcacgggtgagcccgcat

SEQ ID NO: 87013 - DNA, 30 bp, Artificial Sequence
  Synthetic oligonucleotide
cgacgtgtgtaaaggacggcccatccgcat

SEQ ID NO: 87014 - DNA, 30 bp, Artificial Sequence
  Synthetic oligonucleotide
agttgaccaagggatcccaggctatcgcat

SEQ ID NO: 87015 - DNA, 30 bp, Artificial Sequence
  Synthetic oligonucleotide
gtaaaatgatagtcgcattcataccggcat

SEQ ID NO: 87016 - DNA, 30 bp, Artificial Sequence
  Synthetic oligonucleotide
acgtggcgggaaaacctatatgggcggcat

SEQ ID NO: 87017 - DNA, 30 bp, Artificial Sequence
  Synthetic oligonucleotide
cacgattaagtcaagctttaatggcggcat

SEQ ID NO: 87018 - DNA, 30 bp, Artificial Sequence
  Synthetic oligonucleotide
gtcgtaaatattcactcaaggctggggcat

SEQ ID NO: 87019 - DNA, 30 bp, Artificial Sequence
  Synthetic oligonucleotide
tcatgaacgaaagcgcgctaacgctggcat

SEQ ID NO: 87020 - DNA, 30 bp, Artificial Sequence
  Synthetic oligonucleotide
tcacaattgcagtcaccatagggctggcat

SEQ ID NO: 87021 - DNA, 30 bp, Artificial Sequence
  Synthetic oligonucleotide
gcgtatagtccaggacggtttgaactgcat

SEQ ID NO: 87022 - DNA, 30 bp, Artificial Sequence
  Synthetic oligonucleotide
cccgtctcatagggcgtgagtggagtgcat

SEQ ID NO: 87023 - DNA, 30 bp, Artificial Sequence
  Synthetic oligonucleotide
ggtgtccaatgcggattagggactttgcat

SEQ ID NO: 87024 - DNA, 30 bp, Artificial Sequence
  Synthetic oligonucleotide
cgcaccggccagacggcatataaaaatcat

SEQ ID NO: 87025 - DNA, 30 bp, Artificial Sequence
  Synthetic oligonucleotide
tagcgggcacgagacccggagagcaatcat

SEQ ID NO: 87026 - DNA, 30 bp, Artificial Sequence
  Synthetic oligonucleotide
cgagtaagtgcagatgggaccgataatcat

SEQ ID NO: 87027 - DNA, 30 bp, Artificial Sequence
  Synthetic oligonucleotide
acagtgaatcacagtgtacgacggcatcat

SEQ ID NO: 87028 - DNA, 30 bp, Artificial Sequence
  Synthetic oligonucleotide
acctgcccgccatttagagacaacgatcat

SEQ ID NO: 87029 - DNA, 30 bp, Artificial Sequence
  Synthetic oligonucleotide
catgtctgaagcccaacgggagcggatcat

SEQ ID NO: 87030 - DNA, 30 bp, Artificial Sequence
  Synthetic oligonucleotide
gctccgtagcgtaacatcgcttgggatcat

SEQ ID NO: 87031 - DNA, 30 bp, Artificial Sequence
  Synthetic oligonucleotide
aggtccaaagcacgtaatcgtattgatcat

SEQ ID NO: 87032 - DNA, 30 bp, Artificial Sequence
  Synthetic oligonucleotide
gtcgggttaactgtgggcgaaggctatcat

SEQ ID NO: 87033 - DNA, 30 bp, Artificial Sequence
  Synthetic oligonucleotide
ccggtcccaagccttaaataagagtatcat

SEQ ID NO: 87034 - DNA, 30 bp, Artificial Sequence
  Synthetic oligonucleotide
atgtggacggataaggtggcagtttatcat

SEQ ID NO: 87035 - DNA, 30 bp, Artificial Sequence
  Synthetic oligonucleotide
tacgggcgcatcgggcttctatcacctcat

SEQ ID NO: 87036 - DNA, 30 bp, Artificial Sequence
  Synthetic oligonucleotide
tgggggacacattactctaagcatcctcat

SEQ ID NO: 87037 - DNA, 30 bp, Artificial Sequence
  Synthetic oligonucleotide
ctacaatcgagcatagatctaccgtctcat

SEQ ID NO: 87038 - DNA, 30 bp, Artificial Sequence
  Synthetic oligonucleotide
ttacatcaatacgaataagaatggtctcat

SEQ ID NO: 87039 - DNA, 30 bp, Artificial Sequence
  Synthetic oligonucleotide
ctggctcagctcagggtgcaccggcgtcat

SEQ ID NO: 87040 - DNA, 30 bp, Artificial Sequence
  Synthetic oligonucleotide
gcattccggaaagcttatatagtgcgtcat

SEQ ID NO: 87041 - DNA, 30 bp, Artificial Sequence
  Synthetic oligonucleotide
gccggttaagagggggctgtgttgcgtcat

SEQ ID NO: 87042 - DNA, 30 bp, Artificial Sequence
  Synthetic oligonucleotide
gtataccgcaagggacacgccaaaggtcat

SEQ ID NO: 87043 - DNA, 30 bp, Artificial Sequence
  Synthetic oligonucleotide
aacgtagtgcggtaggtctttttaggtcat

SEQ ID NO: 87044 - DNA, 29 bp, Artificial Sequence
  Synthetic oligonucleotide
agagggatcggcataatagtaacggtcat

SEQ ID NO: 87045 - DNA, 30 bp, Artificial Sequence
  Synthetic oligonucleotide
gggatcaatcactcgatacagattggtcat

SEQ ID NO: 87046 - DNA, 30 bp, Artificial Sequence
  Synthetic oligonucleotide
cctaccattcagaaacaatagttgtgtcat

SEQ ID NO: 87047 - DNA, 30 bp, Artificial Sequence
  Synthetic oligonucleotide
ggagtaacacgctgagacatccatattcat

SEQ ID NO: 87048 - DNA, 30 bp, Artificial Sequence
  Synthetic oligonucleotide
catgggtcctcaagctgagattgtattcat

SEQ ID NO: 87049 - DNA, 30 bp, Artificial Sequence
  Synthetic oligonucleotide
gagacaatcccacggtgaaggaagcttcat

SEQ ID NO: 87050 - DNA, 30 bp, Artificial Sequence
  Synthetic oligonucleotide
ttgtagagtctcgaggaaagcgcggttcat

SEQ ID NO: 87051 - DNA, 30 bp, Artificial Sequence
  Synthetic oligonucleotide
ggaacgatagtctgtatttcaatgaaagat

SEQ ID NO: 87052 - DNA, 30 bp, Artificial Sequence
  Synthetic oligonucleotide
ggacagtaattggcacaaacaaataaagat

SEQ ID NO: 87053 - DNA, 30 bp, Artificial Sequence
  Synthetic oligonucleotide
gtcacaaaatcacgaatgcaatctaaagat

SEQ ID NO: 87054 - DNA, 30 bp, Artificial Sequence
  Synthetic oligonucleotide
tcatggacgggtgtctagattatccaagat

SEQ ID NO: 87055 - DNA, 30 bp, Artificial Sequence
  Synthetic oligonucleotide
ccacgtgggtagacagctttagcgcaagat

SEQ ID NO: 87056 - DNA, 30 bp, Artificial Sequence
  Synthetic oligonucleotide
gggcatacagattaggaggcacatcaagat

SEQ ID NO: 87057 - DNA, 30 bp, Artificial Sequence
  Synthetic oligonucleotide
cagagagaggataatccaagcatataagat

SEQ ID NO: 87058 - DNA, 30 bp, Artificial Sequence
  Synthetic oligonucleotide
cgtagtttgaagtagcgtgatcgttaagat

SEQ ID NO: 87059 - DNA, 30 bp, Artificial Sequence
  Synthetic oligonucleotide
agaaagctagttagatgaaatcgaacagat

SEQ ID NO: 87060 - DNA, 30 bp, Artificial Sequence
  Synthetic oligonucleotide
gcaagaaaaagaggacttctttgaacagat

SEQ ID NO: 87061 - DNA, 30 bp, Artificial Sequence
  Synthetic oligonucleotide
accggggaagaaatggtattagcaccagat

SEQ ID NO: 87062 - DNA, 30 bp, Artificial Sequence
  Synthetic oligonucleotide
ctagacgaacatagagtaataggtccagat

SEQ ID NO: 87063 - DNA, 30 bp, Artificial Sequence
  Synthetic oligonucleotide
ataaagccaagggcatgctggatagcagat

SEQ ID NO: 87064 - DNA, 30 bp, Artificial Sequence
  Synthetic oligonucleotide
tggacacgtccatagggcaagagcgcagat

SEQ ID NO: 87065 - DNA, 30 bp, Artificial Sequence
  Synthetic oligonucleotide
ccctttgaaaatggaaatcaacgatcagat

SEQ ID NO: 87066 - DNA, 30 bp, Artificial Sequence
  Synthetic oligonucleotide
gagcagtaccgactgggtacgtgatcagat

SEQ ID NO: 87067 - DNA, 30 bp, Artificial Sequence
  Synthetic oligonucleotide
gtcatggcacacggtccataagactcagat

SEQ ID NO: 87068 - DNA, 30 bp, Artificial Sequence
  Synthetic oligonucleotide
gctgggaacgtaatgggcagggcgtcagat

SEQ ID NO: 87069 - DNA, 30 bp, Artificial Sequence
  Synthetic oligonucleotide
acggacgcttgggtggcaaccgcaagagat

SEQ ID NO: 87070 - DNA, 30 bp, Artificial Sequence
  Synthetic oligonucleotide
cgaggtaggtctgcccttgactaccgagat

SEQ ID NO: 87071 - DNA, 30 bp, Artificial Sequence
  Synthetic oligonucleotide
tggatcggaaatctgtccagtacgcgagat

SEQ ID NO: 87072 - DNA, 30 bp, Artificial Sequence
  Synthetic oligonucleotide
ccgaagagggttcgccgttaggttcgagat

SEQ ID NO: 87073 - DNA, 30 bp, Artificial Sequence
  Synthetic oligonucleotide
gggggtagaaagacgagaggaaacggagat

SEQ ID NO: 87074 - DNA, 30 bp, Artificial Sequence
  Synthetic oligonucleotide
tgtcaccagcttcgggatccaaaatgagat

SEQ ID NO: 87075 - DNA, 30 bp, Artificial Sequence
  Synthetic oligonucleotide
ctagaatcataatgtatgaacgactgagat

SEQ ID NO: 87076 - DNA, 30 bp, Artificial Sequence
  Synthetic oligonucleotide
accgggcgaggcgtagagtgtcagtgagat

SEQ ID NO: 87077 - DNA, 30 bp, Artificial Sequence
  Synthetic oligonucleotide
gtgccgttgtgcttaggacagtggatagat

SEQ ID NO: 87078 - DNA, 30 bp, Artificial Sequence
  Synthetic oligonucleotide
tggggggagaaaaagaggcagtggatagat

SEQ ID NO: 87079 - DNA, 30 bp, Artificial Sequence
  Synthetic oligonucleotide
cacacaatagtagtaccggatgccgtagat

SEQ ID NO: 87080 - DNA, 30 bp, Artificial Sequence
  Synthetic oligonucleotide
aggttgatattaattagcgttaaggtagat

SEQ ID NO: 87081 - DNA, 30 bp, Artificial Sequence
  Synthetic oligonucleotide
gtcccatgtgagagagatcgcgcggtagat

SEQ ID NO: 87082 - DNA, 30 bp, Artificial Sequence
  Synthetic oligonucleotide
actagcctagcgtaagagaaccagttagat

SEQ ID NO: 87083 - DNA, 30 bp, Artificial Sequence
  Synthetic oligonucleotide
gaagtgttgggcgatgtgctgtgaaacgat

SEQ ID NO: 87084 - DNA, 30 bp, Artificial Sequence
  Synthetic oligonucleotide
aacgctcaaaccaatttcggaccacacgat

SEQ ID NO: 87085 - DNA, 30 bp, Artificial Sequence
  Synthetic oligonucleotide
agtatgggattaagcaagttaaacgacgat

SEQ ID NO: 87086 - DNA, 30 bp, Artificial Sequence
  Synthetic oligonucleotide
acacatcatgcacgttaagtgaccaccgat

SEQ ID NO: 87087 - DNA, 30 bp, Artificial Sequence
  Synthetic oligonucleotide
agaggacggatacaagatctatgtaccgat

SEQ ID NO: 87088 - DNA, 30 bp, Artificial Sequence
  Synthetic oligonucleotide
cggggtaacatgaggattagtatttccgat

SEQ ID NO: 87089 - DNA, 30 bp, Artificial Sequence
  Synthetic oligonucleotide
caacccgtgcagagggtccaaaaaagcgat

SEQ ID NO: 87090 - DNA, 30 bp, Artificial Sequence
  Synthetic oligonucleotide
ctactcggaagccaggttaaagagagcgat

SEQ ID NO: 87091 - DNA, 30 bp, Artificial Sequence
  Synthetic oligonucleotide
ataaggccgcgtacgagcctatcgagcgat

SEQ ID NO: 87092 - DNA, 30 bp, Artificial Sequence
  Synthetic oligonucleotide
ccgttaaatcgtccaaggtggaatagcgat

SEQ ID NO: 87093 - DNA, 30 bp, Artificial Sequence
  Synthetic oligonucleotide
gtcgaaggggatcggggtcgccatagcgat

SEQ ID NO: 87094 - DNA, 30 bp, Artificial Sequence
  Synthetic oligonucleotide
gtggagctctcaacgaaccctcatagcgat

SEQ ID NO: 87095 - DNA, 30 bp, Artificial Sequence
  Synthetic oligonucleotide
ctagacgatcgataagctcaggatagcgat

SEQ ID NO: 87096 - DNA, 30 bp, Artificial Sequence
  Synthetic oligonucleotide
ccgtgatggttataatgagtagttggcgat

SEQ ID NO: 87097 - DNA, 30 bp, Artificial Sequence
  Synthetic oligonucleotide
tcggaactcgggctacccagcttctgcgat

SEQ ID NO: 87098 - DNA, 30 bp, Artificial Sequence
  Synthetic oligonucleotide
gtgtagagtaacttcctgcaaaggatcgat

SEQ ID NO: 87099 - DNA, 30 bp, Artificial Sequence
  Synthetic oligonucleotide
gatagcagttcaagtactcagaatatcgat

SEQ ID NO: 87100 - DNA, 30 bp, Artificial Sequence
  Synthetic oligonucleotide
gagccggtgtagtgaatggccactatcgat

SEQ ID NO: 87101 - DNA, 30 bp, Artificial Sequence
  Synthetic oligonucleotide
tccaacactcgttccctgaatgatctcgat

SEQ ID NO: 87102 - DNA, 30 bp, Artificial Sequence
  Synthetic oligonucleotide
gattaaacacggacgacttgaagggtcgat

SEQ ID NO: 87103 - DNA, 30 bp, Artificial Sequence
  Synthetic oligonucleotide
gcactgtggcgtagcattaaatcgttcgat

SEQ ID NO: 87104 - DNA, 30 bp, Artificial Sequence
  Synthetic oligonucleotide
cgggtacggtgtgccgaacggaggttcgat

SEQ ID NO: 87105 - DNA, 30 bp, Artificial Sequence
  Synthetic oligonucleotide
ctacaggcacgaccggtacaggttttcgat

SEQ ID NO: 87106 - DNA, 30 bp, Artificial Sequence
  Synthetic oligonucleotide
taacgttacgcgcctgtacagacaaaggat

SEQ ID NO: 87107 - DNA, 30 bp, Artificial Sequence
  Synthetic oligonucleotide
caatcctcataagtcagcgatatcaaggat

SEQ ID NO: 87108 - DNA, 30 bp, Artificial Sequence
  Synthetic oligonucleotide
atatcggtatgcaccggcggggagaaggat

SEQ ID NO: 87109 - DNA, 30 bp, Artificial Sequence
  Synthetic oligonucleotide
gggcctaaaatgagggtgggcggtaaggat

SEQ ID NO: 87110 - DNA, 30 bp, Artificial Sequence
  Synthetic oligonucleotide
ccacccataacagataaattcctgcaggat

SEQ ID NO: 87111 - DNA, 30 bp, Artificial Sequence
  Synthetic oligonucleotide
ggttagctaaggaaaatgaggtgagaggat

SEQ ID NO: 87112 - DNA, 30 bp, Artificial Sequence
  Synthetic oligonucleotide
tccagaacacctaataaccgattagaggat

SEQ ID NO: 87113 - DNA, 30 bp, Artificial Sequence
  Synthetic oligonucleotide
tattaatatcgagcacaatcgaacgaggat

SEQ ID NO: 87114 - DNA, 30 bp, Artificial Sequence
  Synthetic oligonucleotide
tcccgcgagcagtagtgaactatcgaggat

SEQ ID NO: 87115 - DNA, 30 bp, Artificial Sequence
  Synthetic oligonucleotide
aacgaggcagtggatatcatgcaataggat

SEQ ID NO: 87116 - DNA, 30 bp, Artificial Sequence
  Synthetic oligonucleotide
aagagggactaacgatagtcgtcataggat

SEQ ID NO: 87117 - DNA, 30 bp, Artificial Sequence
  Synthetic oligonucleotide
agactgtaaaggtgctacgactgataggat

SEQ ID NO: 87118 - DNA, 30 bp, Artificial Sequence
  Synthetic oligonucleotide
gaaagcgggggtcttaaagagcacacggat

SEQ ID NO: 87119 - DNA, 30 bp, Artificial Sequence
  Synthetic oligonucleotide
tgcttccaaacgggcacgtgtcatacggat

SEQ ID NO: 87120 - DNA, 30 bp, Artificial Sequence
  Synthetic oligonucleotide
tattagtgccagggatcgggaaacccggat

SEQ ID NO: 87121 - DNA, 30 bp, Artificial Sequence
  Synthetic oligonucleotide
tgctacaaatggggacaggaaacgccggat

SEQ ID NO: 87122 - DNA, 30 bp, Artificial Sequence
  Synthetic oligonucleotide
tggatgtgccggcgcgactgaactgcggat

SEQ ID NO: 87123 - DNA, 30 bp, Artificial Sequence
  Synthetic oligonucleotide
ccacccacaactagataatcgactgcggat

SEQ ID NO: 87124 - DNA, 30 bp, Artificial Sequence
  Synthetic oligonucleotide
tagtacgtgtgctagtcggtcatgagggat

SEQ ID NO: 87125 - DNA, 30 bp, Artificial Sequence
  Synthetic oligonucleotide
cagtaacaactaactcaggcatggcgggat

SEQ ID NO: 87126 - DNA, 30 bp, Artificial Sequence
  Synthetic oligonucleotide
aagcaccgctatgggtgaggaatgcgggat

SEQ ID NO: 87127 - DNA, 30 bp, Artificial Sequence
  Synthetic oligonucleotide
ctagttgagaagactggcgcacctcgggat

SEQ ID NO: 87128 - DNA, 30 bp, Artificial Sequence
  Synthetic oligonucleotide
ccatgaaatgcgcctaaggcgggaggggat

SEQ ID NO: 87129 - DNA, 30 bp, Artificial Sequence
  Synthetic oligonucleotide
agatccaatctaccatgctagcgtggggat

SEQ ID NO: 87130 - DNA, 30 bp, Artificial Sequence
  Synthetic oligonucleotide
aggatacgttgagggacgttggcatgggat

SEQ ID NO: 87131 - DNA, 30 bp, Artificial Sequence
  Synthetic oligonucleotide
agtttgtcgatgtggctagagagctgggat

SEQ ID NO: 87132 - DNA, 30 bp, Artificial Sequence
  Synthetic oligonucleotide
tatacaaactcggaattataggcgtgggat

SEQ ID NO: 87133 - DNA, 30 bp, Artificial Sequence
  Synthetic oligonucleotide
acggattccattcgtgggtaggtgtgggat

SEQ ID NO: 87134 - DNA, 30 bp, Artificial Sequence
  Synthetic oligonucleotide
ggagacagacttaaaccgggtgggatggat

SEQ ID NO: 87135 - DNA, 30 bp, Artificial Sequence
  Synthetic oligonucleotide
ggccggaagaagataggccttgtactggat

SEQ ID NO: 87136 - DNA, 30 bp, Artificial Sequence
  Synthetic oligonucleotide
tgtacggtaaacgagcaatacatgctggat

SEQ ID NO: 87137 - DNA, 30 bp, Artificial Sequence
  Synthetic oligonucleotide
gcattttggggctaagggaggaaaaatgat

SEQ ID NO: 87138 - DNA, 30 bp, Artificial Sequence
  Synthetic oligonucleotide
gtccaaaggactacctaatacgcgaatgat

SEQ ID NO: 87139 - DNA, 30 bp, Artificial Sequence
  Synthetic oligonucleotide
acaggaaatagagccaaaagaatagatgat

SEQ ID NO: 87140 - DNA, 30 bp, Artificial Sequence
  Synthetic oligonucleotide
agagcatggtactattcacaagtagatgat

SEQ ID NO: 87141 - DNA, 30 bp, Artificial Sequence
  Synthetic oligonucleotide
attaactaggtaaaggcgaggaaagctgat

SEQ ID NO: 87142 - DNA, 30 bp, Artificial Sequence
  Synthetic oligonucleotide
ggataggagaggtccagtttacgctctgat

SEQ ID NO: 87143 - DNA, 30 bp, Artificial Sequence
  Synthetic oligonucleotide
ggtcgaattgtacactgtgtccggcgtgat

SEQ ID NO: 87144 - DNA, 30 bp, Artificial Sequence
  Synthetic oligonucleotide
acacggcgtgcggaatctctgtaaggtgat

SEQ ID NO: 87145 - DNA, 30 bp, Artificial Sequence
  Synthetic oligonucleotide
ccatggggtattcaaagaactaagggtgat

SEQ ID NO: 87146 - DNA, 30 bp, Artificial Sequence
  Synthetic oligonucleotide
cactggaggatgcgggctggacaatgtgat

SEQ ID NO: 87147 - DNA, 30 bp, Artificial Sequence
  Synthetic oligonucleotide
atagttgttcgaacaatggtgacaattgat

SEQ ID NO: 87148 - DNA, 30 bp, Artificial Sequence
  Synthetic oligonucleotide
cggttgagggatgtatactacttaattgat

SEQ ID NO: 87149 - DNA, 30 bp, Artificial Sequence
  Synthetic oligonucleotide
agtggcggtgaagctgtttgctcacttgat

SEQ ID NO: 87150 - DNA, 30 bp, Artificial Sequence
  Synthetic oligonucleotide
tgacccaggtccagcgaaagactagttgat

SEQ ID NO: 87151 - DNA, 30 bp, Artificial Sequence
  Synthetic oligonucleotide
cggggtagaaattcgctgagagctcaatat

SEQ ID NO: 87152 - DNA, 30 bp, Artificial Sequence
  Synthetic oligonucleotide
acggcataaagcgccgtacacaccgaatat

SEQ ID NO: 87153 - DNA, 30 bp, Artificial Sequence
  Synthetic oligonucleotide
agcgtcatgagtaaagtgaagaccgaatat

SEQ ID NO: 87154 - DNA, 30 bp, Artificial Sequence
  Synthetic oligonucleotide
caaagcctggggtcactatgggcggcatat

SEQ ID NO: 87155 - DNA, 30 bp, Artificial Sequence
  Synthetic oligonucleotide
acctaggccaaaccagactgcgaaagatat

SEQ ID NO: 87156 - DNA, 30 bp, Artificial Sequence
  Synthetic oligonucleotide
tatgttgcgaatgagaggtttgcgcgatat

SEQ ID NO: 87157 - DNA, 30 bp, Artificial Sequence
  Synthetic oligonucleotide
cagtgttgatggccagaagacttaggatat

SEQ ID NO: 87158 - DNA, 30 bp, Artificial Sequence
  Synthetic oligonucleotide
agtgattgttaaaagaagctaaagggatat

SEQ ID NO: 87159 - DNA, 30 bp, Artificial Sequence
  Synthetic oligonucleotide
atatagctcagaatgcggactgggggatat

SEQ ID NO: 87160 - DNA, 30 bp, Artificial Sequence
  Synthetic oligonucleotide
gaagcaggcttagtggagtatgtgtgatat

SEQ ID NO: 87161 - DNA, 30 bp, Artificial Sequence
  Synthetic oligonucleotide
agggagaacgtttgcatacaaataatatat

SEQ ID NO: 87162 - DNA, 30 bp, Artificial Sequence
  Synthetic oligonucleotide
gaatagcaaggtccgagagctacgatatat

SEQ ID NO: 87163 - DNA, 30 bp, Artificial Sequence
  Synthetic oligonucleotide
cagggatgccgagagttgaggcatatatat

SEQ ID NO: 87164 - DNA, 30 bp, Artificial Sequence
  Synthetic oligonucleotide
acggaaacgtcggacttagtcagtatatat

SEQ ID NO: 87165 - DNA, 30 bp, Artificial Sequence
  Synthetic oligonucleotide
acccgaagaaaggtgtggtccatactatat

SEQ ID NO: 87166 - DNA, 30 bp, Artificial Sequence
  Synthetic oligonucleotide
acgaacgacaccacaagttcccctgtatat

SEQ ID NO: 87167 - DNA, 30 bp, Artificial Sequence
  Synthetic oligonucleotide
gcgagggattagttacgtattgccttatat

SEQ ID NO: 87168 - DNA, 30 bp, Artificial Sequence
  Synthetic oligonucleotide
agagaagatgctacactcgccatgttatat

SEQ ID NO: 87169 - DNA, 30 bp, Artificial Sequence
  Synthetic oligonucleotide
gtacagatcggccaccatagaactttatat

SEQ ID NO: 87170 - DNA, 30 bp, Artificial Sequence
  Synthetic oligonucleotide
acatgataccttaccgacattcctttatat

SEQ ID NO: 87171 - DNA, 30 bp, Artificial Sequence
  Synthetic oligonucleotide
tcggggctggtgatagcgccacgaaactat

SEQ ID NO: 87172 - DNA, 30 bp, Artificial Sequence
  Synthetic oligonucleotide
gcggctaacgagggcgacagaaataactat

SEQ ID NO: 87173 - DNA, 30 bp, Artificial Sequence
  Synthetic oligonucleotide
aacggggcgtggaggaaagcgatacactat

SEQ ID NO: 87174 - DNA, 30 bp, Artificial Sequence
  Synthetic oligonucleotide
ccgccgaggactggacaatccgtccactat

SEQ ID NO: 87175 - DNA, 30 bp, Artificial Sequence
  Synthetic oligonucleotide
ctgcgggcgctgaataaacggaatcactat

SEQ ID NO: 87176 - DNA, 30 bp, Artificial Sequence
  Synthetic oligonucleotide
cacgcctaagtcagtttgatgaatcactat

SEQ ID NO: 87177 - DNA, 30 bp, Artificial Sequence
  Synthetic oligonucleotide
cgctctcacgaactacatttttctcactat

SEQ ID NO: 87178 - DNA, 30 bp, Artificial Sequence
  Synthetic oligonucleotide
tacaaagggtgaagcaacgtggaggactat

SEQ ID NO: 87179 - DNA, 31 bp, Artificial Sequence
  Synthetic oligonucleotide
tgaagacgagatagcgttggagccggactat

SEQ ID NO: 87180 - DNA, 30 bp, Artificial Sequence
  Synthetic oligonucleotide
cttgagttcaggcgagggcatgctgactat

SEQ ID NO: 87181 - DNA, 30 bp, Artificial Sequence
  Synthetic oligonucleotide
tcgaccattgcatttagatcaaagtactat

SEQ ID NO: 87182 - DNA, 30 bp, Artificial Sequence
  Synthetic oligonucleotide
tagcgtacgataacgatctgtaggacctat

SEQ ID NO: 87183 - DNA, 30 bp, Artificial Sequence
  Synthetic oligonucleotide
gaggggaatactacgataagagaggcctat

SEQ ID NO: 87184 - DNA, 30 bp, Artificial Sequence
  Synthetic oligonucleotide
ctatgtgcgtaaactataaacagtgcctat

SEQ ID NO: 87185 - DNA, 30 bp, Artificial Sequence
  Synthetic oligonucleotide
ttgttgtgttctctgtttgtgttttcctat

SEQ ID NO: 87186 - DNA, 30 bp, Artificial Sequence
  Synthetic oligonucleotide
caggatcctcctgagatccaccgaagctat

SEQ ID NO: 87187 - DNA, 30 bp, Artificial Sequence
  Synthetic oligonucleotide
cgagcttcaagggggcgagaagtgcgctat

SEQ ID NO: 87188 - DNA, 30 bp, Artificial Sequence
  Synthetic oligonucleotide
ttaccgtaggtattcgggagggatcgctat

SEQ ID NO: 87189 - DNA, 30 bp, Artificial Sequence
  Synthetic oligonucleotide
gacctcgtgaaaccgtgagagggaggctat

SEQ ID NO: 87190 - DNA, 30 bp, Artificial Sequence
  Synthetic oligonucleotide
aaacgtagtcttcaaaagtcaaggggctat

SEQ ID NO: 87191 - DNA, 30 bp, Artificial Sequence
  Synthetic oligonucleotide
tacggaacttgtaagaaattccctggctat

SEQ ID NO: 87192 - DNA, 30 bp, Artificial Sequence
  Synthetic oligonucleotide
cgacattgtgattaacggcaatcatgctat

SEQ ID NO: 87193 - DNA, 30 bp, Artificial Sequence
  Synthetic oligonucleotide
cgcccgaagcgaagtaacagcgagatctat

SEQ ID NO: 87194 - DNA, 30 bp, Artificial Sequence
  Synthetic oligonucleotide
gggaggaaacagtattctccgtccgtctat

SEQ ID NO: 87195 - DNA, 30 bp, Artificial Sequence
  Synthetic oligonucleotide
ctaaacaggaatatttgatccttcgtctat

SEQ ID NO: 87196 - DNA, 30 bp, Artificial Sequence
  Synthetic oligonucleotide
ccacgagtgaacgcggtacgccaattctat

SEQ ID NO: 87197 - DNA, 30 bp, Artificial Sequence
  Synthetic oligonucleotide
ttggtcgagatggagtaggaatcgaagtat

SEQ ID NO: 87198 - DNA, 30 bp, Artificial Sequence
  Synthetic oligonucleotide
cacgggacacccctccctgtactgaagtat

SEQ ID NO: 87199 - DNA, 30 bp, Artificial Sequence
  Synthetic oligonucleotide
tgttgtccgtaggaccatacggtagagtat

SEQ ID NO: 87200 - DNA, 30 bp, Artificial Sequence
  Synthetic oligonucleotide
caaagccacatgccaatatctggatagtat

SEQ ID NO: 87201 - DNA, 30 bp, Artificial Sequence
  Synthetic oligonucleotide
gtgatatcagtgctccttgcgaactagtat

SEQ ID NO: 87202 - DNA, 30 bp, Artificial Sequence
  Synthetic oligonucleotide
gcggggatggcgtaacgtggggcgccgtat

SEQ ID NO: 87203 - DNA, 30 bp, Artificial Sequence
  Synthetic oligonucleotide
cgtaccgcccgtgtttaggtaagagcgtat

SEQ ID NO: 87204 - DNA, 30 bp, Artificial Sequence
  Synthetic oligonucleotide
ccgaatgtaaggtgaaaggagcaggcgtat

SEQ ID NO: 87205 - DNA, 30 bp, Artificial Sequence
  Synthetic oligonucleotide
caatcgtgttagcgcattagccttgcgtat

SEQ ID NO: 87206 - DNA, 30 bp, Artificial Sequence
  Synthetic oligonucleotide
tggctaagcaagatgttctacacctcgtat

SEQ ID NO: 87207 - DNA, 30 bp, Artificial Sequence
  Synthetic oligonucleotide
ggagaggacacaggactctcgtaccggtat

SEQ ID NO: 87208 - DNA, 30 bp, Artificial Sequence
  Synthetic oligonucleotide
aagcgctgggcaagctcgtatcttatgtat

SEQ ID NO: 87209 - DNA, 30 bp, Artificial Sequence
  Synthetic oligonucleotide
tcaaaacttggcgatttggacagactgtat

SEQ ID NO: 87210 - DNA, 30 bp, Artificial Sequence
  Synthetic oligonucleotide
agagccctgaccctcaaatggaagctgtat

SEQ ID NO: 87211 - DNA, 30 bp, Artificial Sequence
  Synthetic oligonucleotide
tcctgaaaaatagatgcgtcctgagtgtat

SEQ ID NO: 87212 - DNA, 30 bp, Artificial Sequence
  Synthetic oligonucleotide
cagtggaaagcgatagtaagcaataattat

SEQ ID NO: 87213 - DNA, 30 bp, Artificial Sequence
  Synthetic oligonucleotide
cgggagacgggcaaacccagttgacattat

SEQ ID NO: 87214 - DNA, 31 bp, Artificial Sequence
  Synthetic oligonucleotide
agacctgacacccccatcatcccgggattat

SEQ ID NO: 87215 - DNA, 30 bp, Artificial Sequence
  Synthetic oligonucleotide
cgcggtgggacaattgatgcgatgacttat

SEQ ID NO: 87216 - DNA, 30 bp, Artificial Sequence
  Synthetic oligonucleotide
ggtagagtgaagcacgtacgtcatccttat

SEQ ID NO: 87217 - DNA, 30 bp, Artificial Sequence
  Synthetic oligonucleotide
ggacataggtccctagccctgcagagttat

SEQ ID NO: 87218 - DNA, 30 bp, Artificial Sequence
  Synthetic oligonucleotide
ttgaccgacatggccgaacaggctggttat

SEQ ID NO: 87219 - DNA, 30 bp, Artificial Sequence
  Synthetic oligonucleotide
ggaggaatgctgaaaccatccgcagtttat

SEQ ID NO: 87220 - DNA, 30 bp, Artificial Sequence
  Synthetic oligonucleotide
agctcgatgattggtcggcgtacgttttat

SEQ ID NO: 87221 - DNA, 30 bp, Artificial Sequence
  Synthetic oligonucleotide
tcttgtgttattccagtgcgaagataaact

SEQ ID NO: 87222 - DNA, 30 bp, Artificial Sequence
  Synthetic oligonucleotide
tatctgaagacgggaaccgatacctaaact

SEQ ID NO: 87223 - DNA, 30 bp, Artificial Sequence
  Synthetic oligonucleotide
cgaaagaggtaggcagtgataggctaaact

SEQ ID NO: 87224 - DNA, 30 bp, Artificial Sequence
  Synthetic oligonucleotide
ctgaaaccaataattctatggagcacaact

SEQ ID NO: 87225 - DNA, 31 bp, Artificial Sequence
  Synthetic oligonucleotide
ggttagtcagtgttagatagaaaaggcaact

SEQ ID NO: 87226 - DNA, 30 bp, Artificial Sequence
  Synthetic oligonucleotide
acagataatcagataccataggaggcaact

SEQ ID NO: 87227 - DNA, 30 bp, Artificial Sequence
  Synthetic oligonucleotide
acttgcacactcgagtataaaagggcaact

SEQ ID NO: 87228 - DNA, 30 bp, Artificial Sequence
  Synthetic oligonucleotide
catacgactcgggctgtgcgccaatcaact

SEQ ID NO: 87229 - DNA, 30 bp, Artificial Sequence
  Synthetic oligonucleotide
aaacataaatgagagaaacagcggagaact

SEQ ID NO: 87230 - DNA, 30 bp, Artificial Sequence
  Synthetic oligonucleotide
tgtgcgctagcagatgcaaccgatagaact

SEQ ID NO: 87231 - DNA, 30 bp, Artificial Sequence
  Synthetic oligonucleotide
gcacaaagacggtaaaaggatactagaact

SEQ ID NO: 87232 - DNA, 30 bp, Artificial Sequence
  Synthetic oligonucleotide
tggagtcaaagttgcgaggactggcgaact

SEQ ID NO: 87233 - DNA, 30 bp, Artificial Sequence
  Synthetic oligonucleotide
tgacagacgactttcacagtcaaaggaact

SEQ ID NO: 87234 - DNA, 30 bp, Artificial Sequence
  Synthetic oligonucleotide
ttgctcgtccatgaaccagaagcaggaact

SEQ ID NO: 87235 - DNA, 30 bp, Artificial Sequence
  Synthetic oligonucleotide
cgcggagattgactaagcattgcaggaact

SEQ ID NO: 87236 - DNA, 30 bp, Artificial Sequence
  Synthetic oligonucleotide
cgcggagatactgcctctcgaaatggaact

SEQ ID NO: 87237 - DNA, 30 bp, Artificial Sequence
  Synthetic oligonucleotide
cgtgatttcgagcggtaccaaagatgaact

SEQ ID NO: 87238 - DNA, 30 bp, Artificial Sequence
  Synthetic oligonucleotide
ttgggtgatcgtaacgactcgcgctgaact

SEQ ID NO: 87239 - DNA, 30 bp, Artificial Sequence
  Synthetic oligonucleotide
atgccgataggtagaaacgaatggtgaact

SEQ ID NO: 87240 - DNA, 30 bp, Artificial Sequence
  Synthetic oligonucleotide
tgcctagacagacaatttgtcgagataact

SEQ ID NO: 87241 - DNA, 30 bp, Artificial Sequence
  Synthetic oligonucleotide
tccgcacggtcagtcgagtgtgggataact

SEQ ID NO: 87242 - DNA, 30 bp, Artificial Sequence
  Synthetic oligonucleotide
tagatacaactacaatcgtatactgtaact

SEQ ID NO: 87243 - DNA, 30 bp, Artificial Sequence
  Synthetic oligonucleotide
tatgagacctcgacagaatcttgcttaact

SEQ ID NO: 87244 - DNA, 30 bp, Artificial Sequence
  Synthetic oligonucleotide
agccccccgaggagacagggatagttaact

SEQ ID NO: 87245 - DNA, 30 bp, Artificial Sequence
  Synthetic oligonucleotide
ggggcatatagttgacaaaggcgaaacact

SEQ ID NO: 87246 - DNA, 30 bp, Artificial Sequence
  Synthetic oligonucleotide
caagtaaagacacgactgggccccaacact

SEQ ID NO: 87247 - DNA, 30 bp, Artificial Sequence
  Synthetic oligonucleotide
ttcgcgcgtacttgagcagcggggaacact

SEQ ID NO: 87248 - DNA, 30 bp, Artificial Sequence
  Synthetic oligonucleotide
tgcaagtgcagaagtaactggagcgacact

SEQ ID NO: 87249 - DNA, 30 bp, Artificial Sequence
  Synthetic oligonucleotide
aggatggtctcgcacgacaaagcggacact

SEQ ID NO: 87250 - DNA, 30 bp, Artificial Sequence
  Synthetic oligonucleotide
gctacataagcccgaagtcccggaaccact

SEQ ID NO: 87251 - DNA, 30 bp, Artificial Sequence
  Synthetic oligonucleotide
caatcacatagcaggaccgtcatgcccact

SEQ ID NO: 87252 - DNA, 30 bp, Artificial Sequence
  Synthetic oligonucleotide
catgaaggagattagtaggaaatggccact

SEQ ID NO: 87253 - DNA, 30 bp, Artificial Sequence
  Synthetic oligonucleotide
tcgggtatgcaatgcatcctcgcaagcact

SEQ ID NO: 87254 - DNA, 30 bp, Artificial Sequence
  Synthetic oligonucleotide
ttcggatgctcgtagtaccgtctaagcact

SEQ ID NO: 87255 - DNA, 30 bp, Artificial Sequence
  Synthetic oligonucleotide
ctcgagacgaaccgtgtgccgaacagcact

SEQ ID NO: 87256 - DNA, 30 bp, Artificial Sequence
  Synthetic oligonucleotide
ggtcgaataaaatcagtctgagggagcact

SEQ ID NO: 87257 - DNA, 29 bp, Artificial Sequence
  Synthetic oligonucleotide
gatgttcaaaaagtcagagaagaggcact

SEQ ID NO: 87258 - DNA, 30 bp, Artificial Sequence
  Synthetic oligonucleotide
aggctgtgcgaagagttaccgatgggcact

SEQ ID NO: 87259 - DNA, 30 bp, Artificial Sequence
  Synthetic oligonucleotide
actaaaatccaggaatgaggcctatgcact

SEQ ID NO: 87260 - DNA, 30 bp, Artificial Sequence
  Synthetic oligonucleotide
gcttacgtgtcgcgaggccacaaaatcact

SEQ ID NO: 87261 - DNA, 30 bp, Artificial Sequence
  Synthetic oligonucleotide
agctcccaaaggaagagaccggtaatcact

SEQ ID NO: 87262 - DNA, 30 bp, Artificial Sequence
  Synthetic oligonucleotide
cttgtcggtctcgtccagggtcgcatcact

SEQ ID NO: 87263 - DNA, 30 bp, Artificial Sequence
  Synthetic oligonucleotide
agcataaacaaagattgttcttgtatcact

SEQ ID NO: 87264 - DNA, 30 bp, Artificial Sequence
  Synthetic oligonucleotide
tcatgcgccagcgcgattcatcaaaagact

SEQ ID NO: 87265 - DNA, 30 bp, Artificial Sequence
  Synthetic oligonucleotide
actgagtgagacgaataaccggctaagact

SEQ ID NO: 87266 - DNA, 30 bp, Artificial Sequence
  Synthetic oligonucleotide
acgaactgtattggaatatgcttttagact

SEQ ID NO: 87267 - DNA, 30 bp, Artificial Sequence
  Synthetic oligonucleotide
tagagagatcgcaaaaaatgttcaacgact

SEQ ID NO: 87268 - DNA, 30 bp, Artificial Sequence
  Synthetic oligonucleotide
actgaggatcaacaattggagtcgacgact

SEQ ID NO: 87269 - DNA, 30 bp, Artificial Sequence
  Synthetic oligonucleotide
aatcgtgatccggaaggcaggacgccgact

SEQ ID NO: 87270 - DNA, 30 bp, Artificial Sequence
  Synthetic oligonucleotide
ttagttgcaatagagttacgccgagcgact

SEQ ID NO: 87271 - DNA, 30 bp, Artificial Sequence
  Synthetic oligonucleotide
acagatccgagagggaccaagcatgcgact

SEQ ID NO: 87272 - DNA, 30 bp, Artificial Sequence
  Synthetic oligonucleotide
aacaatcacagaatcatcgcgctaaggact

SEQ ID NO: 87273 - DNA, 30 bp, Artificial Sequence
  Synthetic oligonucleotide
tcatatgccatcacaaacaaacacaggact

SEQ ID NO: 87274 - DNA, 30 bp, Artificial Sequence
  Synthetic oligonucleotide
tgtgcggcaatggaaacgggagcagggact

SEQ ID NO: 87275 - DNA, 30 bp, Artificial Sequence
  Synthetic oligonucleotide
ttacaggaatgaatcgaccagttcgggact

SEQ ID NO: 87276 - DNA, 30 bp, Artificial Sequence
  Synthetic oligonucleotide
acgatgacccctcggggtgttaaggggact

SEQ ID NO: 87277 - DNA, 30 bp, Artificial Sequence
  Synthetic oligonucleotide
ctaccggtcagatttagtgtcagtgggact

SEQ ID NO: 87278 - DNA, 30 bp, Artificial Sequence
  Synthetic oligonucleotide
ataatggcaaaaatggtgatgggctggact

SEQ ID NO: 87279 - DNA, 30 bp, Artificial Sequence
  Synthetic oligonucleotide
tgcattaataggcaaatggatggactgact

SEQ ID NO: 87280 - DNA, 30 bp, Artificial Sequence
  Synthetic oligonucleotide
aaaggccgtgacatatggccagagctgact

SEQ ID NO: 87281 - DNA, 30 bp, Artificial Sequence
  Synthetic oligonucleotide
ggacagtacgtacatgagagcagtctgact

SEQ ID NO: 87282 - DNA, 30 bp, Artificial Sequence
  Synthetic oligonucleotide
tatcacagggatgcttcggatgaagtgact

SEQ ID NO: 87283 - DNA, 30 bp, Artificial Sequence
  Synthetic oligonucleotide
ttagaaagctgagttggtaactgcgtgact

SEQ ID NO: 87284 - DNA, 30 bp, Artificial Sequence
  Synthetic oligonucleotide
cgtaagaagaaaccatttccttcggtgact

SEQ ID NO: 87285 - DNA, 30 bp, Artificial Sequence
  Synthetic oligonucleotide
ccgcacgtggcagatgagcgggcagatact

SEQ ID NO: 87286 - DNA, 30 bp, Artificial Sequence
  Synthetic oligonucleotide
cccgtgtacaccaaaataaggaacgatact

SEQ ID NO: 87287 - DNA, 30 bp, Artificial Sequence
  Synthetic oligonucleotide
ggctgtgaccaaaaaggtcggttcgatact

SEQ ID NO: 87288 - DNA, 30 bp, Artificial Sequence
  Synthetic oligonucleotide
ccgcaggtagcgaactatggagtctatact

SEQ ID NO: 87289 - DNA, 30 bp, Artificial Sequence
  Synthetic oligonucleotide
tggtgcattaggcatagataaccttatact

SEQ ID NO: 87290 - DNA, 30 bp, Artificial Sequence
  Synthetic oligonucleotide
tcacattatgcaaggccgtggtcgactact

SEQ ID NO: 87291 - DNA, 30 bp, Artificial Sequence
  Synthetic oligonucleotide
cggtaataactaaagcgcgaaaggagtact

SEQ ID NO: 87292 - DNA, 30 bp, Artificial Sequence
  Synthetic oligonucleotide
acgattcgtctggttcaggtccctggtact

SEQ ID NO: 87293 - DNA, 30 bp, Artificial Sequence
  Synthetic oligonucleotide
ctccatatctgctaaactgagcgagttact

SEQ ID NO: 87294 - DNA, 30 bp, Artificial Sequence
  Synthetic oligonucleotide
ccaaaagtcacaaaattgggtaagcaacct

SEQ ID NO: 87295 - DNA, 30 bp, Artificial Sequence
  Synthetic oligonucleotide
ggcccactacgaaatggccgtgccgaacct

SEQ ID NO: 87296 - DNA, 30 bp, Artificial Sequence
  Synthetic oligonucleotide
atcgccggagaacattgcggaagttaacct

SEQ ID NO: 87297 - DNA, 30 bp, Artificial Sequence
  Synthetic oligonucleotide
gcacacattgtaaaatattaaatcacacct

SEQ ID NO: 87298 - DNA, 30 bp, Artificial Sequence
  Synthetic oligonucleotide
taacgggacaagaagtgagcgttagcacct

SEQ ID NO: 87299 - DNA, 30 bp, Artificial Sequence
  Synthetic oligonucleotide
caggcggactgaaaagcgaacatcgcacct

SEQ ID NO: 87300 - DNA, 30 bp, Artificial Sequence
  Synthetic oligonucleotide
gcatcttggactccgggaatcagggcacct

SEQ ID NO: 87301 - DNA, 30 bp, Artificial Sequence
  Synthetic oligonucleotide
cgttacggtgtgtcgaatcgattatcacct

SEQ ID NO: 87302 - DNA, 30 bp, Artificial Sequence
  Synthetic oligonucleotide
agataggggtacgactctgactggagacct

SEQ ID NO: 87303 - DNA, 30 bp, Artificial Sequence
  Synthetic oligonucleotide
cagtccattcaaatacatgtactccgacct

SEQ ID NO: 87304 - DNA, 30 bp, Artificial Sequence
  Synthetic oligonucleotide
acataagtcaacagtagaagagaaggacct

SEQ ID NO: 87305 - DNA, 30 bp, Artificial Sequence
  Synthetic oligonucleotide
atgagggcatcgtgtggattctacggacct

SEQ ID NO: 87306 - DNA, 30 bp, Artificial Sequence
  Synthetic oligonucleotide
gactggtgggcggaggggtgtacggtacct

SEQ ID NO: 87307 - DNA, 30 bp, Artificial Sequence
  Synthetic oligonucleotide
ccagtaggggtcaactcctaaagtgtacct

SEQ ID NO: 87308 - DNA, 30 bp, Artificial Sequence
  Synthetic oligonucleotide
cgaccgtatagctggcaggagagtgtacct

SEQ ID NO: 87309 - DNA, 30 bp, Artificial Sequence
  Synthetic oligonucleotide
cgccgataaggccaatgtcttctaaaccct

SEQ ID NO: 87310 - DNA, 30 bp, Artificial Sequence
  Synthetic oligonucleotide
gaagaggccaccatggacaagcatcaccct

SEQ ID NO: 87311 - DNA, 30 bp, Artificial Sequence
  Synthetic oligonucleotide
cgtggccatagcactaaatcgtgcgaccct

SEQ ID NO: 87312 - DNA, 30 bp, Artificial Sequence
  Synthetic oligonucleotide
cgtaaggctaattcaaagaatgggacccct

SEQ ID NO: 87313 - DNA, 30 bp, Artificial Sequence
  Synthetic oligonucleotide
catcccgctaaagacgatcaccaacgccct

SEQ ID NO: 87314 - DNA, 30 bp, Artificial Sequence
  Synthetic oligonucleotide
ttggatcagtgggaacgtatgtgctgccct

SEQ ID NO: 87315 - DNA, 30 bp, Artificial Sequence
  Synthetic oligonucleotide
tcggatcggtgaattcggtacatgatccct

SEQ ID NO: 87316 - DNA, 30 bp, Artificial Sequence
  Synthetic oligonucleotide
cagaccgaagtcatctggcccgctgtccct

SEQ ID NO: 87317 - DNA, 30 bp, Artificial Sequence
  Synthetic oligonucleotide
gcagccaaaatttgaagtgtaatgttccct

SEQ ID NO: 87318 - DNA, 30 bp, Artificial Sequence
  Synthetic oligonucleotide
ctacgctgtgactaggagctttggaagcct

SEQ ID NO: 87319 - DNA, 30 bp, Artificial Sequence
  Synthetic oligonucleotide
acgaaagacaggtcacctctcccacagcct

SEQ ID NO: 87320 - DNA, 30 bp, Artificial Sequence
  Synthetic oligonucleotide
agaaggcgacgggaatcgttcatcgagcct

SEQ ID NO: 87321 - DNA, 30 bp, Artificial Sequence
  Synthetic oligonucleotide
gtcgtagtccctagagtacgatctgagcct

SEQ ID NO: 87322 - DNA, 30 bp, Artificial Sequence
  Synthetic oligonucleotide
tacgtcatataatggaggagcaccgcgcct

SEQ ID NO: 87323 - DNA, 30 bp, Artificial Sequence
  Synthetic oligonucleotide
ctcggccgaacgaaaaccaagcgatcgcct

SEQ ID NO: 87324 - DNA, 30 bp, Artificial Sequence
  Synthetic oligonucleotide
acggccgagatccggcaaaataggaggcct

SEQ ID NO: 87325 - DNA, 30 bp, Artificial Sequence
  Synthetic oligonucleotide
gacgtagccgaagaaaaggaaagtaggcct

SEQ ID NO: 87326 - DNA, 30 bp, Artificial Sequence
  Synthetic oligonucleotide
cgagggaatggaatgctcacttgttggcct

SEQ ID NO: 87327 - DNA, 30 bp, Artificial Sequence
  Synthetic oligonucleotide
tagggtcgtattgctgaaggaaaactgcct

SEQ ID NO: 87328 - DNA, 30 bp, Artificial Sequence
  Synthetic oligonucleotide
caggggcatgtccccacctaccccctgcct

SEQ ID NO: 87329 - DNA, 30 bp, Artificial Sequence
  Synthetic oligonucleotide
atcaacgaggagcagagcgactcattgcct

SEQ ID NO: 87330 - DNA, 30 bp, Artificial Sequence
  Synthetic oligonucleotide
tccccacgggatgtaatagcagagaatcct

SEQ ID NO: 87331 - DNA, 30 bp, Artificial Sequence
  Synthetic oligonucleotide
acacacactgcattaaaaggccgtgatcct

SEQ ID NO: 87332 - DNA, 30 bp, Artificial Sequence
  Synthetic oligonucleotide
tgcgtctcagacaccaactctccttatcct

SEQ ID NO: 87333 - DNA, 30 bp, Artificial Sequence
  Synthetic oligonucleotide
atgattaaccgaacaagccatagaactcct

SEQ ID NO: 87334 - DNA, 30 bp, Artificial Sequence
  Synthetic oligonucleotide
acgagtggcctgggacgcaccccgactcct

SEQ ID NO: 87335 - DNA, 30 bp, Artificial Sequence
  Synthetic oligonucleotide
acgagattgacatgttggtaaccctctcct

SEQ ID NO: 87336 - DNA, 30 bp, Artificial Sequence
  Synthetic oligonucleotide
actcagccgcacggcataagtgccagtcct

SEQ ID NO: 87337 - DNA, 30 bp, Artificial Sequence
  Synthetic oligonucleotide
ttaacaatatcgttaaggggcatgagtcct

SEQ ID NO: 87338 - DNA, 30 bp, Artificial Sequence
  Synthetic oligonucleotide
cgtaatgaggattgctagtggagccgtcct

SEQ ID NO: 87339 - DNA, 30 bp, Artificial Sequence
  Synthetic oligonucleotide
cagtaatgagtctaagcgatacctggtcct

SEQ ID NO: 87340 - DNA, 30 bp, Artificial Sequence
  Synthetic oligonucleotide
taacgttaaggtctgaaatctaagaaagct

SEQ ID NO: 87341 - DNA, 30 bp, Artificial Sequence
  Synthetic oligonucleotide
tagattgaatgctgcaggaaaaagcaagct

SEQ ID NO: 87342 - DNA, 30 bp, Artificial Sequence
  Synthetic oligonucleotide
aatgcgacgagagattgatacgtgcaagct

SEQ ID NO: 87343 - DNA, 30 bp, Artificial Sequence
  Synthetic oligonucleotide
taagctgagtacaccgtgccctttcaagct

SEQ ID NO: 87344 - DNA, 30 bp, Artificial Sequence
  Synthetic oligonucleotide
gcggcgcaagaccgcagttctgaagaagct

SEQ ID NO: 87345 - DNA, 30 bp, Artificial Sequence
  Synthetic oligonucleotide
taaatggaaagtctacgacccgatgaagct

SEQ ID NO: 87346 - DNA, 30 bp, Artificial Sequence
  Synthetic oligonucleotide
aatcgcgcagggagccgttcatagtaagct

SEQ ID NO: 87347 - DNA, 30 bp, Artificial Sequence
  Synthetic oligonucleotide
tagcgggaagaacccacccgacgaacagct

SEQ ID NO: 87348 - DNA, 30 bp, Artificial Sequence
  Synthetic oligonucleotide
ccgtgggcggcaggcaatatttccccagct

SEQ ID NO: 87349 - DNA, 30 bp, Artificial Sequence
  Synthetic oligonucleotide
cgaatagcaggtttgtactaaaagccagct

SEQ ID NO: 87350 - DNA, 30 bp, Artificial Sequence
  Synthetic oligonucleotide
atgggcatgtaatggaatggcattccagct

SEQ ID NO: 87351 - DNA, 30 bp, Artificial Sequence
  Synthetic oligonucleotide
gccagtgacgggagggttggttcaagagct

SEQ ID NO: 87352 - DNA, 30 bp, Artificial Sequence
  Synthetic oligonucleotide
ccagggcccggtcgtcacccaccgagagct

SEQ ID NO: 87353 - DNA, 30 bp, Artificial Sequence
  Synthetic oligonucleotide
ggaaaaccgtgaattagtaacccgagagct

SEQ ID NO: 87354 - DNA, 30 bp, Artificial Sequence
  Synthetic oligonucleotide
ggctgagacctaaacgaacgaaccggagct

SEQ ID NO: 87355 - DNA, 30 bp, Artificial Sequence
  Synthetic oligonucleotide
taaacaagagttgatacagcaatcatagct

SEQ ID NO: 87356 - DNA, 30 bp, Artificial Sequence
  Synthetic oligonucleotide
gcgggtacaatcttgggtgagaggttagct

SEQ ID NO: 87357 - DNA, 30 bp, Artificial Sequence
  Synthetic oligonucleotide
tcaccaagcgggaggagccgctttaacgct

SEQ ID NO: 87358 - DNA, 30 bp, Artificial Sequence
  Synthetic oligonucleotide
ggggaggacctaattgtgatgaagcacgct

SEQ ID NO: 87359 - DNA, 30 bp, Artificial Sequence
  Synthetic oligonucleotide
gcttagaagagttgagggttgcaaaccgct

SEQ ID NO: 87360 - DNA, 30 bp, Artificial Sequence
  Synthetic oligonucleotide
ctaccaaacttcaaataccagtggaccgct

SEQ ID NO: 87361 - DNA, 29 bp, Artificial Sequence
  Synthetic oligonucleotide
tctacggaattccatggacaacagccgct

SEQ ID NO: 87362 - DNA, 30 bp, Artificial Sequence
  Synthetic oligonucleotide
ctgcttaaacataacagtcgggatgccgct

SEQ ID NO: 87363 - DNA, 30 bp, Artificial Sequence
  Synthetic oligonucleotide
aggtatggcgtttatatcatcgattccgct

SEQ ID NO: 87364 - DNA, 30 bp, Artificial Sequence
  Synthetic oligonucleotide
aggcatatactgaaggcgacaacttccgct

SEQ ID NO: 87365 - DNA, 30 bp, Artificial Sequence
  Synthetic oligonucleotide
agaaaagctgctaggactatgtagtgcgct

SEQ ID NO: 87366 - DNA, 30 bp, Artificial Sequence
  Synthetic oligonucleotide
agtggcattctgacactctgtgcacaggct

SEQ ID NO: 87367 - DNA, 30 bp, Artificial Sequence
  Synthetic oligonucleotide
cgttggatcactctaatgatacctcaggct

SEQ ID NO: 87368 - DNA, 30 bp, Artificial Sequence
  Synthetic oligonucleotide
taacgtgcgagttaagagaaccaagaggct

SEQ ID NO: 87369 - DNA, 30 bp, Artificial Sequence
  Synthetic oligonucleotide
ttacgtgtcgcatggggaggtgaagaggct

SEQ ID NO: 87370 - DNA, 30 bp, Artificial Sequence
  Synthetic oligonucleotide
aggaggattatgcactctaaggtctaggct

SEQ ID NO: 87371 - DNA, 30 bp, Artificial Sequence
  Synthetic oligonucleotide
tgattacagcagtgtaaagagtctacggct

SEQ ID NO: 87372 - DNA, 30 bp, Artificial Sequence
  Synthetic oligonucleotide
tcgcgactacagcaatatactcccgcggct

SEQ ID NO: 87373 - DNA, 30 bp, Artificial Sequence
  Synthetic oligonucleotide
aggtgccggcaggtcaataaggttagggct

SEQ ID NO: 87374 - DNA, 30 bp, Artificial Sequence
  Synthetic oligonucleotide
tagtgaatgtgataagatctgtgacgggct

SEQ ID NO: 87375 - DNA, 30 bp, Artificial Sequence
  Synthetic oligonucleotide
actacgagaccccgtaaaaaagaaggggct

SEQ ID NO: 87376 - DNA, 30 bp, Artificial Sequence
  Synthetic oligonucleotide
acgaaaatttctaaaggtaccgagggggct

SEQ ID NO: 87377 - DNA, 30 bp, Artificial Sequence
  Synthetic oligonucleotide
tcgagtacaccagtaaggcggaactgggct

SEQ ID NO: 87378 - DNA, 30 bp, Artificial Sequence
  Synthetic oligonucleotide
ccgagatgtgctggcaatccgtggatggct

SEQ ID NO: 87379 - DNA, 30 bp, Artificial Sequence
  Synthetic oligonucleotide
gtcagttggtaacgacattggaatgtggct

SEQ ID NO: 87380 - DNA, 30 bp, Artificial Sequence
  Synthetic oligonucleotide
acaccacgatttcgcaggctcggaaatgct

SEQ ID NO: 87381 - DNA, 30 bp, Artificial Sequence
  Synthetic oligonucleotide
gctcggctcgggtgcaaaaataataatgct

SEQ ID NO: 87382 - DNA, 30 bp, Artificial Sequence
  Synthetic oligonucleotide
gaaagggaaggacgtgagtactcgtatgct

SEQ ID NO: 87383 - DNA, 30 bp, Artificial Sequence
  Synthetic oligonucleotide
gaccactaataaaggtgtcggcacactgct

SEQ ID NO: 87384 - DNA, 30 bp, Artificial Sequence
  Synthetic oligonucleotide
ccgaaaaactggagaattagcgctcctgct

SEQ ID NO: 87385 - DNA, 30 bp, Artificial Sequence
  Synthetic oligonucleotide
tggttgcgtaacttcattctacctcgtgct

SEQ ID NO: 87386 - DNA, 30 bp, Artificial Sequence
  Synthetic oligonucleotide
tgatggatacgaacactgttttaccttgct

SEQ ID NO: 87387 - DNA, 30 bp, Artificial Sequence
  Synthetic oligonucleotide
taggaatggttgagacctcgcaagtttgct

SEQ ID NO: 87388 - DNA, 30 bp, Artificial Sequence
  Synthetic oligonucleotide
agaaccttaactcatccataccacaaatct

SEQ ID NO: 87389 - DNA, 30 bp, Artificial Sequence
  Synthetic oligonucleotide
taacggcgtaaatcgatcgtggaacaatct

SEQ ID NO: 87390 - DNA, 30 bp, Artificial Sequence
  Synthetic oligonucleotide
ggagtggtcggtcgtaattgcactcaatct

SEQ ID NO: 87391 - DNA, 30 bp, Artificial Sequence
  Synthetic oligonucleotide
gcaacgagtctttgaaggcaagacgaatct

SEQ ID NO: 87392 - DNA, 30 bp, Artificial Sequence
  Synthetic oligonucleotide
cgaatgatagctataaaaagcacaacatct

SEQ ID NO: 87393 - DNA, 30 bp, Artificial Sequence
  Synthetic oligonucleotide
catggcgcaaagttagaccgaagtacatct

SEQ ID NO: 87394 - DNA, 30 bp, Artificial Sequence
  Synthetic oligonucleotide
ttggatacgtttgaatacaagcagccatct

SEQ ID NO: 87395 - DNA, 30 bp, Artificial Sequence
  Synthetic oligonucleotide
gctgcatggttggtaatcatgtgagcatct

SEQ ID NO: 87396 - DNA, 30 bp, Artificial Sequence
  Synthetic oligonucleotide
caagctgcataactcttaatctaggcatct

SEQ ID NO: 87397 - DNA, 30 bp, Artificial Sequence
  Synthetic oligonucleotide
gagggtccgagagaaacagatataagatct

SEQ ID NO: 87398 - DNA, 30 bp, Artificial Sequence
  Synthetic oligonucleotide
cgaccatcccgaaggagtgcggacagatct

SEQ ID NO: 87399 - DNA, 30 bp, Artificial Sequence
  Synthetic oligonucleotide
gtatagcagaccaagggtcaggggagatct

SEQ ID NO: 87400 - DNA, 30 bp, Artificial Sequence
  Synthetic oligonucleotide
actatgcgatagtctctagtaacccgatct

SEQ ID NO: 87401 - DNA, 30 bp, Artificial Sequence
  Synthetic oligonucleotide
gcggagacgagacgtatacgctggcgatct

SEQ ID NO: 87402 - DNA, 30 bp, Artificial Sequence
  Synthetic oligonucleotide
gggaattattcgctcatgtagggcggatct

SEQ ID NO: 87403 - DNA, 30 bp, Artificial Sequence
  Synthetic oligonucleotide
cggatcgaggactgcattaagttcggatct

SEQ ID NO: 87404 - DNA, 30 bp, Artificial Sequence
  Synthetic oligonucleotide
atgggtttaaggaggaaatacgtgggatct

SEQ ID NO: 87405 - DNA, 30 bp, Artificial Sequence
  Synthetic oligonucleotide
agaccaacgacctggcataaatggatatct

SEQ ID NO: 87406 - DNA, 30 bp, Artificial Sequence
  Synthetic oligonucleotide
tcataacgatatctctcgtacgaggtatct

SEQ ID NO: 87407 - DNA, 30 bp, Artificial Sequence
  Synthetic oligonucleotide
tacagaagtgggtgaagctaatggaactct

SEQ ID NO: 87408 - DNA, 30 bp, Artificial Sequence
  Synthetic oligonucleotide
gcgcgggtaatgaaatccgatttagactct

SEQ ID NO: 87409 - DNA, 30 bp, Artificial Sequence
  Synthetic oligonucleotide
cgaaaccacgatcggaggtataaggactct

SEQ ID NO: 87410 - DNA, 30 bp, Artificial Sequence
  Synthetic oligonucleotide
tcaatcgataccgagaatccatgggactct

SEQ ID NO: 87411 - DNA, 30 bp, Artificial Sequence
  Synthetic oligonucleotide
gcacctagatgtgataaagagcagtactct

SEQ ID NO: 87412 - DNA, 30 bp, Artificial Sequence
  Synthetic oligonucleotide
acacacagggtgtgatgaggtgattactct

SEQ ID NO: 87413 - DNA, 30 bp, Artificial Sequence
  Synthetic oligonucleotide
acgtagcttagtcagccttgaaccgcctct

SEQ ID NO: 87414 - DNA, 30 bp, Artificial Sequence
  Synthetic oligonucleotide
tgaaaacatgcaatgcaccgatcaagctct

SEQ ID NO: 87415 - DNA, 30 bp, Artificial Sequence
  Synthetic oligonucleotide
caggtaaccggaggaagcacgttcagctct

SEQ ID NO: 87416 - DNA, 30 bp, Artificial Sequence
  Synthetic oligonucleotide
gccgttaggggatgtcaagtgactagctct

SEQ ID NO: 87417 - DNA, 30 bp, Artificial Sequence
  Synthetic oligonucleotide
acgtacacgatatggggtacggaacgctct

SEQ ID NO: 87418 - DNA, 30 bp, Artificial Sequence
  Synthetic oligonucleotide
cacccacaacactgcccatcctatcgctct

SEQ ID NO: 87419 - DNA, 30 bp, Artificial Sequence
  Synthetic oligonucleotide
cataacccataagctccggagtgaggctct

SEQ ID NO: 87420 - DNA, 30 bp, Artificial Sequence
  Synthetic oligonucleotide
cggggcgcgtaaactacactggcgtgctct

SEQ ID NO: 87421 - DNA, 30 bp, Artificial Sequence
  Synthetic oligonucleotide
gaaatccatgaaggcgagggagattgctct

SEQ ID NO: 87422 - DNA, 30 bp, Artificial Sequence
  Synthetic oligonucleotide
ggagaagacctataaggggacgattgctct

SEQ ID NO: 87423 - DNA, 30 bp, Artificial Sequence
  Synthetic oligonucleotide
taacgaaaacagtttcaaagctacatctct

SEQ ID NO: 87424 - DNA, 30 bp, Artificial Sequence
  Synthetic oligonucleotide
ccaaccgtcactaatcgcgcgcgattctct

SEQ ID NO: 87425 - DNA, 30 bp, Artificial Sequence
  Synthetic oligonucleotide
acaataagtagtaaggggtggtcaaagtct

SEQ ID NO: 87426 - DNA, 30 bp, Artificial Sequence
  Synthetic oligonucleotide
catacaattgttaagtataccaaagagtct

SEQ ID NO: 87427 - DNA, 30 bp, Artificial Sequence
  Synthetic oligonucleotide
tcaaccggcacagcggaaaagggatagtct

SEQ ID NO: 87428 - DNA, 30 bp, Artificial Sequence
  Synthetic oligonucleotide
cctgtgtaacagcggaaaaataagtagtct

SEQ ID NO: 87429 - DNA, 30 bp, Artificial Sequence
  Synthetic oligonucleotide
ttgcgaagcagccaaatagttgagacgtct

SEQ ID NO: 87430 - DNA, 30 bp, Artificial Sequence
  Synthetic oligonucleotide
gggttgaggtgagcagtgcgttgtccgtct

SEQ ID NO: 87431 - DNA, 30 bp, Artificial Sequence
  Synthetic oligonucleotide
tcggtttgaggaccgatcaactttccgtct

SEQ ID NO: 87432 - DNA, 30 bp, Artificial Sequence
  Synthetic oligonucleotide
caactcgaggttcgtcgatattgatcgtct

SEQ ID NO: 87433 - DNA, 30 bp, Artificial Sequence
  Synthetic oligonucleotide
tggattatgtgtagaggggacgagtcgtct

SEQ ID NO: 87434 - DNA, 30 bp, Artificial Sequence
  Synthetic oligonucleotide
tggtgcgaattcgcgcgtcagggaaggtct

SEQ ID NO: 87435 - DNA, 30 bp, Artificial Sequence
  Synthetic oligonucleotide
ttacacggcttatataatgcccgacggtct

SEQ ID NO: 87436 - DNA, 30 bp, Artificial Sequence
  Synthetic oligonucleotide
ccgcgaagacggcaattgcagcagcggtct

SEQ ID NO: 87437 - DNA, 30 bp, Artificial Sequence
  Synthetic oligonucleotide
actgagctcgaaaccccagttattcggtct

SEQ ID NO: 87438 - DNA, 30 bp, Artificial Sequence
  Synthetic oligonucleotide
agggcgtgtgtcacgtatcgatcgtggtct

SEQ ID NO: 87439 - DNA, 30 bp, Artificial Sequence
  Synthetic oligonucleotide
ctgccggtgttgcgagttactatgatgtct

SEQ ID NO: 87440 - DNA, 30 bp, Artificial Sequence
  Synthetic oligonucleotide
caggtgaaattgataggccgagctgtgtct

SEQ ID NO: 87441 - DNA, 30 bp, Artificial Sequence
  Synthetic oligonucleotide
cgccttcacactgagggccgatgattgtct

SEQ ID NO: 87442 - DNA, 30 bp, Artificial Sequence
  Synthetic oligonucleotide
cgagaaaccaaggtatacccctacgattct

SEQ ID NO: 87443 - DNA, 30 bp, Artificial Sequence
  Synthetic oligonucleotide
aggtcgctcacgtgccgagagcaggattct

SEQ ID NO: 87444 - DNA, 30 bp, Artificial Sequence
  Synthetic oligonucleotide
aggtcggtggataatctggttacatattct

SEQ ID NO: 87445 - DNA, 30 bp, Artificial Sequence
  Synthetic oligonucleotide
gagccactggacgagatgcaccgcacttct

SEQ ID NO: 87446 - DNA, 30 bp, Artificial Sequence
  Synthetic oligonucleotide
cgaccagaaggggggctaccatagggttct

SEQ ID NO: 87447 - DNA, 30 bp, Artificial Sequence
  Synthetic oligonucleotide
agcgctaagtgttgggaaggtgaatgttct

SEQ ID NO: 87448 - DNA, 30 bp, Artificial Sequence
  Synthetic oligonucleotide
gggaggcaaccatagtttaatatctgttct

SEQ ID NO: 87449 - DNA, 30 bp, Artificial Sequence
  Synthetic oligonucleotide
aggacaaacacgaatgggagaataatttct

SEQ ID NO: 87450 - DNA, 30 bp, Artificial Sequence
  Synthetic oligonucleotide
tcgtatggccgggatacagaggccaaaagt

SEQ ID NO: 87451 - DNA, 30 bp, Artificial Sequence
  Synthetic oligonucleotide
ttaggatcgagtaatgcctaaaagaaaagt

SEQ ID NO: 87452 - DNA, 30 bp, Artificial Sequence
  Synthetic oligonucleotide
ttgacacaaggtgaaatatatcaacaaagt

SEQ ID NO: 87453 - DNA, 30 bp, Artificial Sequence
  Synthetic oligonucleotide
aagtcatcagccagttagggatctgaaagt

SEQ ID NO: 87454 - DNA, 30 bp, Artificial Sequence
  Synthetic oligonucleotide
acgattgcacctgatgtgttgggcacaagt

SEQ ID NO: 87455 - DNA, 30 bp, Artificial Sequence
  Synthetic oligonucleotide
aggggaatcccgcggcacgtctagacaagt

SEQ ID NO: 87456 - DNA, 30 bp, Artificial Sequence
  Synthetic oligonucleotide
acgggtaaaataaggggtgctggtacaagt

SEQ ID NO: 87457 - DNA, 30 bp, Artificial Sequence
  Synthetic oligonucleotide
tgcaaccgaacaatgggtatgaaagcaagt

SEQ ID NO: 87458 - DNA, 30 bp, Artificial Sequence
  Synthetic oligonucleotide
tgagatactaaagcaatcaggacagcaagt

SEQ ID NO: 87459 - DNA, 30 bp, Artificial Sequence
  Synthetic oligonucleotide
tgggatgcgaacgggccctcactcgcaagt

SEQ ID NO: 87460 - DNA, 30 bp, Artificial Sequence
  Synthetic oligonucleotide
tgaaccgccgcgatgttcgaataggcaagt

SEQ ID NO: 87461 - DNA, 30 bp, Artificial Sequence
  Synthetic oligonucleotide
gtcaccaggctatcgagattaagtgcaagt

SEQ ID NO: 87462 - DNA, 30 bp, Artificial Sequence
  Synthetic oligonucleotide
cttgaaagcgtggtagggtgttcatcaagt

SEQ ID NO: 87463 - DNA, 30 bp, Artificial Sequence
  Synthetic oligonucleotide
cccggccgtgcatgacaaggaagctcaagt

SEQ ID NO: 87464 - DNA, 30 bp, Artificial Sequence
  Synthetic oligonucleotide
aggcttctcaagggctgggccgccagaagt

SEQ ID NO: 87465 - DNA, 30 bp, Artificial Sequence
  Synthetic oligonucleotide
cggcagttggagctacaacgtgcgagaagt

SEQ ID NO: 87466 - DNA, 30 bp, Artificial Sequence
  Synthetic oligonucleotide
cggcaatttcgatccgaatgactacgaagt

SEQ ID NO: 87467 - DNA, 29 bp, Artificial Sequence
  Synthetic oligonucleotide
cgggaggtgaagtaacaaacgggcgaagt

SEQ ID NO: 87468 - DNA, 30 bp, Artificial Sequence
  Synthetic oligonucleotide
aacggaaagcggaagtacggggctcgaagt

SEQ ID NO: 87469 - DNA, 30 bp, Artificial Sequence
  Synthetic oligonucleotide
ttgcggcatgttgagtaggaggggtgaagt

SEQ ID NO: 87470 - DNA, 30 bp, Artificial Sequence
  Synthetic oligonucleotide
ttcagatgcgaaggtcgatatgggataagt

SEQ ID NO: 87471 - DNA, 30 bp, Artificial Sequence
  Synthetic oligonucleotide
gcatcgcggataaaccggtcgacagtaagt

SEQ ID NO: 87472 - DNA, 30 bp, Artificial Sequence
  Synthetic oligonucleotide
gcatgcgaggcagccggattgcgagtaagt

SEQ ID NO: 87473 - DNA, 30 bp, Artificial Sequence
  Synthetic oligonucleotide
ccgcttctacagtctgagaggagggtaagt

SEQ ID NO: 87474 - DNA, 30 bp, Artificial Sequence
  Synthetic oligonucleotide
cagtgtggcacttcagaaatcctggtaagt

SEQ ID NO: 87475 - DNA, 30 bp, Artificial Sequence
  Synthetic oligonucleotide
ggccgacagttaggcatcgatctggtaagt

SEQ ID NO: 87476 - DNA, 30 bp, Artificial Sequence
  Synthetic oligonucleotide
agtttaacgggggcgttaggttggttaagt

SEQ ID NO: 87477 - DNA, 30 bp, Artificial Sequence
  Synthetic oligonucleotide
ctcaactagggtgagtaaccagtaaacagt

SEQ ID NO: 87478 - DNA, 30 bp, Artificial Sequence
  Synthetic oligonucleotide
acgagggccataagacgatgaaacaacagt

SEQ ID NO: 87479 - DNA, 30 bp, Artificial Sequence
  Synthetic oligonucleotide
taagaggaattcgttggacagcgcaacagt

SEQ ID NO: 87480 - DNA, 30 bp, Artificial Sequence
  Synthetic oligonucleotide
cgaaacatacggagacatgtgttagacagt

SEQ ID NO: 87481 - DNA, 30 bp, Artificial Sequence
  Synthetic oligonucleotide
cccaagcaacgaaccagttgttacgacagt

SEQ ID NO: 87482 - DNA, 30 bp, Artificial Sequence
  Synthetic oligonucleotide
tagagtagcgtcgataggagcgttgacagt

SEQ ID NO: 87483 - DNA, 30 bp, Artificial Sequence
  Synthetic oligonucleotide
agatcgggacaggcatgccgtggctacagt

SEQ ID NO: 87484 - DNA, 30 bp, Artificial Sequence
  Synthetic oligonucleotide
taaaagagaacggtcgacatccgcaccagt

SEQ ID NO: 87485 - DNA, 30 bp, Artificial Sequence
  Synthetic oligonucleotide
ggggcggaagtagtttagcagccttccagt

SEQ ID NO: 87486 - DNA, 30 bp, Artificial Sequence
  Synthetic oligonucleotide
gagcattaaaagaaacctgtaaatagcagt

SEQ ID NO: 87487 - DNA, 30 bp, Artificial Sequence
  Synthetic oligonucleotide
gattagagaaacgatagagttattcgcagt

SEQ ID NO: 87488 - DNA, 30 bp, Artificial Sequence
  Synthetic oligonucleotide
gctagaggcgttcggagtgagatgggcagt

SEQ ID NO: 87489 - DNA, 30 bp, Artificial Sequence
  Synthetic oligonucleotide
agatcagtccaactgtcggcaaatggcagt

SEQ ID NO: 87490 - DNA, 30 bp, Artificial Sequence
  Synthetic oligonucleotide
gctcattcagtaggtgaagatcacatcagt

SEQ ID NO: 87491 - DNA, 30 bp, Artificial Sequence
  Synthetic oligonucleotide
tcaccatctggtttgacgtgactgatcagt

SEQ ID NO: 87492 - DNA, 30 bp, Artificial Sequence
  Synthetic oligonucleotide
ctcgcttcgggtaaaatcattaacgtcagt

SEQ ID NO: 87493 - DNA, 30 bp, Artificial Sequence
  Synthetic oligonucleotide
accaaacacaattgccaaccttccgtcagt

SEQ ID NO: 87494 - DNA, 30 bp, Artificial Sequence
  Synthetic oligonucleotide
acagcgtttcccatcaacacactattcagt

SEQ ID NO: 87495 - DNA, 30 bp, Artificial Sequence
  Synthetic oligonucleotide
taggggaggtacgaagtgattcttttcagt

SEQ ID NO: 87496 - DNA, 30 bp, Artificial Sequence
  Synthetic oligonucleotide
tagtctgttctacacatgcgcgccaagagt

SEQ ID NO: 87497 - DNA, 30 bp, Artificial Sequence
  Synthetic oligonucleotide
atatagacctgtggttccccgtcgaagagt

SEQ ID NO: 87498 - DNA, 30 bp, Artificial Sequence
  Synthetic oligonucleotide
tggtcaagatttaaagctctggggaagagt

SEQ ID NO: 87499 - DNA, 30 bp, Artificial Sequence
  Synthetic oligonucleotide
acgaccggattacctcatacactagagagt

SEQ ID NO: 87500 - DNA, 30 bp, Artificial Sequence
  Synthetic oligonucleotide
agtgaaacagcgcagggggctatcgagagt

SEQ ID NO: 87501 - DNA, 30 bp, Artificial Sequence
  Synthetic oligonucleotide
accttggaggctcagttgtgggtcgagagt

SEQ ID NO: 87502 - DNA, 30 bp, Artificial Sequence
  Synthetic oligonucleotide
acaccagccaagctcccaagcaagtagagt

SEQ ID NO: 87503 - DNA, 30 bp, Artificial Sequence
  Synthetic oligonucleotide
caattaaagagtaagatcggatggtagagt

SEQ ID NO: 87504 - DNA, 30 bp, Artificial Sequence
  Synthetic oligonucleotide
cggagacgctgtgtgacgatgtggtagagt

SEQ ID NO: 87505 - DNA, 30 bp, Artificial Sequence
  Synthetic oligonucleotide
aggtagcagtctggcactagtagttagagt

SEQ ID NO: 87506 - DNA, 30 bp, Artificial Sequence
  Synthetic oligonucleotide
gggacgttagaccgattccatacaacgagt

SEQ ID NO: 87507 - DNA, 30 bp, Artificial Sequence
  Synthetic oligonucleotide
gcgtcgtcaaccttgggcgtaatcacgagt

SEQ ID NO: 87508 - DNA, 30 bp, Artificial Sequence
  Synthetic oligonucleotide
ttgagaccctgccgacgaacgcatacgagt

SEQ ID NO: 87509 - DNA, 30 bp, Artificial Sequence
  Synthetic oligonucleotide
tgcggcagtattccaatggaaacagcgagt

SEQ ID NO: 87510 - DNA, 30 bp, Artificial Sequence
  Synthetic oligonucleotide
ttctcacttcggcaagtcagaattgcgagt

SEQ ID NO: 87511 - DNA, 30 bp, Artificial Sequence
  Synthetic oligonucleotide
cagcgcgtctaggttagacggttgaggagt

SEQ ID NO: 87512 - DNA, 30 bp, Artificial Sequence
  Synthetic oligonucleotide
aggcgctcgttgaaacggacatttaggagt

SEQ ID NO: 87513 - DNA, 30 bp, Artificial Sequence
  Synthetic oligonucleotide
ggagtatagacattgccggagaatcggagt

SEQ ID NO: 87514 - DNA, 30 bp, Artificial Sequence
  Synthetic oligonucleotide
gccgcgccaaaaaaataaggaaaggggagt

SEQ ID NO: 87515 - DNA, 30 bp, Artificial Sequence
  Synthetic oligonucleotide
accacttcagaggtcatgagtacatggagt

SEQ ID NO: 87516 - DNA, 30 bp, Artificial Sequence
  Synthetic oligonucleotide
atagcatactggacaggattatgaatgagt

SEQ ID NO: 87517 - DNA, 30 bp, Artificial Sequence
  Synthetic oligonucleotide
catcgtgttaggacaccgtgcgggatgagt

SEQ ID NO: 87518 - DNA, 30 bp, Artificial Sequence
  Synthetic oligonucleotide
gctgatgataccgaaacggtttgtatgagt

SEQ ID NO: 87519 - DNA, 30 bp, Artificial Sequence
  Synthetic oligonucleotide
atagacatgcgtacgcgtcccatactgagt

SEQ ID NO: 87520 - DNA, 30 bp, Artificial Sequence
  Synthetic oligonucleotide
gttcgaaaaagttcacacagggtcctgagt

SEQ ID NO: 87521 - DNA, 30 bp, Artificial Sequence
  Synthetic oligonucleotide
tcaaaaagaggccaggtctgttgagtgagt

SEQ ID NO: 87522 - DNA, 30 bp, Artificial Sequence
  Synthetic oligonucleotide
ttcagggctctcttcatggcgaccgtgagt

SEQ ID NO: 87523 - DNA, 30 bp, Artificial Sequence
  Synthetic oligonucleotide
aactcggcaataccgtctgggggaaatagt

SEQ ID NO: 87524 - DNA, 30 bp, Artificial Sequence
  Synthetic oligonucleotide
ggaaacagataggaaaagcttgcgaatagt

SEQ ID NO: 87525 - DNA, 30 bp, Artificial Sequence
  Synthetic oligonucleotide
aggatcaaatttcggcaacttggacatagt

SEQ ID NO: 87526 - DNA, 30 bp, Artificial Sequence
  Synthetic oligonucleotide
acgtcgtgcacagtggggtttggtcatagt

SEQ ID NO: 87527 - DNA, 30 bp, Artificial Sequence
  Synthetic oligonucleotide
tgactcggtctaacattgatgtgcgatagt

SEQ ID NO: 87528 - DNA, 30 bp, Artificial Sequence
  Synthetic oligonucleotide
cgggtagatacactttccgggagggatagt

SEQ ID NO: 87529 - DNA, 30 bp, Artificial Sequence
  Synthetic oligonucleotide
cctaaagctagtatactaagtactgatagt

SEQ ID NO: 87530 - DNA, 30 bp, Artificial Sequence
  Synthetic oligonucleotide
ggtaaccgagggagagtaccactcactagt

SEQ ID NO: 87531 - DNA, 30 bp, Artificial Sequence
  Synthetic oligonucleotide
agggtagctcaagcagtcgggaatactagt

SEQ ID NO: 87532 - DNA, 30 bp, Artificial Sequence
  Synthetic oligonucleotide
tatgcgagggggtgcactctacgacctagt

SEQ ID NO: 87533 - DNA, 30 bp, Artificial Sequence
  Synthetic oligonucleotide
aagcggctaacactgcatacgttacctagt

SEQ ID NO: 87534 - DNA, 31 bp, Artificial Sequence
  Synthetic oligonucleotide
cgcatccggaatgcgcttaaatcgaagtagt

SEQ ID NO: 87535 - DNA, 30 bp, Artificial Sequence
  Synthetic oligonucleotide
tctaaggtgatcaagagttcataaggtagt

SEQ ID NO: 87536 - DNA, 30 bp, Artificial Sequence
  Synthetic oligonucleotide
acggtaaccagctggttgaaaacaggtagt

SEQ ID NO: 87537 - DNA, 30 bp, Artificial Sequence
  Synthetic oligonucleotide
atgggagcaatgggagcacaaacgggtagt

SEQ ID NO: 87538 - DNA, 30 bp, Artificial Sequence
  Synthetic oligonucleotide
tgaccagccgagagagcgtctgtgggtagt

SEQ ID NO: 87539 - DNA, 30 bp, Artificial Sequence
  Synthetic oligonucleotide
caccacctcagagcgatacaatgtggtagt

SEQ ID NO: 87540 - DNA, 30 bp, Artificial Sequence
  Synthetic oligonucleotide
ataggaaggcatttaaagacccgaattagt

SEQ ID NO: 87541 - DNA, 30 bp, Artificial Sequence
  Synthetic oligonucleotide
ataccgctcggagacactgtggacgttagt

SEQ ID NO: 87542 - DNA, 30 bp, Artificial Sequence
  Synthetic oligonucleotide
ctagcacatcccttaatataaacatttagt

SEQ ID NO: 87543 - DNA, 30 bp, Artificial Sequence
  Synthetic oligonucleotide
atggcgtaaagtacgtgaatgcactttagt

SEQ ID NO: 87544 - DNA, 30 bp, Artificial Sequence
  Synthetic oligonucleotide
tagtgagaggtaatgggttagcagtttagt

SEQ ID NO: 87545 - DNA, 30 bp, Artificial Sequence
  Synthetic oligonucleotide
gcacgccatcatccgaaggggggaaaacgt

SEQ ID NO: 87546 - DNA, 30 bp, Artificial Sequence
  Synthetic oligonucleotide
cggataaagggaggggagggttataaacgt

SEQ ID NO: 87547 - DNA, 30 bp, Artificial Sequence
  Synthetic oligonucleotide
atggtagcgtcaggctgttcaaagcaacgt

SEQ ID NO: 87548 - DNA, 30 bp, Artificial Sequence
  Synthetic oligonucleotide
gggagaagtgccagggcatgcaagcaacgt

SEQ ID NO: 87549 - DNA, 30 bp, Artificial Sequence
  Synthetic oligonucleotide
gtgcgagagtcagagggttgtcagcaacgt

SEQ ID NO: 87550 - DNA, 30 bp, Artificial Sequence
  Synthetic oligonucleotide
cattgcgtaatcagcaccaaaatgcaacgt

SEQ ID NO: 87551 - DNA, 30 bp, Artificial Sequence
  Synthetic oligonucleotide
cagggccaggccttatcgcgtcatcaacgt

SEQ ID NO: 87552 - DNA, 30 bp, Artificial Sequence
  Synthetic oligonucleotide
aggtgggctcagagaccagggtgtcaacgt

SEQ ID NO: 87553 - DNA, 30 bp, Artificial Sequence
  Synthetic oligonucleotide
atcggggtaataagaacgccaggagaacgt

SEQ ID NO: 87554 - DNA, 30 bp, Artificial Sequence
  Synthetic oligonucleotide
taagccaacctactagatgaaattgaacgt

SEQ ID NO: 87555 - DNA, 30 bp, Artificial Sequence
  Synthetic oligonucleotide
agttgaaacttgacgtcatgagcagcacgt

SEQ ID NO: 87556 - DNA, 30 bp, Artificial Sequence
  Synthetic oligonucleotide
aagggatgctagctttcgtcatgctcacgt

SEQ ID NO: 87557 - DNA, 30 bp, Artificial Sequence
  Synthetic oligonucleotide
actcaatcctaggtgacgtgctcgtcacgt

SEQ ID NO: 87558 - DNA, 30 bp, Artificial Sequence
  Synthetic oligonucleotide
gtgggtgggagtgctggccagttgtcacgt

SEQ ID NO: 87559 - DNA, 30 bp, Artificial Sequence
  Synthetic oligonucleotide
ggaatagtcagaaagggaacacgttcacgt

SEQ ID NO: 87560 - DNA, 31 bp, Artificial Sequence
  Synthetic oligonucleotide
caacgatgagaaaggggcgcgcgtttcacgt

SEQ ID NO: 87561 - DNA, 30 bp, Artificial Sequence
  Synthetic oligonucleotide
cgaggaatcaatggcataacctaaagacgt

SEQ ID NO: 87562 - DNA, 30 bp, Artificial Sequence
  Synthetic oligonucleotide
cagtcgaaagcaatacggacaagcagacgt

SEQ ID NO: 87563 - DNA, 30 bp, Artificial Sequence
  Synthetic oligonucleotide
gttcggcaatggcgggaagaatctagacgt

SEQ ID NO: 87564 - DNA, 30 bp, Artificial Sequence
  Synthetic oligonucleotide
acaatccgttacaagcgggcatggcgacgt

SEQ ID NO: 87565 - DNA, 30 bp, Artificial Sequence
  Synthetic oligonucleotide
tacaccgcacataagagtagctgcggacgt

SEQ ID NO: 87566 - DNA, 31 bp, Artificial Sequence
  Synthetic oligonucleotide
tgccatcttgggtgatgggacagtgggacgt

SEQ ID NO: 87567 - DNA, 30 bp, Artificial Sequence
  Synthetic oligonucleotide
atgcatagacaaaattaatgagggtgacgt

SEQ ID NO: 87568 - DNA, 30 bp, Artificial Sequence
  Synthetic oligonucleotide
caaccaggtggtagccgccgtcgaatacgt

SEQ ID NO: 87569 - DNA, 30 bp, Artificial Sequence
  Synthetic oligonucleotide
tgaagcacattagtgcgtgcaaagatacgt

SEQ ID NO: 87570 - DNA, 30 bp, Artificial Sequence
  Synthetic oligonucleotide
cggttggactcagaggcgcgatttatacgt

SEQ ID NO: 87571 - DNA, 30 bp, Artificial Sequence
  Synthetic oligonucleotide
gtagagacctaagtaagtgaaatagtacgt

SEQ ID NO: 87572 - DNA, 30 bp, Artificial Sequence
  Synthetic oligonucleotide
acattacgaaacaatacttaccctttacgt

SEQ ID NO: 87573 - DNA, 30 bp, Artificial Sequence
  Synthetic oligonucleotide
agctcgctcggaaccatggggcgaaaccgt

SEQ ID NO: 87574 - DNA, 30 bp, Artificial Sequence
  Synthetic oligonucleotide
ggcaattaagaagaagcagccagcaaccgt

SEQ ID NO: 87575 - DNA, 30 bp, Artificial Sequence
  Synthetic oligonucleotide
atctgcgactctgtggtcaagttgaaccgt

SEQ ID NO: 87576 - DNA, 30 bp, Artificial Sequence
  Synthetic oligonucleotide
aacagcgccaggtagggaagcgctaaccgt

SEQ ID NO: 87577 - DNA, 30 bp, Artificial Sequence
  Synthetic oligonucleotide
cacatcctccaaaagttgagcgtacaccgt

SEQ ID NO: 87578 - DNA, 30 bp, Artificial Sequence
  Synthetic oligonucleotide
agttgcagagagcccaccacgggtgaccgt

SEQ ID NO: 87579 - DNA, 30 bp, Artificial Sequence
  Synthetic oligonucleotide
gaggaggataaagaatgaatgacataccgt

SEQ ID NO: 87580 - DNA, 30 bp, Artificial Sequence
  Synthetic oligonucleotide
acgctactgtaaagaatgagcgcaacccgt

SEQ ID NO: 87581 - DNA, 30 bp, Artificial Sequence
  Synthetic oligonucleotide
atcgcaataaaatctcgagatcaaccccgt

SEQ ID NO: 87582 - DNA, 30 bp, Artificial Sequence
  Synthetic oligonucleotide
agttaggaatcatacatgatgaaagcccgt

SEQ ID NO: 87583 - DNA, 30 bp, Artificial Sequence
  Synthetic oligonucleotide
ttagataggaactggaattaacgggcccgt

SEQ ID NO: 87584 - DNA, 30 bp, Artificial Sequence
  Synthetic oligonucleotide
aacgtgtatgcagatgggcgtaggagccgt

SEQ ID NO: 87585 - DNA, 30 bp, Artificial Sequence
  Synthetic oligonucleotide
atattacacataagatgataatcccgccgt

SEQ ID NO: 87586 - DNA, 30 bp, Artificial Sequence
  Synthetic oligonucleotide
aattgagggaaagtttgaatattccgccgt

SEQ ID NO: 87587 - DNA, 30 bp, Artificial Sequence
  Synthetic oligonucleotide
tacaacaataagcatactttcaagtgccgt

SEQ ID NO: 87588 - DNA, 30 bp, Artificial Sequence
  Synthetic oligonucleotide
cgcaatctggattagcctggactgtgccgt

SEQ ID NO: 87589 - DNA, 30 bp, Artificial Sequence
  Synthetic oligonucleotide
ctatggagagaagatggttgagctgtccgt

SEQ ID NO: 87590 - DNA, 30 bp, Artificial Sequence
  Synthetic oligonucleotide
gtgtcaacataaggactgccagaattccgt

SEQ ID NO: 87591 - DNA, 31 bp, Artificial Sequence
  Synthetic oligonucleotide
atcgagtccccataggcggacgtcattccgt

SEQ ID NO: 87592 - DNA, 30 bp, Artificial Sequence
  Synthetic oligonucleotide
gaaccaaccgaaagcaggttgtgaaagcgt

SEQ ID NO: 87593 - DNA, 30 bp, Artificial Sequence
  Synthetic oligonucleotide
atagtacggacgtacgatcactgcaagcgt

SEQ ID NO: 87594 - DNA, 30 bp, Artificial Sequence
  Synthetic oligonucleotide
gcctatgaaaaagataggcgtggatagcgt

SEQ ID NO: 87595 - DNA, 30 bp, Artificial Sequence
  Synthetic oligonucleotide
ctgaatgggatctagtcctacgattagcgt

SEQ ID NO: 87596 - DNA, 30 bp, Artificial Sequence
  Synthetic oligonucleotide
ggcgaagatatgatgcgacaaattacgcgt

SEQ ID NO: 87597 - DNA, 30 bp, Artificial Sequence
  Synthetic oligonucleotide
ggataagtgacctggcgacagcattcgcgt

SEQ ID NO: 87598 - DNA, 30 bp, Artificial Sequence
  Synthetic oligonucleotide
agggtagaaattagtgtactataagggcgt

SEQ ID NO: 87599 - DNA, 30 bp, Artificial Sequence
  Synthetic oligonucleotide
tcggttgccgtcttaggaagactcgggcgt

SEQ ID NO: 87600 - DNA, 30 bp, Artificial Sequence
  Synthetic oligonucleotide
aaggaacaattggtgtcgcgcgtggggcgt

SEQ ID NO: 87601 - DNA, 30 bp, Artificial Sequence
  Synthetic oligonucleotide
tgaggcacggggtagatatcgccctggcgt

SEQ ID NO: 87602 - DNA, 30 bp, Artificial Sequence
  Synthetic oligonucleotide
cttccgttacgaagggacatgtgctggcgt

SEQ ID NO: 87603 - DNA, 30 bp, Artificial Sequence
  Synthetic oligonucleotide
gggaaaaccgataaacccacactcatgcgt

SEQ ID NO: 87604 - DNA, 30 bp, Artificial Sequence
  Synthetic oligonucleotide
cggaggtagagacgacggaagcgtatgcgt

SEQ ID NO: 87605 - DNA, 30 bp, Artificial Sequence
  Synthetic oligonucleotide
aggaagagatgaggtatccggattatgcgt

SEQ ID NO: 87606 - DNA, 30 bp, Artificial Sequence
  Synthetic oligonucleotide
gtgcgttaaactctgtccttaagcgtgcgt

SEQ ID NO: 87607 - DNA, 30 bp, Artificial Sequence
  Synthetic oligonucleotide
tatgtcaatatgtgtgtcaagtcggtgcgt

SEQ ID NO: 87608 - DNA, 30 bp, Artificial Sequence
  Synthetic oligonucleotide
tgaggaccgagaagagctctcacattgcgt

SEQ ID NO: 87609 - DNA, 30 bp, Artificial Sequence
  Synthetic oligonucleotide
tcagcggcgagaatccgcgagactttgcgt

SEQ ID NO: 87610 - DNA, 30 bp, Artificial Sequence
  Synthetic oligonucleotide
cgtccatctaatcgtccattggggcatcgt

SEQ ID NO: 87611 - DNA, 30 bp, Artificial Sequence
  Synthetic oligonucleotide
accaatgaaagtaaagcgaacccagatcgt

SEQ ID NO: 87612 - DNA, 30 bp, Artificial Sequence
  Synthetic oligonucleotide
gtcacaagaccgtgtactatgaaatatcgt

SEQ ID NO: 87613 - DNA, 30 bp, Artificial Sequence
  Synthetic oligonucleotide
aagcctacggtagcagggaggatatatcgt

SEQ ID NO: 87614 - DNA, 30 bp, Artificial Sequence
  Synthetic oligonucleotide
cgcgcactgtcacgaaataccacctatcgt

SEQ ID NO: 87615 - DNA, 30 bp, Artificial Sequence
  Synthetic oligonucleotide
tggaatattgttgcaagtgtgaggtatcgt

SEQ ID NO: 87616 - DNA, 30 bp, Artificial Sequence
  Synthetic oligonucleotide
acgtcatcttacgcactcaatcaaactcgt

SEQ ID NO: 87617 - DNA, 30 bp, Artificial Sequence
  Synthetic oligonucleotide
ccccgtaagcgcattcggccaagcactcgt

SEQ ID NO: 87618 - DNA, 30 bp, Artificial Sequence
  Synthetic oligonucleotide
ggcacctctagataatgaaaacttactcgt

SEQ ID NO: 87619 - DNA, 30 bp, Artificial Sequence
  Synthetic oligonucleotide
ctactatgacttactggttatagcgctcgt

SEQ ID NO: 87620 - DNA, 30 bp, Artificial Sequence
  Synthetic oligonucleotide
aaagtcgcaaacataatcgcaaggtctcgt

SEQ ID NO: 87621 - DNA, 30 bp, Artificial Sequence
  Synthetic oligonucleotide
agtcacattaatccggtcgaaataagtcgt

SEQ ID NO: 87622 - DNA, 30 bp, Artificial Sequence
  Synthetic oligonucleotide
gcttatagtagaagtaactaaaggcgtcgt

SEQ ID NO: 87623 - DNA, 30 bp, Artificial Sequence
  Synthetic oligonucleotide
gtccgatcgggggtggagacaacgtgtcgt

SEQ ID NO: 87624 - DNA, 30 bp, Artificial Sequence
  Synthetic oligonucleotide
tggacttcgtgggcaggcgatacgcttcgt

SEQ ID NO: 87625 - DNA, 30 bp, Artificial Sequence
  Synthetic oligonucleotide
gtacacggaggagatagtgtaggggttcgt

SEQ ID NO: 87626 - DNA, 30 bp, Artificial Sequence
  Synthetic oligonucleotide
tgtcgtattgtaaggagaattcgatttcgt

SEQ ID NO: 87627 - DNA, 30 bp, Artificial Sequence
  Synthetic oligonucleotide
gagaaactgcagacttacgcctaaaaaggt

SEQ ID NO: 87628 - DNA, 30 bp, Artificial Sequence
  Synthetic oligonucleotide
ggtctataggcactccccgtaaacaaaggt

SEQ ID NO: 87629 - DNA, 30 bp, Artificial Sequence
  Synthetic oligonucleotide
gacctgagggtgcagctcggatgccaaggt

SEQ ID NO: 87630 - DNA, 30 bp, Artificial Sequence
  Synthetic oligonucleotide
taggtggtaccatgcagccagagagaaggt

SEQ ID NO: 87631 - DNA, 30 bp, Artificial Sequence
  Synthetic oligonucleotide
gatgattgcaaaacagtgtcactagaaggt

SEQ ID NO: 87632 - DNA, 30 bp, Artificial Sequence
  Synthetic oligonucleotide
tccggaggaagcctcaacatgagggaaggt

SEQ ID NO: 87633 - DNA, 30 bp, Artificial Sequence
  Synthetic oligonucleotide
ggaaaatcctgatgcgaaggatagtaaggt

SEQ ID NO: 87634 - DNA, 30 bp, Artificial Sequence
  Synthetic oligonucleotide
tggtaggcttacgccaaataggtgacaggt

SEQ ID NO: 87635 - DNA, 30 bp, Artificial Sequence
  Synthetic oligonucleotide
aagagtgcaaccaataacagtttgacaggt

SEQ ID NO: 87636 - DNA, 30 bp, Artificial Sequence
  Synthetic oligonucleotide
tagaaggggtaagaattgcgctatacaggt

SEQ ID NO: 87637 - DNA, 30 bp, Artificial Sequence
  Synthetic oligonucleotide
tcaaaagcattgtggcgagacggaccaggt

SEQ ID NO: 87638 - DNA, 30 bp, Artificial Sequence
  Synthetic oligonucleotide
cgtagccgtattcacaacttaacgccaggt

SEQ ID NO: 87639 - DNA, 30 bp, Artificial Sequence
  Synthetic oligonucleotide
gctgggcatgttcaataatgccactcaggt

SEQ ID NO: 87640 - DNA, 30 bp, Artificial Sequence
  Synthetic oligonucleotide
taggaagcctaagggtcaagaatccgaggt

SEQ ID NO: 87641 - DNA, 30 bp, Artificial Sequence
  Synthetic oligonucleotide
ttaagccagcgcgtctgggtgatccgaggt

SEQ ID NO: 87642 - DNA, 30 bp, Artificial Sequence
  Synthetic oligonucleotide
agcctctgagcacgttggagttggcgaggt

SEQ ID NO: 87643 - DNA, 30 bp, Artificial Sequence
  Synthetic oligonucleotide
acatgagcgaacgctccatacggtcgaggt

SEQ ID NO: 87644 - DNA, 30 bp, Artificial Sequence
  Synthetic oligonucleotide
tgcggagggacgcatcgaagagcgtgaggt

SEQ ID NO: 87645 - DNA, 30 bp, Artificial Sequence
  Synthetic oligonucleotide
tagtggctaggatcgaactctcggtgaggt

SEQ ID NO: 87646 - DNA, 30 bp, Artificial Sequence
  Synthetic oligonucleotide
tcgcacagtttagggaggctagggataggt

SEQ ID NO: 87647 - DNA, 30 bp, Artificial Sequence
  Synthetic oligonucleotide
ggcaggtagatcaaggtgcttctcgtaggt

SEQ ID NO: 87648 - DNA, 30 bp, Artificial Sequence
  Synthetic oligonucleotide
cctgctcgaagacctaggggaaacttaggt

SEQ ID NO: 87649 - DNA, 30 bp, Artificial Sequence
  Synthetic oligonucleotide
ggcacgatccgggactagtcaggaaacggt

SEQ ID NO: 87650 - DNA, 30 bp, Artificial Sequence
  Synthetic oligonucleotide
gaagacaaaggaagtatgacgtataacggt

SEQ ID NO: 87651 - DNA, 30 bp, Artificial Sequence
  Synthetic oligonucleotide
cagggtggagtcgataaacaataagacggt

SEQ ID NO: 87652 - DNA, 30 bp, Artificial Sequence
  Synthetic oligonucleotide
agtgaagcacgtgaaagcaggctatacggt

SEQ ID NO: 87653 - DNA, 30 bp, Artificial Sequence
  Synthetic oligonucleotide
acaaagcgacccttctgcgaccgaaccggt

SEQ ID NO: 87654 - DNA, 30 bp, Artificial Sequence
  Synthetic oligonucleotide
gtacgatgaggggtggtcttagacaccggt

SEQ ID NO: 87655 - DNA, 31 bp, Artificial Sequence
  Synthetic oligonucleotide
caagcaacaagatgatggagaagtagccggt

SEQ ID NO: 87656 - DNA, 30 bp, Artificial Sequence
  Synthetic oligonucleotide
aaatgagcacactcacgctcatggtccggt

SEQ ID NO: 87657 - DNA, 30 bp, Artificial Sequence
  Synthetic oligonucleotide
actcgatgccaaaatagggcgagcagcggt

SEQ ID NO: 87658 - DNA, 30 bp, Artificial Sequence
  Synthetic oligonucleotide
acatataaaatggccaaatgactgagcggt

SEQ ID NO: 87659 - DNA, 30 bp, Artificial Sequence
  Synthetic oligonucleotide
ctctcaagggatcggaaagataacggcggt

SEQ ID NO: 87660 - DNA, 30 bp, Artificial Sequence
  Synthetic oligonucleotide
taataacacgggggccgtaacatcggcggt

SEQ ID NO: 87661 - DNA, 30 bp, Artificial Sequence
  Synthetic oligonucleotide
tcggaatagcctcaacccagtgttggcggt

SEQ ID NO: 87662 - DNA, 30 bp, Artificial Sequence
  Synthetic oligonucleotide
aggggcaagggcgattcggcaggctgcggt

SEQ ID NO: 87663 - DNA, 30 bp, Artificial Sequence
  Synthetic oligonucleotide
gacacgaactagtgaagggaaagttgcggt

SEQ ID NO: 87664 - DNA, 30 bp, Artificial Sequence
  Synthetic oligonucleotide
cacatacaggacactaagaccgaactcggt

SEQ ID NO: 87665 - DNA, 30 bp, Artificial Sequence
  Synthetic oligonucleotide
ccgggcctagtacacatcacctttctcggt

SEQ ID NO: 87666 - DNA, 30 bp, Artificial Sequence
  Synthetic oligonucleotide
acttgaccctagataggttagacagtcggt

SEQ ID NO: 87667 - DNA, 30 bp, Artificial Sequence
  Synthetic oligonucleotide
ctttgaggtgatatcggtatgagcttcggt

SEQ ID NO: 87668 - DNA, 30 bp, Artificial Sequence
  Synthetic oligonucleotide
acaaccgcatcaattcaattggataagggt

SEQ ID NO: 87669 - DNA, 30 bp, Artificial Sequence
  Synthetic oligonucleotide
ctcgctaagtagaaggaaaagtataagggt

SEQ ID NO: 87670 - DNA, 30 bp, Artificial Sequence
  Synthetic oligonucleotide
gcacaagaccaagatcctaagtgagagggt

SEQ ID NO: 87671 - DNA, 30 bp, Artificial Sequence
  Synthetic oligonucleotide
cggtcttgaaaacgccataacagcgagggt

SEQ ID NO: 87672 - DNA, 30 bp, Artificial Sequence
  Synthetic oligonucleotide
tgggagtagggaagtctcagtacatagggt

SEQ ID NO: 87673 - DNA, 30 bp, Artificial Sequence
  Synthetic oligonucleotide
aaagcatgcgaaccgtgatgtcaaacgggt

SEQ ID NO: 87674 - DNA, 30 bp, Artificial Sequence
  Synthetic oligonucleotide
gtcgtatatactatcaggcgtgtaccgggt

SEQ ID NO: 87675 - DNA, 30 bp, Artificial Sequence
  Synthetic oligonucleotide
aacgccataaccaaaacggcgtgtccgggt

SEQ ID NO: 87676 - DNA, 30 bp, Artificial Sequence
  Synthetic oligonucleotide
cggatacagccatcaggccagcttgcgggt

SEQ ID NO: 87677 - DNA, 30 bp, Artificial Sequence
  Synthetic oligonucleotide
tgcgaagtgtgcgggtaaaagaaatcgggt

SEQ ID NO: 87678 - DNA, 30 bp, Artificial Sequence
  Synthetic oligonucleotide
ttttacatcaagcagtgaacagcgtcgggt

SEQ ID NO: 87679 - DNA, 30 bp, Artificial Sequence
  Synthetic oligonucleotide
taaagagcgacactccccgtacatcggggt

SEQ ID NO: 87680 - DNA, 30 bp, Artificial Sequence
  Synthetic oligonucleotide
gcccataaggtgtttctgtaggagtggggt

SEQ ID NO: 87681 - DNA, 30 bp, Artificial Sequence
  Synthetic oligonucleotide
ggtctcgagtcatctacagcaataatgggt

SEQ ID NO: 87682 - DNA, 30 bp, Artificial Sequence
  Synthetic oligonucleotide
atcgaacgcctcgagcccgatggactgggt

SEQ ID NO: 87683 - DNA, 30 bp, Artificial Sequence
  Synthetic oligonucleotide
gggagacttatgcaaaattaacaagtgggt

SEQ ID NO: 87684 - DNA, 30 bp, Artificial Sequence
  Synthetic oligonucleotide
agagaggcgcccataatgatcgaggtgggt

SEQ ID NO: 87685 - DNA, 30 bp, Artificial Sequence
  Synthetic oligonucleotide
cgtcgaccattgataggttttcgggtgggt

SEQ ID NO: 87686 - DNA, 30 bp, Artificial Sequence
  Synthetic oligonucleotide
acggttgtcggaatagttggaatggtgggt

SEQ ID NO: 87687 - DNA, 30 bp, Artificial Sequence
  Synthetic oligonucleotide
tcattctgcatcgcatcgtggacattgggt

SEQ ID NO: 87688 - DNA, 30 bp, Artificial Sequence
  Synthetic oligonucleotide
agcaccaggagctagttagtagtattgggt

SEQ ID NO: 87689 - DNA, 30 bp, Artificial Sequence
  Synthetic oligonucleotide
gataccagcgaatagcttacccaaaatggt

SEQ ID NO: 87690 - DNA, 30 bp, Artificial Sequence
  Synthetic oligonucleotide
tattagcatggtgggcgatatgagaatggt

SEQ ID NO: 87691 - DNA, 30 bp, Artificial Sequence
  Synthetic oligonucleotide
tcacaccaattatgatattgctggaatggt

SEQ ID NO: 87692 - DNA, 30 bp, Artificial Sequence
  Synthetic oligonucleotide
tacgatgaaagggtaaggcatcaatatggt

SEQ ID NO: 87693 - DNA, 30 bp, Artificial Sequence
  Synthetic oligonucleotide
caaaggatgaccgagggctaaactcctggt

SEQ ID NO: 87694 - DNA, 30 bp, Artificial Sequence
  Synthetic oligonucleotide
acgtgtccatgggacagccattgggctggt

SEQ ID NO: 87695 - DNA, 30 bp, Artificial Sequence
  Synthetic oligonucleotide
aacagagaacgaccgtgccggttggctggt

SEQ ID NO: 87696 - DNA, 30 bp, Artificial Sequence
  Synthetic oligonucleotide
aaggacaccaaaactcaccacgatagtggt

SEQ ID NO: 87697 - DNA, 30 bp, Artificial Sequence
  Synthetic oligonucleotide
agggtaccattgtgcgtagtataacgtggt

SEQ ID NO: 87698 - DNA, 30 bp, Artificial Sequence
  Synthetic oligonucleotide
actgtcatctacgatatccggataggtggt

SEQ ID NO: 87699 - DNA, 30 bp, Artificial Sequence
  Synthetic oligonucleotide
tggaggactaactgttcatgcacgtgtggt

SEQ ID NO: 87700 - DNA, 30 bp, Artificial Sequence
  Synthetic oligonucleotide
atgggcaccatccctgtgcaaccaattggt

SEQ ID NO: 87701 - DNA, 30 bp, Artificial Sequence
  Synthetic oligonucleotide
tgccgtcgttaagcgtcatcagggattggt

SEQ ID NO: 87702 - DNA, 30 bp, Artificial Sequence
  Synthetic oligonucleotide
agatcgactggatcgactgcttcagttggt

SEQ ID NO: 87703 - DNA, 30 bp, Artificial Sequence
  Synthetic oligonucleotide
ggcgaggtatggttaatcccaaacgttggt

SEQ ID NO: 87704 - DNA, 30 bp, Artificial Sequence
  Synthetic oligonucleotide
atacggggataaagaggtccatacgttggt

SEQ ID NO: 87705 - DNA, 30 bp, Artificial Sequence
  Synthetic oligonucleotide
tcgtgtgagagacagaaatcttaggttggt

SEQ ID NO: 87706 - DNA, 30 bp, Artificial Sequence
  Synthetic oligonucleotide
cgttagagtgaagggctgcatgttgttggt

SEQ ID NO: 87707 - DNA, 30 bp, Artificial Sequence
  Synthetic oligonucleotide
agaaaggggtttctcggtgtgcggtttggt

SEQ ID NO: 87708 - DNA, 30 bp, Artificial Sequence
  Synthetic oligonucleotide
aacacaggtgcgacagtagaccggaaatgt

SEQ ID NO: 87709 - DNA, 30 bp, Artificial Sequence
  Synthetic oligonucleotide
catcaggccaatagcgagcatgggaaatgt

SEQ ID NO: 87710 - DNA, 30 bp, Artificial Sequence
  Synthetic oligonucleotide
ataaaaacggaaatgtgggacaataaatgt

SEQ ID NO: 87711 - DNA, 30 bp, Artificial Sequence
  Synthetic oligonucleotide
tacacgcccgtagacgaaatcactaaatgt

SEQ ID NO: 87712 - DNA, 30 bp, Artificial Sequence
  Synthetic oligonucleotide
gggaaacctgtaacccaatgggaacaatgt

SEQ ID NO: 87713 - DNA, 30 bp, Artificial Sequence
  Synthetic oligonucleotide
gcgacagtctgagacatgctgaggcaatgt

SEQ ID NO: 87714 - DNA, 30 bp, Artificial Sequence
  Synthetic oligonucleotide
taatgtaactccgaagagatctagtaatgt

SEQ ID NO: 87715 - DNA, 30 bp, Artificial Sequence
  Synthetic oligonucleotide
aggcgtgaattggtttttcccttgtaatgt

SEQ ID NO: 87716 - DNA, 30 bp, Artificial Sequence
  Synthetic oligonucleotide
gccggaaagagaccgtactcaagaacatgt

SEQ ID NO: 87717 - DNA, 30 bp, Artificial Sequence
  Synthetic oligonucleotide
aatgtgcactaagaggggatgaggacatgt

SEQ ID NO: 87718 - DNA, 30 bp, Artificial Sequence
  Synthetic oligonucleotide
acgtaagagtttctgaacatgataccatgt

SEQ ID NO: 87719 - DNA, 26 bp, Artificial Sequence
  Synthetic oligonucleotide
tcagagctgaaaagaagaagtcatgt

SEQ ID NO: 87720 - DNA, 30 bp, Artificial Sequence
  Synthetic oligonucleotide
cggtaatatgcctaagttgaaatgtcatgt

SEQ ID NO: 87721 - DNA, 30 bp, Artificial Sequence
  Synthetic oligonucleotide
aggccgtggggctgcctactaaaaagatgt

SEQ ID NO: 87722 - DNA, 30 bp, Artificial Sequence
  Synthetic oligonucleotide
tgattccctataatgaaacgacatagatgt

SEQ ID NO: 87723 - DNA, 30 bp, Artificial Sequence
  Synthetic oligonucleotide
gatacgaagttgatggaattcgaatgatgt

SEQ ID NO: 87724 - DNA, 30 bp, Artificial Sequence
  Synthetic oligonucleotide
gagcttgattacagggcagtcaagtgatgt

SEQ ID NO: 87725 - DNA, 30 bp, Artificial Sequence
  Synthetic oligonucleotide
tcagaagaatagggctgggtctgactatgt

SEQ ID NO: 87726 - DNA, 30 bp, Artificial Sequence
  Synthetic oligonucleotide
taacgtccccaagtaggtgttagattatgt

SEQ ID NO: 87727 - DNA, 30 bp, Artificial Sequence
  Synthetic oligonucleotide
tgtgaaggtcccgaaatgtatagatactgt

SEQ ID NO: 87728 - DNA, 30 bp, Artificial Sequence
  Synthetic oligonucleotide
gaagggatgctccagctccgattgtactgt

SEQ ID NO: 87729 - DNA, 30 bp, Artificial Sequence
  Synthetic oligonucleotide
acctgcgagagcacaatccgagtttactgt

SEQ ID NO: 87730 - DNA, 30 bp, Artificial Sequence
  Synthetic oligonucleotide
cactgtaggaaagacgtgcgcgcgacctgt

SEQ ID NO: 87731 - DNA, 30 bp, Artificial Sequence
  Synthetic oligonucleotide
ggtcatactaaaaccgggtggtctacctgt

SEQ ID NO: 87732 - DNA, 29 bp, Artificial Sequence
  Synthetic oligonucleotide
gtgtatgataagccgagaaagtagcctgt

SEQ ID NO: 87733 - DNA, 30 bp, Artificial Sequence
  Synthetic oligonucleotide
ctgactgggtgtttagagcggtaatcctgt

SEQ ID NO: 87734 - DNA, 30 bp, Artificial Sequence
  Synthetic oligonucleotide
atgattccgaagtccacgcttatatcctgt

SEQ ID NO: 87735 - DNA, 30 bp, Artificial Sequence
  Synthetic oligonucleotide
ataagaatttcttagtgaccaaaccgctgt

SEQ ID NO: 87736 - DNA, 30 bp, Artificial Sequence
  Synthetic oligonucleotide
ttgcggggtctaaacacaagagaaatctgt

SEQ ID NO: 87737 - DNA, 30 bp, Artificial Sequence
  Synthetic oligonucleotide
gtggacagtggacactatcaagaaaagtgt

SEQ ID NO: 87738 - DNA, 30 bp, Artificial Sequence
  Synthetic oligonucleotide
atcggcggcagattgcgtcaattcaagtgt

SEQ ID NO: 87739 - DNA, 30 bp, Artificial Sequence
  Synthetic oligonucleotide
agccacagttaggagggcgttcggacgtgt

SEQ ID NO: 87740 - DNA, 30 bp, Artificial Sequence
  Synthetic oligonucleotide
taagagcgggtgcgaagaggaaatacgtgt

SEQ ID NO: 87741 - DNA, 30 bp, Artificial Sequence
  Synthetic oligonucleotide
tcgttattcagccgaaagggactgccgtgt

SEQ ID NO: 87742 - DNA, 30 bp, Artificial Sequence
  Synthetic oligonucleotide
taataggctagtgaacaacgaaacgcgtgt

SEQ ID NO: 87743 - DNA, 30 bp, Artificial Sequence
  Synthetic oligonucleotide
cggtatgacctattcagctgctcgtcgtgt

SEQ ID NO: 87744 - DNA, 30 bp, Artificial Sequence
  Synthetic oligonucleotide
gaacacgaagtgagggcgactggcaggtgt

SEQ ID NO: 87745 - DNA, 30 bp, Artificial Sequence
  Synthetic oligonucleotide
aaggatgtgctagccatgcctggtaggtgt

SEQ ID NO: 87746 - DNA, 30 bp, Artificial Sequence
  Synthetic oligonucleotide
aacaatcgagcagaccaagtatgtgggtgt

SEQ ID NO: 87747 - DNA, 30 bp, Artificial Sequence
  Synthetic oligonucleotide
cctgggataggtacaaattgccactggtgt

SEQ ID NO: 87748 - DNA, 30 bp, Artificial Sequence
  Synthetic oligonucleotide
ggatcggaacttgattgaacaacctggtgt

SEQ ID NO: 87749 - DNA, 30 bp, Artificial Sequence
  Synthetic oligonucleotide
gtggcaatgagcgatcggcgtagctggtgt

SEQ ID NO: 87750 - DNA, 30 bp, Artificial Sequence
  Synthetic oligonucleotide
tttgtactcgaactcacgatggagtggtgt

SEQ ID NO: 87751 - DNA, 30 bp, Artificial Sequence
  Synthetic oligonucleotide
aaggtgaggatcagccatttggagtggtgt

SEQ ID NO: 87752 - DNA, 30 bp, Artificial Sequence
  Synthetic oligonucleotide
agcttcggacagagctggaaacggatgtgt

SEQ ID NO: 87753 - DNA, 30 bp, Artificial Sequence
  Synthetic oligonucleotide
ctcggagttcatctcttagacattatgtgt

SEQ ID NO: 87754 - DNA, 30 bp, Artificial Sequence
  Synthetic oligonucleotide
tttatcgcattgacccccgagtgactgtgt

SEQ ID NO: 87755 - DNA, 30 bp, Artificial Sequence
  Synthetic oligonucleotide
ggcgtttgaaaataaaaatagggcctgtgt

SEQ ID NO: 87756 - DNA, 30 bp, Artificial Sequence
  Synthetic oligonucleotide
caggagaccagtgattgccgatgcgtgtgt

SEQ ID NO: 87757 - DNA, 30 bp, Artificial Sequence
  Synthetic oligonucleotide
taggaaatatgcatacaaggacctgtgtgt

SEQ ID NO: 87758 - DNA, 30 bp, Artificial Sequence
  Synthetic oligonucleotide
atcgctttgagaggacttacatacaattgt

SEQ ID NO: 87759 - DNA, 30 bp, Artificial Sequence
  Synthetic oligonucleotide
ccgggacattagaataagcgttttaattgt

SEQ ID NO: 87760 - DNA, 30 bp, Artificial Sequence
  Synthetic oligonucleotide
aaagggtaacctgtgctttcagaagattgt

SEQ ID NO: 87761 - DNA, 30 bp, Artificial Sequence
  Synthetic oligonucleotide
caaacgatgctgggtgtgatgtaagattgt

SEQ ID NO: 87762 - DNA, 30 bp, Artificial Sequence
  Synthetic oligonucleotide
atgcactgccatgagataccacgagattgt

SEQ ID NO: 87763 - DNA, 30 bp, Artificial Sequence
  Synthetic oligonucleotide
ccaacacgtgcacgttatcgaaaggattgt

SEQ ID NO: 87764 - DNA, 30 bp, Artificial Sequence
  Synthetic oligonucleotide
gctgaaagtgaacgctttgtcaaggattgt

SEQ ID NO: 87765 - DNA, 30 bp, Artificial Sequence
  Synthetic oligonucleotide
agttagaaaatcagtcacataacggattgt

SEQ ID NO: 87766 - DNA, 30 bp, Artificial Sequence
  Synthetic oligonucleotide
gcctagcgatacagacttgtcatctattgt

SEQ ID NO: 87767 - DNA, 30 bp, Artificial Sequence
  Synthetic oligonucleotide
cctaggcatcctaattaaaataagtattgt

SEQ ID NO: 87768 - DNA, 30 bp, Artificial Sequence
  Synthetic oligonucleotide
tcggaccggatacaaacgtccgattattgt

SEQ ID NO: 87769 - DNA, 30 bp, Artificial Sequence
  Synthetic oligonucleotide
tctaagtgatgaataagggtgaaaacttgt

SEQ ID NO: 87770 - DNA, 30 bp, Artificial Sequence
  Synthetic oligonucleotide
acgagcagtcgatttgatcggtaaacttgt

SEQ ID NO: 87771 - DNA, 30 bp, Artificial Sequence
  Synthetic oligonucleotide
ttgctagcccaacagagctgaccaacttgt

SEQ ID NO: 87772 - DNA, 30 bp, Artificial Sequence
  Synthetic oligonucleotide
agcaggctccacgccatgcaagttacttgt

SEQ ID NO: 87773 - DNA, 30 bp, Artificial Sequence
  Synthetic oligonucleotide
cgatactcggtctggtcgatggtcccttgt

SEQ ID NO: 87774 - DNA, 30 bp, Artificial Sequence
  Synthetic oligonucleotide
tatgaatacagtgagtgagaggtaagttgt

SEQ ID NO: 87775 - DNA, 30 bp, Artificial Sequence
  Synthetic oligonucleotide
aaagggttacctgtgatcgtagccagttgt

SEQ ID NO: 87776 - DNA, 30 bp, Artificial Sequence
  Synthetic oligonucleotide
catggtgagggttgatgaaggacgagttgt

SEQ ID NO: 87777 - DNA, 30 bp, Artificial Sequence
  Synthetic oligonucleotide
acacgcacattattttgcacataacgttgt

SEQ ID NO: 87778 - DNA, 30 bp, Artificial Sequence
  Synthetic oligonucleotide
tatcgtacccaattgaagactgtgcgttgt

SEQ ID NO: 87779 - DNA, 30 bp, Artificial Sequence
  Synthetic oligonucleotide
agaacaggtagtcgacggttgtagggttgt

SEQ ID NO: 87780 - DNA, 30 bp, Artificial Sequence
  Synthetic oligonucleotide
cccaactgaaaattagaaggagagtgttgt

SEQ ID NO: 87781 - DNA, 30 bp, Artificial Sequence
  Synthetic oligonucleotide
aagccaccaggaaccgtcggtcaagtttgt

SEQ ID NO: 87782 - DNA, 30 bp, Artificial Sequence
  Synthetic oligonucleotide
ctggcgaaaaccatgtgaccccacttttgt

SEQ ID NO: 87783 - DNA, 30 bp, Artificial Sequence
  Synthetic oligonucleotide
cgagtctgtttgatgggatagattttttgt

SEQ ID NO: 87784 - DNA, 30 bp, Artificial Sequence
  Synthetic oligonucleotide
ggcctgccaatagaagcgcggtagaaaatt

SEQ ID NO: 87785 - DNA, 30 bp, Artificial Sequence
  Synthetic oligonucleotide
tacgaagcttgtacatagctgaataaaatt

SEQ ID NO: 87786 - DNA, 30 bp, Artificial Sequence
  Synthetic oligonucleotide
aagctaaagatcgcatcgctggacgaaatt

SEQ ID NO: 87787 - DNA, 30 bp, Artificial Sequence
  Synthetic oligonucleotide
caccgtatgttctcgaaccaagcggaaatt

SEQ ID NO: 87788 - DNA, 30 bp, Artificial Sequence
  Synthetic oligonucleotide
aagctgaaaagagtgagaatatcggaaatt

SEQ ID NO: 87789 - DNA, 30 bp, Artificial Sequence
  Synthetic oligonucleotide
gtaaccaaagacggacgggcgatggaaatt

SEQ ID NO: 87790 - DNA, 30 bp, Artificial Sequence
  Synthetic oligonucleotide
cgaatatcatcaacatcgtacgtcacaatt

SEQ ID NO: 87791 - DNA, 30 bp, Artificial Sequence
  Synthetic oligonucleotide
ttcggtaggaatcaaaatagtacgacaatt

SEQ ID NO: 87792 - DNA, 30 bp, Artificial Sequence
  Synthetic oligonucleotide
aggtaatgagtcaaataggttcggacaatt

SEQ ID NO: 87793 - DNA, 30 bp, Artificial Sequence
  Synthetic oligonucleotide
aggacaagccaaaacactattagcccaatt

SEQ ID NO: 87794 - DNA, 30 bp, Artificial Sequence
  Synthetic oligonucleotide
cggattgttagcgctacagagcgagcaatt

SEQ ID NO: 87795 - DNA, 31 bp, Artificial Sequence
  Synthetic oligonucleotide
caatgaggggtagatgaaaccgttcgcaatt

SEQ ID NO: 87796 - DNA, 30 bp, Artificial Sequence
  Synthetic oligonucleotide
aagtgaataggctatactacgacaagaatt

SEQ ID NO: 87797 - DNA, 30 bp, Artificial Sequence
  Synthetic oligonucleotide
acaatgtagcaggggttaattacacgaatt

SEQ ID NO: 87798 - DNA, 30 bp, Artificial Sequence
  Synthetic oligonucleotide
aggaattgagattagcgagccctaggaatt

SEQ ID NO: 87799 - DNA, 30 bp, Artificial Sequence
  Synthetic oligonucleotide
agggttaaacggcaccctctggcttgaatt

SEQ ID NO: 87800 - DNA, 30 bp, Artificial Sequence
  Synthetic oligonucleotide
ccgggcggcattaagcgaacactaataatt

SEQ ID NO: 87801 - DNA, 30 bp, Artificial Sequence
  Synthetic oligonucleotide
atggtgcatgggagaattccggacataatt

SEQ ID NO: 87802 - DNA, 30 bp, Artificial Sequence
  Synthetic oligonucleotide
taacggtcagccagttagagtaccataatt

SEQ ID NO: 87803 - DNA, 30 bp, Artificial Sequence
  Synthetic oligonucleotide
ttattaacacaaagcaaaacacgcataatt

SEQ ID NO: 87804 - DNA, 30 bp, Artificial Sequence
  Synthetic oligonucleotide
tgagtgaagtccgcatgattttgcgtaatt

SEQ ID NO: 87805 - DNA, 30 bp, Artificial Sequence
  Synthetic oligonucleotide
taaaggggctactgtgaggggcaggtaatt

SEQ ID NO: 87806 - DNA, 30 bp, Artificial Sequence
  Synthetic oligonucleotide
taaatgcaagtaggtcaataagggcacatt

SEQ ID NO: 87807 - DNA, 30 bp, Artificial Sequence
  Synthetic oligonucleotide
cgtttatggaccaggcacaaccttcacatt

SEQ ID NO: 87808 - DNA, 30 bp, Artificial Sequence
  Synthetic oligonucleotide
gggaacggtttacatggcgatgaatacatt

SEQ ID NO: 87809 - DNA, 30 bp, Artificial Sequence
  Synthetic oligonucleotide
agaaatgtaaggaatctggcaagctacatt

SEQ ID NO: 87810 - DNA, 30 bp, Artificial Sequence
  Synthetic oligonucleotide
gtggctcggagattcgaataatcgaccatt

SEQ ID NO: 87811 - DNA, 31 bp, Artificial Sequence
  Synthetic oligonucleotide
tcgcgctcccacccaatatgactttaccatt

SEQ ID NO: 87812 - DNA, 30 bp, Artificial Sequence
  Synthetic oligonucleotide
gggccggttaagattcgcgctcaccccatt

SEQ ID NO: 87813 - DNA, 30 bp, Artificial Sequence
  Synthetic oligonucleotide
cgagcgaggtcgtcactactgccggccatt

SEQ ID NO: 87814 - DNA, 30 bp, Artificial Sequence
  Synthetic oligonucleotide
tagggaagtaggtttcacggaaattccatt

SEQ ID NO: 87815 - DNA, 30 bp, Artificial Sequence
  Synthetic oligonucleotide
cccagaagggaccctacaaaggcgggcatt

SEQ ID NO: 87816 - DNA, 30 bp, Artificial Sequence
  Synthetic oligonucleotide
actagggtgaagcttagattagtgtgcatt

SEQ ID NO: 87817 - DNA, 30 bp, Artificial Sequence
  Synthetic oligonucleotide
gctggacgatctgagtgctatggggtcatt

SEQ ID NO: 87818 - DNA, 30 bp, Artificial Sequence
  Synthetic oligonucleotide
cctcatgggccgaattgatggcgattcatt

SEQ ID NO: 87819 - DNA, 30 bp, Artificial Sequence
  Synthetic oligonucleotide
gtgctaaactgaagggccagcggattcatt

SEQ ID NO: 87820 - DNA, 30 bp, Artificial Sequence
  Synthetic oligonucleotide
gatagaggcaaacaagttgcagagcagatt

SEQ ID NO: 87821 - DNA, 30 bp, Artificial Sequence
  Synthetic oligonucleotide
gaagcatggtccaagctcgcatccgagatt

SEQ ID NO: 87822 - DNA, 30 bp, Artificial Sequence
  Synthetic oligonucleotide
ttacatagaaagcaatcacttagaccgatt

SEQ ID NO: 87823 - DNA, 31 bp, Artificial Sequence
  Synthetic oligonucleotide
taatacctacattacaaataggcacccgatt

SEQ ID NO: 87824 - DNA, 30 bp, Artificial Sequence
  Synthetic oligonucleotide
ggacagtacaccgtagaaagtacggcgatt

SEQ ID NO: 87825 - DNA, 30 bp, Artificial Sequence
  Synthetic oligonucleotide
cactccgcatgtatcaaacaaacatcgatt

SEQ ID NO: 87826 - DNA, 30 bp, Artificial Sequence
  Synthetic oligonucleotide
gtaggatgcccacctcaaaccgggtcgatt

SEQ ID NO: 87827 - DNA, 30 bp, Artificial Sequence
  Synthetic oligonucleotide
tctccaggttgttataagcgagcaaggatt

SEQ ID NO: 87828 - DNA, 30 bp, Artificial Sequence
  Synthetic oligonucleotide
tcggcctcaaacacgggcttcgaccggatt

SEQ ID NO: 87829 - DNA, 30 bp, Artificial Sequence
  Synthetic oligonucleotide
ctgaaactaacatcgcggaacacccggatt

SEQ ID NO: 87830 - DNA, 30 bp, Artificial Sequence
  Synthetic oligonucleotide
caagtctaagatcgatattgggtgcggatt

SEQ ID NO: 87831 - DNA, 30 bp, Artificial Sequence
  Synthetic oligonucleotide
gggaaaccgccatgacaaccgtctgggatt

SEQ ID NO: 87832 - DNA, 30 bp, Artificial Sequence
  Synthetic oligonucleotide
ggtgaccgcattaacttatggacatggatt

SEQ ID NO: 87833 - DNA, 30 bp, Artificial Sequence
  Synthetic oligonucleotide
gcgagtgcaagcgaagcttggaagtggatt

SEQ ID NO: 87834 - DNA, 30 bp, Artificial Sequence
  Synthetic oligonucleotide
aacgcgttttaacataaattagagtggatt

SEQ ID NO: 87835 - DNA, 30 bp, Artificial Sequence
  Synthetic oligonucleotide
caacggagtcaacgaactaaatgttggatt

SEQ ID NO: 87836 - DNA, 30 bp, Artificial Sequence
  Synthetic oligonucleotide
acgatctgatgctgacgtaggtgttggatt

SEQ ID NO: 87837 - DNA, 30 bp, Artificial Sequence
  Synthetic oligonucleotide
atatgacagggtccgctaagacagatgatt

SEQ ID NO: 87838 - DNA, 30 bp, Artificial Sequence
  Synthetic oligonucleotide
tcaccagttgtcctgaagaggtgcttgatt

SEQ ID NO: 87839 - DNA, 30 bp, Artificial Sequence
  Synthetic oligonucleotide
aagcgtaatagggtaggagtaagaaatatt

SEQ ID NO: 87840 - DNA, 30 bp, Artificial Sequence
  Synthetic oligonucleotide
atcgtatcaacgagagggcatcacaatatt

SEQ ID NO: 87841 - DNA, 30 bp, Artificial Sequence
  Synthetic oligonucleotide
cagggaaccactgcaaagtgagcgaatatt

SEQ ID NO: 87842 - DNA, 30 bp, Artificial Sequence
  Synthetic oligonucleotide
agtgaacccgagattagtcaattggatatt

SEQ ID NO: 87843 - DNA, 30 bp, Artificial Sequence
  Synthetic oligonucleotide
ggtggcggtacttgcatatgtcaatatatt

SEQ ID NO: 87844 - DNA, 30 bp, Artificial Sequence
  Synthetic oligonucleotide
tgcgtgctcaacatgggttatttcgctatt

SEQ ID NO: 87845 - DNA, 30 bp, Artificial Sequence
  Synthetic oligonucleotide
agacaaaacgccacaacgtcggctagtatt

SEQ ID NO: 87846 - DNA, 30 bp, Artificial Sequence
  Synthetic oligonucleotide
caacgaaaagagtatacactgcgtagtatt

SEQ ID NO: 87847 - DNA, 30 bp, Artificial Sequence
  Synthetic oligonucleotide
cttaacaaactttgatccacgtgacgtatt

SEQ ID NO: 87848 - DNA, 30 bp, Artificial Sequence
  Synthetic oligonucleotide
gggggtggagctcaccaagagaaaggtatt

SEQ ID NO: 87849 - DNA, 31 bp, Artificial Sequence
  Synthetic oligonucleotide
tcgtcatagtaacacacgtgtcaactgtatt

SEQ ID NO: 87850 - DNA, 30 bp, Artificial Sequence
  Synthetic oligonucleotide
cgataatttgtgagtaaagcactacttatt

SEQ ID NO: 87851 - DNA, 30 bp, Artificial Sequence
  Synthetic oligonucleotide
gtggaacaacaactcctcgtaagtcttatt

SEQ ID NO: 87852 - DNA, 30 bp, Artificial Sequence
  Synthetic oligonucleotide
acgctcagtccttctaattgctacaaactt

SEQ ID NO: 87853 - DNA, 30 bp, Artificial Sequence
  Synthetic oligonucleotide
gtgggttcaagagagttggtcggcaaactt

SEQ ID NO: 87854 - DNA, 30 bp, Artificial Sequence
  Synthetic oligonucleotide
agttgtggcggatggctaatcagacaactt

SEQ ID NO: 87855 - DNA, 30 bp, Artificial Sequence
  Synthetic oligonucleotide
ttgagagtgcggtcccaagggggctaactt

SEQ ID NO: 87856 - DNA, 30 bp, Artificial Sequence
  Synthetic oligonucleotide
tggcagtaagcacatgcccgaatctaactt

SEQ ID NO: 87857 - DNA, 30 bp, Artificial Sequence
  Synthetic oligonucleotide
ctgagaagaagagagttcgcagaaacactt

SEQ ID NO: 87858 - DNA, 30 bp, Artificial Sequence
  Synthetic oligonucleotide
acggtcctcagaggtctagcatcaacactt

SEQ ID NO: 87859 - DNA, 30 bp, Artificial Sequence
  Synthetic oligonucleotide
gtcctggtggaagatgtgtaggagccactt

SEQ ID NO: 87860 - DNA, 30 bp, Artificial Sequence
  Synthetic oligonucleotide
catgacacgatgaatacgcgtgaagcactt

SEQ ID NO: 87861 - DNA, 30 bp, Artificial Sequence
  Synthetic oligonucleotide
agtcgtaaaaggacggaattccgggcactt

SEQ ID NO: 87862 - DNA, 30 bp, Artificial Sequence
  Synthetic oligonucleotide
cctcacgtaaacgacacttcaggatcactt

SEQ ID NO: 87863 - DNA, 30 bp, Artificial Sequence
  Synthetic oligonucleotide
ccgacaccgggatcggcagtttgctcactt

SEQ ID NO: 87864 - DNA, 31 bp, Artificial Sequence
  Synthetic oligonucleotide
cggtgcgaggtctcctattccaagttcactt

SEQ ID NO: 87865 - DNA, 30 bp, Artificial Sequence
  Synthetic oligonucleotide
cggaagggaactgcgacacataagagactt

SEQ ID NO: 87866 - DNA, 30 bp, Artificial Sequence
  Synthetic oligonucleotide
acacgacacaagaaacaggctatacgactt

SEQ ID NO: 87867 - DNA, 30 bp, Artificial Sequence
  Synthetic oligonucleotide
gcgtaagtcctatagcgcggaaatcgactt

SEQ ID NO: 87868 - DNA, 30 bp, Artificial Sequence
  Synthetic oligonucleotide
cgagaagaataaataaaaaccacgggactt

SEQ ID NO: 87869 - DNA, 30 bp, Artificial Sequence
  Synthetic oligonucleotide
tcagactcggacgggatgcgtttgggactt

SEQ ID NO: 87870 - DNA, 30 bp, Artificial Sequence
  Synthetic oligonucleotide
actcgtatcgataacacggaacgtggactt

SEQ ID NO: 87871 - DNA, 30 bp, Artificial Sequence
  Synthetic oligonucleotide
caaccgacaaggcctactatcgtactactt

SEQ ID NO: 87872 - DNA, 30 bp, Artificial Sequence
  Synthetic oligonucleotide
agtcgtccgagataagtgagagatctactt

SEQ ID NO: 87873 - DNA, 30 bp, Artificial Sequence
  Synthetic oligonucleotide
acgaggcggatcaaactacaacgagtactt

SEQ ID NO: 87874 - DNA, 30 bp, Artificial Sequence
  Synthetic oligonucleotide
aagggtgccgaatatccgatgacggtactt

SEQ ID NO: 87875 - DNA, 30 bp, Artificial Sequence
  Synthetic oligonucleotide
aggagtatcgtgaagtatagcttaaacctt

SEQ ID NO: 87876 - DNA, 30 bp, Artificial Sequence
  Synthetic oligonucleotide
gaggcaataaggagtaaggggcatgacctt

SEQ ID NO: 87877 - DNA, 30 bp, Artificial Sequence
  Synthetic oligonucleotide
tggtgcggggccgaacaagtgacgtacctt

SEQ ID NO: 87878 - DNA, 30 bp, Artificial Sequence
  Synthetic oligonucleotide
ttgcgcaatacacctcgggatgtgaccctt

SEQ ID NO: 87879 - DNA, 30 bp, Artificial Sequence
  Synthetic oligonucleotide
gtcgccgaatgcgtgaagtatggccccctt

SEQ ID NO: 87880 - DNA, 30 bp, Artificial Sequence
  Synthetic oligonucleotide
acggaggtgacgaaaaatgagggtcccctt

SEQ ID NO: 87881 - DNA, 30 bp, Artificial Sequence
  Synthetic oligonucleotide
acgtgtatcatgatgtataagaaggccctt

SEQ ID NO: 87882 - DNA, 30 bp, Artificial Sequence
  Synthetic oligonucleotide
ggaagccagaatcaaagaagtgaaggcctt

SEQ ID NO: 87883 - DNA, 30 bp, Artificial Sequence
  Synthetic oligonucleotide
acgacacatgagcataccccaggcgtcctt

SEQ ID NO: 87884 - DNA, 30 bp, Artificial Sequence
  Synthetic oligonucleotide
cgtgaccagctgtggggctaggaaaagctt

SEQ ID NO: 87885 - DNA, 30 bp, Artificial Sequence
  Synthetic oligonucleotide
gagatagctccaagtactatttcaaagctt

SEQ ID NO: 87886 - DNA, 30 bp, Artificial Sequence
  Synthetic oligonucleotide
tactcagaactaaggttgcgtcgaaagctt

SEQ ID NO: 87887 - DNA, 30 bp, Artificial Sequence
  Synthetic oligonucleotide
caagatatatagtcagtgagacccgagctt

SEQ ID NO: 87888 - DNA, 30 bp, Artificial Sequence
  Synthetic oligonucleotide
gccataactgctaaatgataacttgagctt

SEQ ID NO: 87889 - DNA, 30 bp, Artificial Sequence
  Synthetic oligonucleotide
gggaactaatctgtgcgcagaagctagctt

SEQ ID NO: 87890 - DNA, 30 bp, Artificial Sequence
  Synthetic oligonucleotide
ccttgagggtagcacaccattacaacgctt

SEQ ID NO: 87891 - DNA, 30 bp, Artificial Sequence
  Synthetic oligonucleotide
tagtaggtcccgttcgacctgagtacgctt

SEQ ID NO: 87892 - DNA, 30 bp, Artificial Sequence
  Synthetic oligonucleotide
cttcagacatcagataaaaaactaccgctt

SEQ ID NO: 87893 - DNA, 30 bp, Artificial Sequence
  Synthetic oligonucleotide
cgagcgcaggcttataccaactaagcgctt

SEQ ID NO: 87894 - DNA, 30 bp, Artificial Sequence
  Synthetic oligonucleotide
cgtgggttgcgtgcaggagacaaggcgctt

SEQ ID NO: 87895 - DNA, 30 bp, Artificial Sequence
  Synthetic oligonucleotide
tgaaggaaaaacgacgttgtgcctcggctt

SEQ ID NO: 87896 - DNA, 30 bp, Artificial Sequence
  Synthetic oligonucleotide
gaggcagtagcacgaagtcataaggggctt

SEQ ID NO: 87897 - DNA, 30 bp, Artificial Sequence
  Synthetic oligonucleotide
acagtgaacacgaaatcaagcctcttgctt

SEQ ID NO: 87898 - DNA, 30 bp, Artificial Sequence
  Synthetic oligonucleotide
accataaaagcagggggggtagggaatctt

SEQ ID NO: 87899 - DNA, 30 bp, Artificial Sequence
  Synthetic oligonucleotide
tcagttagtgcggaccaggcttcatatctt

SEQ ID NO: 87900 - DNA, 30 bp, Artificial Sequence
  Synthetic oligonucleotide
tactactagtacccagatgtgcaggctctt

SEQ ID NO: 87901 - DNA, 30 bp, Artificial Sequence
  Synthetic oligonucleotide
caataacaaagtgcattcacaacttctctt

SEQ ID NO: 87902 - DNA, 30 bp, Artificial Sequence
  Synthetic oligonucleotide
gccagcgccgataaagagaatgcgagtctt

SEQ ID NO: 87903 - DNA, 30 bp, Artificial Sequence
  Synthetic oligonucleotide
cggtaggatgatactgcgggcttgagtctt

SEQ ID NO: 87904 - DNA, 31 bp, Artificial Sequence
  Synthetic oligonucleotide
agtcgaaggatctgggtagggtatacgtctt

SEQ ID NO: 87905 - DNA, 30 bp, Artificial Sequence
  Synthetic oligonucleotide
ggcggtacgagcatgggccgtcatggtctt

SEQ ID NO: 87906 - DNA, 30 bp, Artificial Sequence
  Synthetic oligonucleotide
ggtacgaaagcctcttcctattaagttctt

SEQ ID NO: 87907 - DNA, 30 bp, Artificial Sequence
  Synthetic oligonucleotide
ggacataggcctgatagaaacagcgttctt

SEQ ID NO: 87908 - DNA, 30 bp, Artificial Sequence
  Synthetic oligonucleotide
cgtgtacaaggttgcacgcgtgcgcaagtt

SEQ ID NO: 87909 - DNA, 30 bp, Artificial Sequence
  Synthetic oligonucleotide
aacgtctgcgaagaccgggcgaaagaagtt

SEQ ID NO: 87910 - DNA, 30 bp, Artificial Sequence
  Synthetic oligonucleotide
agatataaaggagtttataagtaagaagtt

SEQ ID NO: 87911 - DNA, 30 bp, Artificial Sequence
  Synthetic oligonucleotide
tgcggttggtgggtgacgtgaagcgaagtt

SEQ ID NO: 87912 - DNA, 30 bp, Artificial Sequence
  Synthetic oligonucleotide
cggctgtaatgactacagcgggaataagtt

SEQ ID NO: 87913 - DNA, 30 bp, Artificial Sequence
  Synthetic oligonucleotide
gaggccaccactcataagtttcagtaagtt

SEQ ID NO: 87914 - DNA, 30 bp, Artificial Sequence
  Synthetic oligonucleotide
agaacggaacggatgaacaaagatacagtt

SEQ ID NO: 87915 - DNA, 30 bp, Artificial Sequence
  Synthetic oligonucleotide
cgcacagccacgtatcccgttgtgccagtt

SEQ ID NO: 87916 - DNA, 30 bp, Artificial Sequence
  Synthetic oligonucleotide
aggccgtgcaaaattacattacattcagtt

SEQ ID NO: 87917 - DNA, 30 bp, Artificial Sequence
  Synthetic oligonucleotide
gacgaatgtaggatactgcgccggagagtt

SEQ ID NO: 87918 - DNA, 30 bp, Artificial Sequence
  Synthetic oligonucleotide
tcaaccgaacattatggcatgttgggagtt

SEQ ID NO: 87919 - DNA, 30 bp, Artificial Sequence
  Synthetic oligonucleotide
ggtaccgcgtccataagtcgttggtgagtt

SEQ ID NO: 87920 - DNA, 30 bp, Artificial Sequence
  Synthetic oligonucleotide
aatcgatacctgagtaagcagctttgagtt

SEQ ID NO: 87921 - DNA, 30 bp, Artificial Sequence
  Synthetic oligonucleotide
cactggccgcgacaaaagggcaacatagtt

SEQ ID NO: 87922 - DNA, 30 bp, Artificial Sequence
  Synthetic oligonucleotide
gcatgcgccatcatataaaggatcatagtt

SEQ ID NO: 87923 - DNA, 30 bp, Artificial Sequence
  Synthetic oligonucleotide
ttaaatgcaaagcgacagcaggccgtagtt

SEQ ID NO: 87924 - DNA, 30 bp, Artificial Sequence
  Synthetic oligonucleotide
tcttaagcagttacggcgtacaacttagtt

SEQ ID NO: 87925 - DNA, 30 bp, Artificial Sequence
  Synthetic oligonucleotide
ggaagaggctgtcctgtcgattacaacgtt

SEQ ID NO: 87926 - DNA, 30 bp, Artificial Sequence
  Synthetic oligonucleotide
tgcggtatactagcgatcaaactccacgtt

SEQ ID NO: 87927 - DNA, 30 bp, Artificial Sequence
  Synthetic oligonucleotide
agcatcgcttgatggacgcgtagtcacgtt

SEQ ID NO: 87928 - DNA, 30 bp, Artificial Sequence
  Synthetic oligonucleotide
taagcaatgcgactaatatactatgacgtt

SEQ ID NO: 87929 - DNA, 30 bp, Artificial Sequence
  Synthetic oligonucleotide
agggttgagcggaatggttacgccaccgtt

SEQ ID NO: 87930 - DNA, 30 bp, Artificial Sequence
  Synthetic oligonucleotide
caacgtctactctagtaactctaagccgtt

SEQ ID NO: 87931 - DNA, 30 bp, Artificial Sequence
  Synthetic oligonucleotide
atggtatagtccgtatctaatagagccgtt

SEQ ID NO: 87932 - DNA, 30 bp, Artificial Sequence
  Synthetic oligonucleotide
aggccacaaaagagcgatcgtccggccgtt

SEQ ID NO: 87933 - DNA, 30 bp, Artificial Sequence
  Synthetic oligonucleotide
taaatagtaaagatcgatccgcgatgcgtt

SEQ ID NO: 87934 - DNA, 30 bp, Artificial Sequence
  Synthetic oligonucleotide
cgggtacacaaaaaacgaaattcctgcgtt

SEQ ID NO: 87935 - DNA, 30 bp, Artificial Sequence
  Synthetic oligonucleotide
atattagacgagaagggccagtctatcgtt

SEQ ID NO: 87936 - DNA, 30 bp, Artificial Sequence
  Synthetic oligonucleotide
ccacgacgcgtaccatccgaatgcctcgtt

SEQ ID NO: 87937 - DNA, 30 bp, Artificial Sequence
  Synthetic oligonucleotide
actacataaaataaaagggatcctgtcgtt

SEQ ID NO: 87938 - DNA, 30 bp, Artificial Sequence
  Synthetic oligonucleotide
ggggcaaaaatatacgttcccggcttcgtt

SEQ ID NO: 87939 - DNA, 30 bp, Artificial Sequence
  Synthetic oligonucleotide
aggtcccacccttccgatacgtgaaaggtt

SEQ ID NO: 87940 - DNA, 30 bp, Artificial Sequence
  Synthetic oligonucleotide
cggagattacggttcatctcctggaaggtt

SEQ ID NO: 87941 - DNA, 30 bp, Artificial Sequence
  Synthetic oligonucleotide
accggatgggtaggtgctaacacccaggtt

SEQ ID NO: 87942 - DNA, 30 bp, Artificial Sequence
  Synthetic oligonucleotide
cggtgtaggcgtcagtgttcgacagaggtt

SEQ ID NO: 87943 - DNA, 30 bp, Artificial Sequence
  Synthetic oligonucleotide
taccaaggcatcgggtcaaatcagtaggtt

SEQ ID NO: 87944 - DNA, 30 bp, Artificial Sequence
  Synthetic oligonucleotide
ggccatggtcccaccatcacgaagacggtt

SEQ ID NO: 87945 - DNA, 30 bp, Artificial Sequence
  Synthetic oligonucleotide
aggggactggcatacagttccgcaccggtt

SEQ ID NO: 87946 - DNA, 30 bp, Artificial Sequence
  Synthetic oligonucleotide
cgggccgcagtatgatatggaatgccggtt

SEQ ID NO: 87947 - DNA, 30 bp, Artificial Sequence
  Synthetic oligonucleotide
tggttccatcaaccatatgagggcgcggtt

SEQ ID NO: 87948 - DNA, 30 bp, Artificial Sequence
  Synthetic oligonucleotide
cgaaaatgcacgcgtcaaaggtgcgcggtt

SEQ ID NO: 87949 - DNA, 30 bp, Artificial Sequence
  Synthetic oligonucleotide
acgacacttagcttgaaatatgaggcggtt

SEQ ID NO: 87950 - DNA, 30 bp, Artificial Sequence
  Synthetic oligonucleotide
ggacagtaacaaagactgttggctgcggtt

SEQ ID NO: 87951 - DNA, 30 bp, Artificial Sequence
  Synthetic oligonucleotide
taaggagatagtgtacttgcggaaagggtt

SEQ ID NO: 87952 - DNA, 30 bp, Artificial Sequence
  Synthetic oligonucleotide
aaggttcagcagggtttactttccagggtt

SEQ ID NO: 87953 - DNA, 30 bp, Artificial Sequence
  Synthetic oligonucleotide
cacagcccgacaactcaggagaagagggtt

SEQ ID NO: 87954 - DNA, 30 bp, Artificial Sequence
  Synthetic oligonucleotide
gaaggtgtgatagtccgtcttacgcgggtt

SEQ ID NO: 87955 - DNA, 30 bp, Artificial Sequence
  Synthetic oligonucleotide
gcaggattaagattagtcatgtctcgggtt

SEQ ID NO: 87956 - DNA, 30 bp, Artificial Sequence
  Synthetic oligonucleotide
cgctgactatgagtttgcagcgagtgggtt

SEQ ID NO: 87957 - DNA, 30 bp, Artificial Sequence
  Synthetic oligonucleotide
agtgcttcgatgtggaagttaggagtggtt

SEQ ID NO: 87958 - DNA, 30 bp, Artificial Sequence
  Synthetic oligonucleotide
gcctgagcagggtgcgcagtgttgttggtt

SEQ ID NO: 87959 - DNA, 30 bp, Artificial Sequence
  Synthetic oligonucleotide
cgactccgaggtcgtgatggatctttggtt

SEQ ID NO: 87960 - DNA, 30 bp, Artificial Sequence
  Synthetic oligonucleotide
agacagtccgagtaggcgcatttgaatgtt

SEQ ID NO: 87961 - DNA, 30 bp, Artificial Sequence
  Synthetic oligonucleotide
cacgagctggcaagcatcgaggtacatgtt

SEQ ID NO: 87962 - DNA, 30 bp, Artificial Sequence
  Synthetic oligonucleotide
cctcgaaaatacacctcataaatgcatgtt

SEQ ID NO: 87963 - DNA, 30 bp, Artificial Sequence
  Synthetic oligonucleotide
actaagggagggcgcaataacccggatgtt

SEQ ID NO: 87964 - DNA, 30 bp, Artificial Sequence
  Synthetic oligonucleotide
tacagaggaatcagcgtaggtctggatgtt

SEQ ID NO: 87965 - DNA, 30 bp, Artificial Sequence
  Synthetic oligonucleotide
taacaatggacgtaccatagatacgctgtt

SEQ ID NO: 87966 - DNA, 30 bp, Artificial Sequence
  Synthetic oligonucleotide
tcttgcgttagaacactaagtccggctgtt

SEQ ID NO: 87967 - DNA, 30 bp, Artificial Sequence
  Synthetic oligonucleotide
gtcgccatgctagaacttaactgcagtgtt

SEQ ID NO: 87968 - DNA, 30 bp, Artificial Sequence
  Synthetic oligonucleotide
acgccactgtgatacccgaggacacgtgtt

SEQ ID NO: 87969 - DNA, 30 bp, Artificial Sequence
  Synthetic oligonucleotide
ggaataagagaaagcctagtgaagggtgtt

SEQ ID NO: 87970 - DNA, 30 bp, Artificial Sequence
  Synthetic oligonucleotide
tcaccttaattgggagtcgaggaaattgtt

SEQ ID NO: 87971 - DNA, 30 bp, Artificial Sequence
  Synthetic oligonucleotide
atgtagtggaggaagtctggtccgcttgtt

SEQ ID NO: 87972 - DNA, 30 bp, Artificial Sequence
  Synthetic oligonucleotide
cgccagggtcgaactaagggggatgttgtt

SEQ ID NO: 87973 - DNA, 30 bp, Artificial Sequence
  Synthetic oligonucleotide
cgaggtgaaagggaataccgacttgttgtt

SEQ ID NO: 87974 - DNA, 30 bp, Artificial Sequence
  Synthetic oligonucleotide
acatcgactgggcaatgacctcgaaaattt

SEQ ID NO: 87975 - DNA, 30 bp, Artificial Sequence
  Synthetic oligonucleotide
ggataactcgaaacaaaaccagccaaattt

SEQ ID NO: 87976 - DNA, 30 bp, Artificial Sequence
  Synthetic oligonucleotide
gttcacgctgagggatgtcagcaaacattt

SEQ ID NO: 87977 - DNA, 30 bp, Artificial Sequence
  Synthetic oligonucleotide
aaaggcaacggtttcatcgcaataccattt

SEQ ID NO: 87978 - DNA, 30 bp, Artificial Sequence
  Synthetic oligonucleotide
agagcgaggagtcggaaccatggagcattt

SEQ ID NO: 87979 - DNA, 30 bp, Artificial Sequence
  Synthetic oligonucleotide
ggccggagggcagctgagtacttggcattt

SEQ ID NO: 87980 - DNA, 30 bp, Artificial Sequence
  Synthetic oligonucleotide
caagatcactaggaccatgaaagctcattt

SEQ ID NO: 87981 - DNA, 30 bp, Artificial Sequence
  Synthetic oligonucleotide
ccgggcactggaaggtagatcttctcattt

SEQ ID NO: 87982 - DNA, 30 bp, Artificial Sequence
  Synthetic oligonucleotide
ctgagggcatgggctgtgagatagagattt

SEQ ID NO: 87983 - DNA, 30 bp, Artificial Sequence
  Synthetic oligonucleotide
ccgcgagaacaaatactgagtcattgattt

SEQ ID NO: 87984 - DNA, 30 bp, Artificial Sequence
  Synthetic oligonucleotide
acacaggcgcatagaactgatcggatattt

SEQ ID NO: 87985 - DNA, 30 bp, Artificial Sequence
  Synthetic oligonucleotide
aggtacaggcaagagactcaaacactattt

SEQ ID NO: 87986 - DNA, 30 bp, Artificial Sequence
  Synthetic oligonucleotide
agaatgcgaatcgagcaggatcggctattt

SEQ ID NO: 87987 - DNA, 30 bp, Artificial Sequence
  Synthetic oligonucleotide
cgtggcggagaagagtgcacagggctattt

SEQ ID NO: 87988 - DNA, 30 bp, Artificial Sequence
  Synthetic oligonucleotide
ggacacccaggtctctcaagcatagtattt

SEQ ID NO: 87989 - DNA, 30 bp, Artificial Sequence
  Synthetic oligonucleotide
ggcgaatcgtcctcaggtaaaatattattt

SEQ ID NO: 87990 - DNA, 30 bp, Artificial Sequence
  Synthetic oligonucleotide
tgagcgctaagagtgatgggttacaacttt

SEQ ID NO: 87991 - DNA, 30 bp, Artificial Sequence
  Synthetic oligonucleotide
aacgtagacggacccacaggctggaacttt

SEQ ID NO: 87992 - DNA, 30 bp, Artificial Sequence
  Synthetic oligonucleotide
cgtcgggcgccgacatcgatccataacttt

SEQ ID NO: 87993 - DNA, 30 bp, Artificial Sequence
  Synthetic oligonucleotide
acgttgatctcgtaggcgcctaaacacttt

SEQ ID NO: 87994 - DNA, 30 bp, Artificial Sequence
  Synthetic oligonucleotide
atgagagggggtaaccgtagaaggaccttt

SEQ ID NO: 87995 - DNA, 30 bp, Artificial Sequence
  Synthetic oligonucleotide
acaacactggtcggtaggacttatgccttt

SEQ ID NO: 87996 - DNA, 30 bp, Artificial Sequence
  Synthetic oligonucleotide
agagaaagagtgctcgccgcccgatccttt

SEQ ID NO: 87997 - DNA, 30 bp, Artificial Sequence
  Synthetic oligonucleotide
cgttcacaaaaccaaagtggcgcgtccttt

SEQ ID NO: 87998 - DNA, 30 bp, Artificial Sequence
  Synthetic oligonucleotide
ccagacggacagccgtggagacttcgcttt

SEQ ID NO: 87999 - DNA, 30 bp, Artificial Sequence
  Synthetic oligonucleotide
cgaaggtagatgggcggcagaaagtgcttt

SEQ ID NO: 88000 - DNA, 30 bp, Artificial Sequence
  Synthetic oligonucleotide
atacgagtgcagggcgcatagtctatcttt

SEQ ID NO: 88001 - DNA, 30 bp, Artificial Sequence
  Synthetic oligonucleotide
tggccctacagagagtcgaagttcctcttt

SEQ ID NO: 88002 - DNA, 30 bp, Artificial Sequence
  Synthetic oligonucleotide
ggccgcaaggggaaggagagctcgttcttt

SEQ ID NO: 88003 - DNA, 30 bp, Artificial Sequence
  Synthetic oligonucleotide
tcatagagggaatctaggtatgcaaagttt

SEQ ID NO: 88004 - DNA, 30 bp, Artificial Sequence
  Synthetic oligonucleotide
gtcaaagcctgcggaatagaccgaaagttt

SEQ ID NO: 88005 - DNA, 30 bp, Artificial Sequence
  Synthetic oligonucleotide
aggccatcttcagaattctcaaaccagttt

SEQ ID NO: 88006 - DNA, 30 bp, Artificial Sequence
  Synthetic oligonucleotide
aggtaccctcagagtgcccacttttcgttt

SEQ ID NO: 88007 - DNA, 30 bp, Artificial Sequence
  Synthetic oligonucleotide
caatagacgttcatcgaagggcgacggttt

SEQ ID NO: 88008 - DNA, 30 bp, Artificial Sequence
  Synthetic oligonucleotide
acggccattcagcgcctgagaaaggggttt

SEQ ID NO: 88009 - DNA, 30 bp, Artificial Sequence
  Synthetic oligonucleotide
cacgattcagaagcaaaattcaaggggttt

SEQ ID NO: 88010 - DNA, 30 bp, Artificial Sequence
  Synthetic oligonucleotide
gtgttccagagaaggcctaaaccatggttt

SEQ ID NO: 88011 - DNA, 30 bp, Artificial Sequence
  Synthetic oligonucleotide
caaagataggcctcaatggtgtactggttt

SEQ ID NO: 88012 - DNA, 30 bp, Artificial Sequence
  Synthetic oligonucleotide
gaaggatgcggagatgagatccggatgttt

SEQ ID NO: 88013 - DNA, 30 bp, Artificial Sequence
  Synthetic oligonucleotide
tgcgcgaggggaaccaacaaagacgtgttt

SEQ ID NO: 88014 - DNA, 30 bp, Artificial Sequence
  Synthetic oligonucleotide
tgtcgggcacgagtacgacagaggttgttt

SEQ ID NO: 88015 - DNA, 30 bp, Artificial Sequence
  Synthetic oligonucleotide
gcacagggtcgtcatacactagcggatttt

SEQ ID NO: 88016 - DNA, 30 bp, Artificial Sequence
  Synthetic oligonucleotide
gaccgtaaggtaggcatccaaagtgatttt

SEQ ID NO: 88017 - DNA, 30 bp, Artificial Sequence
  Synthetic oligonucleotide
ctaggaacgtgaaggcagggaggtcctttt

SEQ ID NO: 88018 - DNA, 30 bp, Artificial Sequence
  Synthetic oligonucleotide
tgcgttaggtcggacaggcgacacagtttt

SEQ ID NO: 88019 - DNA, 30 bp, Artificial Sequence
  Synthetic oligonucleotide
agcgatctcggcgacgacgagggcagtttt

SEQ ID NO: 88020 - DNA, 30 bp, Artificial Sequence
  Synthetic oligonucleotide
cggctggacaatgtacttgatgaaggtttt

SEQ ID NO: 88021 - DNA, 30 bp, Artificial Sequence
  Synthetic oligonucleotide
tgggtaagagcaacattgggctaaggtttt

SEQ ID NO: 88022 - DNA, 30 bp, Artificial Sequence
  Synthetic oligonucleotide
gtctggaccgaaacgtgcgaaaagggtttt

SEQ ID NO: 88023 - DNA, 30 bp, Artificial Sequence
  Synthetic oligonucleotide
gccaggccagttcacttgtgcaccaaaaaa

SEQ ID NO: 88024 - DNA, 30 bp, Artificial Sequence
  Synthetic oligonucleotide
catcgacacgccgacataccctggaaaaaa

SEQ ID NO: 88025 - DNA, 30 bp, Artificial Sequence
  Synthetic oligonucleotide
ctagccagattcagatccagagaacaaaaa

SEQ ID NO: 88026 - DNA, 30 bp, Artificial Sequence
  Synthetic oligonucleotide
agtcccacgttgtatatcgtgagccaaaaa

SEQ ID NO: 88027 - DNA, 30 bp, Artificial Sequence
  Synthetic oligonucleotide
ggcctacgtaaagaaccaacactgcaaaaa

SEQ ID NO: 88028 - DNA, 30 bp, Artificial Sequence
  Synthetic oligonucleotide
ttagagctggctcggtcagtaatcgaaaaa

SEQ ID NO: 88029 - DNA, 30 bp, Artificial Sequence
  Synthetic oligonucleotide
gctgatcgtattgtggaacccggggaaaaa

SEQ ID NO: 88030 - DNA, 30 bp, Artificial Sequence
  Synthetic oligonucleotide
caaggataccttcagaagaatgctgaaaaa

SEQ ID NO: 88031 - DNA, 30 bp, Artificial Sequence
  Synthetic oligonucleotide
ggcgtatcaaggaatactgggagataaaaa

SEQ ID NO: 88032 - DNA, 30 bp, Artificial Sequence
  Synthetic oligonucleotide
gtcgtaacacatctttacaggcccacaaaa

SEQ ID NO: 88033 - DNA, 30 bp, Artificial Sequence
  Synthetic oligonucleotide
cgacaaggggagagtgatgcgatcacaaaa

SEQ ID NO: 88034 - DNA, 30 bp, Artificial Sequence
  Synthetic oligonucleotide
catattatccgatcaagtcaaaggacaaaa

SEQ ID NO: 88035 - DNA, 30 bp, Artificial Sequence
  Synthetic oligonucleotide
tgatcaaagagtatccagaaattgacaaaa

SEQ ID NO: 88036 - DNA, 30 bp, Artificial Sequence
  Synthetic oligonucleotide
aggccgcgagctgacaatgcttttacaaaa

SEQ ID NO: 88037 - DNA, 30 bp, Artificial Sequence
  Synthetic oligonucleotide
agatacttccattacggaatgacaccaaaa

SEQ ID NO: 88038 - DNA, 30 bp, Artificial Sequence
  Synthetic oligonucleotide
ggagctgcgtaggtgagatcaataccaaaa

SEQ ID NO: 88039 - DNA, 30 bp, Artificial Sequence
  Synthetic oligonucleotide
tcgagccgcggggcataattagccccaaaa

SEQ ID NO: 88040 - DNA, 30 bp, Artificial Sequence
  Synthetic oligonucleotide
caacagtaacaggcatgttcaggagcaaaa

SEQ ID NO: 88041 - DNA, 30 bp, Artificial Sequence
  Synthetic oligonucleotide
caatcacgtatcggtcatgtgagtgcaaaa

SEQ ID NO: 88042 - DNA, 30 bp, Artificial Sequence
  Synthetic oligonucleotide
ataggcactgtatacttggcccgctcaaaa

SEQ ID NO: 88043 - DNA, 30 bp, Artificial Sequence
  Synthetic oligonucleotide
gtatagagccagcgagataccgcttcaaaa

SEQ ID NO: 88044 - DNA, 30 bp, Artificial Sequence
  Synthetic oligonucleotide
ggcaggttatgcgtgggaatcgtaagaaaa

SEQ ID NO: 88045 - DNA, 30 bp, Artificial Sequence
  Synthetic oligonucleotide
aagacagaaaacagggcgaatcgcagaaaa

SEQ ID NO: 88046 - DNA, 30 bp, Artificial Sequence
  Synthetic oligonucleotide
gcagggaatcgagaggggatgatgagaaaa

SEQ ID NO: 88047 - DNA, 30 bp, Artificial Sequence
  Synthetic oligonucleotide
agggtatagatacgaagccgagctagaaaa

SEQ ID NO: 88048 - DNA, 30 bp, Artificial Sequence
  Synthetic oligonucleotide
aagaagggggggtttgcctcgctacgaaaa

SEQ ID NO: 88049 - DNA, 30 bp, Artificial Sequence
  Synthetic oligonucleotide
aggcggtctccttggaaagctggccgaaaa

SEQ ID NO: 88050 - DNA, 30 bp, Artificial Sequence
  Synthetic oligonucleotide
tatgagcttgtgaaaaagtttatccgaaaa

SEQ ID NO: 88051 - DNA, 30 bp, Artificial Sequence
  Synthetic oligonucleotide
ccgggctcgtacagcctacgggctcgaaaa

SEQ ID NO: 88052 - DNA, 30 bp, Artificial Sequence
  Synthetic oligonucleotide
ctaactacggccgtcccaggctctcgaaaa

SEQ ID NO: 88053 - DNA, 30 bp, Artificial Sequence
  Synthetic oligonucleotide
gtgtgcggccgctaaaggaaggcaggaaaa

SEQ ID NO: 88054 - DNA, 30 bp, Artificial Sequence
  Synthetic oligonucleotide
taaaccgaccagccgtggactactggaaaa

SEQ ID NO: 88055 - DNA, 30 bp, Artificial Sequence
  Synthetic oligonucleotide
agagatgatgccgagttggcaaaatgaaaa

SEQ ID NO: 88056 - DNA, 30 bp, Artificial Sequence
  Synthetic oligonucleotide
ctggtgttcacccccactgttatgtgaaaa

SEQ ID NO: 88057 - DNA, 30 bp, Artificial Sequence
  Synthetic oligonucleotide
agataaggtcggctcgtccacagaataaaa

SEQ ID NO: 88058 - DNA, 30 bp, Artificial Sequence
  Synthetic oligonucleotide
tatgaacaaattagtggagcacccataaaa

SEQ ID NO: 88059 - DNA, 30 bp, Artificial Sequence
  Synthetic oligonucleotide
ggatactacaggagttaaacaaggataaaa

SEQ ID NO: 88060 - DNA, 30 bp, Artificial Sequence
  Synthetic oligonucleotide
cgcgccgtagtgacagaactcgtgataaaa

SEQ ID NO: 88061 - DNA, 30 bp, Artificial Sequence
  Synthetic oligonucleotide
tcatgtagatgaggaaccgcgagcctaaaa

SEQ ID NO: 88062 - DNA, 30 bp, Artificial Sequence
  Synthetic oligonucleotide
taaatcgggcccaaagtatataagctaaaa

SEQ ID NO: 88063 - DNA, 30 bp, Artificial Sequence
  Synthetic oligonucleotide
accatatcatcgaggacataatctttaaaa

SEQ ID NO: 88064 - DNA, 30 bp, Artificial Sequence
  Synthetic oligonucleotide
aagcaagattcacgtcttccaggtttaaaa

SEQ ID NO: 88065 - DNA, 30 bp, Artificial Sequence
  Synthetic oligonucleotide
ctgaccgaggaatcatgatgttcgaacaaa

SEQ ID NO: 88066 - DNA, 30 bp, Artificial Sequence
  Synthetic oligonucleotide
cctaaatacctgatcgtaccatgacacaaa

SEQ ID NO: 88067 - DNA, 30 bp, Artificial Sequence
  Synthetic oligonucleotide
ggtactacaaatgtgtcaccaggccacaaa

SEQ ID NO: 88068 - DNA, 30 bp, Artificial Sequence
  Synthetic oligonucleotide
caacagatgagctaggtgacgtcgcacaaa

SEQ ID NO: 88069 - DNA, 30 bp, Artificial Sequence
  Synthetic oligonucleotide
cgattggaagcttatgctagccttcacaaa

SEQ ID NO: 88070 - DNA, 30 bp, Artificial Sequence
  Synthetic oligonucleotide
aactgactgatgttgggaacccgagacaaa

SEQ ID NO: 88071 - DNA, 30 bp, Artificial Sequence
  Synthetic oligonucleotide
tgttcatgggctcaagggatttgcgacaaa

SEQ ID NO: 88072 - DNA, 30 bp, Artificial Sequence
  Synthetic oligonucleotide
tccgcgtgtccgtacagcctcaaggacaaa

SEQ ID NO: 88073 - DNA, 30 bp, Artificial Sequence
  Synthetic oligonucleotide
acagattgagactggggggacgttgacaaa

SEQ ID NO: 88074 - DNA, 30 bp, Artificial Sequence
  Synthetic oligonucleotide
cagaaaacacatctttaagacatatacaaa

SEQ ID NO: 88075 - DNA, 30 bp, Artificial Sequence
  Synthetic oligonucleotide
acgactggtaggggaaagtaaggctacaaa

SEQ ID NO: 88076 - DNA, 30 bp, Artificial Sequence
  Synthetic oligonucleotide
ctgatgattagtgcggggtcgtggaccaaa

SEQ ID NO: 88077 - DNA, 30 bp, Artificial Sequence
  Synthetic oligonucleotide
acagattgcagtacccgcgtgactaccaaa

SEQ ID NO: 88078 - DNA, 30 bp, Artificial Sequence
  Synthetic oligonucleotide
gggtctcggtcaagatctactgggcccaaa

SEQ ID NO: 88079 - DNA, 30 bp, Artificial Sequence
  Synthetic oligonucleotide
attggagtacacaaacgacagtgagccaaa

SEQ ID NO: 88080 - DNA, 30 bp, Artificial Sequence
  Synthetic oligonucleotide
gcaaacctccaaagggctggtaccgccaaa

SEQ ID NO: 88081 - DNA, 30 bp, Artificial Sequence
  Synthetic oligonucleotide
atattcgtagcgggggctccctaggccaaa

SEQ ID NO: 88082 - DNA, 30 bp, Artificial Sequence
  Synthetic oligonucleotide
aaaaaggcaccaagcgcgctcgcgtccaaa

SEQ ID NO: 88083 - DNA, 30 bp, Artificial Sequence
  Synthetic oligonucleotide
agggttgactgccggcaactcacaagcaaa

SEQ ID NO: 88084 - DNA, 30 bp, Artificial Sequence
  Synthetic oligonucleotide
cgggtgcaaagccgaggagggtcaagcaaa

SEQ ID NO: 88085 - DNA, 30 bp, Artificial Sequence
  Synthetic oligonucleotide
catgtaacccgcccatgttcgataagcaaa

SEQ ID NO: 88086 - DNA, 30 bp, Artificial Sequence
  Synthetic oligonucleotide
gcaataatgtgctaggttcaaatcagcaaa

SEQ ID NO: 88087 - DNA, 30 bp, Artificial Sequence
  Synthetic oligonucleotide
agcatgtatgtttcgtccaatctgagcaaa

SEQ ID NO: 88088 - DNA, 30 bp, Artificial Sequence
  Synthetic oligonucleotide
tctataagatggaatgacgcctcacgcaaa

SEQ ID NO: 88089 - DNA, 30 bp, Artificial Sequence
  Synthetic oligonucleotide
taccgcgcgtctcagaacgagacaggcaaa

SEQ ID NO: 88090 - DNA, 30 bp, Artificial Sequence
  Synthetic oligonucleotide
tcccgcccgtaagaaagacctcgaggcaaa

SEQ ID NO: 88091 - DNA, 30 bp, Artificial Sequence
  Synthetic oligonucleotide
ctagcgtgacaacgagagtccagcggcaaa

SEQ ID NO: 88092 - DNA, 30 bp, Artificial Sequence
  Synthetic oligonucleotide
tggcgggagaagacaggtcctgtctgcaaa

SEQ ID NO: 88093 - DNA, 30 bp, Artificial Sequence
  Synthetic oligonucleotide
gttgtcggaataggcttccagtagtgcaaa

SEQ ID NO: 88094 - DNA, 30 bp, Artificial Sequence
  Synthetic oligonucleotide
tttgccagaactgtagaatggtacatcaaa

SEQ ID NO: 88095 - DNA, 30 bp, Artificial Sequence
  Synthetic oligonucleotide
ggccttcaataacagtgcagcgaactcaaa

SEQ ID NO: 88096 - DNA, 30 bp, Artificial Sequence
  Synthetic oligonucleotide
gcgggttggtggtcgtcggacacactcaaa

SEQ ID NO: 88097 - DNA, 30 bp, Artificial Sequence
  Synthetic oligonucleotide
tactgacggagtctctacgccaagctcaaa

SEQ ID NO: 88098 - DNA, 30 bp, Artificial Sequence
  Synthetic oligonucleotide
acccacggacaatctcaggcgtaagtcaaa

SEQ ID NO: 88099 - DNA, 30 bp, Artificial Sequence
  Synthetic oligonucleotide
gctaaagtggagtagatcgcatacgtcaaa

SEQ ID NO: 88100 - DNA, 30 bp, Artificial Sequence
  Synthetic oligonucleotide
acctcctcgctagagctgtcggctgtcaaa

SEQ ID NO: 88101 - DNA, 30 bp, Artificial Sequence
  Synthetic oligonucleotide
cattgaagtacaggaacgtgtgcattcaaa

SEQ ID NO: 88102 - DNA, 30 bp, Artificial Sequence
  Synthetic oligonucleotide
aactgtactaggctagaataggcgttcaaa

SEQ ID NO: 88103 - DNA, 30 bp, Artificial Sequence
  Synthetic oligonucleotide
tggggcagcgcgaggagaactaaaaagaaa

SEQ ID NO: 88104 - DNA, 30 bp, Artificial Sequence
  Synthetic oligonucleotide
ggcaagcacaaggggttaaaagaaaagaaa

SEQ ID NO: 88105 - DNA, 30 bp, Artificial Sequence
  Synthetic oligonucleotide
cgcgtcggaacatctggcagtggaaagaaa

SEQ ID NO: 88106 - DNA, 30 bp, Artificial Sequence
  Synthetic oligonucleotide
agatacacagtccgggcgttcacgaagaaa

SEQ ID NO: 88107 - DNA, 30 bp, Artificial Sequence
  Synthetic oligonucleotide
cgaaaagcactaagcgcctaacctaagaaa

SEQ ID NO: 88108 - DNA, 30 bp, Artificial Sequence
  Synthetic oligonucleotide
aactcaagtagggaccagggatgtaagaaa

SEQ ID NO: 88109 - DNA, 30 bp, Artificial Sequence
  Synthetic oligonucleotide
ttggttggcgccgtaggaacagttaagaaa

SEQ ID NO: 88110 - DNA, 31 bp, Artificial Sequence
  Synthetic oligonucleotide
agaagtcacgtctcagtccctctttaagaaa

SEQ ID NO: 88111 - DNA, 30 bp, Artificial Sequence
  Synthetic oligonucleotide
gctgggctctaccatggaacgccagagaaa

SEQ ID NO: 88112 - DNA, 30 bp, Artificial Sequence
  Synthetic oligonucleotide
acacctgtgcgtagaactccaaaggagaaa

SEQ ID NO: 88113 - DNA, 30 bp, Artificial Sequence
  Synthetic oligonucleotide
cgacaactcgcaacacaccatcaatagaaa

SEQ ID NO: 88114 - DNA, 30 bp, Artificial Sequence
  Synthetic oligonucleotide
atggacgtcgttgcgacaagcacatagaaa

SEQ ID NO: 88115 - DNA, 31 bp, Artificial Sequence
  Synthetic oligonucleotide
caagagcgggcaagccagacacggctagaaa

SEQ ID NO: 88116 - DNA, 30 bp, Artificial Sequence
  Synthetic oligonucleotide
tggtactaagagtatacttaacggtagaaa

SEQ ID NO: 88117 - DNA, 30 bp, Artificial Sequence
  Synthetic oligonucleotide
aattgcgggcgcccgagagagaaaacgaaa

SEQ ID NO: 88118 - DNA, 30 bp, Artificial Sequence
  Synthetic oligonucleotide
ggatcgatttgatgagaatggcgaacgaaa

SEQ ID NO: 88119 - DNA, 30 bp, Artificial Sequence
  Synthetic oligonucleotide
tacactgtgacgtgactacggggaacgaaa

SEQ ID NO: 88120 - DNA, 30 bp, Artificial Sequence
  Synthetic oligonucleotide
acatcccccatatatgaacagtgaacgaaa

SEQ ID NO: 88121 - DNA, 30 bp, Artificial Sequence
  Synthetic oligonucleotide
ttgtcgagggaactgagatatgtcacgaaa

SEQ ID NO: 88122 - DNA, 30 bp, Artificial Sequence
  Synthetic oligonucleotide
ctaggagtaagatgggaacggcatacgaaa

SEQ ID NO: 88123 - DNA, 30 bp, Artificial Sequence
  Synthetic oligonucleotide
ttgtaccgggggcgcgaataaggtacgaaa

SEQ ID NO: 88124 - DNA, 30 bp, Artificial Sequence
  Synthetic oligonucleotide
gtttcaaacacacttaagggcaacccgaaa

SEQ ID NO: 88125 - DNA, 30 bp, Artificial Sequence
  Synthetic oligonucleotide
tggagaggagcttacattggtagcccgaaa

SEQ ID NO: 88126 - DNA, 30 bp, Artificial Sequence
  Synthetic oligonucleotide
atgagtgagatcggttagagcgatccgaaa

SEQ ID NO: 88127 - DNA, 30 bp, Artificial Sequence
  Synthetic oligonucleotide
atctgtcaccatggggtaggaccggcgaaa

SEQ ID NO: 88128 - DNA, 30 bp, Artificial Sequence
  Synthetic oligonucleotide
agcgaggactcggcacgggatagatcgaaa

SEQ ID NO: 88129 - DNA, 30 bp, Artificial Sequence
  Synthetic oligonucleotide
taagcggtaactgtacaggtagattcgaaa

SEQ ID NO: 88130 - DNA, 30 bp, Artificial Sequence
  Synthetic oligonucleotide
taatggcgcctcacctagtgaccaaggaaa

SEQ ID NO: 88131 - DNA, 30 bp, Artificial Sequence
  Synthetic oligonucleotide
gaaagcccagggtcgggcgactagaggaaa

SEQ ID NO: 88132 - DNA, 30 bp, Artificial Sequence
  Synthetic oligonucleotide
tcaggtggacccgcccgcactagtaggaaa

SEQ ID NO: 88133 - DNA, 30 bp, Artificial Sequence
  Synthetic oligonucleotide
aactagactaccaaatgtttcgaacggaaa

SEQ ID NO: 88134 - DNA, 30 bp, Artificial Sequence
  Synthetic oligonucleotide
tggcccgaagtagtcttagaccagcggaaa

SEQ ID NO: 88135 - DNA, 30 bp, Artificial Sequence
  Synthetic oligonucleotide
gccgcaaaaagcggacttatcaggcggaaa

SEQ ID NO: 88136 - DNA, 30 bp, Artificial Sequence
  Synthetic oligonucleotide
gtcaataatgactcaaccaagctgcggaaa

SEQ ID NO: 88137 - DNA, 30 bp, Artificial Sequence
  Synthetic oligonucleotide
gtaagtgcgtacctcgggagaactcggaaa

SEQ ID NO: 88138 - DNA, 30 bp, Artificial Sequence
  Synthetic oligonucleotide
cctcgtagggtaatcggttattaggggaaa

SEQ ID NO: 88139 - DNA, 30 bp, Artificial Sequence
  Synthetic oligonucleotide
gatacgtcacctccattagttagggggaaa

SEQ ID NO: 88140 - DNA, 30 bp, Artificial Sequence
  Synthetic oligonucleotide
caggtgacatgctaaacgtgtgcatggaaa

SEQ ID NO: 88141 - DNA, 30 bp, Artificial Sequence
  Synthetic oligonucleotide
ctggggcccgtcttgcctagtaactggaaa

SEQ ID NO: 88142 - DNA, 30 bp, Artificial Sequence
  Synthetic oligonucleotide
gtacgaaaggaaagatgtggatattggaaa

SEQ ID NO: 88143 - DNA, 30 bp, Artificial Sequence
  Synthetic oligonucleotide
tttacggcaagtgtagtccaaacagtgaaa

SEQ ID NO: 88144 - DNA, 30 bp, Artificial Sequence
  Synthetic oligonucleotide
attgcgtgctcaggtaccgcaacgaataaa

SEQ ID NO: 88145 - DNA, 30 bp, Artificial Sequence
  Synthetic oligonucleotide
aagccgggggtcaaccctgagtggaataaa

SEQ ID NO: 88146 - DNA, 31 bp, Artificial Sequence
  Synthetic oligonucleotide
tggcgtctgcataagtaaatgacaccataaa

SEQ ID NO: 88147 - DNA, 30 bp, Artificial Sequence
  Synthetic oligonucleotide
agtggggggataggaggtgccaggcataaa

SEQ ID NO: 88148 - DNA, 30 bp, Artificial Sequence
  Synthetic oligonucleotide
taacttgtggacttgatctacctgcataaa

SEQ ID NO: 88149 - DNA, 30 bp, Artificial Sequence
  Synthetic oligonucleotide
gctaaagagctcgcgaacagctccgataaa

SEQ ID NO: 88150 - DNA, 30 bp, Artificial Sequence
  Synthetic oligonucleotide
cttgataaggacttagggagtggcgataaa

SEQ ID NO: 88151 - DNA, 30 bp, Artificial Sequence
  Synthetic oligonucleotide
ccacgtaagaagcggctcaggttggataaa

SEQ ID NO: 88152 - DNA, 30 bp, Artificial Sequence
  Synthetic oligonucleotide
ccgccaggtactcggaggtatagtgataaa

SEQ ID NO: 88153 - DNA, 30 bp, Artificial Sequence
  Synthetic oligonucleotide
atggaaggcgcgcacctggcaggatataaa

SEQ ID NO: 88154 - DNA, 30 bp, Artificial Sequence
  Synthetic oligonucleotide
agacctatcaatgacattgttttctataaa

SEQ ID NO: 88155 - DNA, 30 bp, Artificial Sequence
  Synthetic oligonucleotide
ctccaagcaaaggaatgtgtccggtataaa

SEQ ID NO: 88156 - DNA, 30 bp, Artificial Sequence
  Synthetic oligonucleotide
gtaatgctgagacacagtgacgtttataaa

SEQ ID NO: 88157 - DNA, 30 bp, Artificial Sequence
  Synthetic oligonucleotide
tcgacggagccgaatagcgcgtgaactaaa

SEQ ID NO: 88158 - DNA, 29 bp, Artificial Sequence
  Synthetic oligonucleotide
tccgagatacaggattggagactcctaaa

SEQ ID NO: 88159 - DNA, 30 bp, Artificial Sequence
  Synthetic oligonucleotide
agggcagaggatactaccgtgtccgctaaa

SEQ ID NO: 88160 - DNA, 30 bp, Artificial Sequence
  Synthetic oligonucleotide
cacttaagaatgataatatagtatgctaaa

SEQ ID NO: 88161 - DNA, 30 bp, Artificial Sequence
  Synthetic oligonucleotide
agcagatctgcaaacatgtgagaatctaaa

SEQ ID NO: 88162 - DNA, 30 bp, Artificial Sequence
  Synthetic oligonucleotide
aaaaaaacccaacacacggaacagtctaaa

SEQ ID NO: 88163 - DNA, 30 bp, Artificial Sequence
  Synthetic oligonucleotide
ccacaaggcgacctcgatcttccgtctaaa

SEQ ID NO: 88164 - DNA, 30 bp, Artificial Sequence
  Synthetic oligonucleotide
tcaaaaggatccagttacggtccaagtaaa

SEQ ID NO: 88165 - DNA, 30 bp, Artificial Sequence
  Synthetic oligonucleotide
tggcaaaaaatctacgggacaaggagtaaa

SEQ ID NO: 88166 - DNA, 30 bp, Artificial Sequence
  Synthetic oligonucleotide
agcatgggacattacatatgtatgagtaaa

SEQ ID NO: 88167 - DNA, 30 bp, Artificial Sequence
  Synthetic oligonucleotide
catcagaggaggcagaacgctcgtagtaaa

SEQ ID NO: 88168 - DNA, 30 bp, Artificial Sequence
  Synthetic oligonucleotide
ccaggactaactctacagtgtgatcgtaaa

SEQ ID NO: 88169 - DNA, 30 bp, Artificial Sequence
  Synthetic oligonucleotide
agttgcacccatataaacagctatcgtaaa

SEQ ID NO: 88170 - DNA, 30 bp, Artificial Sequence
  Synthetic oligonucleotide
ttagtggtgaatcaggtactacaaggtaaa

SEQ ID NO: 88171 - DNA, 30 bp, Artificial Sequence
  Synthetic oligonucleotide
tgatgaggacccacaacagtcatgggtaaa

SEQ ID NO: 88172 - DNA, 30 bp, Artificial Sequence
  Synthetic oligonucleotide
gctccacggcaaatctcggacccgtgtaaa

SEQ ID NO: 88173 - DNA, 30 bp, Artificial Sequence
  Synthetic oligonucleotide
tgacctacaagggcgctccaaatgtgtaaa

SEQ ID NO: 88174 - DNA, 30 bp, Artificial Sequence
  Synthetic oligonucleotide
cgtaaaggacaatgtttcctgaattgtaaa

SEQ ID NO: 88175 - DNA, 30 bp, Artificial Sequence
  Synthetic oligonucleotide
ggcaggagtcggggaccgtgttattgtaaa

SEQ ID NO: 88176 - DNA, 30 bp, Artificial Sequence
  Synthetic oligonucleotide
aggatgctctctgagtagagtacacttaaa

SEQ ID NO: 88177 - DNA, 30 bp, Artificial Sequence
  Synthetic oligonucleotide
acggggttctgcgaagtagaggttcttaaa

SEQ ID NO: 88178 - DNA, 30 bp, Artificial Sequence
  Synthetic oligonucleotide
accagcggggtcgcctctatgcaagttaaa

SEQ ID NO: 88179 - DNA, 30 bp, Artificial Sequence
  Synthetic oligonucleotide
acaggagccctagtcgagattgacgttaaa

SEQ ID NO: 88180 - DNA, 30 bp, Artificial Sequence
  Synthetic oligonucleotide
gtgcggcagtgaaagggtggttagtttaaa

SEQ ID NO: 88181 - DNA, 30 bp, Artificial Sequence
  Synthetic oligonucleotide
ggaggaggaagatcaatggtcgtgtttaaa

SEQ ID NO: 88182 - DNA, 30 bp, Artificial Sequence
  Synthetic oligonucleotide
gtatgcgtaaatttgatgtgggcgaaacaa

SEQ ID NO: 88183 - DNA, 30 bp, Artificial Sequence
  Synthetic oligonucleotide
cacgggagtttagccggtgctcctcaacaa

SEQ ID NO: 88184 - DNA, 30 bp, Artificial Sequence
  Synthetic oligonucleotide
ttcaggagacccgagacagcgacagaacaa

SEQ ID NO: 88185 - DNA, 30 bp, Artificial Sequence
  Synthetic oligonucleotide
cattaacccacacatatgtctatggaacaa

SEQ ID NO: 88186 - DNA, 30 bp, Artificial Sequence
  Synthetic oligonucleotide
ttgtatgtcgggtgagtacagtctgaacaa

SEQ ID NO: 88187 - DNA, 30 bp, Artificial Sequence
  Synthetic oligonucleotide
ctacacctcagtgataaggggctgtaacaa

SEQ ID NO: 88188 - DNA, 30 bp, Artificial Sequence
  Synthetic oligonucleotide
tgtacgttgtacccaccagaatgaacacaa

SEQ ID NO: 88189 - DNA, 30 bp, Artificial Sequence
  Synthetic oligonucleotide
caagggttagcgggtcggtaatagacacaa

SEQ ID NO: 88190 - DNA, 30 bp, Artificial Sequence
  Synthetic oligonucleotide
gggtacccggctccatgtcatgcgacacaa

SEQ ID NO: 88191 - DNA, 29 bp, Artificial Sequence
  Synthetic oligonucleotide
acactacagatccgggctaatctacacaa

SEQ ID NO: 88192 - DNA, 30 bp, Artificial Sequence
  Synthetic oligonucleotide
ttatcagacacgtaacgggaagtcccacaa

SEQ ID NO: 88193 - DNA, 30 bp, Artificial Sequence
  Synthetic oligonucleotide
cgaccgattttcagtctaaaactgccacaa

SEQ ID NO: 88194 - DNA, 30 bp, Artificial Sequence
  Synthetic oligonucleotide
catattggtaagcaagtaatccacgcacaa

SEQ ID NO: 88195 - DNA, 30 bp, Artificial Sequence
  Synthetic oligonucleotide
caactcgcgtcgaatggcacacgcgcacaa

SEQ ID NO: 88196 - DNA, 30 bp, Artificial Sequence
  Synthetic oligonucleotide
aagaggaagtgaagtgaaggcatcgcacaa

SEQ ID NO: 88197 - DNA, 30 bp, Artificial Sequence
  Synthetic oligonucleotide
gtacaaatccgaatcgagataactgcacaa

SEQ ID NO: 88198 - DNA, 30 bp, Artificial Sequence
  Synthetic oligonucleotide
taccgttggcaattaaggatgtctgcacaa

SEQ ID NO: 88199 - DNA, 30 bp, Artificial Sequence
  Synthetic oligonucleotide
ggtcggcgagtgccatcagaggtatcacaa

SEQ ID NO: 88200 - DNA, 30 bp, Artificial Sequence
  Synthetic oligonucleotide
gtagatatgcccaggaatacgcgctcacaa

SEQ ID NO: 88201 - DNA, 30 bp, Artificial Sequence
  Synthetic oligonucleotide
gatagatccgagatcgagagtcattcacaa

SEQ ID NO: 88202 - DNA, 30 bp, Artificial Sequence
  Synthetic oligonucleotide
tgactgaacgtttgtttaaagaaaagacaa

SEQ ID NO: 88203 - DNA, 30 bp, Artificial Sequence
  Synthetic oligonucleotide
ttacacacatggtgaccaggtcaaagacaa

SEQ ID NO: 88204 - DNA, 30 bp, Artificial Sequence
  Synthetic oligonucleotide
gactccccatgagaggaaaacgggagacaa

SEQ ID NO: 88205 - DNA, 30 bp, Artificial Sequence
  Synthetic oligonucleotide
agctgagaaagagcggaaacattccgacaa

SEQ ID NO: 88206 - DNA, 30 bp, Artificial Sequence
  Synthetic oligonucleotide
ccccgacataggaatatgctacggcgacaa

SEQ ID NO: 88207 - DNA, 30 bp, Artificial Sequence
  Synthetic oligonucleotide
ccgccaaatatccgagagatgtggcgacaa

SEQ ID NO: 88208 - DNA, 30 bp, Artificial Sequence
  Synthetic oligonucleotide
gctgcgaaacggtcaggtggttatcgacaa

SEQ ID NO: 88209 - DNA, 30 bp, Artificial Sequence
  Synthetic oligonucleotide
tccaccagtataaacggtatgattcgacaa

SEQ ID NO: 88210 - DNA, 30 bp, Artificial Sequence
  Synthetic oligonucleotide
acccagtactgacggctgacggagggacaa

SEQ ID NO: 88211 - DNA, 30 bp, Artificial Sequence
  Synthetic oligonucleotide
acgtcgaacccagggcgttcagcgggacaa

SEQ ID NO: 88212 - DNA, 31 bp, Artificial Sequence
  Synthetic oligonucleotide
aggtgctctaactctccacaaaatgggacaa

SEQ ID NO: 88213 - DNA, 30 bp, Artificial Sequence
  Synthetic oligonucleotide
acccacaatctcaagcccaaaatgggacaa

SEQ ID NO: 88214 - DNA, 30 bp, Artificial Sequence
  Synthetic oligonucleotide
ccgcatagggctccatgcaagaaatgacaa

SEQ ID NO: 88215 - DNA, 30 bp, Artificial Sequence
  Synthetic oligonucleotide
cacatgcgttgctcgcaccaaccgtgacaa

SEQ ID NO: 88216 - DNA, 30 bp, Artificial Sequence
  Synthetic oligonucleotide
ggtagcttgcgggcacgtcgggattgacaa

SEQ ID NO: 88217 - DNA, 30 bp, Artificial Sequence
  Synthetic oligonucleotide
cccagacactagtggacgaatccaatacaa

SEQ ID NO: 88218 - DNA, 30 bp, Artificial Sequence
  Synthetic oligonucleotide
ggatgacgtgaagtcgcatcaggaatacaa

SEQ ID NO: 88219 - DNA, 30 bp, Artificial Sequence
  Synthetic oligonucleotide
gaactgaacaaaccgtgtgcgtgaatacaa

SEQ ID NO: 88220 - DNA, 30 bp, Artificial Sequence
  Synthetic oligonucleotide
ccgtatgttatcaggagactttccatacaa

SEQ ID NO: 88221 - DNA, 30 bp, Artificial Sequence
  Synthetic oligonucleotide
tgtcaggtcagacccaacttcagcatacaa

SEQ ID NO: 88222 - DNA, 30 bp, Artificial Sequence
  Synthetic oligonucleotide
caactggtgatctgcaaaaagctcatacaa

SEQ ID NO: 88223 - DNA, 30 bp, Artificial Sequence
  Synthetic oligonucleotide
ggcccaaactctgtgtatacttagatacaa

SEQ ID NO: 88224 - DNA, 30 bp, Artificial Sequence
  Synthetic oligonucleotide
cagggtacatgcgcctggttggttatacaa

SEQ ID NO: 88225 - DNA, 30 bp, Artificial Sequence
  Synthetic oligonucleotide
agtgtacttagctgactatggggcctacaa

SEQ ID NO: 88226 - DNA, 30 bp, Artificial Sequence
  Synthetic oligonucleotide
gccagtaagtactacccgtccatcctacaa

SEQ ID NO: 88227 - DNA, 30 bp, Artificial Sequence
  Synthetic oligonucleotide
atgcgcacacgccttatataaagagtacaa

SEQ ID NO: 88228 - DNA, 30 bp, Artificial Sequence
  Synthetic oligonucleotide
tggggtgcgtccagtcaacgggatgtacaa

SEQ ID NO: 88229 - DNA, 30 bp, Artificial Sequence
  Synthetic oligonucleotide
gcccaaaaacgccataaataatgtgtacaa

SEQ ID NO: 88230 - DNA, 30 bp, Artificial Sequence
  Synthetic oligonucleotide
atgaatcgatgtcgtacgaacatcaaccaa

SEQ ID NO: 88231 - DNA, 30 bp, Artificial Sequence
  Synthetic oligonucleotide
agattagggtagctctagcacggtcaccaa

SEQ ID NO: 88232 - DNA, 30 bp, Artificial Sequence
  Synthetic oligonucleotide
tgacacagacttaccggatatcttacccaa

SEQ ID NO: 88233 - DNA, 30 bp, Artificial Sequence
  Synthetic oligonucleotide
gcggtgagagtgacattcgggtacccccaa

SEQ ID NO: 88234 - DNA, 30 bp, Artificial Sequence
  Synthetic oligonucleotide
cgtcagtaattcattcagggagacgcccaa

SEQ ID NO: 88235 - DNA, 30 bp, Artificial Sequence
  Synthetic oligonucleotide
ggctcacaaccccgatggcgtgtgtcccaa

SEQ ID NO: 88236 - DNA, 30 bp, Artificial Sequence
  Synthetic oligonucleotide
catcggggcgtactggaaggatattcccaa

SEQ ID NO: 88237 - DNA, 30 bp, Artificial Sequence
  Synthetic oligonucleotide
tactaagaaacggatgaagtgcaaagccaa

SEQ ID NO: 88238 - DNA, 30 bp, Artificial Sequence
  Synthetic oligonucleotide
gaacagacagcactgaccctcacacgccaa

SEQ ID NO: 88239 - DNA, 30 bp, Artificial Sequence
  Synthetic oligonucleotide
acaccttattcggtggagggcttcggccaa

SEQ ID NO: 88240 - DNA, 30 bp, Artificial Sequence
  Synthetic oligonucleotide
gtcagaaatgagcgggggtaaggtggccaa

SEQ ID NO: 88241 - DNA, 30 bp, Artificial Sequence
  Synthetic oligonucleotide
gtgtgcacaccgtaaacgctcacgtgccaa

SEQ ID NO: 88242 - DNA, 30 bp, Artificial Sequence
  Synthetic oligonucleotide
ccatctaggtgactatagcgactgtgccaa

SEQ ID NO: 88243 - DNA, 30 bp, Artificial Sequence
  Synthetic oligonucleotide
ttggacatcgaatttttaaactcaatccaa

SEQ ID NO: 88244 - DNA, 30 bp, Artificial Sequence
  Synthetic oligonucleotide
ttcatacaggaccacgccgagggaatccaa

SEQ ID NO: 88245 - DNA, 30 bp, Artificial Sequence
  Synthetic oligonucleotide
gcgttacggactgaagacctttatatccaa

SEQ ID NO: 88246 - DNA, 30 bp, Artificial Sequence
  Synthetic oligonucleotide
atctagcaacatccataggattggctccaa

SEQ ID NO: 88247 - DNA, 30 bp, Artificial Sequence
  Synthetic oligonucleotide
agtagttcctgaggaaagtagcgagtccaa

SEQ ID NO: 88248 - DNA, 30 bp, Artificial Sequence
  Synthetic oligonucleotide
aagcttacgtgaatagcgtacacggtccaa

SEQ ID NO: 88249 - DNA, 30 bp, Artificial Sequence
  Synthetic oligonucleotide
acgccccttgctaaacatagcccgttccaa

SEQ ID NO: 88250 - DNA, 30 bp, Artificial Sequence
  Synthetic oligonucleotide
ctgacgtacattggaaaatagcaaaagcaa

SEQ ID NO: 88251 - DNA, 30 bp, Artificial Sequence
  Synthetic oligonucleotide
aggatacattaggatcatatactaaagcaa

SEQ ID NO: 88252 - DNA, 30 bp, Artificial Sequence
  Synthetic oligonucleotide
ggtagctttttaggggagggtgacaagcaa

SEQ ID NO: 88253 - DNA, 30 bp, Artificial Sequence
  Synthetic oligonucleotide
accctcgaaatgacataaaaaaaacagcaa

SEQ ID NO: 88254 - DNA, 30 bp, Artificial Sequence
  Synthetic oligonucleotide
accacagcgagaggcgatgtcgtagagcaa

SEQ ID NO: 88255 - DNA, 30 bp, Artificial Sequence
  Synthetic oligonucleotide
gagcactgcctctgaggggcggtagagcaa

SEQ ID NO: 88256 - DNA, 30 bp, Artificial Sequence
  Synthetic oligonucleotide
tgaagcgcaggggacgggcattatgagcaa

SEQ ID NO: 88257 - DNA, 30 bp, Artificial Sequence
  Synthetic oligonucleotide
cggacattaaggctaccctcaatatagcaa

SEQ ID NO: 88258 - DNA, 30 bp, Artificial Sequence
  Synthetic oligonucleotide
catgttcaggggtggtcccggacaacgcaa

SEQ ID NO: 88259 - DNA, 30 bp, Artificial Sequence
  Synthetic oligonucleotide
ctgagtcggaataatgaatcaccgacgcaa

SEQ ID NO: 88260 - DNA, 30 bp, Artificial Sequence
  Synthetic oligonucleotide
acgtcatacattaggaacaactggacgcaa

SEQ ID NO: 88261 - DNA, 30 bp, Artificial Sequence
  Synthetic oligonucleotide
acgagtaaggggtcggggctagttacgcaa

SEQ ID NO: 88262 - DNA, 30 bp, Artificial Sequence
  Synthetic oligonucleotide
gtacggtgctcccctgagtcccaaccgcaa

SEQ ID NO: 88263 - DNA, 30 bp, Artificial Sequence
  Synthetic oligonucleotide
atgcaaggacgaatccagcaattgccgcaa

SEQ ID NO: 88264 - DNA, 30 bp, Artificial Sequence
  Synthetic oligonucleotide
cgagacacgtagtcgggctgaggagcgcaa

SEQ ID NO: 88265 - DNA, 30 bp, Artificial Sequence
  Synthetic oligonucleotide
ggtgcttggcgcggaaaactctcatcgcaa

SEQ ID NO: 88266 - DNA, 30 bp, Artificial Sequence
  Synthetic oligonucleotide
ggtaaaagaccggtatgtgcgaagaggcaa

SEQ ID NO: 88267 - DNA, 30 bp, Artificial Sequence
  Synthetic oligonucleotide
ccctaacaacatcaatatttggggaggcaa

SEQ ID NO: 88268 - DNA, 30 bp, Artificial Sequence
  Synthetic oligonucleotide
cgaacagtcggttaagatgtttggaggcaa

SEQ ID NO: 88269 - DNA, 30 bp, Artificial Sequence
  Synthetic oligonucleotide
caaggttaccaaactctgttaattaggcaa

SEQ ID NO: 88270 - DNA, 30 bp, Artificial Sequence
  Synthetic oligonucleotide
taaccttgataacggataagaagtcggcaa

SEQ ID NO: 88271 - DNA, 30 bp, Artificial Sequence
  Synthetic oligonucleotide
aagccgatgaatgggatgcttatagggcaa

SEQ ID NO: 88272 - DNA, 30 bp, Artificial Sequence
  Synthetic oligonucleotide
ataggaacctggaccttatcaccatggcaa

SEQ ID NO: 88273 - DNA, 30 bp, Artificial Sequence
  Synthetic oligonucleotide
caagctatccactcatccaaaacctggcaa

SEQ ID NO: 88274 - DNA, 30 bp, Artificial Sequence
  Synthetic oligonucleotide
gtcaacgtctaatcggataggtgaatgcaa

SEQ ID NO: 88275 - DNA, 30 bp, Artificial Sequence
  Synthetic oligonucleotide
acagacttagagcctcgctgcctaatgcaa

SEQ ID NO: 88276 - DNA, 30 bp, Artificial Sequence
  Synthetic oligonucleotide
gtgcggccaaagggcgatgaggtgatgcaa

SEQ ID NO: 88277 - DNA, 30 bp, Artificial Sequence
  Synthetic oligonucleotide
tttacgtgctacctatacgaatctctgcaa

SEQ ID NO: 88278 - DNA, 30 bp, Artificial Sequence
  Synthetic oligonucleotide
tgaacctaaaagatagcctcacaagtgcaa

SEQ ID NO: 88279 - DNA, 30 bp, Artificial Sequence
  Synthetic oligonucleotide
ctgagcgccggtctgactgctcgagtgcaa

SEQ ID NO: 88280 - DNA, 30 bp, Artificial Sequence
  Synthetic oligonucleotide
ccgaagcaacaggcttatttaatggtgcaa

SEQ ID NO: 88281 - DNA, 30 bp, Artificial Sequence
  Synthetic oligonucleotide
gtaagctacgtagggactaactgtttgcaa

SEQ ID NO: 88282 - DNA, 30 bp, Artificial Sequence
  Synthetic oligonucleotide
tagtccaaaggtgtagggggcgtaaatcaa

SEQ ID NO: 88283 - DNA, 30 bp, Artificial Sequence
  Synthetic oligonucleotide
gatggcacaactaatcattttccgaatcaa

SEQ ID NO: 88284 - DNA, 30 bp, Artificial Sequence
  Synthetic oligonucleotide
taaggcttatcaggaagtggaaggaatcaa

SEQ ID NO: 88285 - DNA, 30 bp, Artificial Sequence
  Synthetic oligonucleotide
aacggtcaaaggcactcgtggcgagatcaa

SEQ ID NO: 88286 - DNA, 30 bp, Artificial Sequence
  Synthetic oligonucleotide
cgagttggtgctaaggggcacaactatcaa

SEQ ID NO: 88287 - DNA, 30 bp, Artificial Sequence
  Synthetic oligonucleotide
catgaggatgatgcgtggtggagctatcaa

SEQ ID NO: 88288 - DNA, 30 bp, Artificial Sequence
  Synthetic oligonucleotide
acagtcgatggcggattggttggctatcaa

SEQ ID NO: 88289 - DNA, 30 bp, Artificial Sequence
  Synthetic oligonucleotide
catcagagtttgcattggtggggttatcaa

SEQ ID NO: 88290 - DNA, 30 bp, Artificial Sequence
  Synthetic oligonucleotide
gcataagaatcatcctagagcctagctcaa

SEQ ID NO: 88291 - DNA, 30 bp, Artificial Sequence
  Synthetic oligonucleotide
ccaggcgaaagtttactctggccctctcaa

SEQ ID NO: 88292 - DNA, 30 bp, Artificial Sequence
  Synthetic oligonucleotide
tgaagccatgcgatccttaagtcgtctcaa

SEQ ID NO: 88293 - DNA, 30 bp, Artificial Sequence
  Synthetic oligonucleotide
acaacagctgtgtcacatcggtggtctcaa

SEQ ID NO: 88294 - DNA, 30 bp, Artificial Sequence
  Synthetic oligonucleotide
tacgtggcatgcacctatcataaaagtcaa

SEQ ID NO: 88295 - DNA, 30 bp, Artificial Sequence
  Synthetic oligonucleotide
aatggtcactgtccaggtaaagctagtcaa

SEQ ID NO: 88296 - DNA, 30 bp, Artificial Sequence
  Synthetic oligonucleotide
ccacacaggttaagcacttgtatacgtcaa

SEQ ID NO: 88297 - DNA, 30 bp, Artificial Sequence
  Synthetic oligonucleotide
gatcatctatacctgcccagaccccgtcaa

SEQ ID NO: 88298 - DNA, 30 bp, Artificial Sequence
  Synthetic oligonucleotide
tactgagtatacttgccggggaagggtcaa

SEQ ID NO: 88299 - DNA, 30 bp, Artificial Sequence
  Synthetic oligonucleotide
agtgaaccgtagccgtacggggaatgtcaa

SEQ ID NO: 88300 - DNA, 30 bp, Artificial Sequence
  Synthetic oligonucleotide
gcgaagttcagtcagggtcgagcatgtcaa

SEQ ID NO: 88301 - DNA, 30 bp, Artificial Sequence
  Synthetic oligonucleotide
agaggcacactagtgccccagacaattcaa

SEQ ID NO: 88302 - DNA, 30 bp, Artificial Sequence
  Synthetic oligonucleotide
aggagcatccagcgatcatgatacattcaa

SEQ ID NO: 88303 - DNA, 30 bp, Artificial Sequence
  Synthetic oligonucleotide
cggccgtcgcaaagactcttttacattcaa

SEQ ID NO: 88304 - DNA, 30 bp, Artificial Sequence
  Synthetic oligonucleotide
agcatataacgtaccaatcctatgattcaa

SEQ ID NO: 88305 - DNA, 30 bp, Artificial Sequence
  Synthetic oligonucleotide
gaagtggagctgcgacgagttactattcaa

SEQ ID NO: 88306 - DNA, 30 bp, Artificial Sequence
  Synthetic oligonucleotide
tagggactaaaaggcgcccaatgagttcaa

SEQ ID NO: 88307 - DNA, 30 bp, Artificial Sequence
  Synthetic oligonucleotide
cgaagacacggaccgcggacgaaggttcaa

SEQ ID NO: 88308 - DNA, 30 bp, Artificial Sequence
  Synthetic oligonucleotide
acgaacaagaatgatatccatgtggttcaa

SEQ ID NO: 88309 - DNA, 30 bp, Artificial Sequence
  Synthetic oligonucleotide
aagcaacgagaacacacagatagatttcaa

SEQ ID NO: 88310 - DNA, 30 bp, Artificial Sequence
  Synthetic oligonucleotide
cgagggacttgctgttacattgtttttcaa

SEQ ID NO: 88311 - DNA, 30 bp, Artificial Sequence
  Synthetic oligonucleotide
tacacaggagtagaccagccgctaaaagaa

SEQ ID NO: 88312 - DNA, 30 bp, Artificial Sequence
  Synthetic oligonucleotide
tagggttagtataagggccagcataaagaa

SEQ ID NO: 88313 - DNA, 30 bp, Artificial Sequence
  Synthetic oligonucleotide
aacgactgtcattgaaaacatggtaaagaa

SEQ ID NO: 88314 - DNA, 30 bp, Artificial Sequence
  Synthetic oligonucleotide
atagaatgacaggaccaagagagccaagaa

SEQ ID NO: 88315 - DNA, 30 bp, Artificial Sequence
  Synthetic oligonucleotide
gtagatctgtgttggagatttggtcaagaa

SEQ ID NO: 88316 - DNA, 30 bp, Artificial Sequence
  Synthetic oligonucleotide
gttagtatgatcggaagtagtagcgaagaa

SEQ ID NO: 88317 - DNA, 30 bp, Artificial Sequence
  Synthetic oligonucleotide
aataggggggatagcacggagtgtgaagaa

SEQ ID NO: 88318 - DNA, 30 bp, Artificial Sequence
  Synthetic oligonucleotide
atttcggacagacgaggaaccaaataagaa

SEQ ID NO: 88319 - DNA, 30 bp, Artificial Sequence
  Synthetic oligonucleotide
atgctatcgagtggtggaaggggctaagaa

SEQ ID NO: 88320 - DNA, 30 bp, Artificial Sequence
  Synthetic oligonucleotide
aaagggcaagtggagaagcgatgttaagaa

SEQ ID NO: 88321 - DNA, 30 bp, Artificial Sequence
  Synthetic oligonucleotide
gtcggtgggccgcgttcgtaggtttaagaa

SEQ ID NO: 88322 - DNA, 30 bp, Artificial Sequence
  Synthetic oligonucleotide
attcgccatatagagaatttgtcaacagaa

SEQ ID NO: 88323 - DNA, 30 bp, Artificial Sequence
  Synthetic oligonucleotide
accaaaatgatgattgggccagcgacagaa

SEQ ID NO: 88324 - DNA, 30 bp, Artificial Sequence
  Synthetic oligonucleotide
ggacatcggatcttcaatcgaaggacagaa

SEQ ID NO: 88325 - DNA, 30 bp, Artificial Sequence
  Synthetic oligonucleotide
aaggaatgcatgtactagtgggggacagaa

SEQ ID NO: 88326 - DNA, 30 bp, Artificial Sequence
  Synthetic oligonucleotide
tgtctgtgcatgaaacgacatatgccagaa

SEQ ID NO: 88327 - DNA, 30 bp, Artificial Sequence
  Synthetic oligonucleotide
accacccaatggctaagggcgcttccagaa

SEQ ID NO: 88328 - DNA, 30 bp, Artificial Sequence
  Synthetic oligonucleotide
acatcgaagtattgcaggcatgttccagaa

SEQ ID NO: 88329 - DNA, 30 bp, Artificial Sequence
  Synthetic oligonucleotide
caggagtggagcggaccacgcaaagcagaa

SEQ ID NO: 88330 - DNA, 30 bp, Artificial Sequence
  Synthetic oligonucleotide
ggaggagtcatagacaaacacgtagcagaa

SEQ ID NO: 88331 - DNA, 30 bp, Artificial Sequence
  Synthetic oligonucleotide
cgtaattcaaaggaatcatgctacgcagaa

SEQ ID NO: 88332 - DNA, 30 bp, Artificial Sequence
  Synthetic oligonucleotide
acgctggagagaggtatcgccagcgcagaa

SEQ ID NO: 88333 - DNA, 30 bp, Artificial Sequence
  Synthetic oligonucleotide
taaggtcggggcagggactgtcaatcagaa

SEQ ID NO: 88334 - DNA, 30 bp, Artificial Sequence
  Synthetic oligonucleotide
tagataagtgcgcaagtcatacagtcagaa

SEQ ID NO: 88335 - DNA, 30 bp, Artificial Sequence
  Synthetic oligonucleotide
gacgacagatcgaggctagtcgcttcagaa

SEQ ID NO: 88336 - DNA, 30 bp, Artificial Sequence
  Synthetic oligonucleotide
tcatagcgggggtaccggttggaaagagaa

SEQ ID NO: 88337 - DNA, 30 bp, Artificial Sequence
  Synthetic oligonucleotide
ttaaccaaagacccttctggcataagagaa

SEQ ID NO: 88338 - DNA, 30 bp, Artificial Sequence
  Synthetic oligonucleotide
accgcccaggaggaacgtttgctcagagaa

SEQ ID NO: 88339 - DNA, 30 bp, Artificial Sequence
  Synthetic oligonucleotide
gtatgcctgcagtactacattaagagagaa

SEQ ID NO: 88340 - DNA, 30 bp, Artificial Sequence
  Synthetic oligonucleotide
aggaaccaaatgaccgctagtacgagagaa

SEQ ID NO: 88341 - DNA, 30 bp, Artificial Sequence
  Synthetic oligonucleotide
ctgctcaaaagccttccgcactaccgagaa

SEQ ID NO: 88342 - DNA, 30 bp, Artificial Sequence
  Synthetic oligonucleotide
ggcacttcggtctgtgtgagataaggagaa

SEQ ID NO: 88343 - DNA, 30 bp, Artificial Sequence
  Synthetic oligonucleotide
ctcaggcagtaacccgttatcagtggagaa

SEQ ID NO: 88344 - DNA, 30 bp, Artificial Sequence
  Synthetic oligonucleotide
accctgagtttactcgaaagactatgagaa

SEQ ID NO: 88345 - DNA, 30 bp, Artificial Sequence
  Synthetic oligonucleotide
tgtggagcgtcgcatgagcttcactgagaa

SEQ ID NO: 88346 - DNA, 30 bp, Artificial Sequence
  Synthetic oligonucleotide
cgaacctaactacatgatgggctctgagaa

SEQ ID NO: 88347 - DNA, 30 bp, Artificial Sequence
  Synthetic oligonucleotide
agtctcagaccatacttcatccagtgagaa

SEQ ID NO: 88348 - DNA, 30 bp, Artificial Sequence
  Synthetic oligonucleotide
cctcggccagaaggttcagcacacatagaa

SEQ ID NO: 88349 - DNA, 30 bp, Artificial Sequence
  Synthetic oligonucleotide
caagcaggtgctggcgcacatggcatagaa

SEQ ID NO: 88350 - DNA, 30 bp, Artificial Sequence
  Synthetic oligonucleotide
ccgaagagtgtgaactcgacggggatagaa

SEQ ID NO: 88351 - DNA, 30 bp, Artificial Sequence
  Synthetic oligonucleotide
ataggtaagcgttttaaaggggggatagaa

SEQ ID NO: 88352 - DNA, 30 bp, Artificial Sequence
  Synthetic oligonucleotide
agtatctaacggattccggcagtcctagaa

SEQ ID NO: 88353 - DNA, 30 bp, Artificial Sequence
  Synthetic oligonucleotide
ggaaccatattggatacttggccagtagaa

SEQ ID NO: 88354 - DNA, 30 bp, Artificial Sequence
  Synthetic oligonucleotide
ttgtcatcacgggctggcatcggagtagaa

SEQ ID NO: 88355 - DNA, 30 bp, Artificial Sequence
  Synthetic oligonucleotide
gatcccgtctggattgtaaattatgtagaa

SEQ ID NO: 88356 - DNA, 31 bp, Artificial Sequence
  Synthetic oligonucleotide
ctgccaaataaatggtaagaaccgtgtagaa

SEQ ID NO: 88357 - DNA, 30 bp, Artificial Sequence
  Synthetic oligonucleotide
ggaaggtatagttctggcaaatgtgtagaa

SEQ ID NO: 88358 - DNA, 30 bp, Artificial Sequence
  Synthetic oligonucleotide
cccaaagagggtttggattcgtttgtagaa

SEQ ID NO: 88359 - DNA, 30 bp, Artificial Sequence
  Synthetic oligonucleotide
tacggcaagttgcatcggctgcaattagaa

SEQ ID NO: 88360 - DNA, 30 bp, Artificial Sequence
  Synthetic oligonucleotide
aggatgatagccggtagaccacccttagaa

SEQ ID NO: 88361 - DNA, 30 bp, Artificial Sequence
  Synthetic oligonucleotide
acactatacaggggatttcagagcttagaa

SEQ ID NO: 88362 - DNA, 30 bp, Artificial Sequence
  Synthetic oligonucleotide
tggcattatatgccattcggagtaaacgaa

SEQ ID NO: 88363 - DNA, 30 bp, Artificial Sequence
  Synthetic oligonucleotide
agagacgttaggacgtcatggttaaacgaa

SEQ ID NO: 88364 - DNA, 30 bp, Artificial Sequence
  Synthetic oligonucleotide
cccccgggggcaccgaacgtgaggaacgaa

SEQ ID NO: 88365 - DNA, 30 bp, Artificial Sequence
  Synthetic oligonucleotide
ggtattaaagatactagggcggataacgaa

SEQ ID NO: 88366 - DNA, 30 bp, Artificial Sequence
  Synthetic oligonucleotide
tttccctccacgcttcagcgaactcacgaa

SEQ ID NO: 88367 - DNA, 30 bp, Artificial Sequence
  Synthetic oligonucleotide
gacaaccccctagaggccgaaaagtacgaa

SEQ ID NO: 88368 - DNA, 30 bp, Artificial Sequence
  Synthetic oligonucleotide
ccgggtgcgccattcattaagaagtacgaa

SEQ ID NO: 88369 - DNA, 30 bp, Artificial Sequence
  Synthetic oligonucleotide
cgattgttggtagattgagactaaaccgaa

SEQ ID NO: 88370 - DNA, 30 bp, Artificial Sequence
  Synthetic oligonucleotide
acaacgagagacaattggacaggcaccgaa

SEQ ID NO: 88371 - DNA, 30 bp, Artificial Sequence
  Synthetic oligonucleotide
tgacagctgagtacagtttcgaaccccgaa

SEQ ID NO: 88372 - DNA, 30 bp, Artificial Sequence
  Synthetic oligonucleotide
gcgccaggggacgaatgggttgggcccgaa

SEQ ID NO: 88373 - DNA, 30 bp, Artificial Sequence
  Synthetic oligonucleotide
ataacagaattattccaaagtgctcccgaa

SEQ ID NO: 88374 - DNA, 30 bp, Artificial Sequence
  Synthetic oligonucleotide
cgggatcataatagctgcgggagcgccgaa

SEQ ID NO: 88375 - DNA, 30 bp, Artificial Sequence
  Synthetic oligonucleotide
gtttggataaggaggcgcattaatgccgaa

SEQ ID NO: 88376 - DNA, 30 bp, Artificial Sequence
  Synthetic oligonucleotide
atgtcgcacgtttaaaaaaagatctccgaa

SEQ ID NO: 88377 - DNA, 30 bp, Artificial Sequence
  Synthetic oligonucleotide
cttgccgatgttgggctcgaattctccgaa

SEQ ID NO: 88378 - DNA, 30 bp, Artificial Sequence
  Synthetic oligonucleotide
aactagaattagggagaggggtaaagcgaa

SEQ ID NO: 88379 - DNA, 30 bp, Artificial Sequence
  Synthetic oligonucleotide
cgggactcgaatagggcgagaccaagcgaa

SEQ ID NO: 88380 - DNA, 30 bp, Artificial Sequence
  Synthetic oligonucleotide
ggccggctacatgttaatggcaatagcgaa

SEQ ID NO: 88381 - DNA, 30 bp, Artificial Sequence
  Synthetic oligonucleotide
cgcggtttatccttccgcgtgactagcgaa

SEQ ID NO: 88382 - DNA, 30 bp, Artificial Sequence
  Synthetic oligonucleotide
aagcgggactataaccgggtagtacgcgaa

SEQ ID NO: 88383 - DNA, 30 bp, Artificial Sequence
  Synthetic oligonucleotide
acgataaacatatttttcacttgccgcgaa

SEQ ID NO: 88384 - DNA, 30 bp, Artificial Sequence
  Synthetic oligonucleotide
gacctagtccatcgaagaagattgcgcgaa

SEQ ID NO: 88385 - DNA, 30 bp, Artificial Sequence
  Synthetic oligonucleotide
gtgttcaacgctggaatatgtactcgcgaa

SEQ ID NO: 88386 - DNA, 30 bp, Artificial Sequence
  Synthetic oligonucleotide
gacccacgagtggcaaaaacaaagggcgaa

SEQ ID NO: 88387 - DNA, 30 bp, Artificial Sequence
  Synthetic oligonucleotide
gacgagtacggctaattctcacagggcgaa

SEQ ID NO: 88388 - DNA, 30 bp, Artificial Sequence
  Synthetic oligonucleotide
ggagattgccggcagaccgagcctggcgaa

SEQ ID NO: 88389 - DNA, 30 bp, Artificial Sequence
  Synthetic oligonucleotide
tgagtgtgcttaggatggaagacctgcgaa

SEQ ID NO: 88390 - DNA, 30 bp, Artificial Sequence
  Synthetic oligonucleotide
ggggggcacccaacagatcgctggtgcgaa

SEQ ID NO: 88391 - DNA, 30 bp, Artificial Sequence
  Synthetic oligonucleotide
aggtattgggacgtcagggtactttgcgaa

SEQ ID NO: 88392 - DNA, 30 bp, Artificial Sequence
  Synthetic oligonucleotide
ggtcctaggtagctggactgttaaatcgaa

SEQ ID NO: 88393 - DNA, 30 bp, Artificial Sequence
  Synthetic oligonucleotide
attacaacatttaaaagaggactcatcgaa

SEQ ID NO: 88394 - DNA, 30 bp, Artificial Sequence
  Synthetic oligonucleotide
tcgttaatagtgaatgccatttcgatcgaa

SEQ ID NO: 88395 - DNA, 30 bp, Artificial Sequence
  Synthetic oligonucleotide
acaaagtggatcgttgctgggaaactcgaa

SEQ ID NO: 88396 - DNA, 30 bp, Artificial Sequence
  Synthetic oligonucleotide
tctatcacaagacgggggactgcactcgaa

SEQ ID NO: 88397 - DNA, 30 bp, Artificial Sequence
  Synthetic oligonucleotide
aatgacgggcttgcgtactaatacgtcgaa

SEQ ID NO: 88398 - DNA, 30 bp, Artificial Sequence
  Synthetic oligonucleotide
cgcacaggtttagaacagtgatacgtcgaa

SEQ ID NO: 88399 - DNA, 30 bp, Artificial Sequence
  Synthetic oligonucleotide
gtgggcctgatgactttagagtcgttcgaa

SEQ ID NO: 88400 - DNA, 30 bp, Artificial Sequence
  Synthetic oligonucleotide
catgagtcctgaagtggggggcggttcgaa

SEQ ID NO: 88401 - DNA, 30 bp, Artificial Sequence
  Synthetic oligonucleotide
gaatggtccaaggtgaataggggtttcgaa

SEQ ID NO: 88402 - DNA, 30 bp, Artificial Sequence
  Synthetic oligonucleotide
cgcatccagctgcttaaaacagaaaaggaa

SEQ ID NO: 88403 - DNA, 30 bp, Artificial Sequence
  Synthetic oligonucleotide
tgcttaaaaacttagatccgtaagaaggaa

SEQ ID NO: 88404 - DNA, 30 bp, Artificial Sequence
  Synthetic oligonucleotide
tcaggttgtgatccatgcgggggacaggaa

SEQ ID NO: 88405 - DNA, 30 bp, Artificial Sequence
  Synthetic oligonucleotide
tcaaaggcaaatgatgggaagatacaggaa

SEQ ID NO: 88406 - DNA, 30 bp, Artificial Sequence
  Synthetic oligonucleotide
agtatgcaatgagtccgggacctacaggaa

SEQ ID NO: 88407 - DNA, 30 bp, Artificial Sequence
  Synthetic oligonucleotide
cgtctaggctaacggcgttttaagcaggaa

SEQ ID NO: 88408 - DNA, 30 bp, Artificial Sequence
  Synthetic oligonucleotide
gcaatccgaagcagcgcgacattgcaggaa

SEQ ID NO: 88409 - DNA, 30 bp, Artificial Sequence
  Synthetic oligonucleotide
gatgggggcaaagtttactcaattcaggaa

SEQ ID NO: 88410 - DNA, 30 bp, Artificial Sequence
  Synthetic oligonucleotide
cgggatgcgatagagtataatattcaggaa

SEQ ID NO: 88411 - DNA, 30 bp, Artificial Sequence
  Synthetic oligonucleotide
gctgcaggacataggacaatataagaggaa

SEQ ID NO: 88412 - DNA, 30 bp, Artificial Sequence
  Synthetic oligonucleotide
ttcaccacacgctatgaggatcccgaggaa

SEQ ID NO: 88413 - DNA, 30 bp, Artificial Sequence
  Synthetic oligonucleotide
gtcaaatcatccgggggggtacgcgaggaa

SEQ ID NO: 88414 - DNA, 30 bp, Artificial Sequence
  Synthetic oligonucleotide
ataatgcagtaccagaatcgtcgcgaggaa

SEQ ID NO: 88415 - DNA, 30 bp, Artificial Sequence
  Synthetic oligonucleotide
caagaacttcgtccacaatggcaggaggaa

SEQ ID NO: 88416 - DNA, 30 bp, Artificial Sequence
  Synthetic oligonucleotide
aaggatgaagaagttaaacaccgggaggaa

SEQ ID NO: 88417 - DNA, 30 bp, Artificial Sequence
  Synthetic oligonucleotide
gctggcttcgcggggaagctacatgaggaa

SEQ ID NO: 88418 - DNA, 30 bp, Artificial Sequence
  Synthetic oligonucleotide
caaaaagtgttgaagagactggaataggaa

SEQ ID NO: 88419 - DNA, 30 bp, Artificial Sequence
  Synthetic oligonucleotide
acattcaagcactggccacggaccacggaa

SEQ ID NO: 88420 - DNA, 30 bp, Artificial Sequence
  Synthetic oligonucleotide
aacgctgaaagggagcctggaatgacggaa

SEQ ID NO: 88421 - DNA, 30 bp, Artificial Sequence
  Synthetic oligonucleotide
tgtaacagtcctaggaaaaacagaccggaa

SEQ ID NO: 88422 - DNA, 30 bp, Artificial Sequence
  Synthetic oligonucleotide
aaacggtaggtaaatggcaaatggccggaa

SEQ ID NO: 88423 - DNA, 30 bp, Artificial Sequence
  Synthetic oligonucleotide
ctgctcgctagcagattgccccaagcggaa

SEQ ID NO: 88424 - DNA, 30 bp, Artificial Sequence
  Synthetic oligonucleotide
ggtaataacgaccaatcgccaaaggcggaa

SEQ ID NO: 88425 - DNA, 30 bp, Artificial Sequence
  Synthetic oligonucleotide
gaggaagtatagccatcgagacgggcggaa

SEQ ID NO: 88426 - DNA, 30 bp, Artificial Sequence
  Synthetic oligonucleotide
agtagatcagagtgaacggcgtactcggaa

SEQ ID NO: 88427 - DNA, 30 bp, Artificial Sequence
  Synthetic oligonucleotide
caggcaagtggaaaggcgtattattcggaa

SEQ ID NO: 88428 - DNA, 30 bp, Artificial Sequence
  Synthetic oligonucleotide
cgcgcctggtgggtgtattactcaagggaa

SEQ ID NO: 88429 - DNA, 30 bp, Artificial Sequence
  Synthetic oligonucleotide
cggatgacctacgaagtacagcccagggaa

SEQ ID NO: 88430 - DNA, 30 bp, Artificial Sequence
  Synthetic oligonucleotide
gggtcgaaaaaaggtaaggggggcagggaa

SEQ ID NO: 88431 - DNA, 30 bp, Artificial Sequence
  Synthetic oligonucleotide
ggatcaatggggcagttggatccgagggaa

SEQ ID NO: 88432 - DNA, 30 bp, Artificial Sequence
  Synthetic oligonucleotide
ccacttaccctcgggatgtcatcacgggaa

SEQ ID NO: 88433 - DNA, 30 bp, Artificial Sequence
  Synthetic oligonucleotide
ctgcggtttcgtgccagcatcagtggggaa

SEQ ID NO: 88434 - DNA, 30 bp, Artificial Sequence
  Synthetic oligonucleotide
acgtcacagggagagtcgatggcatgggaa

SEQ ID NO: 88435 - DNA, 30 bp, Artificial Sequence
  Synthetic oligonucleotide
cgcaagaacatcaacctcacccactgggaa

SEQ ID NO: 88436 - DNA, 30 bp, Artificial Sequence
  Synthetic oligonucleotide
acccaaaatgatataaatccggtctgggaa

SEQ ID NO: 88437 - DNA, 30 bp, Artificial Sequence
  Synthetic oligonucleotide
gttgcactgaaacgcgacaacaagtgggaa

SEQ ID NO: 88438 - DNA, 30 bp, Artificial Sequence
  Synthetic oligonucleotide
actgccaaaaaaccccttatcggttgggaa

SEQ ID NO: 88439 - DNA, 30 bp, Artificial Sequence
  Synthetic oligonucleotide
ctggcaatgttcgttggaaggttaatggaa

SEQ ID NO: 88440 - DNA, 30 bp, Artificial Sequence
  Synthetic oligonucleotide
aagtagtttagtagagccacctggatggaa

SEQ ID NO: 88441 - DNA, 30 bp, Artificial Sequence
  Synthetic oligonucleotide
ggagctaatatccgaatgttgctgatggaa

SEQ ID NO: 88442 - DNA, 30 bp, Artificial Sequence
  Synthetic oligonucleotide
ccgaccatactggcacacacgatactggaa

SEQ ID NO: 88443 - DNA, 30 bp, Artificial Sequence
  Synthetic oligonucleotide
ccttatagcaaatatcactcgatagtggaa

SEQ ID NO: 88444 - DNA, 30 bp, Artificial Sequence
  Synthetic oligonucleotide
gtggtgaaccagtaaaataagcacttggaa

SEQ ID NO: 88445 - DNA, 30 bp, Artificial Sequence
  Synthetic oligonucleotide
cggagctcaaagagatctatccccttggaa

SEQ ID NO: 88446 - DNA, 30 bp, Artificial Sequence
  Synthetic oligonucleotide
ccattagtcctatacgacatacaaaatgaa

SEQ ID NO: 88447 - DNA, 30 bp, Artificial Sequence
  Synthetic oligonucleotide
gatcgaaataatccggacggtataaatgaa

SEQ ID NO: 88448 - DNA, 30 bp, Artificial Sequence
  Synthetic oligonucleotide
ccaagaacagtatacgtgggggacaatgaa

SEQ ID NO: 88449 - DNA, 30 bp, Artificial Sequence
  Synthetic oligonucleotide
ttgctatgaacgggacagagtctacatgaa

SEQ ID NO: 88450 - DNA, 30 bp, Artificial Sequence
  Synthetic oligonucleotide
gtcgttctgactgtccgagccatccatgaa

SEQ ID NO: 88451 - DNA, 30 bp, Artificial Sequence
  Synthetic oligonucleotide
acaagtagccttaggctcatcatgcatgaa

SEQ ID NO: 88452 - DNA, 30 bp, Artificial Sequence
  Synthetic oligonucleotide
gacactaggagttaactgtgagttcatgaa

SEQ ID NO: 88453 - DNA, 30 bp, Artificial Sequence
  Synthetic oligonucleotide
caccgtgtcgccgtcggattgcacgatgaa

SEQ ID NO: 88454 - DNA, 30 bp, Artificial Sequence
  Synthetic oligonucleotide
agaggagactcgtgtcggcatccggatgaa

SEQ ID NO: 88455 - DNA, 31 bp, Artificial Sequence
  Synthetic oligonucleotide
attagcacagcagacctccaagttggatgaa

SEQ ID NO: 88456 - DNA, 30 bp, Artificial Sequence
  Synthetic oligonucleotide
tcagtccatatacgccagtgcagctatgaa

SEQ ID NO: 88457 - DNA, 30 bp, Artificial Sequence
  Synthetic oligonucleotide
agctagggcatttgaacggtacagtatgaa

SEQ ID NO: 88458 - DNA, 30 bp, Artificial Sequence
  Synthetic oligonucleotide
gttgagaatatcaaccgtcccgcgtatgaa

SEQ ID NO: 88459 - DNA, 30 bp, Artificial Sequence
  Synthetic oligonucleotide
tcacccctaggcacgaccccaagttatgaa

SEQ ID NO: 88460 - DNA, 30 bp, Artificial Sequence
  Synthetic oligonucleotide
agggctctgagcgcattataggtaactgaa

SEQ ID NO: 88461 - DNA, 30 bp, Artificial Sequence
  Synthetic oligonucleotide
taatgtcaagtagactcgtactgcactgaa

SEQ ID NO: 88462 - DNA, 30 bp, Artificial Sequence
  Synthetic oligonucleotide
atgagacctatttctttccagatgcctgaa

SEQ ID NO: 88463 - DNA, 30 bp, Artificial Sequence
  Synthetic oligonucleotide
gtgggaccccacctccgccaacatcctgaa

SEQ ID NO: 88464 - DNA, 30 bp, Artificial Sequence
  Synthetic oligonucleotide
ggcgttacacttttcaaagatcctcctgaa

SEQ ID NO: 88465 - DNA, 30 bp, Artificial Sequence
  Synthetic oligonucleotide
tacggagggaaatagtactaccaggctgaa

SEQ ID NO: 88466 - DNA, 30 bp, Artificial Sequence
  Synthetic oligonucleotide
atacataaaggacatcttaattaggctgaa

SEQ ID NO: 88467 - DNA, 30 bp, Artificial Sequence
  Synthetic oligonucleotide
tgggttagaatactgaattgagggagtgaa

SEQ ID NO: 88468 - DNA, 30 bp, Artificial Sequence
  Synthetic oligonucleotide
tggtgtaaaccaaaatcgccaaagcgtgaa

SEQ ID NO: 88469 - DNA, 30 bp, Artificial Sequence
  Synthetic oligonucleotide
cattaggaaatgagattacgctgaggtgaa

SEQ ID NO: 88470 - DNA, 30 bp, Artificial Sequence
  Synthetic oligonucleotide
cgtgtaattattatatcgagaacatgtgaa

SEQ ID NO: 88471 - DNA, 30 bp, Artificial Sequence
  Synthetic oligonucleotide
aggggcttggtagatccgtcaaagtgtgaa

SEQ ID NO: 88472 - DNA, 30 bp, Artificial Sequence
  Synthetic oligonucleotide
tacacaatgcccgagttatgcgcgtgtgaa

SEQ ID NO: 88473 - DNA, 30 bp, Artificial Sequence
  Synthetic oligonucleotide
gtatgtccggagggaacgacaaattgtgaa

SEQ ID NO: 88474 - DNA, 30 bp, Artificial Sequence
  Synthetic oligonucleotide
gcagtaccaaaccaagctcagaattgtgaa

SEQ ID NO: 88475 - DNA, 30 bp, Artificial Sequence
  Synthetic oligonucleotide
ggggtcgctgtatcactaattgaaattgaa

SEQ ID NO: 88476 - DNA, 30 bp, Artificial Sequence
  Synthetic oligonucleotide
acacagccttcggcactttaacgaattgaa

SEQ ID NO: 88477 - DNA, 30 bp, Artificial Sequence
  Synthetic oligonucleotide
actaacgcacaattgagtggatggattgaa

SEQ ID NO: 88478 - DNA, 30 bp, Artificial Sequence
  Synthetic oligonucleotide
catgtgagacctatccagataatacttgaa

SEQ ID NO: 88479 - DNA, 30 bp, Artificial Sequence
  Synthetic oligonucleotide
aggtattttatagagctcaatatccttgaa

SEQ ID NO: 88480 - DNA, 30 bp, Artificial Sequence
  Synthetic oligonucleotide
gagggaatcggatagaccccttcgcttgaa

SEQ ID NO: 88481 - DNA, 30 bp, Artificial Sequence
  Synthetic oligonucleotide
tggcatccggccaaagggatctatcttgaa

SEQ ID NO: 88482 - DNA, 30 bp, Artificial Sequence
  Synthetic oligonucleotide
cgacaggtgtctgaaaagttggtcgttgaa

SEQ ID NO: 88483 - DNA, 30 bp, Artificial Sequence
  Synthetic oligonucleotide
ccgtgcgtccggaacatgatgggtgttgaa

SEQ ID NO: 88484 - DNA, 30 bp, Artificial Sequence
  Synthetic oligonucleotide
ccagtggcccatgaaaaatgcaaatttgaa

SEQ ID NO: 88485 - DNA, 30 bp, Artificial Sequence
  Synthetic oligonucleotide
tatggcctaccacagggtgaaagatttgaa

SEQ ID NO: 88486 - DNA, 30 bp, Artificial Sequence
  Synthetic oligonucleotide
gataaggacctgacgtcaatacacaaataa

SEQ ID NO: 88487 - DNA, 30 bp, Artificial Sequence
  Synthetic oligonucleotide
ggactagtaatggtgatatatgacaaataa

SEQ ID NO: 88488 - DNA, 30 bp, Artificial Sequence
  Synthetic oligonucleotide
ggaatgcagggaatcttgttggggaaataa

SEQ ID NO: 88489 - DNA, 30 bp, Artificial Sequence
  Synthetic oligonucleotide
tcctcacctgggaaacgtaccggtcaataa

SEQ ID NO: 88490 - DNA, 30 bp, Artificial Sequence
  Synthetic oligonucleotide
gaaacggttctacaaagctgcagggaataa

SEQ ID NO: 88491 - DNA, 30 bp, Artificial Sequence
  Synthetic oligonucleotide
cagcgcttatagaaggatagaattgaataa

SEQ ID NO: 88492 - DNA, 30 bp, Artificial Sequence
  Synthetic oligonucleotide
tacggggagacgtcaacacgctaataataa

SEQ ID NO: 88493 - DNA, 31 bp, Artificial Sequence
  Synthetic oligonucleotide
cctaacgttgttgccgtgttctcgataataa

SEQ ID NO: 88494 - DNA, 30 bp, Artificial Sequence
  Synthetic oligonucleotide
ggagaaaggccacatttgtaggtataataa

SEQ ID NO: 88495 - DNA, 30 bp, Artificial Sequence
  Synthetic oligonucleotide
gaaagaaaggttcatgcaattaggtaataa

SEQ ID NO: 88496 - DNA, 30 bp, Artificial Sequence
  Synthetic oligonucleotide
atcaacagcaaaacttgaaagggaacataa

SEQ ID NO: 88497 - DNA, 30 bp, Artificial Sequence
  Synthetic oligonucleotide
tgagtgtgtgagggcatgggcgtaacataa

SEQ ID NO: 88498 - DNA, 30 bp, Artificial Sequence
  Synthetic oligonucleotide
atacgcacggagcccagcaaagttacataa

SEQ ID NO: 88499 - DNA, 30 bp, Artificial Sequence
  Synthetic oligonucleotide
cggctgaggacgttggttaatacgccataa

SEQ ID NO: 88500 - DNA, 30 bp, Artificial Sequence
  Synthetic oligonucleotide
actggatatagaggaaggataagtccataa

SEQ ID NO: 88501 - DNA, 30 bp, Artificial Sequence
  Synthetic oligonucleotide
gtgcgtagagtctttgaggggagcgcataa

SEQ ID NO: 88502 - DNA, 30 bp, Artificial Sequence
  Synthetic oligonucleotide
agctagctcgagtatgaggtaactgcataa

SEQ ID NO: 88503 - DNA, 30 bp, Artificial Sequence
  Synthetic oligonucleotide
cacaggaaggcattctggagtagtgcataa

SEQ ID NO: 88504 - DNA, 30 bp, Artificial Sequence
  Synthetic oligonucleotide
tagaaaaggataaatcgtcggcactcataa

SEQ ID NO: 88505 - DNA, 30 bp, Artificial Sequence
  Synthetic oligonucleotide
gaccctagcggcgggtaatctaattcataa

SEQ ID NO: 88506 - DNA, 30 bp, Artificial Sequence
  Synthetic oligonucleotide
tcacacgaaaatagacccagataaagataa

SEQ ID NO: 88507 - DNA, 30 bp, Artificial Sequence
  Synthetic oligonucleotide
atgtctgagtatagctcaagaaagagataa

SEQ ID NO: 88508 - DNA, 30 bp, Artificial Sequence
  Synthetic oligonucleotide
cgaactgccacttgaaatagcacacgataa

SEQ ID NO: 88509 - DNA, 30 bp, Artificial Sequence
  Synthetic oligonucleotide
gccgtggtctacataggtcgaggacgataa

SEQ ID NO: 88510 - DNA, 30 bp, Artificial Sequence
  Synthetic oligonucleotide
cgcgcgtagcttaaaagggaggcgggataa

SEQ ID NO: 88511 - DNA, 30 bp, Artificial Sequence
  Synthetic oligonucleotide
accggcaggactaaatgtcaatctggataa

SEQ ID NO: 88512 - DNA, 30 bp, Artificial Sequence
  Synthetic oligonucleotide
agccgtcagttttgtgaggctagtggataa

SEQ ID NO: 88513 - DNA, 30 bp, Artificial Sequence
  Synthetic oligonucleotide
ctggtgtttcggatacaataaggctgataa

SEQ ID NO: 88514 - DNA, 30 bp, Artificial Sequence
  Synthetic oligonucleotide
gtcgcttcgaagagtgcactcgggtgataa

SEQ ID NO: 88515 - DNA, 30 bp, Artificial Sequence
  Synthetic oligonucleotide
cagtagtaagccgggaagtggcggatataa

SEQ ID NO: 88516 - DNA, 30 bp, Artificial Sequence
  Synthetic oligonucleotide
ggaacggctaggataaaaagcaacctataa

SEQ ID NO: 88517 - DNA, 30 bp, Artificial Sequence
  Synthetic oligonucleotide
aagataagaccatggcatgagggcgtataa

SEQ ID NO: 88518 - DNA, 30 bp, Artificial Sequence
  Synthetic oligonucleotide
caaaccgatgtgatcctagcgagattataa

SEQ ID NO: 88519 - DNA, 30 bp, Artificial Sequence
  Synthetic oligonucleotide
cattacgtcataataggagcatggttataa

SEQ ID NO: 88520 - DNA, 30 bp, Artificial Sequence
  Synthetic oligonucleotide
gcagagaaaggaaccatgttgcgaaactaa

SEQ ID NO: 88521 - DNA, 30 bp, Artificial Sequence
  Synthetic oligonucleotide
gcacagggtaataagaagctagaacactaa

SEQ ID NO: 88522 - DNA, 30 bp, Artificial Sequence
  Synthetic oligonucleotide
aggaaaaccgggccccccagagctcactaa

SEQ ID NO: 88523 - DNA, 30 bp, Artificial Sequence
  Synthetic oligonucleotide
cagatcggacgtcattcctaacaatactaa

SEQ ID NO: 88524 - DNA, 30 bp, Artificial Sequence
  Synthetic oligonucleotide
cagccgtctaaagattcgtgttgatactaa

SEQ ID NO: 88525 - DNA, 30 bp, Artificial Sequence
  Synthetic oligonucleotide
gctaccaacgatgcttacgactactactaa

SEQ ID NO: 88526 - DNA, 30 bp, Artificial Sequence
  Synthetic oligonucleotide
cgagaatgcgccaagaaaaatttcgcctaa

SEQ ID NO: 88527 - DNA, 30 bp, Artificial Sequence
  Synthetic oligonucleotide
gtgatgaaagcgcgtgtaccggaatcctaa

SEQ ID NO: 88528 - DNA, 30 bp, Artificial Sequence
  Synthetic oligonucleotide
ccaccataagccatgaaaattagatcctaa

SEQ ID NO: 88529 - DNA, 29 bp, Artificial Sequence
  Synthetic oligonucleotide
tacggaacgtgagatgttaaacgagctaa

SEQ ID NO: 88530 - DNA, 30 bp, Artificial Sequence
  Synthetic oligonucleotide
cggagagggcagcacgcataacggagctaa

SEQ ID NO: 88531 - DNA, 30 bp, Artificial Sequence
  Synthetic oligonucleotide
ccgtgcaagtcaaatctatggagtcgctaa

SEQ ID NO: 88532 - DNA, 30 bp, Artificial Sequence
  Synthetic oligonucleotide
tgtgagtaacaacagacggaagttcgctaa

SEQ ID NO: 88533 - DNA, 30 bp, Artificial Sequence
  Synthetic oligonucleotide
tcaacggcgattcgtggacagtagtgctaa

SEQ ID NO: 88534 - DNA, 30 bp, Artificial Sequence
  Synthetic oligonucleotide
cgtcaggagtgcaagcctggaaagatctaa

SEQ ID NO: 88535 - DNA, 30 bp, Artificial Sequence
  Synthetic oligonucleotide
cggggataccacgtagcgctaaggatctaa

SEQ ID NO: 88536 - DNA, 30 bp, Artificial Sequence
  Synthetic oligonucleotide
ctcaggtatcgatgagagggagggatctaa

SEQ ID NO: 88537 - DNA, 30 bp, Artificial Sequence
  Synthetic oligonucleotide
tgacagtcagtgaccagagatgcgctctaa

SEQ ID NO: 88538 - DNA, 30 bp, Artificial Sequence
  Synthetic oligonucleotide
gctaattgcaaaatcgagcataaggtctaa

SEQ ID NO: 88539 - DNA, 30 bp, Artificial Sequence
  Synthetic oligonucleotide
aggttgccgagttttgtcacagaggtctaa

SEQ ID NO: 88540 - DNA, 30 bp, Artificial Sequence
  Synthetic oligonucleotide
ggggcaagtatctgcgaacggtctgtctaa

SEQ ID NO: 88541 - DNA, 30 bp, Artificial Sequence
  Synthetic oligonucleotide
atgcgtacgattgaggtgtggcttgtctaa

SEQ ID NO: 88542 - DNA, 30 bp, Artificial Sequence
  Synthetic oligonucleotide
ggataggaagagatcaaaggggttgtctaa

SEQ ID NO: 88543 - DNA, 30 bp, Artificial Sequence
  Synthetic oligonucleotide
gaaaattaaacaccatatcgtcacttctaa

SEQ ID NO: 88544 - DNA, 30 bp, Artificial Sequence
  Synthetic oligonucleotide
gtctcgaggagaggcatcagctaaaagtaa

SEQ ID NO: 88545 - DNA, 30 bp, Artificial Sequence
  Synthetic oligonucleotide
tcggaaaaaggatccagttacgcaaagtaa

SEQ ID NO: 88546 - DNA, 31 bp, Artificial Sequence
  Synthetic oligonucleotide
agctacgtaatatcctgcttcacccaagtaa

SEQ ID NO: 88547 - DNA, 30 bp, Artificial Sequence
  Synthetic oligonucleotide
ggtgtttatacggataagaactagaagtaa

SEQ ID NO: 88548 - DNA, 30 bp, Artificial Sequence
  Synthetic oligonucleotide
cctgtatgtagtgaagaaggcaggaagtaa

SEQ ID NO: 88549 - DNA, 30 bp, Artificial Sequence
  Synthetic oligonucleotide
gtcacgtgtttaaaatcgacatatcagtaa

SEQ ID NO: 88550 - DNA, 30 bp, Artificial Sequence
  Synthetic oligonucleotide
tgcatcttgttgtggccaaagaaggagtaa

SEQ ID NO: 88551 - DNA, 30 bp, Artificial Sequence
  Synthetic oligonucleotide
gagtcacgtctggagctcggtacatagtaa

SEQ ID NO: 88552 - DNA, 30 bp, Artificial Sequence
  Synthetic oligonucleotide
cgggtattgccacgctctatcggatagtaa

SEQ ID NO: 88553 - DNA, 30 bp, Artificial Sequence
  Synthetic oligonucleotide
gggtatctttagaccgtcgggggatagtaa

SEQ ID NO: 88554 - DNA, 30 bp, Artificial Sequence
  Synthetic oligonucleotide
acggccaccgccgatcatgctcagacgtaa

SEQ ID NO: 88555 - DNA, 30 bp, Artificial Sequence
  Synthetic oligonucleotide
caaaggtccgaagatctattccacccgtaa

SEQ ID NO: 88556 - DNA, 30 bp, Artificial Sequence
  Synthetic oligonucleotide
tggatgacgagaagagtcgcgcgagcgtaa

SEQ ID NO: 88557 - DNA, 30 bp, Artificial Sequence
  Synthetic oligonucleotide
ggcaagtggagagactgcgtagcggcgtaa

SEQ ID NO: 88558 - DNA, 30 bp, Artificial Sequence
  Synthetic oligonucleotide
tcagtaggagtatatgggaggtgtgcgtaa

SEQ ID NO: 88559 - DNA, 30 bp, Artificial Sequence
  Synthetic oligonucleotide
agccagtaagaaagacccgatggatcgtaa

SEQ ID NO: 88560 - DNA, 30 bp, Artificial Sequence
  Synthetic oligonucleotide
tagactatcgcgcaaggtcaggcttcgtaa

SEQ ID NO: 88561 - DNA, 30 bp, Artificial Sequence
  Synthetic oligonucleotide
gatctaagaaaatcagcacaacaaaggtaa

SEQ ID NO: 88562 - DNA, 30 bp, Artificial Sequence
  Synthetic oligonucleotide
cggactggcgtcttcacaccggataggtaa

SEQ ID NO: 88563 - DNA, 30 bp, Artificial Sequence
  Synthetic oligonucleotide
cgattgcctagcaagcaagggaaacggtaa

SEQ ID NO: 88564 - DNA, 30 bp, Artificial Sequence
  Synthetic oligonucleotide
atgtacggatggattggcccgagccggtaa

SEQ ID NO: 88565 - DNA, 30 bp, Artificial Sequence
  Synthetic oligonucleotide
agacaatatggctagagttacctagggtaa

SEQ ID NO: 88566 - DNA, 30 bp, Artificial Sequence
  Synthetic oligonucleotide
ggtcgatattcgagggaaattaatgggtaa

SEQ ID NO: 88567 - DNA, 30 bp, Artificial Sequence
  Synthetic oligonucleotide
gtgcgggtcagtcaaacagcggtatggtaa

SEQ ID NO: 88568 - DNA, 30 bp, Artificial Sequence
  Synthetic oligonucleotide
agtcggattgcagatgtgcaaggctggtaa

SEQ ID NO: 88569 - DNA, 40 bp, Artificial Sequence
  Synthetic oligonucleotide
cgcgtggcatttcgtttcttcggaggtttaaagttggtaa

SEQ ID NO: 88570 - DNA, 30 bp, Artificial Sequence
  Synthetic oligonucleotide
aggtatcagttaactacatcgcgtatgtaa

SEQ ID NO: 88571 - DNA, 30 bp, Artificial Sequence
  Synthetic oligonucleotide
ccggtcgtctgccacaatgcgacactgtaa

SEQ ID NO: 88572 - DNA, 30 bp, Artificial Sequence
  Synthetic oligonucleotide
cggtccccaataaggcgtatgctactgtaa

SEQ ID NO: 88573 - DNA, 30 bp, Artificial Sequence
  Synthetic oligonucleotide
acgaggagctgccagtaacgaggtctgtaa

SEQ ID NO: 88574 - DNA, 30 bp, Artificial Sequence
  Synthetic oligonucleotide
cctagtagagagatatggggcattgtgtaa

SEQ ID NO: 88575 - DNA, 30 bp, Artificial Sequence
  Synthetic oligonucleotide
ggatgcaatgggcatggtcgtcagttgtaa

SEQ ID NO: 88576 - DNA, 30 bp, Artificial Sequence
  Synthetic oligonucleotide
caagctggagaaacaaccagaaggttgtaa

SEQ ID NO: 88577 - DNA, 30 bp, Artificial Sequence
  Synthetic oligonucleotide
cgagctatgtgacggaacggccacaattaa

SEQ ID NO: 88578 - DNA, 30 bp, Artificial Sequence
  Synthetic oligonucleotide
actatcgccgacatggggcttgacaattaa

SEQ ID NO: 88579 - DNA, 30 bp, Artificial Sequence
  Synthetic oligonucleotide
ccgaaagatcggtttcttatcccgaattaa

SEQ ID NO: 88580 - DNA, 30 bp, Artificial Sequence
  Synthetic oligonucleotide
agattcgcgtcataggggacaagtaattaa

SEQ ID NO: 88581 - DNA, 30 bp, Artificial Sequence
  Synthetic oligonucleotide
caggcgtgcgaccctacagcgcggcattaa

SEQ ID NO: 88582 - DNA, 30 bp, Artificial Sequence
  Synthetic oligonucleotide
tcgtaactgtcccggtacactaatcattaa

SEQ ID NO: 88583 - DNA, 30 bp, Artificial Sequence
  Synthetic oligonucleotide
cgcagccgaacggtggtcatgtctgattaa

SEQ ID NO: 88584 - DNA, 30 bp, Artificial Sequence
  Synthetic oligonucleotide
gatgggccgaaggcgagcgaatcatattaa

SEQ ID NO: 88585 - DNA, 30 bp, Artificial Sequence
  Synthetic oligonucleotide
actagtttcaacccttcaataccgtattaa

SEQ ID NO: 88586 - DNA, 30 bp, Artificial Sequence
  Synthetic oligonucleotide
agtcaggggcgacccgtgtattattattaa

SEQ ID NO: 88587 - DNA, 30 bp, Artificial Sequence
  Synthetic oligonucleotide
acgttcaatcgagctacgggcgttacttaa

SEQ ID NO: 88588 - DNA, 30 bp, Artificial Sequence
  Synthetic oligonucleotide
gggcatcgacaagggtaagttctagcttaa

SEQ ID NO: 88589 - DNA, 30 bp, Artificial Sequence
  Synthetic oligonucleotide
tcagtcgccaacgggagattcaaaagttaa

SEQ ID NO: 88590 - DNA, 30 bp, Artificial Sequence
  Synthetic oligonucleotide
tcagcgatgatttgaataagccacagttaa

SEQ ID NO: 88591 - DNA, 30 bp, Artificial Sequence
  Synthetic oligonucleotide
gtctagataggtccaggctagccgagttaa

SEQ ID NO: 88592 - DNA, 30 bp, Artificial Sequence
  Synthetic oligonucleotide
atagtcgtaggcggggatagcacacgttaa

SEQ ID NO: 88593 - DNA, 30 bp, Artificial Sequence
  Synthetic oligonucleotide
gcaggggaatcgagacatcaggtgcgttaa

SEQ ID NO: 88594 - DNA, 30 bp, Artificial Sequence
  Synthetic oligonucleotide
tgacacgtataatgagaacgggaatgttaa

SEQ ID NO: 88595 - DNA, 30 bp, Artificial Sequence
  Synthetic oligonucleotide
ggggcaagagaaacgtcttacctctgttaa

SEQ ID NO: 88596 - DNA, 30 bp, Artificial Sequence
  Synthetic oligonucleotide
cattgtagtgtgtgtagggctcattgttaa

SEQ ID NO: 88597 - DNA, 30 bp, Artificial Sequence
  Synthetic oligonucleotide
agtaaatcccaaacatggccgattatttaa

SEQ ID NO: 88598 - DNA, 30 bp, Artificial Sequence
  Synthetic oligonucleotide
atcgtaacgaggaactgctggtggttttaa

SEQ ID NO: 88599 - DNA, 30 bp, Artificial Sequence
  Synthetic oligonucleotide
agagctcataaaatgttacgctaaaaaaca

SEQ ID NO: 88600 - DNA, 30 bp, Artificial Sequence
  Synthetic oligonucleotide
ctagaccccggactcaccagtctaaaaaca

SEQ ID NO: 88601 - DNA, 30 bp, Artificial Sequence
  Synthetic oligonucleotide
cgaagtccagccaggagcagtgcgaaaaca

SEQ ID NO: 88602 - DNA, 30 bp, Artificial Sequence
  Synthetic oligonucleotide
cacgtaaatagctacataatctataaaaca

SEQ ID NO: 88603 - DNA, 30 bp, Artificial Sequence
  Synthetic oligonucleotide
catcgatctggattaggatcgagacaaaca

SEQ ID NO: 88604 - DNA, 30 bp, Artificial Sequence
  Synthetic oligonucleotide
cacgtcaccaagactacaaggatagaaaca

SEQ ID NO: 88605 - DNA, 30 bp, Artificial Sequence
  Synthetic oligonucleotide
acgaagtgtagtcagactcagaaggaaaca

SEQ ID NO: 88606 - DNA, 30 bp, Artificial Sequence
  Synthetic oligonucleotide
cgagatatgcaccggtagcagccgtaaaca

SEQ ID NO: 88607 - DNA, 30 bp, Artificial Sequence
  Synthetic oligonucleotide
aaacattaaacgaaatcattcgcgtaaaca

SEQ ID NO: 88608 - DNA, 30 bp, Artificial Sequence
  Synthetic oligonucleotide
aagactatacagacaaaccatcaaacaaca

SEQ ID NO: 88609 - DNA, 30 bp, Artificial Sequence
  Synthetic oligonucleotide
cattcgtggagcgggaacccccacacaaca

SEQ ID NO: 88610 - DNA, 30 bp, Artificial Sequence
  Synthetic oligonucleotide
tacttccaggggcagtggctctccacaaca

SEQ ID NO: 88611 - DNA, 30 bp, Artificial Sequence
  Synthetic oligonucleotide
ctagagcttatattttacagcaggacaaca

SEQ ID NO: 88612 - DNA, 30 bp, Artificial Sequence
  Synthetic oligonucleotide
gacggtcacttcgtcagtggtccaccaaca

SEQ ID NO: 88613 - DNA, 30 bp, Artificial Sequence
  Synthetic oligonucleotide
tcaatgaccacattccaattctgcccaaca

SEQ ID NO: 88614 - DNA, 30 bp, Artificial Sequence
  Synthetic oligonucleotide
acagaatcacgattctgactagtgccaaca

SEQ ID NO: 88615 - DNA, 30 bp, Artificial Sequence
  Synthetic oligonucleotide
actcactagcgagagtgtaaccttccaaca

SEQ ID NO: 88616 - DNA, 31 bp, Artificial Sequence
  Synthetic oligonucleotide
gattggttgagggacaccgtacggcgcaaca

SEQ ID NO: 88617 - DNA, 30 bp, Artificial Sequence
  Synthetic oligonucleotide
agtaaacgcctagcgaattggattgcaaca

SEQ ID NO: 88618 - DNA, 30 bp, Artificial Sequence
  Synthetic oligonucleotide
aagataccgagcacccgctcaaactcaaca

SEQ ID NO: 88619 - DNA, 30 bp, Artificial Sequence
  Synthetic oligonucleotide
cgtatcgtaaagctgcctcccaactcaaca

SEQ ID NO: 88620 - DNA, 30 bp, Artificial Sequence
  Synthetic oligonucleotide
gcgtgcgtttagcgcaagatcaggtcaaca

SEQ ID NO: 88621 - DNA, 30 bp, Artificial Sequence
  Synthetic oligonucleotide
gcgctttaatgctggaatggaccaagaaca

SEQ ID NO: 88622 - DNA, 30 bp, Artificial Sequence
  Synthetic oligonucleotide
aaacgaggattacttagtcggctgagaaca

SEQ ID NO: 88623 - DNA, 30 bp, Artificial Sequence
  Synthetic oligonucleotide
catgttgagcttcaagctccggggcgaaca

SEQ ID NO: 88624 - DNA, 30 bp, Artificial Sequence
  Synthetic oligonucleotide
acaggaatgctagactctagcctaggaaca

SEQ ID NO: 88625 - DNA, 30 bp, Artificial Sequence
  Synthetic oligonucleotide
caccacgggcgcgaagaagactgcggaaca

SEQ ID NO: 88626 - DNA, 30 bp, Artificial Sequence
  Synthetic oligonucleotide
cgtaagggagcctaaccgtgaaagggaaca

SEQ ID NO: 88627 - DNA, 30 bp, Artificial Sequence
  Synthetic oligonucleotide
cgacggtgaggtaaactctgaacatgaaca

SEQ ID NO: 88628 - DNA, 30 bp, Artificial Sequence
  Synthetic oligonucleotide
gccttcaaggcatccccagtcaactgaaca

SEQ ID NO: 88629 - DNA, 30 bp, Artificial Sequence
  Synthetic oligonucleotide
ggagtgtgccacctacataccgccataaca

SEQ ID NO: 88630 - DNA, 30 bp, Artificial Sequence
  Synthetic oligonucleotide
gggcgcatacggtcaacgaatgcactaaca

SEQ ID NO: 88631 - DNA, 30 bp, Artificial Sequence
  Synthetic oligonucleotide
gcataaagatgtccgttgacttggctaaca

SEQ ID NO: 88632 - DNA, 30 bp, Artificial Sequence
  Synthetic oligonucleotide
cacacttagcggcaagaccggaacgtaaca

SEQ ID NO: 88633 - DNA, 30 bp, Artificial Sequence
  Synthetic oligonucleotide
acgcgtaatgcataacgattcaccgtaaca

SEQ ID NO: 88634 - DNA, 30 bp, Artificial Sequence
  Synthetic oligonucleotide
atcaaagtaagactagtggatagggtaaca

SEQ ID NO: 88635 - DNA, 30 bp, Artificial Sequence
  Synthetic oligonucleotide
agcaaatgaccttacctgctgcaaaacaca

SEQ ID NO: 88636 - DNA, 30 bp, Artificial Sequence
  Synthetic oligonucleotide
gcatcgacgttggctggaagtaacaacaca

SEQ ID NO: 88637 - DNA, 30 bp, Artificial Sequence
  Synthetic oligonucleotide
accggaatgagttgaaattgtaaacacaca

SEQ ID NO: 88638 - DNA, 30 bp, Artificial Sequence
  Synthetic oligonucleotide
catccaatcagggcggaagatagtcacaca

SEQ ID NO: 88639 - DNA, 30 bp, Artificial Sequence
  Synthetic oligonucleotide
aaggtaatgtggacctacgctgaagacaca

SEQ ID NO: 88640 - DNA, 30 bp, Artificial Sequence
  Synthetic oligonucleotide
ctcgaggctaggctaaccggactcgacaca

SEQ ID NO: 88641 - DNA, 30 bp, Artificial Sequence
  Synthetic oligonucleotide
gttacgtgcgaatccggtatacaatacaca

SEQ ID NO: 88642 - DNA, 30 bp, Artificial Sequence
  Synthetic oligonucleotide
tcataaagaccacatcaactgtaatacaca

SEQ ID NO: 88643 - DNA, 30 bp, Artificial Sequence
  Synthetic oligonucleotide
accgggatgaatagggaactcagctacaca

SEQ ID NO: 88644 - DNA, 30 bp, Artificial Sequence
  Synthetic oligonucleotide
catacgaatgctcggtgacgtgggtacaca

SEQ ID NO: 88645 - DNA, 30 bp, Artificial Sequence
  Synthetic oligonucleotide
cggccaggggcttctaagtctacttacaca

SEQ ID NO: 88646 - DNA, 29 bp, Artificial Sequence
  Synthetic oligonucleotide
atcgccaacggtatgtcaacgacaccaca

SEQ ID NO: 88647 - DNA, 30 bp, Artificial Sequence
  Synthetic oligonucleotide
gccgaatgagtcagagtgctgaaacccaca

SEQ ID NO: 88648 - DNA, 30 bp, Artificial Sequence
  Synthetic oligonucleotide
ctacgtattaaacggatcgacctgcccaca

SEQ ID NO: 88649 - DNA, 30 bp, Artificial Sequence
  Synthetic oligonucleotide
ctgtagcgcccgaatcaacttttggccaca

SEQ ID NO: 88650 - DNA, 30 bp, Artificial Sequence
  Synthetic oligonucleotide
agggtttagtatagctgatgtattgccaca

SEQ ID NO: 88651 - DNA, 30 bp, Artificial Sequence
  Synthetic oligonucleotide
tcatctggtagggcgactagaaagtccaca

SEQ ID NO: 88652 - DNA, 30 bp, Artificial Sequence
  Synthetic oligonucleotide
tcgggttccaatttcggagtcacttccaca

SEQ ID NO: 88653 - DNA, 30 bp, Artificial Sequence
  Synthetic oligonucleotide
tctaatctgcgcataaaatcttcgagcaca

SEQ ID NO: 88654 - DNA, 30 bp, Artificial Sequence
  Synthetic oligonucleotide
actagggaaacgcatcacaaggaccgcaca

SEQ ID NO: 88655 - DNA, 30 bp, Artificial Sequence
  Synthetic oligonucleotide
cgaggggacaacacgagtcgaggccgcaca

SEQ ID NO: 88656 - DNA, 30 bp, Artificial Sequence
  Synthetic oligonucleotide
caggcctggcgttgaacgcaagagcgcaca

SEQ ID NO: 88657 - DNA, 30 bp, Artificial Sequence
  Synthetic oligonucleotide
caaatggctgtcacctacacctcgcgcaca

SEQ ID NO: 88658 - DNA, 30 bp, Artificial Sequence
  Synthetic oligonucleotide
gagcatagaaaaataacatagcactgcaca

SEQ ID NO: 88659 - DNA, 30 bp, Artificial Sequence
  Synthetic oligonucleotide
gaatcgtggtgggtcacgggcgcctgcaca

SEQ ID NO: 88660 - DNA, 30 bp, Artificial Sequence
  Synthetic oligonucleotide
gcacgcctgatcggtgacatcccttgcaca

SEQ ID NO: 88661 - DNA, 30 bp, Artificial Sequence
  Synthetic oligonucleotide
acatatgtagtttatcgaatcgacatcaca

SEQ ID NO: 88662 - DNA, 30 bp, Artificial Sequence
  Synthetic oligonucleotide
cttgacacaatcccaataacatccatcaca

SEQ ID NO: 88663 - DNA, 30 bp, Artificial Sequence
  Synthetic oligonucleotide
agcgtgctacacacgcaggaaagcatcaca

SEQ ID NO: 88664 - DNA, 30 bp, Artificial Sequence
  Synthetic oligonucleotide
atgggctacaccgtttaggaaccactcaca

SEQ ID NO: 88665 - DNA, 30 bp, Artificial Sequence
  Synthetic oligonucleotide
ggaaagtttcgaatggataaaagagtcaca

SEQ ID NO: 88666 - DNA, 30 bp, Artificial Sequence
  Synthetic oligonucleotide
tcgttaaatgggcgatcagaacacgtcaca

SEQ ID NO: 88667 - DNA, 30 bp, Artificial Sequence
  Synthetic oligonucleotide
cagtaagactagtcagatcgtatcgtcaca

SEQ ID NO: 88668 - DNA, 30 bp, Artificial Sequence
  Synthetic oligonucleotide
tctagctctcactaattaattaacttcaca

SEQ ID NO: 88669 - DNA, 30 bp, Artificial Sequence
  Synthetic oligonucleotide
cagatcatgagatcaatatatcgaaagaca

SEQ ID NO: 88670 - DNA, 30 bp, Artificial Sequence
  Synthetic oligonucleotide
ttaagtagcgctgggcacaggctaaagaca

SEQ ID NO: 88671 - DNA, 30 bp, Artificial Sequence
  Synthetic oligonucleotide
cgtagccttctcactagcgtaaacaagaca

SEQ ID NO: 88672 - DNA, 30 bp, Artificial Sequence
  Synthetic oligonucleotide
gctgagttaatcactgtcatgagcaagaca

SEQ ID NO: 88673 - DNA, 30 bp, Artificial Sequence
  Synthetic oligonucleotide
gggcggtacctgcactgacaggggaagaca

SEQ ID NO: 88674 - DNA, 30 bp, Artificial Sequence
  Synthetic oligonucleotide
accacaggagtactgctgctcactaagaca

SEQ ID NO: 88675 - DNA, 30 bp, Artificial Sequence
  Synthetic oligonucleotide
ttctgagagttagggagggaactacagaca

SEQ ID NO: 88676 - DNA, 30 bp, Artificial Sequence
  Synthetic oligonucleotide
gcaaaataagcaaaatagtgagggcagaca

SEQ ID NO: 88677 - DNA, 30 bp, Artificial Sequence
  Synthetic oligonucleotide
atagtggggctggggtaatcaagcgagaca

SEQ ID NO: 88678 - DNA, 30 bp, Artificial Sequence
  Synthetic oligonucleotide
acttgataaactcttagggcagtcgagaca

SEQ ID NO: 88679 - DNA, 30 bp, Artificial Sequence
  Synthetic oligonucleotide
cgctaccaaccgatcttaacgtatgagaca

SEQ ID NO: 88680 - DNA, 30 bp, Artificial Sequence
  Synthetic oligonucleotide
cgtacatcataaacgtgggatttctagaca

SEQ ID NO: 88681 - DNA, 30 bp, Artificial Sequence
  Synthetic oligonucleotide
ggcccggcggttacgtacaaagagtagaca

SEQ ID NO: 88682 - DNA, 30 bp, Artificial Sequence
  Synthetic oligonucleotide
cggacaaatacatggtatagttgcacgaca

SEQ ID NO: 88683 - DNA, 30 bp, Artificial Sequence
  Synthetic oligonucleotide
ggggcaacgtccgtttaggtcacgacgaca

SEQ ID NO: 88684 - DNA, 30 bp, Artificial Sequence
  Synthetic oligonucleotide
ggacgacggactaatgacgatggtacgaca

SEQ ID NO: 88685 - DNA, 30 bp, Artificial Sequence
  Synthetic oligonucleotide
aacgtctgctaagagctacatcttacgaca

SEQ ID NO: 88686 - DNA, 30 bp, Artificial Sequence
  Synthetic oligonucleotide
ggactccatcaacgaagcctgagaccgaca

SEQ ID NO: 88687 - DNA, 30 bp, Artificial Sequence
  Synthetic oligonucleotide
gagagttaagacgtagaagagtacccgaca

SEQ ID NO: 88688 - DNA, 29 bp, Artificial Sequence
  Synthetic oligonucleotide
acgtcaggcgtattattggagagccgaca

SEQ ID NO: 88689 - DNA, 30 bp, Artificial Sequence
  Synthetic oligonucleotide
tcagtcaatcattgtatatagagcgcgaca

SEQ ID NO: 88690 - DNA, 30 bp, Artificial Sequence
  Synthetic oligonucleotide
caaaggtcatgactcccttcacgcgcgaca

SEQ ID NO: 88691 - DNA, 30 bp, Artificial Sequence
  Synthetic oligonucleotide
aggagctctgtgagtctaggcatcgcgaca

SEQ ID NO: 88692 - DNA, 30 bp, Artificial Sequence
  Synthetic oligonucleotide
tatgcgagtcccgatcatatacgggcgaca

SEQ ID NO: 88693 - DNA, 30 bp, Artificial Sequence
  Synthetic oligonucleotide
aagaatcacggatgcatagaagccaggaca

SEQ ID NO: 88694 - DNA, 30 bp, Artificial Sequence
  Synthetic oligonucleotide
acgattagtggctcctcacggctccggaca

SEQ ID NO: 88695 - DNA, 30 bp, Artificial Sequence
  Synthetic oligonucleotide
gtaccgggtacggttcttaataacgggaca

SEQ ID NO: 88696 - DNA, 30 bp, Artificial Sequence
  Synthetic oligonucleotide
ggggatccaagggggtaaaaaacggggaca

SEQ ID NO: 88697 - DNA, 30 bp, Artificial Sequence
  Synthetic oligonucleotide
gattgcgaagtggtacacgccacatggaca

SEQ ID NO: 88698 - DNA, 30 bp, Artificial Sequence
  Synthetic oligonucleotide
ctataacaccgcccatctgattcatggaca

SEQ ID NO: 88699 - DNA, 30 bp, Artificial Sequence
  Synthetic oligonucleotide
tcagtcgtcttcgggagtgaactatggaca

SEQ ID NO: 88700 - DNA, 30 bp, Artificial Sequence
  Synthetic oligonucleotide
aagagccaaaatcgaggcgaatcctggaca

SEQ ID NO: 88701 - DNA, 30 bp, Artificial Sequence
  Synthetic oligonucleotide
tgcactagctgtactggactaccgtggaca

SEQ ID NO: 88702 - DNA, 30 bp, Artificial Sequence
  Synthetic oligonucleotide
tgcattatcgtgatgtgtctggcttggaca

SEQ ID NO: 88703 - DNA, 30 bp, Artificial Sequence
  Synthetic oligonucleotide
ccaatccttgcctaacagagggttctgaca

SEQ ID NO: 88704 - DNA, 30 bp, Artificial Sequence
  Synthetic oligonucleotide
taagcttagattggaggtttagcggtgaca

SEQ ID NO: 88705 - DNA, 30 bp, Artificial Sequence
  Synthetic oligonucleotide
gggctactatgggatactgcgaagttgaca

SEQ ID NO: 88706 - DNA, 30 bp, Artificial Sequence
  Synthetic oligonucleotide
cgagtcggaaagcaatgggctactttgaca

SEQ ID NO: 88707 - DNA, 30 bp, Artificial Sequence
  Synthetic oligonucleotide
tacccgctcgacactagaggaaagaataca

SEQ ID NO: 88708 - DNA, 30 bp, Artificial Sequence
  Synthetic oligonucleotide
gggcgatctctctccgctaaacggaataca

SEQ ID NO: 88709 - DNA, 30 bp, Artificial Sequence
  Synthetic oligonucleotide
cctcaacacagatattccataaataataca

SEQ ID NO: 88710 - DNA, 30 bp, Artificial Sequence
  Synthetic oligonucleotide
ggagaagtttaaaagcgacgatcacataca

SEQ ID NO: 88711 - DNA, 30 bp, Artificial Sequence
  Synthetic oligonucleotide
acgcaaatgacacactccgcgaaccataca

SEQ ID NO: 88712 - DNA, 30 bp, Artificial Sequence
  Synthetic oligonucleotide
tcggctcgatcgggagacgaagatcataca

SEQ ID NO: 88713 - DNA, 30 bp, Artificial Sequence
  Synthetic oligonucleotide
catctaccctggaaggtagagggtcataca

SEQ ID NO: 88714 - DNA, 30 bp, Artificial Sequence
  Synthetic oligonucleotide
agaggggaatcgctgatggaagtagataca

SEQ ID NO: 88715 - DNA, 30 bp, Artificial Sequence
  Synthetic oligonucleotide
gtaatagttgcgcgagcacacagggataca

SEQ ID NO: 88716 - DNA, 30 bp, Artificial Sequence
  Synthetic oligonucleotide
aaggtgacacgcgatttaggccgtgataca

SEQ ID NO: 88717 - DNA, 30 bp, Artificial Sequence
  Synthetic oligonucleotide
actgggtcgtgtaagactgtaaaatataca

SEQ ID NO: 88718 - DNA, 30 bp, Artificial Sequence
  Synthetic oligonucleotide
tcacgtcgaggcattaaaccatcgtataca

SEQ ID NO: 88719 - DNA, 30 bp, Artificial Sequence
  Synthetic oligonucleotide
aaggtaatgacatcgggtctgaggtataca

SEQ ID NO: 88720 - DNA, 29 bp, Artificial Sequence
  Synthetic oligonucleotide
cgaatgtactagtgctcggagattataca

SEQ ID NO: 88721 - DNA, 30 bp, Artificial Sequence
  Synthetic oligonucleotide
ggcgggcaacaattttcggcttcgactaca

SEQ ID NO: 88722 - DNA, 30 bp, Artificial Sequence
  Synthetic oligonucleotide
ggcgagaacttctggatcgtgaacgctaca

SEQ ID NO: 88723 - DNA, 30 bp, Artificial Sequence
  Synthetic oligonucleotide
tcattatccgagtcccgatctggaagtaca

SEQ ID NO: 88724 - DNA, 30 bp, Artificial Sequence
  Synthetic oligonucleotide
cgcttagaaaacttaaaataggggagtaca

SEQ ID NO: 88725 - DNA, 30 bp, Artificial Sequence
  Synthetic oligonucleotide
atgccaatatctacctcgaaagtgagtaca

SEQ ID NO: 88726 - DNA, 31 bp, Artificial Sequence
  Synthetic oligonucleotide
taacgcggatccttgcattccaacgcgtaca

SEQ ID NO: 88727 - DNA, 30 bp, Artificial Sequence
  Synthetic oligonucleotide
cggactagttctgcaagaccggtgcgtaca

SEQ ID NO: 88728 - DNA, 30 bp, Artificial Sequence
  Synthetic oligonucleotide
cgtagtggatgtccgctcttggatcgtaca

SEQ ID NO: 88729 - DNA, 30 bp, Artificial Sequence
  Synthetic oligonucleotide
atatagggcacggggtcgcgttgaggtaca

SEQ ID NO: 88730 - DNA, 30 bp, Artificial Sequence
  Synthetic oligonucleotide
aatagacgcttcggactaaagaagggtaca

SEQ ID NO: 88731 - DNA, 30 bp, Artificial Sequence
  Synthetic oligonucleotide
atggtcggggcccctcgaaagcactgtaca

SEQ ID NO: 88732 - DNA, 30 bp, Artificial Sequence
  Synthetic oligonucleotide
agggtgattcgtgacaggtaggtttgtaca

SEQ ID NO: 88733 - DNA, 30 bp, Artificial Sequence
  Synthetic oligonucleotide
cggaataagcgcagcacggggttgattaca

SEQ ID NO: 88734 - DNA, 30 bp, Artificial Sequence
  Synthetic oligonucleotide
ccgcgacctaggaaactatgtggtcttaca

SEQ ID NO: 88735 - DNA, 30 bp, Artificial Sequence
  Synthetic oligonucleotide
catattatagagcaaattaacacagttaca

SEQ ID NO: 88736 - DNA, 30 bp, Artificial Sequence
  Synthetic oligonucleotide
catctaaaatcgaactaggatagggttaca

SEQ ID NO: 88737 - DNA, 30 bp, Artificial Sequence
  Synthetic oligonucleotide
gcttagtagaggttcatgtgacgggttaca

SEQ ID NO: 88738 - DNA, 30 bp, Artificial Sequence
  Synthetic oligonucleotide
acgagcgtgttcggcgcaatgcttgttaca

SEQ ID NO: 88739 - DNA, 30 bp, Artificial Sequence
  Synthetic oligonucleotide
ccggtcgatgagagtctcaagactaaacca

SEQ ID NO: 88740 - DNA, 30 bp, Artificial Sequence
  Synthetic oligonucleotide
gggatcgcatcgcaatagagtccacaacca

SEQ ID NO: 88741 - DNA, 30 bp, Artificial Sequence
  Synthetic oligonucleotide
tggttgagcgccggatttaaagaagaacca

SEQ ID NO: 88742 - DNA, 30 bp, Artificial Sequence
  Synthetic oligonucleotide
agataggctaaggaccgaataggagaacca

SEQ ID NO: 88743 - DNA, 30 bp, Artificial Sequence
  Synthetic oligonucleotide
ggaccgctgtaatcggtgacgtgcgaacca

SEQ ID NO: 88744 - DNA, 30 bp, Artificial Sequence
  Synthetic oligonucleotide
cgctatagtgaaacgaccaagtgataacca

SEQ ID NO: 88745 - DNA, 30 bp, Artificial Sequence
  Synthetic oligonucleotide
actcatacgggcattggatacggcacacca

SEQ ID NO: 88746 - DNA, 30 bp, Artificial Sequence
  Synthetic oligonucleotide
ttggcgtccgattttccgatacatccacca

SEQ ID NO: 88747 - DNA, 29 bp, Artificial Sequence
  Synthetic oligonucleotide
agctaagtaaatagtggtgtatcgcacca

SEQ ID NO: 88748 - DNA, 30 bp, Artificial Sequence
  Synthetic oligonucleotide
cagcaactctgctaaagagagttcgcacca

SEQ ID NO: 88749 - DNA, 30 bp, Artificial Sequence
  Synthetic oligonucleotide
cacgaaaagtacgtccaatgttagtcacca

SEQ ID NO: 88750 - DNA, 30 bp, Artificial Sequence
  Synthetic oligonucleotide
aatggtcggacgggggctttacattcacca

SEQ ID NO: 88751 - DNA, 30 bp, Artificial Sequence
  Synthetic oligonucleotide
tcttaagaaattttgggcactccacgacca

SEQ ID NO: 88752 - DNA, 30 bp, Artificial Sequence
  Synthetic oligonucleotide
cagagctccacggaacacactgcccgacca

SEQ ID NO: 88753 - DNA, 30 bp, Artificial Sequence
  Synthetic oligonucleotide
ggtttactggggaaactatacgtccgacca

SEQ ID NO: 88754 - DNA, 30 bp, Artificial Sequence
  Synthetic oligonucleotide
aggttaatggagagaccggcgccaggacca

SEQ ID NO: 88755 - DNA, 30 bp, Artificial Sequence
  Synthetic oligonucleotide
ggctaaaccacgagcgctcatatcggacca

SEQ ID NO: 88756 - DNA, 30 bp, Artificial Sequence
  Synthetic oligonucleotide
atgctaagagtaacccaacccatttgacca

SEQ ID NO: 88757 - DNA, 30 bp, Artificial Sequence
  Synthetic oligonucleotide
accttccgtccgcaaatcctaaagatacca

SEQ ID NO: 88758 - DNA, 30 bp, Artificial Sequence
  Synthetic oligonucleotide
agcggggaacatatccgctcggatatacca

SEQ ID NO: 88759 - DNA, 30 bp, Artificial Sequence
  Synthetic oligonucleotide
agtatcgtaaacaatggaagtattatacca

SEQ ID NO: 88760 - DNA, 30 bp, Artificial Sequence
  Synthetic oligonucleotide
attgatcacatgtccgttccccgattacca

SEQ ID NO: 88761 - DNA, 30 bp, Artificial Sequence
  Synthetic oligonucleotide
taaagcgcgaataaactggtgaccttacca

SEQ ID NO: 88762 - DNA, 30 bp, Artificial Sequence
  Synthetic oligonucleotide
ccgggcatacgatactacacctccttacca

SEQ ID NO: 88763 - DNA, 30 bp, Artificial Sequence
  Synthetic oligonucleotide
tcaccacagtcggtggatgaggagttacca

SEQ ID NO: 88764 - DNA, 30 bp, Artificial Sequence
  Synthetic oligonucleotide
ctggcacatgcgccgctgtctccaaaccca

SEQ ID NO: 88765 - DNA, 30 bp, Artificial Sequence
  Synthetic oligonucleotide
catggtaagcgttcccccgacaacaaccca

SEQ ID NO: 88766 - DNA, 30 bp, Artificial Sequence
  Synthetic oligonucleotide
gtcagatatatggcagccgtaatcaaccca

SEQ ID NO: 88767 - DNA, 30 bp, Artificial Sequence
  Synthetic oligonucleotide
ttgtgatagcatcgttggaagcatgaccca

SEQ ID NO: 88768 - DNA, 30 bp, Artificial Sequence
  Synthetic oligonucleotide
aagtaccgaatggagtcctgctgtgaccca

SEQ ID NO: 88769 - DNA, 30 bp, Artificial Sequence
  Synthetic oligonucleotide
ccagggcacgcaaaacagaatattgaccca

SEQ ID NO: 88770 - DNA, 30 bp, Artificial Sequence
  Synthetic oligonucleotide
ctgtgaaaaaataagaacttgcttgaccca

SEQ ID NO: 88771 - DNA, 30 bp, Artificial Sequence
  Synthetic oligonucleotide
cctacagggtgaggggtcttactataccca

SEQ ID NO: 88772 - DNA, 30 bp, Artificial Sequence
  Synthetic oligonucleotide
aggacttaagttcagtaataggtgtaccca

SEQ ID NO: 88773 - DNA, 30 bp, Artificial Sequence
  Synthetic oligonucleotide
cagtagcgctcgtcgaagcttccttaccca

SEQ ID NO: 88774 - DNA, 30 bp, Artificial Sequence
  Synthetic oligonucleotide
gggagaatgtgtaggaaacatgccacccca

SEQ ID NO: 88775 - DNA, 30 bp, Artificial Sequence
  Synthetic oligonucleotide
cgaccaacgttattgcacaggctgccccca

SEQ ID NO: 88776 - DNA, 30 bp, Artificial Sequence
  Synthetic oligonucleotide
ttaggacacccgtagtcgaaggccgcccca

SEQ ID NO: 88777 - DNA, 30 bp, Artificial Sequence
  Synthetic oligonucleotide
taatcaaccgtggtaaattggatggcccca

SEQ ID NO: 88778 - DNA, 30 bp, Artificial Sequence
  Synthetic oligonucleotide
aaagagctaattagtataaccctgtcccca

SEQ ID NO: 88779 - DNA, 30 bp, Artificial Sequence
  Synthetic oligonucleotide
cgttgagaggtccaaccacgagcgcgccca

SEQ ID NO: 88780 - DNA, 30 bp, Artificial Sequence
  Synthetic oligonucleotide
acgcgggtaaatgtcatctagatgggccca

SEQ ID NO: 88781 - DNA, 30 bp, Artificial Sequence
  Synthetic oligonucleotide
ccgtacgttgctgtacgaaacgtaatccca

SEQ ID NO: 88782 - DNA, 30 bp, Artificial Sequence
  Synthetic oligonucleotide
agcgactaatagagcgtacctgtgatccca

SEQ ID NO: 88783 - DNA, 30 bp, Artificial Sequence
  Synthetic oligonucleotide
aggtgtctatacagagggctcgtactccca

SEQ ID NO: 88784 - DNA, 30 bp, Artificial Sequence
  Synthetic oligonucleotide
tttgcgagacagcgttacaaacggaagcca

SEQ ID NO: 88785 - DNA, 30 bp, Artificial Sequence
  Synthetic oligonucleotide
gcccgtgtaggttaagtaagcggacagcca

SEQ ID NO: 88786 - DNA, 30 bp, Artificial Sequence
  Synthetic oligonucleotide
cgatgttgtgggggacgaaacccgcagcca

SEQ ID NO: 88787 - DNA, 30 bp, Artificial Sequence
  Synthetic oligonucleotide
cgagaaaattttctgacagaaagagagcca

SEQ ID NO: 88788 - DNA, 30 bp, Artificial Sequence
  Synthetic oligonucleotide
tcgctatattgcaggatcaaagttgagcca

SEQ ID NO: 88789 - DNA, 30 bp, Artificial Sequence
  Synthetic oligonucleotide
gcgtactaactgcatcttacatcatagcca

SEQ ID NO: 88790 - DNA, 30 bp, Artificial Sequence
  Synthetic oligonucleotide
agagcacgagtgcgaacctttgaaacgcca

SEQ ID NO: 88791 - DNA, 30 bp, Artificial Sequence
  Synthetic oligonucleotide
gacgtagtcagtaaagaacctaggacgcca

SEQ ID NO: 88792 - DNA, 30 bp, Artificial Sequence
  Synthetic oligonucleotide
ctgattatctatctacgactctcggcgcca

SEQ ID NO: 88793 - DNA, 30 bp, Artificial Sequence
  Synthetic oligonucleotide
ggctgcactcacaccgtgtctgaatcgcca

SEQ ID NO: 88794 - DNA, 30 bp, Artificial Sequence
  Synthetic oligonucleotide
aagcaaattcgcaacctaattagcaggcca

SEQ ID NO: 88795 - DNA, 30 bp, Artificial Sequence
  Synthetic oligonucleotide
cataaacggcaggcaagactactgaggcca

SEQ ID NO: 88796 - DNA, 30 bp, Artificial Sequence
  Synthetic oligonucleotide
gggggaaaacgtctattcactaaacggcca

SEQ ID NO: 88797 - DNA, 30 bp, Artificial Sequence
  Synthetic oligonucleotide
cgtttgagtgcaatcgaacgaacacggcca

SEQ ID NO: 88798 - DNA, 30 bp, Artificial Sequence
  Synthetic oligonucleotide
acacctagaagtgataacatttggcggcca

SEQ ID NO: 88799 - DNA, 30 bp, Artificial Sequence
  Synthetic oligonucleotide
cgatgtggcaggaccgagttgaaggggcca

SEQ ID NO: 88800 - DNA, 30 bp, Artificial Sequence
  Synthetic oligonucleotide
cccttgtagctccggtggtcaatggggcca

SEQ ID NO: 88801 - DNA, 30 bp, Artificial Sequence
  Synthetic oligonucleotide
caaattcgtaaatccagtttagcatggcca

SEQ ID NO: 88802 - DNA, 30 bp, Artificial Sequence
  Synthetic oligonucleotide
ttggaggctgggaaccctgctacaatgcca

SEQ ID NO: 88803 - DNA, 30 bp, Artificial Sequence
  Synthetic oligonucleotide
gcgtcaactctactcggctggttcatgcca

SEQ ID NO: 88804 - DNA, 30 bp, Artificial Sequence
  Synthetic oligonucleotide
acgatgtagccaggtgtggcacagatgcca

SEQ ID NO: 88805 - DNA, 30 bp, Artificial Sequence
  Synthetic oligonucleotide
cgattctacctgaaattgcgccgactgcca

SEQ ID NO: 88806 - DNA, 30 bp, Artificial Sequence
  Synthetic oligonucleotide
cgccacacctcccatcatgtgagcctgcca

SEQ ID NO: 88807 - DNA, 30 bp, Artificial Sequence
  Synthetic oligonucleotide
atacggtgatcagtcgtacatagcctgcca

SEQ ID NO: 88808 - DNA, 30 bp, Artificial Sequence
  Synthetic oligonucleotide
ggtaagtcgcacagtaaggataagctgcca

SEQ ID NO: 88809 - DNA, 31 bp, Artificial Sequence
  Synthetic oligonucleotide
aaatagtgagtcggccaaataggctctgcca

SEQ ID NO: 88810 - DNA, 30 bp, Artificial Sequence
  Synthetic oligonucleotide
agtctcagaaaatgagccatccgcttgcca

SEQ ID NO: 88811 - DNA, 30 bp, Artificial Sequence
  Synthetic oligonucleotide
tcggcccattagcatcagactcgcttgcca

SEQ ID NO: 88812 - DNA, 30 bp, Artificial Sequence
  Synthetic oligonucleotide
aggagtcaacgaggcggtagattgttgcca

SEQ ID NO: 88813 - DNA, 30 bp, Artificial Sequence
  Synthetic oligonucleotide
gtggttaatccggccgagactacaaatcca

SEQ ID NO: 88814 - DNA, 30 bp, Artificial Sequence
  Synthetic oligonucleotide
tcggacctacgtagcagggttcgagatcca

SEQ ID NO: 88815 - DNA, 30 bp, Artificial Sequence
  Synthetic oligonucleotide
tcacatattagcaaagcccgacggtatcca

SEQ ID NO: 88816 - DNA, 30 bp, Artificial Sequence
  Synthetic oligonucleotide
tcgacttgtgttgcctagaaaagttatcca

SEQ ID NO: 88817 - DNA, 30 bp, Artificial Sequence
  Synthetic oligonucleotide
tgatcttgtctggatagaaaccaaactcca

SEQ ID NO: 88818 - DNA, 30 bp, Artificial Sequence
  Synthetic oligonucleotide
atgaaggacacccaagggatctgtactcca

SEQ ID NO: 88819 - DNA, 30 bp, Artificial Sequence
  Synthetic oligonucleotide
taaggaggtgggtgtctgggttacgctcca

SEQ ID NO: 88820 - DNA, 30 bp, Artificial Sequence
  Synthetic oligonucleotide
ctaggttgagatccgtctgcccatgctcca

SEQ ID NO: 88821 - DNA, 30 bp, Artificial Sequence
  Synthetic oligonucleotide
ggtgggaaaatgtctatacaacactctcca

SEQ ID NO: 88822 - DNA, 30 bp, Artificial Sequence
  Synthetic oligonucleotide
cgcggtgaccgaccagtaagtcattctcca

SEQ ID NO: 88823 - DNA, 30 bp, Artificial Sequence
  Synthetic oligonucleotide
aatcgacgagaggaagataaggccagtcca

SEQ ID NO: 88824 - DNA, 30 bp, Artificial Sequence
  Synthetic oligonucleotide
aacgaatcagccgttctaggaattagtcca

SEQ ID NO: 88825 - DNA, 30 bp, Artificial Sequence
  Synthetic oligonucleotide
tgtagcgatcaagttccgagttaaggtcca

SEQ ID NO: 88826 - DNA, 30 bp, Artificial Sequence
  Synthetic oligonucleotide
acataaccccgatgtaagtttcccggtcca

SEQ ID NO: 88827 - DNA, 30 bp, Artificial Sequence
  Synthetic oligonucleotide
aacacctaagaacaatcgcacccatgtcca

SEQ ID NO: 88828 - DNA, 30 bp, Artificial Sequence
  Synthetic oligonucleotide
atcagatcccccacaggaatttcgtgtcca

SEQ ID NO: 88829 - DNA, 30 bp, Artificial Sequence
  Synthetic oligonucleotide
taacaaactagttagcgcccgatcattcca

SEQ ID NO: 88830 - DNA, 30 bp, Artificial Sequence
  Synthetic oligonucleotide
ggcatcagcgcgcctcgacgatgacttcca

SEQ ID NO: 88831 - DNA, 30 bp, Artificial Sequence
  Synthetic oligonucleotide
ggtcaaaacgccgctccaccggaaaaagca

SEQ ID NO: 88832 - DNA, 30 bp, Artificial Sequence
  Synthetic oligonucleotide
tcgcatagtataccaggtaaggagaaagca

SEQ ID NO: 88833 - DNA, 30 bp, Artificial Sequence
  Synthetic oligonucleotide
tcacttgcactgaaagagaggcggaaagca

SEQ ID NO: 88834 - DNA, 30 bp, Artificial Sequence
  Synthetic oligonucleotide
cacgcacctcatatcagtagattgaaagca

SEQ ID NO: 88835 - DNA, 30 bp, Artificial Sequence
  Synthetic oligonucleotide
gggatgtcactcgtccagacaatacaagca

SEQ ID NO: 88836 - DNA, 30 bp, Artificial Sequence
  Synthetic oligonucleotide
gtgagggtcggccaatattggttagaagca

SEQ ID NO: 88837 - DNA, 30 bp, Artificial Sequence
  Synthetic oligonucleotide
agttgaggcatcaagggacgagcggaagca

SEQ ID NO: 88838 - DNA, 30 bp, Artificial Sequence
  Synthetic oligonucleotide
tgaagacctccgcgcgaagtggctgaagca

SEQ ID NO: 88839 - DNA, 30 bp, Artificial Sequence
  Synthetic oligonucleotide
ctcattttataacgactgcgaagctaagca

SEQ ID NO: 88840 - DNA, 30 bp, Artificial Sequence
  Synthetic oligonucleotide
ggtgtctcacacaatttggagtcgtaagca

SEQ ID NO: 88841 - DNA, 30 bp, Artificial Sequence
  Synthetic oligonucleotide
gatgtgtcaatcgcaaaacaatcttaagca

SEQ ID NO: 88842 - DNA, 30 bp, Artificial Sequence
  Synthetic oligonucleotide
tctggctatatccttatattttgcacagca

SEQ ID NO: 88843 - DNA, 30 bp, Artificial Sequence
  Synthetic oligonucleotide
gggacacagaaaagggttgggggtacagca

SEQ ID NO: 88844 - DNA, 30 bp, Artificial Sequence
  Synthetic oligonucleotide
accgccaaactgagtagcctgggtccagca

SEQ ID NO: 88845 - DNA, 30 bp, Artificial Sequence
  Synthetic oligonucleotide
gagtcaccacaggaagtctacatcgcagca

SEQ ID NO: 88846 - DNA, 30 bp, Artificial Sequence
  Synthetic oligonucleotide
ttctgctaagacgggtatagaagtcgagca

SEQ ID NO: 88847 - DNA, 30 bp, Artificial Sequence
  Synthetic oligonucleotide
cgcgtacgatattggtgtaccataggagca

SEQ ID NO: 88848 - DNA, 30 bp, Artificial Sequence
  Synthetic oligonucleotide
aggggaccgcatgtggcgaaacagggagca

SEQ ID NO: 88849 - DNA, 30 bp, Artificial Sequence
  Synthetic oligonucleotide
cttgtaggaggctatgtgctgaggtgagca

SEQ ID NO: 88850 - DNA, 30 bp, Artificial Sequence
  Synthetic oligonucleotide
cacaggcacacgaccgagggggcaatagca

SEQ ID NO: 88851 - DNA, 30 bp, Artificial Sequence
  Synthetic oligonucleotide
gttccagatagttcaaacaacagcatagca

SEQ ID NO: 88852 - DNA, 30 bp, Artificial Sequence
  Synthetic oligonucleotide
aaaacgggcctatagagctttgcgatagca

SEQ ID NO: 88853 - DNA, 30 bp, Artificial Sequence
  Synthetic oligonucleotide
tgccttttgtggaaaagctagaggatagca

SEQ ID NO: 88854 - DNA, 30 bp, Artificial Sequence
  Synthetic oligonucleotide
ctatctcacgctcgggggttgcctctagca

SEQ ID NO: 88855 - DNA, 30 bp, Artificial Sequence
  Synthetic oligonucleotide
ctgctcaaactcccaccgtctccattagca

SEQ ID NO: 88856 - DNA, 30 bp, Artificial Sequence
  Synthetic oligonucleotide
gaccttaacgataaccgccgtctattagca

SEQ ID NO: 88857 - DNA, 30 bp, Artificial Sequence
  Synthetic oligonucleotide
cggcagtgactaaatagctaggtattagca

SEQ ID NO: 88858 - DNA, 30 bp, Artificial Sequence
  Synthetic oligonucleotide
tccttggagtgagtcgtaggcagaaacgca

SEQ ID NO: 88859 - DNA, 30 bp, Artificial Sequence
  Synthetic oligonucleotide
atcgctggcatgggctaccggagaaacgca

SEQ ID NO: 88860 - DNA, 30 bp, Artificial Sequence
  Synthetic oligonucleotide
gtaaggcacatttgatggactgtcaacgca

SEQ ID NO: 88861 - DNA, 30 bp, Artificial Sequence
  Synthetic oligonucleotide
cccaacgaaggctaattcgcaatgaacgca

SEQ ID NO: 88862 - DNA, 30 bp, Artificial Sequence
  Synthetic oligonucleotide
gggttcacaccgttcgaaggacagtacgca

SEQ ID NO: 88863 - DNA, 30 bp, Artificial Sequence
  Synthetic oligonucleotide
ttggatcaggatactggtatccgttacgca

SEQ ID NO: 88864 - DNA, 30 bp, Artificial Sequence
  Synthetic oligonucleotide
agggggactactaatttgaggtgttacgca

SEQ ID NO: 88865 - DNA, 30 bp, Artificial Sequence
  Synthetic oligonucleotide
accaataaggatggcctaaggcgaaccgca

SEQ ID NO: 88866 - DNA, 30 bp, Artificial Sequence
  Synthetic oligonucleotide
gacgtaggcttactaaggtatggaaccgca

SEQ ID NO: 88867 - DNA, 30 bp, Artificial Sequence
  Synthetic oligonucleotide
tacgggcactcatgtgacgtctagaccgca

SEQ ID NO: 88868 - DNA, 30 bp, Artificial Sequence
  Synthetic oligonucleotide
ataaggaaaagttttccggatacacccgca

SEQ ID NO: 88869 - DNA, 30 bp, Artificial Sequence
  Synthetic oligonucleotide
ttcgaagagaaaacggactagtcccccgca

SEQ ID NO: 88870 - DNA, 30 bp, Artificial Sequence
  Synthetic oligonucleotide
acggtccatgatacatggtttgcagccgca

SEQ ID NO: 88871 - DNA, 30 bp, Artificial Sequence
  Synthetic oligonucleotide
gggaagtcgcgatatgaacgtgtctccgca

SEQ ID NO: 88872 - DNA, 30 bp, Artificial Sequence
  Synthetic oligonucleotide
actagcctaaagtgaattatcttctccgca

SEQ ID NO: 88873 - DNA, 30 bp, Artificial Sequence
  Synthetic oligonucleotide
ttccggcgtgagtcgcctccgatcagcgca

SEQ ID NO: 88874 - DNA, 30 bp, Artificial Sequence
  Synthetic oligonucleotide
tgagaccaatttggttcatataagagcgca

SEQ ID NO: 88875 - DNA, 30 bp, Artificial Sequence
  Synthetic oligonucleotide
ggtcgaaagttatgattagagcggcgcgca

SEQ ID NO: 88876 - DNA, 30 bp, Artificial Sequence
  Synthetic oligonucleotide
tacggctttcgtctagctagctatcgcgca

SEQ ID NO: 88877 - DNA, 30 bp, Artificial Sequence
  Synthetic oligonucleotide
gtggagtgcttcaggagagatctaggcgca

SEQ ID NO: 88878 - DNA, 30 bp, Artificial Sequence
  Synthetic oligonucleotide
ccgtttcgagagacggtgtgcgtaggcgca

SEQ ID NO: 88879 - DNA, 30 bp, Artificial Sequence
  Synthetic oligonucleotide
agcatagtcatcgagatgaggcacatcgca

SEQ ID NO: 88880 - DNA, 30 bp, Artificial Sequence
  Synthetic oligonucleotide
gcaggcaagtgacctcatcatgacgtcgca

SEQ ID NO: 88881 - DNA, 30 bp, Artificial Sequence
  Synthetic oligonucleotide
ggggattgaacacacccacaggtgttcgca

SEQ ID NO: 88882 - DNA, 30 bp, Artificial Sequence
  Synthetic oligonucleotide
agcctcgcttaatagcccagtagaaaggca

SEQ ID NO: 88883 - DNA, 30 bp, Artificial Sequence
  Synthetic oligonucleotide
aagtacgtaaagcgcgatcatccacaggca

SEQ ID NO: 88884 - DNA, 30 bp, Artificial Sequence
  Synthetic oligonucleotide
acgttgtagttacaggggacttcccaggca

SEQ ID NO: 88885 - DNA, 30 bp, Artificial Sequence
  Synthetic oligonucleotide
tggagggaccataattgcatccatgaggca

SEQ ID NO: 88886 - DNA, 30 bp, Artificial Sequence
  Synthetic oligonucleotide
ggaagaccatgtaagaaagtccagtaggca

SEQ ID NO: 88887 - DNA, 30 bp, Artificial Sequence
  Synthetic oligonucleotide
tactcactccgaatcaaggaagggtaggca

SEQ ID NO: 88888 - DNA, 30 bp, Artificial Sequence
  Synthetic oligonucleotide
cactgtggttcagatattggtgcgccggca

SEQ ID NO: 88889 - DNA, 30 bp, Artificial Sequence
  Synthetic oligonucleotide
cccggtcagagtgaaaaagagtagtcggca

SEQ ID NO: 88890 - DNA, 30 bp, Artificial Sequence
  Synthetic oligonucleotide
gatgagaggtctagtctgaacagttcggca

SEQ ID NO: 88891 - DNA, 30 bp, Artificial Sequence
  Synthetic oligonucleotide
cctatgtacagagttgactacgaaagggca

SEQ ID NO: 88892 - DNA, 30 bp, Artificial Sequence
  Synthetic oligonucleotide
agtagggtacattcggatcggataagggca

SEQ ID NO: 88893 - DNA, 30 bp, Artificial Sequence
  Synthetic oligonucleotide
aggtcttgtcttgagtgcttagtgagggca

SEQ ID NO: 88894 - DNA, 30 bp, Artificial Sequence
  Synthetic oligonucleotide
catcgttcaccccgatcggaagagcgggca

SEQ ID NO: 88895 - DNA, 30 bp, Artificial Sequence
  Synthetic oligonucleotide
tgcccagtaccgaatgaaagacgaggggca

SEQ ID NO: 88896 - DNA, 27 bp, Artificial Sequence
  Synthetic oligonucleotide
cggactagatcagctgtatgaggggca

SEQ ID NO: 88897 - DNA, 30 bp, Artificial Sequence
  Synthetic oligonucleotide
gcgaggcaagtgaaatagttagccggggca

SEQ ID NO: 88898 - DNA, 30 bp, Artificial Sequence
  Synthetic oligonucleotide
catgcggctggcgtttgaaacgagggggca

SEQ ID NO: 88899 - DNA, 30 bp, Artificial Sequence
  Synthetic oligonucleotide
cacaagtacataagcacgtgtccatgggca

SEQ ID NO: 88900 - DNA, 30 bp, Artificial Sequence
  Synthetic oligonucleotide
gcccgagcaagactgattcaggtctgggca

SEQ ID NO: 88901 - DNA, 30 bp, Artificial Sequence
  Synthetic oligonucleotide
ccacgttgatcgtgtgaaaacttctgggca

SEQ ID NO: 88902 - DNA, 30 bp, Artificial Sequence
  Synthetic oligonucleotide
ggcctcaacgctccagaaatagattgggca

SEQ ID NO: 88903 - DNA, 30 bp, Artificial Sequence
  Synthetic oligonucleotide
tgcgtccacatcagtaaagagacaatggca

SEQ ID NO: 88904 - DNA, 30 bp, Artificial Sequence
  Synthetic oligonucleotide
gcgatgccaatcacttgataaatcatggca

SEQ ID NO: 88905 - DNA, 30 bp, Artificial Sequence
  Synthetic oligonucleotide
ccgtatgcactaccgtgtggccttatggca

SEQ ID NO: 88906 - DNA, 30 bp, Artificial Sequence
  Synthetic oligonucleotide
agtagtggacgacatataactggactggca

SEQ ID NO: 88907 - DNA, 30 bp, Artificial Sequence
  Synthetic oligonucleotide
atgcggagctcatactgaaaggcagtggca

SEQ ID NO: 88908 - DNA, 30 bp, Artificial Sequence
  Synthetic oligonucleotide
gcttctgatagtagaccagtgggcgtggca

SEQ ID NO: 88909 - DNA, 30 bp, Artificial Sequence
  Synthetic oligonucleotide
agtgcttattgtgcatggtatggtgtggca

SEQ ID NO: 88910 - DNA, 30 bp, Artificial Sequence
  Synthetic oligonucleotide
agaccgggtgcacgcccgcaggttgtggca

SEQ ID NO: 88911 - DNA, 30 bp, Artificial Sequence
  Synthetic oligonucleotide
gacgtggttaccgacgacgagatattggca

SEQ ID NO: 88912 - DNA, 30 bp, Artificial Sequence
  Synthetic oligonucleotide
aggttgggatgtgactagaggtaaaatgca

SEQ ID NO: 88913 - DNA, 30 bp, Artificial Sequence
  Synthetic oligonucleotide
caaaaaacgcttcgttgaagcctaaatgca

SEQ ID NO: 88914 - DNA, 30 bp, Artificial Sequence
  Synthetic oligonucleotide
ggggacatcatagacgcacgagtgaatgca

SEQ ID NO: 88915 - DNA, 30 bp, Artificial Sequence
  Synthetic oligonucleotide
gtgtaagagagcagcaacacgaaccatgca

SEQ ID NO: 88916 - DNA, 30 bp, Artificial Sequence
  Synthetic oligonucleotide
ggcatgtcctgacaaggcgtccgggatgca

SEQ ID NO: 88917 - DNA, 30 bp, Artificial Sequence
  Synthetic oligonucleotide
cacgggtcaagtgattcgatccatgatgca

SEQ ID NO: 88918 - DNA, 30 bp, Artificial Sequence
  Synthetic oligonucleotide
gcgaccgaggcatcgatatagaaatatgca

SEQ ID NO: 88919 - DNA, 30 bp, Artificial Sequence
  Synthetic oligonucleotide
ccatagaggtagttctgaagcgtacctgca

SEQ ID NO: 88920 - DNA, 30 bp, Artificial Sequence
  Synthetic oligonucleotide
aagatgggaacccagatggcagcccctgca

SEQ ID NO: 88921 - DNA, 30 bp, Artificial Sequence
  Synthetic oligonucleotide
tctgaaggcgggagtattccagtgcctgca

SEQ ID NO: 88922 - DNA, 30 bp, Artificial Sequence
  Synthetic oligonucleotide
ttagaaccgagtaaacaggaggatgctgca

SEQ ID NO: 88923 - DNA, 30 bp, Artificial Sequence
  Synthetic oligonucleotide
acggatcccttgacgccacaggcctctgca

SEQ ID NO: 88924 - DNA, 30 bp, Artificial Sequence
  Synthetic oligonucleotide
ccgtttagcctgggagactatccttctgca

SEQ ID NO: 88925 - DNA, 31 bp, Artificial Sequence
  Synthetic oligonucleotide
tgttgaatgtagttaggaacgagcaagtgca

SEQ ID NO: 88926 - DNA, 30 bp, Artificial Sequence
  Synthetic oligonucleotide
ataccgccgtatggtcaggaaacacgtgca

SEQ ID NO: 88927 - DNA, 30 bp, Artificial Sequence
  Synthetic oligonucleotide
ccgccaagtcgagactctgagctgcgtgca

SEQ ID NO: 88928 - DNA, 30 bp, Artificial Sequence
  Synthetic oligonucleotide
acggtggggattggacccagaggtcgtgca

SEQ ID NO: 88929 - DNA, 30 bp, Artificial Sequence
  Synthetic oligonucleotide
ggagcactgagaggctcacatctgggtgca

SEQ ID NO: 88930 - DNA, 30 bp, Artificial Sequence
  Synthetic oligonucleotide
ccgaaccaatgagcccgactgaggtgtgca

SEQ ID NO: 88931 - DNA, 30 bp, Artificial Sequence
  Synthetic oligonucleotide
gcaaagaagatcgtcgagacttggtgtgca

SEQ ID NO: 88932 - DNA, 30 bp, Artificial Sequence
  Synthetic oligonucleotide
cgcgcaaaaccaccatatcgcatacttgca

SEQ ID NO: 88933 - DNA, 30 bp, Artificial Sequence
  Synthetic oligonucleotide
ggggcagtggttttatattcctgagttgca

SEQ ID NO: 88934 - DNA, 31 bp, Artificial Sequence
  Synthetic oligonucleotide
acccagggattaaccgagatattacgttgca

SEQ ID NO: 88935 - DNA, 30 bp, Artificial Sequence
  Synthetic oligonucleotide
ctcggcaatcaataaggatttggggttgca

SEQ ID NO: 88936 - DNA, 30 bp, Artificial Sequence
  Synthetic oligonucleotide
agagttgacatactagggaaactggttgca

SEQ ID NO: 88937 - DNA, 30 bp, Artificial Sequence
  Synthetic oligonucleotide
gaaccagggggttagatcacagagaaatca

SEQ ID NO: 88938 - DNA, 30 bp, Artificial Sequence
  Synthetic oligonucleotide
aggcggataggcaggcaagtccaggaatca

SEQ ID NO: 88939 - DNA, 30 bp, Artificial Sequence
  Synthetic oligonucleotide
gggtgagtgtattctataatgttggaatca

SEQ ID NO: 88940 - DNA, 30 bp, Artificial Sequence
  Synthetic oligonucleotide
gagcaacacgcaacggtgtacggctaatca

SEQ ID NO: 88941 - DNA, 30 bp, Artificial Sequence
  Synthetic oligonucleotide
ttcaagaccaccacgtgcggtaggtaatca

SEQ ID NO: 88942 - DNA, 30 bp, Artificial Sequence
  Synthetic oligonucleotide
acgacacgtccacgtatcgctaattaatca

SEQ ID NO: 88943 - DNA, 30 bp, Artificial Sequence
  Synthetic oligonucleotide
agataacgctgggttcgagagctttaatca

SEQ ID NO: 88944 - DNA, 30 bp, Artificial Sequence
  Synthetic oligonucleotide
agaagcagaggcctaggaaatgtttaatca

SEQ ID NO: 88945 - DNA, 30 bp, Artificial Sequence
  Synthetic oligonucleotide
aagagtctacaagcaagcagcttaacatca

SEQ ID NO: 88946 - DNA, 30 bp, Artificial Sequence
  Synthetic oligonucleotide
agtcctgactctaaccgatacgaaccatca

SEQ ID NO: 88947 - DNA, 30 bp, Artificial Sequence
  Synthetic oligonucleotide
ggaggtataaggcctagggctcagccatca

SEQ ID NO: 88948 - DNA, 30 bp, Artificial Sequence
  Synthetic oligonucleotide
ggttagcagatctaaacttgtatgccatca

SEQ ID NO: 88949 - DNA, 30 bp, Artificial Sequence
  Synthetic oligonucleotide
gtggactacacaagtttgattctaagatca

SEQ ID NO: 88950 - DNA, 30 bp, Artificial Sequence
  Synthetic oligonucleotide
tgggcattcaaggtccgtgcatagcgatca

SEQ ID NO: 88951 - DNA, 30 bp, Artificial Sequence
  Synthetic oligonucleotide
aggaacttcggccaccacactatgcgatca

SEQ ID NO: 88952 - DNA, 30 bp, Artificial Sequence
  Synthetic oligonucleotide
ttttcgagtcaaggcggtcttttgcgatca

SEQ ID NO: 88953 - DNA, 30 bp, Artificial Sequence
  Synthetic oligonucleotide
cagataatcgtccgatttagtgtaggatca

SEQ ID NO: 88954 - DNA, 30 bp, Artificial Sequence
  Synthetic oligonucleotide
acagcctggacaaagaatcttttcggatca

SEQ ID NO: 88955 - DNA, 30 bp, Artificial Sequence
  Synthetic oligonucleotide
aatccaaccctcggaacagaagggggatca

SEQ ID NO: 88956 - DNA, 30 bp, Artificial Sequence
  Synthetic oligonucleotide
tggtcgcacccacaaggccggaattgatca

SEQ ID NO: 88957 - DNA, 30 bp, Artificial Sequence
  Synthetic oligonucleotide
ggcaaggcaagctcaaatgtatccatatca

SEQ ID NO: 88958 - DNA, 30 bp, Artificial Sequence
  Synthetic oligonucleotide
tcaggatagacgggctagttcatcatatca

SEQ ID NO: 88959 - DNA, 30 bp, Artificial Sequence
  Synthetic oligonucleotide
ggattaatgcaaaattacgaggggatatca

SEQ ID NO: 88960 - DNA, 30 bp, Artificial Sequence
  Synthetic oligonucleotide
cgttggcaaaaactccagctatcactatca

SEQ ID NO: 88961 - DNA, 30 bp, Artificial Sequence
  Synthetic oligonucleotide
taattgagaaataacatggaacacgtatca

SEQ ID NO: 88962 - DNA, 30 bp, Artificial Sequence
  Synthetic oligonucleotide
ccaaaccggtgaaaccagggacttgtatca

SEQ ID NO: 88963 - DNA, 30 bp, Artificial Sequence
  Synthetic oligonucleotide
cagagcggtgactgtagagttcctttatca

SEQ ID NO: 88964 - DNA, 30 bp, Artificial Sequence
  Synthetic oligonucleotide
tagcggggactcgttagggtcacaaactca

SEQ ID NO: 88965 - DNA, 30 bp, Artificial Sequence
  Synthetic oligonucleotide
ccatcaagcgacatacgagccataaactca

SEQ ID NO: 88966 - DNA, 30 bp, Artificial Sequence
  Synthetic oligonucleotide
cttgggtcactgtaaaaagacatgaactca

SEQ ID NO: 88967 - DNA, 30 bp, Artificial Sequence
  Synthetic oligonucleotide
aggtactggggacccgtgatcgtgaactca

SEQ ID NO: 88968 - DNA, 30 bp, Artificial Sequence
  Synthetic oligonucleotide
acggccagctatgcctgttgtgcggactca

SEQ ID NO: 88969 - DNA, 26 bp, Artificial Sequence
  Synthetic oligonucleotide
aatggaggctgagtcataaatactca

SEQ ID NO: 88970 - DNA, 30 bp, Artificial Sequence
  Synthetic oligonucleotide
agataaatagcggtaacgaacaattactca

SEQ ID NO: 88971 - DNA, 30 bp, Artificial Sequence
  Synthetic oligonucleotide
ggtaaaaagcccaaagagagtacgccctca

SEQ ID NO: 88972 - DNA, 30 bp, Artificial Sequence
  Synthetic oligonucleotide
catcaggggataatagtcggtccagcctca

SEQ ID NO: 88973 - DNA, 30 bp, Artificial Sequence
  Synthetic oligonucleotide
ctgcgaagtacattcctcgcctctgcctca

SEQ ID NO: 88974 - DNA, 30 bp, Artificial Sequence
  Synthetic oligonucleotide
taaggagctgaaacgctgaaaagttcctca

SEQ ID NO: 88975 - DNA, 30 bp, Artificial Sequence
  Synthetic oligonucleotide
tacctccaccggccctcgcaaaacagctca

SEQ ID NO: 88976 - DNA, 30 bp, Artificial Sequence
  Synthetic oligonucleotide
ccttgataaagggtgaatgtgagtagctca

SEQ ID NO: 88977 - DNA, 30 bp, Artificial Sequence
  Synthetic oligonucleotide
ctggggacttgtcgacggtccgaacgctca

SEQ ID NO: 88978 - DNA, 30 bp, Artificial Sequence
  Synthetic oligonucleotide
acggacgctagactacaaagagagcgctca

SEQ ID NO: 88979 - DNA, 30 bp, Artificial Sequence
  Synthetic oligonucleotide
gatgactaagggggatctagttcaggctca

SEQ ID NO: 88980 - DNA, 30 bp, Artificial Sequence
  Synthetic oligonucleotide
tctgtggagggcaattacggagttggctca

SEQ ID NO: 88981 - DNA, 30 bp, Artificial Sequence
  Synthetic oligonucleotide
atatcagcacgtatcacagagttatgctca

SEQ ID NO: 88982 - DNA, 30 bp, Artificial Sequence
  Synthetic oligonucleotide
ggcaatgccaaacggcgccaataaatctca

SEQ ID NO: 88983 - DNA, 30 bp, Artificial Sequence
  Synthetic oligonucleotide
tatgaacatcactgtcgaatcgccatctca

SEQ ID NO: 88984 - DNA, 30 bp, Artificial Sequence
  Synthetic oligonucleotide
gaaacgatataaattgaaaggcggatctca

SEQ ID NO: 88985 - DNA, 30 bp, Artificial Sequence
  Synthetic oligonucleotide
tggctcaaaggccatgtagtcaccctctca

SEQ ID NO: 88986 - DNA, 30 bp, Artificial Sequence
  Synthetic oligonucleotide
gcaacttagcgtttcagtagcaagctctca

SEQ ID NO: 88987 - DNA, 30 bp, Artificial Sequence
  Synthetic oligonucleotide
agacgatactacggacgttgaaatgtctca

SEQ ID NO: 88988 - DNA, 30 bp, Artificial Sequence
  Synthetic oligonucleotide
aaccagatgtacaagcttgaatatgtctca

SEQ ID NO: 88989 - DNA, 30 bp, Artificial Sequence
  Synthetic oligonucleotide
agcgcaacccaagaacgatcgcgcttctca

SEQ ID NO: 88990 - DNA, 30 bp, Artificial Sequence
  Synthetic oligonucleotide
tgatccattatgtgagtgtatgcgttctca

SEQ ID NO: 88991 - DNA, 30 bp, Artificial Sequence
  Synthetic oligonucleotide
cctgcattctaaacataaataagccagtca

SEQ ID NO: 88992 - DNA, 30 bp, Artificial Sequence
  Synthetic oligonucleotide
cggaagctctgagttaagcacccgtagtca

SEQ ID NO: 88993 - DNA, 30 bp, Artificial Sequence
  Synthetic oligonucleotide
agcgagtgggactcggtacgtctgtagtca

SEQ ID NO: 88994 - DNA, 30 bp, Artificial Sequence
  Synthetic oligonucleotide
tggggacgagtttggtacacgtcaccgtca

SEQ ID NO: 88995 - DNA, 30 bp, Artificial Sequence
  Synthetic oligonucleotide
gcctaaacatacgaattatagtccgcgtca

SEQ ID NO: 88996 - DNA, 30 bp, Artificial Sequence
  Synthetic oligonucleotide
ttaggatgctgggatctcacaggtgcgtca

SEQ ID NO: 88997 - DNA, 30 bp, Artificial Sequence
  Synthetic oligonucleotide
ccgtacgtcaatacttatcaaccatcgtca

SEQ ID NO: 88998 - DNA, 30 bp, Artificial Sequence
  Synthetic oligonucleotide
tgtcagtggacagggctgcctacctcgtca

SEQ ID NO: 88999 - DNA, 31 bp, Artificial Sequence
  Synthetic oligonucleotide
agcggtcaccacccaatgtagggcgaggtca

SEQ ID NO: 89000 - DNA, 30 bp, Artificial Sequence
  Synthetic oligonucleotide
tcaacggcctacacagactggtcacggtca

SEQ ID NO: 89001 - DNA, 30 bp, Artificial Sequence
  Synthetic oligonucleotide
aagtcgaagtgtttgtagcacgggcggtca

SEQ ID NO: 89002 - DNA, 30 bp, Artificial Sequence
  Synthetic oligonucleotide
ggctataggaggatgtccgccagagggtca

SEQ ID NO: 89003 - DNA, 30 bp, Artificial Sequence
  Synthetic oligonucleotide
ccatatcaaaaggtggaaggacttgggtca

SEQ ID NO: 89004 - DNA, 30 bp, Artificial Sequence
  Synthetic oligonucleotide
aatcgcccagtcataataagaggaatgtca

SEQ ID NO: 89005 - DNA, 30 bp, Artificial Sequence
  Synthetic oligonucleotide
cgtagagaacttccgtgggaaatcctgtca

SEQ ID NO: 89006 - DNA, 30 bp, Artificial Sequence
  Synthetic oligonucleotide
gcgcacgagggtttatgagcggtggtgtca

SEQ ID NO: 89007 - DNA, 30 bp, Artificial Sequence
  Synthetic oligonucleotide
gtcgggatctaaggctgccacaacttgtca

SEQ ID NO: 89008 - DNA, 30 bp, Artificial Sequence
  Synthetic oligonucleotide
gttcgacgggtcgcgatctgatagcattca

SEQ ID NO: 89009 - DNA, 30 bp, Artificial Sequence
  Synthetic oligonucleotide
tagcccactccaacacgagatgacgattca

SEQ ID NO: 89010 - DNA, 30 bp, Artificial Sequence
  Synthetic oligonucleotide
ccataacggtgggaggtctgtggtgattca

SEQ ID NO: 89011 - DNA, 30 bp, Artificial Sequence
  Synthetic oligonucleotide
cgtggcggacaagcttaaaggcgtacttca

SEQ ID NO: 89012 - DNA, 30 bp, Artificial Sequence
  Synthetic oligonucleotide
gacggacccccgactgcttgccgtccttca

SEQ ID NO: 89013 - DNA, 30 bp, Artificial Sequence
  Synthetic oligonucleotide
gggacagtcgggacgaactaaatagcttca

SEQ ID NO: 89014 - DNA, 30 bp, Artificial Sequence
  Synthetic oligonucleotide
aggggtttgatcacctgggtggaggcttca

SEQ ID NO: 89015 - DNA, 30 bp, Artificial Sequence
  Synthetic oligonucleotide
gtgtcattaggaaactatagtgtggcttca

SEQ ID NO: 89016 - DNA, 30 bp, Artificial Sequence
  Synthetic oligonucleotide
gcaaggggaaccagaaagaggaatgcttca

SEQ ID NO: 89017 - DNA, 30 bp, Artificial Sequence
  Synthetic oligonucleotide
cctggtcatagattaaaacaattaagttca

SEQ ID NO: 89018 - DNA, 30 bp, Artificial Sequence
  Synthetic oligonucleotide
aacggtagacttgagctcctgaaacgttca

SEQ ID NO: 89019 - DNA, 30 bp, Artificial Sequence
  Synthetic oligonucleotide
cgctgtacagagtaagtgcttaagcgttca

SEQ ID NO: 89020 - DNA, 30 bp, Artificial Sequence
  Synthetic oligonucleotide
gcaggtggcctgcttactagtgtgcgttca

SEQ ID NO: 89021 - DNA, 30 bp, Artificial Sequence
  Synthetic oligonucleotide
ggtatcagaaggactcgggcagccggttca

SEQ ID NO: 89022 - DNA, 30 bp, Artificial Sequence
  Synthetic oligonucleotide
tgagtacgtcaccctcatatgcgtggttca

SEQ ID NO: 89023 - DNA, 30 bp, Artificial Sequence
  Synthetic oligonucleotide
tcggaaataacgaagtgtacccagtgttca

SEQ ID NO: 89024 - DNA, 30 bp, Artificial Sequence
  Synthetic oligonucleotide
ccaaagggaagacacgatacggcgtgttca

SEQ ID NO: 89025 - DNA, 30 bp, Artificial Sequence
  Synthetic oligonucleotide
gcgtgggacctgatggcagtggtgtgttca

SEQ ID NO: 89026 - DNA, 30 bp, Artificial Sequence
  Synthetic oligonucleotide
tggcgcagggagcgggcacactgcatttca

SEQ ID NO: 89027 - DNA, 30 bp, Artificial Sequence
  Synthetic oligonucleotide
cgaggcctcaataccatagaaagtatttca

SEQ ID NO: 89028 - DNA, 30 bp, Artificial Sequence
  Synthetic oligonucleotide
acaacaaaggaacttaggggtcgcgtttca

SEQ ID NO: 89029 - DNA, 30 bp, Artificial Sequence
  Synthetic oligonucleotide
gcgctacgtagaaaggctggatgtttttca

SEQ ID NO: 89030 - DNA, 30 bp, Artificial Sequence
  Synthetic oligonucleotide
aaacgcgtggacacaatggttcgaaaaaga

SEQ ID NO: 89031 - DNA, 30 bp, Artificial Sequence
  Synthetic oligonucleotide
ataggacgagcattggttcgcataaaaaga

SEQ ID NO: 89032 - DNA, 30 bp, Artificial Sequence
  Synthetic oligonucleotide
gctatgtccgcgagcatggccaggaaaaga

SEQ ID NO: 89033 - DNA, 30 bp, Artificial Sequence
  Synthetic oligonucleotide
gattctactgcaaaggatcgaaaacaaaga

SEQ ID NO: 89034 - DNA, 30 bp, Artificial Sequence
  Synthetic oligonucleotide
aaccgaacactacagtgcttggtccaaaga

SEQ ID NO: 89035 - DNA, 30 bp, Artificial Sequence
  Synthetic oligonucleotide
aacttgcttcaatgtcaaagcccagaaaga

SEQ ID NO: 89036 - DNA, 30 bp, Artificial Sequence
  Synthetic oligonucleotide
ctcattacgcggagatgaccacgagaaaga

SEQ ID NO: 89037 - DNA, 30 bp, Artificial Sequence
  Synthetic oligonucleotide
cacaaaagacaccgtcgcgtccgggaaaga

SEQ ID NO: 89038 - DNA, 30 bp, Artificial Sequence
  Synthetic oligonucleotide
gacgtacaagttccgacggaacgataaaga

SEQ ID NO: 89039 - DNA, 30 bp, Artificial Sequence
  Synthetic oligonucleotide
acctaagtagggggcgtatgtatctaaaga

SEQ ID NO: 89040 - DNA, 30 bp, Artificial Sequence
  Synthetic oligonucleotide
gtgaccaattcaggggtgaggttgtaaaga

SEQ ID NO: 89041 - DNA, 30 bp, Artificial Sequence
  Synthetic oligonucleotide
attccagtaggtggatcaaatgtgccaaga

SEQ ID NO: 89042 - DNA, 30 bp, Artificial Sequence
  Synthetic oligonucleotide
ggctcgctcacgctatccagagctccaaga

SEQ ID NO: 89043 - DNA, 30 bp, Artificial Sequence
  Synthetic oligonucleotide
tgaggttgtggaggcattaggggtccaaga

SEQ ID NO: 89044 - DNA, 30 bp, Artificial Sequence
  Synthetic oligonucleotide
cgggtataaatgtgcggaattctgtcaaga

SEQ ID NO: 89045 - DNA, 30 bp, Artificial Sequence
  Synthetic oligonucleotide
atgcatatcggtaccgtctcagtgtcaaga

SEQ ID NO: 89046 - DNA, 30 bp, Artificial Sequence
  Synthetic oligonucleotide
gcatgaacgagtatgaggtcttattcaaga

SEQ ID NO: 89047 - DNA, 30 bp, Artificial Sequence
  Synthetic oligonucleotide
attgcggtggaccagtgaaggtgttcaaga

SEQ ID NO: 89048 - DNA, 30 bp, Artificial Sequence
  Synthetic oligonucleotide
aagacgtgggtccggtgtcgtggaagaaga

SEQ ID NO: 89049 - DNA, 30 bp, Artificial Sequence
  Synthetic oligonucleotide
aagtaactttggaaatgcctcttaagaaga

SEQ ID NO: 89050 - DNA, 30 bp, Artificial Sequence
  Synthetic oligonucleotide
gagcaaaaatgccaacattccgggagaaga

SEQ ID NO: 89051 - DNA, 30 bp, Artificial Sequence
  Synthetic oligonucleotide
ttatcagctaaagaagcgtggagtagaaga

SEQ ID NO: 89052 - DNA, 30 bp, Artificial Sequence
  Synthetic oligonucleotide
gtgtacttcaacgcactgatgtgacgaaga

SEQ ID NO: 89053 - DNA, 30 bp, Artificial Sequence
  Synthetic oligonucleotide
ccgtgggcactgtttattatttaccgaaga

SEQ ID NO: 89054 - DNA, 30 bp, Artificial Sequence
  Synthetic oligonucleotide
tgggtattagtcaaactacacaggggaaga

SEQ ID NO: 89055 - DNA, 30 bp, Artificial Sequence
  Synthetic oligonucleotide
gatcaaacatcagaattagcatggggaaga

SEQ ID NO: 89056 - DNA, 30 bp, Artificial Sequence
  Synthetic oligonucleotide
ctgaagatatcaggaatggtaatgggaaga

SEQ ID NO: 89057 - DNA, 30 bp, Artificial Sequence
  Synthetic oligonucleotide
gaaacgcccaacaagggttcttctggaaga

SEQ ID NO: 89058 - DNA, 30 bp, Artificial Sequence
  Synthetic oligonucleotide
gactccccaaggctgtctacgggtggaaga

SEQ ID NO: 89059 - DNA, 30 bp, Artificial Sequence
  Synthetic oligonucleotide
gggggcggacatgcataaatgtcatgaaga

SEQ ID NO: 89060 - DNA, 30 bp, Artificial Sequence
  Synthetic oligonucleotide
ccaaggatgatgttcacagacagctgaaga

SEQ ID NO: 89061 - DNA, 30 bp, Artificial Sequence
  Synthetic oligonucleotide
tggtacgttacaagggaagccgcttgaaga

SEQ ID NO: 89062 - DNA, 30 bp, Artificial Sequence
  Synthetic oligonucleotide
tcagcgataatcaggtggtctacgataaga

SEQ ID NO: 89063 - DNA, 30 bp, Artificial Sequence
  Synthetic oligonucleotide
gagcttggatcatccagataaccgataaga

SEQ ID NO: 89064 - DNA, 30 bp, Artificial Sequence
  Synthetic oligonucleotide
gcggcgttgcaagggtcatcaggactaaga

SEQ ID NO: 89065 - DNA, 30 bp, Artificial Sequence
  Synthetic oligonucleotide
agattctaagaagcgctcgctacagtaaga

SEQ ID NO: 89066 - DNA, 30 bp, Artificial Sequence
  Synthetic oligonucleotide
ttagctggctaccgttcgggttaggtaaga

SEQ ID NO: 89067 - DNA, 30 bp, Artificial Sequence
  Synthetic oligonucleotide
atgtgaaaatcgggaactgaacctgtaaga

SEQ ID NO: 89068 - DNA, 30 bp, Artificial Sequence
  Synthetic oligonucleotide
gacgcgtcggaaattgcagagcctgtaaga

SEQ ID NO: 89069 - DNA, 30 bp, Artificial Sequence
  Synthetic oligonucleotide
cgtgcggtagactaatagtccattgtaaga

SEQ ID NO: 89070 - DNA, 30 bp, Artificial Sequence
  Synthetic oligonucleotide
ctacagtaatagggcacgtgtgcattaaga

SEQ ID NO: 89071 - DNA, 30 bp, Artificial Sequence
  Synthetic oligonucleotide
agggcttcggagtttcacccatgattaaga

SEQ ID NO: 89072 - DNA, 30 bp, Artificial Sequence
  Synthetic oligonucleotide
aatcaaccgtcgcacacaccaatgttaaga

SEQ ID NO: 89073 - DNA, 30 bp, Artificial Sequence
  Synthetic oligonucleotide
tcaaacatatttgacaggttggcgcacaga

SEQ ID NO: 89074 - DNA, 30 bp, Artificial Sequence
  Synthetic oligonucleotide
tcgcatgacggcggggctcagtctcacaga

SEQ ID NO: 89075 - DNA, 30 bp, Artificial Sequence
  Synthetic oligonucleotide
ccgttcatctctgtcacgaacttagacaga

SEQ ID NO: 89076 - DNA, 30 bp, Artificial Sequence
  Synthetic oligonucleotide
gcgtaaacgacctggcgccacttggacaga

SEQ ID NO: 89077 - DNA, 30 bp, Artificial Sequence
  Synthetic oligonucleotide
agacagcgttagttcatgtaagggtacaga

SEQ ID NO: 89078 - DNA, 30 bp, Artificial Sequence
  Synthetic oligonucleotide
aacggcgttattagggtgatcggttacaga

SEQ ID NO: 89079 - DNA, 30 bp, Artificial Sequence
  Synthetic oligonucleotide
agttcgacggcctggcgaccaacaaccaga

SEQ ID NO: 89080 - DNA, 30 bp, Artificial Sequence
  Synthetic oligonucleotide
aaaaggtgtcgcaccgaaggttgacccaga

SEQ ID NO: 89081 - DNA, 30 bp, Artificial Sequence
  Synthetic oligonucleotide
ctaaaataggagcactagtgccgagccaga

SEQ ID NO: 89082 - DNA, 30 bp, Artificial Sequence
  Synthetic oligonucleotide
tcagcctgcggagggtgtgcgtccgccaga

SEQ ID NO: 89083 - DNA, 30 bp, Artificial Sequence
  Synthetic oligonucleotide
tgttcgcaaacttttcactgtaaggccaga

SEQ ID NO: 89084 - DNA, 30 bp, Artificial Sequence
  Synthetic oligonucleotide
ttggactggaggtcaccgccgttggccaga

SEQ ID NO: 89085 - DNA, 30 bp, Artificial Sequence
  Synthetic oligonucleotide
cagttgggtctacccaatacgggtgccaga

SEQ ID NO: 89086 - DNA, 31 bp, Artificial Sequence
  Synthetic oligonucleotide
cgcgaccgaacccttttgacgatgatccaga

SEQ ID NO: 89087 - DNA, 30 bp, Artificial Sequence
  Synthetic oligonucleotide
cacaattagacttcgatagtgttatccaga

SEQ ID NO: 89088 - DNA, 30 bp, Artificial Sequence
  Synthetic oligonucleotide
tccttagtcactggaactatagcctccaga

SEQ ID NO: 89089 - DNA, 30 bp, Artificial Sequence
  Synthetic oligonucleotide
cacgcattagtggtgcagagtcattccaga

SEQ ID NO: 89090 - DNA, 30 bp, Artificial Sequence
  Synthetic oligonucleotide
ctcggaggtggggtcaaccccaaaagcaga

SEQ ID NO: 89091 - DNA, 30 bp, Artificial Sequence
  Synthetic oligonucleotide
caaaataggtccctagagtttcaaagcaga

SEQ ID NO: 89092 - DNA, 30 bp, Artificial Sequence
  Synthetic oligonucleotide
cataggacaatggattgcccaaaccgcaga

SEQ ID NO: 89093 - DNA, 30 bp, Artificial Sequence
  Synthetic oligonucleotide
gcagagctctctcacaccttacatcgcaga

SEQ ID NO: 89094 - DNA, 30 bp, Artificial Sequence
  Synthetic oligonucleotide
ttacaaacgggctacgggcacacaggcaga

SEQ ID NO: 89095 - DNA, 30 bp, Artificial Sequence
  Synthetic oligonucleotide
tcggactgaccgcgctccatggcaggcaga

SEQ ID NO: 89096 - DNA, 30 bp, Artificial Sequence
  Synthetic oligonucleotide
caaaaaaatactccaaatcaatacggcaga

SEQ ID NO: 89097 - DNA, 30 bp, Artificial Sequence
  Synthetic oligonucleotide
agatagactagcctgagacaagagggcaga

SEQ ID NO: 89098 - DNA, 30 bp, Artificial Sequence
  Synthetic oligonucleotide
tctgtggaatacagtaagttaaatggcaga

SEQ ID NO: 89099 - DNA, 30 bp, Artificial Sequence
  Synthetic oligonucleotide
cataagacgtcaagctagtattcatgcaga

SEQ ID NO: 89100 - DNA, 31 bp, Artificial Sequence
  Synthetic oligonucleotide
gcagaccactacgcgttgccgtctatgcaga

SEQ ID NO: 89101 - DNA, 30 bp, Artificial Sequence
  Synthetic oligonucleotide
ttagggagtttgatgtcaagccagtgcaga

SEQ ID NO: 89102 - DNA, 30 bp, Artificial Sequence
  Synthetic oligonucleotide
tgagtatcggagaacatcccaaaaatcaga

SEQ ID NO: 89103 - DNA, 30 bp, Artificial Sequence
  Synthetic oligonucleotide
acaagcatacgaggggcggtgaaaatcaga

SEQ ID NO: 89104 - DNA, 30 bp, Artificial Sequence
  Synthetic oligonucleotide
agactgcatattatgctatcgcaaatcaga

SEQ ID NO: 89105 - DNA, 30 bp, Artificial Sequence
  Synthetic oligonucleotide
agtaggtatctacgcgataatgacatcaga

SEQ ID NO: 89106 - DNA, 30 bp, Artificial Sequence
  Synthetic oligonucleotide
cgatcaaagactccactaacacgcatcaga

SEQ ID NO: 89107 - DNA, 30 bp, Artificial Sequence
  Synthetic oligonucleotide
gattacttagctggatagatgaagatcaga

SEQ ID NO: 89108 - DNA, 30 bp, Artificial Sequence
  Synthetic oligonucleotide
atagcactccgagaacacgacgagatcaga

SEQ ID NO: 89109 - DNA, 30 bp, Artificial Sequence
  Synthetic oligonucleotide
gattgcggtgggttatgaaactggatcaga

SEQ ID NO: 89110 - DNA, 30 bp, Artificial Sequence
  Synthetic oligonucleotide
gggagcaacagtcgatatatccgtatcaga

SEQ ID NO: 89111 - DNA, 30 bp, Artificial Sequence
  Synthetic oligonucleotide
caaaatcgcgttatgttagtggcactcaga

SEQ ID NO: 89112 - DNA, 30 bp, Artificial Sequence
  Synthetic oligonucleotide
tgtatcccgagacgggtggctaagctcaga

SEQ ID NO: 89113 - DNA, 30 bp, Artificial Sequence
  Synthetic oligonucleotide
ggcgctataagcgctcatgcgtacgtcaga

SEQ ID NO: 89114 - DNA, 30 bp, Artificial Sequence
  Synthetic oligonucleotide
cggccgtttgcagatataatctaggtcaga

SEQ ID NO: 89115 - DNA, 30 bp, Artificial Sequence
  Synthetic oligonucleotide
cgaaaaaatatgttggtagaagttgtcaga

SEQ ID NO: 89116 - DNA, 30 bp, Artificial Sequence
  Synthetic oligonucleotide
actcaatacattccagtaaaactattcaga

SEQ ID NO: 89117 - DNA, 30 bp, Artificial Sequence
  Synthetic oligonucleotide
tggcttgggcgagaacagtgtcacttcaga

SEQ ID NO: 89118 - DNA, 30 bp, Artificial Sequence
  Synthetic oligonucleotide
gtatggtaagcaattagtgttgcaaagaga

SEQ ID NO: 89119 - DNA, 30 bp, Artificial Sequence
  Synthetic oligonucleotide
tgagagtcctttaaggccatgctcaagaga

SEQ ID NO: 89120 - DNA, 30 bp, Artificial Sequence
  Synthetic oligonucleotide
catactggcgccctcaacaacggtaagaga

SEQ ID NO: 89121 - DNA, 30 bp, Artificial Sequence
  Synthetic oligonucleotide
gcaagtttgagacatcttagtacacagaga

SEQ ID NO: 89122 - DNA, 30 bp, Artificial Sequence
  Synthetic oligonucleotide
gtttagcaggatacgctacgggttgagaga

SEQ ID NO: 89123 - DNA, 30 bp, Artificial Sequence
  Synthetic oligonucleotide
tcacggacactaggaaagggtatctagaga

SEQ ID NO: 89124 - DNA, 30 bp, Artificial Sequence
  Synthetic oligonucleotide
ccagatagaacaggtgggcagtagtagaga

SEQ ID NO: 89125 - DNA, 30 bp, Artificial Sequence
  Synthetic oligonucleotide
ctcagatgaaccatgcgtatgatgtagaga

SEQ ID NO: 89126 - DNA, 30 bp, Artificial Sequence
  Synthetic oligonucleotide
tgagcggggaaactaaaattctagacgaga

SEQ ID NO: 89127 - DNA, 30 bp, Artificial Sequence
  Synthetic oligonucleotide
actaagtgaaatcgcacttggggtacgaga

SEQ ID NO: 89128 - DNA, 30 bp, Artificial Sequence
  Synthetic oligonucleotide
cagcattccatgcagaacagtgacccgaga

SEQ ID NO: 89129 - DNA, 30 bp, Artificial Sequence
  Synthetic oligonucleotide
cttacagaacgatagtggccaagtccgaga

SEQ ID NO: 89130 - DNA, 30 bp, Artificial Sequence
  Synthetic oligonucleotide
acaggacgtcgatttgggtcctgcgcgaga

SEQ ID NO: 89131 - DNA, 30 bp, Artificial Sequence
  Synthetic oligonucleotide
ttgagaactgtcaagcgtctaatggcgaga

SEQ ID NO: 89132 - DNA, 30 bp, Artificial Sequence
  Synthetic oligonucleotide
accagtataggaagctccgccgcaaggaga

SEQ ID NO: 89133 - DNA, 30 bp, Artificial Sequence
  Synthetic oligonucleotide
tggaaaagctttaggcgtgacttaaggaga

SEQ ID NO: 89134 - DNA, 30 bp, Artificial Sequence
  Synthetic oligonucleotide
tacaagtgactgtgttcccgcgccaggaga

SEQ ID NO: 89135 - DNA, 30 bp, Artificial Sequence
  Synthetic oligonucleotide
accaagcattggcacggaaatcagaggaga

SEQ ID NO: 89136 - DNA, 30 bp, Artificial Sequence
  Synthetic oligonucleotide
ggggggaccttttgtcgggctcataggaga

SEQ ID NO: 89137 - DNA, 30 bp, Artificial Sequence
  Synthetic oligonucleotide
ctaaggattgccgacttaacgtataggaga

SEQ ID NO: 89138 - DNA, 30 bp, Artificial Sequence
  Synthetic oligonucleotide
atagtaaatcgctgttttggattagggaga

SEQ ID NO: 89139 - DNA, 30 bp, Artificial Sequence
  Synthetic oligonucleotide
gcgaaggcgtcggcgtttgagagctggaga

SEQ ID NO: 89140 - DNA, 30 bp, Artificial Sequence
  Synthetic oligonucleotide
ggcaacgcgcatgaagaaattgtaatgaga

SEQ ID NO: 89141 - DNA, 30 bp, Artificial Sequence
  Synthetic oligonucleotide
ccccagaagggaggacgagggtatatgaga

SEQ ID NO: 89142 - DNA, 30 bp, Artificial Sequence
  Synthetic oligonucleotide
atgaggtcaaggagcgtcggttatatgaga

SEQ ID NO: 89143 - DNA, 30 bp, Artificial Sequence
  Synthetic oligonucleotide
cagggctccagttcttgaggtgtactgaga

SEQ ID NO: 89144 - DNA, 30 bp, Artificial Sequence
  Synthetic oligonucleotide
aagagcgtaaccccgctaacatcgctgaga

SEQ ID NO: 89145 - DNA, 30 bp, Artificial Sequence
  Synthetic oligonucleotide
cctccaattgggaaagatcgcgccgtgaga

SEQ ID NO: 89146 - DNA, 30 bp, Artificial Sequence
  Synthetic oligonucleotide
accggccaaaggcgcgtgatgtgcgtgaga

SEQ ID NO: 89147 - DNA, 30 bp, Artificial Sequence
  Synthetic oligonucleotide
cagccacctggataggtactgttcgtgaga

SEQ ID NO: 89148 - DNA, 30 bp, Artificial Sequence
  Synthetic oligonucleotide
tgtgtgaaacgaaatcgcaaataggtgaga

SEQ ID NO: 89149 - DNA, 30 bp, Artificial Sequence
  Synthetic oligonucleotide
agaccccgatggtagaggaacgctgtgaga

SEQ ID NO: 89150 - DNA, 30 bp, Artificial Sequence
  Synthetic oligonucleotide
aaagcgaattgaattacatagcaaaataga

SEQ ID NO: 89151 - DNA, 30 bp, Artificial Sequence
  Synthetic oligonucleotide
ggcattagtaccgacatagggcaccataga

SEQ ID NO: 89152 - DNA, 30 bp, Artificial Sequence
  Synthetic oligonucleotide
tatcgaggcaatgttgatacatgggataga

SEQ ID NO: 89153 - DNA, 30 bp, Artificial Sequence
  Synthetic oligonucleotide
aaaccgcgaaactgatgatctgaatataga

SEQ ID NO: 89154 - DNA, 30 bp, Artificial Sequence
  Synthetic oligonucleotide
cttcaaagttgataaaagcgtgaatataga

SEQ ID NO: 89155 - DNA, 30 bp, Artificial Sequence
  Synthetic oligonucleotide
cacgttccaggactctggattagatataga

SEQ ID NO: 89156 - DNA, 29 bp, Artificial Sequence
  Synthetic oligonucleotide
tacatagaaaatcatcagcttgatataga

SEQ ID NO: 89157 - DNA, 30 bp, Artificial Sequence
  Synthetic oligonucleotide
ggagctgatctggcagtaatggcgtataga

SEQ ID NO: 89158 - DNA, 30 bp, Artificial Sequence
  Synthetic oligonucleotide
atgggggcggccaccgtcataatgtataga

SEQ ID NO: 89159 - DNA, 30 bp, Artificial Sequence
  Synthetic oligonucleotide
tcaccgtgaaacgacaagtatgaaactaga

SEQ ID NO: 89160 - DNA, 30 bp, Artificial Sequence
  Synthetic oligonucleotide
gccctctggatgggtaagagacacactaga

SEQ ID NO: 89161 - DNA, 30 bp, Artificial Sequence
  Synthetic oligonucleotide
cggtctcaccgcgacggctaaatcactaga

SEQ ID NO: 89162 - DNA, 30 bp, Artificial Sequence
  Synthetic oligonucleotide
gcaggcacataggggctactgtaagctaga

SEQ ID NO: 89163 - DNA, 30 bp, Artificial Sequence
  Synthetic oligonucleotide
ggagccgtgatcaaccggccattcgctaga

SEQ ID NO: 89164 - DNA, 30 bp, Artificial Sequence
  Synthetic oligonucleotide
gcgatttggagtgaaacgttactatctaga

SEQ ID NO: 89165 - DNA, 30 bp, Artificial Sequence
  Synthetic oligonucleotide
cgatgtaggaccttcctcactacctctaga

SEQ ID NO: 89166 - DNA, 30 bp, Artificial Sequence
  Synthetic oligonucleotide
cttagcggtcagatgggaaagcgctctaga

SEQ ID NO: 89167 - DNA, 30 bp, Artificial Sequence
  Synthetic oligonucleotide
ggtaactcataacgcgtgggaaaaagtaga

SEQ ID NO: 89168 - DNA, 30 bp, Artificial Sequence
  Synthetic oligonucleotide
aactcatctggcctaaacgactcgagtaga

SEQ ID NO: 89169 - DNA, 30 bp, Artificial Sequence
  Synthetic oligonucleotide
tagcgggggtgcttgcgacctcgccgtaga

SEQ ID NO: 89170 - DNA, 30 bp, Artificial Sequence
  Synthetic oligonucleotide
ctcgtccgtcaagtactaatcccaggtaga

SEQ ID NO: 89171 - DNA, 30 bp, Artificial Sequence
  Synthetic oligonucleotide
atcgccctgagtcaggacggagtaggtaga

SEQ ID NO: 89172 - DNA, 30 bp, Artificial Sequence
  Synthetic oligonucleotide
ggctcacgtgtctaattacctttcggtaga

SEQ ID NO: 89173 - DNA, 30 bp, Artificial Sequence
  Synthetic oligonucleotide
gtggaaagcccagattggaattttggtaga

SEQ ID NO: 89174 - DNA, 30 bp, Artificial Sequence
  Synthetic oligonucleotide
gaagggtccataattatcagaatgcttaga

SEQ ID NO: 89175 - DNA, 30 bp, Artificial Sequence
  Synthetic oligonucleotide
gataattgtacctcatgctcaagtcttaga

SEQ ID NO: 89176 - DNA, 30 bp, Artificial Sequence
  Synthetic oligonucleotide
acaaagggagctaaaggaagcaacgttaga

SEQ ID NO: 89177 - DNA, 30 bp, Artificial Sequence
  Synthetic oligonucleotide
gctaagtgaaatgtggtaccaaactttaga

SEQ ID NO: 89178 - DNA, 30 bp, Artificial Sequence
  Synthetic oligonucleotide
cgttacatggtggtcaaattgcgaaaacga

SEQ ID NO: 89179 - DNA, 30 bp, Artificial Sequence
  Synthetic oligonucleotide
gggattaagtgctcgataggtggtcaacga

SEQ ID NO: 89180 - DNA, 30 bp, Artificial Sequence
  Synthetic oligonucleotide
cggggtggagaggatgtttttggagaacga

SEQ ID NO: 89181 - DNA, 30 bp, Artificial Sequence
  Synthetic oligonucleotide
actgaattagacaaccgaggactcgaacga

SEQ ID NO: 89182 - DNA, 30 bp, Artificial Sequence
  Synthetic oligonucleotide
cgggcttcaaatactactcttgaataacga

SEQ ID NO: 89183 - DNA, 30 bp, Artificial Sequence
  Synthetic oligonucleotide
gatgccggagcgaagcagggcttctaacga

SEQ ID NO: 89184 - DNA, 30 bp, Artificial Sequence
  Synthetic oligonucleotide
cgtcggggcaacgacttaaccgatacacga

SEQ ID NO: 89185 - DNA, 30 bp, Artificial Sequence
  Synthetic oligonucleotide
ccttaggtggctgtgtaggaggatacacga

SEQ ID NO: 89186 - DNA, 30 bp, Artificial Sequence
  Synthetic oligonucleotide
ctcataagctccagcagcggttcaccacga

SEQ ID NO: 89187 - DNA, 30 bp, Artificial Sequence
  Synthetic oligonucleotide
aactgccgtatataaaaaggtgtagcacga

SEQ ID NO: 89188 - DNA, 30 bp, Artificial Sequence
  Synthetic oligonucleotide
tgcccggagcgctactgaccaggatcacga

SEQ ID NO: 89189 - DNA, 30 bp, Artificial Sequence
  Synthetic oligonucleotide
caccgttcaagtacgtttgggacctcacga

SEQ ID NO: 89190 - DNA, 30 bp, Artificial Sequence
  Synthetic oligonucleotide
cacatgctgatgaacggttgatagagacga

SEQ ID NO: 89191 - DNA, 30 bp, Artificial Sequence
  Synthetic oligonucleotide
tcatctaaccacttaccatggaagcgacga

SEQ ID NO: 89192 - DNA, 30 bp, Artificial Sequence
  Synthetic oligonucleotide
tcgattacacggaatcttgacgttcgacga

SEQ ID NO: 89193 - DNA, 30 bp, Artificial Sequence
  Synthetic oligonucleotide
ccttaaattccagtcaagtatccaggacga

SEQ ID NO: 89194 - DNA, 30 bp, Artificial Sequence
  Synthetic oligonucleotide
actgagcagctgaaaaacgaaggaggacga

SEQ ID NO: 89195 - DNA, 30 bp, Artificial Sequence
  Synthetic oligonucleotide
gacattgaagtacaaagccggaatggacga

SEQ ID NO: 89196 - DNA, 30 bp, Artificial Sequence
  Synthetic oligonucleotide
ttggttaggagaacaatactcttatgacga

SEQ ID NO: 89197 - DNA, 30 bp, Artificial Sequence
  Synthetic oligonucleotide
aatcgcgattgtctcggactaagctgacga

SEQ ID NO: 89198 - DNA, 30 bp, Artificial Sequence
  Synthetic oligonucleotide
catcgacatctgaacaggtagagaatacga

SEQ ID NO: 89199 - DNA, 30 bp, Artificial Sequence
  Synthetic oligonucleotide
caagaaaagcattcctcgagccatatacga

SEQ ID NO: 89200 - DNA, 30 bp, Artificial Sequence
  Synthetic oligonucleotide
catagggggagggtaatggtgcctatacga

SEQ ID NO: 89201 - DNA, 30 bp, Artificial Sequence
  Synthetic oligonucleotide
tgggagacggaaagtccactatacctacga

SEQ ID NO: 89202 - DNA, 30 bp, Artificial Sequence
  Synthetic oligonucleotide
tgacaatttttgggttcgaagagcctacga

SEQ ID NO: 89203 - DNA, 30 bp, Artificial Sequence
  Synthetic oligonucleotide
caaggcttgctgaccaccaaccttctacga

SEQ ID NO: 89204 - DNA, 30 bp, Artificial Sequence
  Synthetic oligonucleotide
gagggaaccgtgggagtagaccgggtacga

SEQ ID NO: 89205 - DNA, 30 bp, Artificial Sequence
  Synthetic oligonucleotide
gtaagctgagtactaggcatccggttacga

SEQ ID NO: 89206 - DNA, 30 bp, Artificial Sequence
  Synthetic oligonucleotide
taaagcgccgagacctacgcgacaaaccga

SEQ ID NO: 89207 - DNA, 30 bp, Artificial Sequence
  Synthetic oligonucleotide
gagtcgataccaaatttgaaagagaaccga

SEQ ID NO: 89208 - DNA, 30 bp, Artificial Sequence
  Synthetic oligonucleotide
aggtacaggttgtattctaagtggcaccga

SEQ ID NO: 89209 - DNA, 30 bp, Artificial Sequence
  Synthetic oligonucleotide
caaaccagtcacagggagaagccagaccga

SEQ ID NO: 89210 - DNA, 30 bp, Artificial Sequence
  Synthetic oligonucleotide
gtcggggtaatgtccgttcgacaggaccga

SEQ ID NO: 89211 - DNA, 30 bp, Artificial Sequence
  Synthetic oligonucleotide
ggtagagtcccggagggcccaccggaccga

SEQ ID NO: 89212 - DNA, 30 bp, Artificial Sequence
  Synthetic oligonucleotide
cgggataattaaccgtttggaccggaccga

SEQ ID NO: 89213 - DNA, 30 bp, Artificial Sequence
  Synthetic oligonucleotide
aaaaaccaccatagaaggaaactggaccga

SEQ ID NO: 89214 - DNA, 30 bp, Artificial Sequence
  Synthetic oligonucleotide
acttatagtgaacgttcgttgggctaccga

SEQ ID NO: 89215 - DNA, 30 bp, Artificial Sequence
  Synthetic oligonucleotide
ctgagcttgcggctggctgggtgctaccga

SEQ ID NO: 89216 - DNA, 30 bp, Artificial Sequence
  Synthetic oligonucleotide
atacgttcaagggcaaatggttgctaccga

SEQ ID NO: 89217 - DNA, 30 bp, Artificial Sequence
  Synthetic oligonucleotide
cgaccttatattgggcccgagcggtaccga

SEQ ID NO: 89218 - DNA, 30 bp, Artificial Sequence
  Synthetic oligonucleotide
gaaggataaatgcggctgatttccacccga

SEQ ID NO: 89219 - DNA, 30 bp, Artificial Sequence
  Synthetic oligonucleotide
catggacagattcattcttgatcgacccga

SEQ ID NO: 89220 - DNA, 30 bp, Artificial Sequence
  Synthetic oligonucleotide
caacgtgacggtcaaactactcctacccga

SEQ ID NO: 89221 - DNA, 30 bp, Artificial Sequence
  Synthetic oligonucleotide
gtacgtgaagcgcgtttagatagaccccga

SEQ ID NO: 89222 - DNA, 30 bp, Artificial Sequence
  Synthetic oligonucleotide
agaaaagtcacccgcgaggtgagatcccga

SEQ ID NO: 89223 - DNA, 30 bp, Artificial Sequence
  Synthetic oligonucleotide
tgacgtgatatatttttcatgcattcccga

SEQ ID NO: 89224 - DNA, 30 bp, Artificial Sequence
  Synthetic oligonucleotide
ggataaggagaccatggagcgtgttcccga

SEQ ID NO: 89225 - DNA, 30 bp, Artificial Sequence
  Synthetic oligonucleotide
gcaaggataccccacaacgttggtagccga

SEQ ID NO: 89226 - DNA, 30 bp, Artificial Sequence
  Synthetic oligonucleotide
cagggacggtgccccactgaggaacgccga

SEQ ID NO: 89227 - DNA, 30 bp, Artificial Sequence
  Synthetic oligonucleotide
cctaagctgggtacggttccacaccgccga

SEQ ID NO: 89228 - DNA, 30 bp, Artificial Sequence
  Synthetic oligonucleotide
gaccgtttaatcactatatcccgccgccga

SEQ ID NO: 89229 - DNA, 30 bp, Artificial Sequence
  Synthetic oligonucleotide
cgagcaagtggcggaataatcgcgcgccga

SEQ ID NO: 89230 - DNA, 30 bp, Artificial Sequence
  Synthetic oligonucleotide
cgaatctcataggtagacctggccggccga

SEQ ID NO: 89231 - DNA, 30 bp, Artificial Sequence
  Synthetic oligonucleotide
gtagtaacgcatagttaaagtggctgccga

SEQ ID NO: 89232 - DNA, 30 bp, Artificial Sequence
  Synthetic oligonucleotide
cataataacttctagagaatcgggtgccga

SEQ ID NO: 89233 - DNA, 30 bp, Artificial Sequence
  Synthetic oligonucleotide
gttcatggttcacggtgtgtagcttgccga

SEQ ID NO: 89234 - DNA, 30 bp, Artificial Sequence
  Synthetic oligonucleotide
aaatggcacggagcgcaaatcgtaatccga

SEQ ID NO: 89235 - DNA, 30 bp, Artificial Sequence
  Synthetic oligonucleotide
gtagacaatatccattcctgaagcatccga

SEQ ID NO: 89236 - DNA, 30 bp, Artificial Sequence
  Synthetic oligonucleotide
ttgctccctttagagagcgaatcgatccga

SEQ ID NO: 89237 - DNA, 30 bp, Artificial Sequence
  Synthetic oligonucleotide
cgataatgtcacggagtaggaaggatccga

SEQ ID NO: 89238 - DNA, 30 bp, Artificial Sequence
  Synthetic oligonucleotide
atgctttctaaagaaactatcgcagtccga

SEQ ID NO: 89239 - DNA, 30 bp, Artificial Sequence
  Synthetic oligonucleotide
caggtaggagggtaccatatctccgtccga

SEQ ID NO: 89240 - DNA, 30 bp, Artificial Sequence
  Synthetic oligonucleotide
gctttaagcggaaaacgaataagggtccga

SEQ ID NO: 89241 - DNA, 30 bp, Artificial Sequence
  Synthetic oligonucleotide
aacttatcgcgtagcgtacagatcttccga

SEQ ID NO: 89242 - DNA, 30 bp, Artificial Sequence
  Synthetic oligonucleotide
gtggaactataccgggtcacgtgaaagcga

SEQ ID NO: 89243 - DNA, 30 bp, Artificial Sequence
  Synthetic oligonucleotide
taggaatgaccgacaacctgtatcaagcga

SEQ ID NO: 89244 - DNA, 30 bp, Artificial Sequence
  Synthetic oligonucleotide
aaggacgaccaaagtatcggtcaacagcga

SEQ ID NO: 89245 - DNA, 30 bp, Artificial Sequence
  Synthetic oligonucleotide
gggggggcggtcgtctcgacgcgacagcga

SEQ ID NO: 89246 - DNA, 30 bp, Artificial Sequence
  Synthetic oligonucleotide
cgagtggatggtcggggagagcggcagcga

SEQ ID NO: 89247 - DNA, 30 bp, Artificial Sequence
  Synthetic oligonucleotide
ccgtgcaatgtgggggccggacaatagcga

SEQ ID NO: 89248 - DNA, 30 bp, Artificial Sequence
  Synthetic oligonucleotide
tcggccgtagacaaagaggcgtcaacgcga

SEQ ID NO: 89249 - DNA, 30 bp, Artificial Sequence
  Synthetic oligonucleotide
ctgtcgaagacgcgtgttcagaagccgcga

SEQ ID NO: 89250 - DNA, 30 bp, Artificial Sequence
  Synthetic oligonucleotide
cctccgtgtaacggctaccggatcgcgcga

SEQ ID NO: 89251 - DNA, 30 bp, Artificial Sequence
  Synthetic oligonucleotide
ctcgacgtgcgctagagcccacatgcgcga

SEQ ID NO: 89252 - DNA, 30 bp, Artificial Sequence
  Synthetic oligonucleotide
aattagtgaccttcacgattagcatcgcga

SEQ ID NO: 89253 - DNA, 30 bp, Artificial Sequence
  Synthetic oligonucleotide
atggggcgagcagtatgacattacaggcga

SEQ ID NO: 89254 - DNA, 30 bp, Artificial Sequence
  Synthetic oligonucleotide
gaggaattccaggcgttatggcggaggcga

SEQ ID NO: 89255 - DNA, 30 bp, Artificial Sequence
  Synthetic oligonucleotide
ggagcaagagctaaattcaagatacggcga

SEQ ID NO: 89256 - DNA, 30 bp, Artificial Sequence
  Synthetic oligonucleotide
acttatgccttatcagcagatatacggcga

SEQ ID NO: 89257 - DNA, 30 bp, Artificial Sequence
  Synthetic oligonucleotide
cagttacatctcgggaggaatcaggggcga

SEQ ID NO: 89258 - DNA, 30 bp, Artificial Sequence
  Synthetic oligonucleotide
gtaacatatttaggggagtgtaaaatgcga

SEQ ID NO: 89259 - DNA, 30 bp, Artificial Sequence
  Synthetic oligonucleotide
gcccgcaaaacagagttacacaggatgcga

SEQ ID NO: 89260 - DNA, 30 bp, Artificial Sequence
  Synthetic oligonucleotide
ccgtaagccgccaatggaattcagctgcga

SEQ ID NO: 89261 - DNA, 30 bp, Artificial Sequence
  Synthetic oligonucleotide
agtttcaagcgcgttgggtaggagctgcga

SEQ ID NO: 89262 - DNA, 30 bp, Artificial Sequence
  Synthetic oligonucleotide
cgctctcgtctctcaacaaggcaggtgcga

SEQ ID NO: 89263 - DNA, 30 bp, Artificial Sequence
  Synthetic oligonucleotide
gcgtcgtgttgctagccctaggttcatcga

SEQ ID NO: 89264 - DNA, 30 bp, Artificial Sequence
  Synthetic oligonucleotide
tctggaactgaattgggattgtttcatcga

SEQ ID NO: 89265 - DNA, 30 bp, Artificial Sequence
  Synthetic oligonucleotide
gcagaacattaaagttgagaagtagatcga

SEQ ID NO: 89266 - DNA, 30 bp, Artificial Sequence
  Synthetic oligonucleotide
gtaaggttactgggtagcgccacggatcga

SEQ ID NO: 89267 - DNA, 30 bp, Artificial Sequence
  Synthetic oligonucleotide
tgtgggggaaggggggcgttggatgatcga

SEQ ID NO: 89268 - DNA, 30 bp, Artificial Sequence
  Synthetic oligonucleotide
tgcggcctcacccacaatcaatttgatcga

SEQ ID NO: 89269 - DNA, 30 bp, Artificial Sequence
  Synthetic oligonucleotide
ggaggacgttttctgtagaaccaccctcga

SEQ ID NO: 89270 - DNA, 30 bp, Artificial Sequence
  Synthetic oligonucleotide
caaactttctcgaacttgtagccgcctcga

SEQ ID NO: 89271 - DNA, 30 bp, Artificial Sequence
  Synthetic oligonucleotide
tcaaagggacagtctaattgcgcagctcga

SEQ ID NO: 89272 - DNA, 30 bp, Artificial Sequence
  Synthetic oligonucleotide
gaacacggtattacaactagatgagctcga

SEQ ID NO: 89273 - DNA, 30 bp, Artificial Sequence
  Synthetic oligonucleotide
cgcgagacgttggttacgagattagctcga

SEQ ID NO: 89274 - DNA, 30 bp, Artificial Sequence
  Synthetic oligonucleotide
cgcggaggtaggggcattacagaggctcga

SEQ ID NO: 89275 - DNA, 30 bp, Artificial Sequence
  Synthetic oligonucleotide
tcactgagacgatcggtaccggttgctcga

SEQ ID NO: 89276 - DNA, 30 bp, Artificial Sequence
  Synthetic oligonucleotide
ctgaatgataatcacgtctcttattctcga

SEQ ID NO: 89277 - DNA, 30 bp, Artificial Sequence
  Synthetic oligonucleotide
agagcaaaatataggctaattggcagtcga

SEQ ID NO: 89278 - DNA, 30 bp, Artificial Sequence
  Synthetic oligonucleotide
aaagccaaaagaggtacgaagcgtcgtcga

SEQ ID NO: 89279 - DNA, 30 bp, Artificial Sequence
  Synthetic oligonucleotide
gacgatcttgcttatgagggataatgtcga

SEQ ID NO: 89280 - DNA, 30 bp, Artificial Sequence
  Synthetic oligonucleotide
tgtttggctacctattaaccgaggtgtcga

SEQ ID NO: 89281 - DNA, 30 bp, Artificial Sequence
  Synthetic oligonucleotide
ctgcgaaatgcccccaaggttgggtgtcga

SEQ ID NO: 89282 - DNA, 30 bp, Artificial Sequence
  Synthetic oligonucleotide
cgtgggcaatgtcgaacacgtacgattcga

SEQ ID NO: 89283 - DNA, 30 bp, Artificial Sequence
  Synthetic oligonucleotide
acagtaacatgtggcaatgtggtccttcga

SEQ ID NO: 89284 - DNA, 30 bp, Artificial Sequence
  Synthetic oligonucleotide
tgggcatcattccaaatctgccaggttcga

SEQ ID NO: 89285 - DNA, 30 bp, Artificial Sequence
  Synthetic oligonucleotide
cgtggtgacgggcgtgcattccgtgttcga

SEQ ID NO: 89286 - DNA, 30 bp, Artificial Sequence
  Synthetic oligonucleotide
gcggtagatggtcgattcctacttgttcga

SEQ ID NO: 89287 - DNA, 30 bp, Artificial Sequence
  Synthetic oligonucleotide
ggaagattggacgtgggacgcgcaaaagga

SEQ ID NO: 89288 - DNA, 30 bp, Artificial Sequence
  Synthetic oligonucleotide
ccttacaagccttgccgtcgtataaaagga

SEQ ID NO: 89289 - DNA, 30 bp, Artificial Sequence
  Synthetic oligonucleotide
gctgacgcgaatctcgtaagttagaaagga

SEQ ID NO: 89290 - DNA, 30 bp, Artificial Sequence
  Synthetic oligonucleotide
cggatatgtttgaagtagtgaacgaaagga

SEQ ID NO: 89291 - DNA, 30 bp, Artificial Sequence
  Synthetic oligonucleotide
acacgtgggaaccgtatattttgacaagga

SEQ ID NO: 89292 - DNA, 30 bp, Artificial Sequence
  Synthetic oligonucleotide
acgagttgtgacagtgtttcgtggcaagga

SEQ ID NO: 89293 - DNA, 30 bp, Artificial Sequence
  Synthetic oligonucleotide
tgtccagttcattacatctccatcgaagga

SEQ ID NO: 89294 - DNA, 30 bp, Artificial Sequence
  Synthetic oligonucleotide
tgctgctgtcaaaaggtcaaatgggaagga

SEQ ID NO: 89295 - DNA, 30 bp, Artificial Sequence
  Synthetic oligonucleotide
cacaagatggacgacgcggaaactgaagga

SEQ ID NO: 89296 - DNA, 30 bp, Artificial Sequence
  Synthetic oligonucleotide
ctttatcaaagaaattgaatcgcataagga

SEQ ID NO: 89297 - DNA, 30 bp, Artificial Sequence
  Synthetic oligonucleotide
ttagatacgccgtctgatagcgactaagga

SEQ ID NO: 89298 - DNA, 31 bp, Artificial Sequence
  Synthetic oligonucleotide
gcttagggagggaaacaaatgtatctaagga

SEQ ID NO: 89299 - DNA, 30 bp, Artificial Sequence
  Synthetic oligonucleotide
taacctgggattgggcaagaattttaagga

SEQ ID NO: 89300 - DNA, 30 bp, Artificial Sequence
  Synthetic oligonucleotide
gcagccgtcaggctagacacattttaagga

SEQ ID NO: 89301 - DNA, 30 bp, Artificial Sequence
  Synthetic oligonucleotide
aagactcgtgggggtaagacgttcacagga

SEQ ID NO: 89302 - DNA, 31 bp, Artificial Sequence
  Synthetic oligonucleotide
aggtgtcatacccgcacagccgacgacagga

SEQ ID NO: 89303 - DNA, 30 bp, Artificial Sequence
  Synthetic oligonucleotide
catgattgagaagtggtagttcggacagga

SEQ ID NO: 89304 - DNA, 30 bp, Artificial Sequence
  Synthetic oligonucleotide
gtctacgaaagtcgcgttcgtcatacagga

SEQ ID NO: 89305 - DNA, 30 bp, Artificial Sequence
  Synthetic oligonucleotide
ccaacgtcgaagtgcattaaggatacagga

SEQ ID NO: 89306 - DNA, 30 bp, Artificial Sequence
  Synthetic oligonucleotide
atggtgagcttcgaggtcggtagaccagga

SEQ ID NO: 89307 - DNA, 30 bp, Artificial Sequence
  Synthetic oligonucleotide
cagtaaagggcccctgatatttgaccagga

SEQ ID NO: 89308 - DNA, 30 bp, Artificial Sequence
  Synthetic oligonucleotide
gtcattggcaaacgtaccaccggcccagga

SEQ ID NO: 89309 - DNA, 30 bp, Artificial Sequence
  Synthetic oligonucleotide
cggaccttctgaggaacgattgcgccagga

SEQ ID NO: 89310 - DNA, 30 bp, Artificial Sequence
  Synthetic oligonucleotide
gcctagcggcgcgggtgaatattagcagga

SEQ ID NO: 89311 - DNA, 30 bp, Artificial Sequence
  Synthetic oligonucleotide
ataaacgaaacatcggactatcgtgcagga

SEQ ID NO: 89312 - DNA, 30 bp, Artificial Sequence
  Synthetic oligonucleotide
agcgcagttagggacaaattcgtcagagga

SEQ ID NO: 89313 - DNA, 30 bp, Artificial Sequence
  Synthetic oligonucleotide
gaggatccactcgtgaggggcgagagagga

SEQ ID NO: 89314 - DNA, 30 bp, Artificial Sequence
  Synthetic oligonucleotide
taccacgtacagtcttgggttacgagagga

SEQ ID NO: 89315 - DNA, 30 bp, Artificial Sequence
  Synthetic oligonucleotide
tggttacaaattggggagcgggttagagga

SEQ ID NO: 89316 - DNA, 30 bp, Artificial Sequence
  Synthetic oligonucleotide
ttattctgaaggcacttcagggaacgagga

SEQ ID NO: 89317 - DNA, 30 bp, Artificial Sequence
  Synthetic oligonucleotide
ggctcaaacgggtataagaacgcacgagga

SEQ ID NO: 89318 - DNA, 30 bp, Artificial Sequence
  Synthetic oligonucleotide
gggtaaagggtgtgattgactcgccgagga

SEQ ID NO: 89319 - DNA, 30 bp, Artificial Sequence
  Synthetic oligonucleotide
aaataattaacaagagaagaggtccgagga

SEQ ID NO: 89320 - DNA, 30 bp, Artificial Sequence
  Synthetic oligonucleotide
taatggtgaagtggttccgcctggcgagga

SEQ ID NO: 89321 - DNA, 30 bp, Artificial Sequence
  Synthetic oligonucleotide
gctggagcacgacggaactctagtcgagga

SEQ ID NO: 89322 - DNA, 30 bp, Artificial Sequence
  Synthetic oligonucleotide
cgagcataagtcgaaatttaatgaggagga

SEQ ID NO: 89323 - DNA, 30 bp, Artificial Sequence
  Synthetic oligonucleotide
cgaggcaaaaatgttgtggatccgggagga

SEQ ID NO: 89324 - DNA, 30 bp, Artificial Sequence
  Synthetic oligonucleotide
cagaactgcgcgcgaccagcgacctgagga

SEQ ID NO: 89325 - DNA, 30 bp, Artificial Sequence
  Synthetic oligonucleotide
tactcaccacctgcatgctgaacgtgagga

SEQ ID NO: 89326 - DNA, 30 bp, Artificial Sequence
  Synthetic oligonucleotide
gttcgcggcaagtaacagaggtgaatagga

SEQ ID NO: 89327 - DNA, 30 bp, Artificial Sequence
  Synthetic oligonucleotide
cacgtcaaccctgtaactttgtgaatagga

SEQ ID NO: 89328 - DNA, 30 bp, Artificial Sequence
  Synthetic oligonucleotide
cttggggttacggggttagtagtaatagga

SEQ ID NO: 89329 - DNA, 30 bp, Artificial Sequence
  Synthetic oligonucleotide
taagaggaagcgtacgaccaaaacatagga

SEQ ID NO: 89330 - DNA, 30 bp, Artificial Sequence
  Synthetic oligonucleotide
gtcggatcgacagcaggggtaccactagga

SEQ ID NO: 89331 - DNA, 30 bp, Artificial Sequence
  Synthetic oligonucleotide
ctgggtagtggaaactcaaaggcactagga

SEQ ID NO: 89332 - DNA, 30 bp, Artificial Sequence
  Synthetic oligonucleotide
tgcaggagtgagttggtagataacctagga

SEQ ID NO: 89333 - DNA, 30 bp, Artificial Sequence
  Synthetic oligonucleotide
cctgattgagcgactcggaggcaggtagga

SEQ ID NO: 89334 - DNA, 30 bp, Artificial Sequence
  Synthetic oligonucleotide
taagtaggtgctgaacacgctactgtagga

SEQ ID NO: 89335 - DNA, 30 bp, Artificial Sequence
  Synthetic oligonucleotide
tgagtgcaccgggcgagatcggccttagga

SEQ ID NO: 89336 - DNA, 30 bp, Artificial Sequence
  Synthetic oligonucleotide
gcgtatcccagcgacttaacgaaaaacgga

SEQ ID NO: 89337 - DNA, 30 bp, Artificial Sequence
  Synthetic oligonucleotide
ccccaatgtccacaagccttacaaaacgga

SEQ ID NO: 89338 - DNA, 30 bp, Artificial Sequence
  Synthetic oligonucleotide
ttgcacgatccggaattatctagcaacgga

SEQ ID NO: 89339 - DNA, 30 bp, Artificial Sequence
  Synthetic oligonucleotide
taaggaattatatccgggaccggcaacgga

SEQ ID NO: 89340 - DNA, 30 bp, Artificial Sequence
  Synthetic oligonucleotide
tcgtaggagctaaaaggtgaatggaacgga

SEQ ID NO: 89341 - DNA, 30 bp, Artificial Sequence
  Synthetic oligonucleotide
gcgcgtccaaggaaccttcgaattaacgga

SEQ ID NO: 89342 - DNA, 30 bp, Artificial Sequence
  Synthetic oligonucleotide
gcacgagaggtgcgttccggcggcgacgga

SEQ ID NO: 89343 - DNA, 30 bp, Artificial Sequence
  Synthetic oligonucleotide
gaagaccggaatcaaacacaagaatacgga

SEQ ID NO: 89344 - DNA, 30 bp, Artificial Sequence
  Synthetic oligonucleotide
cgtttgagacagggagtgttgacgtacgga

SEQ ID NO: 89345 - DNA, 30 bp, Artificial Sequence
  Synthetic oligonucleotide
acatccccttgagcctcaggaaacaccgga

SEQ ID NO: 89346 - DNA, 30 bp, Artificial Sequence
  Synthetic oligonucleotide
aacgagacttagcatggacatcctaccgga

SEQ ID NO: 89347 - DNA, 30 bp, Artificial Sequence
  Synthetic oligonucleotide
taagtgtggcgcacccagtgccgtaccgga

SEQ ID NO: 89348 - DNA, 30 bp, Artificial Sequence
  Synthetic oligonucleotide
ataagcctactatctggtacaccccccgga

SEQ ID NO: 89349 - DNA, 30 bp, Artificial Sequence
  Synthetic oligonucleotide
aggtatcgatttgtgactcgtagccccgga

SEQ ID NO: 89350 - DNA, 30 bp, Artificial Sequence
  Synthetic oligonucleotide
cgaaagaaggccgatgcgcactcgcccgga

SEQ ID NO: 89351 - DNA, 30 bp, Artificial Sequence
  Synthetic oligonucleotide
aacacagtcgatgggcgccatacatccgga

SEQ ID NO: 89352 - DNA, 30 bp, Artificial Sequence
  Synthetic oligonucleotide
actgttcctcggttcaatacatcctccgga

SEQ ID NO: 89353 - DNA, 30 bp, Artificial Sequence
  Synthetic oligonucleotide
tgaagggtcctgataaaacgagcgtccgga

SEQ ID NO: 89354 - DNA, 30 bp, Artificial Sequence
  Synthetic oligonucleotide
caaagggcgaaagtgaatacggtgtccgga

SEQ ID NO: 89355 - DNA, 30 bp, Artificial Sequence
  Synthetic oligonucleotide
atacgacgggaacttgaatatcattccgga

SEQ ID NO: 89356 - DNA, 30 bp, Artificial Sequence
  Synthetic oligonucleotide
aagagctaaattagatttgtcacaagcgga

SEQ ID NO: 89357 - DNA, 30 bp, Artificial Sequence
  Synthetic oligonucleotide
ttcggccgtccggagatccaaaccagcgga

SEQ ID NO: 89358 - DNA, 30 bp, Artificial Sequence
  Synthetic oligonucleotide
aggtacgggtgcaggaaagggaggagcgga

SEQ ID NO: 89359 - DNA, 30 bp, Artificial Sequence
  Synthetic oligonucleotide
tcacatggtatctagtggaacgcgcgcgga

SEQ ID NO: 89360 - DNA, 30 bp, Artificial Sequence
  Synthetic oligonucleotide
attctaatagccatagagagtgtcggcgga

SEQ ID NO: 89361 - DNA, 30 bp, Artificial Sequence
  Synthetic oligonucleotide
tcactacacaacgactcagccggtggcgga

SEQ ID NO: 89362 - DNA, 30 bp, Artificial Sequence
  Synthetic oligonucleotide
tcgcgctcgtccccatcataaggctgcgga

SEQ ID NO: 89363 - DNA, 30 bp, Artificial Sequence
  Synthetic oligonucleotide
agaaatgctgtgcaggtttaaccgtgcgga

SEQ ID NO: 89364 - DNA, 30 bp, Artificial Sequence
  Synthetic oligonucleotide
tccagaaatgttaatttacaagcttgcgga

SEQ ID NO: 89365 - DNA, 30 bp, Artificial Sequence
  Synthetic oligonucleotide
gcgcaaccgcacatagtcagagtaatcgga

SEQ ID NO: 89366 - DNA, 30 bp, Artificial Sequence
  Synthetic oligonucleotide
ttcgaaatcattgcccccatagtgatcgga

SEQ ID NO: 89367 - DNA, 30 bp, Artificial Sequence
  Synthetic oligonucleotide
ttacagagacttcgttaaagattgatcgga

SEQ ID NO: 89368 - DNA, 30 bp, Artificial Sequence
  Synthetic oligonucleotide
caaggtagtaacgggagctgttgtctcgga

SEQ ID NO: 89369 - DNA, 30 bp, Artificial Sequence
  Synthetic oligonucleotide
agcaggcgaacgctgacattgcgagtcgga

SEQ ID NO: 89370 - DNA, 30 bp, Artificial Sequence
  Synthetic oligonucleotide
agaccatctcattgtgctacaggagtcgga

SEQ ID NO: 89371 - DNA, 30 bp, Artificial Sequence
  Synthetic oligonucleotide
gctaggagaactctacggtccagggtcgga

SEQ ID NO: 89372 - DNA, 30 bp, Artificial Sequence
  Synthetic oligonucleotide
taccgacgatagaaatctcatcgattcgga

SEQ ID NO: 89373 - DNA, 30 bp, Artificial Sequence
  Synthetic oligonucleotide
tcgatgaatcttagggctctcagaaaggga

SEQ ID NO: 89374 - DNA, 30 bp, Artificial Sequence
  Synthetic oligonucleotide
gatcgttcgaggccggaattcaataaggga

SEQ ID NO: 89375 - DNA, 30 bp, Artificial Sequence
  Synthetic oligonucleotide
taggatacgcaccaggtttaaatccaggga

SEQ ID NO: 89376 - DNA, 30 bp, Artificial Sequence
  Synthetic oligonucleotide
cactaacaagtgtacggaattgaagaggga

SEQ ID NO: 89377 - DNA, 30 bp, Artificial Sequence
  Synthetic oligonucleotide
aagggcaggtaaggtaaacccgtagaggga

SEQ ID NO: 89378 - DNA, 30 bp, Artificial Sequence
  Synthetic oligonucleotide
tctgggatcgattatagcaagtacgaggga

SEQ ID NO: 89379 - DNA, 30 bp, Artificial Sequence
  Synthetic oligonucleotide
agggaccatccgtctcgggactactaggga

SEQ ID NO: 89380 - DNA, 30 bp, Artificial Sequence
  Synthetic oligonucleotide
agtcggtgacactgcgataccggctaggga

SEQ ID NO: 89381 - DNA, 30 bp, Artificial Sequence
  Synthetic oligonucleotide
aggaagcgaatcctatggctgctaccggga

SEQ ID NO: 89382 - DNA, 30 bp, Artificial Sequence
  Synthetic oligonucleotide
atgggttaatcggagtgtgtatacccggga

SEQ ID NO: 89383 - DNA, 30 bp, Artificial Sequence
  Synthetic oligonucleotide
agagcaccatcgatgatcgtccacgcggga

SEQ ID NO: 89384 - DNA, 30 bp, Artificial Sequence
  Synthetic oligonucleotide
cacggtaccgatataaagatcctatcggga

SEQ ID NO: 89385 - DNA, 30 bp, Artificial Sequence
  Synthetic oligonucleotide
gtgtcatttcagtaggtcaccaagtcggga

SEQ ID NO: 89386 - DNA, 30 bp, Artificial Sequence
  Synthetic oligonucleotide
ctcgtaggtagggtggagggaaggtcggga

SEQ ID NO: 89387 - DNA, 31 bp, Artificial Sequence
  Synthetic oligonucleotide
atgagtcttcgtcgtgttacccatcagggga

SEQ ID NO: 89388 - DNA, 30 bp, Artificial Sequence
  Synthetic oligonucleotide
tgagcaactaagaactgattcatgagggga

SEQ ID NO: 89389 - DNA, 30 bp, Artificial Sequence
  Synthetic oligonucleotide
ggatatcatgcaccgccgatcgtcggggga

SEQ ID NO: 89390 - DNA, 30 bp, Artificial Sequence
  Synthetic oligonucleotide
gcttagtatcggatcaacgagtcgggggga

SEQ ID NO: 89391 - DNA, 40 bp, Artificial Sequence
  Synthetic oligonucleotide
aagataatacattcctggtatggtcggggatcggggggga

SEQ ID NO: 89392 - DNA, 39 bp, Artificial Sequence
  Synthetic oligonucleotide
aagataatacattcatggttggtcggggatcggggggga

SEQ ID NO: 89393 - DNA, 30 bp, Artificial Sequence
  Synthetic oligonucleotide
tcaagataccgtgcaaacctggaatgggga

SEQ ID NO: 89394 - DNA, 30 bp, Artificial Sequence
  Synthetic oligonucleotide
ctccagagcactgttagcaggaggtgggga

SEQ ID NO: 89395 - DNA, 30 bp, Artificial Sequence
  Synthetic oligonucleotide
agtgaggaatcgttgtgtcgcctgtgggga

SEQ ID NO: 89396 - DNA, 30 bp, Artificial Sequence
  Synthetic oligonucleotide
catgataggtagcggtttgtgccttgggga

SEQ ID NO: 89397 - DNA, 30 bp, Artificial Sequence
  Synthetic oligonucleotide
agagaggggatatcgatacaccaaatggga

SEQ ID NO: 89398 - DNA, 30 bp, Artificial Sequence
  Synthetic oligonucleotide
gcgcacggcgacgcggagaaggaaatggga

SEQ ID NO: 89399 - DNA, 30 bp, Artificial Sequence
  Synthetic oligonucleotide
ttgagatgttaggtgatactaagaatggga

SEQ ID NO: 89400 - DNA, 30 bp, Artificial Sequence
  Synthetic oligonucleotide
agcagcgcggcggaggttggggacatggga

SEQ ID NO: 89401 - DNA, 30 bp, Artificial Sequence
  Synthetic oligonucleotide
ggaggcggtatactattaaaaatcatggga

SEQ ID NO: 89402 - DNA, 30 bp, Artificial Sequence
  Synthetic oligonucleotide
agatgaaagtggtctaaggaaattatggga

SEQ ID NO: 89403 - DNA, 30 bp, Artificial Sequence
  Synthetic oligonucleotide
acaacctcagaagtgtttcggtgagtggga

SEQ ID NO: 89404 - DNA, 30 bp, Artificial Sequence
  Synthetic oligonucleotide
aaaggctaaagcataatgtgagtattggga

SEQ ID NO: 89405 - DNA, 30 bp, Artificial Sequence
  Synthetic oligonucleotide
atacggtcaacatgcaaaaattacttggga

SEQ ID NO: 89406 - DNA, 30 bp, Artificial Sequence
  Synthetic oligonucleotide
ggacacaaattacggtggcgcataaatgga

SEQ ID NO: 89407 - DNA, 30 bp, Artificial Sequence
  Synthetic oligonucleotide
acagctaaacatgacgagaggaggaatgga

SEQ ID NO: 89408 - DNA, 30 bp, Artificial Sequence
  Synthetic oligonucleotide
ttaggcttggtgtgcagggacttgaatgga

SEQ ID NO: 89409 - DNA, 30 bp, Artificial Sequence
  Synthetic oligonucleotide
ggcccacctagtatctcactctggcatgga

SEQ ID NO: 89410 - DNA, 30 bp, Artificial Sequence
  Synthetic oligonucleotide
ggtggggaggtaccaacgacaacagatgga

SEQ ID NO: 89411 - DNA, 30 bp, Artificial Sequence
  Synthetic oligonucleotide
agagctttaacggaaagggaatacgatgga

SEQ ID NO: 89412 - DNA, 30 bp, Artificial Sequence
  Synthetic oligonucleotide
ggattcaaaaacctggcagcattatatgga

SEQ ID NO: 89413 - DNA, 30 bp, Artificial Sequence
  Synthetic oligonucleotide
atgtggaaacagaggcaacgcttgtatgga

SEQ ID NO: 89414 - DNA, 30 bp, Artificial Sequence
  Synthetic oligonucleotide
tacaaatcaggtttgtcaattcgttatgga

SEQ ID NO: 89415 - DNA, 31 bp, Artificial Sequence
  Synthetic oligonucleotide
cgtgctggttaagggttcctcttgttatgga

SEQ ID NO: 89416 - DNA, 30 bp, Artificial Sequence
  Synthetic oligonucleotide
cgtaaatagccacgcaataaagaaactgga

SEQ ID NO: 89417 - DNA, 30 bp, Artificial Sequence
  Synthetic oligonucleotide
cgtaccacttccaactgggtcagaactgga

SEQ ID NO: 89418 - DNA, 30 bp, Artificial Sequence
  Synthetic oligonucleotide
ggaggtgtagtgttcgcttagcggactgga

SEQ ID NO: 89419 - DNA, 30 bp, Artificial Sequence
  Synthetic oligonucleotide
caagtatgttgtggggtctagcttcctgga

SEQ ID NO: 89420 - DNA, 30 bp, Artificial Sequence
  Synthetic oligonucleotide
acgtaaaaggcctaaagtaagaaagctgga

SEQ ID NO: 89421 - DNA, 30 bp, Artificial Sequence
  Synthetic oligonucleotide
cgcccagatagtgaaccaaagcaggctgga

SEQ ID NO: 89422 - DNA, 30 bp, Artificial Sequence
  Synthetic oligonucleotide
gcgtgcacagagttccctcacgctgctgga

SEQ ID NO: 89423 - DNA, 30 bp, Artificial Sequence
  Synthetic oligonucleotide
catgcccccaggcatcgatggaactctgga

SEQ ID NO: 89424 - DNA, 30 bp, Artificial Sequence
  Synthetic oligonucleotide
ggacagacaactatgtaattcgctagtgga

SEQ ID NO: 89425 - DNA, 30 bp, Artificial Sequence
  Synthetic oligonucleotide
aggtgaggctaaaaagctgactaacgtgga

SEQ ID NO: 89426 - DNA, 30 bp, Artificial Sequence
  Synthetic oligonucleotide
gttccgctatccgaaagcgcaatccgtgga

SEQ ID NO: 89427 - DNA, 30 bp, Artificial Sequence
  Synthetic oligonucleotide
ctgtgtacgcaagtatggttgaagcgtgga

SEQ ID NO: 89428 - DNA, 30 bp, Artificial Sequence
  Synthetic oligonucleotide
gacgcgatcaagtttagaggtgtaggtgga

SEQ ID NO: 89429 - DNA, 30 bp, Artificial Sequence
  Synthetic oligonucleotide
cactgcgcaacggcttacacggacggtgga

SEQ ID NO: 89430 - DNA, 30 bp, Artificial Sequence
  Synthetic oligonucleotide
taaactggcggaccatttgtcagcggtgga

SEQ ID NO: 89431 - DNA, 30 bp, Artificial Sequence
  Synthetic oligonucleotide
ccatcaacattcaggctgagaggtggtgga

SEQ ID NO: 89432 - DNA, 30 bp, Artificial Sequence
  Synthetic oligonucleotide
taagctgggttagagatggctgtttgtgga

SEQ ID NO: 89433 - DNA, 30 bp, Artificial Sequence
  Synthetic oligonucleotide
agccagtagtataatccaaagaacattgga

SEQ ID NO: 89434 - DNA, 30 bp, Artificial Sequence
  Synthetic oligonucleotide
gggtgaatggaaaagttggctcgtattgga

SEQ ID NO: 89435 - DNA, 30 bp, Artificial Sequence
  Synthetic oligonucleotide
caacaaaaggaaagacagttaacccttgga

SEQ ID NO: 89436 - DNA, 30 bp, Artificial Sequence
  Synthetic oligonucleotide
tgggggtcttctcaaacagtggtgcttgga

SEQ ID NO: 89437 - DNA, 30 bp, Artificial Sequence
  Synthetic oligonucleotide
ttgacagcatgaattgaaagtgtgcttgga

SEQ ID NO: 89438 - DNA, 30 bp, Artificial Sequence
  Synthetic oligonucleotide
ataccaggtagactagtgcgcaaagttgga

SEQ ID NO: 89439 - DNA, 30 bp, Artificial Sequence
  Synthetic oligonucleotide
ggataaggtaccccacaataacaagttgga

SEQ ID NO: 89440 - DNA, 30 bp, Artificial Sequence
  Synthetic oligonucleotide
cggaaagtttgttaagacataagagttgga

SEQ ID NO: 89441 - DNA, 30 bp, Artificial Sequence
  Synthetic oligonucleotide
taatgtaactagaagtaggacgcggttgga

SEQ ID NO: 89442 - DNA, 30 bp, Artificial Sequence
  Synthetic oligonucleotide
tgggcctgtcaagggaggtacaaatttgga

SEQ ID NO: 89443 - DNA, 30 bp, Artificial Sequence
  Synthetic oligonucleotide
tgtaagctggacagactcaccgaaaaatga

SEQ ID NO: 89444 - DNA, 30 bp, Artificial Sequence
  Synthetic oligonucleotide
tggaaggctcctagctaaaagctaaaatga

SEQ ID NO: 89445 - DNA, 30 bp, Artificial Sequence
  Synthetic oligonucleotide
gttcctcagagttccaactatacgaaatga

SEQ ID NO: 89446 - DNA, 30 bp, Artificial Sequence
  Synthetic oligonucleotide
gagcaggggtttataatgggaatgaaatga

SEQ ID NO: 89447 - DNA, 30 bp, Artificial Sequence
  Synthetic oligonucleotide
taatgctactgaaagctaatgaaagaatga

SEQ ID NO: 89448 - DNA, 30 bp, Artificial Sequence
  Synthetic oligonucleotide
cacgcgtaaagacaagtgttctgcgaatga

SEQ ID NO: 89449 - DNA, 30 bp, Artificial Sequence
  Synthetic oligonucleotide
gaacgagagcacttgtgatgccgataatga

SEQ ID NO: 89450 - DNA, 30 bp, Artificial Sequence
  Synthetic oligonucleotide
caaaactttctagtaagcgaaccctaatga

SEQ ID NO: 89451 - DNA, 30 bp, Artificial Sequence
  Synthetic oligonucleotide
ctatcttagtcagtcgagtgtgcgtaatga

SEQ ID NO: 89452 - DNA, 30 bp, Artificial Sequence
  Synthetic oligonucleotide
cgcatagaaattgcccaagaaaagccatga

SEQ ID NO: 89453 - DNA, 30 bp, Artificial Sequence
  Synthetic oligonucleotide
tggtccactatctgttaatccgagccatga

SEQ ID NO: 89454 - DNA, 30 bp, Artificial Sequence
  Synthetic oligonucleotide
gcgcaccgctaacagacgaacgaagcatga

SEQ ID NO: 89455 - DNA, 30 bp, Artificial Sequence
  Synthetic oligonucleotide
gggaaaaattgggggggttgtgcgtcatga

SEQ ID NO: 89456 - DNA, 30 bp, Artificial Sequence
  Synthetic oligonucleotide
ctagacgtaagccaagtgagatattcatga

SEQ ID NO: 89457 - DNA, 30 bp, Artificial Sequence
  Synthetic oligonucleotide
tgccctccaaggaaatgcaagttaagatga

SEQ ID NO: 89458 - DNA, 30 bp, Artificial Sequence
  Synthetic oligonucleotide
gggccccgggtgacatgggcacgacgatga

SEQ ID NO: 89459 - DNA, 30 bp, Artificial Sequence
  Synthetic oligonucleotide
tcgtcgggcaatcgcgccttggggggatga

SEQ ID NO: 89460 - DNA, 34 bp, Artificial Sequence
  Synthetic oligonucleotide
cttaatccccactcggtacattcccacaatatga

SEQ ID NO: 89461 - DNA, 30 bp, Artificial Sequence
  Synthetic oligonucleotide
tcgtcttctaagacatcgagattgatatga

SEQ ID NO: 89462 - DNA, 30 bp, Artificial Sequence
  Synthetic oligonucleotide
gcgtcattagaagccgagtgtaaggtatga

SEQ ID NO: 89463 - DNA, 30 bp, Artificial Sequence
  Synthetic oligonucleotide
atgcaggggttcgctacttggcaggtatga

SEQ ID NO: 89464 - DNA, 31 bp, Artificial Sequence
  Synthetic oligonucleotide
ctgaactattaggaagttgcaatctgtatga

SEQ ID NO: 89465 - DNA, 30 bp, Artificial Sequence
  Synthetic oligonucleotide
agcggcgacacccatgaatggatcttatga

SEQ ID NO: 89466 - DNA, 30 bp, Artificial Sequence
  Synthetic oligonucleotide
cgaactcaagtattcgggactcataactga

SEQ ID NO: 89467 - DNA, 30 bp, Artificial Sequence
  Synthetic oligonucleotide
ttcatcgcgagggacatggataagcactga

SEQ ID NO: 89468 - DNA, 30 bp, Artificial Sequence
  Synthetic oligonucleotide
ggtgagttcgaagcttagaacagagactga

SEQ ID NO: 89469 - DNA, 30 bp, Artificial Sequence
  Synthetic oligonucleotide
taaggttacgggataccgtgatgctactga

SEQ ID NO: 89470 - DNA, 30 bp, Artificial Sequence
  Synthetic oligonucleotide
tgtaacaccttgcatagataaggcacctga

SEQ ID NO: 89471 - DNA, 30 bp, Artificial Sequence
  Synthetic oligonucleotide
ggagcggggtaccactctgcggtgacctga

SEQ ID NO: 89472 - DNA, 30 bp, Artificial Sequence
  Synthetic oligonucleotide
cagacgacactgtttggtgaacgtacctga

SEQ ID NO: 89473 - DNA, 30 bp, Artificial Sequence
  Synthetic oligonucleotide
aagaatagtaaataatctctcattgcctga

SEQ ID NO: 89474 - DNA, 30 bp, Artificial Sequence
  Synthetic oligonucleotide
ctagactacgaccctgctgtcccatcctga

SEQ ID NO: 89475 - DNA, 30 bp, Artificial Sequence
  Synthetic oligonucleotide
agaccgctgagtaggctgtgctgaagctga

SEQ ID NO: 89476 - DNA, 30 bp, Artificial Sequence
  Synthetic oligonucleotide
agcaagagaattcgattgagactgggctga

SEQ ID NO: 89477 - DNA, 30 bp, Artificial Sequence
  Synthetic oligonucleotide
cagaagcgcgcatgaggctggtatggctga

SEQ ID NO: 89478 - DNA, 30 bp, Artificial Sequence
  Synthetic oligonucleotide
tgagatcctatcgatcaacgttactgctga

SEQ ID NO: 89479 - DNA, 30 bp, Artificial Sequence
  Synthetic oligonucleotide
ccagcaacaaatacaccaccccgctgctga

SEQ ID NO: 89480 - DNA, 30 bp, Artificial Sequence
  Synthetic oligonucleotide
caggctaagcgtgggcctgtgtgtatctga

SEQ ID NO: 89481 - DNA, 30 bp, Artificial Sequence
  Synthetic oligonucleotide
agggatacacgtccgtgtgcacctgtctga

SEQ ID NO: 89482 - DNA, 30 bp, Artificial Sequence
  Synthetic oligonucleotide
atataagggatcgaacacgcatagaagtga

SEQ ID NO: 89483 - DNA, 30 bp, Artificial Sequence
  Synthetic oligonucleotide
ctcgctgtggaggggggctaataccagtga

SEQ ID NO: 89484 - DNA, 30 bp, Artificial Sequence
  Synthetic oligonucleotide
aggaaaagtgactagcagaagtaccagtga

SEQ ID NO: 89485 - DNA, 30 bp, Artificial Sequence
  Synthetic oligonucleotide
caagaccatatacgcaccgacccggagtga

SEQ ID NO: 89486 - DNA, 30 bp, Artificial Sequence
  Synthetic oligonucleotide
tatacctacgcgcagtggcgggtggagtga

SEQ ID NO: 89487 - DNA, 30 bp, Artificial Sequence
  Synthetic oligonucleotide
tccgtagtgagccacgtcacttcctagtga

SEQ ID NO: 89488 - DNA, 30 bp, Artificial Sequence
  Synthetic oligonucleotide
ggtcaaggtccgttggctcgagcgtagtga

SEQ ID NO: 89489 - DNA, 30 bp, Artificial Sequence
  Synthetic oligonucleotide
ctagctaagccacacaggaaagcaacgtga

SEQ ID NO: 89490 - DNA, 30 bp, Artificial Sequence
  Synthetic oligonucleotide
acggggtattataactacaacgacacgtga

SEQ ID NO: 89491 - DNA, 30 bp, Artificial Sequence
  Synthetic oligonucleotide
ggacgggacattcattcaaaggtcacgtga

SEQ ID NO: 89492 - DNA, 30 bp, Artificial Sequence
  Synthetic oligonucleotide
taagccacggggataaaatcacggtcgtga

SEQ ID NO: 89493 - DNA, 30 bp, Artificial Sequence
  Synthetic oligonucleotide
caataaccagtcagttaagccgataggtga

SEQ ID NO: 89494 - DNA, 30 bp, Artificial Sequence
  Synthetic oligonucleotide
tcgatgggtattgcacaatccccgcggtga

SEQ ID NO: 89495 - DNA, 30 bp, Artificial Sequence
  Synthetic oligonucleotide
taaccggcaatacgatataaagggcggtga

SEQ ID NO: 89496 - DNA, 30 bp, Artificial Sequence
  Synthetic oligonucleotide
acgttttcgagggacactcatcacgggtga

SEQ ID NO: 89497 - DNA, 30 bp, Artificial Sequence
  Synthetic oligonucleotide
ggggaccactggttgattgatttggggtga

SEQ ID NO: 89498 - DNA, 30 bp, Artificial Sequence
  Synthetic oligonucleotide
actcggagcatcgagaagcaaacgtggtga

SEQ ID NO: 89499 - DNA, 30 bp, Artificial Sequence
  Synthetic oligonucleotide
gccttgccctctgcgtaaaccaggtggtga

SEQ ID NO: 89500 - DNA, 30 bp, Artificial Sequence
  Synthetic oligonucleotide
agtactcactaagctgcggcactagtgtga

SEQ ID NO: 89501 - DNA, 30 bp, Artificial Sequence
  Synthetic oligonucleotide
ttagggcccagcactacatccgcaaattga

SEQ ID NO: 89502 - DNA, 30 bp, Artificial Sequence
  Synthetic oligonucleotide
cattaatcaggccgttaaatagaacattga

SEQ ID NO: 89503 - DNA, 30 bp, Artificial Sequence
  Synthetic oligonucleotide
ggaggaccatgggctacaaaagcacattga

SEQ ID NO: 89504 - DNA, 30 bp, Artificial Sequence
  Synthetic oligonucleotide
tagcgtacacgcggagtgaagagacattga

SEQ ID NO: 89505 - DNA, 30 bp, Artificial Sequence
  Synthetic oligonucleotide
caagtgtaagagcttgggcgattcgattga

SEQ ID NO: 89506 - DNA, 30 bp, Artificial Sequence
  Synthetic oligonucleotide
cgctgtgtgggcaccatggacaaggattga

SEQ ID NO: 89507 - DNA, 30 bp, Artificial Sequence
  Synthetic oligonucleotide
ctaggacgattactggatgtgccatattga

SEQ ID NO: 89508 - DNA, 30 bp, Artificial Sequence
  Synthetic oligonucleotide
catagaggacggctcgaatcccactattga

SEQ ID NO: 89509 - DNA, 30 bp, Artificial Sequence
  Synthetic oligonucleotide
ccatggagagtcatgcagagacagtattga

SEQ ID NO: 89510 - DNA, 30 bp, Artificial Sequence
  Synthetic oligonucleotide
acgtgccccgaacccgggatacggtattga

SEQ ID NO: 89511 - DNA, 30 bp, Artificial Sequence
  Synthetic oligonucleotide
tatggaagaccccatgacaaaaaaacttga

SEQ ID NO: 89512 - DNA, 30 bp, Artificial Sequence
  Synthetic oligonucleotide
tatcatcaggggcaatgcgtcccaacttga

SEQ ID NO: 89513 - DNA, 30 bp, Artificial Sequence
  Synthetic oligonucleotide
atctaaaccgaggtagcaggatgaacttga

SEQ ID NO: 89514 - DNA, 30 bp, Artificial Sequence
  Synthetic oligonucleotide
atgctgcttgctagaaagtacagcacttga

SEQ ID NO: 89515 - DNA, 30 bp, Artificial Sequence
  Synthetic oligonucleotide
taccggacttacacggataacaccccttga

SEQ ID NO: 89516 - DNA, 30 bp, Artificial Sequence
  Synthetic oligonucleotide
caccagataagggtacctgagataagttga

SEQ ID NO: 89517 - DNA, 30 bp, Artificial Sequence
  Synthetic oligonucleotide
ccgtgagggatgcgggctgtggaaggttga

SEQ ID NO: 89518 - DNA, 30 bp, Artificial Sequence
  Synthetic oligonucleotide
ttgactgttagaactaatctccgcggttga

SEQ ID NO: 89519 - DNA, 30 bp, Artificial Sequence
  Synthetic oligonucleotide
catcaagagggaataacccaatggtgttga

SEQ ID NO: 89520 - DNA, 30 bp, Artificial Sequence
  Synthetic oligonucleotide
cagcgtatacaagcatggcgaggagtttga

SEQ ID NO: 89521 - DNA, 30 bp, Artificial Sequence
  Synthetic oligonucleotide
gtgctagcacgccttatagtacaattttga

SEQ ID NO: 89522 - DNA, 30 bp, Artificial Sequence
  Synthetic oligonucleotide
atattgaacaggaagtacgagggaaaaata

SEQ ID NO: 89523 - DNA, 30 bp, Artificial Sequence
  Synthetic oligonucleotide
aggtacgatgcaatggcgacctgaaaaata

SEQ ID NO: 89524 - DNA, 30 bp, Artificial Sequence
  Synthetic oligonucleotide
ggaggaagatgtctggaacagaacaaaata

SEQ ID NO: 89525 - DNA, 30 bp, Artificial Sequence
  Synthetic oligonucleotide
ccgtataagatttgggccggatgtaaaata

SEQ ID NO: 89526 - DNA, 30 bp, Artificial Sequence
  Synthetic oligonucleotide
aagcccaatcaacggtgtgaaattaaaata

SEQ ID NO: 89527 - DNA, 30 bp, Artificial Sequence
  Synthetic oligonucleotide
catcggtgaagactaccccgtcaacaaata

SEQ ID NO: 89528 - DNA, 30 bp, Artificial Sequence
  Synthetic oligonucleotide
tgcgaaagcggaggcaacgggtctcaaata

SEQ ID NO: 89529 - DNA, 30 bp, Artificial Sequence
  Synthetic oligonucleotide
tcataaagatactccgggagactagaaata

SEQ ID NO: 89530 - DNA, 30 bp, Artificial Sequence
  Synthetic oligonucleotide
cttgaagccatctgggttgtgggggaaata

SEQ ID NO: 89531 - DNA, 30 bp, Artificial Sequence
  Synthetic oligonucleotide
ggagcttgagctcggatagggacataaata

SEQ ID NO: 89532 - DNA, 30 bp, Artificial Sequence
  Synthetic oligonucleotide
caatcgatcaacaggcgaacaaactaaata

SEQ ID NO: 89533 - DNA, 30 bp, Artificial Sequence
  Synthetic oligonucleotide
cctgtatgcaagaaaagaccctactaaata

SEQ ID NO: 89534 - DNA, 30 bp, Artificial Sequence
  Synthetic oligonucleotide
ggagagcagaatagcaggaaaggctaaata

SEQ ID NO: 89535 - DNA, 30 bp, Artificial Sequence
  Synthetic oligonucleotide
acatgaagcaacatgcgtcgggagtaaata

SEQ ID NO: 89536 - DNA, 30 bp, Artificial Sequence
  Synthetic oligonucleotide
agattaagccgagacctaggggcaacaata

SEQ ID NO: 89537 - DNA, 30 bp, Artificial Sequence
  Synthetic oligonucleotide
gtgagcgcgaatggtaaggttcggacaata

SEQ ID NO: 89538 - DNA, 30 bp, Artificial Sequence
  Synthetic oligonucleotide
ggatgaaccaattgtaataacataccaata

SEQ ID NO: 89539 - DNA, 30 bp, Artificial Sequence
  Synthetic oligonucleotide
ggatcaggccaggatactcgcgaggcaata

SEQ ID NO: 89540 - DNA, 30 bp, Artificial Sequence
  Synthetic oligonucleotide
caatgagcaatttacactgttctggcaata

SEQ ID NO: 89541 - DNA, 30 bp, Artificial Sequence
  Synthetic oligonucleotide
caagttggagcatcccttgagttggcaata

SEQ ID NO: 89542 - DNA, 30 bp, Artificial Sequence
  Synthetic oligonucleotide
gttaccgacaatatgcgacagtgtgcaata

SEQ ID NO: 89543 - DNA, 30 bp, Artificial Sequence
  Synthetic oligonucleotide
gccgtacgatccataagcacagttgcaata

SEQ ID NO: 89544 - DNA, 30 bp, Artificial Sequence
  Synthetic oligonucleotide
ggggtggttcaagtaagctaggaaagaata

SEQ ID NO: 89545 - DNA, 30 bp, Artificial Sequence
  Synthetic oligonucleotide
ggcataccgcctgtcagcgtgtaccgaata

SEQ ID NO: 89546 - DNA, 30 bp, Artificial Sequence
  Synthetic oligonucleotide
agtggagtggtggcgaattgatcccgaata

SEQ ID NO: 89547 - DNA, 30 bp, Artificial Sequence
  Synthetic oligonucleotide
atcacacccaaaagcgctttctcaggaata

SEQ ID NO: 89548 - DNA, 30 bp, Artificial Sequence
  Synthetic oligonucleotide
cggaatggatttaaagggggatggtgaata

SEQ ID NO: 89549 - DNA, 30 bp, Artificial Sequence
  Synthetic oligonucleotide
agaggagtccctggtagattcttgtgaata

SEQ ID NO: 89550 - DNA, 30 bp, Artificial Sequence
  Synthetic oligonucleotide
tctcgtaacgtaagaactatacgaataata

SEQ ID NO: 89551 - DNA, 30 bp, Artificial Sequence
  Synthetic oligonucleotide
gcatcggtggagggtcgacagggaataata

SEQ ID NO: 89552 - DNA, 30 bp, Artificial Sequence
  Synthetic oligonucleotide
ccaggcatgtcaaaggaatcaaagataata

SEQ ID NO: 89553 - DNA, 30 bp, Artificial Sequence
  Synthetic oligonucleotide
ggttgaaacatcaagaagtaacagataata

SEQ ID NO: 89554 - DNA, 30 bp, Artificial Sequence
  Synthetic oligonucleotide
taacacagtaagctactatgtactataata

SEQ ID NO: 89555 - DNA, 30 bp, Artificial Sequence
  Synthetic oligonucleotide
ggcttctaaacgaggctaggaagtataata

SEQ ID NO: 89556 - DNA, 30 bp, Artificial Sequence
  Synthetic oligonucleotide
gcacagaaagcaccttagttccgactaata

SEQ ID NO: 89557 - DNA, 30 bp, Artificial Sequence
  Synthetic oligonucleotide
tctagtaagtgatcgtcccactcagtaata

SEQ ID NO: 89558 - DNA, 30 bp, Artificial Sequence
  Synthetic oligonucleotide
gtagggttcatcgacaaatgggaattaata

SEQ ID NO: 89559 - DNA, 30 bp, Artificial Sequence
  Synthetic oligonucleotide
gacagttcaagtaagagtaacagcttaata

SEQ ID NO: 89560 - DNA, 30 bp, Artificial Sequence
  Synthetic oligonucleotide
gaaacacggacttatagaaaaggtttaata

SEQ ID NO: 89561 - DNA, 30 bp, Artificial Sequence
  Synthetic oligonucleotide
tgcacaaggacggaccctacttaacacata

SEQ ID NO: 89562 - DNA, 30 bp, Artificial Sequence
  Synthetic oligonucleotide
ggcgcacgaattgtagggcatgaggacata

SEQ ID NO: 89563 - DNA, 30 bp, Artificial Sequence
  Synthetic oligonucleotide
gcagtccagcgtgcacgaacctctgacata

SEQ ID NO: 89564 - DNA, 30 bp, Artificial Sequence
  Synthetic oligonucleotide
gctgggtacttgattatgggatgtgacata

SEQ ID NO: 89565 - DNA, 30 bp, Artificial Sequence
  Synthetic oligonucleotide
ggacgggttccatcaggggtcgaatacata

SEQ ID NO: 89566 - DNA, 30 bp, Artificial Sequence
  Synthetic oligonucleotide
gcgcggacttccataaggaggcgttacata

SEQ ID NO: 89567 - DNA, 30 bp, Artificial Sequence
  Synthetic oligonucleotide
ttaactgccaactttccaggagcgaccata

SEQ ID NO: 89568 - DNA, 30 bp, Artificial Sequence
  Synthetic oligonucleotide
actaataagcaagaaagtgggctccccata

SEQ ID NO: 89569 - DNA, 30 bp, Artificial Sequence
  Synthetic oligonucleotide
cagaatggtaatgggtgaaaggcgcccata

SEQ ID NO: 89570 - DNA, 30 bp, Artificial Sequence
  Synthetic oligonucleotide
aaggatgaccgtatactcacggggcccata

SEQ ID NO: 89571 - DNA, 30 bp, Artificial Sequence
  Synthetic oligonucleotide
atagttcaaagcatctcgatactgcccata

SEQ ID NO: 89572 - DNA, 30 bp, Artificial Sequence
  Synthetic oligonucleotide
ttggaagcatgtatgtcaacgagtcccata

SEQ ID NO: 89573 - DNA, 30 bp, Artificial Sequence
  Synthetic oligonucleotide
ggtgtaagtaaagctcaaccggaatccata

SEQ ID NO: 89574 - DNA, 30 bp, Artificial Sequence
  Synthetic oligonucleotide
tgacaggaccaaactgatccttaatccata

SEQ ID NO: 89575 - DNA, 30 bp, Artificial Sequence
  Synthetic oligonucleotide
gtaaacggagctcgcaaaaagaggagcata

SEQ ID NO: 89576 - DNA, 30 bp, Artificial Sequence
  Synthetic oligonucleotide
aaaggtaaatttagaggcagagctagcata

SEQ ID NO: 89577 - DNA, 30 bp, Artificial Sequence
  Synthetic oligonucleotide
gcgagatgaagcagttgtacctaatgcata

SEQ ID NO: 89578 - DNA, 30 bp, Artificial Sequence
  Synthetic oligonucleotide
agtagctcacgaggatactctgactgcata

SEQ ID NO: 89579 - DNA, 30 bp, Artificial Sequence
  Synthetic oligonucleotide
ggtagtccgacacccttacaagggatcata

SEQ ID NO: 89580 - DNA, 30 bp, Artificial Sequence
  Synthetic oligonucleotide
ggcacagtaggatcggttggaggtatcata

SEQ ID NO: 89581 - DNA, 30 bp, Artificial Sequence
  Synthetic oligonucleotide
aaggtactcggacccggattggaactcata

SEQ ID NO: 89582 - DNA, 30 bp, Artificial Sequence
  Synthetic oligonucleotide
ggagaaatgttataaatggacatcctcata

SEQ ID NO: 89583 - DNA, 30 bp, Artificial Sequence
  Synthetic oligonucleotide
ttcagggtaatagccggtcaacagctcata

SEQ ID NO: 89584 - DNA, 30 bp, Artificial Sequence
  Synthetic oligonucleotide
gccataccctacaagagataaactgtcata

SEQ ID NO: 89585 - DNA, 30 bp, Artificial Sequence
  Synthetic oligonucleotide
agtgcattcccactagagctaaccttcata

SEQ ID NO: 89586 - DNA, 30 bp, Artificial Sequence
  Synthetic oligonucleotide
agagtgcgacagcggatagttttgttcata

SEQ ID NO: 89587 - DNA, 30 bp, Artificial Sequence
  Synthetic oligonucleotide
aagaacagaacagggcgaacacagaagata

SEQ ID NO: 89588 - DNA, 30 bp, Artificial Sequence
  Synthetic oligonucleotide
gttaaaagcgtaggcctggcgatgaagata

SEQ ID NO: 89589 - DNA, 30 bp, Artificial Sequence
  Synthetic oligonucleotide
gcaagctatagttcctgagagaatcagata

SEQ ID NO: 89590 - DNA, 30 bp, Artificial Sequence
  Synthetic oligonucleotide
gctaaagagcatggcgtattgaatgagata

SEQ ID NO: 89591 - DNA, 30 bp, Artificial Sequence
  Synthetic oligonucleotide
cgatggaacggatgcataaagcgtgagata

SEQ ID NO: 89592 - DNA, 30 bp, Artificial Sequence
  Synthetic oligonucleotide
agagaccggtgctaacgcgttatctagata

SEQ ID NO: 89593 - DNA, 30 bp, Artificial Sequence
  Synthetic oligonucleotide
agcatggcgccatgcgggtcaaggtagata

SEQ ID NO: 89594 - DNA, 30 bp, Artificial Sequence
  Synthetic oligonucleotide
acgtgcataggggctcgagtggagacgata

SEQ ID NO: 89595 - DNA, 30 bp, Artificial Sequence
  Synthetic oligonucleotide
ggatatggcccagtaactagagcgccgata

SEQ ID NO: 89596 - DNA, 30 bp, Artificial Sequence
  Synthetic oligonucleotide
agcgatcagaatgtcctcgtgttcgcgata

SEQ ID NO: 89597 - DNA, 30 bp, Artificial Sequence
  Synthetic oligonucleotide
gaagcctccgaaccaatatgcaaggcgata

SEQ ID NO: 89598 - DNA, 30 bp, Artificial Sequence
  Synthetic oligonucleotide
actcattacgatactaaacataagtcgata

SEQ ID NO: 89599 - DNA, 30 bp, Artificial Sequence
  Synthetic oligonucleotide
gcaaatttaagactcgctctaaaaaggata

SEQ ID NO: 89600 - DNA, 30 bp, Artificial Sequence
  Synthetic oligonucleotide
agataaacaatgtgcaaggtgagaaggata

SEQ ID NO: 89601 - DNA, 30 bp, Artificial Sequence
  Synthetic oligonucleotide
tcacgctgatggtagctaactcacaggata

SEQ ID NO: 89602 - DNA, 30 bp, Artificial Sequence
  Synthetic oligonucleotide
gtgtaaataggacgaagaggaaagaggata

SEQ ID NO: 89603 - DNA, 30 bp, Artificial Sequence
  Synthetic oligonucleotide
cgtacatggctgcttaggtttccccggata

SEQ ID NO: 89604 - DNA, 30 bp, Artificial Sequence
  Synthetic oligonucleotide
tgcaggtggagcaaggagtccgaagggata

SEQ ID NO: 89605 - DNA, 30 bp, Artificial Sequence
  Synthetic oligonucleotide
gtaacgttaggattaatgaaatactggata

SEQ ID NO: 89606 - DNA, 30 bp, Artificial Sequence
  Synthetic oligonucleotide
tgaggaaactgaggccgaggagtttggata

SEQ ID NO: 89607 - DNA, 30 bp, Artificial Sequence
  Synthetic oligonucleotide
agggggtacagaaagcagcccgtttggata

SEQ ID NO: 89608 - DNA, 30 bp, Artificial Sequence
  Synthetic oligonucleotide
taagacagggtagcgaaaggacaactgata

SEQ ID NO: 89609 - DNA, 30 bp, Artificial Sequence
  Synthetic oligonucleotide
taagaagcaccagaagccgcctgactgata

SEQ ID NO: 89610 - DNA, 30 bp, Artificial Sequence
  Synthetic oligonucleotide
ttagattgataaggttagagatagctgata

SEQ ID NO: 89611 - DNA, 30 bp, Artificial Sequence
  Synthetic oligonucleotide
aggtaatggtcgcctgactactatctgata

SEQ ID NO: 89612 - DNA, 30 bp, Artificial Sequence
  Synthetic oligonucleotide
cacgataatgtcgctcggttcacagtgata

SEQ ID NO: 89613 - DNA, 30 bp, Artificial Sequence
  Synthetic oligonucleotide
gcgcggccgcgacgacgatcgattttgata

SEQ ID NO: 89614 - DNA, 30 bp, Artificial Sequence
  Synthetic oligonucleotide
acgggcacgtttcatacagcatttttgata

SEQ ID NO: 89615 - DNA, 30 bp, Artificial Sequence
  Synthetic oligonucleotide
tggaccagtgcagtctaggtgatcaatata

SEQ ID NO: 89616 - DNA, 30 bp, Artificial Sequence
  Synthetic oligonucleotide
ggagcgacagagcgactcaactcgaatata

SEQ ID NO: 89617 - DNA, 30 bp, Artificial Sequence
  Synthetic oligonucleotide
tgattcagtaaggagaaacagagccatata

SEQ ID NO: 89618 - DNA, 30 bp, Artificial Sequence
  Synthetic oligonucleotide
caaacgccaggtcgtgcgctggagcatata

SEQ ID NO: 89619 - DNA, 30 bp, Artificial Sequence
  Synthetic oligonucleotide
aaacacgagcggcgtcatgtgaggcatata

SEQ ID NO: 89620 - DNA, 30 bp, Artificial Sequence
  Synthetic oligonucleotide
gctctgcggcaaactcatggaaacgatata

SEQ ID NO: 89621 - DNA, 30 bp, Artificial Sequence
  Synthetic oligonucleotide
ccggtctattgccaggggccatacgatata

SEQ ID NO: 89622 - DNA, 30 bp, Artificial Sequence
  Synthetic oligonucleotide
tcaaagcaccactaagtttgctgtgatata

SEQ ID NO: 89623 - DNA, 30 bp, Artificial Sequence
  Synthetic oligonucleotide
acaaaacgaattcgttacgcctgccctata

SEQ ID NO: 89624 - DNA, 30 bp, Artificial Sequence
  Synthetic oligonucleotide
ccgaagatggaaggtgtgattggatctata

SEQ ID NO: 89625 - DNA, 30 bp, Artificial Sequence
  Synthetic oligonucleotide
tcgaaactgacagtctcacttggatctata

SEQ ID NO: 89626 - DNA, 30 bp, Artificial Sequence
  Synthetic oligonucleotide
aggcaaccaattcatgggataaagtctata

SEQ ID NO: 89627 - DNA, 30 bp, Artificial Sequence
  Synthetic oligonucleotide
ccggtacacctgtcgagaatccattctata

SEQ ID NO: 89628 - DNA, 30 bp, Artificial Sequence
  Synthetic oligonucleotide
ttgagcactctaacacacagcggccgtata

SEQ ID NO: 89629 - DNA, 30 bp, Artificial Sequence
  Synthetic oligonucleotide
atcggtgaccgtagtgaccatacatgtata

SEQ ID NO: 89630 - DNA, 30 bp, Artificial Sequence
  Synthetic oligonucleotide
acggcacgaagggagcttgatgtcattata

SEQ ID NO: 89631 - DNA, 30 bp, Artificial Sequence
  Synthetic oligonucleotide
cgaggtcatcatatgaaatggaatcttata

SEQ ID NO: 89632 - DNA, 30 bp, Artificial Sequence
  Synthetic oligonucleotide
ggagggaacgaacagtctaagtgtcttata

SEQ ID NO: 89633 - DNA, 30 bp, Artificial Sequence
  Synthetic oligonucleotide
tgtgggaaagatcgatactgccgttttata

SEQ ID NO: 89634 - DNA, 30 bp, Artificial Sequence
  Synthetic oligonucleotide
agaactcaaccacacgcatggtccaaacta

SEQ ID NO: 89635 - DNA, 30 bp, Artificial Sequence
  Synthetic oligonucleotide
caggcttgtggctaacttatcacacaacta

SEQ ID NO: 89636 - DNA, 30 bp, Artificial Sequence
  Synthetic oligonucleotide
cccctaagagatttaatcaggaatcaacta

SEQ ID NO: 89637 - DNA, 30 bp, Artificial Sequence
  Synthetic oligonucleotide
actatccgattaactggctgtagagaacta

SEQ ID NO: 89638 - DNA, 30 bp, Artificial Sequence
  Synthetic oligonucleotide
tgatccgtcagcgcgggcgtcgaggaacta

SEQ ID NO: 89639 - DNA, 30 bp, Artificial Sequence
  Synthetic oligonucleotide
acttgaaggccgcgggagactatggaacta

SEQ ID NO: 89640 - DNA, 30 bp, Artificial Sequence
  Synthetic oligonucleotide
ggggttgtccgtctcacacctctggaacta

SEQ ID NO: 89641 - DNA, 30 bp, Artificial Sequence
  Synthetic oligonucleotide
cgtcaggacccatatgcatgaaaaacacta

SEQ ID NO: 89642 - DNA, 30 bp, Artificial Sequence
  Synthetic oligonucleotide
gggagatcccgtacggtagccgaaccacta

SEQ ID NO: 89643 - DNA, 30 bp, Artificial Sequence
  Synthetic oligonucleotide
aacctgcccgagaacctgtcattaccacta

SEQ ID NO: 89644 - DNA, 30 bp, Artificial Sequence
  Synthetic oligonucleotide
cgtgctacgataggctcggtatcagcacta

SEQ ID NO: 89645 - DNA, 30 bp, Artificial Sequence
  Synthetic oligonucleotide
gagtaccgaataggtggcaagggagcacta

SEQ ID NO: 89646 - DNA, 30 bp, Artificial Sequence
  Synthetic oligonucleotide
caactatagaccagaagcggaaaatcacta

SEQ ID NO: 89647 - DNA, 30 bp, Artificial Sequence
  Synthetic oligonucleotide
atgaagatcataattgctccaccatcacta

SEQ ID NO: 89648 - DNA, 30 bp, Artificial Sequence
  Synthetic oligonucleotide
ggtggtaaaacctagaacggaggctcacta

SEQ ID NO: 89649 - DNA, 30 bp, Artificial Sequence
  Synthetic oligonucleotide
aatgtctaaaagagcggataccacagacta

SEQ ID NO: 89650 - DNA, 29 bp, Artificial Sequence
  Synthetic oligonucleotide
agacttaggttggcgcactgggacgacta

SEQ ID NO: 89651 - DNA, 30 bp, Artificial Sequence
  Synthetic oligonucleotide
agtacgtaggaggaatggcggcagctacta

SEQ ID NO: 89652 - DNA, 30 bp, Artificial Sequence
  Synthetic oligonucleotide
agcagccctcattgaaatcacaaacaccta

SEQ ID NO: 89653 - DNA, 30 bp, Artificial Sequence
  Synthetic oligonucleotide
atccagaggaagaatggggataaccaccta

SEQ ID NO: 89654 - DNA, 30 bp, Artificial Sequence
  Synthetic oligonucleotide
agtcgataacgccgatgttgccgagaccta

SEQ ID NO: 89655 - DNA, 30 bp, Artificial Sequence
  Synthetic oligonucleotide
cgtgaacgatcgacttctcaaggcgaccta

SEQ ID NO: 89656 - DNA, 30 bp, Artificial Sequence
  Synthetic oligonucleotide
tccaacagtataaggaaaaatgcggaccta

SEQ ID NO: 89657 - DNA, 30 bp, Artificial Sequence
  Synthetic oligonucleotide
agacacgtgcgtactgattcctcaacccta

SEQ ID NO: 89658 - DNA, 30 bp, Artificial Sequence
  Synthetic oligonucleotide
agcataggcgagatcgagtatagtgcccta

SEQ ID NO: 89659 - DNA, 30 bp, Artificial Sequence
  Synthetic oligonucleotide
ctaacatcaatgccgacgttagcacgccta

SEQ ID NO: 89660 - DNA, 30 bp, Artificial Sequence
  Synthetic oligonucleotide
agtaacgttctggacgactatacgcgccta

SEQ ID NO: 89661 - DNA, 30 bp, Artificial Sequence
  Synthetic oligonucleotide
cgttaggggacaaacgtacgagcaggccta

SEQ ID NO: 89662 - DNA, 30 bp, Artificial Sequence
  Synthetic oligonucleotide
agtcatcggggtaatcgagagcagggccta

SEQ ID NO: 89663 - DNA, 30 bp, Artificial Sequence
  Synthetic oligonucleotide
caagattcaacgtagattcaaactggccta

SEQ ID NO: 89664 - DNA, 30 bp, Artificial Sequence
  Synthetic oligonucleotide
tagagagttaacaaggaacaccagtgccta

SEQ ID NO: 89665 - DNA, 30 bp, Artificial Sequence
  Synthetic oligonucleotide
cgacacaaagagctctatgagacagtccta

SEQ ID NO: 89666 - DNA, 30 bp, Artificial Sequence
  Synthetic oligonucleotide
acagaatgtcgtataaaagagcccgtccta

SEQ ID NO: 89667 - DNA, 30 bp, Artificial Sequence
  Synthetic oligonucleotide
gtggtaaacttcgggtcgtgtggcgtccta

SEQ ID NO: 89668 - DNA, 30 bp, Artificial Sequence
  Synthetic oligonucleotide
aggaaaactaccagcaacagatgcgtccta

SEQ ID NO: 89669 - DNA, 30 bp, Artificial Sequence
  Synthetic oligonucleotide
acgggttagtctagaacaagtcaaaagcta

SEQ ID NO: 89670 - DNA, 30 bp, Artificial Sequence
  Synthetic oligonucleotide
ccttgaggattgagcggctattcgaagcta

SEQ ID NO: 89671 - DNA, 30 bp, Artificial Sequence
  Synthetic oligonucleotide
aggcgttggagacgtatggcccgccagcta

SEQ ID NO: 89672 - DNA, 30 bp, Artificial Sequence
  Synthetic oligonucleotide
cggaagtggaagtcccggaggatagagcta

SEQ ID NO: 89673 - DNA, 30 bp, Artificial Sequence
  Synthetic oligonucleotide
tgacagaggatatatcggcctacggagcta

SEQ ID NO: 89674 - DNA, 30 bp, Artificial Sequence
  Synthetic oligonucleotide
gccatttccctacggaagaataagtagcta

SEQ ID NO: 89675 - DNA, 30 bp, Artificial Sequence
  Synthetic oligonucleotide
ggaccctgtccggacatacttgcgtagcta

SEQ ID NO: 89676 - DNA, 30 bp, Artificial Sequence
  Synthetic oligonucleotide
actacaagaatttctaacaatatgtagcta

SEQ ID NO: 89677 - DNA, 30 bp, Artificial Sequence
  Synthetic oligonucleotide
tagcgatacgcatgtaaccttgtgtagcta

SEQ ID NO: 89678 - DNA, 30 bp, Artificial Sequence
  Synthetic oligonucleotide
aaggcagctgcatgtaaaagaaatacgcta

SEQ ID NO: 89679 - DNA, 30 bp, Artificial Sequence
  Synthetic oligonucleotide
acgatcacacgtgcaggccatgctgcgcta

SEQ ID NO: 89680 - DNA, 30 bp, Artificial Sequence
  Synthetic oligonucleotide
gatgcacgcaatcaagggcatctctcgcta

SEQ ID NO: 89681 - DNA, 30 bp, Artificial Sequence
  Synthetic oligonucleotide
ctgtagataatagacacgttacccaggcta

SEQ ID NO: 89682 - DNA, 30 bp, Artificial Sequence
  Synthetic oligonucleotide
acctcaagccgtgggctctcaaggaggcta

SEQ ID NO: 89683 - DNA, 30 bp, Artificial Sequence
  Synthetic oligonucleotide
acgacaagtagcctaggatgtgataggcta

SEQ ID NO: 89684 - DNA, 30 bp, Artificial Sequence
  Synthetic oligonucleotide
tcataaatgaccaaaacctccaaacggcta

SEQ ID NO: 89685 - DNA, 30 bp, Artificial Sequence
  Synthetic oligonucleotide
gatgcctagatatctaaagcaacatggcta

SEQ ID NO: 89686 - DNA, 30 bp, Artificial Sequence
  Synthetic oligonucleotide
aggtagtggaaattcgatccacattggcta

SEQ ID NO: 89687 - DNA, 30 bp, Artificial Sequence
  Synthetic oligonucleotide
caccgtcattggctaggctaacaactgcta

SEQ ID NO: 89688 - DNA, 30 bp, Artificial Sequence
  Synthetic oligonucleotide
gtagggttatacatgaccggtatactgcta

SEQ ID NO: 89689 - DNA, 30 bp, Artificial Sequence
  Synthetic oligonucleotide
ttcgacggtcgccaatatggtaatctgcta

SEQ ID NO: 89690 - DNA, 30 bp, Artificial Sequence
  Synthetic oligonucleotide
caccaaagagttaatgacatttctctgcta

SEQ ID NO: 89691 - DNA, 30 bp, Artificial Sequence
  Synthetic oligonucleotide
actggggtaacagataagacatggaatcta

SEQ ID NO: 89692 - DNA, 30 bp, Artificial Sequence
  Synthetic oligonucleotide
tcctcggacatagcctaagatcctcatcta

SEQ ID NO: 89693 - DNA, 30 bp, Artificial Sequence
  Synthetic oligonucleotide
gcaaccaaacggcagaaagctcaagatcta

SEQ ID NO: 89694 - DNA, 30 bp, Artificial Sequence
  Synthetic oligonucleotide
tctaccaatatcaatatggtcagggatcta

SEQ ID NO: 89695 - DNA, 30 bp, Artificial Sequence
  Synthetic oligonucleotide
ttgtgagtcctccacgaacctgtaactcta

SEQ ID NO: 89696 - DNA, 30 bp, Artificial Sequence
  Synthetic oligonucleotide
taagaccatcacatccagaataggactcta

SEQ ID NO: 89697 - DNA, 30 bp, Artificial Sequence
  Synthetic oligonucleotide
acagtcgggcaacacctctgagcacctcta

SEQ ID NO: 89698 - DNA, 30 bp, Artificial Sequence
  Synthetic oligonucleotide
atgacggagggaacgaattagaaagctcta

SEQ ID NO: 89699 - DNA, 30 bp, Artificial Sequence
  Synthetic oligonucleotide
aacgcaaaagagtgcgcggaggctagtcta

SEQ ID NO: 89700 - DNA, 30 bp, Artificial Sequence
  Synthetic oligonucleotide
ggccctaaaaggagagatgcaccacgtcta

SEQ ID NO: 89701 - DNA, 30 bp, Artificial Sequence
  Synthetic oligonucleotide
taccgtgggaccgcgactaagcatcgtcta

SEQ ID NO: 89702 - DNA, 30 bp, Artificial Sequence
  Synthetic oligonucleotide
gagaggataaacgcaacggataggggtcta

SEQ ID NO: 89703 - DNA, 30 bp, Artificial Sequence
  Synthetic oligonucleotide
acgatgggttccgctcgtgcattatgtcta

SEQ ID NO: 89704 - DNA, 30 bp, Artificial Sequence
  Synthetic oligonucleotide
ttaaccgggaataacaagtaagtctgtcta

SEQ ID NO: 89705 - DNA, 30 bp, Artificial Sequence
  Synthetic oligonucleotide
cgcgaagatgaaccgagtgcgcgtgttcta

SEQ ID NO: 89706 - DNA, 30 bp, Artificial Sequence
  Synthetic oligonucleotide
cgtgctacgccacgaggacagacaaaagta

SEQ ID NO: 89707 - DNA, 30 bp, Artificial Sequence
  Synthetic oligonucleotide
tggacggcacatagggtaataaacaaagta

SEQ ID NO: 89708 - DNA, 30 bp, Artificial Sequence
  Synthetic oligonucleotide
atccaaaagtaagacacgtttgggaaagta

SEQ ID NO: 89709 - DNA, 30 bp, Artificial Sequence
  Synthetic oligonucleotide
acgcgacaatagatagtagagcataaagta

SEQ ID NO: 89710 - DNA, 30 bp, Artificial Sequence
  Synthetic oligonucleotide
cattgactggagtaaataactaaacaagta

SEQ ID NO: 89711 - DNA, 30 bp, Artificial Sequence
  Synthetic oligonucleotide
caccggggcacgacgttcctgctacaagta

SEQ ID NO: 89712 - DNA, 30 bp, Artificial Sequence
  Synthetic oligonucleotide
tggagaatggtgatcttaccacggcaagta

SEQ ID NO: 89713 - DNA, 30 bp, Artificial Sequence
  Synthetic oligonucleotide
gttaaaacttccaaagctgagcatcaagta

SEQ ID NO: 89714 - DNA, 30 bp, Artificial Sequence
  Synthetic oligonucleotide
gctgactacaaagatcgtcatcgtcaagta

SEQ ID NO: 89715 - DNA, 30 bp, Artificial Sequence
  Synthetic oligonucleotide
gctaagttacaggttgcgccgaacgaagta

SEQ ID NO: 89716 - DNA, 30 bp, Artificial Sequence
  Synthetic oligonucleotide
gcaagcgagcatccgtatggttactaagta

SEQ ID NO: 89717 - DNA, 31 bp, Artificial Sequence
  Synthetic oligonucleotide
ccagacctcgagtttgtactttacctaagta

SEQ ID NO: 89718 - DNA, 30 bp, Artificial Sequence
  Synthetic oligonucleotide
agggggtgcgtgaataggtaagggtaagta

SEQ ID NO: 89719 - DNA, 30 bp, Artificial Sequence
  Synthetic oligonucleotide
atggcgttagtaggttcttaatggtaagta

SEQ ID NO: 89720 - DNA, 30 bp, Artificial Sequence
  Synthetic oligonucleotide
gtaggccattcgattttgaccacttaagta

SEQ ID NO: 89721 - DNA, 30 bp, Artificial Sequence
  Synthetic oligonucleotide
tcaagcaacgcaatgtttcgaacaacagta

SEQ ID NO: 89722 - DNA, 29 bp, Artificial Sequence
  Synthetic oligonucleotide
tggtgccccattaggtaaatagaacagta

SEQ ID NO: 89723 - DNA, 30 bp, Artificial Sequence
  Synthetic oligonucleotide
cataggactataccacgcctcggaacagta

SEQ ID NO: 89724 - DNA, 30 bp, Artificial Sequence
  Synthetic oligonucleotide
atccagcgtggccgggtgaaggtaacagta

SEQ ID NO: 89725 - DNA, 30 bp, Artificial Sequence
  Synthetic oligonucleotide
ggccctcccgcgtaacggatagtgacagta

SEQ ID NO: 89726 - DNA, 30 bp, Artificial Sequence
  Synthetic oligonucleotide
gtgcgacaggcaagggttcagctaccagta

SEQ ID NO: 89727 - DNA, 30 bp, Artificial Sequence
  Synthetic oligonucleotide
agagatgttaagattctcgggttaccagta

SEQ ID NO: 89728 - DNA, 30 bp, Artificial Sequence
  Synthetic oligonucleotide
ttacggaaaccgaggcgatcgacagcagta

SEQ ID NO: 89729 - DNA, 30 bp, Artificial Sequence
  Synthetic oligonucleotide
ccttgtccagtccgggaatggctagcagta

SEQ ID NO: 89730 - DNA, 30 bp, Artificial Sequence
  Synthetic oligonucleotide
atgaagctgatacacaaacattgcgcagta

SEQ ID NO: 89731 - DNA, 30 bp, Artificial Sequence
  Synthetic oligonucleotide
ccgtaatggcggaagtcaatcactgcagta

SEQ ID NO: 89732 - DNA, 30 bp, Artificial Sequence
  Synthetic oligonucleotide
ccaaggactttcgaagcggctaattcagta

SEQ ID NO: 89733 - DNA, 30 bp, Artificial Sequence
  Synthetic oligonucleotide
gcgaagggaatcagcgtagtataaagagta

SEQ ID NO: 89734 - DNA, 30 bp, Artificial Sequence
  Synthetic oligonucleotide
tagtatccagaccataaacacatcagagta

SEQ ID NO: 89735 - DNA, 30 bp, Artificial Sequence
  Synthetic oligonucleotide
cacatggttgtacgttattgaagtagagta

SEQ ID NO: 89736 - DNA, 30 bp, Artificial Sequence
  Synthetic oligonucleotide
acatacggaaatagcacctttaccggagta

SEQ ID NO: 89737 - DNA, 30 bp, Artificial Sequence
  Synthetic oligonucleotide
ttacatctgaccaaacggaaaacctgagta

SEQ ID NO: 89738 - DNA, 30 bp, Artificial Sequence
  Synthetic oligonucleotide
acgagcattcccggtgctcttagctgagta

SEQ ID NO: 89739 - DNA, 30 bp, Artificial Sequence
  Synthetic oligonucleotide
cgactgaatgtggaacgtgttgggtgagta

SEQ ID NO: 89740 - DNA, 30 bp, Artificial Sequence
  Synthetic oligonucleotide
gcgtatatacagctctgagtgcaactagta

SEQ ID NO: 89741 - DNA, 30 bp, Artificial Sequence
  Synthetic oligonucleotide
ggtagtgaagccaagactatctgactagta

SEQ ID NO: 89742 - DNA, 30 bp, Artificial Sequence
  Synthetic oligonucleotide
cttagggcgaacgctgagccaggtctagta

SEQ ID NO: 89743 - DNA, 30 bp, Artificial Sequence
  Synthetic oligonucleotide
cgtgtccagaccaactacgtggccgtagta

SEQ ID NO: 89744 - DNA, 30 bp, Artificial Sequence
  Synthetic oligonucleotide
cggacctaacgtccgggaatagttgtagta

SEQ ID NO: 89745 - DNA, 30 bp, Artificial Sequence
  Synthetic oligonucleotide
atgacaatcttaccagctaccaccttagta

SEQ ID NO: 89746 - DNA, 30 bp, Artificial Sequence
  Synthetic oligonucleotide
tccaccacgggcgaaagcgtggaaaacgta

SEQ ID NO: 89747 - DNA, 30 bp, Artificial Sequence
  Synthetic oligonucleotide
tactactactatgaactactactcaacgta

SEQ ID NO: 89748 - DNA, 30 bp, Artificial Sequence
  Synthetic oligonucleotide
atcctaggggtcaggtcgataaggaacgta

SEQ ID NO: 89749 - DNA, 30 bp, Artificial Sequence
  Synthetic oligonucleotide
atgctgatggttcaagatgggtcacacgta

SEQ ID NO: 89750 - DNA, 30 bp, Artificial Sequence
  Synthetic oligonucleotide
cgcagtgcagggttgactaaacgacacgta

SEQ ID NO: 89751 - DNA, 30 bp, Artificial Sequence
  Synthetic oligonucleotide
aactacaagattactagcgctaggcacgta

SEQ ID NO: 89752 - DNA, 30 bp, Artificial Sequence
  Synthetic oligonucleotide
acatcgtgcgacactatcagcggggacgta

SEQ ID NO: 89753 - DNA, 30 bp, Artificial Sequence
  Synthetic oligonucleotide
tcatcttaactactaaccccatatgacgta

SEQ ID NO: 89754 - DNA, 30 bp, Artificial Sequence
  Synthetic oligonucleotide
cggacgagcaactggaggtgcatttacgta

SEQ ID NO: 89755 - DNA, 30 bp, Artificial Sequence
  Synthetic oligonucleotide
cccgttggagtagacccgcggagaaccgta

SEQ ID NO: 89756 - DNA, 30 bp, Artificial Sequence
  Synthetic oligonucleotide
gtggtgggagcctaaatgatatccaccgta

SEQ ID NO: 89757 - DNA, 30 bp, Artificial Sequence
  Synthetic oligonucleotide
agccgagggagcgctcacgagttacccgta

SEQ ID NO: 89758 - DNA, 30 bp, Artificial Sequence
  Synthetic oligonucleotide
tggatctggacagtattacgtgagcccgta

SEQ ID NO: 89759 - DNA, 30 bp, Artificial Sequence
  Synthetic oligonucleotide
agccggctaaccgtcagattggtgcccgta

SEQ ID NO: 89760 - DNA, 30 bp, Artificial Sequence
  Synthetic oligonucleotide
accagaggtacgcgtagattaaacgccgta

SEQ ID NO: 89761 - DNA, 30 bp, Artificial Sequence
  Synthetic oligonucleotide
caacgatgtcaagataaggagaccgccgta

SEQ ID NO: 89762 - DNA, 30 bp, Artificial Sequence
  Synthetic oligonucleotide
tcgtaccagggggtttgacgtggcgccgta

SEQ ID NO: 89763 - DNA, 30 bp, Artificial Sequence
  Synthetic oligonucleotide
gtacagcggacgaatgaggtagctgccgta

SEQ ID NO: 89764 - DNA, 30 bp, Artificial Sequence
  Synthetic oligonucleotide
cgattttagtagtggtgcttcggtgccgta

SEQ ID NO: 89765 - DNA, 30 bp, Artificial Sequence
  Synthetic oligonucleotide
gagaggtataaatggatcctatcttccgta

SEQ ID NO: 89766 - DNA, 31 bp, Artificial Sequence
  Synthetic oligonucleotide
agcattcacaacagcgaccgaaacaagcgta

SEQ ID NO: 89767 - DNA, 30 bp, Artificial Sequence
  Synthetic oligonucleotide
ttatagcgaaatcaagagtggggacgcgta

SEQ ID NO: 89768 - DNA, 31 bp, Artificial Sequence
  Synthetic oligonucleotide
gagctgttgtaggcgatcattggtgggcgta

SEQ ID NO: 89769 - DNA, 31 bp, Artificial Sequence
  Synthetic oligonucleotide
agtccacctgcagtaagcatagcttggcgta

SEQ ID NO: 89770 - DNA, 30 bp, Artificial Sequence
  Synthetic oligonucleotide
ccgtggtctggtttaagaagcggatgcgta

SEQ ID NO: 89771 - DNA, 30 bp, Artificial Sequence
  Synthetic oligonucleotide
gcctggagatgcggaaaaccctgaatcgta

SEQ ID NO: 89772 - DNA, 30 bp, Artificial Sequence
  Synthetic oligonucleotide
ataagtaggcaaaaatagtaatacatcgta

SEQ ID NO: 89773 - DNA, 30 bp, Artificial Sequence
  Synthetic oligonucleotide
tgcacagcggactgttagtcgagtatcgta

SEQ ID NO: 89774 - DNA, 30 bp, Artificial Sequence
  Synthetic oligonucleotide
acacagttagggatagcttacttactcgta

SEQ ID NO: 89775 - DNA, 30 bp, Artificial Sequence
  Synthetic oligonucleotide
agaaacaaacggactgacatgatgctcgta

SEQ ID NO: 89776 - DNA, 30 bp, Artificial Sequence
  Synthetic oligonucleotide
ccagggcaagaagcacaaggctatttcgta

SEQ ID NO: 89777 - DNA, 30 bp, Artificial Sequence
  Synthetic oligonucleotide
cgctcgcgtgttgacgtccacactttcgta

SEQ ID NO: 89778 - DNA, 30 bp, Artificial Sequence
  Synthetic oligonucleotide
tcagtggggaagaagacacagccaaaggta

SEQ ID NO: 89779 - DNA, 30 bp, Artificial Sequence
  Synthetic oligonucleotide
gtgagttaacacgctcaactatggaaggta

SEQ ID NO: 89780 - DNA, 30 bp, Artificial Sequence
  Synthetic oligonucleotide
cgaaccaggatagatctcacctttcaggta

SEQ ID NO: 89781 - DNA, 30 bp, Artificial Sequence
  Synthetic oligonucleotide
tcgcggcccgtaactgagggaccataggta

SEQ ID NO: 89782 - DNA, 30 bp, Artificial Sequence
  Synthetic oligonucleotide
ggccagcaaagtatatgtaggccataggta

SEQ ID NO: 89783 - DNA, 30 bp, Artificial Sequence
  Synthetic oligonucleotide
gaactgcgtggagtgcacggagtttaggta

SEQ ID NO: 89784 - DNA, 30 bp, Artificial Sequence
  Synthetic oligonucleotide
gaggcgtgattggtgcggtagtagccggta

SEQ ID NO: 89785 - DNA, 30 bp, Artificial Sequence
  Synthetic oligonucleotide
tcgtccaaaatttggatcacgaatccggta

SEQ ID NO: 89786 - DNA, 30 bp, Artificial Sequence
  Synthetic oligonucleotide
cagggggcctgaatacttgggaatccggta

SEQ ID NO: 89787 - DNA, 30 bp, Artificial Sequence
  Synthetic oligonucleotide
aggctataacagaagtaagcgactccggta

SEQ ID NO: 89788 - DNA, 30 bp, Artificial Sequence
  Synthetic oligonucleotide
tgtcgtgcaactgggtgctacaaagcggta

SEQ ID NO: 89789 - DNA, 30 bp, Artificial Sequence
  Synthetic oligonucleotide
acgagataaggtacgaacgcacagtcggta

SEQ ID NO: 89790 - DNA, 30 bp, Artificial Sequence
  Synthetic oligonucleotide
accgttggtagaagctagagctggtcggta

SEQ ID NO: 89791 - DNA, 30 bp, Artificial Sequence
  Synthetic oligonucleotide
ggcttgtaagcacacaacactatttcggta

SEQ ID NO: 89792 - DNA, 30 bp, Artificial Sequence
  Synthetic oligonucleotide
ccaacagtcaggcccatcctgatccgggta

SEQ ID NO: 89793 - DNA, 30 bp, Artificial Sequence
  Synthetic oligonucleotide
taaactccctacatatcctgagtgcgggta

SEQ ID NO: 89794 - DNA, 30 bp, Artificial Sequence
  Synthetic oligonucleotide
ataagcgattcgaagtactcacgcggggta

SEQ ID NO: 89795 - DNA, 30 bp, Artificial Sequence
  Synthetic oligonucleotide
agtgaaacgatcgtgttataaggcggggta

SEQ ID NO: 89796 - DNA, 30 bp, Artificial Sequence
  Synthetic oligonucleotide
caacgagtcagggtatctaccgggggggta

SEQ ID NO: 89797 - DNA, 30 bp, Artificial Sequence
  Synthetic oligonucleotide
ataaggacagcaaaaacgtaacgatgggta

SEQ ID NO: 89798 - DNA, 30 bp, Artificial Sequence
  Synthetic oligonucleotide
ggtcccgagcatcatactgagcagatggta

SEQ ID NO: 89799 - DNA, 30 bp, Artificial Sequence
  Synthetic oligonucleotide
cattaatcacgcaattgggatgcactggta

SEQ ID NO: 89800 - DNA, 30 bp, Artificial Sequence
  Synthetic oligonucleotide
gtccacccacatacaagggaacacgtggta

SEQ ID NO: 89801 - DNA, 30 bp, Artificial Sequence
  Synthetic oligonucleotide
cgaatatcacatcgctgtgttgtcgtggta

SEQ ID NO: 89802 - DNA, 30 bp, Artificial Sequence
  Synthetic oligonucleotide
gaacaggctagaaggagcgcaatacatgta

SEQ ID NO: 89803 - DNA, 30 bp, Artificial Sequence
  Synthetic oligonucleotide
cgatcacagtaatctaaaagagtacatgta

SEQ ID NO: 89804 - DNA, 30 bp, Artificial Sequence
  Synthetic oligonucleotide
gcagaggatcctgggacggcacttcatgta

SEQ ID NO: 89805 - DNA, 30 bp, Artificial Sequence
  Synthetic oligonucleotide
ctgggatgtgacatgtgtgggtaagatgta

SEQ ID NO: 89806 - DNA, 30 bp, Artificial Sequence
  Synthetic oligonucleotide
tcggacctaactcgctgtttacaggatgta

SEQ ID NO: 89807 - DNA, 30 bp, Artificial Sequence
  Synthetic oligonucleotide
ccctcgagctcgcgagatcgtctgtatgta

SEQ ID NO: 89808 - DNA, 30 bp, Artificial Sequence
  Synthetic oligonucleotide
atttgcaggggcacgataaagggttatgta

SEQ ID NO: 89809 - DNA, 30 bp, Artificial Sequence
  Synthetic oligonucleotide
tctgaatagattgcgataatttagactgta

SEQ ID NO: 89810 - DNA, 30 bp, Artificial Sequence
  Synthetic oligonucleotide
cgttgtgacatgacggaaggctgacctgta

SEQ ID NO: 89811 - DNA, 30 bp, Artificial Sequence
  Synthetic oligonucleotide
ctacaaaagagactaccgctcatgcctgta

SEQ ID NO: 89812 - DNA, 30 bp, Artificial Sequence
  Synthetic oligonucleotide
ctgagacgtggctgagtaagttccgctgta

SEQ ID NO: 89813 - DNA, 30 bp, Artificial Sequence
  Synthetic oligonucleotide
ggcgcacgtccgacctcaggagtctctgta

SEQ ID NO: 89814 - DNA, 30 bp, Artificial Sequence
  Synthetic oligonucleotide
tgaatgccacgaccagagtcgattagtgta

SEQ ID NO: 89815 - DNA, 30 bp, Artificial Sequence
  Synthetic oligonucleotide
tcgtaaagtttgttgagataatgacgtgta

SEQ ID NO: 89816 - DNA, 30 bp, Artificial Sequence
  Synthetic oligonucleotide
gacgcgtgtggtatgcggttagcaggtgta

SEQ ID NO: 89817 - DNA, 30 bp, Artificial Sequence
  Synthetic oligonucleotide
aagtcgctcgccgtacgcacccagggtgta

SEQ ID NO: 89818 - DNA, 30 bp, Artificial Sequence
  Synthetic oligonucleotide
gggataggacatccgaagttacggggtgta

SEQ ID NO: 89819 - DNA, 30 bp, Artificial Sequence
  Synthetic oligonucleotide
ctcctcaagaagtcaacagtgaatggtgta

SEQ ID NO: 89820 - DNA, 30 bp, Artificial Sequence
  Synthetic oligonucleotide
agcggaggctgattgctgatatgttgtgta

SEQ ID NO: 89821 - DNA, 30 bp, Artificial Sequence
  Synthetic oligonucleotide
aaggacgcgatatccggcacgatcattgta

SEQ ID NO: 89822 - DNA, 30 bp, Artificial Sequence
  Synthetic oligonucleotide
gtaggacccgaacaccatgcgcggattgta

SEQ ID NO: 89823 - DNA, 30 bp, Artificial Sequence
  Synthetic oligonucleotide
acatgcgcaagcctacccgactctattgta

SEQ ID NO: 89824 - DNA, 30 bp, Artificial Sequence
  Synthetic oligonucleotide
agtagaaaaaggtagcggtaacgacttgta

SEQ ID NO: 89825 - DNA, 30 bp, Artificial Sequence
  Synthetic oligonucleotide
ttagtcgtcgtgcaatgtccctaagttgta

SEQ ID NO: 89826 - DNA, 30 bp, Artificial Sequence
  Synthetic oligonucleotide
tcaacagggtccaggagtgagctggttgta

SEQ ID NO: 89827 - DNA, 30 bp, Artificial Sequence
  Synthetic oligonucleotide
aggtacagatcggattgggagggctttgta

SEQ ID NO: 89828 - DNA, 30 bp, Artificial Sequence
  Synthetic oligonucleotide
tgcgggtgacggcgatgcatgcgcaaatta

SEQ ID NO: 89829 - DNA, 30 bp, Artificial Sequence
  Synthetic oligonucleotide
gcgatatcaaaacatggaaaaatccaatta

SEQ ID NO: 89830 - DNA, 30 bp, Artificial Sequence
  Synthetic oligonucleotide
acgtgtccgccatgagagtaccagcaatta

SEQ ID NO: 89831 - DNA, 30 bp, Artificial Sequence
  Synthetic oligonucleotide
acgcagaatgaaggatcaaaaacataatta

SEQ ID NO: 89832 - DNA, 30 bp, Artificial Sequence
  Synthetic oligonucleotide
taatacggcatcgactaatcgactacatta

SEQ ID NO: 89833 - DNA, 30 bp, Artificial Sequence
  Synthetic oligonucleotide
atcaaactgttaaattggaatcgtccatta

SEQ ID NO: 89834 - DNA, 30 bp, Artificial Sequence
  Synthetic oligonucleotide
gggaaccgtacggtcgtggtgtgatcatta

SEQ ID NO: 89835 - DNA, 30 bp, Artificial Sequence
  Synthetic oligonucleotide
tacatgaaaaccatcgctcgtctcagatta

SEQ ID NO: 89836 - DNA, 30 bp, Artificial Sequence
  Synthetic oligonucleotide
gcgatgataacctacccgctagtgggatta

SEQ ID NO: 89837 - DNA, 30 bp, Artificial Sequence
  Synthetic oligonucleotide
tacagagatgaatcggcccgaaagtgatta

SEQ ID NO: 89838 - DNA, 30 bp, Artificial Sequence
  Synthetic oligonucleotide
cggggcaggccggtgaaatacgattgatta

SEQ ID NO: 89839 - DNA, 30 bp, Artificial Sequence
  Synthetic oligonucleotide
tcattaaatataagagcacgcgattgatta

SEQ ID NO: 89840 - DNA, 30 bp, Artificial Sequence
  Synthetic oligonucleotide
ctgtaaacgggcaaacagtgggatatatta

SEQ ID NO: 89841 - DNA, 30 bp, Artificial Sequence
  Synthetic oligonucleotide
ggaataaaaaaatatacttgatcactatta

SEQ ID NO: 89842 - DNA, 30 bp, Artificial Sequence
  Synthetic oligonucleotide
aggcaaaagccttttggcggatacgactta

SEQ ID NO: 89843 - DNA, 30 bp, Artificial Sequence
  Synthetic oligonucleotide
gttggggacgcgataaccagtgagtactta

SEQ ID NO: 89844 - DNA, 30 bp, Artificial Sequence
  Synthetic oligonucleotide
gccagggggatgagagacgagctaccctta

SEQ ID NO: 89845 - DNA, 30 bp, Artificial Sequence
  Synthetic oligonucleotide
aggggaaagcaaagggatatgcgagcctta

SEQ ID NO: 89846 - DNA, 30 bp, Artificial Sequence
  Synthetic oligonucleotide
agatggatagtttggaaagaatgaagctta

SEQ ID NO: 89847 - DNA, 30 bp, Artificial Sequence
  Synthetic oligonucleotide
aggctcgaaagaacaagcgagcttagctta

SEQ ID NO: 89848 - DNA, 30 bp, Artificial Sequence
  Synthetic oligonucleotide
gaggtagaatcgatggggcctgaaggctta

SEQ ID NO: 89849 - DNA, 30 bp, Artificial Sequence
  Synthetic oligonucleotide
tagtagcgaagtcatttaaacgtatgctta

SEQ ID NO: 89850 - DNA, 30 bp, Artificial Sequence
  Synthetic oligonucleotide
tccgaacagtcgcgagaccatatgtgctta

SEQ ID NO: 89851 - DNA, 30 bp, Artificial Sequence
  Synthetic oligonucleotide
agttagggggcacttcgtgaagtcatctta

SEQ ID NO: 89852 - DNA, 30 bp, Artificial Sequence
  Synthetic oligonucleotide
tacgaccgagggctaggaatacttatctta

SEQ ID NO: 89853 - DNA, 30 bp, Artificial Sequence
  Synthetic oligonucleotide
cgtcaacttcccataatattggtagtctta

SEQ ID NO: 89854 - DNA, 30 bp, Artificial Sequence
  Synthetic oligonucleotide
cagtaatgaccccataatagattcttctta

SEQ ID NO: 89855 - DNA, 30 bp, Artificial Sequence
  Synthetic oligonucleotide
gtcgaatcagcaggtgttgctgcaaagtta

SEQ ID NO: 89856 - DNA, 30 bp, Artificial Sequence
  Synthetic oligonucleotide
gcggggatcacccatgatgacactcagtta

SEQ ID NO: 89857 - DNA, 30 bp, Artificial Sequence
  Synthetic oligonucleotide
taagggtcgaacgcgagggcgagggagtta

SEQ ID NO: 89858 - DNA, 30 bp, Artificial Sequence
  Synthetic oligonucleotide
aatgaacatgattggtaatcgggggagtta

SEQ ID NO: 89859 - DNA, 30 bp, Artificial Sequence
  Synthetic oligonucleotide
cattccgcgcccgcgaggccggtggagtta

SEQ ID NO: 89860 - DNA, 30 bp, Artificial Sequence
  Synthetic oligonucleotide
acggaactcgtatatctactgactgagtta

SEQ ID NO: 89861 - DNA, 30 bp, Artificial Sequence
  Synthetic oligonucleotide
acggaaatgttccgcctataccaatagtta

SEQ ID NO: 89862 - DNA, 30 bp, Artificial Sequence
  Synthetic oligonucleotide
caggggtcatactcgatttagggatagtta

SEQ ID NO: 89863 - DNA, 30 bp, Artificial Sequence
  Synthetic oligonucleotide
ctccaattcacgtggctgagtaagtagtta

SEQ ID NO: 89864 - DNA, 30 bp, Artificial Sequence
  Synthetic oligonucleotide
acggggcgcgggtccgtaaaggagtagtta

SEQ ID NO: 89865 - DNA, 30 bp, Artificial Sequence
  Synthetic oligonucleotide
gggagattcggcgatcgcagagtaacgtta

SEQ ID NO: 89866 - DNA, 30 bp, Artificial Sequence
  Synthetic oligonucleotide
gctaagcagggaggaagaaaggggacgtta

SEQ ID NO: 89867 - DNA, 30 bp, Artificial Sequence
  Synthetic oligonucleotide
aacaacaaagagctcagtaggtacccgtta

SEQ ID NO: 89868 - DNA, 30 bp, Artificial Sequence
  Synthetic oligonucleotide
ccgtagatacgttctgagaccgtgccgtta

SEQ ID NO: 89869 - DNA, 30 bp, Artificial Sequence
  Synthetic oligonucleotide
acattctggtaaggagtgcttgaagcgtta

SEQ ID NO: 89870 - DNA, 30 bp, Artificial Sequence
  Synthetic oligonucleotide
atcaagtacatttcccacattaaatcgtta

SEQ ID NO: 89871 - DNA, 30 bp, Artificial Sequence
  Synthetic oligonucleotide
ggtgacaggtagtgtgatcgcacttcgtta

SEQ ID NO: 89872 - DNA, 30 bp, Artificial Sequence
  Synthetic oligonucleotide
aacggtaatcacattgaacattccaggtta

SEQ ID NO: 89873 - DNA, 30 bp, Artificial Sequence
  Synthetic oligonucleotide
gtcccatgaacatgaatcctgcgcaggtta

SEQ ID NO: 89874 - DNA, 30 bp, Artificial Sequence
  Synthetic oligonucleotide
aggtaacgtactggaatatccgtcaggtta

SEQ ID NO: 89875 - DNA, 30 bp, Artificial Sequence
  Synthetic oligonucleotide
tgcttacgtgctgggccaaacgctaggtta

SEQ ID NO: 89876 - DNA, 30 bp, Artificial Sequence
  Synthetic oligonucleotide
ttggcgacggatttaaatagcaaacggtta

SEQ ID NO: 89877 - DNA, 30 bp, Artificial Sequence
  Synthetic oligonucleotide
cgcaaaagcgtacaaactatggggcggtta

SEQ ID NO: 89878 - DNA, 30 bp, Artificial Sequence
  Synthetic oligonucleotide
gaccgagaagtagtggttacagatgggtta

SEQ ID NO: 89879 - DNA, 30 bp, Artificial Sequence
  Synthetic oligonucleotide
acgattaagtaatgggcagtgtaatggtta

SEQ ID NO: 89880 - DNA, 30 bp, Artificial Sequence
  Synthetic oligonucleotide
ggtccaccacgatggagcgttgactggtta

SEQ ID NO: 89881 - DNA, 30 bp, Artificial Sequence
  Synthetic oligonucleotide
aggttggttgtgacgtgttcatggtggtta

SEQ ID NO: 89882 - DNA, 30 bp, Artificial Sequence
  Synthetic oligonucleotide
ctgtgtatgtagggcatcgtatggtggtta

SEQ ID NO: 89883 - DNA, 30 bp, Artificial Sequence
  Synthetic oligonucleotide
cggacggttatcgagcttggagcaatgtta

SEQ ID NO: 89884 - DNA, 30 bp, Artificial Sequence
  Synthetic oligonucleotide
tcgaccagggatccgtgaaaagtaatgtta

SEQ ID NO: 89885 - DNA, 30 bp, Artificial Sequence
  Synthetic oligonucleotide
acgttggtggacagcatactaaggatgtta

SEQ ID NO: 89886 - DNA, 30 bp, Artificial Sequence
  Synthetic oligonucleotide
acggcgagcccagtgaaaaaccaactgtta

SEQ ID NO: 89887 - DNA, 30 bp, Artificial Sequence
  Synthetic oligonucleotide
catcaatcacacatggggtcaccactgtta

SEQ ID NO: 89888 - DNA, 30 bp, Artificial Sequence
  Synthetic oligonucleotide
tgcgtagctcggagataagagtacctgtta

SEQ ID NO: 89889 - DNA, 30 bp, Artificial Sequence
  Synthetic oligonucleotide
agagcacagttggcgaagggaagggtgtta

SEQ ID NO: 89890 - DNA, 30 bp, Artificial Sequence
  Synthetic oligonucleotide
accctgacagccaacgaaaatacattgtta

SEQ ID NO: 89891 - DNA, 30 bp, Artificial Sequence
  Synthetic oligonucleotide
aacgtatatgctcataagactatattgtta

SEQ ID NO: 89892 - DNA, 30 bp, Artificial Sequence
  Synthetic oligonucleotide
tgctacaagcaccctagacgtgacttgtta

SEQ ID NO: 89893 - DNA, 30 bp, Artificial Sequence
  Synthetic oligonucleotide
cgaaatggcagggtataatctgctttgtta

SEQ ID NO: 89894 - DNA, 30 bp, Artificial Sequence
  Synthetic oligonucleotide
acccaaaagtcgagaccaacgcggaattta

SEQ ID NO: 89895 - DNA, 30 bp, Artificial Sequence
  Synthetic oligonucleotide
aacgggaccgagaaccgcatgatagattta

SEQ ID NO: 89896 - DNA, 30 bp, Artificial Sequence
  Synthetic oligonucleotide
ctatgcaaaagtaatagataggtcgattta

SEQ ID NO: 89897 - DNA, 30 bp, Artificial Sequence
  Synthetic oligonucleotide
ggaatgccagacagttccatatcggattta

SEQ ID NO: 89898 - DNA, 30 bp, Artificial Sequence
  Synthetic oligonucleotide
tgacacgtaaacgagtaacaaggcacttta

SEQ ID NO: 89899 - DNA, 30 bp, Artificial Sequence
  Synthetic oligonucleotide
gtagccggactacctgaaaaaaagacttta

SEQ ID NO: 89900 - DNA, 30 bp, Artificial Sequence
  Synthetic oligonucleotide
actagatcacgtcggaagtagtcaggttta

SEQ ID NO: 89901 - DNA, 30 bp, Artificial Sequence
  Synthetic oligonucleotide
taatgagaggccagctgatgccggggttta

SEQ ID NO: 89902 - DNA, 30 bp, Artificial Sequence
  Synthetic oligonucleotide
ggcgtaacaaagctatctcaactgtgttta

SEQ ID NO: 89903 - DNA, 30 bp, Artificial Sequence
  Synthetic oligonucleotide
aagtcggtagacaaacgacgtccactttta

SEQ ID NO: 89904 - DNA, 30 bp, Artificial Sequence
  Synthetic oligonucleotide
aagggcgtttagggggcgtccagcgtttta

SEQ ID NO: 89905 - DNA, 30 bp, Artificial Sequence
  Synthetic oligonucleotide
cagcgtattcgaaaggttagggggaaaaac

SEQ ID NO: 89906 - DNA, 30 bp, Artificial Sequence
  Synthetic oligonucleotide
gctaacgagttccatactgctgctaaaaac

SEQ ID NO: 89907 - DNA, 30 bp, Artificial Sequence
  Synthetic oligonucleotide
tgtatagaggaatgtagttctggtaaaaac

SEQ ID NO: 89908 - DNA, 30 bp, Artificial Sequence
  Synthetic oligonucleotide
ggacaacctgtggtaacgaatggacaaaac

SEQ ID NO: 89909 - DNA, 30 bp, Artificial Sequence
  Synthetic oligonucleotide
cagttagtacgcttaaagagcctgcaaaac

SEQ ID NO: 89910 - DNA, 30 bp, Artificial Sequence
  Synthetic oligonucleotide
gggaggcaatatgcgccatggcacgaaaac

SEQ ID NO: 89911 - DNA, 30 bp, Artificial Sequence
  Synthetic oligonucleotide
aaagagatgtttagggagagaactgaaaac

SEQ ID NO: 89912 - DNA, 30 bp, Artificial Sequence
  Synthetic oligonucleotide
ctcgagtagtcaaagatgagaacgtaaaac

SEQ ID NO: 89913 - DNA, 30 bp, Artificial Sequence
  Synthetic oligonucleotide
atgtctatgagtgagtgggcgagtacaaac

SEQ ID NO: 89914 - DNA, 30 bp, Artificial Sequence
  Synthetic oligonucleotide
tgtgggcgataacgacattgctgtacaaac

SEQ ID NO: 89915 - DNA, 30 bp, Artificial Sequence
  Synthetic oligonucleotide
gagcgaggactatgtgtagctacgccaaac

SEQ ID NO: 89916 - DNA, 30 bp, Artificial Sequence
  Synthetic oligonucleotide
agatagaaaagcttgggaggatcagcaaac

SEQ ID NO: 89917 - DNA, 30 bp, Artificial Sequence
  Synthetic oligonucleotide
agtgctaatggctcagcgaaagccgcaaac

SEQ ID NO: 89918 - DNA, 30 bp, Artificial Sequence
  Synthetic oligonucleotide
gcaacaagaaatggccaacctctcgcaaac

SEQ ID NO: 89919 - DNA, 30 bp, Artificial Sequence
  Synthetic oligonucleotide
gtacggggaaagggacgtgcctgtgcaaac

SEQ ID NO: 89920 - DNA, 30 bp, Artificial Sequence
  Synthetic oligonucleotide
tagacgcgctatgccatatggagatcaaac

SEQ ID NO: 89921 - DNA, 30 bp, Artificial Sequence
  Synthetic oligonucleotide
cggggaagtgcaactccgtggtgctcaaac

SEQ ID NO: 89922 - DNA, 30 bp, Artificial Sequence
  Synthetic oligonucleotide
gagccagtgggtggtaattgccagtcaaac

SEQ ID NO: 89923 - DNA, 30 bp, Artificial Sequence
  Synthetic oligonucleotide
aagcgctgggacaacccttacgacagaaac

SEQ ID NO: 89924 - DNA, 31 bp, Artificial Sequence
  Synthetic oligonucleotide
tccaacaagaatgatgttgatggacagaaac

SEQ ID NO: 89925 - DNA, 30 bp, Artificial Sequence
  Synthetic oligonucleotide
gccgcgaacccgcggtactaacgacgaaac

SEQ ID NO: 89926 - DNA, 30 bp, Artificial Sequence
  Synthetic oligonucleotide
agcagaggcatgcgagctgaatgccgaaac

SEQ ID NO: 89927 - DNA, 30 bp, Artificial Sequence
  Synthetic oligonucleotide
ggaagacttgtaggtgtaagagggtgaaac

SEQ ID NO: 89928 - DNA, 30 bp, Artificial Sequence
  Synthetic oligonucleotide
cttaaacgtggaggttgaaagaccataaac

SEQ ID NO: 89929 - DNA, 30 bp, Artificial Sequence
  Synthetic oligonucleotide
cagcaggaagtgggaacggtagcgataaac

SEQ ID NO: 89930 - DNA, 30 bp, Artificial Sequence
  Synthetic oligonucleotide
ctgctagccgagatacggtgggtactaaac

SEQ ID NO: 89931 - DNA, 30 bp, Artificial Sequence
  Synthetic oligonucleotide
agggtcgaagtcgtataatcgctcgtaaac

SEQ ID NO: 89932 - DNA, 30 bp, Artificial Sequence
  Synthetic oligonucleotide
gatgagtgcactttcgacaacggaaacaac

SEQ ID NO: 89933 - DNA, 30 bp, Artificial Sequence
  Synthetic oligonucleotide
acaattatagctgccgaattcaatcacaac

SEQ ID NO: 89934 - DNA, 40 bp, Artificial Sequence
  Synthetic oligonucleotide
taggccctataagtcgaataaagagggcaagtgggacaac

SEQ ID NO: 89935 - DNA, 30 bp, Artificial Sequence
  Synthetic oligonucleotide
tctaacatgacttgggtgaacaactacaac

SEQ ID NO: 89936 - DNA, 30 bp, Artificial Sequence
  Synthetic oligonucleotide
tcagggctattaaaaaggaacatctacaac

SEQ ID NO: 89937 - DNA, 30 bp, Artificial Sequence
  Synthetic oligonucleotide
aggttggtcaataatgctacaggtaccaac

SEQ ID NO: 89938 - DNA, 30 bp, Artificial Sequence
  Synthetic oligonucleotide
atgaggcaaagtcaactggtgattcccaac

SEQ ID NO: 89939 - DNA, 29 bp, Artificial Sequence
  Synthetic oligonucleotide
taaggcgtgacgagcgaggtgtggccaac

SEQ ID NO: 89940 - DNA, 30 bp, Artificial Sequence
  Synthetic oligonucleotide
cggcatcttagtctacaaccagtctccaac

SEQ ID NO: 89941 - DNA, 30 bp, Artificial Sequence
  Synthetic oligonucleotide
agggatggctgaagaaattgatggtccaac

SEQ ID NO: 89942 - DNA, 30 bp, Artificial Sequence
  Synthetic oligonucleotide
gtgagaatctactgatccgcatcttccaac

SEQ ID NO: 89943 - DNA, 30 bp, Artificial Sequence
  Synthetic oligonucleotide
cccacagtaatggcaacattctcaagcaac

SEQ ID NO: 89944 - DNA, 30 bp, Artificial Sequence
  Synthetic oligonucleotide
aaaacaggcattaagaataaaaaacgcaac

SEQ ID NO: 89945 - DNA, 30 bp, Artificial Sequence
  Synthetic oligonucleotide
ccgtaaatatatgagagttgcaaacgcaac

SEQ ID NO: 89946 - DNA, 30 bp, Artificial Sequence
  Synthetic oligonucleotide
tcctctgtcaatgaacggaatgcgcgcaac

SEQ ID NO: 89947 - DNA, 30 bp, Artificial Sequence
  Synthetic oligonucleotide
gtccagggtaagatgatcgctactcgcaac

SEQ ID NO: 89948 - DNA, 30 bp, Artificial Sequence
  Synthetic oligonucleotide
ttggtcaaggcaaaaaacgattctcgcaac

SEQ ID NO: 89949 - DNA, 30 bp, Artificial Sequence
  Synthetic oligonucleotide
cataccatggatggattgctcaatggcaac

SEQ ID NO: 89950 - DNA, 30 bp, Artificial Sequence
  Synthetic oligonucleotide
ggcggtacctattgggcgaacggatgcaac

SEQ ID NO: 89951 - DNA, 30 bp, Artificial Sequence
  Synthetic oligonucleotide
ccgtttacgtggactacagcgccaatcaac

SEQ ID NO: 89952 - DNA, 30 bp, Artificial Sequence
  Synthetic oligonucleotide
gaggcaggaagaatcttagccttcatcaac

SEQ ID NO: 89953 - DNA, 30 bp, Artificial Sequence
  Synthetic oligonucleotide
gggggcgcaaatcgtcaacttccgatcaac

SEQ ID NO: 89954 - DNA, 30 bp, Artificial Sequence
  Synthetic oligonucleotide
ccgtacggccctaataaacagcctatcaac

SEQ ID NO: 89955 - DNA, 30 bp, Artificial Sequence
  Synthetic oligonucleotide
tgtgaaagcaattcccctcccgccctcaac

SEQ ID NO: 89956 - DNA, 30 bp, Artificial Sequence
  Synthetic oligonucleotide
atgcgaagaccggcatcggcggagctcaac

SEQ ID NO: 89957 - DNA, 30 bp, Artificial Sequence
  Synthetic oligonucleotide
cctcgaccggcaccgatctgggtcgtcaac

SEQ ID NO: 89958 - DNA, 30 bp, Artificial Sequence
  Synthetic oligonucleotide
tgagcatattcattcttgtgactgttcaac

SEQ ID NO: 89959 - DNA, 30 bp, Artificial Sequence
  Synthetic oligonucleotide
tccgcgagtgctgaatccagatacaagaac

SEQ ID NO: 89960 - DNA, 30 bp, Artificial Sequence
  Synthetic oligonucleotide
acgggcagggagaagttttgcgtcaagaac

SEQ ID NO: 89961 - DNA, 30 bp, Artificial Sequence
  Synthetic oligonucleotide
caaatagttatcaaagggcgattcaagaac

SEQ ID NO: 89962 - DNA, 30 bp, Artificial Sequence
  Synthetic oligonucleotide
tgtatcccatgaattaataccagtaagaac

SEQ ID NO: 89963 - DNA, 30 bp, Artificial Sequence
  Synthetic oligonucleotide
gcgcctatcgtaaaagggtgaaacgagaac

SEQ ID NO: 89964 - DNA, 30 bp, Artificial Sequence
  Synthetic oligonucleotide
tgagctagttttttcgggacaatcgagaac

SEQ ID NO: 89965 - DNA, 30 bp, Artificial Sequence
  Synthetic oligonucleotide
cgcggggtttcgagatggccaggatagaac

SEQ ID NO: 89966 - DNA, 30 bp, Artificial Sequence
  Synthetic oligonucleotide
agaaaaagcgtacaaggattggtttagaac

SEQ ID NO: 89967 - DNA, 30 bp, Artificial Sequence
  Synthetic oligonucleotide
cgacacattgataatactgctcgtacgaac

SEQ ID NO: 89968 - DNA, 30 bp, Artificial Sequence
  Synthetic oligonucleotide
aggctgtgttctacaggccagattccgaac

SEQ ID NO: 89969 - DNA, 30 bp, Artificial Sequence
  Synthetic oligonucleotide
tgacacagttgtacagagtccaacgcgaac

SEQ ID NO: 89970 - DNA, 30 bp, Artificial Sequence
  Synthetic oligonucleotide
ataatccgcgcgtgacgtacatttgcgaac

SEQ ID NO: 89971 - DNA, 30 bp, Artificial Sequence
  Synthetic oligonucleotide
cgtacgttttcaaaaccgcacgaatcgaac

SEQ ID NO: 89972 - DNA, 29 bp, Artificial Sequence
  Synthetic oligonucleotide
agggggtcaatgagtgagattcatcgaac

SEQ ID NO: 89973 - DNA, 30 bp, Artificial Sequence
  Synthetic oligonucleotide
gtggtaaagactctctaacctcggtcgaac

SEQ ID NO: 89974 - DNA, 30 bp, Artificial Sequence
  Synthetic oligonucleotide
ggcatcggtacatagtcaacatcaaggaac

SEQ ID NO: 89975 - DNA, 30 bp, Artificial Sequence
  Synthetic oligonucleotide
cgatatttgttgagttctctcaccaggaac

SEQ ID NO: 89976 - DNA, 30 bp, Artificial Sequence
  Synthetic oligonucleotide
atggttcgatttgtctgcaaacataggaac

SEQ ID NO: 89977 - DNA, 30 bp, Artificial Sequence
  Synthetic oligonucleotide
cgtattatacacaataataccgtggggaac

SEQ ID NO: 89978 - DNA, 30 bp, Artificial Sequence
  Synthetic oligonucleotide
gggcattcgaccggtggggacggatggaac

SEQ ID NO: 89979 - DNA, 30 bp, Artificial Sequence
  Synthetic oligonucleotide
aaggaagctggggcaaaattgttgtggaac

SEQ ID NO: 89980 - DNA, 30 bp, Artificial Sequence
  Synthetic oligonucleotide
gtggaaattgttggaagcctagagatgaac

SEQ ID NO: 89981 - DNA, 30 bp, Artificial Sequence
  Synthetic oligonucleotide
agctatgctatagcgttagtaatgatgaac

SEQ ID NO: 89982 - DNA, 30 bp, Artificial Sequence
  Synthetic oligonucleotide
cattggacagaaagagcatcgtgtgtgaac

SEQ ID NO: 89983 - DNA, 30 bp, Artificial Sequence
  Synthetic oligonucleotide
gcaagcgcaggtaatcaggctacgttgaac

SEQ ID NO: 89984 - DNA, 30 bp, Artificial Sequence
  Synthetic oligonucleotide
tggcgtcaagaaccaggacatagcaataac

SEQ ID NO: 89985 - DNA, 30 bp, Artificial Sequence
  Synthetic oligonucleotide
acaaactgggatcgaactagggaccataac

SEQ ID NO: 89986 - DNA, 30 bp, Artificial Sequence
  Synthetic oligonucleotide
tgagatgagcggagataaccagttcataac

SEQ ID NO: 89987 - DNA, 30 bp, Artificial Sequence
  Synthetic oligonucleotide
ctgaattatcgagataccgttggggataac

SEQ ID NO: 89988 - DNA, 30 bp, Artificial Sequence
  Synthetic oligonucleotide
ggggaagacgtgtaaaggatacatgataac

SEQ ID NO: 89989 - DNA, 30 bp, Artificial Sequence
  Synthetic oligonucleotide
gaacttaatatcaaaatcaatcccgctaac

SEQ ID NO: 89990 - DNA, 30 bp, Artificial Sequence
  Synthetic oligonucleotide
taggatccataggtgacgtttactgctaac

SEQ ID NO: 89991 - DNA, 30 bp, Artificial Sequence
  Synthetic oligonucleotide
aaaaagaaggcacacatttccgctgctaac

SEQ ID NO: 89992 - DNA, 30 bp, Artificial Sequence
  Synthetic oligonucleotide
ttacacaggacggggataccatcgtctaac

SEQ ID NO: 89993 - DNA, 30 bp, Artificial Sequence
  Synthetic oligonucleotide
taggacgcgtgcggagtgttccccagtaac

SEQ ID NO: 89994 - DNA, 30 bp, Artificial Sequence
  Synthetic oligonucleotide
ccaggatgtatgtactactgagagcgtaac

SEQ ID NO: 89995 - DNA, 30 bp, Artificial Sequence
  Synthetic oligonucleotide
cacatgaaattgacatataacccgcgtaac

SEQ ID NO: 89996 - DNA, 30 bp, Artificial Sequence
  Synthetic oligonucleotide
aggagcggtgaaatcagcatggggcgtaac

SEQ ID NO: 89997 - DNA, 30 bp, Artificial Sequence
  Synthetic oligonucleotide
ggtctcgaaaatagaatgaacggaggtaac

SEQ ID NO: 89998 - DNA, 30 bp, Artificial Sequence
  Synthetic oligonucleotide
ttgaagcgagagccagtgggggaatgtaac

SEQ ID NO: 89999 - DNA, 30 bp, Artificial Sequence
  Synthetic oligonucleotide
ccaagtgcatcgacggcaaacgcttgtaac

SEQ ID NO: 90000 - DNA, 30 bp, Artificial Sequence
  Synthetic oligonucleotide
agaccaaaattcatacagcttccaattaac

SEQ ID NO: 90001 - DNA, 30 bp, Artificial Sequence
  Synthetic oligonucleotide
caggcaacattttgccacatcgagattaac

SEQ ID NO: 90002 - DNA, 30 bp, Artificial Sequence
  Synthetic oligonucleotide
cgaaatcaattaagaaccattcggattaac

SEQ ID NO: 90003 - DNA, 30 bp, Artificial Sequence
  Synthetic oligonucleotide
acgatttcttcgagagcggcgggtattaac

SEQ ID NO: 90004 - DNA, 30 bp, Artificial Sequence
  Synthetic oligonucleotide
ggaatcggtgaggttaacgtgattattaac

SEQ ID NO: 90005 - DNA, 30 bp, Artificial Sequence
  Synthetic oligonucleotide
gaacggaacacagggctctgacatgttaac

SEQ ID NO: 90006 - DNA, 30 bp, Artificial Sequence
  Synthetic oligonucleotide
ctcgcatataaagttccgaacccatttaac

SEQ ID NO: 90007 - DNA, 30 bp, Artificial Sequence
  Synthetic oligonucleotide
tgtgtaccggagacgagacgtaagtttaac

SEQ ID NO: 90008 - DNA, 30 bp, Artificial Sequence
  Synthetic oligonucleotide
gaagcaatcaagctaccgaattcaaaacac

SEQ ID NO: 90009 - DNA, 30 bp, Artificial Sequence
  Synthetic oligonucleotide
ttcgccttgcataagggcttccggaaacac

SEQ ID NO: 90010 - DNA, 30 bp, Artificial Sequence
  Synthetic oligonucleotide
acttggctatttagcacggcagggaaacac

SEQ ID NO: 90011 - DNA, 30 bp, Artificial Sequence
  Synthetic oligonucleotide
tccaccacaaccacacttattcttaaacac

SEQ ID NO: 90012 - DNA, 30 bp, Artificial Sequence
  Synthetic oligonucleotide
cgacaaggtcgaacctcgggcttggaacac

SEQ ID NO: 90013 - DNA, 30 bp, Artificial Sequence
  Synthetic oligonucleotide
gcaaggggttcttagcccaaaacataacac

SEQ ID NO: 90014 - DNA, 30 bp, Artificial Sequence
  Synthetic oligonucleotide
gggggacagtaagatcacccttagtaacac

SEQ ID NO: 90015 - DNA, 30 bp, Artificial Sequence
  Synthetic oligonucleotide
gaaagtgcccagcaaacaaacaaaacacac

SEQ ID NO: 90016 - DNA, 30 bp, Artificial Sequence
  Synthetic oligonucleotide
tgtacaacaagagggatatcagccacacac

SEQ ID NO: 90017 - DNA, 30 bp, Artificial Sequence
  Synthetic oligonucleotide
cattaaacaccacaactcattacgacacac

SEQ ID NO: 90018 - DNA, 30 bp, Artificial Sequence
  Synthetic oligonucleotide
gccgaggaggggtaggtttactatccacac

SEQ ID NO: 90019 - DNA, 30 bp, Artificial Sequence
  Synthetic oligonucleotide
cgacagggcatttcggtcactggtccacac

SEQ ID NO: 90020 - DNA, 30 bp, Artificial Sequence
  Synthetic oligonucleotide
caggatctagaatgagcaacatttccacac

SEQ ID NO: 90021 - DNA, 30 bp, Artificial Sequence
  Synthetic oligonucleotide
gagcctgtgggaagtattacagtagcacac

SEQ ID NO: 90022 - DNA, 30 bp, Artificial Sequence
  Synthetic oligonucleotide
caggacggaacactcagcgttgtctcacac

SEQ ID NO: 90023 - DNA, 30 bp, Artificial Sequence
  Synthetic oligonucleotide
tcgatatcgcggacgacacgtgacagacac

SEQ ID NO: 90024 - DNA, 30 bp, Artificial Sequence
  Synthetic oligonucleotide
cgatatttaaagagagcttgctcgagacac

SEQ ID NO: 90025 - DNA, 30 bp, Artificial Sequence
  Synthetic oligonucleotide
ccgcgcagcctatgaaagagggttcgacac

SEQ ID NO: 90026 - DNA, 30 bp, Artificial Sequence
  Synthetic oligonucleotide
tcggtaagcagatgatatcaggtcggacac

SEQ ID NO: 90027 - DNA, 30 bp, Artificial Sequence
  Synthetic oligonucleotide
actggggacataagaagacgccggggacac

SEQ ID NO: 90028 - DNA, 30 bp, Artificial Sequence
  Synthetic oligonucleotide
atgaaagaggagttcgatcggcgtggacac

SEQ ID NO: 90029 - DNA, 30 bp, Artificial Sequence
  Synthetic oligonucleotide
gggcatgatcccggtaaattgttcatacac

SEQ ID NO: 90030 - DNA, 30 bp, Artificial Sequence
  Synthetic oligonucleotide
agccaggataagggaccatattagatacac

SEQ ID NO: 90031 - DNA, 30 bp, Artificial Sequence
  Synthetic oligonucleotide
acgccatcggtgtagatggtaaggatacac

SEQ ID NO: 90032 - DNA, 30 bp, Artificial Sequence
  Synthetic oligonucleotide
aagacgtaagatacattaaagtggatacac

SEQ ID NO: 90033 - DNA, 30 bp, Artificial Sequence
  Synthetic oligonucleotide
cgtatcagggtgtggatgttacgggtacac

SEQ ID NO: 90034 - DNA, 30 bp, Artificial Sequence
  Synthetic oligonucleotide
tcagcgcaggtgtaaagagcggcaaaccac

SEQ ID NO: 90035 - DNA, 30 bp, Artificial Sequence
  Synthetic oligonucleotide
cttaagatggagtgatctcatacccaccac

SEQ ID NO: 90036 - DNA, 30 bp, Artificial Sequence
  Synthetic oligonucleotide
tgagtcagccaactgaacttgggccaccac

SEQ ID NO: 90037 - DNA, 30 bp, Artificial Sequence
  Synthetic oligonucleotide
ccgtcgctcaggatgagaagtccgcaccac

SEQ ID NO: 90038 - DNA, 30 bp, Artificial Sequence
  Synthetic oligonucleotide
caatgcgttgatatgcactgagaagaccac

SEQ ID NO: 90039 - DNA, 30 bp, Artificial Sequence
  Synthetic oligonucleotide
cattgggaactcggtgctaacagggaccac

SEQ ID NO: 90040 - DNA, 30 bp, Artificial Sequence
  Synthetic oligonucleotide
caagtggcaggttatgatgagggtgaccac

SEQ ID NO: 90041 - DNA, 30 bp, Artificial Sequence
  Synthetic oligonucleotide
gacctagggtggaaacggcccaaataccac

SEQ ID NO: 90042 - DNA, 30 bp, Artificial Sequence
  Synthetic oligonucleotide
ctgagtcccacacaagggtttcgctaccac

SEQ ID NO: 90043 - DNA, 30 bp, Artificial Sequence
  Synthetic oligonucleotide
agattgagacgtgcgacggaacattaccac

SEQ ID NO: 90044 - DNA, 30 bp, Artificial Sequence
  Synthetic oligonucleotide
tttgaagtaagaactaatacatacgcccac

SEQ ID NO: 90045 - DNA, 30 bp, Artificial Sequence
  Synthetic oligonucleotide
ggcttcgcgtatacacgactaagatcccac

SEQ ID NO: 90046 - DNA, 30 bp, Artificial Sequence
  Synthetic oligonucleotide
gccactaagtacaagtacggcagtagccac

SEQ ID NO: 90047 - DNA, 30 bp, Artificial Sequence
  Synthetic oligonucleotide
ctacgttggccaaatggtgtggacggccac

SEQ ID NO: 90048 - DNA, 30 bp, Artificial Sequence
  Synthetic oligonucleotide
tcacaccctgcacgtgtgtaggccggccac

SEQ ID NO: 90049 - DNA, 30 bp, Artificial Sequence
  Synthetic oligonucleotide
taggcaaaccagtacttgaccactggccac

SEQ ID NO: 90050 - DNA, 30 bp, Artificial Sequence
  Synthetic oligonucleotide
ggctcgccggatcactagtcacagctccac

SEQ ID NO: 90051 - DNA, 30 bp, Artificial Sequence
  Synthetic oligonucleotide
gggttccgccggaacagaatacataagcac

SEQ ID NO: 90052 - DNA, 30 bp, Artificial Sequence
  Synthetic oligonucleotide
gggggaaggccgcattgtgtcgataagcac

SEQ ID NO: 90053 - DNA, 30 bp, Artificial Sequence
  Synthetic oligonucleotide
ataggacaggaaatgcacgtttataagcac

SEQ ID NO: 90054 - DNA, 30 bp, Artificial Sequence
  Synthetic oligonucleotide
aagagatgcaggaagcatggactggagcac

SEQ ID NO: 90055 - DNA, 30 bp, Artificial Sequence
  Synthetic oligonucleotide
gtatctgtagactcaaattaacagtagcac

SEQ ID NO: 90056 - DNA, 30 bp, Artificial Sequence
  Synthetic oligonucleotide
gatgggtggcgcaatgcacttcattagcac

SEQ ID NO: 90057 - DNA, 30 bp, Artificial Sequence
  Synthetic oligonucleotide
tctcaccttccccacgaaagcattgcgcac

SEQ ID NO: 90058 - DNA, 30 bp, Artificial Sequence
  Synthetic oligonucleotide
agacttcagaggaggtaaaacggtaggcac

SEQ ID NO: 90059 - DNA, 30 bp, Artificial Sequence
  Synthetic oligonucleotide
caccccggcgatgatcggaattgtaggcac

SEQ ID NO: 90060 - DNA, 30 bp, Artificial Sequence
  Synthetic oligonucleotide
tggaatgtcgttaacagggtggaatggcac

SEQ ID NO: 90061 - DNA, 30 bp, Artificial Sequence
  Synthetic oligonucleotide
ttatcccgccattttaacaagggactgcac

SEQ ID NO: 90062 - DNA, 30 bp, Artificial Sequence
  Synthetic oligonucleotide
gagggcttacagagacgatagaggttgcac

SEQ ID NO: 90063 - DNA, 30 bp, Artificial Sequence
  Synthetic oligonucleotide
cggatacatcaaccggaccgagggttgcac

SEQ ID NO: 90064 - DNA, 30 bp, Artificial Sequence
  Synthetic oligonucleotide
gtgttgggaaacgtgaaacgaattttgcac

SEQ ID NO: 90065 - DNA, 30 bp, Artificial Sequence
  Synthetic oligonucleotide
ggtatgcccaactagctagggggtaatcac

SEQ ID NO: 90066 - DNA, 30 bp, Artificial Sequence
  Synthetic oligonucleotide
tcccagcttcaaactgcaaggagagatcac

SEQ ID NO: 90067 - DNA, 30 bp, Artificial Sequence
  Synthetic oligonucleotide
gagaagcagggcgatataaaactcgatcac

SEQ ID NO: 90068 - DNA, 30 bp, Artificial Sequence
  Synthetic oligonucleotide
agaggccgtagggcgaggaccgactatcac

SEQ ID NO: 90069 - DNA, 30 bp, Artificial Sequence
  Synthetic oligonucleotide
cacgaaagcaatcccgtcaatagctatcac

SEQ ID NO: 90070 - DNA, 30 bp, Artificial Sequence
  Synthetic oligonucleotide
tccacgcaagacactagtctcaattatcac

SEQ ID NO: 90071 - DNA, 30 bp, Artificial Sequence
  Synthetic oligonucleotide
agcaaaggatgcacgaggggacattatcac

SEQ ID NO: 90072 - DNA, 30 bp, Artificial Sequence
  Synthetic oligonucleotide
cggctgatgcttggctttgtcgaaactcac

SEQ ID NO: 90073 - DNA, 30 bp, Artificial Sequence
  Synthetic oligonucleotide
tatcgtcccaacagggtcgagccaactcac

SEQ ID NO: 90074 - DNA, 30 bp, Artificial Sequence
  Synthetic oligonucleotide
gtgtaagaaggatccctagttcgaactcac

SEQ ID NO: 90075 - DNA, 30 bp, Artificial Sequence
  Synthetic oligonucleotide
agcacatcgatgcatagaagtccgcctcac

SEQ ID NO: 90076 - DNA, 30 bp, Artificial Sequence
  Synthetic oligonucleotide
tacggatgtcaataggagaaagtggctcac

SEQ ID NO: 90077 - DNA, 30 bp, Artificial Sequence
  Synthetic oligonucleotide
atgatatacaaacactagtagttgtctcac

SEQ ID NO: 90078 - DNA, 30 bp, Artificial Sequence
  Synthetic oligonucleotide
gtggaccctaaggataacaatgattctcac

SEQ ID NO: 90079 - DNA, 30 bp, Artificial Sequence
  Synthetic oligonucleotide
caatggacatcccgcatcgaataaagtcac

SEQ ID NO: 90080 - DNA, 30 bp, Artificial Sequence
  Synthetic oligonucleotide
aggttagtaagctatcttaacgcaagtcac

SEQ ID NO: 90081 - DNA, 30 bp, Artificial Sequence
  Synthetic oligonucleotide
acgtaaacccctgatcacgtggggagtcac

SEQ ID NO: 90082 - DNA, 30 bp, Artificial Sequence
  Synthetic oligonucleotide
cgaaccattatgaggcgtcaacatagtcac

SEQ ID NO: 90083 - DNA, 40 bp, Artificial Sequence
  Synthetic oligonucleotide
atgcatgtcagttagtggcggtaaacagcttagtcgtcac

SEQ ID NO: 90084 - DNA, 30 bp, Artificial Sequence
  Synthetic oligonucleotide
ggaacgcgcccgaatagtaggctgggtcac

SEQ ID NO: 90085 - DNA, 30 bp, Artificial Sequence
  Synthetic oligonucleotide
agcagaattgagtaatcctcgccatgtcac

SEQ ID NO: 90086 - DNA, 30 bp, Artificial Sequence
  Synthetic oligonucleotide
catctcgaatttacaaggatatgctgtcac

SEQ ID NO: 90087 - DNA, 30 bp, Artificial Sequence
  Synthetic oligonucleotide
attaggaacaggcgaaggcgcatctgtcac

SEQ ID NO: 90088 - DNA, 30 bp, Artificial Sequence
  Synthetic oligonucleotide
aagggcgagtacgattcacaaagaattcac

SEQ ID NO: 90089 - DNA, 30 bp, Artificial Sequence
  Synthetic oligonucleotide
tgggggtgtcttcatcaccagtagattcac

SEQ ID NO: 90090 - DNA, 30 bp, Artificial Sequence
  Synthetic oligonucleotide
tccacagtaccggcggcaacgcgacttcac

SEQ ID NO: 90091 - DNA, 34 bp, Artificial Sequence
  Synthetic oligonucleotide
gatactagaccaccacgtgtccattacaaaagac

SEQ ID NO: 90092 - DNA, 34 bp, Artificial Sequence
  Synthetic oligonucleotide
gatactagcccaccacgtgtccatcagaaaagac

SEQ ID NO: 90093 - DNA, 34 bp, Artificial Sequence
  Synthetic oligonucleotide
gatactagaccaccacgtgttcatcagaaaagac

SEQ ID NO: 90094 - DNA, 30 bp, Artificial Sequence
  Synthetic oligonucleotide
cgtgaattcgtgatttggaatcacaaagac

SEQ ID NO: 90095 - DNA, 30 bp, Artificial Sequence
  Synthetic oligonucleotide
aaaggacaacgtgatgagaacgggaaagac

SEQ ID NO: 90096 - DNA, 30 bp, Artificial Sequence
  Synthetic oligonucleotide
cgcgcattcgaaagaggacggcgacaagac

SEQ ID NO: 90097 - DNA, 30 bp, Artificial Sequence
  Synthetic oligonucleotide
atgaaacaacgccgatcagcccagcaagac

SEQ ID NO: 90098 - DNA, 30 bp, Artificial Sequence
  Synthetic oligonucleotide
aactcaccaagggaaagagagccgcaagac

SEQ ID NO: 90099 - DNA, 30 bp, Artificial Sequence
  Synthetic oligonucleotide
gcacgcacggaatatacacgatcgcaagac

SEQ ID NO: 90100 - DNA, 30 bp, Artificial Sequence
  Synthetic oligonucleotide
ggtacgccatccacgtgaacgcatcaagac

SEQ ID NO: 90101 - DNA, 30 bp, Artificial Sequence
  Synthetic oligonucleotide
agttgtagtgcctagttcagaggagaagac

SEQ ID NO: 90102 - DNA, 30 bp, Artificial Sequence
  Synthetic oligonucleotide
acgaaacttcgaatgagacacctagaagac

SEQ ID NO: 90103 - DNA, 30 bp, Artificial Sequence
  Synthetic oligonucleotide
acagagcgactccttcgtgggagtgaagac

SEQ ID NO: 90104 - DNA, 30 bp, Artificial Sequence
  Synthetic oligonucleotide
ataaaaggagcatagagtggaggataagac

SEQ ID NO: 90105 - DNA, 30 bp, Artificial Sequence
  Synthetic oligonucleotide
agaggccctagttgcgagcagtgataagac

SEQ ID NO: 90106 - DNA, 30 bp, Artificial Sequence
  Synthetic oligonucleotide
ggtctggtgcaagagcgctggtgataagac

SEQ ID NO: 90107 - DNA, 30 bp, Artificial Sequence
  Synthetic oligonucleotide
tgaaagtcttcgtaacatgcgctctaagac

SEQ ID NO: 90108 - DNA, 30 bp, Artificial Sequence
  Synthetic oligonucleotide
tgatgctactagggattacgagatccagac

SEQ ID NO: 90109 - DNA, 30 bp, Artificial Sequence
  Synthetic oligonucleotide
tgttctatccagaaggatcgatgtccagac

SEQ ID NO: 90110 - DNA, 30 bp, Artificial Sequence
  Synthetic oligonucleotide
gaccaagatacgtgcaatctaagagcagac

SEQ ID NO: 90111 - DNA, 30 bp, Artificial Sequence
  Synthetic oligonucleotide
acgctaggccgctcgaccaacttagcagac

SEQ ID NO: 90112 - DNA, 30 bp, Artificial Sequence
  Synthetic oligonucleotide
gcttacaggaacaagtggacgtgtgcagac

SEQ ID NO: 90113 - DNA, 29 bp, Artificial Sequence
  Synthetic oligonucleotide
cagccctaaaggttgggaagtcatcagac

SEQ ID NO: 90114 - DNA, 31 bp, Artificial Sequence
  Synthetic oligonucleotide
agtactgggcacaggtaaggcaacttcagac

SEQ ID NO: 90115 - DNA, 30 bp, Artificial Sequence
  Synthetic oligonucleotide
tggctcgataaatttcctctaccaagagac

SEQ ID NO: 90116 - DNA, 30 bp, Artificial Sequence
  Synthetic oligonucleotide
tgataagtgacagctccataaatccgagac

SEQ ID NO: 90117 - DNA, 30 bp, Artificial Sequence
  Synthetic oligonucleotide
cggcaggcaccgtagataacgtcgcgagac

SEQ ID NO: 90118 - DNA, 30 bp, Artificial Sequence
  Synthetic oligonucleotide
aacaccaataaaggataatccgtgcgagac

SEQ ID NO: 90119 - DNA, 30 bp, Artificial Sequence
  Synthetic oligonucleotide
ggcccaaaggactgagtttggttgcgagac

SEQ ID NO: 90120 - DNA, 30 bp, Artificial Sequence
  Synthetic oligonucleotide
cagtgggcgacgccgcccagaggtggagac

SEQ ID NO: 90121 - DNA, 30 bp, Artificial Sequence
  Synthetic oligonucleotide
atacacttccacgcggcgggacggtgagac

SEQ ID NO: 90122 - DNA, 30 bp, Artificial Sequence
  Synthetic oligonucleotide
gcctcacacccggttaggcaagaaatagac

SEQ ID NO: 90123 - DNA, 30 bp, Artificial Sequence
  Synthetic oligonucleotide
cgccaactgcagcgacaagtcgaattagac

SEQ ID NO: 90124 - DNA, 30 bp, Artificial Sequence
  Synthetic oligonucleotide
gccgtgaaacttcgagcgcaggcaaacgac

SEQ ID NO: 90125 - DNA, 30 bp, Artificial Sequence
  Synthetic oligonucleotide
ggggccgagcaaatgccgcgcttaaacgac

SEQ ID NO: 90126 - DNA, 30 bp, Artificial Sequence
  Synthetic oligonucleotide
gcataaccaaagcaggtgtagtagcacgac

SEQ ID NO: 90127 - DNA, 30 bp, Artificial Sequence
  Synthetic oligonucleotide
acgtttaatcggtcaactgggtcggacgac

SEQ ID NO: 90128 - DNA, 30 bp, Artificial Sequence
  Synthetic oligonucleotide
cgcagggcaggctggattcgatcatacgac

SEQ ID NO: 90129 - DNA, 30 bp, Artificial Sequence
  Synthetic oligonucleotide
catcgcgtttgcgaattggatgtatacgac

SEQ ID NO: 90130 - DNA, 30 bp, Artificial Sequence
  Synthetic oligonucleotide
atgcttcgactagactcgagccactacgac

SEQ ID NO: 90131 - DNA, 30 bp, Artificial Sequence
  Synthetic oligonucleotide
atcacctacccgtgaccactgacgtacgac

SEQ ID NO: 90132 - DNA, 30 bp, Artificial Sequence
  Synthetic oligonucleotide
aaaaagcacgagtagcacgtgacgtacgac

SEQ ID NO: 90133 - DNA, 30 bp, Artificial Sequence
  Synthetic oligonucleotide
atgcgctaggactgttgggcgcggtacgac

SEQ ID NO: 90134 - DNA, 30 bp, Artificial Sequence
  Synthetic oligonucleotide
agaggttcatcgagggcgcgctggcccgac

SEQ ID NO: 90135 - DNA, 30 bp, Artificial Sequence
  Synthetic oligonucleotide
gccgcccctctttgagccgaacatcccgac

SEQ ID NO: 90136 - DNA, 30 bp, Artificial Sequence
  Synthetic oligonucleotide
aaccaatgcagtcacgagcaaacagccgac

SEQ ID NO: 90137 - DNA, 30 bp, Artificial Sequence
  Synthetic oligonucleotide
gatggtataacaacggacgcataggccgac

SEQ ID NO: 90138 - DNA, 30 bp, Artificial Sequence
  Synthetic oligonucleotide
tatgtacaggtgcgaaatgctccggccgac

SEQ ID NO: 90139 - DNA, 30 bp, Artificial Sequence
  Synthetic oligonucleotide
gcttagggaatactgtacagctaaagcgac

SEQ ID NO: 90140 - DNA, 30 bp, Artificial Sequence
  Synthetic oligonucleotide
aggcggtgcatggcctaaacagacagcgac

SEQ ID NO: 90141 - DNA, 30 bp, Artificial Sequence
  Synthetic oligonucleotide
ctcaggaaaagttaaaatgcggtcagcgac

SEQ ID NO: 90142 - DNA, 30 bp, Artificial Sequence
  Synthetic oligonucleotide
tgagcgcggtcaagggggcacgagagcgac

SEQ ID NO: 90143 - DNA, 30 bp, Artificial Sequence
  Synthetic oligonucleotide
tggccatgaatagttcgaacgagccgcgac

SEQ ID NO: 90144 - DNA, 30 bp, Artificial Sequence
  Synthetic oligonucleotide
ttacgggtgttctgcggtacgtaaggcgac

SEQ ID NO: 90145 - DNA, 30 bp, Artificial Sequence
  Synthetic oligonucleotide
tcgtgccaatccgtatacctaaggggcgac

SEQ ID NO: 90146 - DNA, 30 bp, Artificial Sequence
  Synthetic oligonucleotide
ccgcgatcgaagaggctgaaagtgggcgac

SEQ ID NO: 90147 - DNA, 30 bp, Artificial Sequence
  Synthetic oligonucleotide
atggtgctgcgaagtcacaagggctgcgac

SEQ ID NO: 90148 - DNA, 30 bp, Artificial Sequence
  Synthetic oligonucleotide
tccttctagcaaaagggaatttcgatcgac

SEQ ID NO: 90149 - DNA, 30 bp, Artificial Sequence
  Synthetic oligonucleotide
acacagtacaacctcaacccctatctcgac

SEQ ID NO: 90150 - DNA, 30 bp, Artificial Sequence
  Synthetic oligonucleotide
gaataacctcaagggaaatatcttctcgac

SEQ ID NO: 90151 - DNA, 30 bp, Artificial Sequence
  Synthetic oligonucleotide
aggggggtcagcgctcaggtctgcgtcgac

SEQ ID NO: 90152 - DNA, 30 bp, Artificial Sequence
  Synthetic oligonucleotide
gtagagtggcaggccaagtaaatggtcgac

SEQ ID NO: 90153 - DNA, 30 bp, Artificial Sequence
  Synthetic oligonucleotide
acgggctcgtcattgttcgaacaattcgac

SEQ ID NO: 90154 - DNA, 30 bp, Artificial Sequence
  Synthetic oligonucleotide
gcttcgcgatggcgttacacaaggttcgac

SEQ ID NO: 90155 - DNA, 30 bp, Artificial Sequence
  Synthetic oligonucleotide
ccatcatcatcattcgtaagaataaaggac

SEQ ID NO: 90156 - DNA, 30 bp, Artificial Sequence
  Synthetic oligonucleotide
cgctgaggtaatatgtggagcacccaggac

SEQ ID NO: 90157 - DNA, 30 bp, Artificial Sequence
  Synthetic oligonucleotide
ggtaattgtactgcaaagcgttgggaggac

SEQ ID NO: 90158 - DNA, 30 bp, Artificial Sequence
  Synthetic oligonucleotide
cggcactttttcaccgtggtgcttgaggac

SEQ ID NO: 90159 - DNA, 30 bp, Artificial Sequence
  Synthetic oligonucleotide
acctgacgtagagggaaaggctattaggac

SEQ ID NO: 90160 - DNA, 30 bp, Artificial Sequence
  Synthetic oligonucleotide
cagcgaggggcgtccaattcttgaccggac

SEQ ID NO: 90161 - DNA, 30 bp, Artificial Sequence
  Synthetic oligonucleotide
aaaagaagtagattccgaaagggcccggac

SEQ ID NO: 90162 - DNA, 30 bp, Artificial Sequence
  Synthetic oligonucleotide
agcaggagcttgacagccttaagcgcggac

SEQ ID NO: 90163 - DNA, 30 bp, Artificial Sequence
  Synthetic oligonucleotide
gctagaaaacatgtgcacacggttgcggac

SEQ ID NO: 90164 - DNA, 30 bp, Artificial Sequence
  Synthetic oligonucleotide
ggatgtcttataacaggctgcgggtcggac

SEQ ID NO: 90165 - DNA, 30 bp, Artificial Sequence
  Synthetic oligonucleotide
cgctaggacaagcaccgcaaggggtcggac

SEQ ID NO: 90166 - DNA, 30 bp, Artificial Sequence
  Synthetic oligonucleotide
accggaataactcataggtcaacccgggac

SEQ ID NO: 90167 - DNA, 30 bp, Artificial Sequence
  Synthetic oligonucleotide
tctagctcaggcgggccaaagggaggggac

SEQ ID NO: 90168 - DNA, 30 bp, Artificial Sequence
  Synthetic oligonucleotide
aaggtaaatatgggcttgcatatatgggac

SEQ ID NO: 90169 - DNA, 30 bp, Artificial Sequence
  Synthetic oligonucleotide
agagatatgccgtatagttctggactggac

SEQ ID NO: 90170 - DNA, 30 bp, Artificial Sequence
  Synthetic oligonucleotide
gaacggtcatgcttaacagtcgtggtggac

SEQ ID NO: 90171 - DNA, 31 bp, Artificial Sequence
  Synthetic oligonucleotide
caacaggaggactcggttagccaacttggac

SEQ ID NO: 90172 - DNA, 30 bp, Artificial Sequence
  Synthetic oligonucleotide
agcacgagaaggttagtgcaaagaaatgac

SEQ ID NO: 90173 - DNA, 30 bp, Artificial Sequence
  Synthetic oligonucleotide
ggagacagtggtgcgaaactcgctaatgac

SEQ ID NO: 90174 - DNA, 30 bp, Artificial Sequence
  Synthetic oligonucleotide
agaaaccacccgcggactgcaattaatgac

SEQ ID NO: 90175 - DNA, 30 bp, Artificial Sequence
  Synthetic oligonucleotide
aacactcaagcgcatatccaaggtgatgac

SEQ ID NO: 90176 - DNA, 30 bp, Artificial Sequence
  Synthetic oligonucleotide
tatggcaaccgtagagctatagttgatgac

SEQ ID NO: 90177 - DNA, 30 bp, Artificial Sequence
  Synthetic oligonucleotide
ccgggagaagatagccagagtgaatatgac

SEQ ID NO: 90178 - DNA, 30 bp, Artificial Sequence
  Synthetic oligonucleotide
gcatggtccggggtgacaaattactatgac

SEQ ID NO: 90179 - DNA, 30 bp, Artificial Sequence
  Synthetic oligonucleotide
ggtttgatcaggggtgaatcggtgtatgac

SEQ ID NO: 90180 - DNA, 30 bp, Artificial Sequence
  Synthetic oligonucleotide
cggttggggggcacatccactgtaactgac

SEQ ID NO: 90181 - DNA, 30 bp, Artificial Sequence
  Synthetic oligonucleotide
atgagttgttagagcccaatgatgtctgac

SEQ ID NO: 90182 - DNA, 30 bp, Artificial Sequence
  Synthetic oligonucleotide
ctggtagtgtgataaagtgtttcgcgtgac

SEQ ID NO: 90183 - DNA, 29 bp, Artificial Sequence
  Synthetic oligonucleotide
agattccgggcgcggaggtgggtcgtgac

SEQ ID NO: 90184 - DNA, 30 bp, Artificial Sequence
  Synthetic oligonucleotide
gaacgactctacttttggagagagggtgac

SEQ ID NO: 90185 - DNA, 30 bp, Artificial Sequence
  Synthetic oligonucleotide
cggcaatccctggagttgaggcggggtgac

SEQ ID NO: 90186 - DNA, 30 bp, Artificial Sequence
  Synthetic oligonucleotide
ggccccagatgtgaacaacattgcattgac

SEQ ID NO: 90187 - DNA, 30 bp, Artificial Sequence
  Synthetic oligonucleotide
cgggctcacaaggctcggaaccagattgac

SEQ ID NO: 90188 - DNA, 30 bp, Artificial Sequence
  Synthetic oligonucleotide
cggcgcccacttgcgaataattgccttgac

SEQ ID NO: 90189 - DNA, 30 bp, Artificial Sequence
  Synthetic oligonucleotide
tgtagaagttggtggccggtctaggttgac

SEQ ID NO: 90190 - DNA, 30 bp, Artificial Sequence
  Synthetic oligonucleotide
accagaccaactccaatacagagatttgac

SEQ ID NO: 90191 - DNA, 30 bp, Artificial Sequence
  Synthetic oligonucleotide
gatacgaggagtcacacggggtaccaatac

SEQ ID NO: 90192 - DNA, 30 bp, Artificial Sequence
  Synthetic oligonucleotide
agtggagtgcgttggcggatggatgaatac

SEQ ID NO: 90193 - DNA, 30 bp, Artificial Sequence
  Synthetic oligonucleotide
gaaacctcgatcgtaaggatacctgaatac

SEQ ID NO: 90194 - DNA, 30 bp, Artificial Sequence
  Synthetic oligonucleotide
cgccaacaaatacctgtcgcatacccatac

SEQ ID NO: 90195 - DNA, 30 bp, Artificial Sequence
  Synthetic oligonucleotide
gggaccgtatgaacgcatattaaagcatac

SEQ ID NO: 90196 - DNA, 30 bp, Artificial Sequence
  Synthetic oligonucleotide
atggtcagcaggaacccgatcccgtcatac

SEQ ID NO: 90197 - DNA, 30 bp, Artificial Sequence
  Synthetic oligonucleotide
cggattgagcacagaccagtaatgtcatac

SEQ ID NO: 90198 - DNA, 30 bp, Artificial Sequence
  Synthetic oligonucleotide
agtagaagcggcgaataaatagggcgatac

SEQ ID NO: 90199 - DNA, 30 bp, Artificial Sequence
  Synthetic oligonucleotide
gcgtatacctcttaaaagaaggcaggatac

SEQ ID NO: 90200 - DNA, 30 bp, Artificial Sequence
  Synthetic oligonucleotide
acctcacctgtgaactgtggggcctgatac

SEQ ID NO: 90201 - DNA, 30 bp, Artificial Sequence
  Synthetic oligonucleotide
gttggccgttggggagtgaaccagtgatac

SEQ ID NO: 90202 - DNA, 30 bp, Artificial Sequence
  Synthetic oligonucleotide
caggggcaattttaattcgagtccatatac

SEQ ID NO: 90203 - DNA, 30 bp, Artificial Sequence
  Synthetic oligonucleotide
aggaagaaagagacaagcagatagctatac

SEQ ID NO: 90204 - DNA, 30 bp, Artificial Sequence
  Synthetic oligonucleotide
aagtatagggcgtcgggattggttgtatac

SEQ ID NO: 90205 - DNA, 30 bp, Artificial Sequence
  Synthetic oligonucleotide
ggccatgcatggatagagatcgcgttatac

SEQ ID NO: 90206 - DNA, 30 bp, Artificial Sequence
  Synthetic oligonucleotide
gtgtattaaggtggatcggatagcaactac

SEQ ID NO: 90207 - DNA, 30 bp, Artificial Sequence
  Synthetic oligonucleotide
tcttcaaaaggatctttcatagctaactac

SEQ ID NO: 90208 - DNA, 30 bp, Artificial Sequence
  Synthetic oligonucleotide
aggggtacaacatcgcctcccgctaactac

SEQ ID NO: 90209 - DNA, 30 bp, Artificial Sequence
  Synthetic oligonucleotide
ccagactggacagccgcgccggacgactac

SEQ ID NO: 90210 - DNA, 30 bp, Artificial Sequence
  Synthetic oligonucleotide
agctccatccgctgaatctggagggactac

SEQ ID NO: 90211 - DNA, 30 bp, Artificial Sequence
  Synthetic oligonucleotide
gtgttagagactggactgaatatgtactac

SEQ ID NO: 90212 - DNA, 30 bp, Artificial Sequence
  Synthetic oligonucleotide
aggatgtaaaatacgtgaacatcagcctac

SEQ ID NO: 90213 - DNA, 30 bp, Artificial Sequence
  Synthetic oligonucleotide
gggggaactacggcaaagtgtccttcctac

SEQ ID NO: 90214 - DNA, 30 bp, Artificial Sequence
  Synthetic oligonucleotide
ggcaatgaagatggggcatgtcatagctac

SEQ ID NO: 90215 - DNA, 30 bp, Artificial Sequence
  Synthetic oligonucleotide
ggataaatgctgtttgaggtaagtagctac

SEQ ID NO: 90216 - DNA, 30 bp, Artificial Sequence
  Synthetic oligonucleotide
catgctgaaaaggctttaaatatgcgctac

SEQ ID NO: 90217 - DNA, 30 bp, Artificial Sequence
  Synthetic oligonucleotide
acggataccagtaggagccgcatcggctac

SEQ ID NO: 90218 - DNA, 30 bp, Artificial Sequence
  Synthetic oligonucleotide
ctcagaaggctcggaacgtgctagggctac

SEQ ID NO: 90219 - DNA, 30 bp, Artificial Sequence
  Synthetic oligonucleotide
tcacggtaggggtcttgcggtcttatctac

SEQ ID NO: 90220 - DNA, 30 bp, Artificial Sequence
  Synthetic oligonucleotide
aaactgcgaaccgtcaacagagcactctac

SEQ ID NO: 90221 - DNA, 30 bp, Artificial Sequence
  Synthetic oligonucleotide
gggcaggatcagggcactagagcgttctac

SEQ ID NO: 90222 - DNA, 30 bp, Artificial Sequence
  Synthetic oligonucleotide
aatgcgacatagtcaatcgagtctaagtac

SEQ ID NO: 90223 - DNA, 30 bp, Artificial Sequence
  Synthetic oligonucleotide
gaggagtagggatggattgaaaaagagtac

SEQ ID NO: 90224 - DNA, 30 bp, Artificial Sequence
  Synthetic oligonucleotide
ggggcgcaacagggtaactgataagagtac

SEQ ID NO: 90225 - DNA, 30 bp, Artificial Sequence
  Synthetic oligonucleotide
gtcggaatgtgtcctgttcgaacagagtac

SEQ ID NO: 90226 - DNA, 30 bp, Artificial Sequence
  Synthetic oligonucleotide
gcaaacggtaatcaaacggtgcaggagtac

SEQ ID NO: 90227 - DNA, 30 bp, Artificial Sequence
  Synthetic oligonucleotide
tgcgtataggccaaatacagtcaatagtac

SEQ ID NO: 90228 - DNA, 30 bp, Artificial Sequence
  Synthetic oligonucleotide
cattcgtgtgtggtaccgaccatatagtac

SEQ ID NO: 90229 - DNA, 30 bp, Artificial Sequence
  Synthetic oligonucleotide
agggggtacggactgtcgaggaagtagtac

SEQ ID NO: 90230 - DNA, 30 bp, Artificial Sequence
  Synthetic oligonucleotide
ttggttacaagtcaatgaattaatccgtac

SEQ ID NO: 90231 - DNA, 30 bp, Artificial Sequence
  Synthetic oligonucleotide
cattaaagacggggataatggggagcgtac

SEQ ID NO: 90232 - DNA, 30 bp, Artificial Sequence
  Synthetic oligonucleotide
gaacacgcacttggctggacagaggcgtac

SEQ ID NO: 90233 - DNA, 30 bp, Artificial Sequence
  Synthetic oligonucleotide
attacgtagagggtgtcgggcccatcgtac

SEQ ID NO: 90234 - DNA, 30 bp, Artificial Sequence
  Synthetic oligonucleotide
tgtaagtcagtcaaattccctttgtcgtac

SEQ ID NO: 90235 - DNA, 30 bp, Artificial Sequence
  Synthetic oligonucleotide
cgatcgcatgcgaggatcccttattcgtac

SEQ ID NO: 90236 - DNA, 30 bp, Artificial Sequence
  Synthetic oligonucleotide
aacggtgatgcggaagcagcatacaggtac

SEQ ID NO: 90237 - DNA, 30 bp, Artificial Sequence
  Synthetic oligonucleotide
cgcgttgatataagaatcccgcagcggtac

SEQ ID NO: 90238 - DNA, 30 bp, Artificial Sequence
  Synthetic oligonucleotide
agtcaaggtctacaggatgtgacagggtac

SEQ ID NO: 90239 - DNA, 30 bp, Artificial Sequence
  Synthetic oligonucleotide
ggacttacgtatgcgcactggggcgggtac

SEQ ID NO: 90240 - DNA, 30 bp, Artificial Sequence
  Synthetic oligonucleotide
ggcagccaaatgatcagcatgcagtggtac

SEQ ID NO: 90241 - DNA, 30 bp, Artificial Sequence
  Synthetic oligonucleotide
ggtagacctggtcgagcactatattggtac

SEQ ID NO: 90242 - DNA, 30 bp, Artificial Sequence
  Synthetic oligonucleotide
tagcgttggctgccagcaaggggtgtgtac

SEQ ID NO: 90243 - DNA, 31 bp, Artificial Sequence
  Synthetic oligonucleotide
aaggacatacgccagaagccggtgcttgtac

SEQ ID NO: 90244 - DNA, 30 bp, Artificial Sequence
  Synthetic oligonucleotide
ctaactgcggtcctgcgcgaaatcaattac

SEQ ID NO: 90245 - DNA, 30 bp, Artificial Sequence
  Synthetic oligonucleotide
aggccggtcaaaccaagtcatcgggattac

SEQ ID NO: 90246 - DNA, 30 bp, Artificial Sequence
  Synthetic oligonucleotide
gaggtgtacgaaccaattatgaatgattac

SEQ ID NO: 90247 - DNA, 30 bp, Artificial Sequence
  Synthetic oligonucleotide
cgagggagagaataaattccggactattac

SEQ ID NO: 90248 - DNA, 30 bp, Artificial Sequence
  Synthetic oligonucleotide
cgaagaaaataacttcccagatcgtattac

SEQ ID NO: 90249 - DNA, 30 bp, Artificial Sequence
  Synthetic oligonucleotide
tagactcgataccgaccgtgtcattattac

SEQ ID NO: 90250 - DNA, 30 bp, Artificial Sequence
  Synthetic oligonucleotide
agggcccacagtagaatcggcttaacttac

SEQ ID NO: 90251 - DNA, 30 bp, Artificial Sequence
  Synthetic oligonucleotide
gggtggataggaccgtgacctattacttac

SEQ ID NO: 90252 - DNA, 30 bp, Artificial Sequence
  Synthetic oligonucleotide
acggaccgagatatactgggcgcgccttac

SEQ ID NO: 90253 - DNA, 30 bp, Artificial Sequence
  Synthetic oligonucleotide
aggcgcatagaaaaggggaaatgttcttac

SEQ ID NO: 90254 - DNA, 30 bp, Artificial Sequence
  Synthetic oligonucleotide
ttgagtctgtcgtcaccgcgtgggagttac

SEQ ID NO: 90255 - DNA, 30 bp, Artificial Sequence
  Synthetic oligonucleotide
cgcgtgcgatatagcggatatagaggttac

SEQ ID NO: 90256 - DNA, 30 bp, Artificial Sequence
  Synthetic oligonucleotide
cacaacatggaggcttaatggaaatgttac

SEQ ID NO: 90257 - DNA, 30 bp, Artificial Sequence
  Synthetic oligonucleotide
cccagaagaagcacgccctatgtcatttac

SEQ ID NO: 90258 - DNA, 30 bp, Artificial Sequence
  Synthetic oligonucleotide
acctctatggcacaagggtggtatctttac

SEQ ID NO: 90259 - DNA, 30 bp, Artificial Sequence
  Synthetic oligonucleotide
ggccaggttgcgagaaagcacactctttac

SEQ ID NO: 90260 - DNA, 30 bp, Artificial Sequence
  Synthetic oligonucleotide
ctggaagcgggtcagttgcctacagtttac

SEQ ID NO: 90261 - DNA, 30 bp, Artificial Sequence
  Synthetic oligonucleotide
cgctttagtcaggggatagatcaggtttac

SEQ ID NO: 90262 - DNA, 30 bp, Artificial Sequence
  Synthetic oligonucleotide
gtacagtgtggtgcgtcacttaggttttac

SEQ ID NO: 90263 - DNA, 30 bp, Artificial Sequence
  Synthetic oligonucleotide
caccggatatgatcacctaagcgtaaaacc

SEQ ID NO: 90264 - DNA, 30 bp, Artificial Sequence
  Synthetic oligonucleotide
ccgaacgggcgagcctggagtaagtaaacc

SEQ ID NO: 90265 - DNA, 30 bp, Artificial Sequence
  Synthetic oligonucleotide
agatgtacctgtctaacaaacaaaacaacc

SEQ ID NO: 90266 - DNA, 30 bp, Artificial Sequence
  Synthetic oligonucleotide
atgtaataaaggatccgatgcaacacaacc

SEQ ID NO: 90267 - DNA, 30 bp, Artificial Sequence
  Synthetic oligonucleotide
gagacttaagtgtgcatggaacatacaacc

SEQ ID NO: 90268 - DNA, 30 bp, Artificial Sequence
  Synthetic oligonucleotide
ggcgtgtaggataatctaacgagcccaacc

SEQ ID NO: 90269 - DNA, 30 bp, Artificial Sequence
  Synthetic oligonucleotide
cggctgtctctcaaaatccagggcccaacc

SEQ ID NO: 90270 - DNA, 30 bp, Artificial Sequence
  Synthetic oligonucleotide
ccaaaaacagcggtgaggctcagtgcaacc

SEQ ID NO: 90271 - DNA, 30 bp, Artificial Sequence
  Synthetic oligonucleotide
aacatccgaaacttacaacagacttcaacc

SEQ ID NO: 90272 - DNA, 30 bp, Artificial Sequence
  Synthetic oligonucleotide
gaataacaccagatgacgacttcacgaacc

SEQ ID NO: 90273 - DNA, 30 bp, Artificial Sequence
  Synthetic oligonucleotide
ccaaatctggaaatcgtggggagtcgaacc

SEQ ID NO: 90274 - DNA, 30 bp, Artificial Sequence
  Synthetic oligonucleotide
acgcttcggcccacagacggggaaggaacc

SEQ ID NO: 90275 - DNA, 30 bp, Artificial Sequence
  Synthetic oligonucleotide
acagtagttctgtcggagggaatcggaacc

SEQ ID NO: 90276 - DNA, 30 bp, Artificial Sequence
  Synthetic oligonucleotide
gccgagcaacgattgtgaccagtctgaacc

SEQ ID NO: 90277 - DNA, 30 bp, Artificial Sequence
  Synthetic oligonucleotide
tcatgtcatggaactgcaatagacataacc

SEQ ID NO: 90278 - DNA, 30 bp, Artificial Sequence
  Synthetic oligonucleotide
ttaacggtgcagtctaagataaaggtaacc

SEQ ID NO: 90279 - DNA, 30 bp, Artificial Sequence
  Synthetic oligonucleotide
cgtgcctcaaacatatctggggctaacacc

SEQ ID NO: 90280 - DNA, 30 bp, Artificial Sequence
  Synthetic oligonucleotide
attcgacagggaacggaccgcctacacacc

SEQ ID NO: 90281 - DNA, 30 bp, Artificial Sequence
  Synthetic oligonucleotide
caacgcaaagcggaaaatggatctcacacc

SEQ ID NO: 90282 - DNA, 30 bp, Artificial Sequence
  Synthetic oligonucleotide
aggaaggcaacgaggtttcaccacgacacc

SEQ ID NO: 90283 - DNA, 30 bp, Artificial Sequence
  Synthetic oligonucleotide
cagagagcaggccgtgggcgatccgacacc

SEQ ID NO: 90284 - DNA, 30 bp, Artificial Sequence
  Synthetic oligonucleotide
cgtaatataggacttattaggcgggacacc

SEQ ID NO: 90285 - DNA, 30 bp, Artificial Sequence
  Synthetic oligonucleotide
ccggttgagcgttagattgcggggtacacc

SEQ ID NO: 90286 - DNA, 31 bp, Artificial Sequence
  Synthetic oligonucleotide
catacagcttcgtgcaaaaaaatcaaccacc

SEQ ID NO: 90287 - DNA, 30 bp, Artificial Sequence
  Synthetic oligonucleotide
ggcaaaagtatgctgagaagcgggaccacc

SEQ ID NO: 90288 - DNA, 30 bp, Artificial Sequence
  Synthetic oligonucleotide
ggtcgatcgggatagcacactttacccacc

SEQ ID NO: 90289 - DNA, 30 bp, Artificial Sequence
  Synthetic oligonucleotide
ggaaccatgatcaaaactgtgttcgccacc

SEQ ID NO: 90290 - DNA, 30 bp, Artificial Sequence
  Synthetic oligonucleotide
aaggcactagctaaccggttgtactccacc

SEQ ID NO: 90291 - DNA, 30 bp, Artificial Sequence
  Synthetic oligonucleotide
ttctcaactagtattcattttgcgagcacc

SEQ ID NO: 90292 - DNA, 30 bp, Artificial Sequence
  Synthetic oligonucleotide
agtggaaaggaacggcgaatgcgtagcacc

SEQ ID NO: 90293 - DNA, 31 bp, Artificial Sequence
  Synthetic oligonucleotide
cggaagtaaattgtaacggcccacgcgcacc

SEQ ID NO: 90294 - DNA, 30 bp, Artificial Sequence
  Synthetic oligonucleotide
attaataagaatcaccaacatatgtgcacc

SEQ ID NO: 90295 - DNA, 30 bp, Artificial Sequence
  Synthetic oligonucleotide
gaccggtaggtagaatatcaatattgcacc

SEQ ID NO: 90296 - DNA, 30 bp, Artificial Sequence
  Synthetic oligonucleotide
aagcggccgggacgtaatacggggctcacc

SEQ ID NO: 90297 - DNA, 30 bp, Artificial Sequence
  Synthetic oligonucleotide
caccgggaaatagagaaagcactggtcacc

SEQ ID NO: 90298 - DNA, 30 bp, Artificial Sequence
  Synthetic oligonucleotide
acgtatcatatcaatttgttggttgtcacc

SEQ ID NO: 90299 - DNA, 30 bp, Artificial Sequence
  Synthetic oligonucleotide
aagaaagggacatacgttaaacgattcacc

SEQ ID NO: 90300 - DNA, 30 bp, Artificial Sequence
  Synthetic oligonucleotide
gttcggactagaccatacccaaagttcacc

SEQ ID NO: 90301 - DNA, 30 bp, Artificial Sequence
  Synthetic oligonucleotide
aaggagaccgggtaatctagacgtcagacc

SEQ ID NO: 90302 - DNA, 30 bp, Artificial Sequence
  Synthetic oligonucleotide
accttgcataacaatcgtttccgggagacc

SEQ ID NO: 90303 - DNA, 30 bp, Artificial Sequence
  Synthetic oligonucleotide
ggacgacaaattgtggagtaaaaaacgacc

SEQ ID NO: 90304 - DNA, 30 bp, Artificial Sequence
  Synthetic oligonucleotide
gagagtctgggcgaagggacattaacgacc

SEQ ID NO: 90305 - DNA, 30 bp, Artificial Sequence
  Synthetic oligonucleotide
caacgtatggcgttcgtatgagcaccgacc

SEQ ID NO: 90306 - DNA, 30 bp, Artificial Sequence
  Synthetic oligonucleotide
acggtcgcagtctcacgtgctaatccgacc

SEQ ID NO: 90307 - DNA, 30 bp, Artificial Sequence
  Synthetic oligonucleotide
cgatacgtttgaatggtcaaagaagcgacc

SEQ ID NO: 90308 - DNA, 30 bp, Artificial Sequence
  Synthetic oligonucleotide
acggagttcatcggtctatatagtgcgacc

SEQ ID NO: 90309 - DNA, 30 bp, Artificial Sequence
  Synthetic oligonucleotide
gcggtgaagagcgggcgacctattaggacc

SEQ ID NO: 90310 - DNA, 30 bp, Artificial Sequence
  Synthetic oligonucleotide
cgagattggccgaataatccttttaggacc

SEQ ID NO: 90311 - DNA, 30 bp, Artificial Sequence
  Synthetic oligonucleotide
cgcatgattagaaacgcgtacatggggacc

SEQ ID NO: 90312 - DNA, 30 bp, Artificial Sequence
  Synthetic oligonucleotide
ttcgtaagggacaggtatccagatgggacc

SEQ ID NO: 90313 - DNA, 30 bp, Artificial Sequence
  Synthetic oligonucleotide
ccgcattgctccaaatctcaagggtggacc

SEQ ID NO: 90314 - DNA, 30 bp, Artificial Sequence
  Synthetic oligonucleotide
agttgtaagacacacagtatacgaatgacc

SEQ ID NO: 90315 - DNA, 30 bp, Artificial Sequence
  Synthetic oligonucleotide
gcgagatcgtgtttagagagctccatgacc

SEQ ID NO: 90316 - DNA, 30 bp, Artificial Sequence
  Synthetic oligonucleotide
tcggaacaaatgaaatcagccgagatgacc

SEQ ID NO: 90317 - DNA, 30 bp, Artificial Sequence
  Synthetic oligonucleotide
tcgccaattcggtgtacctaaacgctgacc

SEQ ID NO: 90318 - DNA, 30 bp, Artificial Sequence
  Synthetic oligonucleotide
gcataatgctggtaagtaggtgcagtgacc

SEQ ID NO: 90319 - DNA, 30 bp, Artificial Sequence
  Synthetic oligonucleotide
cgtgataaacgtgaagacatctgattgacc

SEQ ID NO: 90320 - DNA, 30 bp, Artificial Sequence
  Synthetic oligonucleotide
aaaggtaataggggtactcggcgaaatacc

SEQ ID NO: 90321 - DNA, 30 bp, Artificial Sequence
  Synthetic oligonucleotide
aggtcgagggtaaaccccatttataatacc

SEQ ID NO: 90322 - DNA, 30 bp, Artificial Sequence
  Synthetic oligonucleotide
acgattgaatgggaaataacggaccatacc

SEQ ID NO: 90323 - DNA, 30 bp, Artificial Sequence
  Synthetic oligonucleotide
cacgtcaattgtcatcggctcaatcctacc

SEQ ID NO: 90324 - DNA, 30 bp, Artificial Sequence
  Synthetic oligonucleotide
ttggagatacaccacatccgaggtcctacc

SEQ ID NO: 90325 - DNA, 30 bp, Artificial Sequence
  Synthetic oligonucleotide
gtcaacgactacttgtaggacatggctacc

SEQ ID NO: 90326 - DNA, 30 bp, Artificial Sequence
  Synthetic oligonucleotide
gacaagaagagaggatgccgcttggctacc

SEQ ID NO: 90327 - DNA, 30 bp, Artificial Sequence
  Synthetic oligonucleotide
ggttaatcgaagtgaagcctccagtctacc

SEQ ID NO: 90328 - DNA, 30 bp, Artificial Sequence
  Synthetic oligonucleotide
atgtgcattcagaatgcatggtcaagtacc

SEQ ID NO: 90329 - DNA, 30 bp, Artificial Sequence
  Synthetic oligonucleotide
tcagacattgatggagtaagccggggtacc

SEQ ID NO: 90330 - DNA, 30 bp, Artificial Sequence
  Synthetic oligonucleotide
aggtcccaaatacctggtattgactgtacc

SEQ ID NO: 90331 - DNA, 30 bp, Artificial Sequence
  Synthetic oligonucleotide
accgacagaatggagttaggtgcgcttacc

SEQ ID NO: 90332 - DNA, 30 bp, Artificial Sequence
  Synthetic oligonucleotide
caccattgtgatgtaaggcatgtctttacc

SEQ ID NO: 90333 - DNA, 30 bp, Artificial Sequence
  Synthetic oligonucleotide
cgccgagagctaaatcagaaggagaaaccc

SEQ ID NO: 90334 - DNA, 30 bp, Artificial Sequence
  Synthetic oligonucleotide
gtcgaactcaaggtgtatcaaaacgcaccc

SEQ ID NO: 90335 - DNA, 30 bp, Artificial Sequence
  Synthetic oligonucleotide
acgaacgtacgggatctcaaaactggaccc

SEQ ID NO: 90336 - DNA, 30 bp, Artificial Sequence
  Synthetic oligonucleotide
aggtagcccagttactgctaaggctgaccc

SEQ ID NO: 90337 - DNA, 30 bp, Artificial Sequence
  Synthetic oligonucleotide
tggaggactaagtagagtaccacgtgaccc

SEQ ID NO: 90338 - DNA, 30 bp, Artificial Sequence
  Synthetic oligonucleotide
cagtaacagtaaactcctcgtaatctaccc

SEQ ID NO: 90339 - DNA, 30 bp, Artificial Sequence
  Synthetic oligonucleotide
acgaaatactcgagtgctccgcatgtaccc

SEQ ID NO: 90340 - DNA, 30 bp, Artificial Sequence
  Synthetic oligonucleotide
gagaccaaacccctaaccgaagaattaccc

SEQ ID NO: 90341 - DNA, 30 bp, Artificial Sequence
  Synthetic oligonucleotide
gggggatcggacaaacggtcaatgaacccc

SEQ ID NO: 90342 - DNA, 30 bp, Artificial Sequence
  Synthetic oligonucleotide
ataatcatcgtatctaccgaaagtgacccc

SEQ ID NO: 90343 - DNA, 30 bp, Artificial Sequence
  Synthetic oligonucleotide
ggcaataaatcagcgaccacgtaatacccc

SEQ ID NO: 90344 - DNA, 30 bp, Artificial Sequence
  Synthetic oligonucleotide
acaagcatcagtaccaaacgctacaccccc

SEQ ID NO: 90345 - DNA, 30 bp, Artificial Sequence
  Synthetic oligonucleotide
cttgaaggactacatcgaaccgagcccccc

SEQ ID NO: 90346 - DNA, 30 bp, Artificial Sequence
  Synthetic oligonucleotide
gcttacacagtaaaacttcgcgactccccc

SEQ ID NO: 90347 - DNA, 30 bp, Artificial Sequence
  Synthetic oligonucleotide
tgtagttagctaagcacggcacggtccccc

SEQ ID NO: 90348 - DNA, 30 bp, Artificial Sequence
  Synthetic oligonucleotide
tgccaccaagcggacaagctaaccagcccc

SEQ ID NO: 90349 - DNA, 31 bp, Artificial Sequence
  Synthetic oligonucleotide
acactgaagcaagtggatcttcgcccgcccc

SEQ ID NO: 90350 - DNA, 30 bp, Artificial Sequence
  Synthetic oligonucleotide
cggtcttactgcggccatcgaacgtgcccc

SEQ ID NO: 90351 - DNA, 30 bp, Artificial Sequence
  Synthetic oligonucleotide
aggcccagaaacagagtagcataactcccc

SEQ ID NO: 90352 - DNA, 30 bp, Artificial Sequence
  Synthetic oligonucleotide
taaaggacatgggttaggcagtcattcccc

SEQ ID NO: 90353 - DNA, 30 bp, Artificial Sequence
  Synthetic oligonucleotide
tctgggaataaaggcgagctgacgttcccc

SEQ ID NO: 90354 - DNA, 30 bp, Artificial Sequence
  Synthetic oligonucleotide
gacggcgcgcacgtggacgtacaccagccc

SEQ ID NO: 90355 - DNA, 30 bp, Artificial Sequence
  Synthetic oligonucleotide
acgtgaattcataagggtttcgagcagccc

SEQ ID NO: 90356 - DNA, 30 bp, Artificial Sequence
  Synthetic oligonucleotide
cctagcattggaatatcgatcttgcagccc

SEQ ID NO: 90357 - DNA, 30 bp, Artificial Sequence
  Synthetic oligonucleotide
tgcgtgtagctgagcttaggccgtgagccc

SEQ ID NO: 90358 - DNA, 30 bp, Artificial Sequence
  Synthetic oligonucleotide
tccacatagcccactttataacaaacgccc

SEQ ID NO: 90359 - DNA, 30 bp, Artificial Sequence
  Synthetic oligonucleotide
tgggacgcttctggcaattggagcacgccc

SEQ ID NO: 90360 - DNA, 30 bp, Artificial Sequence
  Synthetic oligonucleotide
agtgcttatcaaatttcatgcctaaggccc

SEQ ID NO: 90361 - DNA, 30 bp, Artificial Sequence
  Synthetic oligonucleotide
tacagtttactgctaacccgagtaatgccc

SEQ ID NO: 90362 - DNA, 30 bp, Artificial Sequence
  Synthetic oligonucleotide
gcctgttgtagattttaagagggtatgccc

SEQ ID NO: 90363 - DNA, 30 bp, Artificial Sequence
  Synthetic oligonucleotide
tcaaaggatgaccataagtagtaactgccc

SEQ ID NO: 90364 - DNA, 30 bp, Artificial Sequence
  Synthetic oligonucleotide
acagctcacagagatctgcgaatgaatccc

SEQ ID NO: 90365 - DNA, 30 bp, Artificial Sequence
  Synthetic oligonucleotide
ggagagacttcgccgtcagccaagcatccc

SEQ ID NO: 90366 - DNA, 30 bp, Artificial Sequence
  Synthetic oligonucleotide
acaactaaagggtttgggcatgatcatccc

SEQ ID NO: 90367 - DNA, 30 bp, Artificial Sequence
  Synthetic oligonucleotide
ctaatgagaccaattatggggcttcctccc

SEQ ID NO: 90368 - DNA, 30 bp, Artificial Sequence
  Synthetic oligonucleotide
agtttcaatataagtgaccagtaagctccc

SEQ ID NO: 90369 - DNA, 30 bp, Artificial Sequence
  Synthetic oligonucleotide
gaggtaggcataaggtggaatgtagctccc

SEQ ID NO: 90370 - DNA, 30 bp, Artificial Sequence
  Synthetic oligonucleotide
tgagtagagctggtccatcctgacgctccc

SEQ ID NO: 90371 - DNA, 30 bp, Artificial Sequence
  Synthetic oligonucleotide
acctcgaaatcgctcgacgtcggggctccc

SEQ ID NO: 90372 - DNA, 30 bp, Artificial Sequence
  Synthetic oligonucleotide
acaatgtagatgagtttcgtttcttctccc

SEQ ID NO: 90373 - DNA, 30 bp, Artificial Sequence
  Synthetic oligonucleotide
ggtcctggaagtacagagggatacagtccc

SEQ ID NO: 90374 - DNA, 30 bp, Artificial Sequence
  Synthetic oligonucleotide
agcgggggaatgggtcggcagtagagtccc

SEQ ID NO: 90375 - DNA, 30 bp, Artificial Sequence
  Synthetic oligonucleotide
gacgatgattaaagctagatgtcgcgtccc

SEQ ID NO: 90376 - DNA, 30 bp, Artificial Sequence
  Synthetic oligonucleotide
gccgcttaaaagtgaagccgttagtgtccc

SEQ ID NO: 90377 - DNA, 30 bp, Artificial Sequence
  Synthetic oligonucleotide
aaggcaggcctggctgcgcgtgaaattccc

SEQ ID NO: 90378 - DNA, 30 bp, Artificial Sequence
  Synthetic oligonucleotide
cggataggctcgtctccgtagagcattccc

SEQ ID NO: 90379 - DNA, 30 bp, Artificial Sequence
  Synthetic oligonucleotide
atagaagcactgcgcgaactgctgattccc

SEQ ID NO: 90380 - DNA, 30 bp, Artificial Sequence
  Synthetic oligonucleotide
cagtcttccatgaggggtgccacaaaagcc

SEQ ID NO: 90381 - DNA, 30 bp, Artificial Sequence
  Synthetic oligonucleotide
atgacgtattgctgatagtgatacaaagcc

SEQ ID NO: 90382 - DNA, 30 bp, Artificial Sequence
  Synthetic oligonucleotide
ccaccacatgcgcaatcaaggtacaaagcc

SEQ ID NO: 90383 - DNA, 30 bp, Artificial Sequence
  Synthetic oligonucleotide
acaagttaaataaaaagcccaaataaagcc

SEQ ID NO: 90384 - DNA, 30 bp, Artificial Sequence
  Synthetic oligonucleotide
cggttattaatcaacaaactggaacaagcc

SEQ ID NO: 90385 - DNA, 30 bp, Artificial Sequence
  Synthetic oligonucleotide
ggataaagcgagcgcacttccgcccaagcc

SEQ ID NO: 90386 - DNA, 30 bp, Artificial Sequence
  Synthetic oligonucleotide
gatccagattagcttcagctcggggaagcc

SEQ ID NO: 90387 - DNA, 30 bp, Artificial Sequence
  Synthetic oligonucleotide
cgggagcccagacgttcacaggtggaagcc

SEQ ID NO: 90388 - DNA, 30 bp, Artificial Sequence
  Synthetic oligonucleotide
agtgaagacgtccattgcgtaagtacagcc

SEQ ID NO: 90389 - DNA, 30 bp, Artificial Sequence
  Synthetic oligonucleotide
tatacgagcatggatagtgtatgaccagcc

SEQ ID NO: 90390 - DNA, 30 bp, Artificial Sequence
  Synthetic oligonucleotide
tctgcgggttaggcactggacactccagcc

SEQ ID NO: 90391 - DNA, 30 bp, Artificial Sequence
  Synthetic oligonucleotide
aacagataagttatcgtcgcatgagcagcc

SEQ ID NO: 90392 - DNA, 30 bp, Artificial Sequence
  Synthetic oligonucleotide
tccctgagacatatcacgtgtcagagagcc

SEQ ID NO: 90393 - DNA, 30 bp, Artificial Sequence
  Synthetic oligonucleotide
gcgaagagccgatggggaagcgggagagcc

SEQ ID NO: 90394 - DNA, 31 bp, Artificial Sequence
  Synthetic oligonucleotide
accctccggaagagtggcacgtcatcgagcc

SEQ ID NO: 90395 - DNA, 30 bp, Artificial Sequence
  Synthetic oligonucleotide
gctaccacggaacatgactcgagcggagcc

SEQ ID NO: 90396 - DNA, 30 bp, Artificial Sequence
  Synthetic oligonucleotide
gcctgacatgaaataggttatagcggagcc

SEQ ID NO: 90397 - DNA, 30 bp, Artificial Sequence
  Synthetic oligonucleotide
cacaaatgaggctgacagagatgcggagcc

SEQ ID NO: 90398 - DNA, 30 bp, Artificial Sequence
  Synthetic oligonucleotide
gaacgggtgaagagcaccgttatctgagcc

SEQ ID NO: 90399 - DNA, 30 bp, Artificial Sequence
  Synthetic oligonucleotide
ggcgagactaaacacggaacgctgtgagcc

SEQ ID NO: 90400 - DNA, 30 bp, Artificial Sequence
  Synthetic oligonucleotide
gcggttcaccatcgaaggcgtgattgagcc

SEQ ID NO: 90401 - DNA, 30 bp, Artificial Sequence
  Synthetic oligonucleotide
gaggataaggaccaggaaaaaatgatagcc

SEQ ID NO: 90402 - DNA, 30 bp, Artificial Sequence
  Synthetic oligonucleotide
ccgagatggttgactgccgggaaactagcc

SEQ ID NO: 90403 - DNA, 30 bp, Artificial Sequence
  Synthetic oligonucleotide
tagggcgcatactggtctgagggactagcc

SEQ ID NO: 90404 - DNA, 30 bp, Artificial Sequence
  Synthetic oligonucleotide
catgcaaaagggcccgaagggaaggtagcc

SEQ ID NO: 90405 - DNA, 30 bp, Artificial Sequence
  Synthetic oligonucleotide
tagtgcgacacgctatctatcccggtagcc

SEQ ID NO: 90406 - DNA, 30 bp, Artificial Sequence
  Synthetic oligonucleotide
gcctcaggggagtacaaggattgggtagcc

SEQ ID NO: 90407 - DNA, 30 bp, Artificial Sequence
  Synthetic oligonucleotide
tgatacgcattaaaccaaacttttttagcc

SEQ ID NO: 90408 - DNA, 30 bp, Artificial Sequence
  Synthetic oligonucleotide
catccgaaacactctccaaaagccaacgcc

SEQ ID NO: 90409 - DNA, 30 bp, Artificial Sequence
  Synthetic oligonucleotide
tcagtggttcgaccgttcagtgtgcacgcc

SEQ ID NO: 90410 - DNA, 30 bp, Artificial Sequence
  Synthetic oligonucleotide
acatagctatctatggtggttgcgtacgcc

SEQ ID NO: 90411 - DNA, 30 bp, Artificial Sequence
  Synthetic oligonucleotide
taggcatggacgcaagatcatctccccgcc

SEQ ID NO: 90412 - DNA, 30 bp, Artificial Sequence
  Synthetic oligonucleotide
caggatcttaccataacaatgtatagcgcc

SEQ ID NO: 90413 - DNA, 30 bp, Artificial Sequence
  Synthetic oligonucleotide
catacacacgggataattttacagcgcgcc

SEQ ID NO: 90414 - DNA, 30 bp, Artificial Sequence
  Synthetic oligonucleotide
caagtaccgtagtgggtctatttgatcgcc

SEQ ID NO: 90415 - DNA, 30 bp, Artificial Sequence
  Synthetic oligonucleotide
cctagacaacctagaccgacactagtcgcc

SEQ ID NO: 90416 - DNA, 30 bp, Artificial Sequence
  Synthetic oligonucleotide
cttcgcggctacgtacttaagaggttcgcc

SEQ ID NO: 90417 - DNA, 30 bp, Artificial Sequence
  Synthetic oligonucleotide
ggcaactagtactcgcgagtcgatttcgcc

SEQ ID NO: 90418 - DNA, 30 bp, Artificial Sequence
  Synthetic oligonucleotide
agtgatgtgacatcccatgtaagcaaggcc

SEQ ID NO: 90419 - DNA, 30 bp, Artificial Sequence
  Synthetic oligonucleotide
agagacaagatttagcgctgctgacaggcc

SEQ ID NO: 90420 - DNA, 30 bp, Artificial Sequence
  Synthetic oligonucleotide
gcgaagacgcgtacaaccacgaatcaggcc

SEQ ID NO: 90421 - DNA, 30 bp, Artificial Sequence
  Synthetic oligonucleotide
caatgcgcgtgctattggtaaagtcaggcc

SEQ ID NO: 90422 - DNA, 30 bp, Artificial Sequence
  Synthetic oligonucleotide
aggtgtaacaatccggcgaagtgtacggcc

SEQ ID NO: 90423 - DNA, 30 bp, Artificial Sequence
  Synthetic oligonucleotide
ttggaataagttataggagttggcccggcc

SEQ ID NO: 90424 - DNA, 30 bp, Artificial Sequence
  Synthetic oligonucleotide
ctctagatgactacgttcggaagcgcggcc

SEQ ID NO: 90425 - DNA, 30 bp, Artificial Sequence
  Synthetic oligonucleotide
cgaggggcgggataatggttacacagggcc

SEQ ID NO: 90426 - DNA, 30 bp, Artificial Sequence
  Synthetic oligonucleotide
ctcaccattctgaatacgggacgtcgggcc

SEQ ID NO: 90427 - DNA, 30 bp, Artificial Sequence
  Synthetic oligonucleotide
tgctaacgacatcaccgggatataggggcc

SEQ ID NO: 90428 - DNA, 30 bp, Artificial Sequence
  Synthetic oligonucleotide
ggtacaaggtgaaatacatgaccatgggcc

SEQ ID NO: 90429 - DNA, 30 bp, Artificial Sequence
  Synthetic oligonucleotide
accagaggaaatatatagagtgactgggcc

SEQ ID NO: 90430 - DNA, 30 bp, Artificial Sequence
  Synthetic oligonucleotide
atcggtgctcacatcgtgtagtaaatggcc

SEQ ID NO: 90431 - DNA, 30 bp, Artificial Sequence
  Synthetic oligonucleotide
gtatcaaacacgggtattcaatccatggcc

SEQ ID NO: 90432 - DNA, 30 bp, Artificial Sequence
  Synthetic oligonucleotide
gaggaagtccccagtgtcgacggattggcc

SEQ ID NO: 90433 - DNA, 30 bp, Artificial Sequence
  Synthetic oligonucleotide
tccgtaactaccaatagccaaaatttggcc

SEQ ID NO: 90434 - DNA, 30 bp, Artificial Sequence
  Synthetic oligonucleotide
ccgagttagaacgtaattgtgaccaatgcc

SEQ ID NO: 90435 - DNA, 30 bp, Artificial Sequence
  Synthetic oligonucleotide
acatcaaagatgtcacgaccaatacatgcc

SEQ ID NO: 90436 - DNA, 30 bp, Artificial Sequence
  Synthetic oligonucleotide
cgttccaacggataatcctcgtctgatgcc

SEQ ID NO: 90437 - DNA, 30 bp, Artificial Sequence
  Synthetic oligonucleotide
ggccaaaacgggctactggtttcgtatgcc

SEQ ID NO: 90438 - DNA, 30 bp, Artificial Sequence
  Synthetic oligonucleotide
agatcgtaggtgtgaggctagtggtatgcc

SEQ ID NO: 90439 - DNA, 30 bp, Artificial Sequence
  Synthetic oligonucleotide
ggtaccatgtgacttgggaggatgactgcc

SEQ ID NO: 90440 - DNA, 30 bp, Artificial Sequence
  Synthetic oligonucleotide
acatgacaagcttaatgactcgtagctgcc

SEQ ID NO: 90441 - DNA, 30 bp, Artificial Sequence
  Synthetic oligonucleotide
atttaaagcacagaagaccctgtggctgcc

SEQ ID NO: 90442 - DNA, 30 bp, Artificial Sequence
  Synthetic oligonucleotide
aagagattacggaatcctgaaagttctgcc

SEQ ID NO: 90443 - DNA, 30 bp, Artificial Sequence
  Synthetic oligonucleotide
tattaacacgaatacggtgcctagagtgcc

SEQ ID NO: 90444 - DNA, 30 bp, Artificial Sequence
  Synthetic oligonucleotide
attgtgtggaatatgtcctttatgagtgcc

SEQ ID NO: 90445 - DNA, 30 bp, Artificial Sequence
  Synthetic oligonucleotide
ggcaaagtgttaagagtatcaagacgtgcc

SEQ ID NO: 90446 - DNA, 30 bp, Artificial Sequence
  Synthetic oligonucleotide
ggacgagccgactgttatgcagggggtgcc

SEQ ID NO: 90447 - DNA, 30 bp, Artificial Sequence
  Synthetic oligonucleotide
ttggcaagcgagtacgctccggagtgtgcc

SEQ ID NO: 90448 - DNA, 30 bp, Artificial Sequence
  Synthetic oligonucleotide
cctgtatgcccacatcagctcgtaattgcc

SEQ ID NO: 90449 - DNA, 30 bp, Artificial Sequence
  Synthetic oligonucleotide
gtacgaatggtactagtgctgatacttgcc

SEQ ID NO: 90450 - DNA, 30 bp, Artificial Sequence
  Synthetic oligonucleotide
cgcgtgtggtagtcctgctgcaagcttgcc

SEQ ID NO: 90451 - DNA, 30 bp, Artificial Sequence
  Synthetic oligonucleotide
gtaccatcaagtttaggaagttattttgcc

SEQ ID NO: 90452 - DNA, 30 bp, Artificial Sequence
  Synthetic oligonucleotide
ttggcagtcacgaggcttgaacgaaaatcc

SEQ ID NO: 90453 - DNA, 30 bp, Artificial Sequence
  Synthetic oligonucleotide
atgctgagctaactcgtatgtgcgcaatcc

SEQ ID NO: 90454 - DNA, 30 bp, Artificial Sequence
  Synthetic oligonucleotide
caggggtggtagtgtggacgacgtcaatcc

SEQ ID NO: 90455 - DNA, 30 bp, Artificial Sequence
  Synthetic oligonucleotide
gggtaagcccaaacggactccataacatcc

SEQ ID NO: 90456 - DNA, 30 bp, Artificial Sequence
  Synthetic oligonucleotide
aaggtaaggtatgttgattaaaacacatcc

SEQ ID NO: 90457 - DNA, 30 bp, Artificial Sequence
  Synthetic oligonucleotide
tcgttaatattcataaacaaacaggcatcc

SEQ ID NO: 90458 - DNA, 30 bp, Artificial Sequence
  Synthetic oligonucleotide
tcgtcgaatggaacaggcactcttgcatcc

SEQ ID NO: 90459 - DNA, 30 bp, Artificial Sequence
  Synthetic oligonucleotide
tctaggaaaaatagaattaagctcctatcc

SEQ ID NO: 90460 - DNA, 30 bp, Artificial Sequence
  Synthetic oligonucleotide
gaacaaattaccgggagcaagaaaaactcc

SEQ ID NO: 90461 - DNA, 30 bp, Artificial Sequence
  Synthetic oligonucleotide
atcaagactccggtagattggtcggcctcc

SEQ ID NO: 90462 - DNA, 30 bp, Artificial Sequence
  Synthetic oligonucleotide
gggagggcacgcataatttgaacgagctcc

SEQ ID NO: 90463 - DNA, 30 bp, Artificial Sequence
  Synthetic oligonucleotide
aggaacttgtaacgctagacggtgagctcc

SEQ ID NO: 90464 - DNA, 30 bp, Artificial Sequence
  Synthetic oligonucleotide
aaaggctgggcgatgtcgatgttgcgctcc

SEQ ID NO: 90465 - DNA, 30 bp, Artificial Sequence
  Synthetic oligonucleotide
tcacgccgtctcttgcaacatcatggctcc

SEQ ID NO: 90466 - DNA, 30 bp, Artificial Sequence
  Synthetic oligonucleotide
tcgacctggcgacataaagagctaatctcc

SEQ ID NO: 90467 - DNA, 30 bp, Artificial Sequence
  Synthetic oligonucleotide
agtttgcggacctgaatccgattgatctcc

SEQ ID NO: 90468 - DNA, 30 bp, Artificial Sequence
  Synthetic oligonucleotide
tggcgaacatgatatattgttggtgtctcc

SEQ ID NO: 90469 - DNA, 30 bp, Artificial Sequence
  Synthetic oligonucleotide
cgacggtgcaaatctatgacttgccagtcc

SEQ ID NO: 90470 - DNA, 30 bp, Artificial Sequence
  Synthetic oligonucleotide
tcgcctatagtggtaactggaccagagtcc

SEQ ID NO: 90471 - DNA, 30 bp, Artificial Sequence
  Synthetic oligonucleotide
tgggagacctagtgcagtttatgatagtcc

SEQ ID NO: 90472 - DNA, 30 bp, Artificial Sequence
  Synthetic oligonucleotide
tacgcatagcaatgaaatcgggagtagtcc

SEQ ID NO: 90473 - DNA, 30 bp, Artificial Sequence
  Synthetic oligonucleotide
tgctaggattacttaggtgatcgaacgtcc

SEQ ID NO: 90474 - DNA, 30 bp, Artificial Sequence
  Synthetic oligonucleotide
ggctgtcaattgggctatacaagcacgtcc

SEQ ID NO: 90475 - DNA, 30 bp, Artificial Sequence
  Synthetic oligonucleotide
ataaccccgagtctatctgcgaccccgtcc

SEQ ID NO: 90476 - DNA, 30 bp, Artificial Sequence
  Synthetic oligonucleotide
cacctgcgtacaatgtggaggtatccgtcc

SEQ ID NO: 90477 - DNA, 30 bp, Artificial Sequence
  Synthetic oligonucleotide
gggcacatgtggagttgttaatttccgtcc

SEQ ID NO: 90478 - DNA, 30 bp, Artificial Sequence
  Synthetic oligonucleotide
ctggcacaccgcggaaatgtaaacgcgtcc

SEQ ID NO: 90479 - DNA, 30 bp, Artificial Sequence
  Synthetic oligonucleotide
gggcaatcttagcttaggcgtctggcgtcc

SEQ ID NO: 90480 - DNA, 30 bp, Artificial Sequence
  Synthetic oligonucleotide
gctgcgcacaacaggggggttctggcgtcc

SEQ ID NO: 90481 - DNA, 30 bp, Artificial Sequence
  Synthetic oligonucleotide
ttcagaggttagctggctcggagtgcgtcc

SEQ ID NO: 90482 - DNA, 30 bp, Artificial Sequence
  Synthetic oligonucleotide
gcggcctataaaaagcgccggggtgcgtcc

SEQ ID NO: 90483 - DNA, 30 bp, Artificial Sequence
  Synthetic oligonucleotide
tccaagcctagacactctgcgaagtcgtcc

SEQ ID NO: 90484 - DNA, 30 bp, Artificial Sequence
  Synthetic oligonucleotide
cgtttccaaagcgtcgtttcggtacggtcc

SEQ ID NO: 90485 - DNA, 30 bp, Artificial Sequence
  Synthetic oligonucleotide
gccttcaacaccgtcaacgtgacccggtcc

SEQ ID NO: 90486 - DNA, 30 bp, Artificial Sequence
  Synthetic oligonucleotide
tacgtggattgttgtgaggcacatcggtcc

SEQ ID NO: 90487 - DNA, 30 bp, Artificial Sequence
  Synthetic oligonucleotide
atgagtaggaatacaatgcttgttcggtcc

SEQ ID NO: 90488 - DNA, 30 bp, Artificial Sequence
  Synthetic oligonucleotide
ttagtggagagagggcaattaagagggtcc

SEQ ID NO: 90489 - DNA, 30 bp, Artificial Sequence
  Synthetic oligonucleotide
gggctgcaaataggctcaaattaggggtcc

SEQ ID NO: 90490 - DNA, 30 bp, Artificial Sequence
  Synthetic oligonucleotide
caagcaaatagtctagtgaactagtggtcc

SEQ ID NO: 90491 - DNA, 30 bp, Artificial Sequence
  Synthetic oligonucleotide
aaatcatcggatgtggatcgagggtggtcc

SEQ ID NO: 90492 - DNA, 30 bp, Artificial Sequence
  Synthetic oligonucleotide
gatgagcatgcgaatccaaagtctatgtcc

SEQ ID NO: 90493 - DNA, 30 bp, Artificial Sequence
  Synthetic oligonucleotide
cattaaccgactaacccatgtgaactgtcc

SEQ ID NO: 90494 - DNA, 30 bp, Artificial Sequence
  Synthetic oligonucleotide
gcaagggaagggcatgagcgtgcgctgtcc

SEQ ID NO: 90495 - DNA, 30 bp, Artificial Sequence
  Synthetic oligonucleotide
atcacgttctgtgggatcaaatacgtgtcc

SEQ ID NO: 90496 - DNA, 30 bp, Artificial Sequence
  Synthetic oligonucleotide
tgtcgaaaacggttgtaattacatgtgtcc

SEQ ID NO: 90497 - DNA, 30 bp, Artificial Sequence
  Synthetic oligonucleotide
atggaactaggagggctaggcacgttgtcc

SEQ ID NO: 90498 - DNA, 30 bp, Artificial Sequence
  Synthetic oligonucleotide
cgatgtcgccgggggattcctgttttgtcc

SEQ ID NO: 90499 - DNA, 30 bp, Artificial Sequence
  Synthetic oligonucleotide
gcgcagcttgtacaaccaggtggcaattcc

SEQ ID NO: 90500 - DNA, 30 bp, Artificial Sequence
  Synthetic oligonucleotide
ggggtgggggattactctagttcgaattcc

SEQ ID NO: 90501 - DNA, 30 bp, Artificial Sequence
  Synthetic oligonucleotide
ttcatcacgtcaaaggggtggctccattcc

SEQ ID NO: 90502 - DNA, 30 bp, Artificial Sequence
  Synthetic oligonucleotide
acagcatagggacgccaatggtgagattcc

SEQ ID NO: 90503 - DNA, 30 bp, Artificial Sequence
  Synthetic oligonucleotide
tgagtgtgattaaggtcaggtgccgattcc

SEQ ID NO: 90504 - DNA, 30 bp, Artificial Sequence
  Synthetic oligonucleotide
gacaagtcggacgttaagtgtggcgattcc

SEQ ID NO: 90505 - DNA, 30 bp, Artificial Sequence
  Synthetic oligonucleotide
tatcgtacttgtcgggggcatcctgattcc

SEQ ID NO: 90506 - DNA, 30 bp, Artificial Sequence
  Synthetic oligonucleotide
ggaaatgattgaccagaatcgcgtacttcc

SEQ ID NO: 90507 - DNA, 30 bp, Artificial Sequence
  Synthetic oligonucleotide
tagaatcaatcgaaggatagaaggagttcc

SEQ ID NO: 90508 - DNA, 30 bp, Artificial Sequence
  Synthetic oligonucleotide
acgttaatctgcggtactgacgtatgttcc

SEQ ID NO: 90509 - DNA, 30 bp, Artificial Sequence
  Synthetic oligonucleotide
taaggggtacatgccttcacctactgttcc

SEQ ID NO: 90510 - DNA, 30 bp, Artificial Sequence
  Synthetic oligonucleotide
cactggagcgcagaaatcgactagctttcc

SEQ ID NO: 90511 - DNA, 30 bp, Artificial Sequence
  Synthetic oligonucleotide
acacgccgacaacaccgaaagagagtttcc

SEQ ID NO: 90512 - DNA, 30 bp, Artificial Sequence
  Synthetic oligonucleotide
caacggcgagatcgggctcgaatcgtttcc

SEQ ID NO: 90513 - DNA, 30 bp, Artificial Sequence
  Synthetic oligonucleotide
cgataagacacacgatgtcataatgtttcc

SEQ ID NO: 90514 - DNA, 30 bp, Artificial Sequence
  Synthetic oligonucleotide
cgcgataacctaagtgaaagatatgtttcc

SEQ ID NO: 90515 - DNA, 30 bp, Artificial Sequence
  Synthetic oligonucleotide
aaaggcaaacgttagacgagatcgttttcc

SEQ ID NO: 90516 - DNA, 30 bp, Artificial Sequence
  Synthetic oligonucleotide
acaacaacacggggaactttaaacaaaagc

SEQ ID NO: 90517 - DNA, 30 bp, Artificial Sequence
  Synthetic oligonucleotide
acaggtctccgttagagtcggaagaaaagc

SEQ ID NO: 90518 - DNA, 30 bp, Artificial Sequence
  Synthetic oligonucleotide
gctcaaaaggtaggcgctccgcctcaaagc

SEQ ID NO: 90519 - DNA, 30 bp, Artificial Sequence
  Synthetic oligonucleotide
gatatggcgagatcccatatgaccgaaagc

SEQ ID NO: 90520 - DNA, 30 bp, Artificial Sequence
  Synthetic oligonucleotide
ttacgtgaaggcccaacgagttactaaagc

SEQ ID NO: 90521 - DNA, 30 bp, Artificial Sequence
  Synthetic oligonucleotide
aagtgatagcacggggtagcagggtaaagc

SEQ ID NO: 90522 - DNA, 30 bp, Artificial Sequence
  Synthetic oligonucleotide
ttgtaaccacgtctaaaacaggggtaaagc

SEQ ID NO: 90523 - DNA, 30 bp, Artificial Sequence
  Synthetic oligonucleotide
gggagacaaggcctacagaggttaacaagc

SEQ ID NO: 90524 - DNA, 30 bp, Artificial Sequence
  Synthetic oligonucleotide
ttagacgggatagcccgaactcccacaagc

SEQ ID NO: 90525 - DNA, 30 bp, Artificial Sequence
  Synthetic oligonucleotide
aaaccatcaattaggcagtgccgtacaagc

SEQ ID NO: 90526 - DNA, 30 bp, Artificial Sequence
  Synthetic oligonucleotide
caacattgggtgcaaacttctacgtcaagc

SEQ ID NO: 90527 - DNA, 30 bp, Artificial Sequence
  Synthetic oligonucleotide
tgcaaacgagctgcgctccacaggtcaagc

SEQ ID NO: 90528 - DNA, 30 bp, Artificial Sequence
  Synthetic oligonucleotide
agtggacacttagattaaacgataagaagc

SEQ ID NO: 90529 - DNA, 30 bp, Artificial Sequence
  Synthetic oligonucleotide
cacgatcaggttcacagatcgtacagaagc

SEQ ID NO: 90530 - DNA, 30 bp, Artificial Sequence
  Synthetic oligonucleotide
ggcgcgaaagcccaaaggacaagcagaagc

SEQ ID NO: 90531 - DNA, 30 bp, Artificial Sequence
  Synthetic oligonucleotide
tgtggaaaaaatgggatgtaccggagaagc

SEQ ID NO: 90532 - DNA, 30 bp, Artificial Sequence
  Synthetic oligonucleotide
ggtaacttgcatggaggtaagccacgaagc

SEQ ID NO: 90533 - DNA, 30 bp, Artificial Sequence
  Synthetic oligonucleotide
tctaacggcgccaggtcaccgagacgaagc

SEQ ID NO: 90534 - DNA, 30 bp, Artificial Sequence
  Synthetic oligonucleotide
ggattttgaccaggccgattaatgcgaagc

SEQ ID NO: 90535 - DNA, 30 bp, Artificial Sequence
  Synthetic oligonucleotide
ctagccagggatagccatggagacggaagc

SEQ ID NO: 90536 - DNA, 30 bp, Artificial Sequence
  Synthetic oligonucleotide
agtcccaaataagtaggtcgaccgggaagc

SEQ ID NO: 90537 - DNA, 30 bp, Artificial Sequence
  Synthetic oligonucleotide
taaagaagacgaaagaagcaagattgaagc

SEQ ID NO: 90538 - DNA, 30 bp, Artificial Sequence
  Synthetic oligonucleotide
atagcacgcaatagatcaccccacataagc

SEQ ID NO: 90539 - DNA, 30 bp, Artificial Sequence
  Synthetic oligonucleotide
tagtgcgtacttgtgtaggcttcgataagc

SEQ ID NO: 90540 - DNA, 30 bp, Artificial Sequence
  Synthetic oligonucleotide
aacgccaccaataggacgcggaggataagc

SEQ ID NO: 90541 - DNA, 30 bp, Artificial Sequence
  Synthetic oligonucleotide
taacaagtgatccggacgtgtaacctaagc

SEQ ID NO: 90542 - DNA, 30 bp, Artificial Sequence
  Synthetic oligonucleotide
tttagggtcgatcgactcgcggaagtaagc

SEQ ID NO: 90543 - DNA, 30 bp, Artificial Sequence
  Synthetic oligonucleotide
taaccgataaaatcagagtagtgggtaagc

SEQ ID NO: 90544 - DNA, 30 bp, Artificial Sequence
  Synthetic oligonucleotide
attcagacctcccgccgaaccgttgtaagc

SEQ ID NO: 90545 - DNA, 30 bp, Artificial Sequence
  Synthetic oligonucleotide
aaggttagtgtacataacatacaattaagc

SEQ ID NO: 90546 - DNA, 30 bp, Artificial Sequence
  Synthetic oligonucleotide
tagaaatcagacaaagagatggcgttaagc

SEQ ID NO: 90547 - DNA, 30 bp, Artificial Sequence
  Synthetic oligonucleotide
taggtgtagatgcgtttgtggaatttaagc

SEQ ID NO: 90548 - DNA, 30 bp, Artificial Sequence
  Synthetic oligonucleotide
aggtcgaaagtcagtagaacataaaacagc

SEQ ID NO: 90549 - DNA, 30 bp, Artificial Sequence
  Synthetic oligonucleotide
ggctcgaatcaatagtgagacacaaacagc

SEQ ID NO: 90550 - DNA, 30 bp, Artificial Sequence
  Synthetic oligonucleotide
cgacatgtattctcaaaacttaacaacagc

SEQ ID NO: 90551 - DNA, 30 bp, Artificial Sequence
  Synthetic oligonucleotide
acgtttagccagatatttgtaatcaacagc

SEQ ID NO: 90552 - DNA, 30 bp, Artificial Sequence
  Synthetic oligonucleotide
agccccgtaagtacctcgaagactaacagc

SEQ ID NO: 90553 - DNA, 30 bp, Artificial Sequence
  Synthetic oligonucleotide
accagcgaagtcaaggaatcaggtaacagc

SEQ ID NO: 90554 - DNA, 30 bp, Artificial Sequence
  Synthetic oligonucleotide
cgtgtaatgccaccattcgatattcacagc

SEQ ID NO: 90555 - DNA, 30 bp, Artificial Sequence
  Synthetic oligonucleotide
ccggacaaatatcgttgatggggagacagc

SEQ ID NO: 90556 - DNA, 30 bp, Artificial Sequence
  Synthetic oligonucleotide
ctggagggtatgcgataagtaccggacagc

SEQ ID NO: 90557 - DNA, 30 bp, Artificial Sequence
  Synthetic oligonucleotide
gacgcgtacgggaagaacgcgccatacagc

SEQ ID NO: 90558 - DNA, 30 bp, Artificial Sequence
  Synthetic oligonucleotide
caagcattataggtataaatggcttacagc

SEQ ID NO: 90559 - DNA, 30 bp, Artificial Sequence
  Synthetic oligonucleotide
aaccaaacgggagcctagtgctgtaccagc

SEQ ID NO: 90560 - DNA, 30 bp, Artificial Sequence
  Synthetic oligonucleotide
gacacagaaccaagcagagacgcacccagc

SEQ ID NO: 90561 - DNA, 31 bp, Artificial Sequence
  Synthetic oligonucleotide
caccgattatgaaagcgaaatgcgatccagc

SEQ ID NO: 90562 - DNA, 30 bp, Artificial Sequence
  Synthetic oligonucleotide
cgctgatgtcattaactcatctctagcagc

SEQ ID NO: 90563 - DNA, 30 bp, Artificial Sequence
  Synthetic oligonucleotide
agacttgtacgacgtatagggtacggcagc

SEQ ID NO: 90564 - DNA, 30 bp, Artificial Sequence
  Synthetic oligonucleotide
ataaggttacggagggactcgcccggcagc

SEQ ID NO: 90565 - DNA, 30 bp, Artificial Sequence
  Synthetic oligonucleotide
caatggaaatcaaaggttttattgggcagc

SEQ ID NO: 90566 - DNA, 30 bp, Artificial Sequence
  Synthetic oligonucleotide
atagcgccaagataaggggtagcatgcagc

SEQ ID NO: 90567 - DNA, 30 bp, Artificial Sequence
  Synthetic oligonucleotide
tgaggtaaatttacaatgagcaaagtcagc

SEQ ID NO: 90568 - DNA, 30 bp, Artificial Sequence
  Synthetic oligonucleotide
taacatagatatcgcgccgggcaagtcagc

SEQ ID NO: 90569 - DNA, 30 bp, Artificial Sequence
  Synthetic oligonucleotide
ggatactgaattgtttaaactacagtcagc

SEQ ID NO: 90570 - DNA, 30 bp, Artificial Sequence
  Synthetic oligonucleotide
tggtgcgtcctactaccatgagcagtcagc

SEQ ID NO: 90571 - DNA, 30 bp, Artificial Sequence
  Synthetic oligonucleotide
cgtattttacctatggcacaacccgtcagc

SEQ ID NO: 90572 - DNA, 30 bp, Artificial Sequence
  Synthetic oligonucleotide
ttacaggtagccaattggacttgcttcagc

SEQ ID NO: 90573 - DNA, 30 bp, Artificial Sequence
  Synthetic oligonucleotide
gcgtatatccgaagacataacactttcagc

SEQ ID NO: 90574 - DNA, 30 bp, Artificial Sequence
  Synthetic oligonucleotide
atgagaagggtatgagtgtgccaaaagagc

SEQ ID NO: 90575 - DNA, 30 bp, Artificial Sequence
  Synthetic oligonucleotide
ctaggacgcacgtttggcaatataaagagc

SEQ ID NO: 90576 - DNA, 30 bp, Artificial Sequence
  Synthetic oligonucleotide
tggaacaaccttaaagcacggaacaagagc

SEQ ID NO: 90577 - DNA, 30 bp, Artificial Sequence
  Synthetic oligonucleotide
aacgcgggctatgccatgttggccaagagc

SEQ ID NO: 90578 - DNA, 30 bp, Artificial Sequence
  Synthetic oligonucleotide
aaaggaaccccgtagagcggagcacagagc

SEQ ID NO: 90579 - DNA, 30 bp, Artificial Sequence
  Synthetic oligonucleotide
gggcggtcaaagcactgccactgagagagc

SEQ ID NO: 90580 - DNA, 30 bp, Artificial Sequence
  Synthetic oligonucleotide
acaagagaaatataatttatcccgtagagc

SEQ ID NO: 90581 - DNA, 30 bp, Artificial Sequence
  Synthetic oligonucleotide
aggaggaagatggcgctggctccgtagagc

SEQ ID NO: 90582 - DNA, 30 bp, Artificial Sequence
  Synthetic oligonucleotide
tcgtagaccacaaacataacccagacgagc

SEQ ID NO: 90583 - DNA, 30 bp, Artificial Sequence
  Synthetic oligonucleotide
atgatcagacatgggttatgtgtgacgagc

SEQ ID NO: 90584 - DNA, 30 bp, Artificial Sequence
  Synthetic oligonucleotide
tgagagagatgtaggctgcaaccgccgagc

SEQ ID NO: 90585 - DNA, 30 bp, Artificial Sequence
  Synthetic oligonucleotide
cgcaaatgggagggtgaatacactccgagc

SEQ ID NO: 90586 - DNA, 30 bp, Artificial Sequence
  Synthetic oligonucleotide
agcatccagaggataaactatcacgcgagc

SEQ ID NO: 90587 - DNA, 30 bp, Artificial Sequence
  Synthetic oligonucleotide
ggggtagccttttgattcagtaatgcgagc

SEQ ID NO: 90588 - DNA, 30 bp, Artificial Sequence
  Synthetic oligonucleotide
atccacacccgtagatctccaggatcgagc

SEQ ID NO: 90589 - DNA, 30 bp, Artificial Sequence
  Synthetic oligonucleotide
agatggcactccgaggctttaagctcgagc

SEQ ID NO: 90590 - DNA, 30 bp, Artificial Sequence
  Synthetic oligonucleotide
agcctgggcgggagcgtgagggtctcgagc

SEQ ID NO: 90591 - DNA, 30 bp, Artificial Sequence
  Synthetic oligonucleotide
cacagtatttgaccggattggcccaggagc

SEQ ID NO: 90592 - DNA, 30 bp, Artificial Sequence
  Synthetic oligonucleotide
atggcggacgggctctgtataatcaggagc

SEQ ID NO: 90593 - DNA, 30 bp, Artificial Sequence
  Synthetic oligonucleotide
ctcgtctgtgggatgaaaagaagccggagc

SEQ ID NO: 90594 - DNA, 30 bp, Artificial Sequence
  Synthetic oligonucleotide
cagcaagcatattagctggtgaaagggagc

SEQ ID NO: 90595 - DNA, 30 bp, Artificial Sequence
  Synthetic oligonucleotide
agcgaagagcttcttcgaaaagtcgggagc

SEQ ID NO: 90596 - DNA, 30 bp, Artificial Sequence
  Synthetic oligonucleotide
taggtcgagtatccggatgtctaggggagc

SEQ ID NO: 90597 - DNA, 30 bp, Artificial Sequence
  Synthetic oligonucleotide
ttatatagctctgggtaagacatggggagc

SEQ ID NO: 90598 - DNA, 30 bp, Artificial Sequence
  Synthetic oligonucleotide
gactacagcgtcgggaccacagcatggagc

SEQ ID NO: 90599 - DNA, 30 bp, Artificial Sequence
  Synthetic oligonucleotide
tcgtagcgaattttcatgacatattggagc

SEQ ID NO: 90600 - DNA, 30 bp, Artificial Sequence
  Synthetic oligonucleotide
accgacccgcgtgagcctctaaacatgagc

SEQ ID NO: 90601 - DNA, 30 bp, Artificial Sequence
  Synthetic oligonucleotide
gaagggcagcctgaccaatgtcgcctgagc

SEQ ID NO: 90602 - DNA, 30 bp, Artificial Sequence
  Synthetic oligonucleotide
cgggtgaccaacctacacggactagtgagc

SEQ ID NO: 90603 - DNA, 30 bp, Artificial Sequence
  Synthetic oligonucleotide
gacggttccccgatgcccagggtagtgagc

SEQ ID NO: 90604 - DNA, 30 bp, Artificial Sequence
  Synthetic oligonucleotide
taaggagaacatgtaccttgtactgtgagc

SEQ ID NO: 90605 - DNA, 30 bp, Artificial Sequence
  Synthetic oligonucleotide
cagaatgttgtagaacagagtgttgtgagc

SEQ ID NO: 90606 - DNA, 30 bp, Artificial Sequence
  Synthetic oligonucleotide
aaacaaggaccttagctaggtcggttgagc

SEQ ID NO: 90607 - DNA, 30 bp, Artificial Sequence
  Synthetic oligonucleotide
ctcggctccttagagacgggacgacatagc

SEQ ID NO: 90608 - DNA, 31 bp, Artificial Sequence
  Synthetic oligonucleotide
tcgatattcattcctcaaccgcgtccatagc

SEQ ID NO: 90609 - DNA, 30 bp, Artificial Sequence
  Synthetic oligonucleotide
ataagtatcaatcagactcacatagatagc

SEQ ID NO: 90610 - DNA, 30 bp, Artificial Sequence
  Synthetic oligonucleotide
ctcgggtctgctaaatgtaaacgggatagc

SEQ ID NO: 90611 - DNA, 30 bp, Artificial Sequence
  Synthetic oligonucleotide
tgtggtcgtacgacaatcaatgtggatagc

SEQ ID NO: 90612 - DNA, 30 bp, Artificial Sequence
  Synthetic oligonucleotide
ggataaggtgcgttcttgaaaggtgatagc

SEQ ID NO: 90613 - DNA, 30 bp, Artificial Sequence
  Synthetic oligonucleotide
acgaagcctgtggagtaggcagaatatagc

SEQ ID NO: 90614 - DNA, 30 bp, Artificial Sequence
  Synthetic oligonucleotide
cacggctgaagataggtccaaaattatagc

SEQ ID NO: 90615 - DNA, 30 bp, Artificial Sequence
  Synthetic oligonucleotide
ctgtattcataagaactcacacacactagc

SEQ ID NO: 90616 - DNA, 30 bp, Artificial Sequence
  Synthetic oligonucleotide
catcaacaatagggtacgtcttctactagc

SEQ ID NO: 90617 - DNA, 30 bp, Artificial Sequence
  Synthetic oligonucleotide
ggctaagttgtcataggaacacctcctagc

SEQ ID NO: 90618 - DNA, 30 bp, Artificial Sequence
  Synthetic oligonucleotide
ctcgacgagagatggatgcacttaagtagc

SEQ ID NO: 90619 - DNA, 30 bp, Artificial Sequence
  Synthetic oligonucleotide
tatcggaaatctgcatagattaaaggtagc

SEQ ID NO: 90620 - DNA, 30 bp, Artificial Sequence
  Synthetic oligonucleotide
ggcaaattgtcccaaagcagttttggtagc

SEQ ID NO: 90621 - DNA, 30 bp, Artificial Sequence
  Synthetic oligonucleotide
ttgtaaaagaatacgcctttaatttgtagc

SEQ ID NO: 90622 - DNA, 30 bp, Artificial Sequence
  Synthetic oligonucleotide
aaaccgtactatggagctattcaaattagc

SEQ ID NO: 90623 - DNA, 30 bp, Artificial Sequence
  Synthetic oligonucleotide
ttcatggggaccgcaacgtatcccattagc

SEQ ID NO: 90624 - DNA, 30 bp, Artificial Sequence
  Synthetic oligonucleotide
atggtgaccggccagtgtagtcagattagc

SEQ ID NO: 90625 - DNA, 30 bp, Artificial Sequence
  Synthetic oligonucleotide
tagagccttaagattaaagccgagattagc

SEQ ID NO: 90626 - DNA, 30 bp, Artificial Sequence
  Synthetic oligonucleotide
gcatcctgcgcggggaggattcatattagc

SEQ ID NO: 90627 - DNA, 30 bp, Artificial Sequence
  Synthetic oligonucleotide
ggaacccagtcgttaataaagcaccttagc

SEQ ID NO: 90628 - DNA, 30 bp, Artificial Sequence
  Synthetic oligonucleotide
ggagttaacaatgggatcagtgcagttagc

SEQ ID NO: 90629 - DNA, 30 bp, Artificial Sequence
  Synthetic oligonucleotide
aagtgggtatgggctccatgtgatgttagc

SEQ ID NO: 90630 - DNA, 30 bp, Artificial Sequence
  Synthetic oligonucleotide
gcccaccacacagcgagagaataatttagc

SEQ ID NO: 90631 - DNA, 30 bp, Artificial Sequence
  Synthetic oligonucleotide
tcgtcgaaatatgctccagtacgatttagc

SEQ ID NO: 90632 - DNA, 30 bp, Artificial Sequence
  Synthetic oligonucleotide
gaccggggtgctgacaaaatgggcaaacgc

SEQ ID NO: 90633 - DNA, 30 bp, Artificial Sequence
  Synthetic oligonucleotide
ccggaatgatttcaggtcgacgtcaaacgc

SEQ ID NO: 90634 - DNA, 30 bp, Artificial Sequence
  Synthetic oligonucleotide
tcataatgagcaaagatagaggggcaacgc

SEQ ID NO: 90635 - DNA, 30 bp, Artificial Sequence
  Synthetic oligonucleotide
tagtgagctggatcatgtaaagacgaacgc

SEQ ID NO: 90636 - DNA, 30 bp, Artificial Sequence
  Synthetic oligonucleotide
tggatagatagtcaccagacaatcgaacgc

SEQ ID NO: 90637 - DNA, 30 bp, Artificial Sequence
  Synthetic oligonucleotide
gagcccaaccaatcgccaataggctaacgc

SEQ ID NO: 90638 - DNA, 30 bp, Artificial Sequence
  Synthetic oligonucleotide
tacgtcaacagtaccttcgttctaacacgc

SEQ ID NO: 90639 - DNA, 30 bp, Artificial Sequence
  Synthetic oligonucleotide
gcttgtgaaaccttggctcgggagccacgc

SEQ ID NO: 90640 - DNA, 30 bp, Artificial Sequence
  Synthetic oligonucleotide
tcgctgtaggtcacaacaggagcgccacgc

SEQ ID NO: 90641 - DNA, 30 bp, Artificial Sequence
  Synthetic oligonucleotide
ctttgaacaaggaacggcgattgagcacgc

SEQ ID NO: 90642 - DNA, 30 bp, Artificial Sequence
  Synthetic oligonucleotide
ctgacctagtacccaacagactaatcacgc

SEQ ID NO: 90643 - DNA, 30 bp, Artificial Sequence
  Synthetic oligonucleotide
tacctcccagaggatccttagcactcacgc

SEQ ID NO: 90644 - DNA, 30 bp, Artificial Sequence
  Synthetic oligonucleotide
tggtggaatgtacagaaaattaagtcacgc

SEQ ID NO: 90645 - DNA, 30 bp, Artificial Sequence
  Synthetic oligonucleotide
agacccctgactaagagtagatcgtcacgc

SEQ ID NO: 90646 - DNA, 30 bp, Artificial Sequence
  Synthetic oligonucleotide
gtcaagggactgctcggtctcgaactacgc

SEQ ID NO: 90647 - DNA, 30 bp, Artificial Sequence
  Synthetic oligonucleotide
aaacgaccaagtcggatataaagagtacgc

SEQ ID NO: 90648 - DNA, 30 bp, Artificial Sequence
  Synthetic oligonucleotide
ggttcagtggctgtagaaaagctggtacgc

SEQ ID NO: 90649 - DNA, 30 bp, Artificial Sequence
  Synthetic oligonucleotide
tatcgacatacggagaaaagggctgtacgc

SEQ ID NO: 90650 - DNA, 30 bp, Artificial Sequence
  Synthetic oligonucleotide
tgcgttaaatttgtcccctcagaacaccgc

SEQ ID NO: 90651 - DNA, 30 bp, Artificial Sequence
  Synthetic oligonucleotide
ccgaagaggtcgaatggcttgtgacaccgc

SEQ ID NO: 90652 - DNA, 30 bp, Artificial Sequence
  Synthetic oligonucleotide
gcaaagattcgatataagctccagcaccgc

SEQ ID NO: 90653 - DNA, 30 bp, Artificial Sequence
  Synthetic oligonucleotide
taggatcgataatgcgctaggtagcaccgc

SEQ ID NO: 90654 - DNA, 30 bp, Artificial Sequence
  Synthetic oligonucleotide
atcaagtctcagtcaagggcgatgtaccgc

SEQ ID NO: 90655 - DNA, 30 bp, Artificial Sequence
  Synthetic oligonucleotide
caacagtgcaattactagacttgaccccgc

SEQ ID NO: 90656 - DNA, 30 bp, Artificial Sequence
  Synthetic oligonucleotide
cgatccggatccctagatgaccttccccgc

SEQ ID NO: 90657 - DNA, 30 bp, Artificial Sequence
  Synthetic oligonucleotide
cataaggcaccactccaaggcgttgcccgc

SEQ ID NO: 90658 - DNA, 30 bp, Artificial Sequence
  Synthetic oligonucleotide
acgaggggcgttctccataaagtgagccgc

SEQ ID NO: 90659 - DNA, 30 bp, Artificial Sequence
  Synthetic oligonucleotide
cacagttatgttaggtataaacaacgccgc

SEQ ID NO: 90660 - DNA, 30 bp, Artificial Sequence
  Synthetic oligonucleotide
cgtccactacccggtactaacgttcgccgc

SEQ ID NO: 90661 - DNA, 30 bp, Artificial Sequence
  Synthetic oligonucleotide
aagctgggcatagcggagacctggtgccgc

SEQ ID NO: 90662 - DNA, 30 bp, Artificial Sequence
  Synthetic oligonucleotide
tcggaaactcaaagtgcggactaggtccgc

SEQ ID NO: 90663 - DNA, 30 bp, Artificial Sequence
  Synthetic oligonucleotide
tcccgaacccaagaccattaaccattccgc

SEQ ID NO: 90664 - DNA, 30 bp, Artificial Sequence
  Synthetic oligonucleotide
cggtacggacacgatacatcagaaaagcgc

SEQ ID NO: 90665 - DNA, 30 bp, Artificial Sequence
  Synthetic oligonucleotide
atagggtaggagttagagccataaaagcgc

SEQ ID NO: 90666 - DNA, 30 bp, Artificial Sequence
  Synthetic oligonucleotide
cgtatctaaactggatggcccgggtagcgc

SEQ ID NO: 90667 - DNA, 30 bp, Artificial Sequence
  Synthetic oligonucleotide
gtgaggtggcataatggatcaaaaacgcgc

SEQ ID NO: 90668 - DNA, 30 bp, Artificial Sequence
  Synthetic oligonucleotide
tcaatatgtgagtgaacaggtgtcacgcgc

SEQ ID NO: 90669 - DNA, 30 bp, Artificial Sequence
  Synthetic oligonucleotide
gcacacgtatgcatgataacagtggcgcgc

SEQ ID NO: 90670 - DNA, 30 bp, Artificial Sequence
  Synthetic oligonucleotide
atgacttctcagggactgaacaggaggcgc

SEQ ID NO: 90671 - DNA, 30 bp, Artificial Sequence
  Synthetic oligonucleotide
cggcacttccgcaaggaaaatctggggcgc

SEQ ID NO: 90672 - DNA, 30 bp, Artificial Sequence
  Synthetic oligonucleotide
atctccatcgaaagagcgcaacttgggcgc

SEQ ID NO: 90673 - DNA, 30 bp, Artificial Sequence
  Synthetic oligonucleotide
aagtcgtaagacgaaatcaagaacatgcgc

SEQ ID NO: 90674 - DNA, 30 bp, Artificial Sequence
  Synthetic oligonucleotide
agtagataagttcatgtaattatcctgcgc

SEQ ID NO: 90675 - DNA, 30 bp, Artificial Sequence
  Synthetic oligonucleotide
gaccgcgaggagttggagcttaatctgcgc

SEQ ID NO: 90676 - DNA, 30 bp, Artificial Sequence
  Synthetic oligonucleotide
aagtaaacggcccgaggattaggagtgcgc

SEQ ID NO: 90677 - DNA, 30 bp, Artificial Sequence
  Synthetic oligonucleotide
tcgttctagtcatcaccgggggtagtgcgc

SEQ ID NO: 90678 - DNA, 30 bp, Artificial Sequence
  Synthetic oligonucleotide
caagataagtcccgttcttgtcccgtgcgc

SEQ ID NO: 90679 - DNA, 30 bp, Artificial Sequence
  Synthetic oligonucleotide
gggaggtccattaattgtctcagacatcgc

SEQ ID NO: 90680 - DNA, 30 bp, Artificial Sequence
  Synthetic oligonucleotide
tcgctagagcccgccgattatgagcatcgc

SEQ ID NO: 90681 - DNA, 30 bp, Artificial Sequence
  Synthetic oligonucleotide
cgataaacaatacgagggcttagtcatcgc

SEQ ID NO: 90682 - DNA, 30 bp, Artificial Sequence
  Synthetic oligonucleotide
tggacgtggacagctgaatgacaagatcgc

SEQ ID NO: 90683 - DNA, 30 bp, Artificial Sequence
  Synthetic oligonucleotide
ctcacgagcaagggtcagttgaaatatcgc

SEQ ID NO: 90684 - DNA, 30 bp, Artificial Sequence
  Synthetic oligonucleotide
gcgttaagcgtacagggcttaataactcgc

SEQ ID NO: 90685 - DNA, 30 bp, Artificial Sequence
  Synthetic oligonucleotide
caccgtgttaccgatatcattaggactcgc

SEQ ID NO: 90686 - DNA, 30 bp, Artificial Sequence
  Synthetic oligonucleotide
gggggtgaaaaggactttggatatactcgc

SEQ ID NO: 90687 - DNA, 30 bp, Artificial Sequence
  Synthetic oligonucleotide
acgtaccgatttaattttatgcgtactcgc

SEQ ID NO: 90688 - DNA, 30 bp, Artificial Sequence
  Synthetic oligonucleotide
gtacaactataaaaacaaaggtcggctcgc

SEQ ID NO: 90689 - DNA, 30 bp, Artificial Sequence
  Synthetic oligonucleotide
ctggtaggtcatagtaatgcaggggctcgc

SEQ ID NO: 90690 - DNA, 30 bp, Artificial Sequence
  Synthetic oligonucleotide
gtccataggttcaaaaaagccagatctcgc

SEQ ID NO: 90691 - DNA, 30 bp, Artificial Sequence
  Synthetic oligonucleotide
caatatccgaggctagtatggcactctcgc

SEQ ID NO: 90692 - DNA, 30 bp, Artificial Sequence
  Synthetic oligonucleotide
tggtgcggatgtaattaaaggccttctcgc

SEQ ID NO: 90693 - DNA, 30 bp, Artificial Sequence
  Synthetic oligonucleotide
actgacggccccctccgctcagaaagtcgc

SEQ ID NO: 90694 - DNA, 30 bp, Artificial Sequence
  Synthetic oligonucleotide
tgggatagtcgataccccgggtcaagtcgc

SEQ ID NO: 90695 - DNA, 30 bp, Artificial Sequence
  Synthetic oligonucleotide
acaaggagaataaaattaatgggaagtcgc

SEQ ID NO: 90696 - DNA, 30 bp, Artificial Sequence
  Synthetic oligonucleotide
gactacggtcacgtgtcagtggagagtcgc

SEQ ID NO: 90697 - DNA, 30 bp, Artificial Sequence
  Synthetic oligonucleotide
ccgagctcacgaacctgcgatgggcgtcgc

SEQ ID NO: 90698 - DNA, 30 bp, Artificial Sequence
  Synthetic oligonucleotide
cacatgtcattttgactacaacaatgtcgc

SEQ ID NO: 90699 - DNA, 30 bp, Artificial Sequence
  Synthetic oligonucleotide
agataaagtggtggcactagtctcattcgc

SEQ ID NO: 90700 - DNA, 30 bp, Artificial Sequence
  Synthetic oligonucleotide
gccccagaaagctactcgacgatccttcgc

SEQ ID NO: 90701 - DNA, 30 bp, Artificial Sequence
  Synthetic oligonucleotide
ggcaatcgccatgcaaggccctacgttcgc

SEQ ID NO: 90702 - DNA, 30 bp, Artificial Sequence
  Synthetic oligonucleotide
gtggaagcaaaaactgaacgatgcgttcgc

SEQ ID NO: 90703 - DNA, 30 bp, Artificial Sequence
  Synthetic oligonucleotide
gttacgatagtgcaacgaaatgtcaaaggc

SEQ ID NO: 90704 - DNA, 30 bp, Artificial Sequence
  Synthetic oligonucleotide
ccctatgagaacccggttagctaacaaggc

SEQ ID NO: 90705 - DNA, 30 bp, Artificial Sequence
  Synthetic oligonucleotide
ccttagttgtaaaaatttgtaaaagaaggc

SEQ ID NO: 90706 - DNA, 30 bp, Artificial Sequence
  Synthetic oligonucleotide
gagactggaaactaactatacctggaaggc

SEQ ID NO: 90707 - DNA, 30 bp, Artificial Sequence
  Synthetic oligonucleotide
tggaggcaatcactggtggcggggacaggc

SEQ ID NO: 90708 - DNA, 30 bp, Artificial Sequence
  Synthetic oligonucleotide
tcgtcaggttagatgacggggattccaggc

SEQ ID NO: 90709 - DNA, 30 bp, Artificial Sequence
  Synthetic oligonucleotide
accgcggagtaacgaagagggaaagcaggc

SEQ ID NO: 90710 - DNA, 30 bp, Artificial Sequence
  Synthetic oligonucleotide
tggatccacagttaggacgaacaacgaggc

SEQ ID NO: 90711 - DNA, 30 bp, Artificial Sequence
  Synthetic oligonucleotide
cgaggaagaaagtggagggatactcgaggc

SEQ ID NO: 90712 - DNA, 30 bp, Artificial Sequence
  Synthetic oligonucleotide
cgagataaaatgtggcgtctgaactgaggc

SEQ ID NO: 90713 - DNA, 30 bp, Artificial Sequence
  Synthetic oligonucleotide
gtgcagaactcctcagtgcagaggtgaggc

SEQ ID NO: 90714 - DNA, 30 bp, Artificial Sequence
  Synthetic oligonucleotide
tgctgatctggaggtggagatataataggc

SEQ ID NO: 90715 - DNA, 30 bp, Artificial Sequence
  Synthetic oligonucleotide
atggaaaagtacgggtcatcaaagataggc

SEQ ID NO: 90716 - DNA, 30 bp, Artificial Sequence
  Synthetic oligonucleotide
ggaaacggggacggaaggggcaagataggc

SEQ ID NO: 90717 - DNA, 30 bp, Artificial Sequence
  Synthetic oligonucleotide
tagatccaggctcaattttgaccgataggc

SEQ ID NO: 90718 - DNA, 30 bp, Artificial Sequence
  Synthetic oligonucleotide
cgaccattgacatgttacacaaggataggc

SEQ ID NO: 90719 - DNA, 30 bp, Artificial Sequence
  Synthetic oligonucleotide
agatacgaaagaacccttgggaggataggc

SEQ ID NO: 90720 - DNA, 30 bp, Artificial Sequence
  Synthetic oligonucleotide
atagcaagaattgagtactaaaatataggc

SEQ ID NO: 90721 - DNA, 30 bp, Artificial Sequence
  Synthetic oligonucleotide
cagttataaaacacgtaaggtgaactaggc

SEQ ID NO: 90722 - DNA, 30 bp, Artificial Sequence
  Synthetic oligonucleotide
taggtcattcggagagtacatttggtaggc

SEQ ID NO: 90723 - DNA, 30 bp, Artificial Sequence
  Synthetic oligonucleotide
gacctgagtgcaaggactccttgtgtaggc

SEQ ID NO: 90724 - DNA, 30 bp, Artificial Sequence
  Synthetic oligonucleotide
tgaagtcacgaggattattcgcacttaggc

SEQ ID NO: 90725 - DNA, 30 bp, Artificial Sequence
  Synthetic oligonucleotide
caagatgtcaactcggcactcgtagacggc

SEQ ID NO: 90726 - DNA, 30 bp, Artificial Sequence
  Synthetic oligonucleotide
cataacggacagcgcgtttcgtgtgacggc

SEQ ID NO: 90727 - DNA, 30 bp, Artificial Sequence
  Synthetic oligonucleotide
ccattggctaggaagacagtgataaccggc

SEQ ID NO: 90728 - DNA, 30 bp, Artificial Sequence
  Synthetic oligonucleotide
gcgtgagctattgaaagttgactaaccggc

SEQ ID NO: 90729 - DNA, 30 bp, Artificial Sequence
  Synthetic oligonucleotide
gtcagatatatggagcagtagacgaccggc

SEQ ID NO: 90730 - DNA, 30 bp, Artificial Sequence
  Synthetic oligonucleotide
agtcctaacggcgattccggggacgccggc

SEQ ID NO: 90731 - DNA, 30 bp, Artificial Sequence
  Synthetic oligonucleotide
ttgcttgcgaagggatcgggctcatccggc

SEQ ID NO: 90732 - DNA, 30 bp, Artificial Sequence
  Synthetic oligonucleotide
ctgatagtgccccctctatgaaaaagcggc

SEQ ID NO: 90733 - DNA, 30 bp, Artificial Sequence
  Synthetic oligonucleotide
caggaatagtccatagacataccaagcggc

SEQ ID NO: 90734 - DNA, 30 bp, Artificial Sequence
  Synthetic oligonucleotide
gggtgaactgtagactaggctctgagcggc

SEQ ID NO: 90735 - DNA, 30 bp, Artificial Sequence
  Synthetic oligonucleotide
cttgatgtacgacaaaattaacttagcggc

SEQ ID NO: 90736 - DNA, 30 bp, Artificial Sequence
  Synthetic oligonucleotide
tgtgcatggcacccgaccacgttttgcggc

SEQ ID NO: 90737 - DNA, 30 bp, Artificial Sequence
  Synthetic oligonucleotide
cgggcagtagggctgggaggtggcatcggc

SEQ ID NO: 90738 - DNA, 30 bp, Artificial Sequence
  Synthetic oligonucleotide
aggcctgcacggggggcgcgccatatcggc

SEQ ID NO: 90739 - DNA, 30 bp, Artificial Sequence
  Synthetic oligonucleotide
ctgcgtggccatgtagaagaataggtcggc

SEQ ID NO: 90740 - DNA, 30 bp, Artificial Sequence
  Synthetic oligonucleotide
tcctgttaacgcctcataaaaggtgtcggc

SEQ ID NO: 90741 - DNA, 30 bp, Artificial Sequence
  Synthetic oligonucleotide
tcaggtgcgctaatgtgtgtcagcttcggc

SEQ ID NO: 90742 - DNA, 30 bp, Artificial Sequence
  Synthetic oligonucleotide
tgatggccaatcggaggagctaagttcggc

SEQ ID NO: 90743 - DNA, 30 bp, Artificial Sequence
  Synthetic oligonucleotide
aggctatgataggatcggtaccaaaagggc

SEQ ID NO: 90744 - DNA, 30 bp, Artificial Sequence
  Synthetic oligonucleotide
aaaaagggtagtgcctgtcagccaaagggc

SEQ ID NO: 90745 - DNA, 30 bp, Artificial Sequence
  Synthetic oligonucleotide
gaagacaatactagctcctggctaaagggc

SEQ ID NO: 90746 - DNA, 30 bp, Artificial Sequence
  Synthetic oligonucleotide
atataggattgatcagctacgagcaagggc

SEQ ID NO: 90747 - DNA, 30 bp, Artificial Sequence
  Synthetic oligonucleotide
caggagcatgggttaggagttgagcagggc

SEQ ID NO: 90748 - DNA, 30 bp, Artificial Sequence
  Synthetic oligonucleotide
taagtaccgtaaaaggtcagcggcgagggc

SEQ ID NO: 90749 - DNA, 30 bp, Artificial Sequence
  Synthetic oligonucleotide
tcactcgctcgtaggagaaggtgcgagggc

SEQ ID NO: 90750 - DNA, 30 bp, Artificial Sequence
  Synthetic oligonucleotide
caacgagtctcgggagcatacacggagggc

SEQ ID NO: 90751 - DNA, 30 bp, Artificial Sequence
  Synthetic oligonucleotide
gaatgcccgccaacgtccgaggtatagggc

SEQ ID NO: 90752 - DNA, 30 bp, Artificial Sequence
  Synthetic oligonucleotide
gccggcgagacaaagctgttaacgtagggc

SEQ ID NO: 90753 - DNA, 30 bp, Artificial Sequence
  Synthetic oligonucleotide
ctgtgtaaagaaactcgaagtcatacgggc

SEQ ID NO: 90754 - DNA, 30 bp, Artificial Sequence
  Synthetic oligonucleotide
gtcgtaaggggtagtggttcatatacgggc

SEQ ID NO: 90755 - DNA, 30 bp, Artificial Sequence
  Synthetic oligonucleotide
gtcaaaacctgtcgcttgaatagagcgggc

SEQ ID NO: 90756 - DNA, 30 bp, Artificial Sequence
  Synthetic oligonucleotide
tttgaaaggggaatacagtgctcgtcgggc

SEQ ID NO: 90757 - DNA, 30 bp, Artificial Sequence
  Synthetic oligonucleotide
ggcttgcagtagataacctgggcaaggggc

SEQ ID NO: 90758 - DNA, 30 bp, Artificial Sequence
  Synthetic oligonucleotide
ttgtggcccagaatactgggtcaagggggc

SEQ ID NO: 90759 - DNA, 30 bp, Artificial Sequence
  Synthetic oligonucleotide
acaagcgggagcgagggcaactgggggggc

SEQ ID NO: 90760 - DNA, 30 bp, Artificial Sequence
  Synthetic oligonucleotide
ttagaagtagtatatggagaaactgggggc

SEQ ID NO: 90761 - DNA, 30 bp, Artificial Sequence
  Synthetic oligonucleotide
tcggtagtgcgtgcggagtgaaaaatgggc

SEQ ID NO: 90762 - DNA, 30 bp, Artificial Sequence
  Synthetic oligonucleotide
gacgggataaagcgataaaaactgatgggc

SEQ ID NO: 90763 - DNA, 30 bp, Artificial Sequence
  Synthetic oligonucleotide
tgaggtagcctgatttcatcgttcgtgggc

SEQ ID NO: 90764 - DNA, 30 bp, Artificial Sequence
  Synthetic oligonucleotide
atacagtaggacaggcgtgccaagttgggc

SEQ ID NO: 90765 - DNA, 30 bp, Artificial Sequence
  Synthetic oligonucleotide
acatattcaaaataccgtaaggctaatggc

SEQ ID NO: 90766 - DNA, 30 bp, Artificial Sequence
  Synthetic oligonucleotide
gggcacagaggtgcaggaagttcacatggc

SEQ ID NO: 90767 - DNA, 30 bp, Artificial Sequence
  Synthetic oligonucleotide
aaatgaataatctcgaacgcggtgcatggc

SEQ ID NO: 90768 - DNA, 30 bp, Artificial Sequence
  Synthetic oligonucleotide
agacgacaaagcggatcttaatgtcatggc

SEQ ID NO: 90769 - DNA, 30 bp, Artificial Sequence
  Synthetic oligonucleotide
taagcgcgccggctcagacagagtgatggc

SEQ ID NO: 90770 - DNA, 30 bp, Artificial Sequence
  Synthetic oligonucleotide
acttcagggaagtgacaggtctgctatggc

SEQ ID NO: 90771 - DNA, 30 bp, Artificial Sequence
  Synthetic oligonucleotide
aaggaccacttggtgtgtccacagtatggc

SEQ ID NO: 90772 - DNA, 30 bp, Artificial Sequence
  Synthetic oligonucleotide
ctgatcggacacaatacgaggggcgctggc

SEQ ID NO: 90773 - DNA, 30 bp, Artificial Sequence
  Synthetic oligonucleotide
cgtaaccataaatgtaccggctgggctggc

SEQ ID NO: 90774 - DNA, 30 bp, Artificial Sequence
  Synthetic oligonucleotide
acatatttaagcgatgccactgatgctggc

SEQ ID NO: 90775 - DNA, 30 bp, Artificial Sequence
  Synthetic oligonucleotide
acgaagcgagaagggcgaaagggttctggc

SEQ ID NO: 90776 - DNA, 30 bp, Artificial Sequence
  Synthetic oligonucleotide
gacagattcggactaacattgatcagtggc

SEQ ID NO: 90777 - DNA, 30 bp, Artificial Sequence
  Synthetic oligonucleotide
agcaggcgtacaactagaaggggtagtggc

SEQ ID NO: 90778 - DNA, 30 bp, Artificial Sequence
  Synthetic oligonucleotide
cgataatagtgtggaacaggttcaattggc

SEQ ID NO: 90779 - DNA, 30 bp, Artificial Sequence
  Synthetic oligonucleotide
atgccgatggtgttatgtgccggtattggc

SEQ ID NO: 90780 - DNA, 30 bp, Artificial Sequence
  Synthetic oligonucleotide
gagcctggcaaatacgttaccgaacttggc

SEQ ID NO: 90781 - DNA, 30 bp, Artificial Sequence
  Synthetic oligonucleotide
gtgctgttagcatctcgcggctaggttggc

SEQ ID NO: 90782 - DNA, 30 bp, Artificial Sequence
  Synthetic oligonucleotide
cgaacataaagcaagctgagtaaatttggc

SEQ ID NO: 90783 - DNA, 29 bp, Artificial Sequence
  Synthetic oligonucleotide
aacgaaataaaggaaggcgtgtctttggc

SEQ ID NO: 90784 - DNA, 30 bp, Artificial Sequence
  Synthetic oligonucleotide
agtaagtcctagaggccggggtaacaatgc

SEQ ID NO: 90785 - DNA, 30 bp, Artificial Sequence
  Synthetic oligonucleotide
ccttccaaaatccgaagcttaatacaatgc

SEQ ID NO: 90786 - DNA, 30 bp, Artificial Sequence
  Synthetic oligonucleotide
aaaagccagagagtgacaagttgtcaatgc

SEQ ID NO: 90787 - DNA, 30 bp, Artificial Sequence
  Synthetic oligonucleotide
cagcaaccagtcacaccgaggatcgaatgc

SEQ ID NO: 90788 - DNA, 30 bp, Artificial Sequence
  Synthetic oligonucleotide
gctaggtagtaagtcaatactagataatgc

SEQ ID NO: 90789 - DNA, 30 bp, Artificial Sequence
  Synthetic oligonucleotide
caagtttgaaggggctctaagacctaatgc

SEQ ID NO: 90790 - DNA, 30 bp, Artificial Sequence
  Synthetic oligonucleotide
tgtaggcgggtacagagttttaagtaatgc

SEQ ID NO: 90791 - DNA, 30 bp, Artificial Sequence
  Synthetic oligonucleotide
tgacatgctactcgaggaacgacaacatgc

SEQ ID NO: 90792 - DNA, 30 bp, Artificial Sequence
  Synthetic oligonucleotide
caaggtagtccaagaatgacgaagacatgc

SEQ ID NO: 90793 - DNA, 30 bp, Artificial Sequence
  Synthetic oligonucleotide
ttaatctcgaaacgagggaaccttccatgc

SEQ ID NO: 90794 - DNA, 30 bp, Artificial Sequence
  Synthetic oligonucleotide
ctgagcacagttactaaagaagagtcatgc

SEQ ID NO: 90795 - DNA, 30 bp, Artificial Sequence
  Synthetic oligonucleotide
cactaactcactcgctaccgcgaacgatgc

SEQ ID NO: 90796 - DNA, 30 bp, Artificial Sequence
  Synthetic oligonucleotide
acgccatttagcggaaatgcgcagcgatgc

SEQ ID NO: 90797 - DNA, 30 bp, Artificial Sequence
  Synthetic oligonucleotide
ataaggggtcgtatatcccgaatatgatgc

SEQ ID NO: 90798 - DNA, 30 bp, Artificial Sequence
  Synthetic oligonucleotide
tccgaggcacgtgagagctcacaactatgc

SEQ ID NO: 90799 - DNA, 30 bp, Artificial Sequence
  Synthetic oligonucleotide
ccgaggcgaagtgaggcaagccgtctatgc

SEQ ID NO: 90800 - DNA, 30 bp, Artificial Sequence
  Synthetic oligonucleotide
ccgataccaacataataaggaagcgtatgc

SEQ ID NO: 90801 - DNA, 30 bp, Artificial Sequence
  Synthetic oligonucleotide
tgacggggacgtgcaagttccgcggtatgc

SEQ ID NO: 90802 - DNA, 30 bp, Artificial Sequence
  Synthetic oligonucleotide
tacgacatactggatttgctcgagaactgc

SEQ ID NO: 90803 - DNA, 30 bp, Artificial Sequence
  Synthetic oligonucleotide
gaacttaggcgtcagaataatacgaactgc

SEQ ID NO: 90804 - DNA, 30 bp, Artificial Sequence
  Synthetic oligonucleotide
acggcaacctgctggttcctggacccctgc

SEQ ID NO: 90805 - DNA, 30 bp, Artificial Sequence
  Synthetic oligonucleotide
cgtctatgtattggatgagtaagtccctgc

SEQ ID NO: 90806 - DNA, 30 bp, Artificial Sequence
  Synthetic oligonucleotide
tagaacattgtaccagctgaaggagcctgc

SEQ ID NO: 90807 - DNA, 30 bp, Artificial Sequence
  Synthetic oligonucleotide
gcttcggtcctttcacagctctccgcctgc

SEQ ID NO: 90808 - DNA, 30 bp, Artificial Sequence
  Synthetic oligonucleotide
aacatacatcacatagagatcggggcctgc

SEQ ID NO: 90809 - DNA, 30 bp, Artificial Sequence
  Synthetic oligonucleotide
gcgttatattctgatgaaaggaagtcctgc

SEQ ID NO: 90810 - DNA, 30 bp, Artificial Sequence
  Synthetic oligonucleotide
gagagcatacatggggatcgttcaagctgc

SEQ ID NO: 90811 - DNA, 30 bp, Artificial Sequence
  Synthetic oligonucleotide
aataagaaggatttggagcgcgcgagctgc

SEQ ID NO: 90812 - DNA, 30 bp, Artificial Sequence
  Synthetic oligonucleotide
gggggttcacctttcaagaggatacgctgc

SEQ ID NO: 90813 - DNA, 30 bp, Artificial Sequence
  Synthetic oligonucleotide
tttcgcggaacaagtaggagtgatcgctgc

SEQ ID NO: 90814 - DNA, 30 bp, Artificial Sequence
  Synthetic oligonucleotide
ctagggatatagtacggtttagaaggctgc

SEQ ID NO: 90815 - DNA, 30 bp, Artificial Sequence
  Synthetic oligonucleotide
aatatgctggacaatagattaccaggctgc

SEQ ID NO: 90816 - DNA, 30 bp, Artificial Sequence
  Synthetic oligonucleotide
ttgtgcggcctgtatgaagaaagctgctgc

SEQ ID NO: 90817 - DNA, 30 bp, Artificial Sequence
  Synthetic oligonucleotide
agtggaggcaagggagcgaggctgctctgc

SEQ ID NO: 90818 - DNA, 30 bp, Artificial Sequence
  Synthetic oligonucleotide
gcggaggagcgtgggcatgatgaaaagtgc

SEQ ID NO: 90819 - DNA, 30 bp, Artificial Sequence
  Synthetic oligonucleotide
tatcttacaatcggtgggtcaggaaagtgc

SEQ ID NO: 90820 - DNA, 30 bp, Artificial Sequence
  Synthetic oligonucleotide
tgagagagcaagctttgcctaaggaagtgc

SEQ ID NO: 90821 - DNA, 30 bp, Artificial Sequence
  Synthetic oligonucleotide
cagggtccgtgaggtataacaggacagtgc

SEQ ID NO: 90822 - DNA, 30 bp, Artificial Sequence
  Synthetic oligonucleotide
gggcgcggatataaggcccgcatccagtgc

SEQ ID NO: 90823 - DNA, 30 bp, Artificial Sequence
  Synthetic oligonucleotide
tatatgcatcaggagccatataagcagtgc

SEQ ID NO: 90824 - DNA, 30 bp, Artificial Sequence
  Synthetic oligonucleotide
ggggccgtcataggctgtcgcgaaacgtgc

SEQ ID NO: 90825 - DNA, 30 bp, Artificial Sequence
  Synthetic oligonucleotide
agggagcaggcctacaaagtcacaacgtgc

SEQ ID NO: 90826 - DNA, 30 bp, Artificial Sequence
  Synthetic oligonucleotide
gataaaggggtctggaagagcttcacgtgc

SEQ ID NO: 90827 - DNA, 30 bp, Artificial Sequence
  Synthetic oligonucleotide
gggaatagctccgaacattcctggccgtgc

SEQ ID NO: 90828 - DNA, 30 bp, Artificial Sequence
  Synthetic oligonucleotide
tgactccatatgtatgggcgacctccgtgc

SEQ ID NO: 90829 - DNA, 30 bp, Artificial Sequence
  Synthetic oligonucleotide
aacgaagggccacacttggacacagcgtgc

SEQ ID NO: 90830 - DNA, 30 bp, Artificial Sequence
  Synthetic oligonucleotide
cacaaggcgtccatactgcatggcgcgtgc

SEQ ID NO: 90831 - DNA, 30 bp, Artificial Sequence
  Synthetic oligonucleotide
tctagtgataccactgagattagggcgtgc

SEQ ID NO: 90832 - DNA, 30 bp, Artificial Sequence
  Synthetic oligonucleotide
actgcgtgattgaaaccaccgtgtgcgtgc

SEQ ID NO: 90833 - DNA, 30 bp, Artificial Sequence
  Synthetic oligonucleotide
attagtaaagtcgtattcaacatctcgtgc

SEQ ID NO: 90834 - DNA, 30 bp, Artificial Sequence
  Synthetic oligonucleotide
tcctttaggcggtcagaggcggcttcgtgc

SEQ ID NO: 90835 - DNA, 30 bp, Artificial Sequence
  Synthetic oligonucleotide
cgcgaagggagtgcatgaacgaccaggtgc

SEQ ID NO: 90836 - DNA, 30 bp, Artificial Sequence
  Synthetic oligonucleotide
accgcgatagtccttggaaacctgaggtgc

SEQ ID NO: 90837 - DNA, 30 bp, Artificial Sequence
  Synthetic oligonucleotide
gagttcatttggtgaagattgaaagggtgc

SEQ ID NO: 90838 - DNA, 30 bp, Artificial Sequence
  Synthetic oligonucleotide
ttcctataacgctaagagaaagaggggtgc

SEQ ID NO: 90839 - DNA, 30 bp, Artificial Sequence
  Synthetic oligonucleotide
tgtatgccggaacacatgacatgggggtgc

SEQ ID NO: 90840 - DNA, 30 bp, Artificial Sequence
  Synthetic oligonucleotide
gcaggaaagtagaataaaaatcgtgggtgc

SEQ ID NO: 90841 - DNA, 30 bp, Artificial Sequence
  Synthetic oligonucleotide
atatagaaaccacgacaacacagctggtgc

SEQ ID NO: 90842 - DNA, 30 bp, Artificial Sequence
  Synthetic oligonucleotide
gtgggatggaagagtagtctttcgctgtgc

SEQ ID NO: 90843 - DNA, 31 bp, Artificial Sequence
  Synthetic oligonucleotide
gggtgtggtgggaatgaatctggctctgtgc

SEQ ID NO: 90844 - DNA, 30 bp, Artificial Sequence
  Synthetic oligonucleotide
acatggcggcttatcctggggtagaattgc

SEQ ID NO: 90845 - DNA, 30 bp, Artificial Sequence
  Synthetic oligonucleotide
acctgagccgttagtcagcgagggcattgc

SEQ ID NO: 90846 - DNA, 30 bp, Artificial Sequence
  Synthetic oligonucleotide
atgcaagtattcgagcgaattaggtattgc

SEQ ID NO: 90847 - DNA, 30 bp, Artificial Sequence
  Synthetic oligonucleotide
ctggcctggaaaacatctaaaggttattgc

SEQ ID NO: 90848 - DNA, 30 bp, Artificial Sequence
  Synthetic oligonucleotide
aattataactctgggcaaagggaagcttgc

SEQ ID NO: 90849 - DNA, 30 bp, Artificial Sequence
  Synthetic oligonucleotide
cgatgaggacacagacagtcctacgcttgc

SEQ ID NO: 90850 - DNA, 30 bp, Artificial Sequence
  Synthetic oligonucleotide
aaccgaagggccatagttcataccagttgc

SEQ ID NO: 90851 - DNA, 30 bp, Artificial Sequence
  Synthetic oligonucleotide
aggggttattaccagatattgtctcgttgc

SEQ ID NO: 90852 - DNA, 30 bp, Artificial Sequence
  Synthetic oligonucleotide
atcagtgaaactggatccaatgcaggttgc

SEQ ID NO: 90853 - DNA, 30 bp, Artificial Sequence
  Synthetic oligonucleotide
tgcttgatacgcaagggttgtgacggttgc

SEQ ID NO: 90854 - DNA, 30 bp, Artificial Sequence
  Synthetic oligonucleotide
tcgctagcgagaatgaataactacggttgc

SEQ ID NO: 90855 - DNA, 30 bp, Artificial Sequence
  Synthetic oligonucleotide
cactgggtaacttcaaacaatcagggttgc

SEQ ID NO: 90856 - DNA, 30 bp, Artificial Sequence
  Synthetic oligonucleotide
aagagagcgaagagtgggtaaagttgttgc

SEQ ID NO: 90857 - DNA, 30 bp, Artificial Sequence
  Synthetic oligonucleotide
agcaaactggcgccggatcgcatggtttgc

SEQ ID NO: 90858 - DNA, 30 bp, Artificial Sequence
  Synthetic oligonucleotide
atgcaaacgtgtcggcataaagttaaaatc

SEQ ID NO: 90859 - DNA, 30 bp, Artificial Sequence
  Synthetic oligonucleotide
ggcatgctccacttcaagatacgacaaatc

SEQ ID NO: 90860 - DNA, 30 bp, Artificial Sequence
  Synthetic oligonucleotide
agcttggtctgttatgagggggggcaaatc

SEQ ID NO: 90861 - DNA, 30 bp, Artificial Sequence
  Synthetic oligonucleotide
caaggccgagatatacgactccacgaaatc

SEQ ID NO: 90862 - DNA, 30 bp, Artificial Sequence
  Synthetic oligonucleotide
gcgcccgttatgggacggacatacgaaatc

SEQ ID NO: 90863 - DNA, 30 bp, Artificial Sequence
  Synthetic oligonucleotide
agtgcacgacaaggaaacatggccgaaatc

SEQ ID NO: 90864 - DNA, 30 bp, Artificial Sequence
  Synthetic oligonucleotide
catcgtagttctagatggttcttcgaaatc

SEQ ID NO: 90865 - DNA, 30 bp, Artificial Sequence
  Synthetic oligonucleotide
cgaacaccttcccatgtactatactaaatc

SEQ ID NO: 90866 - DNA, 30 bp, Artificial Sequence
  Synthetic oligonucleotide
gaaggggactggtacctggtcccaacaatc

SEQ ID NO: 90867 - DNA, 30 bp, Artificial Sequence
  Synthetic oligonucleotide
gacgtgccctgacgaaaatctggaacaatc

SEQ ID NO: 90868 - DNA, 30 bp, Artificial Sequence
  Synthetic oligonucleotide
agctgctaacgtgcttactgaaaaccaatc

SEQ ID NO: 90869 - DNA, 30 bp, Artificial Sequence
  Synthetic oligonucleotide
acgcaggtggaaaccgcagtagcaccaatc

SEQ ID NO: 90870 - DNA, 30 bp, Artificial Sequence
  Synthetic oligonucleotide
cagttctgagatacaaattcgaccccaatc

SEQ ID NO: 90871 - DNA, 30 bp, Artificial Sequence
  Synthetic oligonucleotide
cacctacatggtagggcgttaatgccaatc

SEQ ID NO: 90872 - DNA, 30 bp, Artificial Sequence
  Synthetic oligonucleotide
aagtgtcagacttgtgaatacctcgcaatc

SEQ ID NO: 90873 - DNA, 30 bp, Artificial Sequence
  Synthetic oligonucleotide
ccgccaacaacattcctaactgaatcaatc

SEQ ID NO: 90874 - DNA, 30 bp, Artificial Sequence
  Synthetic oligonucleotide
atggccattctggatatgctagggtcaatc

SEQ ID NO: 90875 - DNA, 30 bp, Artificial Sequence
  Synthetic oligonucleotide
aaaggggatggcggcacaatgcagagaatc

SEQ ID NO: 90876 - DNA, 30 bp, Artificial Sequence
  Synthetic oligonucleotide
tcactaagggtcaaagctgcacggagaatc

SEQ ID NO: 90877 - DNA, 30 bp, Artificial Sequence
  Synthetic oligonucleotide
cagatggggtgacattaaatgtctcgaatc

SEQ ID NO: 90878 - DNA, 30 bp, Artificial Sequence
  Synthetic oligonucleotide
ggggttatataatgacagacacgaggaatc

SEQ ID NO: 90879 - DNA, 30 bp, Artificial Sequence
  Synthetic oligonucleotide
aggttagcgtgtctattcgaaataggaatc

SEQ ID NO: 90880 - DNA, 30 bp, Artificial Sequence
  Synthetic oligonucleotide
ccatctgttcgtgaaatggggataggaatc

SEQ ID NO: 90881 - DNA, 30 bp, Artificial Sequence
  Synthetic oligonucleotide
ggttggagcccggcctagcgagagggaatc

SEQ ID NO: 90882 - DNA, 30 bp, Artificial Sequence
  Synthetic oligonucleotide
gctggtagaggaggtcatcagcgtggaatc

SEQ ID NO: 90883 - DNA, 30 bp, Artificial Sequence
  Synthetic oligonucleotide
taaggtcggaagtgcaaaggcgggataatc

SEQ ID NO: 90884 - DNA, 30 bp, Artificial Sequence
  Synthetic oligonucleotide
catgctcacatgaggtaatggccggtaatc

SEQ ID NO: 90885 - DNA, 30 bp, Artificial Sequence
  Synthetic oligonucleotide
tcgttggagagactggatcgggatgtaatc

SEQ ID NO: 90886 - DNA, 30 bp, Artificial Sequence
  Synthetic oligonucleotide
caggtggagacgtggatgtcgctcttaatc

SEQ ID NO: 90887 - DNA, 31 bp, Artificial Sequence
  Synthetic oligonucleotide
aaggataccgggggcgcggtagtacaacatc

SEQ ID NO: 90888 - DNA, 30 bp, Artificial Sequence
  Synthetic oligonucleotide
cacgccagaggtattaggacccaggacatc

SEQ ID NO: 90889 - DNA, 30 bp, Artificial Sequence
  Synthetic oligonucleotide
aacgctgggttgagcacgcttgaggacatc

SEQ ID NO: 90890 - DNA, 30 bp, Artificial Sequence
  Synthetic oligonucleotide
tgttaagagaccaatcaggcccgatacatc

SEQ ID NO: 90891 - DNA, 30 bp, Artificial Sequence
  Synthetic oligonucleotide
agcatcagcgattaaaaagaagcctacatc

SEQ ID NO: 90892 - DNA, 30 bp, Artificial Sequence
  Synthetic oligonucleotide
tccacgtaacacacctgtccgaacaccatc

SEQ ID NO: 90893 - DNA, 30 bp, Artificial Sequence
  Synthetic oligonucleotide
tgtgacagcgacgttcgactaaccaccatc

SEQ ID NO: 90894 - DNA, 30 bp, Artificial Sequence
  Synthetic oligonucleotide
agagagtctcggagggcacagctcaccatc

SEQ ID NO: 90895 - DNA, 30 bp, Artificial Sequence
  Synthetic oligonucleotide
gggtcgaaaaatcaagcggaacaacccatc

SEQ ID NO: 90896 - DNA, 30 bp, Artificial Sequence
  Synthetic oligonucleotide
cgatgcggggtttgtccaagcgaacccatc

SEQ ID NO: 90897 - DNA, 30 bp, Artificial Sequence
  Synthetic oligonucleotide
agaactccagaccttccaacctcacccatc

SEQ ID NO: 90898 - DNA, 30 bp, Artificial Sequence
  Synthetic oligonucleotide
ggataaagctgtctgcgtaactttcccatc

SEQ ID NO: 90899 - DNA, 30 bp, Artificial Sequence
  Synthetic oligonucleotide
acaaccgtgaaggacgctacaagagccatc

SEQ ID NO: 90900 - DNA, 30 bp, Artificial Sequence
  Synthetic oligonucleotide
cggtaccacagttcactcagttgggccatc

SEQ ID NO: 90901 - DNA, 30 bp, Artificial Sequence
  Synthetic oligonucleotide
gcggcccgcattgcaataaagggtgccatc

SEQ ID NO: 90902 - DNA, 30 bp, Artificial Sequence
  Synthetic oligonucleotide
ctggccggcggggtgttgtcgtcatccatc

SEQ ID NO: 90903 - DNA, 30 bp, Artificial Sequence
  Synthetic oligonucleotide
caggcaactacttaaagcggcgtatccatc

SEQ ID NO: 90904 - DNA, 30 bp, Artificial Sequence
  Synthetic oligonucleotide
tacgatgtggagaaacacgaaacgtccatc

SEQ ID NO: 90905 - DNA, 30 bp, Artificial Sequence
  Synthetic oligonucleotide
aggtcccgaggctggactggtgtaagcatc

SEQ ID NO: 90906 - DNA, 30 bp, Artificial Sequence
  Synthetic oligonucleotide
tgaggatatagcaacaataagcccagcatc

SEQ ID NO: 90907 - DNA, 30 bp, Artificial Sequence
  Synthetic oligonucleotide
ggcagacttaaaacaataaagatgcgcatc

SEQ ID NO: 90908 - DNA, 30 bp, Artificial Sequence
  Synthetic oligonucleotide
ccatatggcaacatcgtgttatatcgcatc

SEQ ID NO: 90909 - DNA, 30 bp, Artificial Sequence
  Synthetic oligonucleotide
gtgcaggctgtgttctaggtccatggcatc

SEQ ID NO: 90910 - DNA, 30 bp, Artificial Sequence
  Synthetic oligonucleotide
cctgaaaacagagtatacaatccctgcatc

SEQ ID NO: 90911 - DNA, 30 bp, Artificial Sequence
  Synthetic oligonucleotide
cggtccccatatcagatagcggagtgcatc

SEQ ID NO: 90912 - DNA, 30 bp, Artificial Sequence
  Synthetic oligonucleotide
gcataatggtataacgagaccttcatcatc

SEQ ID NO: 90913 - DNA, 30 bp, Artificial Sequence
  Synthetic oligonucleotide
cacaggcagtagatggcaccaacactcatc

SEQ ID NO: 90914 - DNA, 30 bp, Artificial Sequence
  Synthetic oligonucleotide
aagggctacttggattgatatcgtgtcatc

SEQ ID NO: 90915 - DNA, 30 bp, Artificial Sequence
  Synthetic oligonucleotide
gttccagcgtgggcgataccaaatttcatc

SEQ ID NO: 90916 - DNA, 30 bp, Artificial Sequence
  Synthetic oligonucleotide
ggcacagtccgcccaatcgagacaaagatc

SEQ ID NO: 90917 - DNA, 30 bp, Artificial Sequence
  Synthetic oligonucleotide
aggatcgaggggtttaagctcagcaagatc

SEQ ID NO: 90918 - DNA, 30 bp, Artificial Sequence
  Synthetic oligonucleotide
gacgatcggcaagctatgcactttaagatc

SEQ ID NO: 90919 - DNA, 30 bp, Artificial Sequence
  Synthetic oligonucleotide
cagacagtgtatacaaacgaataacagatc

SEQ ID NO: 90920 - DNA, 30 bp, Artificial Sequence
  Synthetic oligonucleotide
aggaagttgccgatactgaaggcccagatc

SEQ ID NO: 90921 - DNA, 30 bp, Artificial Sequence
  Synthetic oligonucleotide
aggcagactcatacactcgagtctcagatc

SEQ ID NO: 90922 - DNA, 27 bp, Artificial Sequence
  Synthetic oligonucleotide
agcgacgaaggaggttaaggagagatc

SEQ ID NO: 90923 - DNA, 30 bp, Artificial Sequence
  Synthetic oligonucleotide
ctgcctaaattgcttacctggagtgagatc

SEQ ID NO: 90924 - DNA, 30 bp, Artificial Sequence
  Synthetic oligonucleotide
cgtacgatacacgaccccgcgtccacgatc

SEQ ID NO: 90925 - DNA, 31 bp, Artificial Sequence
  Synthetic oligonucleotide
attagccgaaataaactagtaagttacgatc

SEQ ID NO: 90926 - DNA, 30 bp, Artificial Sequence
  Synthetic oligonucleotide
cccgaggcccaaaattttgagacaccgatc

SEQ ID NO: 90927 - DNA, 30 bp, Artificial Sequence
  Synthetic oligonucleotide
caaaacaccgagataccgaatcgaccgatc

SEQ ID NO: 90928 - DNA, 30 bp, Artificial Sequence
  Synthetic oligonucleotide
actttagaggtccgagaaactcgcccgatc

SEQ ID NO: 90929 - DNA, 30 bp, Artificial Sequence
  Synthetic oligonucleotide
ggcggaaagtgtgagacagttagtccgatc

SEQ ID NO: 90930 - DNA, 30 bp, Artificial Sequence
  Synthetic oligonucleotide
agtcgacaaatgtaagtccatatagcgatc

SEQ ID NO: 90931 - DNA, 30 bp, Artificial Sequence
  Synthetic oligonucleotide
gactgtaccatttctaagatcgcctcgatc

SEQ ID NO: 90932 - DNA, 30 bp, Artificial Sequence
  Synthetic oligonucleotide
accgtgaattttagacattgctaaaggatc

SEQ ID NO: 90933 - DNA, 31 bp, Artificial Sequence
  Synthetic oligonucleotide
atatactaaaggaaatgaatagccaaggatc

SEQ ID NO: 90934 - DNA, 30 bp, Artificial Sequence
  Synthetic oligonucleotide
cagatacaggactagacaacaatcaggatc

SEQ ID NO: 90935 - DNA, 30 bp, Artificial Sequence
  Synthetic oligonucleotide
aatggacgtaggtgtgatacgaaccggatc

SEQ ID NO: 90936 - DNA, 30 bp, Artificial Sequence
  Synthetic oligonucleotide
cgttattcacagctctgacttggagggatc

SEQ ID NO: 90937 - DNA, 30 bp, Artificial Sequence
  Synthetic oligonucleotide
ggttaaatatcataagaaatctgagggatc

SEQ ID NO: 90938 - DNA, 30 bp, Artificial Sequence
  Synthetic oligonucleotide
atagaatcgagcccagctgtctatgggatc

SEQ ID NO: 90939 - DNA, 30 bp, Artificial Sequence
  Synthetic oligonucleotide
ccatcaagaagcattgttccgtgtgggatc

SEQ ID NO: 90940 - DNA, 30 bp, Artificial Sequence
  Synthetic oligonucleotide
ataggaatactgacaagaagggggtggatc

SEQ ID NO: 90941 - DNA, 30 bp, Artificial Sequence
  Synthetic oligonucleotide
caatatggggattggtgggtcatgtggatc

SEQ ID NO: 90942 - DNA, 30 bp, Artificial Sequence
  Synthetic oligonucleotide
gtcaagtccgcgagtgagcagggcatgatc

SEQ ID NO: 90943 - DNA, 30 bp, Artificial Sequence
  Synthetic oligonucleotide
gcgtgcaggtgctcgaaggcggatatgatc

SEQ ID NO: 90944 - DNA, 30 bp, Artificial Sequence
  Synthetic oligonucleotide
tcgacgaagaagattacactcgatgtgatc

SEQ ID NO: 90945 - DNA, 30 bp, Artificial Sequence
  Synthetic oligonucleotide
agagatggccggaggcgtcgaaccttgatc

SEQ ID NO: 90946 - DNA, 30 bp, Artificial Sequence
  Synthetic oligonucleotide
cgaggacggacaacaactacggttcatatc

SEQ ID NO: 90947 - DNA, 30 bp, Artificial Sequence
  Synthetic oligonucleotide
tccatgagcaccatcatgacccgagatatc

SEQ ID NO: 90948 - DNA, 30 bp, Artificial Sequence
  Synthetic oligonucleotide
acgatgtcaaggtcttcgtacaccgatatc

SEQ ID NO: 90949 - DNA, 30 bp, Artificial Sequence
  Synthetic oligonucleotide
ccgcaggcgagaatgttgggggtttatatc

SEQ ID NO: 90950 - DNA, 30 bp, Artificial Sequence
  Synthetic oligonucleotide
agtaccgtaagaaacagactgttagctatc

SEQ ID NO: 90951 - DNA, 30 bp, Artificial Sequence
  Synthetic oligonucleotide
caggaaagtgccgtggactaagggagtatc

SEQ ID NO: 90952 - DNA, 30 bp, Artificial Sequence
  Synthetic oligonucleotide
ttgacagatacgttagggatctagggtatc

SEQ ID NO: 90953 - DNA, 30 bp, Artificial Sequence
  Synthetic oligonucleotide
tccgaaagtcgaagttgttccagatgtatc

SEQ ID NO: 90954 - DNA, 30 bp, Artificial Sequence
  Synthetic oligonucleotide
ggaggagatggctcctgatagagttgtatc

SEQ ID NO: 90955 - DNA, 30 bp, Artificial Sequence
  Synthetic oligonucleotide
cgtggcaaatgtgctagtggaagtattatc

SEQ ID NO: 90956 - DNA, 30 bp, Artificial Sequence
  Synthetic oligonucleotide
acgcccgatccatcttctgccgagtttatc

SEQ ID NO: 90957 - DNA, 30 bp, Artificial Sequence
  Synthetic oligonucleotide
atcgaaagttgcgatgcgcctataaaactc

SEQ ID NO: 90958 - DNA, 30 bp, Artificial Sequence
  Synthetic oligonucleotide
actgtagcgcacagaacaaggaccaaactc

SEQ ID NO: 90959 - DNA, 30 bp, Artificial Sequence
  Synthetic oligonucleotide
aagtgaataggatcgggggtattggaactc

SEQ ID NO: 90960 - DNA, 30 bp, Artificial Sequence
  Synthetic oligonucleotide
tcgaaaaatgcaaaaccgggcttctaactc

SEQ ID NO: 90961 - DNA, 30 bp, Artificial Sequence
  Synthetic oligonucleotide
agggtgccctgaagctggcgtggaacactc

SEQ ID NO: 90962 - DNA, 30 bp, Artificial Sequence
  Synthetic oligonucleotide
ggtgcaattgggcgacggcgtttgacactc

SEQ ID NO: 90963 - DNA, 30 bp, Artificial Sequence
  Synthetic oligonucleotide
atgtgtgcttacgatagaatcagagcactc

SEQ ID NO: 90964 - DNA, 30 bp, Artificial Sequence
  Synthetic oligonucleotide
cgtgggcttatcgatgcggctggagcactc

SEQ ID NO: 90965 - DNA, 30 bp, Artificial Sequence
  Synthetic oligonucleotide
aaacaaagtgacggacttatggtcgcactc

SEQ ID NO: 90966 - DNA, 30 bp, Artificial Sequence
  Synthetic oligonucleotide
cttaggcggaaagtggccagaattgcactc

SEQ ID NO: 90967 - DNA, 30 bp, Artificial Sequence
  Synthetic oligonucleotide
gcaaggggatgttactaagtatggtcactc

SEQ ID NO: 90968 - DNA, 30 bp, Artificial Sequence
  Synthetic oligonucleotide
ctctaaggcaagataccgaagataagactc

SEQ ID NO: 90969 - DNA, 30 bp, Artificial Sequence
  Synthetic oligonucleotide
tacggggttatcacattagagaagagactc

SEQ ID NO: 90970 - DNA, 30 bp, Artificial Sequence
  Synthetic oligonucleotide
tcgcagatttgagaatgagggagccgactc

SEQ ID NO: 90971 - DNA, 30 bp, Artificial Sequence
  Synthetic oligonucleotide
cacggtctcgaatcgattatgtgctgactc

SEQ ID NO: 90972 - DNA, 30 bp, Artificial Sequence
  Synthetic oligonucleotide
gcgttctgccaagtgcactccgtgtgactc

SEQ ID NO: 90973 - DNA, 30 bp, Artificial Sequence
  Synthetic oligonucleotide
agaatggaatgagatcccaggtggatactc

SEQ ID NO: 90974 - DNA, 30 bp, Artificial Sequence
  Synthetic oligonucleotide
tccatagaatgtaagcaaatggatatactc

SEQ ID NO: 90975 - DNA, 30 bp, Artificial Sequence
  Synthetic oligonucleotide
tacacagaggcttcatgctgacgactactc

SEQ ID NO: 90976 - DNA, 30 bp, Artificial Sequence
  Synthetic oligonucleotide
cacggagagaaatgcaggcgactggtactc

SEQ ID NO: 90977 - DNA, 30 bp, Artificial Sequence
  Synthetic oligonucleotide
acaatgagaggaacgtaccgagtcttactc

SEQ ID NO: 90978 - DNA, 30 bp, Artificial Sequence
  Synthetic oligonucleotide
gcgaggaggtaacaaaacgagataaacctc

SEQ ID NO: 90979 - DNA, 30 bp, Artificial Sequence
  Synthetic oligonucleotide
acaatgtggtacaattccagttctcacctc

SEQ ID NO: 90980 - DNA, 30 bp, Artificial Sequence
  Synthetic oligonucleotide
taatcaggggcatctgaccaagttaccctc

SEQ ID NO: 90981 - DNA, 30 bp, Artificial Sequence
  Synthetic oligonucleotide
aggtactcgtgtattccgagctaacccctc

SEQ ID NO: 90982 - DNA, 30 bp, Artificial Sequence
  Synthetic oligonucleotide
ccatgtcacaccgcatggttcagaagcctc

SEQ ID NO: 90983 - DNA, 30 bp, Artificial Sequence
  Synthetic oligonucleotide
cgtaggccgaaagctggcatatttagcctc

SEQ ID NO: 90984 - DNA, 30 bp, Artificial Sequence
  Synthetic oligonucleotide
agctgacgaatctgcgcgtatgacggcctc

SEQ ID NO: 90985 - DNA, 30 bp, Artificial Sequence
  Synthetic oligonucleotide
gggcaaaattagaatgttcggaccggcctc

SEQ ID NO: 90986 - DNA, 30 bp, Artificial Sequence
  Synthetic oligonucleotide
gacgaggatacctccaggagacctggcctc

SEQ ID NO: 90987 - DNA, 30 bp, Artificial Sequence
  Synthetic oligonucleotide
gtaccaaaacctcagtcagttgctggcctc

SEQ ID NO: 90988 - DNA, 30 bp, Artificial Sequence
  Synthetic oligonucleotide
gtgtaatggtgaagctgataatgtggcctc

SEQ ID NO: 90989 - DNA, 30 bp, Artificial Sequence
  Synthetic oligonucleotide
aagaggaccagggtaagtaacacattcctc

SEQ ID NO: 90990 - DNA, 30 bp, Artificial Sequence
  Synthetic oligonucleotide
actagaggtagcgtaaggtaaatacagctc

SEQ ID NO: 90991 - DNA, 30 bp, Artificial Sequence
  Synthetic oligonucleotide
ttacagtgcgtattgcttacactccagctc

SEQ ID NO: 90992 - DNA, 30 bp, Artificial Sequence
  Synthetic oligonucleotide
agaacaaacgtgtcggaccacctgcagctc

SEQ ID NO: 90993 - DNA, 30 bp, Artificial Sequence
  Synthetic oligonucleotide
cggccatagtcatatggtatccgtgagctc

SEQ ID NO: 90994 - DNA, 30 bp, Artificial Sequence
  Synthetic oligonucleotide
caactcgggatcagtaatttgttgtagctc

SEQ ID NO: 90995 - DNA, 30 bp, Artificial Sequence
  Synthetic oligonucleotide
acgaaatgggtgtgagatcagacaacgctc

SEQ ID NO: 90996 - DNA, 30 bp, Artificial Sequence
  Synthetic oligonucleotide
agcaaagtcaggcctgaaatcactacgctc

SEQ ID NO: 90997 - DNA, 30 bp, Artificial Sequence
  Synthetic oligonucleotide
tcgtagtacgaatcacatgcgtgaccgctc

SEQ ID NO: 90998 - DNA, 30 bp, Artificial Sequence
  Synthetic oligonucleotide
acggggacgggtttgaacgttttggcgctc

SEQ ID NO: 90999 - DNA, 30 bp, Artificial Sequence
  Synthetic oligonucleotide
aggagaagcaagtaacgtagggggaggctc

SEQ ID NO: 91000 - DNA, 30 bp, Artificial Sequence
  Synthetic oligonucleotide
cctaccggaaacgcatatggacgagggctc

SEQ ID NO: 91001 - DNA, 30 bp, Artificial Sequence
  Synthetic oligonucleotide
ctatgtaaggtaattgaaaatggagggctc

SEQ ID NO: 91002 - DNA, 30 bp, Artificial Sequence
  Synthetic oligonucleotide
actgaaaactcattacctacctttgggctc

SEQ ID NO: 91003 - DNA, 30 bp, Artificial Sequence
  Synthetic oligonucleotide
gcgggatgggggcgccgagagacctggctc

SEQ ID NO: 91004 - DNA, 30 bp, Artificial Sequence
  Synthetic oligonucleotide
gaccacgtgtctgtgcaataagctatgctc

SEQ ID NO: 91005 - DNA, 30 bp, Artificial Sequence
  Synthetic oligonucleotide
gcgtgtcgaatagcgttcgtcaatctgctc

SEQ ID NO: 91006 - DNA, 31 bp, Artificial Sequence
  Synthetic oligonucleotide
gttcacgaggtaatatgcagagggtctgctc

SEQ ID NO: 91007 - DNA, 30 bp, Artificial Sequence
  Synthetic oligonucleotide
aaacacgtacaccgacgtgagatagtgctc

SEQ ID NO: 91008 - DNA, 30 bp, Artificial Sequence
  Synthetic oligonucleotide
tagataggtgcggagaataagcagttgctc

SEQ ID NO: 91009 - DNA, 30 bp, Artificial Sequence
  Synthetic oligonucleotide
ttgacgcggggtaccaaaccggaaaatctc

SEQ ID NO: 91010 - DNA, 30 bp, Artificial Sequence
  Synthetic oligonucleotide
gcgactttctagtccagagttgctcctctc

SEQ ID NO: 91011 - DNA, 30 bp, Artificial Sequence
  Synthetic oligonucleotide
aataaacgccgacttagcgccgatagtctc

SEQ ID NO: 91012 - DNA, 30 bp, Artificial Sequence
  Synthetic oligonucleotide
tcgcactcgttaattgtcttagcacgtctc

SEQ ID NO: 91013 - DNA, 30 bp, Artificial Sequence
  Synthetic oligonucleotide
cctcagagatgtaagcacctttagcgtctc

SEQ ID NO: 91014 - DNA, 30 bp, Artificial Sequence
  Synthetic oligonucleotide
atggctcgaagtgctcaggggccctgtctc

SEQ ID NO: 91015 - DNA, 30 bp, Artificial Sequence
  Synthetic oligonucleotide
aaatgctcccaaggcaaccggaagtgtctc

SEQ ID NO: 91016 - DNA, 30 bp, Artificial Sequence
  Synthetic oligonucleotide
atcggggagtattgggccagattgtgtctc

SEQ ID NO: 91017 - DNA, 30 bp, Artificial Sequence
  Synthetic oligonucleotide
tgctacaaatattgtgcgtgagcttgtctc

SEQ ID NO: 91018 - DNA, 30 bp, Artificial Sequence
  Synthetic oligonucleotide
taatccgagcgagttctagatcccaaagtc

SEQ ID NO: 91019 - DNA, 30 bp, Artificial Sequence
  Synthetic oligonucleotide
acaatattcagaatgtcagggtaacaagtc

SEQ ID NO: 91020 - DNA, 30 bp, Artificial Sequence
  Synthetic oligonucleotide
catctgcgacccctgagggattgtcaagtc

SEQ ID NO: 91021 - DNA, 30 bp, Artificial Sequence
  Synthetic oligonucleotide
tcagttggtcagttagaatcctatgcagtc

SEQ ID NO: 91022 - DNA, 30 bp, Artificial Sequence
  Synthetic oligonucleotide
taatctggagctcaagcgcggagttgagtc

SEQ ID NO: 91023 - DNA, 30 bp, Artificial Sequence
  Synthetic oligonucleotide
cgagtcggggcgcaagaagggtagatagtc

SEQ ID NO: 91024 - DNA, 30 bp, Artificial Sequence
  Synthetic oligonucleotide
cgtaagcgggcagaggagctcagtatagtc

SEQ ID NO: 91025 - DNA, 30 bp, Artificial Sequence
  Synthetic oligonucleotide
catccggccggggtcggctagccgctagtc

SEQ ID NO: 91026 - DNA, 30 bp, Artificial Sequence
  Synthetic oligonucleotide
gggcgggaggatattttctgcaaggtagtc

SEQ ID NO: 91027 - DNA, 30 bp, Artificial Sequence
  Synthetic oligonucleotide
gactagggtggagtcgctaatgtgttagtc

SEQ ID NO: 91028 - DNA, 30 bp, Artificial Sequence
  Synthetic oligonucleotide
gatatgcccaaactgcgcaatgagcacgtc

SEQ ID NO: 91029 - DNA, 30 bp, Artificial Sequence
  Synthetic oligonucleotide
agtcggggaacaaagaggatacggtacgtc

SEQ ID NO: 91030 - DNA, 30 bp, Artificial Sequence
  Synthetic oligonucleotide
taaaataaggcgaatgcaacgggttacgtc

SEQ ID NO: 91031 - DNA, 30 bp, Artificial Sequence
  Synthetic oligonucleotide
gcgttcggccacaaaaaaatccgaaccgtc

SEQ ID NO: 91032 - DNA, 30 bp, Artificial Sequence
  Synthetic oligonucleotide
atcaggattcccatgcaagtgcagaccgtc

SEQ ID NO: 91033 - DNA, 30 bp, Artificial Sequence
  Synthetic oligonucleotide
ggtgaagagactttttctcgaggtaccgtc

SEQ ID NO: 91034 - DNA, 30 bp, Artificial Sequence
  Synthetic oligonucleotide
cggtaaagcgaaggtccacaactccccgtc

SEQ ID NO: 91035 - DNA, 30 bp, Artificial Sequence
  Synthetic oligonucleotide
tcatagatgaggggtacttgtagggccgtc

SEQ ID NO: 91036 - DNA, 30 bp, Artificial Sequence
  Synthetic oligonucleotide
ccgtaatctatcgatttggattctgccgtc

SEQ ID NO: 91037 - DNA, 30 bp, Artificial Sequence
  Synthetic oligonucleotide
cggatacacaagaatggatacgttagcgtc

SEQ ID NO: 91038 - DNA, 30 bp, Artificial Sequence
  Synthetic oligonucleotide
acgattaagccgttacgtccactacgcgtc

SEQ ID NO: 91039 - DNA, 30 bp, Artificial Sequence
  Synthetic oligonucleotide
cctgattgcttacaacacctcgggggcgtc

SEQ ID NO: 91040 - DNA, 30 bp, Artificial Sequence
  Synthetic oligonucleotide
tattggaaaggggtcgaccaatcgtgcgtc

SEQ ID NO: 91041 - DNA, 30 bp, Artificial Sequence
  Synthetic oligonucleotide
aaaaaaattctcacgagcacaagttgcgtc

SEQ ID NO: 91042 - DNA, 30 bp, Artificial Sequence
  Synthetic oligonucleotide
ccggcaagccggaagattacgaaggtcgtc

SEQ ID NO: 91043 - DNA, 30 bp, Artificial Sequence
  Synthetic oligonucleotide
tgctacggtggtaaaagctagggcaaggtc

SEQ ID NO: 91044 - DNA, 30 bp, Artificial Sequence
  Synthetic oligonucleotide
gcagggctaagcacccaaaacgagaaggtc

SEQ ID NO: 91045 - DNA, 30 bp, Artificial Sequence
  Synthetic oligonucleotide
cagcttaaccacacgaggacaacgaaggtc

SEQ ID NO: 91046 - DNA, 30 bp, Artificial Sequence
  Synthetic oligonucleotide
atcaatgagattaggttgggcactgaggtc

SEQ ID NO: 91047 - DNA, 30 bp, Artificial Sequence
  Synthetic oligonucleotide
cagcgagagatataagatgaagtgacggtc

SEQ ID NO: 91048 - DNA, 30 bp, Artificial Sequence
  Synthetic oligonucleotide
tatcggcaggataacccaatagaatcggtc

SEQ ID NO: 91049 - DNA, 30 bp, Artificial Sequence
  Synthetic oligonucleotide
gggaatgcctttgaaaatacagcccgggtc

SEQ ID NO: 91050 - DNA, 30 bp, Artificial Sequence
  Synthetic oligonucleotide
cagaatggagcctcggtcgagtcgcgggtc

SEQ ID NO: 91051 - DNA, 30 bp, Artificial Sequence
  Synthetic oligonucleotide
aggacttgctcgtaatcttaaaaatgggtc

SEQ ID NO: 91052 - DNA, 30 bp, Artificial Sequence
  Synthetic oligonucleotide
ccttggcggggattggaagaagaatgggtc

SEQ ID NO: 91053 - DNA, 30 bp, Artificial Sequence
  Synthetic oligonucleotide
tcattaagtgagataagcgatatcctggtc

SEQ ID NO: 91054 - DNA, 30 bp, Artificial Sequence
  Synthetic oligonucleotide
cgtagggcaaagttggatgttctagtggtc

SEQ ID NO: 91055 - DNA, 30 bp, Artificial Sequence
  Synthetic oligonucleotide
gagaggtttgccaggacagtatgattggtc

SEQ ID NO: 91056 - DNA, 30 bp, Artificial Sequence
  Synthetic oligonucleotide
tgaacataaatcaccttacatcctttggtc

SEQ ID NO: 91057 - DNA, 30 bp, Artificial Sequence
  Synthetic oligonucleotide
gctggacggtctaacgcttcataaaatgtc

SEQ ID NO: 91058 - DNA, 30 bp, Artificial Sequence
  Synthetic oligonucleotide
ggaggtttatcattcgagaaaatagatgtc

SEQ ID NO: 91059 - DNA, 30 bp, Artificial Sequence
  Synthetic oligonucleotide
taccatagacttcccagaggattcgatgtc

SEQ ID NO: 91060 - DNA, 30 bp, Artificial Sequence
  Synthetic oligonucleotide
cgatagctcaaacttatctcgcctgatgtc

SEQ ID NO: 91061 - DNA, 30 bp, Artificial Sequence
  Synthetic oligonucleotide
tcgagtttgggacctggatttcctgatgtc

SEQ ID NO: 91062 - DNA, 30 bp, Artificial Sequence
  Synthetic oligonucleotide
acaaagctaaatgggaaacgggactatgtc

SEQ ID NO: 91063 - DNA, 30 bp, Artificial Sequence
  Synthetic oligonucleotide
cgttactggagaggtgtgccaacgtatgtc

SEQ ID NO: 91064 - DNA, 31 bp, Artificial Sequence
  Synthetic oligonucleotide
agagggaatagatcgggacacctagactgtc

SEQ ID NO: 91065 - DNA, 30 bp, Artificial Sequence
  Synthetic oligonucleotide
gaatacgggtggaagcttgagtagcctgtc

SEQ ID NO: 91066 - DNA, 30 bp, Artificial Sequence
  Synthetic oligonucleotide
ttagcgcacctatgtcaagggaccgctgtc

SEQ ID NO: 91067 - DNA, 30 bp, Artificial Sequence
  Synthetic oligonucleotide
gatcataaactgtggagtgatcgcgctgtc

SEQ ID NO: 91068 - DNA, 30 bp, Artificial Sequence
  Synthetic oligonucleotide
cgtctagaccgaattggggaaaggggtgtc

SEQ ID NO: 91069 - DNA, 30 bp, Artificial Sequence
  Synthetic oligonucleotide
gtgggaaacggggcactgcccgtgggtgtc

SEQ ID NO: 91070 - DNA, 30 bp, Artificial Sequence
  Synthetic oligonucleotide
ccagggtacagttagatccgatgtggtgtc

SEQ ID NO: 91071 - DNA, 30 bp, Artificial Sequence
  Synthetic oligonucleotide
cgccactagatgacatgaaggtgaattgtc

SEQ ID NO: 91072 - DNA, 30 bp, Artificial Sequence
  Synthetic oligonucleotide
gggtcgacctgtaggcttgcgtcgattgtc

SEQ ID NO: 91073 - DNA, 30 bp, Artificial Sequence
  Synthetic oligonucleotide
gtcaccatgtcagtaattaggtcgattgtc

SEQ ID NO: 91074 - DNA, 30 bp, Artificial Sequence
  Synthetic oligonucleotide
gataggggggcatcggtctcaatatttgtc

SEQ ID NO: 91075 - DNA, 30 bp, Artificial Sequence
  Synthetic oligonucleotide
gacgaagggctaaggtaatggctgtttgtc

SEQ ID NO: 91076 - DNA, 30 bp, Artificial Sequence
  Synthetic oligonucleotide
ccgtcggattgttggggataaggttttgtc

SEQ ID NO: 91077 - DNA, 30 bp, Artificial Sequence
  Synthetic oligonucleotide
gaggaaagtgtcggcgataaagagaaattc

SEQ ID NO: 91078 - DNA, 30 bp, Artificial Sequence
  Synthetic oligonucleotide
cgggtcggggaaggttatcccgcgaaattc

SEQ ID NO: 91079 - DNA, 30 bp, Artificial Sequence
  Synthetic oligonucleotide
ccaacgctgaagcacctcatcatccaattc

SEQ ID NO: 91080 - DNA, 30 bp, Artificial Sequence
  Synthetic oligonucleotide
cccgagatagaaggccaaagtccagaattc

SEQ ID NO: 91081 - DNA, 30 bp, Artificial Sequence
  Synthetic oligonucleotide
tactagcttatgcggtgacgtacggaattc

SEQ ID NO: 91082 - DNA, 30 bp, Artificial Sequence
  Synthetic oligonucleotide
aatcacgatcacgtgtgtgacagaccattc

SEQ ID NO: 91083 - DNA, 30 bp, Artificial Sequence
  Synthetic oligonucleotide
agggggagcgggcacgtgacctcagcattc

SEQ ID NO: 91084 - DNA, 30 bp, Artificial Sequence
  Synthetic oligonucleotide
acatctaccggatatacgtccaactcattc

SEQ ID NO: 91085 - DNA, 30 bp, Artificial Sequence
  Synthetic oligonucleotide
taagcaagcgctaagcacgaacttagattc

SEQ ID NO: 91086 - DNA, 30 bp, Artificial Sequence
  Synthetic oligonucleotide
ttggttcagatgcgagagagttgacgattc

SEQ ID NO: 91087 - DNA, 30 bp, Artificial Sequence
  Synthetic oligonucleotide
actgcatgtgtatatgatcgtatccgattc

SEQ ID NO: 91088 - DNA, 30 bp, Artificial Sequence
  Synthetic oligonucleotide
gccttggaaatgcctcgacttaagcgattc

SEQ ID NO: 91089 - DNA, 30 bp, Artificial Sequence
  Synthetic oligonucleotide
tcggttgtatgggcaacagtacgaggattc

SEQ ID NO: 91090 - DNA, 30 bp, Artificial Sequence
  Synthetic oligonucleotide
cgccaggtaactaccaactatcagggattc

SEQ ID NO: 91091 - DNA, 30 bp, Artificial Sequence
  Synthetic oligonucleotide
cggcattgcgatagtgtgaaaattatattc

SEQ ID NO: 91092 - DNA, 30 bp, Artificial Sequence
  Synthetic oligonucleotide
agtggccccatcgcttcgcaccgactattc

SEQ ID NO: 91093 - DNA, 30 bp, Artificial Sequence
  Synthetic oligonucleotide
actgggggcaccttgtcgtatgtggtattc

SEQ ID NO: 91094 - DNA, 30 bp, Artificial Sequence
  Synthetic oligonucleotide
cataaaccatggaagcgggtagtaaacttc

SEQ ID NO: 91095 - DNA, 30 bp, Artificial Sequence
  Synthetic oligonucleotide
agcaccattaggcgcatagtacaagacttc

SEQ ID NO: 91096 - DNA, 30 bp, Artificial Sequence
  Synthetic oligonucleotide
agtgggagctccatgtacgacgcatacttc

SEQ ID NO: 91097 - DNA, 30 bp, Artificial Sequence
  Synthetic oligonucleotide
gtaaaaagcggggaaaacatggcctccttc

SEQ ID NO: 91098 - DNA, 30 bp, Artificial Sequence
  Synthetic oligonucleotide
acgagagcagacaatatagaagcaagcttc

SEQ ID NO: 91099 - DNA, 30 bp, Artificial Sequence
  Synthetic oligonucleotide
aggcgggcggcttgatgatgtataagcttc

SEQ ID NO: 91100 - DNA, 30 bp, Artificial Sequence
  Synthetic oligonucleotide
atcggtttaacaacacctagatcaggcttc

SEQ ID NO: 91101 - DNA, 30 bp, Artificial Sequence
  Synthetic oligonucleotide
tgtagtactaaaaagtacggggtgggcttc

SEQ ID NO: 91102 - DNA, 30 bp, Artificial Sequence
  Synthetic oligonucleotide
aacccgcaaacaagggagaagcaaatcttc

SEQ ID NO: 91103 - DNA, 30 bp, Artificial Sequence
  Synthetic oligonucleotide
aacagggcgcgcgtggcgtcagggatcttc

SEQ ID NO: 91104 - DNA, 30 bp, Artificial Sequence
  Synthetic oligonucleotide
atcgagcgtgaacagctacgacgtctcttc

SEQ ID NO: 91105 - DNA, 30 bp, Artificial Sequence
  Synthetic oligonucleotide
tagcgtgtgttctagggcgcgagagtcttc

SEQ ID NO: 91106 - DNA, 30 bp, Artificial Sequence
  Synthetic oligonucleotide
tgtagggcaatggtgtgattgatagtcttc

SEQ ID NO: 91107 - DNA, 30 bp, Artificial Sequence
  Synthetic oligonucleotide
ctcactgcgaaagagcacggaaccttcttc

SEQ ID NO: 91108 - DNA, 30 bp, Artificial Sequence
  Synthetic oligonucleotide
tgggcggtgaatcattctgagaacaagttc

SEQ ID NO: 91109 - DNA, 30 bp, Artificial Sequence
  Synthetic oligonucleotide
ccgaggcgtgaattatcctaagtccagttc

SEQ ID NO: 91110 - DNA, 30 bp, Artificial Sequence
  Synthetic oligonucleotide
ctaacaaatccggaactgtgagagcagttc

SEQ ID NO: 91111 - DNA, 30 bp, Artificial Sequence
  Synthetic oligonucleotide
atagcaaatgaatgaccagtggacgagttc

SEQ ID NO: 91112 - DNA, 30 bp, Artificial Sequence
  Synthetic oligonucleotide
tgagggtaatgcgtttagtcacccgagttc

SEQ ID NO: 91113 - DNA, 30 bp, Artificial Sequence
  Synthetic oligonucleotide
gaggatgagcggataccagagttcgagttc

SEQ ID NO: 91114 - DNA, 30 bp, Artificial Sequence
  Synthetic oligonucleotide
cggggagttcaagaggataccaaagcgttc

SEQ ID NO: 91115 - DNA, 30 bp, Artificial Sequence
  Synthetic oligonucleotide
ctaaacgaccatccatcttaagtctcgttc

SEQ ID NO: 91116 - DNA, 30 bp, Artificial Sequence
  Synthetic oligonucleotide
ctagctaagacttgtaaacgtttgtcgttc

SEQ ID NO: 91117 - DNA, 30 bp, Artificial Sequence
  Synthetic oligonucleotide
acaataacataaaggtcgttaaaaaggttc

SEQ ID NO: 91118 - DNA, 30 bp, Artificial Sequence
  Synthetic oligonucleotide
agatggactagcaattgcgcacgaaggttc

SEQ ID NO: 91119 - DNA, 30 bp, Artificial Sequence
  Synthetic oligonucleotide
acatgattaagaggctgggatcacaggttc

SEQ ID NO: 91120 - DNA, 30 bp, Artificial Sequence
  Synthetic oligonucleotide
taacgaagcatgccagaggtggtacggttc

SEQ ID NO: 91121 - DNA, 30 bp, Artificial Sequence
  Synthetic oligonucleotide
gacgttacagcggagaataatgaagggttc

SEQ ID NO: 91122 - DNA, 30 bp, Artificial Sequence
  Synthetic oligonucleotide
tcgggcaaagcccaaaggacgtgtatgttc

SEQ ID NO: 91123 - DNA, 30 bp, Artificial Sequence
  Synthetic oligonucleotide
ttgaaagcaagctcagggactaacctgttc

SEQ ID NO: 91124 - DNA, 30 bp, Artificial Sequence
  Synthetic oligonucleotide
actgatcggtaagcatcgacacgtctgttc

SEQ ID NO: 91125 - DNA, 30 bp, Artificial Sequence
  Synthetic oligonucleotide
gacgtggaggtcgggaatttcacggtgttc

SEQ ID NO: 91126 - DNA, 30 bp, Artificial Sequence
  Synthetic oligonucleotide
attggagtcgtcagcccgggcatggtgttc

SEQ ID NO: 91127 - DNA, 30 bp, Artificial Sequence
  Synthetic oligonucleotide
gggccgaaatatttaaactagcaattgttc

SEQ ID NO: 91128 - DNA, 30 bp, Artificial Sequence
  Synthetic oligonucleotide
tcagagtttgagtgcgtaagaacattgttc

SEQ ID NO: 91129 - DNA, 30 bp, Artificial Sequence
  Synthetic oligonucleotide
tgacggggagccgcgttgaaccgattgttc

SEQ ID NO: 91130 - DNA, 30 bp, Artificial Sequence
  Synthetic oligonucleotide
cgtcggacgctggtacgccccctgtatttc

SEQ ID NO: 91131 - DNA, 30 bp, Artificial Sequence
  Synthetic oligonucleotide
caggacgcggtcatttaagtaagcactttc

SEQ ID NO: 91132 - DNA, 30 bp, Artificial Sequence
  Synthetic oligonucleotide
gggttaggcgtgccatggaacagtcctttc

SEQ ID NO: 91133 - DNA, 30 bp, Artificial Sequence
  Synthetic oligonucleotide
tgatcgccatcgctaaggcgcccgagtttc

SEQ ID NO: 91134 - DNA, 30 bp, Artificial Sequence
  Synthetic oligonucleotide
cgttctaaatgggctggaatggctagtttc

SEQ ID NO: 91135 - DNA, 30 bp, Artificial Sequence
  Synthetic oligonucleotide
acttctaggtgggaaaccatatcccgtttc

SEQ ID NO: 91136 - DNA, 30 bp, Artificial Sequence
  Synthetic oligonucleotide
agactatcctcccaagcatcgagaggtttc

SEQ ID NO: 91137 - DNA, 30 bp, Artificial Sequence
  Synthetic oligonucleotide
tcaaacccgggaatggaagtctgaattttc

SEQ ID NO: 91138 - DNA, 30 bp, Artificial Sequence
  Synthetic oligonucleotide
ccttttaatgatttgccgtgtacaaaaaag

SEQ ID NO: 91139 - DNA, 30 bp, Artificial Sequence
  Synthetic oligonucleotide
gatctggactgccggaaatcgcgcaaaaag

SEQ ID NO: 91140 - DNA, 30 bp, Artificial Sequence
  Synthetic oligonucleotide
gcccaagtctcccccaagcgaaagaaaaag

SEQ ID NO: 91141 - DNA, 30 bp, Artificial Sequence
  Synthetic oligonucleotide
gacacagaataatcgttactcctgaaaaag

SEQ ID NO: 91142 - DNA, 30 bp, Artificial Sequence
  Synthetic oligonucleotide
gctaaaggcagcccattgactaataaaaag

SEQ ID NO: 91143 - DNA, 30 bp, Artificial Sequence
  Synthetic oligonucleotide
gccgtgtggcggtctgaggaatttaaaaag

SEQ ID NO: 91144 - DNA, 30 bp, Artificial Sequence
  Synthetic oligonucleotide
acgtatgcaatagtaccccttggacaaaag

SEQ ID NO: 91145 - DNA, 30 bp, Artificial Sequence
  Synthetic oligonucleotide
tttttaaaaggaggaaggcaagcccaaaag

SEQ ID NO: 91146 - DNA, 30 bp, Artificial Sequence
  Synthetic oligonucleotide
tgtggctatgcgccgtgacagggggaaaag

SEQ ID NO: 91147 - DNA, 30 bp, Artificial Sequence
  Synthetic oligonucleotide
gttgtattggtcacagatggtcgtgaaaag

SEQ ID NO: 91148 - DNA, 30 bp, Artificial Sequence
  Synthetic oligonucleotide
aaacgggttgagaaatccgtcggtgaaaag

SEQ ID NO: 91149 - DNA, 30 bp, Artificial Sequence
  Synthetic oligonucleotide
agacaaacggcacttctcgcgccataaaag

SEQ ID NO: 91150 - DNA, 30 bp, Artificial Sequence
  Synthetic oligonucleotide
ggagtgagaataaccgacagaaactaaaag

SEQ ID NO: 91151 - DNA, 30 bp, Artificial Sequence
  Synthetic oligonucleotide
ggatgtctaagtttaaacccatactaaaag

SEQ ID NO: 91152 - DNA, 30 bp, Artificial Sequence
  Synthetic oligonucleotide
cattaagagtctctacatttacgctaaaag

SEQ ID NO: 91153 - DNA, 30 bp, Artificial Sequence
  Synthetic oligonucleotide
catagaaatgtacttgagaacgtctaaaag

SEQ ID NO: 91154 - DNA, 31 bp, Artificial Sequence
  Synthetic oligonucleotide
gtactaaacggtgttgcctagagaaacaaag

SEQ ID NO: 91155 - DNA, 30 bp, Artificial Sequence
  Synthetic oligonucleotide
tacatgattcacgttctcagactaacaaag

SEQ ID NO: 91156 - DNA, 30 bp, Artificial Sequence
  Synthetic oligonucleotide
tgccaagtaagtatcggcagaaccacaaag

SEQ ID NO: 91157 - DNA, 30 bp, Artificial Sequence
  Synthetic oligonucleotide
ttacgatgtcatgatgcgactgctacaaag

SEQ ID NO: 91158 - DNA, 31 bp, Artificial Sequence
  Synthetic oligonucleotide
agggtggttcaattataatcatacaccaaag

SEQ ID NO: 91159 - DNA, 30 bp, Artificial Sequence
  Synthetic oligonucleotide
gatcgacccatgggggaagtccaagcaaag

SEQ ID NO: 91160 - DNA, 30 bp, Artificial Sequence
  Synthetic oligonucleotide
cagagacagaaaagaacaactagcgcaaag

SEQ ID NO: 91161 - DNA, 30 bp, Artificial Sequence
  Synthetic oligonucleotide
tactctgagtttgataaaagggtcgcaaag

SEQ ID NO: 91162 - DNA, 30 bp, Artificial Sequence
  Synthetic oligonucleotide
tagaaaaaaccggacttggtgatggcaaag

SEQ ID NO: 91163 - DNA, 30 bp, Artificial Sequence
  Synthetic oligonucleotide
ataagagcggagcgttgcaagactgcaaag

SEQ ID NO: 91164 - DNA, 30 bp, Artificial Sequence
  Synthetic oligonucleotide
ttgaaagtggggttttacccggaatcaaag

SEQ ID NO: 91165 - DNA, 30 bp, Artificial Sequence
  Synthetic oligonucleotide
tcgctatgcatccttaattcagcatcaaag

SEQ ID NO: 91166 - DNA, 30 bp, Artificial Sequence
  Synthetic oligonucleotide
gactcggactggtcaaacgagaactcaaag

SEQ ID NO: 91167 - DNA, 30 bp, Artificial Sequence
  Synthetic oligonucleotide
taagaaagcatgcggcattactcctcaaag

SEQ ID NO: 91168 - DNA, 30 bp, Artificial Sequence
  Synthetic oligonucleotide
acgtatatgtgtacctagtcgttctcaaag

SEQ ID NO: 91169 - DNA, 30 bp, Artificial Sequence
  Synthetic oligonucleotide
acggacgtttggggaacgtccttgtcaaag

SEQ ID NO: 91170 - DNA, 30 bp, Artificial Sequence
  Synthetic oligonucleotide
tactcaggcactataacggctaagagaaag

SEQ ID NO: 91171 - DNA, 30 bp, Artificial Sequence
  Synthetic oligonucleotide
acttgaagtacagccagtctgcggagaaag

SEQ ID NO: 91172 - DNA, 30 bp, Artificial Sequence
  Synthetic oligonucleotide
aaagaaggtcattcttcggaggctagaaag

SEQ ID NO: 91173 - DNA, 30 bp, Artificial Sequence
  Synthetic oligonucleotide
atcgggtagcgaatatattaaaaccgaaag

SEQ ID NO: 91174 - DNA, 30 bp, Artificial Sequence
  Synthetic oligonucleotide
tgtgcgaaatcaaaagtagcgacccgaaag

SEQ ID NO: 91175 - DNA, 30 bp, Artificial Sequence
  Synthetic oligonucleotide
ccacgaacctggacaaaccccccgcgaaag

SEQ ID NO: 91176 - DNA, 30 bp, Artificial Sequence
  Synthetic oligonucleotide
gtgctgggaggggagacccaatgtcgaaag

SEQ ID NO: 91177 - DNA, 30 bp, Artificial Sequence
  Synthetic oligonucleotide
cacaggctcacaggactaggttgtcgaaag

SEQ ID NO: 91178 - DNA, 30 bp, Artificial Sequence
  Synthetic oligonucleotide
cagagacataaaagctagtcctttcgaaag

SEQ ID NO: 91179 - DNA, 30 bp, Artificial Sequence
  Synthetic oligonucleotide
ttagtggagggacaaattgatacgggaaag

SEQ ID NO: 91180 - DNA, 30 bp, Artificial Sequence
  Synthetic oligonucleotide
gtaccactcatgatcattatgttgggaaag

SEQ ID NO: 91181 - DNA, 30 bp, Artificial Sequence
  Synthetic oligonucleotide
cttaacagagaagacgaccagcatggaaag

SEQ ID NO: 91182 - DNA, 30 bp, Artificial Sequence
  Synthetic oligonucleotide
gctgcgtaaaatatgagagctactggaaag

SEQ ID NO: 91183 - DNA, 30 bp, Artificial Sequence
  Synthetic oligonucleotide
cctcgcgtgcgacaaattttaggtggaaag

SEQ ID NO: 91184 - DNA, 30 bp, Artificial Sequence
  Synthetic oligonucleotide
cattaccctgctatgccttgctactgaaag

SEQ ID NO: 91185 - DNA, 30 bp, Artificial Sequence
  Synthetic oligonucleotide
taattgcgagagaaatgagatctgtgaaag

SEQ ID NO: 91186 - DNA, 30 bp, Artificial Sequence
  Synthetic oligonucleotide
aagtcagaagcgaagtttattcgttgaaag

SEQ ID NO: 91187 - DNA, 30 bp, Artificial Sequence
  Synthetic oligonucleotide
cgacgagccacccgcgttgaagaaataaag

SEQ ID NO: 91188 - DNA, 30 bp, Artificial Sequence
  Synthetic oligonucleotide
taactcggccggaaacgcgggctcataaag

SEQ ID NO: 91189 - DNA, 30 bp, Artificial Sequence
  Synthetic oligonucleotide
tcatgccgatctggattcagctttataaag

SEQ ID NO: 91190 - DNA, 30 bp, Artificial Sequence
  Synthetic oligonucleotide
ttgaaaaatgaagttaggggcagactaaag

SEQ ID NO: 91191 - DNA, 30 bp, Artificial Sequence
  Synthetic oligonucleotide
gtacgccttaaaagggcaacgagcctaaag

SEQ ID NO: 91192 - DNA, 30 bp, Artificial Sequence
  Synthetic oligonucleotide
gggctataacgtacccgaacgcgtctaaag

SEQ ID NO: 91193 - DNA, 30 bp, Artificial Sequence
  Synthetic oligonucleotide
taccggatgaggtcagaggagtaagtaaag

SEQ ID NO: 91194 - DNA, 30 bp, Artificial Sequence
  Synthetic oligonucleotide
tgctcgtccaggttccctaagggagtaaag

SEQ ID NO: 91195 - DNA, 31 bp, Artificial Sequence
  Synthetic oligonucleotide
tcggcagctagtatgaaatacccgcgtaaag

SEQ ID NO: 91196 - DNA, 30 bp, Artificial Sequence
  Synthetic oligonucleotide
cctaaaatagtggatgccctctagttaaag

SEQ ID NO: 91197 - DNA, 30 bp, Artificial Sequence
  Synthetic oligonucleotide
agtttctcatacgttcagaacgatttaaag

SEQ ID NO: 91198 - DNA, 30 bp, Artificial Sequence
  Synthetic oligonucleotide
aacgttacccgatataggggtagcaacaag

SEQ ID NO: 91199 - DNA, 30 bp, Artificial Sequence
  Synthetic oligonucleotide
cttcctggaaggggctcccgtggtaacaag

SEQ ID NO: 91200 - DNA, 30 bp, Artificial Sequence
  Synthetic oligonucleotide
caagaattcgaggggcagactcaccacaag

SEQ ID NO: 91201 - DNA, 30 bp, Artificial Sequence
  Synthetic oligonucleotide
agttccacatcgagcgtaaagctcgacaag

SEQ ID NO: 91202 - DNA, 30 bp, Artificial Sequence
  Synthetic oligonucleotide
aaatgcgaggggagggcaacatgggacaag

SEQ ID NO: 91203 - DNA, 30 bp, Artificial Sequence
  Synthetic oligonucleotide
cacgacccgagcacgtcgcaaggatacaag

SEQ ID NO: 91204 - DNA, 30 bp, Artificial Sequence
  Synthetic oligonucleotide
tatgcgatgccaaagggacggttatacaag

SEQ ID NO: 91205 - DNA, 30 bp, Artificial Sequence
  Synthetic oligonucleotide
taattaattcgtgatcatcaaagttacaag

SEQ ID NO: 91206 - DNA, 30 bp, Artificial Sequence
  Synthetic oligonucleotide
cttagtgagggagacggctcctccaccaag

SEQ ID NO: 91207 - DNA, 30 bp, Artificial Sequence
  Synthetic oligonucleotide
aggctattttgaatggttcccggtaccaag

SEQ ID NO: 91208 - DNA, 31 bp, Artificial Sequence
  Synthetic oligonucleotide
agtcgtccattcagagcacttagagcccaag

SEQ ID NO: 91209 - DNA, 30 bp, Artificial Sequence
  Synthetic oligonucleotide
ctgctaataggtcctccaaaggggcccaag

SEQ ID NO: 91210 - DNA, 30 bp, Artificial Sequence
  Synthetic oligonucleotide
caatcgaacggatcctacgacagtcccaag

SEQ ID NO: 91211 - DNA, 30 bp, Artificial Sequence
  Synthetic oligonucleotide
tgtgtctaatgatatccgataagagccaag

SEQ ID NO: 91212 - DNA, 30 bp, Artificial Sequence
  Synthetic oligonucleotide
ctgtgtcttcgatgcatcgaacgagccaag

SEQ ID NO: 91213 - DNA, 30 bp, Artificial Sequence
  Synthetic oligonucleotide
taagaggacactccgtactcgaaggccaag

SEQ ID NO: 91214 - DNA, 30 bp, Artificial Sequence
  Synthetic oligonucleotide
gtaaaagccgggtaggaatgtatggccaag

SEQ ID NO: 91215 - DNA, 30 bp, Artificial Sequence
  Synthetic oligonucleotide
gacgtggataattacgattactctgccaag

SEQ ID NO: 91216 - DNA, 30 bp, Artificial Sequence
  Synthetic oligonucleotide
tcgattagtgaaatggcagtcgggtccaag

SEQ ID NO: 91217 - DNA, 30 bp, Artificial Sequence
  Synthetic oligonucleotide
gtattgaaacggttgaattggcttagcaag

SEQ ID NO: 91218 - DNA, 30 bp, Artificial Sequence
  Synthetic oligonucleotide
ccgggtagatcaatcatatcgcgccgcaag

SEQ ID NO: 91219 - DNA, 30 bp, Artificial Sequence
  Synthetic oligonucleotide
gcgtattaaagttattatggatttcgcaag

SEQ ID NO: 91220 - DNA, 30 bp, Artificial Sequence
  Synthetic oligonucleotide
cgacacgtattcaaaagcacaatgtgcaag

SEQ ID NO: 91221 - DNA, 30 bp, Artificial Sequence
  Synthetic oligonucleotide
ggaaaagggtcaaaggctagggcaatcaag

SEQ ID NO: 91222 - DNA, 30 bp, Artificial Sequence
  Synthetic oligonucleotide
cccaggcatagcgggggcacgagaatcaag

SEQ ID NO: 91223 - DNA, 30 bp, Artificial Sequence
  Synthetic oligonucleotide
ccaagggaggtcgagatcttcttaatcaag

SEQ ID NO: 91224 - DNA, 30 bp, Artificial Sequence
  Synthetic oligonucleotide
gaggacaaaaaacctgacacttacatcaag

SEQ ID NO: 91225 - DNA, 30 bp, Artificial Sequence
  Synthetic oligonucleotide
gggactcacttataagggacaatgatcaag

SEQ ID NO: 91226 - DNA, 30 bp, Artificial Sequence
  Synthetic oligonucleotide
gatccctccacgatgggcggatggctcaag

SEQ ID NO: 91227 - DNA, 30 bp, Artificial Sequence
  Synthetic oligonucleotide
tttggccaaactagagaacgggcggtcaag

SEQ ID NO: 91228 - DNA, 30 bp, Artificial Sequence
  Synthetic oligonucleotide
taggactggatatatggtcagctggtcaag

SEQ ID NO: 91229 - DNA, 30 bp, Artificial Sequence
  Synthetic oligonucleotide
gtaagatcgaagggctttgcccatgtcaag

SEQ ID NO: 91230 - DNA, 30 bp, Artificial Sequence
  Synthetic oligonucleotide
gacacatacattgtgacatatacattcaag

SEQ ID NO: 91231 - DNA, 30 bp, Artificial Sequence
  Synthetic oligonucleotide
cctcgaaatcaaggcgggtggacaaagaag

SEQ ID NO: 91232 - DNA, 30 bp, Artificial Sequence
  Synthetic oligonucleotide
gtcagggattgtaaaactgcatgcaagaag

SEQ ID NO: 91233 - DNA, 30 bp, Artificial Sequence
  Synthetic oligonucleotide
gagctacgagatagttcacggacgaagaag

SEQ ID NO: 91234 - DNA, 30 bp, Artificial Sequence
  Synthetic oligonucleotide
atgtggcgaagtcggtatgcccaacagaag

SEQ ID NO: 91235 - DNA, 30 bp, Artificial Sequence
  Synthetic oligonucleotide
agaggggagttccatgcacgggaccagaag

SEQ ID NO: 91236 - DNA, 30 bp, Artificial Sequence
  Synthetic oligonucleotide
gggtgcgtaccttgtaacactccccagaag

SEQ ID NO: 91237 - DNA, 30 bp, Artificial Sequence
  Synthetic oligonucleotide
tgtgagggggggaggtagtacgagcagaag

SEQ ID NO: 91238 - DNA, 30 bp, Artificial Sequence
  Synthetic oligonucleotide
aagactgatgtcagaaagatattgcagaag

SEQ ID NO: 91239 - DNA, 30 bp, Artificial Sequence
  Synthetic oligonucleotide
catgcctttcacgcaaatgcgttgcagaag

SEQ ID NO: 91240 - DNA, 30 bp, Artificial Sequence
  Synthetic oligonucleotide
ctagacaaggtgacctcacacagtcagaag

SEQ ID NO: 91241 - DNA, 30 bp, Artificial Sequence
  Synthetic oligonucleotide
cgacaccgagaggataacccgctcgagaag

SEQ ID NO: 91242 - DNA, 30 bp, Artificial Sequence
  Synthetic oligonucleotide
atgtcggggtcgaccgtttttcgggagaag

SEQ ID NO: 91243 - DNA, 30 bp, Artificial Sequence
  Synthetic oligonucleotide
gcgtcccgatcacaatgcgaggtggagaag

SEQ ID NO: 91244 - DNA, 30 bp, Artificial Sequence
  Synthetic oligonucleotide
attgactgggccaagcaaattcgtgagaag

SEQ ID NO: 91245 - DNA, 30 bp, Artificial Sequence
  Synthetic oligonucleotide
ttgcctggaggaatcaggtagcttgagaag

SEQ ID NO: 91246 - DNA, 30 bp, Artificial Sequence
  Synthetic oligonucleotide
aagctagcggtttaacggtagtaatagaag

SEQ ID NO: 91247 - DNA, 27 bp, Artificial Sequence
  Synthetic oligonucleotide
tcgccaatctgtcctggtcaaacgaag

SEQ ID NO: 91248 - DNA, 30 bp, Artificial Sequence
  Synthetic oligonucleotide
cactgggactatccgatataggaaacgaag

SEQ ID NO: 91249 - DNA, 30 bp, Artificial Sequence
  Synthetic oligonucleotide
gatctagccggaaaaatcggtcacacgaag

SEQ ID NO: 91250 - DNA, 30 bp, Artificial Sequence
  Synthetic oligonucleotide
acagttacaggctaaattaggatcacgaag

SEQ ID NO: 91251 - DNA, 30 bp, Artificial Sequence
  Synthetic oligonucleotide
cagagcggtgtccgaattaaagaaccgaag

SEQ ID NO: 91252 - DNA, 30 bp, Artificial Sequence
  Synthetic oligonucleotide
cacgtaggtctgttcgaccagcaagcgaag

SEQ ID NO: 91253 - DNA, 31 bp, Artificial Sequence
  Synthetic oligonucleotide
acgtcgtctgtggcaccaaagatgagcgaag

SEQ ID NO: 91254 - DNA, 30 bp, Artificial Sequence
  Synthetic oligonucleotide
ctcataccggtagcgggccttagcgcgaag

SEQ ID NO: 91255 - DNA, 30 bp, Artificial Sequence
  Synthetic oligonucleotide
ggtcatagccgggatcggaaattggcgaag

SEQ ID NO: 91256 - DNA, 30 bp, Artificial Sequence
  Synthetic oligonucleotide
tagaaccgcgtgcctccgcgcctctcgaag

SEQ ID NO: 91257 - DNA, 30 bp, Artificial Sequence
  Synthetic oligonucleotide
cctagtcctcatataaggacctattcgaag

SEQ ID NO: 91258 - DNA, 30 bp, Artificial Sequence
  Synthetic oligonucleotide
acacttaatgttataattcaaacaaggaag

SEQ ID NO: 91259 - DNA, 30 bp, Artificial Sequence
  Synthetic oligonucleotide
tgaggataaaggggggccgcccgaaggaag

SEQ ID NO: 91260 - DNA, 30 bp, Artificial Sequence
  Synthetic oligonucleotide
gactaggggcattagttctaatgcaggaag

SEQ ID NO: 91261 - DNA, 30 bp, Artificial Sequence
  Synthetic oligonucleotide
tggactggcggtcacgcccgggagaggaag

SEQ ID NO: 91262 - DNA, 30 bp, Artificial Sequence
  Synthetic oligonucleotide
gtacgggggtatactcaaggtgagaggaag

SEQ ID NO: 91263 - DNA, 30 bp, Artificial Sequence
  Synthetic oligonucleotide
gtcagtggaagagccctcagggaccggaag

SEQ ID NO: 91264 - DNA, 30 bp, Artificial Sequence
  Synthetic oligonucleotide
atccgattaaagctctgaacgagtcggaag

SEQ ID NO: 91265 - DNA, 30 bp, Artificial Sequence
  Synthetic oligonucleotide
aaccggcgcagttaacaggtcgttcggaag

SEQ ID NO: 91266 - DNA, 30 bp, Artificial Sequence
  Synthetic oligonucleotide
atagggtgcgtcgatatgcgcccagggaag

SEQ ID NO: 91267 - DNA, 30 bp, Artificial Sequence
  Synthetic oligonucleotide
aggtgatacctactataaaatgcatggaag

SEQ ID NO: 91268 - DNA, 30 bp, Artificial Sequence
  Synthetic oligonucleotide
tccccagctggtatgatgtgtctatggaag

SEQ ID NO: 91269 - DNA, 30 bp, Artificial Sequence
  Synthetic oligonucleotide
tggtggcggggtgatcggatatggtggaag

SEQ ID NO: 91270 - DNA, 30 bp, Artificial Sequence
  Synthetic oligonucleotide
aagagccgtagtcttggtaaactttggaag

SEQ ID NO: 91271 - DNA, 30 bp, Artificial Sequence
  Synthetic oligonucleotide
ctacgcccagaatgttcgggaaagatgaag

SEQ ID NO: 91272 - DNA, 30 bp, Artificial Sequence
  Synthetic oligonucleotide
tgccgctgtcacacgagtcgggccctgaag

SEQ ID NO: 91273 - DNA, 31 bp, Artificial Sequence
  Synthetic oligonucleotide
aggcggggacgcaaagatggggtagctgaag

SEQ ID NO: 91274 - DNA, 30 bp, Artificial Sequence
  Synthetic oligonucleotide
gaccagcgccataaaaatgaattgctgaag

SEQ ID NO: 91275 - DNA, 30 bp, Artificial Sequence
  Synthetic oligonucleotide
gtagggataccctgatccacatatgtgaag

SEQ ID NO: 91276 - DNA, 30 bp, Artificial Sequence
  Synthetic oligonucleotide
ctaagaagtcaacagccttagagattgaag

SEQ ID NO: 91277 - DNA, 30 bp, Artificial Sequence
  Synthetic oligonucleotide
ttaagcggacgctgtgtcagtccaaataag

SEQ ID NO: 91278 - DNA, 30 bp, Artificial Sequence
  Synthetic oligonucleotide
ccgtagccgtcacaacattcgtgcaataag

SEQ ID NO: 91279 - DNA, 30 bp, Artificial Sequence
  Synthetic oligonucleotide
gcacaagtcgaacgggcttaatataataag

SEQ ID NO: 91280 - DNA, 30 bp, Artificial Sequence
  Synthetic oligonucleotide
gcatgtccccgaaaggcgactattaataag

SEQ ID NO: 91281 - DNA, 30 bp, Artificial Sequence
  Synthetic oligonucleotide
atctgcaaggggcagctaccgcgacataag

SEQ ID NO: 91282 - DNA, 30 bp, Artificial Sequence
  Synthetic oligonucleotide
ctgctttggaaacatgtgtgcatacataag

SEQ ID NO: 91283 - DNA, 30 bp, Artificial Sequence
  Synthetic oligonucleotide
ctactcgatcggaagaccttgatgcataag

SEQ ID NO: 91284 - DNA, 30 bp, Artificial Sequence
  Synthetic oligonucleotide
cgaagggtacatctttcttacaaaactaag

SEQ ID NO: 91285 - DNA, 30 bp, Artificial Sequence
  Synthetic oligonucleotide
cagaaaaaggatatctggtgccgaactaag

SEQ ID NO: 91286 - DNA, 30 bp, Artificial Sequence
  Synthetic oligonucleotide
tgacagccatgaaaagctgcgtctactaag

SEQ ID NO: 91287 - DNA, 30 bp, Artificial Sequence
  Synthetic oligonucleotide
aaataatacagtagatccaggaaacctaag

SEQ ID NO: 91288 - DNA, 30 bp, Artificial Sequence
  Synthetic oligonucleotide
gtcacgacgtcgggtgtaggaaaccctaag

SEQ ID NO: 91289 - DNA, 30 bp, Artificial Sequence
  Synthetic oligonucleotide
ctttactgccaaaggtcataaatccctaag

SEQ ID NO: 91290 - DNA, 30 bp, Artificial Sequence
  Synthetic oligonucleotide
agtgccgaggtccctgaattgtgcgctaag

SEQ ID NO: 91291 - DNA, 30 bp, Artificial Sequence
  Synthetic oligonucleotide
gcagtaaggagatgcgtctttgttgctaag

SEQ ID NO: 91292 - DNA, 30 bp, Artificial Sequence
  Synthetic oligonucleotide
cacacagcataagagcgaagtaggtctaag

SEQ ID NO: 91293 - DNA, 30 bp, Artificial Sequence
  Synthetic oligonucleotide
aagggatcttgcagttcccaaccaagtaag

SEQ ID NO: 91294 - DNA, 30 bp, Artificial Sequence
  Synthetic oligonucleotide
gtacaggcgcaacttttcaaatacagtaag

SEQ ID NO: 91295 - DNA, 30 bp, Artificial Sequence
  Synthetic oligonucleotide
tcttcacagagatggtaagtacccagtaag

SEQ ID NO: 91296 - DNA, 30 bp, Artificial Sequence
  Synthetic oligonucleotide
cttggcaatcaggtagtcctttagagtaag

SEQ ID NO: 91297 - DNA, 30 bp, Artificial Sequence
  Synthetic oligonucleotide
aggggccacctccatactgggtaacgtaag

SEQ ID NO: 91298 - DNA, 30 bp, Artificial Sequence
  Synthetic oligonucleotide
ccctcagctgggtattaggggcgacgtaag

SEQ ID NO: 91299 - DNA, 30 bp, Artificial Sequence
  Synthetic oligonucleotide
actgcttcaagaagggacgaatgccgtaag

SEQ ID NO: 91300 - DNA, 30 bp, Artificial Sequence
  Synthetic oligonucleotide
gcatcctgtcgacttaagcaatcaggtaag

SEQ ID NO: 91301 - DNA, 30 bp, Artificial Sequence
  Synthetic oligonucleotide
cgttgttcgtatccagaaagatcaggtaag

SEQ ID NO: 91302 - DNA, 30 bp, Artificial Sequence
  Synthetic oligonucleotide
ggccggtcaagaaaattcaacacgtgtaag

SEQ ID NO: 91303 - DNA, 30 bp, Artificial Sequence
  Synthetic oligonucleotide
tttagacggaggctgaggtcactcattaag

SEQ ID NO: 91304 - DNA, 30 bp, Artificial Sequence
  Synthetic oligonucleotide
aacgctcggccgagctaggggaagattaag

SEQ ID NO: 91305 - DNA, 30 bp, Artificial Sequence
  Synthetic oligonucleotide
gtaacgctgtgaagtccttggccagttaag

SEQ ID NO: 91306 - DNA, 30 bp, Artificial Sequence
  Synthetic oligonucleotide
atcggaacggacattggatccggagttaag

SEQ ID NO: 91307 - DNA, 30 bp, Artificial Sequence
  Synthetic oligonucleotide
agccttagctgattttcgaaggtcgttaag

SEQ ID NO: 91308 - DNA, 30 bp, Artificial Sequence
  Synthetic oligonucleotide
attgagattcaactcacactcgtggttaag

SEQ ID NO: 91309 - DNA, 30 bp, Artificial Sequence
  Synthetic oligonucleotide
aggcattcgtaacacaggcatggatttaag

SEQ ID NO: 91310 - DNA, 30 bp, Artificial Sequence
  Synthetic oligonucleotide
tacgggcctaaagaccgggagtaaaaacag

SEQ ID NO: 91311 - DNA, 30 bp, Artificial Sequence
  Synthetic oligonucleotide
accgaagggggcgaccatagtataaaacag

SEQ ID NO: 91312 - DNA, 30 bp, Artificial Sequence
  Synthetic oligonucleotide
gtaatggaagagtagggacataacaaacag

SEQ ID NO: 91313 - DNA, 30 bp, Artificial Sequence
  Synthetic oligonucleotide
agggctagacaagagggtgaaagcaaacag

SEQ ID NO: 91314 - DNA, 30 bp, Artificial Sequence
  Synthetic oligonucleotide
agtgcaatgtcaatggtcgcgacacaacag

SEQ ID NO: 91315 - DNA, 30 bp, Artificial Sequence
  Synthetic oligonucleotide
ggattaacgagttgaagaggggtagaacag

SEQ ID NO: 91316 - DNA, 30 bp, Artificial Sequence
  Synthetic oligonucleotide
accgtgctacaaagggccttataggaacag

SEQ ID NO: 91317 - DNA, 30 bp, Artificial Sequence
  Synthetic oligonucleotide
ggtcaatagcaagcggatcactcggaacag

SEQ ID NO: 91318 - DNA, 30 bp, Artificial Sequence
  Synthetic oligonucleotide
gtacgaaagaatcgccataagcgtgaacag

SEQ ID NO: 91319 - DNA, 30 bp, Artificial Sequence
  Synthetic oligonucleotide
cggcagttactaccacttgctggtgaacag

SEQ ID NO: 91320 - DNA, 30 bp, Artificial Sequence
  Synthetic oligonucleotide
gggtacggaggtcccagcgagtttgaacag

SEQ ID NO: 91321 - DNA, 30 bp, Artificial Sequence
  Synthetic oligonucleotide
tgaatggtataggggcaaggatgataacag

SEQ ID NO: 91322 - DNA, 30 bp, Artificial Sequence
  Synthetic oligonucleotide
ctcggcgatcttcgtagtcctttataacag

SEQ ID NO: 91323 - DNA, 30 bp, Artificial Sequence
  Synthetic oligonucleotide
ctgcgctccgccaaactcgtgggctaacag

SEQ ID NO: 91324 - DNA, 30 bp, Artificial Sequence
  Synthetic oligonucleotide
gaatcaagatctaggacagcctcgtaacag

SEQ ID NO: 91325 - DNA, 30 bp, Artificial Sequence
  Synthetic oligonucleotide
tagggcgctttgtggcctccgttttaacag

SEQ ID NO: 91326 - DNA, 30 bp, Artificial Sequence
  Synthetic oligonucleotide
cgctcaccgattcatatgggcaccacacag

SEQ ID NO: 91327 - DNA, 30 bp, Artificial Sequence
  Synthetic oligonucleotide
tcgcgaagtgtgctagtctttcgaccacag

SEQ ID NO: 91328 - DNA, 30 bp, Artificial Sequence
  Synthetic oligonucleotide
tgtgtcggaccgtgttatcaagggccacag

SEQ ID NO: 91329 - DNA, 30 bp, Artificial Sequence
  Synthetic oligonucleotide
tgaaacaattggcaaggtaacactccacag

SEQ ID NO: 91330 - DNA, 30 bp, Artificial Sequence
  Synthetic oligonucleotide
ggaagatacaccaatccagacccagcacag

SEQ ID NO: 91331 - DNA, 30 bp, Artificial Sequence
  Synthetic oligonucleotide
ccgagtctcaatcaaacaaaattctcacag

SEQ ID NO: 91332 - DNA, 30 bp, Artificial Sequence
  Synthetic oligonucleotide
tattatcggtcaggaatcaaagcgtcacag

SEQ ID NO: 91333 - DNA, 30 bp, Artificial Sequence
  Synthetic oligonucleotide
gtgttagggctgaaaaatagagtaagacag

SEQ ID NO: 91334 - DNA, 30 bp, Artificial Sequence
  Synthetic oligonucleotide
ctggataaatgctgagtaaacgccagacag

SEQ ID NO: 91335 - DNA, 30 bp, Artificial Sequence
  Synthetic oligonucleotide
cgtcagccgggataatcgagagggagacag

SEQ ID NO: 91336 - DNA, 30 bp, Artificial Sequence
  Synthetic oligonucleotide
aaacgtggatcacaaatatcgcaccgacag

SEQ ID NO: 91337 - DNA, 30 bp, Artificial Sequence
  Synthetic oligonucleotide
gctgaccggagatggtatttgcaccgacag

SEQ ID NO: 91338 - DNA, 30 bp, Artificial Sequence
  Synthetic oligonucleotide
aaggagctaggtgatttagcatcgggacag

SEQ ID NO: 91339 - DNA, 30 bp, Artificial Sequence
  Synthetic oligonucleotide
agatgacgtccgagcggacatgatggacag

SEQ ID NO: 91340 - DNA, 30 bp, Artificial Sequence
  Synthetic oligonucleotide
cttcagggggctatgcgggccacgtgacag

SEQ ID NO: 91341 - DNA, 30 bp, Artificial Sequence
  Synthetic oligonucleotide
gttctggcaatggcaaggatatccatacag

SEQ ID NO: 91342 - DNA, 30 bp, Artificial Sequence
  Synthetic oligonucleotide
taaggataggaactgttgttatgcatacag

SEQ ID NO: 91343 - DNA, 30 bp, Artificial Sequence
  Synthetic oligonucleotide
catatctcgtacgagcaaacctagatacag

SEQ ID NO: 91344 - DNA, 30 bp, Artificial Sequence
  Synthetic oligonucleotide
atgaacgtacgcgggcggacagacctacag

SEQ ID NO: 91345 - DNA, 30 bp, Artificial Sequence
  Synthetic oligonucleotide
ctgaaatcgccttgttgtatgcccctacag

SEQ ID NO: 91346 - DNA, 30 bp, Artificial Sequence
  Synthetic oligonucleotide
acggatgtgctgatctttgcgaggctacag

SEQ ID NO: 91347 - DNA, 30 bp, Artificial Sequence
  Synthetic oligonucleotide
tagaaagaggaattcgctcagtcagtacag

SEQ ID NO: 91348 - DNA, 30 bp, Artificial Sequence
  Synthetic oligonucleotide
cctgacagctaccattcataaggcgtacag

SEQ ID NO: 91349 - DNA, 30 bp, Artificial Sequence
  Synthetic oligonucleotide
atgagtccgtatcggctgtaccgattacag

SEQ ID NO: 91350 - DNA, 30 bp, Artificial Sequence
  Synthetic oligonucleotide
cggcgtctcgtagggacgtagggcttacag

SEQ ID NO: 91351 - DNA, 30 bp, Artificial Sequence
  Synthetic oligonucleotide
agcgcgagagcgacggtctgcacaaaccag

SEQ ID NO: 91352 - DNA, 30 bp, Artificial Sequence
  Synthetic oligonucleotide
tatgcacacatcggtccggcgacaaaccag

SEQ ID NO: 91353 - DNA, 30 bp, Artificial Sequence
  Synthetic oligonucleotide
tagggtagccggtagctatgtcacaaccag

SEQ ID NO: 91354 - DNA, 29 bp, Artificial Sequence
  Synthetic oligonucleotide
atataacctggcgaaccttcgagcaccag

SEQ ID NO: 91355 - DNA, 30 bp, Artificial Sequence
  Synthetic oligonucleotide
accagggtttagcgtacacgggagcaccag

SEQ ID NO: 91356 - DNA, 30 bp, Artificial Sequence
  Synthetic oligonucleotide
agcggtcgtcataaagctggctggcaccag

SEQ ID NO: 91357 - DNA, 30 bp, Artificial Sequence
  Synthetic oligonucleotide
ggggctggaaatggtaatgtcagtcaccag

SEQ ID NO: 91358 - DNA, 30 bp, Artificial Sequence
  Synthetic oligonucleotide
cccaagcgtgaaaagatgaaaagtgaccag

SEQ ID NO: 91359 - DNA, 30 bp, Artificial Sequence
  Synthetic oligonucleotide
ggcctgtagttccgttggacaggtgaccag

SEQ ID NO: 91360 - DNA, 30 bp, Artificial Sequence
  Synthetic oligonucleotide
gctcacattacgggatagatttggtaccag

SEQ ID NO: 91361 - DNA, 30 bp, Artificial Sequence
  Synthetic oligonucleotide
gaggcgtaacgttacttgccgatgccccag

SEQ ID NO: 91362 - DNA, 30 bp, Artificial Sequence
  Synthetic oligonucleotide
ggtaagaaggtgatggtgtgtaaggcccag

SEQ ID NO: 91363 - DNA, 30 bp, Artificial Sequence
  Synthetic oligonucleotide
acgacgggtcctcaccaaagctactcccag

SEQ ID NO: 91364 - DNA, 30 bp, Artificial Sequence
  Synthetic oligonucleotide
ccggcgaatacgtctcgggtgcattcccag

SEQ ID NO: 91365 - DNA, 30 bp, Artificial Sequence
  Synthetic oligonucleotide
tctaggatgcacgtcagtttacaaagccag

SEQ ID NO: 91366 - DNA, 30 bp, Artificial Sequence
  Synthetic oligonucleotide
tgtctatcaatagtagacagtcaaagccag

SEQ ID NO: 91367 - DNA, 30 bp, Artificial Sequence
  Synthetic oligonucleotide
acggggaagtacccttcaagcgaacgccag

SEQ ID NO: 91368 - DNA, 30 bp, Artificial Sequence
  Synthetic oligonucleotide
ggccaggtgagagcaatctgcaacggccag

SEQ ID NO: 91369 - DNA, 30 bp, Artificial Sequence
  Synthetic oligonucleotide
gatccattacttcagcgaccatcgggccag

SEQ ID NO: 91370 - DNA, 30 bp, Artificial Sequence
  Synthetic oligonucleotide
tcagagcaaactacacccagcggttgccag

SEQ ID NO: 91371 - DNA, 30 bp, Artificial Sequence
  Synthetic oligonucleotide
gactacggagctagcacatccacaatccag

SEQ ID NO: 91372 - DNA, 30 bp, Artificial Sequence
  Synthetic oligonucleotide
ttgtgagaaaaagagacacttctaatccag

SEQ ID NO: 91373 - DNA, 30 bp, Artificial Sequence
  Synthetic oligonucleotide
atatgcgaaacgccgaaacgcggcgtccag

SEQ ID NO: 91374 - DNA, 30 bp, Artificial Sequence
  Synthetic oligonucleotide
cctaattcggaaactatattaagggtccag

SEQ ID NO: 91375 - DNA, 30 bp, Artificial Sequence
  Synthetic oligonucleotide
gccaagcgggactagtccaaagctgtccag

SEQ ID NO: 91376 - DNA, 30 bp, Artificial Sequence
  Synthetic oligonucleotide
atttcgttacgttggcgggattcgaagcag

SEQ ID NO: 91377 - DNA, 30 bp, Artificial Sequence
  Synthetic oligonucleotide
ttgaggagttgctggcatataagtaagcag

SEQ ID NO: 91378 - DNA, 30 bp, Artificial Sequence
  Synthetic oligonucleotide
ggtgggtgaaatcagcgtagtgcccagcag

SEQ ID NO: 91379 - DNA, 30 bp, Artificial Sequence
  Synthetic oligonucleotide
gttcatcagaacggtgagcaaaggcagcag

SEQ ID NO: 91380 - DNA, 30 bp, Artificial Sequence
  Synthetic oligonucleotide
agactattgagtagtattattaaggagcag

SEQ ID NO: 91381 - DNA, 31 bp, Artificial Sequence
  Synthetic oligonucleotide
agatggaccggggtatacattgtatgagcag

SEQ ID NO: 91382 - DNA, 30 bp, Artificial Sequence
  Synthetic oligonucleotide
gacacgataaggagcttaggtggatagcag

SEQ ID NO: 91383 - DNA, 30 bp, Artificial Sequence
  Synthetic oligonucleotide
cagttagttcaactaagctatcattagcag

SEQ ID NO: 91384 - DNA, 30 bp, Artificial Sequence
  Synthetic oligonucleotide
tactgttagctcaaaaatacaaacacgcag

SEQ ID NO: 91385 - DNA, 30 bp, Artificial Sequence
  Synthetic oligonucleotide
agaacaccctttagctgtgctgctacgcag

SEQ ID NO: 91386 - DNA, 30 bp, Artificial Sequence
  Synthetic oligonucleotide
cgtgtagatcaagccccgcgtataccgcag

SEQ ID NO: 91387 - DNA, 30 bp, Artificial Sequence
  Synthetic oligonucleotide
caggctcagtgacggggtaagggcgcgcag

SEQ ID NO: 91388 - DNA, 30 bp, Artificial Sequence
  Synthetic oligonucleotide
tatcgggacacacttcaggtcagtgcgcag

SEQ ID NO: 91389 - DNA, 30 bp, Artificial Sequence
  Synthetic oligonucleotide
acctgcccgaggtggtactagcggaggcag

SEQ ID NO: 91390 - DNA, 30 bp, Artificial Sequence
  Synthetic oligonucleotide
tccgccgtgaatggtcaacagttatggcag

SEQ ID NO: 91391 - DNA, 30 bp, Artificial Sequence
  Synthetic oligonucleotide
gtaggccagtgccccaaaatgcgctggcag

SEQ ID NO: 91392 - DNA, 30 bp, Artificial Sequence
  Synthetic oligonucleotide
atagttgggaccgtgtgcaaaggaatgcag

SEQ ID NO: 91393 - DNA, 30 bp, Artificial Sequence
  Synthetic oligonucleotide
gagttagaggaaaccactagcaaagtgcag

SEQ ID NO: 91394 - DNA, 30 bp, Artificial Sequence
  Synthetic oligonucleotide
atggtgagacgtgagcgtggttaagtgcag

SEQ ID NO: 91395 - DNA, 30 bp, Artificial Sequence
  Synthetic oligonucleotide
agacgactctggcaccatagatcggtgcag

SEQ ID NO: 91396 - DNA, 30 bp, Artificial Sequence
  Synthetic oligonucleotide
ggtattgctaaaaggtgcacctatgtgcag

SEQ ID NO: 91397 - DNA, 30 bp, Artificial Sequence
  Synthetic oligonucleotide
gaaaggagggagtagcagtggaaattgcag

SEQ ID NO: 91398 - DNA, 30 bp, Artificial Sequence
  Synthetic oligonucleotide
ctgggcgaaatttgagtcatagccaatcag

SEQ ID NO: 91399 - DNA, 30 bp, Artificial Sequence
  Synthetic oligonucleotide
gtgtcggggaaccctccggtcgatcatcag

SEQ ID NO: 91400 - DNA, 30 bp, Artificial Sequence
  Synthetic oligonucleotide
aacataacgaggtagtccaacattcatcag

SEQ ID NO: 91401 - DNA, 30 bp, Artificial Sequence
  Synthetic oligonucleotide
atgttgatgaacacactcaaaaaggatcag

SEQ ID NO: 91402 - DNA, 30 bp, Artificial Sequence
  Synthetic oligonucleotide
agaatatgctgggcaactggtattgatcag

SEQ ID NO: 91403 - DNA, 30 bp, Artificial Sequence
  Synthetic oligonucleotide
tagagtggatgggtagcgtaccgctatcag

SEQ ID NO: 91404 - DNA, 30 bp, Artificial Sequence
  Synthetic oligonucleotide
ttacatccagtcaagtccggctgctatcag

SEQ ID NO: 91405 - DNA, 30 bp, Artificial Sequence
  Synthetic oligonucleotide
ctgccaatacttatgccgaagttgtatcag

SEQ ID NO: 91406 - DNA, 30 bp, Artificial Sequence
  Synthetic oligonucleotide
tgctgccgggaaaagggatcgtattatcag

SEQ ID NO: 91407 - DNA, 30 bp, Artificial Sequence
  Synthetic oligonucleotide
catgaggggtgcagcaaagttctcactcag

SEQ ID NO: 91408 - DNA, 30 bp, Artificial Sequence
  Synthetic oligonucleotide
cctaactattcagtgcgagtacagactcag

SEQ ID NO: 91409 - DNA, 30 bp, Artificial Sequence
  Synthetic oligonucleotide
tacttgatgaaagccaacattatgactcag

SEQ ID NO: 91410 - DNA, 30 bp, Artificial Sequence
  Synthetic oligonucleotide
catcctgttaaacacctaaaacaccctcag

SEQ ID NO: 91411 - DNA, 30 bp, Artificial Sequence
  Synthetic oligonucleotide
ggtcaagtcaacctcaatagtaaagctcag

SEQ ID NO: 91412 - DNA, 30 bp, Artificial Sequence
  Synthetic oligonucleotide
aacgtaacactcacaggtttcggcgctcag

SEQ ID NO: 91413 - DNA, 30 bp, Artificial Sequence
  Synthetic oligonucleotide
ttaaacaagacctgtgaagttcactctcag

SEQ ID NO: 91414 - DNA, 30 bp, Artificial Sequence
  Synthetic oligonucleotide
tgggtttagagaactaggacgtgttctcag

SEQ ID NO: 91415 - DNA, 30 bp, Artificial Sequence
  Synthetic oligonucleotide
ggacggcttgaggtacctgtcgatagtcag

SEQ ID NO: 91416 - DNA, 30 bp, Artificial Sequence
  Synthetic oligonucleotide
taacgagtgtacatagagaaatgtagtcag

SEQ ID NO: 91417 - DNA, 30 bp, Artificial Sequence
  Synthetic oligonucleotide
cggaaagtgtgggagaggcttgaccgtcag

SEQ ID NO: 91418 - DNA, 30 bp, Artificial Sequence
  Synthetic oligonucleotide
accgcgcccacagtaatagcaataggtcag

SEQ ID NO: 91419 - DNA, 30 bp, Artificial Sequence
  Synthetic oligonucleotide
aacacgtgattcacgagtgtgctcggtcag

SEQ ID NO: 91420 - DNA, 30 bp, Artificial Sequence
  Synthetic oligonucleotide
cggacgaaaggaaagaatcgacctggtcag

SEQ ID NO: 91421 - DNA, 30 bp, Artificial Sequence
  Synthetic oligonucleotide
cataccctggcctgaaactagcaatgtcag

SEQ ID NO: 91422 - DNA, 30 bp, Artificial Sequence
  Synthetic oligonucleotide
tacggggaacctcacagatgggcatgtcag

SEQ ID NO: 91423 - DNA, 30 bp, Artificial Sequence
  Synthetic oligonucleotide
acgtccccaaaatccgatcacatatgtcag

SEQ ID NO: 91424 - DNA, 30 bp, Artificial Sequence
  Synthetic oligonucleotide
ttcgacaccaacagaggttcagtctgtcag

SEQ ID NO: 91425 - DNA, 30 bp, Artificial Sequence
  Synthetic oligonucleotide
atggtgaagtttaattcgtgtagtattcag

SEQ ID NO: 91426 - DNA, 30 bp, Artificial Sequence
  Synthetic oligonucleotide
cgaaatgtcaggagacctacgtaacttcag

SEQ ID NO: 91427 - DNA, 30 bp, Artificial Sequence
  Synthetic oligonucleotide
gtcggccggtgaaactgagcgccacttcag

SEQ ID NO: 91428 - DNA, 30 bp, Artificial Sequence
  Synthetic oligonucleotide
ttaaggtagggagcgacgaggctgcttcag

SEQ ID NO: 91429 - DNA, 30 bp, Artificial Sequence
  Synthetic oligonucleotide
agtgacgtcacaatgcgtcagcgagttcag

SEQ ID NO: 91430 - DNA, 30 bp, Artificial Sequence
  Synthetic oligonucleotide
aggcacgtggaagcctactcagaatttcag

SEQ ID NO: 91431 - DNA, 30 bp, Artificial Sequence
  Synthetic oligonucleotide
aggagtcgcgcgcgcgtatctgtatttcag

SEQ ID NO: 91432 - DNA, 30 bp, Artificial Sequence
  Synthetic oligonucleotide
attgaagtgtgagtcgcaaccaagtttcag

SEQ ID NO: 91433 - DNA, 30 bp, Artificial Sequence
  Synthetic oligonucleotide
agtagggcttctgccatgggataaaaagag

SEQ ID NO: 91434 - DNA, 30 bp, Artificial Sequence
  Synthetic oligonucleotide
gggcccaagctatggtgaatagacaaagag

SEQ ID NO: 91435 - DNA, 30 bp, Artificial Sequence
  Synthetic oligonucleotide
taagcgtacctttttagcgtatacaaagag

SEQ ID NO: 91436 - DNA, 30 bp, Artificial Sequence
  Synthetic oligonucleotide
gtgatctatcctaggacgatatccaaagag

SEQ ID NO: 91437 - DNA, 30 bp, Artificial Sequence
  Synthetic oligonucleotide
ccatatgcacacattgtagggggcaaagag

SEQ ID NO: 91438 - DNA, 30 bp, Artificial Sequence
  Synthetic oligonucleotide
atggcacctcctagctttatacggaaagag

SEQ ID NO: 91439 - DNA, 30 bp, Artificial Sequence
  Synthetic oligonucleotide
gaggacatatgtggcgagcagaataaagag

SEQ ID NO: 91440 - DNA, 30 bp, Artificial Sequence
  Synthetic oligonucleotide
acggaggccatttcaatgatagttaaagag

SEQ ID NO: 91441 - DNA, 30 bp, Artificial Sequence
  Synthetic oligonucleotide
agagcgtctcaggttgggaccgctcaagag

SEQ ID NO: 91442 - DNA, 30 bp, Artificial Sequence
  Synthetic oligonucleotide
tggggtagcaactcacagcaacttcaagag

SEQ ID NO: 91443 - DNA, 30 bp, Artificial Sequence
  Synthetic oligonucleotide
ttgaaccccgagaaaacaagggaagaagag

SEQ ID NO: 91444 - DNA, 30 bp, Artificial Sequence
  Synthetic oligonucleotide
tcggcgaggccactgcagacaatcgaagag

SEQ ID NO: 91445 - DNA, 30 bp, Artificial Sequence
  Synthetic oligonucleotide
ctaacattttcattcaccgtgcaggaagag

SEQ ID NO: 91446 - DNA, 30 bp, Artificial Sequence
  Synthetic oligonucleotide
gcaggttagtttagacttgacgaggaagag

SEQ ID NO: 91447 - DNA, 30 bp, Artificial Sequence
  Synthetic oligonucleotide
ggcctcgggtgatgccaaccattggaagag

SEQ ID NO: 91448 - DNA, 30 bp, Artificial Sequence
  Synthetic oligonucleotide
accctgctgagcgcaactgatcatgaagag

SEQ ID NO: 91449 - DNA, 30 bp, Artificial Sequence
  Synthetic oligonucleotide
aatgttcgaccgccacctacgcttgaagag

SEQ ID NO: 91450 - DNA, 30 bp, Artificial Sequence
  Synthetic oligonucleotide
tcaaatattctgttccacgaacgataagag

SEQ ID NO: 91451 - DNA, 30 bp, Artificial Sequence
  Synthetic oligonucleotide
ccacgcgggatacccggacgtaattaagag

SEQ ID NO: 91452 - DNA, 30 bp, Artificial Sequence
  Synthetic oligonucleotide
gccgcgtcttgcgtagtatggtcttaagag

SEQ ID NO: 91453 - DNA, 30 bp, Artificial Sequence
  Synthetic oligonucleotide
agccacaacggtgcccaagggggttaagag

SEQ ID NO: 91454 - DNA, 30 bp, Artificial Sequence
  Synthetic oligonucleotide
cgggatttagggcacaaagagatttaagag

SEQ ID NO: 91455 - DNA, 30 bp, Artificial Sequence
  Synthetic oligonucleotide
ggaaagcggcctctacggataaaaacagag

SEQ ID NO: 91456 - DNA, 30 bp, Artificial Sequence
  Synthetic oligonucleotide
cgcgtagcttgatcacaaaataaaacagag

SEQ ID NO: 91457 - DNA, 30 bp, Artificial Sequence
  Synthetic oligonucleotide
ggcacaggtccagacgactagacgacagag

SEQ ID NO: 91458 - DNA, 30 bp, Artificial Sequence
  Synthetic oligonucleotide
gtacatgagggaacgggccgagtgacagag

SEQ ID NO: 91459 - DNA, 30 bp, Artificial Sequence
  Synthetic oligonucleotide
tccatagagtgaggccaaaagcttacagag

SEQ ID NO: 91460 - DNA, 30 bp, Artificial Sequence
  Synthetic oligonucleotide
cactaggtctttacgtaagagcgttcagag

SEQ ID NO: 91461 - DNA, 30 bp, Artificial Sequence
  Synthetic oligonucleotide
tcgagtgcgctttgcgtattcgaaagagag

SEQ ID NO: 91462 - DNA, 30 bp, Artificial Sequence
  Synthetic oligonucleotide
gctgaacttcggcaagaacggttaagagag

SEQ ID NO: 91463 - DNA, 30 bp, Artificial Sequence
  Synthetic oligonucleotide
aactcatgggcaaggagtaagatacgagag

SEQ ID NO: 91464 - DNA, 30 bp, Artificial Sequence
  Synthetic oligonucleotide
ttcccgatgccgccgtattgggagcgagag

SEQ ID NO: 91465 - DNA, 30 bp, Artificial Sequence
  Synthetic oligonucleotide
taccaactcgtcagcgcgagtcatcgagag

SEQ ID NO: 91466 - DNA, 30 bp, Artificial Sequence
  Synthetic oligonucleotide
gtctatatgtcaaaacatcgttatcgagag

SEQ ID NO: 91467 - DNA, 30 bp, Artificial Sequence
  Synthetic oligonucleotide
ggccaagtatatgttagcacaattcgagag

SEQ ID NO: 91468 - DNA, 30 bp, Artificial Sequence
  Synthetic oligonucleotide
tccgtacaggctttgggggactttggagag

SEQ ID NO: 91469 - DNA, 30 bp, Artificial Sequence
  Synthetic oligonucleotide
gttaaggaagtttactgaagtatatgagag

SEQ ID NO: 91470 - DNA, 30 bp, Artificial Sequence
  Synthetic oligonucleotide
ataaaggcggccgagtgagaactatgagag

SEQ ID NO: 91471 - DNA, 30 bp, Artificial Sequence
  Synthetic oligonucleotide
gttactatccagctagaagccaactgagag

SEQ ID NO: 91472 - DNA, 30 bp, Artificial Sequence
  Synthetic oligonucleotide
atcgggttccaaacatgttgcttctgagag

SEQ ID NO: 91473 - DNA, 30 bp, Artificial Sequence
  Synthetic oligonucleotide
tgatatgtgcttcacctataacgaatagag

SEQ ID NO: 91474 - DNA, 30 bp, Artificial Sequence
  Synthetic oligonucleotide
tccactgccagaaactcaatgggcatagag

SEQ ID NO: 91475 - DNA, 30 bp, Artificial Sequence
  Synthetic oligonucleotide
gcctcgctgataagggttagggtcatagag

SEQ ID NO: 91476 - DNA, 30 bp, Artificial Sequence
  Synthetic oligonucleotide
cggacgccgggctcggtaagggggatagag

SEQ ID NO: 91477 - DNA, 30 bp, Artificial Sequence
  Synthetic oligonucleotide
acctgtgcgcgtgatatagggatgatagag

SEQ ID NO: 91478 - DNA, 30 bp, Artificial Sequence
  Synthetic oligonucleotide
tacgggattccgttggcgttacatatagag

SEQ ID NO: 91479 - DNA, 30 bp, Artificial Sequence
  Synthetic oligonucleotide
gttggcaggatccggtcgggaagtatagag

SEQ ID NO: 91480 - DNA, 30 bp, Artificial Sequence
  Synthetic oligonucleotide
tcgacaggtctgattattcgggttatagag

SEQ ID NO: 91481 - DNA, 30 bp, Artificial Sequence
  Synthetic oligonucleotide
tatgatcgcgtatccagataacgactagag

SEQ ID NO: 91482 - DNA, 30 bp, Artificial Sequence
  Synthetic oligonucleotide
acgagggtaagcttgagggggtaggtagag

SEQ ID NO: 91483 - DNA, 30 bp, Artificial Sequence
  Synthetic oligonucleotide
gaaatacagatgcaacaacattatgtagag

SEQ ID NO: 91484 - DNA, 30 bp, Artificial Sequence
  Synthetic oligonucleotide
atgtggatatttggagcgcccactgtagag

SEQ ID NO: 91485 - DNA, 30 bp, Artificial Sequence
  Synthetic oligonucleotide
acctatggtatcttagtagtatgcttagag

SEQ ID NO: 91486 - DNA, 30 bp, Artificial Sequence
  Synthetic oligonucleotide
aaaagaaatgcataaatgccggtgttagag

SEQ ID NO: 91487 - DNA, 30 bp, Artificial Sequence
  Synthetic oligonucleotide
cgatgtagttagactatcggaggtttagag

SEQ ID NO: 91488 - DNA, 30 bp, Artificial Sequence
  Synthetic oligonucleotide
accgacacgcagggtgccccgcacaacgag

SEQ ID NO: 91489 - DNA, 30 bp, Artificial Sequence
  Synthetic oligonucleotide
ttattgaggaaaagcagggtaatcaacgag

SEQ ID NO: 91490 - DNA, 30 bp, Artificial Sequence
  Synthetic oligonucleotide
ccgtttggaaatgacagaggcaagaacgag

SEQ ID NO: 91491 - DNA, 30 bp, Artificial Sequence
  Synthetic oligonucleotide
tgcgaaacactggcggcgcatgctaacgag

SEQ ID NO: 91492 - DNA, 30 bp, Artificial Sequence
  Synthetic oligonucleotide
gaaaggtctgtacgcgtaatgggacacgag

SEQ ID NO: 91493 - DNA, 30 bp, Artificial Sequence
  Synthetic oligonucleotide
atcaagctaaggttcaaggtgtgcgacgag

SEQ ID NO: 91494 - DNA, 30 bp, Artificial Sequence
  Synthetic oligonucleotide
atgtccgtgctcgtattattacgggacgag

SEQ ID NO: 91495 - DNA, 30 bp, Artificial Sequence
  Synthetic oligonucleotide
gccggtattaggtaacgggctagctacgag

SEQ ID NO: 91496 - DNA, 30 bp, Artificial Sequence
  Synthetic oligonucleotide
cgtcagagacgtgatcaagtttggtacgag

SEQ ID NO: 91497 - DNA, 30 bp, Artificial Sequence
  Synthetic oligonucleotide
aagtgttctatgctctgacaggcaaccgag

SEQ ID NO: 91498 - DNA, 30 bp, Artificial Sequence
  Synthetic oligonucleotide
tcaaccacactatagacgtggagaaccgag

SEQ ID NO: 91499 - DNA, 30 bp, Artificial Sequence
  Synthetic oligonucleotide
aacataagccatcgtcattaatcgaccgag

SEQ ID NO: 91500 - DNA, 30 bp, Artificial Sequence
  Synthetic oligonucleotide
gctacacccgcagacacatgcaggaccgag

SEQ ID NO: 91501 - DNA, 30 bp, Artificial Sequence
  Synthetic oligonucleotide
atacgaggtcagtattgctcgcggaccgag

SEQ ID NO: 91502 - DNA, 30 bp, Artificial Sequence
  Synthetic oligonucleotide
ggtggtccggaggagaaccataaccccgag

SEQ ID NO: 91503 - DNA, 30 bp, Artificial Sequence
  Synthetic oligonucleotide
cgggggaacgctatcgttacttcccccgag

SEQ ID NO: 91504 - DNA, 30 bp, Artificial Sequence
  Synthetic oligonucleotide
cggcattagccaagtttcattagtgccgag

SEQ ID NO: 91505 - DNA, 30 bp, Artificial Sequence
  Synthetic oligonucleotide
taatagggggaaaaacgtctaccgtccgag

SEQ ID NO: 91506 - DNA, 30 bp, Artificial Sequence
  Synthetic oligonucleotide
agcagtctctcagtaaatcttgcatgcgag

SEQ ID NO: 91507 - DNA, 30 bp, Artificial Sequence
  Synthetic oligonucleotide
tcaaagagcggttaaagagtgcatatcgag

SEQ ID NO: 91508 - DNA, 30 bp, Artificial Sequence
  Synthetic oligonucleotide
ccgttctagacattccgagattaactcgag

SEQ ID NO: 91509 - DNA, 30 bp, Artificial Sequence
  Synthetic oligonucleotide
ggagctgtacgggggtaaagaatactcgag

SEQ ID NO: 91510 - DNA, 30 bp, Artificial Sequence
  Synthetic oligonucleotide
gctatcgctaggaccttaggtaaagtcgag

SEQ ID NO: 91511 - DNA, 30 bp, Artificial Sequence
  Synthetic oligonucleotide
ctcctgagcaatgggtacatcatagtcgag

SEQ ID NO: 91512 - DNA, 30 bp, Artificial Sequence
  Synthetic oligonucleotide
gcggcattaatggctgcggacaaggtcgag

SEQ ID NO: 91513 - DNA, 30 bp, Artificial Sequence
  Synthetic oligonucleotide
tcaggagtggttactgaatgctaggtcgag

SEQ ID NO: 91514 - DNA, 30 bp, Artificial Sequence
  Synthetic oligonucleotide
ccggttgcgtctgtacgatcgacggtcgag

SEQ ID NO: 91515 - DNA, 30 bp, Artificial Sequence
  Synthetic oligonucleotide
acaattgacactactgtgcccaacaaggag

SEQ ID NO: 91516 - DNA, 30 bp, Artificial Sequence
  Synthetic oligonucleotide
acatttcgggccaacgtgggtgggaaggag

SEQ ID NO: 91517 - DNA, 30 bp, Artificial Sequence
  Synthetic oligonucleotide
ggttggagtgtaaatgtgaccgttaaggag

SEQ ID NO: 91518 - DNA, 30 bp, Artificial Sequence
  Synthetic oligonucleotide
gctcgctccaatgcgtagctataacaggag

SEQ ID NO: 91519 - DNA, 30 bp, Artificial Sequence
  Synthetic oligonucleotide
atgttacgcgattcggcttgagtacaggag

SEQ ID NO: 91520 - DNA, 30 bp, Artificial Sequence
  Synthetic oligonucleotide
cgtctttcgaacaacgctcgtgtacaggag

SEQ ID NO: 91521 - DNA, 30 bp, Artificial Sequence
  Synthetic oligonucleotide
actgtggaaatggatgctcggtcccaggag

SEQ ID NO: 91522 - DNA, 30 bp, Artificial Sequence
  Synthetic oligonucleotide
ggtacaatgagtgagacgcgctgccaggag

SEQ ID NO: 91523 - DNA, 30 bp, Artificial Sequence
  Synthetic oligonucleotide
tcactatcgacgatctctaaggtccaggag

SEQ ID NO: 91524 - DNA, 30 bp, Artificial Sequence
  Synthetic oligonucleotide
ggtacgttgtcagctaagttaaagcaggag

SEQ ID NO: 91525 - DNA, 30 bp, Artificial Sequence
  Synthetic oligonucleotide
ggatcaggcaggttgttattccttcaggag

SEQ ID NO: 91526 - DNA, 30 bp, Artificial Sequence
  Synthetic oligonucleotide
ggcgcctccccggtaggtggagtagaggag

SEQ ID NO: 91527 - DNA, 30 bp, Artificial Sequence
  Synthetic oligonucleotide
ctagctcgcgatccttcagaaaaggaggag

SEQ ID NO: 91528 - DNA, 30 bp, Artificial Sequence
  Synthetic oligonucleotide
cagcacaaatgtcagcggataatggaggag

SEQ ID NO: 91529 - DNA, 30 bp, Artificial Sequence
  Synthetic oligonucleotide
cagctaactctaggttactacatataggag

SEQ ID NO: 91530 - DNA, 30 bp, Artificial Sequence
  Synthetic oligonucleotide
gcacaaccattcttgaactacttgtaggag

SEQ ID NO: 91531 - DNA, 30 bp, Artificial Sequence
  Synthetic oligonucleotide
taatagaaactctgtcccctagctacggag

SEQ ID NO: 91532 - DNA, 30 bp, Artificial Sequence
  Synthetic oligonucleotide
atgctttgaccggagtcgaaggaaccggag

SEQ ID NO: 91533 - DNA, 30 bp, Artificial Sequence
  Synthetic oligonucleotide
gaacatcctgtacaactagatagaccggag

SEQ ID NO: 91534 - DNA, 30 bp, Artificial Sequence
  Synthetic oligonucleotide
ttgctggatcactcgaatgctccgccggag

SEQ ID NO: 91535 - DNA, 30 bp, Artificial Sequence
  Synthetic oligonucleotide
ggtctgtaaaatatacctatacatccggag

SEQ ID NO: 91536 - DNA, 30 bp, Artificial Sequence
  Synthetic oligonucleotide
ttaacccccacccaccgccaggctccggag

SEQ ID NO: 91537 - DNA, 30 bp, Artificial Sequence
  Synthetic oligonucleotide
gctcacgtattcagtcagtctagtccggag

SEQ ID NO: 91538 - DNA, 30 bp, Artificial Sequence
  Synthetic oligonucleotide
cggggccatgaggtttcgacccaagcggag

SEQ ID NO: 91539 - DNA, 30 bp, Artificial Sequence
  Synthetic oligonucleotide
ggaatgagcacaatcaatataggcgcggag

SEQ ID NO: 91540 - DNA, 30 bp, Artificial Sequence
  Synthetic oligonucleotide
tattgggtcaaacgggggtcggaggcggag

SEQ ID NO: 91541 - DNA, 30 bp, Artificial Sequence
  Synthetic oligonucleotide
aatggcaagtctgcgaccgatgaggcggag

SEQ ID NO: 91542 - DNA, 30 bp, Artificial Sequence
  Synthetic oligonucleotide
cttactaatgatctgatgctgaattcggag

SEQ ID NO: 91543 - DNA, 30 bp, Artificial Sequence
  Synthetic oligonucleotide
agattagaacctttacaattgagttcggag

SEQ ID NO: 91544 - DNA, 30 bp, Artificial Sequence
  Synthetic oligonucleotide
acagcgtttgcatacaaggtactttcggag

SEQ ID NO: 91545 - DNA, 30 bp, Artificial Sequence
  Synthetic oligonucleotide
agggctcagactatgtctagatgcagggag

SEQ ID NO: 91546 - DNA, 30 bp, Artificial Sequence
  Synthetic oligonucleotide
tgcgttgatattcgtaacgatctgagggag

SEQ ID NO: 91547 - DNA, 30 bp, Artificial Sequence
  Synthetic oligonucleotide
gccgcgctcacagtgtgacagtctcgggag

SEQ ID NO: 91548 - DNA, 30 bp, Artificial Sequence
  Synthetic oligonucleotide
ctacgttcggtcgataaagaatgtcgggag

SEQ ID NO: 91549 - DNA, 30 bp, Artificial Sequence
  Synthetic oligonucleotide
actgcaacgtgtcttcaaatcgacggggag

SEQ ID NO: 91550 - DNA, 30 bp, Artificial Sequence
  Synthetic oligonucleotide
atctacgtatacatcgcagggttcggggag

SEQ ID NO: 91551 - DNA, 30 bp, Artificial Sequence
  Synthetic oligonucleotide
tcgaagagtttgaggcgacttggtggggag

SEQ ID NO: 91552 - DNA, 30 bp, Artificial Sequence
  Synthetic oligonucleotide
gcgtcacattggtatgatatggttggggag

SEQ ID NO: 91553 - DNA, 30 bp, Artificial Sequence
  Synthetic oligonucleotide
aaatgaagcgtaattggctcttgaatggag

SEQ ID NO: 91554 - DNA, 30 bp, Artificial Sequence
  Synthetic oligonucleotide
cgcggcagtggaaaagtagtgatgatggag

SEQ ID NO: 91555 - DNA, 30 bp, Artificial Sequence
  Synthetic oligonucleotide
ttcagacgagttgccaggctaactatggag

SEQ ID NO: 91556 - DNA, 30 bp, Artificial Sequence
  Synthetic oligonucleotide
tagcgtctgttgatcgtgaggtgcctggag

SEQ ID NO: 91557 - DNA, 30 bp, Artificial Sequence
  Synthetic oligonucleotide
gatgtcacgatagagtttaactggctggag

SEQ ID NO: 91558 - DNA, 30 bp, Artificial Sequence
  Synthetic oligonucleotide
aggaccgtccacagtgtaatttggctggag

SEQ ID NO: 91559 - DNA, 30 bp, Artificial Sequence
  Synthetic oligonucleotide
ataggcagaccgaagggcagccctctggag

SEQ ID NO: 91560 - DNA, 30 bp, Artificial Sequence
  Synthetic oligonucleotide
agctatcaatcggtggttggtggtgtggag

SEQ ID NO: 91561 - DNA, 30 bp, Artificial Sequence
  Synthetic oligonucleotide
atccgtgtacaagaagattgcgaattggag

SEQ ID NO: 91562 - DNA, 30 bp, Artificial Sequence
  Synthetic oligonucleotide
ggctggtgcgaaacggcccgtgtcttggag

SEQ ID NO: 91563 - DNA, 30 bp, Artificial Sequence
  Synthetic oligonucleotide
cgtttgtcggacaggcgaggatagttggag

SEQ ID NO: 91564 - DNA, 30 bp, Artificial Sequence
  Synthetic oligonucleotide
agaggcacgcgcgggtgatttcttttggag

SEQ ID NO: 91565 - DNA, 30 bp, Artificial Sequence
  Synthetic oligonucleotide
ccagccaattgacatatcaacataaatgag

SEQ ID NO: 91566 - DNA, 30 bp, Artificial Sequence
  Synthetic oligonucleotide
cacgccggtgtgcgattccagaggaatgag

SEQ ID NO: 91567 - DNA, 30 bp, Artificial Sequence
  Synthetic oligonucleotide
tcagtgaccatccagttttacatgaatgag

SEQ ID NO: 91568 - DNA, 31 bp, Artificial Sequence
  Synthetic oligonucleotide
ggtgaaaggggaatatatgcgccaccatgag

SEQ ID NO: 91569 - DNA, 30 bp, Artificial Sequence
  Synthetic oligonucleotide
ctgtcgctcgtccgttctggcgcccatgag

SEQ ID NO: 91570 - DNA, 30 bp, Artificial Sequence
  Synthetic oligonucleotide
catcgttccttgcgaagtccattagatgag

SEQ ID NO: 91571 - DNA, 30 bp, Artificial Sequence
  Synthetic oligonucleotide
taacatacgcggtttcactgcacggatgag

SEQ ID NO: 91572 - DNA, 30 bp, Artificial Sequence
  Synthetic oligonucleotide
aggtacaagtttaactcttctgcggatgag

SEQ ID NO: 91573 - DNA, 30 bp, Artificial Sequence
  Synthetic oligonucleotide
agtattgaatgtcaaacaaaatgggatgag

SEQ ID NO: 91574 - DNA, 30 bp, Artificial Sequence
  Synthetic oligonucleotide
gtgctgcatgctttggagacggatgatgag

SEQ ID NO: 91575 - DNA, 30 bp, Artificial Sequence
  Synthetic oligonucleotide
tgctcttgtagtcgtaggagcaaatatgag

SEQ ID NO: 91576 - DNA, 30 bp, Artificial Sequence
  Synthetic oligonucleotide
taatgacatacctttccatccttctatgag

SEQ ID NO: 91577 - DNA, 30 bp, Artificial Sequence
  Synthetic oligonucleotide
cccgaggcgcaaatccccgccgggtatgag

SEQ ID NO: 91578 - DNA, 30 bp, Artificial Sequence
  Synthetic oligonucleotide
taaagatccactatcactcagaattatgag

SEQ ID NO: 91579 - DNA, 30 bp, Artificial Sequence
  Synthetic oligonucleotide
tagcgatagaaacgtcaccgtgaaactgag

SEQ ID NO: 91580 - DNA, 30 bp, Artificial Sequence
  Synthetic oligonucleotide
gtctagtacatggtgggccagataactgag

SEQ ID NO: 91581 - DNA, 30 bp, Artificial Sequence
  Synthetic oligonucleotide
taataaaagtccggcgtcatatcgactgag

SEQ ID NO: 91582 - DNA, 30 bp, Artificial Sequence
  Synthetic oligonucleotide
gtttccatgagaggtatgcggtgtactgag

SEQ ID NO: 91583 - DNA, 30 bp, Artificial Sequence
  Synthetic oligonucleotide
gcacacttctacaggatcgagtttactgag

SEQ ID NO: 91584 - DNA, 30 bp, Artificial Sequence
  Synthetic oligonucleotide
gacatcaaggtaacatcattagcacctgag

SEQ ID NO: 91585 - DNA, 30 bp, Artificial Sequence
  Synthetic oligonucleotide
tcccgcaaaaggtagctccaggcacctgag

SEQ ID NO: 91586 - DNA, 30 bp, Artificial Sequence
  Synthetic oligonucleotide
atgggctaagtcgaggcacgataagctgag

SEQ ID NO: 91587 - DNA, 30 bp, Artificial Sequence
  Synthetic oligonucleotide
aaaaaaagaaggttcatctgcggagctgag

SEQ ID NO: 91588 - DNA, 30 bp, Artificial Sequence
  Synthetic oligonucleotide
gggtaagattgactatctgacgggtctgag

SEQ ID NO: 91589 - DNA, 30 bp, Artificial Sequence
  Synthetic oligonucleotide
ggatgtttacgggacaggttcgtgtctgag

SEQ ID NO: 91590 - DNA, 30 bp, Artificial Sequence
  Synthetic oligonucleotide
ggcctcaagcgtccagcgaagtcaagtgag

SEQ ID NO: 91591 - DNA, 30 bp, Artificial Sequence
  Synthetic oligonucleotide
acttacatattccggtaactaacacgtgag

SEQ ID NO: 91592 - DNA, 30 bp, Artificial Sequence
  Synthetic oligonucleotide
ggtaatatataacacggaaacgtacgtgag

SEQ ID NO: 91593 - DNA, 30 bp, Artificial Sequence
  Synthetic oligonucleotide
caagaaggatattgacagttgcggcgtgag

SEQ ID NO: 91594 - DNA, 30 bp, Artificial Sequence
  Synthetic oligonucleotide
tcgatgccacgacggtgcagataaggtgag

SEQ ID NO: 91595 - DNA, 30 bp, Artificial Sequence
  Synthetic oligonucleotide
cagaaagagctgaacttacggttaggtgag

SEQ ID NO: 91596 - DNA, 30 bp, Artificial Sequence
  Synthetic oligonucleotide
gtatatcaaatttgggcgcgatggggtgag

SEQ ID NO: 91597 - DNA, 30 bp, Artificial Sequence
  Synthetic oligonucleotide
gggactattcataaaaagcatctgggtgag

SEQ ID NO: 91598 - DNA, 30 bp, Artificial Sequence
  Synthetic oligonucleotide
catgaatcacgtctccgctccgctggtgag

SEQ ID NO: 91599 - DNA, 30 bp, Artificial Sequence
  Synthetic oligonucleotide
gtaggccactatcgcggattagttggtgag

SEQ ID NO: 91600 - DNA, 30 bp, Artificial Sequence
  Synthetic oligonucleotide
tccgttctacattctaactatgagtgtgag

SEQ ID NO: 91601 - DNA, 30 bp, Artificial Sequence
  Synthetic oligonucleotide
cgttgtgagcgaggtattaactcgtgtgag

SEQ ID NO: 91602 - DNA, 30 bp, Artificial Sequence
  Synthetic oligonucleotide
aagaccgattaactaggcgtggacattgag

SEQ ID NO: 91603 - DNA, 30 bp, Artificial Sequence
  Synthetic oligonucleotide
gtgacagacgcattgtcgtgtatcattgag

SEQ ID NO: 91604 - DNA, 30 bp, Artificial Sequence
  Synthetic oligonucleotide
cgtctactccgtatgtaaaaggtcattgag

SEQ ID NO: 91605 - DNA, 30 bp, Artificial Sequence
  Synthetic oligonucleotide
aagagcgtaaatacagttccttggattgag

SEQ ID NO: 91606 - DNA, 30 bp, Artificial Sequence
  Synthetic oligonucleotide
ccctatcggagtatgtaccgacttattgag

SEQ ID NO: 91607 - DNA, 30 bp, Artificial Sequence
  Synthetic oligonucleotide
gggtaagcagtgttgatattcggacttgag

SEQ ID NO: 91608 - DNA, 30 bp, Artificial Sequence
  Synthetic oligonucleotide
agcttgtgactcctttttaagcaagttgag

SEQ ID NO: 91609 - DNA, 30 bp, Artificial Sequence
  Synthetic oligonucleotide
aagtgagctcaaaaattgggttaagttgag

SEQ ID NO: 91610 - DNA, 30 bp, Artificial Sequence
  Synthetic oligonucleotide
gacagatgacttcctctcaggggagttgag

SEQ ID NO: 91611 - DNA, 30 bp, Artificial Sequence
  Synthetic oligonucleotide
agaaagggtgctatatgggcgaatgttgag

SEQ ID NO: 91612 - DNA, 30 bp, Artificial Sequence
  Synthetic oligonucleotide
gatctggttgcctgtcggaaaattgttgag

SEQ ID NO: 91613 - DNA, 30 bp, Artificial Sequence
  Synthetic oligonucleotide
actggtcgtcattaaaggcctcgctttgag

SEQ ID NO: 91614 - DNA, 31 bp, Artificial Sequence
  Synthetic oligonucleotide
ggttacgacaatcacgcgtgcccgaaaatag

SEQ ID NO: 91615 - DNA, 30 bp, Artificial Sequence
  Synthetic oligonucleotide
cacttgttccatactcagcttcggcaatag

SEQ ID NO: 91616 - DNA, 30 bp, Artificial Sequence
  Synthetic oligonucleotide
gtgcccaaaaccgtctgagatattcaatag

SEQ ID NO: 91617 - DNA, 30 bp, Artificial Sequence
  Synthetic oligonucleotide
ggaatctagagtcggtcggattgcgaatag

SEQ ID NO: 91618 - DNA, 30 bp, Artificial Sequence
  Synthetic oligonucleotide
ggtttggaagtctagtggcagattgaatag

SEQ ID NO: 91619 - DNA, 30 bp, Artificial Sequence
  Synthetic oligonucleotide
cgtcaggataacgaacgcccgatataatag

SEQ ID NO: 91620 - DNA, 30 bp, Artificial Sequence
  Synthetic oligonucleotide
tgtcacagacagattcggtgatggtaatag

SEQ ID NO: 91621 - DNA, 30 bp, Artificial Sequence
  Synthetic oligonucleotide
caggtgagtttttcgacgattcccacatag

SEQ ID NO: 91622 - DNA, 30 bp, Artificial Sequence
  Synthetic oligonucleotide
tcgagcgacaagcgcctttcacagacatag

SEQ ID NO: 91623 - DNA, 30 bp, Artificial Sequence
  Synthetic oligonucleotide
ccaaataggggtccggagttttggacatag

SEQ ID NO: 91624 - DNA, 30 bp, Artificial Sequence
  Synthetic oligonucleotide
atgaggatcgtaaaagggtgccttacatag

SEQ ID NO: 91625 - DNA, 30 bp, Artificial Sequence
  Synthetic oligonucleotide
caggaaccttcatacattcgtcatccatag

SEQ ID NO: 91626 - DNA, 30 bp, Artificial Sequence
  Synthetic oligonucleotide
gtgcgtccttgaagtacaccagatccatag

SEQ ID NO: 91627 - DNA, 30 bp, Artificial Sequence
  Synthetic oligonucleotide
aggcgctacacgtggcgataggcagcatag

SEQ ID NO: 91628 - DNA, 30 bp, Artificial Sequence
  Synthetic oligonucleotide
cactcgggtgaatgtaaccattctgcatag

SEQ ID NO: 91629 - DNA, 30 bp, Artificial Sequence
  Synthetic oligonucleotide
ggggatcctgatgttgctttctgatcatag

SEQ ID NO: 91630 - DNA, 30 bp, Artificial Sequence
  Synthetic oligonucleotide
gaggtgggggttatctatgtgcgttcatag

SEQ ID NO: 91631 - DNA, 30 bp, Artificial Sequence
  Synthetic oligonucleotide
atcggcaaattaagaatataacgcagatag

SEQ ID NO: 91632 - DNA, 30 bp, Artificial Sequence
  Synthetic oligonucleotide
ctggttgttgggtactacactggtagatag

SEQ ID NO: 91633 - DNA, 30 bp, Artificial Sequence
  Synthetic oligonucleotide
cactactgagtcacgaatttgattagatag

SEQ ID NO: 91634 - DNA, 30 bp, Artificial Sequence
  Synthetic oligonucleotide
tagcgaatcgtgttcattgggtgccgatag

SEQ ID NO: 91635 - DNA, 30 bp, Artificial Sequence
  Synthetic oligonucleotide
atgccatcgaatggatgagcatttcgatag

SEQ ID NO: 91636 - DNA, 30 bp, Artificial Sequence
  Synthetic oligonucleotide
tatgttcaaagagcgtgctccaacggatag

SEQ ID NO: 91637 - DNA, 30 bp, Artificial Sequence
  Synthetic oligonucleotide
tagtagcaatgtggacatgtttttggatag

SEQ ID NO: 91638 - DNA, 30 bp, Artificial Sequence
  Synthetic oligonucleotide
caaggtattcgacgacgaccacgcatatag

SEQ ID NO: 91639 - DNA, 30 bp, Artificial Sequence
  Synthetic oligonucleotide
acctcgctagaccgttatccgatcgtatag

SEQ ID NO: 91640 - DNA, 30 bp, Artificial Sequence
  Synthetic oligonucleotide
ccggggaaacactgagaagtggaggtatag

SEQ ID NO: 91641 - DNA, 30 bp, Artificial Sequence
  Synthetic oligonucleotide
atgtacagataatgttgagcgcatgtatag

SEQ ID NO: 91642 - DNA, 30 bp, Artificial Sequence
  Synthetic oligonucleotide
ggtcgtacaaagggcgagctatttgtatag

SEQ ID NO: 91643 - DNA, 30 bp, Artificial Sequence
  Synthetic oligonucleotide
agaaggttatgagggtattgtgacttatag

SEQ ID NO: 91644 - DNA, 30 bp, Artificial Sequence
  Synthetic oligonucleotide
caaagcccactcaacactcccataaactag

SEQ ID NO: 91645 - DNA, 30 bp, Artificial Sequence
  Synthetic oligonucleotide
ctggttcaagggttggttaacaaacactag

SEQ ID NO: 91646 - DNA, 30 bp, Artificial Sequence
  Synthetic oligonucleotide
aacggtgtatggcagtctgtccgacactag

SEQ ID NO: 91647 - DNA, 30 bp, Artificial Sequence
  Synthetic oligonucleotide
taagttgaacggagtacgcggaggcactag

SEQ ID NO: 91648 - DNA, 30 bp, Artificial Sequence
  Synthetic oligonucleotide
catgtcgaccaacccggagctaatcactag

SEQ ID NO: 91649 - DNA, 30 bp, Artificial Sequence
  Synthetic oligonucleotide
gggtagcttatgtgatgacttggagactag

SEQ ID NO: 91650 - DNA, 30 bp, Artificial Sequence
  Synthetic oligonucleotide
tgggggacggacgcacgtgaagacgactag

SEQ ID NO: 91651 - DNA, 30 bp, Artificial Sequence
  Synthetic oligonucleotide
atgattgacttaatggtcccggaatactag

SEQ ID NO: 91652 - DNA, 30 bp, Artificial Sequence
  Synthetic oligonucleotide
tgcggggggttaaagatagaattatactag

SEQ ID NO: 91653 - DNA, 30 bp, Artificial Sequence
  Synthetic oligonucleotide
gcgtacgataatcttaattacagtacctag

SEQ ID NO: 91654 - DNA, 30 bp, Artificial Sequence
  Synthetic oligonucleotide
taggcgaaggtggtgcttatgtacccctag

SEQ ID NO: 91655 - DNA, 30 bp, Artificial Sequence
  Synthetic oligonucleotide
tcctggaacgtaaattactgtgtgccctag

SEQ ID NO: 91656 - DNA, 30 bp, Artificial Sequence
  Synthetic oligonucleotide
gcaacatcatcaaatcttactttagcctag

SEQ ID NO: 91657 - DNA, 30 bp, Artificial Sequence
  Synthetic oligonucleotide
tagctgaaacgatggctcttacccgcctag

SEQ ID NO: 91658 - DNA, 30 bp, Artificial Sequence
  Synthetic oligonucleotide
ctaaagaagagtcatacgtgcccggcctag

SEQ ID NO: 91659 - DNA, 30 bp, Artificial Sequence
  Synthetic oligonucleotide
gttctgtcgacgacaaaaagtccatcctag

SEQ ID NO: 91660 - DNA, 30 bp, Artificial Sequence
  Synthetic oligonucleotide
atctaggcaccaccattgtcatcctcctag

SEQ ID NO: 91661 - DNA, 30 bp, Artificial Sequence
  Synthetic oligonucleotide
tgaaagttgatagcgtgtcaggcaagctag

SEQ ID NO: 91662 - DNA, 30 bp, Artificial Sequence
  Synthetic oligonucleotide
gaacacttcctcgtgaaaacctgaagctag

SEQ ID NO: 91663 - DNA, 30 bp, Artificial Sequence
  Synthetic oligonucleotide
tgaaccagggtttccaaggcttacagctag

SEQ ID NO: 91664 - DNA, 30 bp, Artificial Sequence
  Synthetic oligonucleotide
acggctagagagccttatgttcatagctag

SEQ ID NO: 91665 - DNA, 30 bp, Artificial Sequence
  Synthetic oligonucleotide
taacagacacttcgacaggagaggcgctag

SEQ ID NO: 91666 - DNA, 30 bp, Artificial Sequence
  Synthetic oligonucleotide
atgtcccatcgacatgactatatgcgctag

SEQ ID NO: 91667 - DNA, 30 bp, Artificial Sequence
  Synthetic oligonucleotide
tgaatgtaggtggcctggagtacatgctag

SEQ ID NO: 91668 - DNA, 30 bp, Artificial Sequence
  Synthetic oligonucleotide
ggatggcgggcgatacctggcccatgctag

SEQ ID NO: 91669 - DNA, 30 bp, Artificial Sequence
  Synthetic oligonucleotide
aatggtggtagttccagagcgcgaatctag

SEQ ID NO: 91670 - DNA, 30 bp, Artificial Sequence
  Synthetic oligonucleotide
gttagctatcacgggtctggctgaatctag

SEQ ID NO: 91671 - DNA, 30 bp, Artificial Sequence
  Synthetic oligonucleotide
agtcatctggaaaaagactggggaaagtag

SEQ ID NO: 91672 - DNA, 30 bp, Artificial Sequence
  Synthetic oligonucleotide
gcggcggggcgctcaccggtgtaacagtag

SEQ ID NO: 91673 - DNA, 30 bp, Artificial Sequence
  Synthetic oligonucleotide
gaagagtgtcatcatcatcgtcaccagtag

SEQ ID NO: 91674 - DNA, 30 bp, Artificial Sequence
  Synthetic oligonucleotide
ggggttcggtcttttcttagatacgagtag

SEQ ID NO: 91675 - DNA, 30 bp, Artificial Sequence
  Synthetic oligonucleotide
aggtcctaaggatgaactcactgggagtag

SEQ ID NO: 91676 - DNA, 30 bp, Artificial Sequence
  Synthetic oligonucleotide
gctattgctgatgccgggtgtaaatagtag

SEQ ID NO: 91677 - DNA, 30 bp, Artificial Sequence
  Synthetic oligonucleotide
ggtgagctaataaacgcgagcctgtagtag

SEQ ID NO: 91678 - DNA, 30 bp, Artificial Sequence
  Synthetic oligonucleotide
caagcccctctttcacgaatgacttagtag

SEQ ID NO: 91679 - DNA, 30 bp, Artificial Sequence
  Synthetic oligonucleotide
gaaggtatctgcttcacaccggaaacgtag

SEQ ID NO: 91680 - DNA, 30 bp, Artificial Sequence
  Synthetic oligonucleotide
aatggctaactcagaatagtttttacgtag

SEQ ID NO: 91681 - DNA, 30 bp, Artificial Sequence
  Synthetic oligonucleotide
gcgacagtattactaagtgccgcaccgtag

SEQ ID NO: 91682 - DNA, 30 bp, Artificial Sequence
  Synthetic oligonucleotide
cgatgctacgccaggccgattggtccgtag

SEQ ID NO: 91683 - DNA, 30 bp, Artificial Sequence
  Synthetic oligonucleotide
tccaaggtggactctccaatctcggcgtag

SEQ ID NO: 91684 - DNA, 30 bp, Artificial Sequence
  Synthetic oligonucleotide
cctaacgacgatccaccaccgtcggcgtag

SEQ ID NO: 91685 - DNA, 30 bp, Artificial Sequence
  Synthetic oligonucleotide
gcgccgaagtcaatcgaggtcggggcgtag

SEQ ID NO: 91686 - DNA, 30 bp, Artificial Sequence
  Synthetic oligonucleotide
ggacaccaccacgatagcctaggctcgtag

SEQ ID NO: 91687 - DNA, 30 bp, Artificial Sequence
  Synthetic oligonucleotide
ataccgtcggtaggtaagactttaaggtag

SEQ ID NO: 91688 - DNA, 30 bp, Artificial Sequence
  Synthetic oligonucleotide
taatgccctcagcgtaaccgcgcgaggtag

SEQ ID NO: 91689 - DNA, 31 bp, Artificial Sequence
  Synthetic oligonucleotide
gaaatgtacggcggtggaaaatcttaggtag

SEQ ID NO: 91690 - DNA, 29 bp, Artificial Sequence
  Synthetic oligonucleotide
cagggtatcgagcgaagccaggacggtag

SEQ ID NO: 91691 - DNA, 30 bp, Artificial Sequence
  Synthetic oligonucleotide
cctatgccctcagaaagcatgggacggtag

SEQ ID NO: 91692 - DNA, 30 bp, Artificial Sequence
  Synthetic oligonucleotide
gccagtaccaaaggtagacccgcgcggtag

SEQ ID NO: 91693 - DNA, 30 bp, Artificial Sequence
  Synthetic oligonucleotide
cgcatatcgataaaaacggcgttagggtag

SEQ ID NO: 91694 - DNA, 30 bp, Artificial Sequence
  Synthetic oligonucleotide
tcacagccgtaaggggggctcgaggggtag

SEQ ID NO: 91695 - DNA, 30 bp, Artificial Sequence
  Synthetic oligonucleotide
gctagaacaaattatgtaggttactggtag

SEQ ID NO: 91696 - DNA, 30 bp, Artificial Sequence
  Synthetic oligonucleotide
gcatgtgcccatgagcacgtctcaatgtag

SEQ ID NO: 91697 - DNA, 30 bp, Artificial Sequence
  Synthetic oligonucleotide
ctccgacgcaataggtgtgtagtaatgtag

SEQ ID NO: 91698 - DNA, 30 bp, Artificial Sequence
  Synthetic oligonucleotide
ggataccgagtgacatctaggctcatgtag

SEQ ID NO: 91699 - DNA, 30 bp, Artificial Sequence
  Synthetic oligonucleotide
taaacggggtgctgataggagtagatgtag

SEQ ID NO: 91700 - DNA, 30 bp, Artificial Sequence
  Synthetic oligonucleotide
gttgcggattaatagcatatggtgatgtag

SEQ ID NO: 91701 - DNA, 30 bp, Artificial Sequence
  Synthetic oligonucleotide
accatactatgtgaacctgcacatctgtag

SEQ ID NO: 91702 - DNA, 30 bp, Artificial Sequence
  Synthetic oligonucleotide
tcaagggatagtacagcgacggtagtgtag

SEQ ID NO: 91703 - DNA, 30 bp, Artificial Sequence
  Synthetic oligonucleotide
ttagagccaactactgtcattatcgtgtag

SEQ ID NO: 91704 - DNA, 30 bp, Artificial Sequence
  Synthetic oligonucleotide
taatcaacatccttcgcgggataggtgtag

SEQ ID NO: 91705 - DNA, 30 bp, Artificial Sequence
  Synthetic oligonucleotide
agtgggagaaggctggtgtctagcttgtag

SEQ ID NO: 91706 - DNA, 30 bp, Artificial Sequence
  Synthetic oligonucleotide
aacattacattgaagtaatttggtttgtag

SEQ ID NO: 91707 - DNA, 30 bp, Artificial Sequence
  Synthetic oligonucleotide
caatatgttacggtctccaaaataaattag

SEQ ID NO: 91708 - DNA, 30 bp, Artificial Sequence
  Synthetic oligonucleotide
catgccaacgatatgtaggtggcacattag

SEQ ID NO: 91709 - DNA, 30 bp, Artificial Sequence
  Synthetic oligonucleotide
tccatgggtgttgcttccacagagcattag

SEQ ID NO: 91710 - DNA, 30 bp, Artificial Sequence
  Synthetic oligonucleotide
cctacattgttatcagtaacgtaggattag

SEQ ID NO: 91711 - DNA, 30 bp, Artificial Sequence
  Synthetic oligonucleotide
tcgggcagatgggagtaaccatgggattag

SEQ ID NO: 91712 - DNA, 30 bp, Artificial Sequence
  Synthetic oligonucleotide
tgagcgcttgggcgcaagcgacatgattag

SEQ ID NO: 91713 - DNA, 30 bp, Artificial Sequence
  Synthetic oligonucleotide
catggaatgggcgaaataggaactgattag

SEQ ID NO: 91714 - DNA, 30 bp, Artificial Sequence
  Synthetic oligonucleotide
ggaggtggtccagtgggcatccactattag

SEQ ID NO: 91715 - DNA, 30 bp, Artificial Sequence
  Synthetic oligonucleotide
tcatctcccacgaagagcgattattattag

SEQ ID NO: 91716 - DNA, 30 bp, Artificial Sequence
  Synthetic oligonucleotide
tatcgatccagccctgcaagggcaacttag

SEQ ID NO: 91717 - DNA, 30 bp, Artificial Sequence
  Synthetic oligonucleotide
gggggtgaagaatcacccggtggaacttag

SEQ ID NO: 91718 - DNA, 30 bp, Artificial Sequence
  Synthetic oligonucleotide
tgtgtcacctaggcagaggtgacgacttag

SEQ ID NO: 91719 - DNA, 31 bp, Artificial Sequence
  Synthetic oligonucleotide
ggcgtcttctccggcctcctaattagcttag

SEQ ID NO: 91720 - DNA, 30 bp, Artificial Sequence
  Synthetic oligonucleotide
gggaacgaatatcagtatctacgcgcttag

SEQ ID NO: 91721 - DNA, 30 bp, Artificial Sequence
  Synthetic oligonucleotide
tagcttagaatcggggaccgtccatcttag

SEQ ID NO: 91722 - DNA, 30 bp, Artificial Sequence
  Synthetic oligonucleotide
gggacaccctcctcgctcttagcgtcttag

SEQ ID NO: 91723 - DNA, 30 bp, Artificial Sequence
  Synthetic oligonucleotide
atcatgctatcaaaaaaaaacgaaagttag

SEQ ID NO: 91724 - DNA, 30 bp, Artificial Sequence
  Synthetic oligonucleotide
gagcgaatgagctgtattggccatagttag

SEQ ID NO: 91725 - DNA, 30 bp, Artificial Sequence
  Synthetic oligonucleotide
ccgaaatcactgtaaagaaacgatagttag

SEQ ID NO: 91726 - DNA, 30 bp, Artificial Sequence
  Synthetic oligonucleotide
gcatgtgtgctgccgaaacgacttagttag

SEQ ID NO: 91727 - DNA, 30 bp, Artificial Sequence
  Synthetic oligonucleotide
cctacgctgataaattatcatggaggttag

SEQ ID NO: 91728 - DNA, 30 bp, Artificial Sequence
  Synthetic oligonucleotide
gcggtcattcggggcattgtcttatgttag

SEQ ID NO: 91729 - DNA, 30 bp, Artificial Sequence
  Synthetic oligonucleotide
caagacgggggttacttctccacgtgttag

SEQ ID NO: 91730 - DNA, 30 bp, Artificial Sequence
  Synthetic oligonucleotide
ctttgtgaaggggttgaagaggaaatttag

SEQ ID NO: 91731 - DNA, 30 bp, Artificial Sequence
  Synthetic oligonucleotide
cataagaataggcggaacgatagaatttag

SEQ ID NO: 91732 - DNA, 30 bp, Artificial Sequence
  Synthetic oligonucleotide
gtacggcaaagggatgcagtcataatttag

SEQ ID NO: 91733 - DNA, 30 bp, Artificial Sequence
  Synthetic oligonucleotide
ttggagcaacccactagtaggcacgtttag

SEQ ID NO: 91734 - DNA, 30 bp, Artificial Sequence
  Synthetic oligonucleotide
aactctgcaaaatcagataagcgcgtttag

SEQ ID NO: 91735 - DNA, 30 bp, Artificial Sequence
  Synthetic oligonucleotide
aggtaagagtgcggttatgcgttcgtttag

SEQ ID NO: 91736 - DNA, 30 bp, Artificial Sequence
  Synthetic oligonucleotide
gcgaagttcgcgtcggtcggtaaggtttag

SEQ ID NO: 91737 - DNA, 29 bp, Artificial Sequence
  Synthetic oligonucleotide
agcgtaccttcgttcgttgagacttttag

SEQ ID NO: 91738 - DNA, 30 bp, Artificial Sequence
  Synthetic oligonucleotide
aagtgggaatgaaataacgagggcaaaacg

SEQ ID NO: 91739 - DNA, 30 bp, Artificial Sequence
  Synthetic oligonucleotide
tcgtcatagggcattgtcgggaagcaaacg

SEQ ID NO: 91740 - DNA, 30 bp, Artificial Sequence
  Synthetic oligonucleotide
tgcaatcgcatcaattccggtaagcaaacg

SEQ ID NO: 91741 - DNA, 30 bp, Artificial Sequence
  Synthetic oligonucleotide
cttgggtagtcacacggtaatccgcaaacg

SEQ ID NO: 91742 - DNA, 30 bp, Artificial Sequence
  Synthetic oligonucleotide
agaccactctcgccgtgacagaaggaaacg

SEQ ID NO: 91743 - DNA, 30 bp, Artificial Sequence
  Synthetic oligonucleotide
ccatatgctttaacggccggacatgaaacg

SEQ ID NO: 91744 - DNA, 30 bp, Artificial Sequence
  Synthetic oligonucleotide
tggcgtagaggctcggcgaccggtgaaacg

SEQ ID NO: 91745 - DNA, 30 bp, Artificial Sequence
  Synthetic oligonucleotide
caagcatctcttgaagaaaccgagtaaacg

SEQ ID NO: 91746 - DNA, 30 bp, Artificial Sequence
  Synthetic oligonucleotide
gaacgctggctccagcccagatggtaaacg

SEQ ID NO: 91747 - DNA, 30 bp, Artificial Sequence
  Synthetic oligonucleotide
catctgtagtgaaataagccactttaaacg

SEQ ID NO: 91748 - DNA, 30 bp, Artificial Sequence
  Synthetic oligonucleotide
ggggcacgtggcatgaagaggtcgacaacg

SEQ ID NO: 91749 - DNA, 30 bp, Artificial Sequence
  Synthetic oligonucleotide
gaacaggacaacgtcctccaggggacaacg

SEQ ID NO: 91750 - DNA, 30 bp, Artificial Sequence
  Synthetic oligonucleotide
ctggcactgtgctgtggccattgaccaacg

SEQ ID NO: 91751 - DNA, 30 bp, Artificial Sequence
  Synthetic oligonucleotide
tcaaaagaaaggcgagctaaggccccaacg

SEQ ID NO: 91752 - DNA, 30 bp, Artificial Sequence
  Synthetic oligonucleotide
gaccggtaattctgtgtacattcgccaacg

SEQ ID NO: 91753 - DNA, 30 bp, Artificial Sequence
  Synthetic oligonucleotide
aaggtgtgtaccacaaacgacactccaacg

SEQ ID NO: 91754 - DNA, 30 bp, Artificial Sequence
  Synthetic oligonucleotide
cagatgtggtgaaggcccgacgttccaacg

SEQ ID NO: 91755 - DNA, 30 bp, Artificial Sequence
  Synthetic oligonucleotide
aatccgatacacgaaataggtcccgcaacg

SEQ ID NO: 91756 - DNA, 30 bp, Artificial Sequence
  Synthetic oligonucleotide
tgcggagggtaacaagccaatcaggcaacg

SEQ ID NO: 91757 - DNA, 30 bp, Artificial Sequence
  Synthetic oligonucleotide
tacaaccccggcctaaccttaggggcaacg

SEQ ID NO: 91758 - DNA, 30 bp, Artificial Sequence
  Synthetic oligonucleotide
aaactggttgtcaaacttatacgatcaacg

SEQ ID NO: 91759 - DNA, 30 bp, Artificial Sequence
  Synthetic oligonucleotide
tcgtctgaaccttcaagctacggttcaacg

SEQ ID NO: 91760 - DNA, 30 bp, Artificial Sequence
  Synthetic oligonucleotide
gacaagaaaggcttcccgcatggttcaacg

SEQ ID NO: 91761 - DNA, 30 bp, Artificial Sequence
  Synthetic oligonucleotide
acaagagttaatgagcaagatggttcaacg

SEQ ID NO: 91762 - DNA, 30 bp, Artificial Sequence
  Synthetic oligonucleotide
gtctatcaggtgcgtagcatgaaaagaacg

SEQ ID NO: 91763 - DNA, 30 bp, Artificial Sequence
  Synthetic oligonucleotide
agcacacatttggacaaatttgagagaacg

SEQ ID NO: 91764 - DNA, 30 bp, Artificial Sequence
  Synthetic oligonucleotide
gatacacaggggtgggcttggtttcgaacg

SEQ ID NO: 91765 - DNA, 30 bp, Artificial Sequence
  Synthetic oligonucleotide
ggacagaacgtgcctagcttagaatgaacg

SEQ ID NO: 91766 - DNA, 30 bp, Artificial Sequence
  Synthetic oligonucleotide
aaaactattgcaagaacgagtccctgaacg

SEQ ID NO: 91767 - DNA, 30 bp, Artificial Sequence
  Synthetic oligonucleotide
ccgtggaggtatcctctaacacgctgaacg

SEQ ID NO: 91768 - DNA, 30 bp, Artificial Sequence
  Synthetic oligonucleotide
aagataccgagcgcaactgcgatttgaacg

SEQ ID NO: 91769 - DNA, 29 bp, Artificial Sequence
  Synthetic oligonucleotide
cccatacctgggagtaagaccgcataacg

SEQ ID NO: 91770 - DNA, 30 bp, Artificial Sequence
  Synthetic oligonucleotide
caagcacatacagtacagaaacagataacg

SEQ ID NO: 91771 - DNA, 30 bp, Artificial Sequence
  Synthetic oligonucleotide
taacaacggcccagggggattgctataacg

SEQ ID NO: 91772 - DNA, 30 bp, Artificial Sequence
  Synthetic oligonucleotide
catgatgccgtgctcggggaagtagtaacg

SEQ ID NO: 91773 - DNA, 30 bp, Artificial Sequence
  Synthetic oligonucleotide
gggtcgagtgcgtccgcagacttagtaacg

SEQ ID NO: 91774 - DNA, 30 bp, Artificial Sequence
  Synthetic oligonucleotide
ggaaagacttccgacggccggccattaacg

SEQ ID NO: 91775 - DNA, 30 bp, Artificial Sequence
  Synthetic oligonucleotide
taaagatcgctacacaaagcatggttaacg

SEQ ID NO: 91776 - DNA, 30 bp, Artificial Sequence
  Synthetic oligonucleotide
tcggatattaaaatctgtaggcccaacacg

SEQ ID NO: 91777 - DNA, 30 bp, Artificial Sequence
  Synthetic oligonucleotide
agcctgaaaagactttgtattccgaacacg

SEQ ID NO: 91778 - DNA, 30 bp, Artificial Sequence
  Synthetic oligonucleotide
acagcctagctatgtatgggtgcccacacg

SEQ ID NO: 91779 - DNA, 30 bp, Artificial Sequence
  Synthetic oligonucleotide
ggggtaacaagtttgcccacaagctacacg

SEQ ID NO: 91780 - DNA, 30 bp, Artificial Sequence
  Synthetic oligonucleotide
cggtcgtagtgtaaatttcagtagtacacg

SEQ ID NO: 91781 - DNA, 30 bp, Artificial Sequence
  Synthetic oligonucleotide
aggtgatgtccagaagaagatgggaccacg

SEQ ID NO: 91782 - DNA, 30 bp, Artificial Sequence
  Synthetic oligonucleotide
gaaggcaaccactgttagggaagtcccacg

SEQ ID NO: 91783 - DNA, 30 bp, Artificial Sequence
  Synthetic oligonucleotide
cacgttcgattccgtaagtgacaagccacg

SEQ ID NO: 91784 - DNA, 30 bp, Artificial Sequence
  Synthetic oligonucleotide
tgaccgaagcttcaatagttcagtgccacg

SEQ ID NO: 91785 - DNA, 30 bp, Artificial Sequence
  Synthetic oligonucleotide
gtcgactgaggaggaaaccggtggtccacg

SEQ ID NO: 91786 - DNA, 30 bp, Artificial Sequence
  Synthetic oligonucleotide
gaggaataaatcacggaggtcgattccacg

SEQ ID NO: 91787 - DNA, 30 bp, Artificial Sequence
  Synthetic oligonucleotide
ataggcaacatctcatttagtttcagcacg

SEQ ID NO: 91788 - DNA, 30 bp, Artificial Sequence
  Synthetic oligonucleotide
ggaaggcatacgggaatctatgatagcacg

SEQ ID NO: 91789 - DNA, 30 bp, Artificial Sequence
  Synthetic oligonucleotide
tcgggatgttctgttcgacactctagcacg

SEQ ID NO: 91790 - DNA, 30 bp, Artificial Sequence
  Synthetic oligonucleotide
tgggcaggttgaccaccccgtaagggcacg

SEQ ID NO: 91791 - DNA, 30 bp, Artificial Sequence
  Synthetic oligonucleotide
agtccgagcactgaattagataatggcacg

SEQ ID NO: 91792 - DNA, 30 bp, Artificial Sequence
  Synthetic oligonucleotide
ggggacctccgcaaaaaaaatctaatcacg

SEQ ID NO: 91793 - DNA, 30 bp, Artificial Sequence
  Synthetic oligonucleotide
gacatactatacaggtgagtccagatcacg

SEQ ID NO: 91794 - DNA, 30 bp, Artificial Sequence
  Synthetic oligonucleotide
ataggctacaggcacactgcagggatcacg

SEQ ID NO: 91795 - DNA, 30 bp, Artificial Sequence
  Synthetic oligonucleotide
ctcaatccacaaaagaagtttgatctcacg

SEQ ID NO: 91796 - DNA, 30 bp, Artificial Sequence
  Synthetic oligonucleotide
aggtgtagcaaacccttcggttgagtcacg

SEQ ID NO: 91797 - DNA, 30 bp, Artificial Sequence
  Synthetic oligonucleotide
ttaggggtatctgagtcatggacgttcacg

SEQ ID NO: 91798 - DNA, 30 bp, Artificial Sequence
  Synthetic oligonucleotide
acatagtccgcggaaatttgacggttcacg

SEQ ID NO: 91799 - DNA, 30 bp, Artificial Sequence
  Synthetic oligonucleotide
tcggatgccttcagtcgaatagggttcacg

SEQ ID NO: 91800 - DNA, 30 bp, Artificial Sequence
  Synthetic oligonucleotide
gggcgggataatgtcttaggatccaagacg

SEQ ID NO: 91801 - DNA, 29 bp, Artificial Sequence
  Synthetic oligonucleotide
acagaggtatggtaaacttgtcacagacg

SEQ ID NO: 91802 - DNA, 30 bp, Artificial Sequence
  Synthetic oligonucleotide
agcatcgcccgtatctgagtgtcccagacg

SEQ ID NO: 91803 - DNA, 30 bp, Artificial Sequence
  Synthetic oligonucleotide
caaaccgtcacagggatttaaggtcagacg

SEQ ID NO: 91804 - DNA, 30 bp, Artificial Sequence
  Synthetic oligonucleotide
ggtagcgggtatatggaatcactcgagacg

SEQ ID NO: 91805 - DNA, 30 bp, Artificial Sequence
  Synthetic oligonucleotide
gatgctaaaaggaatgagatctgggagacg

SEQ ID NO: 91806 - DNA, 30 bp, Artificial Sequence
  Synthetic oligonucleotide
tcccttgcaataaaaggtgaattatagacg

SEQ ID NO: 91807 - DNA, 30 bp, Artificial Sequence
  Synthetic oligonucleotide
tgccaaactcgactgccaggaagctagacg

SEQ ID NO: 91808 - DNA, 31 bp, Artificial Sequence
  Synthetic oligonucleotide
atgtcttagagcaagaaacaagtggtagacg

SEQ ID NO: 91809 - DNA, 30 bp, Artificial Sequence
  Synthetic oligonucleotide
catgccaccaagcgcgaggtgcgttagacg

SEQ ID NO: 91810 - DNA, 30 bp, Artificial Sequence
  Synthetic oligonucleotide
ccaataccagtagaaagatactcaacgacg

SEQ ID NO: 91811 - DNA, 30 bp, Artificial Sequence
  Synthetic oligonucleotide
atggcaagtattcaggctgaccagacgacg

SEQ ID NO: 91812 - DNA, 30 bp, Artificial Sequence
  Synthetic oligonucleotide
tcagaccgcgagactccacagagcccgacg

SEQ ID NO: 91813 - DNA, 31 bp, Artificial Sequence
  Synthetic oligonucleotide
atatggattaacccacatgataacgccgacg

SEQ ID NO: 91814 - DNA, 30 bp, Artificial Sequence
  Synthetic oligonucleotide
cagcggacggacccccgttaagaggcgacg

SEQ ID NO: 91815 - DNA, 30 bp, Artificial Sequence
  Synthetic oligonucleotide
gagatgttggctcttgacgaaggaaggacg

SEQ ID NO: 91816 - DNA, 30 bp, Artificial Sequence
  Synthetic oligonucleotide
atgataacaccttgttaatcagagaggacg

SEQ ID NO: 91817 - DNA, 30 bp, Artificial Sequence
  Synthetic oligonucleotide
gtcgttggccatagtatcgtgagccggacg

SEQ ID NO: 91818 - DNA, 30 bp, Artificial Sequence
  Synthetic oligonucleotide
ggcaacatgaggtggtattaatcgcggacg

SEQ ID NO: 91819 - DNA, 30 bp, Artificial Sequence
  Synthetic oligonucleotide
tgaggagcgtgtagcagtgcagtagggacg

SEQ ID NO: 91820 - DNA, 30 bp, Artificial Sequence
  Synthetic oligonucleotide
tacgatgggattgcgaatggggtatggacg

SEQ ID NO: 91821 - DNA, 30 bp, Artificial Sequence
  Synthetic oligonucleotide
tgtttggtaacacacgaagacggaatgacg

SEQ ID NO: 91822 - DNA, 30 bp, Artificial Sequence
  Synthetic oligonucleotide
agatagagtgtgccaagtcgttatatgacg

SEQ ID NO: 91823 - DNA, 30 bp, Artificial Sequence
  Synthetic oligonucleotide
tacagggacaggggagctcatacactgacg

SEQ ID NO: 91824 - DNA, 30 bp, Artificial Sequence
  Synthetic oligonucleotide
tctaaaaagttatacatgagttacctgacg

SEQ ID NO: 91825 - DNA, 30 bp, Artificial Sequence
  Synthetic oligonucleotide
ccgaggcagacaacatattgcccggtgacg

SEQ ID NO: 91826 - DNA, 30 bp, Artificial Sequence
  Synthetic oligonucleotide
agcaagacaaccgtgtcctaccttgtgacg

SEQ ID NO: 91827 - DNA, 30 bp, Artificial Sequence
  Synthetic oligonucleotide
ggtgccggactggaaactataagattgacg

SEQ ID NO: 91828 - DNA, 30 bp, Artificial Sequence
  Synthetic oligonucleotide
gagaggaaccgaaaatgcgaatctttgacg

SEQ ID NO: 91829 - DNA, 30 bp, Artificial Sequence
  Synthetic oligonucleotide
actatgctacatataacctacatgaatacg

SEQ ID NO: 91830 - DNA, 30 bp, Artificial Sequence
  Synthetic oligonucleotide
acgggcgtatagcgaacgagatcacatacg

SEQ ID NO: 91831 - DNA, 30 bp, Artificial Sequence
  Synthetic oligonucleotide
ccttgtgtttcaaagcatgcaatacatacg

SEQ ID NO: 91832 - DNA, 30 bp, Artificial Sequence
  Synthetic oligonucleotide
ttagcaaacaaaactagcacgctccatacg

SEQ ID NO: 91833 - DNA, 30 bp, Artificial Sequence
  Synthetic oligonucleotide
ccacggcggaggccccccgacgatcatacg

SEQ ID NO: 91834 - DNA, 30 bp, Artificial Sequence
  Synthetic oligonucleotide
ggaaaagagggcatagggtacaaagatacg

SEQ ID NO: 91835 - DNA, 30 bp, Artificial Sequence
  Synthetic oligonucleotide
agagcgcacgtgcccaggtagctcgatacg

SEQ ID NO: 91836 - DNA, 30 bp, Artificial Sequence
  Synthetic oligonucleotide
gcgtcagcgcgggttaggcctctcgatacg

SEQ ID NO: 91837 - DNA, 30 bp, Artificial Sequence
  Synthetic oligonucleotide
accagcgccgtaacaaactaccgctatacg

SEQ ID NO: 91838 - DNA, 30 bp, Artificial Sequence
  Synthetic oligonucleotide
gcctacggaccaaattaccatttctatacg

SEQ ID NO: 91839 - DNA, 30 bp, Artificial Sequence
  Synthetic oligonucleotide
gctgtaaaggatcgagccactaagtatacg

SEQ ID NO: 91840 - DNA, 30 bp, Artificial Sequence
  Synthetic oligonucleotide
ctcggtcgtaggcagtaaatcgcaactacg

SEQ ID NO: 91841 - DNA, 30 bp, Artificial Sequence
  Synthetic oligonucleotide
aacagcccgggtcgcctattgggaactacg

SEQ ID NO: 91842 - DNA, 30 bp, Artificial Sequence
  Synthetic oligonucleotide
gcacgcctagcgtccaaactaaggactacg

SEQ ID NO: 91843 - DNA, 30 bp, Artificial Sequence
  Synthetic oligonucleotide
gcgtaaaggccttactgacaccctactacg

SEQ ID NO: 91844 - DNA, 30 bp, Artificial Sequence
  Synthetic oligonucleotide
ctcaaaaggtaacatgttctccctactacg

SEQ ID NO: 91845 - DNA, 30 bp, Artificial Sequence
  Synthetic oligonucleotide
atcgcgctagcgaataaaactcttactacg

SEQ ID NO: 91846 - DNA, 30 bp, Artificial Sequence
  Synthetic oligonucleotide
tggacaatgctcatcgtggatgaccctacg

SEQ ID NO: 91847 - DNA, 30 bp, Artificial Sequence
  Synthetic oligonucleotide
ctaaataggggtcaagtggtcctgcctacg

SEQ ID NO: 91848 - DNA, 30 bp, Artificial Sequence
  Synthetic oligonucleotide
cgttgttcagaaaaaaagtatagtgctacg

SEQ ID NO: 91849 - DNA, 30 bp, Artificial Sequence
  Synthetic oligonucleotide
aggaagaaagcccttcacgcaattgctacg

SEQ ID NO: 91850 - DNA, 30 bp, Artificial Sequence
  Synthetic oligonucleotide
cacctaggttaaaacccgaattaatctacg

SEQ ID NO: 91851 - DNA, 30 bp, Artificial Sequence
  Synthetic oligonucleotide
gagtccggaggcatggcaagattgtctacg

SEQ ID NO: 91852 - DNA, 30 bp, Artificial Sequence
  Synthetic oligonucleotide
gatcgacctctcttagtgatacaaagtacg

SEQ ID NO: 91853 - DNA, 30 bp, Artificial Sequence
  Synthetic oligonucleotide
agatgataaggcctgtgagcctacagtacg

SEQ ID NO: 91854 - DNA, 30 bp, Artificial Sequence
  Synthetic oligonucleotide
tggggtttaacatggattcggtagcgtacg

SEQ ID NO: 91855 - DNA, 30 bp, Artificial Sequence
  Synthetic oligonucleotide
gctcgacactagtgaagtcagtgcggtacg

SEQ ID NO: 91856 - DNA, 30 bp, Artificial Sequence
  Synthetic oligonucleotide
aaaagagtcaggtatgcgaaggactgtacg

SEQ ID NO: 91857 - DNA, 30 bp, Artificial Sequence
  Synthetic oligonucleotide
ctccactgaaatgaaggtggtgattgtacg

SEQ ID NO: 91858 - DNA, 30 bp, Artificial Sequence
  Synthetic oligonucleotide
aaggtgattaagacatttctcacttgtacg

SEQ ID NO: 91859 - DNA, 30 bp, Artificial Sequence
  Synthetic oligonucleotide
aagtagggacctggggcatccatacttacg

SEQ ID NO: 91860 - DNA, 30 bp, Artificial Sequence
  Synthetic oligonucleotide
aaggcggcaagtactcatttgctacttacg

SEQ ID NO: 91861 - DNA, 30 bp, Artificial Sequence
  Synthetic oligonucleotide
gtagcgaaaaacgttgggatacggcttacg

SEQ ID NO: 91862 - DNA, 30 bp, Artificial Sequence
  Synthetic oligonucleotide
gagcatggactactaacatcgtgagttacg

SEQ ID NO: 91863 - DNA, 30 bp, Artificial Sequence
  Synthetic oligonucleotide
aacgacggcaatagatatccacggtttacg

SEQ ID NO: 91864 - DNA, 30 bp, Artificial Sequence
  Synthetic oligonucleotide
gcgggaacgagtaacgaagttacgaaaccg

SEQ ID NO: 91865 - DNA, 30 bp, Artificial Sequence
  Synthetic oligonucleotide
cgctagtgggtagaggctaagtcacaaccg

SEQ ID NO: 91866 - DNA, 31 bp, Artificial Sequence
  Synthetic oligonucleotide
ccctgtacgagaagatctagagggacaaccg

SEQ ID NO: 91867 - DNA, 30 bp, Artificial Sequence
  Synthetic oligonucleotide
gcctgtgattagaataagattcaagaaccg

SEQ ID NO: 91868 - DNA, 30 bp, Artificial Sequence
  Synthetic oligonucleotide
gtctcagcagaaggtgcaggaaatgaaccg

SEQ ID NO: 91869 - DNA, 30 bp, Artificial Sequence
  Synthetic oligonucleotide
gacttacagggaaaatgaatagcataaccg

SEQ ID NO: 91870 - DNA, 30 bp, Artificial Sequence
  Synthetic oligonucleotide
gtggtgtgagttgactatggcatataaccg

SEQ ID NO: 91871 - DNA, 30 bp, Artificial Sequence
  Synthetic oligonucleotide
cccaactaccataaagcctaaccctaaccg

SEQ ID NO: 91872 - DNA, 30 bp, Artificial Sequence
  Synthetic oligonucleotide
ctcgttcatttatcgtcggcccagtaaccg

SEQ ID NO: 91873 - DNA, 30 bp, Artificial Sequence
  Synthetic oligonucleotide
ctaagctttaacaaggtgcctggcacaccg

SEQ ID NO: 91874 - DNA, 30 bp, Artificial Sequence
  Synthetic oligonucleotide
gtcaagaatccaagcaatcagtgcccaccg

SEQ ID NO: 91875 - DNA, 30 bp, Artificial Sequence
  Synthetic oligonucleotide
aatggattgaagacgaactcatggccaccg

SEQ ID NO: 91876 - DNA, 30 bp, Artificial Sequence
  Synthetic oligonucleotide
atgagtgtaacgcgctaagttcgagcaccg

SEQ ID NO: 91877 - DNA, 30 bp, Artificial Sequence
  Synthetic oligonucleotide
cattggttggattagaaggttggagcaccg

SEQ ID NO: 91878 - DNA, 30 bp, Artificial Sequence
  Synthetic oligonucleotide
cgcgagacaaatagatgatgctccgcaccg

SEQ ID NO: 91879 - DNA, 30 bp, Artificial Sequence
  Synthetic oligonucleotide
ccgggttcacgtgactagacgggccgaccg

SEQ ID NO: 91880 - DNA, 30 bp, Artificial Sequence
  Synthetic oligonucleotide
cggaaacacctagcactcccacacggaccg

SEQ ID NO: 91881 - DNA, 30 bp, Artificial Sequence
  Synthetic oligonucleotide
acatggtgcaacgatcatgggtgcggaccg

SEQ ID NO: 91882 - DNA, 30 bp, Artificial Sequence
  Synthetic oligonucleotide
ctcgtaaggatttgatccgggaactgaccg

SEQ ID NO: 91883 - DNA, 30 bp, Artificial Sequence
  Synthetic oligonucleotide
cggtgcacgttttgtgagaatcagtgaccg

SEQ ID NO: 91884 - DNA, 30 bp, Artificial Sequence
  Synthetic oligonucleotide
caccataggtttgtgacaacggtttgaccg

SEQ ID NO: 91885 - DNA, 30 bp, Artificial Sequence
  Synthetic oligonucleotide
agttcactgggggatgtctcgccactaccg

SEQ ID NO: 91886 - DNA, 30 bp, Artificial Sequence
  Synthetic oligonucleotide
ggtaggaagtgtacaatagattatctaccg

SEQ ID NO: 91887 - DNA, 30 bp, Artificial Sequence
  Synthetic oligonucleotide
ggagcagaaaagcgagtctgttccgtaccg

SEQ ID NO: 91888 - DNA, 30 bp, Artificial Sequence
  Synthetic oligonucleotide
acttccggctccaggaatacgtgattaccg

SEQ ID NO: 91889 - DNA, 30 bp, Artificial Sequence
  Synthetic oligonucleotide
ttacctaatggggcgtacaacgagaacccg

SEQ ID NO: 91890 - DNA, 30 bp, Artificial Sequence
  Synthetic oligonucleotide
tcgttatcctctggtatcactagtaacccg

SEQ ID NO: 91891 - DNA, 30 bp, Artificial Sequence
  Synthetic oligonucleotide
ggcaatgagcggggacaggtcacagacccg

SEQ ID NO: 91892 - DNA, 30 bp, Artificial Sequence
  Synthetic oligonucleotide
tgtatcagggttgaggaccacctcgacccg

SEQ ID NO: 91893 - DNA, 30 bp, Artificial Sequence
  Synthetic oligonucleotide
tcgaagagctggtccgtttgtcaacccccg

SEQ ID NO: 91894 - DNA, 30 bp, Artificial Sequence
  Synthetic oligonucleotide
ttgccctgcggtaagccgtgaagacccccg

SEQ ID NO: 91895 - DNA, 30 bp, Artificial Sequence
  Synthetic oligonucleotide
cacgaagtgactcattgcgcggatcccccg

SEQ ID NO: 91896 - DNA, 30 bp, Artificial Sequence
  Synthetic oligonucleotide
gcaaggtgcctggaagcggatagcgccccg

SEQ ID NO: 91897 - DNA, 30 bp, Artificial Sequence
  Synthetic oligonucleotide
cgcgactggcgccagagtcaccgcgccccg

SEQ ID NO: 91898 - DNA, 30 bp, Artificial Sequence
  Synthetic oligonucleotide
agcgatgcataagcctatatgccatccccg

SEQ ID NO: 91899 - DNA, 30 bp, Artificial Sequence
  Synthetic oligonucleotide
aggaagggattagggttacctttctccccg

SEQ ID NO: 91900 - DNA, 30 bp, Artificial Sequence
  Synthetic oligonucleotide
caccttaagagtcttaaaacagcaagcccg

SEQ ID NO: 91901 - DNA, 30 bp, Artificial Sequence
  Synthetic oligonucleotide
tcagtggtgctgcaatacttgcaccgcccg

SEQ ID NO: 91902 - DNA, 30 bp, Artificial Sequence
  Synthetic oligonucleotide
aggtcgagtcagctattgtatgaccgcccg

SEQ ID NO: 91903 - DNA, 30 bp, Artificial Sequence
  Synthetic oligonucleotide
gagagggaatccaatttttaggagcgcccg

SEQ ID NO: 91904 - DNA, 30 bp, Artificial Sequence
  Synthetic oligonucleotide
agcgttgtgtagggctatccagacggcccg

SEQ ID NO: 91905 - DNA, 30 bp, Artificial Sequence
  Synthetic oligonucleotide
gataacgaattctggaaactgaacatcccg

SEQ ID NO: 91906 - DNA, 30 bp, Artificial Sequence
  Synthetic oligonucleotide
gccaacaaacgagtaggagaccttatcccg

SEQ ID NO: 91907 - DNA, 30 bp, Artificial Sequence
  Synthetic oligonucleotide
ctgagagagggacgtaacaaggccctcccg

SEQ ID NO: 91908 - DNA, 30 bp, Artificial Sequence
  Synthetic oligonucleotide
gtcagataatggtctaagaccgctctcccg

SEQ ID NO: 91909 - DNA, 30 bp, Artificial Sequence
  Synthetic oligonucleotide
ctgggttggaggggatgcccttcagtcccg

SEQ ID NO: 91910 - DNA, 30 bp, Artificial Sequence
  Synthetic oligonucleotide
gcatatctgcgaatgcacgatgggttcccg

SEQ ID NO: 91911 - DNA, 30 bp, Artificial Sequence
  Synthetic oligonucleotide
accatacgcattaaattgatggtacagccg

SEQ ID NO: 91912 - DNA, 30 bp, Artificial Sequence
  Synthetic oligonucleotide
aacatgggaagaacgttgaaatgctagccg

SEQ ID NO: 91913 - DNA, 30 bp, Artificial Sequence
  Synthetic oligonucleotide
cccataaaggcgacgtgagcattgtagccg

SEQ ID NO: 91914 - DNA, 30 bp, Artificial Sequence
  Synthetic oligonucleotide
cagggaacaataaggctggctcgaacgccg

SEQ ID NO: 91915 - DNA, 30 bp, Artificial Sequence
  Synthetic oligonucleotide
atcgggtcgcaaattcaatagtacgcgccg

SEQ ID NO: 91916 - DNA, 30 bp, Artificial Sequence
  Synthetic oligonucleotide
ggcaggtagaaagtccttgtgcccgcgccg

SEQ ID NO: 91917 - DNA, 30 bp, Artificial Sequence
  Synthetic oligonucleotide
ggagctttaatggtgcatgatggatcgccg

SEQ ID NO: 91918 - DNA, 30 bp, Artificial Sequence
  Synthetic oligonucleotide
cggctaagtagccagtatgtttgatcgccg

SEQ ID NO: 91919 - DNA, 30 bp, Artificial Sequence
  Synthetic oligonucleotide
tacaggcttgactcctacgacggacggccg

SEQ ID NO: 91920 - DNA, 30 bp, Artificial Sequence
  Synthetic oligonucleotide
agcctggccgaagaggctgtgaccgggccg

SEQ ID NO: 91921 - DNA, 30 bp, Artificial Sequence
  Synthetic oligonucleotide
ccacggagctaaggttcgaatgaaatgccg

SEQ ID NO: 91922 - DNA, 30 bp, Artificial Sequence
  Synthetic oligonucleotide
atcaatcacgggaacagacctctaatgccg

SEQ ID NO: 91923 - DNA, 30 bp, Artificial Sequence
  Synthetic oligonucleotide
cgttcacacaacttcgtcattcacctgccg

SEQ ID NO: 91924 - DNA, 30 bp, Artificial Sequence
  Synthetic oligonucleotide
ttgggaaagaagtgcgagtacatgctgccg

SEQ ID NO: 91925 - DNA, 30 bp, Artificial Sequence
  Synthetic oligonucleotide
tggtctgacggagaaggagtatgtctgccg

SEQ ID NO: 91926 - DNA, 30 bp, Artificial Sequence
  Synthetic oligonucleotide
cgaccggtcgtaggaaaaggatagttgccg

SEQ ID NO: 91927 - DNA, 30 bp, Artificial Sequence
  Synthetic oligonucleotide
ctggaggacgtcccaaggtccggcaatccg

SEQ ID NO: 91928 - DNA, 30 bp, Artificial Sequence
  Synthetic oligonucleotide
gcaaatgggcatgtcgtctactagaatccg

SEQ ID NO: 91929 - DNA, 30 bp, Artificial Sequence
  Synthetic oligonucleotide
ggatacaatggttaagattatgcgaatccg

SEQ ID NO: 91930 - DNA, 30 bp, Artificial Sequence
  Synthetic oligonucleotide
acctcatcgaacgataacttaaaccatccg

SEQ ID NO: 91931 - DNA, 30 bp, Artificial Sequence
  Synthetic oligonucleotide
tacattggcaaacgctctggtcagcatccg

SEQ ID NO: 91932 - DNA, 30 bp, Artificial Sequence
  Synthetic oligonucleotide
accacgaagccctcctaggataaagatccg

SEQ ID NO: 91933 - DNA, 30 bp, Artificial Sequence
  Synthetic oligonucleotide
ggggtacatttgcaatgtacttcagatccg

SEQ ID NO: 91934 - DNA, 30 bp, Artificial Sequence
  Synthetic oligonucleotide
cgcgaattgaacgagattccgtgatatccg

SEQ ID NO: 91935 - DNA, 30 bp, Artificial Sequence
  Synthetic oligonucleotide
acagggcgaacagcctagtgcccaactccg

SEQ ID NO: 91936 - DNA, 30 bp, Artificial Sequence
  Synthetic oligonucleotide
cgccatagcgcaatgcttggcatgactccg

SEQ ID NO: 91937 - DNA, 30 bp, Artificial Sequence
  Synthetic oligonucleotide
tcagcattcccatcatctagttcacctccg

SEQ ID NO: 91938 - DNA, 30 bp, Artificial Sequence
  Synthetic oligonucleotide
gcctatagcgaggatgtacccgtccctccg

SEQ ID NO: 91939 - DNA, 30 bp, Artificial Sequence
  Synthetic oligonucleotide
ggctaaactccggttattaacacagctccg

SEQ ID NO: 91940 - DNA, 30 bp, Artificial Sequence
  Synthetic oligonucleotide
aaggccatgtgatgaggcgaaagcgctccg

SEQ ID NO: 91941 - DNA, 30 bp, Artificial Sequence
  Synthetic oligonucleotide
ttcagccaaggggttaaacgattggctccg

SEQ ID NO: 91942 - DNA, 30 bp, Artificial Sequence
  Synthetic oligonucleotide
gttccgacccagggcagggcggctgctccg

SEQ ID NO: 91943 - DNA, 30 bp, Artificial Sequence
  Synthetic oligonucleotide
tccgcggaatgtgtgtctcctgatagtccg

SEQ ID NO: 91944 - DNA, 30 bp, Artificial Sequence
  Synthetic oligonucleotide
ttgctaagtgcgtagactctagtacgtccg

SEQ ID NO: 91945 - DNA, 30 bp, Artificial Sequence
  Synthetic oligonucleotide
gtgaaagtaagaatgctctattagcgtccg

SEQ ID NO: 91946 - DNA, 30 bp, Artificial Sequence
  Synthetic oligonucleotide
tgaataagcctggcggcgggcagtcgtccg

SEQ ID NO: 91947 - DNA, 30 bp, Artificial Sequence
  Synthetic oligonucleotide
tcgccatccatggagtagataggcggtccg

SEQ ID NO: 91948 - DNA, 30 bp, Artificial Sequence
  Synthetic oligonucleotide
gataaaggcgctccgaggatgcggggtccg

SEQ ID NO: 91949 - DNA, 30 bp, Artificial Sequence
  Synthetic oligonucleotide
atcgagggctactaagtgaccccatgtccg

SEQ ID NO: 91950 - DNA, 30 bp, Artificial Sequence
  Synthetic oligonucleotide
agcacgtaattcgtcgaccggaacattccg

SEQ ID NO: 91951 - DNA, 30 bp, Artificial Sequence
  Synthetic oligonucleotide
tgccggtcgtggtggagggacatcattccg

SEQ ID NO: 91952 - DNA, 30 bp, Artificial Sequence
  Synthetic oligonucleotide
actcaacgaacgaaagattcttggattccg

SEQ ID NO: 91953 - DNA, 30 bp, Artificial Sequence
  Synthetic oligonucleotide
atggtaagacactcgcctgtagatattccg

SEQ ID NO: 91954 - DNA, 30 bp, Artificial Sequence
  Synthetic oligonucleotide
aggacatgaaggtgtgtctggaagcttccg

SEQ ID NO: 91955 - DNA, 30 bp, Artificial Sequence
  Synthetic oligonucleotide
tgttaaggtaatgtgccaggactagttccg

SEQ ID NO: 91956 - DNA, 30 bp, Artificial Sequence
  Synthetic oligonucleotide
gtggaacagctttggcgtcaataggttccg

SEQ ID NO: 91957 - DNA, 30 bp, Artificial Sequence
  Synthetic oligonucleotide
tcccgtgaaggcttagtggtgaactttccg

SEQ ID NO: 91958 - DNA, 30 bp, Artificial Sequence
  Synthetic oligonucleotide
aatcgataagcagaagcgaccacctttccg

SEQ ID NO: 91959 - DNA, 30 bp, Artificial Sequence
  Synthetic oligonucleotide
atagaaggcttggatggtagaaagtttccg

SEQ ID NO: 91960 - DNA, 30 bp, Artificial Sequence
  Synthetic oligonucleotide
ccagtggaaaattgggggtgggcaaaagcg

SEQ ID NO: 91961 - DNA, 30 bp, Artificial Sequence
  Synthetic oligonucleotide
acattcagtgccctcgaggaagtaaaagcg

SEQ ID NO: 91962 - DNA, 30 bp, Artificial Sequence
  Synthetic oligonucleotide
tgataaagaagtacgggattgcacaaagcg

SEQ ID NO: 91963 - DNA, 30 bp, Artificial Sequence
  Synthetic oligonucleotide
aacacatatataggactgaggagtcaagcg

SEQ ID NO: 91964 - DNA, 30 bp, Artificial Sequence
  Synthetic oligonucleotide
aatagcgagacgtgtgaaataaaggaagcg

SEQ ID NO: 91965 - DNA, 30 bp, Artificial Sequence
  Synthetic oligonucleotide
tgctccgaatcctcggagaatgtctaagcg

SEQ ID NO: 91966 - DNA, 30 bp, Artificial Sequence
  Synthetic oligonucleotide
ggctacgtaaacttaatgcatatgtaagcg

SEQ ID NO: 91967 - DNA, 30 bp, Artificial Sequence
  Synthetic oligonucleotide
cagcgtacatagtgccatatgctcacagcg

SEQ ID NO: 91968 - DNA, 30 bp, Artificial Sequence
  Synthetic oligonucleotide
gcctgcgaagaggtagtaatgtcgacagcg

SEQ ID NO: 91969 - DNA, 30 bp, Artificial Sequence
  Synthetic oligonucleotide
caagtcaatgtaactggcattagagcagcg

SEQ ID NO: 91970 - DNA, 30 bp, Artificial Sequence
  Synthetic oligonucleotide
tggagatatgatacggcgggaggagcagcg

SEQ ID NO: 91971 - DNA, 30 bp, Artificial Sequence
  Synthetic oligonucleotide
aagctaggacgaacatatacattagcagcg

SEQ ID NO: 91972 - DNA, 30 bp, Artificial Sequence
  Synthetic oligonucleotide
atcggcggcccgcgtctagacaatgcagcg

SEQ ID NO: 91973 - DNA, 30 bp, Artificial Sequence
  Synthetic oligonucleotide
agtcaagggatggtcttaactaattcagcg

SEQ ID NO: 91974 - DNA, 30 bp, Artificial Sequence
  Synthetic oligonucleotide
gaggcgcgacagtcagggagtccaagagcg

SEQ ID NO: 91975 - DNA, 30 bp, Artificial Sequence
  Synthetic oligonucleotide
tgcgtcagattccgggggaacagaagagcg

SEQ ID NO: 91976 - DNA, 30 bp, Artificial Sequence
  Synthetic oligonucleotide
gcacacatgtaccagttaagcatcagagcg

SEQ ID NO: 91977 - DNA, 30 bp, Artificial Sequence
  Synthetic oligonucleotide
gtgggactaatcattacagcgatcagagcg

SEQ ID NO: 91978 - DNA, 30 bp, Artificial Sequence
  Synthetic oligonucleotide
tgactcactaaagccacagcaactagagcg

SEQ ID NO: 91979 - DNA, 30 bp, Artificial Sequence
  Synthetic oligonucleotide
ggctctgactgggtggagatcttacgagcg

SEQ ID NO: 91980 - DNA, 30 bp, Artificial Sequence
  Synthetic oligonucleotide
ctagtttcgaacgccgatagaccccgagcg

SEQ ID NO: 91981 - DNA, 30 bp, Artificial Sequence
  Synthetic oligonucleotide
actataggtcagacggttactaggcgagcg

SEQ ID NO: 91982 - DNA, 30 bp, Artificial Sequence
  Synthetic oligonucleotide
gaagcaaagttccatcggtgagcaggagcg

SEQ ID NO: 91983 - DNA, 30 bp, Artificial Sequence
  Synthetic oligonucleotide
gcatcgcacgggcaggacatgcgtggagcg

SEQ ID NO: 91984 - DNA, 31 bp, Artificial Sequence
  Synthetic oligonucleotide
cgcccagattgaagctaaggcttgtggagcg

SEQ ID NO: 91985 - DNA, 30 bp, Artificial Sequence
  Synthetic oligonucleotide
tgctctctcaacacggagtaagagtgagcg

SEQ ID NO: 91986 - DNA, 30 bp, Artificial Sequence
  Synthetic oligonucleotide
gaaaaggcccatggataggagggaatagcg

SEQ ID NO: 91987 - DNA, 30 bp, Artificial Sequence
  Synthetic oligonucleotide
gcacgaatcactgggtgcacgaacatagcg

SEQ ID NO: 91988 - DNA, 30 bp, Artificial Sequence
  Synthetic oligonucleotide
gccagggatagaatcttcaccacgatagcg

SEQ ID NO: 91989 - DNA, 30 bp, Artificial Sequence
  Synthetic oligonucleotide
tctaacattctcaatgtaggcaatatagcg

SEQ ID NO: 91990 - DNA, 30 bp, Artificial Sequence
  Synthetic oligonucleotide
aaggtgcggcggtccccacgtaacgtagcg

SEQ ID NO: 91991 - DNA, 30 bp, Artificial Sequence
  Synthetic oligonucleotide
atgatggctcagctcagagttcacgtagcg

SEQ ID NO: 91992 - DNA, 30 bp, Artificial Sequence
  Synthetic oligonucleotide
tggaattaagatgcaactgaaaaggtagcg

SEQ ID NO: 91993 - DNA, 30 bp, Artificial Sequence
  Synthetic oligonucleotide
tagaatccgagctcaatgcacctggtagcg

SEQ ID NO: 91994 - DNA, 30 bp, Artificial Sequence
  Synthetic oligonucleotide
tggacataagtacgtctggcaaatttagcg

SEQ ID NO: 91995 - DNA, 30 bp, Artificial Sequence
  Synthetic oligonucleotide
agggcattttagtcgatgagttgaaacgcg

SEQ ID NO: 91996 - DNA, 30 bp, Artificial Sequence
  Synthetic oligonucleotide
cgtcgtggagaaagaaatagtcggaacgcg

SEQ ID NO: 91997 - DNA, 30 bp, Artificial Sequence
  Synthetic oligonucleotide
accgatgggccacctgctcggacacacgcg

SEQ ID NO: 91998 - DNA, 30 bp, Artificial Sequence
  Synthetic oligonucleotide
tgagaactgactcctacgattcgccacgcg

SEQ ID NO: 91999 - DNA, 30 bp, Artificial Sequence
  Synthetic oligonucleotide
aggaagttcttcaaaggcgccaaaaccgcg

SEQ ID NO: 92000 - DNA, 30 bp, Artificial Sequence
  Synthetic oligonucleotide
ggacccatggggaccgtcttagcaaccgcg

SEQ ID NO: 92001 - DNA, 30 bp, Artificial Sequence
  Synthetic oligonucleotide
accatacaaggcaaagagttaagaaccgcg

SEQ ID NO: 92002 - DNA, 30 bp, Artificial Sequence
  Synthetic oligonucleotide
atactaacgccggagagtcataccaccgcg

SEQ ID NO: 92003 - DNA, 30 bp, Artificial Sequence
  Synthetic oligonucleotide
cacgttcaggacaaaaagagactagccgcg

SEQ ID NO: 92004 - DNA, 30 bp, Artificial Sequence
  Synthetic oligonucleotide
ggaggcaaggaactgttttttagcgccgcg

SEQ ID NO: 92005 - DNA, 30 bp, Artificial Sequence
  Synthetic oligonucleotide
aaaggacgtcagtggcgatagcctgccgcg

SEQ ID NO: 92006 - DNA, 30 bp, Artificial Sequence
  Synthetic oligonucleotide
ggatgagaccttgagctggagcagtccgcg

SEQ ID NO: 92007 - DNA, 30 bp, Artificial Sequence
  Synthetic oligonucleotide
tacgagcgtcaatggtgaaaatccagcgcg

SEQ ID NO: 92008 - DNA, 30 bp, Artificial Sequence
  Synthetic oligonucleotide
gtgatcggtctctgacccagaggtagcgcg

SEQ ID NO: 92009 - DNA, 30 bp, Artificial Sequence
  Synthetic oligonucleotide
acatgctgccgatactgatatcaacgcgcg

SEQ ID NO: 92010 - DNA, 30 bp, Artificial Sequence
  Synthetic oligonucleotide
aagaagcgaagtcgtgttgtagaacgcgcg

SEQ ID NO: 92011 - DNA, 30 bp, Artificial Sequence
  Synthetic oligonucleotide
aagtagtgatcagcggagcagtatcgcgcg

SEQ ID NO: 92012 - DNA, 30 bp, Artificial Sequence
  Synthetic oligonucleotide
gcgattgttgagtcaatgtgaggttgcgcg

SEQ ID NO: 92013 - DNA, 30 bp, Artificial Sequence
  Synthetic oligonucleotide
ctagacaaagacacaaggcgggtaatcgcg

SEQ ID NO: 92014 - DNA, 30 bp, Artificial Sequence
  Synthetic oligonucleotide
ataaagactaaaacttaacaggatctcgcg

SEQ ID NO: 92015 - DNA, 30 bp, Artificial Sequence
  Synthetic oligonucleotide
gtacagcctgtcgcgtgagtcagggtcgcg

SEQ ID NO: 92016 - DNA, 30 bp, Artificial Sequence
  Synthetic oligonucleotide
ggagtgctacaactccataccatggtcgcg

SEQ ID NO: 92017 - DNA, 30 bp, Artificial Sequence
  Synthetic oligonucleotide
tggtaatggaaccggcctattcagttcgcg

SEQ ID NO: 92018 - DNA, 30 bp, Artificial Sequence
  Synthetic oligonucleotide
tgtccgacagcgaagtgtggctggttcgcg

SEQ ID NO: 92019 - DNA, 30 bp, Artificial Sequence
  Synthetic oligonucleotide
tgagagtcataatatcgtgcaaatttcgcg

SEQ ID NO: 92020 - DNA, 30 bp, Artificial Sequence
  Synthetic oligonucleotide
cacgggtagaagaggttatgtcaaaaggcg

SEQ ID NO: 92021 - DNA, 29 bp, Artificial Sequence
  Synthetic oligonucleotide
gtatatacaaaacgtcaaggataaaggcg

SEQ ID NO: 92022 - DNA, 30 bp, Artificial Sequence
  Synthetic oligonucleotide
caagggttagaacgcttcaatggacaggcg

SEQ ID NO: 92023 - DNA, 30 bp, Artificial Sequence
  Synthetic oligonucleotide
accaggcgataccaggtcgtttgtcaggcg

SEQ ID NO: 92024 - DNA, 29 bp, Artificial Sequence
  Synthetic oligonucleotide
cggaaggtgccgacgtccattaggaggcg

SEQ ID NO: 92025 - DNA, 30 bp, Artificial Sequence
  Synthetic oligonucleotide
cgccaatgagttcgcgtggtgcgggaggcg

SEQ ID NO: 92026 - DNA, 30 bp, Artificial Sequence
  Synthetic oligonucleotide
tcgggataagagagcggtgggttggaggcg

SEQ ID NO: 92027 - DNA, 30 bp, Artificial Sequence
  Synthetic oligonucleotide
ggctgaactatcgagcttatggaataggcg

SEQ ID NO: 92028 - DNA, 30 bp, Artificial Sequence
  Synthetic oligonucleotide
ttgccttcgtggctaggggcagtataggcg

SEQ ID NO: 92029 - DNA, 30 bp, Artificial Sequence
  Synthetic oligonucleotide
tatcgcctgaaggacctcggacgaacggcg

SEQ ID NO: 92030 - DNA, 30 bp, Artificial Sequence
  Synthetic oligonucleotide
atatcatagtagaagtaaagttgtccggcg

SEQ ID NO: 92031 - DNA, 30 bp, Artificial Sequence
  Synthetic oligonucleotide
aactgccatcgtgggaagccttgagcggcg

SEQ ID NO: 92032 - DNA, 30 bp, Artificial Sequence
  Synthetic oligonucleotide
ttgactcgaacagtgtgctccaagagggcg

SEQ ID NO: 92033 - DNA, 30 bp, Artificial Sequence
  Synthetic oligonucleotide
gcgagcgtagatctgtgggggtctagggcg

SEQ ID NO: 92034 - DNA, 30 bp, Artificial Sequence
  Synthetic oligonucleotide
cgctcgtggttccatcgtaggtgtagggcg

SEQ ID NO: 92035 - DNA, 30 bp, Artificial Sequence
  Synthetic oligonucleotide
cacgaggaactagtgtaaactacgcgggcg

SEQ ID NO: 92036 - DNA, 30 bp, Artificial Sequence
  Synthetic oligonucleotide
gcaaaacacgactctagagatacaggggcg

SEQ ID NO: 92037 - DNA, 30 bp, Artificial Sequence
  Synthetic oligonucleotide
accacctacgcctttagaagtctgggggcg

SEQ ID NO: 92038 - DNA, 30 bp, Artificial Sequence
  Synthetic oligonucleotide
tgccaaatgtacgatagaggtgcatgggcg

SEQ ID NO: 92039 - DNA, 30 bp, Artificial Sequence
  Synthetic oligonucleotide
acccacagtgcaaatagaactccttgggcg

SEQ ID NO: 92040 - DNA, 30 bp, Artificial Sequence
  Synthetic oligonucleotide
cgccgatagtaaaattatagtccgatggcg

SEQ ID NO: 92041 - DNA, 30 bp, Artificial Sequence
  Synthetic oligonucleotide
gtacgtttggcgaatcggaatgctatggcg

SEQ ID NO: 92042 - DNA, 30 bp, Artificial Sequence
  Synthetic oligonucleotide
gtgtctaactcataaggaaagtggctggcg

SEQ ID NO: 92043 - DNA, 30 bp, Artificial Sequence
  Synthetic oligonucleotide
acacgatttgattaactgctagtagtggcg

SEQ ID NO: 92044 - DNA, 29 bp, Artificial Sequence
  Synthetic oligonucleotide
cgcattgcagtaacggggaacacgtggcg

SEQ ID NO: 92045 - DNA, 30 bp, Artificial Sequence
  Synthetic oligonucleotide
tggtacctgactcatgaccaacaaaatgcg

SEQ ID NO: 92046 - DNA, 30 bp, Artificial Sequence
  Synthetic oligonucleotide
gacacacataaccgttctagctcaaatgcg

SEQ ID NO: 92047 - DNA, 30 bp, Artificial Sequence
  Synthetic oligonucleotide
catccatgtaagctgggcatttcaaatgcg

SEQ ID NO: 92048 - DNA, 30 bp, Artificial Sequence
  Synthetic oligonucleotide
gcggtaacgccttccagagaggacaatgcg

SEQ ID NO: 92049 - DNA, 30 bp, Artificial Sequence
  Synthetic oligonucleotide
ggtttcgtgtccgaactcccttgcaatgcg

SEQ ID NO: 92050 - DNA, 30 bp, Artificial Sequence
  Synthetic oligonucleotide
tcctatcatagcgtggatgacagtaatgcg

SEQ ID NO: 92051 - DNA, 30 bp, Artificial Sequence
  Synthetic oligonucleotide
gaccgtcattatcgagacatgcctcatgcg

SEQ ID NO: 92052 - DNA, 30 bp, Artificial Sequence
  Synthetic oligonucleotide
agaaaagcaaatcatcccaaacaggatgcg

SEQ ID NO: 92053 - DNA, 29 bp, Artificial Sequence
  Synthetic oligonucleotide
acacgaaatatatccgtcaaaaatatgcg

SEQ ID NO: 92054 - DNA, 30 bp, Artificial Sequence
  Synthetic oligonucleotide
gaacggtcatgtaaatgtactcagtatgcg

SEQ ID NO: 92055 - DNA, 30 bp, Artificial Sequence
  Synthetic oligonucleotide
ctgagcccgatagattacccacttactgcg

SEQ ID NO: 92056 - DNA, 30 bp, Artificial Sequence
  Synthetic oligonucleotide
atagagccggaggcctgatagcaacctgcg

SEQ ID NO: 92057 - DNA, 30 bp, Artificial Sequence
  Synthetic oligonucleotide
cgcgcatatggttaaggctaggtagctgcg

SEQ ID NO: 92058 - DNA, 30 bp, Artificial Sequence
  Synthetic oligonucleotide
aagtattgttatcaggcaatccgggctgcg

SEQ ID NO: 92059 - DNA, 30 bp, Artificial Sequence
  Synthetic oligonucleotide
gcatatttgcaagacatcgccacctctgcg

SEQ ID NO: 92060 - DNA, 30 bp, Artificial Sequence
  Synthetic oligonucleotide
ctgtgagtcgtatcaggggcagtcagtgcg

SEQ ID NO: 92061 - DNA, 30 bp, Artificial Sequence
  Synthetic oligonucleotide
ggcgaaaacggggatacctacgtccgtgcg

SEQ ID NO: 92062 - DNA, 30 bp, Artificial Sequence
  Synthetic oligonucleotide
aggttctgcaatgatgtactcgagcgtgcg

SEQ ID NO: 92063 - DNA, 30 bp, Artificial Sequence
  Synthetic oligonucleotide
tcgttgatttgaaacggctagaggcgtgcg

SEQ ID NO: 92064 - DNA, 30 bp, Artificial Sequence
  Synthetic oligonucleotide
cttgcagggtctgggtgtagacatcgtgcg

SEQ ID NO: 92065 - DNA, 30 bp, Artificial Sequence
  Synthetic oligonucleotide
gatcaagggaacaacctatctaacggtgcg

SEQ ID NO: 92066 - DNA, 30 bp, Artificial Sequence
  Synthetic oligonucleotide
aagatgtcacgtggagaccgagtgtgtgcg

SEQ ID NO: 92067 - DNA, 30 bp, Artificial Sequence
  Synthetic oligonucleotide
aacccgacacaaccaggtgcgtaacttgcg

SEQ ID NO: 92068 - DNA, 30 bp, Artificial Sequence
  Synthetic oligonucleotide
gggggaaagcgtatgaacccaaagcttgcg

SEQ ID NO: 92069 - DNA, 30 bp, Artificial Sequence
  Synthetic oligonucleotide
atacgagtaagcctgattcaggaggttgcg

SEQ ID NO: 92070 - DNA, 30 bp, Artificial Sequence
  Synthetic oligonucleotide
caagtaatgcgatcgcccaatgaatttgcg

SEQ ID NO: 92071 - DNA, 30 bp, Artificial Sequence
  Synthetic oligonucleotide
caacataggggtaactctgacagctttgcg

SEQ ID NO: 92072 - DNA, 30 bp, Artificial Sequence
  Synthetic oligonucleotide
aaaagaagtgacttgtcacagggaaaatcg

SEQ ID NO: 92073 - DNA, 30 bp, Artificial Sequence
  Synthetic oligonucleotide
cataatagagccggtctctgttacaaatcg

SEQ ID NO: 92074 - DNA, 30 bp, Artificial Sequence
  Synthetic oligonucleotide
cccgggaagacttcaccgtaatagaaatcg

SEQ ID NO: 92075 - DNA, 30 bp, Artificial Sequence
  Synthetic oligonucleotide
tgtagcgggaatatgggtaggttccaatcg

SEQ ID NO: 92076 - DNA, 30 bp, Artificial Sequence
  Synthetic oligonucleotide
atacgcgtagcccaccctagctaagaatcg

SEQ ID NO: 92077 - DNA, 30 bp, Artificial Sequence
  Synthetic oligonucleotide
cgggttagatggcctactggcccggaatcg

SEQ ID NO: 92078 - DNA, 31 bp, Artificial Sequence
  Synthetic oligonucleotide
agacatgagtaatacgagttgcagtgaatcg

SEQ ID NO: 92079 - DNA, 30 bp, Artificial Sequence
  Synthetic oligonucleotide
gccgaggtatgaaacaggtcggttgaatcg

SEQ ID NO: 92080 - DNA, 30 bp, Artificial Sequence
  Synthetic oligonucleotide
agagagtaaacgggggtagttccctaatcg

SEQ ID NO: 92081 - DNA, 30 bp, Artificial Sequence
  Synthetic oligonucleotide
actcttaggagtacaatggtaaagtaatcg

SEQ ID NO: 92082 - DNA, 30 bp, Artificial Sequence
  Synthetic oligonucleotide
cttggtgttaaacgggacgaatagtaatcg

SEQ ID NO: 92083 - DNA, 30 bp, Artificial Sequence
  Synthetic oligonucleotide
tattccgtggcagaaattcgagcgacatcg

SEQ ID NO: 92084 - DNA, 30 bp, Artificial Sequence
  Synthetic oligonucleotide
ggagcctggagcatcccgaacggtacatcg

SEQ ID NO: 92085 - DNA, 30 bp, Artificial Sequence
  Synthetic oligonucleotide
acaaccaacacggtagttgaccttacatcg

SEQ ID NO: 92086 - DNA, 30 bp, Artificial Sequence
  Synthetic oligonucleotide
agagtgagtaaggcatcaacaaaaccatcg

SEQ ID NO: 92087 - DNA, 30 bp, Artificial Sequence
  Synthetic oligonucleotide
atatccgaaagtaagcagggcccaccatcg

SEQ ID NO: 92088 - DNA, 30 bp, Artificial Sequence
  Synthetic oligonucleotide
gcggtcatcggtactgtagcaaacccatcg

SEQ ID NO: 92089 - DNA, 30 bp, Artificial Sequence
  Synthetic oligonucleotide
cgacatttagttcgtaagctagctccatcg

SEQ ID NO: 92090 - DNA, 30 bp, Artificial Sequence
  Synthetic oligonucleotide
gctaaagatcgtttggactaagtagcatcg

SEQ ID NO: 92091 - DNA, 30 bp, Artificial Sequence
  Synthetic oligonucleotide
atggcttagctacgtactaaggcatcatcg

SEQ ID NO: 92092 - DNA, 30 bp, Artificial Sequence
  Synthetic oligonucleotide
attcacggcatcaggagggctgcaagatcg

SEQ ID NO: 92093 - DNA, 30 bp, Artificial Sequence
  Synthetic oligonucleotide
taagtgttttacagaatcacagtaagatcg

SEQ ID NO: 92094 - DNA, 30 bp, Artificial Sequence
  Synthetic oligonucleotide
caccccgtcccgtcgtatgcctgtagatcg

SEQ ID NO: 92095 - DNA, 30 bp, Artificial Sequence
  Synthetic oligonucleotide
taagtccagtgatgacgtaggtgtcgatcg

SEQ ID NO: 92096 - DNA, 30 bp, Artificial Sequence
  Synthetic oligonucleotide
gccagtgagggctgaaatatcattcgatcg

SEQ ID NO: 92097 - DNA, 30 bp, Artificial Sequence
  Synthetic oligonucleotide
ggaaggcggaaatgtccctaggccggatcg

SEQ ID NO: 92098 - DNA, 30 bp, Artificial Sequence
  Synthetic oligonucleotide
tactaaacgtgtttcaacctaatcggatcg

SEQ ID NO: 92099 - DNA, 30 bp, Artificial Sequence
  Synthetic oligonucleotide
tggactcaacatccggccagtgaatgatcg

SEQ ID NO: 92100 - DNA, 30 bp, Artificial Sequence
  Synthetic oligonucleotide
gcgcaatttaccgctaaaactgcatgatcg

SEQ ID NO: 92101 - DNA, 30 bp, Artificial Sequence
  Synthetic oligonucleotide
ccacaacggtaaatagaaactgcttgatcg

SEQ ID NO: 92102 - DNA, 30 bp, Artificial Sequence
  Synthetic oligonucleotide
caatgtctaaaggagattgggaatatatcg

SEQ ID NO: 92103 - DNA, 30 bp, Artificial Sequence
  Synthetic oligonucleotide
cggatgatattccaactttgctctatatcg

SEQ ID NO: 92104 - DNA, 30 bp, Artificial Sequence
  Synthetic oligonucleotide
ccgagcgtaaaatcaggcggcctcgtatcg

SEQ ID NO: 92105 - DNA, 30 bp, Artificial Sequence
  Synthetic oligonucleotide
cacgcggttagtgtcctaggtagggtatcg

SEQ ID NO: 92106 - DNA, 30 bp, Artificial Sequence
  Synthetic oligonucleotide
agcaacgattgggccgtaatccttgtatcg

SEQ ID NO: 92107 - DNA, 30 bp, Artificial Sequence
  Synthetic oligonucleotide
tgatccattgtccgaaactgtgcattatcg

SEQ ID NO: 92108 - DNA, 30 bp, Artificial Sequence
  Synthetic oligonucleotide
atataaggcctggtggtcctgtgcttatcg

SEQ ID NO: 92109 - DNA, 30 bp, Artificial Sequence
  Synthetic oligonucleotide
ccaggaccggcgaggtttcgaaatttatcg

SEQ ID NO: 92110 - DNA, 30 bp, Artificial Sequence
  Synthetic oligonucleotide
acgtacacctatccggccaacactttatcg

SEQ ID NO: 92111 - DNA, 30 bp, Artificial Sequence
  Synthetic oligonucleotide
acaccaatttggtcactgggtcaaaactcg

SEQ ID NO: 92112 - DNA, 30 bp, Artificial Sequence
  Synthetic oligonucleotide
cgagaccgcacataatcatcctctaactcg

SEQ ID NO: 92113 - DNA, 30 bp, Artificial Sequence
  Synthetic oligonucleotide
ctattctgctagataacatgtgggtactcg

SEQ ID NO: 92114 - DNA, 30 bp, Artificial Sequence
  Synthetic oligonucleotide
cggggaaccagtgtgaatcagtggtactcg

SEQ ID NO: 92115 - DNA, 30 bp, Artificial Sequence
  Synthetic oligonucleotide
ttaattgaataatcgttgcaatcttactcg

SEQ ID NO: 92116 - DNA, 30 bp, Artificial Sequence
  Synthetic oligonucleotide
agggaggtatggtagaaaaccgcgccctcg

SEQ ID NO: 92117 - DNA, 30 bp, Artificial Sequence
  Synthetic oligonucleotide
tataatgggcgggtcattccgttgccctcg

SEQ ID NO: 92118 - DNA, 30 bp, Artificial Sequence
  Synthetic oligonucleotide
agtggttatctcctccagatacgtccctcg

SEQ ID NO: 92119 - DNA, 30 bp, Artificial Sequence
  Synthetic oligonucleotide
gcaagaccgtaccgcatactccttccctcg

SEQ ID NO: 92120 - DNA, 30 bp, Artificial Sequence
  Synthetic oligonucleotide
gttcgctctgttgagataggagaagcctcg

SEQ ID NO: 92121 - DNA, 31 bp, Artificial Sequence
  Synthetic oligonucleotide
acctatcgaactgtaaaaccgctctgcctcg

SEQ ID NO: 92122 - DNA, 30 bp, Artificial Sequence
  Synthetic oligonucleotide
ggttaggctgccctgctgatcagatcctcg

SEQ ID NO: 92123 - DNA, 30 bp, Artificial Sequence
  Synthetic oligonucleotide
atactaaacagagtgagtgatggttcctcg

SEQ ID NO: 92124 - DNA, 30 bp, Artificial Sequence
  Synthetic oligonucleotide
cctgagcgaaacgagtccctaggaagctcg

SEQ ID NO: 92125 - DNA, 30 bp, Artificial Sequence
  Synthetic oligonucleotide
gggtagagtttctgtacaagatcgagctcg

SEQ ID NO: 92126 - DNA, 30 bp, Artificial Sequence
  Synthetic oligonucleotide
tgagcaaacaaataggtatgtcggagctcg

SEQ ID NO: 92127 - DNA, 30 bp, Artificial Sequence
  Synthetic oligonucleotide
caactccggaccatgtgcgcgttacgctcg

SEQ ID NO: 92128 - DNA, 30 bp, Artificial Sequence
  Synthetic oligonucleotide
gaccaactttcaggggtattaagcggctcg

SEQ ID NO: 92129 - DNA, 30 bp, Artificial Sequence
  Synthetic oligonucleotide
gtgtttatcactatgtacacactcggctcg

SEQ ID NO: 92130 - DNA, 30 bp, Artificial Sequence
  Synthetic oligonucleotide
ttaaccatacagccgatcgaagggggctcg

SEQ ID NO: 92131 - DNA, 30 bp, Artificial Sequence
  Synthetic oligonucleotide
gactcaagtccacacaccagtgctggctcg

SEQ ID NO: 92132 - DNA, 30 bp, Artificial Sequence
  Synthetic oligonucleotide
caatatgttggtaaatccccacgttgctcg

SEQ ID NO: 92133 - DNA, 30 bp, Artificial Sequence
  Synthetic oligonucleotide
acttgaaaaggcgatcccgcaagaatctcg

SEQ ID NO: 92134 - DNA, 30 bp, Artificial Sequence
  Synthetic oligonucleotide
cgaaaaatacaaaggcgtgcacgtatctcg

SEQ ID NO: 92135 - DNA, 30 bp, Artificial Sequence
  Synthetic oligonucleotide
atcaaactaaattggatcacagccctctcg

SEQ ID NO: 92136 - DNA, 30 bp, Artificial Sequence
  Synthetic oligonucleotide
agactaggttacgtgtgtctatgcgtctcg

SEQ ID NO: 92137 - DNA, 30 bp, Artificial Sequence
  Synthetic oligonucleotide
gcgcaatggctaaatgggtttccggtctcg

SEQ ID NO: 92138 - DNA, 30 bp, Artificial Sequence
  Synthetic oligonucleotide
ggtctacggtaagttttgtcgaatgtctcg

SEQ ID NO: 92139 - DNA, 30 bp, Artificial Sequence
  Synthetic oligonucleotide
tggagcatatcggaaattaatcatgtctcg

SEQ ID NO: 92140 - DNA, 30 bp, Artificial Sequence
  Synthetic oligonucleotide
ggacagcaaggcacatggcttgaattctcg

SEQ ID NO: 92141 - DNA, 30 bp, Artificial Sequence
  Synthetic oligonucleotide
ccttgtggatgcgtacaacacctcaagtcg

SEQ ID NO: 92142 - DNA, 30 bp, Artificial Sequence
  Synthetic oligonucleotide
acttcatgcgttgagaaggaaacacagtcg

SEQ ID NO: 92143 - DNA, 30 bp, Artificial Sequence
  Synthetic oligonucleotide
tttagactcggctccgcaagatgacagtcg

SEQ ID NO: 92144 - DNA, 30 bp, Artificial Sequence
  Synthetic oligonucleotide
actctggtaagaagtaactagagtcagtcg

SEQ ID NO: 92145 - DNA, 30 bp, Artificial Sequence
  Synthetic oligonucleotide
catcttgttaccaaatatgtaattcagtcg

SEQ ID NO: 92146 - DNA, 30 bp, Artificial Sequence
  Synthetic oligonucleotide
tttcggaacggacttgaagccttcgagtcg

SEQ ID NO: 92147 - DNA, 30 bp, Artificial Sequence
  Synthetic oligonucleotide
gaatcacatggtgtgatggcgtgttagtcg

SEQ ID NO: 92148 - DNA, 30 bp, Artificial Sequence
  Synthetic oligonucleotide
tcgggtcaccgaaacctgctattttagtcg

SEQ ID NO: 92149 - DNA, 30 bp, Artificial Sequence
  Synthetic oligonucleotide
agtggccggtgtaagtccatcaaaacgtcg

SEQ ID NO: 92150 - DNA, 30 bp, Artificial Sequence
  Synthetic oligonucleotide
gcgggggtgggcattagattcataacgtcg

SEQ ID NO: 92151 - DNA, 30 bp, Artificial Sequence
  Synthetic oligonucleotide
agctccaagcccggattacggtgcacgtcg

SEQ ID NO: 92152 - DNA, 30 bp, Artificial Sequence
  Synthetic oligonucleotide
caaatgatgtgtggatccgactggacgtcg

SEQ ID NO: 92153 - DNA, 30 bp, Artificial Sequence
  Synthetic oligonucleotide
tggtcgaccaggagattccggatgacgtcg

SEQ ID NO: 92154 - DNA, 30 bp, Artificial Sequence
  Synthetic oligonucleotide
tgaactcacgtcgagctacggtacccgtcg

SEQ ID NO: 92155 - DNA, 30 bp, Artificial Sequence
  Synthetic oligonucleotide
ggccacatctaactctcaagtattgcgtcg

SEQ ID NO: 92156 - DNA, 30 bp, Artificial Sequence
  Synthetic oligonucleotide
gtagctaatcctctggatgactcaaggtcg

SEQ ID NO: 92157 - DNA, 30 bp, Artificial Sequence
  Synthetic oligonucleotide
cctctggcagtggggagcgtaatccggtcg

SEQ ID NO: 92158 - DNA, 30 bp, Artificial Sequence
  Synthetic oligonucleotide
gcgcctatcggacataattgatgagggtcg

SEQ ID NO: 92159 - DNA, 25 bp, Artificial Sequence
  Synthetic oligonucleotide
gcgtaagcgcatggggcgtgggtcg

SEQ ID NO: 92160 - DNA, 30 bp, Artificial Sequence
  Synthetic oligonucleotide
atggagtgaagaattcacctctgtgggtcg

SEQ ID NO: 92161 - DNA, 30 bp, Artificial Sequence
  Synthetic oligonucleotide
gcgtttacgcatctacctacaaaatggtcg

SEQ ID NO: 92162 - DNA, 30 bp, Artificial Sequence
  Synthetic oligonucleotide
atcgagttgtgcagggaaatactttggtcg

SEQ ID NO: 92163 - DNA, 30 bp, Artificial Sequence
  Synthetic oligonucleotide
cctctgcgtaacactttatgtcaaatgtcg

SEQ ID NO: 92164 - DNA, 30 bp, Artificial Sequence
  Synthetic oligonucleotide
tgccttgtgctccggaaaacaataatgtcg

SEQ ID NO: 92165 - DNA, 30 bp, Artificial Sequence
  Synthetic oligonucleotide
ggtcctatggggagttatcaactcatgtcg

SEQ ID NO: 92166 - DNA, 30 bp, Artificial Sequence
  Synthetic oligonucleotide
taataccaacatttaggcccacagatgtcg

SEQ ID NO: 92167 - DNA, 30 bp, Artificial Sequence
  Synthetic oligonucleotide
aataggttaggtggagttgcgtgactgtcg

SEQ ID NO: 92168 - DNA, 30 bp, Artificial Sequence
  Synthetic oligonucleotide
cggagaaagcccccggaacattaagtgtcg

SEQ ID NO: 92169 - DNA, 30 bp, Artificial Sequence
  Synthetic oligonucleotide
tgattccgcgctgggaacgtaatggtgtcg

SEQ ID NO: 92170 - DNA, 30 bp, Artificial Sequence
  Synthetic oligonucleotide
gggacttaggcagtcccttgagaattgtcg

SEQ ID NO: 92171 - DNA, 30 bp, Artificial Sequence
  Synthetic oligonucleotide
cttgggagtaggtagactggcagattgtcg

SEQ ID NO: 92172 - DNA, 30 bp, Artificial Sequence
  Synthetic oligonucleotide
cgcgctgggaatctagtaatagtattgtcg

SEQ ID NO: 92173 - DNA, 30 bp, Artificial Sequence
  Synthetic oligonucleotide
ccgacgcacaacgttggcacaaagttgtcg

SEQ ID NO: 92174 - DNA, 30 bp, Artificial Sequence
  Synthetic oligonucleotide
ttatagcaagatggcaaaccagagttgtcg

SEQ ID NO: 92175 - DNA, 30 bp, Artificial Sequence
  Synthetic oligonucleotide
ctgattccaaggatggtggcaggtttgtcg

SEQ ID NO: 92176 - DNA, 30 bp, Artificial Sequence
  Synthetic oligonucleotide
gaatcgtcgtcatatcttcgcctccattcg

SEQ ID NO: 92177 - DNA, 30 bp, Artificial Sequence
  Synthetic oligonucleotide
ccggagaccagctacacaattcatcattcg

SEQ ID NO: 92178 - DNA, 30 bp, Artificial Sequence
  Synthetic oligonucleotide
gagcggaggtccatacgcattgctcattcg

SEQ ID NO: 92179 - DNA, 30 bp, Artificial Sequence
  Synthetic oligonucleotide
cgtgcgatacagatgaacacgcgtcattcg

SEQ ID NO: 92180 - DNA, 30 bp, Artificial Sequence
  Synthetic oligonucleotide
tctccgtctaggagataacgatgtcattcg

SEQ ID NO: 92181 - DNA, 30 bp, Artificial Sequence
  Synthetic oligonucleotide
aagtatgtcgtagtatgttacgaggattcg

SEQ ID NO: 92182 - DNA, 30 bp, Artificial Sequence
  Synthetic oligonucleotide
gggaagctagggcggttgacgacatattcg

SEQ ID NO: 92183 - DNA, 30 bp, Artificial Sequence
  Synthetic oligonucleotide
cggatgatatagcgtgagggatagtattcg

SEQ ID NO: 92184 - DNA, 30 bp, Artificial Sequence
  Synthetic oligonucleotide
tacataggggctgtgacgagcgtgtattcg

SEQ ID NO: 92185 - DNA, 30 bp, Artificial Sequence
  Synthetic oligonucleotide
gagggaatcattaagctggagggttattcg

SEQ ID NO: 92186 - DNA, 30 bp, Artificial Sequence
  Synthetic oligonucleotide
accgtgtaagatccgagaatgttttattcg

SEQ ID NO: 92187 - DNA, 30 bp, Artificial Sequence
  Synthetic oligonucleotide
tgattgatctagttgtaagacaacacttcg

SEQ ID NO: 92188 - DNA, 30 bp, Artificial Sequence
  Synthetic oligonucleotide
acggtccacacggacggatgcgagacttcg

SEQ ID NO: 92189 - DNA, 30 bp, Artificial Sequence
  Synthetic oligonucleotide
gattgtccaacgtaggtggatggagcttcg

SEQ ID NO: 92190 - DNA, 30 bp, Artificial Sequence
  Synthetic oligonucleotide
ttaggggtgggatcataaggctcctcttcg

SEQ ID NO: 92191 - DNA, 30 bp, Artificial Sequence
  Synthetic oligonucleotide
cgcatagtccccgagctccaattctcttcg

SEQ ID NO: 92192 - DNA, 30 bp, Artificial Sequence
  Synthetic oligonucleotide
caaccagccttaatgccagtcgagtcttcg

SEQ ID NO: 92193 - DNA, 30 bp, Artificial Sequence
  Synthetic oligonucleotide
tcgggctaaatgagatgtagatattcttcg

SEQ ID NO: 92194 - DNA, 30 bp, Artificial Sequence
  Synthetic oligonucleotide
cgaggcgagaggaacagtcgtggcagttcg

SEQ ID NO: 92195 - DNA, 30 bp, Artificial Sequence
  Synthetic oligonucleotide
ggagatagtttcagtaagggtgtcagttcg

SEQ ID NO: 92196 - DNA, 30 bp, Artificial Sequence
  Synthetic oligonucleotide
aaggaatcgggtatttctggaaggagttcg

SEQ ID NO: 92197 - DNA, 30 bp, Artificial Sequence
  Synthetic oligonucleotide
ctgcttatgcatcttaaatatatccgttcg

SEQ ID NO: 92198 - DNA, 30 bp, Artificial Sequence
  Synthetic oligonucleotide
tcctaaataaacggttcaggggtccgttcg

SEQ ID NO: 92199 - DNA, 30 bp, Artificial Sequence
  Synthetic oligonucleotide
aaggtcctgggtaactagtgattgcgttcg

SEQ ID NO: 92200 - DNA, 30 bp, Artificial Sequence
  Synthetic oligonucleotide
tacagtgtgcaagttgtcctacgaggttcg

SEQ ID NO: 92201 - DNA, 30 bp, Artificial Sequence
  Synthetic oligonucleotide
agcactctgcattcagggatctatggttcg

SEQ ID NO: 92202 - DNA, 30 bp, Artificial Sequence
  Synthetic oligonucleotide
gactgacgaccaagaaggaacagtggttcg

SEQ ID NO: 92203 - DNA, 30 bp, Artificial Sequence
  Synthetic oligonucleotide
cggacttcatctcatcacatccgctgttcg

SEQ ID NO: 92204 - DNA, 30 bp, Artificial Sequence
  Synthetic oligonucleotide
ccagaattccgtaaggtacaagcaatttcg

SEQ ID NO: 92205 - DNA, 30 bp, Artificial Sequence
  Synthetic oligonucleotide
cctaggtaaggcccgtgcaagcgcatttcg

SEQ ID NO: 92206 - DNA, 30 bp, Artificial Sequence
  Synthetic oligonucleotide
tcacattacggaagttttaaatagatttcg

SEQ ID NO: 92207 - DNA, 30 bp, Artificial Sequence
  Synthetic oligonucleotide
cggtttttacacggtacaggctagatttcg

SEQ ID NO: 92208 - DNA, 30 bp, Artificial Sequence
  Synthetic oligonucleotide
gtaggtgccaatgcgaacaaattgatttcg

SEQ ID NO: 92209 - DNA, 30 bp, Artificial Sequence
  Synthetic oligonucleotide
gggcgatctacacgctaaaattgggtttcg

SEQ ID NO: 92210 - DNA, 30 bp, Artificial Sequence
  Synthetic oligonucleotide
tcttcacattttagcaacagcgtggtttcg

SEQ ID NO: 92211 - DNA, 30 bp, Artificial Sequence
  Synthetic oligonucleotide
accgtgctctagtagcagtctcgtgtttcg

SEQ ID NO: 92212 - DNA, 30 bp, Artificial Sequence
  Synthetic oligonucleotide
tgggatatagtgagagataagctcttttcg

SEQ ID NO: 92213 - DNA, 30 bp, Artificial Sequence
  Synthetic oligonucleotide
aaggaagcgttagttgtcacaaatttttcg

SEQ ID NO: 92214 - DNA, 30 bp, Artificial Sequence
  Synthetic oligonucleotide
ataattagtgggcccgttctgagaaaaagg

SEQ ID NO: 92215 - DNA, 30 bp, Artificial Sequence
  Synthetic oligonucleotide
cagtgtaacaattcgtgtgcgagcaaaagg

SEQ ID NO: 92216 - DNA, 30 bp, Artificial Sequence
  Synthetic oligonucleotide
gacaaggaagtcccgatgataatcaaaagg

SEQ ID NO: 92217 - DNA, 30 bp, Artificial Sequence
  Synthetic oligonucleotide
gattagaattcattggccaaatcgaaaagg

SEQ ID NO: 92218 - DNA, 30 bp, Artificial Sequence
  Synthetic oligonucleotide
gtgtatcacgtgtagtgtccaggccaaagg

SEQ ID NO: 92219 - DNA, 30 bp, Artificial Sequence
  Synthetic oligonucleotide
tctatattcatcccgaggctacggcaaagg

SEQ ID NO: 92220 - DNA, 30 bp, Artificial Sequence
  Synthetic oligonucleotide
tggtagagagaatcgaggaccgcagaaagg

SEQ ID NO: 92221 - DNA, 30 bp, Artificial Sequence
  Synthetic oligonucleotide
ttattactagtgcgaaggtaggcagaaagg

SEQ ID NO: 92222 - DNA, 30 bp, Artificial Sequence
  Synthetic oligonucleotide
tggaggcgcaaagttgttcccttagaaagg

SEQ ID NO: 92223 - DNA, 30 bp, Artificial Sequence
  Synthetic oligonucleotide
ggtattaaaaggaatcacttcgccgaaagg

SEQ ID NO: 92224 - DNA, 30 bp, Artificial Sequence
  Synthetic oligonucleotide
tgggagcaacgtcagcaaagaagcgaaagg

SEQ ID NO: 92225 - DNA, 30 bp, Artificial Sequence
  Synthetic oligonucleotide
ggcttacggcatagacataagtcggaaagg

SEQ ID NO: 92226 - DNA, 30 bp, Artificial Sequence
  Synthetic oligonucleotide
aagacattacacgtaaagtatcgggaaagg

SEQ ID NO: 92227 - DNA, 30 bp, Artificial Sequence
  Synthetic oligonucleotide
gggctcaagaatacagttgccttataaagg

SEQ ID NO: 92228 - DNA, 30 bp, Artificial Sequence
  Synthetic oligonucleotide
atagtgtttcaaggaactaaacgttaaagg

SEQ ID NO: 92229 - DNA, 30 bp, Artificial Sequence
  Synthetic oligonucleotide
ccaagttgataaccacgaaaggtttaaagg

SEQ ID NO: 92230 - DNA, 30 bp, Artificial Sequence
  Synthetic oligonucleotide
atgttgcggctgggttacgtattaacaagg

SEQ ID NO: 92231 - DNA, 30 bp, Artificial Sequence
  Synthetic oligonucleotide
tgatgacaccaatcagtaatcaacacaagg

SEQ ID NO: 92232 - DNA, 30 bp, Artificial Sequence
  Synthetic oligonucleotide
aggttccccatacgaaattgcactacaagg

SEQ ID NO: 92233 - DNA, 30 bp, Artificial Sequence
  Synthetic oligonucleotide
cggcaaacaggagcttaattagactcaagg

SEQ ID NO: 92234 - DNA, 30 bp, Artificial Sequence
  Synthetic oligonucleotide
caacctacgctgggggcgcatcaaagaagg

SEQ ID NO: 92235 - DNA, 30 bp, Artificial Sequence
  Synthetic oligonucleotide
attcacgagcatagaaatgttagcagaagg

SEQ ID NO: 92236 - DNA, 30 bp, Artificial Sequence
  Synthetic oligonucleotide
agcgcagcggtggtggcagcaaggagaagg

SEQ ID NO: 92237 - DNA, 30 bp, Artificial Sequence
  Synthetic oligonucleotide
cttactcaacagaccacagtaggtagaagg

SEQ ID NO: 92238 - DNA, 30 bp, Artificial Sequence
  Synthetic oligonucleotide
ggcgggcaaagggggtaatgagtccgaagg

SEQ ID NO: 92239 - DNA, 30 bp, Artificial Sequence
  Synthetic oligonucleotide
ctgatgtaagagcaatcatatccgcgaagg

SEQ ID NO: 92240 - DNA, 30 bp, Artificial Sequence
  Synthetic oligonucleotide
ggtgatcggcgaaatgtgaggcacggaagg

SEQ ID NO: 92241 - DNA, 30 bp, Artificial Sequence
  Synthetic oligonucleotide
agaaaccccgcgaactgttcagtcggaagg

SEQ ID NO: 92242 - DNA, 30 bp, Artificial Sequence
  Synthetic oligonucleotide
aacgcaataagcgggttgttcgtcggaagg

SEQ ID NO: 92243 - DNA, 30 bp, Artificial Sequence
  Synthetic oligonucleotide
ctttcgtggcggatgagtgtttatggaagg

SEQ ID NO: 92244 - DNA, 30 bp, Artificial Sequence
  Synthetic oligonucleotide
tcgcgctcggcttaaggctatcgttgaagg

SEQ ID NO: 92245 - DNA, 30 bp, Artificial Sequence
  Synthetic oligonucleotide
ttctgcggtacgctagagtgtctaataagg

SEQ ID NO: 92246 - DNA, 30 bp, Artificial Sequence
  Synthetic oligonucleotide
ttgcagaccatgaacacttgcgcgataagg

SEQ ID NO: 92247 - DNA, 30 bp, Artificial Sequence
  Synthetic oligonucleotide
ctaccggaacccaggcatgtaaaagtaagg

SEQ ID NO: 92248 - DNA, 30 bp, Artificial Sequence
  Synthetic oligonucleotide
gcctaatcgacttataccatggaagtaagg

SEQ ID NO: 92249 - DNA, 30 bp, Artificial Sequence
  Synthetic oligonucleotide
acaccattaagaccctagcagttagtaagg

SEQ ID NO: 92250 - DNA, 30 bp, Artificial Sequence
  Synthetic oligonucleotide
tacaagggaggtaagttacggggcgtaagg

SEQ ID NO: 92251 - DNA, 30 bp, Artificial Sequence
  Synthetic oligonucleotide
accagtattgccgatttaacgatggtaagg

SEQ ID NO: 92252 - DNA, 30 bp, Artificial Sequence
  Synthetic oligonucleotide
gcgcaaatgtatttgagcggggatgtaagg

SEQ ID NO: 92253 - DNA, 30 bp, Artificial Sequence
  Synthetic oligonucleotide
agaagactgtcgcggatcaatggcttaagg

SEQ ID NO: 92254 - DNA, 30 bp, Artificial Sequence
  Synthetic oligonucleotide
accagaaacaagagctgcacggagttaagg

SEQ ID NO: 92255 - DNA, 30 bp, Artificial Sequence
  Synthetic oligonucleotide
cgttagccatggccatgcctcatgttaagg

SEQ ID NO: 92256 - DNA, 30 bp, Artificial Sequence
  Synthetic oligonucleotide
gtaaacgacgtgtcacataagtgaaacagg

SEQ ID NO: 92257 - DNA, 30 bp, Artificial Sequence
  Synthetic oligonucleotide
cttacggcgatatccacttccgccaacagg

SEQ ID NO: 92258 - DNA, 30 bp, Artificial Sequence
  Synthetic oligonucleotide
gaggatatgtcgcatcgtcggtataacagg

SEQ ID NO: 92259 - DNA, 30 bp, Artificial Sequence
  Synthetic oligonucleotide
cgcttatgcaaccaaaccgaatctcacagg

SEQ ID NO: 92260 - DNA, 30 bp, Artificial Sequence
  Synthetic oligonucleotide
tggtgaactaattgttccgaatctcacagg

SEQ ID NO: 92261 - DNA, 30 bp, Artificial Sequence
  Synthetic oligonucleotide
gacccctcgccgtttaattgctaagacagg

SEQ ID NO: 92262 - DNA, 30 bp, Artificial Sequence
  Synthetic oligonucleotide
tcactaggcctcattgcggggtaggacagg

SEQ ID NO: 92263 - DNA, 30 bp, Artificial Sequence
  Synthetic oligonucleotide
gaagggttcataagcaagcggcgggacagg

SEQ ID NO: 92264 - DNA, 30 bp, Artificial Sequence
  Synthetic oligonucleotide
gcggtgctatcagagttccaatgggacagg

SEQ ID NO: 92265 - DNA, 30 bp, Artificial Sequence
  Synthetic oligonucleotide
taggcggcggaccggaccaaggttgacagg

SEQ ID NO: 92266 - DNA, 30 bp, Artificial Sequence
  Synthetic oligonucleotide
gcctaggacctaccgtagggctcgtacagg

SEQ ID NO: 92267 - DNA, 30 bp, Artificial Sequence
  Synthetic oligonucleotide
tcctgcacaaactagactcgcaggtacagg

SEQ ID NO: 92268 - DNA, 30 bp, Artificial Sequence
  Synthetic oligonucleotide
gccgtggaagacgagtttcgtgtgtacagg

SEQ ID NO: 92269 - DNA, 30 bp, Artificial Sequence
  Synthetic oligonucleotide
tgagtcactgaggttaaagccaattacagg

SEQ ID NO: 92270 - DNA, 31 bp, Artificial Sequence
  Synthetic oligonucleotide
gaaacaatcgtaactcattaacttaaccagg

SEQ ID NO: 92271 - DNA, 30 bp, Artificial Sequence
  Synthetic oligonucleotide
ctatggcacgatctcagctgggataccagg

SEQ ID NO: 92272 - DNA, 30 bp, Artificial Sequence
  Synthetic oligonucleotide
gtcgttccagtcagtctttaatgtaccagg

SEQ ID NO: 92273 - DNA, 30 bp, Artificial Sequence
  Synthetic oligonucleotide
gtcgcctgtgaagagtatatcgcgcccagg

SEQ ID NO: 92274 - DNA, 30 bp, Artificial Sequence
  Synthetic oligonucleotide
ggtccaagagagtaggtagctgatcccagg

SEQ ID NO: 92275 - DNA, 30 bp, Artificial Sequence
  Synthetic oligonucleotide
gaaagtctaagaattaatacagcagccagg

SEQ ID NO: 92276 - DNA, 30 bp, Artificial Sequence
  Synthetic oligonucleotide
ttatttgtagtgtcccatgagtgagccagg

SEQ ID NO: 92277 - DNA, 31 bp, Artificial Sequence
  Synthetic oligonucleotide
tagtcgcaactaggaaagtatgcacgccagg

SEQ ID NO: 92278 - DNA, 30 bp, Artificial Sequence
  Synthetic oligonucleotide
aattaacagatacggggactaaccgccagg

SEQ ID NO: 92279 - DNA, 30 bp, Artificial Sequence
  Synthetic oligonucleotide
actcgaagcatgtaggcgtaccaggccagg

SEQ ID NO: 92280 - DNA, 30 bp, Artificial Sequence
  Synthetic oligonucleotide
tgatagcatgctgaactagccggatccagg

SEQ ID NO: 92281 - DNA, 30 bp, Artificial Sequence
  Synthetic oligonucleotide
cagtgtcttctgaatttggtaatctccagg

SEQ ID NO: 92282 - DNA, 30 bp, Artificial Sequence
  Synthetic oligonucleotide
gcaaacaacggagcaaggcaatattccagg

SEQ ID NO: 92283 - DNA, 30 bp, Artificial Sequence
  Synthetic oligonucleotide
atctaaacataaggttttggtggttccagg

SEQ ID NO: 92284 - DNA, 30 bp, Artificial Sequence
  Synthetic oligonucleotide
tcgtgcatggctcttgactccgtcagcagg

SEQ ID NO: 92285 - DNA, 30 bp, Artificial Sequence
  Synthetic oligonucleotide
tgagacgtatttggcatcaaatcccgcagg

SEQ ID NO: 92286 - DNA, 30 bp, Artificial Sequence
  Synthetic oligonucleotide
agttagtccggtacctcaggagaaggcagg

SEQ ID NO: 92287 - DNA, 30 bp, Artificial Sequence
  Synthetic oligonucleotide
taagggcagccagagtggtaaataggcagg

SEQ ID NO: 92288 - DNA, 30 bp, Artificial Sequence
  Synthetic oligonucleotide
attcgccgaatatgacaacctatgggcagg

SEQ ID NO: 92289 - DNA, 30 bp, Artificial Sequence
  Synthetic oligonucleotide
tacgtcctgggacatcacggacattgcagg

SEQ ID NO: 92290 - DNA, 30 bp, Artificial Sequence
  Synthetic oligonucleotide
tgcctacacgcgaacgacgaataaatcagg

SEQ ID NO: 92291 - DNA, 30 bp, Artificial Sequence
  Synthetic oligonucleotide
attaagcgagaaatttagacaaatatcagg

SEQ ID NO: 92292 - DNA, 30 bp, Artificial Sequence
  Synthetic oligonucleotide
agatgtacaatgtcgacggtgattatcagg

SEQ ID NO: 92293 - DNA, 30 bp, Artificial Sequence
  Synthetic oligonucleotide
agaggataaggtctaaggggcgttatcagg

SEQ ID NO: 92294 - DNA, 30 bp, Artificial Sequence
  Synthetic oligonucleotide
actctcaatgttactgcgcttagcgtcagg

SEQ ID NO: 92295 - DNA, 30 bp, Artificial Sequence
  Synthetic oligonucleotide
agggaccgaagggcgtgtccgctggtcagg

SEQ ID NO: 92296 - DNA, 30 bp, Artificial Sequence
  Synthetic oligonucleotide
cgcaaaaagttttactactcgactgtcagg

SEQ ID NO: 92297 - DNA, 30 bp, Artificial Sequence
  Synthetic oligonucleotide
gcagtggaaggcaaccgctgctacttcagg

SEQ ID NO: 92298 - DNA, 30 bp, Artificial Sequence
  Synthetic oligonucleotide
tgcggagagcttcgtaccacacgaaagagg

SEQ ID NO: 92299 - DNA, 30 bp, Artificial Sequence
  Synthetic oligonucleotide
acaataattccttcgaaccttaataagagg

SEQ ID NO: 92300 - DNA, 30 bp, Artificial Sequence
  Synthetic oligonucleotide
tgcaggatacggagatggtgcgcccagagg

SEQ ID NO: 92301 - DNA, 30 bp, Artificial Sequence
  Synthetic oligonucleotide
caaaggcaatctcacgtggtagagcagagg

SEQ ID NO: 92302 - DNA, 30 bp, Artificial Sequence
  Synthetic oligonucleotide
gtgttcgaaagctttggacatgagcagagg

SEQ ID NO: 92303 - DNA, 30 bp, Artificial Sequence
  Synthetic oligonucleotide
gaggttcaagaggattgtccaacgcagagg

SEQ ID NO: 92304 - DNA, 30 bp, Artificial Sequence
  Synthetic oligonucleotide
aagtatatacatcttgctcatgggcagagg

SEQ ID NO: 92305 - DNA, 30 bp, Artificial Sequence
  Synthetic oligonucleotide
cactacagggaactagttttatctcagagg

SEQ ID NO: 92306 - DNA, 30 bp, Artificial Sequence
  Synthetic oligonucleotide
atgacagagcgaatgagagcacacgagagg

SEQ ID NO: 92307 - DNA, 30 bp, Artificial Sequence
  Synthetic oligonucleotide
ctcacacacaatcgttactcaacggagagg

SEQ ID NO: 92308 - DNA, 30 bp, Artificial Sequence
  Synthetic oligonucleotide
agcgctgggggtgatggttctattgagagg

SEQ ID NO: 92309 - DNA, 30 bp, Artificial Sequence
  Synthetic oligonucleotide
gccgtatacataaaggtgaagaagccgagg

SEQ ID NO: 92310 - DNA, 30 bp, Artificial Sequence
  Synthetic oligonucleotide
taacaagctggagtgtaacgggaagcgagg

SEQ ID NO: 92311 - DNA, 30 bp, Artificial Sequence
  Synthetic oligonucleotide
agatataaactggcaattggaatggcgagg

SEQ ID NO: 92312 - DNA, 31 bp, Artificial Sequence
  Synthetic oligonucleotide
gtaggccaggtctctcatccgtaatgcgagg

SEQ ID NO: 92313 - DNA, 30 bp, Artificial Sequence
  Synthetic oligonucleotide
caggctccagtccaagaaggattatcgagg

SEQ ID NO: 92314 - DNA, 30 bp, Artificial Sequence
  Synthetic oligonucleotide
aggaatcgccataaacggcataattcgagg

SEQ ID NO: 92315 - DNA, 30 bp, Artificial Sequence
  Synthetic oligonucleotide
ataagggggtcaattggttgaaagaggagg

SEQ ID NO: 92316 - DNA, 30 bp, Artificial Sequence
  Synthetic oligonucleotide
tgggaagtttgtttatggaagtggaggagg

SEQ ID NO: 92317 - DNA, 30 bp, Artificial Sequence
  Synthetic oligonucleotide
cgtatacggcgcttggctgacgtgaggagg

SEQ ID NO: 92318 - DNA, 30 bp, Artificial Sequence
  Synthetic oligonucleotide
gctggtaacacactcaattggtctaggagg

SEQ ID NO: 92319 - DNA, 30 bp, Artificial Sequence
  Synthetic oligonucleotide
agaatggttaagggttggcgatttaggagg

SEQ ID NO: 92320 - DNA, 30 bp, Artificial Sequence
  Synthetic oligonucleotide
cggtattgcgactaaaaatcaggacggagg

SEQ ID NO: 92321 - DNA, 30 bp, Artificial Sequence
  Synthetic oligonucleotide
ggcaagccagttagataattatgacggagg

SEQ ID NO: 92322 - DNA, 30 bp, Artificial Sequence
  Synthetic oligonucleotide
cggactgagcggaatcatggacgtcggagg

SEQ ID NO: 92323 - DNA, 30 bp, Artificial Sequence
  Synthetic oligonucleotide
aggcttcctaacatgatgtaggtcgggagg

SEQ ID NO: 92324 - DNA, 30 bp, Artificial Sequence
  Synthetic oligonucleotide
cggaaaggtctgacgacgcccaatgggagg

SEQ ID NO: 92325 - DNA, 30 bp, Artificial Sequence
  Synthetic oligonucleotide
acgtaccagcggtagccgaatcctgggagg

SEQ ID NO: 92326 - DNA, 30 bp, Artificial Sequence
  Synthetic oligonucleotide
ttcccagggaagaggtgtcaactatggagg

SEQ ID NO: 92327 - DNA, 29 bp, Artificial Sequence
  Synthetic oligonucleotide
tccatcggaaataatagacgtcaatgagg

SEQ ID NO: 92328 - DNA, 30 bp, Artificial Sequence
  Synthetic oligonucleotide
aacggggttaccgcgagatgtaacctgagg

SEQ ID NO: 92329 - DNA, 30 bp, Artificial Sequence
  Synthetic oligonucleotide
cagtcgtagcgcgactgtgttggggtgagg

SEQ ID NO: 92330 - DNA, 30 bp, Artificial Sequence
  Synthetic oligonucleotide
caggtaaagctctcggccagtcagttgagg

SEQ ID NO: 92331 - DNA, 30 bp, Artificial Sequence
  Synthetic oligonucleotide
cagctagtgcgcggagtaatgtacaatagg

SEQ ID NO: 92332 - DNA, 30 bp, Artificial Sequence
  Synthetic oligonucleotide
gccaaagccacagctggaagacagaatagg

SEQ ID NO: 92333 - DNA, 30 bp, Artificial Sequence
  Synthetic oligonucleotide
agtaaacttgaataggtaatgggacatagg

SEQ ID NO: 92334 - DNA, 30 bp, Artificial Sequence
  Synthetic oligonucleotide
gcaataacaccgcaccaagttctcgatagg

SEQ ID NO: 92335 - DNA, 30 bp, Artificial Sequence
  Synthetic oligonucleotide
gcccgagctacgagagtcggatgatatagg

SEQ ID NO: 92336 - DNA, 30 bp, Artificial Sequence
  Synthetic oligonucleotide
ggatcagaattcctgcgagggggctatagg

SEQ ID NO: 92337 - DNA, 30 bp, Artificial Sequence
  Synthetic oligonucleotide
taggacaactatcggaacacgttctatagg

SEQ ID NO: 92338 - DNA, 30 bp, Artificial Sequence
  Synthetic oligonucleotide
ggaccggggtctcataaagtatcttatagg

SEQ ID NO: 92339 - DNA, 30 bp, Artificial Sequence
  Synthetic oligonucleotide
acgtgtgcagtcgtaatgcgatgttatagg

SEQ ID NO: 92340 - DNA, 30 bp, Artificial Sequence
  Synthetic oligonucleotide
gctcaccgagcgagttaggcagggactagg

SEQ ID NO: 92341 - DNA, 30 bp, Artificial Sequence
  Synthetic oligonucleotide
ggtgagagatgagtcaagcgctctactagg

SEQ ID NO: 92342 - DNA, 30 bp, Artificial Sequence
  Synthetic oligonucleotide
aatggtggaatatcattcgtctttgctagg

SEQ ID NO: 92343 - DNA, 30 bp, Artificial Sequence
  Synthetic oligonucleotide
caggagaggtgtaatgccacggagtctagg

SEQ ID NO: 92344 - DNA, 30 bp, Artificial Sequence
  Synthetic oligonucleotide
tgcggtaaatccgtggagaagcacagtagg

SEQ ID NO: 92345 - DNA, 30 bp, Artificial Sequence
  Synthetic oligonucleotide
cactcgagcttgacaactatgttcagtagg

SEQ ID NO: 92346 - DNA, 30 bp, Artificial Sequence
  Synthetic oligonucleotide
cctcaaaggcgggatacgggcggtggtagg

SEQ ID NO: 92347 - DNA, 30 bp, Artificial Sequence
  Synthetic oligonucleotide
catgccagtagcgcaaaggtgctgtgtagg

SEQ ID NO: 92348 - DNA, 30 bp, Artificial Sequence
  Synthetic oligonucleotide
cattgaactggttatcagctggtaattagg

SEQ ID NO: 92349 - DNA, 30 bp, Artificial Sequence
  Synthetic oligonucleotide
tagggttaatacgaaggggacggcattagg

SEQ ID NO: 92350 - DNA, 30 bp, Artificial Sequence
  Synthetic oligonucleotide
acaagtgattcccaagaactttcccttagg

SEQ ID NO: 92351 - DNA, 30 bp, Artificial Sequence
  Synthetic oligonucleotide
ccaggtacagaactagttgaatgccttagg

SEQ ID NO: 92352 - DNA, 30 bp, Artificial Sequence
  Synthetic oligonucleotide
accgacaaaatataagtgactcaagttagg

SEQ ID NO: 92353 - DNA, 30 bp, Artificial Sequence
  Synthetic oligonucleotide
gctgaggaagcttagtgattacatgttagg

SEQ ID NO: 92354 - DNA, 30 bp, Artificial Sequence
  Synthetic oligonucleotide
gggaaggtcacttttccactgaaatttagg

SEQ ID NO: 92355 - DNA, 30 bp, Artificial Sequence
  Synthetic oligonucleotide
aaggtatggcttcgaatctgaagatttagg

SEQ ID NO: 92356 - DNA, 30 bp, Artificial Sequence
  Synthetic oligonucleotide
gtaatcgaaaccgatgagacaaggtttagg

SEQ ID NO: 92357 - DNA, 30 bp, Artificial Sequence
  Synthetic oligonucleotide
taaagggaaagtaagcgcgtcgacaaacgg

SEQ ID NO: 92358 - DNA, 30 bp, Artificial Sequence
  Synthetic oligonucleotide
atgggtagtgcttattaattcatcaaacgg

SEQ ID NO: 92359 - DNA, 30 bp, Artificial Sequence
  Synthetic oligonucleotide
cgaagtatgttacggaaaggagttaaacgg

SEQ ID NO: 92360 - DNA, 30 bp, Artificial Sequence
  Synthetic oligonucleotide
agctggataattcttctgcgtaatgaacgg

SEQ ID NO: 92361 - DNA, 30 bp, Artificial Sequence
  Synthetic oligonucleotide
atggcgtccaaataatggggattgtaacgg

SEQ ID NO: 92362 - DNA, 30 bp, Artificial Sequence
  Synthetic oligonucleotide
agcacttgaggatttaacaccgaagcacgg

SEQ ID NO: 92363 - DNA, 31 bp, Artificial Sequence
  Synthetic oligonucleotide
ttggattgccaaattgtaggccaggagacgg

SEQ ID NO: 92364 - DNA, 30 bp, Artificial Sequence
  Synthetic oligonucleotide
agccacagcgattcctgcaatcggagacgg

SEQ ID NO: 92365 - DNA, 30 bp, Artificial Sequence
  Synthetic oligonucleotide
acggtagactcatagaataccggcggacgg

SEQ ID NO: 92366 - DNA, 30 bp, Artificial Sequence
  Synthetic oligonucleotide
gggctgtttgccggaacgaataagggacgg

SEQ ID NO: 92367 - DNA, 30 bp, Artificial Sequence
  Synthetic oligonucleotide
ttagggcatactcagcatacagtgggacgg

SEQ ID NO: 92368 - DNA, 30 bp, Artificial Sequence
  Synthetic oligonucleotide
gtgcaccggtaagaggtctagaaaatacgg

SEQ ID NO: 92369 - DNA, 30 bp, Artificial Sequence
  Synthetic oligonucleotide
aggagggcttatcgttaagtctgactacgg

SEQ ID NO: 92370 - DNA, 30 bp, Artificial Sequence
  Synthetic oligonucleotide
gagcacatgcagagagtggtacggctacgg

SEQ ID NO: 92371 - DNA, 31 bp, Artificial Sequence
  Synthetic oligonucleotide
atgggcattttgtacgaagattgatctacgg

SEQ ID NO: 92372 - DNA, 30 bp, Artificial Sequence
  Synthetic oligonucleotide
ttaacatccaatccgcactacaccgtacgg

SEQ ID NO: 92373 - DNA, 30 bp, Artificial Sequence
  Synthetic oligonucleotide
catatcgtggaaaataagcctgcggtacgg

SEQ ID NO: 92374 - DNA, 30 bp, Artificial Sequence
  Synthetic oligonucleotide
taatgactaagtgttagtagacgggtacgg

SEQ ID NO: 92375 - DNA, 30 bp, Artificial Sequence
  Synthetic oligonucleotide
tgtggttgtgcgacagtaagctgtttacgg

SEQ ID NO: 92376 - DNA, 30 bp, Artificial Sequence
  Synthetic oligonucleotide
gggtaatagaaggagggtttgaccaaccgg

SEQ ID NO: 92377 - DNA, 30 bp, Artificial Sequence
  Synthetic oligonucleotide
tgaacctaccaaacgggtgcgcagaaccgg

SEQ ID NO: 92378 - DNA, 30 bp, Artificial Sequence
  Synthetic oligonucleotide
caacgcgtgcgtacgcctgtctataaccgg

SEQ ID NO: 92379 - DNA, 30 bp, Artificial Sequence
  Synthetic oligonucleotide
gtatagaaccaagtgtcagttgaccaccgg

SEQ ID NO: 92380 - DNA, 29 bp, Artificial Sequence
  Synthetic oligonucleotide
atgaaagtgtattactatcgcggcaccgg

SEQ ID NO: 92381 - DNA, 30 bp, Artificial Sequence
  Synthetic oligonucleotide
aagaaggatactacaataaggcggcaccgg

SEQ ID NO: 92382 - DNA, 30 bp, Artificial Sequence
  Synthetic oligonucleotide
ccacggagtgctctgtaggatgtagaccgg

SEQ ID NO: 92383 - DNA, 30 bp, Artificial Sequence
  Synthetic oligonucleotide
ttaccaagagcggggttccatcacgaccgg

SEQ ID NO: 92384 - DNA, 30 bp, Artificial Sequence
  Synthetic oligonucleotide
ggggtaatagagaattcagtgtgcgaccgg

SEQ ID NO: 92385 - DNA, 30 bp, Artificial Sequence
  Synthetic oligonucleotide
gactgactatcattgacactggagtaccgg

SEQ ID NO: 92386 - DNA, 30 bp, Artificial Sequence
  Synthetic oligonucleotide
aagcaattcttataaccgagtcccacccgg

SEQ ID NO: 92387 - DNA, 30 bp, Artificial Sequence
  Synthetic oligonucleotide
gcgattcgcattatgagaggtgagacccgg

SEQ ID NO: 92388 - DNA, 30 bp, Artificial Sequence
  Synthetic oligonucleotide
ggcaagggtactagcgtaggcaatccccgg

SEQ ID NO: 92389 - DNA, 30 bp, Artificial Sequence
  Synthetic oligonucleotide
cgcacgagcaaaggcctagctaacgcccgg

SEQ ID NO: 92390 - DNA, 30 bp, Artificial Sequence
  Synthetic oligonucleotide
taataggaatgtcaagaaatcggctcccgg

SEQ ID NO: 92391 - DNA, 30 bp, Artificial Sequence
  Synthetic oligonucleotide
aagagagacccgttaacattcttaagccgg

SEQ ID NO: 92392 - DNA, 30 bp, Artificial Sequence
  Synthetic oligonucleotide
atgggttcttatcacctgtgagctagccgg

SEQ ID NO: 92393 - DNA, 30 bp, Artificial Sequence
  Synthetic oligonucleotide
cgcactcaagcatgggtaatgaaccgccgg

SEQ ID NO: 92394 - DNA, 30 bp, Artificial Sequence
  Synthetic oligonucleotide
gtgagcgtgtacgccgagattacgcgccgg

SEQ ID NO: 92395 - DNA, 30 bp, Artificial Sequence
  Synthetic oligonucleotide
agagtcttacgaggagatctttctcgccgg

SEQ ID NO: 92396 - DNA, 30 bp, Artificial Sequence
  Synthetic oligonucleotide
actagtggcgtcaattggcagtcatgccgg

SEQ ID NO: 92397 - DNA, 30 bp, Artificial Sequence
  Synthetic oligonucleotide
atgtgtgggaagaacgacgctctttgccgg

SEQ ID NO: 92398 - DNA, 30 bp, Artificial Sequence
  Synthetic oligonucleotide
agatagggattgtatggcaagcacatccgg

SEQ ID NO: 92399 - DNA, 30 bp, Artificial Sequence
  Synthetic oligonucleotide
cgaatgtgtaccgtcccttcaatgatccgg

SEQ ID NO: 92400 - DNA, 30 bp, Artificial Sequence
  Synthetic oligonucleotide
agggagccaaaagctctgttcagactccgg

SEQ ID NO: 92401 - DNA, 30 bp, Artificial Sequence
  Synthetic oligonucleotide
accggaccaaagagtacgacccttctccgg

SEQ ID NO: 92402 - DNA, 30 bp, Artificial Sequence
  Synthetic oligonucleotide
tgcaaaactttctcgaagccaggagtccgg

SEQ ID NO: 92403 - DNA, 30 bp, Artificial Sequence
  Synthetic oligonucleotide
taatgtggaagtacagagggtcatgtccgg

SEQ ID NO: 92404 - DNA, 30 bp, Artificial Sequence
  Synthetic oligonucleotide
ggagataacattaccctattaatcttccgg

SEQ ID NO: 92405 - DNA, 30 bp, Artificial Sequence
  Synthetic oligonucleotide
catgtcgggttaacaagcctttacaagcgg

SEQ ID NO: 92406 - DNA, 30 bp, Artificial Sequence
  Synthetic oligonucleotide
aggcaagcaagtcgggaagaccagaagcgg

SEQ ID NO: 92407 - DNA, 30 bp, Artificial Sequence
  Synthetic oligonucleotide
gcaactaaaaaaatttactcccagaagcgg

SEQ ID NO: 92408 - DNA, 30 bp, Artificial Sequence
  Synthetic oligonucleotide
gcttggctgggctgtgtattcaggaagcgg

SEQ ID NO: 92409 - DNA, 30 bp, Artificial Sequence
  Synthetic oligonucleotide
actgctgcccgtgaatgaatctgccagcgg

SEQ ID NO: 92410 - DNA, 30 bp, Artificial Sequence
  Synthetic oligonucleotide
ttaggtataagtaccatgtcacaggagcgg

SEQ ID NO: 92411 - DNA, 30 bp, Artificial Sequence
  Synthetic oligonucleotide
gatgaaacagtttcggtcataatgtagcgg

SEQ ID NO: 92412 - DNA, 30 bp, Artificial Sequence
  Synthetic oligonucleotide
tacgcttagtcgatgagggatcgaacgcgg

SEQ ID NO: 92413 - DNA, 32 bp, Artificial Sequence
  Synthetic oligonucleotide
agacactggataagtaagaccggagcccgcgg

SEQ ID NO: 92414 - DNA, 30 bp, Artificial Sequence
  Synthetic oligonucleotide
atcgcatcggttagcagaaaggcagcgcgg

SEQ ID NO: 92415 - DNA, 30 bp, Artificial Sequence
  Synthetic oligonucleotide
ttcccagcaaaggaaggaattaagaggcgg

SEQ ID NO: 92416 - DNA, 30 bp, Artificial Sequence
  Synthetic oligonucleotide
ctacgtgaagtgtcacgcgcccaacggcgg

SEQ ID NO: 92417 - DNA, 30 bp, Artificial Sequence
  Synthetic oligonucleotide
tcagaaaaggcgagactcaaagcggggcgg

SEQ ID NO: 92418 - DNA, 30 bp, Artificial Sequence
  Synthetic oligonucleotide
aggaggttaggcgcaatcttggttgggcgg

SEQ ID NO: 92419 - DNA, 30 bp, Artificial Sequence
  Synthetic oligonucleotide
cctagcgcacagggtttgaggtatatgcgg

SEQ ID NO: 92420 - DNA, 30 bp, Artificial Sequence
  Synthetic oligonucleotide
tcagcggtggataaaatgcaatttatgcgg

SEQ ID NO: 92421 - DNA, 30 bp, Artificial Sequence
  Synthetic oligonucleotide
cctcatatggcacctggaaaagggctgcgg

SEQ ID NO: 92422 - DNA, 30 bp, Artificial Sequence
  Synthetic oligonucleotide
tcattgagttgatagtgtccatatctgcgg

SEQ ID NO: 92423 - DNA, 30 bp, Artificial Sequence
  Synthetic oligonucleotide
ccaaggtctaatcgaatatttccggtgcgg

SEQ ID NO: 92424 - DNA, 30 bp, Artificial Sequence
  Synthetic oligonucleotide
gacaggattctgggggaaggtcatgtgcgg

SEQ ID NO: 92425 - DNA, 30 bp, Artificial Sequence
  Synthetic oligonucleotide
ttcacgaggaccggacaaatcttcaatcgg

SEQ ID NO: 92426 - DNA, 30 bp, Artificial Sequence
  Synthetic oligonucleotide
ctatgaagaattagtatgggaaagcatcgg

SEQ ID NO: 92427 - DNA, 30 bp, Artificial Sequence
  Synthetic oligonucleotide
tggggtgtcagtacccctcagcagcatcgg

SEQ ID NO: 92428 - DNA, 30 bp, Artificial Sequence
  Synthetic oligonucleotide
cgtcacggcggggattgatgtcatcatcgg

SEQ ID NO: 92429 - DNA, 30 bp, Artificial Sequence
  Synthetic oligonucleotide
gggcaaacaaggttccctagtttgactcgg

SEQ ID NO: 92430 - DNA, 30 bp, Artificial Sequence
  Synthetic oligonucleotide
tggcaaacaccgcctcggcgaactactcgg

SEQ ID NO: 92431 - DNA, 30 bp, Artificial Sequence
  Synthetic oligonucleotide
gagggattaaacgtatcatgctaacctcgg

SEQ ID NO: 92432 - DNA, 30 bp, Artificial Sequence
  Synthetic oligonucleotide
gatcgccacaccggaggaacctgagctcgg

SEQ ID NO: 92433 - DNA, 30 bp, Artificial Sequence
  Synthetic oligonucleotide
tcagacggagagcagttgcacgcgtctcgg

SEQ ID NO: 92434 - DNA, 30 bp, Artificial Sequence
  Synthetic oligonucleotide
gatggatatacacactgtgaccggcgtcgg

SEQ ID NO: 92435 - DNA, 30 bp, Artificial Sequence
  Synthetic oligonucleotide
acacggcgatccaaataagtaatgcgtcgg

SEQ ID NO: 92436 - DNA, 30 bp, Artificial Sequence
  Synthetic oligonucleotide
tgaaaaaggatgcgattcgtcggaggtcgg

SEQ ID NO: 92437 - DNA, 30 bp, Artificial Sequence
  Synthetic oligonucleotide
tgtgtcatgtcctaagagagaataggtcgg

SEQ ID NO: 92438 - DNA, 30 bp, Artificial Sequence
  Synthetic oligonucleotide
aaaggaggcaaaaacattaggacgggtcgg

SEQ ID NO: 92439 - DNA, 30 bp, Artificial Sequence
  Synthetic oligonucleotide
tcatcggaaatgtgtcacatggggggtcgg

SEQ ID NO: 92440 - DNA, 30 bp, Artificial Sequence
  Synthetic oligonucleotide
ggcggtaaaaaagtaaccccgagatgtcgg

SEQ ID NO: 92441 - DNA, 30 bp, Artificial Sequence
  Synthetic oligonucleotide
gcgtcattatgcgagggccagttgtgtcgg

SEQ ID NO: 92442 - DNA, 30 bp, Artificial Sequence
  Synthetic oligonucleotide
ataagacttcagtagtcatggataattcgg

SEQ ID NO: 92443 - DNA, 30 bp, Artificial Sequence
  Synthetic oligonucleotide
acgaagatcttgatcgggtcgctgattcgg

SEQ ID NO: 92444 - DNA, 30 bp, Artificial Sequence
  Synthetic oligonucleotide
cgcgattacaaacttgtcaaccctattcgg

SEQ ID NO: 92445 - DNA, 30 bp, Artificial Sequence
  Synthetic oligonucleotide
ccattaagcttgttgaaattaaaacttcgg

SEQ ID NO: 92446 - DNA, 30 bp, Artificial Sequence
  Synthetic oligonucleotide
tctaagactatcacgcgccaaagtcttcgg

SEQ ID NO: 92447 - DNA, 30 bp, Artificial Sequence
  Synthetic oligonucleotide
caagaaccgggaatctcgggatacaaaggg

SEQ ID NO: 92448 - DNA, 30 bp, Artificial Sequence
  Synthetic oligonucleotide
agattaatacgtcgggagagggccaaaggg

SEQ ID NO: 92449 - DNA, 30 bp, Artificial Sequence
  Synthetic oligonucleotide
tcagaagatggtgtggattatccgaaaggg

SEQ ID NO: 92450 - DNA, 30 bp, Artificial Sequence
  Synthetic oligonucleotide
agcagctcggttgtgttcggggttaaaggg

SEQ ID NO: 92451 - DNA, 30 bp, Artificial Sequence
  Synthetic oligonucleotide
gtgcgttaagcacttgtgtatgttaaaggg

SEQ ID NO: 92452 - DNA, 30 bp, Artificial Sequence
  Synthetic oligonucleotide
ctgaactgctatcaaattacactacaaggg

SEQ ID NO: 92453 - DNA, 30 bp, Artificial Sequence
  Synthetic oligonucleotide
ttcgggagggtatcgcggacacaagaaggg

SEQ ID NO: 92454 - DNA, 30 bp, Artificial Sequence
  Synthetic oligonucleotide
tgcttaagctgaggagtttttgcagaaggg

SEQ ID NO: 92455 - DNA, 30 bp, Artificial Sequence
  Synthetic oligonucleotide
tgggcttagtaggtatcatacatagaaggg

SEQ ID NO: 92456 - DNA, 30 bp, Artificial Sequence
  Synthetic oligonucleotide
tcccacgaatatcgatgggagtacgaaggg

SEQ ID NO: 92457 - DNA, 30 bp, Artificial Sequence
  Synthetic oligonucleotide
acatcctaatctgatcgttgttgcgaaggg

SEQ ID NO: 92458 - DNA, 30 bp, Artificial Sequence
  Synthetic oligonucleotide
cactcatacagttctcgtgcgttcgaaggg

SEQ ID NO: 92459 - DNA, 30 bp, Artificial Sequence
  Synthetic oligonucleotide
agcaggggagtcaggttattgctggaaggg

SEQ ID NO: 92460 - DNA, 30 bp, Artificial Sequence
  Synthetic oligonucleotide
ctatgcttagaacgagtaggaccttaaggg

SEQ ID NO: 92461 - DNA, 30 bp, Artificial Sequence
  Synthetic oligonucleotide
gcgtataccaaaacagaggctaaaacaggg

SEQ ID NO: 92462 - DNA, 30 bp, Artificial Sequence
  Synthetic oligonucleotide
tgcgcaatatagcaagggtattcaacaggg

SEQ ID NO: 92463 - DNA, 30 bp, Artificial Sequence
  Synthetic oligonucleotide
ttttgtagttcatcacagagtggaccaggg

SEQ ID NO: 92464 - DNA, 30 bp, Artificial Sequence
  Synthetic oligonucleotide
ccacctacggaaaccgataaactagcaggg

SEQ ID NO: 92465 - DNA, 30 bp, Artificial Sequence
  Synthetic oligonucleotide
tacaagacttggagagccagctacgcaggg

SEQ ID NO: 92466 - DNA, 30 bp, Artificial Sequence
  Synthetic oligonucleotide
atactcgaggggagggaaaaaggggcaggg

SEQ ID NO: 92467 - DNA, 30 bp, Artificial Sequence
  Synthetic oligonucleotide
aggttatgctcagcttcgtgtactgcaggg

SEQ ID NO: 92468 - DNA, 30 bp, Artificial Sequence
  Synthetic oligonucleotide
aaaccgactgtagtgaaacttattgcaggg

SEQ ID NO: 92469 - DNA, 30 bp, Artificial Sequence
  Synthetic oligonucleotide
agacataattggcctgggaaatagtcaggg

SEQ ID NO: 92470 - DNA, 30 bp, Artificial Sequence
  Synthetic oligonucleotide
tgataactacagaagatgtagatgtcaggg

SEQ ID NO: 92471 - DNA, 30 bp, Artificial Sequence
  Synthetic oligonucleotide
agtaatagcatggacctccgtcgttcaggg

SEQ ID NO: 92472 - DNA, 30 bp, Artificial Sequence
  Synthetic oligonucleotide
cgaagattatagattttcggggaaagaggg

SEQ ID NO: 92473 - DNA, 30 bp, Artificial Sequence
  Synthetic oligonucleotide
tcagcgagaattatgtacaaacccagaggg

SEQ ID NO: 92474 - DNA, 30 bp, Artificial Sequence
  Synthetic oligonucleotide
atcaaatctaatagaggtatcatcagaggg

SEQ ID NO: 92475 - DNA, 30 bp, Artificial Sequence
  Synthetic oligonucleotide
gggaattgaaagcagatgaggtcgagaggg

SEQ ID NO: 92476 - DNA, 30 bp, Artificial Sequence
  Synthetic oligonucleotide
gaagaaaagtctatgggatcgatgagaggg

SEQ ID NO: 92477 - DNA, 30 bp, Artificial Sequence
  Synthetic oligonucleotide
tgcaggtccgccgggagtgcatcacgaggg

SEQ ID NO: 92478 - DNA, 30 bp, Artificial Sequence
  Synthetic oligonucleotide
tgcggtcgccatcccgggtatgtaggaggg

SEQ ID NO: 92479 - DNA, 30 bp, Artificial Sequence
  Synthetic oligonucleotide
taaccgcagaaaaacttacgcaatggaggg

SEQ ID NO: 92480 - DNA, 30 bp, Artificial Sequence
  Synthetic oligonucleotide
aacggcgccggagtgagttgcgagtgaggg

SEQ ID NO: 92481 - DNA, 30 bp, Artificial Sequence
  Synthetic oligonucleotide
aacggcaatcgtgtggaattgaggtgaggg

SEQ ID NO: 92482 - DNA, 30 bp, Artificial Sequence
  Synthetic oligonucleotide
accgggtgatcagaatgaggcgtcataggg

SEQ ID NO: 92483 - DNA, 30 bp, Artificial Sequence
  Synthetic oligonucleotide
agattatagcgtatgcccccgcggataggg

SEQ ID NO: 92484 - DNA, 30 bp, Artificial Sequence
  Synthetic oligonucleotide
atcggggatcaatattggaatctactaggg

SEQ ID NO: 92485 - DNA, 30 bp, Artificial Sequence
  Synthetic oligonucleotide
aaagtggtagtgtaagaggccatcctaggg

SEQ ID NO: 92486 - DNA, 30 bp, Artificial Sequence
  Synthetic oligonucleotide
tggccgagggttttacaggatgcgctaggg

SEQ ID NO: 92487 - DNA, 29 bp, Artificial Sequence
  Synthetic oligonucleotide
ttacacgatccgccccagcgtgagtaggg

SEQ ID NO: 92488 - DNA, 30 bp, Artificial Sequence
  Synthetic oligonucleotide
gtacaaaagggtcattaaaaaagcgtaggg

SEQ ID NO: 92489 - DNA, 30 bp, Artificial Sequence
  Synthetic oligonucleotide
ctatgtagactcattcggcaatgattaggg

SEQ ID NO: 92490 - DNA, 30 bp, Artificial Sequence
  Synthetic oligonucleotide
cacgatacaacatcggttagcgacttaggg

SEQ ID NO: 92491 - DNA, 30 bp, Artificial Sequence
  Synthetic oligonucleotide
tacgtgctggctaacctcagagacaacggg

SEQ ID NO: 92492 - DNA, 30 bp, Artificial Sequence
  Synthetic oligonucleotide
gcaaagtgaatagtgtgccacagtaacggg

SEQ ID NO: 92493 - DNA, 30 bp, Artificial Sequence
  Synthetic oligonucleotide
accgactgggttgcattacggtcccacggg

SEQ ID NO: 92494 - DNA, 30 bp, Artificial Sequence
  Synthetic oligonucleotide
aacggctgacaaggccgcgataaatacggg

SEQ ID NO: 92495 - DNA, 30 bp, Artificial Sequence
  Synthetic oligonucleotide
atgtacagtcatggatctgggcaatacggg

SEQ ID NO: 92496 - DNA, 30 bp, Artificial Sequence
  Synthetic oligonucleotide
gcgcggtgcaaaacgagcaacccatacggg

SEQ ID NO: 92497 - DNA, 30 bp, Artificial Sequence
  Synthetic oligonucleotide
atcacaggagcgaaacaagggtaaaccggg

SEQ ID NO: 92498 - DNA, 30 bp, Artificial Sequence
  Synthetic oligonucleotide
ctagggtgctcgttgtatggtgcccccggg

SEQ ID NO: 92499 - DNA, 30 bp, Artificial Sequence
  Synthetic oligonucleotide
agtagtgatggttccacgaccttcgccggg

SEQ ID NO: 92500 - DNA, 30 bp, Artificial Sequence
  Synthetic oligonucleotide
aaacgaagcaagaggtaaagagtggccggg

SEQ ID NO: 92501 - DNA, 30 bp, Artificial Sequence
  Synthetic oligonucleotide
acaacggtttacgtaccggcatgatccggg

SEQ ID NO: 92502 - DNA, 30 bp, Artificial Sequence
  Synthetic oligonucleotide
ctaagtggtctagcgggatgcgtatccggg

SEQ ID NO: 92503 - DNA, 30 bp, Artificial Sequence
  Synthetic oligonucleotide
cccagctaacagggatcagtattcagcggg

SEQ ID NO: 92504 - DNA, 30 bp, Artificial Sequence
  Synthetic oligonucleotide
tagcaatgggcccgaggacgaatgcgcggg

SEQ ID NO: 92505 - DNA, 30 bp, Artificial Sequence
  Synthetic oligonucleotide
cgttttgtttgtgtaataccggaaggcggg

SEQ ID NO: 92506 - DNA, 30 bp, Artificial Sequence
  Synthetic oligonucleotide
ctgaacacatttgggtgatacagcggcggg

SEQ ID NO: 92507 - DNA, 30 bp, Artificial Sequence
  Synthetic oligonucleotide
tgggataggcaccaattgataatatgcggg

SEQ ID NO: 92508 - DNA, 30 bp, Artificial Sequence
  Synthetic oligonucleotide
ttggaccgtcgtactagaatccgctgcggg

SEQ ID NO: 92509 - DNA, 30 bp, Artificial Sequence
  Synthetic oligonucleotide
acgcaagcgggtaagaagcggggaatcggg

SEQ ID NO: 92510 - DNA, 30 bp, Artificial Sequence
  Synthetic oligonucleotide
ggactgtaaaatctcgtgtccctgatcggg

SEQ ID NO: 92511 - DNA, 30 bp, Artificial Sequence
  Synthetic oligonucleotide
ccatcccggctgcgtaagcgccacctcggg

SEQ ID NO: 92512 - DNA, 30 bp, Artificial Sequence
  Synthetic oligonucleotide
cacctctgtcgaacaacgagtaagctcggg

SEQ ID NO: 92513 - DNA, 30 bp, Artificial Sequence
  Synthetic oligonucleotide
tatgcgcgggccatattaggatttctcggg

SEQ ID NO: 92514 - DNA, 30 bp, Artificial Sequence
  Synthetic oligonucleotide
gtcccatcactaggcttcggtatcgtcggg

SEQ ID NO: 92515 - DNA, 30 bp, Artificial Sequence
  Synthetic oligonucleotide
tattgtatatcgaacatgagtcaggtcggg

SEQ ID NO: 92516 - DNA, 30 bp, Artificial Sequence
  Synthetic oligonucleotide
agtactccaaatcattccccaaatgtcggg

SEQ ID NO: 92517 - DNA, 30 bp, Artificial Sequence
  Synthetic oligonucleotide
tggattaagacgaggcaaaatatcttcggg

SEQ ID NO: 92518 - DNA, 30 bp, Artificial Sequence
  Synthetic oligonucleotide
aactcctacctgggggccgaacaaaagggg

SEQ ID NO: 92519 - DNA, 30 bp, Artificial Sequence
  Synthetic oligonucleotide
aatgagaacactgggtgatgggaaaagggg

SEQ ID NO: 92520 - DNA, 30 bp, Artificial Sequence
  Synthetic oligonucleotide
ttctaatgcagagtgtgtatggagaagggg

SEQ ID NO: 92521 - DNA, 30 bp, Artificial Sequence
  Synthetic oligonucleotide
acttgcgatgcacgtggttcgtctaagggg

SEQ ID NO: 92522 - DNA, 30 bp, Artificial Sequence
  Synthetic oligonucleotide
tcaaggcagaggccggagctagaccagggg

SEQ ID NO: 92523 - DNA, 30 bp, Artificial Sequence
  Synthetic oligonucleotide
aggagctatgagtactgcccaggtcagggg

SEQ ID NO: 92524 - DNA, 30 bp, Artificial Sequence
  Synthetic oligonucleotide
tccgttaggtgcttcccagacagagagggg

SEQ ID NO: 92525 - DNA, 30 bp, Artificial Sequence
  Synthetic oligonucleotide
acggccttacccgatctttaatgggagggg

SEQ ID NO: 92526 - DNA, 30 bp, Artificial Sequence
  Synthetic oligonucleotide
gggggaacgggacaatgcggaagatagggg

SEQ ID NO: 92527 - DNA, 30 bp, Artificial Sequence
  Synthetic oligonucleotide
agcctcagggtggtacggaagacttagggg

SEQ ID NO: 92528 - DNA, 30 bp, Artificial Sequence
  Synthetic oligonucleotide
gcacaggctcaaattcgtcacgtcacgggg

SEQ ID NO: 92529 - DNA, 30 bp, Artificial Sequence
  Synthetic oligonucleotide
tcacgtacgcgtaaacactaggagacgggg

SEQ ID NO: 92530 - DNA, 30 bp, Artificial Sequence
  Synthetic oligonucleotide
acagttaggatagccaagtgcatgacgggg

SEQ ID NO: 92531 - DNA, 30 bp, Artificial Sequence
  Synthetic oligonucleotide
tcagtactacgaactcatgaatctacgggg

SEQ ID NO: 92532 - DNA, 30 bp, Artificial Sequence
  Synthetic oligonucleotide
tacaccggatacaaacttggtggtacgggg

SEQ ID NO: 92533 - DNA, 30 bp, Artificial Sequence
  Synthetic oligonucleotide
cagcttgaaactcgatcgcgcataccgggg

SEQ ID NO: 92534 - DNA, 30 bp, Artificial Sequence
  Synthetic oligonucleotide
acacaccgccacatatctgagacagcgggg

SEQ ID NO: 92535 - DNA, 30 bp, Artificial Sequence
  Synthetic oligonucleotide
catacgtagcttcaaaagcttgttgcgggg

SEQ ID NO: 92536 - DNA, 30 bp, Artificial Sequence
  Synthetic oligonucleotide
ctgccgacactatgtagtaaataatcgggg

SEQ ID NO: 92537 - DNA, 30 bp, Artificial Sequence
  Synthetic oligonucleotide
atcagaaataggggcggggaaacatcgggg

SEQ ID NO: 92538 - DNA, 30 bp, Artificial Sequence
  Synthetic oligonucleotide
acagcatataacgagtagaaacggtcgggg

SEQ ID NO: 92539 - DNA, 30 bp, Artificial Sequence
  Synthetic oligonucleotide
ttgcgggcgaaccataaaccttcttcgggg

SEQ ID NO: 92540 - DNA, 30 bp, Artificial Sequence
  Synthetic oligonucleotide
taacatcggttcggagactatttacggggg

SEQ ID NO: 92541 - DNA, 30 bp, Artificial Sequence
  Synthetic oligonucleotide
tcgcgtgcgcaagtgaagacggtccggggg

SEQ ID NO: 92542 - DNA, 30 bp, Artificial Sequence
  Synthetic oligonucleotide
ggacgtctcgccaagaagaagtggcggggg

SEQ ID NO: 92543 - DNA, 30 bp, Artificial Sequence
  Synthetic oligonucleotide
cattcggaagtaaaactctaaagagggggg

SEQ ID NO: 92544 - DNA, 30 bp, Artificial Sequence
  Synthetic oligonucleotide
tcactaaagtgatgactgcgagaggggggg

SEQ ID NO: 92545 - DNA, 30 bp, Artificial Sequence
  Synthetic oligonucleotide
tagggttaccgtgcgatgcccaagtggggg

SEQ ID NO: 92546 - DNA, 30 bp, Artificial Sequence
  Synthetic oligonucleotide
aactgtactgactctactaggaggtggggg

SEQ ID NO: 92547 - DNA, 30 bp, Artificial Sequence
  Synthetic oligonucleotide
tcttatttgtgaacgtatatggattggggg

SEQ ID NO: 92548 - DNA, 30 bp, Artificial Sequence
  Synthetic oligonucleotide
acacgttcaacctgaaccctacaaatgggg

SEQ ID NO: 92549 - DNA, 30 bp, Artificial Sequence
  Synthetic oligonucleotide
ggttagataaaaccgacctcatccatgggg

SEQ ID NO: 92550 - DNA, 30 bp, Artificial Sequence
  Synthetic oligonucleotide
taagcctgacaaagccggggagtcatgggg

SEQ ID NO: 92551 - DNA, 30 bp, Artificial Sequence
  Synthetic oligonucleotide
tatcgacaatatctgtaccaatttatgggg

SEQ ID NO: 92552 - DNA, 30 bp, Artificial Sequence
  Synthetic oligonucleotide
accctagctacagcaccaaagggactgggg

SEQ ID NO: 92553 - DNA, 30 bp, Artificial Sequence
  Synthetic oligonucleotide
agcgaagggactaggcagctccagctgggg

SEQ ID NO: 92554 - DNA, 30 bp, Artificial Sequence
  Synthetic oligonucleotide
atccctgacgcaaaaagtggagcagtgggg

SEQ ID NO: 92555 - DNA, 30 bp, Artificial Sequence
  Synthetic oligonucleotide
atagggtttgaaacagaaaacagagtgggg

SEQ ID NO: 92556 - DNA, 30 bp, Artificial Sequence
  Synthetic oligonucleotide
ctctcgtgaaacacagccagtagagtgggg

SEQ ID NO: 92557 - DNA, 30 bp, Artificial Sequence
  Synthetic oligonucleotide
ttggcaaggggcttgcgtattcgcgtgggg

SEQ ID NO: 92558 - DNA, 30 bp, Artificial Sequence
  Synthetic oligonucleotide
gctatgtaaccacgagtcagagaggtgggg

SEQ ID NO: 92559 - DNA, 30 bp, Artificial Sequence
  Synthetic oligonucleotide
acaaatcactactcctttaagccggtgggg

SEQ ID NO: 92560 - DNA, 30 bp, Artificial Sequence
  Synthetic oligonucleotide
aaagacaattatcgccacgcccatgtgggg

SEQ ID NO: 92561 - DNA, 30 bp, Artificial Sequence
  Synthetic oligonucleotide
cgtgctcaatgaggatgcggtgaattgggg

SEQ ID NO: 92562 - DNA, 30 bp, Artificial Sequence
  Synthetic oligonucleotide
acagtgtgcgcggcataagtctgcttgggg

SEQ ID NO: 92563 - DNA, 30 bp, Artificial Sequence
  Synthetic oligonucleotide
gcttgtgtgtgttgaaaatacaggaatggg

SEQ ID NO: 92564 - DNA, 30 bp, Artificial Sequence
  Synthetic oligonucleotide
aaagagttaagatgtccgggatataatggg

SEQ ID NO: 92565 - DNA, 30 bp, Artificial Sequence
  Synthetic oligonucleotide
caaaacgttgtagatgccgagcgtcatggg

SEQ ID NO: 92566 - DNA, 30 bp, Artificial Sequence
  Synthetic oligonucleotide
atgctacgaccgatcgaggtcggagatggg

SEQ ID NO: 92567 - DNA, 30 bp, Artificial Sequence
  Synthetic oligonucleotide
gcaggttgataacctctgctcaaaactggg

SEQ ID NO: 92568 - DNA, 30 bp, Artificial Sequence
  Synthetic oligonucleotide
agcgtgaagaggatcccgccgtacactggg

SEQ ID NO: 92569 - DNA, 30 bp, Artificial Sequence
  Synthetic oligonucleotide
tcccatcggttaggtagagcgaagactggg

SEQ ID NO: 92570 - DNA, 30 bp, Artificial Sequence
  Synthetic oligonucleotide
ctagatggctacacggcaatatgacctggg

SEQ ID NO: 92571 - DNA, 30 bp, Artificial Sequence
  Synthetic oligonucleotide
atcagtcaaatgggttaaccgcgccctggg

SEQ ID NO: 92572 - DNA, 30 bp, Artificial Sequence
  Synthetic oligonucleotide
cattagcagagggaatccctagcgcctggg

SEQ ID NO: 92573 - DNA, 30 bp, Artificial Sequence
  Synthetic oligonucleotide
atagtgaatcactaacatggtcgctctggg

SEQ ID NO: 92574 - DNA, 30 bp, Artificial Sequence
  Synthetic oligonucleotide
tcatggattccgggcacgaactattctggg

SEQ ID NO: 92575 - DNA, 30 bp, Artificial Sequence
  Synthetic oligonucleotide
gaagctgtacacactccaaataacagtggg

SEQ ID NO: 92576 - DNA, 30 bp, Artificial Sequence
  Synthetic oligonucleotide
tcgcgcaaaaaaacccttgtgccccgtggg

SEQ ID NO: 92577 - DNA, 30 bp, Artificial Sequence
  Synthetic oligonucleotide
tacttcggtcattggaacgactcccgtggg

SEQ ID NO: 92578 - DNA, 30 bp, Artificial Sequence
  Synthetic oligonucleotide
tatgttacacataacacatggcgtcgtggg

SEQ ID NO: 92579 - DNA, 31 bp, Artificial Sequence
  Synthetic oligonucleotide
tcgcgtatctatcatggtacctacaggtggg

SEQ ID NO: 92580 - DNA, 30 bp, Artificial Sequence
  Synthetic oligonucleotide
gtgaactaacaatagttttgtgccggtggg

SEQ ID NO: 92581 - DNA, 30 bp, Artificial Sequence
  Synthetic oligonucleotide
aggtgaggatgttaggacagctcgggtggg

SEQ ID NO: 92582 - DNA, 30 bp, Artificial Sequence
  Synthetic oligonucleotide
gattggctacgctatacctatcgtggtggg

SEQ ID NO: 92583 - DNA, 30 bp, Artificial Sequence
  Synthetic oligonucleotide
tcactgtcttatcatacggccaaatgtggg

SEQ ID NO: 92584 - DNA, 30 bp, Artificial Sequence
  Synthetic oligonucleotide
ggacgtgacaagtctcagcaatgatgtggg

SEQ ID NO: 92585 - DNA, 30 bp, Artificial Sequence
  Synthetic oligonucleotide
tcctatgtcggttccagcatgatctgtggg

SEQ ID NO: 92586 - DNA, 30 bp, Artificial Sequence
  Synthetic oligonucleotide
agaagagcagtagtggggtgactgtgtggg

SEQ ID NO: 92587 - DNA, 30 bp, Artificial Sequence
  Synthetic oligonucleotide
gagacaggactgatgtctcgcacttgtggg

SEQ ID NO: 92588 - DNA, 30 bp, Artificial Sequence
  Synthetic oligonucleotide
tcaccgtccattctgcaccgacaaattggg

SEQ ID NO: 92589 - DNA, 30 bp, Artificial Sequence
  Synthetic oligonucleotide
gtaatgggagaataaggatggcgcattggg

SEQ ID NO: 92590 - DNA, 30 bp, Artificial Sequence
  Synthetic oligonucleotide
aagcaattgggatgcgatgagcctcttggg

SEQ ID NO: 92591 - DNA, 30 bp, Artificial Sequence
  Synthetic oligonucleotide
acagtggggttcgttagatcggccgttggg

SEQ ID NO: 92592 - DNA, 30 bp, Artificial Sequence
  Synthetic oligonucleotide
tacgcaatgtcgatgacgactggcgttggg

SEQ ID NO: 92593 - DNA, 30 bp, Artificial Sequence
  Synthetic oligonucleotide
caacaggaaaacatctgccccatggttggg

SEQ ID NO: 92594 - DNA, 30 bp, Artificial Sequence
  Synthetic oligonucleotide
cgactccatgatcttcttaccgtggttggg

SEQ ID NO: 92595 - DNA, 30 bp, Artificial Sequence
  Synthetic oligonucleotide
acgcattcagaaaaagaaggcctgtttggg

SEQ ID NO: 92596 - DNA, 30 bp, Artificial Sequence
  Synthetic oligonucleotide
tggcccggactatggcaatgtagaaaatgg

SEQ ID NO: 92597 - DNA, 30 bp, Artificial Sequence
  Synthetic oligonucleotide
cagtatgacggtatagttcaacacaaatgg

SEQ ID NO: 92598 - DNA, 30 bp, Artificial Sequence
  Synthetic oligonucleotide
cactcaatactgccggagaagagcaaatgg

SEQ ID NO: 92599 - DNA, 30 bp, Artificial Sequence
  Synthetic oligonucleotide
tcggttcgttcgttgtaagtgacgaaatgg

SEQ ID NO: 92600 - DNA, 30 bp, Artificial Sequence
  Synthetic oligonucleotide
caaggactcaaagacttatgctggaaatgg

SEQ ID NO: 92601 - DNA, 30 bp, Artificial Sequence
  Synthetic oligonucleotide
gttcagtcttaagccccaaacggtcaatgg

SEQ ID NO: 92602 - DNA, 30 bp, Artificial Sequence
  Synthetic oligonucleotide
tggtggatcttatagatgttttgcgaatgg

SEQ ID NO: 92603 - DNA, 30 bp, Artificial Sequence
  Synthetic oligonucleotide
cagtggtactctagatgccttttggaatgg

SEQ ID NO: 92604 - DNA, 30 bp, Artificial Sequence
  Synthetic oligonucleotide
cgtccgggatcggcttaaagacttgaatgg

SEQ ID NO: 92605 - DNA, 30 bp, Artificial Sequence
  Synthetic oligonucleotide
gcacgacgtgggtgcctgggaacttaatgg

SEQ ID NO: 92606 - DNA, 30 bp, Artificial Sequence
  Synthetic oligonucleotide
caagcacggcaacgatgcatcacttaatgg

SEQ ID NO: 92607 - DNA, 30 bp, Artificial Sequence
  Synthetic oligonucleotide
agtttactgactctccacaaagaaacatgg

SEQ ID NO: 92608 - DNA, 30 bp, Artificial Sequence
  Synthetic oligonucleotide
cccgcgttagacgtggataatactacatgg

SEQ ID NO: 92609 - DNA, 30 bp, Artificial Sequence
  Synthetic oligonucleotide
taacgctcgtggtcagggaatgacccatgg

SEQ ID NO: 92610 - DNA, 30 bp, Artificial Sequence
  Synthetic oligonucleotide
aagtgtgtagatgtttactacaatccatgg

SEQ ID NO: 92611 - DNA, 30 bp, Artificial Sequence
  Synthetic oligonucleotide
acaataagccacaacgtgtaacctgcatgg

SEQ ID NO: 92612 - DNA, 30 bp, Artificial Sequence
  Synthetic oligonucleotide
ttcggcagccggtaagagtagatgtcatgg

SEQ ID NO: 92613 - DNA, 30 bp, Artificial Sequence
  Synthetic oligonucleotide
aattaaaaagagtggcggttatgttcatgg

SEQ ID NO: 92614 - DNA, 30 bp, Artificial Sequence
  Synthetic oligonucleotide
agggtgattcaacacaggagttcaagatgg

SEQ ID NO: 92615 - DNA, 30 bp, Artificial Sequence
  Synthetic oligonucleotide
ccctaagtgccggtagcataaagaagatgg

SEQ ID NO: 92616 - DNA, 30 bp, Artificial Sequence
  Synthetic oligonucleotide
tgaaaggcgcttgatgagtgcgtcagatgg

SEQ ID NO: 92617 - DNA, 30 bp, Artificial Sequence
  Synthetic oligonucleotide
taatttgggatacgggtaaactgccgatgg

SEQ ID NO: 92618 - DNA, 30 bp, Artificial Sequence
  Synthetic oligonucleotide
taaagaagatccaaggatgctgagcgatgg

SEQ ID NO: 92619 - DNA, 30 bp, Artificial Sequence
  Synthetic oligonucleotide
aaaatcaaaagaccattccggccgcgatgg

SEQ ID NO: 92620 - DNA, 30 bp, Artificial Sequence
  Synthetic oligonucleotide
aacgctgattggatccgaggcccatgatgg

SEQ ID NO: 92621 - DNA, 30 bp, Artificial Sequence
  Synthetic oligonucleotide
ttacgcgacagtagatgagcctagtgatgg

SEQ ID NO: 92622 - DNA, 30 bp, Artificial Sequence
  Synthetic oligonucleotide
tctagtccagtgacgacctccgaaatatgg

SEQ ID NO: 92623 - DNA, 30 bp, Artificial Sequence
  Synthetic oligonucleotide
tcgtcctgagagttgtacccggatatatgg

SEQ ID NO: 92624 - DNA, 30 bp, Artificial Sequence
  Synthetic oligonucleotide
ctaactcatgcgcatcttgccgtcctatgg

SEQ ID NO: 92625 - DNA, 30 bp, Artificial Sequence
  Synthetic oligonucleotide
gagagggagtctgataggtgccgtctatgg

SEQ ID NO: 92626 - DNA, 30 bp, Artificial Sequence
  Synthetic oligonucleotide
tggaaatgttcgggagactgacaagtatgg

SEQ ID NO: 92627 - DNA, 30 bp, Artificial Sequence
  Synthetic oligonucleotide
tacacgtcgatccggcggggtgccgtatgg

SEQ ID NO: 92628 - DNA, 30 bp, Artificial Sequence
  Synthetic oligonucleotide
tgcatcgtgaagggttgcccggtcgtatgg

SEQ ID NO: 92629 - DNA, 30 bp, Artificial Sequence
  Synthetic oligonucleotide
agacacgtctgagggcgcccagcattatgg

SEQ ID NO: 92630 - DNA, 30 bp, Artificial Sequence
  Synthetic oligonucleotide
agctgctacaaaaagactcgttggttatgg

SEQ ID NO: 92631 - DNA, 30 bp, Artificial Sequence
  Synthetic oligonucleotide
agtagcggttcaggtccgaacagtttatgg

SEQ ID NO: 92632 - DNA, 30 bp, Artificial Sequence
  Synthetic oligonucleotide
agtacaaacgttgttcatgtgggtttatgg

SEQ ID NO: 92633 - DNA, 30 bp, Artificial Sequence
  Synthetic oligonucleotide
tgactagagcgcataagaggacttaactgg

SEQ ID NO: 92634 - DNA, 30 bp, Artificial Sequence
  Synthetic oligonucleotide
tgtgcgcacagaaatcgcactgaagactgg

SEQ ID NO: 92635 - DNA, 30 bp, Artificial Sequence
  Synthetic oligonucleotide
ccttgactctcggcaacttgtaacgactgg

SEQ ID NO: 92636 - DNA, 30 bp, Artificial Sequence
  Synthetic oligonucleotide
ttggcctggaagtccctggcaagcgactgg

SEQ ID NO: 92637 - DNA, 30 bp, Artificial Sequence
  Synthetic oligonucleotide
ctcggctgtcaggctgaatgtaaatactgg

SEQ ID NO: 92638 - DNA, 30 bp, Artificial Sequence
  Synthetic oligonucleotide
tctcagatatcaagaaggagggtttactgg

SEQ ID NO: 92639 - DNA, 30 bp, Artificial Sequence
  Synthetic oligonucleotide
cttggaacgagatcggccaaacccacctgg

SEQ ID NO: 92640 - DNA, 30 bp, Artificial Sequence
  Synthetic oligonucleotide
aggggttagttgtggaactgacttacctgg

SEQ ID NO: 92641 - DNA, 30 bp, Artificial Sequence
  Synthetic oligonucleotide
cacactatcaatcgccctgggcttacctgg

SEQ ID NO: 92642 - DNA, 30 bp, Artificial Sequence
  Synthetic oligonucleotide
aggctacacgcgattctgctatcaccctgg

SEQ ID NO: 92643 - DNA, 30 bp, Artificial Sequence
  Synthetic oligonucleotide
agaagagtatcgacatttgtcctaccctgg

SEQ ID NO: 92644 - DNA, 30 bp, Artificial Sequence
  Synthetic oligonucleotide
cagataccccgacaatttcacaggccctgg

SEQ ID NO: 92645 - DNA, 30 bp, Artificial Sequence
  Synthetic oligonucleotide
aaagtcaactgggagtgatatgattcctgg

SEQ ID NO: 92646 - DNA, 30 bp, Artificial Sequence
  Synthetic oligonucleotide
tctggcacacatagcgcatcagccagctgg

SEQ ID NO: 92647 - DNA, 30 bp, Artificial Sequence
  Synthetic oligonucleotide
cgtactgcatgggatccaaatgctagctgg

SEQ ID NO: 92648 - DNA, 30 bp, Artificial Sequence
  Synthetic oligonucleotide
gcgattcgatgacccatcttcccgcgctgg

SEQ ID NO: 92649 - DNA, 30 bp, Artificial Sequence
  Synthetic oligonucleotide
agacgttaggtagatgaatagtccggctgg

SEQ ID NO: 92650 - DNA, 30 bp, Artificial Sequence
  Synthetic oligonucleotide
gaggataggttggacaccatcatgggctgg

SEQ ID NO: 92651 - DNA, 30 bp, Artificial Sequence
  Synthetic oligonucleotide
cttgagacgggactcatagagtctggctgg

SEQ ID NO: 92652 - DNA, 30 bp, Artificial Sequence
  Synthetic oligonucleotide
tacctacagtattacgggctgatatgctgg

SEQ ID NO: 92653 - DNA, 30 bp, Artificial Sequence
  Synthetic oligonucleotide
caaaacagatatccgttcgtgctctgctgg

SEQ ID NO: 92654 - DNA, 30 bp, Artificial Sequence
  Synthetic oligonucleotide
tatacggggaaccaaaaaatttcttgctgg

SEQ ID NO: 92655 - DNA, 30 bp, Artificial Sequence
  Synthetic oligonucleotide
tataaccgagtgatataagccggtatctgg

SEQ ID NO: 92656 - DNA, 30 bp, Artificial Sequence
  Synthetic oligonucleotide
tcgcggtggtcgcagagctctaccctctgg

SEQ ID NO: 92657 - DNA, 30 bp, Artificial Sequence
  Synthetic oligonucleotide
tcggcgatccttaacttgagatatgtctgg

SEQ ID NO: 92658 - DNA, 30 bp, Artificial Sequence
  Synthetic oligonucleotide
cctaaagcgcgttctgtcaatgacttctgg

SEQ ID NO: 92659 - DNA, 30 bp, Artificial Sequence
  Synthetic oligonucleotide
cgcgattgtcaggtcaaggtgggcttctgg

SEQ ID NO: 92660 - DNA, 30 bp, Artificial Sequence
  Synthetic oligonucleotide
taaggggtcaggaggactaatgctttctgg

SEQ ID NO: 92661 - DNA, 30 bp, Artificial Sequence
  Synthetic oligonucleotide
cacacgcaaccatcttaatctcccaagtgg

SEQ ID NO: 92662 - DNA, 30 bp, Artificial Sequence
  Synthetic oligonucleotide
gggcgccgaatgtctgctgggagcaagtgg

SEQ ID NO: 92663 - DNA, 30 bp, Artificial Sequence
  Synthetic oligonucleotide
tgccctaacctactacagcctcggaagtgg

SEQ ID NO: 92664 - DNA, 30 bp, Artificial Sequence
  Synthetic oligonucleotide
caacgcgggatgatgctgaattgacagtgg

SEQ ID NO: 92665 - DNA, 30 bp, Artificial Sequence
  Synthetic oligonucleotide
tcgtcactgagactaggaactattcagtgg

SEQ ID NO: 92666 - DNA, 30 bp, Artificial Sequence
  Synthetic oligonucleotide
tctaagtcagattataagtagcgagagtgg

SEQ ID NO: 92667 - DNA, 30 bp, Artificial Sequence
  Synthetic oligonucleotide
ggctaggggtattcagcgaggagggagtgg

SEQ ID NO: 92668 - DNA, 30 bp, Artificial Sequence
  Synthetic oligonucleotide
gcctggggtatcttgaaactgaatgagtgg

SEQ ID NO: 92669 - DNA, 30 bp, Artificial Sequence
  Synthetic oligonucleotide
tgagggggcctaaaggcttaccaatagtgg

SEQ ID NO: 92670 - DNA, 30 bp, Artificial Sequence
  Synthetic oligonucleotide
agtgatatgcctagtttgctagcatagtgg

SEQ ID NO: 92671 - DNA, 30 bp, Artificial Sequence
  Synthetic oligonucleotide
ttgcgtgaggtgtatcgtggcttttagtgg

SEQ ID NO: 92672 - DNA, 30 bp, Artificial Sequence
  Synthetic oligonucleotide
aaccttgccaggatccgtcgggatacgtgg

SEQ ID NO: 92673 - DNA, 30 bp, Artificial Sequence
  Synthetic oligonucleotide
tagctggcagacttgatactagctacgtgg

SEQ ID NO: 92674 - DNA, 30 bp, Artificial Sequence
  Synthetic oligonucleotide
gataaaccgtacatctacaatttcccgtgg

SEQ ID NO: 92675 - DNA, 30 bp, Artificial Sequence
  Synthetic oligonucleotide
agaagttgtattcaggtacagaaagcgtgg

SEQ ID NO: 92676 - DNA, 30 bp, Artificial Sequence
  Synthetic oligonucleotide
tgtgcatgatcaacttgactgtctgcgtgg

SEQ ID NO: 92677 - DNA, 30 bp, Artificial Sequence
  Synthetic oligonucleotide
gccagtgagcaggattagaacatttcgtgg

SEQ ID NO: 92678 - DNA, 30 bp, Artificial Sequence
  Synthetic oligonucleotide
gctggaacgagagtgttagggaagaggtgg

SEQ ID NO: 92679 - DNA, 30 bp, Artificial Sequence
  Synthetic oligonucleotide
ccatccatgccagcgccgcacgagaggtgg

SEQ ID NO: 92680 - DNA, 30 bp, Artificial Sequence
  Synthetic oligonucleotide
gaggagagactccgacaatctattaggtgg

SEQ ID NO: 92681 - DNA, 30 bp, Artificial Sequence
  Synthetic oligonucleotide
ccgcaaccaatgaggggcaacggacggtgg

SEQ ID NO: 92682 - DNA, 30 bp, Artificial Sequence
  Synthetic oligonucleotide
gcttaatgcaaatatggagtgcagcggtgg

SEQ ID NO: 92683 - DNA, 30 bp, Artificial Sequence
  Synthetic oligonucleotide
tccacaacatgcttggtgtcaggggggtgg

SEQ ID NO: 92684 - DNA, 31 bp, Artificial Sequence
  Synthetic oligonucleotide
cgtaaccgtaggacacacaaacaactggtgg

SEQ ID NO: 92685 - DNA, 30 bp, Artificial Sequence
  Synthetic oligonucleotide
cctgccggatggcaccggacagaaatgtgg

SEQ ID NO: 92686 - DNA, 30 bp, Artificial Sequence
  Synthetic oligonucleotide
acgggcatagctgattactgcggtatgtgg

SEQ ID NO: 92687 - DNA, 30 bp, Artificial Sequence
  Synthetic oligonucleotide
gaagatggtcctcggggttcgaaactgtgg

SEQ ID NO: 92688 - DNA, 30 bp, Artificial Sequence
  Synthetic oligonucleotide
gatgtggtaatgcattgggtatcactgtgg

SEQ ID NO: 92689 - DNA, 29 bp, Artificial Sequence
  Synthetic oligonucleotide
tagagaaacaagcagcgattagactgtgg

SEQ ID NO: 92690 - DNA, 30 bp, Artificial Sequence
  Synthetic oligonucleotide
acgctaaaaagcagggtagagcccctgtgg

SEQ ID NO: 92691 - DNA, 30 bp, Artificial Sequence
  Synthetic oligonucleotide
tagacagtggctgggacagccctgctgtgg

SEQ ID NO: 92692 - DNA, 30 bp, Artificial Sequence
  Synthetic oligonucleotide
gccagctatgcgctaatcaaaatagtgtgg

SEQ ID NO: 92693 - DNA, 30 bp, Artificial Sequence
  Synthetic oligonucleotide
aagggtcgaaaagataatgtatgtgtgtgg

SEQ ID NO: 92694 - DNA, 30 bp, Artificial Sequence
  Synthetic oligonucleotide
ttagaccgttgggatcactcgtaattgtgg

SEQ ID NO: 92695 - DNA, 30 bp, Artificial Sequence
  Synthetic oligonucleotide
ccgaggattttcacatcacgaactttgtgg

SEQ ID NO: 92696 - DNA, 30 bp, Artificial Sequence
  Synthetic oligonucleotide
caaacttcgtcaccagatcgaacgaattgg

SEQ ID NO: 92697 - DNA, 30 bp, Artificial Sequence
  Synthetic oligonucleotide
cggcagggtggtgggatatcggatcattgg

SEQ ID NO: 92698 - DNA, 30 bp, Artificial Sequence
  Synthetic oligonucleotide
cggacagcacgttcgtgtaaggtagattgg

SEQ ID NO: 92699 - DNA, 30 bp, Artificial Sequence
  Synthetic oligonucleotide
cgagggccgcatctccctaagactgattgg

SEQ ID NO: 92700 - DNA, 30 bp, Artificial Sequence
  Synthetic oligonucleotide
caatctccgattggatcatgacagtattgg

SEQ ID NO: 92701 - DNA, 30 bp, Artificial Sequence
  Synthetic oligonucleotide
tcaggaacgatcttgaagcgatattattgg

SEQ ID NO: 92702 - DNA, 30 bp, Artificial Sequence
  Synthetic oligonucleotide
tggaggaatagatgagcgttgggcccttgg

SEQ ID NO: 92703 - DNA, 30 bp, Artificial Sequence
  Synthetic oligonucleotide
acgtggtcgaccaggacttgttcagcttgg

SEQ ID NO: 92704 - DNA, 30 bp, Artificial Sequence
  Synthetic oligonucleotide
cgtacatcacgttgacattagatagcttgg

SEQ ID NO: 92705 - DNA, 30 bp, Artificial Sequence
  Synthetic oligonucleotide
cgaccgacagttcgatttggctacgcttgg

SEQ ID NO: 92706 - DNA, 30 bp, Artificial Sequence
  Synthetic oligonucleotide
tacggatagcggttcatacgacgtagttgg

SEQ ID NO: 92707 - DNA, 30 bp, Artificial Sequence
  Synthetic oligonucleotide
cacaccagaaatcaagtctgtggtagttgg

SEQ ID NO: 92708 - DNA, 30 bp, Artificial Sequence
  Synthetic oligonucleotide
gcatagatgtacccaaactccattagttgg

SEQ ID NO: 92709 - DNA, 30 bp, Artificial Sequence
  Synthetic oligonucleotide
ggctaacgctatttaaggaacagccgttgg

SEQ ID NO: 92710 - DNA, 30 bp, Artificial Sequence
  Synthetic oligonucleotide
ggctgggccgagttgaggcaaacgcgttgg

SEQ ID NO: 92711 - DNA, 30 bp, Artificial Sequence
  Synthetic oligonucleotide
ggtagagcacagcaaagcaaggatcgttgg

SEQ ID NO: 92712 - DNA, 30 bp, Artificial Sequence
  Synthetic oligonucleotide
agtaacatggcatcttcaaaccctcgttgg

SEQ ID NO: 92713 - DNA, 31 bp, Artificial Sequence
  Synthetic oligonucleotide
aaggtaatcacgattcgatagcgcaggttgg

SEQ ID NO: 92714 - DNA, 30 bp, Artificial Sequence
  Synthetic oligonucleotide
caagtaaggtaggttgcgaaatagggttgg

SEQ ID NO: 92715 - DNA, 30 bp, Artificial Sequence
  Synthetic oligonucleotide
agcgaagattgagtcttatagaccatttgg

SEQ ID NO: 92716 - DNA, 30 bp, Artificial Sequence
  Synthetic oligonucleotide
aaccgtcaacagttatcaacctgtatttgg

SEQ ID NO: 92717 - DNA, 30 bp, Artificial Sequence
  Synthetic oligonucleotide
aaaggtaacggtaaaaaacaaaacctttgg

SEQ ID NO: 92718 - DNA, 30 bp, Artificial Sequence
  Synthetic oligonucleotide
agagagattaaacagaggctgccgctttgg

SEQ ID NO: 92719 - DNA, 30 bp, Artificial Sequence
  Synthetic oligonucleotide
aggagtcatactttgttaaggctcgtttgg

SEQ ID NO: 92720 - DNA, 30 bp, Artificial Sequence
  Synthetic oligonucleotide
gcttgtcctagtggtaaattcgaggtttgg

SEQ ID NO: 92721 - DNA, 30 bp, Artificial Sequence
  Synthetic oligonucleotide
tacaagtaagcacaaagcgtgggggtttgg

SEQ ID NO: 92722 - DNA, 30 bp, Artificial Sequence
  Synthetic oligonucleotide
aggaaattttcgctggaggtcgtggtttgg

SEQ ID NO: 92723 - DNA, 30 bp, Artificial Sequence
  Synthetic oligonucleotide
tggcgtagtgatggacggtatgcattttgg

SEQ ID NO: 92724 - DNA, 30 bp, Artificial Sequence
  Synthetic oligonucleotide
cggcaccggccacaaatggagcgattttgg

SEQ ID NO: 92725 - DNA, 28 bp, Artificial Sequence
  Synthetic oligonucleotide
gtctgaggtcccgggtgcacgaaaaatg

SEQ ID NO: 92726 - DNA, 30 bp, Artificial Sequence
  Synthetic oligonucleotide
aaaacataacgactacgttcgacgaaaatg

SEQ ID NO: 92727 - DNA, 30 bp, Artificial Sequence
  Synthetic oligonucleotide
agtgcgaatcgtatagaaatttggaaaatg

SEQ ID NO: 92728 - DNA, 30 bp, Artificial Sequence
  Synthetic oligonucleotide
ttgcagagtgtacttggtttcatgaaaatg

SEQ ID NO: 92729 - DNA, 31 bp, Artificial Sequence
  Synthetic oligonucleotide
aacgacgtaccttacgggatttgataaaatg

SEQ ID NO: 92730 - DNA, 30 bp, Artificial Sequence
  Synthetic oligonucleotide
atgttcgcgatgaatgtatctggtaaaatg

SEQ ID NO: 92731 - DNA, 30 bp, Artificial Sequence
  Synthetic oligonucleotide
gcgatacggtactcacccactatacaaatg

SEQ ID NO: 92732 - DNA, 30 bp, Artificial Sequence
  Synthetic oligonucleotide
ccattcgagtaatccaagttagcagaaatg

SEQ ID NO: 92733 - DNA, 30 bp, Artificial Sequence
  Synthetic oligonucleotide
tgaaggtgtagggctatgtcagacgaaatg

SEQ ID NO: 92734 - DNA, 31 bp, Artificial Sequence
  Synthetic oligonucleotide
tcaacgttaagtggagttaaggcatgaaatg

SEQ ID NO: 92735 - DNA, 29 bp, Artificial Sequence
  Synthetic oligonucleotide
tcttatgtggtcaaggctgagctgaaatg

SEQ ID NO: 92736 - DNA, 30 bp, Artificial Sequence
  Synthetic oligonucleotide
acgtttagcctcctgggtcttggtgaaatg

SEQ ID NO: 92737 - DNA, 30 bp, Artificial Sequence
  Synthetic oligonucleotide
agtgtgaacgcgtgccaatggtgataaatg

SEQ ID NO: 92738 - DNA, 30 bp, Artificial Sequence
  Synthetic oligonucleotide
gcttctgcgcgtacgggctgaggcacaatg

SEQ ID NO: 92739 - DNA, 30 bp, Artificial Sequence
  Synthetic oligonucleotide
aagaacaagaagcccgtaactcagacaatg

SEQ ID NO: 92740 - DNA, 30 bp, Artificial Sequence
  Synthetic oligonucleotide
tgacaacgccggctggtggggggcccaatg

SEQ ID NO: 92741 - DNA, 30 bp, Artificial Sequence
  Synthetic oligonucleotide
gattctggcatatagggagcgattccaatg

SEQ ID NO: 92742 - DNA, 30 bp, Artificial Sequence
  Synthetic oligonucleotide
tcgttaaatgatgtatggatgctctcaatg

SEQ ID NO: 92743 - DNA, 30 bp, Artificial Sequence
  Synthetic oligonucleotide
ccgaatttggtaccatttgtagggtcaatg

SEQ ID NO: 92744 - DNA, 30 bp, Artificial Sequence
  Synthetic oligonucleotide
tgcgcgtggggacatcgtattacttcaatg

SEQ ID NO: 92745 - DNA, 30 bp, Artificial Sequence
  Synthetic oligonucleotide
ccgaacctaggctactattcgcgttcaatg

SEQ ID NO: 92746 - DNA, 30 bp, Artificial Sequence
  Synthetic oligonucleotide
aacatggcagtcgacatagtttcaagaatg

SEQ ID NO: 92747 - DNA, 29 bp, Artificial Sequence
  Synthetic oligonucleotide
gtagataagttaactaatatgacagaatg

SEQ ID NO: 92748 - DNA, 30 bp, Artificial Sequence
  Synthetic oligonucleotide
atatgtcatgtaaaaagaagcctgagaatg

SEQ ID NO: 92749 - DNA, 30 bp, Artificial Sequence
  Synthetic oligonucleotide
ctggtcctcatgagggcaacgaatagaatg

SEQ ID NO: 92750 - DNA, 30 bp, Artificial Sequence
  Synthetic oligonucleotide
cactatgttatcgcgtgaaacactagaatg

SEQ ID NO: 92751 - DNA, 30 bp, Artificial Sequence
  Synthetic oligonucleotide
aaggtatagtattcaagattgacaggaatg

SEQ ID NO: 92752 - DNA, 30 bp, Artificial Sequence
  Synthetic oligonucleotide
ttacgaagtaaattaaacctcgccggaatg

SEQ ID NO: 92753 - DNA, 30 bp, Artificial Sequence
  Synthetic oligonucleotide
atggctggctgtggttaggtcttgggaatg

SEQ ID NO: 92754 - DNA, 30 bp, Artificial Sequence
  Synthetic oligonucleotide
ccgtgacccgtaaggtcaagctagtgaatg

SEQ ID NO: 92755 - DNA, 26 bp, Artificial Sequence
  Synthetic oligonucleotide
actgtagtaagtaaagagcaataatg

SEQ ID NO: 92756 - DNA, 30 bp, Artificial Sequence
  Synthetic oligonucleotide
cgccaccaattaccaggacgactaataatg

SEQ ID NO: 92757 - DNA, 30 bp, Artificial Sequence
  Synthetic oligonucleotide
tcgtccgcgggtctaactagtctgataatg

SEQ ID NO: 92758 - DNA, 30 bp, Artificial Sequence
  Synthetic oligonucleotide
ggccgtacactgattaggtaaagtataatg

SEQ ID NO: 92759 - DNA, 30 bp, Artificial Sequence
  Synthetic oligonucleotide
gccgactagtggaggggacccgaactaatg

SEQ ID NO: 92760 - DNA, 30 bp, Artificial Sequence
  Synthetic oligonucleotide
taataacaagggggtatgtggactctaatg

SEQ ID NO: 92761 - DNA, 30 bp, Artificial Sequence
  Synthetic oligonucleotide
atagtcatgtcagaaacggtaacagtaatg

SEQ ID NO: 92762 - DNA, 30 bp, Artificial Sequence
  Synthetic oligonucleotide
tcaaacctaaggtgtaacacacgagtaatg

SEQ ID NO: 92763 - DNA, 30 bp, Artificial Sequence
  Synthetic oligonucleotide
ccaattgttgaaggagagtcggtagtaatg

SEQ ID NO: 92764 - DNA, 30 bp, Artificial Sequence
  Synthetic oligonucleotide
ctaacttcaccgtgacttcactccgtaatg

SEQ ID NO: 92765 - DNA, 30 bp, Artificial Sequence
  Synthetic oligonucleotide
tcgatagacattaggaccgctaaggtaatg

SEQ ID NO: 92766 - DNA, 30 bp, Artificial Sequence
  Synthetic oligonucleotide
cagggatcgatatgtcgagtctcggtaatg

SEQ ID NO: 92767 - DNA, 30 bp, Artificial Sequence
  Synthetic oligonucleotide
gttacagatagcgcttgacatagggtaatg

SEQ ID NO: 92768 - DNA, 30 bp, Artificial Sequence
  Synthetic oligonucleotide
atcgttagttgaagccgagatactgtaatg

SEQ ID NO: 92769 - DNA, 30 bp, Artificial Sequence
  Synthetic oligonucleotide
agatgcaaagcgccaagtcaaattgtaatg

SEQ ID NO: 92770 - DNA, 30 bp, Artificial Sequence
  Synthetic oligonucleotide
acgagaaacatgctttattgagcattaatg

SEQ ID NO: 92771 - DNA, 30 bp, Artificial Sequence
  Synthetic oligonucleotide
cgatcttgtaaacgcctgggagtcaacatg

SEQ ID NO: 92772 - DNA, 30 bp, Artificial Sequence
  Synthetic oligonucleotide
cattgaggcaataggcgcaccaggaacatg

SEQ ID NO: 92773 - DNA, 30 bp, Artificial Sequence
  Synthetic oligonucleotide
atacgtagtgacaatggagagcttaacatg

SEQ ID NO: 92774 - DNA, 30 bp, Artificial Sequence
  Synthetic oligonucleotide
aagagaatatagtcgcgaggggacgacatg

SEQ ID NO: 92775 - DNA, 30 bp, Artificial Sequence
  Synthetic oligonucleotide
caggttacataacactgccttggggacatg

SEQ ID NO: 92776 - DNA, 30 bp, Artificial Sequence
  Synthetic oligonucleotide
aacggcgcgatatggggggaatgtgacatg

SEQ ID NO: 92777 - DNA, 30 bp, Artificial Sequence
  Synthetic oligonucleotide
gcctcagttgcaaatctgtagcagtacatg

SEQ ID NO: 92778 - DNA, 30 bp, Artificial Sequence
  Synthetic oligonucleotide
aggcgtggggcaaggcacccgcgttacatg

SEQ ID NO: 92779 - DNA, 30 bp, Artificial Sequence
  Synthetic oligonucleotide
aaccgttattaccagggtaaggcaaccatg

SEQ ID NO: 92780 - DNA, 30 bp, Artificial Sequence
  Synthetic oligonucleotide
caggggccgattgctgacggttcaaccatg

SEQ ID NO: 92781 - DNA, 30 bp, Artificial Sequence
  Synthetic oligonucleotide
atgcaaccctcatactccgggctgaccatg

SEQ ID NO: 92782 - DNA, 30 bp, Artificial Sequence
  Synthetic oligonucleotide
acgtgtctcagatgatcgtcttgtaccatg

SEQ ID NO: 92783 - DNA, 30 bp, Artificial Sequence
  Synthetic oligonucleotide
tagattcgtatcttctacattagagccatg

SEQ ID NO: 92784 - DNA, 30 bp, Artificial Sequence
  Synthetic oligonucleotide
taaagatttgctaggcgaaggcgagccatg

SEQ ID NO: 92785 - DNA, 30 bp, Artificial Sequence
  Synthetic oligonucleotide
caggactaagtacggatccttcaggccatg

SEQ ID NO: 92786 - DNA, 30 bp, Artificial Sequence
  Synthetic oligonucleotide
acaagctaacccccaacaatggtggccatg

SEQ ID NO: 92787 - DNA, 30 bp, Artificial Sequence
  Synthetic oligonucleotide
gcgtgcgaactaggtattaatccctccatg

SEQ ID NO: 92788 - DNA, 30 bp, Artificial Sequence
  Synthetic oligonucleotide
taagagtgaaccatactcagccattccatg

SEQ ID NO: 92789 - DNA, 30 bp, Artificial Sequence
  Synthetic oligonucleotide
tcggtagctagctacgttgatagaagcatg

SEQ ID NO: 92790 - DNA, 30 bp, Artificial Sequence
  Synthetic oligonucleotide
cgtgggaacttttgggggagaccacgcatg

SEQ ID NO: 92791 - DNA, 30 bp, Artificial Sequence
  Synthetic oligonucleotide
aagcgcatcatcaaaacctgatctcgcatg

SEQ ID NO: 92792 - DNA, 30 bp, Artificial Sequence
  Synthetic oligonucleotide
caccggcataagcatcatacgataggcatg

SEQ ID NO: 92793 - DNA, 30 bp, Artificial Sequence
  Synthetic oligonucleotide
tggtgtcatcggggcccattgagcggcatg

SEQ ID NO: 92794 - DNA, 30 bp, Artificial Sequence
  Synthetic oligonucleotide
acacaggtggtagaggcaattacgggcatg

SEQ ID NO: 92795 - DNA, 30 bp, Artificial Sequence
  Synthetic oligonucleotide
atgcataattaatccatgaccgtgggcatg

SEQ ID NO: 92796 - DNA, 30 bp, Artificial Sequence
  Synthetic oligonucleotide
tgaaggcaacaagtcaaagccaatggcatg

SEQ ID NO: 92797 - DNA, 30 bp, Artificial Sequence
  Synthetic oligonucleotide
ggggggctgctgtcgtaaaacaaatgcatg

SEQ ID NO: 92798 - DNA, 30 bp, Artificial Sequence
  Synthetic oligonucleotide
caggagacactgcagaaaacgctatgcatg

SEQ ID NO: 92799 - DNA, 30 bp, Artificial Sequence
  Synthetic oligonucleotide
accaccctccgctacaagtacctctgcatg

SEQ ID NO: 92800 - DNA, 30 bp, Artificial Sequence
  Synthetic oligonucleotide
atgagaggagggaacaccagtcggtgcatg

SEQ ID NO: 92801 - DNA, 30 bp, Artificial Sequence
  Synthetic oligonucleotide
ctcataagagtgaaaaggcggcgcatcatg

SEQ ID NO: 92802 - DNA, 30 bp, Artificial Sequence
  Synthetic oligonucleotide
aagggacggatgttggattctgtactcatg

SEQ ID NO: 92803 - DNA, 30 bp, Artificial Sequence
  Synthetic oligonucleotide
gcattgttcgtgcaggttcggtcgctcatg

SEQ ID NO: 92804 - DNA, 30 bp, Artificial Sequence
  Synthetic oligonucleotide
aaaggtggggagacggtcagccgagtcatg

SEQ ID NO: 92805 - DNA, 30 bp, Artificial Sequence
  Synthetic oligonucleotide
agagcagcgtatccaagtgttaaattcatg

SEQ ID NO: 92806 - DNA, 30 bp, Artificial Sequence
  Synthetic oligonucleotide
gaatggcggccgtgacaattgaatttcatg

SEQ ID NO: 92807 - DNA, 30 bp, Artificial Sequence
  Synthetic oligonucleotide
ctcggaccgggatcccgctgggccaagatg

SEQ ID NO: 92808 - DNA, 30 bp, Artificial Sequence
  Synthetic oligonucleotide
ggcggtcccaggccagattctaagaagatg

SEQ ID NO: 92809 - DNA, 30 bp, Artificial Sequence
  Synthetic oligonucleotide
attacactagtcaggtgtgcgccgaagatg

SEQ ID NO: 92810 - DNA, 30 bp, Artificial Sequence
  Synthetic oligonucleotide
gaagctactcagagttgtgagctgaagatg

SEQ ID NO: 92811 - DNA, 30 bp, Artificial Sequence
  Synthetic oligonucleotide
ttgaactaaaggcacggatcatttaagatg

SEQ ID NO: 92812 - DNA, 30 bp, Artificial Sequence
  Synthetic oligonucleotide
cagctgcgacaatgttggacatgacagatg

SEQ ID NO: 92813 - DNA, 30 bp, Artificial Sequence
  Synthetic oligonucleotide
actctaggttcaaggcgaggaatacagatg

SEQ ID NO: 92814 - DNA, 30 bp, Artificial Sequence
  Synthetic oligonucleotide
gcaactcctgctttgatggagagccagatg

SEQ ID NO: 92815 - DNA, 30 bp, Artificial Sequence
  Synthetic oligonucleotide
tgtcacgaccaagtattctgactgcagatg

SEQ ID NO: 92816 - DNA, 30 bp, Artificial Sequence
  Synthetic oligonucleotide
ctaggagataacggggggatctgtcagatg

SEQ ID NO: 92817 - DNA, 29 bp, Artificial Sequence
  Synthetic oligonucleotide
taggtacaccgtgcttgtcggatgagatg

SEQ ID NO: 92818 - DNA, 30 bp, Artificial Sequence
  Synthetic oligonucleotide
agttgcaagttatatactggaattgagatg

SEQ ID NO: 92819 - DNA, 30 bp, Artificial Sequence
  Synthetic oligonucleotide
aaacgtggcggtagatgagtgtgatagatg

SEQ ID NO: 92820 - DNA, 30 bp, Artificial Sequence
  Synthetic oligonucleotide
atgagtttagtggagtcgaatgggtagatg

SEQ ID NO: 92821 - DNA, 30 bp, Artificial Sequence
  Synthetic oligonucleotide
agacaccaagaacttgttgcagcttagatg

SEQ ID NO: 92822 - DNA, 30 bp, Artificial Sequence
  Synthetic oligonucleotide
tcagcccaaagggttagctgataaacgatg

SEQ ID NO: 92823 - DNA, 30 bp, Artificial Sequence
  Synthetic oligonucleotide
attcaggtctatcaatggcaatgaccgatg

SEQ ID NO: 92824 - DNA, 30 bp, Artificial Sequence
  Synthetic oligonucleotide
ccatcgggcaagctataaatcgatccgatg

SEQ ID NO: 92825 - DNA, 30 bp, Artificial Sequence
  Synthetic oligonucleotide
aagtgggattctcgtacaaccgcggcgatg

SEQ ID NO: 92826 - DNA, 30 bp, Artificial Sequence
  Synthetic oligonucleotide
ttgaggaacattatccgaaatcatgcgatg

SEQ ID NO: 92827 - DNA, 30 bp, Artificial Sequence
  Synthetic oligonucleotide
gactaagcgaggactcccaccgttgcgatg

SEQ ID NO: 92828 - DNA, 30 bp, Artificial Sequence
  Synthetic oligonucleotide
cgctgactcgggaaatgaaagtgatcgatg

SEQ ID NO: 92829 - DNA, 30 bp, Artificial Sequence
  Synthetic oligonucleotide
aacacgtaggaacgttaagtggactcgatg

SEQ ID NO: 92830 - DNA, 30 bp, Artificial Sequence
  Synthetic oligonucleotide
aatcacatgcatgtaaggagtatctcgatg

SEQ ID NO: 92831 - DNA, 30 bp, Artificial Sequence
  Synthetic oligonucleotide
gtcaaaaggcagcgctagacgttctcgatg

SEQ ID NO: 92832 - DNA, 30 bp, Artificial Sequence
  Synthetic oligonucleotide
ttaagcaggggaatcgtgatcacgtcgatg

SEQ ID NO: 92833 - DNA, 30 bp, Artificial Sequence
  Synthetic oligonucleotide
aagagcgatatctgttcgatggggtcgatg

SEQ ID NO: 92834 - DNA, 30 bp, Artificial Sequence
  Synthetic oligonucleotide
cagtcacctcgtataataatgatgtcgatg

SEQ ID NO: 92835 - DNA, 30 bp, Artificial Sequence
  Synthetic oligonucleotide
tttgcgatacgagcaagcaatgacaggatg

SEQ ID NO: 92836 - DNA, 30 bp, Artificial Sequence
  Synthetic oligonucleotide
aataggaaccttctgaaaatggagaggatg

SEQ ID NO: 92837 - DNA, 30 bp, Artificial Sequence
  Synthetic oligonucleotide
tcgggctccacatggtgagccgataggatg

SEQ ID NO: 92838 - DNA, 30 bp, Artificial Sequence
  Synthetic oligonucleotide
gccgacggtagtactaaagttgaacggatg

SEQ ID NO: 92839 - DNA, 30 bp, Artificial Sequence
  Synthetic oligonucleotide
ggcgtcgaggagaggtaacaataacggatg

SEQ ID NO: 92840 - DNA, 30 bp, Artificial Sequence
  Synthetic oligonucleotide
ccaaccagaatgattgaataacgtcggatg

SEQ ID NO: 92841 - DNA, 30 bp, Artificial Sequence
  Synthetic oligonucleotide
caagagagcgtggttggtcggtcctggatg

SEQ ID NO: 92842 - DNA, 30 bp, Artificial Sequence
  Synthetic oligonucleotide
tctcgccactgatgaggatccaagtggatg

SEQ ID NO: 92843 - DNA, 30 bp, Artificial Sequence
  Synthetic oligonucleotide
aacgggtcagttggacgtcattcgtggatg

SEQ ID NO: 92844 - DNA, 30 bp, Artificial Sequence
  Synthetic oligonucleotide
aaaccccgtatcatgctacaagggctgatg

SEQ ID NO: 92845 - DNA, 30 bp, Artificial Sequence
  Synthetic oligonucleotide
acgccgcgttggcataaccaccgtctgatg

SEQ ID NO: 92846 - DNA, 30 bp, Artificial Sequence
  Synthetic oligonucleotide
agccatgcataggtgtgaagcgcggtgatg

SEQ ID NO: 92847 - DNA, 30 bp, Artificial Sequence
  Synthetic oligonucleotide
acttgcatggttaggggaaattgcttgatg

SEQ ID NO: 92848 - DNA, 30 bp, Artificial Sequence
  Synthetic oligonucleotide
aatagaggtgtatgaataacgaggttgatg

SEQ ID NO: 92849 - DNA, 30 bp, Artificial Sequence
  Synthetic oligonucleotide
gtcaaggggattaatcctgtgtgtttgatg

SEQ ID NO: 92850 - DNA, 30 bp, Artificial Sequence
  Synthetic oligonucleotide
actaagggtggatcaaccaaagagaatatg

SEQ ID NO: 92851 - DNA, 30 bp, Artificial Sequence
  Synthetic oligonucleotide
ccgaagtgcgatatcgctctgccgaatatg

SEQ ID NO: 92852 - DNA, 30 bp, Artificial Sequence
  Synthetic oligonucleotide
ggggtcgtacacaagtttggctataatatg

SEQ ID NO: 92853 - DNA, 30 bp, Artificial Sequence
  Synthetic oligonucleotide
gtaagtcgaagggagctgggatttaatatg

SEQ ID NO: 92854 - DNA, 30 bp, Artificial Sequence
  Synthetic oligonucleotide
ggatcggaactccgctcataccgacatatg

SEQ ID NO: 92855 - DNA, 30 bp, Artificial Sequence
  Synthetic oligonucleotide
ggtgtaagcgcggagtaagcgaatcatatg

SEQ ID NO: 92856 - DNA, 30 bp, Artificial Sequence
  Synthetic oligonucleotide
cggggggaacccataaagtcacgtcatatg

SEQ ID NO: 92857 - DNA, 30 bp, Artificial Sequence
  Synthetic oligonucleotide
tgtcctgaacgggttgattggtgcgatatg

SEQ ID NO: 92858 - DNA, 30 bp, Artificial Sequence
  Synthetic oligonucleotide
ctcacgaagtctttaaagtggtaatatatg

SEQ ID NO: 92859 - DNA, 30 bp, Artificial Sequence
  Synthetic oligonucleotide
tggccaaatctaccccatttaccatatatg

SEQ ID NO: 92860 - DNA, 30 bp, Artificial Sequence
  Synthetic oligonucleotide
cattaaaagtatccttgctaaagctatatg

SEQ ID NO: 92861 - DNA, 30 bp, Artificial Sequence
  Synthetic oligonucleotide
ctcgccaccgtaatacgtaattcgactatg

SEQ ID NO: 92862 - DNA, 30 bp, Artificial Sequence
  Synthetic oligonucleotide
cacatcgaccttaagtagaatcggactatg

SEQ ID NO: 92863 - DNA, 30 bp, Artificial Sequence
  Synthetic oligonucleotide
gggcgtacggccggcgagcagcaacctatg

SEQ ID NO: 92864 - DNA, 30 bp, Artificial Sequence
  Synthetic oligonucleotide
agatggggtcagtaacgacgaccacctatg

SEQ ID NO: 92865 - DNA, 29 bp, Artificial Sequence
  Synthetic oligonucleotide
agtcctcacaaagctagagtagccctatg

SEQ ID NO: 92866 - DNA, 30 bp, Artificial Sequence
  Synthetic oligonucleotide
aagaaggattacgtagggtcgaaatctatg

SEQ ID NO: 92867 - DNA, 30 bp, Artificial Sequence
  Synthetic oligonucleotide
gcaaccagtaatggactcagaaagtctatg

SEQ ID NO: 92868 - DNA, 30 bp, Artificial Sequence
  Synthetic oligonucleotide
tcgatcgcactaaaaggttttggaagtatg

SEQ ID NO: 92869 - DNA, 30 bp, Artificial Sequence
  Synthetic oligonucleotide
tcggagcgaatgtctcagtgtttaagtatg

SEQ ID NO: 92870 - DNA, 30 bp, Artificial Sequence
  Synthetic oligonucleotide
aaaagtaggcagtggggaagcatcagtatg

SEQ ID NO: 92871 - DNA, 30 bp, Artificial Sequence
  Synthetic oligonucleotide
gcgatcgctgtataccgttatatgagtatg

SEQ ID NO: 92872 - DNA, 30 bp, Artificial Sequence
  Synthetic oligonucleotide
gtgcgacagtctgactgggggcctagtatg

SEQ ID NO: 92873 - DNA, 30 bp, Artificial Sequence
  Synthetic oligonucleotide
ggggtctcgtagtagctctgaagtagtatg

SEQ ID NO: 92874 - DNA, 30 bp, Artificial Sequence
  Synthetic oligonucleotide
ccgggacgactcggtaacgggagacgtatg

SEQ ID NO: 92875 - DNA, 30 bp, Artificial Sequence
  Synthetic oligonucleotide
cgctctgaccacaaacagttgatacgtatg

SEQ ID NO: 92876 - DNA, 30 bp, Artificial Sequence
  Synthetic oligonucleotide
taagatacttgccaaagttactggcgtatg

SEQ ID NO: 92877 - DNA, 29 bp, Artificial Sequence
  Synthetic oligonucleotide
aacacggtattaggtccagagttcgtatg

SEQ ID NO: 92878 - DNA, 30 bp, Artificial Sequence
  Synthetic oligonucleotide
cacctatcctcaggataaggcaaaggtatg

SEQ ID NO: 92879 - DNA, 30 bp, Artificial Sequence
  Synthetic oligonucleotide
tcgcaatccgtaaagccagtggatggtatg

SEQ ID NO: 92880 - DNA, 30 bp, Artificial Sequence
  Synthetic oligonucleotide
gactagcttagcggttgaagaggtggtatg

SEQ ID NO: 92881 - DNA, 30 bp, Artificial Sequence
  Synthetic oligonucleotide
acgaggtaggtttaaatccaggactgtatg

SEQ ID NO: 92882 - DNA, 30 bp, Artificial Sequence
  Synthetic oligonucleotide
agcgcctagccgatgtgccccccgattatg

SEQ ID NO: 92883 - DNA, 30 bp, Artificial Sequence
  Synthetic oligonucleotide
cacacaaggtcctagtgaacatggattatg

SEQ ID NO: 92884 - DNA, 30 bp, Artificial Sequence
  Synthetic oligonucleotide
ttagtgagatccacggtctcgtttattatg

SEQ ID NO: 92885 - DNA, 30 bp, Artificial Sequence
  Synthetic oligonucleotide
caaatagcgaaaccatcacgtgacgttatg

SEQ ID NO: 92886 - DNA, 30 bp, Artificial Sequence
  Synthetic oligonucleotide
acatcattacgtttctagccaagcgttatg

SEQ ID NO: 92887 - DNA, 30 bp, Artificial Sequence
  Synthetic oligonucleotide
tcatcgatagatgccttcaagcgatttatg

SEQ ID NO: 92888 - DNA, 30 bp, Artificial Sequence
  Synthetic oligonucleotide
ccgggacgtgctttttacaggtgatttatg

SEQ ID NO: 92889 - DNA, 30 bp, Artificial Sequence
  Synthetic oligonucleotide
cgccaccttaatagtatagcacactttatg

SEQ ID NO: 92890 - DNA, 30 bp, Artificial Sequence
  Synthetic oligonucleotide
gaatgccagactccaagatgctacaaactg

SEQ ID NO: 92891 - DNA, 30 bp, Artificial Sequence
  Synthetic oligonucleotide
attgggccacacaggagtagaggagaactg

SEQ ID NO: 92892 - DNA, 30 bp, Artificial Sequence
  Synthetic oligonucleotide
ccgcctgcataaactgcacgaaagtaactg

SEQ ID NO: 92893 - DNA, 30 bp, Artificial Sequence
  Synthetic oligonucleotide
tgatcgaagattctcgccatactgtaactg

SEQ ID NO: 92894 - DNA, 30 bp, Artificial Sequence
  Synthetic oligonucleotide
tcaatctcgccgagcggttaataaacactg

SEQ ID NO: 92895 - DNA, 30 bp, Artificial Sequence
  Synthetic oligonucleotide
cctgacacccagaagtctacaaccacactg

SEQ ID NO: 92896 - DNA, 30 bp, Artificial Sequence
  Synthetic oligonucleotide
acaatatgaatgtagaagcccatcacactg

SEQ ID NO: 92897 - DNA, 30 bp, Artificial Sequence
  Synthetic oligonucleotide
acgaaagaggtcggctgattatggacactg

SEQ ID NO: 92898 - DNA, 30 bp, Artificial Sequence
  Synthetic oligonucleotide
ctggaaagcactatgcttccgactccactg

SEQ ID NO: 92899 - DNA, 30 bp, Artificial Sequence
  Synthetic oligonucleotide
tgaggatcagtaaacggatcatgggcactg

SEQ ID NO: 92900 - DNA, 30 bp, Artificial Sequence
  Synthetic oligonucleotide
acacatgtcgttgcgcacgtatctgcactg

SEQ ID NO: 92901 - DNA, 30 bp, Artificial Sequence
  Synthetic oligonucleotide
gacgcaagacacatttctactagtgcactg

SEQ ID NO: 92902 - DNA, 30 bp, Artificial Sequence
  Synthetic oligonucleotide
acggtttacgtgcgcttttgacaatcactg

SEQ ID NO: 92903 - DNA, 30 bp, Artificial Sequence
  Synthetic oligonucleotide
gtgcgaattggatgacatcaatgttcactg

SEQ ID NO: 92904 - DNA, 30 bp, Artificial Sequence
  Synthetic oligonucleotide
cgtcgtataaacgactggactctaagactg

SEQ ID NO: 92905 - DNA, 30 bp, Artificial Sequence
  Synthetic oligonucleotide
ccacgcctagagtccgtgtcacagagactg

SEQ ID NO: 92906 - DNA, 30 bp, Artificial Sequence
  Synthetic oligonucleotide
gctaggagccaatccgtcggtgtgagactg

SEQ ID NO: 92907 - DNA, 30 bp, Artificial Sequence
  Synthetic oligonucleotide
ccagcgctgggtaggaccgcatgacgactg

SEQ ID NO: 92908 - DNA, 30 bp, Artificial Sequence
  Synthetic oligonucleotide
taagggatttcagaacgtatttctcgactg

SEQ ID NO: 92909 - DNA, 30 bp, Artificial Sequence
  Synthetic oligonucleotide
ggtcattggtcgaaggaacactgcggactg

SEQ ID NO: 92910 - DNA, 30 bp, Artificial Sequence
  Synthetic oligonucleotide
tgctgtacctacatagcaagcccgggactg

SEQ ID NO: 92911 - DNA, 30 bp, Artificial Sequence
  Synthetic oligonucleotide
acagaacgaatggaatggaagaactgactg

SEQ ID NO: 92912 - DNA, 30 bp, Artificial Sequence
  Synthetic oligonucleotide
ctggcaaacggggctgttaccgagtgactg

SEQ ID NO: 92913 - DNA, 30 bp, Artificial Sequence
  Synthetic oligonucleotide
agactatcgcttacagggacactcatactg

SEQ ID NO: 92914 - DNA, 31 bp, Artificial Sequence
  Synthetic oligonucleotide
aatggagatggcggacttggataatatactg

SEQ ID NO: 92915 - DNA, 30 bp, Artificial Sequence
  Synthetic oligonucleotide
ggagagatcaggcacaaagtagatatactg

SEQ ID NO: 92916 - DNA, 30 bp, Artificial Sequence
  Synthetic oligonucleotide
atgcatgagagacggtgtgttgtgctactg

SEQ ID NO: 92917 - DNA, 30 bp, Artificial Sequence
  Synthetic oligonucleotide
agtaaatattaaacgcgaatacatctactg

SEQ ID NO: 92918 - DNA, 30 bp, Artificial Sequence
  Synthetic oligonucleotide
cgtatttaataaatggccttaagagtactg

SEQ ID NO: 92919 - DNA, 30 bp, Artificial Sequence
  Synthetic oligonucleotide
gacgggtcaacctgccggcgaggcttactg

SEQ ID NO: 92920 - DNA, 30 bp, Artificial Sequence
  Synthetic oligonucleotide
gtagggtaggcgcttaaactacagttactg

SEQ ID NO: 92921 - DNA, 30 bp, Artificial Sequence
  Synthetic oligonucleotide
gcttagcgagtgcagagatttcagttactg

SEQ ID NO: 92922 - DNA, 30 bp, Artificial Sequence
  Synthetic oligonucleotide
ggctcctcgggcagagagattgcaaacctg

SEQ ID NO: 92923 - DNA, 31 bp, Artificial Sequence
  Synthetic oligonucleotide
cctcgcttccacctggctaaacgtgaacctg

SEQ ID NO: 92924 - DNA, 30 bp, Artificial Sequence
  Synthetic oligonucleotide
atcctgaaatgactgaaagctttacacctg

SEQ ID NO: 92925 - DNA, 30 bp, Artificial Sequence
  Synthetic oligonucleotide
tcggatcccgcaacgttaccgtgccacctg

SEQ ID NO: 92926 - DNA, 30 bp, Artificial Sequence
  Synthetic oligonucleotide
agtaacgaggaaagagagcgagaggacctg

SEQ ID NO: 92927 - DNA, 30 bp, Artificial Sequence
  Synthetic oligonucleotide
gaagcgtctagaaaaattcccctgtacctg

SEQ ID NO: 92928 - DNA, 30 bp, Artificial Sequence
  Synthetic oligonucleotide
acggctggtagagcctgctaaggacccctg

SEQ ID NO: 92929 - DNA, 30 bp, Artificial Sequence
  Synthetic oligonucleotide
cagcgtgagggggcagtaatgcaagccctg

SEQ ID NO: 92930 - DNA, 30 bp, Artificial Sequence
  Synthetic oligonucleotide
gatgaaacacgtgtgctttcaaagtccctg

SEQ ID NO: 92931 - DNA, 30 bp, Artificial Sequence
  Synthetic oligonucleotide
cgaggtttgtggccattgaccgtgagcctg

SEQ ID NO: 92932 - DNA, 31 bp, Artificial Sequence
  Synthetic oligonucleotide
ttatgtcatggaatcggtaccattgagcctg

SEQ ID NO: 92933 - DNA, 30 bp, Artificial Sequence
  Synthetic oligonucleotide
taaatcgcatattaactggaatttagcctg

SEQ ID NO: 92934 - DNA, 30 bp, Artificial Sequence
  Synthetic oligonucleotide
tgcctcgggtccaataaaatctgcggcctg

SEQ ID NO: 92935 - DNA, 30 bp, Artificial Sequence
  Synthetic oligonucleotide
gataggggcgcaagagcctgtctgtgcctg

SEQ ID NO: 92936 - DNA, 30 bp, Artificial Sequence
  Synthetic oligonucleotide
gggctaacgtccaattgacacaaaatcctg

SEQ ID NO: 92937 - DNA, 30 bp, Artificial Sequence
  Synthetic oligonucleotide
cataaagggcaccagcccgtgttaatcctg

SEQ ID NO: 92938 - DNA, 30 bp, Artificial Sequence
  Synthetic oligonucleotide
tcttgatagggtaccatgggtaggatcctg

SEQ ID NO: 92939 - DNA, 30 bp, Artificial Sequence
  Synthetic oligonucleotide
ccgattgccggtacatatacaattatcctg

SEQ ID NO: 92940 - DNA, 30 bp, Artificial Sequence
  Synthetic oligonucleotide
tacggagctagagatacacagctactcctg

SEQ ID NO: 92941 - DNA, 30 bp, Artificial Sequence
  Synthetic oligonucleotide
acgcgtccagatagacttgtgttggtcctg

SEQ ID NO: 92942 - DNA, 30 bp, Artificial Sequence
  Synthetic oligonucleotide
gaagatatggttaaggggacgtgtgtcctg

SEQ ID NO: 92943 - DNA, 30 bp, Artificial Sequence
  Synthetic oligonucleotide
atcggcgatggtgatgttattacattcctg

SEQ ID NO: 92944 - DNA, 30 bp, Artificial Sequence
  Synthetic oligonucleotide
ccaattacagactaacacttctcccagctg

SEQ ID NO: 92945 - DNA, 30 bp, Artificial Sequence
  Synthetic oligonucleotide
gtggtgttgaaatgcgtcatgtatcagctg

SEQ ID NO: 92946 - DNA, 30 bp, Artificial Sequence
  Synthetic oligonucleotide
tcctacggtttccaaaaccctttcgagctg

SEQ ID NO: 92947 - DNA, 30 bp, Artificial Sequence
  Synthetic oligonucleotide
ccctatcgaaacacatcagattggtagctg

SEQ ID NO: 92948 - DNA, 30 bp, Artificial Sequence
  Synthetic oligonucleotide
attcaccaagtatcaaatgaacaaacgctg

SEQ ID NO: 92949 - DNA, 30 bp, Artificial Sequence
  Synthetic oligonucleotide
cacataataaaacaaaggatttgtgcgctg

SEQ ID NO: 92950 - DNA, 30 bp, Artificial Sequence
  Synthetic oligonucleotide
gagcgatgggaaaacctcctagtgtcgctg

SEQ ID NO: 92951 - DNA, 30 bp, Artificial Sequence
  Synthetic oligonucleotide
tatgtgggcgtcgacaaaccacaagggctg

SEQ ID NO: 92952 - DNA, 30 bp, Artificial Sequence
  Synthetic oligonucleotide
actctcaagtggggttagcattgagggctg

SEQ ID NO: 92953 - DNA, 30 bp, Artificial Sequence
  Synthetic oligonucleotide
gatacgcgctagcgtgcctagaatgggctg

SEQ ID NO: 92954 - DNA, 30 bp, Artificial Sequence
  Synthetic oligonucleotide
ctcccttatcatcgaaggaaaatatggctg

SEQ ID NO: 92955 - DNA, 30 bp, Artificial Sequence
  Synthetic oligonucleotide
aggttgatggaggtgtggctagggatgctg

SEQ ID NO: 92956 - DNA, 30 bp, Artificial Sequence
  Synthetic oligonucleotide
gaagtcctatcgcaatgagtagatatgctg

SEQ ID NO: 92957 - DNA, 30 bp, Artificial Sequence
  Synthetic oligonucleotide
aaaacaaatggatgcatcataaacgtgctg

SEQ ID NO: 92958 - DNA, 30 bp, Artificial Sequence
  Synthetic oligonucleotide
gaccggtaatgctaccaatacacattgctg

SEQ ID NO: 92959 - DNA, 30 bp, Artificial Sequence
  Synthetic oligonucleotide
ccaaggctgtggggttacacgtcgttgctg

SEQ ID NO: 92960 - DNA, 30 bp, Artificial Sequence
  Synthetic oligonucleotide
agcttgggaggacacagatcaagaaatctg

SEQ ID NO: 92961 - DNA, 30 bp, Artificial Sequence
  Synthetic oligonucleotide
tattgagccataaagtaatgaaccaatctg

SEQ ID NO: 92962 - DNA, 30 bp, Artificial Sequence
  Synthetic oligonucleotide
cgattcatggtagtaaatctatggaatctg

SEQ ID NO: 92963 - DNA, 30 bp, Artificial Sequence
  Synthetic oligonucleotide
tctcatgacgtttcggtaaccttggatctg

SEQ ID NO: 92964 - DNA, 30 bp, Artificial Sequence
  Synthetic oligonucleotide
atcgcgagtttaaccacatcgggtgatctg

SEQ ID NO: 92965 - DNA, 30 bp, Artificial Sequence
  Synthetic oligonucleotide
taacgtcgcaagggtctcgtaagatatctg

SEQ ID NO: 92966 - DNA, 30 bp, Artificial Sequence
  Synthetic oligonucleotide
tatgacaccatcgattaggatctgtatctg

SEQ ID NO: 92967 - DNA, 30 bp, Artificial Sequence
  Synthetic oligonucleotide
cggcaattttcactgaagctgggaactctg

SEQ ID NO: 92968 - DNA, 30 bp, Artificial Sequence
  Synthetic oligonucleotide
tagttaaccgaatctatgatagggactctg

SEQ ID NO: 92969 - DNA, 30 bp, Artificial Sequence
  Synthetic oligonucleotide
tttacgtaaagtggtaatgaacggcctctg

SEQ ID NO: 92970 - DNA, 30 bp, Artificial Sequence
  Synthetic oligonucleotide
tttgtaggacataaactgctaacagctctg

SEQ ID NO: 92971 - DNA, 30 bp, Artificial Sequence
  Synthetic oligonucleotide
agctatagtgtccaaatcatatcttctctg

SEQ ID NO: 92972 - DNA, 30 bp, Artificial Sequence
  Synthetic oligonucleotide
tcacttggcttgaacggcgagacaagtctg

SEQ ID NO: 92973 - DNA, 30 bp, Artificial Sequence
  Synthetic oligonucleotide
gggaaatgcaatctcatagggatcagtctg

SEQ ID NO: 92974 - DNA, 30 bp, Artificial Sequence
  Synthetic oligonucleotide
aatcgggatcagaggatccgcacgcgtctg

SEQ ID NO: 92975 - DNA, 30 bp, Artificial Sequence
  Synthetic oligonucleotide
tgtctcagtacaaaaccagtgcatcgtctg

SEQ ID NO: 92976 - DNA, 30 bp, Artificial Sequence
  Synthetic oligonucleotide
tgtgagatatgcgttgccagggcgggtctg

SEQ ID NO: 92977 - DNA, 30 bp, Artificial Sequence
  Synthetic oligonucleotide
gatgcatcagcatgtgagaagaggggtctg

SEQ ID NO: 92978 - DNA, 30 bp, Artificial Sequence
  Synthetic oligonucleotide
gcgtgcggataaacgcaaatgtaatgtctg

SEQ ID NO: 92979 - DNA, 30 bp, Artificial Sequence
  Synthetic oligonucleotide
gagtctgtgtaagggacctagcgatgtctg

SEQ ID NO: 92980 - DNA, 30 bp, Artificial Sequence
  Synthetic oligonucleotide
catacgagccctatggacgttgaagttctg

SEQ ID NO: 92981 - DNA, 30 bp, Artificial Sequence
  Synthetic oligonucleotide
gacggcggataatacaagaggaatgttctg

SEQ ID NO: 92982 - DNA, 30 bp, Artificial Sequence
  Synthetic oligonucleotide
tgtcaagtaccaatagacttagctgttctg

SEQ ID NO: 92983 - DNA, 30 bp, Artificial Sequence
  Synthetic oligonucleotide
ccgcgcagaggggctgatacgaactttctg

SEQ ID NO: 92984 - DNA, 30 bp, Artificial Sequence
  Synthetic oligonucleotide
gcttgatatatgtacagtaaatgtaaagtg

SEQ ID NO: 92985 - DNA, 30 bp, Artificial Sequence
  Synthetic oligonucleotide
acaccatactgacacagggttgcacaagtg

SEQ ID NO: 92986 - DNA, 30 bp, Artificial Sequence
  Synthetic oligonucleotide
cgcgacggcagtaaatgcatctgccaagtg

SEQ ID NO: 92987 - DNA, 30 bp, Artificial Sequence
  Synthetic oligonucleotide
gatgcacagccggcactggggaaagaagtg

SEQ ID NO: 92988 - DNA, 30 bp, Artificial Sequence
  Synthetic oligonucleotide
aaaaaaggaagacagaaaccgctagaagtg

SEQ ID NO: 92989 - DNA, 30 bp, Artificial Sequence
  Synthetic oligonucleotide
cactagtgcactgtttcaaattgcgaagtg

SEQ ID NO: 92990 - DNA, 30 bp, Artificial Sequence
  Synthetic oligonucleotide
tcccaagacgaagaacggataggggaagtg

SEQ ID NO: 92991 - DNA, 30 bp, Artificial Sequence
  Synthetic oligonucleotide
gtcttactcgttcagtgtacgacataagtg

SEQ ID NO: 92992 - DNA, 30 bp, Artificial Sequence
  Synthetic oligonucleotide
actctgccgacaactcttcagccgtaagtg

SEQ ID NO: 92993 - DNA, 30 bp, Artificial Sequence
  Synthetic oligonucleotide
accctgggcgggtaactcggcaattaagtg

SEQ ID NO: 92994 - DNA, 30 bp, Artificial Sequence
  Synthetic oligonucleotide
attgaactgcgaccttcacgggattaagtg

SEQ ID NO: 92995 - DNA, 30 bp, Artificial Sequence
  Synthetic oligonucleotide
aaggtgtgtgttagttaacaccgaacagtg

SEQ ID NO: 92996 - DNA, 30 bp, Artificial Sequence
  Synthetic oligonucleotide
ccgttataaattaggtttgccaacacagtg

SEQ ID NO: 92997 - DNA, 30 bp, Artificial Sequence
  Synthetic oligonucleotide
acgcatgtgtccctaaaaatctccacagtg

SEQ ID NO: 92998 - DNA, 30 bp, Artificial Sequence
  Synthetic oligonucleotide
ctgacacgatatgagtgtattagcccagtg

SEQ ID NO: 92999 - DNA, 30 bp, Artificial Sequence
  Synthetic oligonucleotide
ttcaaagcatagcagtttacaaagccagtg

SEQ ID NO: 93000 - DNA, 30 bp, Artificial Sequence
  Synthetic oligonucleotide
catgtgcgcagattcaaggatattccagtg

SEQ ID NO: 93001 - DNA, 30 bp, Artificial Sequence
  Synthetic oligonucleotide
tcacggatttagaaagcactgttagcagtg

SEQ ID NO: 93002 - DNA, 30 bp, Artificial Sequence
  Synthetic oligonucleotide
gcaggtcgcaagacggctgggatggcagtg

SEQ ID NO: 93003 - DNA, 30 bp, Artificial Sequence
  Synthetic oligonucleotide
cgtaaaaagaatgaagttattgtggcagtg

SEQ ID NO: 93004 - DNA, 30 bp, Artificial Sequence
  Synthetic oligonucleotide
aaggaagcagggccttttccagatgcagtg

SEQ ID NO: 93005 - DNA, 30 bp, Artificial Sequence
  Synthetic oligonucleotide
atcggcttggggtggatttggagatcagtg

SEQ ID NO: 93006 - DNA, 30 bp, Artificial Sequence
  Synthetic oligonucleotide
tacggaggcaataagagtaatcagtcagtg

SEQ ID NO: 93007 - DNA, 30 bp, Artificial Sequence
  Synthetic oligonucleotide
gaaaccactactgggaaggaagagtcagtg

SEQ ID NO: 93008 - DNA, 30 bp, Artificial Sequence
  Synthetic oligonucleotide
agctgtaatatgaaagacatgctgtcagtg

SEQ ID NO: 93009 - DNA, 30 bp, Artificial Sequence
  Synthetic oligonucleotide
tacgctgcggatgatgagcccttaagagtg

SEQ ID NO: 93010 - DNA, 30 bp, Artificial Sequence
  Synthetic oligonucleotide
gggtaagatacagaggtaaattggcgagtg

SEQ ID NO: 93011 - DNA, 30 bp, Artificial Sequence
  Synthetic oligonucleotide
cggggagtcatgagccataggtttcgagtg

SEQ ID NO: 93012 - DNA, 30 bp, Artificial Sequence
  Synthetic oligonucleotide
agcctccaaccacatatggcaacaggagtg

SEQ ID NO: 93013 - DNA, 30 bp, Artificial Sequence
  Synthetic oligonucleotide
gggagcggtttctcggaagtgttaggagtg

SEQ ID NO: 93014 - DNA, 30 bp, Artificial Sequence
  Synthetic oligonucleotide
tggcctgggattgcgtaagctggcggagtg

SEQ ID NO: 93015 - DNA, 30 bp, Artificial Sequence
  Synthetic oligonucleotide
ggaccgtacagtaactactggatatgagtg

SEQ ID NO: 93016 - DNA, 30 bp, Artificial Sequence
  Synthetic oligonucleotide
ctgaatgttatacagtgggactactgagtg

SEQ ID NO: 93017 - DNA, 30 bp, Artificial Sequence
  Synthetic oligonucleotide
agcgtcgccgggggcccggcgtagtgagtg

SEQ ID NO: 93018 - DNA, 30 bp, Artificial Sequence
  Synthetic oligonucleotide
gtaacccttagataaatgcgcgcttgagtg

SEQ ID NO: 93019 - DNA, 30 bp, Artificial Sequence
  Synthetic oligonucleotide
ctccggagcaggaatcacgggggcatagtg

SEQ ID NO: 93020 - DNA, 30 bp, Artificial Sequence
  Synthetic oligonucleotide
tgaggtagggggctgcagcaagtcatagtg

SEQ ID NO: 93021 - DNA, 30 bp, Artificial Sequence
  Synthetic oligonucleotide
gggttcagtggttggtagcttcagatagtg

SEQ ID NO: 93022 - DNA, 30 bp, Artificial Sequence
  Synthetic oligonucleotide
ataaacgatagcggtttagccggcctagtg

SEQ ID NO: 93023 - DNA, 30 bp, Artificial Sequence
  Synthetic oligonucleotide
tttcaccgcgcataatcagtagaggtagtg

SEQ ID NO: 93024 - DNA, 30 bp, Artificial Sequence
  Synthetic oligonucleotide
gcggcacttgtaggatccgtaagtgtagtg

SEQ ID NO: 93025 - DNA, 30 bp, Artificial Sequence
  Synthetic oligonucleotide
ttatatgctcaagggtgtcatattgtagtg

SEQ ID NO: 93026 - DNA, 30 bp, Artificial Sequence
  Synthetic oligonucleotide
tcggttaacgtactctgaccataattagtg

SEQ ID NO: 93027 - DNA, 30 bp, Artificial Sequence
  Synthetic oligonucleotide
ggatgcatgagggaacaaatcagattagtg

SEQ ID NO: 93028 - DNA, 30 bp, Artificial Sequence
  Synthetic oligonucleotide
tgtcggaggcagggggctaggaacttagtg

SEQ ID NO: 93029 - DNA, 30 bp, Artificial Sequence
  Synthetic oligonucleotide
ataacgaactaaatgcaccaaaagttagtg

SEQ ID NO: 93030 - DNA, 30 bp, Artificial Sequence
  Synthetic oligonucleotide
ctgtacgattaatcaacatgcaagttagtg

SEQ ID NO: 93031 - DNA, 30 bp, Artificial Sequence
  Synthetic oligonucleotide
cgacaacgcgtagcgtgagggaaaaacgtg

SEQ ID NO: 93032 - DNA, 30 bp, Artificial Sequence
  Synthetic oligonucleotide
ggtaaagattcttagaacttaccaaacgtg

SEQ ID NO: 93033 - DNA, 30 bp, Artificial Sequence
  Synthetic oligonucleotide
tgcaagcagattacggtggggggcaacgtg

SEQ ID NO: 93034 - DNA, 30 bp, Artificial Sequence
  Synthetic oligonucleotide
ggcgaagggtcgctttgtaaaggagacgtg

SEQ ID NO: 93035 - DNA, 30 bp, Artificial Sequence
  Synthetic oligonucleotide
ggaacatgagaaatgaggtttatggacgtg

SEQ ID NO: 93036 - DNA, 30 bp, Artificial Sequence
  Synthetic oligonucleotide
acacgtagtggaccggtcttacctgacgtg

SEQ ID NO: 93037 - DNA, 30 bp, Artificial Sequence
  Synthetic oligonucleotide
agagattatgtgacggtccctcgtgacgtg

SEQ ID NO: 93038 - DNA, 30 bp, Artificial Sequence
  Synthetic oligonucleotide
aggaccaggtaactgaaggccagctacgtg

SEQ ID NO: 93039 - DNA, 30 bp, Artificial Sequence
  Synthetic oligonucleotide
gatggatagcagaaaccgaacgcgtacgtg

SEQ ID NO: 93040 - DNA, 30 bp, Artificial Sequence
  Synthetic oligonucleotide
tcatcctaacttgtccgtctcccaaccgtg

SEQ ID NO: 93041 - DNA, 30 bp, Artificial Sequence
  Synthetic oligonucleotide
acggtaagggcccaatgcttacccaccgtg

SEQ ID NO: 93042 - DNA, 30 bp, Artificial Sequence
  Synthetic oligonucleotide
acttgccaaagtagcgccgactggaccgtg

SEQ ID NO: 93043 - DNA, 30 bp, Artificial Sequence
  Synthetic oligonucleotide
ggaacttcccaacaaaatgaagtgcccgtg

SEQ ID NO: 93044 - DNA, 30 bp, Artificial Sequence
  Synthetic oligonucleotide
aggccaacatcattgttcttatacgccgtg

SEQ ID NO: 93045 - DNA, 30 bp, Artificial Sequence
  Synthetic oligonucleotide
aaaggtaagggttgccgcgcgccggccgtg

SEQ ID NO: 93046 - DNA, 30 bp, Artificial Sequence
  Synthetic oligonucleotide
acttacatatgtgatccatattaaagcgtg

SEQ ID NO: 93047 - DNA, 30 bp, Artificial Sequence
  Synthetic oligonucleotide
ccggggaagaagtgaggtattctcagcgtg

SEQ ID NO: 93048 - DNA, 30 bp, Artificial Sequence
  Synthetic oligonucleotide
tcgacagaaattaggtcgttgttgcgcgtg

SEQ ID NO: 93049 - DNA, 30 bp, Artificial Sequence
  Synthetic oligonucleotide
agatgatacggtgccgaattgtatcgcgtg

SEQ ID NO: 93050 - DNA, 30 bp, Artificial Sequence
  Synthetic oligonucleotide
ctgcttgaataaccacaatactaaggcgtg

SEQ ID NO: 93051 - DNA, 30 bp, Artificial Sequence
  Synthetic oligonucleotide
tgtaagaattaccgctcacgtggatgcgtg

SEQ ID NO: 93052 - DNA, 30 bp, Artificial Sequence
  Synthetic oligonucleotide
aagactaccagcgcaataacgtgctgcgtg

SEQ ID NO: 93053 - DNA, 30 bp, Artificial Sequence
  Synthetic oligonucleotide
aagtattccgaggcgccagaccggatcgtg

SEQ ID NO: 93054 - DNA, 30 bp, Artificial Sequence
  Synthetic oligonucleotide
ggcatatatgacaccgcttggtaactcgtg

SEQ ID NO: 93055 - DNA, 30 bp, Artificial Sequence
  Synthetic oligonucleotide
atgaaacatggtggtagtcgactcctcgtg

SEQ ID NO: 93056 - DNA, 30 bp, Artificial Sequence
  Synthetic oligonucleotide
gtattgtgactccatatcttgctgctcgtg

SEQ ID NO: 93057 - DNA, 30 bp, Artificial Sequence
  Synthetic oligonucleotide
ctgcgccctatattagctagattcttcgtg

SEQ ID NO: 93058 - DNA, 30 bp, Artificial Sequence
  Synthetic oligonucleotide
cgatcggttatactaggatccaacaaggtg

SEQ ID NO: 93059 - DNA, 30 bp, Artificial Sequence
  Synthetic oligonucleotide
tagacgacgtatatacttaatccgaaggtg

SEQ ID NO: 93060 - DNA, 31 bp, Artificial Sequence
  Synthetic oligonucleotide
acatcgtctcgcgatatgcagaatgaaggtg

SEQ ID NO: 93061 - DNA, 30 bp, Artificial Sequence
  Synthetic oligonucleotide
gatgggcatactatgggatgcaataaggtg

SEQ ID NO: 93062 - DNA, 30 bp, Artificial Sequence
  Synthetic oligonucleotide
ctgcgttacagaaaggggcggtaagaggtg

SEQ ID NO: 93063 - DNA, 30 bp, Artificial Sequence
  Synthetic oligonucleotide
caatggtatgcggtagaatactaggaggtg

SEQ ID NO: 93064 - DNA, 30 bp, Artificial Sequence
  Synthetic oligonucleotide
ttggagaggaggggacggaggggggaggtg

SEQ ID NO: 93065 - DNA, 30 bp, Artificial Sequence
  Synthetic oligonucleotide
caccgggagtatttaagttctaactaggtg

SEQ ID NO: 93066 - DNA, 30 bp, Artificial Sequence
  Synthetic oligonucleotide
gtgttggcgagaaaaggttcggtctaggtg

SEQ ID NO: 93067 - DNA, 30 bp, Artificial Sequence
  Synthetic oligonucleotide
ggtgccgggcaatgcaattctttgtaggtg

SEQ ID NO: 93068 - DNA, 30 bp, Artificial Sequence
  Synthetic oligonucleotide
ttgatcggcagaccttacaaggcaacggtg

SEQ ID NO: 93069 - DNA, 30 bp, Artificial Sequence
  Synthetic oligonucleotide
gaccacataatacttcaccaattaacggtg

SEQ ID NO: 93070 - DNA, 30 bp, Artificial Sequence
  Synthetic oligonucleotide
catcgcaatgttaaaaacgtcacgccggtg

SEQ ID NO: 93071 - DNA, 30 bp, Artificial Sequence
  Synthetic oligonucleotide
aacgccatcattaatacacggactgcggtg

SEQ ID NO: 93072 - DNA, 30 bp, Artificial Sequence
  Synthetic oligonucleotide
tgtgctgttgcgtccagtggtagctcggtg

SEQ ID NO: 93073 - DNA, 30 bp, Artificial Sequence
  Synthetic oligonucleotide
ctgaagattctggtctacctggtgagggtg

SEQ ID NO: 93074 - DNA, 30 bp, Artificial Sequence
  Synthetic oligonucleotide
aaggaaggagcagggtaggagcatagggtg

SEQ ID NO: 93075 - DNA, 30 bp, Artificial Sequence
  Synthetic oligonucleotide
ataaattgcgagcatgacttcaagcgggtg

SEQ ID NO: 93076 - DNA, 30 bp, Artificial Sequence
  Synthetic oligonucleotide
ttcgtacagtatgagctaatgataggggtg

SEQ ID NO: 93077 - DNA, 30 bp, Artificial Sequence
  Synthetic oligonucleotide
gcgaatgaaaaccactttttgtagggggtg

SEQ ID NO: 93078 - DNA, 30 bp, Artificial Sequence
  Synthetic oligonucleotide
taattagacatcagatgaacagatggggtg

SEQ ID NO: 93079 - DNA, 30 bp, Artificial Sequence
  Synthetic oligonucleotide
gatcgatagataggtcaagttactggggtg

SEQ ID NO: 93080 - DNA, 30 bp, Artificial Sequence
  Synthetic oligonucleotide
acactgatccgaataggccggggtggggtg

SEQ ID NO: 93081 - DNA, 30 bp, Artificial Sequence
  Synthetic oligonucleotide
tccaagcccgagcaaacaggttcatgggtg

SEQ ID NO: 93082 - DNA, 30 bp, Artificial Sequence
  Synthetic oligonucleotide
gacggtcgacttactgcatattattgggtg

SEQ ID NO: 93083 - DNA, 30 bp, Artificial Sequence
  Synthetic oligonucleotide
gggaacgcaggtagtgtcgtcagaatggtg

SEQ ID NO: 93084 - DNA, 30 bp, Artificial Sequence
  Synthetic oligonucleotide
aagttaaagggcaggattctcctcatggtg

SEQ ID NO: 93085 - DNA, 30 bp, Artificial Sequence
  Synthetic oligonucleotide
tcatcgtaatgcggatgcggtcggctggtg

SEQ ID NO: 93086 - DNA, 30 bp, Artificial Sequence
  Synthetic oligonucleotide
cgttattatataacattagaaaacgtggtg

SEQ ID NO: 93087 - DNA, 29 bp, Artificial Sequence
  Synthetic oligonucleotide
tgctctgtatacaaagaccatacgtggtg

SEQ ID NO: 93088 - DNA, 30 bp, Artificial Sequence
  Synthetic oligonucleotide
aaagagctaaacgactcccacacggtggtg

SEQ ID NO: 93089 - DNA, 30 bp, Artificial Sequence
  Synthetic oligonucleotide
agtgtcgtgataacacacgaacgattggtg

SEQ ID NO: 93090 - DNA, 30 bp, Artificial Sequence
  Synthetic oligonucleotide
tgttgaacagggaggccagtgatattggtg

SEQ ID NO: 93091 - DNA, 30 bp, Artificial Sequence
  Synthetic oligonucleotide
gctaatgttcggtggtatggtccaaatgtg

SEQ ID NO: 93092 - DNA, 30 bp, Artificial Sequence
  Synthetic oligonucleotide
gcacaagacgactaacccacgtgcaatgtg

SEQ ID NO: 93093 - DNA, 30 bp, Artificial Sequence
  Synthetic oligonucleotide
tcatatagtggccagattaccacacatgtg

SEQ ID NO: 93094 - DNA, 30 bp, Artificial Sequence
  Synthetic oligonucleotide
ggggaacctaacgctccaataatacatgtg

SEQ ID NO: 93095 - DNA, 30 bp, Artificial Sequence
  Synthetic oligonucleotide
ttatagaagaacagatcagggtggcatgtg

SEQ ID NO: 93096 - DNA, 30 bp, Artificial Sequence
  Synthetic oligonucleotide
ccaagggtagtgcaaacaatgtgcgatgtg

SEQ ID NO: 93097 - DNA, 30 bp, Artificial Sequence
  Synthetic oligonucleotide
atcgcgatttgccccaagacttgggatgtg

SEQ ID NO: 93098 - DNA, 30 bp, Artificial Sequence
  Synthetic oligonucleotide
tcgcaaataaaaagtcatctacggtatgtg

SEQ ID NO: 93099 - DNA, 30 bp, Artificial Sequence
  Synthetic oligonucleotide
gggaggtgtttctccggaaaaagttatgtg

SEQ ID NO: 93100 - DNA, 30 bp, Artificial Sequence
  Synthetic oligonucleotide
aggtgattctcgttggtcgcaaaaactgtg

SEQ ID NO: 93101 - DNA, 30 bp, Artificial Sequence
  Synthetic oligonucleotide
aacgccgaggagtcccccgatattcctgtg

SEQ ID NO: 93102 - DNA, 30 bp, Artificial Sequence
  Synthetic oligonucleotide
gggtgaggaaaacaccttcattttcctgtg

SEQ ID NO: 93103 - DNA, 30 bp, Artificial Sequence
  Synthetic oligonucleotide
tatgcgtccggtacagtatgcaaagctgtg

SEQ ID NO: 93104 - DNA, 30 bp, Artificial Sequence
  Synthetic oligonucleotide
tgccctacaaggatttggccgatagctgtg

SEQ ID NO: 93105 - DNA, 30 bp, Artificial Sequence
  Synthetic oligonucleotide
agtgtcggttgggcaatggtaggtgctgtg

SEQ ID NO: 93106 - DNA, 30 bp, Artificial Sequence
  Synthetic oligonucleotide
ttcggtggtagtggacactaaaagtctgtg

SEQ ID NO: 93107 - DNA, 30 bp, Artificial Sequence
  Synthetic oligonucleotide
cgataacacgtgacagcgtcgagttctgtg

SEQ ID NO: 93108 - DNA, 30 bp, Artificial Sequence
  Synthetic oligonucleotide
atcgcgctgtcagcaggtcgtctaagtgtg

SEQ ID NO: 93109 - DNA, 30 bp, Artificial Sequence
  Synthetic oligonucleotide
taggggacgcccagtctagcgttaagtgtg

SEQ ID NO: 93110 - DNA, 30 bp, Artificial Sequence
  Synthetic oligonucleotide
atcgtggggtcacaaccagtgaatagtgtg

SEQ ID NO: 93111 - DNA, 30 bp, Artificial Sequence
  Synthetic oligonucleotide
cgggcttagcgggaatgtgggagacgtgtg

SEQ ID NO: 93112 - DNA, 30 bp, Artificial Sequence
  Synthetic oligonucleotide
ctggtgctaataggaaccatgatacgtgtg

SEQ ID NO: 93113 - DNA, 30 bp, Artificial Sequence
  Synthetic oligonucleotide
cgttggtgtaggtgtgaccgctgtggtgtg

SEQ ID NO: 93114 - DNA, 30 bp, Artificial Sequence
  Synthetic oligonucleotide
tatgtgcatttccgagattagcagtgtgtg

SEQ ID NO: 93115 - DNA, 30 bp, Artificial Sequence
  Synthetic oligonucleotide
ggaggatctcgatgcgcggacttgtgtgtg

SEQ ID NO: 93116 - DNA, 30 bp, Artificial Sequence
  Synthetic oligonucleotide
gaataatgggtaatcaggcaggaaattgtg

SEQ ID NO: 93117 - DNA, 30 bp, Artificial Sequence
  Synthetic oligonucleotide
agggatcactacgcgagagacggcattgtg

SEQ ID NO: 93118 - DNA, 30 bp, Artificial Sequence
  Synthetic oligonucleotide
taacgcgcaagttcgccttgcaggattgtg

SEQ ID NO: 93119 - DNA, 30 bp, Artificial Sequence
  Synthetic oligonucleotide
gaagagagactagacaaagaaacacttgtg

SEQ ID NO: 93120 - DNA, 30 bp, Artificial Sequence
  Synthetic oligonucleotide
aggtgtaaccactaattgagctaagttgtg

SEQ ID NO: 93121 - DNA, 30 bp, Artificial Sequence
  Synthetic oligonucleotide
gagtcagccaagaaccgaggagcagttgtg

SEQ ID NO: 93122 - DNA, 30 bp, Artificial Sequence
  Synthetic oligonucleotide
gctagttactatggggatcaccaggttgtg

SEQ ID NO: 93123 - DNA, 31 bp, Artificial Sequence
  Synthetic oligonucleotide
tggataacgttgatccagagttatctttgtg

SEQ ID NO: 93124 - DNA, 30 bp, Artificial Sequence
  Synthetic oligonucleotide
ggtatgcgagaacaagcatttccgtttgtg

SEQ ID NO: 93125 - DNA, 30 bp, Artificial Sequence
  Synthetic oligonucleotide
ggaagagcgataatttatgtaatgtttgtg

SEQ ID NO: 93126 - DNA, 30 bp, Artificial Sequence
  Synthetic oligonucleotide
ggaggactttcaggatgcgtcaagaaattg

SEQ ID NO: 93127 - DNA, 30 bp, Artificial Sequence
  Synthetic oligonucleotide
agcacaaccttccattaacctgtacaattg

SEQ ID NO: 93128 - DNA, 30 bp, Artificial Sequence
  Synthetic oligonucleotide
gtaagctttagatacatcgggttcgaattg

SEQ ID NO: 93129 - DNA, 30 bp, Artificial Sequence
  Synthetic oligonucleotide
atgactatatcaagttattaacaggaattg

SEQ ID NO: 93130 - DNA, 30 bp, Artificial Sequence
  Synthetic oligonucleotide
ggatggaacggttgcaatcattatgaattg

SEQ ID NO: 93131 - DNA, 30 bp, Artificial Sequence
  Synthetic oligonucleotide
tcatcctaatctaggcagatacgtgaattg

SEQ ID NO: 93132 - DNA, 30 bp, Artificial Sequence
  Synthetic oligonucleotide
agcgaatacgacatgttcttggcctaattg

SEQ ID NO: 93133 - DNA, 30 bp, Artificial Sequence
  Synthetic oligonucleotide
gaaacgacgctctatcgccaccgaacattg

SEQ ID NO: 93134 - DNA, 30 bp, Artificial Sequence
  Synthetic oligonucleotide
aaattcgcaaagacaggggagttaacattg

SEQ ID NO: 93135 - DNA, 30 bp, Artificial Sequence
  Synthetic oligonucleotide
ctgacgtatggggaggctatgggtacattg

SEQ ID NO: 93136 - DNA, 30 bp, Artificial Sequence
  Synthetic oligonucleotide
acagtgagtgagagggtttggcaagcattg

SEQ ID NO: 93137 - DNA, 30 bp, Artificial Sequence
  Synthetic oligonucleotide
tgccgtgcttgagtgtatcggagcgcattg

SEQ ID NO: 93138 - DNA, 30 bp, Artificial Sequence
  Synthetic oligonucleotide
tgtaataccgacactgcttgtcgctcattg

SEQ ID NO: 93139 - DNA, 30 bp, Artificial Sequence
  Synthetic oligonucleotide
aacgtatggtctggacatcgtgattcattg

SEQ ID NO: 93140 - DNA, 30 bp, Artificial Sequence
  Synthetic oligonucleotide
ttaggcgtctacgttgagagctgaagattg

SEQ ID NO: 93141 - DNA, 30 bp, Artificial Sequence
  Synthetic oligonucleotide
atttggagccgcgtcagcgaaataagattg

SEQ ID NO: 93142 - DNA, 30 bp, Artificial Sequence
  Synthetic oligonucleotide
ggtcgacgattcgtcggctatgctagattg

SEQ ID NO: 93143 - DNA, 30 bp, Artificial Sequence
  Synthetic oligonucleotide
gcaaggtatggtcactagtctggtagattg

SEQ ID NO: 93144 - DNA, 30 bp, Artificial Sequence
  Synthetic oligonucleotide
ctctaagcatgaagttgagagtggggattg

SEQ ID NO: 93145 - DNA, 30 bp, Artificial Sequence
  Synthetic oligonucleotide
atgatagagacttacggcttaatatgattg

SEQ ID NO: 93146 - DNA, 30 bp, Artificial Sequence
  Synthetic oligonucleotide
cctcaaaacgtggccccaacacactgattg

SEQ ID NO: 93147 - DNA, 30 bp, Artificial Sequence
  Synthetic oligonucleotide
tccagcatccgtgtcggctatgtctgattg

SEQ ID NO: 93148 - DNA, 30 bp, Artificial Sequence
  Synthetic oligonucleotide
aatgcctgcgagagatgttttcagtgattg

SEQ ID NO: 93149 - DNA, 30 bp, Artificial Sequence
  Synthetic oligonucleotide
tagcgaggtcagaagtgaattatgatattg

SEQ ID NO: 93150 - DNA, 30 bp, Artificial Sequence
  Synthetic oligonucleotide
agaaaagacagcggtttgacatagctattg

SEQ ID NO: 93151 - DNA, 30 bp, Artificial Sequence
  Synthetic oligonucleotide
gcgtattggggcgggttttacaacgtattg

SEQ ID NO: 93152 - DNA, 30 bp, Artificial Sequence
  Synthetic oligonucleotide
aaacgtcagttttaggtgcgacccgtattg

SEQ ID NO: 93153 - DNA, 30 bp, Artificial Sequence
  Synthetic oligonucleotide
gtgcaggggaaagttcaacgatcggtattg

SEQ ID NO: 93154 - DNA, 30 bp, Artificial Sequence
  Synthetic oligonucleotide
cgtctacgcgtaacagtaggtagtgtattg

SEQ ID NO: 93155 - DNA, 30 bp, Artificial Sequence
  Synthetic oligonucleotide
actcaaattggcatcagtgtccacttattg

SEQ ID NO: 93156 - DNA, 30 bp, Artificial Sequence
  Synthetic oligonucleotide
cccctgcggatggcccgaatcagaaacttg

SEQ ID NO: 93157 - DNA, 30 bp, Artificial Sequence
  Synthetic oligonucleotide
ggaaactttcgggcaggcactaagaacttg

SEQ ID NO: 93158 - DNA, 30 bp, Artificial Sequence
  Synthetic oligonucleotide
gctcatggcccgatcatactagataacttg

SEQ ID NO: 93159 - DNA, 30 bp, Artificial Sequence
  Synthetic oligonucleotide
gacaagcttaagggtgaagtattgcacttg

SEQ ID NO: 93160 - DNA, 30 bp, Artificial Sequence
  Synthetic oligonucleotide
cgtctcgtagttatagatactagtcacttg

SEQ ID NO: 93161 - DNA, 30 bp, Artificial Sequence
  Synthetic oligonucleotide
tagatgggatgctcatcggggggggacttg

SEQ ID NO: 93162 - DNA, 30 bp, Artificial Sequence
  Synthetic oligonucleotide
tgcacataacacacgctcatcccctacttg

SEQ ID NO: 93163 - DNA, 30 bp, Artificial Sequence
  Synthetic oligonucleotide
aacggaccggtctaataaaggggcaccttg

SEQ ID NO: 93164 - DNA, 30 bp, Artificial Sequence
  Synthetic oligonucleotide
catgttaactacgacagatatatgaccttg

SEQ ID NO: 93165 - DNA, 30 bp, Artificial Sequence
  Synthetic oligonucleotide
tgagtcgaactcggcagtaggctctccttg

SEQ ID NO: 93166 - DNA, 40 bp, Artificial Sequence
  Synthetic oligonucleotide
ttagcactcaaccctcattaacccgtatagctgtagcttg

SEQ ID NO: 93167 - DNA, 30 bp, Artificial Sequence
  Synthetic oligonucleotide
aaaggcgaaagcccaacaggtcggcgcttg

SEQ ID NO: 93168 - DNA, 30 bp, Artificial Sequence
  Synthetic oligonucleotide
acggtgaagtaatgacaaaaccgtcgcttg

SEQ ID NO: 93169 - DNA, 30 bp, Artificial Sequence
  Synthetic oligonucleotide
gcgggtatgatgcgcgcagaaaccggcttg

SEQ ID NO: 93170 - DNA, 30 bp, Artificial Sequence
  Synthetic oligonucleotide
tatcccgtgtacggtaggaaaaatggcttg

SEQ ID NO: 93171 - DNA, 30 bp, Artificial Sequence
  Synthetic oligonucleotide
ggacccgtcgtggatcggataacatgcttg

SEQ ID NO: 93172 - DNA, 30 bp, Artificial Sequence
  Synthetic oligonucleotide
tgccgtcctcagcgcaggagaacgtgcttg

SEQ ID NO: 93173 - DNA, 30 bp, Artificial Sequence
  Synthetic oligonucleotide
tacgccgataacggcaagcgggcaatcttg

SEQ ID NO: 93174 - DNA, 30 bp, Artificial Sequence
  Synthetic oligonucleotide
acggcatacgaggtaaggcgggcggtcttg

SEQ ID NO: 93175 - DNA, 30 bp, Artificial Sequence
  Synthetic oligonucleotide
tcagacgcggaatcggcttacatattcttg

SEQ ID NO: 93176 - DNA, 31 bp, Artificial Sequence
  Synthetic oligonucleotide
ctaggcttgagggacggcttgtaagttcttg

SEQ ID NO: 93177 - DNA, 30 bp, Artificial Sequence
  Synthetic oligonucleotide
agggggctacgtctccaggttgggttcttg

SEQ ID NO: 93178 - DNA, 30 bp, Artificial Sequence
  Synthetic oligonucleotide
cggatacgggtccgcggggccatgttcttg

SEQ ID NO: 93179 - DNA, 30 bp, Artificial Sequence
  Synthetic oligonucleotide
ggaacaagagaagagagtaacagtttcttg

SEQ ID NO: 93180 - DNA, 30 bp, Artificial Sequence
  Synthetic oligonucleotide
atgagagtatagaacgcattgaacaagttg

SEQ ID NO: 93181 - DNA, 30 bp, Artificial Sequence
  Synthetic oligonucleotide
agtgcgcgcataatcgaccccttcaagttg

SEQ ID NO: 93182 - DNA, 30 bp, Artificial Sequence
  Synthetic oligonucleotide
gtccgtagtatagaagatagatagaagttg

SEQ ID NO: 93183 - DNA, 30 bp, Artificial Sequence
  Synthetic oligonucleotide
acggccgctagtacggtatcaatgaagttg

SEQ ID NO: 93184 - DNA, 30 bp, Artificial Sequence
  Synthetic oligonucleotide
ttacaacggtctagcgagagcgctcagttg

SEQ ID NO: 93185 - DNA, 30 bp, Artificial Sequence
  Synthetic oligonucleotide
tcgtacacagtggtgacttagcccgagttg

SEQ ID NO: 93186 - DNA, 30 bp, Artificial Sequence
  Synthetic oligonucleotide
cagacagggggtgctccgttcagcgagttg

SEQ ID NO: 93187 - DNA, 30 bp, Artificial Sequence
  Synthetic oligonucleotide
cgaggatgataatgctgcgatagaacgttg

SEQ ID NO: 93188 - DNA, 30 bp, Artificial Sequence
  Synthetic oligonucleotide
caggtctcggtagtaagtagggttacgttg

SEQ ID NO: 93189 - DNA, 30 bp, Artificial Sequence
  Synthetic oligonucleotide
tatgattatctcttaatcgaacatccgttg

SEQ ID NO: 93190 - DNA, 30 bp, Artificial Sequence
  Synthetic oligonucleotide
gtggccttaaaggcctaagccgctccgttg

SEQ ID NO: 93191 - DNA, 30 bp, Artificial Sequence
  Synthetic oligonucleotide
ttgaaccgagcgtaagtcgaaaaagcgttg

SEQ ID NO: 93192 - DNA, 30 bp, Artificial Sequence
  Synthetic oligonucleotide
tgatacgtccgaacgtgaagccgagcgttg

SEQ ID NO: 93193 - DNA, 30 bp, Artificial Sequence
  Synthetic oligonucleotide
aaaggaagtaaagtagaccaatgtgcgttg

SEQ ID NO: 93194 - DNA, 30 bp, Artificial Sequence
  Synthetic oligonucleotide
tcgatgtccgccacccccccggcctcgttg

SEQ ID NO: 93195 - DNA, 30 bp, Artificial Sequence
  Synthetic oligonucleotide
acggacaatgtatcgctagatccgtcgttg

SEQ ID NO: 93196 - DNA, 30 bp, Artificial Sequence
  Synthetic oligonucleotide
cgcatagtagctagacttgacccaaggttg

SEQ ID NO: 93197 - DNA, 30 bp, Artificial Sequence
  Synthetic oligonucleotide
atgttccgaggcggggagtgcggcaggttg

SEQ ID NO: 93198 - DNA, 30 bp, Artificial Sequence
  Synthetic oligonucleotide
acagggggcttaaggcgtgcactcaggttg

SEQ ID NO: 93199 - DNA, 30 bp, Artificial Sequence
  Synthetic oligonucleotide
cgaggcaatcgaccacactcctgtaggttg

SEQ ID NO: 93200 - DNA, 30 bp, Artificial Sequence
  Synthetic oligonucleotide
ggagcagaagtaacgaaactccttaggttg

SEQ ID NO: 93201 - DNA, 30 bp, Artificial Sequence
  Synthetic oligonucleotide
tcacaacttacggcataagacccccggttg

SEQ ID NO: 93202 - DNA, 30 bp, Artificial Sequence
  Synthetic oligonucleotide
cgccaatacgtggggattttatggcggttg

SEQ ID NO: 93203 - DNA, 30 bp, Artificial Sequence
  Synthetic oligonucleotide
atgcggaagggccgtggatcaaatgggttg

SEQ ID NO: 93204 - DNA, 30 bp, Artificial Sequence
  Synthetic oligonucleotide
cggcttgtgggtccgactcgaacgtggttg

SEQ ID NO: 93205 - DNA, 30 bp, Artificial Sequence
  Synthetic oligonucleotide
gcatatcgggataggttccaattcatgttg

SEQ ID NO: 93206 - DNA, 30 bp, Artificial Sequence
  Synthetic oligonucleotide
cgtggatagcctgctcaacttagactgttg

SEQ ID NO: 93207 - DNA, 30 bp, Artificial Sequence
  Synthetic oligonucleotide
taaattggaacgtcagactggtgactgttg

SEQ ID NO: 93208 - DNA, 30 bp, Artificial Sequence
  Synthetic oligonucleotide
ggcccgatgtaataaccattcattctgttg

SEQ ID NO: 93209 - DNA, 30 bp, Artificial Sequence
  Synthetic oligonucleotide
tggggagtaacaatcatgtcatcggtgttg

SEQ ID NO: 93210 - DNA, 30 bp, Artificial Sequence
  Synthetic oligonucleotide
gggcggtacgctttggtacagcctgtgttg

SEQ ID NO: 93211 - DNA, 30 bp, Artificial Sequence
  Synthetic oligonucleotide
gctagctgtgctagataggcgattgtgttg

SEQ ID NO: 93212 - DNA, 30 bp, Artificial Sequence
  Synthetic oligonucleotide
gagtctgaccgaaccgcaaagaagttgttg

SEQ ID NO: 93213 - DNA, 30 bp, Artificial Sequence
  Synthetic oligonucleotide
atgttggtagtagtcgtcaaatggttgttg

SEQ ID NO: 93214 - DNA, 30 bp, Artificial Sequence
  Synthetic oligonucleotide
cgaatccatgcccacaggcagagcaatttg

SEQ ID NO: 93215 - DNA, 30 bp, Artificial Sequence
  Synthetic oligonucleotide
tcagaatgagtaagtgaagctctgaatttg

SEQ ID NO: 93216 - DNA, 30 bp, Artificial Sequence
  Synthetic oligonucleotide
tattgctaggaataagaacataaagatttg

SEQ ID NO: 93217 - DNA, 30 bp, Artificial Sequence
  Synthetic oligonucleotide
ccatctaatgtggagtaacactaggatttg

SEQ ID NO: 93218 - DNA, 30 bp, Artificial Sequence
  Synthetic oligonucleotide
ggtggtatgagtagatcaagtcgcactttg

SEQ ID NO: 93219 - DNA, 30 bp, Artificial Sequence
  Synthetic oligonucleotide
cgaacatcgaccacgccatccgaacctttg

SEQ ID NO: 93220 - DNA, 30 bp, Artificial Sequence
  Synthetic oligonucleotide
gtgtgcctagaaaggagaactcgagctttg

SEQ ID NO: 93221 - DNA, 30 bp, Artificial Sequence
  Synthetic oligonucleotide
gtctgaactcacccggtgtaacccgctttg

SEQ ID NO: 93222 - DNA, 30 bp, Artificial Sequence
  Synthetic oligonucleotide
gcgtagtgtctgcgtcgcattacggctttg

SEQ ID NO: 93223 - DNA, 30 bp, Artificial Sequence
  Synthetic oligonucleotide
tcatccgatacatggaccaaatgggctttg

SEQ ID NO: 93224 - DNA, 30 bp, Artificial Sequence
  Synthetic oligonucleotide
gaagaggaattccgccccacaacaagtttg

SEQ ID NO: 93225 - DNA, 30 bp, Artificial Sequence
  Synthetic oligonucleotide
tgggcaatatcggcggaagtatatagtttg

SEQ ID NO: 93226 - DNA, 30 bp, Artificial Sequence
  Synthetic oligonucleotide
catgacattgcatcgaaaagaggcggtttg

SEQ ID NO: 93227 - DNA, 30 bp, Artificial Sequence
  Synthetic oligonucleotide
cgaaccatcggcccccactaaatcggtttg

SEQ ID NO: 93228 - DNA, 30 bp, Artificial Sequence
  Synthetic oligonucleotide
cttgagagggatcatatctctgaaattttg

SEQ ID NO: 93229 - DNA, 30 bp, Artificial Sequence
  Synthetic oligonucleotide
aagaagcgagcagatcgggacagcattttg

SEQ ID NO: 93230 - DNA, 31 bp, Artificial Sequence
  Synthetic oligonucleotide
ccttaccaagcgaactcacatgatacttttg

SEQ ID NO: 93231 - DNA, 29 bp, Artificial Sequence
  Synthetic oligonucleotide
gtcgtagcttacgattgcgtcgagttttg

SEQ ID NO: 93232 - DNA, 30 bp, Artificial Sequence
  Synthetic oligonucleotide
cactgggatcaactaggagttaccgttttg

SEQ ID NO: 93233 - DNA, 30 bp, Artificial Sequence
  Synthetic oligonucleotide
tcgtgtacggcgttttgtaatagtgttttg

SEQ ID NO: 93234 - DNA, 30 bp, Artificial Sequence
  Synthetic oligonucleotide
aggggatacattgccgtatcgcgtgttttg

SEQ ID NO: 93235 - DNA, 30 bp, Artificial Sequence
  Synthetic oligonucleotide
cggctagggtgaggatttggagttcaaaat

SEQ ID NO: 93236 - DNA, 30 bp, Artificial Sequence
  Synthetic oligonucleotide
ttagactcacctcctcaggataagtaaaat

SEQ ID NO: 93237 - DNA, 30 bp, Artificial Sequence
  Synthetic oligonucleotide
gttcagaagagtagaaattgcttgtaaaat

SEQ ID NO: 93238 - DNA, 30 bp, Artificial Sequence
  Synthetic oligonucleotide
cttgaagggactgaatctcgaataacaaat

SEQ ID NO: 93239 - DNA, 30 bp, Artificial Sequence
  Synthetic oligonucleotide
cggcgtgttgaggcgtgtgggtggacaaat

SEQ ID NO: 93240 - DNA, 30 bp, Artificial Sequence
  Synthetic oligonucleotide
gctaagataagcagtggaagatgcgcaaat

SEQ ID NO: 93241 - DNA, 30 bp, Artificial Sequence
  Synthetic oligonucleotide
acggttgatatacaaaggatagcggcaaat

SEQ ID NO: 93242 - DNA, 30 bp, Artificial Sequence
  Synthetic oligonucleotide
atacgtgcgtaaagggctaaaagggcaaat

SEQ ID NO: 93243 - DNA, 30 bp, Artificial Sequence
  Synthetic oligonucleotide
gcttactgtacgttcaagaagtctgcaaat

SEQ ID NO: 93244 - DNA, 30 bp, Artificial Sequence
  Synthetic oligonucleotide
gggtaggcttgtaggagtacaccatcaaat

SEQ ID NO: 93245 - DNA, 30 bp, Artificial Sequence
  Synthetic oligonucleotide
ggggctcacacaagaggtctcatctcaaat

SEQ ID NO: 93246 - DNA, 30 bp, Artificial Sequence
  Synthetic oligonucleotide
cggaaatctcaattcacaagtcattcaaat

SEQ ID NO: 93247 - DNA, 30 bp, Artificial Sequence
  Synthetic oligonucleotide
actcaaaacggaacaaacgcaggaagaaat

SEQ ID NO: 93248 - DNA, 30 bp, Artificial Sequence
  Synthetic oligonucleotide
gcaaaaaagaaaaatgatcgagatagaaat

SEQ ID NO: 93249 - DNA, 30 bp, Artificial Sequence
  Synthetic oligonucleotide
gcgctccggatcaacgggagtcaccgaaat

SEQ ID NO: 93250 - DNA, 31 bp, Artificial Sequence
  Synthetic oligonucleotide
tgttcttacaagcaccaataaagaccgaaat

SEQ ID NO: 93251 - DNA, 30 bp, Artificial Sequence
  Synthetic oligonucleotide
agttctgcacgccaaataatgggcggaaat

SEQ ID NO: 93252 - DNA, 30 bp, Artificial Sequence
  Synthetic oligonucleotide
catcgaagcgcatcaagcgtgtagggaaat

SEQ ID NO: 93253 - DNA, 30 bp, Artificial Sequence
  Synthetic oligonucleotide
gtgcgccgattggattgaatagtgggaaat

SEQ ID NO: 93254 - DNA, 30 bp, Artificial Sequence
  Synthetic oligonucleotide
gcagggccaatgaatagttcaggtggaaat

SEQ ID NO: 93255 - DNA, 30 bp, Artificial Sequence
  Synthetic oligonucleotide
acaacttccgggtgattagagatgtgaaat

SEQ ID NO: 93256 - DNA, 30 bp, Artificial Sequence
  Synthetic oligonucleotide
agagaaggaggcctagtagcactttgaaat

SEQ ID NO: 93257 - DNA, 30 bp, Artificial Sequence
  Synthetic oligonucleotide
atgggagggcgcgggtctcacagaataaat

SEQ ID NO: 93258 - DNA, 30 bp, Artificial Sequence
  Synthetic oligonucleotide
agatagtaaatcgtaagagtcgacataaat

SEQ ID NO: 93259 - DNA, 30 bp, Artificial Sequence
  Synthetic oligonucleotide
gaattgggggtgacaatggtggggataaat

SEQ ID NO: 93260 - DNA, 30 bp, Artificial Sequence
  Synthetic oligonucleotide
gagtcacctagggaaaatgagcctataaat

SEQ ID NO: 93261 - DNA, 30 bp, Artificial Sequence
  Synthetic oligonucleotide
cagcatgtgactgcgactaggctagtaaat

SEQ ID NO: 93262 - DNA, 30 bp, Artificial Sequence
  Synthetic oligonucleotide
cgaccgtgccgcactggtagggtcgtaaat

SEQ ID NO: 93263 - DNA, 30 bp, Artificial Sequence
  Synthetic oligonucleotide
gccaacgcgcatagcagacgtaatgtaaat

SEQ ID NO: 93264 - DNA, 30 bp, Artificial Sequence
  Synthetic oligonucleotide
gcaacgggtactctcgcgccgacgttaaat

SEQ ID NO: 93265 - DNA, 30 bp, Artificial Sequence
  Synthetic oligonucleotide
cggattgctggcatggttcgtgctttaaat

SEQ ID NO: 93266 - DNA, 30 bp, Artificial Sequence
  Synthetic oligonucleotide
cgtctaaaagcgataggtgagcgtttaaat

SEQ ID NO: 93267 - DNA, 30 bp, Artificial Sequence
  Synthetic oligonucleotide
cagggtataaccaatgagtgcttgaacaat

SEQ ID NO: 93268 - DNA, 30 bp, Artificial Sequence
  Synthetic oligonucleotide
caatggctacctaaatacttctatcacaat

SEQ ID NO: 93269 - DNA, 30 bp, Artificial Sequence
  Synthetic oligonucleotide
cgatcgtggcctagaagctgtccctacaat

SEQ ID NO: 93270 - DNA, 30 bp, Artificial Sequence
  Synthetic oligonucleotide
tgtcgtgggtagagaatgatgacttacaat

SEQ ID NO: 93271 - DNA, 30 bp, Artificial Sequence
  Synthetic oligonucleotide
catcgaatcataggacgtgaaaggaccaat

SEQ ID NO: 93272 - DNA, 30 bp, Artificial Sequence
  Synthetic oligonucleotide
aaggtgctctggagtatgtaacaggccaat

SEQ ID NO: 93273 - DNA, 30 bp, Artificial Sequence
  Synthetic oligonucleotide
ggtgtactgaaataaaaccaacagagcaat

SEQ ID NO: 93274 - DNA, 30 bp, Artificial Sequence
  Synthetic oligonucleotide
agtggtcaaccgtggcacccatcccgcaat

SEQ ID NO: 93275 - DNA, 30 bp, Artificial Sequence
  Synthetic oligonucleotide
tccgtgcccgacgaaaggttaacgcgcaat

SEQ ID NO: 93276 - DNA, 30 bp, Artificial Sequence
  Synthetic oligonucleotide
gtaacgacgtaggcagggatcaagggcaat

SEQ ID NO: 93277 - DNA, 30 bp, Artificial Sequence
  Synthetic oligonucleotide
accaggccccgagtaaatcttaagggcaat

SEQ ID NO: 93278 - DNA, 30 bp, Artificial Sequence
  Synthetic oligonucleotide
ctatgcacatagtggctggcgtctggcaat

SEQ ID NO: 93279 - DNA, 30 bp, Artificial Sequence
  Synthetic oligonucleotide
acgaagctttccctcgtcatcaagtgcaat

SEQ ID NO: 93280 - DNA, 30 bp, Artificial Sequence
  Synthetic oligonucleotide
cgagttgtgtaaaagggtcatggttgcaat

SEQ ID NO: 93281 - DNA, 30 bp, Artificial Sequence
  Synthetic oligonucleotide
caacggggcgggctcataagtgtttgcaat

SEQ ID NO: 93282 - DNA, 30 bp, Artificial Sequence
  Synthetic oligonucleotide
gggccacaactttggaacgtggtcatcaat

SEQ ID NO: 93283 - DNA, 30 bp, Artificial Sequence
  Synthetic oligonucleotide
tgcgctcacctcgaattagtggcagtcaat

SEQ ID NO: 93284 - DNA, 30 bp, Artificial Sequence
  Synthetic oligonucleotide
ctgcgacgagactgggtgtaggccgtcaat

SEQ ID NO: 93285 - DNA, 30 bp, Artificial Sequence
  Synthetic oligonucleotide
aaagaatgggtgttgtcgcaatgggtcaat

SEQ ID NO: 93286 - DNA, 30 bp, Artificial Sequence
  Synthetic oligonucleotide
aaagcagggaagatcttgacctctgtcaat

SEQ ID NO: 93287 - DNA, 30 bp, Artificial Sequence
  Synthetic oligonucleotide
agtacatgacgagtcagatcaaacttcaat

SEQ ID NO: 93288 - DNA, 30 bp, Artificial Sequence
  Synthetic oligonucleotide
tgatcaacaataatggtggtaacaaagaat

SEQ ID NO: 93289 - DNA, 30 bp, Artificial Sequence
  Synthetic oligonucleotide
cgggagtaattacgatatggagtcaagaat

SEQ ID NO: 93290 - DNA, 30 bp, Artificial Sequence
  Synthetic oligonucleotide
ccaatagacagtgcgtgacggacgaagaat

SEQ ID NO: 93291 - DNA, 30 bp, Artificial Sequence
  Synthetic oligonucleotide
aacaaaccacagcgcaccgggattaagaat

SEQ ID NO: 93292 - DNA, 30 bp, Artificial Sequence
  Synthetic oligonucleotide
gacaaggacccgaacattccgcttaagaat

SEQ ID NO: 93293 - DNA, 30 bp, Artificial Sequence
  Synthetic oligonucleotide
gcggaatctcccagacgatacgtacagaat

SEQ ID NO: 93294 - DNA, 30 bp, Artificial Sequence
  Synthetic oligonucleotide
gcacatgatgagatgtagtatcggcagaat

SEQ ID NO: 93295 - DNA, 30 bp, Artificial Sequence
  Synthetic oligonucleotide
aactaaaagttccacgattgtgcagagaat

SEQ ID NO: 93296 - DNA, 30 bp, Artificial Sequence
  Synthetic oligonucleotide
ttaagacggggaatcataactatagagaat

SEQ ID NO: 93297 - DNA, 30 bp, Artificial Sequence
  Synthetic oligonucleotide
ctgccaggcacaaaacatcgggtggagaat

SEQ ID NO: 93298 - DNA, 30 bp, Artificial Sequence
  Synthetic oligonucleotide
atgagatgagccaaactaccagttgagaat

SEQ ID NO: 93299 - DNA, 30 bp, Artificial Sequence
  Synthetic oligonucleotide
ggctccacttaaagttccatccactagaat

SEQ ID NO: 93300 - DNA, 30 bp, Artificial Sequence
  Synthetic oligonucleotide
gagattgagaagagcggtaatacctagaat

SEQ ID NO: 93301 - DNA, 30 bp, Artificial Sequence
  Synthetic oligonucleotide
ggcatatcctctaacacaaatcggtagaat

SEQ ID NO: 93302 - DNA, 30 bp, Artificial Sequence
  Synthetic oligonucleotide
caaaaggtgctggagtggtgcggaacgaat

SEQ ID NO: 93303 - DNA, 30 bp, Artificial Sequence
  Synthetic oligonucleotide
gccctgctgaaacattgacttcgcacgaat

SEQ ID NO: 93304 - DNA, 30 bp, Artificial Sequence
  Synthetic oligonucleotide
agcgaaagagttgtattagctaaatcgaat

SEQ ID NO: 93305 - DNA, 30 bp, Artificial Sequence
  Synthetic oligonucleotide
gatacaggacggacgagtttctgatcgaat

SEQ ID NO: 93306 - DNA, 30 bp, Artificial Sequence
  Synthetic oligonucleotide
acatgtttgtggcatactagactatcgaat

SEQ ID NO: 93307 - DNA, 30 bp, Artificial Sequence
  Synthetic oligonucleotide
ctacgtgctcaagaagctctgcactcgaat

SEQ ID NO: 93308 - DNA, 30 bp, Artificial Sequence
  Synthetic oligonucleotide
cgactctcctagcgtatacgtccctcgaat

SEQ ID NO: 93309 - DNA, 30 bp, Artificial Sequence
  Synthetic oligonucleotide
ccagccgatggagatccctagtattcgaat

SEQ ID NO: 93310 - DNA, 30 bp, Artificial Sequence
  Synthetic oligonucleotide
acgccatggtatggaagcacccacaggaat

SEQ ID NO: 93311 - DNA, 30 bp, Artificial Sequence
  Synthetic oligonucleotide
aggtttttggcagcgaggaagcgcaggaat

SEQ ID NO: 93312 - DNA, 30 bp, Artificial Sequence
  Synthetic oligonucleotide
agattcgagagccaggcatataagaggaat

SEQ ID NO: 93313 - DNA, 30 bp, Artificial Sequence
  Synthetic oligonucleotide
aggaggaactagaatgttaatattaggaat

SEQ ID NO: 93314 - DNA, 30 bp, Artificial Sequence
  Synthetic oligonucleotide
gtctcagatcaatggggtaaggtacggaat

SEQ ID NO: 93315 - DNA, 30 bp, Artificial Sequence
  Synthetic oligonucleotide
agtggtagtcagcagcccgattcatggaat

SEQ ID NO: 93316 - DNA, 30 bp, Artificial Sequence
  Synthetic oligonucleotide
gccgagggtaaagggagcctgtattggaat

SEQ ID NO: 93317 - DNA, 30 bp, Artificial Sequence
  Synthetic oligonucleotide
ggagtggtgcgtaataaaataggttggaat

SEQ ID NO: 93318 - DNA, 30 bp, Artificial Sequence
  Synthetic oligonucleotide
cccgagatataacttggtgtggggatgaat

SEQ ID NO: 93319 - DNA, 30 bp, Artificial Sequence
  Synthetic oligonucleotide
tgtgtagaaatcactgctgttgtcctgaat

SEQ ID NO: 93320 - DNA, 30 bp, Artificial Sequence
  Synthetic oligonucleotide
tgtagcaggacgacctatagttaagtgaat

SEQ ID NO: 93321 - DNA, 30 bp, Artificial Sequence
  Synthetic oligonucleotide
gcgaaataggtaaatgacaacaaggtgaat

SEQ ID NO: 93322 - DNA, 30 bp, Artificial Sequence
  Synthetic oligonucleotide
acgttagctaaccactatagacaggtgaat

SEQ ID NO: 93323 - DNA, 30 bp, Artificial Sequence
  Synthetic oligonucleotide
atcgggataaggtgaggcatggcggtgaat

SEQ ID NO: 93324 - DNA, 30 bp, Artificial Sequence
  Synthetic oligonucleotide
gcgaagatagttgagatgaatggggtgaat

SEQ ID NO: 93325 - DNA, 30 bp, Artificial Sequence
  Synthetic oligonucleotide
gaatcgtcccacgattcagaaaacttgaat

SEQ ID NO: 93326 - DNA, 30 bp, Artificial Sequence
  Synthetic oligonucleotide
gagataggcaataggagtttgcgcttgaat

SEQ ID NO: 93327 - DNA, 30 bp, Artificial Sequence
  Synthetic oligonucleotide
tgtatacaagaaatgcgatagagaaataat

SEQ ID NO: 93328 - DNA, 30 bp, Artificial Sequence
  Synthetic oligonucleotide
tagtaattaagtcacgaggctccgaataat

SEQ ID NO: 93329 - DNA, 30 bp, Artificial Sequence
  Synthetic oligonucleotide
ggaataatctggcctaaatgagtacataat

SEQ ID NO: 93330 - DNA, 30 bp, Artificial Sequence
  Synthetic oligonucleotide
agccaccgttaaggattttcgctcgataat

SEQ ID NO: 93331 - DNA, 30 bp, Artificial Sequence
  Synthetic oligonucleotide
cggctacatgtggggacaaaggtatataat

SEQ ID NO: 93332 - DNA, 30 bp, Artificial Sequence
  Synthetic oligonucleotide
accctcagctaaaacatcgaggttcctaat

SEQ ID NO: 93333 - DNA, 29 bp, Artificial Sequence
  Synthetic oligonucleotide
tcatggatagacagtcaagtgctgctaat

SEQ ID NO: 93334 - DNA, 30 bp, Artificial Sequence
  Synthetic oligonucleotide
aaggaactcgagcagagctagatttctaat

SEQ ID NO: 93335 - DNA, 30 bp, Artificial Sequence
  Synthetic oligonucleotide
tgaaccggcgaacaaggaacgcagagtaat

SEQ ID NO: 93336 - DNA, 30 bp, Artificial Sequence
  Synthetic oligonucleotide
ctgtaaatggcacctgggcccagacgtaat

SEQ ID NO: 93337 - DNA, 30 bp, Artificial Sequence
  Synthetic oligonucleotide
gtagccgtggcgtgtgacggcctacgtaat

SEQ ID NO: 93338 - DNA, 30 bp, Artificial Sequence
  Synthetic oligonucleotide
cgcgggacaacaggcgaaatgttgcgtaat

SEQ ID NO: 93339 - DNA, 30 bp, Artificial Sequence
  Synthetic oligonucleotide
cggtattaactgtgtgcgcggtcaggtaat

SEQ ID NO: 93340 - DNA, 30 bp, Artificial Sequence
  Synthetic oligonucleotide
agtacgcccaaaccgacgtctaagggtaat

SEQ ID NO: 93341 - DNA, 30 bp, Artificial Sequence
  Synthetic oligonucleotide
ccaaggagcagatttgcacgatgtggtaat

SEQ ID NO: 93342 - DNA, 30 bp, Artificial Sequence
  Synthetic oligonucleotide
aaagggcagggatcatattccacgtgtaat

SEQ ID NO: 93343 - DNA, 30 bp, Artificial Sequence
  Synthetic oligonucleotide
tcgtgacctacacaatgaagcaggtgtaat

SEQ ID NO: 93344 - DNA, 30 bp, Artificial Sequence
  Synthetic oligonucleotide
atcgtgaaccgaagacaaccgctaattaat

SEQ ID NO: 93345 - DNA, 30 bp, Artificial Sequence
  Synthetic oligonucleotide
gcgatgggggagttcattttctagattaat

SEQ ID NO: 93346 - DNA, 30 bp, Artificial Sequence
  Synthetic oligonucleotide
ccgttcgtgtgtaaatgaactgaggttaat

SEQ ID NO: 93347 - DNA, 30 bp, Artificial Sequence
  Synthetic oligonucleotide
cgcaacgaccaaatctcatgcaagaaacat

SEQ ID NO: 93348 - DNA, 30 bp, Artificial Sequence
  Synthetic oligonucleotide
cgtattatcacgtagtggggtaaacaacat

SEQ ID NO: 93349 - DNA, 30 bp, Artificial Sequence
  Synthetic oligonucleotide
aagacggtagttcacctcattcgccaacat

SEQ ID NO: 93350 - DNA, 30 bp, Artificial Sequence
  Synthetic oligonucleotide
cagaaccgtacagggctggtgtgtcaacat

SEQ ID NO: 93351 - DNA, 30 bp, Artificial Sequence
  Synthetic oligonucleotide
tacatcgaaaccatgggagcccgggaacat

SEQ ID NO: 93352 - DNA, 30 bp, Artificial Sequence
  Synthetic oligonucleotide
ggtagacaggaaccattatgctctgaacat

SEQ ID NO: 93353 - DNA, 30 bp, Artificial Sequence
  Synthetic oligonucleotide
atatacaggccgtccacactcgactaacat

SEQ ID NO: 93354 - DNA, 30 bp, Artificial Sequence
  Synthetic oligonucleotide
tacacaggattcacgctgatccagtaacat

SEQ ID NO: 93355 - DNA, 30 bp, Artificial Sequence
  Synthetic oligonucleotide
catcagatgggtaatattaggtcaacacat

SEQ ID NO: 93356 - DNA, 30 bp, Artificial Sequence
  Synthetic oligonucleotide
caaatgccgccactgggcaaaaccacacat

SEQ ID NO: 93357 - DNA, 30 bp, Artificial Sequence
  Synthetic oligonucleotide
acatcgactgggagatgtggatccacacat

SEQ ID NO: 93358 - DNA, 30 bp, Artificial Sequence
  Synthetic oligonucleotide
gaagaaggaaaggagtatcggcgcacacat

SEQ ID NO: 93359 - DNA, 30 bp, Artificial Sequence
  Synthetic oligonucleotide
cattggtaatatgtaatccaagctacacat

SEQ ID NO: 93360 - DNA, 30 bp, Artificial Sequence
  Synthetic oligonucleotide
tccgttaagattgcaaaaagtagtacacat

SEQ ID NO: 93361 - DNA, 30 bp, Artificial Sequence
  Synthetic oligonucleotide
ccacgttgctgttcaggccgttttacacat

SEQ ID NO: 93362 - DNA, 30 bp, Artificial Sequence
  Synthetic oligonucleotide
gcgaggtggcataacacgtcgaaagcacat

SEQ ID NO: 93363 - DNA, 30 bp, Artificial Sequence
  Synthetic oligonucleotide
ggcacgcgcgtcgcggaaaaaacagcacat

SEQ ID NO: 93364 - DNA, 30 bp, Artificial Sequence
  Synthetic oligonucleotide
aacggcgtaacaaccgggatatggtcacat

SEQ ID NO: 93365 - DNA, 30 bp, Artificial Sequence
  Synthetic oligonucleotide
cagctaccgagattcatatgcctgtcacat

SEQ ID NO: 93366 - DNA, 30 bp, Artificial Sequence
  Synthetic oligonucleotide
gtgagagcagaatttcgccctggaagacat

SEQ ID NO: 93367 - DNA, 30 bp, Artificial Sequence
  Synthetic oligonucleotide
ggacgaaagaatatgcgtaaaatgagacat

SEQ ID NO: 93368 - DNA, 30 bp, Artificial Sequence
  Synthetic oligonucleotide
aaatagagattgaaacaaaggcgtagacat

SEQ ID NO: 93369 - DNA, 30 bp, Artificial Sequence
  Synthetic oligonucleotide
gcgtactgacatacgggacgaaaacgacat

SEQ ID NO: 93370 - DNA, 30 bp, Artificial Sequence
  Synthetic oligonucleotide
ggcgaatttgtaggcaaaatcgtgcgacat

SEQ ID NO: 93371 - DNA, 30 bp, Artificial Sequence
  Synthetic oligonucleotide
actacagtactcatagggattaagggacat

SEQ ID NO: 93372 - DNA, 30 bp, Artificial Sequence
  Synthetic oligonucleotide
gggtaaagcggcccaaaagtttatggacat

SEQ ID NO: 93373 - DNA, 30 bp, Artificial Sequence
  Synthetic oligonucleotide
tgagcgaagggataccggggatcatgacat

SEQ ID NO: 93374 - DNA, 30 bp, Artificial Sequence
  Synthetic oligonucleotide
agcggtaagggatctcaggcacgatgacat

SEQ ID NO: 93375 - DNA, 30 bp, Artificial Sequence
  Synthetic oligonucleotide
cacgcggcgggaaaagcttcatactgacat

SEQ ID NO: 93376 - DNA, 30 bp, Artificial Sequence
  Synthetic oligonucleotide
ccgttggagtgcgtattcccgccgtgacat

SEQ ID NO: 93377 - DNA, 30 bp, Artificial Sequence
  Synthetic oligonucleotide
acacatatataggcgtgcgacggttgacat

SEQ ID NO: 93378 - DNA, 30 bp, Artificial Sequence
  Synthetic oligonucleotide
aatgccctcactacataaccaataatacat

SEQ ID NO: 93379 - DNA, 30 bp, Artificial Sequence
  Synthetic oligonucleotide
tggggcgacactttgaaatattccatacat

SEQ ID NO: 93380 - DNA, 30 bp, Artificial Sequence
  Synthetic oligonucleotide
cgtcatccgattagagggcttgctatacat

SEQ ID NO: 93381 - DNA, 30 bp, Artificial Sequence
  Synthetic oligonucleotide
cgcacgaaatgaataatcactactctacat

SEQ ID NO: 93382 - DNA, 30 bp, Artificial Sequence
  Synthetic oligonucleotide
aaggacaaatgcagggaaactcaggtacat

SEQ ID NO: 93383 - DNA, 30 bp, Artificial Sequence
  Synthetic oligonucleotide
tctggtccgccagaaggggttgaggtacat

SEQ ID NO: 93384 - DNA, 30 bp, Artificial Sequence
  Synthetic oligonucleotide
agggacaacccggcatggttctacaaccat

SEQ ID NO: 93385 - DNA, 30 bp, Artificial Sequence
  Synthetic oligonucleotide
gagcgattagagctaacggtaaataaccat

SEQ ID NO: 93386 - DNA, 30 bp, Artificial Sequence
  Synthetic oligonucleotide
gtgacaacatacattgagcacaaataccat

SEQ ID NO: 93387 - DNA, 30 bp, Artificial Sequence
  Synthetic oligonucleotide
cgtcgagaaaccaaagacgcgagtccccat

SEQ ID NO: 93388 - DNA, 30 bp, Artificial Sequence
  Synthetic oligonucleotide
ctggctaatgtcgccaaccaatactcccat

SEQ ID NO: 93389 - DNA, 30 bp, Artificial Sequence
  Synthetic oligonucleotide
aaggaagggtccgccacaatcgctagccat

SEQ ID NO: 93390 - DNA, 30 bp, Artificial Sequence
  Synthetic oligonucleotide
tcggtagaatgtagtgaacgcatacgccat

SEQ ID NO: 93391 - DNA, 30 bp, Artificial Sequence
  Synthetic oligonucleotide
cctgggaaatcccgacatacagtccgccat

SEQ ID NO: 93392 - DNA, 30 bp, Artificial Sequence
  Synthetic oligonucleotide
ggacaaccacgcgatgggtacgggcgccat

SEQ ID NO: 93393 - DNA, 30 bp, Artificial Sequence
  Synthetic oligonucleotide
tagctcaaccggtgaaagcgctccggccat

SEQ ID NO: 93394 - DNA, 30 bp, Artificial Sequence
  Synthetic oligonucleotide
cgaggcggcggactacactccgggggccat

SEQ ID NO: 93395 - DNA, 30 bp, Artificial Sequence
  Synthetic oligonucleotide
gcgtcaagattacttgaagccttgggccat

SEQ ID NO: 93396 - DNA, 30 bp, Artificial Sequence
  Synthetic oligonucleotide
ttatcgtaattagactcccacgactgccat

SEQ ID NO: 93397 - DNA, 30 bp, Artificial Sequence
  Synthetic oligonucleotide
ggtagactcatgcgggaaactaagctccat

SEQ ID NO: 93398 - DNA, 30 bp, Artificial Sequence
  Synthetic oligonucleotide
atgtcgagtgtctgcaagtgcgttgtccat

SEQ ID NO: 93399 - DNA, 31 bp, Artificial Sequence
  Synthetic oligonucleotide
ggaggaatagacactacccgagacattccat

SEQ ID NO: 93400 - DNA, 30 bp, Artificial Sequence
  Synthetic oligonucleotide
tagcgacacgaggagtacaaggctttccat

SEQ ID NO: 93401 - DNA, 30 bp, Artificial Sequence
  Synthetic oligonucleotide
atgtagcgtcgatgtggcgcaaccaagcat

SEQ ID NO: 93402 - DNA, 30 bp, Artificial Sequence
  Synthetic oligonucleotide
gccggaccgtaaagacagggtaagaagcat

SEQ ID NO: 93403 - DNA, 30 bp, Artificial Sequence
  Synthetic oligonucleotide
tcgatgccggggcggagggagaaacagcat

SEQ ID NO: 93404 - DNA, 30 bp, Artificial Sequence
  Synthetic oligonucleotide
tggagtcatcgcatgcgctagggtcagcat

SEQ ID NO: 93405 - DNA, 30 bp, Artificial Sequence
  Synthetic oligonucleotide
ggtatagagaaaaggtaaaagggagagcat

SEQ ID NO: 93406 - DNA, 30 bp, Artificial Sequence
  Synthetic oligonucleotide
gaaccatagcggtctaccgaagtcgagcat

SEQ ID NO: 93407 - DNA, 30 bp, Artificial Sequence
  Synthetic oligonucleotide
aaaaacactaagacgacatggaaggagcat

SEQ ID NO: 93408 - DNA, 30 bp, Artificial Sequence
  Synthetic oligonucleotide
ctgcggaatcggccaccggcttagtagcat

SEQ ID NO: 93409 - DNA, 30 bp, Artificial Sequence
  Synthetic oligonucleotide
cggacatccagggtattcgtcgaaacgcat

SEQ ID NO: 93410 - DNA, 30 bp, Artificial Sequence
  Synthetic oligonucleotide
aacggttgccaacagagatgtcgagcgcat

SEQ ID NO: 93411 - DNA, 30 bp, Artificial Sequence
  Synthetic oligonucleotide
gagagtgtaatgttcgggcctatcgcgcat

SEQ ID NO: 93412 - DNA, 30 bp, Artificial Sequence
  Synthetic oligonucleotide
agcgtaatgtaaccacagatcatggcgcat

SEQ ID NO: 93413 - DNA, 30 bp, Artificial Sequence
  Synthetic oligonucleotide
aacggggtaccccttaagggcggtgcgcat

SEQ ID NO: 93414 - DNA, 30 bp, Artificial Sequence
  Synthetic oligonucleotide
aagacctccataggagtcaaagtgaggcat

SEQ ID NO: 93415 - DNA, 30 bp, Artificial Sequence
  Synthetic oligonucleotide
aggcattggtggtgaatcggcccacggcat

SEQ ID NO: 93416 - DNA, 30 bp, Artificial Sequence
  Synthetic oligonucleotide
cctagagatgaacattggggaagacggcat

SEQ ID NO: 93417 - DNA, 30 bp, Artificial Sequence
  Synthetic oligonucleotide
ggaaggtgctcagacgtcgagtagcggcat

SEQ ID NO: 93418 - DNA, 30 bp, Artificial Sequence
  Synthetic oligonucleotide
ccgtctctggaggacttatacacctggcat

SEQ ID NO: 93419 - DNA, 30 bp, Artificial Sequence
  Synthetic oligonucleotide
agtctgcagagatgatgcgatggttggcat

SEQ ID NO: 93420 - DNA, 30 bp, Artificial Sequence
  Synthetic oligonucleotide
atgaccgttgagaccaaactttacatgcat

SEQ ID NO: 93421 - DNA, 30 bp, Artificial Sequence
  Synthetic oligonucleotide
tcgatacgatgcgccatacaaagcatgcat

SEQ ID NO: 93422 - DNA, 30 bp, Artificial Sequence
  Synthetic oligonucleotide
cgacaccaagtacctgagccggagatgcat

SEQ ID NO: 93423 - DNA, 30 bp, Artificial Sequence
  Synthetic oligonucleotide
gcgaaggcaacctacgcttaatttatgcat

SEQ ID NO: 93424 - DNA, 30 bp, Artificial Sequence
  Synthetic oligonucleotide
taggacatgatgggcaaggggaagctgcat

SEQ ID NO: 93425 - DNA, 30 bp, Artificial Sequence
  Synthetic oligonucleotide
cagcaacgggaggggcccttaaacaatcat

SEQ ID NO: 93426 - DNA, 30 bp, Artificial Sequence
  Synthetic oligonucleotide
agtagcggcaaaatccgacactcccatcat

SEQ ID NO: 93427 - DNA, 30 bp, Artificial Sequence
  Synthetic oligonucleotide
gaaagctatgtgggcaaaaggaagtatcat

SEQ ID NO: 93428 - DNA, 30 bp, Artificial Sequence
  Synthetic oligonucleotide
gggccctcccacctagatgctataactcat

SEQ ID NO: 93429 - DNA, 30 bp, Artificial Sequence
  Synthetic oligonucleotide
aatatccgtgcaggagtgacagccactcat

SEQ ID NO: 93430 - DNA, 30 bp, Artificial Sequence
  Synthetic oligonucleotide
caccgggttgatagtgtcaaactcactcat

SEQ ID NO: 93431 - DNA, 30 bp, Artificial Sequence
  Synthetic oligonucleotide
aacgaagggtaatctcaaaaagtgactcat

SEQ ID NO: 93432 - DNA, 30 bp, Artificial Sequence
  Synthetic oligonucleotide
tctattcgcgaactcgtgagaactcctcat

SEQ ID NO: 93433 - DNA, 30 bp, Artificial Sequence
  Synthetic oligonucleotide
ctaggcgcaaacccagtgaacaacgctcat

SEQ ID NO: 93434 - DNA, 30 bp, Artificial Sequence
  Synthetic oligonucleotide
ctcatctaaaccagaggcatgcgcgctcat

SEQ ID NO: 93435 - DNA, 30 bp, Artificial Sequence
  Synthetic oligonucleotide
agaagcgaagcgacaaaagttgtatctcat

SEQ ID NO: 93436 - DNA, 30 bp, Artificial Sequence
  Synthetic oligonucleotide
acgaaacgattgcgctgtgcggagagtcat

SEQ ID NO: 93437 - DNA, 30 bp, Artificial Sequence
  Synthetic oligonucleotide
aggaagcacctccttaccgttcaccgtcat

SEQ ID NO: 93438 - DNA, 30 bp, Artificial Sequence
  Synthetic oligonucleotide
agcaagataaatgcgcacaatggaggtcat

SEQ ID NO: 93439 - DNA, 30 bp, Artificial Sequence
  Synthetic oligonucleotide
taaggcactcggtcccgtgaatagattcat

SEQ ID NO: 93440 - DNA, 30 bp, Artificial Sequence
  Synthetic oligonucleotide
cagagtgttaggtaatgcttaccgattcat

SEQ ID NO: 93441 - DNA, 30 bp, Artificial Sequence
  Synthetic oligonucleotide
cggccattcagacaagccctattagttcat

SEQ ID NO: 93442 - DNA, 30 bp, Artificial Sequence
  Synthetic oligonucleotide
ccaccaaatgaggactgcgaaaccaaagat

SEQ ID NO: 93443 - DNA, 30 bp, Artificial Sequence
  Synthetic oligonucleotide
gttacagtcttcgccaccgattaccaagat

SEQ ID NO: 93444 - DNA, 30 bp, Artificial Sequence
  Synthetic oligonucleotide
gctacttatcaaaacgtgcactagcaagat

SEQ ID NO: 93445 - DNA, 30 bp, Artificial Sequence
  Synthetic oligonucleotide
gaagatgctaagagcgagtgcaatcaagat

SEQ ID NO: 93446 - DNA, 30 bp, Artificial Sequence
  Synthetic oligonucleotide
agagtgaagagctttgtgggacccgaagat

SEQ ID NO: 93447 - DNA, 30 bp, Artificial Sequence
  Synthetic oligonucleotide
cgtaacgtgttaactcggtgggccgaagat

SEQ ID NO: 93448 - DNA, 30 bp, Artificial Sequence
  Synthetic oligonucleotide
agggacggactatagggcctgtccgaagat

SEQ ID NO: 93449 - DNA, 30 bp, Artificial Sequence
  Synthetic oligonucleotide
aacatgaggccacggacctgtggcgaagat

SEQ ID NO: 93450 - DNA, 30 bp, Artificial Sequence
  Synthetic oligonucleotide
tcgggacccggggtagtagctacataagat

SEQ ID NO: 93451 - DNA, 30 bp, Artificial Sequence
  Synthetic oligonucleotide
tcagcggccgacagagatcagtcataagat

SEQ ID NO: 93452 - DNA, 30 bp, Artificial Sequence
  Synthetic oligonucleotide
ggtaggagccgataggatcaaggataagat

SEQ ID NO: 93453 - DNA, 30 bp, Artificial Sequence
  Synthetic oligonucleotide
gcctggtaccgaggcgtagaatcaacagat

SEQ ID NO: 93454 - DNA, 30 bp, Artificial Sequence
  Synthetic oligonucleotide
cgtctccgtctgaagcatttactcacagat

SEQ ID NO: 93455 - DNA, 30 bp, Artificial Sequence
  Synthetic oligonucleotide
cggttgccaggttcaccctcaactacagat

SEQ ID NO: 93456 - DNA, 30 bp, Artificial Sequence
  Synthetic oligonucleotide
tttgcgccgaatgcataaagcacaccagat

SEQ ID NO: 93457 - DNA, 30 bp, Artificial Sequence
  Synthetic oligonucleotide
cgcccggccattatgtgaacagggccagat

SEQ ID NO: 93458 - DNA, 30 bp, Artificial Sequence
  Synthetic oligonucleotide
cggctataataatatcagggaatagcagat

SEQ ID NO: 93459 - DNA, 30 bp, Artificial Sequence
  Synthetic oligonucleotide
aatcggtgactgaatcgtctacgggcagat

SEQ ID NO: 93460 - DNA, 30 bp, Artificial Sequence
  Synthetic oligonucleotide
ataacagatttgggcgataggtgatcagat

SEQ ID NO: 93461 - DNA, 30 bp, Artificial Sequence
  Synthetic oligonucleotide
gtataatcaaatagcgaagatgattcagat

SEQ ID NO: 93462 - DNA, 30 bp, Artificial Sequence
  Synthetic oligonucleotide
ggccgagcacccatggcgtggtccagagat

SEQ ID NO: 93463 - DNA, 30 bp, Artificial Sequence
  Synthetic oligonucleotide
tctgtgaggaggttcgagggtttgagagat

SEQ ID NO: 93464 - DNA, 30 bp, Artificial Sequence
  Synthetic oligonucleotide
cgcgtacatccaggtatgcaataacgagat

SEQ ID NO: 93465 - DNA, 30 bp, Artificial Sequence
  Synthetic oligonucleotide
attggtgtacgaacaatagggattggagat

SEQ ID NO: 93466 - DNA, 30 bp, Artificial Sequence
  Synthetic oligonucleotide
gagcgtggattttcacgcatgaagtgagat

SEQ ID NO: 93467 - DNA, 30 bp, Artificial Sequence
  Synthetic oligonucleotide
aatgcatagcttcggcggtacgtgtgagat

SEQ ID NO: 93468 - DNA, 30 bp, Artificial Sequence
  Synthetic oligonucleotide
aaggtttctcgaacagagtggcattgagat

SEQ ID NO: 93469 - DNA, 30 bp, Artificial Sequence
  Synthetic oligonucleotide
gatcgtggcaactgggcaccaaaaatagat

SEQ ID NO: 93470 - DNA, 30 bp, Artificial Sequence
  Synthetic oligonucleotide
tgacgcgagtgcttaatggatgctatagat

SEQ ID NO: 93471 - DNA, 30 bp, Artificial Sequence
  Synthetic oligonucleotide
ctacgacgtatgttcgagatgagactagat

SEQ ID NO: 93472 - DNA, 30 bp, Artificial Sequence
  Synthetic oligonucleotide
ggaagcacaaggatgccgcgatccctagat

SEQ ID NO: 93473 - DNA, 30 bp, Artificial Sequence
  Synthetic oligonucleotide
gatcatcggagttgattaaaagcgctagat

SEQ ID NO: 93474 - DNA, 30 bp, Artificial Sequence
  Synthetic oligonucleotide
agagccgtccaggtgcaagagccagtagat

SEQ ID NO: 93475 - DNA, 30 bp, Artificial Sequence
  Synthetic oligonucleotide
aacaaaggtatccgcatggtaaacttagat

SEQ ID NO: 93476 - DNA, 30 bp, Artificial Sequence
  Synthetic oligonucleotide
ctcccatggaaatcgggaaaggcgttagat

SEQ ID NO: 93477 - DNA, 30 bp, Artificial Sequence
  Synthetic oligonucleotide
ggcccttaatgacagtccaaagcgaacgat

SEQ ID NO: 93478 - DNA, 30 bp, Artificial Sequence
  Synthetic oligonucleotide
cgagcaggcgagatggtgggccctcacgat

SEQ ID NO: 93479 - DNA, 30 bp, Artificial Sequence
  Synthetic oligonucleotide
acattttctggggaagcgtgacgtgacgat

SEQ ID NO: 93480 - DNA, 30 bp, Artificial Sequence
  Synthetic oligonucleotide
ccagggggaaaactagtaggagcctacgat

SEQ ID NO: 93481 - DNA, 30 bp, Artificial Sequence
  Synthetic oligonucleotide
ttacgctgggtcactttgttcgagtacgat

SEQ ID NO: 93482 - DNA, 30 bp, Artificial Sequence
  Synthetic oligonucleotide
aactgccatccaaagcggtagaggtacgat

SEQ ID NO: 93483 - DNA, 30 bp, Artificial Sequence
  Synthetic oligonucleotide
gcgaatagaagagaagatcacgtaaccgat

SEQ ID NO: 93484 - DNA, 30 bp, Artificial Sequence
  Synthetic oligonucleotide
gaggtttgaattctgaaagaagcgcccgat

SEQ ID NO: 93485 - DNA, 30 bp, Artificial Sequence
  Synthetic oligonucleotide
ctgggtagccgtactagctctaggcccgat

SEQ ID NO: 93486 - DNA, 30 bp, Artificial Sequence
  Synthetic oligonucleotide
gtctagttcacgtctcatagcggcgccgat

SEQ ID NO: 93487 - DNA, 30 bp, Artificial Sequence
  Synthetic oligonucleotide
cgctcatcagatacgcatgaggaggccgat

SEQ ID NO: 93488 - DNA, 30 bp, Artificial Sequence
  Synthetic oligonucleotide
tgacggaacgggctgtcaactgtggccgat

SEQ ID NO: 93489 - DNA, 30 bp, Artificial Sequence
  Synthetic oligonucleotide
gtggacatggaacgtattgaccaatccgat

SEQ ID NO: 93490 - DNA, 30 bp, Artificial Sequence
  Synthetic oligonucleotide
aggtgcgcctgattttattacaactccgat

SEQ ID NO: 93491 - DNA, 30 bp, Artificial Sequence
  Synthetic oligonucleotide
ggtacattggtagtctaatattgttccgat

SEQ ID NO: 93492 - DNA, 30 bp, Artificial Sequence
  Synthetic oligonucleotide
gtcgggtcatgttacaagaccaacagcgat

SEQ ID NO: 93493 - DNA, 30 bp, Artificial Sequence
  Synthetic oligonucleotide
accctacaaacgtcagcactggacagcgat

SEQ ID NO: 93494 - DNA, 30 bp, Artificial Sequence
  Synthetic oligonucleotide
ttaggcggagcaggctttgaagccagcgat

SEQ ID NO: 93495 - DNA, 30 bp, Artificial Sequence
  Synthetic oligonucleotide
ggctcataaaaggctggacaagcgagcgat

SEQ ID NO: 93496 - DNA, 30 bp, Artificial Sequence
  Synthetic oligonucleotide
aggcacaaagaggagataccagcccgcgat

SEQ ID NO: 93497 - DNA, 30 bp, Artificial Sequence
  Synthetic oligonucleotide
agtggaatgacgcttgtctgtcactgcgat

SEQ ID NO: 93498 - DNA, 30 bp, Artificial Sequence
  Synthetic oligonucleotide
tctcgccaacggagactacttctttgcgat

SEQ ID NO: 93499 - DNA, 30 bp, Artificial Sequence
  Synthetic oligonucleotide
tcgtaaagactaaaagggggtgtaatcgat

SEQ ID NO: 93500 - DNA, 30 bp, Artificial Sequence
  Synthetic oligonucleotide
aataggctagattcataaaccagcatcgat

SEQ ID NO: 93501 - DNA, 30 bp, Artificial Sequence
  Synthetic oligonucleotide
tacctagactaacggggacgggaattcgat

SEQ ID NO: 93502 - DNA, 30 bp, Artificial Sequence
  Synthetic oligonucleotide
gactggtgaaggcattagggaaccaaggat

SEQ ID NO: 93503 - DNA, 30 bp, Artificial Sequence
  Synthetic oligonucleotide
gggttagtatcaggtaagaacgctaaggat

SEQ ID NO: 93504 - DNA, 30 bp, Artificial Sequence
  Synthetic oligonucleotide
tgcgcacctcgtacaccaaagcaccaggat

SEQ ID NO: 93505 - DNA, 30 bp, Artificial Sequence
  Synthetic oligonucleotide
acagccaacctattgtcagtgagagaggat

SEQ ID NO: 93506 - DNA, 30 bp, Artificial Sequence
  Synthetic oligonucleotide
gccagtttcgccattacgagtcacgaggat

SEQ ID NO: 93507 - DNA, 30 bp, Artificial Sequence
  Synthetic oligonucleotide
ggtgcaaattcccattaatagacggaggat

SEQ ID NO: 93508 - DNA, 30 bp, Artificial Sequence
  Synthetic oligonucleotide
aaccacgtaggtgacaaagaatgataggat

SEQ ID NO: 93509 - DNA, 30 bp, Artificial Sequence
  Synthetic oligonucleotide
cgtgtcgaccgaaaagctgtatagtaggat

SEQ ID NO: 93510 - DNA, 28 bp, Artificial Sequence
  Synthetic oligonucleotide
taggacaaggtgatttaattcttaggat

SEQ ID NO: 93511 - DNA, 30 bp, Artificial Sequence
  Synthetic oligonucleotide
gatgtgaatccacttaggaaaagaacggat

SEQ ID NO: 93512 - DNA, 30 bp, Artificial Sequence
  Synthetic oligonucleotide
tcaacggcgtatgtagaaaacgtaacggat

SEQ ID NO: 93513 - DNA, 30 bp, Artificial Sequence
  Synthetic oligonucleotide
gccggtgtggcaggcacaactagaccggat

SEQ ID NO: 93514 - DNA, 30 bp, Artificial Sequence
  Synthetic oligonucleotide
cacgactagaatgctcgtagagcgccggat

SEQ ID NO: 93515 - DNA, 30 bp, Artificial Sequence
  Synthetic oligonucleotide
cgtggctcccaggcacggtaactagcggat

SEQ ID NO: 93516 - DNA, 30 bp, Artificial Sequence
  Synthetic oligonucleotide
ctgatgtaatcgtaacaagacggcgcggat

SEQ ID NO: 93517 - DNA, 30 bp, Artificial Sequence
  Synthetic oligonucleotide
tcgtttggcgagttagcaagagtggcggat

SEQ ID NO: 93518 - DNA, 30 bp, Artificial Sequence
  Synthetic oligonucleotide
ttcgtgcgcaaacgggtgagcagtgcggat

SEQ ID NO: 93519 - DNA, 30 bp, Artificial Sequence
  Synthetic oligonucleotide
aggatgccaattgattagtagtgctcggat

SEQ ID NO: 93520 - DNA, 30 bp, Artificial Sequence
  Synthetic oligonucleotide
gtggtcagagagtataggaggtttagggat

SEQ ID NO: 93521 - DNA, 30 bp, Artificial Sequence
  Synthetic oligonucleotide
tctacaggatgggattgagggtgcggggat

SEQ ID NO: 93522 - DNA, 30 bp, Artificial Sequence
  Synthetic oligonucleotide
cggtaacgcggcggtggtgaatagtgggat

SEQ ID NO: 93523 - DNA, 30 bp, Artificial Sequence
  Synthetic oligonucleotide
gggcatgccgcgtctgtttaggtaatggat

SEQ ID NO: 93524 - DNA, 30 bp, Artificial Sequence
  Synthetic oligonucleotide
tcgaccctgtacgggacgtaggggatggat

SEQ ID NO: 93525 - DNA, 30 bp, Artificial Sequence
  Synthetic oligonucleotide
cccaccatgaccagtgggggaagcctggat

SEQ ID NO: 93526 - DNA, 30 bp, Artificial Sequence
  Synthetic oligonucleotide
tgaggcttactggatctcacccaagtggat

SEQ ID NO: 93527 - DNA, 31 bp, Artificial Sequence
  Synthetic oligonucleotide
cagagatcgtggtagactggggaagttggat

SEQ ID NO: 93528 - DNA, 30 bp, Artificial Sequence
  Synthetic oligonucleotide
acactgtaaaaaaaggttcgtcaaaatgat

SEQ ID NO: 93529 - DNA, 30 bp, Artificial Sequence
  Synthetic oligonucleotide
acatgggggcacagaggatcacgcaatgat

SEQ ID NO: 93530 - DNA, 30 bp, Artificial Sequence
  Synthetic oligonucleotide
ttggctggaagggacatagaatttcatgat

SEQ ID NO: 93531 - DNA, 30 bp, Artificial Sequence
  Synthetic oligonucleotide
ccaaatgggtagcagtcaaatgtagatgat

SEQ ID NO: 93532 - DNA, 30 bp, Artificial Sequence
  Synthetic oligonucleotide
gagccacaatatgccgtcatacactatgat

SEQ ID NO: 93533 - DNA, 30 bp, Artificial Sequence
  Synthetic oligonucleotide
gcgacaatgactaccgaagagttctatgat

SEQ ID NO: 93534 - DNA, 30 bp, Artificial Sequence
  Synthetic oligonucleotide
ccatcccgacactcgcccacagcttatgat

SEQ ID NO: 93535 - DNA, 30 bp, Artificial Sequence
  Synthetic oligonucleotide
accgatattctaagcactggccagactgat

SEQ ID NO: 93536 - DNA, 30 bp, Artificial Sequence
  Synthetic oligonucleotide
tcataagctgcaggatttaaagagactgat

SEQ ID NO: 93537 - DNA, 30 bp, Artificial Sequence
  Synthetic oligonucleotide
tgattagcggaaccggagcgttagactgat

SEQ ID NO: 93538 - DNA, 30 bp, Artificial Sequence
  Synthetic oligonucleotide
agtggcggcgaaagcgaacgaacccctgat

SEQ ID NO: 93539 - DNA, 31 bp, Artificial Sequence
  Synthetic oligonucleotide
aaggtagctttgacaaacgaacgtggctgat

SEQ ID NO: 93540 - DNA, 30 bp, Artificial Sequence
  Synthetic oligonucleotide
ggaggacttagctgcatcctgactgctgat

SEQ ID NO: 93541 - DNA, 30 bp, Artificial Sequence
  Synthetic oligonucleotide
gcccagggcgacacgtttaatcgatctgat

SEQ ID NO: 93542 - DNA, 30 bp, Artificial Sequence
  Synthetic oligonucleotide
ggtcgcgtgacttctaagtatgttagtgat

SEQ ID NO: 93543 - DNA, 30 bp, Artificial Sequence
  Synthetic oligonucleotide
acgataacaaccgtatcggacccaggtgat

SEQ ID NO: 93544 - DNA, 30 bp, Artificial Sequence
  Synthetic oligonucleotide
agagaccagagcaaaataaagcgaggtgat

SEQ ID NO: 93545 - DNA, 30 bp, Artificial Sequence
  Synthetic oligonucleotide
accggtggacactactctaactgcggtgat

SEQ ID NO: 93546 - DNA, 30 bp, Artificial Sequence
  Synthetic oligonucleotide
gacatagcaacagggcacggcctcggtgat

SEQ ID NO: 93547 - DNA, 30 bp, Artificial Sequence
  Synthetic oligonucleotide
tagcatggataggggctccagatgggtgat

SEQ ID NO: 93548 - DNA, 30 bp, Artificial Sequence
  Synthetic oligonucleotide
gtaccatagggtacgccatggacttgtgat

SEQ ID NO: 93549 - DNA, 30 bp, Artificial Sequence
  Synthetic oligonucleotide
ggatccatgggttattgaataaaacttgat

SEQ ID NO: 93550 - DNA, 30 bp, Artificial Sequence
  Synthetic oligonucleotide
actgacatagaccacaggtcggcggttgat

SEQ ID NO: 93551 - DNA, 30 bp, Artificial Sequence
  Synthetic oligonucleotide
aggaatggactaacacaatatcgcaaatat

SEQ ID NO: 93552 - DNA, 30 bp, Artificial Sequence
  Synthetic oligonucleotide
gtaggtataccaggttttaccacgaaatat

SEQ ID NO: 93553 - DNA, 30 bp, Artificial Sequence
  Synthetic oligonucleotide
agagcgtctaatctactgctgccgaaatat

SEQ ID NO: 93554 - DNA, 30 bp, Artificial Sequence
  Synthetic oligonucleotide
gggtcctacgtataaatcggaaggaaatat

SEQ ID NO: 93555 - DNA, 30 bp, Artificial Sequence
  Synthetic oligonucleotide
atgagcaaagggcataacatcgatcaatat

SEQ ID NO: 93556 - DNA, 30 bp, Artificial Sequence
  Synthetic oligonucleotide
gcccgcttaatcatccaggtgcgcgaatat

SEQ ID NO: 93557 - DNA, 30 bp, Artificial Sequence
  Synthetic oligonucleotide
acgggcaggacaccgcgtaaattataatat

SEQ ID NO: 93558 - DNA, 30 bp, Artificial Sequence
  Synthetic oligonucleotide
ttgtgtatacaaatggatcatagaacatat

SEQ ID NO: 93559 - DNA, 30 bp, Artificial Sequence
  Synthetic oligonucleotide
cggtcgtgctcaatgtatagtgacacatat

SEQ ID NO: 93560 - DNA, 30 bp, Artificial Sequence
  Synthetic oligonucleotide
ccaatacgactaattaatccttggacatat

SEQ ID NO: 93561 - DNA, 30 bp, Artificial Sequence
  Synthetic oligonucleotide
tcttacctcttaaaataaaggcatacatat

SEQ ID NO: 93562 - DNA, 30 bp, Artificial Sequence
  Synthetic oligonucleotide
aggctgaagtccggacctcggcttacatat

SEQ ID NO: 93563 - DNA, 30 bp, Artificial Sequence
  Synthetic oligonucleotide
ggtgggccgggagtatatgtgagaccatat

SEQ ID NO: 93564 - DNA, 30 bp, Artificial Sequence
  Synthetic oligonucleotide
ataccagtaagtcatagtgtatcgccatat

SEQ ID NO: 93565 - DNA, 30 bp, Artificial Sequence
  Synthetic oligonucleotide
ttggatggcgggcgtgcctcgtgagcatat

SEQ ID NO: 93566 - DNA, 30 bp, Artificial Sequence
  Synthetic oligonucleotide
ctcggtgctgagattgaataggaggcatat

SEQ ID NO: 93567 - DNA, 30 bp, Artificial Sequence
  Synthetic oligonucleotide
cgagcgtacagactaccaatattcagatat

SEQ ID NO: 93568 - DNA, 30 bp, Artificial Sequence
  Synthetic oligonucleotide
ggagcagctccatgaaactgcgggagatat

SEQ ID NO: 93569 - DNA, 30 bp, Artificial Sequence
  Synthetic oligonucleotide
attcaaagcacctgtaatgtcacccgatat

SEQ ID NO: 93570 - DNA, 29 bp, Artificial Sequence
  Synthetic oligonucleotide
ggaaggtcattagagttgaagtgcgatat

SEQ ID NO: 93571 - DNA, 30 bp, Artificial Sequence
  Synthetic oligonucleotide
taacaggatggtgacatccacgtgcgatat

SEQ ID NO: 93572 - DNA, 30 bp, Artificial Sequence
  Synthetic oligonucleotide
ggctagaagcggtcacttataagcggatat

SEQ ID NO: 93573 - DNA, 30 bp, Artificial Sequence
  Synthetic oligonucleotide
ccacattgggcagccttgtcaaggggatat

SEQ ID NO: 93574 - DNA, 30 bp, Artificial Sequence
  Synthetic oligonucleotide
aaccacactggattgctcattggtggatat

SEQ ID NO: 93575 - DNA, 30 bp, Artificial Sequence
  Synthetic oligonucleotide
accctgaaatgggctacctctcgatgatat

SEQ ID NO: 93576 - DNA, 30 bp, Artificial Sequence
  Synthetic oligonucleotide
tgatgtccaacctgggtagagacctgatat

SEQ ID NO: 93577 - DNA, 30 bp, Artificial Sequence
  Synthetic oligonucleotide
tctgagaggagagtacgaactaagctatat

SEQ ID NO: 93578 - DNA, 30 bp, Artificial Sequence
  Synthetic oligonucleotide
gggcacgaggtatcctcgccctatctatat

SEQ ID NO: 93579 - DNA, 30 bp, Artificial Sequence
  Synthetic oligonucleotide
tacgaatgctgcgacgggggtgtggtatat

SEQ ID NO: 93580 - DNA, 30 bp, Artificial Sequence
  Synthetic oligonucleotide
agggataccatgccttcgtccatattatat

SEQ ID NO: 93581 - DNA, 30 bp, Artificial Sequence
  Synthetic oligonucleotide
ggaccgggagactgggatctatcaaactat

SEQ ID NO: 93582 - DNA, 30 bp, Artificial Sequence
  Synthetic oligonucleotide
acattgacgaggggaagggttcgcaactat

SEQ ID NO: 93583 - DNA, 30 bp, Artificial Sequence
  Synthetic oligonucleotide
ttgagtaataccagtgcgctacgacactat

SEQ ID NO: 93584 - DNA, 30 bp, Artificial Sequence
  Synthetic oligonucleotide
gtctggcgctggaaagataaagtacactat

SEQ ID NO: 93585 - DNA, 30 bp, Artificial Sequence
  Synthetic oligonucleotide
gggtaagcagagaagtatgagtaggactat

SEQ ID NO: 93586 - DNA, 30 bp, Artificial Sequence
  Synthetic oligonucleotide
cggtctcaaggcagtcagcaaagaacctat

SEQ ID NO: 93587 - DNA, 30 bp, Artificial Sequence
  Synthetic oligonucleotide
cgcgtccaaaagtgaccttgtaaatcctat

SEQ ID NO: 93588 - DNA, 30 bp, Artificial Sequence
  Synthetic oligonucleotide
ttgttgtgttctctttttgtgtgttcctat

SEQ ID NO: 93589 - DNA, 30 bp, Artificial Sequence
  Synthetic oligonucleotide
ttgttgtgttatctttttgtgttttcctat

SEQ ID NO: 93590 - DNA, 30 bp, Artificial Sequence
  Synthetic oligonucleotide
gaacgcctaataagaactaactacagctat

SEQ ID NO: 93591 - DNA, 30 bp, Artificial Sequence
  Synthetic oligonucleotide
aaaaaggcactgtacaccataaccagctat

SEQ ID NO: 93592 - DNA, 30 bp, Artificial Sequence
  Synthetic oligonucleotide
tggatataaagaaacaatatacatagctat

SEQ ID NO: 93593 - DNA, 30 bp, Artificial Sequence
  Synthetic oligonucleotide
acttaagggagccctcgaaactgtcgctat

SEQ ID NO: 93594 - DNA, 30 bp, Artificial Sequence
  Synthetic oligonucleotide
cgagatatttcattgcgggacaatggctat

SEQ ID NO: 93595 - DNA, 30 bp, Artificial Sequence
  Synthetic oligonucleotide
atgtacatgtctaagtgaactccatgctat

SEQ ID NO: 93596 - DNA, 30 bp, Artificial Sequence
  Synthetic oligonucleotide
attgggggggtggcacctcggtcgtgctat

SEQ ID NO: 93597 - DNA, 30 bp, Artificial Sequence
  Synthetic oligonucleotide
tgctgagctgattagacacttcatctctat

SEQ ID NO: 93598 - DNA, 30 bp, Artificial Sequence
  Synthetic oligonucleotide
tactcccagaaccagtcggatccggtctat

SEQ ID NO: 93599 - DNA, 30 bp, Artificial Sequence
  Synthetic oligonucleotide
ggcttgctaagcataaagaagagtgtctat

SEQ ID NO: 93600 - DNA, 30 bp, Artificial Sequence
  Synthetic oligonucleotide
gcgcacgagatacgcttataaagacagtat

SEQ ID NO: 93601 - DNA, 30 bp, Artificial Sequence
  Synthetic oligonucleotide
gacaattggtcctccgtcgtgcctcagtat

SEQ ID NO: 93602 - DNA, 30 bp, Artificial Sequence
  Synthetic oligonucleotide
cagtcggcccaagtagttagagcggagtat

SEQ ID NO: 93603 - DNA, 30 bp, Artificial Sequence
  Synthetic oligonucleotide
gagaccgttaccaagacggcgaaagcgtat

SEQ ID NO: 93604 - DNA, 30 bp, Artificial Sequence
  Synthetic oligonucleotide
cggcgaacgggctcatcatctatagcgtat

SEQ ID NO: 93605 - DNA, 30 bp, Artificial Sequence
  Synthetic oligonucleotide
ggatattaaattacaacagggtcggcgtat

SEQ ID NO: 93606 - DNA, 30 bp, Artificial Sequence
  Synthetic oligonucleotide
actggcacacttattcgcgaggaatcgtat

SEQ ID NO: 93607 - DNA, 30 bp, Artificial Sequence
  Synthetic oligonucleotide
tcgaatctcctcacatgcaaagattcgtat

SEQ ID NO: 93608 - DNA, 30 bp, Artificial Sequence
  Synthetic oligonucleotide
ggcgtgggggtgaatggaaacgtttcgtat

SEQ ID NO: 93609 - DNA, 30 bp, Artificial Sequence
  Synthetic oligonucleotide
aaaggggcaaggaacaaatcctgacggtat

SEQ ID NO: 93610 - DNA, 30 bp, Artificial Sequence
  Synthetic oligonucleotide
taagactgatgcggcacaggctgacggtat

SEQ ID NO: 93611 - DNA, 30 bp, Artificial Sequence
  Synthetic oligonucleotide
aggataggaaaatgttcgctggctcggtat

SEQ ID NO: 93612 - DNA, 30 bp, Artificial Sequence
  Synthetic oligonucleotide
tccagggaacaggcgctctaaagatggtat

SEQ ID NO: 93613 - DNA, 30 bp, Artificial Sequence
  Synthetic oligonucleotide
gggtagtagggagtagacttgtgatggtat

SEQ ID NO: 93614 - DNA, 30 bp, Artificial Sequence
  Synthetic oligonucleotide
taccgagcagggtatggtagcaagtggtat

SEQ ID NO: 93615 - DNA, 30 bp, Artificial Sequence
  Synthetic oligonucleotide
gaagaaaagttgaaatagcataagtggtat

SEQ ID NO: 93616 - DNA, 30 bp, Artificial Sequence
  Synthetic oligonucleotide
atcctgccctaaaaagtgaaatgcatgtat

SEQ ID NO: 93617 - DNA, 30 bp, Artificial Sequence
  Synthetic oligonucleotide
tcctaagccgaattgcggtccaacctgtat

SEQ ID NO: 93618 - DNA, 30 bp, Artificial Sequence
  Synthetic oligonucleotide
agcatgggctctcaacttatgagggtgtat

SEQ ID NO: 93619 - DNA, 30 bp, Artificial Sequence
  Synthetic oligonucleotide
cagcaatgttgaggtcgccgaggtgtgtat

SEQ ID NO: 93620 - DNA, 30 bp, Artificial Sequence
  Synthetic oligonucleotide
taagagcgaatcaactagacgccattgtat

SEQ ID NO: 93621 - DNA, 30 bp, Artificial Sequence
  Synthetic oligonucleotide
gcgtatcagaaagcaaacgagatattgtat

SEQ ID NO: 93622 - DNA, 30 bp, Artificial Sequence
  Synthetic oligonucleotide
tgcggggcgttcctgctgagactattgtat

SEQ ID NO: 93623 - DNA, 30 bp, Artificial Sequence
  Synthetic oligonucleotide
atactcggaccgataggggtacgaaattat

SEQ ID NO: 93624 - DNA, 30 bp, Artificial Sequence
  Synthetic oligonucleotide
aagcaccgaggtggaagtagcttaaattat

SEQ ID NO: 93625 - DNA, 30 bp, Artificial Sequence
  Synthetic oligonucleotide
ttcgtaaggtgatgaaccaacacgaattat

SEQ ID NO: 93626 - DNA, 30 bp, Artificial Sequence
  Synthetic oligonucleotide
tcactatgcggacagtagtcgtgacattat

SEQ ID NO: 93627 - DNA, 30 bp, Artificial Sequence
  Synthetic oligonucleotide
cgggcaaaggccgacagcaggaatcattat

SEQ ID NO: 93628 - DNA, 30 bp, Artificial Sequence
  Synthetic oligonucleotide
aaaggggtacgtcaggccgtgggagattat

SEQ ID NO: 93629 - DNA, 30 bp, Artificial Sequence
  Synthetic oligonucleotide
gacggcattacaagggatgatttagattat

SEQ ID NO: 93630 - DNA, 30 bp, Artificial Sequence
  Synthetic oligonucleotide
tgttaggagaggactaagagatgctattat

SEQ ID NO: 93631 - DNA, 30 bp, Artificial Sequence
  Synthetic oligonucleotide
gaagaagaggtcgaagtgactatcccttat

SEQ ID NO: 93632 - DNA, 30 bp, Artificial Sequence
  Synthetic oligonucleotide
atgcgtggattaaccagtgcatcagcttat

SEQ ID NO: 93633 - DNA, 30 bp, Artificial Sequence
  Synthetic oligonucleotide
cctacatcttgtccagggacgaatgcttat

SEQ ID NO: 93634 - DNA, 30 bp, Artificial Sequence
  Synthetic oligonucleotide
aagtcagcacaaggaatgacatcgtcttat

SEQ ID NO: 93635 - DNA, 30 bp, Artificial Sequence
  Synthetic oligonucleotide
gggagactgacaagtgtgtaacagcgttat

SEQ ID NO: 93636 - DNA, 30 bp, Artificial Sequence
  Synthetic oligonucleotide
ataaggcaccctgattgagtggacggttat

SEQ ID NO: 93637 - DNA, 30 bp, Artificial Sequence
  Synthetic oligonucleotide
gcctggctaacacgagatcaggcgggttat

SEQ ID NO: 93638 - DNA, 30 bp, Artificial Sequence
  Synthetic oligonucleotide
agtggatcatgtcctataacacgatgttat

SEQ ID NO: 93639 - DNA, 30 bp, Artificial Sequence
  Synthetic oligonucleotide
atacgtgagagtctcggcggcggatgttat

SEQ ID NO: 93640 - DNA, 30 bp, Artificial Sequence
  Synthetic oligonucleotide
gagagacagggggagagttgtaggtgttat

SEQ ID NO: 93641 - DNA, 30 bp, Artificial Sequence
  Synthetic oligonucleotide
acggagaagctagaacacgatgaaatttat

SEQ ID NO: 93642 - DNA, 30 bp, Artificial Sequence
  Synthetic oligonucleotide
gggcatgattaaagtggaccttatgtttat

SEQ ID NO: 93643 - DNA, 30 bp, Artificial Sequence
  Synthetic oligonucleotide
gcgatcattttaaggtaaagcatcaaaact

SEQ ID NO: 93644 - DNA, 30 bp, Artificial Sequence
  Synthetic oligonucleotide
caacacgttttattgagggagggacaaact

SEQ ID NO: 93645 - DNA, 30 bp, Artificial Sequence
  Synthetic oligonucleotide
gggtgagacggcaggagcacatagcaaact

SEQ ID NO: 93646 - DNA, 30 bp, Artificial Sequence
  Synthetic oligonucleotide
gctagcgtgggacgccctacaaacgaaact

SEQ ID NO: 93647 - DNA, 30 bp, Artificial Sequence
  Synthetic oligonucleotide
ttactgtaggatgagtgtagagtataaact

SEQ ID NO: 93648 - DNA, 30 bp, Artificial Sequence
  Synthetic oligonucleotide
tgtcatgacccgtgcgaattaacgtaaact

SEQ ID NO: 93649 - DNA, 30 bp, Artificial Sequence
  Synthetic oligonucleotide
acacacggaacattttaagaaccgtaaact

SEQ ID NO: 93650 - DNA, 30 bp, Artificial Sequence
  Synthetic oligonucleotide
tatgttccgtgcactacggaaatcacaact

SEQ ID NO: 93651 - DNA, 30 bp, Artificial Sequence
  Synthetic oligonucleotide
agggaggggggtaataaacatcatacaact

SEQ ID NO: 93652 - DNA, 30 bp, Artificial Sequence
  Synthetic oligonucleotide
taatgaccatgctagtgataaagtacaact

SEQ ID NO: 93653 - DNA, 30 bp, Artificial Sequence
  Synthetic oligonucleotide
cagagtggagcgtcgaaaattaacccaact

SEQ ID NO: 93654 - DNA, 30 bp, Artificial Sequence
  Synthetic oligonucleotide
agacaagacttgaccaaggcccaagcaact

SEQ ID NO: 93655 - DNA, 30 bp, Artificial Sequence
  Synthetic oligonucleotide
aaataggacataacgcgattcttagcaact

SEQ ID NO: 93656 - DNA, 30 bp, Artificial Sequence
  Synthetic oligonucleotide
gcgaatcagcaggagtgatgtaatgcaact

SEQ ID NO: 93657 - DNA, 30 bp, Artificial Sequence
  Synthetic oligonucleotide
tgcagtacgtaacacatggctctatcaact

SEQ ID NO: 93658 - DNA, 30 bp, Artificial Sequence
  Synthetic oligonucleotide
ggaaaattctgaagtgtggatgggtcaact

SEQ ID NO: 93659 - DNA, 30 bp, Artificial Sequence
  Synthetic oligonucleotide
accctggggggcacctctagagcaagaact

SEQ ID NO: 93660 - DNA, 30 bp, Artificial Sequence
  Synthetic oligonucleotide
taccgtacggtacatacagcgaggagaact

SEQ ID NO: 93661 - DNA, 30 bp, Artificial Sequence
  Synthetic oligonucleotide
ccacgcacttgcgggctggccgtgagaact

SEQ ID NO: 93662 - DNA, 30 bp, Artificial Sequence
  Synthetic oligonucleotide
cctaccccagaatgatcaacttttcgaact

SEQ ID NO: 93663 - DNA, 30 bp, Artificial Sequence
  Synthetic oligonucleotide
aacaatatggatggaatagtcgaaggaact

SEQ ID NO: 93664 - DNA, 30 bp, Artificial Sequence
  Synthetic oligonucleotide
aaccaggcttaaataaacttttcaggaact

SEQ ID NO: 93665 - DNA, 30 bp, Artificial Sequence
  Synthetic oligonucleotide
tgtgtagtcggaagatcaaaactcggaact

SEQ ID NO: 93666 - DNA, 30 bp, Artificial Sequence
  Synthetic oligonucleotide
ggttgagccgccggaaagcatgagggaact

SEQ ID NO: 93667 - DNA, 30 bp, Artificial Sequence
  Synthetic oligonucleotide
aacggtgatgtaaaccgagtaccgggaact

SEQ ID NO: 93668 - DNA, 30 bp, Artificial Sequence
  Synthetic oligonucleotide
cgagaaggaaaccgcggacggaatggaact

SEQ ID NO: 93669 - DNA, 30 bp, Artificial Sequence
  Synthetic oligonucleotide
tgagggagactgctgaatagctcaataact

SEQ ID NO: 93670 - DNA, 30 bp, Artificial Sequence
  Synthetic oligonucleotide
ggtcggtacgctgagaatcttcgcataact

SEQ ID NO: 93671 - DNA, 30 bp, Artificial Sequence
  Synthetic oligonucleotide
acgacacacacatattggaaggcactaact

SEQ ID NO: 93672 - DNA, 30 bp, Artificial Sequence
  Synthetic oligonucleotide
accagaagattcacacttacatcactaact

SEQ ID NO: 93673 - DNA, 30 bp, Artificial Sequence
  Synthetic oligonucleotide
agagaggttgcctcttccgactgagtaact

SEQ ID NO: 93674 - DNA, 30 bp, Artificial Sequence
  Synthetic oligonucleotide
cggaactccgtgggaacgcaggtgttaact

SEQ ID NO: 93675 - DNA, 30 bp, Artificial Sequence
  Synthetic oligonucleotide
gaaatacccggagaacgcattcgaaacact

SEQ ID NO: 93676 - DNA, 30 bp, Artificial Sequence
  Synthetic oligonucleotide
gacttgagctcgtcacagtaactaaacact

SEQ ID NO: 93677 - DNA, 30 bp, Artificial Sequence
  Synthetic oligonucleotide
tgctaatcccaatggagccagaggaacact

SEQ ID NO: 93678 - DNA, 30 bp, Artificial Sequence
  Synthetic oligonucleotide
cgggcaaccttaacaagtctagtgaacact

SEQ ID NO: 93679 - DNA, 30 bp, Artificial Sequence
  Synthetic oligonucleotide
ggcggggggttactcatgtgcttacacact

SEQ ID NO: 93680 - DNA, 30 bp, Artificial Sequence
  Synthetic oligonucleotide
ctcaaatgtaacgaagataaagcccacact

SEQ ID NO: 93681 - DNA, 30 bp, Artificial Sequence
  Synthetic oligonucleotide
ccacgataagcgatattacccagccacact

SEQ ID NO: 93682 - DNA, 30 bp, Artificial Sequence
  Synthetic oligonucleotide
agagtgtacaacggcatcagattatacact

SEQ ID NO: 93683 - DNA, 30 bp, Artificial Sequence
  Synthetic oligonucleotide
tataacgataatagagttacctcagccact

SEQ ID NO: 93684 - DNA, 30 bp, Artificial Sequence
  Synthetic oligonucleotide
gcaggccatcaatataacaatgtcgccact

SEQ ID NO: 93685 - DNA, 30 bp, Artificial Sequence
  Synthetic oligonucleotide
atcacaagcattgaaggataacgtgccact

SEQ ID NO: 93686 - DNA, 30 bp, Artificial Sequence
  Synthetic oligonucleotide
cgtcagttggaatagggagaataaagcact

SEQ ID NO: 93687 - DNA, 30 bp, Artificial Sequence
  Synthetic oligonucleotide
acgaatcggccccataactccccacgcact

SEQ ID NO: 93688 - DNA, 30 bp, Artificial Sequence
  Synthetic oligonucleotide
gtccagtgtaccaggattcgaaatcgcact

SEQ ID NO: 93689 - DNA, 30 bp, Artificial Sequence
  Synthetic oligonucleotide
ccagggctgccaattaatatcgttatcact

SEQ ID NO: 93690 - DNA, 30 bp, Artificial Sequence
  Synthetic oligonucleotide
gtgcaattaggcaccaatctgagcttcact

SEQ ID NO: 93691 - DNA, 30 bp, Artificial Sequence
  Synthetic oligonucleotide
aagtgtagttcaggagggtgcgaaaagact

SEQ ID NO: 93692 - DNA, 30 bp, Artificial Sequence
  Synthetic oligonucleotide
agggctcccggcatttccgtgagcaagact

SEQ ID NO: 93693 - DNA, 31 bp, Artificial Sequence
  Synthetic oligonucleotide
ccctttacccgcccggaacaaacagcagact

SEQ ID NO: 93694 - DNA, 30 bp, Artificial Sequence
  Synthetic oligonucleotide
caactactagaaccccaggcgtagcagact

SEQ ID NO: 93695 - DNA, 30 bp, Artificial Sequence
  Synthetic oligonucleotide
tctacgtatagggtgactgcctcagagact

SEQ ID NO: 93696 - DNA, 30 bp, Artificial Sequence
  Synthetic oligonucleotide
aaagatagtattctgcggaagggagagact

SEQ ID NO: 93697 - DNA, 30 bp, Artificial Sequence
  Synthetic oligonucleotide
agtttggcgggcacgagaccactaacgact

SEQ ID NO: 93698 - DNA, 30 bp, Artificial Sequence
  Synthetic oligonucleotide
tagaacaaattgtgatatgctcaagcgact

SEQ ID NO: 93699 - DNA, 30 bp, Artificial Sequence
  Synthetic oligonucleotide
gataacccgacatacccacgaccagcgact

SEQ ID NO: 93700 - DNA, 30 bp, Artificial Sequence
  Synthetic oligonucleotide
gggataaagtctcgaaagggtcactcgact

SEQ ID NO: 93701 - DNA, 30 bp, Artificial Sequence
  Synthetic oligonucleotide
tgataaggtactgtaacgtatacctcgact

SEQ ID NO: 93702 - DNA, 30 bp, Artificial Sequence
  Synthetic oligonucleotide
agactgacacgggacacatctgtcaggact

SEQ ID NO: 93703 - DNA, 30 bp, Artificial Sequence
  Synthetic oligonucleotide
tgcataaagatcgtattctgagagtggact

SEQ ID NO: 93704 - DNA, 30 bp, Artificial Sequence
  Synthetic oligonucleotide
atcagacatcggatagtataaggttggact

SEQ ID NO: 93705 - DNA, 30 bp, Artificial Sequence
  Synthetic oligonucleotide
tggagcaaaggggaccaatacaaaatgact

SEQ ID NO: 93706 - DNA, 30 bp, Artificial Sequence
  Synthetic oligonucleotide
tacgggagatgctcgcgcgcgtacatgact

SEQ ID NO: 93707 - DNA, 30 bp, Artificial Sequence
  Synthetic oligonucleotide
agaaccatgcaacgtcgcacacgcatgact

SEQ ID NO: 93708 - DNA, 30 bp, Artificial Sequence
  Synthetic oligonucleotide
catgggccgaaccaagcgacgtgtatgact

SEQ ID NO: 93709 - DNA, 30 bp, Artificial Sequence
  Synthetic oligonucleotide
gtcggaagggatataggtacttttatgact

SEQ ID NO: 93710 - DNA, 30 bp, Artificial Sequence
  Synthetic oligonucleotide
cccgctcgaaccaagagtgtgtgactgact

SEQ ID NO: 93711 - DNA, 30 bp, Artificial Sequence
  Synthetic oligonucleotide
tgggtagggtccaaagctgtgagcctgact

SEQ ID NO: 93712 - DNA, 30 bp, Artificial Sequence
  Synthetic oligonucleotide
cagatatcacttacggtagacttcgtgact

SEQ ID NO: 93713 - DNA, 30 bp, Artificial Sequence
  Synthetic oligonucleotide
atggcatcggactcgtgatgagcggtgact

SEQ ID NO: 93714 - DNA, 30 bp, Artificial Sequence
  Synthetic oligonucleotide
gtacgggacgggtatcgtgttggattgact

SEQ ID NO: 93715 - DNA, 30 bp, Artificial Sequence
  Synthetic oligonucleotide
gtcggggaccaacgagactgacgcttgact

SEQ ID NO: 93716 - DNA, 30 bp, Artificial Sequence
  Synthetic oligonucleotide
ccaggggagcagttctgggtaaataatact

SEQ ID NO: 93717 - DNA, 30 bp, Artificial Sequence
  Synthetic oligonucleotide
tatggtgagaaagcgttgttacaccatact

SEQ ID NO: 93718 - DNA, 30 bp, Artificial Sequence
  Synthetic oligonucleotide
ggaacaaagcaaagactgacgttcgatact

SEQ ID NO: 93719 - DNA, 30 bp, Artificial Sequence
  Synthetic oligonucleotide
aagcgagtatgatcggatcgaggatatact

SEQ ID NO: 93720 - DNA, 30 bp, Artificial Sequence
  Synthetic oligonucleotide
gtacgaatgattcttgagtatggctatact

SEQ ID NO: 93721 - DNA, 30 bp, Artificial Sequence
  Synthetic oligonucleotide
aaagtcaggggaatttgggtgaaaactact

SEQ ID NO: 93722 - DNA, 30 bp, Artificial Sequence
  Synthetic oligonucleotide
agcagcgagacaaggtgctggcaaactact

SEQ ID NO: 93723 - DNA, 30 bp, Artificial Sequence
  Synthetic oligonucleotide
cgcgtgaacgagctcagggtagcgactact

SEQ ID NO: 93724 - DNA, 30 bp, Artificial Sequence
  Synthetic oligonucleotide
ggacctcaatgcctaagaatgcatactact

SEQ ID NO: 93725 - DNA, 30 bp, Artificial Sequence
  Synthetic oligonucleotide
gaacatggtcaagtctagccttcacctact

SEQ ID NO: 93726 - DNA, 30 bp, Artificial Sequence
  Synthetic oligonucleotide
gcaaaataaatcacgacagggtcgcctact

SEQ ID NO: 93727 - DNA, 30 bp, Artificial Sequence
  Synthetic oligonucleotide
aggttcacccgtaaagaagtatttcctact

SEQ ID NO: 93728 - DNA, 30 bp, Artificial Sequence
  Synthetic oligonucleotide
gggcatgttggacgccatgctgacgctact

SEQ ID NO: 93729 - DNA, 30 bp, Artificial Sequence
  Synthetic oligonucleotide
gcgaggaccaatattctatatacggctact

SEQ ID NO: 93730 - DNA, 30 bp, Artificial Sequence
  Synthetic oligonucleotide
tgaagcactcacgatcaggaggtgtctact

SEQ ID NO: 93731 - DNA, 29 bp, Artificial Sequence
  Synthetic oligonucleotide
gatcgcgggtatgaggcataagaagtact

SEQ ID NO: 93732 - DNA, 30 bp, Artificial Sequence
  Synthetic oligonucleotide
ccggtaggatctttaatggaagtaagtact

SEQ ID NO: 93733 - DNA, 31 bp, Artificial Sequence
  Synthetic oligonucleotide
gacgtgttgtgaccgcgaaatgagtagtact

SEQ ID NO: 93734 - DNA, 30 bp, Artificial Sequence
  Synthetic oligonucleotide
cgattagactggaaacggattgttcgtact

SEQ ID NO: 93735 - DNA, 30 bp, Artificial Sequence
  Synthetic oligonucleotide
atagaaaatactgcacacaccatgggtact

SEQ ID NO: 93736 - DNA, 30 bp, Artificial Sequence
  Synthetic oligonucleotide
tcgcccagatgtgccgagacggctggtact

SEQ ID NO: 93737 - DNA, 30 bp, Artificial Sequence
  Synthetic oligonucleotide
gtcctaagccagtaaagcgcggaatgtact

SEQ ID NO: 93738 - DNA, 30 bp, Artificial Sequence
  Synthetic oligonucleotide
atggaccaagggacgactcaaccgtgtact

SEQ ID NO: 93739 - DNA, 31 bp, Artificial Sequence
  Synthetic oligonucleotide
tgcttggtgggctagtggggcagtgattact

SEQ ID NO: 93740 - DNA, 30 bp, Artificial Sequence
  Synthetic oligonucleotide
ggaagtgaaggtcgttaacaagctgttact

SEQ ID NO: 93741 - DNA, 30 bp, Artificial Sequence
  Synthetic oligonucleotide
tcgcagggctacaattgagtgcattttact

SEQ ID NO: 93742 - DNA, 30 bp, Artificial Sequence
  Synthetic oligonucleotide
tctcataaattagggtcatgggaataacct

SEQ ID NO: 93743 - DNA, 30 bp, Artificial Sequence
  Synthetic oligonucleotide
gctggggtattacataataaacgtgcacct

SEQ ID NO: 93744 - DNA, 30 bp, Artificial Sequence
  Synthetic oligonucleotide
agctgacctgcctgccatagctaatcacct

SEQ ID NO: 93745 - DNA, 30 bp, Artificial Sequence
  Synthetic oligonucleotide
acctgttcacggccgagagcggggtcacct

SEQ ID NO: 93746 - DNA, 30 bp, Artificial Sequence
  Synthetic oligonucleotide
atggtatagtcgaaggaacagcattcacct

SEQ ID NO: 93747 - DNA, 30 bp, Artificial Sequence
  Synthetic oligonucleotide
cgagatgcgctgtgggacccaggcagacct

SEQ ID NO: 93748 - DNA, 30 bp, Artificial Sequence
  Synthetic oligonucleotide
ggtcaactctggatacgtctcaaacgacct

SEQ ID NO: 93749 - DNA, 30 bp, Artificial Sequence
  Synthetic oligonucleotide
cgtacgcccacgaaaccgatacaccgacct

SEQ ID NO: 93750 - DNA, 30 bp, Artificial Sequence
  Synthetic oligonucleotide
ggggtaatattagtagtgactatgcgacct

SEQ ID NO: 93751 - DNA, 30 bp, Artificial Sequence
  Synthetic oligonucleotide
gttccggcgggccaaacatggtggggacct

SEQ ID NO: 93752 - DNA, 30 bp, Artificial Sequence
  Synthetic oligonucleotide
aagggttagacgaacctcataccatgacct

SEQ ID NO: 93753 - DNA, 30 bp, Artificial Sequence
  Synthetic oligonucleotide
cgtagcataagacttagatctcggtgacct

SEQ ID NO: 93754 - DNA, 30 bp, Artificial Sequence
  Synthetic oligonucleotide
ggacacttggatggaaaagcgtgcatacct

SEQ ID NO: 93755 - DNA, 30 bp, Artificial Sequence
  Synthetic oligonucleotide
gcgtgatggataaagtgtttaccgatacct

SEQ ID NO: 93756 - DNA, 30 bp, Artificial Sequence
  Synthetic oligonucleotide
cactgttgggcattaggctagcgactacct

SEQ ID NO: 93757 - DNA, 30 bp, Artificial Sequence
  Synthetic oligonucleotide
gcatgctctcaaaggagataccaagtacct

SEQ ID NO: 93758 - DNA, 30 bp, Artificial Sequence
  Synthetic oligonucleotide
ctaaactaaaaatctcgccataacgtacct

SEQ ID NO: 93759 - DNA, 30 bp, Artificial Sequence
  Synthetic oligonucleotide
cgaaatttgacttagaggtattgtgtacct

SEQ ID NO: 93760 - DNA, 30 bp, Artificial Sequence
  Synthetic oligonucleotide
tgggagtatccgtcgagctagcagttacct

SEQ ID NO: 93761 - DNA, 30 bp, Artificial Sequence
  Synthetic oligonucleotide
gggtaatagtcaaaccaatctagaaaccct

SEQ ID NO: 93762 - DNA, 30 bp, Artificial Sequence
  Synthetic oligonucleotide
caataggcctggatggcgtagaatcaccct

SEQ ID NO: 93763 - DNA, 30 bp, Artificial Sequence
  Synthetic oligonucleotide
cagatcggaggcatataaaagcctgaccct

SEQ ID NO: 93764 - DNA, 30 bp, Artificial Sequence
  Synthetic oligonucleotide
ataaacgctggaggcccaagaagaagccct

SEQ ID NO: 93765 - DNA, 30 bp, Artificial Sequence
  Synthetic oligonucleotide
aataaaacgtggtagaagagttatcgccct

SEQ ID NO: 93766 - DNA, 30 bp, Artificial Sequence
  Synthetic oligonucleotide
gcgtagcattagtgcgcatgctcctgccct

SEQ ID NO: 93767 - DNA, 30 bp, Artificial Sequence
  Synthetic oligonucleotide
gctacactagatacctgacgactgtgccct

SEQ ID NO: 93768 - DNA, 30 bp, Artificial Sequence
  Synthetic oligonucleotide
ctaaaatgggcacgaggggttactatccct

SEQ ID NO: 93769 - DNA, 30 bp, Artificial Sequence
  Synthetic oligonucleotide
ggagccgaaaatcagcggtgaaaagtccct

SEQ ID NO: 93770 - DNA, 30 bp, Artificial Sequence
  Synthetic oligonucleotide
tgtgcagggacaggtcgtggcctgaagcct

SEQ ID NO: 93771 - DNA, 30 bp, Artificial Sequence
  Synthetic oligonucleotide
cagaacacggcaaatagccagactaagcct

SEQ ID NO: 93772 - DNA, 30 bp, Artificial Sequence
  Synthetic oligonucleotide
aaggcaacgagccctgaggatttccagcct

SEQ ID NO: 93773 - DNA, 31 bp, Artificial Sequence
  Synthetic oligonucleotide
ctgacaaggcaaaatctacataaggcagcct

SEQ ID NO: 93774 - DNA, 30 bp, Artificial Sequence
  Synthetic oligonucleotide
tgtgaccatgtagaagatgatataacgcct

SEQ ID NO: 93775 - DNA, 30 bp, Artificial Sequence
  Synthetic oligonucleotide
gacataaatccaacgctcaatactgcgcct

SEQ ID NO: 93776 - DNA, 30 bp, Artificial Sequence
  Synthetic oligonucleotide
gactataacagattaagaataattgcgcct

SEQ ID NO: 93777 - DNA, 30 bp, Artificial Sequence
  Synthetic oligonucleotide
cgcatacagacttaaatcagggtatcgcct

SEQ ID NO: 93778 - DNA, 30 bp, Artificial Sequence
  Synthetic oligonucleotide
ctatactgaacgatctcgccactgtcgcct

SEQ ID NO: 93779 - DNA, 30 bp, Artificial Sequence
  Synthetic oligonucleotide
acaaggagattctgttaacaagaaaggcct

SEQ ID NO: 93780 - DNA, 30 bp, Artificial Sequence
  Synthetic oligonucleotide
ccaaaagcggtaatttaaatagcaaggcct

SEQ ID NO: 93781 - DNA, 30 bp, Artificial Sequence
  Synthetic oligonucleotide
ggaaggatggtgtcacgtataaccaggcct

SEQ ID NO: 93782 - DNA, 30 bp, Artificial Sequence
  Synthetic oligonucleotide
gaataagcaacaccgcacgaaagggggcct

SEQ ID NO: 93783 - DNA, 30 bp, Artificial Sequence
  Synthetic oligonucleotide
ccaaactgtgaaaatgtcgccggtgggcct

SEQ ID NO: 93784 - DNA, 30 bp, Artificial Sequence
  Synthetic oligonucleotide
tcacgggctcatcaagatagcgcgtggcct

SEQ ID NO: 93785 - DNA, 30 bp, Artificial Sequence
  Synthetic oligonucleotide
cgtagtccgtcaaagtcaagatcactgcct

SEQ ID NO: 93786 - DNA, 30 bp, Artificial Sequence
  Synthetic oligonucleotide
gatggtgaacatgagtcaaatacagtgcct

SEQ ID NO: 93787 - DNA, 30 bp, Artificial Sequence
  Synthetic oligonucleotide
agttaactgaacaggcagagacaggtgcct

SEQ ID NO: 93788 - DNA, 30 bp, Artificial Sequence
  Synthetic oligonucleotide
acataacggtacaattaccggagcttgcct

SEQ ID NO: 93789 - DNA, 30 bp, Artificial Sequence
  Synthetic oligonucleotide
gaaaagaatgataaaacaatttcagatcct

SEQ ID NO: 93790 - DNA, 30 bp, Artificial Sequence
  Synthetic oligonucleotide
ggacactgtataagccgtgactacgatcct

SEQ ID NO: 93791 - DNA, 30 bp, Artificial Sequence
  Synthetic oligonucleotide
acgtgatcgccatgcaggtttcgggatcct

SEQ ID NO: 93792 - DNA, 30 bp, Artificial Sequence
  Synthetic oligonucleotide
ctacggataactaaactacacactgatcct

SEQ ID NO: 93793 - DNA, 30 bp, Artificial Sequence
  Synthetic oligonucleotide
aagggtggctatctaaatgggtcctatcct

SEQ ID NO: 93794 - DNA, 30 bp, Artificial Sequence
  Synthetic oligonucleotide
tcgtaacgaggtggcaaccggaagtatcct

SEQ ID NO: 93795 - DNA, 30 bp, Artificial Sequence
  Synthetic oligonucleotide
cggaaaaatgagggcgctatacattatcct

SEQ ID NO: 93796 - DNA, 30 bp, Artificial Sequence
  Synthetic oligonucleotide
tgatgcggtgggtgtaacggtgtttatcct

SEQ ID NO: 93797 - DNA, 30 bp, Artificial Sequence
  Synthetic oligonucleotide
tcatggtcgcaaccccgtgtaagtcctcct

SEQ ID NO: 93798 - DNA, 30 bp, Artificial Sequence
  Synthetic oligonucleotide
aggggatgctgacaagagaacactcgtcct

SEQ ID NO: 93799 - DNA, 30 bp, Artificial Sequence
  Synthetic oligonucleotide
aaccgagttgcgacacaatcaggcaaagct

SEQ ID NO: 93800 - DNA, 30 bp, Artificial Sequence
  Synthetic oligonucleotide
gttcacgataacaatgttagttcacaagct

SEQ ID NO: 93801 - DNA, 30 bp, Artificial Sequence
  Synthetic oligonucleotide
cacggagttaaagaggtctatgtggaagct

SEQ ID NO: 93802 - DNA, 30 bp, Artificial Sequence
  Synthetic oligonucleotide
ctaataaacatcatgtcagtaagcacagct

SEQ ID NO: 93803 - DNA, 30 bp, Artificial Sequence
  Synthetic oligonucleotide
acacgaaatgaagataagttaatgacagct

SEQ ID NO: 93804 - DNA, 30 bp, Artificial Sequence
  Synthetic oligonucleotide
tcacgggggaaagagctttttaatacagct

SEQ ID NO: 93805 - DNA, 30 bp, Artificial Sequence
  Synthetic oligonucleotide
aatcggctgagaggggaaaaaataccagct

SEQ ID NO: 93806 - DNA, 30 bp, Artificial Sequence
  Synthetic oligonucleotide
gcccgagcatgatactagagggttccagct

SEQ ID NO: 93807 - DNA, 30 bp, Artificial Sequence
  Synthetic oligonucleotide
acagttaccttcaagtattacacagcagct

SEQ ID NO: 93808 - DNA, 30 bp, Artificial Sequence
  Synthetic oligonucleotide
gcagaacctacaaatgagaaaatatcagct

SEQ ID NO: 93809 - DNA, 30 bp, Artificial Sequence
  Synthetic oligonucleotide
tcaacgtcgtcacacccaaacgaaagagct

SEQ ID NO: 93810 - DNA, 30 bp, Artificial Sequence
  Synthetic oligonucleotide
acaggcgcgcctcgccataccgacagagct

SEQ ID NO: 93811 - DNA, 30 bp, Artificial Sequence
  Synthetic oligonucleotide
ctatagaaaaggcattcagcatccagagct

SEQ ID NO: 93812 - DNA, 30 bp, Artificial Sequence
  Synthetic oligonucleotide
cagccgggatggtcggtgcatctcagagct

SEQ ID NO: 93813 - DNA, 30 bp, Artificial Sequence
  Synthetic oligonucleotide
gtcgaacctcctttccgttgagtccgagct

SEQ ID NO: 93814 - DNA, 30 bp, Artificial Sequence
  Synthetic oligonucleotide
acagtctgtgtggacgtacaccagcgagct

SEQ ID NO: 93815 - DNA, 30 bp, Artificial Sequence
  Synthetic oligonucleotide
ttcttcgcataggcgcaaattcagcgagct

SEQ ID NO: 93816 - DNA, 30 bp, Artificial Sequence
  Synthetic oligonucleotide
cgaatttgtcgaaactacaccaagatagct

SEQ ID NO: 93817 - DNA, 30 bp, Artificial Sequence
  Synthetic oligonucleotide
atgaactctcagtgatgggtaaatatagct

SEQ ID NO: 93818 - DNA, 30 bp, Artificial Sequence
  Synthetic oligonucleotide
tgagaagcaaacaagttataagggctagct

SEQ ID NO: 93819 - DNA, 30 bp, Artificial Sequence
  Synthetic oligonucleotide
taaataccaagtgaccgtgttcgtctagct

SEQ ID NO: 93820 - DNA, 30 bp, Artificial Sequence
  Synthetic oligonucleotide
cgatgtactctcgtggcatcgctagtagct

SEQ ID NO: 93821 - DNA, 30 bp, Artificial Sequence
  Synthetic oligonucleotide
ctgtatgagtgcatgactggaagaaacgct

SEQ ID NO: 93822 - DNA, 30 bp, Artificial Sequence
  Synthetic oligonucleotide
gttcggaaaggttccgacctagaatccgct

SEQ ID NO: 93823 - DNA, 30 bp, Artificial Sequence
  Synthetic oligonucleotide
acagtcaggtcaatggtctcgatctccgct

SEQ ID NO: 93824 - DNA, 30 bp, Artificial Sequence
  Synthetic oligonucleotide
tcgtaccaaaggaaatcaacactaatcgct

SEQ ID NO: 93825 - DNA, 30 bp, Artificial Sequence
  Synthetic oligonucleotide
cttcattgagggaaacgatcggcactcgct

SEQ ID NO: 93826 - DNA, 30 bp, Artificial Sequence
  Synthetic oligonucleotide
gcgtcgttgacacacgtatttcgactcgct

SEQ ID NO: 93827 - DNA, 30 bp, Artificial Sequence
  Synthetic oligonucleotide
acggccgaactcaggggtgctatactcgct

SEQ ID NO: 93828 - DNA, 30 bp, Artificial Sequence
  Synthetic oligonucleotide
gcaggctggtgacccaagcatccgctcgct

SEQ ID NO: 93829 - DNA, 30 bp, Artificial Sequence
  Synthetic oligonucleotide
cggcccgaaagtatcgcgatccaagtcgct

SEQ ID NO: 93830 - DNA, 30 bp, Artificial Sequence
  Synthetic oligonucleotide
cagcattcattagggaataaaggagtcgct

SEQ ID NO: 93831 - DNA, 30 bp, Artificial Sequence
  Synthetic oligonucleotide
cggttaaagaaacttaacaatcacgtcgct

SEQ ID NO: 93832 - DNA, 30 bp, Artificial Sequence
  Synthetic oligonucleotide
ctataagctcggcggctcaaaaacttcgct

SEQ ID NO: 93833 - DNA, 30 bp, Artificial Sequence
  Synthetic oligonucleotide
aaggaagatccgttggggcgggacttcgct

SEQ ID NO: 93834 - DNA, 30 bp, Artificial Sequence
  Synthetic oligonucleotide
cgggatcggtcgtgatcccgagcaaaggct

SEQ ID NO: 93835 - DNA, 30 bp, Artificial Sequence
  Synthetic oligonucleotide
ggccgtctcgagcaggcaggtgcttaggct

SEQ ID NO: 93836 - DNA, 30 bp, Artificial Sequence
  Synthetic oligonucleotide
gttcgggataataatatcagtcaaacggct

SEQ ID NO: 93837 - DNA, 30 bp, Artificial Sequence
  Synthetic oligonucleotide
tctggtctaaatgtgaagaataggccggct

SEQ ID NO: 93838 - DNA, 30 bp, Artificial Sequence
  Synthetic oligonucleotide
acagcgggagtagtgcgcgcgctgccggct

SEQ ID NO: 93839 - DNA, 31 bp, Artificial Sequence
  Synthetic oligonucleotide
aactctgattttgcgagggtcgagggcggct

SEQ ID NO: 93840 - DNA, 30 bp, Artificial Sequence
  Synthetic oligonucleotide
cgtaaatatgggggaaaacccacatcggct

SEQ ID NO: 93841 - DNA, 30 bp, Artificial Sequence
  Synthetic oligonucleotide
cttagaacgtaaaatgtggggtcgagggct

SEQ ID NO: 93842 - DNA, 27 bp, Artificial Sequence
  Synthetic oligonucleotide
aagctgggctgcgtcgggaggggggct

SEQ ID NO: 93843 - DNA, 30 bp, Artificial Sequence
  Synthetic oligonucleotide
aattgtcacggtagttaatgagggggggct

SEQ ID NO: 93844 - DNA, 30 bp, Artificial Sequence
  Synthetic oligonucleotide
tgacaatcgtcagtggtttgcctttgggct

SEQ ID NO: 93845 - DNA, 30 bp, Artificial Sequence
  Synthetic oligonucleotide
ctaatgctaggatagagctaagcaatggct

SEQ ID NO: 93846 - DNA, 30 bp, Artificial Sequence
  Synthetic oligonucleotide
cagctggtcgaatggaagtggggcctggct

SEQ ID NO: 93847 - DNA, 30 bp, Artificial Sequence
  Synthetic oligonucleotide
gaacacagtagaccgagggtaggtctggct

SEQ ID NO: 93848 - DNA, 30 bp, Artificial Sequence
  Synthetic oligonucleotide
cgatgcatagacagtggctatctcttggct

SEQ ID NO: 93849 - DNA, 30 bp, Artificial Sequence
  Synthetic oligonucleotide
gcgactttaaaccacataacgacaaatgct

SEQ ID NO: 93850 - DNA, 30 bp, Artificial Sequence
  Synthetic oligonucleotide
caccaggtcataattacatctgtcaatgct

SEQ ID NO: 93851 - DNA, 30 bp, Artificial Sequence
  Synthetic oligonucleotide
ggtgtatggtgggtctatcgatcgaatgct

SEQ ID NO: 93852 - DNA, 30 bp, Artificial Sequence
  Synthetic oligonucleotide
ttcaagtgaatacgctctcgtaagcatgct

SEQ ID NO: 93853 - DNA, 30 bp, Artificial Sequence
  Synthetic oligonucleotide
gcctcgtgctttgctggaagggaagatgct

SEQ ID NO: 93854 - DNA, 30 bp, Artificial Sequence
  Synthetic oligonucleotide
ccgcttgaagtaggtgggccccacgatgct

SEQ ID NO: 93855 - DNA, 30 bp, Artificial Sequence
  Synthetic oligonucleotide
tggaagttagagaagtggccgcccactgct

SEQ ID NO: 93856 - DNA, 30 bp, Artificial Sequence
  Synthetic oligonucleotide
gttgacaatcgcgaatatcacgaagctgct

SEQ ID NO: 93857 - DNA, 30 bp, Artificial Sequence
  Synthetic oligonucleotide
ggcgaatgttgaggggtagacatcgctgct

SEQ ID NO: 93858 - DNA, 30 bp, Artificial Sequence
  Synthetic oligonucleotide
ccactctaggagtgagctcgttaatctgct

SEQ ID NO: 93859 - DNA, 30 bp, Artificial Sequence
  Synthetic oligonucleotide
tgactgatggttgcgtcagacaacagtgct

SEQ ID NO: 93860 - DNA, 30 bp, Artificial Sequence
  Synthetic oligonucleotide
gaggctggtgagaaatcactgagccgtgct

SEQ ID NO: 93861 - DNA, 30 bp, Artificial Sequence
  Synthetic oligonucleotide
acaataaaagactggccagggcgccgtgct

SEQ ID NO: 93862 - DNA, 30 bp, Artificial Sequence
  Synthetic oligonucleotide
tacgcaccttatgtaagaggttgtcgtgct

SEQ ID NO: 93863 - DNA, 30 bp, Artificial Sequence
  Synthetic oligonucleotide
taggggatgcgatttaacccttgtggtgct

SEQ ID NO: 93864 - DNA, 30 bp, Artificial Sequence
  Synthetic oligonucleotide
caggagaccctgggtagcgcatttggtgct

SEQ ID NO: 93865 - DNA, 30 bp, Artificial Sequence
  Synthetic oligonucleotide
tgacgtcgtacgtgttacgagctatgtgct

SEQ ID NO: 93866 - DNA, 30 bp, Artificial Sequence
  Synthetic oligonucleotide
ccttggcataggtgatgtcttaggtgtgct

SEQ ID NO: 93867 - DNA, 30 bp, Artificial Sequence
  Synthetic oligonucleotide
gatctaccgagtaggcatcgtgaaattgct

SEQ ID NO: 93868 - DNA, 30 bp, Artificial Sequence
  Synthetic oligonucleotide
gaatagcgcaggaatagaacatagattgct

SEQ ID NO: 93869 - DNA, 30 bp, Artificial Sequence
  Synthetic oligonucleotide
acgagtagattatttaaaaatcaccttgct

SEQ ID NO: 93870 - DNA, 30 bp, Artificial Sequence
  Synthetic oligonucleotide
ccgctagcggattgtggatactaagttgct

SEQ ID NO: 93871 - DNA, 30 bp, Artificial Sequence
  Synthetic oligonucleotide
accagtcacgttcaaatgatagtctttgct

SEQ ID NO: 93872 - DNA, 30 bp, Artificial Sequence
  Synthetic oligonucleotide
tgacgtatcgttctatctatgctcaaatct

SEQ ID NO: 93873 - DNA, 30 bp, Artificial Sequence
  Synthetic oligonucleotide
tgtaagggagagcagtagatgacgaaatct

SEQ ID NO: 93874 - DNA, 30 bp, Artificial Sequence
  Synthetic oligonucleotide
gcctaaaaaagacaatatatgagtaaatct

SEQ ID NO: 93875 - DNA, 30 bp, Artificial Sequence
  Synthetic oligonucleotide
acagttacctccgatcgtttccgtcaatct

SEQ ID NO: 93876 - DNA, 30 bp, Artificial Sequence
  Synthetic oligonucleotide
agactgaaaccccgaggattaagagaatct

SEQ ID NO: 93877 - DNA, 30 bp, Artificial Sequence
  Synthetic oligonucleotide
aataaaagagtgtaagagaaaactgaatct

SEQ ID NO: 93878 - DNA, 30 bp, Artificial Sequence
  Synthetic oligonucleotide
cgatacagaaaatacgtttactgaagatct

SEQ ID NO: 93879 - DNA, 30 bp, Artificial Sequence
  Synthetic oligonucleotide
acagggagggctccggaactattgagatct

SEQ ID NO: 93880 - DNA, 30 bp, Artificial Sequence
  Synthetic oligonucleotide
ggggaaaaaccggtggtctggcgaggatct

SEQ ID NO: 93881 - DNA, 30 bp, Artificial Sequence
  Synthetic oligonucleotide
atgagaccaaggatgcatggctactgatct

SEQ ID NO: 93882 - DNA, 30 bp, Artificial Sequence
  Synthetic oligonucleotide
gtactgcgatagtgctcccgactttgatct

SEQ ID NO: 93883 - DNA, 30 bp, Artificial Sequence
  Synthetic oligonucleotide
cacaaagggttgtctcagattgaaatatct

SEQ ID NO: 93884 - DNA, 30 bp, Artificial Sequence
  Synthetic oligonucleotide
tatgaagaaccaagctgggggttcatatct

SEQ ID NO: 93885 - DNA, 30 bp, Artificial Sequence
  Synthetic oligonucleotide
ggcgggttggcccttcgaacaatactatct

SEQ ID NO: 93886 - DNA, 30 bp, Artificial Sequence
  Synthetic oligonucleotide
gtaaggaacacaaccgggcggaacctatct

SEQ ID NO: 93887 - DNA, 30 bp, Artificial Sequence
  Synthetic oligonucleotide
gatgtggcaaatgagcaagatccaaactct

SEQ ID NO: 93888 - DNA, 30 bp, Artificial Sequence
  Synthetic oligonucleotide
acgtgatggacccatgataccgggaactct

SEQ ID NO: 93889 - DNA, 30 bp, Artificial Sequence
  Synthetic oligonucleotide
ggtggtacgcccgccagatggaaacactct

SEQ ID NO: 93890 - DNA, 30 bp, Artificial Sequence
  Synthetic oligonucleotide
ggggggagtggtattcaggtgacagactct

SEQ ID NO: 93891 - DNA, 30 bp, Artificial Sequence
  Synthetic oligonucleotide
aaggggcgtaaatagattttgagttactct

SEQ ID NO: 93892 - DNA, 30 bp, Artificial Sequence
  Synthetic oligonucleotide
ttccaccgagtgcacgcatgtgagacctct

SEQ ID NO: 93893 - DNA, 30 bp, Artificial Sequence
  Synthetic oligonucleotide
catgcaagtgcaatgtgaagcaatacctct

SEQ ID NO: 93894 - DNA, 30 bp, Artificial Sequence
  Synthetic oligonucleotide
acatcagtactataccagatgtctccctct

SEQ ID NO: 93895 - DNA, 30 bp, Artificial Sequence
  Synthetic oligonucleotide
atgattggaagaatggatgaggccggctct

SEQ ID NO: 93896 - DNA, 30 bp, Artificial Sequence
  Synthetic oligonucleotide
tgaaacgcagaaacatgataagggggctct

SEQ ID NO: 93897 - DNA, 30 bp, Artificial Sequence
  Synthetic oligonucleotide
aaggcctgtcacatcttagcgtatggctct

SEQ ID NO: 93898 - DNA, 30 bp, Artificial Sequence
  Synthetic oligonucleotide
gggcaccgttgcaattaccaactaatctct

SEQ ID NO: 93899 - DNA, 30 bp, Artificial Sequence
  Synthetic oligonucleotide
acttacagtcagtctagatgtgaggtctct

SEQ ID NO: 93900 - DNA, 30 bp, Artificial Sequence
  Synthetic oligonucleotide
tatgacctcgacactgagaaagtagagtct

SEQ ID NO: 93901 - DNA, 30 bp, Artificial Sequence
  Synthetic oligonucleotide
ggctacgagtatagagcgcgggttgagtct

SEQ ID NO: 93902 - DNA, 30 bp, Artificial Sequence
  Synthetic oligonucleotide
gtgcaaaatctgcgggcacaaccatagtct

SEQ ID NO: 93903 - DNA, 30 bp, Artificial Sequence
  Synthetic oligonucleotide
gggtcggtttaagaatgctgggggacgtct

SEQ ID NO: 93904 - DNA, 30 bp, Artificial Sequence
  Synthetic oligonucleotide
gggtggtaggtgatcggggcatgaccgtct

SEQ ID NO: 93905 - DNA, 30 bp, Artificial Sequence
  Synthetic oligonucleotide
ccttgccttggtttagtggtatggccgtct

SEQ ID NO: 93906 - DNA, 30 bp, Artificial Sequence
  Synthetic oligonucleotide
ttggtcaatatcgaggtattaagcgcgtct

SEQ ID NO: 93907 - DNA, 30 bp, Artificial Sequence
  Synthetic oligonucleotide
gtggtctcctgatctcatcgtacttcgtct

SEQ ID NO: 93908 - DNA, 30 bp, Artificial Sequence
  Synthetic oligonucleotide
cgaggggtttatatcggcagaccttcgtct

SEQ ID NO: 93909 - DNA, 30 bp, Artificial Sequence
  Synthetic oligonucleotide
ccatgccatcaagcatcaatcaaaaggtct

SEQ ID NO: 93910 - DNA, 30 bp, Artificial Sequence
  Synthetic oligonucleotide
ccacgacggaccgaataatctgagcggtct

SEQ ID NO: 93911 - DNA, 30 bp, Artificial Sequence
  Synthetic oligonucleotide
tgacatgtttgatcgattcctctatggtct

SEQ ID NO: 93912 - DNA, 30 bp, Artificial Sequence
  Synthetic oligonucleotide
ctgttgtaaagttcggatccaagctggtct

SEQ ID NO: 93913 - DNA, 30 bp, Artificial Sequence
  Synthetic oligonucleotide
cgagacccaagaagggttagccacatgtct

SEQ ID NO: 93914 - DNA, 30 bp, Artificial Sequence
  Synthetic oligonucleotide
agaagcagactaaggaagttgaccatgtct

SEQ ID NO: 93915 - DNA, 30 bp, Artificial Sequence
  Synthetic oligonucleotide
acataatatcgttgaaagctcagtatgtct

SEQ ID NO: 93916 - DNA, 30 bp, Artificial Sequence
  Synthetic oligonucleotide
gtattcggtaatagtgaaacatctctgtct

SEQ ID NO: 93917 - DNA, 30 bp, Artificial Sequence
  Synthetic oligonucleotide
aggaaaggggatgttgatagtatattgtct

SEQ ID NO: 93918 - DNA, 30 bp, Artificial Sequence
  Synthetic oligonucleotide
cgatgtggaggacgccgttgcgtcaattct

SEQ ID NO: 93919 - DNA, 30 bp, Artificial Sequence
  Synthetic oligonucleotide
aggtgctaatgcgaatgaaattcagattct

SEQ ID NO: 93920 - DNA, 30 bp, Artificial Sequence
  Synthetic oligonucleotide
cgataaaccctacgaaccttctcttattct

SEQ ID NO: 93921 - DNA, 30 bp, Artificial Sequence
  Synthetic oligonucleotide
ccgggagtatgctcgttcaaagcagcttct

SEQ ID NO: 93922 - DNA, 30 bp, Artificial Sequence
  Synthetic oligonucleotide
tccgtcaatcggaggtgatagtagtcttct

SEQ ID NO: 93923 - DNA, 30 bp, Artificial Sequence
  Synthetic oligonucleotide
tagaaagacggtaggaccaacataagttct

SEQ ID NO: 93924 - DNA, 30 bp, Artificial Sequence
  Synthetic oligonucleotide
tcagtgaccggtatcgaacaagtacgttct

SEQ ID NO: 93925 - DNA, 30 bp, Artificial Sequence
  Synthetic oligonucleotide
acgaattagcgtccaacagatatgcgttct

SEQ ID NO: 93926 - DNA, 30 bp, Artificial Sequence
  Synthetic oligonucleotide
ttcccgaagctaacagcgagacttcgttct

SEQ ID NO: 93927 - DNA, 30 bp, Artificial Sequence
  Synthetic oligonucleotide
cgcgtgggaaatgcacgccgtaggggttct

SEQ ID NO: 93928 - DNA, 30 bp, Artificial Sequence
  Synthetic oligonucleotide
acgcaggggagtcttacgagtgtgtgttct

SEQ ID NO: 93929 - DNA, 30 bp, Artificial Sequence
  Synthetic oligonucleotide
aggaggcatccaaagaggtaattaatttct

SEQ ID NO: 93930 - DNA, 30 bp, Artificial Sequence
  Synthetic oligonucleotide
atgcaaccacggtgacagaatgacatttct

SEQ ID NO: 93931 - DNA, 30 bp, Artificial Sequence
  Synthetic oligonucleotide
agccaaaaagatactttaacttacatttct

SEQ ID NO: 93932 - DNA, 30 bp, Artificial Sequence
  Synthetic oligonucleotide
gtcaggacaagttccaattacacattttct

SEQ ID NO: 93933 - DNA, 30 bp, Artificial Sequence
  Synthetic oligonucleotide
tcgcaaagctcgtcaggaggactaaaaagt

SEQ ID NO: 93934 - DNA, 30 bp, Artificial Sequence
  Synthetic oligonucleotide
tgagcgggtaaagaaattttaaaacaaagt

SEQ ID NO: 93935 - DNA, 30 bp, Artificial Sequence
  Synthetic oligonucleotide
caggtagcatacgtgaagcattcgcaaagt

SEQ ID NO: 93936 - DNA, 30 bp, Artificial Sequence
  Synthetic oligonucleotide
taggaaactagcggagggctcgggcaaagt

SEQ ID NO: 93937 - DNA, 30 bp, Artificial Sequence
  Synthetic oligonucleotide
agacgagtatgcacgtcaccagaagaaagt

SEQ ID NO: 93938 - DNA, 30 bp, Artificial Sequence
  Synthetic oligonucleotide
atggagcatcaccattggtcattcgaaagt

SEQ ID NO: 93939 - DNA, 30 bp, Artificial Sequence
  Synthetic oligonucleotide
gaccgtacgcctacccctataccggaaagt

SEQ ID NO: 93940 - DNA, 30 bp, Artificial Sequence
  Synthetic oligonucleotide
cacagttgtaggggactagcgcttgaaagt

SEQ ID NO: 93941 - DNA, 30 bp, Artificial Sequence
  Synthetic oligonucleotide
cgtacgaatttccgatcgagaccaacaagt

SEQ ID NO: 93942 - DNA, 30 bp, Artificial Sequence
  Synthetic oligonucleotide
ccggatgtacatcataacaaacaagcaagt

SEQ ID NO: 93943 - DNA, 30 bp, Artificial Sequence
  Synthetic oligonucleotide
gtgaatcagatgggaaactcgaccgcaagt

SEQ ID NO: 93944 - DNA, 30 bp, Artificial Sequence
  Synthetic oligonucleotide
catgctaagtgatacaatcgctcatcaagt

SEQ ID NO: 93945 - DNA, 30 bp, Artificial Sequence
  Synthetic oligonucleotide
catacccgtgggaggcgaagattatcaagt

SEQ ID NO: 93946 - DNA, 30 bp, Artificial Sequence
  Synthetic oligonucleotide
ggctagtgtaaacctaacttgcattcaagt

SEQ ID NO: 93947 - DNA, 30 bp, Artificial Sequence
  Synthetic oligonucleotide
tcgcgaaccgccctactagagagttcaagt

SEQ ID NO: 93948 - DNA, 29 bp, Artificial Sequence
  Synthetic oligonucleotide
gctagtgcgaaggaagccgtagttcaagt

SEQ ID NO: 93949 - DNA, 30 bp, Artificial Sequence
  Synthetic oligonucleotide
tcactaggcagaaaatacaggaaaagaagt

SEQ ID NO: 93950 - DNA, 30 bp, Artificial Sequence
  Synthetic oligonucleotide
gggcctggactggaaactcatacaagaagt

SEQ ID NO: 93951 - DNA, 30 bp, Artificial Sequence
  Synthetic oligonucleotide
gcgaacgcgcgagtcatgcctacaagaagt

SEQ ID NO: 93952 - DNA, 30 bp, Artificial Sequence
  Synthetic oligonucleotide
cggatgacatgaggtgatgtttgcagaagt

SEQ ID NO: 93953 - DNA, 30 bp, Artificial Sequence
  Synthetic oligonucleotide
cgaggggtgtccatacgcggggcgagaagt

SEQ ID NO: 93954 - DNA, 30 bp, Artificial Sequence
  Synthetic oligonucleotide
tcttaggtgcaaacacattcccgtagaagt

SEQ ID NO: 93955 - DNA, 30 bp, Artificial Sequence
  Synthetic oligonucleotide
cggggggacaagtcgatgacccgccgaagt

SEQ ID NO: 93956 - DNA, 30 bp, Artificial Sequence
  Synthetic oligonucleotide
tggcaaagtggacaaagaagttgtcgaagt

SEQ ID NO: 93957 - DNA, 30 bp, Artificial Sequence
  Synthetic oligonucleotide
aagggcgagtgggagattaccgaaggaagt

SEQ ID NO: 93958 - DNA, 31 bp, Artificial Sequence
  Synthetic oligonucleotide
tcgcgaccgtctgctctagatcgaaggaagt

SEQ ID NO: 93959 - DNA, 30 bp, Artificial Sequence
  Synthetic oligonucleotide
ggcctagacttttcagggccaaatggaagt

SEQ ID NO: 93960 - DNA, 30 bp, Artificial Sequence
  Synthetic oligonucleotide
ccaggacgatccttagtgggggttggaagt

SEQ ID NO: 93961 - DNA, 30 bp, Artificial Sequence
  Synthetic oligonucleotide
ggagtaagataactcccagtgtttggaagt

SEQ ID NO: 93962 - DNA, 30 bp, Artificial Sequence
  Synthetic oligonucleotide
tgcaatcaacgaaggtggaaagtatgaagt

SEQ ID NO: 93963 - DNA, 30 bp, Artificial Sequence
  Synthetic oligonucleotide
acggtacctgttaagagagttttctgaagt

SEQ ID NO: 93964 - DNA, 30 bp, Artificial Sequence
  Synthetic oligonucleotide
ctgttagggggcaatctgaggggtctaagt

SEQ ID NO: 93965 - DNA, 30 bp, Artificial Sequence
  Synthetic oligonucleotide
ggcgtgaatctagcaggaacgtaagtaagt

SEQ ID NO: 93966 - DNA, 30 bp, Artificial Sequence
  Synthetic oligonucleotide
tgggtttgcggagccgaagtgtaggtaagt

SEQ ID NO: 93967 - DNA, 30 bp, Artificial Sequence
  Synthetic oligonucleotide
atccgcaaggtgtgtcacgggctggtaagt

SEQ ID NO: 93968 - DNA, 30 bp, Artificial Sequence
  Synthetic oligonucleotide
tgcttctgtatagtacgagtgcgcttaagt

SEQ ID NO: 93969 - DNA, 30 bp, Artificial Sequence
  Synthetic oligonucleotide
cggtatagaggggttgctacgggcttaagt

SEQ ID NO: 93970 - DNA, 30 bp, Artificial Sequence
  Synthetic oligonucleotide
tgagttcaagccatgaaacgaaggttaagt

SEQ ID NO: 93971 - DNA, 30 bp, Artificial Sequence
  Synthetic oligonucleotide
ccatcaaggatataatagaataatttaagt

SEQ ID NO: 93972 - DNA, 30 bp, Artificial Sequence
  Synthetic oligonucleotide
ggtacacacaattgagaactaggtttaagt

SEQ ID NO: 93973 - DNA, 30 bp, Artificial Sequence
  Synthetic oligonucleotide
tgaactaactgttgtgatctgaacaacagt

SEQ ID NO: 93974 - DNA, 30 bp, Artificial Sequence
  Synthetic oligonucleotide
acggaggcagaggcatctcgacggaacagt

SEQ ID NO: 93975 - DNA, 30 bp, Artificial Sequence
  Synthetic oligonucleotide
aggcaaccgaagatcgaaagatttaacagt

SEQ ID NO: 93976 - DNA, 30 bp, Artificial Sequence
  Synthetic oligonucleotide
tgaagccaggcagaaaggggccgtgacagt

SEQ ID NO: 93977 - DNA, 30 bp, Artificial Sequence
  Synthetic oligonucleotide
tatggtacatctgattacatcactaccagt

SEQ ID NO: 93978 - DNA, 30 bp, Artificial Sequence
  Synthetic oligonucleotide
gcgagcgatagggtcccagacaaatccagt

SEQ ID NO: 93979 - DNA, 30 bp, Artificial Sequence
  Synthetic oligonucleotide
tatcggaaatatgaaagaacacactccagt

SEQ ID NO: 93980 - DNA, 30 bp, Artificial Sequence
  Synthetic oligonucleotide
cgagatagctaaggcaagttcaggtccagt

SEQ ID NO: 93981 - DNA, 30 bp, Artificial Sequence
  Synthetic oligonucleotide
agaaaagattcataacttggaagtagcagt

SEQ ID NO: 93982 - DNA, 30 bp, Artificial Sequence
  Synthetic oligonucleotide
attagtgtggtccaccccttgagcggcagt

SEQ ID NO: 93983 - DNA, 30 bp, Artificial Sequence
  Synthetic oligonucleotide
cgtgggagtcatacccgtatccagggcagt

SEQ ID NO: 93984 - DNA, 30 bp, Artificial Sequence
  Synthetic oligonucleotide
gggtgcatgatactcgtctaccggggcagt

SEQ ID NO: 93985 - DNA, 30 bp, Artificial Sequence
  Synthetic oligonucleotide
tatcgagatgagccctatgtgacatgcagt

SEQ ID NO: 93986 - DNA, 30 bp, Artificial Sequence
  Synthetic oligonucleotide
cgggtgccacaggcttatctgtgagtcagt

SEQ ID NO: 93987 - DNA, 30 bp, Artificial Sequence
  Synthetic oligonucleotide
aaatgagtggaaacaaggccttgcttcagt

SEQ ID NO: 93988 - DNA, 30 bp, Artificial Sequence
  Synthetic oligonucleotide
agtcgtatctataactactaggagaagagt

SEQ ID NO: 93989 - DNA, 30 bp, Artificial Sequence
  Synthetic oligonucleotide
gttcaacccgtaattcgaatgtggaagagt

SEQ ID NO: 93990 - DNA, 30 bp, Artificial Sequence
  Synthetic oligonucleotide
agggagttttagtcgtggggctggcagagt

SEQ ID NO: 93991 - DNA, 30 bp, Artificial Sequence
  Synthetic oligonucleotide
tacaattgtgggcatcagggtgtggagagt

SEQ ID NO: 93992 - DNA, 30 bp, Artificial Sequence
  Synthetic oligonucleotide
ttaagatagaaggctggttaaccatagagt

SEQ ID NO: 93993 - DNA, 30 bp, Artificial Sequence
  Synthetic oligonucleotide
ctagtggagcttcatcttaaacgaacgagt

SEQ ID NO: 93994 - DNA, 30 bp, Artificial Sequence
  Synthetic oligonucleotide
gcgtacaggtgtaatgcgggccacacgagt

SEQ ID NO: 93995 - DNA, 30 bp, Artificial Sequence
  Synthetic oligonucleotide
caggcagggatcttctctcaccgcacgagt

SEQ ID NO: 93996 - DNA, 30 bp, Artificial Sequence
  Synthetic oligonucleotide
gagatccctaagaataagtgcgtgacgagt

SEQ ID NO: 93997 - DNA, 30 bp, Artificial Sequence
  Synthetic oligonucleotide
tattaccgattgccgaaatgtaccgcgagt

SEQ ID NO: 93998 - DNA, 30 bp, Artificial Sequence
  Synthetic oligonucleotide
cgtcatgacccctcaactagcggaaggagt

SEQ ID NO: 93999 - DNA, 30 bp, Artificial Sequence
  Synthetic oligonucleotide
tcgcgatcactctggcataacgagaggagt

SEQ ID NO: 94000 - DNA, 30 bp, Artificial Sequence
  Synthetic oligonucleotide
acaatgacctcgccaacaattaggaggagt

SEQ ID NO: 94001 - DNA, 30 bp, Artificial Sequence
  Synthetic oligonucleotide
tcggtatgatgtactaaggtcggacggagt

SEQ ID NO: 94002 - DNA, 30 bp, Artificial Sequence
  Synthetic oligonucleotide
gcggtgcctgactgcgccgattgccggagt

SEQ ID NO: 94003 - DNA, 30 bp, Artificial Sequence
  Synthetic oligonucleotide
gggacacattgacgatcggagactcggagt

SEQ ID NO: 94004 - DNA, 30 bp, Artificial Sequence
  Synthetic oligonucleotide
ggcatatactatttagtataaaaagggagt

SEQ ID NO: 94005 - DNA, 30 bp, Artificial Sequence
  Synthetic oligonucleotide
aagaccgaactggtactcagattggggagt

SEQ ID NO: 94006 - DNA, 30 bp, Artificial Sequence
  Synthetic oligonucleotide
cgtcctcgtgctcaaagagatatctggagt

SEQ ID NO: 94007 - DNA, 30 bp, Artificial Sequence
  Synthetic oligonucleotide
agcctgcgacttgtaagaactataatgagt

SEQ ID NO: 94008 - DNA, 30 bp, Artificial Sequence
  Synthetic oligonucleotide
ggacgtgcttcaagcgtgacgtgcatgagt

SEQ ID NO: 94009 - DNA, 30 bp, Artificial Sequence
  Synthetic oligonucleotide
gatggtgtgtcacccgaggataccctgagt

SEQ ID NO: 94010 - DNA, 30 bp, Artificial Sequence
  Synthetic oligonucleotide
gcggcgatgatgtatgacgttttcctgagt

SEQ ID NO: 94011 - DNA, 30 bp, Artificial Sequence
  Synthetic oligonucleotide
tgaaaacatcctgcggagcgattagtgagt

SEQ ID NO: 94012 - DNA, 30 bp, Artificial Sequence
  Synthetic oligonucleotide
ttacaaaaggtgagggtagaatgattgagt

SEQ ID NO: 94013 - DNA, 30 bp, Artificial Sequence
  Synthetic oligonucleotide
ctcggtaaagtaataaagaatatgttgagt

SEQ ID NO: 94014 - DNA, 30 bp, Artificial Sequence
  Synthetic oligonucleotide
caatgtatgtgttataagtaggtgttgagt

SEQ ID NO: 94015 - DNA, 30 bp, Artificial Sequence
  Synthetic oligonucleotide
tgcggggggctagggtgtgatgctttgagt

SEQ ID NO: 94016 - DNA, 30 bp, Artificial Sequence
  Synthetic oligonucleotide
gcatactaaccgaaggagacagttcatagt

SEQ ID NO: 94017 - DNA, 30 bp, Artificial Sequence
  Synthetic oligonucleotide
ttcacaaaggagacactcaagactgatagt

SEQ ID NO: 94018 - DNA, 30 bp, Artificial Sequence
  Synthetic oligonucleotide
atgaagagttaacatttattacattatagt

SEQ ID NO: 94019 - DNA, 30 bp, Artificial Sequence
  Synthetic oligonucleotide
accaatccccgacgggtcgaggaaactagt

SEQ ID NO: 94020 - DNA, 30 bp, Artificial Sequence
  Synthetic oligonucleotide
cggatgtaaaacttaaagagacgctctagt

SEQ ID NO: 94021 - DNA, 30 bp, Artificial Sequence
  Synthetic oligonucleotide
agggcagggccagctccatagcattctagt

SEQ ID NO: 94022 - DNA, 30 bp, Artificial Sequence
  Synthetic oligonucleotide
accgagtaagacttgcgagtggacagtagt

SEQ ID NO: 94023 - DNA, 30 bp, Artificial Sequence
  Synthetic oligonucleotide
gcaccgcgtgtagaatggccatttagtagt

SEQ ID NO: 94024 - DNA, 30 bp, Artificial Sequence
  Synthetic oligonucleotide
caccagtcgtcgaggtagtgagtccgtagt

SEQ ID NO: 94025 - DNA, 30 bp, Artificial Sequence
  Synthetic oligonucleotide
tgccaaagacaagatgctattttgattagt

SEQ ID NO: 94026 - DNA, 30 bp, Artificial Sequence
  Synthetic oligonucleotide
taccagtagcagcgattggcgtgtattagt

SEQ ID NO: 94027 - DNA, 30 bp, Artificial Sequence
  Synthetic oligonucleotide
cgcttaggggcaagccctagaaacaaacgt

SEQ ID NO: 94028 - DNA, 30 bp, Artificial Sequence
  Synthetic oligonucleotide
acacgatttggaactgcgcatatacaacgt

SEQ ID NO: 94029 - DNA, 30 bp, Artificial Sequence
  Synthetic oligonucleotide
agaactaatgaggataagtcagctcaacgt

SEQ ID NO: 94030 - DNA, 30 bp, Artificial Sequence
  Synthetic oligonucleotide
agggtagggtctattaaatagcctgaacgt

SEQ ID NO: 94031 - DNA, 30 bp, Artificial Sequence
  Synthetic oligonucleotide
atgagaactcaactccacgcaaaataacgt

SEQ ID NO: 94032 - DNA, 30 bp, Artificial Sequence
  Synthetic oligonucleotide
ctgtttaagtggaaggtaagcgaaccacgt

SEQ ID NO: 94033 - DNA, 30 bp, Artificial Sequence
  Synthetic oligonucleotide
aagggtacagacgggggaatgatctcacgt

SEQ ID NO: 94034 - DNA, 30 bp, Artificial Sequence
  Synthetic oligonucleotide
atgacataaaggggcatatcggagtcacgt

SEQ ID NO: 94035 - DNA, 30 bp, Artificial Sequence
  Synthetic oligonucleotide
cggtagtaaagacgtatacatgtttcacgt

SEQ ID NO: 94036 - DNA, 30 bp, Artificial Sequence
  Synthetic oligonucleotide
acaccgtccaaggaacgaattctgcgacgt

SEQ ID NO: 94037 - DNA, 30 bp, Artificial Sequence
  Synthetic oligonucleotide
ggaacttgatagaaaggccattaaggacgt

SEQ ID NO: 94038 - DNA, 30 bp, Artificial Sequence
  Synthetic oligonucleotide
aaataaggcctcgtcgaaagcataggacgt

SEQ ID NO: 94039 - DNA, 30 bp, Artificial Sequence
  Synthetic oligonucleotide
tgaaccgaagcgtcttcataccgttgacgt

SEQ ID NO: 94040 - DNA, 30 bp, Artificial Sequence
  Synthetic oligonucleotide
tcctcgcaggggtcagactggtcgctacgt

SEQ ID NO: 94041 - DNA, 30 bp, Artificial Sequence
  Synthetic oligonucleotide
gggactacgcttgctatgcgatcggtacgt

SEQ ID NO: 94042 - DNA, 30 bp, Artificial Sequence
  Synthetic oligonucleotide
catagaaagtgcccatccgacctgttacgt

SEQ ID NO: 94043 - DNA, 30 bp, Artificial Sequence
  Synthetic oligonucleotide
gccccataactcagagaagctgggaaccgt

SEQ ID NO: 94044 - DNA, 30 bp, Artificial Sequence
  Synthetic oligonucleotide
tcacttaccacggagtaggggcgcgaccgt

SEQ ID NO: 94045 - DNA, 30 bp, Artificial Sequence
  Synthetic oligonucleotide
tggtgcgatccggtgctgggagtggaccgt

SEQ ID NO: 94046 - DNA, 30 bp, Artificial Sequence
  Synthetic oligonucleotide
ctaaccactacctcaacgaatatataccgt

SEQ ID NO: 94047 - DNA, 30 bp, Artificial Sequence
  Synthetic oligonucleotide
aagcgtgtagcgttcgaataacactaccgt

SEQ ID NO: 94048 - DNA, 30 bp, Artificial Sequence
  Synthetic oligonucleotide
gagcaagcaccggacagacctagcacccgt

SEQ ID NO: 94049 - DNA, 30 bp, Artificial Sequence
  Synthetic oligonucleotide
gccggagaaaaatggttcagccatacccgt

SEQ ID NO: 94050 - DNA, 30 bp, Artificial Sequence
  Synthetic oligonucleotide
ggcagtagggcgtcaggaatcaatccccgt

SEQ ID NO: 94051 - DNA, 30 bp, Artificial Sequence
  Synthetic oligonucleotide
cctgctggagaaactgagtgtaacgcccgt

SEQ ID NO: 94052 - DNA, 29 bp, Artificial Sequence
  Synthetic oligonucleotide
cactatgtaagtccgtgagagaggcccgt

SEQ ID NO: 94053 - DNA, 30 bp, Artificial Sequence
  Synthetic oligonucleotide
ggggtgataactaagtgctagtaacgccgt

SEQ ID NO: 94054 - DNA, 30 bp, Artificial Sequence
  Synthetic oligonucleotide
tgaaactgaaggacgatggggggacgccgt

SEQ ID NO: 94055 - DNA, 30 bp, Artificial Sequence
  Synthetic oligonucleotide
ggcatttcacctgcgggcgaaacttgccgt

SEQ ID NO: 94056 - DNA, 29 bp, Artificial Sequence
  Synthetic oligonucleotide
cgaggtgtggtatcagtaattagatccgt

SEQ ID NO: 94057 - DNA, 30 bp, Artificial Sequence
  Synthetic oligonucleotide
caaagtgcctctttggaagaaaggatccgt

SEQ ID NO: 94058 - DNA, 30 bp, Artificial Sequence
  Synthetic oligonucleotide
cgattacgacgggttcatcaagtactccgt

SEQ ID NO: 94059 - DNA, 29 bp, Artificial Sequence
  Synthetic oligonucleotide
actggcacagtatctccaagtgagtccgt

SEQ ID NO: 94060 - DNA, 30 bp, Artificial Sequence
  Synthetic oligonucleotide
tacgtcccgaaggcgtcccttgctgtccgt

SEQ ID NO: 94061 - DNA, 30 bp, Artificial Sequence
  Synthetic oligonucleotide
ctgacggcgatatttgccctaaaattccgt

SEQ ID NO: 94062 - DNA, 30 bp, Artificial Sequence
  Synthetic oligonucleotide
agcggacaggacaaaatggaacggttccgt

SEQ ID NO: 94063 - DNA, 30 bp, Artificial Sequence
  Synthetic oligonucleotide
gatgtggcaattggctcataccggttccgt

SEQ ID NO: 94064 - DNA, 30 bp, Artificial Sequence
  Synthetic oligonucleotide
ggtctatttacagccgagtgatccaagcgt

SEQ ID NO: 94065 - DNA, 30 bp, Artificial Sequence
  Synthetic oligonucleotide
cagctatgaaaacatattgatatccagcgt

SEQ ID NO: 94066 - DNA, 30 bp, Artificial Sequence
  Synthetic oligonucleotide
gcataatgagctagtctaaaggctcagcgt

SEQ ID NO: 94067 - DNA, 30 bp, Artificial Sequence
  Synthetic oligonucleotide
cggaaacagaagtggcccgcctgtcagcgt

SEQ ID NO: 94068 - DNA, 30 bp, Artificial Sequence
  Synthetic oligonucleotide
gcgactagtagcaatgttaaccccgagcgt

SEQ ID NO: 94069 - DNA, 30 bp, Artificial Sequence
  Synthetic oligonucleotide
caggttgtgaggaatgtgaagatcgagcgt

SEQ ID NO: 94070 - DNA, 30 bp, Artificial Sequence
  Synthetic oligonucleotide
taccgatgtcggttagggaactgctagcgt

SEQ ID NO: 94071 - DNA, 30 bp, Artificial Sequence
  Synthetic oligonucleotide
aacgaggctgaaatcgagacgtagtagcgt

SEQ ID NO: 94072 - DNA, 30 bp, Artificial Sequence
  Synthetic oligonucleotide
taaaacctcctactccggtaaatcacgcgt

SEQ ID NO: 94073 - DNA, 30 bp, Artificial Sequence
  Synthetic oligonucleotide
gacacacattaagtgcgaaacgtcacgcgt

SEQ ID NO: 94074 - DNA, 30 bp, Artificial Sequence
  Synthetic oligonucleotide
cagcagaagatgatctatgctgtgccgcgt

SEQ ID NO: 94075 - DNA, 30 bp, Artificial Sequence
  Synthetic oligonucleotide
cgtgtatcggcaggtagtgcacttgcgcgt

SEQ ID NO: 94076 - DNA, 30 bp, Artificial Sequence
  Synthetic oligonucleotide
ataacagctaattgaaacgtatcgtcgcgt

SEQ ID NO: 94077 - DNA, 30 bp, Artificial Sequence
  Synthetic oligonucleotide
cgaattgagcgcgcggttaatactcggcgt

SEQ ID NO: 94078 - DNA, 30 bp, Artificial Sequence
  Synthetic oligonucleotide
caataatgcttggattgatatatagggcgt

SEQ ID NO: 94079 - DNA, 30 bp, Artificial Sequence
  Synthetic oligonucleotide
ccagtccagcgaacgtagcgggtagggcgt

SEQ ID NO: 94080 - DNA, 30 bp, Artificial Sequence
  Synthetic oligonucleotide
tcaagcatggtgatatgctgagcctggcgt

SEQ ID NO: 94081 - DNA, 30 bp, Artificial Sequence
  Synthetic oligonucleotide
gatcgaccggaaacggttgggcagatgcgt

SEQ ID NO: 94082 - DNA, 30 bp, Artificial Sequence
  Synthetic oligonucleotide
cacatgtctcggatcattcgaaatatgcgt

SEQ ID NO: 94083 - DNA, 30 bp, Artificial Sequence
  Synthetic oligonucleotide
aagcaccaaactatgaataagactatgcgt

SEQ ID NO: 94084 - DNA, 30 bp, Artificial Sequence
  Synthetic oligonucleotide
ccttgaaagggacatcactatagagtgcgt

SEQ ID NO: 94085 - DNA, 30 bp, Artificial Sequence
  Synthetic oligonucleotide
ctggcgacacagctgggggacgaggtgcgt

SEQ ID NO: 94086 - DNA, 30 bp, Artificial Sequence
  Synthetic oligonucleotide
cttgacagtgaaaacccgaggtcgaatcgt

SEQ ID NO: 94087 - DNA, 30 bp, Artificial Sequence
  Synthetic oligonucleotide
aggccagtttacaaaagctgatatcatcgt

SEQ ID NO: 94088 - DNA, 30 bp, Artificial Sequence
  Synthetic oligonucleotide
actcgggcattcgtgcgcgcgtatcatcgt

SEQ ID NO: 94089 - DNA, 30 bp, Artificial Sequence
  Synthetic oligonucleotide
ctgaataagagtcggtctgcaggctatcgt

SEQ ID NO: 94090 - DNA, 30 bp, Artificial Sequence
  Synthetic oligonucleotide
cacggatagtctgttccagaggagtatcgt

SEQ ID NO: 94091 - DNA, 30 bp, Artificial Sequence
  Synthetic oligonucleotide
cgatcgacaaggcccaggtaaggaactcgt

SEQ ID NO: 94092 - DNA, 30 bp, Artificial Sequence
  Synthetic oligonucleotide
tgttgggtagcatatggatagcgcactcgt

SEQ ID NO: 94093 - DNA, 30 bp, Artificial Sequence
  Synthetic oligonucleotide
taggagatatgaagaatgctgatcactcgt

SEQ ID NO: 94094 - DNA, 30 bp, Artificial Sequence
  Synthetic oligonucleotide
gctatgggcaccgtccaacataagactcgt

SEQ ID NO: 94095 - DNA, 30 bp, Artificial Sequence
  Synthetic oligonucleotide
cgacatctctagtacggctgactccctcgt

SEQ ID NO: 94096 - DNA, 30 bp, Artificial Sequence
  Synthetic oligonucleotide
agctacgtagtggatatacaacttcctcgt

SEQ ID NO: 94097 - DNA, 30 bp, Artificial Sequence
  Synthetic oligonucleotide
actgaatttatggagtatatattacgtcgt

SEQ ID NO: 94098 - DNA, 30 bp, Artificial Sequence
  Synthetic oligonucleotide
atatacagaagggaagtccattcgcgtcgt

SEQ ID NO: 94099 - DNA, 30 bp, Artificial Sequence
  Synthetic oligonucleotide
agtcagcagaacatagaacgttgaggtcgt

SEQ ID NO: 94100 - DNA, 30 bp, Artificial Sequence
  Synthetic oligonucleotide
agtcgacatgctagataaagggaatgtcgt

SEQ ID NO: 94101 - DNA, 30 bp, Artificial Sequence
  Synthetic oligonucleotide
tctggatcgccctgtacaaacagcattcgt

SEQ ID NO: 94102 - DNA, 30 bp, Artificial Sequence
  Synthetic oligonucleotide
acagccgctcacaagcaagcacggattcgt

SEQ ID NO: 94103 - DNA, 30 bp, Artificial Sequence
  Synthetic oligonucleotide
gtatagggtatggtggtgatccccaaaggt

SEQ ID NO: 94104 - DNA, 30 bp, Artificial Sequence
  Synthetic oligonucleotide
agggagacatcagtccgggtgaatgaaggt

SEQ ID NO: 94105 - DNA, 31 bp, Artificial Sequence
  Synthetic oligonucleotide
gggtaacttcgtagtacgagcggatgaaggt

SEQ ID NO: 94106 - DNA, 30 bp, Artificial Sequence
  Synthetic oligonucleotide
caatcctaatggcggtcaccggctgaaggt

SEQ ID NO: 94107 - DNA, 30 bp, Artificial Sequence
  Synthetic oligonucleotide
atgagctctcacgttggcatcaagtaaggt

SEQ ID NO: 94108 - DNA, 30 bp, Artificial Sequence
  Synthetic oligonucleotide
aataaaccataacgaacgtgcttgtaaggt

SEQ ID NO: 94109 - DNA, 30 bp, Artificial Sequence
  Synthetic oligonucleotide
gggaggtaaaaaacagcatgttcttaaggt

SEQ ID NO: 94110 - DNA, 30 bp, Artificial Sequence
  Synthetic oligonucleotide
tagaggttgcttcaatctaacgatccaggt

SEQ ID NO: 94111 - DNA, 30 bp, Artificial Sequence
  Synthetic oligonucleotide
aaggcgtctcaaaccattagaccagcaggt

SEQ ID NO: 94112 - DNA, 30 bp, Artificial Sequence
  Synthetic oligonucleotide
aggatgtatggtaactgcaatcaatcaggt

SEQ ID NO: 94113 - DNA, 30 bp, Artificial Sequence
  Synthetic oligonucleotide
acgtctgatgtgaggttgagacttagaggt

SEQ ID NO: 94114 - DNA, 30 bp, Artificial Sequence
  Synthetic oligonucleotide
tcgtaccttaagtagagaggcgttagaggt

SEQ ID NO: 94115 - DNA, 30 bp, Artificial Sequence
  Synthetic oligonucleotide
ctgggatccggactaggtgagaaacgaggt

SEQ ID NO: 94116 - DNA, 30 bp, Artificial Sequence
  Synthetic oligonucleotide
tgaagatacacttcattaaagggacgaggt

SEQ ID NO: 94117 - DNA, 30 bp, Artificial Sequence
  Synthetic oligonucleotide
ggagtaccgagccagctaagaaagcgaggt

SEQ ID NO: 94118 - DNA, 30 bp, Artificial Sequence
  Synthetic oligonucleotide
taccaaattcgggtatgccagccaggaggt

SEQ ID NO: 94119 - DNA, 30 bp, Artificial Sequence
  Synthetic oligonucleotide
ggtgcacgggtaacccgcacgcgaggaggt

SEQ ID NO: 94120 - DNA, 30 bp, Artificial Sequence
  Synthetic oligonucleotide
aagaaactggacgtcgatgtaggaggaggt

SEQ ID NO: 94121 - DNA, 30 bp, Artificial Sequence
  Synthetic oligonucleotide
atcataaaattacataagctggcgggaggt

SEQ ID NO: 94122 - DNA, 30 bp, Artificial Sequence
  Synthetic oligonucleotide
accatgaggttaggtaaaagctaatgaggt

SEQ ID NO: 94123 - DNA, 30 bp, Artificial Sequence
  Synthetic oligonucleotide
gtcggtatggtagcctcgggagcagtaggt

SEQ ID NO: 94124 - DNA, 30 bp, Artificial Sequence
  Synthetic oligonucleotide
gtcgtagtcccgctgctgtagtgagtaggt

SEQ ID NO: 94125 - DNA, 30 bp, Artificial Sequence
  Synthetic oligonucleotide
tgagcgaatccaggctaattattcgtaggt

SEQ ID NO: 94126 - DNA, 30 bp, Artificial Sequence
  Synthetic oligonucleotide
actcccacagccaggtgcgcattggtaggt

SEQ ID NO: 94127 - DNA, 30 bp, Artificial Sequence
  Synthetic oligonucleotide
tgataaacggttattaccgatgatttaggt

SEQ ID NO: 94128 - DNA, 30 bp, Artificial Sequence
  Synthetic oligonucleotide
acgcctgattggaggcaaagcgccgacggt

SEQ ID NO: 94129 - DNA, 30 bp, Artificial Sequence
  Synthetic oligonucleotide
cgcgagaggcttagcacctagctgtacggt

SEQ ID NO: 94130 - DNA, 30 bp, Artificial Sequence
  Synthetic oligonucleotide
cagaagatggccgtgtagaaggaggccggt

SEQ ID NO: 94131 - DNA, 30 bp, Artificial Sequence
  Synthetic oligonucleotide
agctagaaatccagtatccaaacggccggt

SEQ ID NO: 94132 - DNA, 30 bp, Artificial Sequence
  Synthetic oligonucleotide
gaaggatagagagttgatgtataatccggt

SEQ ID NO: 94133 - DNA, 30 bp, Artificial Sequence
  Synthetic oligonucleotide
catctcgaccaatcaaggagggtcagcggt

SEQ ID NO: 94134 - DNA, 30 bp, Artificial Sequence
  Synthetic oligonucleotide
tgtattcttgggccgggttcgtttcgcggt

SEQ ID NO: 94135 - DNA, 30 bp, Artificial Sequence
  Synthetic oligonucleotide
ggaaggctgaataagaggtatttaggcggt

SEQ ID NO: 94136 - DNA, 30 bp, Artificial Sequence
  Synthetic oligonucleotide
accgtgtcatacgatgtaattaagggcggt

SEQ ID NO: 94137 - DNA, 30 bp, Artificial Sequence
  Synthetic oligonucleotide
agaagaaataccatagctatggcatgcggt

SEQ ID NO: 94138 - DNA, 30 bp, Artificial Sequence
  Synthetic oligonucleotide
agcacgggcaacgagttgagggcttgcggt

SEQ ID NO: 94139 - DNA, 30 bp, Artificial Sequence
  Synthetic oligonucleotide
cggacatgtttttaaaggctcaatctcggt

SEQ ID NO: 94140 - DNA, 30 bp, Artificial Sequence
  Synthetic oligonucleotide
cgataagtagggcgcgacgatataaagggt

SEQ ID NO: 94141 - DNA, 30 bp, Artificial Sequence
  Synthetic oligonucleotide
ggatgacccgcctgacctagctccaagggt

SEQ ID NO: 94142 - DNA, 30 bp, Artificial Sequence
  Synthetic oligonucleotide
cagttgactcgggcttacaggttacagggt

SEQ ID NO: 94143 - DNA, 30 bp, Artificial Sequence
  Synthetic oligonucleotide
catggcgtaagtgggagcggggcggagggt

SEQ ID NO: 94144 - DNA, 30 bp, Artificial Sequence
  Synthetic oligonucleotide
ataatattgtcgaacggaaggtgggagggt

SEQ ID NO: 94145 - DNA, 30 bp, Artificial Sequence
  Synthetic oligonucleotide
gcatagcaagtgtgttcgcgaccgtagggt

SEQ ID NO: 94146 - DNA, 30 bp, Artificial Sequence
  Synthetic oligonucleotide
cggaattcagcttatggcctagcttagggt

SEQ ID NO: 94147 - DNA, 30 bp, Artificial Sequence
  Synthetic oligonucleotide
cttgatacaaagaactaggacaacacgggt

SEQ ID NO: 94148 - DNA, 30 bp, Artificial Sequence
  Synthetic oligonucleotide
ggtgaatcgaggtcttaatagcgcccgggt

SEQ ID NO: 94149 - DNA, 30 bp, Artificial Sequence
  Synthetic oligonucleotide
ctcatcttttcataactgtatctgccgggt

SEQ ID NO: 94150 - DNA, 30 bp, Artificial Sequence
  Synthetic oligonucleotide
tcagaaccctaaataggtggtcgagcgggt

SEQ ID NO: 94151 - DNA, 30 bp, Artificial Sequence
  Synthetic oligonucleotide
cgcacgttttaatacagagcacacgcgggt

SEQ ID NO: 94152 - DNA, 30 bp, Artificial Sequence
  Synthetic oligonucleotide
gaagcatgctctcggccgggtcagtcgggt

SEQ ID NO: 94153 - DNA, 30 bp, Artificial Sequence
  Synthetic oligonucleotide
cttaacgttacaggtaaggaacagcggggt

SEQ ID NO: 94154 - DNA, 30 bp, Artificial Sequence
  Synthetic oligonucleotide
gaggaggtcggaatgcagatcagagggggt

SEQ ID NO: 94155 - DNA, 30 bp, Artificial Sequence
  Synthetic oligonucleotide
ttcgcaatggagtaagaagatattgggggt

SEQ ID NO: 94156 - DNA, 30 bp, Artificial Sequence
  Synthetic oligonucleotide
atgatgataaaacaaactgcaccatggggt

SEQ ID NO: 94157 - DNA, 30 bp, Artificial Sequence
  Synthetic oligonucleotide
tgagggacaacagaagctcgctaggtgggt

SEQ ID NO: 94158 - DNA, 30 bp, Artificial Sequence
  Synthetic oligonucleotide
gaataaagattacggtgctagggattgggt

SEQ ID NO: 94159 - DNA, 30 bp, Artificial Sequence
  Synthetic oligonucleotide
agggcacacggagggaaagccacgttgggt

SEQ ID NO: 94160 - DNA, 30 bp, Artificial Sequence
  Synthetic oligonucleotide
cagttagtagaaggggcggattacaatggt

SEQ ID NO: 94161 - DNA, 30 bp, Artificial Sequence
  Synthetic oligonucleotide
cgtatctgaggaaacaatgtatctaatggt

SEQ ID NO: 94162 - DNA, 30 bp, Artificial Sequence
  Synthetic oligonucleotide
agcaaattctcgttaacgaacagtcatggt

SEQ ID NO: 94163 - DNA, 30 bp, Artificial Sequence
  Synthetic oligonucleotide
tagagtgaattggtggaaagtagagatggt

SEQ ID NO: 94164 - DNA, 30 bp, Artificial Sequence
  Synthetic oligonucleotide
gtgttataagagtcgttagatcaggatggt

SEQ ID NO: 94165 - DNA, 30 bp, Artificial Sequence
  Synthetic oligonucleotide
atgtacttgccgaagttaaacggatatggt

SEQ ID NO: 94166 - DNA, 30 bp, Artificial Sequence
  Synthetic oligonucleotide
aaatagccagtacgcgtatgggactatggt

SEQ ID NO: 94167 - DNA, 30 bp, Artificial Sequence
  Synthetic oligonucleotide
ggcgatacggcaggacgacctagctatggt

SEQ ID NO: 94168 - DNA, 30 bp, Artificial Sequence
  Synthetic oligonucleotide
acagaagtaagcgagcgccggcagtatggt

SEQ ID NO: 94169 - DNA, 30 bp, Artificial Sequence
  Synthetic oligonucleotide
gcagcccgagggtatagtcgatattatggt

SEQ ID NO: 94170 - DNA, 30 bp, Artificial Sequence
  Synthetic oligonucleotide
cgttagtgccaatgtaacgagtatactggt

SEQ ID NO: 94171 - DNA, 30 bp, Artificial Sequence
  Synthetic oligonucleotide
atagggtggcatcgttgttacatccctggt

SEQ ID NO: 94172 - DNA, 30 bp, Artificial Sequence
  Synthetic oligonucleotide
ccgttcaacgagggcctagatggggctggt

SEQ ID NO: 94173 - DNA, 30 bp, Artificial Sequence
  Synthetic oligonucleotide
agtcaagtggagaaacaagaggtgtctggt

SEQ ID NO: 94174 - DNA, 30 bp, Artificial Sequence
  Synthetic oligonucleotide
gaatcagggggcattgctgccataagtggt

SEQ ID NO: 94175 - DNA, 30 bp, Artificial Sequence
  Synthetic oligonucleotide
aggaaaagcatactgtaccgtgggagtggt

SEQ ID NO: 94176 - DNA, 30 bp, Artificial Sequence
  Synthetic oligonucleotide
agccgtctgtgggtccagtgtgggagtggt

SEQ ID NO: 94177 - DNA, 30 bp, Artificial Sequence
  Synthetic oligonucleotide
gtactagtactcatagggcgtcaacgtggt

SEQ ID NO: 94178 - DNA, 30 bp, Artificial Sequence
  Synthetic oligonucleotide
tgaaaggccggaaagactaagtcgcgtggt

SEQ ID NO: 94179 - DNA, 30 bp, Artificial Sequence
  Synthetic oligonucleotide
cgaagacaggtgcgcccgagtttgcgtggt

SEQ ID NO: 94180 - DNA, 30 bp, Artificial Sequence
  Synthetic oligonucleotide
ggtaatgcatacaaacggcgggtaggtggt

SEQ ID NO: 94181 - DNA, 30 bp, Artificial Sequence
  Synthetic oligonucleotide
cgcaggtggtagtcttgcaaattctgtggt

SEQ ID NO: 94182 - DNA, 30 bp, Artificial Sequence
  Synthetic oligonucleotide
gactcactgagagcatgtgatgtgtgtggt

SEQ ID NO: 94183 - DNA, 30 bp, Artificial Sequence
  Synthetic oligonucleotide
cgcgcgactcgaccgtgttatgagattggt

SEQ ID NO: 94184 - DNA, 30 bp, Artificial Sequence
  Synthetic oligonucleotide
caataacgtgggtgcatatgccggcttggt

SEQ ID NO: 94185 - DNA, 30 bp, Artificial Sequence
  Synthetic oligonucleotide
atgttcgattcctggtttacagcgtttggt

SEQ ID NO: 94186 - DNA, 30 bp, Artificial Sequence
  Synthetic oligonucleotide
aagcgaggaaacgtaccttgcccgaaatgt

SEQ ID NO: 94187 - DNA, 30 bp, Artificial Sequence
  Synthetic oligonucleotide
gatagcgtagagcgtggtacgagtaaatgt

SEQ ID NO: 94188 - DNA, 30 bp, Artificial Sequence
  Synthetic oligonucleotide
caggcggaaaatttactactgccacaatgt

SEQ ID NO: 94189 - DNA, 30 bp, Artificial Sequence
  Synthetic oligonucleotide
atcatcctcaggcattttagagagcaatgt

SEQ ID NO: 94190 - DNA, 30 bp, Artificial Sequence
  Synthetic oligonucleotide
cagttatctagggaaaaccccacgtaatgt

SEQ ID NO: 94191 - DNA, 30 bp, Artificial Sequence
  Synthetic oligonucleotide
tcgcacaatgcaacaagccaaacaacatgt

SEQ ID NO: 94192 - DNA, 30 bp, Artificial Sequence
  Synthetic oligonucleotide
gacatatgcttagattccagagagacatgt

SEQ ID NO: 94193 - DNA, 30 bp, Artificial Sequence
  Synthetic oligonucleotide
cctaagcctagtcggcctgaagtgccatgt

SEQ ID NO: 94194 - DNA, 30 bp, Artificial Sequence
  Synthetic oligonucleotide
atagtccagctgagacccgtagtgccatgt

SEQ ID NO: 94195 - DNA, 30 bp, Artificial Sequence
  Synthetic oligonucleotide
gtggctcactgcgagagaactgaggcatgt

SEQ ID NO: 94196 - DNA, 30 bp, Artificial Sequence
  Synthetic oligonucleotide
atccgtcggccgcattaccgaactgcatgt

SEQ ID NO: 94197 - DNA, 30 bp, Artificial Sequence
  Synthetic oligonucleotide
ggagtgtaaacttgatggcaggagtcatgt

SEQ ID NO: 94198 - DNA, 30 bp, Artificial Sequence
  Synthetic oligonucleotide
aggtatcagcagacaggattatagtcatgt

SEQ ID NO: 94199 - DNA, 30 bp, Artificial Sequence
  Synthetic oligonucleotide
catcggggttgccttagcgattgaagatgt

SEQ ID NO: 94200 - DNA, 30 bp, Artificial Sequence
  Synthetic oligonucleotide
catcagtcgggttaaatacataatagatgt

SEQ ID NO: 94201 - DNA, 30 bp, Artificial Sequence
  Synthetic oligonucleotide
tggggacgcgatgcggttttggaccgatgt

SEQ ID NO: 94202 - DNA, 30 bp, Artificial Sequence
  Synthetic oligonucleotide
tagtggatctaggccaaaaaccgtcgatgt

SEQ ID NO: 94203 - DNA, 30 bp, Artificial Sequence
  Synthetic oligonucleotide
cgagtccgtgccaagataaggtggggatgt

SEQ ID NO: 94204 - DNA, 30 bp, Artificial Sequence
  Synthetic oligonucleotide
tctagcacccgatactggtcactgggatgt

SEQ ID NO: 94205 - DNA, 30 bp, Artificial Sequence
  Synthetic oligonucleotide
gcgagactttataccacgaaaagactatgt

SEQ ID NO: 94206 - DNA, 30 bp, Artificial Sequence
  Synthetic oligonucleotide
cgggccaacgatgtacgccaagaggtatgt

SEQ ID NO: 94207 - DNA, 30 bp, Artificial Sequence
  Synthetic oligonucleotide
acgctcaagaaaatgagaaggtaattatgt

SEQ ID NO: 94208 - DNA, 30 bp, Artificial Sequence
  Synthetic oligonucleotide
ctggccaaaacgcctggtccgtggttatgt

SEQ ID NO: 94209 - DNA, 30 bp, Artificial Sequence
  Synthetic oligonucleotide
caggcgaaatgattcgtttccgaacactgt

SEQ ID NO: 94210 - DNA, 30 bp, Artificial Sequence
  Synthetic oligonucleotide
aagtagaatggttcagacatggtacactgt

SEQ ID NO: 94211 - DNA, 30 bp, Artificial Sequence
  Synthetic oligonucleotide
gtggagcagccgaaataaaagcggcactgt

SEQ ID NO: 94212 - DNA, 30 bp, Artificial Sequence
  Synthetic oligonucleotide
tcctctcaactgcagagagcccaagactgt

SEQ ID NO: 94213 - DNA, 30 bp, Artificial Sequence
  Synthetic oligonucleotide
agtcaatgaagaaaactattggactactgt

SEQ ID NO: 94214 - DNA, 30 bp, Artificial Sequence
  Synthetic oligonucleotide
cgcgatctcagggacgctccaatctactgt

SEQ ID NO: 94215 - DNA, 30 bp, Artificial Sequence
  Synthetic oligonucleotide
ctactagagtcgatgtgcgtggtaccctgt

SEQ ID NO: 94216 - DNA, 30 bp, Artificial Sequence
  Synthetic oligonucleotide
cgtgtagggttaagtgaaagctctgcctgt

SEQ ID NO: 94217 - DNA, 30 bp, Artificial Sequence
  Synthetic oligonucleotide
gtccgttcagcagatgggacaaaaagctgt

SEQ ID NO: 94218 - DNA, 30 bp, Artificial Sequence
  Synthetic oligonucleotide
ttcgagtcaacgcagaatgtgagtagctgt

SEQ ID NO: 94219 - DNA, 30 bp, Artificial Sequence
  Synthetic oligonucleotide
aggaagcgcctcaagaagacggttagctgt

SEQ ID NO: 94220 - DNA, 30 bp, Artificial Sequence
  Synthetic oligonucleotide
gctcgaggttgagctgtaacgtaacgctgt

SEQ ID NO: 94221 - DNA, 30 bp, Artificial Sequence
  Synthetic oligonucleotide
atgtggccatgctggggacgactgatctgt

SEQ ID NO: 94222 - DNA, 30 bp, Artificial Sequence
  Synthetic oligonucleotide
cgaccgaaaaagaaatgcatttttatctgt

SEQ ID NO: 94223 - DNA, 30 bp, Artificial Sequence
  Synthetic oligonucleotide
gtcatgggggatagcgacgtctcacagtgt

SEQ ID NO: 94224 - DNA, 30 bp, Artificial Sequence
  Synthetic oligonucleotide
gctgacggggtctctgagagtccggagtgt

SEQ ID NO: 94225 - DNA, 30 bp, Artificial Sequence
  Synthetic oligonucleotide
gcaagttgcgatctagcgtgcgcggagtgt

SEQ ID NO: 94226 - DNA, 30 bp, Artificial Sequence
  Synthetic oligonucleotide
acagttactacgagggttgcgggtgagtgt

SEQ ID NO: 94227 - DNA, 30 bp, Artificial Sequence
  Synthetic oligonucleotide
ccaaaagtgcaaagggcctcacgatcgtgt

SEQ ID NO: 94228 - DNA, 30 bp, Artificial Sequence
  Synthetic oligonucleotide
cgggatggggacagacatcaccggtcgtgt

SEQ ID NO: 94229 - DNA, 30 bp, Artificial Sequence
  Synthetic oligonucleotide
tcggataataaagtggcagataaaaggtgt

SEQ ID NO: 94230 - DNA, 30 bp, Artificial Sequence
  Synthetic oligonucleotide
actagtcgagcaaaatgatcacagaggtgt

SEQ ID NO: 94231 - DNA, 30 bp, Artificial Sequence
  Synthetic oligonucleotide
tagcaaaataaaaatgaaatattacggtgt

SEQ ID NO: 94232 - DNA, 31 bp, Artificial Sequence
  Synthetic oligonucleotide
tggaaggtttccacgaggtcacctgcggtgt

SEQ ID NO: 94233 - DNA, 30 bp, Artificial Sequence
  Synthetic oligonucleotide
tgagacggtgaggactatgagtacgggtgt

SEQ ID NO: 94234 - DNA, 30 bp, Artificial Sequence
  Synthetic oligonucleotide
cgctcggtgcaggggggtgagggcatgtgt

SEQ ID NO: 94235 - DNA, 30 bp, Artificial Sequence
  Synthetic oligonucleotide
aacgggcaggggtcacgcctgcatatgtgt

SEQ ID NO: 94236 - DNA, 30 bp, Artificial Sequence
  Synthetic oligonucleotide
ttgaaggtctcgatacggtgtatgctgtgt

SEQ ID NO: 94237 - DNA, 30 bp, Artificial Sequence
  Synthetic oligonucleotide
atgtccatactcagggatggtggcgtgtgt

SEQ ID NO: 94238 - DNA, 30 bp, Artificial Sequence
  Synthetic oligonucleotide
gtgtaacgcgtagtgcggtccaatgtgtgt

SEQ ID NO: 94239 - DNA, 30 bp, Artificial Sequence
  Synthetic oligonucleotide
ggaggctcacatggaccctactatttgtgt

SEQ ID NO: 94240 - DNA, 30 bp, Artificial Sequence
  Synthetic oligonucleotide
taaacggaactccaacatgcagtgaattgt

SEQ ID NO: 94241 - DNA, 30 bp, Artificial Sequence
  Synthetic oligonucleotide
tgacatacatgaatcgcattacgccattgt

SEQ ID NO: 94242 - DNA, 30 bp, Artificial Sequence
  Synthetic oligonucleotide
gtcaggggagaggatgctggggtcgattgt

SEQ ID NO: 94243 - DNA, 30 bp, Artificial Sequence
  Synthetic oligonucleotide
taggcaattcgctggagggcgggggattgt

SEQ ID NO: 94244 - DNA, 30 bp, Artificial Sequence
  Synthetic oligonucleotide
cacaggcctaaggcggctatcgctacttgt

SEQ ID NO: 94245 - DNA, 30 bp, Artificial Sequence
  Synthetic oligonucleotide
gaatggtacagagtcaccaatacaccttgt

SEQ ID NO: 94246 - DNA, 30 bp, Artificial Sequence
  Synthetic oligonucleotide
agtctagtaaacataggaaacaatgcttgt

SEQ ID NO: 94247 - DNA, 30 bp, Artificial Sequence
  Synthetic oligonucleotide
tcagaacaatgtctcgggggctaacgttgt

SEQ ID NO: 94248 - DNA, 30 bp, Artificial Sequence
  Synthetic oligonucleotide
ggccaccatacaacgaagtccgagctttgt

SEQ ID NO: 94249 - DNA, 30 bp, Artificial Sequence
  Synthetic oligonucleotide
ccggccagagcatcggcataaagcgtttgt

SEQ ID NO: 94250 - DNA, 30 bp, Artificial Sequence
  Synthetic oligonucleotide
tagaaccagagtgtttagggccctgtttgt

SEQ ID NO: 94251 - DNA, 30 bp, Artificial Sequence
  Synthetic oligonucleotide
gcgtgggatagctggtaaagcaggttttgt

SEQ ID NO: 94252 - DNA, 30 bp, Artificial Sequence
  Synthetic oligonucleotide
cttggagatacagaactggactgtaaaatt

SEQ ID NO: 94253 - DNA, 30 bp, Artificial Sequence
  Synthetic oligonucleotide
ttgcatgggaaaagacatttgcctgaaatt

SEQ ID NO: 94254 - DNA, 30 bp, Artificial Sequence
  Synthetic oligonucleotide
ttcgtgggacagcaaggtcgcatgtaaatt

SEQ ID NO: 94255 - DNA, 30 bp, Artificial Sequence
  Synthetic oligonucleotide
tcttaggtggagccatcgtctcgcacaatt

SEQ ID NO: 94256 - DNA, 30 bp, Artificial Sequence
  Synthetic oligonucleotide
ggaaggaatgtagttaggaaaagcccaatt

SEQ ID NO: 94257 - DNA, 30 bp, Artificial Sequence
  Synthetic oligonucleotide
ctatgaaaggagaacgaatcgcgtgcaatt

SEQ ID NO: 94258 - DNA, 30 bp, Artificial Sequence
  Synthetic oligonucleotide
ggtgttacggatgtgcgcaaagccagaatt

SEQ ID NO: 94259 - DNA, 30 bp, Artificial Sequence
  Synthetic oligonucleotide
cgtgagaccgggccgtgatgtctcagaatt

SEQ ID NO: 94260 - DNA, 30 bp, Artificial Sequence
  Synthetic oligonucleotide
accggtcaatcaccacacctatcgagaatt

SEQ ID NO: 94261 - DNA, 30 bp, Artificial Sequence
  Synthetic oligonucleotide
ggtgtttacttactgaacccgtaccgaatt

SEQ ID NO: 94262 - DNA, 30 bp, Artificial Sequence
  Synthetic oligonucleotide
tctaagcacacgaatccacctggtcgaatt

SEQ ID NO: 94263 - DNA, 30 bp, Artificial Sequence
  Synthetic oligonucleotide
tacgtaaaggagaaagaaccagattgaatt

SEQ ID NO: 94264 - DNA, 30 bp, Artificial Sequence
  Synthetic oligonucleotide
ggaggactaccgtactatggtataataatt

SEQ ID NO: 94265 - DNA, 30 bp, Artificial Sequence
  Synthetic oligonucleotide
cgatggccttgataacgattgtaagtaatt

SEQ ID NO: 94266 - DNA, 30 bp, Artificial Sequence
  Synthetic oligonucleotide
gcgagctagctgcttcaggatggcgtaatt

SEQ ID NO: 94267 - DNA, 30 bp, Artificial Sequence
  Synthetic oligonucleotide
acggctccaccaagcagctgaatattaatt

SEQ ID NO: 94268 - DNA, 30 bp, Artificial Sequence
  Synthetic oligonucleotide
aacacgcaccgttagggacgtagaaacatt

SEQ ID NO: 94269 - DNA, 30 bp, Artificial Sequence
  Synthetic oligonucleotide
aaagtcctaacaggctgagtcgtaaacatt

SEQ ID NO: 94270 - DNA, 30 bp, Artificial Sequence
  Synthetic oligonucleotide
tcatgccccacaggagcagtagtcaacatt

SEQ ID NO: 94271 - DNA, 30 bp, Artificial Sequence
  Synthetic oligonucleotide
gaacgaatccgaacacgagcgtcacacatt

SEQ ID NO: 94272 - DNA, 30 bp, Artificial Sequence
  Synthetic oligonucleotide
atcgagggcggaacttcccatttctacatt

SEQ ID NO: 94273 - DNA, 30 bp, Artificial Sequence
  Synthetic oligonucleotide
gctaagcggcttgggcgggtatattacatt

SEQ ID NO: 94274 - DNA, 30 bp, Artificial Sequence
  Synthetic oligonucleotide
tacataacccagtctatccgggataccatt

SEQ ID NO: 94275 - DNA, 30 bp, Artificial Sequence
  Synthetic oligonucleotide
gggaaggtcgatgtttggagaactaccatt

SEQ ID NO: 94276 - DNA, 30 bp, Artificial Sequence
  Synthetic oligonucleotide
taagcagcccaacgattaggaggacccatt

SEQ ID NO: 94277 - DNA, 30 bp, Artificial Sequence
  Synthetic oligonucleotide
caacacatgtaagggaactcctgcgccatt

SEQ ID NO: 94278 - DNA, 30 bp, Artificial Sequence
  Synthetic oligonucleotide
ggcaaaccggtgtcacctgtaaatgccatt

SEQ ID NO: 94279 - DNA, 30 bp, Artificial Sequence
  Synthetic oligonucleotide
tacgtaagtaatcatagatcctcaagcatt

SEQ ID NO: 94280 - DNA, 30 bp, Artificial Sequence
  Synthetic oligonucleotide
tcaacaggaggcatggggatacaatgcatt

SEQ ID NO: 94281 - DNA, 30 bp, Artificial Sequence
  Synthetic oligonucleotide
ttaaacagtggtacatccagttcatgcatt

SEQ ID NO: 94282 - DNA, 31 bp, Artificial Sequence
  Synthetic oligonucleotide
tagacccgcatttaacacagtggtgtgcatt

SEQ ID NO: 94283 - DNA, 30 bp, Artificial Sequence
  Synthetic oligonucleotide
caggacatatcataatccggattcatcatt

SEQ ID NO: 94284 - DNA, 30 bp, Artificial Sequence
  Synthetic oligonucleotide
ggactagtacgaggacacctcggagtcatt

SEQ ID NO: 94285 - DNA, 30 bp, Artificial Sequence
  Synthetic oligonucleotide
tgggaatatggcataccagagacggtcatt

SEQ ID NO: 94286 - DNA, 30 bp, Artificial Sequence
  Synthetic oligonucleotide
tcgtacagataggaacacagtggattcatt

SEQ ID NO: 94287 - DNA, 30 bp, Artificial Sequence
  Synthetic oligonucleotide
gtccaagtgtcgattggagttgccaagatt

SEQ ID NO: 94288 - DNA, 30 bp, Artificial Sequence
  Synthetic oligonucleotide
ttggtgggttttcgcgtacgacctaagatt

SEQ ID NO: 94289 - DNA, 30 bp, Artificial Sequence
  Synthetic oligonucleotide
tacactccggctcgacaccctgaacagatt

SEQ ID NO: 94290 - DNA, 30 bp, Artificial Sequence
  Synthetic oligonucleotide
accaggaagactggtaagcgaaatcagatt

SEQ ID NO: 94291 - DNA, 30 bp, Artificial Sequence
  Synthetic oligonucleotide
ggagaaagaagcgcaaattaagtagagatt

SEQ ID NO: 94292 - DNA, 30 bp, Artificial Sequence
  Synthetic oligonucleotide
aacccgaaaagtccgataaacgatgagatt

SEQ ID NO: 94293 - DNA, 30 bp, Artificial Sequence
  Synthetic oligonucleotide
taagcgacagggggttatttgaatgcgatt

SEQ ID NO: 94294 - DNA, 30 bp, Artificial Sequence
  Synthetic oligonucleotide
agataaaagacttcaatagtttctgcgatt

SEQ ID NO: 94295 - DNA, 30 bp, Artificial Sequence
  Synthetic oligonucleotide
ctggttaaccggtggaaaattagtgcgatt

SEQ ID NO: 94296 - DNA, 30 bp, Artificial Sequence
  Synthetic oligonucleotide
tcgattactggacaacaaattgaaaggatt

SEQ ID NO: 94297 - DNA, 30 bp, Artificial Sequence
  Synthetic oligonucleotide
ccagaaatatcgaggttcaggactaggatt

SEQ ID NO: 94298 - DNA, 30 bp, Artificial Sequence
  Synthetic oligonucleotide
tcgtcagggaatattaagctgatccggatt

SEQ ID NO: 94299 - DNA, 30 bp, Artificial Sequence
  Synthetic oligonucleotide
cgagcatcggacggggatcaattcgggatt

SEQ ID NO: 94300 - DNA, 30 bp, Artificial Sequence
  Synthetic oligonucleotide
cagacgggcgttaagcgtgaacgtgggatt

SEQ ID NO: 94301 - DNA, 30 bp, Artificial Sequence
  Synthetic oligonucleotide
acgacgaaatggatcttcggaggatggatt

SEQ ID NO: 94302 - DNA, 30 bp, Artificial Sequence
  Synthetic oligonucleotide
tacaggggagagtaactttaacgttggatt

SEQ ID NO: 94303 - DNA, 30 bp, Artificial Sequence
  Synthetic oligonucleotide
agacaagtccatagtaactctataatgatt

SEQ ID NO: 94304 - DNA, 30 bp, Artificial Sequence
  Synthetic oligonucleotide
caagataaggaacgccgatggctactgatt

SEQ ID NO: 94305 - DNA, 30 bp, Artificial Sequence
  Synthetic oligonucleotide
ttacaggagcaataacgaatgaagctgatt

SEQ ID NO: 94306 - DNA, 30 bp, Artificial Sequence
  Synthetic oligonucleotide
cagtgcgcgagtatgaactaactgctgatt

SEQ ID NO: 94307 - DNA, 30 bp, Artificial Sequence
  Synthetic oligonucleotide
agatgtgcgattctggaggaacgggtgatt

SEQ ID NO: 94308 - DNA, 30 bp, Artificial Sequence
  Synthetic oligonucleotide
cctaagggatgcaagatgcccattgtgatt

SEQ ID NO: 94309 - DNA, 30 bp, Artificial Sequence
  Synthetic oligonucleotide
ggtcgaggaacagatcgtttctggttgatt

SEQ ID NO: 94310 - DNA, 30 bp, Artificial Sequence
  Synthetic oligonucleotide
gtcggtgtagttaaatagcttagtttgatt

SEQ ID NO: 94311 - DNA, 30 bp, Artificial Sequence
  Synthetic oligonucleotide
gtcggctcatacagcacaaattggcatatt

SEQ ID NO: 94312 - DNA, 30 bp, Artificial Sequence
  Synthetic oligonucleotide
gcgtgacaacattctgcacacactcatatt

SEQ ID NO: 94313 - DNA, 30 bp, Artificial Sequence
  Synthetic oligonucleotide
tttcgtaggcctaacaggaggaacgatatt

SEQ ID NO: 94314 - DNA, 30 bp, Artificial Sequence
  Synthetic oligonucleotide
tacgccagaacgtaatcggagcgctatatt

SEQ ID NO: 94315 - DNA, 30 bp, Artificial Sequence
  Synthetic oligonucleotide
acgttgcaatacagagtaagatagtatatt

SEQ ID NO: 94316 - DNA, 30 bp, Artificial Sequence
  Synthetic oligonucleotide
tcgatgaccacctagggggatggcactatt

SEQ ID NO: 94317 - DNA, 30 bp, Artificial Sequence
  Synthetic oligonucleotide
cgacaaatcggaaatcaaacttttactatt

SEQ ID NO: 94318 - DNA, 30 bp, Artificial Sequence
  Synthetic oligonucleotide
acttggtggataggacagggggatcctatt

SEQ ID NO: 94319 - DNA, 30 bp, Artificial Sequence
  Synthetic oligonucleotide
caacgagttggaatcgtgaggacggctatt

SEQ ID NO: 94320 - DNA, 30 bp, Artificial Sequence
  Synthetic oligonucleotide
aacgtaaccgacagtgcgatggcggctatt

SEQ ID NO: 94321 - DNA, 30 bp, Artificial Sequence
  Synthetic oligonucleotide
acgtcacctagcgagtgaaggtattctatt

SEQ ID NO: 94322 - DNA, 30 bp, Artificial Sequence
  Synthetic oligonucleotide
acaggtgtggagcaatgctgggatagtatt

SEQ ID NO: 94323 - DNA, 30 bp, Artificial Sequence
  Synthetic oligonucleotide
aggagactgaattccattgaatcgggtatt

SEQ ID NO: 94324 - DNA, 30 bp, Artificial Sequence
  Synthetic oligonucleotide
cggatgttagagcacgataggagcattatt

SEQ ID NO: 94325 - DNA, 30 bp, Artificial Sequence
  Synthetic oligonucleotide
gtcggggtgccgttcaaatcagagattatt

SEQ ID NO: 94326 - DNA, 30 bp, Artificial Sequence
  Synthetic oligonucleotide
gtcacctgtgctaccgaaccgtcgattatt

SEQ ID NO: 94327 - DNA, 30 bp, Artificial Sequence
  Synthetic oligonucleotide
tacggggacttaagggctgcaactattatt

SEQ ID NO: 94328 - DNA, 30 bp, Artificial Sequence
  Synthetic oligonucleotide
ggcgcaggaggcgtactagtccgacttatt

SEQ ID NO: 94329 - DNA, 30 bp, Artificial Sequence
  Synthetic oligonucleotide
ccaacaaacgacaatagatggaggtttatt

SEQ ID NO: 94330 - DNA, 30 bp, Artificial Sequence
  Synthetic oligonucleotide
tcgtactaacgtgtacccacagcaaaactt

SEQ ID NO: 94331 - DNA, 30 bp, Artificial Sequence
  Synthetic oligonucleotide
gggttcgctgtaagtgggctagcaaaactt

SEQ ID NO: 94332 - DNA, 30 bp, Artificial Sequence
  Synthetic oligonucleotide
ctctggccggcgctgtgagggctaaaactt

SEQ ID NO: 94333 - DNA, 30 bp, Artificial Sequence
  Synthetic oligonucleotide
caatcgatggaacgaggtccggccaaactt

SEQ ID NO: 94334 - DNA, 30 bp, Artificial Sequence
  Synthetic oligonucleotide
aacgggcccatcatccccattggagaactt

SEQ ID NO: 94335 - DNA, 30 bp, Artificial Sequence
  Synthetic oligonucleotide
atggatgatattacgaaaggcggataactt

SEQ ID NO: 94336 - DNA, 30 bp, Artificial Sequence
  Synthetic oligonucleotide
gggacaacgttcggtaagaccaccacactt

SEQ ID NO: 94337 - DNA, 30 bp, Artificial Sequence
  Synthetic oligonucleotide
gtaggtgtaaccctgggatgcgctgcactt

SEQ ID NO: 94338 - DNA, 30 bp, Artificial Sequence
  Synthetic oligonucleotide
cgcaacggaacggttgtactcacctcactt

SEQ ID NO: 94339 - DNA, 30 bp, Artificial Sequence
  Synthetic oligonucleotide
gaaacgtggacgtcacgtatggcctcactt

SEQ ID NO: 94340 - DNA, 30 bp, Artificial Sequence
  Synthetic oligonucleotide
tggtaatagaagcgtcatctgccttcactt

SEQ ID NO: 94341 - DNA, 30 bp, Artificial Sequence
  Synthetic oligonucleotide
tcatagaatcgttcgaccagagtaagactt

SEQ ID NO: 94342 - DNA, 30 bp, Artificial Sequence
  Synthetic oligonucleotide
tcgccaacgattccctaatcaccacgactt

SEQ ID NO: 94343 - DNA, 30 bp, Artificial Sequence
  Synthetic oligonucleotide
cagtcgtcaagaagtgctggcaaccgactt

SEQ ID NO: 94344 - DNA, 30 bp, Artificial Sequence
  Synthetic oligonucleotide
agtaggtaccacagttatatagcaggactt

SEQ ID NO: 94345 - DNA, 30 bp, Artificial Sequence
  Synthetic oligonucleotide
taacacgggcaagggcgtaggctcggactt

SEQ ID NO: 94346 - DNA, 30 bp, Artificial Sequence
  Synthetic oligonucleotide
cgagaatggagaaccggcatccggggactt

SEQ ID NO: 94347 - DNA, 30 bp, Artificial Sequence
  Synthetic oligonucleotide
gacacaaataatagtcgtcagcggggactt

SEQ ID NO: 94348 - DNA, 30 bp, Artificial Sequence
  Synthetic oligonucleotide
ccggaaagagaaaggtattaaatgtgactt

SEQ ID NO: 94349 - DNA, 30 bp, Artificial Sequence
  Synthetic oligonucleotide
aacgaaatataggttcaagatatgtgactt

SEQ ID NO: 94350 - DNA, 30 bp, Artificial Sequence
  Synthetic oligonucleotide
gaacaaggttacgttgtgacaggcatactt

SEQ ID NO: 94351 - DNA, 30 bp, Artificial Sequence
  Synthetic oligonucleotide
tcgaatcccctgaaggagagagtactactt

SEQ ID NO: 94352 - DNA, 30 bp, Artificial Sequence
  Synthetic oligonucleotide
tcatggagagtgtgtgtactagctgtactt

SEQ ID NO: 94353 - DNA, 30 bp, Artificial Sequence
  Synthetic oligonucleotide
cggatcagagggcgaaagcgcgtccacctt

SEQ ID NO: 94354 - DNA, 30 bp, Artificial Sequence
  Synthetic oligonucleotide
gagcggggaataaggatcagaggatacctt

SEQ ID NO: 94355 - DNA, 30 bp, Artificial Sequence
  Synthetic oligonucleotide
gagcaatcaacataataacgctagtacctt

SEQ ID NO: 94356 - DNA, 30 bp, Artificial Sequence
  Synthetic oligonucleotide
acggggggggcggaataagaacattacctt

SEQ ID NO: 94357 - DNA, 30 bp, Artificial Sequence
  Synthetic oligonucleotide
ttaagatgtgcgaggcaaccacgttacctt

SEQ ID NO: 94358 - DNA, 30 bp, Artificial Sequence
  Synthetic oligonucleotide
cgtgggcatctccctgggctattaaccctt

SEQ ID NO: 94359 - DNA, 30 bp, Artificial Sequence
  Synthetic oligonucleotide
aacgccagacacgaattcaaacaacccctt

SEQ ID NO: 94360 - DNA, 30 bp, Artificial Sequence
  Synthetic oligonucleotide
tctcgagtaagctgctaccccgatcccctt

SEQ ID NO: 94361 - DNA, 30 bp, Artificial Sequence
  Synthetic oligonucleotide
acggccaaacggacaacagtgcacgccctt

SEQ ID NO: 94362 - DNA, 30 bp, Artificial Sequence
  Synthetic oligonucleotide
ggataaaagtcagattcctggaagtccctt

SEQ ID NO: 94363 - DNA, 30 bp, Artificial Sequence
  Synthetic oligonucleotide
tcggatgatcaagtttgccattaaagcctt

SEQ ID NO: 94364 - DNA, 30 bp, Artificial Sequence
  Synthetic oligonucleotide
taacaggatactggaggtgttcaacgcctt

SEQ ID NO: 94365 - DNA, 30 bp, Artificial Sequence
  Synthetic oligonucleotide
agccatatcagccccggcgagtcctgcctt

SEQ ID NO: 94366 - DNA, 30 bp, Artificial Sequence
  Synthetic oligonucleotide
aggagtccctaggaaggtaatggctgcctt

SEQ ID NO: 94367 - DNA, 30 bp, Artificial Sequence
  Synthetic oligonucleotide
agtgtagagcattggacaatgtgcatcctt

SEQ ID NO: 94368 - DNA, 30 bp, Artificial Sequence
  Synthetic oligonucleotide
gggaactggagctgatggcttgagaagctt

SEQ ID NO: 94369 - DNA, 30 bp, Artificial Sequence
  Synthetic oligonucleotide
gcaggggataggttgcgtcgaacacagctt

SEQ ID NO: 94370 - DNA, 30 bp, Artificial Sequence
  Synthetic oligonucleotide
ttaatcaactcgggcacggcaaacgagctt

SEQ ID NO: 94371 - DNA, 30 bp, Artificial Sequence
  Synthetic oligonucleotide
attgatgaaatctaaaaaactgaatagctt

SEQ ID NO: 94372 - DNA, 30 bp, Artificial Sequence
  Synthetic oligonucleotide
ggcttggtgtatgcttaagatacttagctt

SEQ ID NO: 94373 - DNA, 30 bp, Artificial Sequence
  Synthetic oligonucleotide
cggaaccagattggcatatcatctacgctt

SEQ ID NO: 94374 - DNA, 30 bp, Artificial Sequence
  Synthetic oligonucleotide
acttgaccgaccgagtgttcacgcgcgctt

SEQ ID NO: 94375 - DNA, 30 bp, Artificial Sequence
  Synthetic oligonucleotide
cctagaaatcgggcttgatcgtagtcgctt

SEQ ID NO: 94376 - DNA, 30 bp, Artificial Sequence
  Synthetic oligonucleotide
agaattaggtccatgataccctggcggctt

SEQ ID NO: 94377 - DNA, 30 bp, Artificial Sequence
  Synthetic oligonucleotide
gcggaatatgctaataaatttgaagggctt

SEQ ID NO: 94378 - DNA, 30 bp, Artificial Sequence
  Synthetic oligonucleotide
agggcgctgtgtcaaccaggggtcgggctt

SEQ ID NO: 94379 - DNA, 30 bp, Artificial Sequence
  Synthetic oligonucleotide
cgagagcgttgccaggcaattattgggctt

SEQ ID NO: 94380 - DNA, 31 bp, Artificial Sequence
  Synthetic oligonucleotide
aagaggcgcgactcggcacagaaattggctt

SEQ ID NO: 94381 - DNA, 30 bp, Artificial Sequence
  Synthetic oligonucleotide
cgcgtgagtgattgcgaaagtgacctgctt

SEQ ID NO: 94382 - DNA, 30 bp, Artificial Sequence
  Synthetic oligonucleotide
tctgcgttcatgaaatacaactctgtgctt

SEQ ID NO: 94383 - DNA, 30 bp, Artificial Sequence
  Synthetic oligonucleotide
tagaagcgtcccggacagtaccgacatctt

SEQ ID NO: 94384 - DNA, 30 bp, Artificial Sequence
  Synthetic oligonucleotide
gcgaggggaaacctagttcgtcgagatctt

SEQ ID NO: 94385 - DNA, 30 bp, Artificial Sequence
  Synthetic oligonucleotide
ttacaggggaccattgggcatcgggatctt

SEQ ID NO: 94386 - DNA, 30 bp, Artificial Sequence
  Synthetic oligonucleotide
acatctaccacacgtgatagtccaactctt

SEQ ID NO: 94387 - DNA, 30 bp, Artificial Sequence
  Synthetic oligonucleotide
acactttcggcgagagctaggcgccctctt

SEQ ID NO: 94388 - DNA, 30 bp, Artificial Sequence
  Synthetic oligonucleotide
cgaagtgcttgagcgtgccgcctgcctctt

SEQ ID NO: 94389 - DNA, 30 bp, Artificial Sequence
  Synthetic oligonucleotide
ggaaaagccaaggacatatgctgcgctctt

SEQ ID NO: 94390 - DNA, 30 bp, Artificial Sequence
  Synthetic oligonucleotide
tcggccggagcgaaatataggcgacgtctt

SEQ ID NO: 94391 - DNA, 30 bp, Artificial Sequence
  Synthetic oligonucleotide
atggtccctagaagggcaacaaagtgtctt

SEQ ID NO: 94392 - DNA, 30 bp, Artificial Sequence
  Synthetic oligonucleotide
ctaaattcggggaaactaatacgcattctt

SEQ ID NO: 94393 - DNA, 30 bp, Artificial Sequence
  Synthetic oligonucleotide
agataggtgtgctataaatcctgcaaagtt

SEQ ID NO: 94394 - DNA, 30 bp, Artificial Sequence
  Synthetic oligonucleotide
agcgctctcatgtcgccgattcggaaagtt

SEQ ID NO: 94395 - DNA, 30 bp, Artificial Sequence
  Synthetic oligonucleotide
cgttcatttccgaggctgggtgaacaagtt

SEQ ID NO: 94396 - DNA, 30 bp, Artificial Sequence
  Synthetic oligonucleotide
cgactacgacaaatcctacggtaacaagtt

SEQ ID NO: 94397 - DNA, 30 bp, Artificial Sequence
  Synthetic oligonucleotide
tggccagagtgtagatgtgactttcaagtt

SEQ ID NO: 94398 - DNA, 30 bp, Artificial Sequence
  Synthetic oligonucleotide
ggagtaagcaaatgtcaaaaatgataagtt

SEQ ID NO: 94399 - DNA, 30 bp, Artificial Sequence
  Synthetic oligonucleotide
cgaaaatctaagccacaagcacggagagtt

SEQ ID NO: 94400 - DNA, 30 bp, Artificial Sequence
  Synthetic oligonucleotide
atcagcagatgaatcgtgaagtaaggagtt

SEQ ID NO: 94401 - DNA, 30 bp, Artificial Sequence
  Synthetic oligonucleotide
gcgaaccgtaactgtgcgagtacaggagtt

SEQ ID NO: 94402 - DNA, 30 bp, Artificial Sequence
  Synthetic oligonucleotide
ggttaaaaccgagtcggtcagataggagtt

SEQ ID NO: 94403 - DNA, 30 bp, Artificial Sequence
  Synthetic oligonucleotide
cactcgaaaggtattctcggggatggagtt

SEQ ID NO: 94404 - DNA, 30 bp, Artificial Sequence
  Synthetic oligonucleotide
ataggtcgttagatacgacgtactggagtt

SEQ ID NO: 94405 - DNA, 30 bp, Artificial Sequence
  Synthetic oligonucleotide
caggaatcactagaagcagatatatgagtt

SEQ ID NO: 94406 - DNA, 30 bp, Artificial Sequence
  Synthetic oligonucleotide
aagaggcgaccatagtcgttaagctgagtt

SEQ ID NO: 94407 - DNA, 30 bp, Artificial Sequence
  Synthetic oligonucleotide
agtgcgaatcgacaagtgctggccatagtt

SEQ ID NO: 94408 - DNA, 30 bp, Artificial Sequence
  Synthetic oligonucleotide
agggatactgagaacgggtgctggatagtt

SEQ ID NO: 94409 - DNA, 30 bp, Artificial Sequence
  Synthetic oligonucleotide
tgtacgaccccacgtgagaccgaagtagtt

SEQ ID NO: 94410 - DNA, 30 bp, Artificial Sequence
  Synthetic oligonucleotide
tagaacaaataaaggggacgaatggtagtt

SEQ ID NO: 94411 - DNA, 31 bp, Artificial Sequence
  Synthetic oligonucleotide
cgaaagaacagtacgagccaggttattagtt

SEQ ID NO: 94412 - DNA, 30 bp, Artificial Sequence
  Synthetic oligonucleotide
atgcgtacaactgtgtaatggagtaacgtt

SEQ ID NO: 94413 - DNA, 30 bp, Artificial Sequence
  Synthetic oligonucleotide
gctacggtataatagaggtgcgaacacgtt

SEQ ID NO: 94414 - DNA, 30 bp, Artificial Sequence
  Synthetic oligonucleotide
taaggcgaggctagtatctgacttcacgtt

SEQ ID NO: 94415 - DNA, 30 bp, Artificial Sequence
  Synthetic oligonucleotide
ccattgggacaagtctgtatcgactacgtt

SEQ ID NO: 94416 - DNA, 30 bp, Artificial Sequence
  Synthetic oligonucleotide
taccaaagctagatcgtattgctcaccgtt

SEQ ID NO: 94417 - DNA, 30 bp, Artificial Sequence
  Synthetic oligonucleotide
gcgcgagatgcgatgggggaataacccgtt

SEQ ID NO: 94418 - DNA, 30 bp, Artificial Sequence
  Synthetic oligonucleotide
cgatagggtccaataactgtaaggagcgtt

SEQ ID NO: 94419 - DNA, 30 bp, Artificial Sequence
  Synthetic oligonucleotide
atcattcgacgaataggccgatggcgcgtt

SEQ ID NO: 94420 - DNA, 30 bp, Artificial Sequence
  Synthetic oligonucleotide
caagaaaatgcgaagctggtagcaggcgtt

SEQ ID NO: 94421 - DNA, 30 bp, Artificial Sequence
  Synthetic oligonucleotide
ccgaatataagaaagtccacgctgtgcgtt

SEQ ID NO: 94422 - DNA, 30 bp, Artificial Sequence
  Synthetic oligonucleotide
cacacttgtacataaacgcgtggaatcgtt

SEQ ID NO: 94423 - DNA, 31 bp, Artificial Sequence
  Synthetic oligonucleotide
cagggaccaaggtctgttagatctgctcgtt

SEQ ID NO: 94424 - DNA, 30 bp, Artificial Sequence
  Synthetic oligonucleotide
ggaaggaatgtaactggggtgcccgtcgtt

SEQ ID NO: 94425 - DNA, 30 bp, Artificial Sequence
  Synthetic oligonucleotide
actggaataatcgtttaaagggtggtcgtt

SEQ ID NO: 94426 - DNA, 30 bp, Artificial Sequence
  Synthetic oligonucleotide
tggcacaaccagggcgcgacatgcttcgtt

SEQ ID NO: 94427 - DNA, 30 bp, Artificial Sequence
  Synthetic oligonucleotide
tctgaagaagtatgctggtcattaaaggtt

SEQ ID NO: 94428 - DNA, 31 bp, Artificial Sequence
  Synthetic oligonucleotide
gctcgagcctggcgtcacaatgagataggtt

SEQ ID NO: 94429 - DNA, 30 bp, Artificial Sequence
  Synthetic oligonucleotide
cagcgatccaggatcaccggcaagtaggtt

SEQ ID NO: 94430 - DNA, 30 bp, Artificial Sequence
  Synthetic oligonucleotide
tagcgtagatcatccactcgtatagcggtt

SEQ ID NO: 94431 - DNA, 30 bp, Artificial Sequence
  Synthetic oligonucleotide
tgcgcttactacacaccactcgtatcggtt

SEQ ID NO: 94432 - DNA, 30 bp, Artificial Sequence
  Synthetic oligonucleotide
cagtatagctacgtcggaacgaggagggtt

SEQ ID NO: 94433 - DNA, 30 bp, Artificial Sequence
  Synthetic oligonucleotide
gaacgcgtcgtagacacatttgtgagggtt

SEQ ID NO: 94434 - DNA, 30 bp, Artificial Sequence
  Synthetic oligonucleotide
agtgcatcgtagcggacatacgctagggtt

SEQ ID NO: 94435 - DNA, 29 bp, Artificial Sequence
  Synthetic oligonucleotide
tccaacgggcataaggaggcaaacgggtt

SEQ ID NO: 94436 - DNA, 30 bp, Artificial Sequence
  Synthetic oligonucleotide
agtaatgggatctattggcaaaagcgggtt

SEQ ID NO: 94437 - DNA, 30 bp, Artificial Sequence
  Synthetic oligonucleotide
attagcggggtgacaaccgtgtgaggggtt

SEQ ID NO: 94438 - DNA, 30 bp, Artificial Sequence
  Synthetic oligonucleotide
gaccgtttaaagcgggcccgaaggggggtt

SEQ ID NO: 94439 - DNA, 30 bp, Artificial Sequence
  Synthetic oligonucleotide
taagaaagataaaccaggcgaaatggggtt

SEQ ID NO: 94440 - DNA, 30 bp, Artificial Sequence
  Synthetic oligonucleotide
catcagcgcataggtattaggaatttggtt

SEQ ID NO: 94441 - DNA, 30 bp, Artificial Sequence
  Synthetic oligonucleotide
caggtcgtgtgctgcctagttccaaatgtt

SEQ ID NO: 94442 - DNA, 30 bp, Artificial Sequence
  Synthetic oligonucleotide
gtaggcgggatagtcctacactataatgtt

SEQ ID NO: 94443 - DNA, 30 bp, Artificial Sequence
  Synthetic oligonucleotide
gaagtccacaacattataatcacacatgtt

SEQ ID NO: 94444 - DNA, 30 bp, Artificial Sequence
  Synthetic oligonucleotide
actgtgccggtcagttaatctgtgcatgtt

SEQ ID NO: 94445 - DNA, 30 bp, Artificial Sequence
  Synthetic oligonucleotide
gaggatgggaacccaacccgtgtgcatgtt

SEQ ID NO: 94446 - DNA, 30 bp, Artificial Sequence
  Synthetic oligonucleotide
gcttcctgaagaaatcgccagcaggatgtt

SEQ ID NO: 94447 - DNA, 30 bp, Artificial Sequence
  Synthetic oligonucleotide
ctagtaaatacaactagatcgacatatgtt

SEQ ID NO: 94448 - DNA, 30 bp, Artificial Sequence
  Synthetic oligonucleotide
acgtgcacaaggaccggtgagtctactgtt

SEQ ID NO: 94449 - DNA, 30 bp, Artificial Sequence
  Synthetic oligonucleotide
ttgggtgagcggatgggttatcgtactgtt

SEQ ID NO: 94450 - DNA, 30 bp, Artificial Sequence
  Synthetic oligonucleotide
gtgctcgtagtgcgctccttaactgctgtt

SEQ ID NO: 94451 - DNA, 30 bp, Artificial Sequence
  Synthetic oligonucleotide
cttggggagagcgacgagaccataagtgtt

SEQ ID NO: 94452 - DNA, 30 bp, Artificial Sequence
  Synthetic oligonucleotide
aagatcaagggtgcctataggaagagtgtt

SEQ ID NO: 94453 - DNA, 30 bp, Artificial Sequence
  Synthetic oligonucleotide
gtctgaaaacagtgaaaaggtggtagtgtt

SEQ ID NO: 94454 - DNA, 30 bp, Artificial Sequence
  Synthetic oligonucleotide
actgggtttacgttacataagtggcgtgtt

SEQ ID NO: 94455 - DNA, 30 bp, Artificial Sequence
  Synthetic oligonucleotide
agagctatgaggggctcggacgaaggtgtt

SEQ ID NO: 94456 - DNA, 30 bp, Artificial Sequence
  Synthetic oligonucleotide
tctgccgactgagagtgctcgaacggtgtt

SEQ ID NO: 94457 - DNA, 30 bp, Artificial Sequence
  Synthetic oligonucleotide
gatcgcgcctgagtatgacatcaatgtgtt

SEQ ID NO: 94458 - DNA, 30 bp, Artificial Sequence
  Synthetic oligonucleotide
tcaaggcgttttcggcgatacctatgtgtt

SEQ ID NO: 94459 - DNA, 30 bp, Artificial Sequence
  Synthetic oligonucleotide
tacacgaatgtatgatgggtggactgtgtt

SEQ ID NO: 94460 - DNA, 30 bp, Artificial Sequence
  Synthetic oligonucleotide
gtagtgcttcaacgtgagtatgtaattgtt

SEQ ID NO: 94461 - DNA, 30 bp, Artificial Sequence
  Synthetic oligonucleotide
gatgacatgtggtacgacaaacacgttgtt

SEQ ID NO: 94462 - DNA, 30 bp, Artificial Sequence
  Synthetic oligonucleotide
cctaggtggtagccaagcagtggcaaattt

SEQ ID NO: 94463 - DNA, 30 bp, Artificial Sequence
  Synthetic oligonucleotide
tcgaaaaaaagggcgtccatgttcaaattt

SEQ ID NO: 94464 - DNA, 30 bp, Artificial Sequence
  Synthetic oligonucleotide
aggcattaggcatgaccacgtcgacaattt

SEQ ID NO: 94465 - DNA, 30 bp, Artificial Sequence
  Synthetic oligonucleotide
tcaggacgttggacgggacctgcggaattt

SEQ ID NO: 94466 - DNA, 30 bp, Artificial Sequence
  Synthetic oligonucleotide
cgcgggcgtgaggcataagacccgtaattt

SEQ ID NO: 94467 - DNA, 30 bp, Artificial Sequence
  Synthetic oligonucleotide
tgagacgggtgcgaaagaggcctttaattt

SEQ ID NO: 94468 - DNA, 30 bp, Artificial Sequence
  Synthetic oligonucleotide
tgattacggagcgatcggagtgaaccattt

SEQ ID NO: 94469 - DNA, 27 bp, Artificial Sequence
  Synthetic oligonucleotide
cgtcgcctacgcgatacgagaccattt

SEQ ID NO: 94470 - DNA, 30 bp, Artificial Sequence
  Synthetic oligonucleotide
agacgaagcatagtcgcgcctagtccattt

SEQ ID NO: 94471 - DNA, 30 bp, Artificial Sequence
  Synthetic oligonucleotide
aagagataaccgaagtcagcgttggcattt

SEQ ID NO: 94472 - DNA, 30 bp, Artificial Sequence
  Synthetic oligonucleotide
tgagactaattctagcaggataactcattt

SEQ ID NO: 94473 - DNA, 30 bp, Artificial Sequence
  Synthetic oligonucleotide
ggtgagcgaaggataaacatggcacgattt

SEQ ID NO: 94474 - DNA, 30 bp, Artificial Sequence
  Synthetic oligonucleotide
cgtatcctcacttctcacactcaccgattt

SEQ ID NO: 94475 - DNA, 30 bp, Artificial Sequence
  Synthetic oligonucleotide
ggttaaccagaacgccatcaaatccgattt

SEQ ID NO: 94476 - DNA, 30 bp, Artificial Sequence
  Synthetic oligonucleotide
cagtcgggcgaaggaccaagctatcgattt

SEQ ID NO: 94477 - DNA, 30 bp, Artificial Sequence
  Synthetic oligonucleotide
gaggtgaggtgacccacgggttctcgattt

SEQ ID NO: 94478 - DNA, 30 bp, Artificial Sequence
  Synthetic oligonucleotide
cgattataccagaaatgacactaaggattt

SEQ ID NO: 94479 - DNA, 30 bp, Artificial Sequence
  Synthetic oligonucleotide
tcaaaaccagttaagtactcaagaaacttt

SEQ ID NO: 94480 - DNA, 30 bp, Artificial Sequence
  Synthetic oligonucleotide
tcggcgtgcgtcacctgagaatctcacttt

SEQ ID NO: 94481 - DNA, 30 bp, Artificial Sequence
  Synthetic oligonucleotide
gctaaaacggtagggcaggaaattcacttt

SEQ ID NO: 94482 - DNA, 30 bp, Artificial Sequence
  Synthetic oligonucleotide
cagggtatagcctattacctagtttacttt

SEQ ID NO: 94483 - DNA, 30 bp, Artificial Sequence
  Synthetic oligonucleotide
ggcaaaataagttcaggtgagataaccttt

SEQ ID NO: 94484 - DNA, 30 bp, Artificial Sequence
  Synthetic oligonucleotide
acccgtgacaacccatgatcgagcagcttt

SEQ ID NO: 94485 - DNA, 30 bp, Artificial Sequence
  Synthetic oligonucleotide
aatagacgggaagccgtgacagtacgcttt

SEQ ID NO: 94486 - DNA, 30 bp, Artificial Sequence
  Synthetic oligonucleotide
aaaggggactcccacacccatagtatcttt

SEQ ID NO: 94487 - DNA, 30 bp, Artificial Sequence
  Synthetic oligonucleotide
acaagggaataagtctcaagtcggaagttt

SEQ ID NO: 94488 - DNA, 30 bp, Artificial Sequence
  Synthetic oligonucleotide
aagtgtcggcatgagtgcgtaaataagttt

SEQ ID NO: 94489 - DNA, 30 bp, Artificial Sequence
  Synthetic oligonucleotide
aagatggtgtgatcatggtcaataacgttt

SEQ ID NO: 94490 - DNA, 30 bp, Artificial Sequence
  Synthetic oligonucleotide
agtgaggagtcaacatagagactcacgttt

SEQ ID NO: 94491 - DNA, 30 bp, Artificial Sequence
  Synthetic oligonucleotide
actgcggatcatagttacaacgttacgttt

SEQ ID NO: 94492 - DNA, 30 bp, Artificial Sequence
  Synthetic oligonucleotide
acgaagtattcgtctggcatagggccgttt

SEQ ID NO: 94493 - DNA, 30 bp, Artificial Sequence
  Synthetic oligonucleotide
cacgggctgataggtacgagcagatcgttt

SEQ ID NO: 94494 - DNA, 30 bp, Artificial Sequence
  Synthetic oligonucleotide
gaaaggtggtggaggctaaaagtttcgttt

SEQ ID NO: 94495 - DNA, 30 bp, Artificial Sequence
  Synthetic oligonucleotide
tggcaagatcctgcctcaaaggtgaggttt

SEQ ID NO: 94496 - DNA, 30 bp, Artificial Sequence
  Synthetic oligonucleotide
aaggctagcttgtgcgaagaaaaccggttt

SEQ ID NO: 94497 - DNA, 30 bp, Artificial Sequence
  Synthetic oligonucleotide
gcggcacaggaagacccaatggaccggttt

SEQ ID NO: 94498 - DNA, 30 bp, Artificial Sequence
  Synthetic oligonucleotide
cctaaggcctctagtacgaaacctcggttt

SEQ ID NO: 94499 - DNA, 30 bp, Artificial Sequence
  Synthetic oligonucleotide
aaaggcgagccaagttcaaatagtcggttt

SEQ ID NO: 94500 - DNA, 30 bp, Artificial Sequence
  Synthetic oligonucleotide
ttctggacgagttcgctgagagacatgttt

SEQ ID NO: 94501 - DNA, 30 bp, Artificial Sequence
  Synthetic oligonucleotide
gactgagcgtgcgtatgagactaactgttt

SEQ ID NO: 94502 - DNA, 30 bp, Artificial Sequence
  Synthetic oligonucleotide
ctgagtgttctaatagtaaatagtgtgttt

SEQ ID NO: 94503 - DNA, 30 bp, Artificial Sequence
  Synthetic oligonucleotide
atagatgttgaacctagaccgtgtgtgttt

SEQ ID NO: 94504 - DNA, 30 bp, Artificial Sequence
  Synthetic oligonucleotide
aagcgagtcgttgcggaacacggattgttt

SEQ ID NO: 94505 - DNA, 30 bp, Artificial Sequence
  Synthetic oligonucleotide
gccaacgcacagtaaccgagtgccttgttt

SEQ ID NO: 94506 - DNA, 30 bp, Artificial Sequence
  Synthetic oligonucleotide
gagacgaattcgggcaaggcatagttgttt

SEQ ID NO: 94507 - DNA, 30 bp, Artificial Sequence
  Synthetic oligonucleotide
agctggtggcgtcaacggcctggcaatttt

SEQ ID NO: 94508 - DNA, 30 bp, Artificial Sequence
  Synthetic oligonucleotide
cggaaaactcttagatactgcactgatttt

SEQ ID NO: 94509 - DNA, 30 bp, Artificial Sequence
  Synthetic oligonucleotide
gggaacttcacgttctctcggtagtatttt

SEQ ID NO: 94510 - DNA, 30 bp, Artificial Sequence
  Synthetic oligonucleotide
cgcaacagcccaccaatcagaccaactttt

SEQ ID NO: 94511 - DNA, 30 bp, Artificial Sequence
  Synthetic oligonucleotide
ggactaagctcaacgcataagaagactttt

SEQ ID NO: 94512 - DNA, 30 bp, Artificial Sequence
  Synthetic oligonucleotide
caccaaaagctagaggtgtgcgcacttttt

SEQ ID NO: 94513 - DNA, 30 bp, Artificial Sequence
  Synthetic oligonucleotide
agctgaagcggggaggggacagcagttttt

SEQ ID NO: 94514 - DNA, 30 bp, Artificial Sequence
  Synthetic oligonucleotide
tacgacgtgcgggcaccctgggcaaaaaaa

SEQ ID NO: 94515 - DNA, 30 bp, Artificial Sequence
  Synthetic oligonucleotide
aagtgttaggccccaggtcacacgaaaaaa

SEQ ID NO: 94516 - DNA, 30 bp, Artificial Sequence
  Synthetic oligonucleotide
aggtatcggcctagacattatagtaaaaaa

SEQ ID NO: 94517 - DNA, 30 bp, Artificial Sequence
  Synthetic oligonucleotide
ggactctattgacaactaatgagacaaaaa

SEQ ID NO: 94518 - DNA, 30 bp, Artificial Sequence
  Synthetic oligonucleotide
gtagttccggggccaacagactgacaaaaa

SEQ ID NO: 94519 - DNA, 30 bp, Artificial Sequence
  Synthetic oligonucleotide
acgcaaatgactatgtaccgccgccaaaaa

SEQ ID NO: 94520 - DNA, 30 bp, Artificial Sequence
  Synthetic oligonucleotide
agctaggcccaatctccaggaggtcaaaaa

SEQ ID NO: 94521 - DNA, 30 bp, Artificial Sequence
  Synthetic oligonucleotide
cccatgagcggcactaaaccgagagaaaaa

SEQ ID NO: 94522 - DNA, 30 bp, Artificial Sequence
  Synthetic oligonucleotide
gttcatttcatcatgagggtaagcgaaaaa

SEQ ID NO: 94523 - DNA, 30 bp, Artificial Sequence
  Synthetic oligonucleotide
agatcaggagtgacccaaatcaaggaaaaa

SEQ ID NO: 94524 - DNA, 30 bp, Artificial Sequence
  Synthetic oligonucleotide
gttcgaattgcatacctaagatgtgaaaaa

SEQ ID NO: 94525 - DNA, 30 bp, Artificial Sequence
  Synthetic oligonucleotide
tcacaggtgccgatttcatgtccttaaaaa

SEQ ID NO: 94526 - DNA, 30 bp, Artificial Sequence
  Synthetic oligonucleotide
tgcacacccagagcccaacatgcgacaaaa

SEQ ID NO: 94527 - DNA, 30 bp, Artificial Sequence
  Synthetic oligonucleotide
gtgtagatagaatatgcgactcggacaaaa

SEQ ID NO: 94528 - DNA, 30 bp, Artificial Sequence
  Synthetic oligonucleotide
tgggtccgctcgcaagcaaccgtgacaaaa

SEQ ID NO: 94529 - DNA, 30 bp, Artificial Sequence
  Synthetic oligonucleotide
tcacgtcatgtgggaacattaattacaaaa

SEQ ID NO: 94530 - DNA, 30 bp, Artificial Sequence
  Synthetic oligonucleotide
ttcgaagtcgacatggtgttaggcccaaaa

SEQ ID NO: 94531 - DNA, 30 bp, Artificial Sequence
  Synthetic oligonucleotide
caacgttaatggtatggcggtggcccaaaa

SEQ ID NO: 94532 - DNA, 30 bp, Artificial Sequence
  Synthetic oligonucleotide
cagatttcaagcgtatatcactatccaaaa

SEQ ID NO: 94533 - DNA, 30 bp, Artificial Sequence
  Synthetic oligonucleotide
caactcaaagtgttaccttcacgtccaaaa

SEQ ID NO: 94534 - DNA, 30 bp, Artificial Sequence
  Synthetic oligonucleotide
cccagcccccactgataactaaaggcaaaa

SEQ ID NO: 94535 - DNA, 30 bp, Artificial Sequence
  Synthetic oligonucleotide
gtggaatcggtaaagatcagataggcaaaa

SEQ ID NO: 94536 - DNA, 29 bp, Artificial Sequence
  Synthetic oligonucleotide
gaaacgagacaatcttccccccggcaaaa

SEQ ID NO: 94537 - DNA, 30 bp, Artificial Sequence
  Synthetic oligonucleotide
ccattagcagtctaatgcatactatcaaaa

SEQ ID NO: 94538 - DNA, 30 bp, Artificial Sequence
  Synthetic oligonucleotide
gtaacacagccgagaagtggtcagtcaaaa

SEQ ID NO: 94539 - DNA, 30 bp, Artificial Sequence
  Synthetic oligonucleotide
cgcttcaaaccttctgaacctaggtcaaaa

SEQ ID NO: 94540 - DNA, 30 bp, Artificial Sequence
  Synthetic oligonucleotide
cctcagaggcgggtgatcagttgttcaaaa

SEQ ID NO: 94541 - DNA, 30 bp, Artificial Sequence
  Synthetic oligonucleotide
atgagcactaaaatcgtcgtgaaaagaaaa

SEQ ID NO: 94542 - DNA, 30 bp, Artificial Sequence
  Synthetic oligonucleotide
gcgtgctgagatggaattgatacaagaaaa

SEQ ID NO: 94543 - DNA, 30 bp, Artificial Sequence
  Synthetic oligonucleotide
gagcgtggtgacaagattgagtagagaaaa

SEQ ID NO: 94544 - DNA, 30 bp, Artificial Sequence
  Synthetic oligonucleotide
ccacatagattcgcgatttcaggtagaaaa

SEQ ID NO: 94545 - DNA, 30 bp, Artificial Sequence
  Synthetic oligonucleotide
gaactatgctcggtacacaatgttagaaaa

SEQ ID NO: 94546 - DNA, 30 bp, Artificial Sequence
  Synthetic oligonucleotide
atggatagtggtccgtactgccaacgaaaa

SEQ ID NO: 94547 - DNA, 30 bp, Artificial Sequence
  Synthetic oligonucleotide
aggttatgtcagatcgcaaatgaccgaaaa

SEQ ID NO: 94548 - DNA, 30 bp, Artificial Sequence
  Synthetic oligonucleotide
ccgcctgtattaagtattgtctcaggaaaa

SEQ ID NO: 94549 - DNA, 30 bp, Artificial Sequence
  Synthetic oligonucleotide
gagcgattaacgttaagggaggtcggaaaa

SEQ ID NO: 94550 - DNA, 30 bp, Artificial Sequence
  Synthetic oligonucleotide
cgccgacccaaaaccctaggaacgggaaaa

SEQ ID NO: 94551 - DNA, 30 bp, Artificial Sequence
  Synthetic oligonucleotide
taacaggtcggagcaaggcttactggaaaa

SEQ ID NO: 94552 - DNA, 30 bp, Artificial Sequence
  Synthetic oligonucleotide
atgggctgtgactcgttacaatctggaaaa

SEQ ID NO: 94553 - DNA, 30 bp, Artificial Sequence
  Synthetic oligonucleotide
tcgggggcacatacgggatcatgtggaaaa

SEQ ID NO: 94554 - DNA, 30 bp, Artificial Sequence
  Synthetic oligonucleotide
tggtggagaggctacgataaagactgaaaa

SEQ ID NO: 94555 - DNA, 30 bp, Artificial Sequence
  Synthetic oligonucleotide
tcgagtgggccacaaagctggagctgaaaa

SEQ ID NO: 94556 - DNA, 30 bp, Artificial Sequence
  Synthetic oligonucleotide
cgtcacaagattcagcctggacgaataaaa

SEQ ID NO: 94557 - DNA, 30 bp, Artificial Sequence
  Synthetic oligonucleotide
agcatgaagcccactgtacgcccactaaaa

SEQ ID NO: 94558 - DNA, 30 bp, Artificial Sequence
  Synthetic oligonucleotide
ttcctttgtcactcaacgaaagccctaaaa

SEQ ID NO: 94559 - DNA, 30 bp, Artificial Sequence
  Synthetic oligonucleotide
tttcattatccgagtgcatcgagcctaaaa

SEQ ID NO: 94560 - DNA, 30 bp, Artificial Sequence
  Synthetic oligonucleotide
gcaggttcagctctgccctgttagctaaaa

SEQ ID NO: 94561 - DNA, 30 bp, Artificial Sequence
  Synthetic oligonucleotide
cgattgaggtaccctccagtacctctaaaa

SEQ ID NO: 94562 - DNA, 30 bp, Artificial Sequence
  Synthetic oligonucleotide
cggttgcgcggaggaacgcgacacgtaaaa

SEQ ID NO: 94563 - DNA, 30 bp, Artificial Sequence
  Synthetic oligonucleotide
ggcagacgtaacggtactcggtgggtaaaa

SEQ ID NO: 94564 - DNA, 30 bp, Artificial Sequence
  Synthetic oligonucleotide
atgagataggcgtttggatgagttgtaaaa

SEQ ID NO: 94565 - DNA, 30 bp, Artificial Sequence
  Synthetic oligonucleotide
agagggggaggactatcacacgttgtaaaa

SEQ ID NO: 94566 - DNA, 30 bp, Artificial Sequence
  Synthetic oligonucleotide
gccacgcatcgtaattacagcgtcaacaaa

SEQ ID NO: 94567 - DNA, 30 bp, Artificial Sequence
  Synthetic oligonucleotide
agtagttaagacatagtaatggtcaacaaa

SEQ ID NO: 94568 - DNA, 30 bp, Artificial Sequence
  Synthetic oligonucleotide
acacacggcttcgaggaaggttgtaacaaa

SEQ ID NO: 94569 - DNA, 30 bp, Artificial Sequence
  Synthetic oligonucleotide
caggttcggggcctagaaccgcaacacaaa

SEQ ID NO: 94570 - DNA, 30 bp, Artificial Sequence
  Synthetic oligonucleotide
actgaacacacttaggatcgcttacacaaa

SEQ ID NO: 94571 - DNA, 30 bp, Artificial Sequence
  Synthetic oligonucleotide
tggacatactcgttccaaaggtaccacaaa

SEQ ID NO: 94572 - DNA, 30 bp, Artificial Sequence
  Synthetic oligonucleotide
ggcaagaggggaatcagagatcatcacaaa

SEQ ID NO: 94573 - DNA, 30 bp, Artificial Sequence
  Synthetic oligonucleotide
tcatgttgaatctggcctacaaaagacaaa

SEQ ID NO: 94574 - DNA, 30 bp, Artificial Sequence
  Synthetic oligonucleotide
tacaacgacaagctcggatcgatagacaaa

SEQ ID NO: 94575 - DNA, 30 bp, Artificial Sequence
  Synthetic oligonucleotide
cggggcctctggaataagttagtagacaaa

SEQ ID NO: 94576 - DNA, 30 bp, Artificial Sequence
  Synthetic oligonucleotide
ccttgtatttcgagccggctaacggacaaa

SEQ ID NO: 94577 - DNA, 30 bp, Artificial Sequence
  Synthetic oligonucleotide
tctactattcgccgacgacagagtgacaaa

SEQ ID NO: 94578 - DNA, 30 bp, Artificial Sequence
  Synthetic oligonucleotide
tccatggcagtgcgtcgaataaactacaaa

SEQ ID NO: 94579 - DNA, 30 bp, Artificial Sequence
  Synthetic oligonucleotide
ctgcgagacaccaagctgtggtagcccaaa

SEQ ID NO: 94580 - DNA, 30 bp, Artificial Sequence
  Synthetic oligonucleotide
ctaatgcctagtacataataccaagccaaa

SEQ ID NO: 94581 - DNA, 30 bp, Artificial Sequence
  Synthetic oligonucleotide
accaatcgtatccgtcccgtatctgccaaa

SEQ ID NO: 94582 - DNA, 30 bp, Artificial Sequence
  Synthetic oligonucleotide
caatcagcagttgacagtactcgatccaaa

SEQ ID NO: 94583 - DNA, 30 bp, Artificial Sequence
  Synthetic oligonucleotide
cacgggtataagcctatacggaactccaaa

SEQ ID NO: 94584 - DNA, 30 bp, Artificial Sequence
  Synthetic oligonucleotide
atgagaaaacgagagccgagttagtccaaa

SEQ ID NO: 94585 - DNA, 30 bp, Artificial Sequence
  Synthetic oligonucleotide
gggctgggcctgacataccgatggtccaaa

SEQ ID NO: 94586 - DNA, 31 bp, Artificial Sequence
  Synthetic oligonucleotide
gaggcaaccaccctacagacaccgttccaaa

SEQ ID NO: 94587 - DNA, 30 bp, Artificial Sequence
  Synthetic oligonucleotide
gttccttagggacgggttaagacaagcaaa

SEQ ID NO: 94588 - DNA, 30 bp, Artificial Sequence
  Synthetic oligonucleotide
ggcctggagtgtagcaaaggcgagagcaaa

SEQ ID NO: 94589 - DNA, 30 bp, Artificial Sequence
  Synthetic oligonucleotide
tggatgactgtggtcgaggttaaacgcaaa

SEQ ID NO: 94590 - DNA, 30 bp, Artificial Sequence
  Synthetic oligonucleotide
ctatgtaggcaaaataaatccaaccgcaaa

SEQ ID NO: 94591 - DNA, 30 bp, Artificial Sequence
  Synthetic oligonucleotide
ctgtataggagcaccaaaaagtgccgcaaa

SEQ ID NO: 94592 - DNA, 30 bp, Artificial Sequence
  Synthetic oligonucleotide
caggcaaaggaagccgtttcaacgggcaaa

SEQ ID NO: 94593 - DNA, 30 bp, Artificial Sequence
  Synthetic oligonucleotide
gacggtcgcgtggcgatgcccgagtgcaaa

SEQ ID NO: 94594 - DNA, 30 bp, Artificial Sequence
  Synthetic oligonucleotide
acgaaggaccggcggattgctacttgcaaa

SEQ ID NO: 94595 - DNA, 30 bp, Artificial Sequence
  Synthetic oligonucleotide
ggctgttcagggaggacttgtgcgatcaaa

SEQ ID NO: 94596 - DNA, 30 bp, Artificial Sequence
  Synthetic oligonucleotide
gggacaattgtcaaatggcgccgactcaaa

SEQ ID NO: 94597 - DNA, 30 bp, Artificial Sequence
  Synthetic oligonucleotide
aacttatcgagggaacaagacatactcaaa

SEQ ID NO: 94598 - DNA, 30 bp, Artificial Sequence
  Synthetic oligonucleotide
atgtaagtgtctaagttaactctactcaaa

SEQ ID NO: 94599 - DNA, 30 bp, Artificial Sequence
  Synthetic oligonucleotide
cggaacgcagtcggttcaagcagcctcaaa

SEQ ID NO: 94600 - DNA, 30 bp, Artificial Sequence
  Synthetic oligonucleotide
tcatttggtacgaatgagccaaaagtcaaa

SEQ ID NO: 94601 - DNA, 30 bp, Artificial Sequence
  Synthetic oligonucleotide
ccgaagagctacctgcatttctaagtcaaa

SEQ ID NO: 94602 - DNA, 30 bp, Artificial Sequence
  Synthetic oligonucleotide
cagcccccgcaactagttacaaaggtcaaa

SEQ ID NO: 94603 - DNA, 30 bp, Artificial Sequence
  Synthetic oligonucleotide
tgtgctacagggataatgtgaagggtcaaa

SEQ ID NO: 94604 - DNA, 30 bp, Artificial Sequence
  Synthetic oligonucleotide
gcgtttcacgggggctccacaaaattcaaa

SEQ ID NO: 94605 - DNA, 30 bp, Artificial Sequence
  Synthetic oligonucleotide
gtgacctagagaggaatatggtccaagaaa

SEQ ID NO: 94606 - DNA, 30 bp, Artificial Sequence
  Synthetic oligonucleotide
cgttacaacttgaagttgattcgcaagaaa

SEQ ID NO: 94607 - DNA, 30 bp, Artificial Sequence
  Synthetic oligonucleotide
atgaagagatataggaacgggaaacagaaa

SEQ ID NO: 94608 - DNA, 30 bp, Artificial Sequence
  Synthetic oligonucleotide
tcgggttggtggtagctgcttggccagaaa

SEQ ID NO: 94609 - DNA, 30 bp, Artificial Sequence
  Synthetic oligonucleotide
accgcgagtcacggaaaccgtaatcagaaa

SEQ ID NO: 94610 - DNA, 30 bp, Artificial Sequence
  Synthetic oligonucleotide
atggcctaagatgcgtcaaaccaagagaaa

SEQ ID NO: 94611 - DNA, 30 bp, Artificial Sequence
  Synthetic oligonucleotide
caccgtaagcgaccccaaggctacgagaaa

SEQ ID NO: 94612 - DNA, 30 bp, Artificial Sequence
  Synthetic oligonucleotide
ggtgacgaaaatcgtgcattcctggagaaa

SEQ ID NO: 94613 - DNA, 30 bp, Artificial Sequence
  Synthetic oligonucleotide
ggctcaatggatcagtccatctttgagaaa

SEQ ID NO: 94614 - DNA, 30 bp, Artificial Sequence
  Synthetic oligonucleotide
ggccatatgaaggaaggtattatatagaaa

SEQ ID NO: 94615 - DNA, 30 bp, Artificial Sequence
  Synthetic oligonucleotide
ttgcggtgaacctactgggtatggtagaaa

SEQ ID NO: 94616 - DNA, 30 bp, Artificial Sequence
  Synthetic oligonucleotide
gtgagttggcagtaaacgggtttgtagaaa

SEQ ID NO: 94617 - DNA, 30 bp, Artificial Sequence
  Synthetic oligonucleotide
taagcgccaataggagacccggcttagaaa

SEQ ID NO: 94618 - DNA, 30 bp, Artificial Sequence
  Synthetic oligonucleotide
cgaagtttagaggaacaggagcaaacgaaa

SEQ ID NO: 94619 - DNA, 30 bp, Artificial Sequence
  Synthetic oligonucleotide
cccaactcgaatgtgcatcagatgacgaaa

SEQ ID NO: 94620 - DNA, 30 bp, Artificial Sequence
  Synthetic oligonucleotide
aacaacgaaagttggagctccagtacgaaa

SEQ ID NO: 94621 - DNA, 30 bp, Artificial Sequence
  Synthetic oligonucleotide
gcggagagtcctaacgtttgttccccgaaa

SEQ ID NO: 94622 - DNA, 30 bp, Artificial Sequence
  Synthetic oligonucleotide
tagtgagagggcctttttgtgagagcgaaa

SEQ ID NO: 94623 - DNA, 30 bp, Artificial Sequence
  Synthetic oligonucleotide
gtagacccaaccctttcacaatgagcgaaa

SEQ ID NO: 94624 - DNA, 30 bp, Artificial Sequence
  Synthetic oligonucleotide
acgagatgaggattggcttaacttgcgaaa

SEQ ID NO: 94625 - DNA, 30 bp, Artificial Sequence
  Synthetic oligonucleotide
gttggtagcgaccacggacgagactcgaaa

SEQ ID NO: 94626 - DNA, 30 bp, Artificial Sequence
  Synthetic oligonucleotide
ggatattacgtggcgaggggtcattcgaaa

SEQ ID NO: 94627 - DNA, 30 bp, Artificial Sequence
  Synthetic oligonucleotide
cacactttgactagataatggaaaaggaaa

SEQ ID NO: 94628 - DNA, 30 bp, Artificial Sequence
  Synthetic oligonucleotide
tatgacaagtggtagaccttcgaaaggaaa

SEQ ID NO: 94629 - DNA, 30 bp, Artificial Sequence
  Synthetic oligonucleotide
aaggaaattaggctgagccacctgaggaaa

SEQ ID NO: 94630 - DNA, 30 bp, Artificial Sequence
  Synthetic oligonucleotide
acaggttgaaacagcgtaacgttgaggaaa

SEQ ID NO: 94631 - DNA, 30 bp, Artificial Sequence
  Synthetic oligonucleotide
cccattcagtcgtcgacaagacataggaaa

SEQ ID NO: 94632 - DNA, 30 bp, Artificial Sequence
  Synthetic oligonucleotide
gatcgcaaatgggatgctcatagtaggaaa

SEQ ID NO: 94633 - DNA, 30 bp, Artificial Sequence
  Synthetic oligonucleotide
ctaaacagtctaagggcgttctgtaggaaa

SEQ ID NO: 94634 - DNA, 30 bp, Artificial Sequence
  Synthetic oligonucleotide
gtacaccatcgtctcttagctgttcggaaa

SEQ ID NO: 94635 - DNA, 30 bp, Artificial Sequence
  Synthetic oligonucleotide
acattcggttgcaactcgtccgtcgggaaa

SEQ ID NO: 94636 - DNA, 30 bp, Artificial Sequence
  Synthetic oligonucleotide
cacgcgttgagactgaagttaacatggaaa

SEQ ID NO: 94637 - DNA, 30 bp, Artificial Sequence
  Synthetic oligonucleotide
ttgtgcaaacacgagggattggcatggaaa

SEQ ID NO: 94638 - DNA, 30 bp, Artificial Sequence
  Synthetic oligonucleotide
catgcgattcttctaggctgattatggaaa

SEQ ID NO: 94639 - DNA, 30 bp, Artificial Sequence
  Synthetic oligonucleotide
ggaagagacacgaataatggacagtggaaa

SEQ ID NO: 94640 - DNA, 30 bp, Artificial Sequence
  Synthetic oligonucleotide
accgagccctgtatctcaatggcttggaaa

SEQ ID NO: 94641 - DNA, 30 bp, Artificial Sequence
  Synthetic oligonucleotide
acgccgtagatgacggctgtttcaatgaaa

SEQ ID NO: 94642 - DNA, 30 bp, Artificial Sequence
  Synthetic oligonucleotide
taagacactagctaccgcgatctaatgaaa

SEQ ID NO: 94643 - DNA, 30 bp, Artificial Sequence
  Synthetic oligonucleotide
cggcacctccgaaaaaaatgtccactgaaa

SEQ ID NO: 94644 - DNA, 30 bp, Artificial Sequence
  Synthetic oligonucleotide
aacaagaactaggttaacaacggactgaaa

SEQ ID NO: 94645 - DNA, 30 bp, Artificial Sequence
  Synthetic oligonucleotide
aggacgaacgctgtagacgcccccctgaaa

SEQ ID NO: 94646 - DNA, 30 bp, Artificial Sequence
  Synthetic oligonucleotide
gggcgagcagcaacaaatattatgctgaaa

SEQ ID NO: 94647 - DNA, 30 bp, Artificial Sequence
  Synthetic oligonucleotide
cgttaaagagctgctgggttgactctgaaa

SEQ ID NO: 94648 - DNA, 30 bp, Artificial Sequence
  Synthetic oligonucleotide
gcagcccagacaagacctgtacgagtgaaa

SEQ ID NO: 94649 - DNA, 30 bp, Artificial Sequence
  Synthetic oligonucleotide
cattgtcggacgcgagactccaccgtgaaa

SEQ ID NO: 94650 - DNA, 30 bp, Artificial Sequence
  Synthetic oligonucleotide
ctgagatcgccggtccacacgggcgtgaaa

SEQ ID NO: 94651 - DNA, 30 bp, Artificial Sequence
  Synthetic oligonucleotide
tgaacgcttgatccgggaagggcggtgaaa

SEQ ID NO: 94652 - DNA, 30 bp, Artificial Sequence
  Synthetic oligonucleotide
gggtgtatgtcacgatttgcggtggtgaaa

SEQ ID NO: 94653 - DNA, 30 bp, Artificial Sequence
  Synthetic oligonucleotide
ggaagttagatggggggactactcttgaaa

SEQ ID NO: 94654 - DNA, 30 bp, Artificial Sequence
  Synthetic oligonucleotide
gtacggataatgcgaatcgtacctttgaaa

SEQ ID NO: 94655 - DNA, 30 bp, Artificial Sequence
  Synthetic oligonucleotide
cgtacccaggacggacaataaccaaataaa

SEQ ID NO: 94656 - DNA, 30 bp, Artificial Sequence
  Synthetic oligonucleotide
gccccaaatccggaaggagaaaataataaa

SEQ ID NO: 94657 - DNA, 30 bp, Artificial Sequence
  Synthetic oligonucleotide
agggtgaatggtacttggcaattgcataaa

SEQ ID NO: 94658 - DNA, 30 bp, Artificial Sequence
  Synthetic oligonucleotide
gatcgataatagtagtacgtaccagataaa

SEQ ID NO: 94659 - DNA, 30 bp, Artificial Sequence
  Synthetic oligonucleotide
gcaggtacatcgcatctgacagttgataaa

SEQ ID NO: 94660 - DNA, 30 bp, Artificial Sequence
  Synthetic oligonucleotide
tcatgacgaataagcggcctcaaatataaa

SEQ ID NO: 94661 - DNA, 30 bp, Artificial Sequence
  Synthetic oligonucleotide
ttaagaacggatagctgacaccgtactaaa

SEQ ID NO: 94662 - DNA, 30 bp, Artificial Sequence
  Synthetic oligonucleotide
tgaggaaggaaagtgatcgtcggccctaaa

SEQ ID NO: 94663 - DNA, 30 bp, Artificial Sequence
  Synthetic oligonucleotide
cacatcccaacctaccaagctggtcctaaa

SEQ ID NO: 94664 - DNA, 30 bp, Artificial Sequence
  Synthetic oligonucleotide
tacaggagtggcccaggtgacctatctaaa

SEQ ID NO: 94665 - DNA, 30 bp, Artificial Sequence
  Synthetic oligonucleotide
ccggttccgggtaagctccagaggtctaaa

SEQ ID NO: 94666 - DNA, 30 bp, Artificial Sequence
  Synthetic oligonucleotide
ggacagctggctacctttatcgtaagtaaa

SEQ ID NO: 94667 - DNA, 30 bp, Artificial Sequence
  Synthetic oligonucleotide
cgtgtcgggtcacatggcatgaagcgtaaa

SEQ ID NO: 94668 - DNA, 30 bp, Artificial Sequence
  Synthetic oligonucleotide
aaaccgtataagtcagatattggtcgtaaa

SEQ ID NO: 94669 - DNA, 30 bp, Artificial Sequence
  Synthetic oligonucleotide
aactggataatcccaacggtactcggtaaa

SEQ ID NO: 94670 - DNA, 30 bp, Artificial Sequence
  Synthetic oligonucleotide
tagcaaggtatcatctacacgcttggtaaa

SEQ ID NO: 94671 - DNA, 30 bp, Artificial Sequence
  Synthetic oligonucleotide
gatggcgcgatagacacaaggcttggtaaa

SEQ ID NO: 94672 - DNA, 30 bp, Artificial Sequence
  Synthetic oligonucleotide
taccataggctgaacgatacgcgatgtaaa

SEQ ID NO: 94673 - DNA, 30 bp, Artificial Sequence
  Synthetic oligonucleotide
tctgtgatgttgcgcgtcgtcggatgtaaa

SEQ ID NO: 94674 - DNA, 30 bp, Artificial Sequence
  Synthetic oligonucleotide
tgggatggaaggaagaataatggctgtaaa

SEQ ID NO: 94675 - DNA, 30 bp, Artificial Sequence
  Synthetic oligonucleotide
cgatatggttcgaccgggccgtagtgtaaa

SEQ ID NO: 94676 - DNA, 30 bp, Artificial Sequence
  Synthetic oligonucleotide
gggctcgaaggtgtgtttaggacagttaaa

SEQ ID NO: 94677 - DNA, 30 bp, Artificial Sequence
  Synthetic oligonucleotide
ggcatgtaaaagaaaaaatgaaacgttaaa

SEQ ID NO: 94678 - DNA, 30 bp, Artificial Sequence
  Synthetic oligonucleotide
tcactataagaaacatgcggatacgttaaa

SEQ ID NO: 94679 - DNA, 30 bp, Artificial Sequence
  Synthetic oligonucleotide
tcaatcacaggctcggctgaaattgttaaa

SEQ ID NO: 94680 - DNA, 30 bp, Artificial Sequence
  Synthetic oligonucleotide
ttgcatcgcatgtgcgccaacgggtttaaa

SEQ ID NO: 94681 - DNA, 30 bp, Artificial Sequence
  Synthetic oligonucleotide
aatatcaagagtgcatgaccactaaaacaa

SEQ ID NO: 94682 - DNA, 30 bp, Artificial Sequence
  Synthetic oligonucleotide
tcgtcaatattcgggtagcgttgcaaacaa

SEQ ID NO: 94683 - DNA, 30 bp, Artificial Sequence
  Synthetic oligonucleotide
gggtcagggctataggctttaatggaacaa

SEQ ID NO: 94684 - DNA, 30 bp, Artificial Sequence
  Synthetic oligonucleotide
gtgagcgttaacttactacactccacacaa

SEQ ID NO: 94685 - DNA, 30 bp, Artificial Sequence
  Synthetic oligonucleotide
cgtttgatggcccatgaacattcaccacaa

SEQ ID NO: 94686 - DNA, 30 bp, Artificial Sequence
  Synthetic oligonucleotide
caaggggggtccggaggcccaagcccacaa

SEQ ID NO: 94687 - DNA, 30 bp, Artificial Sequence
  Synthetic oligonucleotide
cgaggaagcataaacgcaaagaagccacaa

SEQ ID NO: 94688 - DNA, 30 bp, Artificial Sequence
  Synthetic oligonucleotide
taacgtaaccgccatgtacttacagcacaa

SEQ ID NO: 94689 - DNA, 30 bp, Artificial Sequence
  Synthetic oligonucleotide
attgaatgataggggcgcaattttgcacaa

SEQ ID NO: 94690 - DNA, 29 bp, Artificial Sequence
  Synthetic oligonucleotide
acagggagattctaggaatcgactcacaa

SEQ ID NO: 94691 - DNA, 30 bp, Artificial Sequence
  Synthetic oligonucleotide
ttaagcggaaatccaaagtagctgtcacaa

SEQ ID NO: 94692 - DNA, 30 bp, Artificial Sequence
  Synthetic oligonucleotide
tcgctccgggccggctactaaaattcacaa

SEQ ID NO: 94693 - DNA, 30 bp, Artificial Sequence
  Synthetic oligonucleotide
gatcaatcgttaaatgtaagaggttcacaa

SEQ ID NO: 94694 - DNA, 30 bp, Artificial Sequence
  Synthetic oligonucleotide
tcgaagaatggaccacagcgcgcaagacaa

SEQ ID NO: 94695 - DNA, 30 bp, Artificial Sequence
  Synthetic oligonucleotide
aaaaagaaataacaggttgcgaggagacaa

SEQ ID NO: 94696 - DNA, 30 bp, Artificial Sequence
  Synthetic oligonucleotide
ttacagggaaaaagcctgaagctgagacaa

SEQ ID NO: 94697 - DNA, 30 bp, Artificial Sequence
  Synthetic oligonucleotide
tggaaaacgccaagcctcacgagtagacaa

SEQ ID NO: 94698 - DNA, 30 bp, Artificial Sequence
  Synthetic oligonucleotide
cgcgtcacacctaataagccggaacgacaa

SEQ ID NO: 94699 - DNA, 30 bp, Artificial Sequence
  Synthetic oligonucleotide
cttgtcagaaaaggaaaacatcgccgacaa

SEQ ID NO: 94700 - DNA, 30 bp, Artificial Sequence
  Synthetic oligonucleotide
acggcctgtatgtgaaggcggagaggacaa

SEQ ID NO: 94701 - DNA, 30 bp, Artificial Sequence
  Synthetic oligonucleotide
cacttgaacaaatataataacaagggacaa

SEQ ID NO: 94702 - DNA, 30 bp, Artificial Sequence
  Synthetic oligonucleotide
gctaaagggaagacgtggaaatggggacaa

SEQ ID NO: 94703 - DNA, 30 bp, Artificial Sequence
  Synthetic oligonucleotide
tgatatttggctcatgagtggctgggacaa

SEQ ID NO: 94704 - DNA, 30 bp, Artificial Sequence
  Synthetic oligonucleotide
cgaagggtctggcaccggattcaatgacaa

SEQ ID NO: 94705 - DNA, 30 bp, Artificial Sequence
  Synthetic oligonucleotide
gtctgggccactaaagtggagacatgacaa

SEQ ID NO: 94706 - DNA, 30 bp, Artificial Sequence
  Synthetic oligonucleotide
gcttcgatggaactccacagtgtttgacaa

SEQ ID NO: 94707 - DNA, 30 bp, Artificial Sequence
  Synthetic oligonucleotide
ccgccggccacagcctaaaacgtcatacaa

SEQ ID NO: 94708 - DNA, 30 bp, Artificial Sequence
  Synthetic oligonucleotide
aagggtaagggtcaggacatcgatatacaa

SEQ ID NO: 94709 - DNA, 30 bp, Artificial Sequence
  Synthetic oligonucleotide
ggtggagactgcttagctacgtgagaccaa

SEQ ID NO: 94710 - DNA, 30 bp, Artificial Sequence
  Synthetic oligonucleotide
catctgggcggggtcaaatctatagaccaa

SEQ ID NO: 94711 - DNA, 30 bp, Artificial Sequence
  Synthetic oligonucleotide
cgcacatcaattcatagcgaattagaccaa

SEQ ID NO: 94712 - DNA, 30 bp, Artificial Sequence
  Synthetic oligonucleotide
agggacgcaacaactttttatggataccaa

SEQ ID NO: 94713 - DNA, 30 bp, Artificial Sequence
  Synthetic oligonucleotide
agcaatgcgtaaggttaatattggacccaa

SEQ ID NO: 94714 - DNA, 30 bp, Artificial Sequence
  Synthetic oligonucleotide
aacatcaagtaccatctcacgcccgcccaa

SEQ ID NO: 94715 - DNA, 30 bp, Artificial Sequence
  Synthetic oligonucleotide
gaggaagtcccgacaacgtcagccgcccaa

SEQ ID NO: 94716 - DNA, 30 bp, Artificial Sequence
  Synthetic oligonucleotide
agcaaacaaggaccaactcttatcgcccaa

SEQ ID NO: 94717 - DNA, 30 bp, Artificial Sequence
  Synthetic oligonucleotide
tacgaataccgtgcgagatatgaggcccaa

SEQ ID NO: 94718 - DNA, 30 bp, Artificial Sequence
  Synthetic oligonucleotide
tggcaccctcgagctggatcgaacagccaa

SEQ ID NO: 94719 - DNA, 30 bp, Artificial Sequence
  Synthetic oligonucleotide
aacgatgcaagatatgcgacatggagccaa

SEQ ID NO: 94720 - DNA, 30 bp, Artificial Sequence
  Synthetic oligonucleotide
aagctgaacacaacgttttagctgcgccaa

SEQ ID NO: 94721 - DNA, 30 bp, Artificial Sequence
  Synthetic oligonucleotide
tgtagaggtcggcactgaaaggatcgccaa

SEQ ID NO: 94722 - DNA, 30 bp, Artificial Sequence
  Synthetic oligonucleotide
tgatcgcgataaaataaggagtatcgccaa

SEQ ID NO: 94723 - DNA, 30 bp, Artificial Sequence
  Synthetic oligonucleotide
gacccacgatgacgtcggaaccgaggccaa

SEQ ID NO: 94724 - DNA, 30 bp, Artificial Sequence
  Synthetic oligonucleotide
accgtatgatgttgaatgcaaagtggccaa

SEQ ID NO: 94725 - DNA, 30 bp, Artificial Sequence
  Synthetic oligonucleotide
aggatccgaaaatgacttttgcgatgccaa

SEQ ID NO: 94726 - DNA, 30 bp, Artificial Sequence
  Synthetic oligonucleotide
taccgaatgcgttgtcggccaccttgccaa

SEQ ID NO: 94727 - DNA, 30 bp, Artificial Sequence
  Synthetic oligonucleotide
tctgatcgatcttctgcacttctgatccaa

SEQ ID NO: 94728 - DNA, 30 bp, Artificial Sequence
  Synthetic oligonucleotide
ttggttagcgagatgatgccagagctccaa

SEQ ID NO: 94729 - DNA, 30 bp, Artificial Sequence
  Synthetic oligonucleotide
ggtacacacggggtctgtcaactgctccaa

SEQ ID NO: 94730 - DNA, 30 bp, Artificial Sequence
  Synthetic oligonucleotide
gaggaagtgggggatacggggaacgtccaa

SEQ ID NO: 94731 - DNA, 30 bp, Artificial Sequence
  Synthetic oligonucleotide
atgtagaacaaaagggcgcatggcgtccaa

SEQ ID NO: 94732 - DNA, 30 bp, Artificial Sequence
  Synthetic oligonucleotide
tttcaaccagcaggcagagattcggtccaa

SEQ ID NO: 94733 - DNA, 30 bp, Artificial Sequence
  Synthetic oligonucleotide
aaagtaactctgttcccgatcacaaagcaa

SEQ ID NO: 94734 - DNA, 30 bp, Artificial Sequence
  Synthetic oligonucleotide
aaatgatagagtgtgtcctcaagaaagcaa

SEQ ID NO: 94735 - DNA, 30 bp, Artificial Sequence
  Synthetic oligonucleotide
gaggagaaatgtctggacagtagaaagcaa

SEQ ID NO: 94736 - DNA, 30 bp, Artificial Sequence
  Synthetic oligonucleotide
agctttgggaacgaagaatctcgcaagcaa

SEQ ID NO: 94737 - DNA, 30 bp, Artificial Sequence
  Synthetic oligonucleotide
tcatgtagctgccagaaagataggaagcaa

SEQ ID NO: 94738 - DNA, 30 bp, Artificial Sequence
  Synthetic oligonucleotide
agaatgacagaacgtcgtgtaagacagcaa

SEQ ID NO: 94739 - DNA, 30 bp, Artificial Sequence
  Synthetic oligonucleotide
aactaatttaccgtactacataaccagcaa

SEQ ID NO: 94740 - DNA, 30 bp, Artificial Sequence
  Synthetic oligonucleotide
cctgatatgttagatcccagccaagagcaa

SEQ ID NO: 94741 - DNA, 30 bp, Artificial Sequence
  Synthetic oligonucleotide
ggcacatcagcgttttgattgtcagagcaa

SEQ ID NO: 94742 - DNA, 30 bp, Artificial Sequence
  Synthetic oligonucleotide
cagtggtaacatcctgagtagggcgagcaa

SEQ ID NO: 94743 - DNA, 30 bp, Artificial Sequence
  Synthetic oligonucleotide
cagcccagtatatagtcccactctgagcaa

SEQ ID NO: 94744 - DNA, 30 bp, Artificial Sequence
  Synthetic oligonucleotide
gaacaccgctaaagactgcgagaatagcaa

SEQ ID NO: 94745 - DNA, 30 bp, Artificial Sequence
  Synthetic oligonucleotide
gtgacatatgatcacaaaaaggtctagcaa

SEQ ID NO: 94746 - DNA, 30 bp, Artificial Sequence
  Synthetic oligonucleotide
ggcatatatgcagccgaccctaagtagcaa

SEQ ID NO: 94747 - DNA, 30 bp, Artificial Sequence
  Synthetic oligonucleotide
gccaacaccgttccatgtcgaaatccgcaa

SEQ ID NO: 94748 - DNA, 30 bp, Artificial Sequence
  Synthetic oligonucleotide
gatcaaaagaacgttaacaagcacgcgcaa

SEQ ID NO: 94749 - DNA, 30 bp, Artificial Sequence
  Synthetic oligonucleotide
agggggggagaaagctttaatagggcgcaa

SEQ ID NO: 94750 - DNA, 30 bp, Artificial Sequence
  Synthetic oligonucleotide
atgtgtggatctgctgacttaggtgcgcaa

SEQ ID NO: 94751 - DNA, 30 bp, Artificial Sequence
  Synthetic oligonucleotide
taagtatgccatctaatacagtgaaggcaa

SEQ ID NO: 94752 - DNA, 30 bp, Artificial Sequence
  Synthetic oligonucleotide
gctactcagagacctcagagcagcaggcaa

SEQ ID NO: 94753 - DNA, 30 bp, Artificial Sequence
  Synthetic oligonucleotide
ccaaggaggaggtacgggcgctagaggcaa

SEQ ID NO: 94754 - DNA, 30 bp, Artificial Sequence
  Synthetic oligonucleotide
aaaaggcataccatgctgtcgcctcggcaa

SEQ ID NO: 94755 - DNA, 30 bp, Artificial Sequence
  Synthetic oligonucleotide
gattgcggagagcagtcgtatcgcgggcaa

SEQ ID NO: 94756 - DNA, 30 bp, Artificial Sequence
  Synthetic oligonucleotide
cacggaagcgataaatatcctggcgggcaa

SEQ ID NO: 94757 - DNA, 30 bp, Artificial Sequence
  Synthetic oligonucleotide
tttgcaacgctaattggaaatggggggcaa

SEQ ID NO: 94758 - DNA, 30 bp, Artificial Sequence
  Synthetic oligonucleotide
aggagcacattgtatctcaccgtggggcaa

SEQ ID NO: 94759 - DNA, 30 bp, Artificial Sequence
  Synthetic oligonucleotide
aaccgacgtttatatcggtactatgggcaa

SEQ ID NO: 94760 - DNA, 30 bp, Artificial Sequence
  Synthetic oligonucleotide
catcgtagatcaacaatgcatcctgggcaa

SEQ ID NO: 94761 - DNA, 30 bp, Artificial Sequence
  Synthetic oligonucleotide
attatagggggcgtctccagaccctggcaa

SEQ ID NO: 94762 - DNA, 30 bp, Artificial Sequence
  Synthetic oligonucleotide
atttgggccgatatcagagacagctggcaa

SEQ ID NO: 94763 - DNA, 30 bp, Artificial Sequence
  Synthetic oligonucleotide
gtgggtagtatggtccggtccagaatgcaa

SEQ ID NO: 94764 - DNA, 30 bp, Artificial Sequence
  Synthetic oligonucleotide
taggtcatgcccccgtcgtctcgaatgcaa

SEQ ID NO: 94765 - DNA, 30 bp, Artificial Sequence
  Synthetic oligonucleotide
tgaaacaaatatcatctgtatagtatgcaa

SEQ ID NO: 94766 - DNA, 30 bp, Artificial Sequence
  Synthetic oligonucleotide
ggctaagtgtagtgtgtcgacaagctgcaa

SEQ ID NO: 94767 - DNA, 30 bp, Artificial Sequence
  Synthetic oligonucleotide
gcaagggcacactccagtcgcatgctgcaa

SEQ ID NO: 94768 - DNA, 30 bp, Artificial Sequence
  Synthetic oligonucleotide
cttagccctacagcttggcaacaagtgcaa

SEQ ID NO: 94769 - DNA, 30 bp, Artificial Sequence
  Synthetic oligonucleotide
aaaacgctccaggatgggcactgagtgcaa

SEQ ID NO: 94770 - DNA, 30 bp, Artificial Sequence
  Synthetic oligonucleotide
acacaagggcgagatgatgtcgacgtgcaa

SEQ ID NO: 94771 - DNA, 30 bp, Artificial Sequence
  Synthetic oligonucleotide
cacaagggtgttacccctatgcgcgtgcaa

SEQ ID NO: 94772 - DNA, 30 bp, Artificial Sequence
  Synthetic oligonucleotide
aatgcgaccccacgcaacggaaataatcaa

SEQ ID NO: 94773 - DNA, 30 bp, Artificial Sequence
  Synthetic oligonucleotide
actaaagatcgatcgccatacgtccatcaa

SEQ ID NO: 94774 - DNA, 30 bp, Artificial Sequence
  Synthetic oligonucleotide
cacgtcgcagacaaattgggctgatatcaa

SEQ ID NO: 94775 - DNA, 30 bp, Artificial Sequence
  Synthetic oligonucleotide
aaaaaaacatggaagggaacggagtatcaa

SEQ ID NO: 94776 - DNA, 30 bp, Artificial Sequence
  Synthetic oligonucleotide
ggtcctcgacgaatccgcatccgaactcaa

SEQ ID NO: 94777 - DNA, 30 bp, Artificial Sequence
  Synthetic oligonucleotide
aggcacgcacactcggcgcgctgcactcaa

SEQ ID NO: 94778 - DNA, 30 bp, Artificial Sequence
  Synthetic oligonucleotide
gacggggccacctatgtcatgaaccctcaa

SEQ ID NO: 94779 - DNA, 30 bp, Artificial Sequence
  Synthetic oligonucleotide
agccgtaccgaacaggtcacagtccctcaa

SEQ ID NO: 94780 - DNA, 30 bp, Artificial Sequence
  Synthetic oligonucleotide
aaacgtgaggatagtggggccttccctcaa

SEQ ID NO: 94781 - DNA, 30 bp, Artificial Sequence
  Synthetic oligonucleotide
tataaatggtagagcagagagcgcgctcaa

SEQ ID NO: 94782 - DNA, 30 bp, Artificial Sequence
  Synthetic oligonucleotide
agtaacgcgtgtggcaccggcagggctcaa

SEQ ID NO: 94783 - DNA, 30 bp, Artificial Sequence
  Synthetic oligonucleotide
gcaccagggcggcgaaatgtcacatctcaa

SEQ ID NO: 94784 - DNA, 30 bp, Artificial Sequence
  Synthetic oligonucleotide
aggtgtaggatttattaccgtgagtctcaa

SEQ ID NO: 94785 - DNA, 30 bp, Artificial Sequence
  Synthetic oligonucleotide
agattatatagtaatcgctaaccaagtcaa

SEQ ID NO: 94786 - DNA, 30 bp, Artificial Sequence
  Synthetic oligonucleotide
ggcaatggggtcggcacacggtagagtcaa

SEQ ID NO: 94787 - DNA, 30 bp, Artificial Sequence
  Synthetic oligonucleotide
tcaaaggggggacgcgggaccgggagtcaa

SEQ ID NO: 94788 - DNA, 30 bp, Artificial Sequence
  Synthetic oligonucleotide
atgcgaagggacagaaagcaggctagtcaa

SEQ ID NO: 94789 - DNA, 30 bp, Artificial Sequence
  Synthetic oligonucleotide
cagaatgtagttccacgatttgtgcgtcaa

SEQ ID NO: 94790 - DNA, 30 bp, Artificial Sequence
  Synthetic oligonucleotide
gaatgtgattacgccacgagagacggtcaa

SEQ ID NO: 94791 - DNA, 30 bp, Artificial Sequence
  Synthetic oligonucleotide
tacctcacaaattgtttcactgtctgtcaa

SEQ ID NO: 94792 - DNA, 30 bp, Artificial Sequence
  Synthetic oligonucleotide
gtggtggcggaagctcactgtacgtgtcaa

SEQ ID NO: 94793 - DNA, 30 bp, Artificial Sequence
  Synthetic oligonucleotide
ctgtagggggacggaggagttctttgtcaa

SEQ ID NO: 94794 - DNA, 30 bp, Artificial Sequence
  Synthetic oligonucleotide
cctgtaggacaccgtgcaagattttgtcaa

SEQ ID NO: 94795 - DNA, 30 bp, Artificial Sequence
  Synthetic oligonucleotide
gtagcagggtcggtcaaagtgggcattcaa

SEQ ID NO: 94796 - DNA, 30 bp, Artificial Sequence
  Synthetic oligonucleotide
aggcacagtataacggctcgcgatattcaa

SEQ ID NO: 94797 - DNA, 30 bp, Artificial Sequence
  Synthetic oligonucleotide
ccgcaaaataggtcctaacactaacttcaa

SEQ ID NO: 94798 - DNA, 30 bp, Artificial Sequence
  Synthetic oligonucleotide
ccttgcgcaaagaaggaacaggaccttcaa

SEQ ID NO: 94799 - DNA, 30 bp, Artificial Sequence
  Synthetic oligonucleotide
accactggggatactaaatagcaagttcaa

SEQ ID NO: 94800 - DNA, 30 bp, Artificial Sequence
  Synthetic oligonucleotide
ggaacactactacctccttctgaagttcaa

SEQ ID NO: 94801 - DNA, 30 bp, Artificial Sequence
  Synthetic oligonucleotide
tgatgaaggtggataatagggacggttcaa

SEQ ID NO: 94802 - DNA, 30 bp, Artificial Sequence
  Synthetic oligonucleotide
accggcgacgatgttcaatcgtatgttcaa

SEQ ID NO: 94803 - DNA, 30 bp, Artificial Sequence
  Synthetic oligonucleotide
tagaggcgaaagtcagcagattcttttcaa

SEQ ID NO: 94804 - DNA, 30 bp, Artificial Sequence
  Synthetic oligonucleotide
cgcatgtgtaagttagtaacgacacaagaa

SEQ ID NO: 94805 - DNA, 30 bp, Artificial Sequence
  Synthetic oligonucleotide
cctgagccatagagccagtcaccccaagaa

SEQ ID NO: 94806 - DNA, 30 bp, Artificial Sequence
  Synthetic oligonucleotide
tgacgtctcggcaatccagaatagcaagaa

SEQ ID NO: 94807 - DNA, 30 bp, Artificial Sequence
  Synthetic oligonucleotide
gtcggcacagggccgcaccgtgtagaagaa

SEQ ID NO: 94808 - DNA, 30 bp, Artificial Sequence
  Synthetic oligonucleotide
acttagaatctgggaaggagaatcgaagaa

SEQ ID NO: 94809 - DNA, 30 bp, Artificial Sequence
  Synthetic oligonucleotide
gtcccaaggagcaccatagctgatgaagaa

SEQ ID NO: 94810 - DNA, 30 bp, Artificial Sequence
  Synthetic oligonucleotide
ccactaaccggatcacattatactgaagaa

SEQ ID NO: 94811 - DNA, 30 bp, Artificial Sequence
  Synthetic oligonucleotide
cgcggccgcctgggagatccacactaagaa

SEQ ID NO: 94812 - DNA, 30 bp, Artificial Sequence
  Synthetic oligonucleotide
gaccgctacaaagaattgcgggtctaagaa

SEQ ID NO: 94813 - DNA, 30 bp, Artificial Sequence
  Synthetic oligonucleotide
gcatcggacagtacattccattagtaagaa

SEQ ID NO: 94814 - DNA, 30 bp, Artificial Sequence
  Synthetic oligonucleotide
cctgaggccgtgaagggaggataaacagaa

SEQ ID NO: 94815 - DNA, 30 bp, Artificial Sequence
  Synthetic oligonucleotide
cagtgaccaaattggttaccagccccagaa

SEQ ID NO: 94816 - DNA, 30 bp, Artificial Sequence
  Synthetic oligonucleotide
agcagggtcgcagaagtgtatagagcagaa

SEQ ID NO: 94817 - DNA, 30 bp, Artificial Sequence
  Synthetic oligonucleotide
gggagaaatcgtaaattatttcgagcagaa

SEQ ID NO: 94818 - DNA, 30 bp, Artificial Sequence
  Synthetic oligonucleotide
ggagcgtatcttggagcacaccgtgcagaa

SEQ ID NO: 94819 - DNA, 30 bp, Artificial Sequence
  Synthetic oligonucleotide
gataccgtaatgttgattaggccctcagaa

SEQ ID NO: 94820 - DNA, 30 bp, Artificial Sequence
  Synthetic oligonucleotide
tgatcgcgagcgcccaagagcacgtcagaa

SEQ ID NO: 94821 - DNA, 30 bp, Artificial Sequence
  Synthetic oligonucleotide
cttaggcgtgatcgtcctgaatcgtcagaa

SEQ ID NO: 94822 - DNA, 30 bp, Artificial Sequence
  Synthetic oligonucleotide
gacctccgtggtaattagtaggcttcagaa

SEQ ID NO: 94823 - DNA, 30 bp, Artificial Sequence
  Synthetic oligonucleotide
tcatatcatgagggacacccgagttcagaa

SEQ ID NO: 94824 - DNA, 30 bp, Artificial Sequence
  Synthetic oligonucleotide
ttgaagtttcgactgatgtaaatttcagaa

SEQ ID NO: 94825 - DNA, 30 bp, Artificial Sequence
  Synthetic oligonucleotide
gtgctatctgcgcgtcaacattttagagaa

SEQ ID NO: 94826 - DNA, 30 bp, Artificial Sequence
  Synthetic oligonucleotide
gggtgtcgagggatgtaatgtttccgagaa

SEQ ID NO: 94827 - DNA, 30 bp, Artificial Sequence
  Synthetic oligonucleotide
tacaggggcacactttgctgtgatcgagaa

SEQ ID NO: 94828 - DNA, 30 bp, Artificial Sequence
  Synthetic oligonucleotide
tatcgacacgcttctttgtgaagaggagaa

SEQ ID NO: 94829 - DNA, 30 bp, Artificial Sequence
  Synthetic oligonucleotide
ccgaatgtcgtgtgatagataatatgagaa

SEQ ID NO: 94830 - DNA, 30 bp, Artificial Sequence
  Synthetic oligonucleotide
ctatgctcaactttgagggtcccaatagaa

SEQ ID NO: 94831 - DNA, 30 bp, Artificial Sequence
  Synthetic oligonucleotide
gtggttgaagagaatttcgtccagatagaa

SEQ ID NO: 94832 - DNA, 30 bp, Artificial Sequence
  Synthetic oligonucleotide
taaacgggcgcaattaatgactggatagaa

SEQ ID NO: 94833 - DNA, 30 bp, Artificial Sequence
  Synthetic oligonucleotide
gtatatgacatgcgagtatactggatagaa

SEQ ID NO: 94834 - DNA, 30 bp, Artificial Sequence
  Synthetic oligonucleotide
gtaggatctatgggacttggattgatagaa

SEQ ID NO: 94835 - DNA, 30 bp, Artificial Sequence
  Synthetic oligonucleotide
tggacattaagctagcacgaagcggtagaa

SEQ ID NO: 94836 - DNA, 30 bp, Artificial Sequence
  Synthetic oligonucleotide
cagcgtggaacgatccgaacaactgtagaa

SEQ ID NO: 94837 - DNA, 30 bp, Artificial Sequence
  Synthetic oligonucleotide
cgtgtagtttgttggtgcacaagattagaa

SEQ ID NO: 94838 - DNA, 30 bp, Artificial Sequence
  Synthetic oligonucleotide
cgctttgcaaatttgcagtcaaagttagaa

SEQ ID NO: 94839 - DNA, 30 bp, Artificial Sequence
  Synthetic oligonucleotide
atgttcaaggggttgatcgtaaaaaacgaa

SEQ ID NO: 94840 - DNA, 30 bp, Artificial Sequence
  Synthetic oligonucleotide
gctggcagggcccttgtgaagatgaacgaa

SEQ ID NO: 94841 - DNA, 30 bp, Artificial Sequence
  Synthetic oligonucleotide
ctgtatcggcaggaggaccgtgttaacgaa

SEQ ID NO: 94842 - DNA, 30 bp, Artificial Sequence
  Synthetic oligonucleotide
caggagggtggggttcagacactgcacgaa

SEQ ID NO: 94843 - DNA, 30 bp, Artificial Sequence
  Synthetic oligonucleotide
gatggatcgagcagaaggtctcaagacgaa

SEQ ID NO: 94844 - DNA, 30 bp, Artificial Sequence
  Synthetic oligonucleotide
agctcagcttgttatagcacggaagacgaa

SEQ ID NO: 94845 - DNA, 30 bp, Artificial Sequence
  Synthetic oligonucleotide
tataacgatggtctacgggtatcatacgaa

SEQ ID NO: 94846 - DNA, 30 bp, Artificial Sequence
  Synthetic oligonucleotide
agctcaagcgtatggggccggggatacgaa

SEQ ID NO: 94847 - DNA, 30 bp, Artificial Sequence
  Synthetic oligonucleotide
agcagacgtccgcagcaagcatccaccgaa

SEQ ID NO: 94848 - DNA, 30 bp, Artificial Sequence
  Synthetic oligonucleotide
ggatagcttaggcatcggagtaggaccgaa

SEQ ID NO: 94849 - DNA, 30 bp, Artificial Sequence
  Synthetic oligonucleotide
gagctatatcgcacggcgcgcgggaccgaa

SEQ ID NO: 94850 - DNA, 30 bp, Artificial Sequence
  Synthetic oligonucleotide
ggatggaagcgccgtgaacgcaggcccgaa

SEQ ID NO: 94851 - DNA, 30 bp, Artificial Sequence
  Synthetic oligonucleotide
gaatggatggccagttatagcgtcgccgaa

SEQ ID NO: 94852 - DNA, 30 bp, Artificial Sequence
  Synthetic oligonucleotide
ccctagaccacgctctacaggatggccgaa

SEQ ID NO: 94853 - DNA, 30 bp, Artificial Sequence
  Synthetic oligonucleotide
gaggtgggcatgcgtccaatctatgccgaa

SEQ ID NO: 94854 - DNA, 30 bp, Artificial Sequence
  Synthetic oligonucleotide
aaaaggacaagacgaaggaaccttgccgaa

SEQ ID NO: 94855 - DNA, 30 bp, Artificial Sequence
  Synthetic oligonucleotide
catatctgcggaagggcggaatagtccgaa

SEQ ID NO: 94856 - DNA, 30 bp, Artificial Sequence
  Synthetic oligonucleotide
gacgattctgaatctagaacgaggtccgaa

SEQ ID NO: 94857 - DNA, 30 bp, Artificial Sequence
  Synthetic oligonucleotide
agctaaaagactatcatcgtgattagcgaa

SEQ ID NO: 94858 - DNA, 30 bp, Artificial Sequence
  Synthetic oligonucleotide
tgagcgagtggtcgaccacatgaccgcgaa

SEQ ID NO: 94859 - DNA, 30 bp, Artificial Sequence
  Synthetic oligonucleotide
aatgctgtaccaacaactctacaaggcgaa

SEQ ID NO: 94860 - DNA, 30 bp, Artificial Sequence
  Synthetic oligonucleotide
gcattattcataggtcactaccacggcgaa

SEQ ID NO: 94861 - DNA, 30 bp, Artificial Sequence
  Synthetic oligonucleotide
ctaacatatgattgtgcgggtaagggcgaa

SEQ ID NO: 94862 - DNA, 30 bp, Artificial Sequence
  Synthetic oligonucleotide
ctaaagttagtctggattggagggggcgaa

SEQ ID NO: 94863 - DNA, 30 bp, Artificial Sequence
  Synthetic oligonucleotide
tgccaagtataaacggcggagactggcgaa

SEQ ID NO: 94864 - DNA, 30 bp, Artificial Sequence
  Synthetic oligonucleotide
gcactagagcaacggaacacccaatgcgaa

SEQ ID NO: 94865 - DNA, 30 bp, Artificial Sequence
  Synthetic oligonucleotide
cgacgatatagtgtctgtgggacctgcgaa

SEQ ID NO: 94866 - DNA, 30 bp, Artificial Sequence
  Synthetic oligonucleotide
gctatcctggaacattagacactgatcgaa

SEQ ID NO: 94867 - DNA, 30 bp, Artificial Sequence
  Synthetic oligonucleotide
acgcggaacggcacatgctcgggtatcgaa

SEQ ID NO: 94868 - DNA, 30 bp, Artificial Sequence
  Synthetic oligonucleotide
accgattggaagacgctaacacgcctcgaa

SEQ ID NO: 94869 - DNA, 30 bp, Artificial Sequence
  Synthetic oligonucleotide
tacgtgcaggagcacaacgtttagctcgaa

SEQ ID NO: 94870 - DNA, 30 bp, Artificial Sequence
  Synthetic oligonucleotide
aacgggggtattttcgccaatcacgtcgaa

SEQ ID NO: 94871 - DNA, 30 bp, Artificial Sequence
  Synthetic oligonucleotide
gatcagcgccggccgtcacaaactgtcgaa

SEQ ID NO: 94872 - DNA, 30 bp, Artificial Sequence
  Synthetic oligonucleotide
gtagttgtcaacaccggatccgacttcgaa

SEQ ID NO: 94873 - DNA, 30 bp, Artificial Sequence
  Synthetic oligonucleotide
ggcgaatgccaggagtttggttctttcgaa

SEQ ID NO: 94874 - DNA, 30 bp, Artificial Sequence
  Synthetic oligonucleotide
aagggaaatacccttctgggcggtttcgaa

SEQ ID NO: 94875 - DNA, 30 bp, Artificial Sequence
  Synthetic oligonucleotide
tacagtggatactgcccatttagcaaggaa

SEQ ID NO: 94876 - DNA, 30 bp, Artificial Sequence
  Synthetic oligonucleotide
ataataacatctaaagtacctcagaaggaa

SEQ ID NO: 94877 - DNA, 30 bp, Artificial Sequence
  Synthetic oligonucleotide
gcgtatatatggaagggctaggtacaggaa

SEQ ID NO: 94878 - DNA, 30 bp, Artificial Sequence
  Synthetic oligonucleotide
cacaacgtggcaaatcaaagtgcccaggaa

SEQ ID NO: 94879 - DNA, 30 bp, Artificial Sequence
  Synthetic oligonucleotide
cagatagtcagctcgtcattagtccaggaa

SEQ ID NO: 94880 - DNA, 30 bp, Artificial Sequence
  Synthetic oligonucleotide
ggacgcctaagcaatgacctgggtcaggaa

SEQ ID NO: 94881 - DNA, 30 bp, Artificial Sequence
  Synthetic oligonucleotide
gtatgcccgggtaaccccaaagtcgaggaa

SEQ ID NO: 94882 - DNA, 30 bp, Artificial Sequence
  Synthetic oligonucleotide
gtagggtgcctcggttggctagttgaggaa

SEQ ID NO: 94883 - DNA, 30 bp, Artificial Sequence
  Synthetic oligonucleotide
atgatatcatatagtctggtaggctaggaa

SEQ ID NO: 94884 - DNA, 30 bp, Artificial Sequence
  Synthetic oligonucleotide
actcaaccgtcccatgaccgtcattaggaa

SEQ ID NO: 94885 - DNA, 30 bp, Artificial Sequence
  Synthetic oligonucleotide
cgaatagaaatcaaaacaaatggcacggaa

SEQ ID NO: 94886 - DNA, 30 bp, Artificial Sequence
  Synthetic oligonucleotide
agcgggcggcacacaagatccaggacggaa

SEQ ID NO: 94887 - DNA, 30 bp, Artificial Sequence
  Synthetic oligonucleotide
gttctcaaggactcctgatagcgtgcggaa

SEQ ID NO: 94888 - DNA, 30 bp, Artificial Sequence
  Synthetic oligonucleotide
ataggaccgtgaagtctactcatgtcggaa

SEQ ID NO: 94889 - DNA, 30 bp, Artificial Sequence
  Synthetic oligonucleotide
ccgacaagctacgcaccgccgatgtcggaa

SEQ ID NO: 94890 - DNA, 30 bp, Artificial Sequence
  Synthetic oligonucleotide
gagccgcaacgaaacatcaaaatttcggaa

SEQ ID NO: 94891 - DNA, 30 bp, Artificial Sequence
  Synthetic oligonucleotide
gatcaattcgtaaagtgaacggccagggaa

SEQ ID NO: 94892 - DNA, 30 bp, Artificial Sequence
  Synthetic oligonucleotide
tgctaggcgcatgttgtaggtgcgagggaa

SEQ ID NO: 94893 - DNA, 30 bp, Artificial Sequence
  Synthetic oligonucleotide
ggtagcgggctgacgggtttatggcgggaa

SEQ ID NO: 94894 - DNA, 30 bp, Artificial Sequence
  Synthetic oligonucleotide
taacagagaagtcaaacatcaagtcgggaa

SEQ ID NO: 94895 - DNA, 30 bp, Artificial Sequence
  Synthetic oligonucleotide
atgcgcgttagtgtggggtccaaaggggaa

SEQ ID NO: 94896 - DNA, 30 bp, Artificial Sequence
  Synthetic oligonucleotide
agttcaagatagcactattctgccggggaa

SEQ ID NO: 94897 - DNA, 30 bp, Artificial Sequence
  Synthetic oligonucleotide
gacctacgtgcacgagaaggatcgggggaa

SEQ ID NO: 94898 - DNA, 30 bp, Artificial Sequence
  Synthetic oligonucleotide
gcctctgcgaggaatgaatcgattggggaa

SEQ ID NO: 94899 - DNA, 30 bp, Artificial Sequence
  Synthetic oligonucleotide
agaacattcgaattcagcgtgccatgggaa

SEQ ID NO: 94900 - DNA, 30 bp, Artificial Sequence
  Synthetic oligonucleotide
ctggcatgcgtggatagacgttgctgggaa

SEQ ID NO: 94901 - DNA, 30 bp, Artificial Sequence
  Synthetic oligonucleotide
agtaggaaaatcctctagacgggaatggaa

SEQ ID NO: 94902 - DNA, 30 bp, Artificial Sequence
  Synthetic oligonucleotide
aagctagtgagaaacaatagagctatggaa

SEQ ID NO: 94903 - DNA, 30 bp, Artificial Sequence
  Synthetic oligonucleotide
ggttaacaacaagtcgctccatgtctggaa

SEQ ID NO: 94904 - DNA, 30 bp, Artificial Sequence
  Synthetic oligonucleotide
ggcatttctagcatcgaaatcgaagtggaa

SEQ ID NO: 94905 - DNA, 30 bp, Artificial Sequence
  Synthetic oligonucleotide
attgtcaccatgggacataaacgattggaa

SEQ ID NO: 94906 - DNA, 30 bp, Artificial Sequence
  Synthetic oligonucleotide
ggtttgaacatagattcgagtgcgttggaa

SEQ ID NO: 94907 - DNA, 30 bp, Artificial Sequence
  Synthetic oligonucleotide
accgtcatggatgcctatctataaaatgaa

SEQ ID NO: 94908 - DNA, 30 bp, Artificial Sequence
  Synthetic oligonucleotide
cccttgctgtatgaatagtatgagaatgaa

SEQ ID NO: 94909 - DNA, 30 bp, Artificial Sequence
  Synthetic oligonucleotide
ggggactgcctatggcggagagtgaatgaa

SEQ ID NO: 94910 - DNA, 30 bp, Artificial Sequence
  Synthetic oligonucleotide
gctcccatcagccaaacttcacgtcatgaa

SEQ ID NO: 94911 - DNA, 30 bp, Artificial Sequence
  Synthetic oligonucleotide
cctgcaaagcggatcacggccagcgatgaa

SEQ ID NO: 94912 - DNA, 30 bp, Artificial Sequence
  Synthetic oligonucleotide
agaaataatattcatcacccgtgcgatgaa

SEQ ID NO: 94913 - DNA, 30 bp, Artificial Sequence
  Synthetic oligonucleotide
tacatcggcaaggctcacacgacggatgaa

SEQ ID NO: 94914 - DNA, 30 bp, Artificial Sequence
  Synthetic oligonucleotide
cgctatgggccatgataacaaaatgatgaa

SEQ ID NO: 94915 - DNA, 29 bp, Artificial Sequence
  Synthetic oligonucleotide
gcgtatgcctattagacgatcatgatgaa

SEQ ID NO: 94916 - DNA, 30 bp, Artificial Sequence
  Synthetic oligonucleotide
tgccgaatgagggccattagattaactgaa

SEQ ID NO: 94917 - DNA, 30 bp, Artificial Sequence
  Synthetic oligonucleotide
gtcgccgaaccgagcgaaagtgatcctgaa

SEQ ID NO: 94918 - DNA, 30 bp, Artificial Sequence
  Synthetic oligonucleotide
tctgattgagaattaatggacgaggctgaa

SEQ ID NO: 94919 - DNA, 30 bp, Artificial Sequence
  Synthetic oligonucleotide
ttttatcgtccaacaaagagggaggctgaa

SEQ ID NO: 94920 - DNA, 30 bp, Artificial Sequence
  Synthetic oligonucleotide
aggtatgcctccaggtaaagtgaggctgaa

SEQ ID NO: 94921 - DNA, 30 bp, Artificial Sequence
  Synthetic oligonucleotide
cgccagggaatatcgaaggtcaggtctgaa

SEQ ID NO: 94922 - DNA, 30 bp, Artificial Sequence
  Synthetic oligonucleotide
gggaattacgtaggtcaaatgggaagtgaa

SEQ ID NO: 94923 - DNA, 30 bp, Artificial Sequence
  Synthetic oligonucleotide
cacagaagagaggtgaattaccccagtgaa

SEQ ID NO: 94924 - DNA, 30 bp, Artificial Sequence
  Synthetic oligonucleotide
tgaggttccaaagggaatgcaagtagtgaa

SEQ ID NO: 94925 - DNA, 30 bp, Artificial Sequence
  Synthetic oligonucleotide
tacatgttatcggcaggatagagtagtgaa

SEQ ID NO: 94926 - DNA, 30 bp, Artificial Sequence
  Synthetic oligonucleotide
ccgctgaccaccacccgatgagaacgtgaa

SEQ ID NO: 94927 - DNA, 30 bp, Artificial Sequence
  Synthetic oligonucleotide
taagagcaaaaacactggccttaacgtgaa

SEQ ID NO: 94928 - DNA, 30 bp, Artificial Sequence
  Synthetic oligonucleotide
aggccatacaatcgcaatcgcaggcgtgaa

SEQ ID NO: 94929 - DNA, 30 bp, Artificial Sequence
  Synthetic oligonucleotide
aatgccaatcctaagtagcggcttcgtgaa

SEQ ID NO: 94930 - DNA, 30 bp, Artificial Sequence
  Synthetic oligonucleotide
acaggaagtgccgctgagagcaaaggtgaa

SEQ ID NO: 94931 - DNA, 30 bp, Artificial Sequence
  Synthetic oligonucleotide
cgtggaaacgacgaaaacagcaccggtgaa

SEQ ID NO: 94932 - DNA, 30 bp, Artificial Sequence
  Synthetic oligonucleotide
tcgtacagcgacccaacaagaaagggtgaa

SEQ ID NO: 94933 - DNA, 30 bp, Artificial Sequence
  Synthetic oligonucleotide
tgggagtgcgtagctcctactacgggtgaa

SEQ ID NO: 94934 - DNA, 30 bp, Artificial Sequence
  Synthetic oligonucleotide
ggagttaagcaggccatgcatcggggtgaa

SEQ ID NO: 94935 - DNA, 30 bp, Artificial Sequence
  Synthetic oligonucleotide
cgtccttggtaagggacacggaatggtgaa

SEQ ID NO: 94936 - DNA, 30 bp, Artificial Sequence
  Synthetic oligonucleotide
gttcagagcacctgcaatgtacatggtgaa

SEQ ID NO: 94937 - DNA, 30 bp, Artificial Sequence
  Synthetic oligonucleotide
ttcgagggacccactccgatataatgtgaa

SEQ ID NO: 94938 - DNA, 30 bp, Artificial Sequence
  Synthetic oligonucleotide
tattcgatttgacgagtgcgtacatgtgaa

SEQ ID NO: 94939 - DNA, 30 bp, Artificial Sequence
  Synthetic oligonucleotide
cccattgaaaaccaatccgcgaccattgaa

SEQ ID NO: 94940 - DNA, 30 bp, Artificial Sequence
  Synthetic oligonucleotide
ctaaaaagaagctgcatttgcctcattgaa

SEQ ID NO: 94941 - DNA, 30 bp, Artificial Sequence
  Synthetic oligonucleotide
gtcaggtgcctgaaacgcggtacacttgaa

SEQ ID NO: 94942 - DNA, 30 bp, Artificial Sequence
  Synthetic oligonucleotide
tggggagcagaggaagtgcgcggtcttgaa

SEQ ID NO: 94943 - DNA, 30 bp, Artificial Sequence
  Synthetic oligonucleotide
gctacgacaagggagaatttgcgcgttgaa

SEQ ID NO: 94944 - DNA, 30 bp, Artificial Sequence
  Synthetic oligonucleotide
atgagctgggggattggacgcacggttgaa

SEQ ID NO: 94945 - DNA, 30 bp, Artificial Sequence
  Synthetic oligonucleotide
ccaccgaattcaggttgtaaattggttgaa

SEQ ID NO: 94946 - DNA, 30 bp, Artificial Sequence
  Synthetic oligonucleotide
actaaaccttgtgaaggcttcagaaaataa

SEQ ID NO: 94947 - DNA, 30 bp, Artificial Sequence
  Synthetic oligonucleotide
aacacaactggactagaaactagaaaataa

SEQ ID NO: 94948 - DNA, 30 bp, Artificial Sequence
  Synthetic oligonucleotide
tcattgcagtgaccgttcagctacaaataa

SEQ ID NO: 94949 - DNA, 30 bp, Artificial Sequence
  Synthetic oligonucleotide
gagagaaggcgtacaggacaaggcaaataa

SEQ ID NO: 94950 - DNA, 30 bp, Artificial Sequence
  Synthetic oligonucleotide
tgagagaatcgagaggacgagaaacaataa

SEQ ID NO: 94951 - DNA, 30 bp, Artificial Sequence
  Synthetic oligonucleotide
gggaatgtctgcaaaagaatatctcaataa

SEQ ID NO: 94952 - DNA, 30 bp, Artificial Sequence
  Synthetic oligonucleotide
tacggcggaggagctagacactccgaataa

SEQ ID NO: 94953 - DNA, 30 bp, Artificial Sequence
  Synthetic oligonucleotide
aaaatagaagggagatcagaccgcccataa

SEQ ID NO: 94954 - DNA, 30 bp, Artificial Sequence
  Synthetic oligonucleotide
ccaatgaaaacgaaaacggtggtgccataa

SEQ ID NO: 94955 - DNA, 30 bp, Artificial Sequence
  Synthetic oligonucleotide
gaacaaaaagcggtatttgccagtccataa

SEQ ID NO: 94956 - DNA, 30 bp, Artificial Sequence
  Synthetic oligonucleotide
taacgtgatatttcttcatgtgttgcataa

SEQ ID NO: 94957 - DNA, 30 bp, Artificial Sequence
  Synthetic oligonucleotide
agtggcgccagtttgtatcacgaatcataa

SEQ ID NO: 94958 - DNA, 30 bp, Artificial Sequence
  Synthetic oligonucleotide
gggaaataggttaacttgcacaattcataa

SEQ ID NO: 94959 - DNA, 30 bp, Artificial Sequence
  Synthetic oligonucleotide
cgaaggcgacggacgatatgcatttcataa

SEQ ID NO: 94960 - DNA, 30 bp, Artificial Sequence
  Synthetic oligonucleotide
atgcggacgggggctctgacgagaagataa

SEQ ID NO: 94961 - DNA, 30 bp, Artificial Sequence
  Synthetic oligonucleotide
ttaccgctagtcagaaactggagaagataa

SEQ ID NO: 94962 - DNA, 30 bp, Artificial Sequence
  Synthetic oligonucleotide
ggagatggcgccagctgaatctgaagataa

SEQ ID NO: 94963 - DNA, 29 bp, Artificial Sequence
  Synthetic oligonucleotide
taaccactacacgggtcgggtgcagataa

SEQ ID NO: 94964 - DNA, 30 bp, Artificial Sequence
  Synthetic oligonucleotide
ttactaccatcaacatagagcctcagataa

SEQ ID NO: 94965 - DNA, 30 bp, Artificial Sequence
  Synthetic oligonucleotide
ttccgaaaaactcaacaaccgggacgataa

SEQ ID NO: 94966 - DNA, 30 bp, Artificial Sequence
  Synthetic oligonucleotide
ttgcgggagttagggcacaccccccgataa

SEQ ID NO: 94967 - DNA, 30 bp, Artificial Sequence
  Synthetic oligonucleotide
tgcaaaagtgtataaagtacgcgccgataa

SEQ ID NO: 94968 - DNA, 30 bp, Artificial Sequence
  Synthetic oligonucleotide
cgatcaaaacgtaaaacgacggtgcgataa

SEQ ID NO: 94969 - DNA, 30 bp, Artificial Sequence
  Synthetic oligonucleotide
tagttagaggtacaaaaaggatcaggataa

SEQ ID NO: 94970 - DNA, 30 bp, Artificial Sequence
  Synthetic oligonucleotide
agctaagtggcgtccttgtcaaacggataa

SEQ ID NO: 94971 - DNA, 30 bp, Artificial Sequence
  Synthetic oligonucleotide
agacgagaaacgtgggagggtatgggataa

SEQ ID NO: 94972 - DNA, 30 bp, Artificial Sequence
  Synthetic oligonucleotide
ggtccaggcaacgttacctaatagatataa

SEQ ID NO: 94973 - DNA, 30 bp, Artificial Sequence
  Synthetic oligonucleotide
aatcacaaacacgctactcgatcgatataa

SEQ ID NO: 94974 - DNA, 30 bp, Artificial Sequence
  Synthetic oligonucleotide
tcaaaccaagtagattgagcgaagctataa

SEQ ID NO: 94975 - DNA, 30 bp, Artificial Sequence
  Synthetic oligonucleotide
agcaaacagaacgagccgtcgagcgtataa

SEQ ID NO: 94976 - DNA, 30 bp, Artificial Sequence
  Synthetic oligonucleotide
aaggccagaaagtcaagaacgtaggtataa

SEQ ID NO: 94977 - DNA, 30 bp, Artificial Sequence
  Synthetic oligonucleotide
atagaccggcactagcaaccagcaaactaa

SEQ ID NO: 94978 - DNA, 30 bp, Artificial Sequence
  Synthetic oligonucleotide
cgctagaggctaataattgctttcaactaa

SEQ ID NO: 94979 - DNA, 30 bp, Artificial Sequence
  Synthetic oligonucleotide
ggtgctgtggcagtaggctagtggaactaa

SEQ ID NO: 94980 - DNA, 30 bp, Artificial Sequence
  Synthetic oligonucleotide
ataaattcggcgacccccaaccgagactaa

SEQ ID NO: 94981 - DNA, 30 bp, Artificial Sequence
  Synthetic oligonucleotide
gtgaaagttgcaatctcactagccgactaa

SEQ ID NO: 94982 - DNA, 30 bp, Artificial Sequence
  Synthetic oligonucleotide
cgcactgtgggagtgagaaaacctgactaa

SEQ ID NO: 94983 - DNA, 30 bp, Artificial Sequence
  Synthetic oligonucleotide
cgggtagcaaaatcgaagttgtttgactaa

SEQ ID NO: 94984 - DNA, 30 bp, Artificial Sequence
  Synthetic oligonucleotide
taagttcctagtattgtagacacctactaa

SEQ ID NO: 94985 - DNA, 30 bp, Artificial Sequence
  Synthetic oligonucleotide
acacacgcttactgcaaaaccgctacctaa

SEQ ID NO: 94986 - DNA, 30 bp, Artificial Sequence
  Synthetic oligonucleotide
agcctaaaggaatcgacatgcggtacctaa

SEQ ID NO: 94987 - DNA, 30 bp, Artificial Sequence
  Synthetic oligonucleotide
gtacagtaaagcataattgaacgaccctaa

SEQ ID NO: 94988 - DNA, 30 bp, Artificial Sequence
  Synthetic oligonucleotide
gagcggccccaatccgatagccagccctaa

SEQ ID NO: 94989 - DNA, 30 bp, Artificial Sequence
  Synthetic oligonucleotide
cgactcaatatgaaccgggtcagggcctaa

SEQ ID NO: 94990 - DNA, 30 bp, Artificial Sequence
  Synthetic oligonucleotide
acatgtgttggaagaaaatttggacgctaa

SEQ ID NO: 94991 - DNA, 30 bp, Artificial Sequence
  Synthetic oligonucleotide
cacgaggttaaatggcgtagggcaggctaa

SEQ ID NO: 94992 - DNA, 30 bp, Artificial Sequence
  Synthetic oligonucleotide
catcaaaagtgcggagaaagaatgtgctaa

SEQ ID NO: 94993 - DNA, 30 bp, Artificial Sequence
  Synthetic oligonucleotide
tggagccctcgtcccagatatctttgctaa

SEQ ID NO: 94994 - DNA, 30 bp, Artificial Sequence
  Synthetic oligonucleotide
caatgtcacactaaaactggacatgtctaa

SEQ ID NO: 94995 - DNA, 31 bp, Artificial Sequence
  Synthetic oligonucleotide
gtagggcagtaagatcgaagtcgctgtctaa

SEQ ID NO: 94996 - DNA, 30 bp, Artificial Sequence
  Synthetic oligonucleotide
cgttaagggcgtaatccagaccgaaagtaa

SEQ ID NO: 94997 - DNA, 30 bp, Artificial Sequence
  Synthetic oligonucleotide
tctaggtatacgcggaccgagggcaagtaa

SEQ ID NO: 94998 - DNA, 30 bp, Artificial Sequence
  Synthetic oligonucleotide
taggattgccaatacagcccacgagagtaa

SEQ ID NO: 94999 - DNA, 30 bp, Artificial Sequence
  Synthetic oligonucleotide
ggagtgccggcatccagagataaggagtaa

SEQ ID NO: 95000 - DNA, 30 bp, Artificial Sequence
  Synthetic oligonucleotide
cgcaataatctgtcctcagtaaatgagtaa

SEQ ID NO: 95001 - DNA, 30 bp, Artificial Sequence
  Synthetic oligonucleotide
taaataacaacagaaggattatttgagtaa

SEQ ID NO: 95002 - DNA, 30 bp, Artificial Sequence
  Synthetic oligonucleotide
acactaacgaaatttagcgtcgcctagtaa

SEQ ID NO: 95003 - DNA, 29 bp, Artificial Sequence
  Synthetic oligonucleotide
cctgtaactagagcgtcccgtcgtagtaa

SEQ ID NO: 95004 - DNA, 30 bp, Artificial Sequence
  Synthetic oligonucleotide
ttcgcacagcaggagtcgttgtgttagtaa

SEQ ID NO: 95005 - DNA, 30 bp, Artificial Sequence
  Synthetic oligonucleotide
tctaaaactagcttaggttcccaaacgtaa

SEQ ID NO: 95006 - DNA, 30 bp, Artificial Sequence
  Synthetic oligonucleotide
ttcacggagttgtactcaggactaccgtaa

SEQ ID NO: 95007 - DNA, 30 bp, Artificial Sequence
  Synthetic oligonucleotide
cgtgtgggaggcaacagattgaatccgtaa

SEQ ID NO: 95008 - DNA, 30 bp, Artificial Sequence
  Synthetic oligonucleotide
ctttcaagtgaaggcacaagtgctgcgtaa

SEQ ID NO: 95009 - DNA, 30 bp, Artificial Sequence
  Synthetic oligonucleotide
taaaggggggtttagacagaagttgcgtaa

SEQ ID NO: 95010 - DNA, 30 bp, Artificial Sequence
  Synthetic oligonucleotide
ctcgcaaaagaaatcgcgtagtaatcgtaa

SEQ ID NO: 95011 - DNA, 30 bp, Artificial Sequence
  Synthetic oligonucleotide
cggtaggcctcgggtgattaagacaggtaa

SEQ ID NO: 95012 - DNA, 30 bp, Artificial Sequence
  Synthetic oligonucleotide
agcaggtgaacaacaatgtatggtaggtaa

SEQ ID NO: 95013 - DNA, 30 bp, Artificial Sequence
  Synthetic oligonucleotide
agcggaagtcgatacgttccaaaccggtaa

SEQ ID NO: 95014 - DNA, 30 bp, Artificial Sequence
  Synthetic oligonucleotide
gtactctacaagcggcggaatgaccggtaa

SEQ ID NO: 95015 - DNA, 30 bp, Artificial Sequence
  Synthetic oligonucleotide
acttaggaagctaacttagccgtccggtaa

SEQ ID NO: 95016 - DNA, 30 bp, Artificial Sequence
  Synthetic oligonucleotide
acgaacctgctaacaacacgatccgggtaa

SEQ ID NO: 95017 - DNA, 30 bp, Artificial Sequence
  Synthetic oligonucleotide
cccgaaagaccacagtgcaagatcgggtaa

SEQ ID NO: 95018 - DNA, 30 bp, Artificial Sequence
  Synthetic oligonucleotide
catcgtcacgtcgtttatagcaactggtaa

SEQ ID NO: 95019 - DNA, 30 bp, Artificial Sequence
  Synthetic oligonucleotide
gacactgcaagaaagatgtctgtttggtaa

SEQ ID NO: 95020 - DNA, 30 bp, Artificial Sequence
  Synthetic oligonucleotide
ggagacttgggtgagcgtgtatgaatgtaa

SEQ ID NO: 95021 - DNA, 30 bp, Artificial Sequence
  Synthetic oligonucleotide
ttagagggatagctagtcgatattatgtaa

SEQ ID NO: 95022 - DNA, 30 bp, Artificial Sequence
  Synthetic oligonucleotide
ttgagagaagataaggcagtctcgctgtaa

SEQ ID NO: 95023 - DNA, 30 bp, Artificial Sequence
  Synthetic oligonucleotide
ttaagggggaacatacaatctttcgtgtaa

SEQ ID NO: 95024 - DNA, 30 bp, Artificial Sequence
  Synthetic oligonucleotide
ggcagagtgtaagaaccgcgcggattgtaa

SEQ ID NO: 95025 - DNA, 30 bp, Artificial Sequence
  Synthetic oligonucleotide
cggaggatatggctacagttatatttgtaa

SEQ ID NO: 95026 - DNA, 30 bp, Artificial Sequence
  Synthetic oligonucleotide
ggagttagccaaagagggggtactttgtaa

SEQ ID NO: 95027 - DNA, 30 bp, Artificial Sequence
  Synthetic oligonucleotide
ctgtaaacggtgcgagtactcgacgattaa

SEQ ID NO: 95028 - DNA, 30 bp, Artificial Sequence
  Synthetic oligonucleotide
cgaaacttgcgatatagtgtctgcgattaa

SEQ ID NO: 95029 - DNA, 30 bp, Artificial Sequence
  Synthetic oligonucleotide
tgaagtaggaacgcaatgttagaggattaa

SEQ ID NO: 95030 - DNA, 30 bp, Artificial Sequence
  Synthetic oligonucleotide
ctgggcaacagacatcagttcgtatattaa

SEQ ID NO: 95031 - DNA, 30 bp, Artificial Sequence
  Synthetic oligonucleotide
ttcaaccaactgagggtgcgaatctattaa

SEQ ID NO: 95032 - DNA, 30 bp, Artificial Sequence
  Synthetic oligonucleotide
gggtaacgggatacgttcgtggtgtattaa

SEQ ID NO: 95033 - DNA, 30 bp, Artificial Sequence
  Synthetic oligonucleotide
aacctggaagaacccgggactgcgacttaa

SEQ ID NO: 95034 - DNA, 30 bp, Artificial Sequence
  Synthetic oligonucleotide
gtcgaaattacttgctacaaggacccttaa

SEQ ID NO: 95035 - DNA, 30 bp, Artificial Sequence
  Synthetic oligonucleotide
agtgcctgaacaatcagtttaaaagcttaa

SEQ ID NO: 95036 - DNA, 30 bp, Artificial Sequence
  Synthetic oligonucleotide
gaaatcggaaactactaccgaacagcttaa

SEQ ID NO: 95037 - DNA, 30 bp, Artificial Sequence
  Synthetic oligonucleotide
tggatacgggccgagtggggtgtatcttaa

SEQ ID NO: 95038 - DNA, 30 bp, Artificial Sequence
  Synthetic oligonucleotide
aagtaatagcgatgggttggatggggttaa

SEQ ID NO: 95039 - DNA, 30 bp, Artificial Sequence
  Synthetic oligonucleotide
gaactccaggttcagcagaaggaagtttaa

SEQ ID NO: 95040 - DNA, 30 bp, Artificial Sequence
  Synthetic oligonucleotide
aggttggaaggatcggctaggtacgtttaa

SEQ ID NO: 95041 - DNA, 30 bp, Artificial Sequence
  Synthetic oligonucleotide
gcttaacacacgacaaccaagaatttttaa

SEQ ID NO: 95042 - DNA, 30 bp, Artificial Sequence
  Synthetic oligonucleotide
cactatgtaaatgcacctagtctaaaaaca

SEQ ID NO: 95043 - DNA, 30 bp, Artificial Sequence
  Synthetic oligonucleotide
cgcctcttagctagactacgagtcaaaaca

SEQ ID NO: 95044 - DNA, 30 bp, Artificial Sequence
  Synthetic oligonucleotide
cactgcagatccgctgtactgacgaaaaca

SEQ ID NO: 95045 - DNA, 30 bp, Artificial Sequence
  Synthetic oligonucleotide
acaagctcgatcaatatatcagataaaaca

SEQ ID NO: 95046 - DNA, 30 bp, Artificial Sequence
  Synthetic oligonucleotide
gaaaagcagaaagaagggggagaacaaaca

SEQ ID NO: 95047 - DNA, 30 bp, Artificial Sequence
  Synthetic oligonucleotide
tccgcaccagagatacaattgtaataaaca

SEQ ID NO: 95048 - DNA, 30 bp, Artificial Sequence
  Synthetic oligonucleotide
gtcaatgaaggcgaaacgtctacttaaaca

SEQ ID NO: 95049 - DNA, 30 bp, Artificial Sequence
  Synthetic oligonucleotide
cggggccgagtaaaactgtcaagttaaaca

SEQ ID NO: 95050 - DNA, 30 bp, Artificial Sequence
  Synthetic oligonucleotide
ccttgcggagacctccaggacataacaaca

SEQ ID NO: 95051 - DNA, 30 bp, Artificial Sequence
  Synthetic oligonucleotide
agttgtacacgaggcgacgattagacaaca

SEQ ID NO: 95052 - DNA, 30 bp, Artificial Sequence
  Synthetic oligonucleotide
tcaggcagagaaatgactgaagcgacaaca

SEQ ID NO: 95053 - DNA, 30 bp, Artificial Sequence
  Synthetic oligonucleotide
accgatatacattgtaataagcggacaaca

SEQ ID NO: 95054 - DNA, 30 bp, Artificial Sequence
  Synthetic oligonucleotide
agtgcacgaactctacaaggagaaccaaca

SEQ ID NO: 95055 - DNA, 30 bp, Artificial Sequence
  Synthetic oligonucleotide
aggtaagccgcattccatactgccccaaca

SEQ ID NO: 95056 - DNA, 30 bp, Artificial Sequence
  Synthetic oligonucleotide
tctccgggagggagcgtcgcgatcccaaca

SEQ ID NO: 95057 - DNA, 30 bp, Artificial Sequence
  Synthetic oligonucleotide
ttaccgagatatcggctggcttgtccaaca

SEQ ID NO: 95058 - DNA, 30 bp, Artificial Sequence
  Synthetic oligonucleotide
agattcgttctcgacgtggagtacgcaaca

SEQ ID NO: 95059 - DNA, 30 bp, Artificial Sequence
  Synthetic oligonucleotide
tctacggaattaactgcagctctctcaaca

SEQ ID NO: 95060 - DNA, 30 bp, Artificial Sequence
  Synthetic oligonucleotide
gcagagcggtttgcccccttggtaagaaca

SEQ ID NO: 95061 - DNA, 30 bp, Artificial Sequence
  Synthetic oligonucleotide
tccggggtacgcggatactatggcagaaca

SEQ ID NO: 95062 - DNA, 30 bp, Artificial Sequence
  Synthetic oligonucleotide
gcatatagatgagtccacattgatcgaaca

SEQ ID NO: 95063 - DNA, 30 bp, Artificial Sequence
  Synthetic oligonucleotide
tactgacgtataatcagggcaagtcgaaca

SEQ ID NO: 95064 - DNA, 30 bp, Artificial Sequence
  Synthetic oligonucleotide
gttggtaggctgcagacctccagaggaaca

SEQ ID NO: 95065 - DNA, 30 bp, Artificial Sequence
  Synthetic oligonucleotide
ccctcctaatgaatcgccggtagaggaaca

SEQ ID NO: 95066 - DNA, 31 bp, Artificial Sequence
  Synthetic oligonucleotide
tgtgttaagaagcgttcgactctacggaaca

SEQ ID NO: 95067 - DNA, 30 bp, Artificial Sequence
  Synthetic oligonucleotide
ggatgaatcaggggaaggatacgtggaaca

SEQ ID NO: 95068 - DNA, 30 bp, Artificial Sequence
  Synthetic oligonucleotide
aggtaagtatgcatcaatgggattggaaca

SEQ ID NO: 95069 - DNA, 30 bp, Artificial Sequence
  Synthetic oligonucleotide
gaacgagacactcaggttgcggtgtgaaca

SEQ ID NO: 95070 - DNA, 30 bp, Artificial Sequence
  Synthetic oligonucleotide
tcatacggagtgtacatactggcgataaca

SEQ ID NO: 95071 - DNA, 30 bp, Artificial Sequence
  Synthetic oligonucleotide
ccggtcaagcctttgaccattaggataaca

SEQ ID NO: 95072 - DNA, 30 bp, Artificial Sequence
  Synthetic oligonucleotide
gaggtatggtcagggatggccttgctaaca

SEQ ID NO: 95073 - DNA, 30 bp, Artificial Sequence
  Synthetic oligonucleotide
ggccagtggagttaacagcagcgagtaaca

SEQ ID NO: 95074 - DNA, 30 bp, Artificial Sequence
  Synthetic oligonucleotide
ccgaatctctacggggggtcataattaaca

SEQ ID NO: 95075 - DNA, 30 bp, Artificial Sequence
  Synthetic oligonucleotide
ggacacaatcttgccacgtcgacattaaca

SEQ ID NO: 95076 - DNA, 30 bp, Artificial Sequence
  Synthetic oligonucleotide
gagataaggggtgtaaaaaaaaacttaaca

SEQ ID NO: 95077 - DNA, 30 bp, Artificial Sequence
  Synthetic oligonucleotide
cgtgtagttcctaatttgtccgtcttaaca

SEQ ID NO: 95078 - DNA, 30 bp, Artificial Sequence
  Synthetic oligonucleotide
atcgattgacccgggggacgatagttaaca

SEQ ID NO: 95079 - DNA, 30 bp, Artificial Sequence
  Synthetic oligonucleotide
aatacagtctccggagtgaaagcgttaaca

SEQ ID NO: 95080 - DNA, 30 bp, Artificial Sequence
  Synthetic oligonucleotide
gagtaaatagaagccagggattcgttaaca

SEQ ID NO: 95081 - DNA, 31 bp, Artificial Sequence
  Synthetic oligonucleotide
agctacgcgtcactatcatacaaggttaaca

SEQ ID NO: 95082 - DNA, 30 bp, Artificial Sequence
  Synthetic oligonucleotide
tcctccagcgctaatagggactggttaaca

SEQ ID NO: 95083 - DNA, 30 bp, Artificial Sequence
  Synthetic oligonucleotide
tcacaaaaaatccaaagtcatgcaaacaca

SEQ ID NO: 95084 - DNA, 30 bp, Artificial Sequence
  Synthetic oligonucleotide
aaaggtcgggttgatgtggtctgaaacaca

SEQ ID NO: 95085 - DNA, 30 bp, Artificial Sequence
  Synthetic oligonucleotide
cgagtcattctgcaagtacggccggacaca

SEQ ID NO: 95086 - DNA, 30 bp, Artificial Sequence
  Synthetic oligonucleotide
atagattgcaatatccgtcgaatatacaca

SEQ ID NO: 95087 - DNA, 30 bp, Artificial Sequence
  Synthetic oligonucleotide
agattaaaactagggatggtggtctacaca

SEQ ID NO: 95088 - DNA, 30 bp, Artificial Sequence
  Synthetic oligonucleotide
gagatcttggactccgtaagaagttacaca

SEQ ID NO: 95089 - DNA, 30 bp, Artificial Sequence
  Synthetic oligonucleotide
gaaggactgcaccctcaccagggaaccaca

SEQ ID NO: 95090 - DNA, 30 bp, Artificial Sequence
  Synthetic oligonucleotide
tccatcgtcttctagccacccgacaccaca

SEQ ID NO: 95091 - DNA, 30 bp, Artificial Sequence
  Synthetic oligonucleotide
cttgtgaaccgaactaagaaatacaccaca

SEQ ID NO: 95092 - DNA, 30 bp, Artificial Sequence
  Synthetic oligonucleotide
atacggatttcggtaacttaccaacccaca

SEQ ID NO: 95093 - DNA, 30 bp, Artificial Sequence
  Synthetic oligonucleotide
cctgacgaaatagcttacacgtaccccaca

SEQ ID NO: 95094 - DNA, 30 bp, Artificial Sequence
  Synthetic oligonucleotide
gaagcaaaatttgcggtgagggcccccaca

SEQ ID NO: 95095 - DNA, 30 bp, Artificial Sequence
  Synthetic oligonucleotide
caccagggtgatggctatggtaaagccaca

SEQ ID NO: 95096 - DNA, 30 bp, Artificial Sequence
  Synthetic oligonucleotide
tgaaccatataaccttctccacaagccaca

SEQ ID NO: 95097 - DNA, 30 bp, Artificial Sequence
  Synthetic oligonucleotide
gagtaatggcaaaaaggatgtgaagccaca

SEQ ID NO: 95098 - DNA, 30 bp, Artificial Sequence
  Synthetic oligonucleotide
atgagcgcatgagtgcgagccgccgccaca

SEQ ID NO: 95099 - DNA, 30 bp, Artificial Sequence
  Synthetic oligonucleotide
gaatagaagctactcagaaggaaatccaca

SEQ ID NO: 95100 - DNA, 30 bp, Artificial Sequence
  Synthetic oligonucleotide
actgggcaacaagcgtgtggaagctccaca

SEQ ID NO: 95101 - DNA, 30 bp, Artificial Sequence
  Synthetic oligonucleotide
ggagtcccgaaattggtgaatgaaagcaca

SEQ ID NO: 95102 - DNA, 30 bp, Artificial Sequence
  Synthetic oligonucleotide
caggcctcgactgcttacatgacaagcaca

SEQ ID NO: 95103 - DNA, 30 bp, Artificial Sequence
  Synthetic oligonucleotide
atgaactgtggggatatgtcttacagcaca

SEQ ID NO: 95104 - DNA, 30 bp, Artificial Sequence
  Synthetic oligonucleotide
ggagtgggcacgtgttcacccctgagcaca

SEQ ID NO: 95105 - DNA, 30 bp, Artificial Sequence
  Synthetic oligonucleotide
gcatttatgcggttggtatggtgtagcaca

SEQ ID NO: 95106 - DNA, 30 bp, Artificial Sequence
  Synthetic oligonucleotide
atatctggcgataaaagtgattgtagcaca

SEQ ID NO: 95107 - DNA, 30 bp, Artificial Sequence
  Synthetic oligonucleotide
agtttaacaataggcaacctagttcgcaca

SEQ ID NO: 95108 - DNA, 30 bp, Artificial Sequence
  Synthetic oligonucleotide
acgaagtaagtaaacacctcgataggcaca

SEQ ID NO: 95109 - DNA, 30 bp, Artificial Sequence
  Synthetic oligonucleotide
cgtaagttacatgcctatgcgtagtgcaca

SEQ ID NO: 95110 - DNA, 30 bp, Artificial Sequence
  Synthetic oligonucleotide
tagaagttaagggagaccaattgaatcaca

SEQ ID NO: 95111 - DNA, 30 bp, Artificial Sequence
  Synthetic oligonucleotide
ctaaaacgtaggattagtacttaactcaca

SEQ ID NO: 95112 - DNA, 30 bp, Artificial Sequence
  Synthetic oligonucleotide
tggtccaacaagtattggcccgatctcaca

SEQ ID NO: 95113 - DNA, 30 bp, Artificial Sequence
  Synthetic oligonucleotide
ttgaaatgggtggcaactaacgcagtcaca

SEQ ID NO: 95114 - DNA, 30 bp, Artificial Sequence
  Synthetic oligonucleotide
aagccacctgagaccaggcacggattcaca

SEQ ID NO: 95115 - DNA, 30 bp, Artificial Sequence
  Synthetic oligonucleotide
tatggggtataggttgctattcaaaagaca

SEQ ID NO: 95116 - DNA, 30 bp, Artificial Sequence
  Synthetic oligonucleotide
tcgcgagaatcgcggtcattcgtaaagaca

SEQ ID NO: 95117 - DNA, 30 bp, Artificial Sequence
  Synthetic oligonucleotide
ctgcgtttgaaacagtgaagtttacagaca

SEQ ID NO: 95118 - DNA, 30 bp, Artificial Sequence
  Synthetic oligonucleotide
gtagcgcatcggtcaaattgtggccagaca

SEQ ID NO: 95119 - DNA, 30 bp, Artificial Sequence
  Synthetic oligonucleotide
tcgggccagagtgtatgtggttcggagaca

SEQ ID NO: 95120 - DNA, 30 bp, Artificial Sequence
  Synthetic oligonucleotide
gcgctcgggtacaccacaggcggggagaca

SEQ ID NO: 95121 - DNA, 30 bp, Artificial Sequence
  Synthetic oligonucleotide
cgcatagggccgtgggacctaggatagaca

SEQ ID NO: 95122 - DNA, 30 bp, Artificial Sequence
  Synthetic oligonucleotide
gcaaaaaaggaccttggattcatttagaca

SEQ ID NO: 95123 - DNA, 30 bp, Artificial Sequence
  Synthetic oligonucleotide
ccagaggcagttcgccggatactcacgaca

SEQ ID NO: 95124 - DNA, 30 bp, Artificial Sequence
  Synthetic oligonucleotide
ggactgaatgtgtcgaggcgtcagacgaca

SEQ ID NO: 95125 - DNA, 30 bp, Artificial Sequence
  Synthetic oligonucleotide
ctgtgctgtggaactccagcgcggacgaca

SEQ ID NO: 95126 - DNA, 30 bp, Artificial Sequence
  Synthetic oligonucleotide
acataggatagtaggaatagaaccccgaca

SEQ ID NO: 95127 - DNA, 30 bp, Artificial Sequence
  Synthetic oligonucleotide
ggtatgcaaatcttattcagagagccgaca

SEQ ID NO: 95128 - DNA, 30 bp, Artificial Sequence
  Synthetic oligonucleotide
atgggcagtgtacagcggcattatccgaca

SEQ ID NO: 95129 - DNA, 30 bp, Artificial Sequence
  Synthetic oligonucleotide
gtaaggccataactgccgttccgcgcgaca

SEQ ID NO: 95130 - DNA, 30 bp, Artificial Sequence
  Synthetic oligonucleotide
tagggaaaaataatataacctcatgcgaca

SEQ ID NO: 95131 - DNA, 30 bp, Artificial Sequence
  Synthetic oligonucleotide
aaaaaagataaaccatcgcagtaatcgaca

SEQ ID NO: 95132 - DNA, 30 bp, Artificial Sequence
  Synthetic oligonucleotide
gcagttactgcggccccatacgagtcgaca

SEQ ID NO: 95133 - DNA, 30 bp, Artificial Sequence
  Synthetic oligonucleotide
gcaggacatggtacccgtcccaggtcgaca

SEQ ID NO: 95134 - DNA, 30 bp, Artificial Sequence
  Synthetic oligonucleotide
tcatgagaactgcagtaggtagtgtcgaca

SEQ ID NO: 95135 - DNA, 30 bp, Artificial Sequence
  Synthetic oligonucleotide
ccactgtgcgtgggaagggttttgtcgaca

SEQ ID NO: 95136 - DNA, 30 bp, Artificial Sequence
  Synthetic oligonucleotide
aaacgtggacctatagcatcgaaaaggaca

SEQ ID NO: 95137 - DNA, 30 bp, Artificial Sequence
  Synthetic oligonucleotide
aaggaaaacagttcttgccgttaaaggaca

SEQ ID NO: 95138 - DNA, 30 bp, Artificial Sequence
  Synthetic oligonucleotide
cgcacgtctccgctgaaggtcaagaggaca

SEQ ID NO: 95139 - DNA, 30 bp, Artificial Sequence
  Synthetic oligonucleotide
tatccgcgaatgcatcaccacaggcggaca

SEQ ID NO: 95140 - DNA, 30 bp, Artificial Sequence
  Synthetic oligonucleotide
tgaatcgctctgaattaaccgacggggaca

SEQ ID NO: 95141 - DNA, 30 bp, Artificial Sequence
  Synthetic oligonucleotide
gacaatggacgatcaactgttttctggaca

SEQ ID NO: 95142 - DNA, 30 bp, Artificial Sequence
  Synthetic oligonucleotide
gacgcattggcaggggttgacgggtggaca

SEQ ID NO: 95143 - DNA, 30 bp, Artificial Sequence
  Synthetic oligonucleotide
caggatggctaacgtcattgcacttggaca

SEQ ID NO: 95144 - DNA, 30 bp, Artificial Sequence
  Synthetic oligonucleotide
caaaaaacacttagcgcgccataaatgaca

SEQ ID NO: 95145 - DNA, 30 bp, Artificial Sequence
  Synthetic oligonucleotide
tggataggtcatcggagctaatacatgaca

SEQ ID NO: 95146 - DNA, 30 bp, Artificial Sequence
  Synthetic oligonucleotide
gactggccatcatacgacactacgatgaca

SEQ ID NO: 95147 - DNA, 30 bp, Artificial Sequence
  Synthetic oligonucleotide
tgaacaactgtgcgctctgggaggatgaca

SEQ ID NO: 95148 - DNA, 30 bp, Artificial Sequence
  Synthetic oligonucleotide
gaaggcccttctgaagggttaaaactgaca

SEQ ID NO: 95149 - DNA, 30 bp, Artificial Sequence
  Synthetic oligonucleotide
taactaccacgacgaaactggcacgtgaca

SEQ ID NO: 95150 - DNA, 30 bp, Artificial Sequence
  Synthetic oligonucleotide
tgacccatcatgctgaggggagaggtgaca

SEQ ID NO: 95151 - DNA, 30 bp, Artificial Sequence
  Synthetic oligonucleotide
ggtagggcacatagcgaccctgaggtgaca

SEQ ID NO: 95152 - DNA, 30 bp, Artificial Sequence
  Synthetic oligonucleotide
aacagggctgaatgatgctcccacaataca

SEQ ID NO: 95153 - DNA, 30 bp, Artificial Sequence
  Synthetic oligonucleotide
gtagagtgaaagcaatagcaatgccataca

SEQ ID NO: 95154 - DNA, 30 bp, Artificial Sequence
  Synthetic oligonucleotide
atctagtagatgagggtcaaactccataca

SEQ ID NO: 95155 - DNA, 31 bp, Artificial Sequence
  Synthetic oligonucleotide
ccaccatacccacgaactacttgtccataca

SEQ ID NO: 95156 - DNA, 30 bp, Artificial Sequence
  Synthetic oligonucleotide
gacgaggacgacccccgttttaggcataca

SEQ ID NO: 95157 - DNA, 30 bp, Artificial Sequence
  Synthetic oligonucleotide
tcaaatgggcagcgccttcactggcataca

SEQ ID NO: 95158 - DNA, 30 bp, Artificial Sequence
  Synthetic oligonucleotide
ccatctaacatacttactggagctcataca

SEQ ID NO: 95159 - DNA, 30 bp, Artificial Sequence
  Synthetic oligonucleotide
ctccgaagtgaaataagaaatagggataca

SEQ ID NO: 95160 - DNA, 30 bp, Artificial Sequence
  Synthetic oligonucleotide
gcagtcaattacggattaactggggataca

SEQ ID NO: 95161 - DNA, 30 bp, Artificial Sequence
  Synthetic oligonucleotide
ggtgatacgccaggaggcccggttgataca

SEQ ID NO: 95162 - DNA, 30 bp, Artificial Sequence
  Synthetic oligonucleotide
acggaggcggcaataagtgatatctataca

SEQ ID NO: 95163 - DNA, 30 bp, Artificial Sequence
  Synthetic oligonucleotide
cacagagtgggacacaactaggaaactaca

SEQ ID NO: 95164 - DNA, 30 bp, Artificial Sequence
  Synthetic oligonucleotide
acgattaaacgagattcgcgaggacctaca

SEQ ID NO: 95165 - DNA, 29 bp, Artificial Sequence
  Synthetic oligonucleotide
atcgtaaacagattagtgcggtagctaca

SEQ ID NO: 95166 - DNA, 30 bp, Artificial Sequence
  Synthetic oligonucleotide
taactagcagcgacaatctgttgatctaca

SEQ ID NO: 95167 - DNA, 30 bp, Artificial Sequence
  Synthetic oligonucleotide
tcgcgacgaccagggagtcgggcttctaca

SEQ ID NO: 95168 - DNA, 30 bp, Artificial Sequence
  Synthetic oligonucleotide
cagtgggataggtaccgtcgggcaagtaca

SEQ ID NO: 95169 - DNA, 30 bp, Artificial Sequence
  Synthetic oligonucleotide
tcacgggccgggcctaggaatacacgtaca

SEQ ID NO: 95170 - DNA, 30 bp, Artificial Sequence
  Synthetic oligonucleotide
tcaatacctcccgcgtccgggatgcgtaca

SEQ ID NO: 95171 - DNA, 30 bp, Artificial Sequence
  Synthetic oligonucleotide
ggaattatcaagagaggtcagtaaggtaca

SEQ ID NO: 95172 - DNA, 30 bp, Artificial Sequence
  Synthetic oligonucleotide
aagccaaatgcaaccacgtggtgaggtaca

SEQ ID NO: 95173 - DNA, 30 bp, Artificial Sequence
  Synthetic oligonucleotide
tagagttcagaaatgttgggagggggtaca

SEQ ID NO: 95174 - DNA, 30 bp, Artificial Sequence
  Synthetic oligonucleotide
gtgcttcacttaagcggtccaatgggtaca

SEQ ID NO: 95175 - DNA, 30 bp, Artificial Sequence
  Synthetic oligonucleotide
gtgtatggactcttggggttaagatgtaca

SEQ ID NO: 95176 - DNA, 30 bp, Artificial Sequence
  Synthetic oligonucleotide
agcgggggagtaaagaccgcgagatgtaca

SEQ ID NO: 95177 - DNA, 30 bp, Artificial Sequence
  Synthetic oligonucleotide
gcagtgtaaagatcgaatagggcctgtaca

SEQ ID NO: 95178 - DNA, 30 bp, Artificial Sequence
  Synthetic oligonucleotide
ttagcaacgacattaggacaacgctgtaca

SEQ ID NO: 95179 - DNA, 30 bp, Artificial Sequence
  Synthetic oligonucleotide
ccacgttacctgtagcgttatcaaattaca

SEQ ID NO: 95180 - DNA, 30 bp, Artificial Sequence
  Synthetic oligonucleotide
gggctagggtatggtggattccacattaca

SEQ ID NO: 95181 - DNA, 30 bp, Artificial Sequence
  Synthetic oligonucleotide
gggaacagaatcggtgtgatcctgcttaca

SEQ ID NO: 95182 - DNA, 30 bp, Artificial Sequence
  Synthetic oligonucleotide
tagagacgccgagggactgatcatcttaca

SEQ ID NO: 95183 - DNA, 30 bp, Artificial Sequence
  Synthetic oligonucleotide
tggtgggggcgaatctcccccggtaaacca

SEQ ID NO: 95184 - DNA, 30 bp, Artificial Sequence
  Synthetic oligonucleotide
atggcatgagacccgtagtgtgaccaacca

SEQ ID NO: 95185 - DNA, 30 bp, Artificial Sequence
  Synthetic oligonucleotide
aaaggtggtcggcctcgaaagacccaacca

SEQ ID NO: 95186 - DNA, 30 bp, Artificial Sequence
  Synthetic oligonucleotide
gtctagcgagatttgagttatgggcaacca

SEQ ID NO: 95187 - DNA, 30 bp, Artificial Sequence
  Synthetic oligonucleotide
gctggactatcgcgaaaaattagtcaacca

SEQ ID NO: 95188 - DNA, 30 bp, Artificial Sequence
  Synthetic oligonucleotide
ttacgggctgtaaaagacatttccgaacca

SEQ ID NO: 95189 - DNA, 30 bp, Artificial Sequence
  Synthetic oligonucleotide
cagcactcgcggcaaaaaataactgaacca

SEQ ID NO: 95190 - DNA, 30 bp, Artificial Sequence
  Synthetic oligonucleotide
atgtccctacgccgtagcgcgccgtaacca

SEQ ID NO: 95191 - DNA, 30 bp, Artificial Sequence
  Synthetic oligonucleotide
cctgtgtaatgatggaccgtgttgtaacca

SEQ ID NO: 95192 - DNA, 30 bp, Artificial Sequence
  Synthetic oligonucleotide
gaattgccgaaatcatgaaggcgttaacca

SEQ ID NO: 95193 - DNA, 30 bp, Artificial Sequence
  Synthetic oligonucleotide
acggtccacccataagatagagaaacacca

SEQ ID NO: 95194 - DNA, 30 bp, Artificial Sequence
  Synthetic oligonucleotide
cgtcccgcacacgaacgagccaggacacca

SEQ ID NO: 95195 - DNA, 30 bp, Artificial Sequence
  Synthetic oligonucleotide
gtatcggttatgcaagggagaaacccacca

SEQ ID NO: 95196 - DNA, 30 bp, Artificial Sequence
  Synthetic oligonucleotide
gtcctaccgggccctccccctaaagcacca

SEQ ID NO: 95197 - DNA, 30 bp, Artificial Sequence
  Synthetic oligonucleotide
gatagcatcatgatgaggtggtgggcacca

SEQ ID NO: 95198 - DNA, 30 bp, Artificial Sequence
  Synthetic oligonucleotide
tgtattgcgacagcggaccaagatgcacca

SEQ ID NO: 95199 - DNA, 30 bp, Artificial Sequence
  Synthetic oligonucleotide
tgtgatactgacttggtagagcgtgcacca

SEQ ID NO: 95200 - DNA, 30 bp, Artificial Sequence
  Synthetic oligonucleotide
attgggaaccctgaactacagatatcacca

SEQ ID NO: 95201 - DNA, 30 bp, Artificial Sequence
  Synthetic oligonucleotide
tataggcccgaagaaacgatcttctcacca

SEQ ID NO: 95202 - DNA, 30 bp, Artificial Sequence
  Synthetic oligonucleotide
taggtggcctaagaggatgtgcgaagacca

SEQ ID NO: 95203 - DNA, 30 bp, Artificial Sequence
  Synthetic oligonucleotide
gcaataccagcggaacgcttttcgagacca

SEQ ID NO: 95204 - DNA, 30 bp, Artificial Sequence
  Synthetic oligonucleotide
gatacttcactgggggggactaatagacca

SEQ ID NO: 95205 - DNA, 30 bp, Artificial Sequence
  Synthetic oligonucleotide
tggtgtaggcaattgagaacttatagacca

SEQ ID NO: 95206 - DNA, 30 bp, Artificial Sequence
  Synthetic oligonucleotide
gggggggttcatactaggtttactcgacca

SEQ ID NO: 95207 - DNA, 30 bp, Artificial Sequence
  Synthetic oligonucleotide
ttgcagtgcgggcttaggatggcgggacca

SEQ ID NO: 95208 - DNA, 30 bp, Artificial Sequence
  Synthetic oligonucleotide
tgacaaactacgggtacttgggcatgacca

SEQ ID NO: 95209 - DNA, 30 bp, Artificial Sequence
  Synthetic oligonucleotide
cctagatcaagtacaattacggagtgacca

SEQ ID NO: 95210 - DNA, 30 bp, Artificial Sequence
  Synthetic oligonucleotide
gtgcatagaagttggccggcataaatacca

SEQ ID NO: 95211 - DNA, 30 bp, Artificial Sequence
  Synthetic oligonucleotide
ttacgtctggcgtcacgtacatcgctacca

SEQ ID NO: 95212 - DNA, 31 bp, Artificial Sequence
  Synthetic oligonucleotide
atgccactggggcaaagcgatacctctacca

SEQ ID NO: 95213 - DNA, 30 bp, Artificial Sequence
  Synthetic oligonucleotide
agactgcagggcagaacgcggaaggtacca

SEQ ID NO: 95214 - DNA, 30 bp, Artificial Sequence
  Synthetic oligonucleotide
tgatcatccggctctgttggaacattacca

SEQ ID NO: 95215 - DNA, 30 bp, Artificial Sequence
  Synthetic oligonucleotide
tcaacgaaagatcaagtctttcagaaccca

SEQ ID NO: 95216 - DNA, 30 bp, Artificial Sequence
  Synthetic oligonucleotide
atcaagaacgggaggtccttcgagaaccca

SEQ ID NO: 95217 - DNA, 30 bp, Artificial Sequence
  Synthetic oligonucleotide
tggccccgatctgagggatgcgggaaccca

SEQ ID NO: 95218 - DNA, 30 bp, Artificial Sequence
  Synthetic oligonucleotide
gacgacagagtacacctccttactgaccca

SEQ ID NO: 95219 - DNA, 30 bp, Artificial Sequence
  Synthetic oligonucleotide
caggaccaaataaccgtagtagggtaccca

SEQ ID NO: 95220 - DNA, 30 bp, Artificial Sequence
  Synthetic oligonucleotide
agtcgcctcaatagattccaaacttaccca

SEQ ID NO: 95221 - DNA, 30 bp, Artificial Sequence
  Synthetic oligonucleotide
acggtattgttaggggggcttaacacccca

SEQ ID NO: 95222 - DNA, 30 bp, Artificial Sequence
  Synthetic oligonucleotide
tggagaactcgcgttcacttacgtacccca

SEQ ID NO: 95223 - DNA, 30 bp, Artificial Sequence
  Synthetic oligonucleotide
ttcgaatacgtggcccatctgcacccccca

SEQ ID NO: 95224 - DNA, 30 bp, Artificial Sequence
  Synthetic oligonucleotide
aagggacagtacacgcccgcgcgggcccca

SEQ ID NO: 95225 - DNA, 30 bp, Artificial Sequence
  Synthetic oligonucleotide
ctgtccagtcacctcctcatgcgatcccca

SEQ ID NO: 95226 - DNA, 30 bp, Artificial Sequence
  Synthetic oligonucleotide
ggaagcgctaccgctgctgaaagtagccca

SEQ ID NO: 95227 - DNA, 30 bp, Artificial Sequence
  Synthetic oligonucleotide
tgtggtctacgtgccatctgaatacgccca

SEQ ID NO: 95228 - DNA, 30 bp, Artificial Sequence
  Synthetic oligonucleotide
tttatattgaataaaccaacgttccgccca

SEQ ID NO: 95229 - DNA, 30 bp, Artificial Sequence
  Synthetic oligonucleotide
atgagctcatcgatacatacaatggtccca

SEQ ID NO: 95230 - DNA, 30 bp, Artificial Sequence
  Synthetic oligonucleotide
cgtccaacatcggtcattgtaggaaagcca

SEQ ID NO: 95231 - DNA, 30 bp, Artificial Sequence
  Synthetic oligonucleotide
gactgcgagacagaggtaggtggcaagcca

SEQ ID NO: 95232 - DNA, 30 bp, Artificial Sequence
  Synthetic oligonucleotide
atggctagagtaaatggagtgtgtaagcca

SEQ ID NO: 95233 - DNA, 30 bp, Artificial Sequence
  Synthetic oligonucleotide
gcatacctcaacactggatacatccagcca

SEQ ID NO: 95234 - DNA, 30 bp, Artificial Sequence
  Synthetic oligonucleotide
acggcagggaaattttcggactatcagcca

SEQ ID NO: 95235 - DNA, 30 bp, Artificial Sequence
  Synthetic oligonucleotide
acaagcacaatgcacgcggtgatcgagcca

SEQ ID NO: 95236 - DNA, 30 bp, Artificial Sequence
  Synthetic oligonucleotide
tcggtgtcaaatgtaaattaaagggagcca

SEQ ID NO: 95237 - DNA, 30 bp, Artificial Sequence
  Synthetic oligonucleotide
atggggcggaggtttactggtatatagcca

SEQ ID NO: 95238 - DNA, 30 bp, Artificial Sequence
  Synthetic oligonucleotide
cttgacatagttcgggagtaactctagcca

SEQ ID NO: 95239 - DNA, 30 bp, Artificial Sequence
  Synthetic oligonucleotide
aggccagatgactcagcagccaccacgcca

SEQ ID NO: 95240 - DNA, 30 bp, Artificial Sequence
  Synthetic oligonucleotide
cgtacgagaggcaaagccatttcaccgcca

SEQ ID NO: 95241 - DNA, 30 bp, Artificial Sequence
  Synthetic oligonucleotide
gctaagacgtccgaagatcccgcgccgcca

SEQ ID NO: 95242 - DNA, 30 bp, Artificial Sequence
  Synthetic oligonucleotide
ggtccgaaagatgtcatggctgtcgcgcca

SEQ ID NO: 95243 - DNA, 30 bp, Artificial Sequence
  Synthetic oligonucleotide
tgtgaagaactatgtcccggtaaggcgcca

SEQ ID NO: 95244 - DNA, 30 bp, Artificial Sequence
  Synthetic oligonucleotide
attcggtaactgtagactacgtactcgcca

SEQ ID NO: 95245 - DNA, 30 bp, Artificial Sequence
  Synthetic oligonucleotide
tagcacatccggcatagggcgtactcgcca

SEQ ID NO: 95246 - DNA, 30 bp, Artificial Sequence
  Synthetic oligonucleotide
gcttggcgaggccgacgtgatactaggcca

SEQ ID NO: 95247 - DNA, 30 bp, Artificial Sequence
  Synthetic oligonucleotide
tgaaaaacctgagcgacagcgccccggcca

SEQ ID NO: 95248 - DNA, 30 bp, Artificial Sequence
  Synthetic oligonucleotide
tctagacgagaaccggtaatacacgggcca

SEQ ID NO: 95249 - DNA, 30 bp, Artificial Sequence
  Synthetic oligonucleotide
gggacaactctcgatgatcggggggggcca

SEQ ID NO: 95250 - DNA, 30 bp, Artificial Sequence
  Synthetic oligonucleotide
gataaagagttacgtaacccctactggcca

SEQ ID NO: 95251 - DNA, 30 bp, Artificial Sequence
  Synthetic oligonucleotide
tgagatgcctttagtaggactaaaatgcca

SEQ ID NO: 95252 - DNA, 30 bp, Artificial Sequence
  Synthetic oligonucleotide
agagaaatgcgagtttatacgttaatgcca

SEQ ID NO: 95253 - DNA, 30 bp, Artificial Sequence
  Synthetic oligonucleotide
tggctgtataaaaaggcgagtcagatgcca

SEQ ID NO: 95254 - DNA, 30 bp, Artificial Sequence
  Synthetic oligonucleotide
agccgacaatcgttccctgaagcactgcca

SEQ ID NO: 95255 - DNA, 30 bp, Artificial Sequence
  Synthetic oligonucleotide
tgggtaagctgaagtggaggaaagctgcca

SEQ ID NO: 95256 - DNA, 30 bp, Artificial Sequence
  Synthetic oligonucleotide
ctatcatcgagaggattgattactgtgcca

SEQ ID NO: 95257 - DNA, 40 bp, Artificial Sequence
  Synthetic oligonucleotide
ctaacagcacctggcgttacctagtttcccgaccttgcca

SEQ ID NO: 95258 - DNA, 30 bp, Artificial Sequence
  Synthetic oligonucleotide
ccggtctgctgcaatctacatcgcttgcca

SEQ ID NO: 95259 - DNA, 30 bp, Artificial Sequence
  Synthetic oligonucleotide
cagtctggggaatttaaaggggcaaatcca

SEQ ID NO: 95260 - DNA, 30 bp, Artificial Sequence
  Synthetic oligonucleotide
ggacatctcgacgtattaactgtcaatcca

SEQ ID NO: 95261 - DNA, 30 bp, Artificial Sequence
  Synthetic oligonucleotide
cgcgcatgatagagaaagagacagaatcca

SEQ ID NO: 95262 - DNA, 30 bp, Artificial Sequence
  Synthetic oligonucleotide
gtcgagggatagagggggaagagtcatcca

SEQ ID NO: 95263 - DNA, 30 bp, Artificial Sequence
  Synthetic oligonucleotide
ccgggcggagttgagcgaggatcatatcca

SEQ ID NO: 95264 - DNA, 30 bp, Artificial Sequence
  Synthetic oligonucleotide
gcttgataagctgacaagagacagtatcca

SEQ ID NO: 95265 - DNA, 30 bp, Artificial Sequence
  Synthetic oligonucleotide
ccgaagccaagattacagggggcttatcca

SEQ ID NO: 95266 - DNA, 30 bp, Artificial Sequence
  Synthetic oligonucleotide
aggccgtgaatacgtcaagcgatccctcca

SEQ ID NO: 95267 - DNA, 30 bp, Artificial Sequence
  Synthetic oligonucleotide
cgcctaaagtgcggtagtcaacctcctcca

SEQ ID NO: 95268 - DNA, 30 bp, Artificial Sequence
  Synthetic oligonucleotide
aaggaaggtcgactcatgcaatctcctcca

SEQ ID NO: 95269 - DNA, 30 bp, Artificial Sequence
  Synthetic oligonucleotide
catgggcacctatagatggaagacgctcca

SEQ ID NO: 95270 - DNA, 30 bp, Artificial Sequence
  Synthetic oligonucleotide
accttgcctttagaatagaagagctctcca

SEQ ID NO: 95271 - DNA, 30 bp, Artificial Sequence
  Synthetic oligonucleotide
aagctagttaaagattaatcagtgtctcca

SEQ ID NO: 95272 - DNA, 30 bp, Artificial Sequence
  Synthetic oligonucleotide
tgaataaccatggaacgcgcaaagagtcca

SEQ ID NO: 95273 - DNA, 30 bp, Artificial Sequence
  Synthetic oligonucleotide
ctagtacttccgataccgatagatcgtcca

SEQ ID NO: 95274 - DNA, 30 bp, Artificial Sequence
  Synthetic oligonucleotide
tcgcccaaacgtatctgagctcctcgtcca

SEQ ID NO: 95275 - DNA, 30 bp, Artificial Sequence
  Synthetic oligonucleotide
aaaaagagtagaggatttctagctcgtcca

SEQ ID NO: 95276 - DNA, 30 bp, Artificial Sequence
  Synthetic oligonucleotide
aagaagataatgcatatttgcgtgggtcca

SEQ ID NO: 95277 - DNA, 30 bp, Artificial Sequence
  Synthetic oligonucleotide
gtgaaacgaagcagccttcatttgggtcca

SEQ ID NO: 95278 - DNA, 30 bp, Artificial Sequence
  Synthetic oligonucleotide
atcccggtagatcatatggggaatggtcca

SEQ ID NO: 95279 - DNA, 30 bp, Artificial Sequence
  Synthetic oligonucleotide
ataattatcggcaaaggaaaaacatgtcca

SEQ ID NO: 95280 - DNA, 30 bp, Artificial Sequence
  Synthetic oligonucleotide
aggggatggaattcatggttatcttgtcca

SEQ ID NO: 95281 - DNA, 30 bp, Artificial Sequence
  Synthetic oligonucleotide
aagtggtcacggccttaactagcagttcca

SEQ ID NO: 95282 - DNA, 30 bp, Artificial Sequence
  Synthetic oligonucleotide
tagggttgccacgcgagagagggatttcca

SEQ ID NO: 95283 - DNA, 30 bp, Artificial Sequence
  Synthetic oligonucleotide
acggggcaatggtgtaccgcttggtttcca

SEQ ID NO: 95284 - DNA, 30 bp, Artificial Sequence
  Synthetic oligonucleotide
cgaacagtgtggtgcgcattatgttttcca

SEQ ID NO: 95285 - DNA, 30 bp, Artificial Sequence
  Synthetic oligonucleotide
aatcagtaaaagaatgccgtaagaaaagca

SEQ ID NO: 95286 - DNA, 30 bp, Artificial Sequence
  Synthetic oligonucleotide
gtgtaatattgcccgtacgtaaacaaagca

SEQ ID NO: 95287 - DNA, 30 bp, Artificial Sequence
  Synthetic oligonucleotide
ctgacggggtggatgcaagtttttcaagca

SEQ ID NO: 95288 - DNA, 30 bp, Artificial Sequence
  Synthetic oligonucleotide
acttgtcataaagaaggtatataagaagca

SEQ ID NO: 95289 - DNA, 30 bp, Artificial Sequence
  Synthetic oligonucleotide
ggggtaatagcggctgcgattaccgaagca

SEQ ID NO: 95290 - DNA, 30 bp, Artificial Sequence
  Synthetic oligonucleotide
gtagagcaaacgaatggcgttggtgaagca

SEQ ID NO: 95291 - DNA, 30 bp, Artificial Sequence
  Synthetic oligonucleotide
atggtcgatcaagattgcgccattgaagca

SEQ ID NO: 95292 - DNA, 30 bp, Artificial Sequence
  Synthetic oligonucleotide
gccgcaagtgcgttgtcaaagagataagca

SEQ ID NO: 95293 - DNA, 30 bp, Artificial Sequence
  Synthetic oligonucleotide
taatgtcgattttgatttgaccattaagca

SEQ ID NO: 95294 - DNA, 30 bp, Artificial Sequence
  Synthetic oligonucleotide
cgagctacttacaccttaagtcacacagca

SEQ ID NO: 95295 - DNA, 30 bp, Artificial Sequence
  Synthetic oligonucleotide
gaagacgtcgagggcagtggcgtcacagca

SEQ ID NO: 95296 - DNA, 30 bp, Artificial Sequence
  Synthetic oligonucleotide
ctcgagcactcttgcatagggaatacagca

SEQ ID NO: 95297 - DNA, 30 bp, Artificial Sequence
  Synthetic oligonucleotide
acttcatatgctaccgtctctgctacagca

SEQ ID NO: 95298 - DNA, 30 bp, Artificial Sequence
  Synthetic oligonucleotide
gccgccgcccccaatccctactaaccagca

SEQ ID NO: 95299 - DNA, 30 bp, Artificial Sequence
  Synthetic oligonucleotide
cctgggtgagaggggaaaggtgcaccagca

SEQ ID NO: 95300 - DNA, 30 bp, Artificial Sequence
  Synthetic oligonucleotide
aagggcgaaggctttaagatctgaccagca

SEQ ID NO: 95301 - DNA, 30 bp, Artificial Sequence
  Synthetic oligonucleotide
caattccgataacactgtactctcccagca

SEQ ID NO: 95302 - DNA, 30 bp, Artificial Sequence
  Synthetic oligonucleotide
tggaatctcaggaaacggcgtactccagca

SEQ ID NO: 95303 - DNA, 30 bp, Artificial Sequence
  Synthetic oligonucleotide
acggacacccagcacaaccccattccagca

SEQ ID NO: 95304 - DNA, 30 bp, Artificial Sequence
  Synthetic oligonucleotide
aagaatgatgggcgtcatcttggggcagca

SEQ ID NO: 95305 - DNA, 30 bp, Artificial Sequence
  Synthetic oligonucleotide
gcttcaaatgaaggacaagagcatgcagca

SEQ ID NO: 95306 - DNA, 30 bp, Artificial Sequence
  Synthetic oligonucleotide
gagccataatcgcataagcggcatgcagca

SEQ ID NO: 95307 - DNA, 30 bp, Artificial Sequence
  Synthetic oligonucleotide
ttaagtgaggtttaggtactgtaatcagca

SEQ ID NO: 95308 - DNA, 30 bp, Artificial Sequence
  Synthetic oligonucleotide
ccttagatacgcctactaccatcttcagca

SEQ ID NO: 95309 - DNA, 30 bp, Artificial Sequence
  Synthetic oligonucleotide
ggtcctagatgcgaggttaaggtttcagca

SEQ ID NO: 95310 - DNA, 30 bp, Artificial Sequence
  Synthetic oligonucleotide
acaattataaaatatgaagaacaaagagca

SEQ ID NO: 95311 - DNA, 30 bp, Artificial Sequence
  Synthetic oligonucleotide
agtgggggtgcgtaagatggatgaagagca

SEQ ID NO: 95312 - DNA, 30 bp, Artificial Sequence
  Synthetic oligonucleotide
aacctgaaggtagcatataaatatagagca

SEQ ID NO: 95313 - DNA, 30 bp, Artificial Sequence
  Synthetic oligonucleotide
tacgaatggaggctagacacgctacgagca

SEQ ID NO: 95314 - DNA, 30 bp, Artificial Sequence
  Synthetic oligonucleotide
acgttcaagggtcttacgcggttacgagca

SEQ ID NO: 95315 - DNA, 30 bp, Artificial Sequence
  Synthetic oligonucleotide
gggccttcttgtctgcgtattaaccgagca

SEQ ID NO: 95316 - DNA, 30 bp, Artificial Sequence
  Synthetic oligonucleotide
ggtgggtggtcacctttataagcccgagca

SEQ ID NO: 95317 - DNA, 30 bp, Artificial Sequence
  Synthetic oligonucleotide
acgtcaggcgcccgcaaccaggtccgagca

SEQ ID NO: 95318 - DNA, 30 bp, Artificial Sequence
  Synthetic oligonucleotide
gtgaagttaaagatagaaatggtccgagca

SEQ ID NO: 95319 - DNA, 30 bp, Artificial Sequence
  Synthetic oligonucleotide
ttcaacataccgcgagagaatgtccgagca

SEQ ID NO: 95320 - DNA, 30 bp, Artificial Sequence
  Synthetic oligonucleotide
agaggagtggtcatagatagtgggcgagca

SEQ ID NO: 95321 - DNA, 30 bp, Artificial Sequence
  Synthetic oligonucleotide
gacagtatgggtccttacaaacgtcgagca

SEQ ID NO: 95322 - DNA, 30 bp, Artificial Sequence
  Synthetic oligonucleotide
ttcatcaaacggagtgagatgaccggagca

SEQ ID NO: 95323 - DNA, 30 bp, Artificial Sequence
  Synthetic oligonucleotide
ggactgactgctcttagggtcgaatgagca

SEQ ID NO: 95324 - DNA, 30 bp, Artificial Sequence
  Synthetic oligonucleotide
gcgttaaaacaattagggcagccctgagca

SEQ ID NO: 95325 - DNA, 30 bp, Artificial Sequence
  Synthetic oligonucleotide
ggatgatcaacccaaatcattaagtgagca

SEQ ID NO: 95326 - DNA, 30 bp, Artificial Sequence
  Synthetic oligonucleotide
tcgggtaatgaacgcccccctcacatagca

SEQ ID NO: 95327 - DNA, 30 bp, Artificial Sequence
  Synthetic oligonucleotide
cccatggaatcaacgggcaatgccatagca

SEQ ID NO: 95328 - DNA, 30 bp, Artificial Sequence
  Synthetic oligonucleotide
atgagaagactaaacacttacccgatagca

SEQ ID NO: 95329 - DNA, 30 bp, Artificial Sequence
  Synthetic oligonucleotide
agagtcgctaagggcgtgctagaactagca

SEQ ID NO: 95330 - DNA, 30 bp, Artificial Sequence
  Synthetic oligonucleotide
cagaagacctttaactgcgtagaagtagca

SEQ ID NO: 95331 - DNA, 30 bp, Artificial Sequence
  Synthetic oligonucleotide
ggagcaactaacgaaggtgatgaagtagca

SEQ ID NO: 95332 - DNA, 30 bp, Artificial Sequence
  Synthetic oligonucleotide
cgatgtcaagccttgggccagatagtagca

SEQ ID NO: 95333 - DNA, 30 bp, Artificial Sequence
  Synthetic oligonucleotide
tagcggtgcgtaggtctgcgtgtggtagca

SEQ ID NO: 95334 - DNA, 30 bp, Artificial Sequence
  Synthetic oligonucleotide
tcaagatgacaatgggcaaagggcttagca

SEQ ID NO: 95335 - DNA, 30 bp, Artificial Sequence
  Synthetic oligonucleotide
cgttaataacgcaacaatatcacgttagca

SEQ ID NO: 95336 - DNA, 30 bp, Artificial Sequence
  Synthetic oligonucleotide
cattatggactatcaggagacgatttagca

SEQ ID NO: 95337 - DNA, 30 bp, Artificial Sequence
  Synthetic oligonucleotide
aaagccttgatgacagggggccgaaacgca

SEQ ID NO: 95338 - DNA, 30 bp, Artificial Sequence
  Synthetic oligonucleotide
tgctacgggaatttaagactacccaacgca

SEQ ID NO: 95339 - DNA, 30 bp, Artificial Sequence
  Synthetic oligonucleotide
ataccaaatccggtccataatacgaacgca

SEQ ID NO: 95340 - DNA, 30 bp, Artificial Sequence
  Synthetic oligonucleotide
gagaagcggactattgagtcagaccacgca

SEQ ID NO: 95341 - DNA, 30 bp, Artificial Sequence
  Synthetic oligonucleotide
agcaggttcattgctacggtaaggcacgca

SEQ ID NO: 95342 - DNA, 30 bp, Artificial Sequence
  Synthetic oligonucleotide
ggtgtggatgtgagacgcaaaactcacgca

SEQ ID NO: 95343 - DNA, 30 bp, Artificial Sequence
  Synthetic oligonucleotide
acacgctggtttacagtcgtacgacccgca

SEQ ID NO: 95344 - DNA, 30 bp, Artificial Sequence
  Synthetic oligonucleotide
tagggaaattcccacaacgtgtgccccgca

SEQ ID NO: 95345 - DNA, 30 bp, Artificial Sequence
  Synthetic oligonucleotide
aagtggaatctgttaaaagaaagttccgca

SEQ ID NO: 95346 - DNA, 30 bp, Artificial Sequence
  Synthetic oligonucleotide
gttaggaacgaggccaccattcgaagcgca

SEQ ID NO: 95347 - DNA, 30 bp, Artificial Sequence
  Synthetic oligonucleotide
tcaaatggctagaatcccaggagcagcgca

SEQ ID NO: 95348 - DNA, 30 bp, Artificial Sequence
  Synthetic oligonucleotide
gtaaccgatgttcgagcgtgcattagcgca

SEQ ID NO: 95349 - DNA, 30 bp, Artificial Sequence
  Synthetic oligonucleotide
cgatgtaagtatactcttaattttagcgca

SEQ ID NO: 95350 - DNA, 30 bp, Artificial Sequence
  Synthetic oligonucleotide
aggtacaggcagagggtaattcaccgcgca

SEQ ID NO: 95351 - DNA, 30 bp, Artificial Sequence
  Synthetic oligonucleotide
agagcttagattcgccagctaaggcgcgca

SEQ ID NO: 95352 - DNA, 30 bp, Artificial Sequence
  Synthetic oligonucleotide
gtacatggtactgtctgacaacttcgcgca

SEQ ID NO: 95353 - DNA, 30 bp, Artificial Sequence
  Synthetic oligonucleotide
tgaaataggagcggattagataactgcgca

SEQ ID NO: 95354 - DNA, 30 bp, Artificial Sequence
  Synthetic oligonucleotide
cctgccggggccacattctcgtgctgcgca

SEQ ID NO: 95355 - DNA, 30 bp, Artificial Sequence
  Synthetic oligonucleotide
cccaaatcatagccagtcaagacaatcgca

SEQ ID NO: 95356 - DNA, 30 bp, Artificial Sequence
  Synthetic oligonucleotide
tggcctactacctgaagagtcgtaatcgca

SEQ ID NO: 95357 - DNA, 30 bp, Artificial Sequence
  Synthetic oligonucleotide
agcgagtgaagcgctttccacttaatcgca

SEQ ID NO: 95358 - DNA, 30 bp, Artificial Sequence
  Synthetic oligonucleotide
cgctctcgtgggcaggtaaacgtcatcgca

SEQ ID NO: 95359 - DNA, 30 bp, Artificial Sequence
  Synthetic oligonucleotide
caccgcctgagagtagaagcgcatctcgca

SEQ ID NO: 95360 - DNA, 30 bp, Artificial Sequence
  Synthetic oligonucleotide
cacgtcgcgtgctaaccattagaagtcgca

SEQ ID NO: 95361 - DNA, 30 bp, Artificial Sequence
  Synthetic oligonucleotide
gtgcgttcaggagcgcatacgtacttcgca

SEQ ID NO: 95362 - DNA, 30 bp, Artificial Sequence
  Synthetic oligonucleotide
aagactgtccgtgcaaatcaaggtaaggca

SEQ ID NO: 95363 - DNA, 30 bp, Artificial Sequence
  Synthetic oligonucleotide
gacagtcgagttagctttgaatttaaggca

SEQ ID NO: 95364 - DNA, 30 bp, Artificial Sequence
  Synthetic oligonucleotide
ggacttgtgtagtaagggagtgggcaggca

SEQ ID NO: 95365 - DNA, 30 bp, Artificial Sequence
  Synthetic oligonucleotide
agtcgggggtgcttaaaacgtgggtaggca

SEQ ID NO: 95366 - DNA, 30 bp, Artificial Sequence
  Synthetic oligonucleotide
aggtcatcaatcttgtcagaccattaggca

SEQ ID NO: 95367 - DNA, 30 bp, Artificial Sequence
  Synthetic oligonucleotide
caaagatgaataggatactgaataccggca

SEQ ID NO: 95368 - DNA, 30 bp, Artificial Sequence
  Synthetic oligonucleotide
agtaggattatttgcgcaaacgtaccggca

SEQ ID NO: 95369 - DNA, 30 bp, Artificial Sequence
  Synthetic oligonucleotide
cggctaaggagtaattcacgtttaccggca

SEQ ID NO: 95370 - DNA, 30 bp, Artificial Sequence
  Synthetic oligonucleotide
tggtcttttaatgctctccagcggccggca

SEQ ID NO: 95371 - DNA, 30 bp, Artificial Sequence
  Synthetic oligonucleotide
tccagagaaaatcgagacgatggtgcggca

SEQ ID NO: 95372 - DNA, 40 bp, Artificial Sequence
  Synthetic oligonucleotide
aatcgtgcgtcacaattttacggtcctgcttcaaagggca

SEQ ID NO: 95373 - DNA, 30 bp, Artificial Sequence
  Synthetic oligonucleotide
accgggacatagtgtgcggtcataagggca

SEQ ID NO: 95374 - DNA, 30 bp, Artificial Sequence
  Synthetic oligonucleotide
aacacggggtcgagggaagagatcagggca

SEQ ID NO: 95375 - DNA, 30 bp, Artificial Sequence
  Synthetic oligonucleotide
cagcgctaggggtccatcacagcgagggca

SEQ ID NO: 95376 - DNA, 30 bp, Artificial Sequence
  Synthetic oligonucleotide
cacacagactggacccccttagcgagggca

SEQ ID NO: 95377 - DNA, 30 bp, Artificial Sequence
  Synthetic oligonucleotide
acggttccagacttgagggtgtgacgggca

SEQ ID NO: 95378 - DNA, 30 bp, Artificial Sequence
  Synthetic oligonucleotide
agtgcggttatcactcaatgtgagcgggca

SEQ ID NO: 95379 - DNA, 30 bp, Artificial Sequence
  Synthetic oligonucleotide
tcgtgagcgccaaccctttaaactggggca

SEQ ID NO: 95380 - DNA, 30 bp, Artificial Sequence
  Synthetic oligonucleotide
agcgttatagagaacgcggtgattggggca

SEQ ID NO: 95381 - DNA, 30 bp, Artificial Sequence
  Synthetic oligonucleotide
gggcggggacactgtaggggcagatgggca

SEQ ID NO: 95382 - DNA, 30 bp, Artificial Sequence
  Synthetic oligonucleotide
tgcaacccaggcacgactcgggagtgggca

SEQ ID NO: 95383 - DNA, 30 bp, Artificial Sequence
  Synthetic oligonucleotide
ggcactagccgtgatcacagcaattgggca

SEQ ID NO: 95384 - DNA, 30 bp, Artificial Sequence
  Synthetic oligonucleotide
cgagaggggatcttgatgggagcaatggca

SEQ ID NO: 95385 - DNA, 30 bp, Artificial Sequence
  Synthetic oligonucleotide
ttgtgcgtgagaacagttcgtaacatggca

SEQ ID NO: 95386 - DNA, 30 bp, Artificial Sequence
  Synthetic oligonucleotide
gaatgtacacaggcaacgcgggacatggca

SEQ ID NO: 95387 - DNA, 30 bp, Artificial Sequence
  Synthetic oligonucleotide
cccatttgatagattggggaagtgatggca

SEQ ID NO: 95388 - DNA, 30 bp, Artificial Sequence
  Synthetic oligonucleotide
cagatccccaaaaatggatgtcatatggca

SEQ ID NO: 95389 - DNA, 30 bp, Artificial Sequence
  Synthetic oligonucleotide
acgtctgcgattcctaggtgtgctatggca

SEQ ID NO: 95390 - DNA, 30 bp, Artificial Sequence
  Synthetic oligonucleotide
ggattggaggtaagggagtacgtgctggca

SEQ ID NO: 95391 - DNA, 30 bp, Artificial Sequence
  Synthetic oligonucleotide
atcaacgtatagataaggtattaattggca

SEQ ID NO: 95392 - DNA, 30 bp, Artificial Sequence
  Synthetic oligonucleotide
caaggagatcagtgattcaggtcaaatgca

SEQ ID NO: 95393 - DNA, 30 bp, Artificial Sequence
  Synthetic oligonucleotide
tatatcaccctccccattctccagcatgca

SEQ ID NO: 95394 - DNA, 30 bp, Artificial Sequence
  Synthetic oligonucleotide
agcggaatcatacgggtgtgagcgcatgca

SEQ ID NO: 95395 - DNA, 30 bp, Artificial Sequence
  Synthetic oligonucleotide
ccgtgacgtgcacatcgctgttcagatgca

SEQ ID NO: 95396 - DNA, 30 bp, Artificial Sequence
  Synthetic oligonucleotide
ctactgtggtcgcggccaggtaaggatgca

SEQ ID NO: 95397 - DNA, 30 bp, Artificial Sequence
  Synthetic oligonucleotide
gttagattaagaatgtagggcggatatgca

SEQ ID NO: 95398 - DNA, 30 bp, Artificial Sequence
  Synthetic oligonucleotide
ttaggcgtgccataaaaatgtaagtatgca

SEQ ID NO: 95399 - DNA, 30 bp, Artificial Sequence
  Synthetic oligonucleotide
tcccagatttgctcatggtcagagtatgca

SEQ ID NO: 95400 - DNA, 30 bp, Artificial Sequence
  Synthetic oligonucleotide
gggtagcaaagtgagtggtttaggtatgca

SEQ ID NO: 95401 - DNA, 31 bp, Artificial Sequence
  Synthetic oligonucleotide
ttaataaggaatggcaggagacgtgtatgca

SEQ ID NO: 95402 - DNA, 30 bp, Artificial Sequence
  Synthetic oligonucleotide
ggcaattcatctgggagtagtctaactgca

SEQ ID NO: 95403 - DNA, 30 bp, Artificial Sequence
  Synthetic oligonucleotide
tgactgtggctacacccgataaacagtgca

SEQ ID NO: 95404 - DNA, 30 bp, Artificial Sequence
  Synthetic oligonucleotide
gggaaaactcttagtctggaggccagtgca

SEQ ID NO: 95405 - DNA, 30 bp, Artificial Sequence
  Synthetic oligonucleotide
tcaaaacaggggggcactccctgcagtgca

SEQ ID NO: 95406 - DNA, 30 bp, Artificial Sequence
  Synthetic oligonucleotide
acgcaaaggagaagcccgagaaatggtgca

SEQ ID NO: 95407 - DNA, 30 bp, Artificial Sequence
  Synthetic oligonucleotide
aggaacggactattgagcatacaatgtgca

SEQ ID NO: 95408 - DNA, 30 bp, Artificial Sequence
  Synthetic oligonucleotide
attaggttcaatcatacgggttagtgtgca

SEQ ID NO: 95409 - DNA, 30 bp, Artificial Sequence
  Synthetic oligonucleotide
tggattaaggaacaacttatctggtgtgca

SEQ ID NO: 95410 - DNA, 30 bp, Artificial Sequence
  Synthetic oligonucleotide
cgcgggaccgaacccgtgtggatgtgtgca

SEQ ID NO: 95411 - DNA, 30 bp, Artificial Sequence
  Synthetic oligonucleotide
aagcgtgggtggaacctatcctgttgtgca

SEQ ID NO: 95412 - DNA, 30 bp, Artificial Sequence
  Synthetic oligonucleotide
acccagaaccgacaaacccctccgattgca

SEQ ID NO: 95413 - DNA, 30 bp, Artificial Sequence
  Synthetic oligonucleotide
acgctggtacgataccgacccttccttgca

SEQ ID NO: 95414 - DNA, 30 bp, Artificial Sequence
  Synthetic oligonucleotide
agtaaacggcctgtgaccttgcctcttgca

SEQ ID NO: 95415 - DNA, 30 bp, Artificial Sequence
  Synthetic oligonucleotide
accttggactactgaagcgaacatgttgca

SEQ ID NO: 95416 - DNA, 30 bp, Artificial Sequence
  Synthetic oligonucleotide
tggttaacgtcccataagcatagcaaatca

SEQ ID NO: 95417 - DNA, 30 bp, Artificial Sequence
  Synthetic oligonucleotide
ggtgcgtcagcaattgatcgatctaaatca

SEQ ID NO: 95418 - DNA, 30 bp, Artificial Sequence
  Synthetic oligonucleotide
ggcttaacctggtgtatttagcgccaatca

SEQ ID NO: 95419 - DNA, 30 bp, Artificial Sequence
  Synthetic oligonucleotide
gacgtgttcaccagtgtgcatggccaatca

SEQ ID NO: 95420 - DNA, 30 bp, Artificial Sequence
  Synthetic oligonucleotide
cacgatcctgttgcttggatcatccaatca

SEQ ID NO: 95421 - DNA, 30 bp, Artificial Sequence
  Synthetic oligonucleotide
ttaagcgcatgtgtaactgttggcgaatca

SEQ ID NO: 95422 - DNA, 30 bp, Artificial Sequence
  Synthetic oligonucleotide
aaaggagcgttttgcgatagattcgaatca

SEQ ID NO: 95423 - DNA, 30 bp, Artificial Sequence
  Synthetic oligonucleotide
ggcagtaacgatgggctcaaatagtaatca

SEQ ID NO: 95424 - DNA, 30 bp, Artificial Sequence
  Synthetic oligonucleotide
gccgcgtgaacgaccgacctagcaacatca

SEQ ID NO: 95425 - DNA, 30 bp, Artificial Sequence
  Synthetic oligonucleotide
gcgagcattaaaaaccgcattatcacatca

SEQ ID NO: 95426 - DNA, 30 bp, Artificial Sequence
  Synthetic oligonucleotide
tcttgaaatggttgtgggaacttcgcatca

SEQ ID NO: 95427 - DNA, 30 bp, Artificial Sequence
  Synthetic oligonucleotide
tcggtggaatttttagcgtaagttgcatca

SEQ ID NO: 95428 - DNA, 30 bp, Artificial Sequence
  Synthetic oligonucleotide
aggggttattacagaacattcgtatcatca

SEQ ID NO: 95429 - DNA, 30 bp, Artificial Sequence
  Synthetic oligonucleotide
caaggtagcggattagcttgaatctcatca

SEQ ID NO: 95430 - DNA, 30 bp, Artificial Sequence
  Synthetic oligonucleotide
cgtatgtgttacttgacaacaataagatca

SEQ ID NO: 95431 - DNA, 30 bp, Artificial Sequence
  Synthetic oligonucleotide
aaaacgcccgcgcgggcgagaagacgatca

SEQ ID NO: 95432 - DNA, 30 bp, Artificial Sequence
  Synthetic oligonucleotide
ggactgatgggagagattggtaaccgatca

SEQ ID NO: 95433 - DNA, 30 bp, Artificial Sequence
  Synthetic oligonucleotide
cactaagtagtgttattcgtggcgggatca

SEQ ID NO: 95434 - DNA, 30 bp, Artificial Sequence
  Synthetic oligonucleotide
atagcgcggaaggaccgttatgcgggatca

SEQ ID NO: 95435 - DNA, 30 bp, Artificial Sequence
  Synthetic oligonucleotide
gtacatgagaatggatgtggacccgtatca

SEQ ID NO: 95436 - DNA, 30 bp, Artificial Sequence
  Synthetic oligonucleotide
caaggtatgcatggtagctaacgcgtatca

SEQ ID NO: 95437 - DNA, 30 bp, Artificial Sequence
  Synthetic oligonucleotide
ccaaaaagagtacagaacgattttgtatca

SEQ ID NO: 95438 - DNA, 30 bp, Artificial Sequence
  Synthetic oligonucleotide
ccctaatatcccatataagcatcgttatca

SEQ ID NO: 95439 - DNA, 30 bp, Artificial Sequence
  Synthetic oligonucleotide
gcaggactagatggcccggtaaggttatca

SEQ ID NO: 95440 - DNA, 30 bp, Artificial Sequence
  Synthetic oligonucleotide
gtcacgatatcgatagggtgtaggttatca

SEQ ID NO: 95441 - DNA, 30 bp, Artificial Sequence
  Synthetic oligonucleotide
cgtcgagggaacgccctttgctccaactca

SEQ ID NO: 95442 - DNA, 30 bp, Artificial Sequence
  Synthetic oligonucleotide
aagcgggggtggctaactcgtgaggactca

SEQ ID NO: 95443 - DNA, 30 bp, Artificial Sequence
  Synthetic oligonucleotide
tcatggagtagaatccttggtgcggactca

SEQ ID NO: 95444 - DNA, 30 bp, Artificial Sequence
  Synthetic oligonucleotide
ataccataggacctaaggaaaactgactca

SEQ ID NO: 95445 - DNA, 30 bp, Artificial Sequence
  Synthetic oligonucleotide
aacctaagatgtgatcgtgaaactgactca

SEQ ID NO: 95446 - DNA, 30 bp, Artificial Sequence
  Synthetic oligonucleotide
agaacttttaaatactgagacagtgactca

SEQ ID NO: 95447 - DNA, 30 bp, Artificial Sequence
  Synthetic oligonucleotide
tgggaggcgtatacgtacgggttaacctca

SEQ ID NO: 95448 - DNA, 30 bp, Artificial Sequence
  Synthetic oligonucleotide
cataaagatcactaggggtacagtacctca

SEQ ID NO: 95449 - DNA, 27 bp, Artificial Sequence
  Synthetic oligonucleotide
aggaggtatcgaacaaagggtacctca

SEQ ID NO: 95450 - DNA, 30 bp, Artificial Sequence
  Synthetic oligonucleotide
agttaagacaaggtgagcacatcaccctca

SEQ ID NO: 95451 - DNA, 30 bp, Artificial Sequence
  Synthetic oligonucleotide
agtccagtgatctcagggtagaagccctca

SEQ ID NO: 95452 - DNA, 30 bp, Artificial Sequence
  Synthetic oligonucleotide
ttagcagcgtaaacgtggaagagagcctca

SEQ ID NO: 95453 - DNA, 30 bp, Artificial Sequence
  Synthetic oligonucleotide
gcggagaacaagaaagtctgcgcgtcctca

SEQ ID NO: 95454 - DNA, 30 bp, Artificial Sequence
  Synthetic oligonucleotide
cgaaagggtggtacgtctctctggcgctca

SEQ ID NO: 95455 - DNA, 30 bp, Artificial Sequence
  Synthetic oligonucleotide
ccatggatagacaaaatcatgcacggctca

SEQ ID NO: 95456 - DNA, 30 bp, Artificial Sequence
  Synthetic oligonucleotide
gttttgtgtaggaagagtgcatgctgctca

SEQ ID NO: 95457 - DNA, 30 bp, Artificial Sequence
  Synthetic oligonucleotide
tctgaagtgtgcatgcgatgctggtgctca

SEQ ID NO: 95458 - DNA, 30 bp, Artificial Sequence
  Synthetic oligonucleotide
acttggtagggttgaagcaggcaaatctca

SEQ ID NO: 95459 - DNA, 30 bp, Artificial Sequence
  Synthetic oligonucleotide
tggaatccactactgcagattggcatctca

SEQ ID NO: 95460 - DNA, 30 bp, Artificial Sequence
  Synthetic oligonucleotide
aggtatcaagcaactagtccataactctca

SEQ ID NO: 95461 - DNA, 30 bp, Artificial Sequence
  Synthetic oligonucleotide
aactaaagagatcacgcgtcggtactctca

SEQ ID NO: 95462 - DNA, 30 bp, Artificial Sequence
  Synthetic oligonucleotide
tcaggggcgctctgtcccggaatggtctca

SEQ ID NO: 95463 - DNA, 30 bp, Artificial Sequence
  Synthetic oligonucleotide
cagggtgaattttgtaactaggcgaagtca

SEQ ID NO: 95464 - DNA, 30 bp, Artificial Sequence
  Synthetic oligonucleotide
tgtcgactagaaaatttaagttaacagtca

SEQ ID NO: 95465 - DNA, 30 bp, Artificial Sequence
  Synthetic oligonucleotide
cgatccccaggagtaaaccacgaccagtca

SEQ ID NO: 95466 - DNA, 30 bp, Artificial Sequence
  Synthetic oligonucleotide
ggtcaataagaagggggtaatcgccagtca

SEQ ID NO: 95467 - DNA, 30 bp, Artificial Sequence
  Synthetic oligonucleotide
cgcgagtttccttaacatctcatccagtca

SEQ ID NO: 95468 - DNA, 30 bp, Artificial Sequence
  Synthetic oligonucleotide
ctaattacgaatcttacagaagctcagtca

SEQ ID NO: 95469 - DNA, 30 bp, Artificial Sequence
  Synthetic oligonucleotide
ggcgtatcaactttctccagcatcgagtca

SEQ ID NO: 95470 - DNA, 30 bp, Artificial Sequence
  Synthetic oligonucleotide
aggttaactatggcgagggattgggagtca

SEQ ID NO: 95471 - DNA, 30 bp, Artificial Sequence
  Synthetic oligonucleotide
cccatcacgggtaagccaatctatgagtca

SEQ ID NO: 95472 - DNA, 30 bp, Artificial Sequence
  Synthetic oligonucleotide
gtggaagaaagctgttaggtatgtacgtca

SEQ ID NO: 95473 - DNA, 30 bp, Artificial Sequence
  Synthetic oligonucleotide
gacatgggcacggctactatatctccgtca

SEQ ID NO: 95474 - DNA, 30 bp, Artificial Sequence
  Synthetic oligonucleotide
tatcgaccttatgtcagcaacgtcgcgtca

SEQ ID NO: 95475 - DNA, 30 bp, Artificial Sequence
  Synthetic oligonucleotide
tacggatattatggtatcacccaggcgtca

SEQ ID NO: 95476 - DNA, 30 bp, Artificial Sequence
  Synthetic oligonucleotide
ttggaagatagaagtacacccaaaaggtca

SEQ ID NO: 95477 - DNA, 30 bp, Artificial Sequence
  Synthetic oligonucleotide
ttaccgtaggagaaggtttttcaaaggtca

SEQ ID NO: 95478 - DNA, 30 bp, Artificial Sequence
  Synthetic oligonucleotide
aaaccatgatcaggactctagacgaggtca

SEQ ID NO: 95479 - DNA, 30 bp, Artificial Sequence
  Synthetic oligonucleotide
tacgctgttaggtacaatcttccagggtca

SEQ ID NO: 95480 - DNA, 30 bp, Artificial Sequence
  Synthetic oligonucleotide
gggagaaaggctggtgattccttcgggtca

SEQ ID NO: 95481 - DNA, 30 bp, Artificial Sequence
  Synthetic oligonucleotide
cctaacgcactgcgtcgatccttggggtca

SEQ ID NO: 95482 - DNA, 30 bp, Artificial Sequence
  Synthetic oligonucleotide
agatctgccaaggtaatcggtaatgggtca

SEQ ID NO: 95483 - DNA, 30 bp, Artificial Sequence
  Synthetic oligonucleotide
ggacaacagctggttaaggttaatgggtca

SEQ ID NO: 95484 - DNA, 30 bp, Artificial Sequence
  Synthetic oligonucleotide
ccatcgtaaaagtcgatgggaagtgggtca

SEQ ID NO: 95485 - DNA, 30 bp, Artificial Sequence
  Synthetic oligonucleotide
tgttgaagtcaccttggatagcactggtca

SEQ ID NO: 95486 - DNA, 30 bp, Artificial Sequence
  Synthetic oligonucleotide
aagctaagtagattagtccgtaagtggtca

SEQ ID NO: 95487 - DNA, 30 bp, Artificial Sequence
  Synthetic oligonucleotide
gtccggaggtcgtactttaaacccatgtca

SEQ ID NO: 95488 - DNA, 30 bp, Artificial Sequence
  Synthetic oligonucleotide
tggcagtggacaggagaggtatttatgtca

SEQ ID NO: 95489 - DNA, 30 bp, Artificial Sequence
  Synthetic oligonucleotide
gcgacagcgcccagcccattagaactgtca

SEQ ID NO: 95490 - DNA, 30 bp, Artificial Sequence
  Synthetic oligonucleotide
ggcggcgtggcgaccaacgttgaagtgtca

SEQ ID NO: 95491 - DNA, 30 bp, Artificial Sequence
  Synthetic oligonucleotide
gtgggcaaagattactgatgaggggtgtca

SEQ ID NO: 95492 - DNA, 31 bp, Artificial Sequence
  Synthetic oligonucleotide
tcaaagtgcacgtctttcgtacctggtgtca

SEQ ID NO: 95493 - DNA, 30 bp, Artificial Sequence
  Synthetic oligonucleotide
agggaccgcatcgaaccattcagtgtgtca

SEQ ID NO: 95494 - DNA, 30 bp, Artificial Sequence
  Synthetic oligonucleotide
gtaggcatgctgggccaccagagtttgtca

SEQ ID NO: 95495 - DNA, 30 bp, Artificial Sequence
  Synthetic oligonucleotide
taggaacctaatgggctacgcgtcaattca

SEQ ID NO: 95496 - DNA, 30 bp, Artificial Sequence
  Synthetic oligonucleotide
tgggttatacgtttggcaacggtcaattca

SEQ ID NO: 95497 - DNA, 30 bp, Artificial Sequence
  Synthetic oligonucleotide
tgctggcgtggaggctgctggcactattca

SEQ ID NO: 95498 - DNA, 30 bp, Artificial Sequence
  Synthetic oligonucleotide
ttaaagtaagcgatcgatccaaccacttca

SEQ ID NO: 95499 - DNA, 30 bp, Artificial Sequence
  Synthetic oligonucleotide
accaacactgctaacatcaaacaaccttca

SEQ ID NO: 95500 - DNA, 30 bp, Artificial Sequence
  Synthetic oligonucleotide
ctggagttcagtaggatcatttgctcttca

SEQ ID NO: 95501 - DNA, 30 bp, Artificial Sequence
  Synthetic oligonucleotide
cgaatgctataggttaggtgggagtcttca

SEQ ID NO: 95502 - DNA, 30 bp, Artificial Sequence
  Synthetic oligonucleotide
acgtgctagttttactgaacaagaagttca

SEQ ID NO: 95503 - DNA, 30 bp, Artificial Sequence
  Synthetic oligonucleotide
tgggtgtgcgttcaggacatgctcagttca

SEQ ID NO: 95504 - DNA, 30 bp, Artificial Sequence
  Synthetic oligonucleotide
ggacgaaaaggactagaggcattacgttca

SEQ ID NO: 95505 - DNA, 30 bp, Artificial Sequence
  Synthetic oligonucleotide
agggggcgcgttcatagttgaacccgttca

SEQ ID NO: 95506 - DNA, 30 bp, Artificial Sequence
  Synthetic oligonucleotide
tcgtctttggccgaattatttttgcgttca

SEQ ID NO: 95507 - DNA, 30 bp, Artificial Sequence
  Synthetic oligonucleotide
gcgtatagggggctcaaatggaggggttca

SEQ ID NO: 95508 - DNA, 30 bp, Artificial Sequence
  Synthetic oligonucleotide
gcagggtaggggttaattgtaaatggttca

SEQ ID NO: 95509 - DNA, 30 bp, Artificial Sequence
  Synthetic oligonucleotide
ctgccctcacacggggaggaggctggttca

SEQ ID NO: 95510 - DNA, 30 bp, Artificial Sequence
  Synthetic oligonucleotide
atcatgggaacactatgtgatatctgttca

SEQ ID NO: 95511 - DNA, 30 bp, Artificial Sequence
  Synthetic oligonucleotide
tcatagtgggaaccctgacagtacgtttca

SEQ ID NO: 95512 - DNA, 30 bp, Artificial Sequence
  Synthetic oligonucleotide
ggagacggcctgcaagtagaatccgtttca

SEQ ID NO: 95513 - DNA, 30 bp, Artificial Sequence
  Synthetic oligonucleotide
gtgacgaatggcaacaatctacaggtttca

SEQ ID NO: 95514 - DNA, 30 bp, Artificial Sequence
  Synthetic oligonucleotide
agacctgtctaacacataaccggggtttca

SEQ ID NO: 95515 - DNA, 30 bp, Artificial Sequence
  Synthetic oligonucleotide
tcacccagtttagagtgtggaggattttca

SEQ ID NO: 95516 - DNA, 30 bp, Artificial Sequence
  Synthetic oligonucleotide
aacagagagcaacgtgttctgttattttca

SEQ ID NO: 95517 - DNA, 30 bp, Artificial Sequence
  Synthetic oligonucleotide
ggcgaattgcgcattattggaagcttttca

SEQ ID NO: 95518 - DNA, 30 bp, Artificial Sequence
  Synthetic oligonucleotide
gcgtcacatccgcaataagcaccaaaaaga

SEQ ID NO: 95519 - DNA, 30 bp, Artificial Sequence
  Synthetic oligonucleotide
gatcacctaatgccacaccgcgacaaaaga

SEQ ID NO: 95520 - DNA, 30 bp, Artificial Sequence
  Synthetic oligonucleotide
caccgtggtttaagtatccggggccaaaga

SEQ ID NO: 95521 - DNA, 30 bp, Artificial Sequence
  Synthetic oligonucleotide
tatggtttgcaatgagacatgctccaaaga

SEQ ID NO: 95522 - DNA, 30 bp, Artificial Sequence
  Synthetic oligonucleotide
aaaaatgactaaagcttaacggaggaaaga

SEQ ID NO: 95523 - DNA, 30 bp, Artificial Sequence
  Synthetic oligonucleotide
aagaacaacgtattagacatgacataaaga

SEQ ID NO: 95524 - DNA, 30 bp, Artificial Sequence
  Synthetic oligonucleotide
cgatgtgtgcgagcacactgtttataaaga

SEQ ID NO: 95525 - DNA, 30 bp, Artificial Sequence
  Synthetic oligonucleotide
gagagcccattctcaggttagtcctaaaga

SEQ ID NO: 95526 - DNA, 30 bp, Artificial Sequence
  Synthetic oligonucleotide
aaccgtagtccttaatctagctagtaaaga

SEQ ID NO: 95527 - DNA, 30 bp, Artificial Sequence
  Synthetic oligonucleotide
tagcctagccggaatattacgctttaaaga

SEQ ID NO: 95528 - DNA, 30 bp, Artificial Sequence
  Synthetic oligonucleotide
tcgagagcacgaaccaggtccttgacaaga

SEQ ID NO: 95529 - DNA, 30 bp, Artificial Sequence
  Synthetic oligonucleotide
acattgttcatggagaacgcccatacaaga

SEQ ID NO: 95530 - DNA, 30 bp, Artificial Sequence
  Synthetic oligonucleotide
acaggtccaactcgaaacttgtgtacaaga

SEQ ID NO: 95531 - DNA, 30 bp, Artificial Sequence
  Synthetic oligonucleotide
atcgagcgaattatgcttaggttaccaaga

SEQ ID NO: 95532 - DNA, 30 bp, Artificial Sequence
  Synthetic oligonucleotide
ttacaatcggtataagaagcgatcccaaga

SEQ ID NO: 95533 - DNA, 30 bp, Artificial Sequence
  Synthetic oligonucleotide
ggtctagcaacggcattcccaagcgcaaga

SEQ ID NO: 95534 - DNA, 30 bp, Artificial Sequence
  Synthetic oligonucleotide
caggtgcaaagaggggtgggtcggtcaaga

SEQ ID NO: 95535 - DNA, 30 bp, Artificial Sequence
  Synthetic oligonucleotide
atcagagacgaaaagcaaaaattgtcaaga

SEQ ID NO: 95536 - DNA, 30 bp, Artificial Sequence
  Synthetic oligonucleotide
cgtgagtattcgctgtggatgctaagaaga

SEQ ID NO: 95537 - DNA, 30 bp, Artificial Sequence
  Synthetic oligonucleotide
aaccggactccacggaggcgcgcgagaaga

SEQ ID NO: 95538 - DNA, 30 bp, Artificial Sequence
  Synthetic oligonucleotide
ttacccacacctattagggggcaaggaaga

SEQ ID NO: 95539 - DNA, 30 bp, Artificial Sequence
  Synthetic oligonucleotide
tgtatgcgtatcaatagagtggtatgaaga

SEQ ID NO: 95540 - DNA, 30 bp, Artificial Sequence
  Synthetic oligonucleotide
actagattagaattcagacctgtatgaaga

SEQ ID NO: 95541 - DNA, 30 bp, Artificial Sequence
  Synthetic oligonucleotide
gctcgcacgcgggcaaactggcagtgaaga

SEQ ID NO: 95542 - DNA, 30 bp, Artificial Sequence
  Synthetic oligonucleotide
ggccgcaaggggacaaccgaaggttgaaga

SEQ ID NO: 95543 - DNA, 30 bp, Artificial Sequence
  Synthetic oligonucleotide
gaaccagaaagtgcctcattgtgttgaaga

SEQ ID NO: 95544 - DNA, 30 bp, Artificial Sequence
  Synthetic oligonucleotide
tgcccaactgatgtctcactagttataaga

SEQ ID NO: 95545 - DNA, 30 bp, Artificial Sequence
  Synthetic oligonucleotide
cgtactgccgacgtatgttcagtactaaga

SEQ ID NO: 95546 - DNA, 30 bp, Artificial Sequence
  Synthetic oligonucleotide
tagccagcgaacattacaaaatagctaaga

SEQ ID NO: 95547 - DNA, 30 bp, Artificial Sequence
  Synthetic oligonucleotide
gcggttcgaactcatttcgctcagttaaga

SEQ ID NO: 95548 - DNA, 30 bp, Artificial Sequence
  Synthetic oligonucleotide
acaggatacgctacaattagtatgttaaga

SEQ ID NO: 95549 - DNA, 30 bp, Artificial Sequence
  Synthetic oligonucleotide
cggtacagatacggcgttcggaatttaaga

SEQ ID NO: 95550 - DNA, 30 bp, Artificial Sequence
  Synthetic oligonucleotide
tagaacaatgcaacagtttggcacaacaga

SEQ ID NO: 95551 - DNA, 30 bp, Artificial Sequence
  Synthetic oligonucleotide
ttcgaaataacggtcatgtccagcaacaga

SEQ ID NO: 95552 - DNA, 30 bp, Artificial Sequence
  Synthetic oligonucleotide
cacgggggatgacttctgtaacataacaga

SEQ ID NO: 95553 - DNA, 30 bp, Artificial Sequence
  Synthetic oligonucleotide
caactagccaaagaggatcggtcacacaga

SEQ ID NO: 95554 - DNA, 30 bp, Artificial Sequence
  Synthetic oligonucleotide
ctgtttaggtataagacacaaattcacaga

SEQ ID NO: 95555 - DNA, 30 bp, Artificial Sequence
  Synthetic oligonucleotide
cacgttccgttatcgctgtggaatgacaga

SEQ ID NO: 95556 - DNA, 30 bp, Artificial Sequence
  Synthetic oligonucleotide
accaatgctagactcgctcatggtgacaga

SEQ ID NO: 95557 - DNA, 30 bp, Artificial Sequence
  Synthetic oligonucleotide
ccgcgtgatgcatatctcagagactacaga

SEQ ID NO: 95558 - DNA, 30 bp, Artificial Sequence
  Synthetic oligonucleotide
attagaacacaatcagagaccagctacaga

SEQ ID NO: 95559 - DNA, 30 bp, Artificial Sequence
  Synthetic oligonucleotide
tgctaagggaactaagggttcggctacaga

SEQ ID NO: 95560 - DNA, 30 bp, Artificial Sequence
  Synthetic oligonucleotide
cattagcaaaagataatgaacttgtacaga

SEQ ID NO: 95561 - DNA, 30 bp, Artificial Sequence
  Synthetic oligonucleotide
acccagtgaagacggtgagagcgttacaga

SEQ ID NO: 95562 - DNA, 30 bp, Artificial Sequence
  Synthetic oligonucleotide
gaggcacggggaatgtttgaaatcaccaga

SEQ ID NO: 95563 - DNA, 30 bp, Artificial Sequence
  Synthetic oligonucleotide
gtacccttgacatgacgtgggtaacccaga

SEQ ID NO: 95564 - DNA, 30 bp, Artificial Sequence
  Synthetic oligonucleotide
gcgacgcaagttcgttgttcagcgcccaga

SEQ ID NO: 95565 - DNA, 30 bp, Artificial Sequence
  Synthetic oligonucleotide
tacgactaacaatcgcgggcggtgcccaga

SEQ ID NO: 95566 - DNA, 30 bp, Artificial Sequence
  Synthetic oligonucleotide
catgtggcaaacatcgtttacgaagccaga

SEQ ID NO: 95567 - DNA, 30 bp, Artificial Sequence
  Synthetic oligonucleotide
gaagagtagttaggggcacccgtatccaga

SEQ ID NO: 95568 - DNA, 30 bp, Artificial Sequence
  Synthetic oligonucleotide
tgctataactattgatcctacacctccaga

SEQ ID NO: 95569 - DNA, 31 bp, Artificial Sequence
  Synthetic oligonucleotide
cagcgggcatgtggattggggagcctccaga

SEQ ID NO: 95570 - DNA, 30 bp, Artificial Sequence
  Synthetic oligonucleotide
ctcaggttgtgggcggttcgtcagtccaga

SEQ ID NO: 95571 - DNA, 30 bp, Artificial Sequence
  Synthetic oligonucleotide
tggctcaagagccaaaaatcggtgtccaga

SEQ ID NO: 95572 - DNA, 30 bp, Artificial Sequence
  Synthetic oligonucleotide
tagccgccaactaaacttccgaaccgcaga

SEQ ID NO: 95573 - DNA, 30 bp, Artificial Sequence
  Synthetic oligonucleotide
cgctgaaggctatcaggcgaggcccgcaga

SEQ ID NO: 95574 - DNA, 30 bp, Artificial Sequence
  Synthetic oligonucleotide
tcctcgaactcgcttacggtcgtgcgcaga

SEQ ID NO: 95575 - DNA, 30 bp, Artificial Sequence
  Synthetic oligonucleotide
caatatgtttaacgtttaacggatggcaga

SEQ ID NO: 95576 - DNA, 30 bp, Artificial Sequence
  Synthetic oligonucleotide
gggtacattaccggctgtacctgatgcaga

SEQ ID NO: 95577 - DNA, 30 bp, Artificial Sequence
  Synthetic oligonucleotide
atcctggaggagtataactagcagtgcaga

SEQ ID NO: 95578 - DNA, 30 bp, Artificial Sequence
  Synthetic oligonucleotide
ggggaaggaggtttcgattgaggtatcaga

SEQ ID NO: 95579 - DNA, 30 bp, Artificial Sequence
  Synthetic oligonucleotide
tgttcaggaagcagtatggttccgctcaga

SEQ ID NO: 95580 - DNA, 30 bp, Artificial Sequence
  Synthetic oligonucleotide
cttggatatccggatgataacagagtcaga

SEQ ID NO: 95581 - DNA, 30 bp, Artificial Sequence
  Synthetic oligonucleotide
ggctacaagtgccccttagtacgggtcaga

SEQ ID NO: 95582 - DNA, 30 bp, Artificial Sequence
  Synthetic oligonucleotide
ttcgagagaaatggaccaaaaactttcaga

SEQ ID NO: 95583 - DNA, 30 bp, Artificial Sequence
  Synthetic oligonucleotide
aaaggttgaacgaggatttacagtttcaga

SEQ ID NO: 95584 - DNA, 30 bp, Artificial Sequence
  Synthetic oligonucleotide
ggtcaccagagctaatctgtgtgtttcaga

SEQ ID NO: 95585 - DNA, 30 bp, Artificial Sequence
  Synthetic oligonucleotide
cgtactggacccattgtaaccctaaagaga

SEQ ID NO: 95586 - DNA, 30 bp, Artificial Sequence
  Synthetic oligonucleotide
atataaacgggtggtagccaggacaagaga

SEQ ID NO: 95587 - DNA, 30 bp, Artificial Sequence
  Synthetic oligonucleotide
ttaagtaaagatagctggcaagtgaagaga

SEQ ID NO: 95588 - DNA, 30 bp, Artificial Sequence
  Synthetic oligonucleotide
gagaggtgtgcaagccaaatgtctaagaga

SEQ ID NO: 95589 - DNA, 30 bp, Artificial Sequence
  Synthetic oligonucleotide
ggccagaggactatatcgtacagccagaga

SEQ ID NO: 95590 - DNA, 30 bp, Artificial Sequence
  Synthetic oligonucleotide
tctaggggtatcgcaaccgttgtccagaga

SEQ ID NO: 95591 - DNA, 30 bp, Artificial Sequence
  Synthetic oligonucleotide
aaatactacctgggcttagccaagcagaga

SEQ ID NO: 95592 - DNA, 30 bp, Artificial Sequence
  Synthetic oligonucleotide
aggcataagcataaggacaggggtcagaga

SEQ ID NO: 95593 - DNA, 30 bp, Artificial Sequence
  Synthetic oligonucleotide
cagttgtacggttgtataaaggcttagaga

SEQ ID NO: 95594 - DNA, 30 bp, Artificial Sequence
  Synthetic oligonucleotide
ggaaattcctcaaccacaggaataacgaga

SEQ ID NO: 95595 - DNA, 30 bp, Artificial Sequence
  Synthetic oligonucleotide
cgagttgaagaaatagacgcacggccgaga

SEQ ID NO: 95596 - DNA, 30 bp, Artificial Sequence
  Synthetic oligonucleotide
tgcatgagggcattaaactggtacgcgaga

SEQ ID NO: 95597 - DNA, 30 bp, Artificial Sequence
  Synthetic oligonucleotide
ggttgcttgagatccgaggggtccgcgaga

SEQ ID NO: 95598 - DNA, 30 bp, Artificial Sequence
  Synthetic oligonucleotide
gaagatcgggcgtcgtaaaaattggcgaga

SEQ ID NO: 95599 - DNA, 30 bp, Artificial Sequence
  Synthetic oligonucleotide
ctagagcatagtaatgactgtggatcgaga

SEQ ID NO: 95600 - DNA, 30 bp, Artificial Sequence
  Synthetic oligonucleotide
ccattatgctcgggaacagtaccgtcgaga

SEQ ID NO: 95601 - DNA, 30 bp, Artificial Sequence
  Synthetic oligonucleotide
aaaaattgtgcgtcagagcggctgtcgaga

SEQ ID NO: 95602 - DNA, 30 bp, Artificial Sequence
  Synthetic oligonucleotide
acggggcacttgcataagtaatgaaggaga

SEQ ID NO: 95603 - DNA, 30 bp, Artificial Sequence
  Synthetic oligonucleotide
cttgtgctcgtcaagctacataacaggaga

SEQ ID NO: 95604 - DNA, 30 bp, Artificial Sequence
  Synthetic oligonucleotide
gcaatcgtattacaacaactgggtaggaga

SEQ ID NO: 95605 - DNA, 30 bp, Artificial Sequence
  Synthetic oligonucleotide
gacttcagtagggatgttgaagttaggaga

SEQ ID NO: 95606 - DNA, 30 bp, Artificial Sequence
  Synthetic oligonucleotide
gcttagctctatggtaaaactatacggaga

SEQ ID NO: 95607 - DNA, 30 bp, Artificial Sequence
  Synthetic oligonucleotide
cgcgagatgtggtcactacagtatcggaga

SEQ ID NO: 95608 - DNA, 30 bp, Artificial Sequence
  Synthetic oligonucleotide
ctagattaacttaagaatgcacgagggaga

SEQ ID NO: 95609 - DNA, 30 bp, Artificial Sequence
  Synthetic oligonucleotide
aagtatatcgatgctaggcgtgcggggaga

SEQ ID NO: 95610 - DNA, 30 bp, Artificial Sequence
  Synthetic oligonucleotide
ggtccactagtaatcctgagcccttggaga

SEQ ID NO: 95611 - DNA, 30 bp, Artificial Sequence
  Synthetic oligonucleotide
agggcgagatttagcgaggtagttatgaga

SEQ ID NO: 95612 - DNA, 30 bp, Artificial Sequence
  Synthetic oligonucleotide
aacaggcaagggatttccattgacctgaga

SEQ ID NO: 95613 - DNA, 30 bp, Artificial Sequence
  Synthetic oligonucleotide
aatgggtcagatgagaaaaacaggctgaga

SEQ ID NO: 95614 - DNA, 30 bp, Artificial Sequence
  Synthetic oligonucleotide
agcaggttagtcctcattaatcatctgaga

SEQ ID NO: 95615 - DNA, 30 bp, Artificial Sequence
  Synthetic oligonucleotide
tgacaacacgaggaggtgtctgttctgaga

SEQ ID NO: 95616 - DNA, 30 bp, Artificial Sequence
  Synthetic oligonucleotide
tcaggtcgagagcacatagatctattgaga

SEQ ID NO: 95617 - DNA, 30 bp, Artificial Sequence
  Synthetic oligonucleotide
agagtttagggcaacctcgaaaagttgaga

SEQ ID NO: 95618 - DNA, 30 bp, Artificial Sequence
  Synthetic oligonucleotide
ttaggcctactggaagtcgcaatgttgaga

SEQ ID NO: 95619 - DNA, 30 bp, Artificial Sequence
  Synthetic oligonucleotide
agaaatgactaacgcgttagaactttgaga

SEQ ID NO: 95620 - DNA, 30 bp, Artificial Sequence
  Synthetic oligonucleotide
aagctgtgtgcaaagacctggactttgaga

SEQ ID NO: 95621 - DNA, 30 bp, Artificial Sequence
  Synthetic oligonucleotide
gttagtcccagcaagcgcgtatcaaataga

SEQ ID NO: 95622 - DNA, 30 bp, Artificial Sequence
  Synthetic oligonucleotide
gctaatggcactggttgggcccgaaataga

SEQ ID NO: 95623 - DNA, 30 bp, Artificial Sequence
  Synthetic oligonucleotide
tggagttgagctcacaaagaaacgaataga

SEQ ID NO: 95624 - DNA, 30 bp, Artificial Sequence
  Synthetic oligonucleotide
gattgaaggctcgggaacactacccataga

SEQ ID NO: 95625 - DNA, 30 bp, Artificial Sequence
  Synthetic oligonucleotide
tagcatgatagtcgtcatacagggcataga

SEQ ID NO: 95626 - DNA, 30 bp, Artificial Sequence
  Synthetic oligonucleotide
gttagcagtaggctaaacggggctcataga

SEQ ID NO: 95627 - DNA, 30 bp, Artificial Sequence
  Synthetic oligonucleotide
tgccgggatgggctgagggtttgcgataga

SEQ ID NO: 95628 - DNA, 30 bp, Artificial Sequence
  Synthetic oligonucleotide
gtcgggccaagtgttttacaacctgataga

SEQ ID NO: 95629 - DNA, 30 bp, Artificial Sequence
  Synthetic oligonucleotide
acctagagaaatgagtacggacaatataga

SEQ ID NO: 95630 - DNA, 30 bp, Artificial Sequence
  Synthetic oligonucleotide
tggaatcacgaaggtaagaaaggtactaga

SEQ ID NO: 95631 - DNA, 30 bp, Artificial Sequence
  Synthetic oligonucleotide
atagtcaaaacacatgctctctttactaga

SEQ ID NO: 95632 - DNA, 30 bp, Artificial Sequence
  Synthetic oligonucleotide
caggattcggggacataatgtcgacctaga

SEQ ID NO: 95633 - DNA, 30 bp, Artificial Sequence
  Synthetic oligonucleotide
gggtacggggagaccagaaaagcgcctaga

SEQ ID NO: 95634 - DNA, 30 bp, Artificial Sequence
  Synthetic oligonucleotide
caaacttccgacaaaaagtaacggcctaga

SEQ ID NO: 95635 - DNA, 30 bp, Artificial Sequence
  Synthetic oligonucleotide
taaggggtaaagtacgtgtcaaaagctaga

SEQ ID NO: 95636 - DNA, 30 bp, Artificial Sequence
  Synthetic oligonucleotide
taacgaacctggttagtggcctgcgctaga

SEQ ID NO: 95637 - DNA, 30 bp, Artificial Sequence
  Synthetic oligonucleotide
taaccgggccggtgcgatctaatggctaga

SEQ ID NO: 95638 - DNA, 30 bp, Artificial Sequence
  Synthetic oligonucleotide
ttggtcatccacaagaactgaaggtctaga

SEQ ID NO: 95639 - DNA, 30 bp, Artificial Sequence
  Synthetic oligonucleotide
tcgcgagatgtaagacaggggatttctaga

SEQ ID NO: 95640 - DNA, 30 bp, Artificial Sequence
  Synthetic oligonucleotide
gaggttatgtgatgtgcgcaaatacgtaga

SEQ ID NO: 95641 - DNA, 30 bp, Artificial Sequence
  Synthetic oligonucleotide
cgattggtggagctggactcaggccgtaga

SEQ ID NO: 95642 - DNA, 30 bp, Artificial Sequence
  Synthetic oligonucleotide
ccagtcagctcgctcggttggaagggtaga

SEQ ID NO: 95643 - DNA, 30 bp, Artificial Sequence
  Synthetic oligonucleotide
acgtgggagggtcctggcgatttgggtaga

SEQ ID NO: 95644 - DNA, 30 bp, Artificial Sequence
  Synthetic oligonucleotide
gctggggagataatgaagcttcatggtaga

SEQ ID NO: 95645 - DNA, 30 bp, Artificial Sequence
  Synthetic oligonucleotide
ggctagcatgaagggggggtgacatgtaga

SEQ ID NO: 95646 - DNA, 30 bp, Artificial Sequence
  Synthetic oligonucleotide
gtgtggtcctttagtcggatcaattgtaga

SEQ ID NO: 95647 - DNA, 30 bp, Artificial Sequence
  Synthetic oligonucleotide
cgacatgagtataaggggcgctacattaga

SEQ ID NO: 95648 - DNA, 30 bp, Artificial Sequence
  Synthetic oligonucleotide
aatcatagggcatcactcaatgggattaga

SEQ ID NO: 95649 - DNA, 30 bp, Artificial Sequence
  Synthetic oligonucleotide
tctacatgaaaataggaacaagggcttaga

SEQ ID NO: 95650 - DNA, 30 bp, Artificial Sequence
  Synthetic oligonucleotide
gtaaagaggatagaagggcacatagttaga

SEQ ID NO: 95651 - DNA, 30 bp, Artificial Sequence
  Synthetic oligonucleotide
tcgttatcaaagagagatgaatgttttaga

SEQ ID NO: 95652 - DNA, 30 bp, Artificial Sequence
  Synthetic oligonucleotide
ttctggaggacacattcgcacatcaaacga

SEQ ID NO: 95653 - DNA, 30 bp, Artificial Sequence
  Synthetic oligonucleotide
cgtgggcttacgaagtttcgtgcgaaacga

SEQ ID NO: 95654 - DNA, 30 bp, Artificial Sequence
  Synthetic oligonucleotide
ccctagggaccatcgagtttatttaaacga

SEQ ID NO: 95655 - DNA, 30 bp, Artificial Sequence
  Synthetic oligonucleotide
ggacatgggtcaacgcgagtcgagcaacga

SEQ ID NO: 95656 - DNA, 30 bp, Artificial Sequence
  Synthetic oligonucleotide
ttatagaaggaagagggcagcaatcaacga

SEQ ID NO: 95657 - DNA, 30 bp, Artificial Sequence
  Synthetic oligonucleotide
gtcgcaacatgcgatatggttcatcaacga

SEQ ID NO: 95658 - DNA, 30 bp, Artificial Sequence
  Synthetic oligonucleotide
ggggatgaggtaaaattgggctacgaacga

SEQ ID NO: 95659 - DNA, 30 bp, Artificial Sequence
  Synthetic oligonucleotide
gagaagccacccgtggcgtcgggcgaacga

SEQ ID NO: 95660 - DNA, 30 bp, Artificial Sequence
  Synthetic oligonucleotide
ataaatacgttgtcaactaggacggaacga

SEQ ID NO: 95661 - DNA, 30 bp, Artificial Sequence
  Synthetic oligonucleotide
gatgacatctataagaatggaccggaacga

SEQ ID NO: 95662 - DNA, 30 bp, Artificial Sequence
  Synthetic oligonucleotide
ccacccaacaatataacgatttactaacga

SEQ ID NO: 95663 - DNA, 30 bp, Artificial Sequence
  Synthetic oligonucleotide
ttaaggcggaagtgcatacttaagtaacga

SEQ ID NO: 95664 - DNA, 30 bp, Artificial Sequence
  Synthetic oligonucleotide
aggtcaaaccttactacctcgttgtaacga

SEQ ID NO: 95665 - DNA, 30 bp, Artificial Sequence
  Synthetic oligonucleotide
cctggacaactcagtccagatgcttaacga

SEQ ID NO: 95666 - DNA, 30 bp, Artificial Sequence
  Synthetic oligonucleotide
ttgggggagggtatattgtgaatttaacga

SEQ ID NO: 95667 - DNA, 30 bp, Artificial Sequence
  Synthetic oligonucleotide
cgttggttatattcgctaccccgaacacga

SEQ ID NO: 95668 - DNA, 30 bp, Artificial Sequence
  Synthetic oligonucleotide
acagcagttgcttagtacgtttacacacga

SEQ ID NO: 95669 - DNA, 30 bp, Artificial Sequence
  Synthetic oligonucleotide
caccgcactaatccggggggaacgacacga

SEQ ID NO: 95670 - DNA, 30 bp, Artificial Sequence
  Synthetic oligonucleotide
gggcccatcgcttccaccacatcgacacga

SEQ ID NO: 95671 - DNA, 30 bp, Artificial Sequence
  Synthetic oligonucleotide
tgcagcctgaacttagactgagtgacacga

SEQ ID NO: 95672 - DNA, 30 bp, Artificial Sequence
  Synthetic oligonucleotide
gggcgtcaaccactgcataactctacacga

SEQ ID NO: 95673 - DNA, 30 bp, Artificial Sequence
  Synthetic oligonucleotide
gtccgcgagggttcaaaatagctgccacga

SEQ ID NO: 95674 - DNA, 29 bp, Artificial Sequence
  Synthetic oligonucleotide
actgacgacactattggttaactccacga

SEQ ID NO: 95675 - DNA, 30 bp, Artificial Sequence
  Synthetic oligonucleotide
tagggacattcgttaacttggattccacga

SEQ ID NO: 95676 - DNA, 30 bp, Artificial Sequence
  Synthetic oligonucleotide
tccacgaagaaccgttaaacttaggcacga

SEQ ID NO: 95677 - DNA, 30 bp, Artificial Sequence
  Synthetic oligonucleotide
cgttaggaagtgtgtcacgcacttgcacga

SEQ ID NO: 95678 - DNA, 30 bp, Artificial Sequence
  Synthetic oligonucleotide
gatataacaggagggtggagatggtcacga

SEQ ID NO: 95679 - DNA, 30 bp, Artificial Sequence
  Synthetic oligonucleotide
gtggttgccgggataattgatatgtcacga

SEQ ID NO: 95680 - DNA, 30 bp, Artificial Sequence
  Synthetic oligonucleotide
gccgaatcccactataaatgtagcagacga

SEQ ID NO: 95681 - DNA, 30 bp, Artificial Sequence
  Synthetic oligonucleotide
gttagcacggtagggtgtgcagtcagacga

SEQ ID NO: 95682 - DNA, 30 bp, Artificial Sequence
  Synthetic oligonucleotide
atgaaggtaagctaggttctatagagacga

SEQ ID NO: 95683 - DNA, 30 bp, Artificial Sequence
  Synthetic oligonucleotide
gaaatgcgtgttacgatagcgcatcgacga

SEQ ID NO: 95684 - DNA, 30 bp, Artificial Sequence
  Synthetic oligonucleotide
ctacggcggaatatcgcgtaggcaggacga

SEQ ID NO: 95685 - DNA, 30 bp, Artificial Sequence
  Synthetic oligonucleotide
ggcctaaatcaagtgctctgctgcggacga

SEQ ID NO: 95686 - DNA, 30 bp, Artificial Sequence
  Synthetic oligonucleotide
gtggggtaagcctatactagtatcggacga

SEQ ID NO: 95687 - DNA, 30 bp, Artificial Sequence
  Synthetic oligonucleotide
caaaagcggttttctgctgaggcgggacga

SEQ ID NO: 95688 - DNA, 30 bp, Artificial Sequence
  Synthetic oligonucleotide
agacaaatgtcacggtgagtctggggacga

SEQ ID NO: 95689 - DNA, 30 bp, Artificial Sequence
  Synthetic oligonucleotide
tcgcgtgcgcgcgagataactctctgacga

SEQ ID NO: 95690 - DNA, 30 bp, Artificial Sequence
  Synthetic oligonucleotide
tacctcccgaagaaaactcgatgtatacga

SEQ ID NO: 95691 - DNA, 30 bp, Artificial Sequence
  Synthetic oligonucleotide
gacaggggcgtcccccgtattggcctacga

SEQ ID NO: 95692 - DNA, 30 bp, Artificial Sequence
  Synthetic oligonucleotide
aaacagcgaggcatccggggaagtctacga

SEQ ID NO: 95693 - DNA, 30 bp, Artificial Sequence
  Synthetic oligonucleotide
gtgaagtcaatcctaattactcttctacga

SEQ ID NO: 95694 - DNA, 30 bp, Artificial Sequence
  Synthetic oligonucleotide
cagagcttcttagggagaatggttctacga

SEQ ID NO: 95695 - DNA, 30 bp, Artificial Sequence
  Synthetic oligonucleotide
tacagtcgtcgtaatacggataaagtacga

SEQ ID NO: 95696 - DNA, 30 bp, Artificial Sequence
  Synthetic oligonucleotide
tctggtcccagcgagaacatggtagtacga

SEQ ID NO: 95697 - DNA, 30 bp, Artificial Sequence
  Synthetic oligonucleotide
cgttcaagcattagagtaaagttagtacga

SEQ ID NO: 95698 - DNA, 30 bp, Artificial Sequence
  Synthetic oligonucleotide
agttgcaaagcagtcaatgtctctgtacga

SEQ ID NO: 95699 - DNA, 30 bp, Artificial Sequence
  Synthetic oligonucleotide
gtcgactggacgcaaggcctagcaaaccga

SEQ ID NO: 95700 - DNA, 30 bp, Artificial Sequence
  Synthetic oligonucleotide
aggatcggggcagcccttcagcggaaccga

SEQ ID NO: 95701 - DNA, 30 bp, Artificial Sequence
  Synthetic oligonucleotide
agagttctgcggttaaagcttcgtcaccga

SEQ ID NO: 95702 - DNA, 30 bp, Artificial Sequence
  Synthetic oligonucleotide
cgcgctcgaacatcaaggagcggcacccga

SEQ ID NO: 95703 - DNA, 30 bp, Artificial Sequence
  Synthetic oligonucleotide
cgatcataagccaggctccgtctcacccga

SEQ ID NO: 95704 - DNA, 30 bp, Artificial Sequence
  Synthetic oligonucleotide
caatatgaacagctgttcgccatagcccga

SEQ ID NO: 95705 - DNA, 30 bp, Artificial Sequence
  Synthetic oligonucleotide
aaaaggatagttacaactgcaacacgccga

SEQ ID NO: 95706 - DNA, 30 bp, Artificial Sequence
  Synthetic oligonucleotide
ttgcattgcacagtaatgagcgaccgccga

SEQ ID NO: 95707 - DNA, 30 bp, Artificial Sequence
  Synthetic oligonucleotide
atacgtaaacctcagggcaggtttcgccga

SEQ ID NO: 95708 - DNA, 30 bp, Artificial Sequence
  Synthetic oligonucleotide
aatccggattcacagtgccagatcggccga

SEQ ID NO: 95709 - DNA, 30 bp, Artificial Sequence
  Synthetic oligonucleotide
gtatggctcgtccagacagggggtggccga

SEQ ID NO: 95710 - DNA, 30 bp, Artificial Sequence
  Synthetic oligonucleotide
ccgaaatcccatacagcaatgggtggccga

SEQ ID NO: 95711 - DNA, 30 bp, Artificial Sequence
  Synthetic oligonucleotide
tgagtgttcagaccgacaaggagctgccga

SEQ ID NO: 95712 - DNA, 30 bp, Artificial Sequence
  Synthetic oligonucleotide
ctagggaggagcagtcccaattcgtgccga

SEQ ID NO: 95713 - DNA, 30 bp, Artificial Sequence
  Synthetic oligonucleotide
aatgccatagcgaacagaacagacatccga

SEQ ID NO: 95714 - DNA, 30 bp, Artificial Sequence
  Synthetic oligonucleotide
tcacaacctatggcataggaatacatccga

SEQ ID NO: 95715 - DNA, 30 bp, Artificial Sequence
  Synthetic oligonucleotide
gtgaagcaagtaattaaccctattatccga

SEQ ID NO: 95716 - DNA, 30 bp, Artificial Sequence
  Synthetic oligonucleotide
agtgtggtcgacgtcctcagaaaactccga

SEQ ID NO: 95717 - DNA, 30 bp, Artificial Sequence
  Synthetic oligonucleotide
ccgatgctgccacaatcgaaaggagtccga

SEQ ID NO: 95718 - DNA, 30 bp, Artificial Sequence
  Synthetic oligonucleotide
gaacgcgggctcgagtagactcttaagcga

SEQ ID NO: 95719 - DNA, 30 bp, Artificial Sequence
  Synthetic oligonucleotide
tccggggtcgagcgttgaactaaacagcga

SEQ ID NO: 95720 - DNA, 30 bp, Artificial Sequence
  Synthetic oligonucleotide
tcactcccgctcaatgaacagggacagcga

SEQ ID NO: 95721 - DNA, 30 bp, Artificial Sequence
  Synthetic oligonucleotide
taaccaacgagatacttgattccgcagcga

SEQ ID NO: 95722 - DNA, 30 bp, Artificial Sequence
  Synthetic oligonucleotide
tgtctgcgctgggaatgcaacgatcagcga

SEQ ID NO: 95723 - DNA, 30 bp, Artificial Sequence
  Synthetic oligonucleotide
agtgtacaacgaactgcgttttatcagcga

SEQ ID NO: 95724 - DNA, 30 bp, Artificial Sequence
  Synthetic oligonucleotide
tcaacgtgcagagtaagataaaatgagcga

SEQ ID NO: 95725 - DNA, 30 bp, Artificial Sequence
  Synthetic oligonucleotide
gcatagtctattaacaggtggccatagcga

SEQ ID NO: 95726 - DNA, 30 bp, Artificial Sequence
  Synthetic oligonucleotide
cgaaccgggtcgggcgcccggcactagcga

SEQ ID NO: 95727 - DNA, 30 bp, Artificial Sequence
  Synthetic oligonucleotide
ggcatacaacatagcgttgggtgctagcga

SEQ ID NO: 95728 - DNA, 30 bp, Artificial Sequence
  Synthetic oligonucleotide
tacccgtcggggcccgggtaagtctagcga

SEQ ID NO: 95729 - DNA, 30 bp, Artificial Sequence
  Synthetic oligonucleotide
aaggggaggctttcatacttcataccgcga

SEQ ID NO: 95730 - DNA, 30 bp, Artificial Sequence
  Synthetic oligonucleotide
ggagctccgttaataccgcaagaagcgcga

SEQ ID NO: 95731 - DNA, 30 bp, Artificial Sequence
  Synthetic oligonucleotide
caaagacggttggattcgaacatagcgcga

SEQ ID NO: 95732 - DNA, 30 bp, Artificial Sequence
  Synthetic oligonucleotide
ttccaacgagaacacgggcgttgggcgcga

SEQ ID NO: 95733 - DNA, 30 bp, Artificial Sequence
  Synthetic oligonucleotide
actggggtagatctacagtacatggcgcga

SEQ ID NO: 95734 - DNA, 30 bp, Artificial Sequence
  Synthetic oligonucleotide
ggggcgaactcttggattttcggtgcgcga

SEQ ID NO: 95735 - DNA, 30 bp, Artificial Sequence
  Synthetic oligonucleotide
tccgaacggtaacacggggcagtatcgcga

SEQ ID NO: 95736 - DNA, 30 bp, Artificial Sequence
  Synthetic oligonucleotide
cggcattaccagtcttttccgataaggcga

SEQ ID NO: 95737 - DNA, 30 bp, Artificial Sequence
  Synthetic oligonucleotide
acagggggcttggtcttcgcacgtcggcga

SEQ ID NO: 95738 - DNA, 30 bp, Artificial Sequence
  Synthetic oligonucleotide
caactaggagtcactagtcaggcagggcga

SEQ ID NO: 95739 - DNA, 30 bp, Artificial Sequence
  Synthetic oligonucleotide
atgccaggatatccgctgggcttagggcga

SEQ ID NO: 95740 - DNA, 30 bp, Artificial Sequence
  Synthetic oligonucleotide
cagatgtgaatccagcgatacagtgggcga

SEQ ID NO: 95741 - DNA, 30 bp, Artificial Sequence
  Synthetic oligonucleotide
cgtttggcccaacgatacaagtgtgggcga

SEQ ID NO: 95742 - DNA, 30 bp, Artificial Sequence
  Synthetic oligonucleotide
gctctgagaagtcacccagtctactggcga

SEQ ID NO: 95743 - DNA, 30 bp, Artificial Sequence
  Synthetic oligonucleotide
tgtaactggacgtaactagtaaagctgcga

SEQ ID NO: 95744 - DNA, 30 bp, Artificial Sequence
  Synthetic oligonucleotide
aagtgcttcatcggcggatcggggctgcga

SEQ ID NO: 95745 - DNA, 30 bp, Artificial Sequence
  Synthetic oligonucleotide
tggtcaccgttgggtgagtccggagtgcga

SEQ ID NO: 95746 - DNA, 30 bp, Artificial Sequence
  Synthetic oligonucleotide
accggaatcccactatcagtctatgtgcga

SEQ ID NO: 95747 - DNA, 30 bp, Artificial Sequence
  Synthetic oligonucleotide
cgccaaacgagtggggttaaccaattgcga

SEQ ID NO: 95748 - DNA, 30 bp, Artificial Sequence
  Synthetic oligonucleotide
gcacacataagatcaaaaagccccaatcga

SEQ ID NO: 95749 - DNA, 30 bp, Artificial Sequence
  Synthetic oligonucleotide
ctaggggccggtcatgctcatagcaatcga

SEQ ID NO: 95750 - DNA, 30 bp, Artificial Sequence
  Synthetic oligonucleotide
cccgaaagtaagtttggcgtgagtaatcga

SEQ ID NO: 95751 - DNA, 30 bp, Artificial Sequence
  Synthetic oligonucleotide
accgtactgtatcggtcatgaccgcatcga

SEQ ID NO: 95752 - DNA, 30 bp, Artificial Sequence
  Synthetic oligonucleotide
ggactaacatagaacggttaagcgcatcga

SEQ ID NO: 95753 - DNA, 30 bp, Artificial Sequence
  Synthetic oligonucleotide
agacgcgcggaccccctacagttcgatcga

SEQ ID NO: 95754 - DNA, 30 bp, Artificial Sequence
  Synthetic oligonucleotide
tcgtctcttcaatcagcaatcaaggatcga

SEQ ID NO: 95755 - DNA, 30 bp, Artificial Sequence
  Synthetic oligonucleotide
acgcgtcgcctcgttgcatagggggatcga

SEQ ID NO: 95756 - DNA, 30 bp, Artificial Sequence
  Synthetic oligonucleotide
gtaagtagtacggtgaacaggatttatcga

SEQ ID NO: 95757 - DNA, 30 bp, Artificial Sequence
  Synthetic oligonucleotide
gtacaggcgagtccagtaaagccaactcga

SEQ ID NO: 95758 - DNA, 30 bp, Artificial Sequence
  Synthetic oligonucleotide
taaggaatgcgcgcatctgcgagcactcga

SEQ ID NO: 95759 - DNA, 30 bp, Artificial Sequence
  Synthetic oligonucleotide
aaggtacgaccagcgaccggtgtcactcga

SEQ ID NO: 95760 - DNA, 30 bp, Artificial Sequence
  Synthetic oligonucleotide
aaaacagtgattgccaagattcagactcga

SEQ ID NO: 95761 - DNA, 30 bp, Artificial Sequence
  Synthetic oligonucleotide
ctgaacaggtttcagggctgtgatgctcga

SEQ ID NO: 95762 - DNA, 30 bp, Artificial Sequence
  Synthetic oligonucleotide
cgataacagcccgcgatgcccttatctcga

SEQ ID NO: 95763 - DNA, 30 bp, Artificial Sequence
  Synthetic oligonucleotide
taccagtataaagagagacagtcttctcga

SEQ ID NO: 95764 - DNA, 30 bp, Artificial Sequence
  Synthetic oligonucleotide
aacgagccgttgaacaaagtatccagtcga

SEQ ID NO: 95765 - DNA, 30 bp, Artificial Sequence
  Synthetic oligonucleotide
gcggatgacgatgtggatttaactagtcga

SEQ ID NO: 95766 - DNA, 30 bp, Artificial Sequence
  Synthetic oligonucleotide
tatacgtgctctaggaagccgactagtcga

SEQ ID NO: 95767 - DNA, 30 bp, Artificial Sequence
  Synthetic oligonucleotide
tcgacaacacgcgtcgaggtaagtcgtcga

SEQ ID NO: 95768 - DNA, 30 bp, Artificial Sequence
  Synthetic oligonucleotide
ctagagactgcgtgcgggcgactaggtcga

SEQ ID NO: 95769 - DNA, 30 bp, Artificial Sequence
  Synthetic oligonucleotide
gatccaggttacgcgagtcatcccggtcga

SEQ ID NO: 95770 - DNA, 30 bp, Artificial Sequence
  Synthetic oligonucleotide
actggctactgccctccctcatggggtcga

SEQ ID NO: 95771 - DNA, 30 bp, Artificial Sequence
  Synthetic oligonucleotide
taaacttatgggcataagtatgaatgtcga

SEQ ID NO: 95772 - DNA, 30 bp, Artificial Sequence
  Synthetic oligonucleotide
gaggtttagtgtggaaatagctactgtcga

SEQ ID NO: 95773 - DNA, 30 bp, Artificial Sequence
  Synthetic oligonucleotide
cgtactcatgtgctaacattgacctgtcga

SEQ ID NO: 95774 - DNA, 30 bp, Artificial Sequence
  Synthetic oligonucleotide
ttacagttggcagaggggacgggctgtcga

SEQ ID NO: 95775 - DNA, 30 bp, Artificial Sequence
  Synthetic oligonucleotide
cctgtaggacagctactggcttgaattcga

SEQ ID NO: 95776 - DNA, 30 bp, Artificial Sequence
  Synthetic oligonucleotide
agcggcgacaacccataactaaagattcga

SEQ ID NO: 95777 - DNA, 30 bp, Artificial Sequence
  Synthetic oligonucleotide
cacaaggtgttcgtgcacaaggttattcga

SEQ ID NO: 95778 - DNA, 30 bp, Artificial Sequence
  Synthetic oligonucleotide
tgtgacacaggcgcggcggagtcagttcga

SEQ ID NO: 95779 - DNA, 30 bp, Artificial Sequence
  Synthetic oligonucleotide
cataagcctttaaaaacatcaagggttcga

SEQ ID NO: 95780 - DNA, 30 bp, Artificial Sequence
  Synthetic oligonucleotide
cacagggcccattcggtcaattgaaaagga

SEQ ID NO: 95781 - DNA, 30 bp, Artificial Sequence
  Synthetic oligonucleotide
aaagcaggtccctacccttagcacaaagga

SEQ ID NO: 95782 - DNA, 30 bp, Artificial Sequence
  Synthetic oligonucleotide
tgtaagagttacgtcaattagctcaaagga

SEQ ID NO: 95783 - DNA, 30 bp, Artificial Sequence
  Synthetic oligonucleotide
agatccgtatcctcgggcagatagaaagga

SEQ ID NO: 95784 - DNA, 29 bp, Artificial Sequence
  Synthetic oligonucleotide
gaccgttctaacatcaagatccgaaagga

SEQ ID NO: 95785 - DNA, 28 bp, Artificial Sequence
  Synthetic oligonucleotide
catgttgcgggtaggcccaaataaagga

SEQ ID NO: 95786 - DNA, 30 bp, Artificial Sequence
  Synthetic oligonucleotide
agtagggaatcgttgcaacacgataaagga

SEQ ID NO: 95787 - DNA, 30 bp, Artificial Sequence
  Synthetic oligonucleotide
gagatgggatacctgataagcagtaaagga

SEQ ID NO: 95788 - DNA, 30 bp, Artificial Sequence
  Synthetic oligonucleotide
cagatcgaaaaagggtattgatgtaaagga

SEQ ID NO: 95789 - DNA, 30 bp, Artificial Sequence
  Synthetic oligonucleotide
ctaatcaggccgagtctcagtgttaaagga

SEQ ID NO: 95790 - DNA, 30 bp, Artificial Sequence
  Synthetic oligonucleotide
ttggagtagcacttctcatttagacaagga

SEQ ID NO: 95791 - DNA, 30 bp, Artificial Sequence
  Synthetic oligonucleotide
atcgcgccctggcaattagtccgacaagga

SEQ ID NO: 95792 - DNA, 30 bp, Artificial Sequence
  Synthetic oligonucleotide
actgacgcgggaactgcgactcgccaagga

SEQ ID NO: 95793 - DNA, 30 bp, Artificial Sequence
  Synthetic oligonucleotide
ggctagatgtataggcagaggtagcaagga

SEQ ID NO: 95794 - DNA, 30 bp, Artificial Sequence
  Synthetic oligonucleotide
aggctcgactcagaggtccgatacgaagga

SEQ ID NO: 95795 - DNA, 30 bp, Artificial Sequence
  Synthetic oligonucleotide
gctataacttcaaaccaagtgttcgaagga

SEQ ID NO: 95796 - DNA, 30 bp, Artificial Sequence
  Synthetic oligonucleotide
tggcatagacgaccagctaggccggaagga

SEQ ID NO: 95797 - DNA, 30 bp, Artificial Sequence
  Synthetic oligonucleotide
aaccacacgagaagagcacttatggaagga

SEQ ID NO: 95798 - DNA, 30 bp, Artificial Sequence
  Synthetic oligonucleotide
gaggcaaggataatcctctgattggaagga

SEQ ID NO: 95799 - DNA, 30 bp, Artificial Sequence
  Synthetic oligonucleotide
gacaatcctgactatcgtgaatgtgaagga

SEQ ID NO: 95800 - DNA, 30 bp, Artificial Sequence
  Synthetic oligonucleotide
gatagtctgtcacaagtggagttctaagga

SEQ ID NO: 95801 - DNA, 30 bp, Artificial Sequence
  Synthetic oligonucleotide
gagaaggctagccgataaacagcgtaagga

SEQ ID NO: 95802 - DNA, 30 bp, Artificial Sequence
  Synthetic oligonucleotide
atgcgtactggatcgtagaagttgtaagga

SEQ ID NO: 95803 - DNA, 30 bp, Artificial Sequence
  Synthetic oligonucleotide
tagtcttagagtagggggaaggctacagga

SEQ ID NO: 95804 - DNA, 30 bp, Artificial Sequence
  Synthetic oligonucleotide
gctgttcgggcaggtgtagaatcaccagga

SEQ ID NO: 95805 - DNA, 30 bp, Artificial Sequence
  Synthetic oligonucleotide
aagaccgaactgtcggagcagactccagga

SEQ ID NO: 95806 - DNA, 30 bp, Artificial Sequence
  Synthetic oligonucleotide
agcaggagagtgtgacacttgtctccagga

SEQ ID NO: 95807 - DNA, 30 bp, Artificial Sequence
  Synthetic oligonucleotide
caggacaacgctcgactatggcttccagga

SEQ ID NO: 95808 - DNA, 30 bp, Artificial Sequence
  Synthetic oligonucleotide
aggtggtttaggtctcgatccatagcagga

SEQ ID NO: 95809 - DNA, 30 bp, Artificial Sequence
  Synthetic oligonucleotide
tcactacgaccttcaaaacccttagcagga

SEQ ID NO: 95810 - DNA, 30 bp, Artificial Sequence
  Synthetic oligonucleotide
cgacgtgggcaggtggaggagggtgcagga

SEQ ID NO: 95811 - DNA, 30 bp, Artificial Sequence
  Synthetic oligonucleotide
gcagacattggaaggaagcattactcagga

SEQ ID NO: 95812 - DNA, 30 bp, Artificial Sequence
  Synthetic oligonucleotide
taatggtttcgggccaggaagcaaagagga

SEQ ID NO: 95813 - DNA, 30 bp, Artificial Sequence
  Synthetic oligonucleotide
tatggtttgagcaaaaaggaacccagagga

SEQ ID NO: 95814 - DNA, 30 bp, Artificial Sequence
  Synthetic oligonucleotide
caacgaaactccaagaccggtggcagagga

SEQ ID NO: 95815 - DNA, 30 bp, Artificial Sequence
  Synthetic oligonucleotide
gagggtagagcaaaatgccaccagagagga

SEQ ID NO: 95816 - DNA, 30 bp, Artificial Sequence
  Synthetic oligonucleotide
cctcgggggctggcggttgcggagagagga

SEQ ID NO: 95817 - DNA, 30 bp, Artificial Sequence
  Synthetic oligonucleotide
aatgactctggaccaggctaaagtagagga

SEQ ID NO: 95818 - DNA, 30 bp, Artificial Sequence
  Synthetic oligonucleotide
aaccggagtgaaacgcaaccgaaccgagga

SEQ ID NO: 95819 - DNA, 30 bp, Artificial Sequence
  Synthetic oligonucleotide
cgtgattattcatgcagcgttacgcgagga

SEQ ID NO: 95820 - DNA, 30 bp, Artificial Sequence
  Synthetic oligonucleotide
tgaattgtcatggaaatagaaaggcgagga

SEQ ID NO: 95821 - DNA, 30 bp, Artificial Sequence
  Synthetic oligonucleotide
taggtagcaagtaacgaccaccgcggagga

SEQ ID NO: 95822 - DNA, 30 bp, Artificial Sequence
  Synthetic oligonucleotide
tgagaaccttgtttgcgcgaactcggagga

SEQ ID NO: 95823 - DNA, 30 bp, Artificial Sequence
  Synthetic oligonucleotide
tctcaaaagccgaccagagtaacgggagga

SEQ ID NO: 95824 - DNA, 30 bp, Artificial Sequence
  Synthetic oligonucleotide
tagtggaatgatagtttctgctcgggagga

SEQ ID NO: 95825 - DNA, 30 bp, Artificial Sequence
  Synthetic oligonucleotide
acgagatggaatgatctttttcatggagga

SEQ ID NO: 95826 - DNA, 30 bp, Artificial Sequence
  Synthetic oligonucleotide
atttgcaatggaggacggattcggtgagga

SEQ ID NO: 95827 - DNA, 30 bp, Artificial Sequence
  Synthetic oligonucleotide
gtcatgaccgaagtacttttcacttgagga

SEQ ID NO: 95828 - DNA, 30 bp, Artificial Sequence
  Synthetic oligonucleotide
atgcctaaactttgggttggggtactagga

SEQ ID NO: 95829 - DNA, 30 bp, Artificial Sequence
  Synthetic oligonucleotide
aagacggacgtgtgggatgatgtgctagga

SEQ ID NO: 95830 - DNA, 30 bp, Artificial Sequence
  Synthetic oligonucleotide
tacatagaggtcaggccttcgaatctagga

SEQ ID NO: 95831 - DNA, 30 bp, Artificial Sequence
  Synthetic oligonucleotide
atcggtcagagtacatctaagcatctagga

SEQ ID NO: 95832 - DNA, 30 bp, Artificial Sequence
  Synthetic oligonucleotide
gctcgggcaatagagaaattgaccgtagga

SEQ ID NO: 95833 - DNA, 30 bp, Artificial Sequence
  Synthetic oligonucleotide
agtaagagattcaggctgtaattggtagga

SEQ ID NO: 95834 - DNA, 30 bp, Artificial Sequence
  Synthetic oligonucleotide
ggatgtcccaggtcgtgtcaattattagga

SEQ ID NO: 95835 - DNA, 30 bp, Artificial Sequence
  Synthetic oligonucleotide
tacggcatgctgtaagataatatgttagga

SEQ ID NO: 95836 - DNA, 30 bp, Artificial Sequence
  Synthetic oligonucleotide
tgtactaagcgaagctaacactttttagga

SEQ ID NO: 95837 - DNA, 30 bp, Artificial Sequence
  Synthetic oligonucleotide
cgactgccggacacgccctggagcaacgga

SEQ ID NO: 95838 - DNA, 30 bp, Artificial Sequence
  Synthetic oligonucleotide
cacatccatgattgacagtatcagaacgga

SEQ ID NO: 95839 - DNA, 30 bp, Artificial Sequence
  Synthetic oligonucleotide
gtaatatgtctggccccgaatcgtaacgga

SEQ ID NO: 95840 - DNA, 30 bp, Artificial Sequence
  Synthetic oligonucleotide
acaacacataaggaacagcctggccacgga

SEQ ID NO: 95841 - DNA, 30 bp, Artificial Sequence
  Synthetic oligonucleotide
cgccaaactgtggaacaggtcaccgacgga

SEQ ID NO: 95842 - DNA, 30 bp, Artificial Sequence
  Synthetic oligonucleotide
tgaaaggcatcactagcgtggccggacgga

SEQ ID NO: 95843 - DNA, 30 bp, Artificial Sequence
  Synthetic oligonucleotide
tgcttaacattagccattaaggcgtacgga

SEQ ID NO: 95844 - DNA, 30 bp, Artificial Sequence
  Synthetic oligonucleotide
caaggatgtagtggttgggtcaaaaccgga

SEQ ID NO: 95845 - DNA, 30 bp, Artificial Sequence
  Synthetic oligonucleotide
tatcaggaaaagaggcaaaggaccaccgga

SEQ ID NO: 95846 - DNA, 30 bp, Artificial Sequence
  Synthetic oligonucleotide
gaaacgcattacatcgtccaacttaccgga

SEQ ID NO: 95847 - DNA, 30 bp, Artificial Sequence
  Synthetic oligonucleotide
acataatgtctgaattaactggcttccgga

SEQ ID NO: 95848 - DNA, 30 bp, Artificial Sequence
  Synthetic oligonucleotide
tcgttagttatacaatgaggatcaagcgga

SEQ ID NO: 95849 - DNA, 30 bp, Artificial Sequence
  Synthetic oligonucleotide
acgggaattgggtatgtagatggaagcgga

SEQ ID NO: 95850 - DNA, 30 bp, Artificial Sequence
  Synthetic oligonucleotide
aatggttcatcgcactctaaagtgggcgga

SEQ ID NO: 95851 - DNA, 30 bp, Artificial Sequence
  Synthetic oligonucleotide
ttgttaattacgtcggagtggccctgcgga

SEQ ID NO: 95852 - DNA, 30 bp, Artificial Sequence
  Synthetic oligonucleotide
cttgagcgctggtgactctcatgctgcgga

SEQ ID NO: 95853 - DNA, 30 bp, Artificial Sequence
  Synthetic oligonucleotide
tccagggcctactttgcaatccagtgcgga

SEQ ID NO: 95854 - DNA, 30 bp, Artificial Sequence
  Synthetic oligonucleotide
gaccgagactgacatgtacctttttgcgga

SEQ ID NO: 95855 - DNA, 30 bp, Artificial Sequence
  Synthetic oligonucleotide
tggcgaaccctatggcaactcttaatcgga

SEQ ID NO: 95856 - DNA, 30 bp, Artificial Sequence
  Synthetic oligonucleotide
ctgatggctctagtgaatgcggccatcgga

SEQ ID NO: 95857 - DNA, 30 bp, Artificial Sequence
  Synthetic oligonucleotide
ggaacacaccgggcacgtggaccgatcgga

SEQ ID NO: 95858 - DNA, 30 bp, Artificial Sequence
  Synthetic oligonucleotide
agttattaccataggtaatcaaacctcgga

SEQ ID NO: 95859 - DNA, 30 bp, Artificial Sequence
  Synthetic oligonucleotide
cgaggtacactaggtggtggcttgctcgga

SEQ ID NO: 95860 - DNA, 30 bp, Artificial Sequence
  Synthetic oligonucleotide
gctcgggaatggcaccaccaacctctcgga

SEQ ID NO: 95861 - DNA, 30 bp, Artificial Sequence
  Synthetic oligonucleotide
aggaatgagttttgaaaatgtcccgtcgga

SEQ ID NO: 95862 - DNA, 30 bp, Artificial Sequence
  Synthetic oligonucleotide
atcagtcaccaagtcgaaatttgcgtcgga

SEQ ID NO: 95863 - DNA, 30 bp, Artificial Sequence
  Synthetic oligonucleotide
acgcaatgtatttgcaaacctcgattcgga

SEQ ID NO: 95864 - DNA, 30 bp, Artificial Sequence
  Synthetic oligonucleotide
atggcctatgaaggtgatgtatgattcgga

SEQ ID NO: 95865 - DNA, 30 bp, Artificial Sequence
  Synthetic oligonucleotide
tacagtgaagcttatccgtacggaaaggga

SEQ ID NO: 95866 - DNA, 30 bp, Artificial Sequence
  Synthetic oligonucleotide
tcaaaagtgaataggcccatggatcaggga

SEQ ID NO: 95867 - DNA, 30 bp, Artificial Sequence
  Synthetic oligonucleotide
tgatatggggtagggtgcacgttcgaggga

SEQ ID NO: 95868 - DNA, 30 bp, Artificial Sequence
  Synthetic oligonucleotide
ggcttcttaagatcaggactctgtgaggga

SEQ ID NO: 95869 - DNA, 30 bp, Artificial Sequence
  Synthetic oligonucleotide
cccttgactggttcggctcaaagataggga

SEQ ID NO: 95870 - DNA, 30 bp, Artificial Sequence
  Synthetic oligonucleotide
ggggaaatcgatcccctcgtatgataggga

SEQ ID NO: 95871 - DNA, 30 bp, Artificial Sequence
  Synthetic oligonucleotide
ggatcgagtgaaagtacgaaaaagtaggga

SEQ ID NO: 95872 - DNA, 30 bp, Artificial Sequence
  Synthetic oligonucleotide
gagcgtttcacgaggggtttggatacggga

SEQ ID NO: 95873 - DNA, 30 bp, Artificial Sequence
  Synthetic oligonucleotide
cggtcactattaggcagaaggctagcggga

SEQ ID NO: 95874 - DNA, 30 bp, Artificial Sequence
  Synthetic oligonucleotide
aacaatcgccaattgcttaacggcgcggga

SEQ ID NO: 95875 - DNA, 30 bp, Artificial Sequence
  Synthetic oligonucleotide
ctaactaggtgagattgttgtccggcggga

SEQ ID NO: 95876 - DNA, 30 bp, Artificial Sequence
  Synthetic oligonucleotide
acagtctagttcgtgattagtcatgcggga

SEQ ID NO: 95877 - DNA, 30 bp, Artificial Sequence
  Synthetic oligonucleotide
ggtgagtatcttgcaaggtgtaactcggga

SEQ ID NO: 95878 - DNA, 30 bp, Artificial Sequence
  Synthetic oligonucleotide
ggctgtatgggccgacatctagaaagggga

SEQ ID NO: 95879 - DNA, 30 bp, Artificial Sequence
  Synthetic oligonucleotide
ttacatatgtgctaaatatcttagagggga

SEQ ID NO: 95880 - DNA, 30 bp, Artificial Sequence
  Synthetic oligonucleotide
ggcgactctctcagggctatgatccgggga

SEQ ID NO: 95881 - DNA, 30 bp, Artificial Sequence
  Synthetic oligonucleotide
aattaagtgttaagagcgctccctcgggga

SEQ ID NO: 95882 - DNA, 30 bp, Artificial Sequence
  Synthetic oligonucleotide
agatccgaatccgctcttcggcgtcgggga

SEQ ID NO: 95883 - DNA, 30 bp, Artificial Sequence
  Synthetic oligonucleotide
atcgaccaaaggctgatgcccaaaggggga

SEQ ID NO: 95884 - DNA, 30 bp, Artificial Sequence
  Synthetic oligonucleotide
aggaatagaatctcgccgcgccaaggggga

SEQ ID NO: 95885 - DNA, 39 bp, Artificial Sequence
  Synthetic oligonucleotide
aagataatacattcaggtatggtcggggatcggggggga

SEQ ID NO: 95886 - DNA, 40 bp, Artificial Sequence
  Synthetic oligonucleotide
aagaaaatacattcatggtatggtcggggatcggggggga

SEQ ID NO: 95887 - DNA, 30 bp, Artificial Sequence
  Synthetic oligonucleotide
cgggagcaacttcacttttggcggtgggga

SEQ ID NO: 95888 - DNA, 30 bp, Artificial Sequence
  Synthetic oligonucleotide
tgatgaacggaaaaatgaacagtcatggga

SEQ ID NO: 95889 - DNA, 30 bp, Artificial Sequence
  Synthetic oligonucleotide
agctccgtggttcacagtagaatagtggga

SEQ ID NO: 95890 - DNA, 30 bp, Artificial Sequence
  Synthetic oligonucleotide
caagaatcagtgtttcccgaagtcgtggga

SEQ ID NO: 95891 - DNA, 30 bp, Artificial Sequence
  Synthetic oligonucleotide
acgcgtggcaaagttttatttaaggtggga

SEQ ID NO: 95892 - DNA, 30 bp, Artificial Sequence
  Synthetic oligonucleotide
ggatagtccgggtgagtgcttggggtggga

SEQ ID NO: 95893 - DNA, 30 bp, Artificial Sequence
  Synthetic oligonucleotide
tttaagggcaccgcgctaccgagcaatgga

SEQ ID NO: 95894 - DNA, 30 bp, Artificial Sequence
  Synthetic oligonucleotide
ttgcaatgatggtaggtctacttgcatgga

SEQ ID NO: 95895 - DNA, 30 bp, Artificial Sequence
  Synthetic oligonucleotide
cgccataaatgagatagtatggatcatgga

SEQ ID NO: 95896 - DNA, 30 bp, Artificial Sequence
  Synthetic oligonucleotide
gctgcaacgaccaggggatgagaagatgga

SEQ ID NO: 95897 - DNA, 30 bp, Artificial Sequence
  Synthetic oligonucleotide
taccgatttggagacaactattgagatgga

SEQ ID NO: 95898 - DNA, 30 bp, Artificial Sequence
  Synthetic oligonucleotide
cacgaaccatggtcgtgatacaattatgga

SEQ ID NO: 95899 - DNA, 30 bp, Artificial Sequence
  Synthetic oligonucleotide
aatggcttcggccaagacgactaacctgga

SEQ ID NO: 95900 - DNA, 30 bp, Artificial Sequence
  Synthetic oligonucleotide
ggtattcacacgcgagcagttagtcctgga

SEQ ID NO: 95901 - DNA, 30 bp, Artificial Sequence
  Synthetic oligonucleotide
agtttacattgggtcgaggaaatgtctgga

SEQ ID NO: 95902 - DNA, 30 bp, Artificial Sequence
  Synthetic oligonucleotide
ctgaaatccttgcatagaggcttgtctgga

SEQ ID NO: 95903 - DNA, 30 bp, Artificial Sequence
  Synthetic oligonucleotide
aggtgagctgtgcgctcttgccaaagtgga

SEQ ID NO: 95904 - DNA, 30 bp, Artificial Sequence
  Synthetic oligonucleotide
gtctgagccggaaacagttcacatcgtgga

SEQ ID NO: 95905 - DNA, 30 bp, Artificial Sequence
  Synthetic oligonucleotide
ggcgcgggttgaaagtgagggcatcgtgga

SEQ ID NO: 95906 - DNA, 30 bp, Artificial Sequence
  Synthetic oligonucleotide
ggacactgctcacttccgaatagcggtgga

SEQ ID NO: 95907 - DNA, 30 bp, Artificial Sequence
  Synthetic oligonucleotide
cttccacagtcaacgcaaaacggtggtgga

SEQ ID NO: 95908 - DNA, 30 bp, Artificial Sequence
  Synthetic oligonucleotide
cgagcggtcacgttaccggagatttgtgga

SEQ ID NO: 95909 - DNA, 30 bp, Artificial Sequence
  Synthetic oligonucleotide
tgggcatggactacagccagccaaattgga

SEQ ID NO: 95910 - DNA, 30 bp, Artificial Sequence
  Synthetic oligonucleotide
aagggatgcattactctgaaaccaattgga

SEQ ID NO: 95911 - DNA, 30 bp, Artificial Sequence
  Synthetic oligonucleotide
aatggtacttaagtcccgatgttaattgga

SEQ ID NO: 95912 - DNA, 30 bp, Artificial Sequence
  Synthetic oligonucleotide
gacggtagtccagggccgtatttcattgga

SEQ ID NO: 95913 - DNA, 30 bp, Artificial Sequence
  Synthetic oligonucleotide
ttcgtcaacctcaatcatattatacttgga

SEQ ID NO: 95914 - DNA, 30 bp, Artificial Sequence
  Synthetic oligonucleotide
gcatagtgctcacagggcgacatgcttgga

SEQ ID NO: 95915 - DNA, 30 bp, Artificial Sequence
  Synthetic oligonucleotide
gaggtaggtcagggacatcacctagttgga

SEQ ID NO: 95916 - DNA, 30 bp, Artificial Sequence
  Synthetic oligonucleotide
gaagctacttacggggtgaaggaatttgga

SEQ ID NO: 95917 - DNA, 30 bp, Artificial Sequence
  Synthetic oligonucleotide
agactgttgcgcggggaggtcacgcaatga

SEQ ID NO: 95918 - DNA, 30 bp, Artificial Sequence
  Synthetic oligonucleotide
aaccaatccgtaagaaaggagccagaatga

SEQ ID NO: 95919 - DNA, 30 bp, Artificial Sequence
  Synthetic oligonucleotide
taagcgattacatgcgatcgataggaatga

SEQ ID NO: 95920 - DNA, 30 bp, Artificial Sequence
  Synthetic oligonucleotide
ataactcagccaaagtttgagtaggaatga

SEQ ID NO: 95921 - DNA, 29 bp, Artificial Sequence
  Synthetic oligonucleotide
gctgcgcttgggcaacagttaaataatga

SEQ ID NO: 95922 - DNA, 30 bp, Artificial Sequence
  Synthetic oligonucleotide
taccattccgaacaaggtgtccgataatga

SEQ ID NO: 95923 - DNA, 30 bp, Artificial Sequence
  Synthetic oligonucleotide
gataacgaatttgagagtcgggtctaatga

SEQ ID NO: 95924 - DNA, 30 bp, Artificial Sequence
  Synthetic oligonucleotide
aggtgtaagtttatgctaggacggtaatga

SEQ ID NO: 95925 - DNA, 30 bp, Artificial Sequence
  Synthetic oligonucleotide
gcatacagggtaaaatcgctcgggtaatga

SEQ ID NO: 95926 - DNA, 30 bp, Artificial Sequence
  Synthetic oligonucleotide
gaagtacagatggctacactaaattaatga

SEQ ID NO: 95927 - DNA, 30 bp, Artificial Sequence
  Synthetic oligonucleotide
tgaaataacgtgatagtacaagaaacatga

SEQ ID NO: 95928 - DNA, 30 bp, Artificial Sequence
  Synthetic oligonucleotide
attaccgaaaagaccaagcaaataacatga

SEQ ID NO: 95929 - DNA, 30 bp, Artificial Sequence
  Synthetic oligonucleotide
acgtaggtgaaaggggcacaattaacatga

SEQ ID NO: 95930 - DNA, 31 bp, Artificial Sequence
  Synthetic oligonucleotide
tagggaacttgtggccaatttctgagcatga

SEQ ID NO: 95931 - DNA, 30 bp, Artificial Sequence
  Synthetic oligonucleotide
ccttcataccacagaagacgagtcgcatga

SEQ ID NO: 95932 - DNA, 30 bp, Artificial Sequence
  Synthetic oligonucleotide
gcagtcacagaatacatcgaattcgcatga

SEQ ID NO: 95933 - DNA, 30 bp, Artificial Sequence
  Synthetic oligonucleotide
atcttggcatggaagtgtcgatctgcatga

SEQ ID NO: 95934 - DNA, 30 bp, Artificial Sequence
  Synthetic oligonucleotide
ggagcgccgcgagaatgtgatcgtgcatga

SEQ ID NO: 95935 - DNA, 30 bp, Artificial Sequence
  Synthetic oligonucleotide
ggcggctctaccagtggataaggatcatga

SEQ ID NO: 95936 - DNA, 30 bp, Artificial Sequence
  Synthetic oligonucleotide
gactttcgataagccgtaaagaattcatga

SEQ ID NO: 95937 - DNA, 30 bp, Artificial Sequence
  Synthetic oligonucleotide
gcgtgcaacaattagccccgggccagatga

SEQ ID NO: 95938 - DNA, 30 bp, Artificial Sequence
  Synthetic oligonucleotide
ccttggctaaggtgtcgttcaacgagatga

SEQ ID NO: 95939 - DNA, 30 bp, Artificial Sequence
  Synthetic oligonucleotide
gcattaaacgagcgcgccgactatagatga

SEQ ID NO: 95940 - DNA, 30 bp, Artificial Sequence
  Synthetic oligonucleotide
ggtaagtaggcgaaattattgactagatga

SEQ ID NO: 95941 - DNA, 30 bp, Artificial Sequence
  Synthetic oligonucleotide
gctatcgatctcacagaagactagcgatga

SEQ ID NO: 95942 - DNA, 30 bp, Artificial Sequence
  Synthetic oligonucleotide
gaagtacgagtaggcggacttccgcgatga

SEQ ID NO: 95943 - DNA, 30 bp, Artificial Sequence
  Synthetic oligonucleotide
aatggccgctgacaagtgatatggggatga

SEQ ID NO: 95944 - DNA, 30 bp, Artificial Sequence
  Synthetic oligonucleotide
aaggcgtacccaacggggcggacttgatga

SEQ ID NO: 95945 - DNA, 30 bp, Artificial Sequence
  Synthetic oligonucleotide
ttagcgaatgagggagggccacagatatga

SEQ ID NO: 95946 - DNA, 30 bp, Artificial Sequence
  Synthetic oligonucleotide
taaaggaccaggtgtgacatggcgatatga

SEQ ID NO: 95947 - DNA, 30 bp, Artificial Sequence
  Synthetic oligonucleotide
cgtaggccgcaacctacttgtgggatatga

SEQ ID NO: 95948 - DNA, 30 bp, Artificial Sequence
  Synthetic oligonucleotide
ctaatcgtgaatgcttcagccagcgtatga

SEQ ID NO: 95949 - DNA, 30 bp, Artificial Sequence
  Synthetic oligonucleotide
aggtggatcactattattccatcggtatga

SEQ ID NO: 95950 - DNA, 30 bp, Artificial Sequence
  Synthetic oligonucleotide
gagatgtaacggtaaaagagagttgtatga

SEQ ID NO: 95951 - DNA, 30 bp, Artificial Sequence
  Synthetic oligonucleotide
caggcgctgggccgaggacccgaattatga

SEQ ID NO: 95952 - DNA, 30 bp, Artificial Sequence
  Synthetic oligonucleotide
tcctgcgtaatgtcaacataaaccaactga

SEQ ID NO: 95953 - DNA, 30 bp, Artificial Sequence
  Synthetic oligonucleotide
aaataacacggtttgctaagggtgaactga

SEQ ID NO: 95954 - DNA, 30 bp, Artificial Sequence
  Synthetic oligonucleotide
tcggactgcgcctagggagtcttgaactga

SEQ ID NO: 95955 - DNA, 30 bp, Artificial Sequence
  Synthetic oligonucleotide
agtgtactggttccaaggaagtgccactga

SEQ ID NO: 95956 - DNA, 30 bp, Artificial Sequence
  Synthetic oligonucleotide
agggaaagattacgtgatcgaccgcactga

SEQ ID NO: 95957 - DNA, 30 bp, Artificial Sequence
  Synthetic oligonucleotide
acagggcgaaaccaagaagccggagactga

SEQ ID NO: 95958 - DNA, 30 bp, Artificial Sequence
  Synthetic oligonucleotide
agttggtctttaggtggcactggcacctga

SEQ ID NO: 95959 - DNA, 30 bp, Artificial Sequence
  Synthetic oligonucleotide
acacaagtccattcaacttcgcgtccctga

SEQ ID NO: 95960 - DNA, 30 bp, Artificial Sequence
  Synthetic oligonucleotide
gacatcgaggttatcatgttagagagctga

SEQ ID NO: 95961 - DNA, 30 bp, Artificial Sequence
  Synthetic oligonucleotide
acactttctgagactagacaacggcgctga

SEQ ID NO: 95962 - DNA, 30 bp, Artificial Sequence
  Synthetic oligonucleotide
gaggagcaattggaaaagaggcgtcgctga

SEQ ID NO: 95963 - DNA, 30 bp, Artificial Sequence
  Synthetic oligonucleotide
acaattggtttaagcccgaagtactgctga

SEQ ID NO: 95964 - DNA, 31 bp, Artificial Sequence
  Synthetic oligonucleotide
aggaagagaatataatgtattgtactgctga

SEQ ID NO: 95965 - DNA, 30 bp, Artificial Sequence
  Synthetic oligonucleotide
ccgctggaagtctcgagttgctgctgctga

SEQ ID NO: 95966 - DNA, 30 bp, Artificial Sequence
  Synthetic oligonucleotide
gcgaagatcaacagactgagttcaatctga

SEQ ID NO: 95967 - DNA, 30 bp, Artificial Sequence
  Synthetic oligonucleotide
gcgaaagattcaaaagagtctaatatctga

SEQ ID NO: 95968 - DNA, 30 bp, Artificial Sequence
  Synthetic oligonucleotide
atagcggattcatgaacagctagactctga

SEQ ID NO: 95969 - DNA, 30 bp, Artificial Sequence
  Synthetic oligonucleotide
actgtagtttgcggttaagttgacgtctga

SEQ ID NO: 95970 - DNA, 30 bp, Artificial Sequence
  Synthetic oligonucleotide
agcgagcaattcaacgccaagatattctga

SEQ ID NO: 95971 - DNA, 30 bp, Artificial Sequence
  Synthetic oligonucleotide
gacgtatggtgatgacgtcgacacaagtga

SEQ ID NO: 95972 - DNA, 30 bp, Artificial Sequence
  Synthetic oligonucleotide
tgaagctggagttgtacgtgatgacagtga

SEQ ID NO: 95973 - DNA, 30 bp, Artificial Sequence
  Synthetic oligonucleotide
cgatactggttcccgtagactgagcagtga

SEQ ID NO: 95974 - DNA, 30 bp, Artificial Sequence
  Synthetic oligonucleotide
tcaagaactgggggttatggggctcagtga

SEQ ID NO: 95975 - DNA, 30 bp, Artificial Sequence
  Synthetic oligonucleotide
atgttaataacacgagggtgctctcagtga

SEQ ID NO: 95976 - DNA, 30 bp, Artificial Sequence
  Synthetic oligonucleotide
gactgtagaaggttcgcaacgtaagagtga

SEQ ID NO: 95977 - DNA, 30 bp, Artificial Sequence
  Synthetic oligonucleotide
tggggtgaatttcgtcttaaacacgagtga

SEQ ID NO: 95978 - DNA, 30 bp, Artificial Sequence
  Synthetic oligonucleotide
cgtgggggtcctctacacaaccacgagtga

SEQ ID NO: 95979 - DNA, 30 bp, Artificial Sequence
  Synthetic oligonucleotide
tcttccactcccgacctcctcaaggagtga

SEQ ID NO: 95980 - DNA, 30 bp, Artificial Sequence
  Synthetic oligonucleotide
gggtagtagggtatagggcaattctagtga

SEQ ID NO: 95981 - DNA, 30 bp, Artificial Sequence
  Synthetic oligonucleotide
aactggagtcactaataaagtaagtagtga

SEQ ID NO: 95982 - DNA, 30 bp, Artificial Sequence
  Synthetic oligonucleotide
tagcgaaggttgcttctcttagggtagtga

SEQ ID NO: 95983 - DNA, 30 bp, Artificial Sequence
  Synthetic oligonucleotide
gaatttgttcgaacggggaagataacgtga

SEQ ID NO: 95984 - DNA, 30 bp, Artificial Sequence
  Synthetic oligonucleotide
taggcaggaaagttcacttcagggacgtga

SEQ ID NO: 95985 - DNA, 30 bp, Artificial Sequence
  Synthetic oligonucleotide
acggccgaaacacggatagtttatacgtga

SEQ ID NO: 95986 - DNA, 30 bp, Artificial Sequence
  Synthetic oligonucleotide
aattgcgagcaaaggcagtgcgcgccgtga

SEQ ID NO: 95987 - DNA, 30 bp, Artificial Sequence
  Synthetic oligonucleotide
ggagtgtcgtaagtcatcatcagtgcgtga

SEQ ID NO: 95988 - DNA, 30 bp, Artificial Sequence
  Synthetic oligonucleotide
atgggcctggcaggaatgggctggtcgtga

SEQ ID NO: 95989 - DNA, 30 bp, Artificial Sequence
  Synthetic oligonucleotide
cacttaagacaacttggtaaattaaggtga

SEQ ID NO: 95990 - DNA, 31 bp, Artificial Sequence
  Synthetic oligonucleotide
acttggtggtcgaacttttgggcacaggtga

SEQ ID NO: 95991 - DNA, 30 bp, Artificial Sequence
  Synthetic oligonucleotide
atcaacaaggccgagatatcgcttaggtga

SEQ ID NO: 95992 - DNA, 30 bp, Artificial Sequence
  Synthetic oligonucleotide
acgagccgggcctattaacggaaccggtga

SEQ ID NO: 95993 - DNA, 30 bp, Artificial Sequence
  Synthetic oligonucleotide
gcagaagcgataggaatggtcgcagggtga

SEQ ID NO: 95994 - DNA, 30 bp, Artificial Sequence
  Synthetic oligonucleotide
agctcaattatgagtgaggacagctggtga

SEQ ID NO: 95995 - DNA, 30 bp, Artificial Sequence
  Synthetic oligonucleotide
actcgtcgaccgggtctggtggtgtggtga

SEQ ID NO: 95996 - DNA, 30 bp, Artificial Sequence
  Synthetic oligonucleotide
cacgtctaaaagctcggttccagaatgtga

SEQ ID NO: 95997 - DNA, 30 bp, Artificial Sequence
  Synthetic oligonucleotide
ggcggatttctcttggcaaacaatatgtga

SEQ ID NO: 95998 - DNA, 30 bp, Artificial Sequence
  Synthetic oligonucleotide
gcgtcataagatgggtcccagtgtatgtga

SEQ ID NO: 95999 - DNA, 30 bp, Artificial Sequence
  Synthetic oligonucleotide
gtcatccaagtgttcaacgaatttatgtga

SEQ ID NO: 96000 - DNA, 30 bp, Artificial Sequence
  Synthetic oligonucleotide
gcggagaattcctactataagaggctgtga

SEQ ID NO: 96001 - DNA, 30 bp, Artificial Sequence
  Synthetic oligonucleotide
tgtactagatagaatatatgcggtctgtga

SEQ ID NO: 96002 - DNA, 30 bp, Artificial Sequence
  Synthetic oligonucleotide
ctgcctaaatgacagagctcctcagtgtga

SEQ ID NO: 96003 - DNA, 30 bp, Artificial Sequence
  Synthetic oligonucleotide
gtgtccaagtaatatattgtgcgggtgtga

SEQ ID NO: 96004 - DNA, 30 bp, Artificial Sequence
  Synthetic oligonucleotide
aggaagtcgtctacacttgtgtcgaattga

SEQ ID NO: 96005 - DNA, 30 bp, Artificial Sequence
  Synthetic oligonucleotide
acggtcacgggggtatgactaaggaattga

SEQ ID NO: 96006 - DNA, 30 bp, Artificial Sequence
  Synthetic oligonucleotide
ctcgagctagtgcgaacgatctctaattga

SEQ ID NO: 96007 - DNA, 30 bp, Artificial Sequence
  Synthetic oligonucleotide
cactagaaaagcaatacattacggcattga

SEQ ID NO: 96008 - DNA, 30 bp, Artificial Sequence
  Synthetic oligonucleotide
atcacaggacggcgactccatagagattga

SEQ ID NO: 96009 - DNA, 30 bp, Artificial Sequence
  Synthetic oligonucleotide
caggggaacgtccgaccaatcattgattga

SEQ ID NO: 96010 - DNA, 30 bp, Artificial Sequence
  Synthetic oligonucleotide
cgagttacggtccagctaatataatattga

SEQ ID NO: 96011 - DNA, 30 bp, Artificial Sequence
  Synthetic oligonucleotide
gcagtctatgcgttagaagactcatattga

SEQ ID NO: 96012 - DNA, 30 bp, Artificial Sequence
  Synthetic oligonucleotide
aacgtgaaagacaagttccccagatattga

SEQ ID NO: 96013 - DNA, 30 bp, Artificial Sequence
  Synthetic oligonucleotide
cggatctcttcgaggctgaagctgtattga

SEQ ID NO: 96014 - DNA, 30 bp, Artificial Sequence
  Synthetic oligonucleotide
gaatcacacgaccaggatgacgacccttga

SEQ ID NO: 96015 - DNA, 30 bp, Artificial Sequence
  Synthetic oligonucleotide
gtgaggtttggagggaatacatccccttga

SEQ ID NO: 96016 - DNA, 30 bp, Artificial Sequence
  Synthetic oligonucleotide
cgcagggatggctttgaggctgctccttga

SEQ ID NO: 96017 - DNA, 30 bp, Artificial Sequence
  Synthetic oligonucleotide
atcgcatacctaccagtccgacctgcttga

SEQ ID NO: 96018 - DNA, 30 bp, Artificial Sequence
  Synthetic oligonucleotide
tcatgcataggaatcaagaacaccagttga

SEQ ID NO: 96019 - DNA, 30 bp, Artificial Sequence
  Synthetic oligonucleotide
gccgtgggatctgagtgtacgatgagttga

SEQ ID NO: 96020 - DNA, 30 bp, Artificial Sequence
  Synthetic oligonucleotide
cagggttaccaggatgctcaaaatagttga

SEQ ID NO: 96021 - DNA, 30 bp, Artificial Sequence
  Synthetic oligonucleotide
tggggcgacggtttctgtgccaatcgttga

SEQ ID NO: 96022 - DNA, 30 bp, Artificial Sequence
  Synthetic oligonucleotide
cagagatcggagctgaagcaactgggttga

SEQ ID NO: 96023 - DNA, 30 bp, Artificial Sequence
  Synthetic oligonucleotide
aaaaataggcagagtgagttctaatgttga

SEQ ID NO: 96024 - DNA, 30 bp, Artificial Sequence
  Synthetic oligonucleotide
gcgtacttcacaaaaactgcacagtgttga

SEQ ID NO: 96025 - DNA, 30 bp, Artificial Sequence
  Synthetic oligonucleotide
agggagtggtcccttcgcatccggatttga

SEQ ID NO: 96026 - DNA, 28 bp, Artificial Sequence
  Synthetic oligonucleotide
atcgaaggaaacattgtaaggattttga

SEQ ID NO: 96027 - DNA, 30 bp, Artificial Sequence
  Synthetic oligonucleotide
agcaccgtagtttcgcggaccaaaaaaata

SEQ ID NO: 96028 - DNA, 30 bp, Artificial Sequence
  Synthetic oligonucleotide
gcggctcacatcatcgattggccgaaaata

SEQ ID NO: 96029 - DNA, 30 bp, Artificial Sequence
  Synthetic oligonucleotide
atacttgaaagacaagattgctggcaaata

SEQ ID NO: 96030 - DNA, 30 bp, Artificial Sequence
  Synthetic oligonucleotide
aggctatgaagttcaagcggctgtcaaata

SEQ ID NO: 96031 - DNA, 30 bp, Artificial Sequence
  Synthetic oligonucleotide
gcggtcataccggttcaaataatagaaata

SEQ ID NO: 96032 - DNA, 30 bp, Artificial Sequence
  Synthetic oligonucleotide
tctgagatctgcttaaaggcttaggaaata

SEQ ID NO: 96033 - DNA, 30 bp, Artificial Sequence
  Synthetic oligonucleotide
caaagggagattgctctgcctctggaaata

SEQ ID NO: 96034 - DNA, 30 bp, Artificial Sequence
  Synthetic oligonucleotide
gactacgtcaatcgtatttaaacctaaata

SEQ ID NO: 96035 - DNA, 30 bp, Artificial Sequence
  Synthetic oligonucleotide
gagcggttaactgtatgagtgaagtaaata

SEQ ID NO: 96036 - DNA, 30 bp, Artificial Sequence
  Synthetic oligonucleotide
cggacgacagtggtacgcagttgcgcaata

SEQ ID NO: 96037 - DNA, 30 bp, Artificial Sequence
  Synthetic oligonucleotide
gacacgaatggttcatgtacctgatcaata

SEQ ID NO: 96038 - DNA, 30 bp, Artificial Sequence
  Synthetic oligonucleotide
tgatcgggatcggggttaacgttgtcaata

SEQ ID NO: 96039 - DNA, 30 bp, Artificial Sequence
  Synthetic oligonucleotide
aagtcacgattctcacatcagttaagaata

SEQ ID NO: 96040 - DNA, 30 bp, Artificial Sequence
  Synthetic oligonucleotide
taggctggccgtgggaagcctggcagaata

SEQ ID NO: 96041 - DNA, 30 bp, Artificial Sequence
  Synthetic oligonucleotide
gtcgacataagaatggcttgcggtagaata

SEQ ID NO: 96042 - DNA, 27 bp, Artificial Sequence
  Synthetic oligonucleotide
atctcgtcgaaggaactaccacgaata

SEQ ID NO: 96043 - DNA, 30 bp, Artificial Sequence
  Synthetic oligonucleotide
agtgcctagcattcgtggaaagaccgaata

SEQ ID NO: 96044 - DNA, 30 bp, Artificial Sequence
  Synthetic oligonucleotide
ttgtctagatacaaaagggcagaaggaata

SEQ ID NO: 96045 - DNA, 30 bp, Artificial Sequence
  Synthetic oligonucleotide
gtgacgagataatcgattaacccaggaata

SEQ ID NO: 96046 - DNA, 30 bp, Artificial Sequence
  Synthetic oligonucleotide
tactacaggcgaaccgattatgccggaata

SEQ ID NO: 96047 - DNA, 29 bp, Artificial Sequence
  Synthetic oligonucleotide
cggtgtggcttcaatgatcaacgggaata

SEQ ID NO: 96048 - DNA, 30 bp, Artificial Sequence
  Synthetic oligonucleotide
tcaggatcacgtgaatcttgtaacataata

SEQ ID NO: 96049 - DNA, 30 bp, Artificial Sequence
  Synthetic oligonucleotide
acgtcaacttagctgggctatcggataata

SEQ ID NO: 96050 - DNA, 30 bp, Artificial Sequence
  Synthetic oligonucleotide
gagactcagtccggggagggaactataata

SEQ ID NO: 96051 - DNA, 30 bp, Artificial Sequence
  Synthetic oligonucleotide
accggggacagtttgcgatcattactaata

SEQ ID NO: 96052 - DNA, 30 bp, Artificial Sequence
  Synthetic oligonucleotide
gtgctctaggtcacaggcgtggcgctaata

SEQ ID NO: 96053 - DNA, 30 bp, Artificial Sequence
  Synthetic oligonucleotide
attgaagcacgaaagttagataaagtaata

SEQ ID NO: 96054 - DNA, 30 bp, Artificial Sequence
  Synthetic oligonucleotide
tagtgggaatcacccatcgatcgagtaata

SEQ ID NO: 96055 - DNA, 30 bp, Artificial Sequence
  Synthetic oligonucleotide
gagatcataaacgcggaacggtgagtaata

SEQ ID NO: 96056 - DNA, 30 bp, Artificial Sequence
  Synthetic oligonucleotide
ccgcatctgcaaatggcacaactagtaata

SEQ ID NO: 96057 - DNA, 30 bp, Artificial Sequence
  Synthetic oligonucleotide
gtagaaagtgtcagcggcactccggtaata

SEQ ID NO: 96058 - DNA, 30 bp, Artificial Sequence
  Synthetic oligonucleotide
cgaagaaactccgttaggcctagggtaata

SEQ ID NO: 96059 - DNA, 30 bp, Artificial Sequence
  Synthetic oligonucleotide
gacggatgcaataaatagtgcgccttaata

SEQ ID NO: 96060 - DNA, 30 bp, Artificial Sequence
  Synthetic oligonucleotide
aatgggggaactagcaatgcaggcttaata

SEQ ID NO: 96061 - DNA, 30 bp, Artificial Sequence
  Synthetic oligonucleotide
gggactgtgtgtaaagtgacaacaaacata

SEQ ID NO: 96062 - DNA, 30 bp, Artificial Sequence
  Synthetic oligonucleotide
actacacatcaatcctggactaataacata

SEQ ID NO: 96063 - DNA, 30 bp, Artificial Sequence
  Synthetic oligonucleotide
tggtacggcaaactaatctgtggtaacata

SEQ ID NO: 96064 - DNA, 30 bp, Artificial Sequence
  Synthetic oligonucleotide
ggatggaccccagtcgccaaaagggacata

SEQ ID NO: 96065 - DNA, 30 bp, Artificial Sequence
  Synthetic oligonucleotide
ctacgtaggggccggtatccgtttgacata

SEQ ID NO: 96066 - DNA, 30 bp, Artificial Sequence
  Synthetic oligonucleotide
aggtgcctcgggaggagaactaaaaccata

SEQ ID NO: 96067 - DNA, 30 bp, Artificial Sequence
  Synthetic oligonucleotide
tacgggcactcgatgaagaatgaaaccata

SEQ ID NO: 96068 - DNA, 30 bp, Artificial Sequence
  Synthetic oligonucleotide
agctgaaacggagaggggggtacagccata

SEQ ID NO: 96069 - DNA, 30 bp, Artificial Sequence
  Synthetic oligonucleotide
caacctcatacccaatggtctatagccata

SEQ ID NO: 96070 - DNA, 30 bp, Artificial Sequence
  Synthetic oligonucleotide
aaaaagaacatcgatacttagctggccata

SEQ ID NO: 96071 - DNA, 30 bp, Artificial Sequence
  Synthetic oligonucleotide
atcagcgggcacggatcggccaatgccata

SEQ ID NO: 96072 - DNA, 30 bp, Artificial Sequence
  Synthetic oligonucleotide
acgcacaagccggaaatgatggcatccata

SEQ ID NO: 96073 - DNA, 30 bp, Artificial Sequence
  Synthetic oligonucleotide
cggtgcgagacggcgatgtccaactccata

SEQ ID NO: 96074 - DNA, 30 bp, Artificial Sequence
  Synthetic oligonucleotide
atgcacccgaacattccgttaacgtccata

SEQ ID NO: 96075 - DNA, 30 bp, Artificial Sequence
  Synthetic oligonucleotide
caccaggatcatcaggcagaccaaagcata

SEQ ID NO: 96076 - DNA, 30 bp, Artificial Sequence
  Synthetic oligonucleotide
gtagagacggaaatgcctggtcaaagcata

SEQ ID NO: 96077 - DNA, 30 bp, Artificial Sequence
  Synthetic oligonucleotide
ccttgtccgcaataaagtgagctacgcata

SEQ ID NO: 96078 - DNA, 30 bp, Artificial Sequence
  Synthetic oligonucleotide
aagatgtggaccgttctaggccagtgcata

SEQ ID NO: 96079 - DNA, 30 bp, Artificial Sequence
  Synthetic oligonucleotide
taagatgggccaaagggtcaattaatcata

SEQ ID NO: 96080 - DNA, 30 bp, Artificial Sequence
  Synthetic oligonucleotide
gttgcagggcagataactaaggtactcata

SEQ ID NO: 96081 - DNA, 30 bp, Artificial Sequence
  Synthetic oligonucleotide
ccgagcttccgggagtacggtgtcctcata

SEQ ID NO: 96082 - DNA, 30 bp, Artificial Sequence
  Synthetic oligonucleotide
gcgctggggacaattatcgagccagtcata

SEQ ID NO: 96083 - DNA, 30 bp, Artificial Sequence
  Synthetic oligonucleotide
ggtatcgaaatgccatcgttctccgtcata

SEQ ID NO: 96084 - DNA, 30 bp, Artificial Sequence
  Synthetic oligonucleotide
aaaacgaaaatctagggagcatcggtcata

SEQ ID NO: 96085 - DNA, 30 bp, Artificial Sequence
  Synthetic oligonucleotide
cgcctggatacgtgtcggttacatttcata

SEQ ID NO: 96086 - DNA, 30 bp, Artificial Sequence
  Synthetic oligonucleotide
ggcccgccggcagcgtgagaccgaaagata

SEQ ID NO: 96087 - DNA, 30 bp, Artificial Sequence
  Synthetic oligonucleotide
agtcgacgcgggcgcagttcgctaaagata

SEQ ID NO: 96088 - DNA, 30 bp, Artificial Sequence
  Synthetic oligonucleotide
gtggtgggtataggaggatcgaccaagata

SEQ ID NO: 96089 - DNA, 30 bp, Artificial Sequence
  Synthetic oligonucleotide
cggtactaagaaaaagtattacataagata

SEQ ID NO: 96090 - DNA, 30 bp, Artificial Sequence
  Synthetic oligonucleotide
caggtggcatagcaggatagctgtaagata

SEQ ID NO: 96091 - DNA, 30 bp, Artificial Sequence
  Synthetic oligonucleotide
ggataccgtggcagtggacgtgaacagata

SEQ ID NO: 96092 - DNA, 30 bp, Artificial Sequence
  Synthetic oligonucleotide
ttgactgtatgaacaaaggagtcacagata

SEQ ID NO: 96093 - DNA, 30 bp, Artificial Sequence
  Synthetic oligonucleotide
ctacgtaaactacaaaggcctgtcgagata

SEQ ID NO: 96094 - DNA, 30 bp, Artificial Sequence
  Synthetic oligonucleotide
aagctaaaagcagaattagtgaaggagata

SEQ ID NO: 96095 - DNA, 30 bp, Artificial Sequence
  Synthetic oligonucleotide
ggtaaaaatctcaactcttcgcccacgata

SEQ ID NO: 96096 - DNA, 30 bp, Artificial Sequence
  Synthetic oligonucleotide
aaccagcataataagttcgaaagcacgata

SEQ ID NO: 96097 - DNA, 30 bp, Artificial Sequence
  Synthetic oligonucleotide
gccacgggagggagggtcccgccgacgata

SEQ ID NO: 96098 - DNA, 30 bp, Artificial Sequence
  Synthetic oligonucleotide
aacgagcttggttcgaattgcgccgcgata

SEQ ID NO: 96099 - DNA, 30 bp, Artificial Sequence
  Synthetic oligonucleotide
agaagcgcaatgtataatggaacatcgata

SEQ ID NO: 96100 - DNA, 30 bp, Artificial Sequence
  Synthetic oligonucleotide
cgttgagatcagagcatggccataaggata

SEQ ID NO: 96101 - DNA, 30 bp, Artificial Sequence
  Synthetic oligonucleotide
acgtgaacacgtgaacgtagttccaggata

SEQ ID NO: 96102 - DNA, 30 bp, Artificial Sequence
  Synthetic oligonucleotide
cactaagtggtgcaaacttccaatcggata

SEQ ID NO: 96103 - DNA, 30 bp, Artificial Sequence
  Synthetic oligonucleotide
aactgatacatgcgggactgcccagggata

SEQ ID NO: 96104 - DNA, 30 bp, Artificial Sequence
  Synthetic oligonucleotide
tggtacggtcaagaatattatgatgggata

SEQ ID NO: 96105 - DNA, 30 bp, Artificial Sequence
  Synthetic oligonucleotide
tacattactacaaagtaaatgtggtggata

SEQ ID NO: 96106 - DNA, 30 bp, Artificial Sequence
  Synthetic oligonucleotide
gcagggggcgaacaagacggaccttggata

SEQ ID NO: 96107 - DNA, 29 bp, Artificial Sequence
  Synthetic oligonucleotide
ggcgcggcgcaacgaaatttcccatgata

SEQ ID NO: 96108 - DNA, 30 bp, Artificial Sequence
  Synthetic oligonucleotide
acaaaaacccaccttggttacagcatgata

SEQ ID NO: 96109 - DNA, 30 bp, Artificial Sequence
  Synthetic oligonucleotide
gcacagagggtactaggcacacgtatgata

SEQ ID NO: 96110 - DNA, 30 bp, Artificial Sequence
  Synthetic oligonucleotide
gaaggtggcaccaacgaaaccatcctgata

SEQ ID NO: 96111 - DNA, 30 bp, Artificial Sequence
  Synthetic oligonucleotide
gtcaaggggttcgattgctacaggctgata

SEQ ID NO: 96112 - DNA, 30 bp, Artificial Sequence
  Synthetic oligonucleotide
ggctacgtcgtaagacgatgaagcgtgata

SEQ ID NO: 96113 - DNA, 30 bp, Artificial Sequence
  Synthetic oligonucleotide
tctcaggaactcaaacgagtcggcgtgata

SEQ ID NO: 96114 - DNA, 30 bp, Artificial Sequence
  Synthetic oligonucleotide
agacagagcggtgtataactacaaaatata

SEQ ID NO: 96115 - DNA, 30 bp, Artificial Sequence
  Synthetic oligonucleotide
gcgaacagtctactactgtatgacaatata

SEQ ID NO: 96116 - DNA, 30 bp, Artificial Sequence
  Synthetic oligonucleotide
tagtcaacacgcctgatctcgcggaatata

SEQ ID NO: 96117 - DNA, 30 bp, Artificial Sequence
  Synthetic oligonucleotide
aaatggctgggatccacgaggccacatata

SEQ ID NO: 96118 - DNA, 30 bp, Artificial Sequence
  Synthetic oligonucleotide
gcacgacgaatcggcgagacgttacatata

SEQ ID NO: 96119 - DNA, 30 bp, Artificial Sequence
  Synthetic oligonucleotide
ttggaaccttcacggaataccaggcatata

SEQ ID NO: 96120 - DNA, 30 bp, Artificial Sequence
  Synthetic oligonucleotide
tcagcttggcgtgtgaggagtcctgctata

SEQ ID NO: 96121 - DNA, 30 bp, Artificial Sequence
  Synthetic oligonucleotide
tagtcagaattagaagatcccaaacgtata

SEQ ID NO: 96122 - DNA, 30 bp, Artificial Sequence
  Synthetic oligonucleotide
cgaaataggcatgctccataagcacgtata

SEQ ID NO: 96123 - DNA, 30 bp, Artificial Sequence
  Synthetic oligonucleotide
cggcacacaaaacaccataaaaatggtata

SEQ ID NO: 96124 - DNA, 30 bp, Artificial Sequence
  Synthetic oligonucleotide
ggtcggagaacgtctgcaggaagtggtata

SEQ ID NO: 96125 - DNA, 30 bp, Artificial Sequence
  Synthetic oligonucleotide
cgaaatgcgaatacccaaatggcttgtata

SEQ ID NO: 96126 - DNA, 30 bp, Artificial Sequence
  Synthetic oligonucleotide
ggcacaagcgaaattcgtcacgacgttata

SEQ ID NO: 96127 - DNA, 30 bp, Artificial Sequence
  Synthetic oligonucleotide
aagcacaaactaaggtcgaaaagtgttata

SEQ ID NO: 96128 - DNA, 30 bp, Artificial Sequence
  Synthetic oligonucleotide
acctgtatgaaggcccatagtaagtttata

SEQ ID NO: 96129 - DNA, 30 bp, Artificial Sequence
  Synthetic oligonucleotide
cgggcgcctttgaatcgggcggaaaaacta

SEQ ID NO: 96130 - DNA, 30 bp, Artificial Sequence
  Synthetic oligonucleotide
tcaagggaagtaacctcgcgctcgaaacta

SEQ ID NO: 96131 - DNA, 30 bp, Artificial Sequence
  Synthetic oligonucleotide
tactaggtctacccaccaaagggacaacta

SEQ ID NO: 96132 - DNA, 30 bp, Artificial Sequence
  Synthetic oligonucleotide
ccggggattaatccaagatgcttagaacta

SEQ ID NO: 96133 - DNA, 30 bp, Artificial Sequence
  Synthetic oligonucleotide
taacagcaccggccgctgaaaaccgaacta

SEQ ID NO: 96134 - DNA, 30 bp, Artificial Sequence
  Synthetic oligonucleotide
ggtggcgagcactgccaagttggcgaacta

SEQ ID NO: 96135 - DNA, 30 bp, Artificial Sequence
  Synthetic oligonucleotide
gcggcaactaatactaaaagatgcgaacta

SEQ ID NO: 96136 - DNA, 30 bp, Artificial Sequence
  Synthetic oligonucleotide
cattggatcgagattgcgagccgggaacta

SEQ ID NO: 96137 - DNA, 30 bp, Artificial Sequence
  Synthetic oligonucleotide
cgctcagggcgaatcgcgtggcatgaacta

SEQ ID NO: 96138 - DNA, 30 bp, Artificial Sequence
  Synthetic oligonucleotide
agataaatcttaggtaaatgaaagtaacta

SEQ ID NO: 96139 - DNA, 30 bp, Artificial Sequence
  Synthetic oligonucleotide
gctcatctgctagtataaaggaacacacta

SEQ ID NO: 96140 - DNA, 30 bp, Artificial Sequence
  Synthetic oligonucleotide
gggataaggtactcaatgtgaatcgcacta

SEQ ID NO: 96141 - DNA, 30 bp, Artificial Sequence
  Synthetic oligonucleotide
aaggtggggtttgtaagacggaaaagacta

SEQ ID NO: 96142 - DNA, 30 bp, Artificial Sequence
  Synthetic oligonucleotide
ggcgaccagcggtccccctaaagcagacta

SEQ ID NO: 96143 - DNA, 30 bp, Artificial Sequence
  Synthetic oligonucleotide
tactaatcgtgacgtctatatcgaggacta

SEQ ID NO: 96144 - DNA, 30 bp, Artificial Sequence
  Synthetic oligonucleotide
gatcacggagaacagcgagattgctgacta

SEQ ID NO: 96145 - DNA, 30 bp, Artificial Sequence
  Synthetic oligonucleotide
aggttagtagttatataatgaccgtgacta

SEQ ID NO: 96146 - DNA, 30 bp, Artificial Sequence
  Synthetic oligonucleotide
gttgctacacacaggacagaactgatacta

SEQ ID NO: 96147 - DNA, 30 bp, Artificial Sequence
  Synthetic oligonucleotide
gctctaacaagacttaaagctgtgatacta

SEQ ID NO: 96148 - DNA, 30 bp, Artificial Sequence
  Synthetic oligonucleotide
gacggagtcttaatagtatacgacctacta

SEQ ID NO: 96149 - DNA, 30 bp, Artificial Sequence
  Synthetic oligonucleotide
gggatccgacggtaaggatgagtattacta

SEQ ID NO: 96150 - DNA, 30 bp, Artificial Sequence
  Synthetic oligonucleotide
tcatgtgctcaggttccgatgtgaaaccta

SEQ ID NO: 96151 - DNA, 30 bp, Artificial Sequence
  Synthetic oligonucleotide
ttgggataagctaccgaccgaatacaccta

SEQ ID NO: 96152 - DNA, 30 bp, Artificial Sequence
  Synthetic oligonucleotide
accacaaagttatgcccagagccgcaccta

SEQ ID NO: 96153 - DNA, 30 bp, Artificial Sequence
  Synthetic oligonucleotide
caagtccggctcagtagaagatctcaccta

SEQ ID NO: 96154 - DNA, 30 bp, Artificial Sequence
  Synthetic oligonucleotide
ataggctcgacatatgatcaggaataccta

SEQ ID NO: 96155 - DNA, 30 bp, Artificial Sequence
  Synthetic oligonucleotide
aggcaggatgtgtattagtatttaacccta

SEQ ID NO: 96156 - DNA, 30 bp, Artificial Sequence
  Synthetic oligonucleotide
accagcggattttgaaagatgtgaccccta

SEQ ID NO: 96157 - DNA, 31 bp, Artificial Sequence
  Synthetic oligonucleotide
cagggtcccggctagcggtgagcccgcccta

SEQ ID NO: 96158 - DNA, 30 bp, Artificial Sequence
  Synthetic oligonucleotide
aattaaaagggaaaaacatggccctcccta

SEQ ID NO: 96159 - DNA, 30 bp, Artificial Sequence
  Synthetic oligonucleotide
acaaccgagacgatcagcgacgtacgccta

SEQ ID NO: 96160 - DNA, 30 bp, Artificial Sequence
  Synthetic oligonucleotide
acgacataatggtgtcatttggtccgccta

SEQ ID NO: 96161 - DNA, 29 bp, Artificial Sequence
  Synthetic oligonucleotide
cgaggatatcacatattggatcctgccta

SEQ ID NO: 96162 - DNA, 30 bp, Artificial Sequence
  Synthetic oligonucleotide
cattgactgctcgattagaagccgatccta

SEQ ID NO: 96163 - DNA, 30 bp, Artificial Sequence
  Synthetic oligonucleotide
agtattgagagcaaggtaagtcgaaagcta

SEQ ID NO: 96164 - DNA, 30 bp, Artificial Sequence
  Synthetic oligonucleotide
acgtgaatatagttgttccccgggaagcta

SEQ ID NO: 96165 - DNA, 30 bp, Artificial Sequence
  Synthetic oligonucleotide
acaccaatcaataagtgcatccctaagcta

SEQ ID NO: 96166 - DNA, 30 bp, Artificial Sequence
  Synthetic oligonucleotide
tcaggtgtcttacctggcgacaaccagcta

SEQ ID NO: 96167 - DNA, 30 bp, Artificial Sequence
  Synthetic oligonucleotide
gtctgatacacgcgcccgaactttcagcta

SEQ ID NO: 96168 - DNA, 30 bp, Artificial Sequence
  Synthetic oligonucleotide
tctataccagcctaagaaggatcagagcta

SEQ ID NO: 96169 - DNA, 30 bp, Artificial Sequence
  Synthetic oligonucleotide
cggaacatcagtcagttgcgtctgtagcta

SEQ ID NO: 96170 - DNA, 30 bp, Artificial Sequence
  Synthetic oligonucleotide
tgagggacgaagtccgggacgtaaacgcta

SEQ ID NO: 96171 - DNA, 30 bp, Artificial Sequence
  Synthetic oligonucleotide
aggaccaagtagatgtacactccaacgcta

SEQ ID NO: 96172 - DNA, 30 bp, Artificial Sequence
  Synthetic oligonucleotide
ccttgggtcgaggaacctgagcccacgcta

SEQ ID NO: 96173 - DNA, 30 bp, Artificial Sequence
  Synthetic oligonucleotide
cttggagtcgaaggccgtgggtcgccgcta

SEQ ID NO: 96174 - DNA, 30 bp, Artificial Sequence
  Synthetic oligonucleotide
atccattacacgccaacgacatccgcgcta

SEQ ID NO: 96175 - DNA, 30 bp, Artificial Sequence
  Synthetic oligonucleotide
agcatgtggtgagaggcggccagtgcgcta

SEQ ID NO: 96176 - DNA, 30 bp, Artificial Sequence
  Synthetic oligonucleotide
cgaggactgtcagaatgaatgacatcgcta

SEQ ID NO: 96177 - DNA, 30 bp, Artificial Sequence
  Synthetic oligonucleotide
caaggtgaggttgctaaagctccgtcgcta

SEQ ID NO: 96178 - DNA, 30 bp, Artificial Sequence
  Synthetic oligonucleotide
atgtggattggaacaggatagaaacggcta

SEQ ID NO: 96179 - DNA, 30 bp, Artificial Sequence
  Synthetic oligonucleotide
cacttaggcctcctccaaaccacacggcta

SEQ ID NO: 96180 - DNA, 30 bp, Artificial Sequence
  Synthetic oligonucleotide
cactattactcgctaacaagggttcggcta

SEQ ID NO: 96181 - DNA, 30 bp, Artificial Sequence
  Synthetic oligonucleotide
ccccgccaaatccaacgagagacatggcta

SEQ ID NO: 96182 - DNA, 30 bp, Artificial Sequence
  Synthetic oligonucleotide
actagtccactgtcgtcttcggtctggcta

SEQ ID NO: 96183 - DNA, 30 bp, Artificial Sequence
  Synthetic oligonucleotide
acataaagaggtaacctatccgcttggcta

SEQ ID NO: 96184 - DNA, 30 bp, Artificial Sequence
  Synthetic oligonucleotide
ttggtaggtccgtaactagagcgcatgcta

SEQ ID NO: 96185 - DNA, 30 bp, Artificial Sequence
  Synthetic oligonucleotide
cgttgaaccgtggggtaaggaaggatgcta

SEQ ID NO: 96186 - DNA, 30 bp, Artificial Sequence
  Synthetic oligonucleotide
atgcacgatacacagggcaggctcctgcta

SEQ ID NO: 96187 - DNA, 30 bp, Artificial Sequence
  Synthetic oligonucleotide
aagacacccgacttaatgcaatcgctgcta

SEQ ID NO: 96188 - DNA, 30 bp, Artificial Sequence
  Synthetic oligonucleotide
atggtgagtgttcgtcagatgaatttgcta

SEQ ID NO: 96189 - DNA, 30 bp, Artificial Sequence
  Synthetic oligonucleotide
ctgcttgtgtaagcgaggagtggaaatcta

SEQ ID NO: 96190 - DNA, 30 bp, Artificial Sequence
  Synthetic oligonucleotide
gaatgggcgatttaactacgaacgaatcta

SEQ ID NO: 96191 - DNA, 30 bp, Artificial Sequence
  Synthetic oligonucleotide
gagagatgatgtagggtaagctggaatcta

SEQ ID NO: 96192 - DNA, 30 bp, Artificial Sequence
  Synthetic oligonucleotide
atgtagacaggggactcgaagtgtaatcta

SEQ ID NO: 96193 - DNA, 30 bp, Artificial Sequence
  Synthetic oligonucleotide
tggtgacggatgaggccgtacattaatcta

SEQ ID NO: 96194 - DNA, 30 bp, Artificial Sequence
  Synthetic oligonucleotide
tacaattggcgcaaaaattccgaacatcta

SEQ ID NO: 96195 - DNA, 30 bp, Artificial Sequence
  Synthetic oligonucleotide
tagtaaacattcactgtcaatcctcatcta

SEQ ID NO: 96196 - DNA, 30 bp, Artificial Sequence
  Synthetic oligonucleotide
tcttccgttatattctagctggccgatcta

SEQ ID NO: 96197 - DNA, 30 bp, Artificial Sequence
  Synthetic oligonucleotide
atctggaaagagggcctggagactgatcta

SEQ ID NO: 96198 - DNA, 30 bp, Artificial Sequence
  Synthetic oligonucleotide
ggttagaaatcactgttcaatgctactcta

SEQ ID NO: 96199 - DNA, 30 bp, Artificial Sequence
  Synthetic oligonucleotide
cgatgccgtgagggaatattctaagctcta

SEQ ID NO: 96200 - DNA, 30 bp, Artificial Sequence
  Synthetic oligonucleotide
ttactatgataataacgaactgcagctcta

SEQ ID NO: 96201 - DNA, 30 bp, Artificial Sequence
  Synthetic oligonucleotide
cattgtagaaggttacacattgtagctcta

SEQ ID NO: 96202 - DNA, 30 bp, Artificial Sequence
  Synthetic oligonucleotide
aggctgtgtagtcaaacggccagtgctcta

SEQ ID NO: 96203 - DNA, 30 bp, Artificial Sequence
  Synthetic oligonucleotide
agttcccagtagcactaagcagaaagtcta

SEQ ID NO: 96204 - DNA, 30 bp, Artificial Sequence
  Synthetic oligonucleotide
gcttaaccaatagcatgaaacttaagtcta

SEQ ID NO: 96205 - DNA, 30 bp, Artificial Sequence
  Synthetic oligonucleotide
cggtatcacgctacaactaacttcagtcta

SEQ ID NO: 96206 - DNA, 30 bp, Artificial Sequence
  Synthetic oligonucleotide
atgtgtagcgtgttggggtcggcgagtcta

SEQ ID NO: 96207 - DNA, 30 bp, Artificial Sequence
  Synthetic oligonucleotide
ggtcctatcggacacgcgatactgagtcta

SEQ ID NO: 96208 - DNA, 31 bp, Artificial Sequence
  Synthetic oligonucleotide
gaagggaaggaaaggtccagttgcacgtcta

SEQ ID NO: 96209 - DNA, 30 bp, Artificial Sequence
  Synthetic oligonucleotide
aaatggacatttctagcaggacggcgtcta

SEQ ID NO: 96210 - DNA, 30 bp, Artificial Sequence
  Synthetic oligonucleotide
aaacggaatgcttgaaacttctttcgtcta

SEQ ID NO: 96211 - DNA, 30 bp, Artificial Sequence
  Synthetic oligonucleotide
ggcatccgtaaaatttagtaggtgggtcta

SEQ ID NO: 96212 - DNA, 30 bp, Artificial Sequence
  Synthetic oligonucleotide
gcgtagcaaccctgtaccctgaatggtcta

SEQ ID NO: 96213 - DNA, 30 bp, Artificial Sequence
  Synthetic oligonucleotide
ttgggacaggtactgatgcatgcctgtcta

SEQ ID NO: 96214 - DNA, 30 bp, Artificial Sequence
  Synthetic oligonucleotide
taggtgatcgtaaaagttgttgtctgtcta

SEQ ID NO: 96215 - DNA, 30 bp, Artificial Sequence
  Synthetic oligonucleotide
tacacagggatgaatggtatccaaattcta

SEQ ID NO: 96216 - DNA, 30 bp, Artificial Sequence
  Synthetic oligonucleotide
acaacactgtgagtaatacgattatttcta

SEQ ID NO: 96217 - DNA, 30 bp, Artificial Sequence
  Synthetic oligonucleotide
gtacagatagtacgtttcggaaaaaaagta

SEQ ID NO: 96218 - DNA, 30 bp, Artificial Sequence
  Synthetic oligonucleotide
cgaagaattatactaccagttgagaaagta

SEQ ID NO: 96219 - DNA, 30 bp, Artificial Sequence
  Synthetic oligonucleotide
gcagaccgtgtagcattgcaacgccaagta

SEQ ID NO: 96220 - DNA, 30 bp, Artificial Sequence
  Synthetic oligonucleotide
gcatcggtcggatgatcgtgtatagaagta

SEQ ID NO: 96221 - DNA, 30 bp, Artificial Sequence
  Synthetic oligonucleotide
tgaatcgtggggtctcgacaacgtgaagta

SEQ ID NO: 96222 - DNA, 30 bp, Artificial Sequence
  Synthetic oligonucleotide
tacggcaatagggtagagcgtcttgaagta

SEQ ID NO: 96223 - DNA, 30 bp, Artificial Sequence
  Synthetic oligonucleotide
agtcacatgggcaaatgttttaagtaagta

SEQ ID NO: 96224 - DNA, 29 bp, Artificial Sequence
  Synthetic oligonucleotide
accgttggcattggcattgggtgtaagta

SEQ ID NO: 96225 - DNA, 30 bp, Artificial Sequence
  Synthetic oligonucleotide
cgaatgggaagctattgtagaaattaagta

SEQ ID NO: 96226 - DNA, 30 bp, Artificial Sequence
  Synthetic oligonucleotide
cgattaaacaaaagtggtagccatacagta

SEQ ID NO: 96227 - DNA, 30 bp, Artificial Sequence
  Synthetic oligonucleotide
taagaaccgcaaagtacaatctatacagta

SEQ ID NO: 96228 - DNA, 30 bp, Artificial Sequence
  Synthetic oligonucleotide
cggccacggcaagagatgcctgctacagta

SEQ ID NO: 96229 - DNA, 30 bp, Artificial Sequence
  Synthetic oligonucleotide
gaatgcgttagccgggggggtatagcagta

SEQ ID NO: 96230 - DNA, 30 bp, Artificial Sequence
  Synthetic oligonucleotide
tctgcgcgtatgctcaagtcaccggcagta

SEQ ID NO: 96231 - DNA, 30 bp, Artificial Sequence
  Synthetic oligonucleotide
aattgcgatggattcacctataacagagta

SEQ ID NO: 96232 - DNA, 30 bp, Artificial Sequence
  Synthetic oligonucleotide
agctatcacggcattattacgaatagagta

SEQ ID NO: 96233 - DNA, 30 bp, Artificial Sequence
  Synthetic oligonucleotide
agttgcagggcggggatagtcattagagta

SEQ ID NO: 96234 - DNA, 30 bp, Artificial Sequence
  Synthetic oligonucleotide
atcacggactgattaattgcacaacgagta

SEQ ID NO: 96235 - DNA, 30 bp, Artificial Sequence
  Synthetic oligonucleotide
gaagattaggaccgttagccaagacgagta

SEQ ID NO: 96236 - DNA, 30 bp, Artificial Sequence
  Synthetic oligonucleotide
ggagtgccgaatccggatttacagcgagta

SEQ ID NO: 96237 - DNA, 30 bp, Artificial Sequence
  Synthetic oligonucleotide
tcgataggcaatccccaaaccgtgcgagta

SEQ ID NO: 96238 - DNA, 30 bp, Artificial Sequence
  Synthetic oligonucleotide
tcatggaattagttactcaggcatcgagta

SEQ ID NO: 96239 - DNA, 30 bp, Artificial Sequence
  Synthetic oligonucleotide
atgctctttacggtgggttgcgctcgagta

SEQ ID NO: 96240 - DNA, 30 bp, Artificial Sequence
  Synthetic oligonucleotide
ggggcgacttttccgatggtccaaggagta

SEQ ID NO: 96241 - DNA, 30 bp, Artificial Sequence
  Synthetic oligonucleotide
tcaatataaaaattgaatcatgaaggagta

SEQ ID NO: 96242 - DNA, 30 bp, Artificial Sequence
  Synthetic oligonucleotide
gcactttatttatctagaacaccaggagta

SEQ ID NO: 96243 - DNA, 30 bp, Artificial Sequence
  Synthetic oligonucleotide
tggaatagccaagagtattggagaggagta

SEQ ID NO: 96244 - DNA, 30 bp, Artificial Sequence
  Synthetic oligonucleotide
gcacccgacaagttgcagtcccgaggagta

SEQ ID NO: 96245 - DNA, 30 bp, Artificial Sequence
  Synthetic oligonucleotide
aaccccactgggagcacacaatccggagta

SEQ ID NO: 96246 - DNA, 30 bp, Artificial Sequence
  Synthetic oligonucleotide
ctgccctacgtaacgttaggctagggagta

SEQ ID NO: 96247 - DNA, 30 bp, Artificial Sequence
  Synthetic oligonucleotide
ggccaaaatttacgtgacggctatggagta

SEQ ID NO: 96248 - DNA, 30 bp, Artificial Sequence
  Synthetic oligonucleotide
ggtatcggggtatttcaacacatcatagta

SEQ ID NO: 96249 - DNA, 30 bp, Artificial Sequence
  Synthetic oligonucleotide
tgggcacgatctcacacggaggtcatagta

SEQ ID NO: 96250 - DNA, 30 bp, Artificial Sequence
  Synthetic oligonucleotide
tgagtgagcacattgttaaaacacgtagta

SEQ ID NO: 96251 - DNA, 30 bp, Artificial Sequence
  Synthetic oligonucleotide
gacggttcgatacctagcgatacattagta

SEQ ID NO: 96252 - DNA, 30 bp, Artificial Sequence
  Synthetic oligonucleotide
caagtatcactaggggggaatagaaacgta

SEQ ID NO: 96253 - DNA, 30 bp, Artificial Sequence
  Synthetic oligonucleotide
ctgaatagtccactaacaccaagccacgta

SEQ ID NO: 96254 - DNA, 30 bp, Artificial Sequence
  Synthetic oligonucleotide
tggaaggacaaaattcatagtcgccacgta

SEQ ID NO: 96255 - DNA, 29 bp, Artificial Sequence
  Synthetic oligonucleotide
ggagaggggccaccaaggtaaaagacgta

SEQ ID NO: 96256 - DNA, 30 bp, Artificial Sequence
  Synthetic oligonucleotide
aatggtattgctgaaggaatacccgacgta

SEQ ID NO: 96257 - DNA, 31 bp, Artificial Sequence
  Synthetic oligonucleotide
gtgcatttcttgcgcgtcagaggtcgacgta

SEQ ID NO: 96258 - DNA, 30 bp, Artificial Sequence
  Synthetic oligonucleotide
agttgcgataaacacgagtctaatgacgta

SEQ ID NO: 96259 - DNA, 30 bp, Artificial Sequence
  Synthetic oligonucleotide
cgcacgtaagtaagactccccggaaccgta

SEQ ID NO: 96260 - DNA, 30 bp, Artificial Sequence
  Synthetic oligonucleotide
gacagcgataagatagaccgtaagaccgta

SEQ ID NO: 96261 - DNA, 30 bp, Artificial Sequence
  Synthetic oligonucleotide
atggggtctaggcagagatgccggaccgta

SEQ ID NO: 96262 - DNA, 30 bp, Artificial Sequence
  Synthetic oligonucleotide
acgcgaatggtctaatacgcagataccgta

SEQ ID NO: 96263 - DNA, 30 bp, Artificial Sequence
  Synthetic oligonucleotide
taatcaaccacaacgaattagcgagccgta

SEQ ID NO: 96264 - DNA, 30 bp, Artificial Sequence
  Synthetic oligonucleotide
ggccactgtagattactcgagatcgccgta

SEQ ID NO: 96265 - DNA, 30 bp, Artificial Sequence
  Synthetic oligonucleotide
tcatgcgtactaggaagttcggggtccgta

SEQ ID NO: 96266 - DNA, 30 bp, Artificial Sequence
  Synthetic oligonucleotide
cccaggcctggtgaaagtgcggacagcgta

SEQ ID NO: 96267 - DNA, 30 bp, Artificial Sequence
  Synthetic oligonucleotide
cgtgacgtggggtacacatgtattagcgta

SEQ ID NO: 96268 - DNA, 30 bp, Artificial Sequence
  Synthetic oligonucleotide
tcactcatcgatcaatgagacttcggcgta

SEQ ID NO: 96269 - DNA, 30 bp, Artificial Sequence
  Synthetic oligonucleotide
tggcgtaagatcggttggtaggggggcgta

SEQ ID NO: 96270 - DNA, 30 bp, Artificial Sequence
  Synthetic oligonucleotide
gcttaagcccgcaacaagtcaaaatgcgta

SEQ ID NO: 96271 - DNA, 30 bp, Artificial Sequence
  Synthetic oligonucleotide
agaacgttgcaagtgggcgtctgatgcgta

SEQ ID NO: 96272 - DNA, 30 bp, Artificial Sequence
  Synthetic oligonucleotide
gaagctagagacataataccggcaatcgta

SEQ ID NO: 96273 - DNA, 30 bp, Artificial Sequence
  Synthetic oligonucleotide
ccagccaagaaccgctctataagtatcgta

SEQ ID NO: 96274 - DNA, 30 bp, Artificial Sequence
  Synthetic oligonucleotide
cgttttatgttgaagacaacttgtatcgta

SEQ ID NO: 96275 - DNA, 30 bp, Artificial Sequence
  Synthetic oligonucleotide
tatgaccagcgttgataatacagcctcgta

SEQ ID NO: 96276 - DNA, 30 bp, Artificial Sequence
  Synthetic oligonucleotide
ccacaaggctaatctgttgaagggctcgta

SEQ ID NO: 96277 - DNA, 30 bp, Artificial Sequence
  Synthetic oligonucleotide
acagggtttccaagaagcgaatgtctcgta

SEQ ID NO: 96278 - DNA, 30 bp, Artificial Sequence
  Synthetic oligonucleotide
aggaaagtaagggcttgacttgcagtcgta

SEQ ID NO: 96279 - DNA, 30 bp, Artificial Sequence
  Synthetic oligonucleotide
attggaagcgtgacatgtatgaccttcgta

SEQ ID NO: 96280 - DNA, 30 bp, Artificial Sequence
  Synthetic oligonucleotide
caatgaattggggatgaagcacccttcgta

SEQ ID NO: 96281 - DNA, 30 bp, Artificial Sequence
  Synthetic oligonucleotide
tgagggtagacttcaagcttaaggttcgta

SEQ ID NO: 96282 - DNA, 30 bp, Artificial Sequence
  Synthetic oligonucleotide
tcataagcagaaatgatctttccaaaggta

SEQ ID NO: 96283 - DNA, 30 bp, Artificial Sequence
  Synthetic oligonucleotide
cgtctccggcagggtggaacgtcaaaggta

SEQ ID NO: 96284 - DNA, 30 bp, Artificial Sequence
  Synthetic oligonucleotide
gggcacatgggccccgtcacctctaaggta

SEQ ID NO: 96285 - DNA, 30 bp, Artificial Sequence
  Synthetic oligonucleotide
gtgtagcattcgaggcaaaggagacaggta

SEQ ID NO: 96286 - DNA, 30 bp, Artificial Sequence
  Synthetic oligonucleotide
tgtgatggtcgaaggctgcaagtacaggta

SEQ ID NO: 96287 - DNA, 30 bp, Artificial Sequence
  Synthetic oligonucleotide
gcgaccggcccctaaatttaaaaccaggta

SEQ ID NO: 96288 - DNA, 30 bp, Artificial Sequence
  Synthetic oligonucleotide
gatcgcaagtatcattcgaaggacgaggta

SEQ ID NO: 96289 - DNA, 30 bp, Artificial Sequence
  Synthetic oligonucleotide
gaccgcatctcagggtaagggcaataggta

SEQ ID NO: 96290 - DNA, 30 bp, Artificial Sequence
  Synthetic oligonucleotide
gcacaaaccgggaattgcgcatcaacggta

SEQ ID NO: 96291 - DNA, 30 bp, Artificial Sequence
  Synthetic oligonucleotide
cgactttgtatagaacaggcggggacggta

SEQ ID NO: 96292 - DNA, 30 bp, Artificial Sequence
  Synthetic oligonucleotide
attgacaataatgttgtcgatgatccggta

SEQ ID NO: 96293 - DNA, 30 bp, Artificial Sequence
  Synthetic oligonucleotide
tggtatgctagcaaggcaatacgcgcggta

SEQ ID NO: 96294 - DNA, 30 bp, Artificial Sequence
  Synthetic oligonucleotide
gggaccatacactatgtggcacgtgcggta

SEQ ID NO: 96295 - DNA, 30 bp, Artificial Sequence
  Synthetic oligonucleotide
atttacaacttggcaggtgactgtgcggta

SEQ ID NO: 96296 - DNA, 30 bp, Artificial Sequence
  Synthetic oligonucleotide
cttgtaacggtcctgagctaactatcggta

SEQ ID NO: 96297 - DNA, 30 bp, Artificial Sequence
  Synthetic oligonucleotide
ggtcagaacatgggtcgccaagtttcggta

SEQ ID NO: 96298 - DNA, 30 bp, Artificial Sequence
  Synthetic oligonucleotide
ttaggcacgttattatggtaatccagggta

SEQ ID NO: 96299 - DNA, 30 bp, Artificial Sequence
  Synthetic oligonucleotide
ccagatcctataactctaggcgaacgggta

SEQ ID NO: 96300 - DNA, 30 bp, Artificial Sequence
  Synthetic oligonucleotide
tgcccgcgcggaaggcgtaacccacgggta

SEQ ID NO: 96301 - DNA, 35 bp, Artificial Sequence
  Synthetic oligonucleotide
cgccggtctttgcgccaccaactgccgggcgggta

SEQ ID NO: 96302 - DNA, 30 bp, Artificial Sequence
  Synthetic oligonucleotide
tacacccgtggtccacatagggtaggggta

SEQ ID NO: 96303 - DNA, 30 bp, Artificial Sequence
  Synthetic oligonucleotide
tcatggtgccttacataatcgtcgggggta

SEQ ID NO: 96304 - DNA, 30 bp, Artificial Sequence
  Synthetic oligonucleotide
tccaacgtaggttagggtttattatgggta

SEQ ID NO: 96305 - DNA, 30 bp, Artificial Sequence
  Synthetic oligonucleotide
acccctcgtcacaggtagagagcaatggta

SEQ ID NO: 96306 - DNA, 30 bp, Artificial Sequence
  Synthetic oligonucleotide
atgaaggcgatctttgtatggaagatggta

SEQ ID NO: 96307 - DNA, 30 bp, Artificial Sequence
  Synthetic oligonucleotide
tgagtgggcaaacccataaaccccctggta

SEQ ID NO: 96308 - DNA, 30 bp, Artificial Sequence
  Synthetic oligonucleotide
atcacattcaatataggagacaatctggta

SEQ ID NO: 96309 - DNA, 30 bp, Artificial Sequence
  Synthetic oligonucleotide
cagacggtaacggcgatctacttagtggta

SEQ ID NO: 96310 - DNA, 30 bp, Artificial Sequence
  Synthetic oligonucleotide
aagggcatgcacgtactggaattggtggta

SEQ ID NO: 96311 - DNA, 30 bp, Artificial Sequence
  Synthetic oligonucleotide
ataggcgattcgatgtaactgattgtggta

SEQ ID NO: 96312 - DNA, 30 bp, Artificial Sequence
  Synthetic oligonucleotide
atagagtgaggccctcctgcatcaaatgta

SEQ ID NO: 96313 - DNA, 30 bp, Artificial Sequence
  Synthetic oligonucleotide
cgctcacacaactggggaagtttacatgta

SEQ ID NO: 96314 - DNA, 30 bp, Artificial Sequence
  Synthetic oligonucleotide
gctaggaccactgtgcactattacgatgta

SEQ ID NO: 96315 - DNA, 30 bp, Artificial Sequence
  Synthetic oligonucleotide
gacaggaggagggccatgtgtgcttatgta

SEQ ID NO: 96316 - DNA, 30 bp, Artificial Sequence
  Synthetic oligonucleotide
aaccaattcacgaacgagaaaaacactgta

SEQ ID NO: 96317 - DNA, 30 bp, Artificial Sequence
  Synthetic oligonucleotide
tgagagggcatttccacagagatgcctgta

SEQ ID NO: 96318 - DNA, 30 bp, Artificial Sequence
  Synthetic oligonucleotide
gacggggcgcggaatttcatgggagctgta

SEQ ID NO: 96319 - DNA, 30 bp, Artificial Sequence
  Synthetic oligonucleotide
gctagaagaaaaatcggttatctcgctgta

SEQ ID NO: 96320 - DNA, 30 bp, Artificial Sequence
  Synthetic oligonucleotide
gctcgagataggggctacttgcttgctgta

SEQ ID NO: 96321 - DNA, 30 bp, Artificial Sequence
  Synthetic oligonucleotide
aaacaccgaggtgtaggtcatgcctctgta

SEQ ID NO: 96322 - DNA, 30 bp, Artificial Sequence
  Synthetic oligonucleotide
ggactccagggtcttatttagaacagtgta

SEQ ID NO: 96323 - DNA, 30 bp, Artificial Sequence
  Synthetic oligonucleotide
ttgtgtgaaggcaaaatccgtccgagtgta

SEQ ID NO: 96324 - DNA, 30 bp, Artificial Sequence
  Synthetic oligonucleotide
tagccgagagtgcgctcacgcacacgtgta

SEQ ID NO: 96325 - DNA, 30 bp, Artificial Sequence
  Synthetic oligonucleotide
tcggaggcaaacgcaacgccatctcgtgta

SEQ ID NO: 96326 - DNA, 30 bp, Artificial Sequence
  Synthetic oligonucleotide
gggccggggtcgccccgaagccgaggtgta

SEQ ID NO: 96327 - DNA, 30 bp, Artificial Sequence
  Synthetic oligonucleotide
ccaatgacggaagcggccttctgaggtgta

SEQ ID NO: 96328 - DNA, 30 bp, Artificial Sequence
  Synthetic oligonucleotide
gtagtaagaattccagtaagctacggtgta

SEQ ID NO: 96329 - DNA, 30 bp, Artificial Sequence
  Synthetic oligonucleotide
caagtgtatgctatgaacgatttcggtgta

SEQ ID NO: 96330 - DNA, 30 bp, Artificial Sequence
  Synthetic oligonucleotide
gcgctgtacgatgatcacggagagggtgta

SEQ ID NO: 96331 - DNA, 30 bp, Artificial Sequence
  Synthetic oligonucleotide
gaagacaacgtaggtccaatcaactgtgta

SEQ ID NO: 96332 - DNA, 30 bp, Artificial Sequence
  Synthetic oligonucleotide
gcggagtccgacaagtaggtacgcattgta

SEQ ID NO: 96333 - DNA, 30 bp, Artificial Sequence
  Synthetic oligonucleotide
ctatatcgcgagatgacaatgtggattgta

SEQ ID NO: 96334 - DNA, 30 bp, Artificial Sequence
  Synthetic oligonucleotide
aggaaggctaaaatcgttgctttgcttgta

SEQ ID NO: 96335 - DNA, 30 bp, Artificial Sequence
  Synthetic oligonucleotide
aggtcgataagaggaggttaatgtgttgta

SEQ ID NO: 96336 - DNA, 30 bp, Artificial Sequence
  Synthetic oligonucleotide
agagtcgtacgataattcgccgcctttgta

SEQ ID NO: 96337 - DNA, 30 bp, Artificial Sequence
  Synthetic oligonucleotide
tgtcaaagggtcgaattagtcctaaaatta

SEQ ID NO: 96338 - DNA, 30 bp, Artificial Sequence
  Synthetic oligonucleotide
ggtgggagtggattatttcggaaccaatta

SEQ ID NO: 96339 - DNA, 30 bp, Artificial Sequence
  Synthetic oligonucleotide
atgggtgtcgcccaacgtgactcgcaatta

SEQ ID NO: 96340 - DNA, 30 bp, Artificial Sequence
  Synthetic oligonucleotide
agtgtggggagcctccgcccatgcgaatta

SEQ ID NO: 96341 - DNA, 30 bp, Artificial Sequence
  Synthetic oligonucleotide
gaacacgagataggctgaccattggaatta

SEQ ID NO: 96342 - DNA, 30 bp, Artificial Sequence
  Synthetic oligonucleotide
cgaccaattgtggtattctatgctgaatta

SEQ ID NO: 96343 - DNA, 30 bp, Artificial Sequence
  Synthetic oligonucleotide
cgttaggaggtcgcacgaggtctgtaatta

SEQ ID NO: 96344 - DNA, 30 bp, Artificial Sequence
  Synthetic oligonucleotide
catgaggcattcgacatcaggtccacatta

SEQ ID NO: 96345 - DNA, 30 bp, Artificial Sequence
  Synthetic oligonucleotide
atgctataaattgggagtgtcgggccatta

SEQ ID NO: 96346 - DNA, 30 bp, Artificial Sequence
  Synthetic oligonucleotide
tctaacacatggcaatactcacctccatta

SEQ ID NO: 96347 - DNA, 30 bp, Artificial Sequence
  Synthetic oligonucleotide
accgttctaggacggggagttacatcatta

SEQ ID NO: 96348 - DNA, 30 bp, Artificial Sequence
  Synthetic oligonucleotide
cccaggaagaacaagaacgtgcactcatta

SEQ ID NO: 96349 - DNA, 30 bp, Artificial Sequence
  Synthetic oligonucleotide
tgggcatctggagatgggcgttgaagatta

SEQ ID NO: 96350 - DNA, 30 bp, Artificial Sequence
  Synthetic oligonucleotide
cttaaacgacagggggcatttataagatta

SEQ ID NO: 96351 - DNA, 30 bp, Artificial Sequence
  Synthetic oligonucleotide
tagggggacccacgcacagtgcacagatta

SEQ ID NO: 96352 - DNA, 30 bp, Artificial Sequence
  Synthetic oligonucleotide
gaggtcttggagtatgaggggggtagatta

SEQ ID NO: 96353 - DNA, 30 bp, Artificial Sequence
  Synthetic oligonucleotide
catcggagaagtgccaacaatccgcgatta

SEQ ID NO: 96354 - DNA, 30 bp, Artificial Sequence
  Synthetic oligonucleotide
tgggttatggaggttaaataaattcgatta

SEQ ID NO: 96355 - DNA, 30 bp, Artificial Sequence
  Synthetic oligonucleotide
taactacccgtgaaggaagtaaccggatta

SEQ ID NO: 96356 - DNA, 30 bp, Artificial Sequence
  Synthetic oligonucleotide
cgccaagatggaagggagattccgggatta

SEQ ID NO: 96357 - DNA, 30 bp, Artificial Sequence
  Synthetic oligonucleotide
agtagaatacctacattgtagcgactatta

SEQ ID NO: 96358 - DNA, 30 bp, Artificial Sequence
  Synthetic oligonucleotide
ttcgtaggtgagcaaacgggtccagtatta

SEQ ID NO: 96359 - DNA, 30 bp, Artificial Sequence
  Synthetic oligonucleotide
cagggctagtggcgatatagttctgtatta

SEQ ID NO: 96360 - DNA, 30 bp, Artificial Sequence
  Synthetic oligonucleotide
caaaaggtgaaagcatagcatgagaactta

SEQ ID NO: 96361 - DNA, 30 bp, Artificial Sequence
  Synthetic oligonucleotide
acgaacgagcacttacgatggcgtaactta

SEQ ID NO: 96362 - DNA, 30 bp, Artificial Sequence
  Synthetic oligonucleotide
gacgggtataccgctttgaatcaccactta

SEQ ID NO: 96363 - DNA, 30 bp, Artificial Sequence
  Synthetic oligonucleotide
tcgtgaatgtggacttagcaatggcactta

SEQ ID NO: 96364 - DNA, 30 bp, Artificial Sequence
  Synthetic oligonucleotide
gcataaatacaatctcgaacattagactta

SEQ ID NO: 96365 - DNA, 30 bp, Artificial Sequence
  Synthetic oligonucleotide
ggggtaaggaaaccacgtgaagtggactta

SEQ ID NO: 96366 - DNA, 30 bp, Artificial Sequence
  Synthetic oligonucleotide
atgagcggatccggcatagaaagcacctta

SEQ ID NO: 96367 - DNA, 30 bp, Artificial Sequence
  Synthetic oligonucleotide
atggtgtatagcgatggactcgtatcctta

SEQ ID NO: 96368 - DNA, 30 bp, Artificial Sequence
  Synthetic oligonucleotide
cgagctgagcatggggtggtagttcgctta

SEQ ID NO: 96369 - DNA, 30 bp, Artificial Sequence
  Synthetic oligonucleotide
acaaggctttcgaggccaaaaagaatctta

SEQ ID NO: 96370 - DNA, 30 bp, Artificial Sequence
  Synthetic oligonucleotide
tcacaacatgatattgcgtttactaagtta

SEQ ID NO: 96371 - DNA, 30 bp, Artificial Sequence
  Synthetic oligonucleotide
acgtaccaccgcaaaatcctgaagcagtta

SEQ ID NO: 96372 - DNA, 30 bp, Artificial Sequence
  Synthetic oligonucleotide
gggctacgagacaagtacgtcgttcagtta

SEQ ID NO: 96373 - DNA, 30 bp, Artificial Sequence
  Synthetic oligonucleotide
aagagccggggtcatgcggagaaggagtta

SEQ ID NO: 96374 - DNA, 30 bp, Artificial Sequence
  Synthetic oligonucleotide
tggtcgtctgtccaaatattaagtgagtta

SEQ ID NO: 96375 - DNA, 30 bp, Artificial Sequence
  Synthetic oligonucleotide
ctgggtaacagcgcagtatgcgactagtta

SEQ ID NO: 96376 - DNA, 30 bp, Artificial Sequence
  Synthetic oligonucleotide
atcaagtgcggaattagtttcgtttagtta

SEQ ID NO: 96377 - DNA, 30 bp, Artificial Sequence
  Synthetic oligonucleotide
ggtcgtacagcgtagtttatcagaacgtta

SEQ ID NO: 96378 - DNA, 30 bp, Artificial Sequence
  Synthetic oligonucleotide
aaacggagttcgtcgcatatacgaacgtta

SEQ ID NO: 96379 - DNA, 30 bp, Artificial Sequence
  Synthetic oligonucleotide
ataaaagatgcgagagatggagctacgtta

SEQ ID NO: 96380 - DNA, 30 bp, Artificial Sequence
  Synthetic oligonucleotide
ggcgctagacaggcggcgcgtactccgtta

SEQ ID NO: 96381 - DNA, 30 bp, Artificial Sequence
  Synthetic oligonucleotide
tagacgtgggccgcatcaaaaatagcgtta

SEQ ID NO: 96382 - DNA, 30 bp, Artificial Sequence
  Synthetic oligonucleotide
cgggtcacactcctataagtggctgcgtta

SEQ ID NO: 96383 - DNA, 30 bp, Artificial Sequence
  Synthetic oligonucleotide
aggggtttctaacgaccagcaggctcgtta

SEQ ID NO: 96384 - DNA, 30 bp, Artificial Sequence
  Synthetic oligonucleotide
gggacccctgatactagtggatgctcgtta

SEQ ID NO: 96385 - DNA, 30 bp, Artificial Sequence
  Synthetic oligonucleotide
caggcacttctctctggacatgggtcgtta

SEQ ID NO: 96386 - DNA, 30 bp, Artificial Sequence
  Synthetic oligonucleotide
gtggccaatagcacaaagctttattcgtta

SEQ ID NO: 96387 - DNA, 30 bp, Artificial Sequence
  Synthetic oligonucleotide
gagcctctggtccgtaactaatcgcggtta

SEQ ID NO: 96388 - DNA, 30 bp, Artificial Sequence
  Synthetic oligonucleotide
actgtaacggcacaaagtacagcggggtta

SEQ ID NO: 96389 - DNA, 30 bp, Artificial Sequence
  Synthetic oligonucleotide
cgcaggagcaagccgtaaactcgtgggtta

SEQ ID NO: 96390 - DNA, 30 bp, Artificial Sequence
  Synthetic oligonucleotide
cgtcctatgagtgggcgcaggcggtggtta

SEQ ID NO: 96391 - DNA, 30 bp, Artificial Sequence
  Synthetic oligonucleotide
cgtgaacaacgcaacgaaagatccatgtta

SEQ ID NO: 96392 - DNA, 30 bp, Artificial Sequence
  Synthetic oligonucleotide
ttagggacaaagtaggatcgggtcatgtta

SEQ ID NO: 96393 - DNA, 30 bp, Artificial Sequence
  Synthetic oligonucleotide
atcgaagcccaagccttagttccgatgtta

SEQ ID NO: 96394 - DNA, 30 bp, Artificial Sequence
  Synthetic oligonucleotide
acaggcaaggcacgccagtgactgatgtta

SEQ ID NO: 96395 - DNA, 30 bp, Artificial Sequence
  Synthetic oligonucleotide
gcgggagggtacaagggcgtggaactgtta

SEQ ID NO: 96396 - DNA, 30 bp, Artificial Sequence
  Synthetic oligonucleotide
aactggcgcgtaatcgaaataagtctgtta

SEQ ID NO: 96397 - DNA, 30 bp, Artificial Sequence
  Synthetic oligonucleotide
cgaacgaccctttaacagagaccagtgtta

SEQ ID NO: 96398 - DNA, 30 bp, Artificial Sequence
  Synthetic oligonucleotide
aagccaacaggttgcggtggtgacgtgtta

SEQ ID NO: 96399 - DNA, 30 bp, Artificial Sequence
  Synthetic oligonucleotide
atgaccgaggagcaattccggaccttgtta

SEQ ID NO: 96400 - DNA, 30 bp, Artificial Sequence
  Synthetic oligonucleotide
ttaaggaagcgaagagtagaagtcttgtta

SEQ ID NO: 96401 - DNA, 30 bp, Artificial Sequence
  Synthetic oligonucleotide
cggctcagtcaggaagttacatggttgtta

SEQ ID NO: 96402 - DNA, 30 bp, Artificial Sequence
  Synthetic oligonucleotide
tagctgacatgaagtcaccagagaaattta

SEQ ID NO: 96403 - DNA, 30 bp, Artificial Sequence
  Synthetic oligonucleotide
ccacaacgataagtgcggtagacgaattta

SEQ ID NO: 96404 - DNA, 30 bp, Artificial Sequence
  Synthetic oligonucleotide
cacggcgtcacatggacaatagttgattta

SEQ ID NO: 96405 - DNA, 30 bp, Artificial Sequence
  Synthetic oligonucleotide
ctgaggacgcatgcggatacaaacacttta

SEQ ID NO: 96406 - DNA, 30 bp, Artificial Sequence
  Synthetic oligonucleotide
cgtgcgaagtataagaagaaggcgccttta

SEQ ID NO: 96407 - DNA, 30 bp, Artificial Sequence
  Synthetic oligonucleotide
aagcggcgaccgggagaggaagaagcttta

SEQ ID NO: 96408 - DNA, 30 bp, Artificial Sequence
  Synthetic oligonucleotide
atgttgtaaaaggctagcggtccaagttta

SEQ ID NO: 96409 - DNA, 30 bp, Artificial Sequence
  Synthetic oligonucleotide
ttccgggcccgggaagaagaatcgagttta

SEQ ID NO: 96410 - DNA, 30 bp, Artificial Sequence
  Synthetic oligonucleotide
tgcatcgagcaccgaagcagtatacgttta

SEQ ID NO: 96411 - DNA, 30 bp, Artificial Sequence
  Synthetic oligonucleotide
cctggcatgggtatccacgactatcgttta

SEQ ID NO: 96412 - DNA, 30 bp, Artificial Sequence
  Synthetic oligonucleotide
acacgtcacgtcgctcacgagttaggttta

SEQ ID NO: 96413 - DNA, 30 bp, Artificial Sequence
  Synthetic oligonucleotide
gacaaaagagtcgattctagcatgggttta

SEQ ID NO: 96414 - DNA, 30 bp, Artificial Sequence
  Synthetic oligonucleotide
acggccacttcgatgataccacctggttta

SEQ ID NO: 96415 - DNA, 30 bp, Artificial Sequence
  Synthetic oligonucleotide
ccttgcgacgagcatccgtacgaaatttta

SEQ ID NO: 96416 - DNA, 30 bp, Artificial Sequence
  Synthetic oligonucleotide
cggacaccaagaaatgcgttcgtgatttta

SEQ ID NO: 96417 - DNA, 30 bp, Artificial Sequence
  Synthetic oligonucleotide
gcaggtaaagctggaagagagacgctttta

SEQ ID NO: 96418 - DNA, 30 bp, Artificial Sequence
  Synthetic oligonucleotide
ttccgtgggtacgcatgagcgcgagtttta

SEQ ID NO: 96419 - DNA, 30 bp, Artificial Sequence
  Synthetic oligonucleotide
tcatcacacgggaccactaaactagtttta

SEQ ID NO: 96420 - DNA, 30 bp, Artificial Sequence
  Synthetic oligonucleotide
cgagcaaggcacagatggtgtaaggtttta

SEQ ID NO: 96421 - DNA, 30 bp, Artificial Sequence
  Synthetic oligonucleotide
gtcaagtagctactattaataaggcaaaac

SEQ ID NO: 96422 - DNA, 30 bp, Artificial Sequence
  Synthetic oligonucleotide
cacgcattatatttgtaagctcctcaaaac

SEQ ID NO: 96423 - DNA, 30 bp, Artificial Sequence
  Synthetic oligonucleotide
tctggggcgcgacgtcctggagaagaaaac

SEQ ID NO: 96424 - DNA, 30 bp, Artificial Sequence
  Synthetic oligonucleotide
ccgaccaattcattatctttagcagaaaac

SEQ ID NO: 96425 - DNA, 30 bp, Artificial Sequence
  Synthetic oligonucleotide
ttacgtctcgcgagtcttcctagagaaaac

SEQ ID NO: 96426 - DNA, 30 bp, Artificial Sequence
  Synthetic oligonucleotide
gcggcgttacatggttcttgcttcgaaaac

SEQ ID NO: 96427 - DNA, 30 bp, Artificial Sequence
  Synthetic oligonucleotide
agcaacagagtatactgcgcgttataaaac

SEQ ID NO: 96428 - DNA, 30 bp, Artificial Sequence
  Synthetic oligonucleotide
cggctatcacagagttaggatgagtaaaac

SEQ ID NO: 96429 - DNA, 30 bp, Artificial Sequence
  Synthetic oligonucleotide
gtcgtgacacagtttgtagaatcgtaaaac

SEQ ID NO: 96430 - DNA, 30 bp, Artificial Sequence
  Synthetic oligonucleotide
agcggcggataagtcgactcagattaaaac

SEQ ID NO: 96431 - DNA, 30 bp, Artificial Sequence
  Synthetic oligonucleotide
cattgctttagacatatactccgaacaaac

SEQ ID NO: 96432 - DNA, 30 bp, Artificial Sequence
  Synthetic oligonucleotide
ctgtactcaagtgtctatcagcgcacaaac

SEQ ID NO: 96433 - DNA, 30 bp, Artificial Sequence
  Synthetic oligonucleotide
gacctatagcacggacattcggtcccaaac

SEQ ID NO: 96434 - DNA, 31 bp, Artificial Sequence
  Synthetic oligonucleotide
cgatgggaaactgaactctaataagccaaac

SEQ ID NO: 96435 - DNA, 30 bp, Artificial Sequence
  Synthetic oligonucleotide
tagaagaaaaagagggacatctaagcaaac

SEQ ID NO: 96436 - DNA, 30 bp, Artificial Sequence
  Synthetic oligonucleotide
gagtaggtaacgccaaatcgaagagcaaac

SEQ ID NO: 96437 - DNA, 30 bp, Artificial Sequence
  Synthetic oligonucleotide
gctagtgggcaagtagagaaagcggcaaac

SEQ ID NO: 96438 - DNA, 30 bp, Artificial Sequence
  Synthetic oligonucleotide
agagggcattcaggactaggggttgcaaac

SEQ ID NO: 96439 - DNA, 30 bp, Artificial Sequence
  Synthetic oligonucleotide
gtctacgactgcccggccaaacagagaaac

SEQ ID NO: 96440 - DNA, 30 bp, Artificial Sequence
  Synthetic oligonucleotide
gggaacttatactcgctcgatcctagaaac

SEQ ID NO: 96441 - DNA, 30 bp, Artificial Sequence
  Synthetic oligonucleotide
tcaggaaagatccgacgttctgaccgaaac

SEQ ID NO: 96442 - DNA, 30 bp, Artificial Sequence
  Synthetic oligonucleotide
gagcaaagttattgatctagtacccgaaac

SEQ ID NO: 96443 - DNA, 30 bp, Artificial Sequence
  Synthetic oligonucleotide
ccaaccgtaggggtacaaaacggccgaaac

SEQ ID NO: 96444 - DNA, 30 bp, Artificial Sequence
  Synthetic oligonucleotide
gcagtctactgagacccagggggaggaaac

SEQ ID NO: 96445 - DNA, 30 bp, Artificial Sequence
  Synthetic oligonucleotide
gtaagtgtaccatagtctgtctctggaaac

SEQ ID NO: 96446 - DNA, 30 bp, Artificial Sequence
  Synthetic oligonucleotide
acacgatacggaaagattaggcaatgaaac

SEQ ID NO: 96447 - DNA, 30 bp, Artificial Sequence
  Synthetic oligonucleotide
cctagaagacctcacgcttacacctgaaac

SEQ ID NO: 96448 - DNA, 30 bp, Artificial Sequence
  Synthetic oligonucleotide
aactaactaaagctgctagccggttgaaac

SEQ ID NO: 96449 - DNA, 30 bp, Artificial Sequence
  Synthetic oligonucleotide
cggtaataggcgacaaggatacgcataaac

SEQ ID NO: 96450 - DNA, 30 bp, Artificial Sequence
  Synthetic oligonucleotide
cctaggaaccacgaaactagggatataaac

SEQ ID NO: 96451 - DNA, 28 bp, Artificial Sequence
  Synthetic oligonucleotide
atgtcgataaaacaggatctgagtaaac

SEQ ID NO: 96452 - DNA, 30 bp, Artificial Sequence
  Synthetic oligonucleotide
tgcggagtggaacagccgggcacattaaac

SEQ ID NO: 96453 - DNA, 30 bp, Artificial Sequence
  Synthetic oligonucleotide
accacgacaatcgaggtggctaacttaaac

SEQ ID NO: 96454 - DNA, 30 bp, Artificial Sequence
  Synthetic oligonucleotide
agcataacggtctggacatacgaacacaac

SEQ ID NO: 96455 - DNA, 30 bp, Artificial Sequence
  Synthetic oligonucleotide
aagggatgataggcaataaaagggcacaac

SEQ ID NO: 96456 - DNA, 30 bp, Artificial Sequence
  Synthetic oligonucleotide
tggtaagtaaaatgatataacttgcacaac

SEQ ID NO: 96457 - DNA, 30 bp, Artificial Sequence
  Synthetic oligonucleotide
ggtaccttgaacggtgacgctcttgacaac

SEQ ID NO: 96458 - DNA, 30 bp, Artificial Sequence
  Synthetic oligonucleotide
gataagggtacttccacatcagtatacaac

SEQ ID NO: 96459 - DNA, 30 bp, Artificial Sequence
  Synthetic oligonucleotide
cgggtaggatgcggagatcggcagtacaac

SEQ ID NO: 96460 - DNA, 30 bp, Artificial Sequence
  Synthetic oligonucleotide
gcatgaaggggacgtctacgtacgtacaac

SEQ ID NO: 96461 - DNA, 30 bp, Artificial Sequence
  Synthetic oligonucleotide
tggcagtgacgtgaggtacggatcaccaac

SEQ ID NO: 96462 - DNA, 30 bp, Artificial Sequence
  Synthetic oligonucleotide
tgtggtagggcttggagtgggctagccaac

SEQ ID NO: 96463 - DNA, 30 bp, Artificial Sequence
  Synthetic oligonucleotide
acggacatgaactgtgttgacagttccaac

SEQ ID NO: 96464 - DNA, 30 bp, Artificial Sequence
  Synthetic oligonucleotide
acacagcaggtgaaggacagatatcgcaac

SEQ ID NO: 96465 - DNA, 30 bp, Artificial Sequence
  Synthetic oligonucleotide
ctcggagattaagccggaaacgcaggcaac

SEQ ID NO: 96466 - DNA, 30 bp, Artificial Sequence
  Synthetic oligonucleotide
agaacagggtttccagtattaattggcaac

SEQ ID NO: 96467 - DNA, 30 bp, Artificial Sequence
  Synthetic oligonucleotide
ccaatgtttccatgcaaaaaataatgcaac

SEQ ID NO: 96468 - DNA, 30 bp, Artificial Sequence
  Synthetic oligonucleotide
tgcagcgcaggacggtctcaataatgcaac

SEQ ID NO: 96469 - DNA, 30 bp, Artificial Sequence
  Synthetic oligonucleotide
gtgctgagatttcacagtgagtcatgcaac

SEQ ID NO: 96470 - DNA, 30 bp, Artificial Sequence
  Synthetic oligonucleotide
ttgccatggaaaaattgtgatggatgcaac

SEQ ID NO: 96471 - DNA, 30 bp, Artificial Sequence
  Synthetic oligonucleotide
aagtggagtgtcgccagttagccaatcaac

SEQ ID NO: 96472 - DNA, 30 bp, Artificial Sequence
  Synthetic oligonucleotide
aagaactgtgtgagggctggcgacatcaac

SEQ ID NO: 96473 - DNA, 30 bp, Artificial Sequence
  Synthetic oligonucleotide
acggaccctagctgaaacaaaattctcaac

SEQ ID NO: 96474 - DNA, 30 bp, Artificial Sequence
  Synthetic oligonucleotide
ccctgctgggaggggacgtgtacattcaac

SEQ ID NO: 96475 - DNA, 30 bp, Artificial Sequence
  Synthetic oligonucleotide
gtgtgtggcgagggcaaacaatgaaagaac

SEQ ID NO: 96476 - DNA, 30 bp, Artificial Sequence
  Synthetic oligonucleotide
ccgtaattcaacagtaaagcctacaagaac

SEQ ID NO: 96477 - DNA, 30 bp, Artificial Sequence
  Synthetic oligonucleotide
acgagacggtaattcaagtctagcaagaac

SEQ ID NO: 96478 - DNA, 30 bp, Artificial Sequence
  Synthetic oligonucleotide
gtccacacgttccgataaatgcgtaagaac

SEQ ID NO: 96479 - DNA, 30 bp, Artificial Sequence
  Synthetic oligonucleotide
ggttaatcatggatcgggcatcgccagaac

SEQ ID NO: 96480 - DNA, 30 bp, Artificial Sequence
  Synthetic oligonucleotide
tagtggagtaacgtccgagtaccgcagaac

SEQ ID NO: 96481 - DNA, 30 bp, Artificial Sequence
  Synthetic oligonucleotide
ttgagcaaatcgttcccctaaatcgagaac

SEQ ID NO: 96482 - DNA, 30 bp, Artificial Sequence
  Synthetic oligonucleotide
cacgatctcaaggataatacgagtgagaac

SEQ ID NO: 96483 - DNA, 30 bp, Artificial Sequence
  Synthetic oligonucleotide
tgggaagagattcttggaatcagatagaac

SEQ ID NO: 96484 - DNA, 31 bp, Artificial Sequence
  Synthetic oligonucleotide
ttcgtgaaaaggtttggcccttgcctagaac

SEQ ID NO: 96485 - DNA, 30 bp, Artificial Sequence
  Synthetic oligonucleotide
gtcggtttagtagatgagatgggcccgaac

SEQ ID NO: 96486 - DNA, 31 bp, Artificial Sequence
  Synthetic oligonucleotide
cgtctcactctgacttttggcacggccgaac

SEQ ID NO: 96487 - DNA, 30 bp, Artificial Sequence
  Synthetic oligonucleotide
ccgtggaaatggcggggtaggttctcgaac

SEQ ID NO: 96488 - DNA, 30 bp, Artificial Sequence
  Synthetic oligonucleotide
gggatcatgggtcatgcaaactaaaggaac

SEQ ID NO: 96489 - DNA, 30 bp, Artificial Sequence
  Synthetic oligonucleotide
gtggacaaacccgggtttactgacaggaac

SEQ ID NO: 96490 - DNA, 30 bp, Artificial Sequence
  Synthetic oligonucleotide
cgtggcaagcctctaagtttaaccaggaac

SEQ ID NO: 96491 - DNA, 30 bp, Artificial Sequence
  Synthetic oligonucleotide
ggagtctgccgacgctgatgttttaggaac

SEQ ID NO: 96492 - DNA, 30 bp, Artificial Sequence
  Synthetic oligonucleotide
tcgaccctacgcgtaagatacaaggggaac

SEQ ID NO: 96493 - DNA, 30 bp, Artificial Sequence
  Synthetic oligonucleotide
aagcgggacggcagtggcataactgggaac

SEQ ID NO: 96494 - DNA, 30 bp, Artificial Sequence
  Synthetic oligonucleotide
ccaaaagcgaagtagggtgtatggtggaac

SEQ ID NO: 96495 - DNA, 30 bp, Artificial Sequence
  Synthetic oligonucleotide
gggacagtcggagccccagacgcttggaac

SEQ ID NO: 96496 - DNA, 30 bp, Artificial Sequence
  Synthetic oligonucleotide
gggagtgcatgttgcactggaacaatgaac

SEQ ID NO: 96497 - DNA, 30 bp, Artificial Sequence
  Synthetic oligonucleotide
gagcactaaagcgagcgtcacagaatgaac

SEQ ID NO: 96498 - DNA, 30 bp, Artificial Sequence
  Synthetic oligonucleotide
gggggagagcaacatcagggagttatgaac

SEQ ID NO: 96499 - DNA, 30 bp, Artificial Sequence
  Synthetic oligonucleotide
agctagaaatctaaaacggaaatagtgaac

SEQ ID NO: 96500 - DNA, 30 bp, Artificial Sequence
  Synthetic oligonucleotide
ttaaggatagatcagtggttgtgtgtgaac

SEQ ID NO: 96501 - DNA, 30 bp, Artificial Sequence
  Synthetic oligonucleotide
tcgatccataaggggtaaacatggttgaac

SEQ ID NO: 96502 - DNA, 30 bp, Artificial Sequence
  Synthetic oligonucleotide
gaggaccacgtacgctcgaagccaaataac

SEQ ID NO: 96503 - DNA, 30 bp, Artificial Sequence
  Synthetic oligonucleotide
atcaagccgtcgtgggcaatcctacataac

SEQ ID NO: 96504 - DNA, 30 bp, Artificial Sequence
  Synthetic oligonucleotide
gcagaccagggcgaattgctcaacgataac

SEQ ID NO: 96505 - DNA, 30 bp, Artificial Sequence
  Synthetic oligonucleotide
acgaggtccgtgccgtattaatacgataac

SEQ ID NO: 96506 - DNA, 30 bp, Artificial Sequence
  Synthetic oligonucleotide
ggtcggagatcaaaaagacatcccgataac

SEQ ID NO: 96507 - DNA, 30 bp, Artificial Sequence
  Synthetic oligonucleotide
acttgtcgagtaaaggtttgtgcggataac

SEQ ID NO: 96508 - DNA, 30 bp, Artificial Sequence
  Synthetic oligonucleotide
ggtagaattggctcaggtttgtcggataac

SEQ ID NO: 96509 - DNA, 30 bp, Artificial Sequence
  Synthetic oligonucleotide
tacgtgcagagcattcaaccggtggataac

SEQ ID NO: 96510 - DNA, 30 bp, Artificial Sequence
  Synthetic oligonucleotide
agaactcatcgtacttacaatgtggataac

SEQ ID NO: 96511 - DNA, 30 bp, Artificial Sequence
  Synthetic oligonucleotide
agttaatagtgactgagcatctatgataac

SEQ ID NO: 96512 - DNA, 30 bp, Artificial Sequence
  Synthetic oligonucleotide
ggcgtttgtagaggaacgattgcatataac

SEQ ID NO: 96513 - DNA, 30 bp, Artificial Sequence
  Synthetic oligonucleotide
gcaaggtcatctttggaacacacttataac

SEQ ID NO: 96514 - DNA, 30 bp, Artificial Sequence
  Synthetic oligonucleotide
acacaaagcaatatgtgttgtctttataac

SEQ ID NO: 96515 - DNA, 30 bp, Artificial Sequence
  Synthetic oligonucleotide
agcgcaagtcttacagagttctaaactaac

SEQ ID NO: 96516 - DNA, 30 bp, Artificial Sequence
  Synthetic oligonucleotide
agtggtaactggatttacagcaagcctaac

SEQ ID NO: 96517 - DNA, 30 bp, Artificial Sequence
  Synthetic oligonucleotide
ggggcattagttctactcaagaggcctaac

SEQ ID NO: 96518 - DNA, 30 bp, Artificial Sequence
  Synthetic oligonucleotide
ccaataacaccaattactaggctagctaac

SEQ ID NO: 96519 - DNA, 30 bp, Artificial Sequence
  Synthetic oligonucleotide
gagggccaagtagatcccgaggaggctaac

SEQ ID NO: 96520 - DNA, 30 bp, Artificial Sequence
  Synthetic oligonucleotide
atgatacaaaattcggacgtttaggctaac

SEQ ID NO: 96521 - DNA, 30 bp, Artificial Sequence
  Synthetic oligonucleotide
ggaagatctcgcccaaagatgtcttctaac

SEQ ID NO: 96522 - DNA, 30 bp, Artificial Sequence
  Synthetic oligonucleotide
cgtgacgagtatgtcgctttattaagtaac

SEQ ID NO: 96523 - DNA, 30 bp, Artificial Sequence
  Synthetic oligonucleotide
tcacgggtggttacttgacgtcacagtaac

SEQ ID NO: 96524 - DNA, 30 bp, Artificial Sequence
  Synthetic oligonucleotide
gttggcaagaacgttcatggagccagtaac

SEQ ID NO: 96525 - DNA, 30 bp, Artificial Sequence
  Synthetic oligonucleotide
cttaggaatcttaaggacgaatgtagtaac

SEQ ID NO: 96526 - DNA, 30 bp, Artificial Sequence
  Synthetic oligonucleotide
tacgctgtacagtagcaggaccaccgtaac

SEQ ID NO: 96527 - DNA, 30 bp, Artificial Sequence
  Synthetic oligonucleotide
gtcgtacgtgtactcattctgcctcgtaac

SEQ ID NO: 96528 - DNA, 30 bp, Artificial Sequence
  Synthetic oligonucleotide
tgctcgaggacaagattggactcaggtaac

SEQ ID NO: 96529 - DNA, 30 bp, Artificial Sequence
  Synthetic oligonucleotide
taggcctgtatataacataatctaggtaac

SEQ ID NO: 96530 - DNA, 30 bp, Artificial Sequence
  Synthetic oligonucleotide
ggagcgggggctagatttttgaactgtaac

SEQ ID NO: 96531 - DNA, 30 bp, Artificial Sequence
  Synthetic oligonucleotide
cgggagccaggagttatggatgaaattaac

SEQ ID NO: 96532 - DNA, 30 bp, Artificial Sequence
  Synthetic oligonucleotide
tcaaaccgtgaattgtggagcttacttaac

SEQ ID NO: 96533 - DNA, 30 bp, Artificial Sequence
  Synthetic oligonucleotide
gtggactgggtatctacagctcaagttaac

SEQ ID NO: 96534 - DNA, 30 bp, Artificial Sequence
  Synthetic oligonucleotide
ctagacaccggtactagagagaacgttaac

SEQ ID NO: 96535 - DNA, 30 bp, Artificial Sequence
  Synthetic oligonucleotide
gcaggacagatattgggacgagacgttaac

SEQ ID NO: 96536 - DNA, 30 bp, Artificial Sequence
  Synthetic oligonucleotide
ggagtctaagggaccatcaattccgttaac

SEQ ID NO: 96537 - DNA, 30 bp, Artificial Sequence
  Synthetic oligonucleotide
tagccaaagaacgtaagtttaccggttaac

SEQ ID NO: 96538 - DNA, 30 bp, Artificial Sequence
  Synthetic oligonucleotide
tagccaggtcaatggtaggagcgatttaac

SEQ ID NO: 96539 - DNA, 30 bp, Artificial Sequence
  Synthetic oligonucleotide
ccacaaaacgaggcttcttcccactttaac

SEQ ID NO: 96540 - DNA, 30 bp, Artificial Sequence
  Synthetic oligonucleotide
aacgaatacagaagttgaacaggttttaac

SEQ ID NO: 96541 - DNA, 30 bp, Artificial Sequence
  Synthetic oligonucleotide
aggcatcgtatgtataaaccctccaaacac

SEQ ID NO: 96542 - DNA, 30 bp, Artificial Sequence
  Synthetic oligonucleotide
tcaagggacattccatctaggagacaacac

SEQ ID NO: 96543 - DNA, 30 bp, Artificial Sequence
  Synthetic oligonucleotide
aacaaggacgatatacgttccgatcaacac

SEQ ID NO: 96544 - DNA, 30 bp, Artificial Sequence
  Synthetic oligonucleotide
tcactaaggactaagagacgtgccacacac

SEQ ID NO: 96545 - DNA, 30 bp, Artificial Sequence
  Synthetic oligonucleotide
agaacgtatgttcgccgtggcgcgacacac

SEQ ID NO: 96546 - DNA, 30 bp, Artificial Sequence
  Synthetic oligonucleotide
gtcgtagcggaaacccccgataaaccacac

SEQ ID NO: 96547 - DNA, 30 bp, Artificial Sequence
  Synthetic oligonucleotide
ccgaaagtctggtctcacctcttaccacac

SEQ ID NO: 96548 - DNA, 30 bp, Artificial Sequence
  Synthetic oligonucleotide
ggtcgtcgtgaatgtggacgttgcccacac

SEQ ID NO: 96549 - DNA, 30 bp, Artificial Sequence
  Synthetic oligonucleotide
ataagacaacaggggcaaaccagtccacac

SEQ ID NO: 96550 - DNA, 30 bp, Artificial Sequence
  Synthetic oligonucleotide
gtggacaacgtggtacttggtcgggcacac

SEQ ID NO: 96551 - DNA, 30 bp, Artificial Sequence
  Synthetic oligonucleotide
tgcctaaaaacaaggaggcagtgtgcacac

SEQ ID NO: 96552 - DNA, 30 bp, Artificial Sequence
  Synthetic oligonucleotide
cgacaattaaggtctatctggcggagacac

SEQ ID NO: 96553 - DNA, 30 bp, Artificial Sequence
  Synthetic oligonucleotide
agaatcggataagccgggtatacacgacac

SEQ ID NO: 96554 - DNA, 30 bp, Artificial Sequence
  Synthetic oligonucleotide
tctctgggagatacgcccggttagggacac

SEQ ID NO: 96555 - DNA, 30 bp, Artificial Sequence
  Synthetic oligonucleotide
ctacgcaataaccagcgtaatggatgacac

SEQ ID NO: 96556 - DNA, 30 bp, Artificial Sequence
  Synthetic oligonucleotide
tcgaccacagcacaaaggtataagtgacac

SEQ ID NO: 96557 - DNA, 30 bp, Artificial Sequence
  Synthetic oligonucleotide
aggtcattgccgcaaccgagcgggtgacac

SEQ ID NO: 96558 - DNA, 30 bp, Artificial Sequence
  Synthetic oligonucleotide
acatgcgatgatcgagacgccggaatacac

SEQ ID NO: 96559 - DNA, 30 bp, Artificial Sequence
  Synthetic oligonucleotide
ccttcagcaggaccaaccataaagatacac

SEQ ID NO: 96560 - DNA, 30 bp, Artificial Sequence
  Synthetic oligonucleotide
tacccagcccaatcaccagagtcgatacac

SEQ ID NO: 96561 - DNA, 30 bp, Artificial Sequence
  Synthetic oligonucleotide
ccggggcaaggaactcgaaagatgatacac

SEQ ID NO: 96562 - DNA, 30 bp, Artificial Sequence
  Synthetic oligonucleotide
acaagggaaaatgaaaactttgcgctacac

SEQ ID NO: 96563 - DNA, 30 bp, Artificial Sequence
  Synthetic oligonucleotide
ttcaacgccacaacaaggtcccgtctacac

SEQ ID NO: 96564 - DNA, 30 bp, Artificial Sequence
  Synthetic oligonucleotide
ataaggtcgggcagtcctaattgcttacac

SEQ ID NO: 96565 - DNA, 30 bp, Artificial Sequence
  Synthetic oligonucleotide
agggagtatgcactttgggctacgttacac

SEQ ID NO: 96566 - DNA, 30 bp, Artificial Sequence
  Synthetic oligonucleotide
taaggtgggggccgttacatagctttacac

SEQ ID NO: 96567 - DNA, 30 bp, Artificial Sequence
  Synthetic oligonucleotide
cgacatcccggttagcttctagtgcaccac

SEQ ID NO: 96568 - DNA, 30 bp, Artificial Sequence
  Synthetic oligonucleotide
acatatgtctgaaaggatcgcacaacccac

SEQ ID NO: 96569 - DNA, 30 bp, Artificial Sequence
  Synthetic oligonucleotide
ctagcatgcttggatacaaaatgaacccac

SEQ ID NO: 96570 - DNA, 30 bp, Artificial Sequence
  Synthetic oligonucleotide
tgactgccacctagaattcgccaagcccac

SEQ ID NO: 96571 - DNA, 30 bp, Artificial Sequence
  Synthetic oligonucleotide
cattaaggtatatgtacgttcagaagccac

SEQ ID NO: 96572 - DNA, 30 bp, Artificial Sequence
  Synthetic oligonucleotide
cgtctcgaaaaatcccggacacgaagccac

SEQ ID NO: 96573 - DNA, 31 bp, Artificial Sequence
  Synthetic oligonucleotide
aactgttgcagagggaacctagggacgccac

SEQ ID NO: 96574 - DNA, 30 bp, Artificial Sequence
  Synthetic oligonucleotide
acagacaatccaagacaccagcaggtccac

SEQ ID NO: 96575 - DNA, 30 bp, Artificial Sequence
  Synthetic oligonucleotide
cggaacgcgcgataaaaacgtatggtccac

SEQ ID NO: 96576 - DNA, 30 bp, Artificial Sequence
  Synthetic oligonucleotide
aggctcgccctaaaagcgtatcctgtccac

SEQ ID NO: 96577 - DNA, 30 bp, Artificial Sequence
  Synthetic oligonucleotide
acgcggaccgtaccataaatatgaaagcac

SEQ ID NO: 96578 - DNA, 30 bp, Artificial Sequence
  Synthetic oligonucleotide
gcacgattcccgacatgtaggcacaagcac

SEQ ID NO: 96579 - DNA, 30 bp, Artificial Sequence
  Synthetic oligonucleotide
ggacgatcgaacggacctcgtgggcagcac

SEQ ID NO: 96580 - DNA, 30 bp, Artificial Sequence
  Synthetic oligonucleotide
agggtgagtattctatgtgcacatcagcac

SEQ ID NO: 96581 - DNA, 30 bp, Artificial Sequence
  Synthetic oligonucleotide
cactttgggcagtgttcaacatgcgagcac

SEQ ID NO: 96582 - DNA, 30 bp, Artificial Sequence
  Synthetic oligonucleotide
gcttcctgaggtcgggggcttgttgagcac

SEQ ID NO: 96583 - DNA, 30 bp, Artificial Sequence
  Synthetic oligonucleotide
actcctaagccaaagcctagagaaccgcac

SEQ ID NO: 96584 - DNA, 30 bp, Artificial Sequence
  Synthetic oligonucleotide
ggtcacacgtgcgattcaggcaacccgcac

SEQ ID NO: 96585 - DNA, 30 bp, Artificial Sequence
  Synthetic oligonucleotide
tccaacggtccgcccgtggtgcgagcgcac

SEQ ID NO: 96586 - DNA, 30 bp, Artificial Sequence
  Synthetic oligonucleotide
tgagcgcaagacagcacgtgacccgcgcac

SEQ ID NO: 96587 - DNA, 30 bp, Artificial Sequence
  Synthetic oligonucleotide
ataagcagaagtctggcaatttagtcgcac

SEQ ID NO: 96588 - DNA, 30 bp, Artificial Sequence
  Synthetic oligonucleotide
tccgtaaggccagatggctaggtgtcgcac

SEQ ID NO: 96589 - DNA, 30 bp, Artificial Sequence
  Synthetic oligonucleotide
ccgctaatgtgagtcgtgacgtgttcgcac

SEQ ID NO: 96590 - DNA, 30 bp, Artificial Sequence
  Synthetic oligonucleotide
gaacacttggataaatgccgaatgcggcac

SEQ ID NO: 96591 - DNA, 29 bp, Artificial Sequence
  Synthetic oligonucleotide
cgcaattaaatactgggtacgttcggcac

SEQ ID NO: 96592 - DNA, 30 bp, Artificial Sequence
  Synthetic oligonucleotide
gttagccgtggctttgggcaaatggggcac

SEQ ID NO: 96593 - DNA, 30 bp, Artificial Sequence
  Synthetic oligonucleotide
cgtcatgaggaggttatcgacggtgggcac

SEQ ID NO: 96594 - DNA, 30 bp, Artificial Sequence
  Synthetic oligonucleotide
aggaactgtgtgttagatagcagaatgcac

SEQ ID NO: 96595 - DNA, 30 bp, Artificial Sequence
  Synthetic oligonucleotide
agaaagactgaactggactcttcgctgcac

SEQ ID NO: 96596 - DNA, 30 bp, Artificial Sequence
  Synthetic oligonucleotide
cggcagcccgggatggcggaatgagtgcac

SEQ ID NO: 96597 - DNA, 30 bp, Artificial Sequence
  Synthetic oligonucleotide
gctccgggccctaagtaagaagtagtgcac

SEQ ID NO: 96598 - DNA, 30 bp, Artificial Sequence
  Synthetic oligonucleotide
gagcaatagtttagagaggctcaattgcac

SEQ ID NO: 96599 - DNA, 30 bp, Artificial Sequence
  Synthetic oligonucleotide
aagcgcttggctgaacaaattaggttgcac

SEQ ID NO: 96600 - DNA, 30 bp, Artificial Sequence
  Synthetic oligonucleotide
agggaagattgatggtaattgtagaatcac

SEQ ID NO: 96601 - DNA, 30 bp, Artificial Sequence
  Synthetic oligonucleotide
tcgggtgcaaagcaatattcgggcgatcac

SEQ ID NO: 96602 - DNA, 30 bp, Artificial Sequence
  Synthetic oligonucleotide
ccgggaagcccaacaatcgttgaatatcac

SEQ ID NO: 96603 - DNA, 30 bp, Artificial Sequence
  Synthetic oligonucleotide
gtatgggggcaaaagcatccactatatcac

SEQ ID NO: 96604 - DNA, 30 bp, Artificial Sequence
  Synthetic oligonucleotide
tcggctactcactgctattcgaggtatcac

SEQ ID NO: 96605 - DNA, 30 bp, Artificial Sequence
  Synthetic oligonucleotide
cgatatgagctccgaaattcaacaactcac

SEQ ID NO: 96606 - DNA, 30 bp, Artificial Sequence
  Synthetic oligonucleotide
aaagagaaggcgcagcgctctgggcctcac

SEQ ID NO: 96607 - DNA, 30 bp, Artificial Sequence
  Synthetic oligonucleotide
cagatagcaccgacccgtctcagtcctcac

SEQ ID NO: 96608 - DNA, 30 bp, Artificial Sequence
  Synthetic oligonucleotide
gatcgactaaacacgatcaaggaagctcac

SEQ ID NO: 96609 - DNA, 30 bp, Artificial Sequence
  Synthetic oligonucleotide
taattgtataaaaaagccgaacacgctcac

SEQ ID NO: 96610 - DNA, 30 bp, Artificial Sequence
  Synthetic oligonucleotide
attggatcaggcaccaacctagatgctcac

SEQ ID NO: 96611 - DNA, 30 bp, Artificial Sequence
  Synthetic oligonucleotide
tcccagaccatgctcagatgtgcccgtcac

SEQ ID NO: 96612 - DNA, 30 bp, Artificial Sequence
  Synthetic oligonucleotide
cgtgtcgaatcaacagcattactccgtcac

SEQ ID NO: 96613 - DNA, 30 bp, Artificial Sequence
  Synthetic oligonucleotide
tcacacttggtatgagaatgttggcgtcac

SEQ ID NO: 96614 - DNA, 30 bp, Artificial Sequence
  Synthetic oligonucleotide
ggggaccaagcggggtcaaagatcggtcac

SEQ ID NO: 96615 - DNA, 30 bp, Artificial Sequence
  Synthetic oligonucleotide
gttaaccatacaatcaaaaaaattggtcac

SEQ ID NO: 96616 - DNA, 30 bp, Artificial Sequence
  Synthetic oligonucleotide
atgacacttggagagtaaaggaggtgtcac

SEQ ID NO: 96617 - DNA, 30 bp, Artificial Sequence
  Synthetic oligonucleotide
catagccagtcctatccctcacagattcac

SEQ ID NO: 96618 - DNA, 30 bp, Artificial Sequence
  Synthetic oligonucleotide
tgcataggatcgtgcttgagcgagattcac

SEQ ID NO: 96619 - DNA, 30 bp, Artificial Sequence
  Synthetic oligonucleotide
gaaaggtagccatgtgtatgcgaagttcac

SEQ ID NO: 96620 - DNA, 30 bp, Artificial Sequence
  Synthetic oligonucleotide
gaagtccataataaaaacactgaggttcac

SEQ ID NO: 96621 - DNA, 30 bp, Artificial Sequence
  Synthetic oligonucleotide
ctaattgggtgcgaatacgatgactttcac

SEQ ID NO: 96622 - DNA, 30 bp, Artificial Sequence
  Synthetic oligonucleotide
aaggtcctacgatccgcggagggctttcac

SEQ ID NO: 96623 - DNA, 34 bp, Artificial Sequence
  Synthetic oligonucleotide
tatactagaccaccacgtgtccatcagaaaagac

SEQ ID NO: 96624 - DNA, 34 bp, Artificial Sequence
  Synthetic oligonucleotide
gataatagaccaccacgtttccatcagaaaagac

SEQ ID NO: 96625 - DNA, 30 bp, Artificial Sequence
  Synthetic oligonucleotide
taaaggtcggagcataccggcaacaaagac

SEQ ID NO: 96626 - DNA, 30 bp, Artificial Sequence
  Synthetic oligonucleotide
gcgttaataaggtcttagcgagtacaagac

SEQ ID NO: 96627 - DNA, 30 bp, Artificial Sequence
  Synthetic oligonucleotide
cagcgtcgctagacgcaaattgcccaagac

SEQ ID NO: 96628 - DNA, 30 bp, Artificial Sequence
  Synthetic oligonucleotide
aaggtctatgcggaagtttaaaacgaagac

SEQ ID NO: 96629 - DNA, 30 bp, Artificial Sequence
  Synthetic oligonucleotide
tccatgattccagtagttactcgcgaagac

SEQ ID NO: 96630 - DNA, 30 bp, Artificial Sequence
  Synthetic oligonucleotide
ccgtgaaacgtgtgattacctgtataagac

SEQ ID NO: 96631 - DNA, 30 bp, Artificial Sequence
  Synthetic oligonucleotide
cggcgaaaatgctaaaaaagtatctaagac

SEQ ID NO: 96632 - DNA, 30 bp, Artificial Sequence
  Synthetic oligonucleotide
tgtacatgcttaatgcatagccccacagac

SEQ ID NO: 96633 - DNA, 30 bp, Artificial Sequence
  Synthetic oligonucleotide
aaaacctcaaagtgcgtcccagccacagac

SEQ ID NO: 96634 - DNA, 30 bp, Artificial Sequence
  Synthetic oligonucleotide
cattaccgggctattattacacaaccagac

SEQ ID NO: 96635 - DNA, 30 bp, Artificial Sequence
  Synthetic oligonucleotide
accgggcagcgtatcgtcaacccaccagac

SEQ ID NO: 96636 - DNA, 30 bp, Artificial Sequence
  Synthetic oligonucleotide
actctcgggagtgcgctgcgcgtaccagac

SEQ ID NO: 96637 - DNA, 30 bp, Artificial Sequence
  Synthetic oligonucleotide
agcgctcctgaactacgtgcaaatccagac

SEQ ID NO: 96638 - DNA, 30 bp, Artificial Sequence
  Synthetic oligonucleotide
actgataatcggttccggtgtggagcagac

SEQ ID NO: 96639 - DNA, 30 bp, Artificial Sequence
  Synthetic oligonucleotide
ccaaagatacaacggtatacgaactcagac

SEQ ID NO: 96640 - DNA, 30 bp, Artificial Sequence
  Synthetic oligonucleotide
cagtgaagtagtgagctcggaaagtcagac

SEQ ID NO: 96641 - DNA, 30 bp, Artificial Sequence
  Synthetic oligonucleotide
gacattaatccgaatctcctgctgtcagac

SEQ ID NO: 96642 - DNA, 30 bp, Artificial Sequence
  Synthetic oligonucleotide
gattgaagaaagggcagtggatcttcagac

SEQ ID NO: 96643 - DNA, 30 bp, Artificial Sequence
  Synthetic oligonucleotide
tcatatgcatctgctaggtacagaagagac

SEQ ID NO: 96644 - DNA, 30 bp, Artificial Sequence
  Synthetic oligonucleotide
acatcacacaatgtgcagccatacagagac

SEQ ID NO: 96645 - DNA, 30 bp, Artificial Sequence
  Synthetic oligonucleotide
cccggcgcatacaccgaacccaagagagac

SEQ ID NO: 96646 - DNA, 30 bp, Artificial Sequence
  Synthetic oligonucleotide
tagtagaaccacgctctttactagagagac

SEQ ID NO: 96647 - DNA, 30 bp, Artificial Sequence
  Synthetic oligonucleotide
tatacaacggccaatgctaaagggagagac

SEQ ID NO: 96648 - DNA, 30 bp, Artificial Sequence
  Synthetic oligonucleotide
gggctggttccttacgcgagtgggagagac

SEQ ID NO: 96649 - DNA, 30 bp, Artificial Sequence
  Synthetic oligonucleotide
cgtgctctttcggaatagcgagtgagagac

SEQ ID NO: 96650 - DNA, 30 bp, Artificial Sequence
  Synthetic oligonucleotide
gcaaacgggtgacatggcacacgtagagac

SEQ ID NO: 96651 - DNA, 30 bp, Artificial Sequence
  Synthetic oligonucleotide
ctgcttgcgaactaacgatgacgtagagac

SEQ ID NO: 96652 - DNA, 30 bp, Artificial Sequence
  Synthetic oligonucleotide
ctggacctgaataacggagggccacgagac

SEQ ID NO: 96653 - DNA, 30 bp, Artificial Sequence
  Synthetic oligonucleotide
acagtgttggagcagagcagtaagcgagac

SEQ ID NO: 96654 - DNA, 30 bp, Artificial Sequence
  Synthetic oligonucleotide
ggatagaaataacagagtgaacggcgagac

SEQ ID NO: 96655 - DNA, 30 bp, Artificial Sequence
  Synthetic oligonucleotide
ttccagcaggcgtacttagaatggggagac

SEQ ID NO: 96656 - DNA, 30 bp, Artificial Sequence
  Synthetic oligonucleotide
atcacactcaccggtgagttgatgggagac

SEQ ID NO: 96657 - DNA, 30 bp, Artificial Sequence
  Synthetic oligonucleotide
aggcacccctacatgtatagaggatgagac

SEQ ID NO: 96658 - DNA, 30 bp, Artificial Sequence
  Synthetic oligonucleotide
cgttagacgagcgacgcgcctaagatagac

SEQ ID NO: 96659 - DNA, 30 bp, Artificial Sequence
  Synthetic oligonucleotide
cggtgcatatggacggcgcatccgatagac

SEQ ID NO: 96660 - DNA, 30 bp, Artificial Sequence
  Synthetic oligonucleotide
acctgttaatctggggtgtcgcggatagac

SEQ ID NO: 96661 - DNA, 30 bp, Artificial Sequence
  Synthetic oligonucleotide
gcggacgtatatttgggcggcccagtagac

SEQ ID NO: 96662 - DNA, 30 bp, Artificial Sequence
  Synthetic oligonucleotide
agtcggaaatggccaggagaatcagtagac

SEQ ID NO: 96663 - DNA, 30 bp, Artificial Sequence
  Synthetic oligonucleotide
gaggatgccattcccccaagacgattagac

SEQ ID NO: 96664 - DNA, 30 bp, Artificial Sequence
  Synthetic oligonucleotide
tcataggagattttgagaacgtacaacgac

SEQ ID NO: 96665 - DNA, 30 bp, Artificial Sequence
  Synthetic oligonucleotide
ccaccgtggggcgggtgttatgcgaacgac

SEQ ID NO: 96666 - DNA, 30 bp, Artificial Sequence
  Synthetic oligonucleotide
gctaccataacgaccagggacggagacgac

SEQ ID NO: 96667 - DNA, 30 bp, Artificial Sequence
  Synthetic oligonucleotide
ctatctgcttgggcggatccgcctgacgac

SEQ ID NO: 96668 - DNA, 30 bp, Artificial Sequence
  Synthetic oligonucleotide
acaccttgtgaagaggtccggtgatacgac

SEQ ID NO: 96669 - DNA, 30 bp, Artificial Sequence
  Synthetic oligonucleotide
ctcggtcaggaaagcggggacccctacgac

SEQ ID NO: 96670 - DNA, 30 bp, Artificial Sequence
  Synthetic oligonucleotide
tggagtaaatagaaggatcaaggcaccgac

SEQ ID NO: 96671 - DNA, 30 bp, Artificial Sequence
  Synthetic oligonucleotide
aagtaagtcagaaattccacgtgcaccgac

SEQ ID NO: 96672 - DNA, 30 bp, Artificial Sequence
  Synthetic oligonucleotide
atgcgtatccgtccgggagctaagaccgac

SEQ ID NO: 96673 - DNA, 30 bp, Artificial Sequence
  Synthetic oligonucleotide
aggaaccgcgctccgagggtgtcgaccgac

SEQ ID NO: 96674 - DNA, 30 bp, Artificial Sequence
  Synthetic oligonucleotide
gtgacctgtatatacaggcgagaagccgac

SEQ ID NO: 96675 - DNA, 30 bp, Artificial Sequence
  Synthetic oligonucleotide
cgtcaattgttgttgaaagataggtccgac

SEQ ID NO: 96676 - DNA, 30 bp, Artificial Sequence
  Synthetic oligonucleotide
ggctggaattagggtgttcgtccacgcgac

SEQ ID NO: 96677 - DNA, 30 bp, Artificial Sequence
  Synthetic oligonucleotide
ggaacgttaccgagtgtaccttaaggcgac

SEQ ID NO: 96678 - DNA, 30 bp, Artificial Sequence
  Synthetic oligonucleotide
aacaggtacagtttgtcacaatccggcgac

SEQ ID NO: 96679 - DNA, 30 bp, Artificial Sequence
  Synthetic oligonucleotide
cctagcatgacatttgtaggtatgggcgac

SEQ ID NO: 96680 - DNA, 30 bp, Artificial Sequence
  Synthetic oligonucleotide
atgcttactagggacggagataattgcgac

SEQ ID NO: 96681 - DNA, 30 bp, Artificial Sequence
  Synthetic oligonucleotide
tctcaatgtgctttggttgcgaagatcgac

SEQ ID NO: 96682 - DNA, 30 bp, Artificial Sequence
  Synthetic oligonucleotide
ctgatcacaagcgagcggtatatagtcgac

SEQ ID NO: 96683 - DNA, 30 bp, Artificial Sequence
  Synthetic oligonucleotide
aggcgcttaggggcgggaagtgccgtcgac

SEQ ID NO: 96684 - DNA, 30 bp, Artificial Sequence
  Synthetic oligonucleotide
tagcagtgaaacatcctgctagcaaaggac

SEQ ID NO: 96685 - DNA, 30 bp, Artificial Sequence
  Synthetic oligonucleotide
ccatacccgtggttaaaaaaagacaaggac

SEQ ID NO: 96686 - DNA, 30 bp, Artificial Sequence
  Synthetic oligonucleotide
tagggataagccagtctctcacggaaggac

SEQ ID NO: 96687 - DNA, 30 bp, Artificial Sequence
  Synthetic oligonucleotide
atgtctggtgcgacaaatgataaacaggac

SEQ ID NO: 96688 - DNA, 30 bp, Artificial Sequence
  Synthetic oligonucleotide
agtggccgccggataacccgacaacaggac

SEQ ID NO: 96689 - DNA, 30 bp, Artificial Sequence
  Synthetic oligonucleotide
gttctagctcatatccatgtgatccaggac

SEQ ID NO: 96690 - DNA, 30 bp, Artificial Sequence
  Synthetic oligonucleotide
agggcgggtccggaacttggcctggaggac

SEQ ID NO: 96691 - DNA, 30 bp, Artificial Sequence
  Synthetic oligonucleotide
agagcgttgtcacgtggacggaagtaggac

SEQ ID NO: 96692 - DNA, 30 bp, Artificial Sequence
  Synthetic oligonucleotide
tagcgaagggcatgcgccagcgtttaggac

SEQ ID NO: 96693 - DNA, 30 bp, Artificial Sequence
  Synthetic oligonucleotide
ctggaaacagagtaccagatcccaacggac

SEQ ID NO: 96694 - DNA, 30 bp, Artificial Sequence
  Synthetic oligonucleotide
tatcccggacccagactggggcgaacggac

SEQ ID NO: 96695 - DNA, 30 bp, Artificial Sequence
  Synthetic oligonucleotide
tgatagatgagtttactggctggcacggac

SEQ ID NO: 96696 - DNA, 30 bp, Artificial Sequence
  Synthetic oligonucleotide
tgtaccgactcgcacacaaactctacggac

SEQ ID NO: 96697 - DNA, 30 bp, Artificial Sequence
  Synthetic oligonucleotide
aagtagaaaggaggaagaaactctacggac

SEQ ID NO: 96698 - DNA, 30 bp, Artificial Sequence
  Synthetic oligonucleotide
gcggcgacaccaacgtccaccaaagcggac

SEQ ID NO: 96699 - DNA, 30 bp, Artificial Sequence
  Synthetic oligonucleotide
tatcgaaattagtgcaaacatacatcggac

SEQ ID NO: 96700 - DNA, 31 bp, Artificial Sequence
  Synthetic oligonucleotide
tgcaaggaggttagctccatgtaattcggac

SEQ ID NO: 96701 - DNA, 30 bp, Artificial Sequence
  Synthetic oligonucleotide
gctcgatgtgcatggcccatatgttcggac

SEQ ID NO: 96702 - DNA, 30 bp, Artificial Sequence
  Synthetic oligonucleotide
aggttaccttccgattaaatacaaagggac

SEQ ID NO: 96703 - DNA, 30 bp, Artificial Sequence
  Synthetic oligonucleotide
cggtaaagaagtaagtggcggtcaagggac

SEQ ID NO: 96704 - DNA, 30 bp, Artificial Sequence
  Synthetic oligonucleotide
actacacttatcgggcaattactaagggac

SEQ ID NO: 96705 - DNA, 30 bp, Artificial Sequence
  Synthetic oligonucleotide
caactcatgtgtatggggagaagtagggac

SEQ ID NO: 96706 - DNA, 30 bp, Artificial Sequence
  Synthetic oligonucleotide
ctggaccgataaacgtctaaatctcgggac

SEQ ID NO: 96707 - DNA, 30 bp, Artificial Sequence
  Synthetic oligonucleotide
tatcaggagcggtaggagctatttcgggac

SEQ ID NO: 96708 - DNA, 30 bp, Artificial Sequence
  Synthetic oligonucleotide
aagggaagcgaaagggaagttgcaatggac

SEQ ID NO: 96709 - DNA, 30 bp, Artificial Sequence
  Synthetic oligonucleotide
tcgtgactttgtaaccgaacgataatggac

SEQ ID NO: 96710 - DNA, 30 bp, Artificial Sequence
  Synthetic oligonucleotide
cgagaggtggacagtttagccattctggac

SEQ ID NO: 96711 - DNA, 30 bp, Artificial Sequence
  Synthetic oligonucleotide
catcgggccagcgcaaattggtttctggac

SEQ ID NO: 96712 - DNA, 30 bp, Artificial Sequence
  Synthetic oligonucleotide
gggtaatgaactaccaacgtgctagtggac

SEQ ID NO: 96713 - DNA, 30 bp, Artificial Sequence
  Synthetic oligonucleotide
tatcaaccaagattcacaattaatgtggac

SEQ ID NO: 96714 - DNA, 30 bp, Artificial Sequence
  Synthetic oligonucleotide
ggaagaatgccttaccccacggttgtggac

SEQ ID NO: 96715 - DNA, 30 bp, Artificial Sequence
  Synthetic oligonucleotide
atcatggtcaaaatacaggtgtgacatgac

SEQ ID NO: 96716 - DNA, 30 bp, Artificial Sequence
  Synthetic oligonucleotide
aacggcacttaacgtaagggtattcatgac

SEQ ID NO: 96717 - DNA, 30 bp, Artificial Sequence
  Synthetic oligonucleotide
ggtgatggataacagatatttgttcatgac

SEQ ID NO: 96718 - DNA, 30 bp, Artificial Sequence
  Synthetic oligonucleotide
aatggctcctgctcaagattcatcgatgac

SEQ ID NO: 96719 - DNA, 30 bp, Artificial Sequence
  Synthetic oligonucleotide
atgacatgggtcagtccgtgctcggatgac

SEQ ID NO: 96720 - DNA, 30 bp, Artificial Sequence
  Synthetic oligonucleotide
taagagcaaacaacgtttggtccatatgac

SEQ ID NO: 96721 - DNA, 30 bp, Artificial Sequence
  Synthetic oligonucleotide
gaaaaaacctgagtccacgattcgtatgac

SEQ ID NO: 96722 - DNA, 30 bp, Artificial Sequence
  Synthetic oligonucleotide
cgcgacactcggagcaagtgctagactgac

SEQ ID NO: 96723 - DNA, 30 bp, Artificial Sequence
  Synthetic oligonucleotide
gagaaaaggaaaagagcgacggctactgac

SEQ ID NO: 96724 - DNA, 30 bp, Artificial Sequence
  Synthetic oligonucleotide
caggatgaacgggatgattgatatcctgac

SEQ ID NO: 96725 - DNA, 30 bp, Artificial Sequence
  Synthetic oligonucleotide
acagttgatcgggaagtcctaagggctgac

SEQ ID NO: 96726 - DNA, 30 bp, Artificial Sequence
  Synthetic oligonucleotide
agacaagcgattagggcatgagatgctgac

SEQ ID NO: 96727 - DNA, 30 bp, Artificial Sequence
  Synthetic oligonucleotide
tgtgacccataacgttggcaggatagtgac

SEQ ID NO: 96728 - DNA, 30 bp, Artificial Sequence
  Synthetic oligonucleotide
tgcgccctgtcgtccgtagacaaacgtgac

SEQ ID NO: 96729 - DNA, 30 bp, Artificial Sequence
  Synthetic oligonucleotide
tcagtgaatgccgagaagccctcccgtgac

SEQ ID NO: 96730 - DNA, 30 bp, Artificial Sequence
  Synthetic oligonucleotide
agggttgaggttaccaggggtactcgtgac

SEQ ID NO: 96731 - DNA, 30 bp, Artificial Sequence
  Synthetic oligonucleotide
ccgtgtaccgggactacttggatcggtgac

SEQ ID NO: 96732 - DNA, 30 bp, Artificial Sequence
  Synthetic oligonucleotide
gactcggagcgtatacagataaactgtgac

SEQ ID NO: 96733 - DNA, 30 bp, Artificial Sequence
  Synthetic oligonucleotide
cggtaatgtgttgcatcgcatcgcattgac

SEQ ID NO: 96734 - DNA, 30 bp, Artificial Sequence
  Synthetic oligonucleotide
acgattggcatgaagatatgcctttttgac

SEQ ID NO: 96735 - DNA, 30 bp, Artificial Sequence
  Synthetic oligonucleotide
cgatgaaatacgccttatgaggtaaaatac

SEQ ID NO: 96736 - DNA, 30 bp, Artificial Sequence
  Synthetic oligonucleotide
caacactgcaatgagggtagggcgaaatac

SEQ ID NO: 96737 - DNA, 30 bp, Artificial Sequence
  Synthetic oligonucleotide
acacgtcacgcaacacgtcgacttaaatac

SEQ ID NO: 96738 - DNA, 30 bp, Artificial Sequence
  Synthetic oligonucleotide
atgaaatgtgacaaggcgcgttaacaatac

SEQ ID NO: 96739 - DNA, 30 bp, Artificial Sequence
  Synthetic oligonucleotide
agagtgaccatcagcacgaaaggtgaatac

SEQ ID NO: 96740 - DNA, 30 bp, Artificial Sequence
  Synthetic oligonucleotide
taccgtaagaaaacgaacaaaattgaatac

SEQ ID NO: 96741 - DNA, 30 bp, Artificial Sequence
  Synthetic oligonucleotide
aaagtaaccgctcacagatcagggacatac

SEQ ID NO: 96742 - DNA, 30 bp, Artificial Sequence
  Synthetic oligonucleotide
cctcgcactatgcgccacctgagaccatac

SEQ ID NO: 96743 - DNA, 30 bp, Artificial Sequence
  Synthetic oligonucleotide
cgggactgagtcgaatgattgtacccatac

SEQ ID NO: 96744 - DNA, 30 bp, Artificial Sequence
  Synthetic oligonucleotide
gactcaatcaagtgatatgggtcgtcatac

SEQ ID NO: 96745 - DNA, 30 bp, Artificial Sequence
  Synthetic oligonucleotide
gtctgtgctgttaaaagtggccaaggatac

SEQ ID NO: 96746 - DNA, 30 bp, Artificial Sequence
  Synthetic oligonucleotide
agtgtggtgtagatgggctagcaaggatac

SEQ ID NO: 96747 - DNA, 30 bp, Artificial Sequence
  Synthetic oligonucleotide
acgccccgggttaactcacggacaggatac

SEQ ID NO: 96748 - DNA, 30 bp, Artificial Sequence
  Synthetic oligonucleotide
gtgcacctaaacgctcgaggtccaggatac

SEQ ID NO: 96749 - DNA, 30 bp, Artificial Sequence
  Synthetic oligonucleotide
ggagtatgctgctgggcaataggtggatac

SEQ ID NO: 96750 - DNA, 30 bp, Artificial Sequence
  Synthetic oligonucleotide
accgttgttgtggaccgttaaagatgatac

SEQ ID NO: 96751 - DNA, 30 bp, Artificial Sequence
  Synthetic oligonucleotide
gccgcgagctagtgggatccggtcgtatac

SEQ ID NO: 96752 - DNA, 30 bp, Artificial Sequence
  Synthetic oligonucleotide
ttgcagctagcgaaaacggtggttgtatac

SEQ ID NO: 96753 - DNA, 30 bp, Artificial Sequence
  Synthetic oligonucleotide
tgaaagagcccttacctcggggatgactac

SEQ ID NO: 96754 - DNA, 30 bp, Artificial Sequence
  Synthetic oligonucleotide
tcctactagcaaggaggatacatcacctac

SEQ ID NO: 96755 - DNA, 30 bp, Artificial Sequence
  Synthetic oligonucleotide
attacagttgagtgcagtgcaacctcctac

SEQ ID NO: 96756 - DNA, 30 bp, Artificial Sequence
  Synthetic oligonucleotide
taactcacatgcgacaagacacccagctac

SEQ ID NO: 96757 - DNA, 30 bp, Artificial Sequence
  Synthetic oligonucleotide
catagaatgcgaacattacccgtcagctac

SEQ ID NO: 96758 - DNA, 30 bp, Artificial Sequence
  Synthetic oligonucleotide
gcttggtcaatgtatggtgaggaccgctac

SEQ ID NO: 96759 - DNA, 30 bp, Artificial Sequence
  Synthetic oligonucleotide
gctatgacggggacctaaaacgctcgctac

SEQ ID NO: 96760 - DNA, 30 bp, Artificial Sequence
  Synthetic oligonucleotide
tacattccctaccgatgtgacaattgctac

SEQ ID NO: 96761 - DNA, 30 bp, Artificial Sequence
  Synthetic oligonucleotide
taccgtcaaagctcatgaacgtccatctac

SEQ ID NO: 96762 - DNA, 30 bp, Artificial Sequence
  Synthetic oligonucleotide
cacgaccgacttccctatgcaaaattctac

SEQ ID NO: 96763 - DNA, 30 bp, Artificial Sequence
  Synthetic oligonucleotide
gcatatcaaacgaaaaggctttaaaagtac

SEQ ID NO: 96764 - DNA, 30 bp, Artificial Sequence
  Synthetic oligonucleotide
ttctggcaccccaagagaccgttaaagtac

SEQ ID NO: 96765 - DNA, 30 bp, Artificial Sequence
  Synthetic oligonucleotide
ggacccctccaggaaaattgggacaagtac

SEQ ID NO: 96766 - DNA, 30 bp, Artificial Sequence
  Synthetic oligonucleotide
tccgaatgaaataccgtcctgtgtaagtac

SEQ ID NO: 96767 - DNA, 30 bp, Artificial Sequence
  Synthetic oligonucleotide
aagaataagacaaatgatccaacccagtac

SEQ ID NO: 96768 - DNA, 30 bp, Artificial Sequence
  Synthetic oligonucleotide
tacggcggagcgaatcagaactatcagtac

SEQ ID NO: 96769 - DNA, 30 bp, Artificial Sequence
  Synthetic oligonucleotide
ttggagtctgacaaatcgagtagcgagtac

SEQ ID NO: 96770 - DNA, 30 bp, Artificial Sequence
  Synthetic oligonucleotide
taagggagtctggcagcggggtccacgtac

SEQ ID NO: 96771 - DNA, 30 bp, Artificial Sequence
  Synthetic oligonucleotide
taagagtatggacgtgggaagaggccgtac

SEQ ID NO: 96772 - DNA, 30 bp, Artificial Sequence
  Synthetic oligonucleotide
tgggatttctgcccttaagcaaacgcgtac

SEQ ID NO: 96773 - DNA, 30 bp, Artificial Sequence
  Synthetic oligonucleotide
aaagtcaaacattcggtgtgggaggcgtac

SEQ ID NO: 96774 - DNA, 30 bp, Artificial Sequence
  Synthetic oligonucleotide
acgtgactcgtgagtcacgcgctatcgtac

SEQ ID NO: 96775 - DNA, 30 bp, Artificial Sequence
  Synthetic oligonucleotide
cgggtacgaatagaataagactgcaggtac

SEQ ID NO: 96776 - DNA, 30 bp, Artificial Sequence
  Synthetic oligonucleotide
gcacggcgagcagtcagtctgtggaggtac

SEQ ID NO: 96777 - DNA, 30 bp, Artificial Sequence
  Synthetic oligonucleotide
tgaattggtggaaacctcgaacgcgggtac

SEQ ID NO: 96778 - DNA, 30 bp, Artificial Sequence
  Synthetic oligonucleotide
tcacgaacttcgtaattgggatgtgggtac

SEQ ID NO: 96779 - DNA, 30 bp, Artificial Sequence
  Synthetic oligonucleotide
ttagacggcgtaaggggctccaccatgtac

SEQ ID NO: 96780 - DNA, 30 bp, Artificial Sequence
  Synthetic oligonucleotide
cgacgagatatggttgactagggtatgtac

SEQ ID NO: 96781 - DNA, 30 bp, Artificial Sequence
  Synthetic oligonucleotide
agtgagagcatcgtcaggaagattatgtac

SEQ ID NO: 96782 - DNA, 30 bp, Artificial Sequence
  Synthetic oligonucleotide
agcgccgactacccccagtatcaactgtac

SEQ ID NO: 96783 - DNA, 30 bp, Artificial Sequence
  Synthetic oligonucleotide
cgtccttgtcaataacgtatcgaactgtac

SEQ ID NO: 96784 - DNA, 30 bp, Artificial Sequence
  Synthetic oligonucleotide
ggcatagccagtgatatatttagggtgtac

SEQ ID NO: 96785 - DNA, 30 bp, Artificial Sequence
  Synthetic oligonucleotide
gtcgagaaaggttaaagtgatattaattac

SEQ ID NO: 96786 - DNA, 30 bp, Artificial Sequence
  Synthetic oligonucleotide
caacgaaaccgtgcgagagtatgttattac

SEQ ID NO: 96787 - DNA, 30 bp, Artificial Sequence
  Synthetic oligonucleotide
aaaggatgctcaatgatcgagctaagttac

SEQ ID NO: 96788 - DNA, 30 bp, Artificial Sequence
  Synthetic oligonucleotide
taataatgtcttaagaatcaagccagttac

SEQ ID NO: 96789 - DNA, 30 bp, Artificial Sequence
  Synthetic oligonucleotide
cgcaaaagatccggctcccgctatagttac

SEQ ID NO: 96790 - DNA, 30 bp, Artificial Sequence
  Synthetic oligonucleotide
agaagtcatacagctaagacatagggttac

SEQ ID NO: 96791 - DNA, 30 bp, Artificial Sequence
  Synthetic oligonucleotide
gggattatgaacacgttacgaccatgttac

SEQ ID NO: 96792 - DNA, 31 bp, Artificial Sequence
  Synthetic oligonucleotide
cgaggcgtcattctatgaaataacgtgttac

SEQ ID NO: 96793 - DNA, 30 bp, Artificial Sequence
  Synthetic oligonucleotide
gagcattccctgcgcaaaagaagcatttac

SEQ ID NO: 96794 - DNA, 30 bp, Artificial Sequence
  Synthetic oligonucleotide
cgcataggtcaactcgatcaacttatttac

SEQ ID NO: 96795 - DNA, 30 bp, Artificial Sequence
  Synthetic oligonucleotide
ggccggaaattcccgaagcgcaatgtttac

SEQ ID NO: 96796 - DNA, 30 bp, Artificial Sequence
  Synthetic oligonucleotide
tagtggagggccaaggggtgagggttttac

SEQ ID NO: 96797 - DNA, 30 bp, Artificial Sequence
  Synthetic oligonucleotide
acatccgggttcgccatgcctccgcaaacc

SEQ ID NO: 96798 - DNA, 30 bp, Artificial Sequence
  Synthetic oligonucleotide
cagccgccaagcccaatgtcgaatcaaacc

SEQ ID NO: 96799 - DNA, 30 bp, Artificial Sequence
  Synthetic oligonucleotide
aatcgaccagaagtgaggtaaggtcaaacc

SEQ ID NO: 96800 - DNA, 30 bp, Artificial Sequence
  Synthetic oligonucleotide
gccagaacatacgaatcgagcattcaaacc

SEQ ID NO: 96801 - DNA, 30 bp, Artificial Sequence
  Synthetic oligonucleotide
tgtacgatgtcatctgaaattggcgaaacc

SEQ ID NO: 96802 - DNA, 30 bp, Artificial Sequence
  Synthetic oligonucleotide
tactgatggttagtttaaaacaaggaaacc

SEQ ID NO: 96803 - DNA, 30 bp, Artificial Sequence
  Synthetic oligonucleotide
cagaagatgaataagttaatagcggaaacc

SEQ ID NO: 96804 - DNA, 30 bp, Artificial Sequence
  Synthetic oligonucleotide
catgaggaaaatggaggtccctcctaaacc

SEQ ID NO: 96805 - DNA, 30 bp, Artificial Sequence
  Synthetic oligonucleotide
aacactgtcgccaccctaaaacggtaaacc

SEQ ID NO: 96806 - DNA, 30 bp, Artificial Sequence
  Synthetic oligonucleotide
agccgtcaagcggacacattcggcacaacc

SEQ ID NO: 96807 - DNA, 30 bp, Artificial Sequence
  Synthetic oligonucleotide
gcaataatctgaaggtctaatctgacaacc

SEQ ID NO: 96808 - DNA, 30 bp, Artificial Sequence
  Synthetic oligonucleotide
actcgagagactgggagtgccgaaccaacc

SEQ ID NO: 96809 - DNA, 30 bp, Artificial Sequence
  Synthetic oligonucleotide
cctcacaccactcaatctagcgtgccaacc

SEQ ID NO: 96810 - DNA, 30 bp, Artificial Sequence
  Synthetic oligonucleotide
cgtccgcccctgtacgggccaaatccaacc

SEQ ID NO: 96811 - DNA, 30 bp, Artificial Sequence
  Synthetic oligonucleotide
cataacatcttgtataaatacggtccaacc

SEQ ID NO: 96812 - DNA, 30 bp, Artificial Sequence
  Synthetic oligonucleotide
caagaaggctcaggtggaaggggagcaacc

SEQ ID NO: 96813 - DNA, 30 bp, Artificial Sequence
  Synthetic oligonucleotide
gagatcagcccattaccgaaataatcaacc

SEQ ID NO: 96814 - DNA, 30 bp, Artificial Sequence
  Synthetic oligonucleotide
aagctaccgcaacggggacggaattcaacc

SEQ ID NO: 96815 - DNA, 30 bp, Artificial Sequence
  Synthetic oligonucleotide
ttaggcggacgggcatatgtaagtagaacc

SEQ ID NO: 96816 - DNA, 30 bp, Artificial Sequence
  Synthetic oligonucleotide
gctacgagcgacggcgttaacggtggaacc

SEQ ID NO: 96817 - DNA, 30 bp, Artificial Sequence
  Synthetic oligonucleotide
actagccatgcgtttcagggcacgataacc

SEQ ID NO: 96818 - DNA, 30 bp, Artificial Sequence
  Synthetic oligonucleotide
gagagacagaggtggtaaatagggataacc

SEQ ID NO: 96819 - DNA, 30 bp, Artificial Sequence
  Synthetic oligonucleotide
tagtgtccaacgtaagcccgacatctaacc

SEQ ID NO: 96820 - DNA, 30 bp, Artificial Sequence
  Synthetic oligonucleotide
ttataccgggaggttgaatgaggtgtaacc

SEQ ID NO: 96821 - DNA, 30 bp, Artificial Sequence
  Synthetic oligonucleotide
agttacccggcgtgcgctccgaaattaacc

SEQ ID NO: 96822 - DNA, 30 bp, Artificial Sequence
  Synthetic oligonucleotide
tcgtcataaggatagtatttcagcttaacc

SEQ ID NO: 96823 - DNA, 30 bp, Artificial Sequence
  Synthetic oligonucleotide
ctgaacagtgatgttaggctggtgttaacc

SEQ ID NO: 96824 - DNA, 30 bp, Artificial Sequence
  Synthetic oligonucleotide
ccagcggatgatgagggacctcgtttaacc

SEQ ID NO: 96825 - DNA, 30 bp, Artificial Sequence
  Synthetic oligonucleotide
ggatctcatgaagacacattgggaaacacc

SEQ ID NO: 96826 - DNA, 30 bp, Artificial Sequence
  Synthetic oligonucleotide
aagttaacaggatggcggcggaccaacacc

SEQ ID NO: 96827 - DNA, 30 bp, Artificial Sequence
  Synthetic oligonucleotide
cttcaaccaccagccgggtggggcaacacc

SEQ ID NO: 96828 - DNA, 30 bp, Artificial Sequence
  Synthetic oligonucleotide
ggctgaggaaaatcacagtgtatgaacacc

SEQ ID NO: 96829 - DNA, 30 bp, Artificial Sequence
  Synthetic oligonucleotide
tcttgctagagtggctgtttatgacacacc

SEQ ID NO: 96830 - DNA, 30 bp, Artificial Sequence
  Synthetic oligonucleotide
ggagacgaacatacaacgctgatagacacc

SEQ ID NO: 96831 - DNA, 30 bp, Artificial Sequence
  Synthetic oligonucleotide
ggaccctgaaacgaagttctccgcgacacc

SEQ ID NO: 96832 - DNA, 30 bp, Artificial Sequence
  Synthetic oligonucleotide
ccactgaacggtatcaactgcagggacacc

SEQ ID NO: 96833 - DNA, 30 bp, Artificial Sequence
  Synthetic oligonucleotide
ggctgcatgagaactttgtggagatacacc

SEQ ID NO: 96834 - DNA, 30 bp, Artificial Sequence
  Synthetic oligonucleotide
cgcttagagaggattttaagcatttacacc

SEQ ID NO: 96835 - DNA, 30 bp, Artificial Sequence
  Synthetic oligonucleotide
ggggaattaaatctccaaattataaccacc

SEQ ID NO: 96836 - DNA, 30 bp, Artificial Sequence
  Synthetic oligonucleotide
gggagcggtaacgcaggcgtacagaccacc

SEQ ID NO: 96837 - DNA, 30 bp, Artificial Sequence
  Synthetic oligonucleotide
tacaatgtctggcataacagtcaaagcacc

SEQ ID NO: 96838 - DNA, 30 bp, Artificial Sequence
  Synthetic oligonucleotide
ttaaagcgtagagcgatgcgaaccagcacc

SEQ ID NO: 96839 - DNA, 30 bp, Artificial Sequence
  Synthetic oligonucleotide
gatagaacaatgtagcagttacaaggcacc

SEQ ID NO: 96840 - DNA, 30 bp, Artificial Sequence
  Synthetic oligonucleotide
tgtcctgccagggtatgggcgtatggcacc

SEQ ID NO: 96841 - DNA, 30 bp, Artificial Sequence
  Synthetic oligonucleotide
cgatgggggatctgtctatactaatgcacc

SEQ ID NO: 96842 - DNA, 30 bp, Artificial Sequence
  Synthetic oligonucleotide
cactaattttacaagtaaggtggctgcacc

SEQ ID NO: 96843 - DNA, 30 bp, Artificial Sequence
  Synthetic oligonucleotide
agtgacgtgtgttaccccagtgcgtgcacc

SEQ ID NO: 96844 - DNA, 30 bp, Artificial Sequence
  Synthetic oligonucleotide
ctatagacatccgaaacttgtgtgtgcacc

SEQ ID NO: 96845 - DNA, 30 bp, Artificial Sequence
  Synthetic oligonucleotide
tcgggcagacgagtgcctgggccaatcacc

SEQ ID NO: 96846 - DNA, 30 bp, Artificial Sequence
  Synthetic oligonucleotide
ctcgactcgaacgaggagagtgaactcacc

SEQ ID NO: 96847 - DNA, 30 bp, Artificial Sequence
  Synthetic oligonucleotide
gaggatctggaaggaacaaaaggagtcacc

SEQ ID NO: 96848 - DNA, 30 bp, Artificial Sequence
  Synthetic oligonucleotide
gctgatataaaagtatagccccaggtcacc

SEQ ID NO: 96849 - DNA, 30 bp, Artificial Sequence
  Synthetic oligonucleotide
ccaggatagcgtttacagagcagtgtcacc

SEQ ID NO: 96850 - DNA, 30 bp, Artificial Sequence
  Synthetic oligonucleotide
taagacacaactacgttacggtataagacc

SEQ ID NO: 96851 - DNA, 30 bp, Artificial Sequence
  Synthetic oligonucleotide
tgggcgctctcgtacggactaggacagacc

SEQ ID NO: 96852 - DNA, 30 bp, Artificial Sequence
  Synthetic oligonucleotide
ggtgctttgagatgaaagggcaggtagacc

SEQ ID NO: 96853 - DNA, 30 bp, Artificial Sequence
  Synthetic oligonucleotide
gagccacattcatgtccgctcaaaacgacc

SEQ ID NO: 96854 - DNA, 30 bp, Artificial Sequence
  Synthetic oligonucleotide
aaggttcagcaagcctacaccctaccgacc

SEQ ID NO: 96855 - DNA, 30 bp, Artificial Sequence
  Synthetic oligonucleotide
tctagcaatgaaacggggcttgagccgacc

SEQ ID NO: 96856 - DNA, 30 bp, Artificial Sequence
  Synthetic oligonucleotide
cggcgagcttcagtatcatcgggagcgacc

SEQ ID NO: 96857 - DNA, 30 bp, Artificial Sequence
  Synthetic oligonucleotide
cgcaggggggttatttaacaagggtcgacc

SEQ ID NO: 96858 - DNA, 30 bp, Artificial Sequence
  Synthetic oligonucleotide
ggtgaacaaatatgtcgaagtgattcgacc

SEQ ID NO: 96859 - DNA, 30 bp, Artificial Sequence
  Synthetic oligonucleotide
tactgccgataataacataacctaaggacc

SEQ ID NO: 96860 - DNA, 30 bp, Artificial Sequence
  Synthetic oligonucleotide
tggggctataccgggtagaatgagaggacc

SEQ ID NO: 96861 - DNA, 30 bp, Artificial Sequence
  Synthetic oligonucleotide
tgtcaaatgccccgggaacgactatggacc

SEQ ID NO: 96862 - DNA, 30 bp, Artificial Sequence
  Synthetic oligonucleotide
ccgtacaacacaacacgcctacagtggacc

SEQ ID NO: 96863 - DNA, 30 bp, Artificial Sequence
  Synthetic oligonucleotide
cataggggatattggccccaaacgatgacc

SEQ ID NO: 96864 - DNA, 30 bp, Artificial Sequence
  Synthetic oligonucleotide
cagcgcgcctatggggaagcgtcgatgacc

SEQ ID NO: 96865 - DNA, 30 bp, Artificial Sequence
  Synthetic oligonucleotide
tcaatataaaacttgagtggatgtctgacc

SEQ ID NO: 96866 - DNA, 30 bp, Artificial Sequence
  Synthetic oligonucleotide
tacgagcgtgagaagctaatctgggtgacc

SEQ ID NO: 96867 - DNA, 30 bp, Artificial Sequence
  Synthetic oligonucleotide
ccctcatactcatcgtccgtttagttgacc

SEQ ID NO: 96868 - DNA, 30 bp, Artificial Sequence
  Synthetic oligonucleotide
aggcttgacggggccatacggacgaatacc

SEQ ID NO: 96869 - DNA, 30 bp, Artificial Sequence
  Synthetic oligonucleotide
gcgagggtaaacaaagggcgaactaatacc

SEQ ID NO: 96870 - DNA, 30 bp, Artificial Sequence
  Synthetic oligonucleotide
caagtacggcccgagagtttgggacatacc

SEQ ID NO: 96871 - DNA, 30 bp, Artificial Sequence
  Synthetic oligonucleotide
ggacaagttagcagggtggcggtgcatacc

SEQ ID NO: 96872 - DNA, 30 bp, Artificial Sequence
  Synthetic oligonucleotide
acggagctcgccactgtggtctgtcatacc

SEQ ID NO: 96873 - DNA, 30 bp, Artificial Sequence
  Synthetic oligonucleotide
gatggaaagtgtgcggctcgtgtcgatacc

SEQ ID NO: 96874 - DNA, 30 bp, Artificial Sequence
  Synthetic oligonucleotide
tcatctgggtgagatagacattagactacc

SEQ ID NO: 96875 - DNA, 30 bp, Artificial Sequence
  Synthetic oligonucleotide
gtgtggcgtactctcaatgaggatactacc

SEQ ID NO: 96876 - DNA, 30 bp, Artificial Sequence
  Synthetic oligonucleotide
agcggcggccacgctcactaacctactacc

SEQ ID NO: 96877 - DNA, 30 bp, Artificial Sequence
  Synthetic oligonucleotide
cgttgagcacgcgcgtaccctgcagctacc

SEQ ID NO: 96878 - DNA, 30 bp, Artificial Sequence
  Synthetic oligonucleotide
ctagatagtgggtatcaggaagtagctacc

SEQ ID NO: 96879 - DNA, 30 bp, Artificial Sequence
  Synthetic oligonucleotide
cgggacccgtggggttggatagcacgtacc

SEQ ID NO: 96880 - DNA, 30 bp, Artificial Sequence
  Synthetic oligonucleotide
tgagtcaataaggagtctatgcactgtacc

SEQ ID NO: 96881 - DNA, 30 bp, Artificial Sequence
  Synthetic oligonucleotide
tagagcaagtgggggaattggatctgtacc

SEQ ID NO: 96882 - DNA, 30 bp, Artificial Sequence
  Synthetic oligonucleotide
tcgcgactacgatatgtcaagttctgtacc

SEQ ID NO: 96883 - DNA, 30 bp, Artificial Sequence
  Synthetic oligonucleotide
cagtagaagagtgtcgctgggcgttgtacc

SEQ ID NO: 96884 - DNA, 30 bp, Artificial Sequence
  Synthetic oligonucleotide
gtggaggctgagcccttaagcacagttacc

SEQ ID NO: 96885 - DNA, 30 bp, Artificial Sequence
  Synthetic oligonucleotide
cggcgatggcacgtgccaagactggttacc

SEQ ID NO: 96886 - DNA, 30 bp, Artificial Sequence
  Synthetic oligonucleotide
gagccaccctaaaacatttggacgtttacc

SEQ ID NO: 96887 - DNA, 30 bp, Artificial Sequence
  Synthetic oligonucleotide
gcgtggtccgacgtaccaggtgaaaaaccc

SEQ ID NO: 96888 - DNA, 30 bp, Artificial Sequence
  Synthetic oligonucleotide
agatctacatgagtttgcgatggaaaaccc

SEQ ID NO: 96889 - DNA, 30 bp, Artificial Sequence
  Synthetic oligonucleotide
caatgaaatcggaccggtcggaggaaaccc

SEQ ID NO: 96890 - DNA, 30 bp, Artificial Sequence
  Synthetic oligonucleotide
cacataacacgagcgagcttctcagaaccc

SEQ ID NO: 96891 - DNA, 30 bp, Artificial Sequence
  Synthetic oligonucleotide
tgatgcaaataacggcagtaaacggaaccc

SEQ ID NO: 96892 - DNA, 30 bp, Artificial Sequence
  Synthetic oligonucleotide
cacttgcccacgactagttcgggaccaccc

SEQ ID NO: 96893 - DNA, 30 bp, Artificial Sequence
  Synthetic oligonucleotide
agtgggtactgtgatagatcacccgcaccc

SEQ ID NO: 96894 - DNA, 30 bp, Artificial Sequence
  Synthetic oligonucleotide
gggatacttatcatgcgagatcctgcaccc

SEQ ID NO: 96895 - DNA, 30 bp, Artificial Sequence
  Synthetic oligonucleotide
tagatgtggaaatcaagtggtagacgaccc

SEQ ID NO: 96896 - DNA, 30 bp, Artificial Sequence
  Synthetic oligonucleotide
cgcctaaacacagcggaatagacgcgaccc

SEQ ID NO: 96897 - DNA, 30 bp, Artificial Sequence
  Synthetic oligonucleotide
tcgggagacgaagatgaccaaagtggaccc

SEQ ID NO: 96898 - DNA, 30 bp, Artificial Sequence
  Synthetic oligonucleotide
cgaaaatccacctgtggcaagttctgaccc

SEQ ID NO: 96899 - DNA, 30 bp, Artificial Sequence
  Synthetic oligonucleotide
atctccggggtgggctctaggtaaataccc

SEQ ID NO: 96900 - DNA, 30 bp, Artificial Sequence
  Synthetic oligonucleotide
ggtgcgcagaatcagcaatctcctataccc

SEQ ID NO: 96901 - DNA, 30 bp, Artificial Sequence
  Synthetic oligonucleotide
tcacgaagcgcgtctctaggtaacctaccc

SEQ ID NO: 96902 - DNA, 30 bp, Artificial Sequence
  Synthetic oligonucleotide
cgggcagctggagaatattgtaaagtaccc

SEQ ID NO: 96903 - DNA, 30 bp, Artificial Sequence
  Synthetic oligonucleotide
gtacattaggactttgagggcgacaacccc

SEQ ID NO: 96904 - DNA, 31 bp, Artificial Sequence
  Synthetic oligonucleotide
aacataatcgctgattatggattcgaacccc

SEQ ID NO: 96905 - DNA, 30 bp, Artificial Sequence
  Synthetic oligonucleotide
cacaccctgttttttacatcaaagcacccc

SEQ ID NO: 96906 - DNA, 30 bp, Artificial Sequence
  Synthetic oligonucleotide
ttaggcgaacccgcccgaacccaagacccc

SEQ ID NO: 96907 - DNA, 30 bp, Artificial Sequence
  Synthetic oligonucleotide
ccatcgggcggggcgagggaggcagacccc

SEQ ID NO: 96908 - DNA, 30 bp, Artificial Sequence
  Synthetic oligonucleotide
acggctgattcgtaacttcgggaggacccc

SEQ ID NO: 96909 - DNA, 30 bp, Artificial Sequence
  Synthetic oligonucleotide
aagatgacagtcgagttcggtcccaccccc

SEQ ID NO: 96910 - DNA, 30 bp, Artificial Sequence
  Synthetic oligonucleotide
atggaggaatctcctaaaggatgagccccc

SEQ ID NO: 96911 - DNA, 30 bp, Artificial Sequence
  Synthetic oligonucleotide
ggaaaatcaatcggattaggttgagccccc

SEQ ID NO: 96912 - DNA, 30 bp, Artificial Sequence
  Synthetic oligonucleotide
ataacaatcattggtgaatacaaggccccc

SEQ ID NO: 96913 - DNA, 30 bp, Artificial Sequence
  Synthetic oligonucleotide
acagcgtgcaaacaaccgaggtggatcccc

SEQ ID NO: 96914 - DNA, 30 bp, Artificial Sequence
  Synthetic oligonucleotide
aggacaatattacgtaaggcatttatcccc

SEQ ID NO: 96915 - DNA, 30 bp, Artificial Sequence
  Synthetic oligonucleotide
cgatgacagtatgtaatcatcgccttcccc

SEQ ID NO: 96916 - DNA, 30 bp, Artificial Sequence
  Synthetic oligonucleotide
tcaaccgccgcacgataactaaccaagccc

SEQ ID NO: 96917 - DNA, 30 bp, Artificial Sequence
  Synthetic oligonucleotide
acgccacttatttcgtactacaccaagccc

SEQ ID NO: 96918 - DNA, 30 bp, Artificial Sequence
  Synthetic oligonucleotide
agctaaatggttggtgaaggctagaagccc

SEQ ID NO: 96919 - DNA, 30 bp, Artificial Sequence
  Synthetic oligonucleotide
gcacgaaggggccgcagaattgtacagccc

SEQ ID NO: 96920 - DNA, 30 bp, Artificial Sequence
  Synthetic oligonucleotide
gataccacgattagccgaccaaggcagccc

SEQ ID NO: 96921 - DNA, 30 bp, Artificial Sequence
  Synthetic oligonucleotide
catatcggcacgcccagcgccagcacgccc

SEQ ID NO: 96922 - DNA, 30 bp, Artificial Sequence
  Synthetic oligonucleotide
taggacgtgtatagagtgtggtaaccgccc

SEQ ID NO: 96923 - DNA, 30 bp, Artificial Sequence
  Synthetic oligonucleotide
caggcatggagatagccgcgaactgcgccc

SEQ ID NO: 96924 - DNA, 30 bp, Artificial Sequence
  Synthetic oligonucleotide
caagaagaaattatgctggtgtactggccc

SEQ ID NO: 96925 - DNA, 30 bp, Artificial Sequence
  Synthetic oligonucleotide
tggggggcgtacgaaatacaggacatgccc

SEQ ID NO: 96926 - DNA, 30 bp, Artificial Sequence
  Synthetic oligonucleotide
gggcgtccaccgtgcaagcttcagatgccc

SEQ ID NO: 96927 - DNA, 30 bp, Artificial Sequence
  Synthetic oligonucleotide
agcactgggttgaaagaggcgtgtatgccc

SEQ ID NO: 96928 - DNA, 30 bp, Artificial Sequence
  Synthetic oligonucleotide
tgtatcctgaatcgccaatccattatgccc

SEQ ID NO: 96929 - DNA, 30 bp, Artificial Sequence
  Synthetic oligonucleotide
tcactgctgaatttagagatgggactgccc

SEQ ID NO: 96930 - DNA, 30 bp, Artificial Sequence
  Synthetic oligonucleotide
tacctcttgcgaaagaggaacaaggtgccc

SEQ ID NO: 96931 - DNA, 30 bp, Artificial Sequence
  Synthetic oligonucleotide
cgaaagcggtttgttggttcgtgtttgccc

SEQ ID NO: 96932 - DNA, 30 bp, Artificial Sequence
  Synthetic oligonucleotide
tcaacggccatgcggaggggacaacatccc

SEQ ID NO: 96933 - DNA, 30 bp, Artificial Sequence
  Synthetic oligonucleotide
tggaggctagaagtgagtagtaaccatccc

SEQ ID NO: 96934 - DNA, 30 bp, Artificial Sequence
  Synthetic oligonucleotide
tgccgaccgtgcgaaggccgaggtcatccc

SEQ ID NO: 96935 - DNA, 30 bp, Artificial Sequence
  Synthetic oligonucleotide
taggtgcgtaaattaggacttctctatccc

SEQ ID NO: 96936 - DNA, 30 bp, Artificial Sequence
  Synthetic oligonucleotide
tacgaaacatgaacttctaccccaactccc

SEQ ID NO: 96937 - DNA, 30 bp, Artificial Sequence
  Synthetic oligonucleotide
gcgccatgttaaggcgcgagctccactccc

SEQ ID NO: 96938 - DNA, 30 bp, Artificial Sequence
  Synthetic oligonucleotide
ggaacgttactcgtccaatccggccctccc

SEQ ID NO: 96939 - DNA, 30 bp, Artificial Sequence
  Synthetic oligonucleotide
ccaaaccgctatatcagcccctcagctccc

SEQ ID NO: 96940 - DNA, 30 bp, Artificial Sequence
  Synthetic oligonucleotide
tcgcagcacttacttgagtgatgaagtccc

SEQ ID NO: 96941 - DNA, 30 bp, Artificial Sequence
  Synthetic oligonucleotide
actacgaccccacgaaaacacgtgagtccc

SEQ ID NO: 96942 - DNA, 30 bp, Artificial Sequence
  Synthetic oligonucleotide
gcgtatgcgcatgtactcaaagaccgtccc

SEQ ID NO: 96943 - DNA, 30 bp, Artificial Sequence
  Synthetic oligonucleotide
agagtgggaggtaataccgccgaaggtccc

SEQ ID NO: 96944 - DNA, 30 bp, Artificial Sequence
  Synthetic oligonucleotide
gcgtacataagcggaagttaaggatttccc

SEQ ID NO: 96945 - DNA, 30 bp, Artificial Sequence
  Synthetic oligonucleotide
cacgtgttcaactgggagcccgctaaagcc

SEQ ID NO: 96946 - DNA, 30 bp, Artificial Sequence
  Synthetic oligonucleotide
gaaagtaagcgatcacaagtaggccaagcc

SEQ ID NO: 96947 - DNA, 30 bp, Artificial Sequence
  Synthetic oligonucleotide
agaagtaaagaaaacacctccttccaagcc

SEQ ID NO: 96948 - DNA, 30 bp, Artificial Sequence
  Synthetic oligonucleotide
cacgctttctaagctaaaaattacgaagcc

SEQ ID NO: 96949 - DNA, 30 bp, Artificial Sequence
  Synthetic oligonucleotide
tagcaaagtcagccatatagaaagacagcc

SEQ ID NO: 96950 - DNA, 29 bp, Artificial Sequence
  Synthetic oligonucleotide
gatcgctaagttctaaccgcataccagcc

SEQ ID NO: 96951 - DNA, 30 bp, Artificial Sequence
  Synthetic oligonucleotide
tcgtaactattttatcgcgaagaagcagcc

SEQ ID NO: 96952 - DNA, 30 bp, Artificial Sequence
  Synthetic oligonucleotide
catcataagagcatggtgtaatgcgcagcc

SEQ ID NO: 96953 - DNA, 30 bp, Artificial Sequence
  Synthetic oligonucleotide
actgctcaaaagaatcagggatatgcagcc

SEQ ID NO: 96954 - DNA, 30 bp, Artificial Sequence
  Synthetic oligonucleotide
ggaaaaatgggtctcgtaatgccatcagcc

SEQ ID NO: 96955 - DNA, 30 bp, Artificial Sequence
  Synthetic oligonucleotide
atctagggctatgccatccgctcgtcagcc

SEQ ID NO: 96956 - DNA, 30 bp, Artificial Sequence
  Synthetic oligonucleotide
ttgctagtcactagtcccgaagagagagcc

SEQ ID NO: 96957 - DNA, 30 bp, Artificial Sequence
  Synthetic oligonucleotide
tgatacggataagacgaggatccgagagcc

SEQ ID NO: 96958 - DNA, 30 bp, Artificial Sequence
  Synthetic oligonucleotide
ggatcagaaagcactaatagtcgccgagcc

SEQ ID NO: 96959 - DNA, 30 bp, Artificial Sequence
  Synthetic oligonucleotide
tcgcaacactctactttccaaacgcgagcc

SEQ ID NO: 96960 - DNA, 30 bp, Artificial Sequence
  Synthetic oligonucleotide
tcacgacacccgggttcaagtatcatagcc

SEQ ID NO: 96961 - DNA, 26 bp, Artificial Sequence
  Synthetic oligonucleotide
aatgaagaccaccaacttgggtagcc

SEQ ID NO: 96962 - DNA, 30 bp, Artificial Sequence
  Synthetic oligonucleotide
acggcacgcgggtatccccagcttgtagcc

SEQ ID NO: 96963 - DNA, 30 bp, Artificial Sequence
  Synthetic oligonucleotide
tcgccctgatgccgcgaacagaataacgcc

SEQ ID NO: 96964 - DNA, 30 bp, Artificial Sequence
  Synthetic oligonucleotide
agcctgaacacgaaaattcgggaccacgcc

SEQ ID NO: 96965 - DNA, 30 bp, Artificial Sequence
  Synthetic oligonucleotide
tcacggcaaaaattactgcacaagcacgcc

SEQ ID NO: 96966 - DNA, 30 bp, Artificial Sequence
  Synthetic oligonucleotide
acttactcgatcgtgccccggaacaccgcc

SEQ ID NO: 96967 - DNA, 30 bp, Artificial Sequence
  Synthetic oligonucleotide
cgtaaggtgttgtgaactttagctaccgcc

SEQ ID NO: 96968 - DNA, 30 bp, Artificial Sequence
  Synthetic oligonucleotide
cggtcagtgccagttaacccggctcccgcc

SEQ ID NO: 96969 - DNA, 30 bp, Artificial Sequence
  Synthetic oligonucleotide
catggaacggatttgaaacgacgtcccgcc

SEQ ID NO: 96970 - DNA, 30 bp, Artificial Sequence
  Synthetic oligonucleotide
taaactatgataacgtgggttcctgccgcc

SEQ ID NO: 96971 - DNA, 30 bp, Artificial Sequence
  Synthetic oligonucleotide
cgtcaaatatcgcaattacatttttccgcc

SEQ ID NO: 96972 - DNA, 30 bp, Artificial Sequence
  Synthetic oligonucleotide
ccgaaaaagtgattatttaccgttagcgcc

SEQ ID NO: 96973 - DNA, 30 bp, Artificial Sequence
  Synthetic oligonucleotide
gttcagaggattcgctctacgaacggcgcc

SEQ ID NO: 96974 - DNA, 30 bp, Artificial Sequence
  Synthetic oligonucleotide
aggctgttgaaaacttctgtctactgcgcc

SEQ ID NO: 96975 - DNA, 30 bp, Artificial Sequence
  Synthetic oligonucleotide
gactcacaagatctgacgcgtgcctgcgcc

SEQ ID NO: 96976 - DNA, 30 bp, Artificial Sequence
  Synthetic oligonucleotide
cgattccagatgccccgcaagtctatcgcc

SEQ ID NO: 96977 - DNA, 30 bp, Artificial Sequence
  Synthetic oligonucleotide
catttcacattgatgtgggacagactcgcc

SEQ ID NO: 96978 - DNA, 30 bp, Artificial Sequence
  Synthetic oligonucleotide
gagcaatccagcacgtggaaagccctcgcc

SEQ ID NO: 96979 - DNA, 30 bp, Artificial Sequence
  Synthetic oligonucleotide
cgccatactaatatgctcagatttttcgcc

SEQ ID NO: 96980 - DNA, 30 bp, Artificial Sequence
  Synthetic oligonucleotide
tgagattatgcgtatgaggtgctaaaggcc

SEQ ID NO: 96981 - DNA, 30 bp, Artificial Sequence
  Synthetic oligonucleotide
tgtggttgggtaaagtcagactggaaggcc

SEQ ID NO: 96982 - DNA, 30 bp, Artificial Sequence
  Synthetic oligonucleotide
ttcgaatgcaatgagaaaaggacccaggcc

SEQ ID NO: 96983 - DNA, 30 bp, Artificial Sequence
  Synthetic oligonucleotide
tgcgccgaaacaggatcgtataatcaggcc

SEQ ID NO: 96984 - DNA, 30 bp, Artificial Sequence
  Synthetic oligonucleotide
atgaatgtaagtatgacatcgagagaggcc

SEQ ID NO: 96985 - DNA, 30 bp, Artificial Sequence
  Synthetic oligonucleotide
tgaggtacaaacgaagcttgtaggacggcc

SEQ ID NO: 96986 - DNA, 30 bp, Artificial Sequence
  Synthetic oligonucleotide
gtatcgacaacacaactgtattcagcggcc

SEQ ID NO: 96987 - DNA, 30 bp, Artificial Sequence
  Synthetic oligonucleotide
aaatggaagaaacaacggagtaccgcggcc

SEQ ID NO: 96988 - DNA, 30 bp, Artificial Sequence
  Synthetic oligonucleotide
gttagaaagaagaagcagcgcgggtcggcc

SEQ ID NO: 96989 - DNA, 30 bp, Artificial Sequence
  Synthetic oligonucleotide
ggcacctcataacgtaagcgggtgtcggcc

SEQ ID NO: 96990 - DNA, 30 bp, Artificial Sequence
  Synthetic oligonucleotide
caacatgggtggaagtgccgcccctgggcc

SEQ ID NO: 96991 - DNA, 30 bp, Artificial Sequence
  Synthetic oligonucleotide
cgacatcttaagcactaagtcacgtgggcc

SEQ ID NO: 96992 - DNA, 30 bp, Artificial Sequence
  Synthetic oligonucleotide
gcaacgagtgctcagggtcaaaagctggcc

SEQ ID NO: 96993 - DNA, 30 bp, Artificial Sequence
  Synthetic oligonucleotide
taagcatgcagggtcgggatgactgtggcc

SEQ ID NO: 96994 - DNA, 30 bp, Artificial Sequence
  Synthetic oligonucleotide
actcaaacggtaaccaggtatactaatgcc

SEQ ID NO: 96995 - DNA, 30 bp, Artificial Sequence
  Synthetic oligonucleotide
gtgttcatggcacgaggttttcgtaatgcc

SEQ ID NO: 96996 - DNA, 30 bp, Artificial Sequence
  Synthetic oligonucleotide
ggtgataccgatgaggaccacacggatgcc

SEQ ID NO: 96997 - DNA, 30 bp, Artificial Sequence
  Synthetic oligonucleotide
gtgggggtcggtggtacctttagcactgcc

SEQ ID NO: 96998 - DNA, 30 bp, Artificial Sequence
  Synthetic oligonucleotide
gcatggtacggataaatatttgcgactgcc

SEQ ID NO: 96999 - DNA, 30 bp, Artificial Sequence
  Synthetic oligonucleotide
acatcgtagatctcgtcagcagggactgcc

SEQ ID NO: 97000 - DNA, 30 bp, Artificial Sequence
  Synthetic oligonucleotide
cagcgtttacacaagccgtcaccccctgcc

SEQ ID NO: 97001 - DNA, 30 bp, Artificial Sequence
  Synthetic oligonucleotide
tgcgaatgtgagtttattagaagtcctgcc

SEQ ID NO: 97002 - DNA, 30 bp, Artificial Sequence
  Synthetic oligonucleotide
accataccgcattgtatagctacgtctgcc

SEQ ID NO: 97003 - DNA, 30 bp, Artificial Sequence
  Synthetic oligonucleotide
taggacattcggccgcagattgtaagtgcc

SEQ ID NO: 97004 - DNA, 30 bp, Artificial Sequence
  Synthetic oligonucleotide
ctcaggttggtgaactcaaacaggagtgcc

SEQ ID NO: 97005 - DNA, 30 bp, Artificial Sequence
  Synthetic oligonucleotide
aggctgtcacctgaatacgggagtagtgcc

SEQ ID NO: 97006 - DNA, 30 bp, Artificial Sequence
  Synthetic oligonucleotide
aggcatgggacgcggtgtaggtgtagtgcc

SEQ ID NO: 97007 - DNA, 30 bp, Artificial Sequence
  Synthetic oligonucleotide
acgacagtgaaacgcttcgaaactggtgcc

SEQ ID NO: 97008 - DNA, 30 bp, Artificial Sequence
  Synthetic oligonucleotide
tcgcatcaaactcttggtcgaggtggtgcc

SEQ ID NO: 97009 - DNA, 30 bp, Artificial Sequence
  Synthetic oligonucleotide
ctcagaaagaggccaccaatgccatgtgcc

SEQ ID NO: 97010 - DNA, 30 bp, Artificial Sequence
  Synthetic oligonucleotide
agtcgggaaaaagttacaactgtgtgtgcc

SEQ ID NO: 97011 - DNA, 30 bp, Artificial Sequence
  Synthetic oligonucleotide
agaccctctagcatacagggcagacttgcc

SEQ ID NO: 97012 - DNA, 30 bp, Artificial Sequence
  Synthetic oligonucleotide
acctatcggtcaatggtcactcaagttgcc

SEQ ID NO: 97013 - DNA, 30 bp, Artificial Sequence
  Synthetic oligonucleotide
gacgtgtccaatgaaagttccctctttgcc

SEQ ID NO: 97014 - DNA, 30 bp, Artificial Sequence
  Synthetic oligonucleotide
gagccctacaaaggacaccatcaaaaatcc

SEQ ID NO: 97015 - DNA, 30 bp, Artificial Sequence
  Synthetic oligonucleotide
tgtagtacgatcatcatcagcacacaatcc

SEQ ID NO: 97016 - DNA, 30 bp, Artificial Sequence
  Synthetic oligonucleotide
ggacgcgaggaacaagacatgcggcaatcc

SEQ ID NO: 97017 - DNA, 29 bp, Artificial Sequence
  Synthetic oligonucleotide
aagggtaacgatatgacgccattcaatcc

SEQ ID NO: 97018 - DNA, 30 bp, Artificial Sequence
  Synthetic oligonucleotide
ggtatggcggcgtaattcactgaggaatcc

SEQ ID NO: 97019 - DNA, 30 bp, Artificial Sequence
  Synthetic oligonucleotide
ttgagcgttacaaagtcaccagtataatcc

SEQ ID NO: 97020 - DNA, 30 bp, Artificial Sequence
  Synthetic oligonucleotide
tagagggggtctcatctctatggctaatcc

SEQ ID NO: 97021 - DNA, 30 bp, Artificial Sequence
  Synthetic oligonucleotide
gaccaccaactcgccggactttccacatcc

SEQ ID NO: 97022 - DNA, 30 bp, Artificial Sequence
  Synthetic oligonucleotide
catacgatacgcgtgttccatcgtacatcc

SEQ ID NO: 97023 - DNA, 30 bp, Artificial Sequence
  Synthetic oligonucleotide
aggacatataacgcgcgtttgaatccatcc

SEQ ID NO: 97024 - DNA, 30 bp, Artificial Sequence
  Synthetic oligonucleotide
acagacggagggggaccactcgcggcatcc

SEQ ID NO: 97025 - DNA, 30 bp, Artificial Sequence
  Synthetic oligonucleotide
tacctagagggtatgacctgtcctgcatcc

SEQ ID NO: 97026 - DNA, 30 bp, Artificial Sequence
  Synthetic oligonucleotide
agggagaggcgtaagatcaatgtccgatcc

SEQ ID NO: 97027 - DNA, 30 bp, Artificial Sequence
  Synthetic oligonucleotide
gtgtgtataccacgccgaatacgatgatcc

SEQ ID NO: 97028 - DNA, 30 bp, Artificial Sequence
  Synthetic oligonucleotide
tatgcactacggcggaactaaccgtgatcc

SEQ ID NO: 97029 - DNA, 30 bp, Artificial Sequence
  Synthetic oligonucleotide
agtcacgcgctacgagcagttggttgatcc

SEQ ID NO: 97030 - DNA, 30 bp, Artificial Sequence
  Synthetic oligonucleotide
aggatctaaacaatgggtgtactaatatcc

SEQ ID NO: 97031 - DNA, 30 bp, Artificial Sequence
  Synthetic oligonucleotide
gggtggtggtgccaagtcggaagtatatcc

SEQ ID NO: 97032 - DNA, 30 bp, Artificial Sequence
  Synthetic oligonucleotide
tctaagagaagcagtgagttcattctatcc

SEQ ID NO: 97033 - DNA, 30 bp, Artificial Sequence
  Synthetic oligonucleotide
ggaggaacatagaaagttctaaccgtatcc

SEQ ID NO: 97034 - DNA, 30 bp, Artificial Sequence
  Synthetic oligonucleotide
ggacgatgggttcatgtgacccttgtatcc

SEQ ID NO: 97035 - DNA, 30 bp, Artificial Sequence
  Synthetic oligonucleotide
gaaaagccgactgagaaaagcgtattatcc

SEQ ID NO: 97036 - DNA, 30 bp, Artificial Sequence
  Synthetic oligonucleotide
cggtttgctaccaccgctaagtacaactcc

SEQ ID NO: 97037 - DNA, 30 bp, Artificial Sequence
  Synthetic oligonucleotide
gctaagaccatagaggttgcccggaactcc

SEQ ID NO: 97038 - DNA, 30 bp, Artificial Sequence
  Synthetic oligonucleotide
tccaggacgaaccgagacccacctaactcc

SEQ ID NO: 97039 - DNA, 30 bp, Artificial Sequence
  Synthetic oligonucleotide
cggagatcacgggtcctaatgcctcactcc

SEQ ID NO: 97040 - DNA, 30 bp, Artificial Sequence
  Synthetic oligonucleotide
agcttccgaaactagggtggcacggactcc

SEQ ID NO: 97041 - DNA, 30 bp, Artificial Sequence
  Synthetic oligonucleotide
tgcatgcatcccgatgggaaagtggactcc

SEQ ID NO: 97042 - DNA, 30 bp, Artificial Sequence
  Synthetic oligonucleotide
taccaagggagcagccgaacgaagtactcc

SEQ ID NO: 97043 - DNA, 30 bp, Artificial Sequence
  Synthetic oligonucleotide
cgaacatagtcgagatcatatccgtactcc

SEQ ID NO: 97044 - DNA, 30 bp, Artificial Sequence
  Synthetic oligonucleotide
acgtaggtcggcttaatatacggcacctcc

SEQ ID NO: 97045 - DNA, 30 bp, Artificial Sequence
  Synthetic oligonucleotide
atcgaacgggatccgcgtgagtaaccctcc

SEQ ID NO: 97046 - DNA, 30 bp, Artificial Sequence
  Synthetic oligonucleotide
acttaccacagtgctgacagtgagccctcc

SEQ ID NO: 97047 - DNA, 30 bp, Artificial Sequence
  Synthetic oligonucleotide
ggggcccgagcatcgactagtatagcctcc

SEQ ID NO: 97048 - DNA, 30 bp, Artificial Sequence
  Synthetic oligonucleotide
ttcacaccattcaggggctaggtggcctcc

SEQ ID NO: 97049 - DNA, 30 bp, Artificial Sequence
  Synthetic oligonucleotide
gcgggggttgccattcagtgcccgtcctcc

SEQ ID NO: 97050 - DNA, 30 bp, Artificial Sequence
  Synthetic oligonucleotide
tgggtttgtcgaaacctcatcggtagctcc

SEQ ID NO: 97051 - DNA, 30 bp, Artificial Sequence
  Synthetic oligonucleotide
catcagtcgacctacccacttgcgatctcc

SEQ ID NO: 97052 - DNA, 30 bp, Artificial Sequence
  Synthetic oligonucleotide
actcgtgaacacgtgactagtatcgtctcc

SEQ ID NO: 97053 - DNA, 30 bp, Artificial Sequence
  Synthetic oligonucleotide
atgatgaatcctgataataggccggtctcc

SEQ ID NO: 97054 - DNA, 30 bp, Artificial Sequence
  Synthetic oligonucleotide
ctagcgtaggctaactacattcttaagtcc

SEQ ID NO: 97055 - DNA, 30 bp, Artificial Sequence
  Synthetic oligonucleotide
aaaggtcaccatgacaaccaggaagagtcc

SEQ ID NO: 97056 - DNA, 31 bp, Artificial Sequence
  Synthetic oligonucleotide
gaccaaagtaaataacgctgtaacttagtcc

SEQ ID NO: 97057 - DNA, 30 bp, Artificial Sequence
  Synthetic oligonucleotide
acagaaaagacgtaagttaagctttagtcc

SEQ ID NO: 97058 - DNA, 30 bp, Artificial Sequence
  Synthetic oligonucleotide
atggaatccacataagaaaagtcaacgtcc

SEQ ID NO: 97059 - DNA, 30 bp, Artificial Sequence
  Synthetic oligonucleotide
gttcggcgaagatcccggtatacaccgtcc

SEQ ID NO: 97060 - DNA, 30 bp, Artificial Sequence
  Synthetic oligonucleotide
acattcttgtttatgggtggaaggccgtcc

SEQ ID NO: 97061 - DNA, 30 bp, Artificial Sequence
  Synthetic oligonucleotide
gctataaaactgagagggtgctatccgtcc

SEQ ID NO: 97062 - DNA, 30 bp, Artificial Sequence
  Synthetic oligonucleotide
atcccggttcaacgatgaaactttgcgtcc

SEQ ID NO: 97063 - DNA, 30 bp, Artificial Sequence
  Synthetic oligonucleotide
actcgcacagatcaagatctgcattcgtcc

SEQ ID NO: 97064 - DNA, 30 bp, Artificial Sequence
  Synthetic oligonucleotide
cgtggcggtgtggtgtaagacaacaggtcc

SEQ ID NO: 97065 - DNA, 30 bp, Artificial Sequence
  Synthetic oligonucleotide
tctccacggagggatttaactcacaggtcc

SEQ ID NO: 97066 - DNA, 30 bp, Artificial Sequence
  Synthetic oligonucleotide
tcgggaacggcaatgacgaaaaagaggtcc

SEQ ID NO: 97067 - DNA, 31 bp, Artificial Sequence
  Synthetic oligonucleotide
catcatagggtttggctgccagaagcggtcc

SEQ ID NO: 97068 - DNA, 30 bp, Artificial Sequence
  Synthetic oligonucleotide
gcataaggtatcatgtaaggttgagggtcc

SEQ ID NO: 97069 - DNA, 30 bp, Artificial Sequence
  Synthetic oligonucleotide
acatcgaacacgacaacccagttgtggtcc

SEQ ID NO: 97070 - DNA, 30 bp, Artificial Sequence
  Synthetic oligonucleotide
tcctttcgaggaagtgcgggggattggtcc

SEQ ID NO: 97071 - DNA, 30 bp, Artificial Sequence
  Synthetic oligonucleotide
gtaaatgaactatttgcctaatattggtcc

SEQ ID NO: 97072 - DNA, 30 bp, Artificial Sequence
  Synthetic oligonucleotide
gcagaaggtaacgtagtgcgccctaattcc

SEQ ID NO: 97073 - DNA, 30 bp, Artificial Sequence
  Synthetic oligonucleotide
cgttacaccatgtcaagtcagtccgattcc

SEQ ID NO: 97074 - DNA, 30 bp, Artificial Sequence
  Synthetic oligonucleotide
cgttccagaacagacggtgtaatcgattcc

SEQ ID NO: 97075 - DNA, 30 bp, Artificial Sequence
  Synthetic oligonucleotide
ctcggaagatacttggtacgattcgattcc

SEQ ID NO: 97076 - DNA, 30 bp, Artificial Sequence
  Synthetic oligonucleotide
aggctccgattacaagatcgcgaatattcc

SEQ ID NO: 97077 - DNA, 30 bp, Artificial Sequence
  Synthetic oligonucleotide
atctcgaaatcacgaggagtggggtattcc

SEQ ID NO: 97078 - DNA, 30 bp, Artificial Sequence
  Synthetic oligonucleotide
gtgcgacagttggaccaaagctgacgttcc

SEQ ID NO: 97079 - DNA, 30 bp, Artificial Sequence
  Synthetic oligonucleotide
cggaggtacgaggtagctcgtgaaggttcc

SEQ ID NO: 97080 - DNA, 30 bp, Artificial Sequence
  Synthetic oligonucleotide
gctcgagacggatagcgtatcaccggttcc

SEQ ID NO: 97081 - DNA, 30 bp, Artificial Sequence
  Synthetic oligonucleotide
cacgtgagagggaagcgcggacggggttcc

SEQ ID NO: 97082 - DNA, 30 bp, Artificial Sequence
  Synthetic oligonucleotide
caaacgagctgagagactgcgtaatgttcc

SEQ ID NO: 97083 - DNA, 30 bp, Artificial Sequence
  Synthetic oligonucleotide
cacaggtgtcattgaataatagagtgttcc

SEQ ID NO: 97084 - DNA, 30 bp, Artificial Sequence
  Synthetic oligonucleotide
catcgggacatcctgcagcggcacatttcc

SEQ ID NO: 97085 - DNA, 30 bp, Artificial Sequence
  Synthetic oligonucleotide
cagcgttcataacagacaactagggtttcc

SEQ ID NO: 97086 - DNA, 30 bp, Artificial Sequence
  Synthetic oligonucleotide
taggtagccagaaacgaagcccgaaaaagc

SEQ ID NO: 97087 - DNA, 30 bp, Artificial Sequence
  Synthetic oligonucleotide
agttcgtccgagtcactagtcatgaaaagc

SEQ ID NO: 97088 - DNA, 30 bp, Artificial Sequence
  Synthetic oligonucleotide
aaacgggcttaagggatttacagacaaagc

SEQ ID NO: 97089 - DNA, 30 bp, Artificial Sequence
  Synthetic oligonucleotide
tcgcttcgagataacgggacggaccaaagc

SEQ ID NO: 97090 - DNA, 30 bp, Artificial Sequence
  Synthetic oligonucleotide
gatgcacacacaggcactcatcatcaaagc

SEQ ID NO: 97091 - DNA, 30 bp, Artificial Sequence
  Synthetic oligonucleotide
gcaaaaccgaatccctcaatcgatcaaagc

SEQ ID NO: 97092 - DNA, 30 bp, Artificial Sequence
  Synthetic oligonucleotide
cctcaagaatgcttacaagtctgtcaaagc

SEQ ID NO: 97093 - DNA, 30 bp, Artificial Sequence
  Synthetic oligonucleotide
ggctgatatcggctcgccggtaaagaaagc

SEQ ID NO: 97094 - DNA, 30 bp, Artificial Sequence
  Synthetic oligonucleotide
cgacctttgtaggacagtagagtagaaagc

SEQ ID NO: 97095 - DNA, 30 bp, Artificial Sequence
  Synthetic oligonucleotide
cgtagacaattgggggtatcgtgcgaaagc

SEQ ID NO: 97096 - DNA, 30 bp, Artificial Sequence
  Synthetic oligonucleotide
gctggacaagctcgcgtcgctaaggaaagc

SEQ ID NO: 97097 - DNA, 30 bp, Artificial Sequence
  Synthetic oligonucleotide
tgcgcgagtagcaaccgactccttgaaagc

SEQ ID NO: 97098 - DNA, 30 bp, Artificial Sequence
  Synthetic oligonucleotide
ctggttagaatgttaacaaaaatataaagc

SEQ ID NO: 97099 - DNA, 30 bp, Artificial Sequence
  Synthetic oligonucleotide
gccgagacattgtttatgttacgttaaagc

SEQ ID NO: 97100 - DNA, 30 bp, Artificial Sequence
  Synthetic oligonucleotide
atcggctggaaagagttaataagaacaagc

SEQ ID NO: 97101 - DNA, 30 bp, Artificial Sequence
  Synthetic oligonucleotide
agcattttaaccaaaacacagctcacaagc

SEQ ID NO: 97102 - DNA, 30 bp, Artificial Sequence
  Synthetic oligonucleotide
gacccgccgaacccagtcgacactccaagc

SEQ ID NO: 97103 - DNA, 30 bp, Artificial Sequence
  Synthetic oligonucleotide
catccccccttggcgacatacaaagcaagc

SEQ ID NO: 97104 - DNA, 30 bp, Artificial Sequence
  Synthetic oligonucleotide
gctggacagtgtgggaaaacagaagcaagc

SEQ ID NO: 97105 - DNA, 30 bp, Artificial Sequence
  Synthetic oligonucleotide
agggtgaagcccacgcattttacagcaagc

SEQ ID NO: 97106 - DNA, 30 bp, Artificial Sequence
  Synthetic oligonucleotide
ggaacaccagtcccaggcttgaaggcaagc

SEQ ID NO: 97107 - DNA, 30 bp, Artificial Sequence
  Synthetic oligonucleotide
ctaagcgggattgcgaatgaatcggcaagc

SEQ ID NO: 97108 - DNA, 30 bp, Artificial Sequence
  Synthetic oligonucleotide
agtggtaaagtgaccagtagatcctcaagc

SEQ ID NO: 97109 - DNA, 30 bp, Artificial Sequence
  Synthetic oligonucleotide
gcactcatccggggataccataaaagaagc

SEQ ID NO: 97110 - DNA, 30 bp, Artificial Sequence
  Synthetic oligonucleotide
agctcgaaagaagataattccagccgaagc

SEQ ID NO: 97111 - DNA, 30 bp, Artificial Sequence
  Synthetic oligonucleotide
ggataggcgtagtgctcttccgggcgaagc

SEQ ID NO: 97112 - DNA, 30 bp, Artificial Sequence
  Synthetic oligonucleotide
ggtgatgtccgacaccaggctggaggaagc

SEQ ID NO: 97113 - DNA, 30 bp, Artificial Sequence
  Synthetic oligonucleotide
agtccctaattttaactgcgatgaggaagc

SEQ ID NO: 97114 - DNA, 30 bp, Artificial Sequence
  Synthetic oligonucleotide
gccataagtgaaacgattaataagggaagc

SEQ ID NO: 97115 - DNA, 30 bp, Artificial Sequence
  Synthetic oligonucleotide
tgaactcgaaaataccccaactacctaagc

SEQ ID NO: 97116 - DNA, 30 bp, Artificial Sequence
  Synthetic oligonucleotide
atgtcagcacaaggttgttgcgcgctaagc

SEQ ID NO: 97117 - DNA, 30 bp, Artificial Sequence
  Synthetic oligonucleotide
gtgtccgtattaaaagagaaactggtaagc

SEQ ID NO: 97118 - DNA, 30 bp, Artificial Sequence
  Synthetic oligonucleotide
gaaataaaggtctaagaggggttggtaagc

SEQ ID NO: 97119 - DNA, 30 bp, Artificial Sequence
  Synthetic oligonucleotide
ggtagggccttccgatcagaggctgtaagc

SEQ ID NO: 97120 - DNA, 30 bp, Artificial Sequence
  Synthetic oligonucleotide
ctagataccccgcaggagaatagtgtaagc

SEQ ID NO: 97121 - DNA, 30 bp, Artificial Sequence
  Synthetic oligonucleotide
atgagcgacatacgaagtatggggttaagc

SEQ ID NO: 97122 - DNA, 30 bp, Artificial Sequence
  Synthetic oligonucleotide
ccagagataacgcaacgcgaagcgaacagc

SEQ ID NO: 97123 - DNA, 30 bp, Artificial Sequence
  Synthetic oligonucleotide
gtaattaggcaatagacagccagacacagc

SEQ ID NO: 97124 - DNA, 30 bp, Artificial Sequence
  Synthetic oligonucleotide
acgaatgtattacggtttttaatgcacagc

SEQ ID NO: 97125 - DNA, 30 bp, Artificial Sequence
  Synthetic oligonucleotide
aaaatacatgcgaagtgggtgccagacagc

SEQ ID NO: 97126 - DNA, 30 bp, Artificial Sequence
  Synthetic oligonucleotide
gacacgtgaaacgagcgggtttgggacagc

SEQ ID NO: 97127 - DNA, 30 bp, Artificial Sequence
  Synthetic oligonucleotide
gaaaaggtcaaatcggcaggaatggacagc

SEQ ID NO: 97128 - DNA, 30 bp, Artificial Sequence
  Synthetic oligonucleotide
gatctaccgggcaaaaaaagccgtgacagc

SEQ ID NO: 97129 - DNA, 30 bp, Artificial Sequence
  Synthetic oligonucleotide
cttaaggactgcgcttagtacagctacagc

SEQ ID NO: 97130 - DNA, 30 bp, Artificial Sequence
  Synthetic oligonucleotide
accgagaagcaacatggcagcggttacagc

SEQ ID NO: 97131 - DNA, 30 bp, Artificial Sequence
  Synthetic oligonucleotide
caaagggaagacaagggtaaaaaaaccagc

SEQ ID NO: 97132 - DNA, 30 bp, Artificial Sequence
  Synthetic oligonucleotide
aacgtagacagagggccgtgtgcaaccagc

SEQ ID NO: 97133 - DNA, 30 bp, Artificial Sequence
  Synthetic oligonucleotide
tagatttagtcgagacacaagaacaccagc

SEQ ID NO: 97134 - DNA, 30 bp, Artificial Sequence
  Synthetic oligonucleotide
acgaatctgtatgattactttacacccagc

SEQ ID NO: 97135 - DNA, 30 bp, Artificial Sequence
  Synthetic oligonucleotide
tgtgtaatatccacgaattaatggcccagc

SEQ ID NO: 97136 - DNA, 30 bp, Artificial Sequence
  Synthetic oligonucleotide
gtgtcggcccactcgttgtgaaatcccagc

SEQ ID NO: 97137 - DNA, 30 bp, Artificial Sequence
  Synthetic oligonucleotide
atggtaattaagactagtccgtacgccagc

SEQ ID NO: 97138 - DNA, 30 bp, Artificial Sequence
  Synthetic oligonucleotide
atattacggtcaatagaaggctaggccagc

SEQ ID NO: 97139 - DNA, 30 bp, Artificial Sequence
  Synthetic oligonucleotide
aaagatcataatctaaacactaattccagc

SEQ ID NO: 97140 - DNA, 30 bp, Artificial Sequence
  Synthetic oligonucleotide
ggaacatgtgaaggacatcgtaaaagcagc

SEQ ID NO: 97141 - DNA, 30 bp, Artificial Sequence
  Synthetic oligonucleotide
gcgggaatctggggcaccggacagagcagc

SEQ ID NO: 97142 - DNA, 30 bp, Artificial Sequence
  Synthetic oligonucleotide
gacaggtaggggagggcgaagggctgcagc

SEQ ID NO: 97143 - DNA, 30 bp, Artificial Sequence
  Synthetic oligonucleotide
cttcggaggcgacatcggacttgctgcagc

SEQ ID NO: 97144 - DNA, 30 bp, Artificial Sequence
  Synthetic oligonucleotide
gtattcacgaggcatcaaaaatgcatcagc

SEQ ID NO: 97145 - DNA, 30 bp, Artificial Sequence
  Synthetic oligonucleotide
tatgacacagacccaaatgtagtcatcagc

SEQ ID NO: 97146 - DNA, 30 bp, Artificial Sequence
  Synthetic oligonucleotide
taagagcacgagcaaaaggtcaggatcagc

SEQ ID NO: 97147 - DNA, 30 bp, Artificial Sequence
  Synthetic oligonucleotide
aggcaccaagtagatcacgtttaggtcagc

SEQ ID NO: 97148 - DNA, 30 bp, Artificial Sequence
  Synthetic oligonucleotide
aaggggcacaataccggtggaggggtcagc

SEQ ID NO: 97149 - DNA, 30 bp, Artificial Sequence
  Synthetic oligonucleotide
atcagcgaacgcagttcggcgaatgtcagc

SEQ ID NO: 97150 - DNA, 30 bp, Artificial Sequence
  Synthetic oligonucleotide
gcacgtaagtgactgtacaataaaaagagc

SEQ ID NO: 97151 - DNA, 30 bp, Artificial Sequence
  Synthetic oligonucleotide
caatgagagtcgttcatacgggcaaagagc

SEQ ID NO: 97152 - DNA, 30 bp, Artificial Sequence
  Synthetic oligonucleotide
ggaaaaacccacagccgtgtcatcaagagc

SEQ ID NO: 97153 - DNA, 30 bp, Artificial Sequence
  Synthetic oligonucleotide
tgtttcataaaatactgggaactcaagagc

SEQ ID NO: 97154 - DNA, 30 bp, Artificial Sequence
  Synthetic oligonucleotide
gaaccaattcgcccgtcagatctcaagagc

SEQ ID NO: 97155 - DNA, 30 bp, Artificial Sequence
  Synthetic oligonucleotide
agtgactaaacaaacggccgatttaagagc

SEQ ID NO: 97156 - DNA, 30 bp, Artificial Sequence
  Synthetic oligonucleotide
agtgaacccatgccccgaagcctgcagagc

SEQ ID NO: 97157 - DNA, 30 bp, Artificial Sequence
  Synthetic oligonucleotide
tgcgccgatggcccgtagaactaaacgagc

SEQ ID NO: 97158 - DNA, 30 bp, Artificial Sequence
  Synthetic oligonucleotide
ctactcgagtaaatgtatgccacaacgagc

SEQ ID NO: 97159 - DNA, 30 bp, Artificial Sequence
  Synthetic oligonucleotide
ataacctgagcaaagacggctaagacgagc

SEQ ID NO: 97160 - DNA, 30 bp, Artificial Sequence
  Synthetic oligonucleotide
aggggaaaggttaacgcctgatctccgagc

SEQ ID NO: 97161 - DNA, 30 bp, Artificial Sequence
  Synthetic oligonucleotide
gagcggtggataaagtcgccgaaagcgagc

SEQ ID NO: 97162 - DNA, 30 bp, Artificial Sequence
  Synthetic oligonucleotide
tgttaccactcagatgttgtaatagcgagc

SEQ ID NO: 97163 - DNA, 30 bp, Artificial Sequence
  Synthetic oligonucleotide
cataaaaagagggtgtgaacgaatgcgagc

SEQ ID NO: 97164 - DNA, 30 bp, Artificial Sequence
  Synthetic oligonucleotide
ttaggcaaatgttagtacctcacatcgagc

SEQ ID NO: 97165 - DNA, 30 bp, Artificial Sequence
  Synthetic oligonucleotide
cacgagatcgggatctatcccaggtcgagc

SEQ ID NO: 97166 - DNA, 30 bp, Artificial Sequence
  Synthetic oligonucleotide
cggacaccgcgatagcgatgagctcggagc

SEQ ID NO: 97167 - DNA, 30 bp, Artificial Sequence
  Synthetic oligonucleotide
tgcaaagttgggcagctaacgaatgggagc

SEQ ID NO: 97168 - DNA, 30 bp, Artificial Sequence
  Synthetic oligonucleotide
gcgtgtcagggttaggttctcacatggagc

SEQ ID NO: 97169 - DNA, 30 bp, Artificial Sequence
  Synthetic oligonucleotide
cgattgcgtatgaagaagggactttggagc

SEQ ID NO: 97170 - DNA, 30 bp, Artificial Sequence
  Synthetic oligonucleotide
aggccatactacacggtataagtttggagc

SEQ ID NO: 97171 - DNA, 30 bp, Artificial Sequence
  Synthetic oligonucleotide
gacgcgaggctttcgtagaaccccatgagc

SEQ ID NO: 97172 - DNA, 30 bp, Artificial Sequence
  Synthetic oligonucleotide
gccaaccagtatgtccaaatgttactgagc

SEQ ID NO: 97173 - DNA, 30 bp, Artificial Sequence
  Synthetic oligonucleotide
cgactctcaacgagcggtggaagcctgagc

SEQ ID NO: 97174 - DNA, 30 bp, Artificial Sequence
  Synthetic oligonucleotide
gcgacgataaggtccgccgtcttcctgagc

SEQ ID NO: 97175 - DNA, 30 bp, Artificial Sequence
  Synthetic oligonucleotide
ggagaccggaacccagggtctagggtgagc

SEQ ID NO: 97176 - DNA, 30 bp, Artificial Sequence
  Synthetic oligonucleotide
agaaagtcatgcagataatgggttttgagc

SEQ ID NO: 97177 - DNA, 30 bp, Artificial Sequence
  Synthetic oligonucleotide
aggctgcgtctttcccagattgaacatagc

SEQ ID NO: 97178 - DNA, 30 bp, Artificial Sequence
  Synthetic oligonucleotide
actgccgaactccccagacgattccatagc

SEQ ID NO: 97179 - DNA, 30 bp, Artificial Sequence
  Synthetic oligonucleotide
aaatgagttacctagaaagcagaggatagc

SEQ ID NO: 97180 - DNA, 30 bp, Artificial Sequence
  Synthetic oligonucleotide
tccgagtcacgatgaaaccatacggatagc

SEQ ID NO: 97181 - DNA, 30 bp, Artificial Sequence
  Synthetic oligonucleotide
agccgtcaccatagacggtaattggatagc

SEQ ID NO: 97182 - DNA, 30 bp, Artificial Sequence
  Synthetic oligonucleotide
taattcgggtagtcaaaagagaatgatagc

SEQ ID NO: 97183 - DNA, 30 bp, Artificial Sequence
  Synthetic oligonucleotide
cctatgccgccccatagtagaaagtatagc

SEQ ID NO: 97184 - DNA, 30 bp, Artificial Sequence
  Synthetic oligonucleotide
ggtgcagcctgtcgaccaatcggcactagc

SEQ ID NO: 97185 - DNA, 30 bp, Artificial Sequence
  Synthetic oligonucleotide
aacatggagtcacggataactggcactagc

SEQ ID NO: 97186 - DNA, 30 bp, Artificial Sequence
  Synthetic oligonucleotide
cgaatgatttagcatgactatattactagc

SEQ ID NO: 97187 - DNA, 30 bp, Artificial Sequence
  Synthetic oligonucleotide
aagttgggagcccagcacgtgtgtcctagc

SEQ ID NO: 97188 - DNA, 30 bp, Artificial Sequence
  Synthetic oligonucleotide
ggggaacccagctgaaggttattcgctagc

SEQ ID NO: 97189 - DNA, 30 bp, Artificial Sequence
  Synthetic oligonucleotide
gttacaagtcagcagaaatggtaggctagc

SEQ ID NO: 97190 - DNA, 30 bp, Artificial Sequence
  Synthetic oligonucleotide
agcatacaacaccctacgttttctgctagc

SEQ ID NO: 97191 - DNA, 30 bp, Artificial Sequence
  Synthetic oligonucleotide
ccagaccaaaatgcgatttcggagtctagc

SEQ ID NO: 97192 - DNA, 30 bp, Artificial Sequence
  Synthetic oligonucleotide
tatggtatcacataagcatgcgcgtctagc

SEQ ID NO: 97193 - DNA, 30 bp, Artificial Sequence
  Synthetic oligonucleotide
acaaatccatgtcttcgagcgggcagtagc

SEQ ID NO: 97194 - DNA, 30 bp, Artificial Sequence
  Synthetic oligonucleotide
gtagattaggttatgagtcgaagaggtagc

SEQ ID NO: 97195 - DNA, 30 bp, Artificial Sequence
  Synthetic oligonucleotide
agcgtggtgaattggattgtcttcggtagc

SEQ ID NO: 97196 - DNA, 30 bp, Artificial Sequence
  Synthetic oligonucleotide
ggggcgcaaagagcttaaacccggggtagc

SEQ ID NO: 97197 - DNA, 30 bp, Artificial Sequence
  Synthetic oligonucleotide
acggcgatgttctagcgtactgcatgtagc

SEQ ID NO: 97198 - DNA, 30 bp, Artificial Sequence
  Synthetic oligonucleotide
gtaagtggtcaggtctccgaaggatgtagc

SEQ ID NO: 97199 - DNA, 30 bp, Artificial Sequence
  Synthetic oligonucleotide
tgaaaggggatgctctgtattagctgtagc

SEQ ID NO: 97200 - DNA, 30 bp, Artificial Sequence
  Synthetic oligonucleotide
tcggggtaacagggggcccaaagttgtagc

SEQ ID NO: 97201 - DNA, 30 bp, Artificial Sequence
  Synthetic oligonucleotide
tatggaaggcacttggggcttcaaattagc

SEQ ID NO: 97202 - DNA, 30 bp, Artificial Sequence
  Synthetic oligonucleotide
taaagggcctataaaacctaaaggattagc

SEQ ID NO: 97203 - DNA, 30 bp, Artificial Sequence
  Synthetic oligonucleotide
acgattactccgcgagagtatgatattagc

SEQ ID NO: 97204 - DNA, 30 bp, Artificial Sequence
  Synthetic oligonucleotide
gagggaaggaccccgggagcacgtcttagc

SEQ ID NO: 97205 - DNA, 30 bp, Artificial Sequence
  Synthetic oligonucleotide
gttcgttggaaaggtatgattacggttagc

SEQ ID NO: 97206 - DNA, 30 bp, Artificial Sequence
  Synthetic oligonucleotide
ctgtaaatgaaaacagtgttcatttttagc

SEQ ID NO: 97207 - DNA, 30 bp, Artificial Sequence
  Synthetic oligonucleotide
ggagatgagcggctgataacggaaaaacgc

SEQ ID NO: 97208 - DNA, 30 bp, Artificial Sequence
  Synthetic oligonucleotide
agaccagtaaaggaaagatggtaaaaacgc

SEQ ID NO: 97209 - DNA, 30 bp, Artificial Sequence
  Synthetic oligonucleotide
acagtcaagtagaacttgcgtgacaaacgc

SEQ ID NO: 97210 - DNA, 30 bp, Artificial Sequence
  Synthetic oligonucleotide
gcaactgttggcaggagtggacgtaaacgc

SEQ ID NO: 97211 - DNA, 30 bp, Artificial Sequence
  Synthetic oligonucleotide
ggaccctcccccgtgcaacttatccaacgc

SEQ ID NO: 97212 - DNA, 30 bp, Artificial Sequence
  Synthetic oligonucleotide
gtctgctacagcgagcatgaggaagaacgc

SEQ ID NO: 97213 - DNA, 30 bp, Artificial Sequence
  Synthetic oligonucleotide
ccacgggacggtgactactttcaggaacgc

SEQ ID NO: 97214 - DNA, 30 bp, Artificial Sequence
  Synthetic oligonucleotide
cctaactttagcacggtctaaccctaacgc

SEQ ID NO: 97215 - DNA, 30 bp, Artificial Sequence
  Synthetic oligonucleotide
gcttacttagtaggcaagatacgctaacgc

SEQ ID NO: 97216 - DNA, 30 bp, Artificial Sequence
  Synthetic oligonucleotide
ggaacagttgcgatgaccagacagtaacgc

SEQ ID NO: 97217 - DNA, 30 bp, Artificial Sequence
  Synthetic oligonucleotide
gggacggtccaatgctttacaatttaacgc

SEQ ID NO: 97218 - DNA, 30 bp, Artificial Sequence
  Synthetic oligonucleotide
tttcgcaaacatagatgaagttctacacgc

SEQ ID NO: 97219 - DNA, 30 bp, Artificial Sequence
  Synthetic oligonucleotide
ccgaataagttttctaaatattttacacgc

SEQ ID NO: 97220 - DNA, 30 bp, Artificial Sequence
  Synthetic oligonucleotide
atccgactccaccgacatcatctcccacgc

SEQ ID NO: 97221 - DNA, 30 bp, Artificial Sequence
  Synthetic oligonucleotide
ctctaaatcgacgggaataaatactcacgc

SEQ ID NO: 97222 - DNA, 30 bp, Artificial Sequence
  Synthetic oligonucleotide
ttggagagttgtagaactcaaatttcacgc

SEQ ID NO: 97223 - DNA, 30 bp, Artificial Sequence
  Synthetic oligonucleotide
ttaggtaagatttctctccagaccagacgc

SEQ ID NO: 97224 - DNA, 30 bp, Artificial Sequence
  Synthetic oligonucleotide
catcgccaaatgttgctatccaggcgacgc

SEQ ID NO: 97225 - DNA, 30 bp, Artificial Sequence
  Synthetic oligonucleotide
tcctgtagacatggtctcccagatcgacgc

SEQ ID NO: 97226 - DNA, 30 bp, Artificial Sequence
  Synthetic oligonucleotide
acatgtgatacccattatcaagagctacgc

SEQ ID NO: 97227 - DNA, 30 bp, Artificial Sequence
  Synthetic oligonucleotide
gaaggagtcgactaaaaagtctggttacgc

SEQ ID NO: 97228 - DNA, 30 bp, Artificial Sequence
  Synthetic oligonucleotide
cggttacatcacgtgcacggaacaaaccgc

SEQ ID NO: 97229 - DNA, 30 bp, Artificial Sequence
  Synthetic oligonucleotide
aagggtaaggtattcttctgcaccaaccgc

SEQ ID NO: 97230 - DNA, 30 bp, Artificial Sequence
  Synthetic oligonucleotide
aggggctatactaggccgtccagacaccgc

SEQ ID NO: 97231 - DNA, 30 bp, Artificial Sequence
  Synthetic oligonucleotide
ccatcgcatggttaaacctagagagaccgc

SEQ ID NO: 97232 - DNA, 30 bp, Artificial Sequence
  Synthetic oligonucleotide
caagttcgtaaggcaggttcgagggaccgc

SEQ ID NO: 97233 - DNA, 30 bp, Artificial Sequence
  Synthetic oligonucleotide
aaacaggctaagcgaagttggagttaccgc

SEQ ID NO: 97234 - DNA, 30 bp, Artificial Sequence
  Synthetic oligonucleotide
cctccggcacctgagtggcagaaaacccgc

SEQ ID NO: 97235 - DNA, 30 bp, Artificial Sequence
  Synthetic oligonucleotide
tctccgcactaaatccagaacggcacccgc

SEQ ID NO: 97236 - DNA, 30 bp, Artificial Sequence
  Synthetic oligonucleotide
atggtctgagaacattaggggatcacccgc

SEQ ID NO: 97237 - DNA, 30 bp, Artificial Sequence
  Synthetic oligonucleotide
caggctatgggtagcccaccaaggacccgc

SEQ ID NO: 97238 - DNA, 30 bp, Artificial Sequence
  Synthetic oligonucleotide
gatgtcggattgcgacgagatattccccgc

SEQ ID NO: 97239 - DNA, 30 bp, Artificial Sequence
  Synthetic oligonucleotide
ccttggtagatagatgaaaagttagcccgc

SEQ ID NO: 97240 - DNA, 30 bp, Artificial Sequence
  Synthetic oligonucleotide
gatatggggggtcggataacaatcgcccgc

SEQ ID NO: 97241 - DNA, 30 bp, Artificial Sequence
  Synthetic oligonucleotide
gctcatgttactcaaaccgataaaagccgc

SEQ ID NO: 97242 - DNA, 30 bp, Artificial Sequence
  Synthetic oligonucleotide
tgggggtcaggttcaattgaccatcgccgc

SEQ ID NO: 97243 - DNA, 30 bp, Artificial Sequence
  Synthetic oligonucleotide
tctgaccgtcgaagatacccgggctgccgc

SEQ ID NO: 97244 - DNA, 29 bp, Artificial Sequence
  Synthetic oligonucleotide
cgcgtggggagtaagaatggaagtgccgc

SEQ ID NO: 97245 - DNA, 30 bp, Artificial Sequence
  Synthetic oligonucleotide
ggagtgtgggctcgtctggaaatgtgccgc

SEQ ID NO: 97246 - DNA, 30 bp, Artificial Sequence
  Synthetic oligonucleotide
cgaacccaggcgcctactcgagatatccgc

SEQ ID NO: 97247 - DNA, 30 bp, Artificial Sequence
  Synthetic oligonucleotide
agatcgcccccgatccgaggtagactccgc

SEQ ID NO: 97248 - DNA, 30 bp, Artificial Sequence
  Synthetic oligonucleotide
tgcgagtgggatctttagcgtgctctccgc

SEQ ID NO: 97249 - DNA, 30 bp, Artificial Sequence
  Synthetic oligonucleotide
acccgaaggtatcagaggcgcatcttccgc

SEQ ID NO: 97250 - DNA, 30 bp, Artificial Sequence
  Synthetic oligonucleotide
tggaaagctaaagcgcgtacgaatttccgc

SEQ ID NO: 97251 - DNA, 30 bp, Artificial Sequence
  Synthetic oligonucleotide
tcaagtgactgcatttcccatagtttccgc

SEQ ID NO: 97252 - DNA, 30 bp, Artificial Sequence
  Synthetic oligonucleotide
atctaacgccgtccactggacaacaagcgc

SEQ ID NO: 97253 - DNA, 30 bp, Artificial Sequence
  Synthetic oligonucleotide
catctaggacaccacctcgcccgcaagcgc

SEQ ID NO: 97254 - DNA, 30 bp, Artificial Sequence
  Synthetic oligonucleotide
tacgtaaagcggttagcggggaataagcgc

SEQ ID NO: 97255 - DNA, 30 bp, Artificial Sequence
  Synthetic oligonucleotide
cattaaacggtctcggcatccactcagcgc

SEQ ID NO: 97256 - DNA, 30 bp, Artificial Sequence
  Synthetic oligonucleotide
cccgccgtccgaggtaacggaataccgcgc

SEQ ID NO: 97257 - DNA, 30 bp, Artificial Sequence
  Synthetic oligonucleotide
acggctagctatcgacgcaaagtcccgcgc

SEQ ID NO: 97258 - DNA, 30 bp, Artificial Sequence
  Synthetic oligonucleotide
ggaagggaatcaaacaaaatgattgcgcgc

SEQ ID NO: 97259 - DNA, 30 bp, Artificial Sequence
  Synthetic oligonucleotide
cggatagcggccgtgcccacaaaatcgcgc

SEQ ID NO: 97260 - DNA, 30 bp, Artificial Sequence
  Synthetic oligonucleotide
tttgggatcggctcattacgaatatcgcgc

SEQ ID NO: 97261 - DNA, 30 bp, Artificial Sequence
  Synthetic oligonucleotide
tgccgtccggtagtaaaaagtgtgtcgcgc

SEQ ID NO: 97262 - DNA, 30 bp, Artificial Sequence
  Synthetic oligonucleotide
ccgggggttggcctgggcagaagttcgcgc

SEQ ID NO: 97263 - DNA, 30 bp, Artificial Sequence
  Synthetic oligonucleotide
gggctagcttgatatcaggaccaaaggcgc

SEQ ID NO: 97264 - DNA, 30 bp, Artificial Sequence
  Synthetic oligonucleotide
gtaacaccaatagagttactggttaggcgc

SEQ ID NO: 97265 - DNA, 30 bp, Artificial Sequence
  Synthetic oligonucleotide
catcattcggagtgacaaaagagaatgcgc

SEQ ID NO: 97266 - DNA, 30 bp, Artificial Sequence
  Synthetic oligonucleotide
tgccgtatccgactcaggctccacatgcgc

SEQ ID NO: 97267 - DNA, 30 bp, Artificial Sequence
  Synthetic oligonucleotide
gtacatgtatttaaaggtccggttgtgcgc

SEQ ID NO: 97268 - DNA, 30 bp, Artificial Sequence
  Synthetic oligonucleotide
cgacttcgtcttctgttgtttgttgtgcgc

SEQ ID NO: 97269 - DNA, 30 bp, Artificial Sequence
  Synthetic oligonucleotide
gaaattgtgcggtcccagatcaacttgcgc

SEQ ID NO: 97270 - DNA, 30 bp, Artificial Sequence
  Synthetic oligonucleotide
agtctatgaaagtcacgatcgtacttgcgc

SEQ ID NO: 97271 - DNA, 30 bp, Artificial Sequence
  Synthetic oligonucleotide
cgaggtaattgacatgagtaccgtcatcgc

SEQ ID NO: 97272 - DNA, 30 bp, Artificial Sequence
  Synthetic oligonucleotide
acaaggaagctagcttactaaacggatcgc

SEQ ID NO: 97273 - DNA, 30 bp, Artificial Sequence
  Synthetic oligonucleotide
gaacaccctgcattgatgtgacatactcgc

SEQ ID NO: 97274 - DNA, 30 bp, Artificial Sequence
  Synthetic oligonucleotide
cacttaaatgttgggacgatcggtactcgc

SEQ ID NO: 97275 - DNA, 30 bp, Artificial Sequence
  Synthetic oligonucleotide
cacacgaccggtatcgaaagtatccctcgc

SEQ ID NO: 97276 - DNA, 31 bp, Artificial Sequence
  Synthetic oligonucleotide
gccacgaataaaatataacacaatgtctcgc

SEQ ID NO: 97277 - DNA, 30 bp, Artificial Sequence
  Synthetic oligonucleotide
aacatatgatagcatcgggtgtaaagtcgc

SEQ ID NO: 97278 - DNA, 30 bp, Artificial Sequence
  Synthetic oligonucleotide
gatgctatcagggcaaaatacgtacgtcgc

SEQ ID NO: 97279 - DNA, 30 bp, Artificial Sequence
  Synthetic oligonucleotide
acgatctaatgcgccattttgtctattcgc

SEQ ID NO: 97280 - DNA, 30 bp, Artificial Sequence
  Synthetic oligonucleotide
gaacagaatggagtgtcaattagtattcgc

SEQ ID NO: 97281 - DNA, 30 bp, Artificial Sequence
  Synthetic oligonucleotide
atgaggctcaacatgtagaaccatcttcgc

SEQ ID NO: 97282 - DNA, 30 bp, Artificial Sequence
  Synthetic oligonucleotide
tctccggccatatccctattgcctcttcgc

SEQ ID NO: 97283 - DNA, 30 bp, Artificial Sequence
  Synthetic oligonucleotide
gatcgtaggagtgtatatagaagcgttcgc

SEQ ID NO: 97284 - DNA, 30 bp, Artificial Sequence
  Synthetic oligonucleotide
aggaagccggtgacccatccacaaaaaggc

SEQ ID NO: 97285 - DNA, 30 bp, Artificial Sequence
  Synthetic oligonucleotide
atcgggcccggtaatatggcgttaaaaggc

SEQ ID NO: 97286 - DNA, 30 bp, Artificial Sequence
  Synthetic oligonucleotide
tagacgtcaatagggaaggaagctaaaggc

SEQ ID NO: 97287 - DNA, 30 bp, Artificial Sequence
  Synthetic oligonucleotide
ttgcgcgtgcaaacgggctggagtaaaggc

SEQ ID NO: 97288 - DNA, 30 bp, Artificial Sequence
  Synthetic oligonucleotide
accacacatcggggcggttattaacaaggc

SEQ ID NO: 97289 - DNA, 30 bp, Artificial Sequence
  Synthetic oligonucleotide
tcagagtagacataactacgttaccaaggc

SEQ ID NO: 97290 - DNA, 30 bp, Artificial Sequence
  Synthetic oligonucleotide
agtatacagttcccgcaagaggagcaaggc

SEQ ID NO: 97291 - DNA, 30 bp, Artificial Sequence
  Synthetic oligonucleotide
ttcgtgggcgtcacctggaatggtcaaggc

SEQ ID NO: 97292 - DNA, 30 bp, Artificial Sequence
  Synthetic oligonucleotide
catgaagatttcacgggccggcgcgaaggc

SEQ ID NO: 97293 - DNA, 30 bp, Artificial Sequence
  Synthetic oligonucleotide
ccttgaaaaattaaaaccggtgaggaaggc

SEQ ID NO: 97294 - DNA, 30 bp, Artificial Sequence
  Synthetic oligonucleotide
cttaggccagtgtcggtgcttgctgaaggc

SEQ ID NO: 97295 - DNA, 30 bp, Artificial Sequence
  Synthetic oligonucleotide
tcacaaaatagggggagaggttcaacaggc

SEQ ID NO: 97296 - DNA, 30 bp, Artificial Sequence
  Synthetic oligonucleotide
tcagtagatgtgtgaggaaattccacaggc

SEQ ID NO: 97297 - DNA, 30 bp, Artificial Sequence
  Synthetic oligonucleotide
acctggggcttcacgactttaagtacaggc

SEQ ID NO: 97298 - DNA, 30 bp, Artificial Sequence
  Synthetic oligonucleotide
cagggcgtcgggggtcagttcgacccaggc

SEQ ID NO: 97299 - DNA, 30 bp, Artificial Sequence
  Synthetic oligonucleotide
gtaaggctaaaacttattcggaaagcaggc

SEQ ID NO: 97300 - DNA, 30 bp, Artificial Sequence
  Synthetic oligonucleotide
gaccggtaagcagttgctttctaatcaggc

SEQ ID NO: 97301 - DNA, 30 bp, Artificial Sequence
  Synthetic oligonucleotide
acgatatcttcgcatcgagacacatcaggc

SEQ ID NO: 97302 - DNA, 30 bp, Artificial Sequence
  Synthetic oligonucleotide
gtcaggacgtgtgagatactcaagtcaggc

SEQ ID NO: 97303 - DNA, 30 bp, Artificial Sequence
  Synthetic oligonucleotide
gaaacgaagttatgtaacatttccagaggc

SEQ ID NO: 97304 - DNA, 30 bp, Artificial Sequence
  Synthetic oligonucleotide
tgaaaacatccaagttccacgcgcagaggc

SEQ ID NO: 97305 - DNA, 30 bp, Artificial Sequence
  Synthetic oligonucleotide
aaggtctgggtcattaaccgggagcgaggc

SEQ ID NO: 97306 - DNA, 30 bp, Artificial Sequence
  Synthetic oligonucleotide
tcgtgcaaatttggtacggatagcggaggc

SEQ ID NO: 97307 - DNA, 30 bp, Artificial Sequence
  Synthetic oligonucleotide
tctcgagaggggccccactccacatgaggc

SEQ ID NO: 97308 - DNA, 30 bp, Artificial Sequence
  Synthetic oligonucleotide
gtgaggtatgacacatcggacacttgaggc

SEQ ID NO: 97309 - DNA, 30 bp, Artificial Sequence
  Synthetic oligonucleotide
ccaattggagacaaaaggtcaaacataggc

SEQ ID NO: 97310 - DNA, 30 bp, Artificial Sequence
  Synthetic oligonucleotide
tcgaggctcagatcgtgtgtacacctaggc

SEQ ID NO: 97311 - DNA, 30 bp, Artificial Sequence
  Synthetic oligonucleotide
gggcaacttcaagatgtggatatcctaggc

SEQ ID NO: 97312 - DNA, 30 bp, Artificial Sequence
  Synthetic oligonucleotide
tgcgacatgtacctgtacctggatctaggc

SEQ ID NO: 97313 - DNA, 30 bp, Artificial Sequence
  Synthetic oligonucleotide
gggtccgatacttgcactcatctagtaggc

SEQ ID NO: 97314 - DNA, 30 bp, Artificial Sequence
  Synthetic oligonucleotide
cggagacagtttatttcgagcctcttaggc

SEQ ID NO: 97315 - DNA, 30 bp, Artificial Sequence
  Synthetic oligonucleotide
ggtcacatagtggggcggatatcaaacggc

SEQ ID NO: 97316 - DNA, 30 bp, Artificial Sequence
  Synthetic oligonucleotide
tccaagaggtcgagattcatagataacggc

SEQ ID NO: 97317 - DNA, 30 bp, Artificial Sequence
  Synthetic oligonucleotide
acaattaatccggagcggaacccagacggc

SEQ ID NO: 97318 - DNA, 30 bp, Artificial Sequence
  Synthetic oligonucleotide
tggggttcgacgaggtaagaatctgacggc

SEQ ID NO: 97319 - DNA, 30 bp, Artificial Sequence
  Synthetic oligonucleotide
ggtaatgcggaaactcgtagaaaatacggc

SEQ ID NO: 97320 - DNA, 30 bp, Artificial Sequence
  Synthetic oligonucleotide
taagatgggtcatctacgtacacatacggc

SEQ ID NO: 97321 - DNA, 30 bp, Artificial Sequence
  Synthetic oligonucleotide
gcaatggcggaaattttactcggatacggc

SEQ ID NO: 97322 - DNA, 30 bp, Artificial Sequence
  Synthetic oligonucleotide
tgtggagaacttataatggatacttacggc

SEQ ID NO: 97323 - DNA, 30 bp, Artificial Sequence
  Synthetic oligonucleotide
tgctgaggcgcgaatcgcgagtagaccggc

SEQ ID NO: 97324 - DNA, 30 bp, Artificial Sequence
  Synthetic oligonucleotide
tccagaacgggcctaaaagactatcccggc

SEQ ID NO: 97325 - DNA, 30 bp, Artificial Sequence
  Synthetic oligonucleotide
ttgcttctagcatggagaagtctagccggc

SEQ ID NO: 97326 - DNA, 30 bp, Artificial Sequence
  Synthetic oligonucleotide
cagtaccgcgcatgtcaggtggaggccggc

SEQ ID NO: 97327 - DNA, 30 bp, Artificial Sequence
  Synthetic oligonucleotide
ccatgtctgctcatgaaacatcattccggc

SEQ ID NO: 97328 - DNA, 30 bp, Artificial Sequence
  Synthetic oligonucleotide
atcacagtgggccccaaaaacaaacgcggc

SEQ ID NO: 97329 - DNA, 30 bp, Artificial Sequence
  Synthetic oligonucleotide
gcggctaataactgagatccctagtgcggc

SEQ ID NO: 97330 - DNA, 30 bp, Artificial Sequence
  Synthetic oligonucleotide
gctgactgaaaatgggtggtaccttgcggc

SEQ ID NO: 97331 - DNA, 30 bp, Artificial Sequence
  Synthetic oligonucleotide
ggagtagacgagaaaggtttaaggatcggc

SEQ ID NO: 97332 - DNA, 30 bp, Artificial Sequence
  Synthetic oligonucleotide
atacaaatctatcgatcaaggaacctcggc

SEQ ID NO: 97333 - DNA, 31 bp, Artificial Sequence
  Synthetic oligonucleotide
atgaaagagttaacaaggcaaacagctcggc

SEQ ID NO: 97334 - DNA, 30 bp, Artificial Sequence
  Synthetic oligonucleotide
gccacgtcatcatgaaccattgcattcggc

SEQ ID NO: 97335 - DNA, 30 bp, Artificial Sequence
  Synthetic oligonucleotide
catcgcattccacggtaagcgaatttcggc

SEQ ID NO: 97336 - DNA, 30 bp, Artificial Sequence
  Synthetic oligonucleotide
tagatcgttgctcgtagcgaaggaaagggc

SEQ ID NO: 97337 - DNA, 30 bp, Artificial Sequence
  Synthetic oligonucleotide
accgcggcacatcggtaataagtcaagggc

SEQ ID NO: 97338 - DNA, 30 bp, Artificial Sequence
  Synthetic oligonucleotide
gcagtaaaatggcgtattggatgtaagggc

SEQ ID NO: 97339 - DNA, 30 bp, Artificial Sequence
  Synthetic oligonucleotide
taggcaatctaaggtttatcagttaagggc

SEQ ID NO: 97340 - DNA, 30 bp, Artificial Sequence
  Synthetic oligonucleotide
tctagggttaatcaccccacttcccagggc

SEQ ID NO: 97341 - DNA, 30 bp, Artificial Sequence
  Synthetic oligonucleotide
gtgactagagagcttagtggtgggcagggc

SEQ ID NO: 97342 - DNA, 30 bp, Artificial Sequence
  Synthetic oligonucleotide
cacgaaacggatggggtaacgcttcagggc

SEQ ID NO: 97343 - DNA, 30 bp, Artificial Sequence
  Synthetic oligonucleotide
gcaagacaggatgggcctgttttagagggc

SEQ ID NO: 97344 - DNA, 30 bp, Artificial Sequence
  Synthetic oligonucleotide
tgttgatcacggagggctatggaggagggc

SEQ ID NO: 97345 - DNA, 30 bp, Artificial Sequence
  Synthetic oligonucleotide
cgcggtcaatccccaacttccatatagggc

SEQ ID NO: 97346 - DNA, 30 bp, Artificial Sequence
  Synthetic oligonucleotide
ccacttatcacagtcaaagtagattagggc

SEQ ID NO: 97347 - DNA, 30 bp, Artificial Sequence
  Synthetic oligonucleotide
ggtgagcgtgggagtttagttaagacgggc

SEQ ID NO: 97348 - DNA, 30 bp, Artificial Sequence
  Synthetic oligonucleotide
cagtccgaacctgtaacctcgttaccgggc

SEQ ID NO: 97349 - DNA, 30 bp, Artificial Sequence
  Synthetic oligonucleotide
agagcgctggcaagtcaattacaaaggggc

SEQ ID NO: 97350 - DNA, 30 bp, Artificial Sequence
  Synthetic oligonucleotide
ccacaactatctgtaggagcgctcaggggc

SEQ ID NO: 97351 - DNA, 30 bp, Artificial Sequence
  Synthetic oligonucleotide
caccaagtcgttggagagcagtctaggggc

SEQ ID NO: 97352 - DNA, 30 bp, Artificial Sequence
  Synthetic oligonucleotide
gggctaaatcgcgaatcgtggggtaggggc

SEQ ID NO: 97353 - DNA, 30 bp, Artificial Sequence
  Synthetic oligonucleotide
actctaatcaaacactagttctcagggggc

SEQ ID NO: 97354 - DNA, 30 bp, Artificial Sequence
  Synthetic oligonucleotide
cggtagtattcataagcggctgcgtggggc

SEQ ID NO: 97355 - DNA, 30 bp, Artificial Sequence
  Synthetic oligonucleotide
tgcgacaatgtgaattttattaacgtgggc

SEQ ID NO: 97356 - DNA, 30 bp, Artificial Sequence
  Synthetic oligonucleotide
caccggtcccctccgaggacattcgtgggc

SEQ ID NO: 97357 - DNA, 30 bp, Artificial Sequence
  Synthetic oligonucleotide
ggaacattgacagtccgatttctggtgggc

SEQ ID NO: 97358 - DNA, 30 bp, Artificial Sequence
  Synthetic oligonucleotide
ggaggttacgtaaacgttgcttgtttgggc

SEQ ID NO: 97359 - DNA, 30 bp, Artificial Sequence
  Synthetic oligonucleotide
ttgcgagttcatagagcgcgacttttgggc

SEQ ID NO: 97360 - DNA, 30 bp, Artificial Sequence
  Synthetic oligonucleotide
agtgtcatcctaagagagaaaaacaatggc

SEQ ID NO: 97361 - DNA, 30 bp, Artificial Sequence
  Synthetic oligonucleotide
tctagaagagcaaattagggcccgaatggc

SEQ ID NO: 97362 - DNA, 30 bp, Artificial Sequence
  Synthetic oligonucleotide
tccacaggatcagcaacaagagcccatggc

SEQ ID NO: 97363 - DNA, 30 bp, Artificial Sequence
  Synthetic oligonucleotide
acaaacagtgacgggaaagtttaagctggc

SEQ ID NO: 97364 - DNA, 30 bp, Artificial Sequence
  Synthetic oligonucleotide
cagagatcgaagtggccgttacagtctggc

SEQ ID NO: 97365 - DNA, 30 bp, Artificial Sequence
  Synthetic oligonucleotide
cccagataaagcatggagggacggtctggc

SEQ ID NO: 97366 - DNA, 30 bp, Artificial Sequence
  Synthetic oligonucleotide
gagttaaccaacgtaacgttacggtctggc

SEQ ID NO: 97367 - DNA, 30 bp, Artificial Sequence
  Synthetic oligonucleotide
gttttgaagggtatccaagagtgaagtggc

SEQ ID NO: 97368 - DNA, 30 bp, Artificial Sequence
  Synthetic oligonucleotide
ccaagagggtaatataccctagggagtggc

SEQ ID NO: 97369 - DNA, 30 bp, Artificial Sequence
  Synthetic oligonucleotide
tacccatggatgcgaaagtactcgcgtggc

SEQ ID NO: 97370 - DNA, 30 bp, Artificial Sequence
  Synthetic oligonucleotide
agctaggaacgggctaggtagcactgtggc

SEQ ID NO: 97371 - DNA, 31 bp, Artificial Sequence
  Synthetic oligonucleotide
ttcaggactaaacgccaacgaccagattggc

SEQ ID NO: 97372 - DNA, 30 bp, Artificial Sequence
  Synthetic oligonucleotide
ggaaggcagtgtcagcctgctgctattggc

SEQ ID NO: 97373 - DNA, 30 bp, Artificial Sequence
  Synthetic oligonucleotide
gagagagtacctcaaacccggaggtttggc

SEQ ID NO: 97374 - DNA, 30 bp, Artificial Sequence
  Synthetic oligonucleotide
agtagtcgacaggtgtggagaagttttggc

SEQ ID NO: 97375 - DNA, 30 bp, Artificial Sequence
  Synthetic oligonucleotide
gtgaaccgtaattgagaagtcagttttggc

SEQ ID NO: 97376 - DNA, 30 bp, Artificial Sequence
  Synthetic oligonucleotide
ttggctggcaccccgtaataaaccaaatgc

SEQ ID NO: 97377 - DNA, 30 bp, Artificial Sequence
  Synthetic oligonucleotide
cggtttaaaaattaggggaggtaacaatgc

SEQ ID NO: 97378 - DNA, 30 bp, Artificial Sequence
  Synthetic oligonucleotide
gtgataataaggcatcttacaaacgaatgc

SEQ ID NO: 97379 - DNA, 30 bp, Artificial Sequence
  Synthetic oligonucleotide
actagatatcaaacgggcgcatcggaatgc

SEQ ID NO: 97380 - DNA, 30 bp, Artificial Sequence
  Synthetic oligonucleotide
ggtcgataataatgtatagcgtctgaatgc

SEQ ID NO: 97381 - DNA, 30 bp, Artificial Sequence
  Synthetic oligonucleotide
cggaacggctccctcatttcatagtaatgc

SEQ ID NO: 97382 - DNA, 30 bp, Artificial Sequence
  Synthetic oligonucleotide
gaggatcgtaggaaactaaccacttaatgc

SEQ ID NO: 97383 - DNA, 30 bp, Artificial Sequence
  Synthetic oligonucleotide
acactgatttaaatctagacgacttaatgc

SEQ ID NO: 97384 - DNA, 30 bp, Artificial Sequence
  Synthetic oligonucleotide
tcgagaggtatcatgcgttgctccacatgc

SEQ ID NO: 97385 - DNA, 30 bp, Artificial Sequence
  Synthetic oligonucleotide
tcggtgggaagcggcgacctgctcacatgc

SEQ ID NO: 97386 - DNA, 30 bp, Artificial Sequence
  Synthetic oligonucleotide
ccgcaagattctgtgtatcttccaccatgc

SEQ ID NO: 97387 - DNA, 30 bp, Artificial Sequence
  Synthetic oligonucleotide
aaagggtcaaaatatgccaaggaggcatgc

SEQ ID NO: 97388 - DNA, 30 bp, Artificial Sequence
  Synthetic oligonucleotide
aacacaggtaaatccagataaagtgcatgc

SEQ ID NO: 97389 - DNA, 30 bp, Artificial Sequence
  Synthetic oligonucleotide
gtgtgaagtcgtaggtctacgagatcatgc

SEQ ID NO: 97390 - DNA, 30 bp, Artificial Sequence
  Synthetic oligonucleotide
gtggaggtaaaaccactagtgagatcatgc

SEQ ID NO: 97391 - DNA, 31 bp, Artificial Sequence
  Synthetic oligonucleotide
caatgcactttccattccgaaccgatcatgc

SEQ ID NO: 97392 - DNA, 30 bp, Artificial Sequence
  Synthetic oligonucleotide
tcaatcccggccagggggaatgacagatgc

SEQ ID NO: 97393 - DNA, 30 bp, Artificial Sequence
  Synthetic oligonucleotide
gcctgaacctgtataacaaatcagagatgc

SEQ ID NO: 97394 - DNA, 30 bp, Artificial Sequence
  Synthetic oligonucleotide
ggagtagcgggacgcaattcagtccgatgc

SEQ ID NO: 97395 - DNA, 30 bp, Artificial Sequence
  Synthetic oligonucleotide
tgttgcggaagtggagattaccctggatgc

SEQ ID NO: 97396 - DNA, 30 bp, Artificial Sequence
  Synthetic oligonucleotide
cacacggatccatagatgttagccatatgc

SEQ ID NO: 97397 - DNA, 30 bp, Artificial Sequence
  Synthetic oligonucleotide
agcgggcaagcaccgtggctaggtatatgc

SEQ ID NO: 97398 - DNA, 30 bp, Artificial Sequence
  Synthetic oligonucleotide
cggggaggaaagtccaggcgggttatatgc

SEQ ID NO: 97399 - DNA, 30 bp, Artificial Sequence
  Synthetic oligonucleotide
atcgagattctgaacagccagtaagtatgc

SEQ ID NO: 97400 - DNA, 30 bp, Artificial Sequence
  Synthetic oligonucleotide
cctaacactgcggcggatacaactgtatgc

SEQ ID NO: 97401 - DNA, 30 bp, Artificial Sequence
  Synthetic oligonucleotide
tttcccgaggtagcgagatggcgtgtatgc

SEQ ID NO: 97402 - DNA, 30 bp, Artificial Sequence
  Synthetic oligonucleotide
taaaaatacaggggtcgtagaccgttatgc

SEQ ID NO: 97403 - DNA, 30 bp, Artificial Sequence
  Synthetic oligonucleotide
gacctggcgtagagtctccacggaaactgc

SEQ ID NO: 97404 - DNA, 30 bp, Artificial Sequence
  Synthetic oligonucleotide
atcgccgaaatgctcgaccaattaaactgc

SEQ ID NO: 97405 - DNA, 30 bp, Artificial Sequence
  Synthetic oligonucleotide
cgctagttcgctcgtaggataaacaactgc

SEQ ID NO: 97406 - DNA, 30 bp, Artificial Sequence
  Synthetic oligonucleotide
cgtcgcgaactacttttcctagttcactgc

SEQ ID NO: 97407 - DNA, 30 bp, Artificial Sequence
  Synthetic oligonucleotide
gacagtatcataagcggaaaagaagactgc

SEQ ID NO: 97408 - DNA, 30 bp, Artificial Sequence
  Synthetic oligonucleotide
ggcaattgagccgttatgtgtcaatactgc

SEQ ID NO: 97409 - DNA, 30 bp, Artificial Sequence
  Synthetic oligonucleotide
gtcgggcggtgttaagtacagcgtccctgc

SEQ ID NO: 97410 - DNA, 30 bp, Artificial Sequence
  Synthetic oligonucleotide
aggggctgaatctcagttgcgataagctgc

SEQ ID NO: 97411 - DNA, 30 bp, Artificial Sequence
  Synthetic oligonucleotide
ttatagcttcaaaccgaaaggagtcgctgc

SEQ ID NO: 97412 - DNA, 30 bp, Artificial Sequence
  Synthetic oligonucleotide
cgagcaccccgatgcgtttaagactgctgc

SEQ ID NO: 97413 - DNA, 30 bp, Artificial Sequence
  Synthetic oligonucleotide
tctacgatctcaatgcgtactttactctgc

SEQ ID NO: 97414 - DNA, 30 bp, Artificial Sequence
  Synthetic oligonucleotide
atcacgtatggcatccgtcgtgcattctgc

SEQ ID NO: 97415 - DNA, 30 bp, Artificial Sequence
  Synthetic oligonucleotide
gggctttgccagatgacattgaagttctgc

SEQ ID NO: 97416 - DNA, 30 bp, Artificial Sequence
  Synthetic oligonucleotide
gggcgtacgaatagtttggcctaaaagtgc

SEQ ID NO: 97417 - DNA, 30 bp, Artificial Sequence
  Synthetic oligonucleotide
atgagcataactaaggcatggcgaaagtgc

SEQ ID NO: 97418 - DNA, 30 bp, Artificial Sequence
  Synthetic oligonucleotide
cctcgagcaacaggctggataggaaagtgc

SEQ ID NO: 97419 - DNA, 30 bp, Artificial Sequence
  Synthetic oligonucleotide
acagttagaacgggggcaattgtgaagtgc

SEQ ID NO: 97420 - DNA, 30 bp, Artificial Sequence
  Synthetic oligonucleotide
cgataagttaagtgtagattgtagcagtgc

SEQ ID NO: 97421 - DNA, 30 bp, Artificial Sequence
  Synthetic oligonucleotide
cggaattattcagatcattaatcgcagtgc

SEQ ID NO: 97422 - DNA, 30 bp, Artificial Sequence
  Synthetic oligonucleotide
atatgaaggagggattgcttgcaggagtgc

SEQ ID NO: 97423 - DNA, 30 bp, Artificial Sequence
  Synthetic oligonucleotide
taccgcggcagtgagttggggcgaacgtgc

SEQ ID NO: 97424 - DNA, 30 bp, Artificial Sequence
  Synthetic oligonucleotide
acacgaggtagtatctacacttctacgtgc

SEQ ID NO: 97425 - DNA, 30 bp, Artificial Sequence
  Synthetic oligonucleotide
gtacaattacaccatttgcgagccccgtgc

SEQ ID NO: 97426 - DNA, 30 bp, Artificial Sequence
  Synthetic oligonucleotide
aaggcgtagggattaacttgttaggcgtgc

SEQ ID NO: 97427 - DNA, 30 bp, Artificial Sequence
  Synthetic oligonucleotide
gcaccagcgctatcaagcaaaaagaggtgc

SEQ ID NO: 97428 - DNA, 30 bp, Artificial Sequence
  Synthetic oligonucleotide
tcccaacggagacggtccaaaaaggggtgc

SEQ ID NO: 97429 - DNA, 30 bp, Artificial Sequence
  Synthetic oligonucleotide
cgttcacctaattcggatatgtaactgtgc

SEQ ID NO: 97430 - DNA, 30 bp, Artificial Sequence
  Synthetic oligonucleotide
cgaaggttagaattttatatcgtgctgtgc

SEQ ID NO: 97431 - DNA, 30 bp, Artificial Sequence
  Synthetic oligonucleotide
ttgcgcaagccacactgaaaaggaaattgc

SEQ ID NO: 97432 - DNA, 30 bp, Artificial Sequence
  Synthetic oligonucleotide
cgggtagtctaagctataatgtcgcattgc

SEQ ID NO: 97433 - DNA, 30 bp, Artificial Sequence
  Synthetic oligonucleotide
cgctgacttaaaccaggactgcgggattgc

SEQ ID NO: 97434 - DNA, 30 bp, Artificial Sequence
  Synthetic oligonucleotide
tgactagtcatgcatagaacacttgattgc

SEQ ID NO: 97435 - DNA, 30 bp, Artificial Sequence
  Synthetic oligonucleotide
tggatagcgtcttaccaccgtcactattgc

SEQ ID NO: 97436 - DNA, 30 bp, Artificial Sequence
  Synthetic oligonucleotide
tcggcgacactgaaccaatgagggacttgc

SEQ ID NO: 97437 - DNA, 30 bp, Artificial Sequence
  Synthetic oligonucleotide
tcatacataccactttcgtatccatcttgc

SEQ ID NO: 97438 - DNA, 30 bp, Artificial Sequence
  Synthetic oligonucleotide
aagtctatcggaagccacacgaaaagttgc

SEQ ID NO: 97439 - DNA, 30 bp, Artificial Sequence
  Synthetic oligonucleotide
gaatcgagggagattttcatgcttagttgc

SEQ ID NO: 97440 - DNA, 30 bp, Artificial Sequence
  Synthetic oligonucleotide
taccgccctattcgaaggagttatcgttgc

SEQ ID NO: 97441 - DNA, 30 bp, Artificial Sequence
  Synthetic oligonucleotide
agacgggcgaagttatttaattagggttgc

SEQ ID NO: 97442 - DNA, 30 bp, Artificial Sequence
  Synthetic oligonucleotide
ggcggcacctccgccagacaaacatgttgc

SEQ ID NO: 97443 - DNA, 30 bp, Artificial Sequence
  Synthetic oligonucleotide
aacgatgaagggaagatggctaaaatttgc

SEQ ID NO: 97444 - DNA, 30 bp, Artificial Sequence
  Synthetic oligonucleotide
aggtcggatgattttggctaggaaatttgc

SEQ ID NO: 97445 - DNA, 30 bp, Artificial Sequence
  Synthetic oligonucleotide
tcgccggagggcagaaaggccggcatttgc

SEQ ID NO: 97446 - DNA, 30 bp, Artificial Sequence
  Synthetic oligonucleotide
acgtgaagggcattacctgagggcatttgc

SEQ ID NO: 97447 - DNA, 30 bp, Artificial Sequence
  Synthetic oligonucleotide
acagtctattgagggagactgaagatttgc

SEQ ID NO: 97448 - DNA, 30 bp, Artificial Sequence
  Synthetic oligonucleotide
agggcatggcacaaggaaggaccgctttgc

SEQ ID NO: 97449 - DNA, 30 bp, Artificial Sequence
  Synthetic oligonucleotide
gcgatctattgtcagtgaggagcagtttgc

SEQ ID NO: 97450 - DNA, 30 bp, Artificial Sequence
  Synthetic oligonucleotide
cggagcggcatgaaccactaagagaaaatc

SEQ ID NO: 97451 - DNA, 30 bp, Artificial Sequence
  Synthetic oligonucleotide
attgagaccaactctcggagttagcaaatc

SEQ ID NO: 97452 - DNA, 30 bp, Artificial Sequence
  Synthetic oligonucleotide
tgctccgatcgcatggagcaatcgcaaatc

SEQ ID NO: 97453 - DNA, 30 bp, Artificial Sequence
  Synthetic oligonucleotide
ttaagccacacatgagcaatatgagaaatc

SEQ ID NO: 97454 - DNA, 30 bp, Artificial Sequence
  Synthetic oligonucleotide
tgaggtgctcccctaccaaatgagacaatc

SEQ ID NO: 97455 - DNA, 30 bp, Artificial Sequence
  Synthetic oligonucleotide
cgccgcggcaaacggggaattacgacaatc

SEQ ID NO: 97456 - DNA, 30 bp, Artificial Sequence
  Synthetic oligonucleotide
cgaggttactgagcgatttctgtcccaatc

SEQ ID NO: 97457 - DNA, 30 bp, Artificial Sequence
  Synthetic oligonucleotide
gtgggtatcgggtgtgctgtaccgccaatc

SEQ ID NO: 97458 - DNA, 30 bp, Artificial Sequence
  Synthetic oligonucleotide
ccgggccgaggctcaacagccccagcaatc

SEQ ID NO: 97459 - DNA, 30 bp, Artificial Sequence
  Synthetic oligonucleotide
attaaggagatgaaacgtcgagaggcaatc

SEQ ID NO: 97460 - DNA, 30 bp, Artificial Sequence
  Synthetic oligonucleotide
agcagaaaccaatgtacctatttctcaatc

SEQ ID NO: 97461 - DNA, 30 bp, Artificial Sequence
  Synthetic oligonucleotide
gataacgggactgatgtcagcaagtcaatc

SEQ ID NO: 97462 - DNA, 30 bp, Artificial Sequence
  Synthetic oligonucleotide
ccagttgcatattgggaactggacagaatc

SEQ ID NO: 97463 - DNA, 30 bp, Artificial Sequence
  Synthetic oligonucleotide
agtccaaacaagcgtaggcccgccagaatc

SEQ ID NO: 97464 - DNA, 30 bp, Artificial Sequence
  Synthetic oligonucleotide
ctgagccatagagagtaaatccaccgaatc

SEQ ID NO: 97465 - DNA, 30 bp, Artificial Sequence
  Synthetic oligonucleotide
cttgtatatcgagaacacgaactccgaatc

SEQ ID NO: 97466 - DNA, 30 bp, Artificial Sequence
  Synthetic oligonucleotide
ggtcggcgccacgtgtgttattccggaatc

SEQ ID NO: 97467 - DNA, 30 bp, Artificial Sequence
  Synthetic oligonucleotide
gcggtcgaggttccatagaccctgtgaatc

SEQ ID NO: 97468 - DNA, 30 bp, Artificial Sequence
  Synthetic oligonucleotide
gcgtgctcaacactaaggtaatggctaatc

SEQ ID NO: 97469 - DNA, 30 bp, Artificial Sequence
  Synthetic oligonucleotide
aaccgaagggtacgcaccgtcatcgtaatc

SEQ ID NO: 97470 - DNA, 30 bp, Artificial Sequence
  Synthetic oligonucleotide
accgacttagatgagatctcactcgtaatc

SEQ ID NO: 97471 - DNA, 30 bp, Artificial Sequence
  Synthetic oligonucleotide
ataccgaggactgcatacgatgcacacatc

SEQ ID NO: 97472 - DNA, 30 bp, Artificial Sequence
  Synthetic oligonucleotide
tcctgggtaaggcatcgatccgatgacatc

SEQ ID NO: 97473 - DNA, 30 bp, Artificial Sequence
  Synthetic oligonucleotide
aggcacccgtttatcgaatatgcaaccatc

SEQ ID NO: 97474 - DNA, 30 bp, Artificial Sequence
  Synthetic oligonucleotide
cgaatatgcgttatcggtagaatgaccatc

SEQ ID NO: 97475 - DNA, 30 bp, Artificial Sequence
  Synthetic oligonucleotide
agtccaaggtctgaaatgtggaacgccatc

SEQ ID NO: 97476 - DNA, 30 bp, Artificial Sequence
  Synthetic oligonucleotide
tcgtaggggtcagctacatgtagttccatc

SEQ ID NO: 97477 - DNA, 30 bp, Artificial Sequence
  Synthetic oligonucleotide
gacggctacaggggtcagctcagaagcatc

SEQ ID NO: 97478 - DNA, 30 bp, Artificial Sequence
  Synthetic oligonucleotide
tacgaaaaaggttcgtaaggagacagcatc

SEQ ID NO: 97479 - DNA, 30 bp, Artificial Sequence
  Synthetic oligonucleotide
accgtctgacataacgatgttgtgagcatc

SEQ ID NO: 97480 - DNA, 30 bp, Artificial Sequence
  Synthetic oligonucleotide
ggggccaggttaagattccggggtagcatc

SEQ ID NO: 97481 - DNA, 30 bp, Artificial Sequence
  Synthetic oligonucleotide
acctgggtagtgaacacagctcggcgcatc

SEQ ID NO: 97482 - DNA, 30 bp, Artificial Sequence
  Synthetic oligonucleotide
tcgaggaagatgcaatgcttgatcggcatc

SEQ ID NO: 97483 - DNA, 30 bp, Artificial Sequence
  Synthetic oligonucleotide
atcgaagttacggtatgtcttggaatcatc

SEQ ID NO: 97484 - DNA, 30 bp, Artificial Sequence
  Synthetic oligonucleotide
gtaacgataaggcgccgtctccacatcatc

SEQ ID NO: 97485 - DNA, 30 bp, Artificial Sequence
  Synthetic oligonucleotide
agggcaacatcatttaagattgtcatcatc

SEQ ID NO: 97486 - DNA, 30 bp, Artificial Sequence
  Synthetic oligonucleotide
agaagagtcgtttccgcacacttgatcatc

SEQ ID NO: 97487 - DNA, 30 bp, Artificial Sequence
  Synthetic oligonucleotide
ttgagccacaggctcggccgaaatatcatc

SEQ ID NO: 97488 - DNA, 30 bp, Artificial Sequence
  Synthetic oligonucleotide
ttagcgtctccggacacaattgcagtcatc

SEQ ID NO: 97489 - DNA, 30 bp, Artificial Sequence
  Synthetic oligonucleotide
agtgggagctatcggtaggagcgagtcatc

SEQ ID NO: 97490 - DNA, 30 bp, Artificial Sequence
  Synthetic oligonucleotide
ataataaggacatgtcacaagagcgtcatc

SEQ ID NO: 97491 - DNA, 30 bp, Artificial Sequence
  Synthetic oligonucleotide
acgatggtttaaggaacttgtgcccagatc

SEQ ID NO: 97492 - DNA, 30 bp, Artificial Sequence
  Synthetic oligonucleotide
tatgagaaggctcggatacagaacgagatc

SEQ ID NO: 97493 - DNA, 30 bp, Artificial Sequence
  Synthetic oligonucleotide
tagagcaaaaccttgcacagatacgagatc

SEQ ID NO: 97494 - DNA, 30 bp, Artificial Sequence
  Synthetic oligonucleotide
acctcagaggggatgagcagaaatgagatc

SEQ ID NO: 97495 - DNA, 30 bp, Artificial Sequence
  Synthetic oligonucleotide
tggcgaaatgaaacacaatatagttagatc

SEQ ID NO: 97496 - DNA, 30 bp, Artificial Sequence
  Synthetic oligonucleotide
tgacctatagcgtaatacaaaccaacgatc

SEQ ID NO: 97497 - DNA, 30 bp, Artificial Sequence
  Synthetic oligonucleotide
gggggcatagcaaacgccttcgtaacgatc

SEQ ID NO: 97498 - DNA, 30 bp, Artificial Sequence
  Synthetic oligonucleotide
actacggtaggtttaagtgactggacgatc

SEQ ID NO: 97499 - DNA, 30 bp, Artificial Sequence
  Synthetic oligonucleotide
cgagttagtatggagttttgatgaccgatc

SEQ ID NO: 97500 - DNA, 30 bp, Artificial Sequence
  Synthetic oligonucleotide
acaaggggcaccaactccgaacgcgcgatc

SEQ ID NO: 97501 - DNA, 30 bp, Artificial Sequence
  Synthetic oligonucleotide
acgattccatgcaacaacttactggcgatc

SEQ ID NO: 97502 - DNA, 30 bp, Artificial Sequence
  Synthetic oligonucleotide
gaagtcggtgatcgttccgagtgctcgatc

SEQ ID NO: 97503 - DNA, 30 bp, Artificial Sequence
  Synthetic oligonucleotide
aggtcacaaaagcaaaccacttgaaggatc

SEQ ID NO: 97504 - DNA, 30 bp, Artificial Sequence
  Synthetic oligonucleotide
tagagttcgaggagtcttagtcgcgggatc

SEQ ID NO: 97505 - DNA, 30 bp, Artificial Sequence
  Synthetic oligonucleotide
gcttgagtgtgacacaagttatggtggatc

SEQ ID NO: 97506 - DNA, 30 bp, Artificial Sequence
  Synthetic oligonucleotide
atggaacatagttcggtgctttaaatgatc

SEQ ID NO: 97507 - DNA, 30 bp, Artificial Sequence
  Synthetic oligonucleotide
gttgccaaccaactgaggctactcgtgatc

SEQ ID NO: 97508 - DNA, 30 bp, Artificial Sequence
  Synthetic oligonucleotide
acgaaagttcaggtggatagcgcattgatc

SEQ ID NO: 97509 - DNA, 30 bp, Artificial Sequence
  Synthetic oligonucleotide
gtgctgtggaatcgcgctggaccgaatatc

SEQ ID NO: 97510 - DNA, 30 bp, Artificial Sequence
  Synthetic oligonucleotide
ggaagaatgcggcaactggcagggaatatc

SEQ ID NO: 97511 - DNA, 30 bp, Artificial Sequence
  Synthetic oligonucleotide
accgtgttaagggaccaagttaagcatatc

SEQ ID NO: 97512 - DNA, 30 bp, Artificial Sequence
  Synthetic oligonucleotide
taaaggggacagccccagggacgcgatatc

SEQ ID NO: 97513 - DNA, 30 bp, Artificial Sequence
  Synthetic oligonucleotide
cggaagagaccagccttacatcgggatatc

SEQ ID NO: 97514 - DNA, 30 bp, Artificial Sequence
  Synthetic oligonucleotide
agagcccggaaggagttggccgtcactatc

SEQ ID NO: 97515 - DNA, 30 bp, Artificial Sequence
  Synthetic oligonucleotide
cgtaacaatcgtcatttgaatctcgctatc

SEQ ID NO: 97516 - DNA, 30 bp, Artificial Sequence
  Synthetic oligonucleotide
gacgagtcgacgatgctgccgtaacgtatc

SEQ ID NO: 97517 - DNA, 30 bp, Artificial Sequence
  Synthetic oligonucleotide
aacacagacctacaagagtcaacacgtatc

SEQ ID NO: 97518 - DNA, 30 bp, Artificial Sequence
  Synthetic oligonucleotide
aacgatggccaagaaccttggtgacgtatc

SEQ ID NO: 97519 - DNA, 30 bp, Artificial Sequence
  Synthetic oligonucleotide
ggggccgttcgtacaccgtgagcccgtatc

SEQ ID NO: 97520 - DNA, 30 bp, Artificial Sequence
  Synthetic oligonucleotide
tcgcatgagttggaatcgtaaacttgtatc

SEQ ID NO: 97521 - DNA, 30 bp, Artificial Sequence
  Synthetic oligonucleotide
tagtgcggaatgttcctctacacagttatc

SEQ ID NO: 97522 - DNA, 30 bp, Artificial Sequence
  Synthetic oligonucleotide
ggataggaccgaggacgctacttagttatc

SEQ ID NO: 97523 - DNA, 30 bp, Artificial Sequence
  Synthetic oligonucleotide
tggaaggaaattccgcggacccgaaaactc

SEQ ID NO: 97524 - DNA, 30 bp, Artificial Sequence
  Synthetic oligonucleotide
ctaggtggtagtccgtgtgatcgaaaactc

SEQ ID NO: 97525 - DNA, 30 bp, Artificial Sequence
  Synthetic oligonucleotide
aacgtcagtcatctgtgactccagaaactc

SEQ ID NO: 97526 - DNA, 30 bp, Artificial Sequence
  Synthetic oligonucleotide
gtcaactacgtcgagacgaccagataactc

SEQ ID NO: 97527 - DNA, 30 bp, Artificial Sequence
  Synthetic oligonucleotide
aaagagcaaaagtaacactacagaccactc

SEQ ID NO: 97528 - DNA, 30 bp, Artificial Sequence
  Synthetic oligonucleotide
atctagtccagataagtgacagtaccactc

SEQ ID NO: 97529 - DNA, 30 bp, Artificial Sequence
  Synthetic oligonucleotide
agtgtgattcgaagagtgagggacccactc

SEQ ID NO: 97530 - DNA, 30 bp, Artificial Sequence
  Synthetic oligonucleotide
taccgaatgtagcatatcagacacgcactc

SEQ ID NO: 97531 - DNA, 30 bp, Artificial Sequence
  Synthetic oligonucleotide
cgcggtaaacatacaggtaggagatcactc

SEQ ID NO: 97532 - DNA, 30 bp, Artificial Sequence
  Synthetic oligonucleotide
agtatttgcacaatcgtggtgcgctcactc

SEQ ID NO: 97533 - DNA, 30 bp, Artificial Sequence
  Synthetic oligonucleotide
cggggagtgggccgttgtccagagcgactc

SEQ ID NO: 97534 - DNA, 30 bp, Artificial Sequence
  Synthetic oligonucleotide
cgccgtgcggagtttactgaagcgcgactc

SEQ ID NO: 97535 - DNA, 30 bp, Artificial Sequence
  Synthetic oligonucleotide
caggtgccccacgactcgcgaagtcgactc

SEQ ID NO: 97536 - DNA, 30 bp, Artificial Sequence
  Synthetic oligonucleotide
gccacaacagatagctgcaaaacaggactc

SEQ ID NO: 97537 - DNA, 30 bp, Artificial Sequence
  Synthetic oligonucleotide
gcagtactggaaagcagtggttgtggactc

SEQ ID NO: 97538 - DNA, 30 bp, Artificial Sequence
  Synthetic oligonucleotide
gcatagtgtggatgacggtccatttgactc

SEQ ID NO: 97539 - DNA, 30 bp, Artificial Sequence
  Synthetic oligonucleotide
gtatgcaaagcggacatggttgacatactc

SEQ ID NO: 97540 - DNA, 30 bp, Artificial Sequence
  Synthetic oligonucleotide
tgcatgagttcagagaaagatgggatactc

SEQ ID NO: 97541 - DNA, 30 bp, Artificial Sequence
  Synthetic oligonucleotide
ggcaaacagtgcaacacgttcgatatactc

SEQ ID NO: 97542 - DNA, 30 bp, Artificial Sequence
  Synthetic oligonucleotide
gaggaggggaaacgcaatgaatgattactc

SEQ ID NO: 97543 - DNA, 30 bp, Artificial Sequence
  Synthetic oligonucleotide
tcgccacgttctcttaacacatgtcacctc

SEQ ID NO: 97544 - DNA, 30 bp, Artificial Sequence
  Synthetic oligonucleotide
taataaaaaggctggagttgcaatgacctc

SEQ ID NO: 97545 - DNA, 30 bp, Artificial Sequence
  Synthetic oligonucleotide
cggattcgggtctacggattgacaaccctc

SEQ ID NO: 97546 - DNA, 30 bp, Artificial Sequence
  Synthetic oligonucleotide
ccagaatcatctaaaaggagcaataccctc

SEQ ID NO: 97547 - DNA, 30 bp, Artificial Sequence
  Synthetic oligonucleotide
ggggagtaccaagggctaaatgataccctc

SEQ ID NO: 97548 - DNA, 30 bp, Artificial Sequence
  Synthetic oligonucleotide
gaacagtacattttgtgaaagcaagccctc

SEQ ID NO: 97549 - DNA, 30 bp, Artificial Sequence
  Synthetic oligonucleotide
gtagaagtgaagagatttgatgtcgccctc

SEQ ID NO: 97550 - DNA, 30 bp, Artificial Sequence
  Synthetic oligonucleotide
gcgttctacggaagggaagacaaggccctc

SEQ ID NO: 97551 - DNA, 30 bp, Artificial Sequence
  Synthetic oligonucleotide
accaggctacggaggagatgcgtatgcctc

SEQ ID NO: 97552 - DNA, 30 bp, Artificial Sequence
  Synthetic oligonucleotide
ggtgcgggttcacgaaaacggtgttgcctc

SEQ ID NO: 97553 - DNA, 30 bp, Artificial Sequence
  Synthetic oligonucleotide
agatagggaatcggtatgcaggatatcctc

SEQ ID NO: 97554 - DNA, 30 bp, Artificial Sequence
  Synthetic oligonucleotide
gcagttgcactcgctcattaggtcctcctc

SEQ ID NO: 97555 - DNA, 30 bp, Artificial Sequence
  Synthetic oligonucleotide
cctgcccaacaaaatcacagtcacgtcctc

SEQ ID NO: 97556 - DNA, 30 bp, Artificial Sequence
  Synthetic oligonucleotide
cgcagggccgcgttatctggtgcctagctc

SEQ ID NO: 97557 - DNA, 30 bp, Artificial Sequence
  Synthetic oligonucleotide
tcgcggaatagcatcaaaaattagacgctc

SEQ ID NO: 97558 - DNA, 30 bp, Artificial Sequence
  Synthetic oligonucleotide
aaggcaagaaggagtggacgctttccgctc

SEQ ID NO: 97559 - DNA, 30 bp, Artificial Sequence
  Synthetic oligonucleotide
actggaaagtcagttgccagcattgcgctc

SEQ ID NO: 97560 - DNA, 30 bp, Artificial Sequence
  Synthetic oligonucleotide
agctttgggggaagatttaataactcgctc

SEQ ID NO: 97561 - DNA, 30 bp, Artificial Sequence
  Synthetic oligonucleotide
ggatcgcgctcccatagaatcccaaggctc

SEQ ID NO: 97562 - DNA, 30 bp, Artificial Sequence
  Synthetic oligonucleotide
cactatgcgctccaataaggtccaaggctc

SEQ ID NO: 97563 - DNA, 29 bp, Artificial Sequence
  Synthetic oligonucleotide
acccgaaccggccgaaccgtctgaggctc

SEQ ID NO: 97564 - DNA, 30 bp, Artificial Sequence
  Synthetic oligonucleotide
ggtcggggacgtatggatctgtgtaggctc

SEQ ID NO: 97565 - DNA, 30 bp, Artificial Sequence
  Synthetic oligonucleotide
ccaggtgccgccagtagacgacaagggctc

SEQ ID NO: 97566 - DNA, 30 bp, Artificial Sequence
  Synthetic oligonucleotide
gcgctatcgtcaatacgccaaggagggctc

SEQ ID NO: 97567 - DNA, 30 bp, Artificial Sequence
  Synthetic oligonucleotide
cgtggaataatcatttatgggtgtgggctc

SEQ ID NO: 97568 - DNA, 30 bp, Artificial Sequence
  Synthetic oligonucleotide
gatgggaataaattatggaacctgctgctc

SEQ ID NO: 97569 - DNA, 30 bp, Artificial Sequence
  Synthetic oligonucleotide
tgacgataattaattgtcagtctggtgctc

SEQ ID NO: 97570 - DNA, 30 bp, Artificial Sequence
  Synthetic oligonucleotide
gcgtagtgttcgtagtcagagtgcttgctc

SEQ ID NO: 97571 - DNA, 30 bp, Artificial Sequence
  Synthetic oligonucleotide
gcgaggaaacgttcctaagtcgagttgctc

SEQ ID NO: 97572 - DNA, 30 bp, Artificial Sequence
  Synthetic oligonucleotide
atgccaaaggactttcagcgaccgaatctc

SEQ ID NO: 97573 - DNA, 30 bp, Artificial Sequence
  Synthetic oligonucleotide
acgattgaaagagtaggaaggaataatctc

SEQ ID NO: 97574 - DNA, 30 bp, Artificial Sequence
  Synthetic oligonucleotide
tgagaaagccaccaccaagagatacatctc

SEQ ID NO: 97575 - DNA, 30 bp, Artificial Sequence
  Synthetic oligonucleotide
gcataccaattaaaataggggaatgctctc

SEQ ID NO: 97576 - DNA, 30 bp, Artificial Sequence
  Synthetic oligonucleotide
aaatcgaaagagaaggcactgctgcgtctc

SEQ ID NO: 97577 - DNA, 30 bp, Artificial Sequence
  Synthetic oligonucleotide
aaaatgcaggcgaggctgtgggatcgtctc

SEQ ID NO: 97578 - DNA, 30 bp, Artificial Sequence
  Synthetic oligonucleotide
gcgggcacagagctttgccgtaaaggtctc

SEQ ID NO: 97579 - DNA, 30 bp, Artificial Sequence
  Synthetic oligonucleotide
ggtaaagtacacagtctcgaatggggtctc

SEQ ID NO: 97580 - DNA, 30 bp, Artificial Sequence
  Synthetic oligonucleotide
caaggaggtaacaccttcagttcctgtctc

SEQ ID NO: 97581 - DNA, 30 bp, Artificial Sequence
  Synthetic oligonucleotide
ctgcgacaagaatttcaaacaatcgttctc

SEQ ID NO: 97582 - DNA, 30 bp, Artificial Sequence
  Synthetic oligonucleotide
aggccaacgatgcgtctgaacatatttctc

SEQ ID NO: 97583 - DNA, 30 bp, Artificial Sequence
  Synthetic oligonucleotide
cctgacaccccaaatacctgcgcgaaagtc

SEQ ID NO: 97584 - DNA, 30 bp, Artificial Sequence
  Synthetic oligonucleotide
gccggatgagggactaggcatagtaaagtc

SEQ ID NO: 97585 - DNA, 30 bp, Artificial Sequence
  Synthetic oligonucleotide
tcgtagtgtgaacatcaaattgtccaagtc

SEQ ID NO: 97586 - DNA, 30 bp, Artificial Sequence
  Synthetic oligonucleotide
agcaatagggcccatttcatcgtgcaagtc

SEQ ID NO: 97587 - DNA, 30 bp, Artificial Sequence
  Synthetic oligonucleotide
aatgggtcgtcccacggtaagtatcaagtc

SEQ ID NO: 97588 - DNA, 30 bp, Artificial Sequence
  Synthetic oligonucleotide
acagctgtgtcccaggtggtccaggaagtc

SEQ ID NO: 97589 - DNA, 30 bp, Artificial Sequence
  Synthetic oligonucleotide
caatcgattcgtcatgaatacattgaagtc

SEQ ID NO: 97590 - DNA, 30 bp, Artificial Sequence
  Synthetic oligonucleotide
tcgcgatggttgtagctatacgtataagtc

SEQ ID NO: 97591 - DNA, 30 bp, Artificial Sequence
  Synthetic oligonucleotide
agtggactaccgccttccccccgttaagtc

SEQ ID NO: 97592 - DNA, 30 bp, Artificial Sequence
  Synthetic oligonucleotide
acggtgggatcgtactattattcaacagtc

SEQ ID NO: 97593 - DNA, 30 bp, Artificial Sequence
  Synthetic oligonucleotide
tgcgggatgacaaagttcatttagccagtc

SEQ ID NO: 97594 - DNA, 30 bp, Artificial Sequence
  Synthetic oligonucleotide
aggagcgtttcgtggacacactgggcagtc

SEQ ID NO: 97595 - DNA, 30 bp, Artificial Sequence
  Synthetic oligonucleotide
tgtgagtaaagaagcattagagtggcagtc

SEQ ID NO: 97596 - DNA, 30 bp, Artificial Sequence
  Synthetic oligonucleotide
tcgaggttagcgatggtcttagtggcagtc

SEQ ID NO: 97597 - DNA, 30 bp, Artificial Sequence
  Synthetic oligonucleotide
ccacaggctcaggacaaagtatcatcagtc

SEQ ID NO: 97598 - DNA, 30 bp, Artificial Sequence
  Synthetic oligonucleotide
ggtgaagtatgatggagataaatttcagtc

SEQ ID NO: 97599 - DNA, 30 bp, Artificial Sequence
  Synthetic oligonucleotide
gccggcactggactgaatcaggaaagagtc

SEQ ID NO: 97600 - DNA, 30 bp, Artificial Sequence
  Synthetic oligonucleotide
cggcaactcgcagtcaagacgacgagagtc

SEQ ID NO: 97601 - DNA, 30 bp, Artificial Sequence
  Synthetic oligonucleotide
ggcatggataacttattatgccctagagtc

SEQ ID NO: 97602 - DNA, 30 bp, Artificial Sequence
  Synthetic oligonucleotide
ataagttagaggtacaataccaagatagtc

SEQ ID NO: 97603 - DNA, 30 bp, Artificial Sequence
  Synthetic oligonucleotide
gagaagactaatacccagaatcggatagtc

SEQ ID NO: 97604 - DNA, 30 bp, Artificial Sequence
  Synthetic oligonucleotide
ttgaaatccagagggggcatagacctagtc

SEQ ID NO: 97605 - DNA, 30 bp, Artificial Sequence
  Synthetic oligonucleotide
atgtgatgagaacctaagtgaacagtagtc

SEQ ID NO: 97606 - DNA, 30 bp, Artificial Sequence
  Synthetic oligonucleotide
gagggaaccacggaaaggctagcgttagtc

SEQ ID NO: 97607 - DNA, 30 bp, Artificial Sequence
  Synthetic oligonucleotide
ttggtgtattgccaggtctgatgaaacgtc

SEQ ID NO: 97608 - DNA, 30 bp, Artificial Sequence
  Synthetic oligonucleotide
ttcttccctaaacgagttgcatagaacgtc

SEQ ID NO: 97609 - DNA, 30 bp, Artificial Sequence
  Synthetic oligonucleotide
cttaggtaagaaggaatgagaaaacacgtc

SEQ ID NO: 97610 - DNA, 30 bp, Artificial Sequence
  Synthetic oligonucleotide
aagcgtcatcaagatctgcggaagcacgtc

SEQ ID NO: 97611 - DNA, 30 bp, Artificial Sequence
  Synthetic oligonucleotide
ataccgaaagagcatcgtgaccttcacgtc

SEQ ID NO: 97612 - DNA, 30 bp, Artificial Sequence
  Synthetic oligonucleotide
cctgccaacggtctcgtgagcgaggacgtc

SEQ ID NO: 97613 - DNA, 30 bp, Artificial Sequence
  Synthetic oligonucleotide
acagtgtgattctggtagagttaggacgtc

SEQ ID NO: 97614 - DNA, 30 bp, Artificial Sequence
  Synthetic oligonucleotide
gagcgttccaataaaagaatatgggacgtc

SEQ ID NO: 97615 - DNA, 30 bp, Artificial Sequence
  Synthetic oligonucleotide
ttgatagtagggaggaactgttatgacgtc

SEQ ID NO: 97616 - DNA, 30 bp, Artificial Sequence
  Synthetic oligonucleotide
acgtaacatgtttgtggaatcattgacgtc

SEQ ID NO: 97617 - DNA, 30 bp, Artificial Sequence
  Synthetic oligonucleotide
gtcgcgtgattgaccgacggtagttacgtc

SEQ ID NO: 97618 - DNA, 30 bp, Artificial Sequence
  Synthetic oligonucleotide
atgtgaaaacgtacactggcatctaccgtc

SEQ ID NO: 97619 - DNA, 30 bp, Artificial Sequence
  Synthetic oligonucleotide
gcaccaacaccaatgcgcgcggttaccgtc

SEQ ID NO: 97620 - DNA, 30 bp, Artificial Sequence
  Synthetic oligonucleotide
accaggtaaatgatgatgtatgttaccgtc

SEQ ID NO: 97621 - DNA, 30 bp, Artificial Sequence
  Synthetic oligonucleotide
tgatgatacaccgaatattccttagccgtc

SEQ ID NO: 97622 - DNA, 30 bp, Artificial Sequence
  Synthetic oligonucleotide
aaaacgcaaatatatgccctaaaggccgtc

SEQ ID NO: 97623 - DNA, 30 bp, Artificial Sequence
  Synthetic oligonucleotide
ctcaggaggctttgggttttgagggccgtc

SEQ ID NO: 97624 - DNA, 30 bp, Artificial Sequence
  Synthetic oligonucleotide
taacactctgatagacaggtagtggccgtc

SEQ ID NO: 97625 - DNA, 30 bp, Artificial Sequence
  Synthetic oligonucleotide
tggacgcgtttgggtgcagttaaatccgtc

SEQ ID NO: 97626 - DNA, 30 bp, Artificial Sequence
  Synthetic oligonucleotide
agtgccaatccgcgcacgacaataagcgtc

SEQ ID NO: 97627 - DNA, 30 bp, Artificial Sequence
  Synthetic oligonucleotide
gggtctaatgtgtactgattacatagcgtc

SEQ ID NO: 97628 - DNA, 30 bp, Artificial Sequence
  Synthetic oligonucleotide
tcttcgcatgatgaacataagccgggcgtc

SEQ ID NO: 97629 - DNA, 30 bp, Artificial Sequence
  Synthetic oligonucleotide
aggactagactaagcatgccatcgtgcgtc

SEQ ID NO: 97630 - DNA, 30 bp, Artificial Sequence
  Synthetic oligonucleotide
gcctagcctaaagcacctgggacttgcgtc

SEQ ID NO: 97631 - DNA, 30 bp, Artificial Sequence
  Synthetic oligonucleotide
tttagtaaggccattatagcgatttgcgtc

SEQ ID NO: 97632 - DNA, 30 bp, Artificial Sequence
  Synthetic oligonucleotide
gtgccccagccctcggtatgtgtttgcgtc

SEQ ID NO: 97633 - DNA, 30 bp, Artificial Sequence
  Synthetic oligonucleotide
cgacggtagtaactgtgcacacgaatcgtc

SEQ ID NO: 97634 - DNA, 30 bp, Artificial Sequence
  Synthetic oligonucleotide
atgcaattattggttgtgcgagtaatcgtc

SEQ ID NO: 97635 - DNA, 30 bp, Artificial Sequence
  Synthetic oligonucleotide
cggctctcccctaggtgtccggtgatcgtc

SEQ ID NO: 97636 - DNA, 30 bp, Artificial Sequence
  Synthetic oligonucleotide
tgcaaggcatgctgcgcggtgggactcgtc

SEQ ID NO: 97637 - DNA, 30 bp, Artificial Sequence
  Synthetic oligonucleotide
gagataaggtgtaatccgtaccccctcgtc

SEQ ID NO: 97638 - DNA, 30 bp, Artificial Sequence
  Synthetic oligonucleotide
tctgtacgatcgataggcggcaaagtcgtc

SEQ ID NO: 97639 - DNA, 30 bp, Artificial Sequence
  Synthetic oligonucleotide
catccaagcggatataaacagcgagtcgtc

SEQ ID NO: 97640 - DNA, 30 bp, Artificial Sequence
  Synthetic oligonucleotide
agaagaattcgatcagcactttacgtcgtc

SEQ ID NO: 97641 - DNA, 30 bp, Artificial Sequence
  Synthetic oligonucleotide
ggtagagcgtggtcacaatatgcattcgtc

SEQ ID NO: 97642 - DNA, 30 bp, Artificial Sequence
  Synthetic oligonucleotide
ggatcgtctcgagtatgcgaactaaaggtc

SEQ ID NO: 97643 - DNA, 30 bp, Artificial Sequence
  Synthetic oligonucleotide
gaaaggagtcctcgaggcctagtaaaggtc

SEQ ID NO: 97644 - DNA, 30 bp, Artificial Sequence
  Synthetic oligonucleotide
tcgacgggaaggcgttggtgatcgcaggtc

SEQ ID NO: 97645 - DNA, 30 bp, Artificial Sequence
  Synthetic oligonucleotide
gggaatgcaatgacgacgtagtggcaggtc

SEQ ID NO: 97646 - DNA, 30 bp, Artificial Sequence
  Synthetic oligonucleotide
aggttatctgcacgtcaattaagataggtc

SEQ ID NO: 97647 - DNA, 30 bp, Artificial Sequence
  Synthetic oligonucleotide
acgtacgatacgaatgataacacaacggtc

SEQ ID NO: 97648 - DNA, 30 bp, Artificial Sequence
  Synthetic oligonucleotide
aggatgatggtacgtgccaatgagacggtc

SEQ ID NO: 97649 - DNA, 30 bp, Artificial Sequence
  Synthetic oligonucleotide
gctaaccgagagcataactagtcgagggtc

SEQ ID NO: 97650 - DNA, 30 bp, Artificial Sequence
  Synthetic oligonucleotide
gggaacatgctggacacaccaatgagggtc

SEQ ID NO: 97651 - DNA, 30 bp, Artificial Sequence
  Synthetic oligonucleotide
taccgtgtcagcgcggatctgactagggtc

SEQ ID NO: 97652 - DNA, 30 bp, Artificial Sequence
  Synthetic oligonucleotide
gaaggcgactttaatccagacacccgggtc

SEQ ID NO: 97653 - DNA, 30 bp, Artificial Sequence
  Synthetic oligonucleotide
cgaggacttgtcaaaggttagatatgggtc

SEQ ID NO: 97654 - DNA, 30 bp, Artificial Sequence
  Synthetic oligonucleotide
aattcgatcgctacactagaaaactgggtc

SEQ ID NO: 97655 - DNA, 30 bp, Artificial Sequence
  Synthetic oligonucleotide
accgccgatgagacgtaacgtgggtgggtc

SEQ ID NO: 97656 - DNA, 30 bp, Artificial Sequence
  Synthetic oligonucleotide
accgccgagcactagcgtgttggttgggtc

SEQ ID NO: 97657 - DNA, 30 bp, Artificial Sequence
  Synthetic oligonucleotide
cattaagtcagagcaccctagccactggtc

SEQ ID NO: 97658 - DNA, 30 bp, Artificial Sequence
  Synthetic oligonucleotide
cattacagttagtggccagggcctctggtc

SEQ ID NO: 97659 - DNA, 30 bp, Artificial Sequence
  Synthetic oligonucleotide
gaggggaaaacggctcgatccttagtggtc

SEQ ID NO: 97660 - DNA, 30 bp, Artificial Sequence
  Synthetic oligonucleotide
gaacgcaatatattgacttcaaacgtggtc

SEQ ID NO: 97661 - DNA, 30 bp, Artificial Sequence
  Synthetic oligonucleotide
agggagggctggtaaacaggcatcgtggtc

SEQ ID NO: 97662 - DNA, 30 bp, Artificial Sequence
  Synthetic oligonucleotide
ccaccagaaatgtttgatgtaaatgtggtc

SEQ ID NO: 97663 - DNA, 30 bp, Artificial Sequence
  Synthetic oligonucleotide
agatggacggtatcgtagtcagcattggtc

SEQ ID NO: 97664 - DNA, 30 bp, Artificial Sequence
  Synthetic oligonucleotide
cagtggtttgttaggatgatacagttggtc

SEQ ID NO: 97665 - DNA, 30 bp, Artificial Sequence
  Synthetic oligonucleotide
actcccgtgaaacgcgatgcaaagaatgtc

SEQ ID NO: 97666 - DNA, 30 bp, Artificial Sequence
  Synthetic oligonucleotide
gtcggaagccgggggaccgaggcgaatgtc

SEQ ID NO: 97667 - DNA, 30 bp, Artificial Sequence
  Synthetic oligonucleotide
taaggacagatgataggtaggcgtgatgtc

SEQ ID NO: 97668 - DNA, 30 bp, Artificial Sequence
  Synthetic oligonucleotide
tgcgagatggaggaaaatcgttactatgtc

SEQ ID NO: 97669 - DNA, 30 bp, Artificial Sequence
  Synthetic oligonucleotide
gcgtaaaagtcgtaacgccttaaaactgtc

SEQ ID NO: 97670 - DNA, 30 bp, Artificial Sequence
  Synthetic oligonucleotide
atcagcgataagtcgagatctggcactgtc

SEQ ID NO: 97671 - DNA, 30 bp, Artificial Sequence
  Synthetic oligonucleotide
tggagctaaataactgagattaaggctgtc

SEQ ID NO: 97672 - DNA, 30 bp, Artificial Sequence
  Synthetic oligonucleotide
ccgtaagctcgtgttatgtaactggctgtc

SEQ ID NO: 97673 - DNA, 30 bp, Artificial Sequence
  Synthetic oligonucleotide
gactcgttgaaggttacaatctgtgctgtc

SEQ ID NO: 97674 - DNA, 30 bp, Artificial Sequence
  Synthetic oligonucleotide
aaagtaccgatggtataaatgtagagtgtc

SEQ ID NO: 97675 - DNA, 30 bp, Artificial Sequence
  Synthetic oligonucleotide
gtcgcgtgggtcattcattgtgggagtgtc

SEQ ID NO: 97676 - DNA, 30 bp, Artificial Sequence
  Synthetic oligonucleotide
acctccaaagtatacacagaacgacgtgtc

SEQ ID NO: 97677 - DNA, 30 bp, Artificial Sequence
  Synthetic oligonucleotide
agacgtgagcgggggagtcatagcggtgtc

SEQ ID NO: 97678 - DNA, 30 bp, Artificial Sequence
  Synthetic oligonucleotide
atcagtgacagtgttccagacaagggtgtc

SEQ ID NO: 97679 - DNA, 30 bp, Artificial Sequence
  Synthetic oligonucleotide
aacgacctccccgaagtcctgatgtgtgtc

SEQ ID NO: 97680 - DNA, 30 bp, Artificial Sequence
  Synthetic oligonucleotide
agcactctgccgtgcggatacagagttgtc

SEQ ID NO: 97681 - DNA, 30 bp, Artificial Sequence
  Synthetic oligonucleotide
tcacgtctaagtgggtcaagtctatttgtc

SEQ ID NO: 97682 - DNA, 30 bp, Artificial Sequence
  Synthetic oligonucleotide
acataatcaatttcggaaccgagttttgtc

SEQ ID NO: 97683 - DNA, 30 bp, Artificial Sequence
  Synthetic oligonucleotide
acagatggaggtgattcaccgtcacaattc

SEQ ID NO: 97684 - DNA, 30 bp, Artificial Sequence
  Synthetic oligonucleotide
tggcgacggacccccaaatgacgacaattc

SEQ ID NO: 97685 - DNA, 30 bp, Artificial Sequence
  Synthetic oligonucleotide
atagcggttacggaatcaaaaatataattc

SEQ ID NO: 97686 - DNA, 30 bp, Artificial Sequence
  Synthetic oligonucleotide
acggccgagaatggagtgcgttcgtaattc

SEQ ID NO: 97687 - DNA, 30 bp, Artificial Sequence
  Synthetic oligonucleotide
cttcgcaacccccatctccggtcaacattc

SEQ ID NO: 97688 - DNA, 30 bp, Artificial Sequence
  Synthetic oligonucleotide
ctcaaaagcgggaaggtttagtaatcattc

SEQ ID NO: 97689 - DNA, 30 bp, Artificial Sequence
  Synthetic oligonucleotide
gctagatcggaatcgtaagcggcctcattc

SEQ ID NO: 97690 - DNA, 30 bp, Artificial Sequence
  Synthetic oligonucleotide
gtggcacttgtataacataaggatcgattc

SEQ ID NO: 97691 - DNA, 30 bp, Artificial Sequence
  Synthetic oligonucleotide
gaacacctaggtatccccgggcgaggattc

SEQ ID NO: 97692 - DNA, 30 bp, Artificial Sequence
  Synthetic oligonucleotide
ctaacataagccagattgccacacggattc

SEQ ID NO: 97693 - DNA, 30 bp, Artificial Sequence
  Synthetic oligonucleotide
gagaagtgccaagacggtggcggctgattc

SEQ ID NO: 97694 - DNA, 30 bp, Artificial Sequence
  Synthetic oligonucleotide
cgtggctgaaggttggcggtgtggtgattc

SEQ ID NO: 97695 - DNA, 30 bp, Artificial Sequence
  Synthetic oligonucleotide
ccgcgaggcagaacggcttagaaactattc

SEQ ID NO: 97696 - DNA, 30 bp, Artificial Sequence
  Synthetic oligonucleotide
aggacacacaggttgagggagcacctattc

SEQ ID NO: 97697 - DNA, 30 bp, Artificial Sequence
  Synthetic oligonucleotide
ctcgggaataactcgatgtgcgctgtattc

SEQ ID NO: 97698 - DNA, 30 bp, Artificial Sequence
  Synthetic oligonucleotide
gaagataagcgatagggtgtcacgttattc

SEQ ID NO: 97699 - DNA, 30 bp, Artificial Sequence
  Synthetic oligonucleotide
tgtaagctcgagaattacagggataacttc

SEQ ID NO: 97700 - DNA, 30 bp, Artificial Sequence
  Synthetic oligonucleotide
cggtcatagggtctatacccgtgtaacttc

SEQ ID NO: 97701 - DNA, 30 bp, Artificial Sequence
  Synthetic oligonucleotide
agacctacgggtccgaacgaagaccacttc

SEQ ID NO: 97702 - DNA, 30 bp, Artificial Sequence
  Synthetic oligonucleotide
agggggtggggagtagtcgctcccgacttc

SEQ ID NO: 97703 - DNA, 30 bp, Artificial Sequence
  Synthetic oligonucleotide
gacgcgatcatagtgcgcatcaagtacttc

SEQ ID NO: 97704 - DNA, 30 bp, Artificial Sequence
  Synthetic oligonucleotide
tgacgtgaaggttgggcacgttcgaccttc

SEQ ID NO: 97705 - DNA, 30 bp, Artificial Sequence
  Synthetic oligonucleotide
agcgacgagctcggttcgagcatagccttc

SEQ ID NO: 97706 - DNA, 30 bp, Artificial Sequence
  Synthetic oligonucleotide
agcatggcttaagtgtgggagggtgccttc

SEQ ID NO: 97707 - DNA, 30 bp, Artificial Sequence
  Synthetic oligonucleotide
agggaactggattgtgtattagtccgcttc

SEQ ID NO: 97708 - DNA, 30 bp, Artificial Sequence
  Synthetic oligonucleotide
atacgcaacggtataacatacgcgcgcttc

SEQ ID NO: 97709 - DNA, 30 bp, Artificial Sequence
  Synthetic oligonucleotide
aaaggggattttgtgttatcgagtcgcttc

SEQ ID NO: 97710 - DNA, 30 bp, Artificial Sequence
  Synthetic oligonucleotide
tattaaagggcggatgtgattgtcggcttc

SEQ ID NO: 97711 - DNA, 30 bp, Artificial Sequence
  Synthetic oligonucleotide
acgttactgcgtaaggcgcctaatggcttc

SEQ ID NO: 97712 - DNA, 30 bp, Artificial Sequence
  Synthetic oligonucleotide
agagtgataggggcgtgttcgattggcttc

SEQ ID NO: 97713 - DNA, 30 bp, Artificial Sequence
  Synthetic oligonucleotide
actgctgactcgagagcaactccatgcttc

SEQ ID NO: 97714 - DNA, 30 bp, Artificial Sequence
  Synthetic oligonucleotide
agaataaaacgaagtcgctagaactgcttc

SEQ ID NO: 97715 - DNA, 30 bp, Artificial Sequence
  Synthetic oligonucleotide
gaacatgtgggaccaccaacctcagtcttc

SEQ ID NO: 97716 - DNA, 30 bp, Artificial Sequence
  Synthetic oligonucleotide
aagcgattcaacatcgaagtgatagtcttc

SEQ ID NO: 97717 - DNA, 30 bp, Artificial Sequence
  Synthetic oligonucleotide
gttatacggtcaggtataccgaatgtcttc

SEQ ID NO: 97718 - DNA, 30 bp, Artificial Sequence
  Synthetic oligonucleotide
cgcattcaggcgttggggagtgcattcttc

SEQ ID NO: 97719 - DNA, 30 bp, Artificial Sequence
  Synthetic oligonucleotide
caaatgaaatggggtcaagccctaaagttc

SEQ ID NO: 97720 - DNA, 30 bp, Artificial Sequence
  Synthetic oligonucleotide
tggtccaaagctacagaagaggacaagttc

SEQ ID NO: 97721 - DNA, 30 bp, Artificial Sequence
  Synthetic oligonucleotide
ccacgaagtatggtagtgggacataagttc

SEQ ID NO: 97722 - DNA, 30 bp, Artificial Sequence
  Synthetic oligonucleotide
taggcctacaaatgcgcatgcggacagttc

SEQ ID NO: 97723 - DNA, 30 bp, Artificial Sequence
  Synthetic oligonucleotide
ctatgaataattttgaagacaccagagttc

SEQ ID NO: 97724 - DNA, 30 bp, Artificial Sequence
  Synthetic oligonucleotide
tggaatcaccagcttgagagttgagagttc

SEQ ID NO: 97725 - DNA, 30 bp, Artificial Sequence
  Synthetic oligonucleotide
aggagggtaggagctggtagtctagagttc

SEQ ID NO: 97726 - DNA, 30 bp, Artificial Sequence
  Synthetic oligonucleotide
ggaagcccactgccccttaattaaacgttc

SEQ ID NO: 97727 - DNA, 30 bp, Artificial Sequence
  Synthetic oligonucleotide
ggcaacagtcatccccagggtagcacgttc

SEQ ID NO: 97728 - DNA, 30 bp, Artificial Sequence
  Synthetic oligonucleotide
gacgttacgaccggaccataaacaccgttc

SEQ ID NO: 97729 - DNA, 30 bp, Artificial Sequence
  Synthetic oligonucleotide
ggagagtaagttagatttggaataccgttc

SEQ ID NO: 97730 - DNA, 30 bp, Artificial Sequence
  Synthetic oligonucleotide
tacaacgcaggcttgttggtcatgccgttc

SEQ ID NO: 97731 - DNA, 30 bp, Artificial Sequence
  Synthetic oligonucleotide
acggacatgtcttgaggcactgaatcgttc

SEQ ID NO: 97732 - DNA, 30 bp, Artificial Sequence
  Synthetic oligonucleotide
gttaggcaggtaggggccatcatatcgttc

SEQ ID NO: 97733 - DNA, 30 bp, Artificial Sequence
  Synthetic oligonucleotide
ttataaaatcaagcgtggcatatgtcgttc

SEQ ID NO: 97734 - DNA, 30 bp, Artificial Sequence
  Synthetic oligonucleotide
gcaggcatatgaaagtaaccagtgaggttc

SEQ ID NO: 97735 - DNA, 30 bp, Artificial Sequence
  Synthetic oligonucleotide
aacgggcacaaacatgcagaatctaggttc

SEQ ID NO: 97736 - DNA, 30 bp, Artificial Sequence
  Synthetic oligonucleotide
ctaatgagaaggacagctaattgccggttc

SEQ ID NO: 97737 - DNA, 30 bp, Artificial Sequence
  Synthetic oligonucleotide
gactcggggaataaccacagatttatgttc

SEQ ID NO: 97738 - DNA, 30 bp, Artificial Sequence
  Synthetic oligonucleotide
ggtgtccaaaaaggtgcgccatagcatttc

SEQ ID NO: 97739 - DNA, 30 bp, Artificial Sequence
  Synthetic oligonucleotide
aggggtacgagtagaggctggggagatttc

SEQ ID NO: 97740 - DNA, 30 bp, Artificial Sequence
  Synthetic oligonucleotide
actaggaatcgggacccgaaaagtgatttc

SEQ ID NO: 97741 - DNA, 30 bp, Artificial Sequence
  Synthetic oligonucleotide
accgcatccggcagtgagtaagcacgtttc

SEQ ID NO: 97742 - DNA, 30 bp, Artificial Sequence
  Synthetic oligonucleotide
acccgtagggatgctctaggtaggcgtttc

SEQ ID NO: 97743 - DNA, 30 bp, Artificial Sequence
  Synthetic oligonucleotide
gggctctgaagtccgaggtgcccctgtttc

SEQ ID NO: 97744 - DNA, 30 bp, Artificial Sequence
  Synthetic oligonucleotide
tcatggcaaaaacagtaagactaacttttc

SEQ ID NO: 97745 - DNA, 30 bp, Artificial Sequence
  Synthetic oligonucleotide
gaactggggctcatgattagtggcgttttc

SEQ ID NO: 97746 - DNA, 30 bp, Artificial Sequence
  Synthetic oligonucleotide
ataccggctggtagacgttatgtcaaaaag

SEQ ID NO: 97747 - DNA, 30 bp, Artificial Sequence
  Synthetic oligonucleotide
aagatcgcagatgagacaaaaccgaaaaag

SEQ ID NO: 97748 - DNA, 30 bp, Artificial Sequence
  Synthetic oligonucleotide
accgccaagtactaaggcccccataaaaag

SEQ ID NO: 97749 - DNA, 30 bp, Artificial Sequence
  Synthetic oligonucleotide
tcattcacaaagatttatgggagccaaaag

SEQ ID NO: 97750 - DNA, 30 bp, Artificial Sequence
  Synthetic oligonucleotide
caggtttccacaaggacttatatccaaaag

SEQ ID NO: 97751 - DNA, 30 bp, Artificial Sequence
  Synthetic oligonucleotide
ggtctagggatgacagtgatttgtcaaaag

SEQ ID NO: 97752 - DNA, 30 bp, Artificial Sequence
  Synthetic oligonucleotide
tggagtaagcggcccgaagtgaacgaaaag

SEQ ID NO: 97753 - DNA, 30 bp, Artificial Sequence
  Synthetic oligonucleotide
gaactaagataggaggatcggtgcgaaaag

SEQ ID NO: 97754 - DNA, 30 bp, Artificial Sequence
  Synthetic oligonucleotide
taaagtgatatttcgacttcctgggaaaag

SEQ ID NO: 97755 - DNA, 30 bp, Artificial Sequence
  Synthetic oligonucleotide
tgtaacagggctcgtatcgtgtgggaaaag

SEQ ID NO: 97756 - DNA, 30 bp, Artificial Sequence
  Synthetic oligonucleotide
gcaagccatcgcgatgagcagctggaaaag

SEQ ID NO: 97757 - DNA, 30 bp, Artificial Sequence
  Synthetic oligonucleotide
tgatcacaaccagaccttctgcgtgaaaag

SEQ ID NO: 97758 - DNA, 30 bp, Artificial Sequence
  Synthetic oligonucleotide
gtaggaacccctcagggtcatatataaaag

SEQ ID NO: 97759 - DNA, 30 bp, Artificial Sequence
  Synthetic oligonucleotide
ccacctcctcagggccttggcggctaaaag

SEQ ID NO: 97760 - DNA, 30 bp, Artificial Sequence
  Synthetic oligonucleotide
gacgggtatcaactctcatagtgctaaaag

SEQ ID NO: 97761 - DNA, 30 bp, Artificial Sequence
  Synthetic oligonucleotide
cgaatcggtgccttgtctgaaaagtaaaag

SEQ ID NO: 97762 - DNA, 30 bp, Artificial Sequence
  Synthetic oligonucleotide
ctgcgcgtgcctagttaagttcggtaaaag

SEQ ID NO: 97763 - DNA, 30 bp, Artificial Sequence
  Synthetic oligonucleotide
tgtataccgggaattggcatatcaacaaag

SEQ ID NO: 97764 - DNA, 31 bp, Artificial Sequence
  Synthetic oligonucleotide
gcagcggaagcagatgggtaagcccacaaag

SEQ ID NO: 97765 - DNA, 30 bp, Artificial Sequence
  Synthetic oligonucleotide
cgccggcggggtatgcctcgtctgacaaag

SEQ ID NO: 97766 - DNA, 30 bp, Artificial Sequence
  Synthetic oligonucleotide
cccgccgttggaaaggaactccgtacaaag

SEQ ID NO: 97767 - DNA, 30 bp, Artificial Sequence
  Synthetic oligonucleotide
aggtgaacccacatggggtcaacaccaaag

SEQ ID NO: 97768 - DNA, 30 bp, Artificial Sequence
  Synthetic oligonucleotide
tcaggggcgctcagtctcaagcccgcaaag

SEQ ID NO: 97769 - DNA, 30 bp, Artificial Sequence
  Synthetic oligonucleotide
aacgattgcggagcacgggaggtcgcaaag

SEQ ID NO: 97770 - DNA, 30 bp, Artificial Sequence
  Synthetic oligonucleotide
ggatccgggtcatgaacaacgcctgcaaag

SEQ ID NO: 97771 - DNA, 30 bp, Artificial Sequence
  Synthetic oligonucleotide
tgccaattatttcagcggtatgcatcaaag

SEQ ID NO: 97772 - DNA, 30 bp, Artificial Sequence
  Synthetic oligonucleotide
gaaagaagcggatgtattagactctcaaag

SEQ ID NO: 97773 - DNA, 30 bp, Artificial Sequence
  Synthetic oligonucleotide
aacaccctagtcatgttcgtacggtcaaag

SEQ ID NO: 97774 - DNA, 30 bp, Artificial Sequence
  Synthetic oligonucleotide
cgcggtcttcgttacgactgccgttcaaag

SEQ ID NO: 97775 - DNA, 30 bp, Artificial Sequence
  Synthetic oligonucleotide
taatcgactacgtgaaccagataaagaaag

SEQ ID NO: 97776 - DNA, 30 bp, Artificial Sequence
  Synthetic oligonucleotide
gcgggaaccaggcggcccaagccaagaaag

SEQ ID NO: 97777 - DNA, 30 bp, Artificial Sequence
  Synthetic oligonucleotide
acgggttgaagtgcccccacggtaagaaag

SEQ ID NO: 97778 - DNA, 30 bp, Artificial Sequence
  Synthetic oligonucleotide
ccccgaggactctggacgttaaccagaaag

SEQ ID NO: 97779 - DNA, 30 bp, Artificial Sequence
  Synthetic oligonucleotide
gtccgaggtgataccggaattgccagaaag

SEQ ID NO: 97780 - DNA, 30 bp, Artificial Sequence
  Synthetic oligonucleotide
attaggtcatgaggctttgattccagaaag

SEQ ID NO: 97781 - DNA, 30 bp, Artificial Sequence
  Synthetic oligonucleotide
gccccgaaaactacagtcagatagagaaag

SEQ ID NO: 97782 - DNA, 30 bp, Artificial Sequence
  Synthetic oligonucleotide
cgaataagggaccggcgtcgggcacgaaag

SEQ ID NO: 97783 - DNA, 30 bp, Artificial Sequence
  Synthetic oligonucleotide
acaggtaactgttgattcaaataccgaaag

SEQ ID NO: 97784 - DNA, 30 bp, Artificial Sequence
  Synthetic oligonucleotide
aacgagtacgttacatctacatctcgaaag

SEQ ID NO: 97785 - DNA, 30 bp, Artificial Sequence
  Synthetic oligonucleotide
ggtgggcggacacaaatgtgggttcgaaag

SEQ ID NO: 97786 - DNA, 30 bp, Artificial Sequence
  Synthetic oligonucleotide
tctgttgaagggtgctcacatcaaggaaag

SEQ ID NO: 97787 - DNA, 30 bp, Artificial Sequence
  Synthetic oligonucleotide
atgaagcaggcccaccgcgcataaggaaag

SEQ ID NO: 97788 - DNA, 30 bp, Artificial Sequence
  Synthetic oligonucleotide
acgggctcaggtgttagtgggttcggaaag

SEQ ID NO: 97789 - DNA, 30 bp, Artificial Sequence
  Synthetic oligonucleotide
agacagtgaactccgttacatcggggaaag

SEQ ID NO: 97790 - DNA, 30 bp, Artificial Sequence
  Synthetic oligonucleotide
cctccaggctcgccgcaacgacgatgaaag

SEQ ID NO: 97791 - DNA, 30 bp, Artificial Sequence
  Synthetic oligonucleotide
tgtacactgagtaatgccgtgggctgaaag

SEQ ID NO: 97792 - DNA, 30 bp, Artificial Sequence
  Synthetic oligonucleotide
ttaggccaacacacccgtgaaacaataaag

SEQ ID NO: 97793 - DNA, 30 bp, Artificial Sequence
  Synthetic oligonucleotide
acacgtatccgttatgcctaagacataaag

SEQ ID NO: 97794 - DNA, 30 bp, Artificial Sequence
  Synthetic oligonucleotide
gggctagtgatggaattgcactccataaag

SEQ ID NO: 97795 - DNA, 30 bp, Artificial Sequence
  Synthetic oligonucleotide
cggcacgacaccgaggcccttttgataaag

SEQ ID NO: 97796 - DNA, 30 bp, Artificial Sequence
  Synthetic oligonucleotide
accctcctaggcgtcgatcagttactaaag

SEQ ID NO: 97797 - DNA, 30 bp, Artificial Sequence
  Synthetic oligonucleotide
taagagcgtagctgtctccaataagtaaag

SEQ ID NO: 97798 - DNA, 30 bp, Artificial Sequence
  Synthetic oligonucleotide
cggttgtgtataaaagtcgcgttcgtaaag

SEQ ID NO: 97799 - DNA, 30 bp, Artificial Sequence
  Synthetic oligonucleotide
gggtaaaacaatgcgtaactagcggtaaag

SEQ ID NO: 97800 - DNA, 30 bp, Artificial Sequence
  Synthetic oligonucleotide
atcggataggcctgagtagtacctgtaaag

SEQ ID NO: 97801 - DNA, 30 bp, Artificial Sequence
  Synthetic oligonucleotide
ggggaagatctttaccagggaccattaaag

SEQ ID NO: 97802 - DNA, 30 bp, Artificial Sequence
  Synthetic oligonucleotide
gactgtctttagatggagacaaacttaaag

SEQ ID NO: 97803 - DNA, 30 bp, Artificial Sequence
  Synthetic oligonucleotide
cgccgggcgttagaggcttgagctttaaag

SEQ ID NO: 97804 - DNA, 30 bp, Artificial Sequence
  Synthetic oligonucleotide
tctaaaatgctacagaaggtttgtttaaag

SEQ ID NO: 97805 - DNA, 30 bp, Artificial Sequence
  Synthetic oligonucleotide
cgcaaataaaggatggtgcgttgcaacaag

SEQ ID NO: 97806 - DNA, 30 bp, Artificial Sequence
  Synthetic oligonucleotide
gcagaatcttgggcaagtatagggaacaag

SEQ ID NO: 97807 - DNA, 30 bp, Artificial Sequence
  Synthetic oligonucleotide
gctagcaatccaattacgagtgataacaag

SEQ ID NO: 97808 - DNA, 30 bp, Artificial Sequence
  Synthetic oligonucleotide
ctacagtgtaacgttcctgaaattaacaag

SEQ ID NO: 97809 - DNA, 30 bp, Artificial Sequence
  Synthetic oligonucleotide
gaggacatgatagtggcgatttttaacaag

SEQ ID NO: 97810 - DNA, 30 bp, Artificial Sequence
  Synthetic oligonucleotide
aacataattgtctggagacggatacacaag

SEQ ID NO: 97811 - DNA, 30 bp, Artificial Sequence
  Synthetic oligonucleotide
ttaaacgaaagcggaggtcactaagacaag

SEQ ID NO: 97812 - DNA, 30 bp, Artificial Sequence
  Synthetic oligonucleotide
atagcggtttattcgctgattacagacaag

SEQ ID NO: 97813 - DNA, 30 bp, Artificial Sequence
  Synthetic oligonucleotide
gcccctggtttggggcgtcaaagggacaag

SEQ ID NO: 97814 - DNA, 30 bp, Artificial Sequence
  Synthetic oligonucleotide
tcaatggtgtggttcaccgctagtgacaag

SEQ ID NO: 97815 - DNA, 30 bp, Artificial Sequence
  Synthetic oligonucleotide
gtccagtgaagtcttattacaatctacaag

SEQ ID NO: 97816 - DNA, 30 bp, Artificial Sequence
  Synthetic oligonucleotide
ctagtccttgtgaggaaaggaaggtacaag

SEQ ID NO: 97817 - DNA, 30 bp, Artificial Sequence
  Synthetic oligonucleotide
agaagtcgcactactaagtcatggtacaag

SEQ ID NO: 97818 - DNA, 30 bp, Artificial Sequence
  Synthetic oligonucleotide
gcaagaatactcgtcggcttacgttacaag

SEQ ID NO: 97819 - DNA, 30 bp, Artificial Sequence
  Synthetic oligonucleotide
tcatcggttaatgcaagttcctgttacaag

SEQ ID NO: 97820 - DNA, 30 bp, Artificial Sequence
  Synthetic oligonucleotide
tgattgatcgccagggatccaggaaccaag

SEQ ID NO: 97821 - DNA, 30 bp, Artificial Sequence
  Synthetic oligonucleotide
gttagcgcacatgtaccgacagcgcccaag

SEQ ID NO: 97822 - DNA, 30 bp, Artificial Sequence
  Synthetic oligonucleotide
atgtagttagaccagggccgaatgcccaag

SEQ ID NO: 97823 - DNA, 30 bp, Artificial Sequence
  Synthetic oligonucleotide
tgatagccctgcttatggtggtcagccaag

SEQ ID NO: 97824 - DNA, 30 bp, Artificial Sequence
  Synthetic oligonucleotide
gcctcataactggcactttatggctccaag

SEQ ID NO: 97825 - DNA, 30 bp, Artificial Sequence
  Synthetic oligonucleotide
cagtgtgaataacggtttatgtgctccaag

SEQ ID NO: 97826 - DNA, 30 bp, Artificial Sequence
  Synthetic oligonucleotide
ccagagtgatactacattaggtcgtccaag

SEQ ID NO: 97827 - DNA, 30 bp, Artificial Sequence
  Synthetic oligonucleotide
tatgatcggctgaactatgtctaaagcaag

SEQ ID NO: 97828 - DNA, 30 bp, Artificial Sequence
  Synthetic oligonucleotide
gtcaataaaactatcgcggtcaacagcaag

SEQ ID NO: 97829 - DNA, 30 bp, Artificial Sequence
  Synthetic oligonucleotide
gatatacggaatacgtaaagctatagcaag

SEQ ID NO: 97830 - DNA, 30 bp, Artificial Sequence
  Synthetic oligonucleotide
gcccggctaagggaactaggaactagcaag

SEQ ID NO: 97831 - DNA, 30 bp, Artificial Sequence
  Synthetic oligonucleotide
ccgtccaataccaacacgtaaattagcaag

SEQ ID NO: 97832 - DNA, 30 bp, Artificial Sequence
  Synthetic oligonucleotide
gaaaacacatttcacccacacgtgcgcaag

SEQ ID NO: 97833 - DNA, 30 bp, Artificial Sequence
  Synthetic oligonucleotide
acctacaaagggttcccttaatatggcaag

SEQ ID NO: 97834 - DNA, 30 bp, Artificial Sequence
  Synthetic oligonucleotide
tggaacccagtcggagggagtgttggcaag

SEQ ID NO: 97835 - DNA, 30 bp, Artificial Sequence
  Synthetic oligonucleotide
cggggccagccacgttattatggctgcaag

SEQ ID NO: 97836 - DNA, 30 bp, Artificial Sequence
  Synthetic oligonucleotide
ggtggtctgataacgtgcaggtagtgcaag

SEQ ID NO: 97837 - DNA, 30 bp, Artificial Sequence
  Synthetic oligonucleotide
gctgaacctcacggcgaaagggggtgcaag

SEQ ID NO: 97838 - DNA, 30 bp, Artificial Sequence
  Synthetic oligonucleotide
taaaacatacacgaggtaagtcgaatcaag

SEQ ID NO: 97839 - DNA, 30 bp, Artificial Sequence
  Synthetic oligonucleotide
ggttaggagcggcaaacaacgataatcaag

SEQ ID NO: 97840 - DNA, 30 bp, Artificial Sequence
  Synthetic oligonucleotide
ccactatactggctataattcggcatcaag

SEQ ID NO: 97841 - DNA, 30 bp, Artificial Sequence
  Synthetic oligonucleotide
ctatcagtagatacaaaacggaggctcaag

SEQ ID NO: 97842 - DNA, 30 bp, Artificial Sequence
  Synthetic oligonucleotide
cgctgcgcgctaacctaagtaagtctcaag

SEQ ID NO: 97843 - DNA, 30 bp, Artificial Sequence
  Synthetic oligonucleotide
gtacggtaccatcccgtagtatcagtcaag

SEQ ID NO: 97844 - DNA, 30 bp, Artificial Sequence
  Synthetic oligonucleotide
tgtaaggaaagtttgtctatattcttcaag

SEQ ID NO: 97845 - DNA, 30 bp, Artificial Sequence
  Synthetic oligonucleotide
ctggcacaggagcgttctgaaaggttcaag

SEQ ID NO: 97846 - DNA, 30 bp, Artificial Sequence
  Synthetic oligonucleotide
gtgatcccacgataaggggtggtaaagaag

SEQ ID NO: 97847 - DNA, 30 bp, Artificial Sequence
  Synthetic oligonucleotide
ggttgcgagtgcggtgacatgagcaagaag

SEQ ID NO: 97848 - DNA, 30 bp, Artificial Sequence
  Synthetic oligonucleotide
tgttgagtataagagtgcaggcctaagaag

SEQ ID NO: 97849 - DNA, 30 bp, Artificial Sequence
  Synthetic oligonucleotide
cacaataagtaattgccagcaagtaagaag

SEQ ID NO: 97850 - DNA, 30 bp, Artificial Sequence
  Synthetic oligonucleotide
gatactgacaagtcataaaaaatacagaag

SEQ ID NO: 97851 - DNA, 30 bp, Artificial Sequence
  Synthetic oligonucleotide
cgaatgacctccccggagtttgtggagaag

SEQ ID NO: 97852 - DNA, 30 bp, Artificial Sequence
  Synthetic oligonucleotide
actaaaatatggccgaaagacagtgagaag

SEQ ID NO: 97853 - DNA, 30 bp, Artificial Sequence
  Synthetic oligonucleotide
tccacctagctccgaattaccctatagaag

SEQ ID NO: 97854 - DNA, 30 bp, Artificial Sequence
  Synthetic oligonucleotide
cgacacgcatatttattaggattatagaag

SEQ ID NO: 97855 - DNA, 30 bp, Artificial Sequence
  Synthetic oligonucleotide
ggtgtgtctacatcgtctcatggaacgaag

SEQ ID NO: 97856 - DNA, 30 bp, Artificial Sequence
  Synthetic oligonucleotide
ctactcataagtagaaagataatcacgaag

SEQ ID NO: 97857 - DNA, 30 bp, Artificial Sequence
  Synthetic oligonucleotide
agatcgggaaatatcgaggttgtcacgaag

SEQ ID NO: 97858 - DNA, 30 bp, Artificial Sequence
  Synthetic oligonucleotide
aagatcggccggggtgctaatttgacgaag

SEQ ID NO: 97859 - DNA, 30 bp, Artificial Sequence
  Synthetic oligonucleotide
agcgataacctaacgggtcaatgcccgaag

SEQ ID NO: 97860 - DNA, 30 bp, Artificial Sequence
  Synthetic oligonucleotide
ttggtgagcaaaagagttggtgttccgaag

SEQ ID NO: 97861 - DNA, 30 bp, Artificial Sequence
  Synthetic oligonucleotide
ttatccgcatctattctccagtgcgcgaag

SEQ ID NO: 97862 - DNA, 30 bp, Artificial Sequence
  Synthetic oligonucleotide
gtcaaattaatccgtctaaaccaggcgaag

SEQ ID NO: 97863 - DNA, 30 bp, Artificial Sequence
  Synthetic oligonucleotide
cccccggaaaggtcgttaaagcatgcgaag

SEQ ID NO: 97864 - DNA, 30 bp, Artificial Sequence
  Synthetic oligonucleotide
taagaggtttgtgtggaagagcgatcgaag

SEQ ID NO: 97865 - DNA, 30 bp, Artificial Sequence
  Synthetic oligonucleotide
accagtcggacatgttacacaaagaggaag

SEQ ID NO: 97866 - DNA, 30 bp, Artificial Sequence
  Synthetic oligonucleotide
cctgcttgcttggaggagttaaggaggaag

SEQ ID NO: 97867 - DNA, 30 bp, Artificial Sequence
  Synthetic oligonucleotide
tttcacagcttgactaagattcaagggaag

SEQ ID NO: 97868 - DNA, 30 bp, Artificial Sequence
  Synthetic oligonucleotide
ctaacggctggccgatcacatttagggaag

SEQ ID NO: 97869 - DNA, 30 bp, Artificial Sequence
  Synthetic oligonucleotide
aatggcagtctactagctgatcgggggaag

SEQ ID NO: 97870 - DNA, 30 bp, Artificial Sequence
  Synthetic oligonucleotide
gagtagtcacaacgaaggcacaatgggaag

SEQ ID NO: 97871 - DNA, 30 bp, Artificial Sequence
  Synthetic oligonucleotide
gttaacactaaacagcaggaccatgggaag

SEQ ID NO: 97872 - DNA, 30 bp, Artificial Sequence
  Synthetic oligonucleotide
aaccagtagtctagcacaatgagtgggaag

SEQ ID NO: 97873 - DNA, 30 bp, Artificial Sequence
  Synthetic oligonucleotide
gtatgaagtgggcaccggccaggtgggaag

SEQ ID NO: 97874 - DNA, 30 bp, Artificial Sequence
  Synthetic oligonucleotide
ccggtagattgtagagtagtgggtgggaag

SEQ ID NO: 97875 - DNA, 30 bp, Artificial Sequence
  Synthetic oligonucleotide
aaggttggtcaatgcttggttgattggaag

SEQ ID NO: 97876 - DNA, 30 bp, Artificial Sequence
  Synthetic oligonucleotide
cgtgtggggagaaagtatatgacttggaag

SEQ ID NO: 97877 - DNA, 30 bp, Artificial Sequence
  Synthetic oligonucleotide
cttagtaccactctgtcggacaccatgaag

SEQ ID NO: 97878 - DNA, 30 bp, Artificial Sequence
  Synthetic oligonucleotide
cgtgattccctagcgggttagccgatgaag

SEQ ID NO: 97879 - DNA, 35 bp, Artificial Sequence
  Synthetic oligonucleotide
atgaagcggccacaaaccggtagcccaatatgaag

SEQ ID NO: 97880 - DNA, 30 bp, Artificial Sequence
  Synthetic oligonucleotide
cacgagatagcgacataaaagtatatgaag

SEQ ID NO: 97881 - DNA, 30 bp, Artificial Sequence
  Synthetic oligonucleotide
cggatcatgtatacagaagaggcactgaag

SEQ ID NO: 97882 - DNA, 30 bp, Artificial Sequence
  Synthetic oligonucleotide
agctcaccggatggagggagttcactgaag

SEQ ID NO: 97883 - DNA, 30 bp, Artificial Sequence
  Synthetic oligonucleotide
atgggggaaccatggcgatcgcccctgaag

SEQ ID NO: 97884 - DNA, 30 bp, Artificial Sequence
  Synthetic oligonucleotide
ggaaagtcaggatgactgagactgctgaag

SEQ ID NO: 97885 - DNA, 30 bp, Artificial Sequence
  Synthetic oligonucleotide
caatagataagcagaataatactcgtgaag

SEQ ID NO: 97886 - DNA, 30 bp, Artificial Sequence
  Synthetic oligonucleotide
gctctaaatcgtcagactgtctgtgtgaag

SEQ ID NO: 97887 - DNA, 31 bp, Artificial Sequence
  Synthetic oligonucleotide
tatgggcgagattagctataggtcattgaag

SEQ ID NO: 97888 - DNA, 30 bp, Artificial Sequence
  Synthetic oligonucleotide
gtcgcgtccggtgtttaattcgtattgaag

SEQ ID NO: 97889 - DNA, 30 bp, Artificial Sequence
  Synthetic oligonucleotide
aatgacctaagcgcacttccacccttgaag

SEQ ID NO: 97890 - DNA, 30 bp, Artificial Sequence
  Synthetic oligonucleotide
tggaaggaaaatgtatacagtgtcttgaag

SEQ ID NO: 97891 - DNA, 30 bp, Artificial Sequence
  Synthetic oligonucleotide
cgcgaatttatagctcagcaatgtttgaag

SEQ ID NO: 97892 - DNA, 30 bp, Artificial Sequence
  Synthetic oligonucleotide
ggacattaatggacgtgaaaggacaataag

SEQ ID NO: 97893 - DNA, 30 bp, Artificial Sequence
  Synthetic oligonucleotide
gatcgaggggcatcttaaactaagaataag

SEQ ID NO: 97894 - DNA, 30 bp, Artificial Sequence
  Synthetic oligonucleotide
gataccgttggttaatgacagtgtcataag

SEQ ID NO: 97895 - DNA, 30 bp, Artificial Sequence
  Synthetic oligonucleotide
gcggcaccattgtgtgctctaatagataag

SEQ ID NO: 97896 - DNA, 30 bp, Artificial Sequence
  Synthetic oligonucleotide
cccgagatagggcccgatgggtccgataag

SEQ ID NO: 97897 - DNA, 30 bp, Artificial Sequence
  Synthetic oligonucleotide
tgtaatagctcggacataatatgtgataag

SEQ ID NO: 97898 - DNA, 30 bp, Artificial Sequence
  Synthetic oligonucleotide
ttccgaataagggccatcggacagtataag

SEQ ID NO: 97899 - DNA, 30 bp, Artificial Sequence
  Synthetic oligonucleotide
cttcacaacgatagggaatagaaaactaag

SEQ ID NO: 97900 - DNA, 30 bp, Artificial Sequence
  Synthetic oligonucleotide
actgtaggtcccatactgcaaaggactaag

SEQ ID NO: 97901 - DNA, 30 bp, Artificial Sequence
  Synthetic oligonucleotide
gtttgcgcgatgacacgagcagaacctaag

SEQ ID NO: 97902 - DNA, 30 bp, Artificial Sequence
  Synthetic oligonucleotide
tcggaatgcgcaggtgtccgtcagcctaag

SEQ ID NO: 97903 - DNA, 30 bp, Artificial Sequence
  Synthetic oligonucleotide
cagcgcaatgcgattgggatagagcctaag

SEQ ID NO: 97904 - DNA, 30 bp, Artificial Sequence
  Synthetic oligonucleotide
atatggcgacctattgaagttttgcctaag

SEQ ID NO: 97905 - DNA, 30 bp, Artificial Sequence
  Synthetic oligonucleotide
agctagcaggtcgattgactcaaagctaag

SEQ ID NO: 97906 - DNA, 30 bp, Artificial Sequence
  Synthetic oligonucleotide
ttgggagggcgtggtcgttcccgagctaag

SEQ ID NO: 97907 - DNA, 30 bp, Artificial Sequence
  Synthetic oligonucleotide
catgacggcaccggtactaacggcgctaag

SEQ ID NO: 97908 - DNA, 30 bp, Artificial Sequence
  Synthetic oligonucleotide
tcgaccgaggattgaatagattaggctaag

SEQ ID NO: 97909 - DNA, 30 bp, Artificial Sequence
  Synthetic oligonucleotide
accggccgatcaataggaggtcgggctaag

SEQ ID NO: 97910 - DNA, 30 bp, Artificial Sequence
  Synthetic oligonucleotide
taataatccaatcaggtgccctccagtaag

SEQ ID NO: 97911 - DNA, 30 bp, Artificial Sequence
  Synthetic oligonucleotide
agtcttgaactgtcagcgtagtagagtaag

SEQ ID NO: 97912 - DNA, 30 bp, Artificial Sequence
  Synthetic oligonucleotide
gtgaagtcaaagggaaaagcgcgccgtaag

SEQ ID NO: 97913 - DNA, 30 bp, Artificial Sequence
  Synthetic oligonucleotide
ttgaagaacgggggaatggataagcgtaag

SEQ ID NO: 97914 - DNA, 30 bp, Artificial Sequence
  Synthetic oligonucleotide
caccaagtgggatttaatgctcttcgtaag

SEQ ID NO: 97915 - DNA, 30 bp, Artificial Sequence
  Synthetic oligonucleotide
aaagcaggactgtagagtggtaaaggtaag

SEQ ID NO: 97916 - DNA, 30 bp, Artificial Sequence
  Synthetic oligonucleotide
tgaaactataagaacatgcggagtggtaag

SEQ ID NO: 97917 - DNA, 30 bp, Artificial Sequence
  Synthetic oligonucleotide
atgtacggttaactcatatgttgtggtaag

SEQ ID NO: 97918 - DNA, 30 bp, Artificial Sequence
  Synthetic oligonucleotide
atgcgttcgagcgagcagcaaccgtgtaag

SEQ ID NO: 97919 - DNA, 30 bp, Artificial Sequence
  Synthetic oligonucleotide
cgggcttgcctatcatcctatgcttgtaag

SEQ ID NO: 97920 - DNA, 30 bp, Artificial Sequence
  Synthetic oligonucleotide
ggccgctccgagattttcctgcgcattaag

SEQ ID NO: 97921 - DNA, 30 bp, Artificial Sequence
  Synthetic oligonucleotide
ttaaacaaggtaggggattaaagtattaag

SEQ ID NO: 97922 - DNA, 30 bp, Artificial Sequence
  Synthetic oligonucleotide
cgagcacaggaacctgcgtctaaagttaag

SEQ ID NO: 97923 - DNA, 30 bp, Artificial Sequence
  Synthetic oligonucleotide
tgtggaatttaaggagcacgtaaagttaag

SEQ ID NO: 97924 - DNA, 30 bp, Artificial Sequence
  Synthetic oligonucleotide
gaccgcggtcaccggaatgcctgagttaag

SEQ ID NO: 97925 - DNA, 30 bp, Artificial Sequence
  Synthetic oligonucleotide
aaatgattaggaaggtcgttcgccgttaag

SEQ ID NO: 97926 - DNA, 30 bp, Artificial Sequence
  Synthetic oligonucleotide
tcattcttaagagttctagtaagcgttaag

SEQ ID NO: 97927 - DNA, 30 bp, Artificial Sequence
  Synthetic oligonucleotide
ggatgctgacaactgcaacgatgcgttaag

SEQ ID NO: 97928 - DNA, 30 bp, Artificial Sequence
  Synthetic oligonucleotide
ccagggaggaactatcaatcgaaatttaag

SEQ ID NO: 97929 - DNA, 30 bp, Artificial Sequence
  Synthetic oligonucleotide
aagagtaagcaccgttacagagtcaaacag

SEQ ID NO: 97930 - DNA, 30 bp, Artificial Sequence
  Synthetic oligonucleotide
agcgaatctttgaaattacgagagaaacag

SEQ ID NO: 97931 - DNA, 30 bp, Artificial Sequence
  Synthetic oligonucleotide
gtttcacgtcagttgaagctcatgaaacag

SEQ ID NO: 97932 - DNA, 30 bp, Artificial Sequence
  Synthetic oligonucleotide
aagtcaatgttgtgacgaatgttgaaacag

SEQ ID NO: 97933 - DNA, 30 bp, Artificial Sequence
  Synthetic oligonucleotide
gtgggtgaagttcattcaagccaccaacag

SEQ ID NO: 97934 - DNA, 30 bp, Artificial Sequence
  Synthetic oligonucleotide
aatgtgatcaaccattactctgcagaacag

SEQ ID NO: 97935 - DNA, 30 bp, Artificial Sequence
  Synthetic oligonucleotide
caaagtgtgcacgttattgtgcgtgaacag

SEQ ID NO: 97936 - DNA, 30 bp, Artificial Sequence
  Synthetic oligonucleotide
catgtaatatctcggaatggtaaataacag

SEQ ID NO: 97937 - DNA, 30 bp, Artificial Sequence
  Synthetic oligonucleotide
cattgaaaaaaacaaagaatttcataacag

SEQ ID NO: 97938 - DNA, 30 bp, Artificial Sequence
  Synthetic oligonucleotide
tgattgtgtacgcctctactacgataacag

SEQ ID NO: 97939 - DNA, 30 bp, Artificial Sequence
  Synthetic oligonucleotide
catggacaccacgtagcctaagcgtaacag

SEQ ID NO: 97940 - DNA, 30 bp, Artificial Sequence
  Synthetic oligonucleotide
atgaagtactccaatcaaacatggtaacag

SEQ ID NO: 97941 - DNA, 30 bp, Artificial Sequence
  Synthetic oligonucleotide
ataagggacagaacgctaattagttaacag

SEQ ID NO: 97942 - DNA, 30 bp, Artificial Sequence
  Synthetic oligonucleotide
acgcacaacttcgggtgtaaccaaacacag

SEQ ID NO: 97943 - DNA, 30 bp, Artificial Sequence
  Synthetic oligonucleotide
tgacttcaattgaactggaacggaacacag

SEQ ID NO: 97944 - DNA, 30 bp, Artificial Sequence
  Synthetic oligonucleotide
gcaaaagtcgcaaatgattcaaatacacag

SEQ ID NO: 97945 - DNA, 30 bp, Artificial Sequence
  Synthetic oligonucleotide
gtcagacatcacacgtgaggatcaccacag

SEQ ID NO: 97946 - DNA, 30 bp, Artificial Sequence
  Synthetic oligonucleotide
gggaggagacacccgcattgcagaccacag

SEQ ID NO: 97947 - DNA, 30 bp, Artificial Sequence
  Synthetic oligonucleotide
ggcgtctggtaactattatggcttccacag

SEQ ID NO: 97948 - DNA, 30 bp, Artificial Sequence
  Synthetic oligonucleotide
agtgcgctggtttcccggagacgagcacag

SEQ ID NO: 97949 - DNA, 30 bp, Artificial Sequence
  Synthetic oligonucleotide
agcgggtcacgcgtgacaaagggggcacag

SEQ ID NO: 97950 - DNA, 30 bp, Artificial Sequence
  Synthetic oligonucleotide
aggtgtaccctcgattctgactaatcacag

SEQ ID NO: 97951 - DNA, 30 bp, Artificial Sequence
  Synthetic oligonucleotide
gcaagtgactcgggatgtaaaccttcacag

SEQ ID NO: 97952 - DNA, 30 bp, Artificial Sequence
  Synthetic oligonucleotide
gcagcccatacatatacaagcagttcacag

SEQ ID NO: 97953 - DNA, 30 bp, Artificial Sequence
  Synthetic oligonucleotide
ttatcagtacgctacgaggaacgaagacag

SEQ ID NO: 97954 - DNA, 30 bp, Artificial Sequence
  Synthetic oligonucleotide
ttgtcatacgtaggtattgcccgaagacag

SEQ ID NO: 97955 - DNA, 30 bp, Artificial Sequence
  Synthetic oligonucleotide
cgaggccactggatggcggaatcgagacag

SEQ ID NO: 97956 - DNA, 30 bp, Artificial Sequence
  Synthetic oligonucleotide
aggaacgtcagttttttacatgtccgacag

SEQ ID NO: 97957 - DNA, 30 bp, Artificial Sequence
  Synthetic oligonucleotide
atcttcgtgggtatgagtaccaagcgacag

SEQ ID NO: 97958 - DNA, 30 bp, Artificial Sequence
  Synthetic oligonucleotide
gaaatagcattccaaatgccttagcgacag

SEQ ID NO: 97959 - DNA, 30 bp, Artificial Sequence
  Synthetic oligonucleotide
gttagaaatcacaacatacaggcgcgacag

SEQ ID NO: 97960 - DNA, 30 bp, Artificial Sequence
  Synthetic oligonucleotide
gaacccagacaaaactatcaaattcgacag

SEQ ID NO: 97961 - DNA, 28 bp, Artificial Sequence
  Synthetic oligonucleotide
acacagcgagcgactcgcaatcggacag

SEQ ID NO: 97962 - DNA, 30 bp, Artificial Sequence
  Synthetic oligonucleotide
cgtgtgcatcgtatttatcgaaggggacag

SEQ ID NO: 97963 - DNA, 30 bp, Artificial Sequence
  Synthetic oligonucleotide
aggtggctttcaagaaacgatacatgacag

SEQ ID NO: 97964 - DNA, 30 bp, Artificial Sequence
  Synthetic oligonucleotide
actaagaggcgtaagtcctcgtcctgacag

SEQ ID NO: 97965 - DNA, 30 bp, Artificial Sequence
  Synthetic oligonucleotide
cattttggcatgaaaatacagtagtgacag

SEQ ID NO: 97966 - DNA, 30 bp, Artificial Sequence
  Synthetic oligonucleotide
agaaactccaagagtcttggattagtacag

SEQ ID NO: 97967 - DNA, 30 bp, Artificial Sequence
  Synthetic oligonucleotide
ggatgcgctcaatgatcaacgaaggtacag

SEQ ID NO: 97968 - DNA, 30 bp, Artificial Sequence
  Synthetic oligonucleotide
gccaattgtggatagagtaactctgtacag

SEQ ID NO: 97969 - DNA, 30 bp, Artificial Sequence
  Synthetic oligonucleotide
aaggcacaatattaaggtagaagtgtacag

SEQ ID NO: 97970 - DNA, 30 bp, Artificial Sequence
  Synthetic oligonucleotide
gataaggacaatgtgatattttaattacag

SEQ ID NO: 97971 - DNA, 30 bp, Artificial Sequence
  Synthetic oligonucleotide
gctaacacgcgactacggttttggttacag

SEQ ID NO: 97972 - DNA, 30 bp, Artificial Sequence
  Synthetic oligonucleotide
ccttccaggatgatgtactagagcaaccag

SEQ ID NO: 97973 - DNA, 30 bp, Artificial Sequence
  Synthetic oligonucleotide
tgtgcaacgggtggattactcccgaaccag

SEQ ID NO: 97974 - DNA, 30 bp, Artificial Sequence
  Synthetic oligonucleotide
tcagtacagaagaaaccattatataaccag

SEQ ID NO: 97975 - DNA, 30 bp, Artificial Sequence
  Synthetic oligonucleotide
taggcgatggaaactggaactcttaaccag

SEQ ID NO: 97976 - DNA, 30 bp, Artificial Sequence
  Synthetic oligonucleotide
ctaggtggtattaaaatgaaagcccaccag

SEQ ID NO: 97977 - DNA, 30 bp, Artificial Sequence
  Synthetic oligonucleotide
agatgtatgacgtacggcgagcgagaccag

SEQ ID NO: 97978 - DNA, 30 bp, Artificial Sequence
  Synthetic oligonucleotide
aagatcaccttaggacatggaggctaccag

SEQ ID NO: 97979 - DNA, 30 bp, Artificial Sequence
  Synthetic oligonucleotide
cctgacacatgagaaaccgataaaccccag

SEQ ID NO: 97980 - DNA, 30 bp, Artificial Sequence
  Synthetic oligonucleotide
cgaaagttgcaacccggtcaacaagcccag

SEQ ID NO: 97981 - DNA, 30 bp, Artificial Sequence
  Synthetic oligonucleotide
cacaacccagcgaaaaccgtcttagcccag

SEQ ID NO: 97982 - DNA, 30 bp, Artificial Sequence
  Synthetic oligonucleotide
actaaagagttgtaaagcacctgggcccag

SEQ ID NO: 97983 - DNA, 30 bp, Artificial Sequence
  Synthetic oligonucleotide
actaggtgcagctcaaatcatggtgcccag

SEQ ID NO: 97984 - DNA, 30 bp, Artificial Sequence
  Synthetic oligonucleotide
taaccaaaaggcgatggacgcatatcccag

SEQ ID NO: 97985 - DNA, 30 bp, Artificial Sequence
  Synthetic oligonucleotide
accgccagctttaattaacgatcgtcccag

SEQ ID NO: 97986 - DNA, 30 bp, Artificial Sequence
  Synthetic oligonucleotide
tacgccgtccagcagtcgattaggtcccag

SEQ ID NO: 97987 - DNA, 30 bp, Artificial Sequence
  Synthetic oligonucleotide
atggtaacgtatgaaagagcgcattcccag

SEQ ID NO: 97988 - DNA, 30 bp, Artificial Sequence
  Synthetic oligonucleotide
gaatcgaagatgagcggggtactttcccag

SEQ ID NO: 97989 - DNA, 30 bp, Artificial Sequence
  Synthetic oligonucleotide
cttacgataggccattttatgataagccag

SEQ ID NO: 97990 - DNA, 30 bp, Artificial Sequence
  Synthetic oligonucleotide
atttagtgcggtttggccaggctaagccag

SEQ ID NO: 97991 - DNA, 30 bp, Artificial Sequence
  Synthetic oligonucleotide
aggtatgcttttattagaatgatcagccag

SEQ ID NO: 97992 - DNA, 30 bp, Artificial Sequence
  Synthetic oligonucleotide
gggaaacgcatatagtgctaggtgagccag

SEQ ID NO: 97993 - DNA, 30 bp, Artificial Sequence
  Synthetic oligonucleotide
acgggagaggcacataatcataatagccag

SEQ ID NO: 97994 - DNA, 30 bp, Artificial Sequence
  Synthetic oligonucleotide
ataccagggtggatgggtatgtgtagccag

SEQ ID NO: 97995 - DNA, 30 bp, Artificial Sequence
  Synthetic oligonucleotide
ccgttgtatcggtcaagtgggatccgccag

SEQ ID NO: 97996 - DNA, 30 bp, Artificial Sequence
  Synthetic oligonucleotide
tgtcgcacctgagatgtgagttagcgccag

SEQ ID NO: 97997 - DNA, 30 bp, Artificial Sequence
  Synthetic oligonucleotide
ccgaagttttcgcgaaatcaatgtcgccag

SEQ ID NO: 97998 - DNA, 30 bp, Artificial Sequence
  Synthetic oligonucleotide
ggccgggtgcgccactgcacgatgatccag

SEQ ID NO: 97999 - DNA, 30 bp, Artificial Sequence
  Synthetic oligonucleotide
tgatccttaatacgcctcattactatccag

SEQ ID NO: 98000 - DNA, 30 bp, Artificial Sequence
  Synthetic oligonucleotide
actcgcgtgggaaaatggaactgtatccag

SEQ ID NO: 98001 - DNA, 30 bp, Artificial Sequence
  Synthetic oligonucleotide
atattggtatatacagagtaagaactccag

SEQ ID NO: 98002 - DNA, 30 bp, Artificial Sequence
  Synthetic oligonucleotide
accctaaacgcacgaaattatgagctccag

SEQ ID NO: 98003 - DNA, 30 bp, Artificial Sequence
  Synthetic oligonucleotide
aacctgctcgtaagtgtggcttcgctccag

SEQ ID NO: 98004 - DNA, 30 bp, Artificial Sequence
  Synthetic oligonucleotide
catcagcccgtcatttaattcgtagtccag

SEQ ID NO: 98005 - DNA, 30 bp, Artificial Sequence
  Synthetic oligonucleotide
gctgtaaaaatatatgggagtgccgtccag

SEQ ID NO: 98006 - DNA, 30 bp, Artificial Sequence
  Synthetic oligonucleotide
caggtgaagtagtgtctactaggcgtccag

SEQ ID NO: 98007 - DNA, 30 bp, Artificial Sequence
  Synthetic oligonucleotide
gaagtgagcaaggcgtacggttgcttccag

SEQ ID NO: 98008 - DNA, 30 bp, Artificial Sequence
  Synthetic oligonucleotide
agagtactggatcggtgagtcaataagcag

SEQ ID NO: 98009 - DNA, 30 bp, Artificial Sequence
  Synthetic oligonucleotide
gagtaactactccttggccggactaagcag

SEQ ID NO: 98010 - DNA, 30 bp, Artificial Sequence
  Synthetic oligonucleotide
caacaacctgggctaaaatgtggccagcag

SEQ ID NO: 98011 - DNA, 30 bp, Artificial Sequence
  Synthetic oligonucleotide
agcttggatccccacaataatatccagcag

SEQ ID NO: 98012 - DNA, 30 bp, Artificial Sequence
  Synthetic oligonucleotide
tctagtataagctcgcttctagttcagcag

SEQ ID NO: 98013 - DNA, 30 bp, Artificial Sequence
  Synthetic oligonucleotide
gtactggaataagcatgactttccgagcag

SEQ ID NO: 98014 - DNA, 30 bp, Artificial Sequence
  Synthetic oligonucleotide
cattacgccggggccgtacccacatagcag

SEQ ID NO: 98015 - DNA, 30 bp, Artificial Sequence
  Synthetic oligonucleotide
actatggttgtgaacatttggacatagcag

SEQ ID NO: 98016 - DNA, 30 bp, Artificial Sequence
  Synthetic oligonucleotide
tgtcggagtgcttgtcaatatcactagcag

SEQ ID NO: 98017 - DNA, 30 bp, Artificial Sequence
  Synthetic oligonucleotide
cggtcactgaccttattcgtacctccgcag

SEQ ID NO: 98018 - DNA, 30 bp, Artificial Sequence
  Synthetic oligonucleotide
acggttgctccgatccatcttagagcgcag

SEQ ID NO: 98019 - DNA, 30 bp, Artificial Sequence
  Synthetic oligonucleotide
cataaggccgggtgtagaaatgtagcgcag

SEQ ID NO: 98020 - DNA, 30 bp, Artificial Sequence
  Synthetic oligonucleotide
tgcaaggaatgacacaaaaaaccggcgcag

SEQ ID NO: 98021 - DNA, 30 bp, Artificial Sequence
  Synthetic oligonucleotide
tagctatccaacaaaaaccactgaaggcag

SEQ ID NO: 98022 - DNA, 30 bp, Artificial Sequence
  Synthetic oligonucleotide
acacgagcgacatcatgcagtaggaggcag

SEQ ID NO: 98023 - DNA, 30 bp, Artificial Sequence
  Synthetic oligonucleotide
ggatgcgataagagttcagaggctaggcag

SEQ ID NO: 98024 - DNA, 30 bp, Artificial Sequence
  Synthetic oligonucleotide
tccgttggttaccggaattattaacggcag

SEQ ID NO: 98025 - DNA, 30 bp, Artificial Sequence
  Synthetic oligonucleotide
cacagaaacaggttacaaggcggacggcag

SEQ ID NO: 98026 - DNA, 30 bp, Artificial Sequence
  Synthetic oligonucleotide
cctggacagtagcccgttcacaaagggcag

SEQ ID NO: 98027 - DNA, 30 bp, Artificial Sequence
  Synthetic oligonucleotide
caacgtgagctgtgggcttctcccgggcag

SEQ ID NO: 98028 - DNA, 30 bp, Artificial Sequence
  Synthetic oligonucleotide
caaacatctggaataactcatgccgggcag

SEQ ID NO: 98029 - DNA, 30 bp, Artificial Sequence
  Synthetic oligonucleotide
gtcatagttatagcaagggacttggggcag

SEQ ID NO: 98030 - DNA, 30 bp, Artificial Sequence
  Synthetic oligonucleotide
taggtaggcaagaagtataaggaatggcag

SEQ ID NO: 98031 - DNA, 30 bp, Artificial Sequence
  Synthetic oligonucleotide
taggtgggaagttgtttatactgatggcag

SEQ ID NO: 98032 - DNA, 30 bp, Artificial Sequence
  Synthetic oligonucleotide
cttcgtccgaacatcgaatgctagtggcag

SEQ ID NO: 98033 - DNA, 31 bp, Artificial Sequence
  Synthetic oligonucleotide
tccgagatccaccatttgagctcttatgcag

SEQ ID NO: 98034 - DNA, 30 bp, Artificial Sequence
  Synthetic oligonucleotide
taatgcattctatatgctccagcagtgcag

SEQ ID NO: 98035 - DNA, 30 bp, Artificial Sequence
  Synthetic oligonucleotide
gacaggtctggaaccaggtatatagtgcag

SEQ ID NO: 98036 - DNA, 30 bp, Artificial Sequence
  Synthetic oligonucleotide
ggacttgcgtctgttaggcccgaggtgcag

SEQ ID NO: 98037 - DNA, 30 bp, Artificial Sequence
  Synthetic oligonucleotide
ggtgtacaacaccactgtctggtcttgcag

SEQ ID NO: 98038 - DNA, 30 bp, Artificial Sequence
  Synthetic oligonucleotide
ggcgaaactttaaaacgagggacgttgcag

SEQ ID NO: 98039 - DNA, 30 bp, Artificial Sequence
  Synthetic oligonucleotide
agtaaatccaatatgggagggcgaaatcag

SEQ ID NO: 98040 - DNA, 30 bp, Artificial Sequence
  Synthetic oligonucleotide
agagcatagtacggatgcgtcgctaatcag

SEQ ID NO: 98041 - DNA, 30 bp, Artificial Sequence
  Synthetic oligonucleotide
acggcttcctaaaccaaaactattaatcag

SEQ ID NO: 98042 - DNA, 30 bp, Artificial Sequence
  Synthetic oligonucleotide
cacgtcgggtacagcgtgagcgagcatcag

SEQ ID NO: 98043 - DNA, 30 bp, Artificial Sequence
  Synthetic oligonucleotide
accactagttggtaatgaagggctcatcag

SEQ ID NO: 98044 - DNA, 30 bp, Artificial Sequence
  Synthetic oligonucleotide
tcgttaaggttgcggtgagaagttcatcag

SEQ ID NO: 98045 - DNA, 30 bp, Artificial Sequence
  Synthetic oligonucleotide
agatgaagtaggtcattttatgcagatcag

SEQ ID NO: 98046 - DNA, 30 bp, Artificial Sequence
  Synthetic oligonucleotide
catgggtggggggctatgcaaagggatcag

SEQ ID NO: 98047 - DNA, 30 bp, Artificial Sequence
  Synthetic oligonucleotide
tctgagggctccctccgatgtggatatcag

SEQ ID NO: 98048 - DNA, 30 bp, Artificial Sequence
  Synthetic oligonucleotide
ggtcacggatgggatattgaccagtatcag

SEQ ID NO: 98049 - DNA, 30 bp, Artificial Sequence
  Synthetic oligonucleotide
acttcaactgagagttgtaggctgtatcag

SEQ ID NO: 98050 - DNA, 30 bp, Artificial Sequence
  Synthetic oligonucleotide
aaatactcgggaagcgggcgtgcaactcag

SEQ ID NO: 98051 - DNA, 30 bp, Artificial Sequence
  Synthetic oligonucleotide
aggattgtaaaatggagtacgtgtactcag

SEQ ID NO: 98052 - DNA, 30 bp, Artificial Sequence
  Synthetic oligonucleotide
cgccgtctcatagcgtgtcgtaagcctcag

SEQ ID NO: 98053 - DNA, 30 bp, Artificial Sequence
  Synthetic oligonucleotide
gcaacgaatcgacgaacaactcctcctcag

SEQ ID NO: 98054 - DNA, 30 bp, Artificial Sequence
  Synthetic oligonucleotide
ccacttccaggagtatacagagacgctcag

SEQ ID NO: 98055 - DNA, 30 bp, Artificial Sequence
  Synthetic oligonucleotide
cgtcagtctcctcaatgctaaatggctcag

SEQ ID NO: 98056 - DNA, 30 bp, Artificial Sequence
  Synthetic oligonucleotide
ggggtcactctatggaaaagtctggctcag

SEQ ID NO: 98057 - DNA, 30 bp, Artificial Sequence
  Synthetic oligonucleotide
acaagcaacgatggcttaatcctatctcag

SEQ ID NO: 98058 - DNA, 30 bp, Artificial Sequence
  Synthetic oligonucleotide
gcaagcagttaacatgcagcgcactctcag

SEQ ID NO: 98059 - DNA, 30 bp, Artificial Sequence
  Synthetic oligonucleotide
ctggcaaagtcttaagaaatagactctcag

SEQ ID NO: 98060 - DNA, 30 bp, Artificial Sequence
  Synthetic oligonucleotide
ttgtcatcgttctgaaaactggcgtctcag

SEQ ID NO: 98061 - DNA, 30 bp, Artificial Sequence
  Synthetic oligonucleotide
agtggctgcccttttgaaaggaagagtcag

SEQ ID NO: 98062 - DNA, 30 bp, Artificial Sequence
  Synthetic oligonucleotide
actggtagaaatcgatgtaatcagagtcag

SEQ ID NO: 98063 - DNA, 30 bp, Artificial Sequence
  Synthetic oligonucleotide
gtcggtgtttacgtacaaactctgagtcag

SEQ ID NO: 98064 - DNA, 30 bp, Artificial Sequence
  Synthetic oligonucleotide
cgctcagatttaagcgttaaaattcgtcag

SEQ ID NO: 98065 - DNA, 30 bp, Artificial Sequence
  Synthetic oligonucleotide
tgcatggttttacacaatcggtgaggtcag

SEQ ID NO: 98066 - DNA, 30 bp, Artificial Sequence
  Synthetic oligonucleotide
acgcggggctctatacctcaagacggtcag

SEQ ID NO: 98067 - DNA, 30 bp, Artificial Sequence
  Synthetic oligonucleotide
actcgggggaggcgggcctcggcgggtcag

SEQ ID NO: 98068 - DNA, 30 bp, Artificial Sequence
  Synthetic oligonucleotide
tgaccgatgcgtatggtagccagatgtcag

SEQ ID NO: 98069 - DNA, 30 bp, Artificial Sequence
  Synthetic oligonucleotide
ggtgccaaagagttaggtacaggctgtcag

SEQ ID NO: 98070 - DNA, 30 bp, Artificial Sequence
  Synthetic oligonucleotide
ttcgtcttagggctcgtcaaaaggattcag

SEQ ID NO: 98071 - DNA, 30 bp, Artificial Sequence
  Synthetic oligonucleotide
tagactagcagtcaatccaacaagcttcag

SEQ ID NO: 98072 - DNA, 30 bp, Artificial Sequence
  Synthetic oligonucleotide
ggcaataacgtactccaaatataatttcag

SEQ ID NO: 98073 - DNA, 30 bp, Artificial Sequence
  Synthetic oligonucleotide
gaggcttaaggaataacatcacgatttcag

SEQ ID NO: 98074 - DNA, 30 bp, Artificial Sequence
  Synthetic oligonucleotide
cccatagtaatcggctgacacatatttcag

SEQ ID NO: 98075 - DNA, 30 bp, Artificial Sequence
  Synthetic oligonucleotide
aaggcgaagctgaattcaaagacctttcag

SEQ ID NO: 98076 - DNA, 30 bp, Artificial Sequence
  Synthetic oligonucleotide
tagcacacagaagtacaagacggctttcag

SEQ ID NO: 98077 - DNA, 30 bp, Artificial Sequence
  Synthetic oligonucleotide
agggcccggaaagtaattagagattttcag

SEQ ID NO: 98078 - DNA, 30 bp, Artificial Sequence
  Synthetic oligonucleotide
cttcggggcacagctgcaatttcttttcag

SEQ ID NO: 98079 - DNA, 30 bp, Artificial Sequence
  Synthetic oligonucleotide
gcattagtggaattaccgtttggaaaagag

SEQ ID NO: 98080 - DNA, 30 bp, Artificial Sequence
  Synthetic oligonucleotide
gttgctcttgattttccaattcacaaagag

SEQ ID NO: 98081 - DNA, 30 bp, Artificial Sequence
  Synthetic oligonucleotide
gttaaattgacccgaaaaagctagaaagag

SEQ ID NO: 98082 - DNA, 30 bp, Artificial Sequence
  Synthetic oligonucleotide
caatcggccagactatgttatactaaagag

SEQ ID NO: 98083 - DNA, 30 bp, Artificial Sequence
  Synthetic oligonucleotide
agttcaactttaggcaagtggcaacaagag

SEQ ID NO: 98084 - DNA, 30 bp, Artificial Sequence
  Synthetic oligonucleotide
atattgacaccgacacaggtcagccaagag

SEQ ID NO: 98085 - DNA, 30 bp, Artificial Sequence
  Synthetic oligonucleotide
ccagttaccttgacattgatccgccaagag

SEQ ID NO: 98086 - DNA, 30 bp, Artificial Sequence
  Synthetic oligonucleotide
caatgcatactaaaaggtatagtccaagag

SEQ ID NO: 98087 - DNA, 30 bp, Artificial Sequence
  Synthetic oligonucleotide
agtgcaaagtgtttcccgatttatcaagag

SEQ ID NO: 98088 - DNA, 30 bp, Artificial Sequence
  Synthetic oligonucleotide
ccgtttctagacaaaaattgtcgtcaagag

SEQ ID NO: 98089 - DNA, 30 bp, Artificial Sequence
  Synthetic oligonucleotide
aggtgggacggttcggcctggggtcaagag

SEQ ID NO: 98090 - DNA, 30 bp, Artificial Sequence
  Synthetic oligonucleotide
gacatatcttaatcgagaactaaggaagag

SEQ ID NO: 98091 - DNA, 30 bp, Artificial Sequence
  Synthetic oligonucleotide
tggtaaataccaggggaggctcgtgaagag

SEQ ID NO: 98092 - DNA, 30 bp, Artificial Sequence
  Synthetic oligonucleotide
agcaggagtcaatcagttagcattgaagag

SEQ ID NO: 98093 - DNA, 30 bp, Artificial Sequence
  Synthetic oligonucleotide
tttaccgtcttaggttagggccgataagag

SEQ ID NO: 98094 - DNA, 30 bp, Artificial Sequence
  Synthetic oligonucleotide
ggatatttggggccctgcgtgaactaagag

SEQ ID NO: 98095 - DNA, 30 bp, Artificial Sequence
  Synthetic oligonucleotide
aaatctccaacgatcaccgccggaacagag

SEQ ID NO: 98096 - DNA, 30 bp, Artificial Sequence
  Synthetic oligonucleotide
gcatccggcaacggatgcaacctgacagag

SEQ ID NO: 98097 - DNA, 30 bp, Artificial Sequence
  Synthetic oligonucleotide
acgtccgcgccgtttatgtaacctacagag

SEQ ID NO: 98098 - DNA, 30 bp, Artificial Sequence
  Synthetic oligonucleotide
gtatgaacgttggtaattgatggtacagag

SEQ ID NO: 98099 - DNA, 30 bp, Artificial Sequence
  Synthetic oligonucleotide
caattatgtcactgagaggcataggcagag

SEQ ID NO: 98100 - DNA, 30 bp, Artificial Sequence
  Synthetic oligonucleotide
gacctgggtgacacataaattgtggcagag

SEQ ID NO: 98101 - DNA, 30 bp, Artificial Sequence
  Synthetic oligonucleotide
ccaaggaatatttctagagtcaactcagag

SEQ ID NO: 98102 - DNA, 30 bp, Artificial Sequence
  Synthetic oligonucleotide
ggtgtcgttgcgcgtgcccagccaagagag

SEQ ID NO: 98103 - DNA, 30 bp, Artificial Sequence
  Synthetic oligonucleotide
gagacgaccacataggtggtggatagagag

SEQ ID NO: 98104 - DNA, 30 bp, Artificial Sequence
  Synthetic oligonucleotide
ccttaggacgccttacttgcatatcgagag

SEQ ID NO: 98105 - DNA, 30 bp, Artificial Sequence
  Synthetic oligonucleotide
atcgaacatagttgcggcatattcggagag

SEQ ID NO: 98106 - DNA, 30 bp, Artificial Sequence
  Synthetic oligonucleotide
ggactgggctaaatgtagcaccctggagag

SEQ ID NO: 98107 - DNA, 30 bp, Artificial Sequence
  Synthetic oligonucleotide
gtatcagcgttgggcatggtatattgagag

SEQ ID NO: 98108 - DNA, 30 bp, Artificial Sequence
  Synthetic oligonucleotide
ttgtaacgtgctacggctcccgaaatagag

SEQ ID NO: 98109 - DNA, 30 bp, Artificial Sequence
  Synthetic oligonucleotide
gggactgggcacacggatagcgcaatagag

SEQ ID NO: 98110 - DNA, 30 bp, Artificial Sequence
  Synthetic oligonucleotide
tccgaaagtgtatttcaagaagacatagag

SEQ ID NO: 98111 - DNA, 30 bp, Artificial Sequence
  Synthetic oligonucleotide
agtatgcgatacgtggtgaatgtcatagag

SEQ ID NO: 98112 - DNA, 30 bp, Artificial Sequence
  Synthetic oligonucleotide
tgattcggctggcaagtgggcatcctagag

SEQ ID NO: 98113 - DNA, 30 bp, Artificial Sequence
  Synthetic oligonucleotide
ggggcggacgaaccctttacgttcctagag

SEQ ID NO: 98114 - DNA, 30 bp, Artificial Sequence
  Synthetic oligonucleotide
catagccttgcgttcaatgatcagctagag

SEQ ID NO: 98115 - DNA, 31 bp, Artificial Sequence
  Synthetic oligonucleotide
aaaggtttgggccatgccattctgtctagag

SEQ ID NO: 98116 - DNA, 30 bp, Artificial Sequence
  Synthetic oligonucleotide
ggaacgcacggccctgttgacatagtagag

SEQ ID NO: 98117 - DNA, 30 bp, Artificial Sequence
  Synthetic oligonucleotide
tgttaattctgatctaagttccacgtagag

SEQ ID NO: 98118 - DNA, 30 bp, Artificial Sequence
  Synthetic oligonucleotide
caaggacctgaaaaagtatacgatgtagag

SEQ ID NO: 98119 - DNA, 30 bp, Artificial Sequence
  Synthetic oligonucleotide
ggtatacggagggtactcgaggtattagag

SEQ ID NO: 98120 - DNA, 30 bp, Artificial Sequence
  Synthetic oligonucleotide
cggatctcgaggaatcaagggcacttagag

SEQ ID NO: 98121 - DNA, 30 bp, Artificial Sequence
  Synthetic oligonucleotide
cgttcgagggtgaagccgcgatctaacgag

SEQ ID NO: 98122 - DNA, 30 bp, Artificial Sequence
  Synthetic oligonucleotide
cactgtatgttttataggttaaaccacgag

SEQ ID NO: 98123 - DNA, 30 bp, Artificial Sequence
  Synthetic oligonucleotide
agtccgtgagtaagccaaaaaccccacgag

SEQ ID NO: 98124 - DNA, 30 bp, Artificial Sequence
  Synthetic oligonucleotide
aagtccgtgacaagccggtccaagcacgag

SEQ ID NO: 98125 - DNA, 30 bp, Artificial Sequence
  Synthetic oligonucleotide
tgtcctattgaattgcaagagaatcacgag

SEQ ID NO: 98126 - DNA, 30 bp, Artificial Sequence
  Synthetic oligonucleotide
atggcaagggtcaacacctataatgacgag

SEQ ID NO: 98127 - DNA, 30 bp, Artificial Sequence
  Synthetic oligonucleotide
ccaattacgtattcctgcgcgtatgacgag

SEQ ID NO: 98128 - DNA, 30 bp, Artificial Sequence
  Synthetic oligonucleotide
acgggtacttcgtttcgacagtaatacgag

SEQ ID NO: 98129 - DNA, 30 bp, Artificial Sequence
  Synthetic oligonucleotide
gcgattacagccgcctgcgtgttatacgag

SEQ ID NO: 98130 - DNA, 30 bp, Artificial Sequence
  Synthetic oligonucleotide
attgggggaaagattattggttgttacgag

SEQ ID NO: 98131 - DNA, 30 bp, Artificial Sequence
  Synthetic oligonucleotide
ctgtgatcagtttggtttgactcgaccgag

SEQ ID NO: 98132 - DNA, 30 bp, Artificial Sequence
  Synthetic oligonucleotide
cagacaatgctcgtctaagccagtaccgag

SEQ ID NO: 98133 - DNA, 30 bp, Artificial Sequence
  Synthetic oligonucleotide
taatgccactaagctttcaacgaacccgag

SEQ ID NO: 98134 - DNA, 30 bp, Artificial Sequence
  Synthetic oligonucleotide
tggtatggtacgacaactgagatgcccgag

SEQ ID NO: 98135 - DNA, 30 bp, Artificial Sequence
  Synthetic oligonucleotide
tgtctaccgccacgcaacaaagatcccgag

SEQ ID NO: 98136 - DNA, 30 bp, Artificial Sequence
  Synthetic oligonucleotide
tgaacttgagcctaatgtttttttcccgag

SEQ ID NO: 98137 - DNA, 30 bp, Artificial Sequence
  Synthetic oligonucleotide
ccttatggccatgcttccgcggcaagcgag

SEQ ID NO: 98138 - DNA, 30 bp, Artificial Sequence
  Synthetic oligonucleotide
cagattaggcgggaagcatgcggaagcgag

SEQ ID NO: 98139 - DNA, 30 bp, Artificial Sequence
  Synthetic oligonucleotide
tcattaagaaactgcaagcacctaagcgag

SEQ ID NO: 98140 - DNA, 30 bp, Artificial Sequence
  Synthetic oligonucleotide
tacgggtctataagggataataacagcgag

SEQ ID NO: 98141 - DNA, 30 bp, Artificial Sequence
  Synthetic oligonucleotide
gaacgttgagcagaggcaggtaacagcgag

SEQ ID NO: 98142 - DNA, 30 bp, Artificial Sequence
  Synthetic oligonucleotide
atattggcgttacatgataacgcgagcgag

SEQ ID NO: 98143 - DNA, 30 bp, Artificial Sequence
  Synthetic oligonucleotide
ggacaatgcaccttgaaaacgcatagcgag

SEQ ID NO: 98144 - DNA, 30 bp, Artificial Sequence
  Synthetic oligonucleotide
agaagactaatacgatggatcatacgcgag

SEQ ID NO: 98145 - DNA, 30 bp, Artificial Sequence
  Synthetic oligonucleotide
atgaacagtgggtggacagctatgcgcgag

SEQ ID NO: 98146 - DNA, 30 bp, Artificial Sequence
  Synthetic oligonucleotide
tcctggggcacatgcggcgttcatcgcgag

SEQ ID NO: 98147 - DNA, 30 bp, Artificial Sequence
  Synthetic oligonucleotide
ccgactaaatagaattcaaacgcaggcgag

SEQ ID NO: 98148 - DNA, 30 bp, Artificial Sequence
  Synthetic oligonucleotide
gtaaagagatgtttcggttagtgaggcgag

SEQ ID NO: 98149 - DNA, 30 bp, Artificial Sequence
  Synthetic oligonucleotide
gtcataaaagagcacagggtaccgtgcgag

SEQ ID NO: 98150 - DNA, 30 bp, Artificial Sequence
  Synthetic oligonucleotide
aggactgtttaaggctagagataaatcgag

SEQ ID NO: 98151 - DNA, 30 bp, Artificial Sequence
  Synthetic oligonucleotide
agtacttccctgagcacgagagagatcgag

SEQ ID NO: 98152 - DNA, 30 bp, Artificial Sequence
  Synthetic oligonucleotide
taggggttctcaatatcttgcatgatcgag

SEQ ID NO: 98153 - DNA, 29 bp, Artificial Sequence
  Synthetic oligonucleotide
agggccagtccaagttgattactatcgag

SEQ ID NO: 98154 - DNA, 30 bp, Artificial Sequence
  Synthetic oligonucleotide
taagtcctaatctagagaagtgccctcgag

SEQ ID NO: 98155 - DNA, 30 bp, Artificial Sequence
  Synthetic oligonucleotide
tagtttaaaactcttaatctcagcctcgag

SEQ ID NO: 98156 - DNA, 30 bp, Artificial Sequence
  Synthetic oligonucleotide
cgtgactattgtagccccaagttcctcgag

SEQ ID NO: 98157 - DNA, 30 bp, Artificial Sequence
  Synthetic oligonucleotide
caacagtgttacctcctctatttcctcgag

SEQ ID NO: 98158 - DNA, 30 bp, Artificial Sequence
  Synthetic oligonucleotide
cgttttgccgtgtgatgtggtcagctcgag

SEQ ID NO: 98159 - DNA, 30 bp, Artificial Sequence
  Synthetic oligonucleotide
taagaagtatcattaaaatcggtgctcgag

SEQ ID NO: 98160 - DNA, 30 bp, Artificial Sequence
  Synthetic oligonucleotide
agctaaactctacgagcttatagcgtcgag

SEQ ID NO: 98161 - DNA, 30 bp, Artificial Sequence
  Synthetic oligonucleotide
gactacttcaacccaatgcatctcgtcgag

SEQ ID NO: 98162 - DNA, 30 bp, Artificial Sequence
  Synthetic oligonucleotide
actgattaactgcttacggaggtggtcgag

SEQ ID NO: 98163 - DNA, 30 bp, Artificial Sequence
  Synthetic oligonucleotide
tgcgatcgcgttatggagaggtgtgtcgag

SEQ ID NO: 98164 - DNA, 30 bp, Artificial Sequence
  Synthetic oligonucleotide
ttaaggtgccccgcatgaccgtgattcgag

SEQ ID NO: 98165 - DNA, 30 bp, Artificial Sequence
  Synthetic oligonucleotide
agcggtacatggacacacgtgctgttcgag

SEQ ID NO: 98166 - DNA, 30 bp, Artificial Sequence
  Synthetic oligonucleotide
agggttcatggctacggacacgtaaaggag

SEQ ID NO: 98167 - DNA, 30 bp, Artificial Sequence
  Synthetic oligonucleotide
tcccggggcttaagaaaatacgcccaggag

SEQ ID NO: 98168 - DNA, 30 bp, Artificial Sequence
  Synthetic oligonucleotide
tcttaaatttttctatgcaggaaagaggag

SEQ ID NO: 98169 - DNA, 30 bp, Artificial Sequence
  Synthetic oligonucleotide
gagtgaactggaaccatcaaagaagaggag

SEQ ID NO: 98170 - DNA, 30 bp, Artificial Sequence
  Synthetic oligonucleotide
atagcatggcacgaaaaggttgctgaggag

SEQ ID NO: 98171 - DNA, 30 bp, Artificial Sequence
  Synthetic oligonucleotide
attgccctgtctggttggaggaagtaggag

SEQ ID NO: 98172 - DNA, 30 bp, Artificial Sequence
  Synthetic oligonucleotide
gttggaacggtagttagcaaccagtaggag

SEQ ID NO: 98173 - DNA, 30 bp, Artificial Sequence
  Synthetic oligonucleotide
tcgctaagttcatggtggctataaacggag

SEQ ID NO: 98174 - DNA, 30 bp, Artificial Sequence
  Synthetic oligonucleotide
gtgttgcgattatgcaagctacgcccggag

SEQ ID NO: 98175 - DNA, 30 bp, Artificial Sequence
  Synthetic oligonucleotide
ttacaacttacgctactaacgtcgccggag

SEQ ID NO: 98176 - DNA, 30 bp, Artificial Sequence
  Synthetic oligonucleotide
aaaataaggcggaaaagctgacttccggag

SEQ ID NO: 98177 - DNA, 30 bp, Artificial Sequence
  Synthetic oligonucleotide
aggtccccttttaaatatttgtcggcggag

SEQ ID NO: 98178 - DNA, 30 bp, Artificial Sequence
  Synthetic oligonucleotide
agcagttactgacaagacgtaactgcggag

SEQ ID NO: 98179 - DNA, 30 bp, Artificial Sequence
  Synthetic oligonucleotide
cagtcatgggacggttaaaatcgatcggag

SEQ ID NO: 98180 - DNA, 30 bp, Artificial Sequence
  Synthetic oligonucleotide
ggggtaatggacggccagtctgcaagggag

SEQ ID NO: 98181 - DNA, 30 bp, Artificial Sequence
  Synthetic oligonucleotide
cactggcctgcctatagcatattaagggag

SEQ ID NO: 98182 - DNA, 30 bp, Artificial Sequence
  Synthetic oligonucleotide
gtattcgacccagcgaggcaggccagggag

SEQ ID NO: 98183 - DNA, 30 bp, Artificial Sequence
  Synthetic oligonucleotide
taataaggccaccgcctactgtttcgggag

SEQ ID NO: 98184 - DNA, 30 bp, Artificial Sequence
  Synthetic oligonucleotide
gggccaactacctcaaggatacaaggggag

SEQ ID NO: 98185 - DNA, 30 bp, Artificial Sequence
  Synthetic oligonucleotide
tgctcgtttggcggcggcgggccaggggag

SEQ ID NO: 98186 - DNA, 30 bp, Artificial Sequence
  Synthetic oligonucleotide
gatagcttgaagccggcagcaataggggag

SEQ ID NO: 98187 - DNA, 30 bp, Artificial Sequence
  Synthetic oligonucleotide
agaatcgcgttagatgttgaggggggggag

SEQ ID NO: 98188 - DNA, 30 bp, Artificial Sequence
  Synthetic oligonucleotide
gttacaggataatgcacggtgtggggggag

SEQ ID NO: 98189 - DNA, 30 bp, Artificial Sequence
  Synthetic oligonucleotide
tgcgcgggtagtcctcatatttctggggag

SEQ ID NO: 98190 - DNA, 30 bp, Artificial Sequence
  Synthetic oligonucleotide
attaaaagccaatgctgggaaagtggggag

SEQ ID NO: 98191 - DNA, 30 bp, Artificial Sequence
  Synthetic oligonucleotide
agcaggtttataccttgaaagatatgggag

SEQ ID NO: 98192 - DNA, 30 bp, Artificial Sequence
  Synthetic oligonucleotide
aaatcacagtgcgctcgtatagcaatggag

SEQ ID NO: 98193 - DNA, 30 bp, Artificial Sequence
  Synthetic oligonucleotide
ggccccgttggtagaatctgtcgaatggag

SEQ ID NO: 98194 - DNA, 30 bp, Artificial Sequence
  Synthetic oligonucleotide
ccgggtgggcgttgtatacatataatggag

SEQ ID NO: 98195 - DNA, 30 bp, Artificial Sequence
  Synthetic oligonucleotide
caacaggtcatgagaatcgagtccatggag

SEQ ID NO: 98196 - DNA, 30 bp, Artificial Sequence
  Synthetic oligonucleotide
ctcgggcgaggacgagtcaaggtcatggag

SEQ ID NO: 98197 - DNA, 30 bp, Artificial Sequence
  Synthetic oligonucleotide
tatgggcattgcgggacgaatacgatggag

SEQ ID NO: 98198 - DNA, 30 bp, Artificial Sequence
  Synthetic oligonucleotide
ccagccctgctacttgaacccttcctggag

SEQ ID NO: 98199 - DNA, 30 bp, Artificial Sequence
  Synthetic oligonucleotide
agcttagtaaaagtgcctgtccggctggag

SEQ ID NO: 98200 - DNA, 30 bp, Artificial Sequence
  Synthetic oligonucleotide
cgcgtcgtaggagatattattatagtggag

SEQ ID NO: 98201 - DNA, 30 bp, Artificial Sequence
  Synthetic oligonucleotide
ataaatgcgactaaactccatcaggtggag

SEQ ID NO: 98202 - DNA, 30 bp, Artificial Sequence
  Synthetic oligonucleotide
ttgaaataggtgcgtcatctgggggtggag

SEQ ID NO: 98203 - DNA, 30 bp, Artificial Sequence
  Synthetic oligonucleotide
agttcaacagtagtaggagttaaattggag

SEQ ID NO: 98204 - DNA, 30 bp, Artificial Sequence
  Synthetic oligonucleotide
acacagttcaaggtctatattggattggag

SEQ ID NO: 98205 - DNA, 30 bp, Artificial Sequence
  Synthetic oligonucleotide
ataggagtcttcgaaacagatttattggag

SEQ ID NO: 98206 - DNA, 30 bp, Artificial Sequence
  Synthetic oligonucleotide
aggcgcctgtcgtacgagccacctttggag

SEQ ID NO: 98207 - DNA, 30 bp, Artificial Sequence
  Synthetic oligonucleotide
acaagaagattagagacataagaaaatgag

SEQ ID NO: 98208 - DNA, 30 bp, Artificial Sequence
  Synthetic oligonucleotide
catatattgtcgatagtggtccgaaatgag

SEQ ID NO: 98209 - DNA, 30 bp, Artificial Sequence
  Synthetic oligonucleotide
gcttctcgatcgccgtaacacgtgaatgag

SEQ ID NO: 98210 - DNA, 30 bp, Artificial Sequence
  Synthetic oligonucleotide
aacagaaaagaaaatgttaaaaaacatgag

SEQ ID NO: 98211 - DNA, 30 bp, Artificial Sequence
  Synthetic oligonucleotide
gaacggcggaaggtgactatataacatgag

SEQ ID NO: 98212 - DNA, 30 bp, Artificial Sequence
  Synthetic oligonucleotide
accagcgggtaagatgggaggagccatgag

SEQ ID NO: 98213 - DNA, 30 bp, Artificial Sequence
  Synthetic oligonucleotide
acgctggcaccccgtcgtacccttcatgag

SEQ ID NO: 98214 - DNA, 30 bp, Artificial Sequence
  Synthetic oligonucleotide
ctaaacgaattaaaatggggagtcgatgag

SEQ ID NO: 98215 - DNA, 30 bp, Artificial Sequence
  Synthetic oligonucleotide
aaacaaaatcgacaacaaagtaatgatgag

SEQ ID NO: 98216 - DNA, 31 bp, Artificial Sequence
  Synthetic oligonucleotide
ttccaacagatggggacacgacgatgatgag

SEQ ID NO: 98217 - DNA, 30 bp, Artificial Sequence
  Synthetic oligonucleotide
gcaattagaaaacgtcatcatacctatgag

SEQ ID NO: 98218 - DNA, 30 bp, Artificial Sequence
  Synthetic oligonucleotide
accctagcctagatcaagtagcgctatgag

SEQ ID NO: 98219 - DNA, 30 bp, Artificial Sequence
  Synthetic oligonucleotide
acagagtaaaagacagtgaaaaagtatgag

SEQ ID NO: 98220 - DNA, 30 bp, Artificial Sequence
  Synthetic oligonucleotide
atcttctaatatagggggcaaggacctgag

SEQ ID NO: 98221 - DNA, 30 bp, Artificial Sequence
  Synthetic oligonucleotide
cagcaccagaggcacagcatctaagctgag

SEQ ID NO: 98222 - DNA, 30 bp, Artificial Sequence
  Synthetic oligonucleotide
tccctatttgcaagaagtgatcgagctgag

SEQ ID NO: 98223 - DNA, 29 bp, Artificial Sequence
  Synthetic oligonucleotide
acgtgggcatctgagcgttacaggctgag

SEQ ID NO: 98224 - DNA, 30 bp, Artificial Sequence
  Synthetic oligonucleotide
gcgtgactcctagaccggcatatggctgag

SEQ ID NO: 98225 - DNA, 30 bp, Artificial Sequence
  Synthetic oligonucleotide
ggagaatagctcacctgacgtttggctgag

SEQ ID NO: 98226 - DNA, 30 bp, Artificial Sequence
  Synthetic oligonucleotide
ttgatagcaaaagtaggagacgttgctgag

SEQ ID NO: 98227 - DNA, 30 bp, Artificial Sequence
  Synthetic oligonucleotide
cgagcttactaaatatagatgtcatctgag

SEQ ID NO: 98228 - DNA, 30 bp, Artificial Sequence
  Synthetic oligonucleotide
tgcagttctaactttctacgagactctgag

SEQ ID NO: 98229 - DNA, 30 bp, Artificial Sequence
  Synthetic oligonucleotide
tggatatgatgagtcgatgcatgctctgag

SEQ ID NO: 98230 - DNA, 30 bp, Artificial Sequence
  Synthetic oligonucleotide
tacgtctatgttaggagtgctctctctgag

SEQ ID NO: 98231 - DNA, 30 bp, Artificial Sequence
  Synthetic oligonucleotide
ggtcccagaggtctctctaaaccgtctgag

SEQ ID NO: 98232 - DNA, 30 bp, Artificial Sequence
  Synthetic oligonucleotide
tgcgcatacgtattgcaaacaaacagtgag

SEQ ID NO: 98233 - DNA, 30 bp, Artificial Sequence
  Synthetic oligonucleotide
tacggactaagtcgggtgctaatcagtgag

SEQ ID NO: 98234 - DNA, 30 bp, Artificial Sequence
  Synthetic oligonucleotide
agcgagtgcaacgagggtgactatagtgag

SEQ ID NO: 98235 - DNA, 30 bp, Artificial Sequence
  Synthetic oligonucleotide
taagagagagtggtcatgaattgtagtgag

SEQ ID NO: 98236 - DNA, 30 bp, Artificial Sequence
  Synthetic oligonucleotide
ccaaaaggatgatctcggatggcgcgtgag

SEQ ID NO: 98237 - DNA, 30 bp, Artificial Sequence
  Synthetic oligonucleotide
tcagcacatgtcgctcatacgataggtgag

SEQ ID NO: 98238 - DNA, 30 bp, Artificial Sequence
  Synthetic oligonucleotide
tccaaggagcatgcaatgcagaccggtgag

SEQ ID NO: 98239 - DNA, 30 bp, Artificial Sequence
  Synthetic oligonucleotide
tctatcgatgaggaaatccctaccggtgag

SEQ ID NO: 98240 - DNA, 30 bp, Artificial Sequence
  Synthetic oligonucleotide
cgtagtctgtgctctaagcgcagcggtgag

SEQ ID NO: 98241 - DNA, 30 bp, Artificial Sequence
  Synthetic oligonucleotide
ggggtgtgttcatggtctgattatggtgag

SEQ ID NO: 98242 - DNA, 30 bp, Artificial Sequence
  Synthetic oligonucleotide
acgttaaaaaaactcatgtagtctggtgag

SEQ ID NO: 98243 - DNA, 30 bp, Artificial Sequence
  Synthetic oligonucleotide
taatgggagtaaccataacatttatgtgag

SEQ ID NO: 98244 - DNA, 30 bp, Artificial Sequence
  Synthetic oligonucleotide
cgaattaggccaaatccagggatctgtgag

SEQ ID NO: 98245 - DNA, 30 bp, Artificial Sequence
  Synthetic oligonucleotide
atcggcgcatcacggtttgtagcgtgtgag

SEQ ID NO: 98246 - DNA, 30 bp, Artificial Sequence
  Synthetic oligonucleotide
atccaagagatacggacagcggtcattgag

SEQ ID NO: 98247 - DNA, 30 bp, Artificial Sequence
  Synthetic oligonucleotide
atatgagaagggaaaacaactgagattgag

SEQ ID NO: 98248 - DNA, 30 bp, Artificial Sequence
  Synthetic oligonucleotide
tgcagataaacagtaagtacacatattgag

SEQ ID NO: 98249 - DNA, 30 bp, Artificial Sequence
  Synthetic oligonucleotide
aatatgaagagcatacaccttgttattgag

SEQ ID NO: 98250 - DNA, 30 bp, Artificial Sequence
  Synthetic oligonucleotide
gagctacaggtcaggctacagacgcttgag

SEQ ID NO: 98251 - DNA, 30 bp, Artificial Sequence
  Synthetic oligonucleotide
tacgaggcgacattttctcagtcgcttgag

SEQ ID NO: 98252 - DNA, 30 bp, Artificial Sequence
  Synthetic oligonucleotide
cctagcctgacatgaatttccctgcttgag

SEQ ID NO: 98253 - DNA, 30 bp, Artificial Sequence
  Synthetic oligonucleotide
cgggatgcatggaaaccaccagacgttgag

SEQ ID NO: 98254 - DNA, 30 bp, Artificial Sequence
  Synthetic oligonucleotide
ggtagcctctagattgggatgctcgttgag

SEQ ID NO: 98255 - DNA, 30 bp, Artificial Sequence
  Synthetic oligonucleotide
cggggcgaagcattgcgcccacttgttgag

SEQ ID NO: 98256 - DNA, 30 bp, Artificial Sequence
  Synthetic oligonucleotide
acggctcgaccgctgaacataacgaaatag

SEQ ID NO: 98257 - DNA, 30 bp, Artificial Sequence
  Synthetic oligonucleotide
acatgtatactatagtgtgaatgccaatag

SEQ ID NO: 98258 - DNA, 30 bp, Artificial Sequence
  Synthetic oligonucleotide
gtggttagcggacggtgagctacgcaatag

SEQ ID NO: 98259 - DNA, 30 bp, Artificial Sequence
  Synthetic oligonucleotide
aactcaccaagtaatgcgacttggcaatag

SEQ ID NO: 98260 - DNA, 31 bp, Artificial Sequence
  Synthetic oligonucleotide
tagcgcgggttgaatgaagcgtcacgaatag

SEQ ID NO: 98261 - DNA, 30 bp, Artificial Sequence
  Synthetic oligonucleotide
ctagacgactaaatattgaagatcgaatag

SEQ ID NO: 98262 - DNA, 30 bp, Artificial Sequence
  Synthetic oligonucleotide
ggggatgagaagttcagcctctgtgaatag

SEQ ID NO: 98263 - DNA, 30 bp, Artificial Sequence
  Synthetic oligonucleotide
tgttcaaaagtggtacgtagtggataatag

SEQ ID NO: 98264 - DNA, 30 bp, Artificial Sequence
  Synthetic oligonucleotide
ggtacccaggtaggctaagatgtataatag

SEQ ID NO: 98265 - DNA, 30 bp, Artificial Sequence
  Synthetic oligonucleotide
atcagggccaaaggctgtcttgaaacatag

SEQ ID NO: 98266 - DNA, 30 bp, Artificial Sequence
  Synthetic oligonucleotide
agttgagtgtttcactggacctgaacatag

SEQ ID NO: 98267 - DNA, 30 bp, Artificial Sequence
  Synthetic oligonucleotide
tagcacgccccatatataagcggcacatag

SEQ ID NO: 98268 - DNA, 30 bp, Artificial Sequence
  Synthetic oligonucleotide
tcgcagtgggcgctcgctatagctccatag

SEQ ID NO: 98269 - DNA, 30 bp, Artificial Sequence
  Synthetic oligonucleotide
ggctggtaagtagagcggtctcgagcatag

SEQ ID NO: 98270 - DNA, 30 bp, Artificial Sequence
  Synthetic oligonucleotide
tttacacgttgagggcgtcgcacggcatag

SEQ ID NO: 98271 - DNA, 30 bp, Artificial Sequence
  Synthetic oligonucleotide
ataaactcgagggcacagcctaaatcatag

SEQ ID NO: 98272 - DNA, 30 bp, Artificial Sequence
  Synthetic oligonucleotide
gtcagatattttaaaatgtcttcgtcatag

SEQ ID NO: 98273 - DNA, 30 bp, Artificial Sequence
  Synthetic oligonucleotide
tggccccatgttgcttccacttggtcatag

SEQ ID NO: 98274 - DNA, 30 bp, Artificial Sequence
  Synthetic oligonucleotide
atacccaagaagttaagctatccttcatag

SEQ ID NO: 98275 - DNA, 30 bp, Artificial Sequence
  Synthetic oligonucleotide
ataagccacgagtggaagatcggttcatag

SEQ ID NO: 98276 - DNA, 30 bp, Artificial Sequence
  Synthetic oligonucleotide
taggatcaggtaggacaaaattcaagatag

SEQ ID NO: 98277 - DNA, 30 bp, Artificial Sequence
  Synthetic oligonucleotide
cgggtcgcttagaacaccagtatcagatag

SEQ ID NO: 98278 - DNA, 30 bp, Artificial Sequence
  Synthetic oligonucleotide
gttgaggctccgtgcgtgtgtcctagatag

SEQ ID NO: 98279 - DNA, 30 bp, Artificial Sequence
  Synthetic oligonucleotide
cacgcaacacgcgatattaaacaacgatag

SEQ ID NO: 98280 - DNA, 30 bp, Artificial Sequence
  Synthetic oligonucleotide
ttttaaaggaaatcacatgctcaacgatag

SEQ ID NO: 98281 - DNA, 30 bp, Artificial Sequence
  Synthetic oligonucleotide
taggagatcgcatagtacagcatacgatag

SEQ ID NO: 98282 - DNA, 30 bp, Artificial Sequence
  Synthetic oligonucleotide
atcgtacaataggaaccctggagtcgatag

SEQ ID NO: 98283 - DNA, 30 bp, Artificial Sequence
  Synthetic oligonucleotide
caaggcacccaacgaatcttcgaaggatag

SEQ ID NO: 98284 - DNA, 30 bp, Artificial Sequence
  Synthetic oligonucleotide
agaggatctgacgggtgctgataaggatag

SEQ ID NO: 98285 - DNA, 30 bp, Artificial Sequence
  Synthetic oligonucleotide
agaatgtcctgtagttaccgctaaggatag

SEQ ID NO: 98286 - DNA, 30 bp, Artificial Sequence
  Synthetic oligonucleotide
aaccgggttatgtaacgcataataggatag

SEQ ID NO: 98287 - DNA, 30 bp, Artificial Sequence
  Synthetic oligonucleotide
ggtcaggaacttcactgcgaccccggatag

SEQ ID NO: 98288 - DNA, 30 bp, Artificial Sequence
  Synthetic oligonucleotide
atcgctcgctaaatccgagagcagggatag

SEQ ID NO: 98289 - DNA, 30 bp, Artificial Sequence
  Synthetic oligonucleotide
ttaacatggttccgatgcgtattgggatag

SEQ ID NO: 98290 - DNA, 30 bp, Artificial Sequence
  Synthetic oligonucleotide
aatcctaacacactagaaaacaatggatag

SEQ ID NO: 98291 - DNA, 30 bp, Artificial Sequence
  Synthetic oligonucleotide
atcagaggatgatttcgcactagtggatag

SEQ ID NO: 98292 - DNA, 30 bp, Artificial Sequence
  Synthetic oligonucleotide
atactaacagagtccaggactgtctgatag

SEQ ID NO: 98293 - DNA, 30 bp, Artificial Sequence
  Synthetic oligonucleotide
tccaagtataacatctacaaccagtgatag

SEQ ID NO: 98294 - DNA, 30 bp, Artificial Sequence
  Synthetic oligonucleotide
cggaaggccgggcgctgttaagagtgatag

SEQ ID NO: 98295 - DNA, 30 bp, Artificial Sequence
  Synthetic oligonucleotide
tgagcgatgaggtataatttggattgatag

SEQ ID NO: 98296 - DNA, 30 bp, Artificial Sequence
  Synthetic oligonucleotide
cacggtatagaggctcagataaatatatag

SEQ ID NO: 98297 - DNA, 30 bp, Artificial Sequence
  Synthetic oligonucleotide
gttcaggcaataaattggaacattatatag

SEQ ID NO: 98298 - DNA, 30 bp, Artificial Sequence
  Synthetic oligonucleotide
cacgcggtgtaagagatgtacgagctatag

SEQ ID NO: 98299 - DNA, 30 bp, Artificial Sequence
  Synthetic oligonucleotide
aagaggtcttgaggtaccttatgagtatag

SEQ ID NO: 98300 - DNA, 30 bp, Artificial Sequence
  Synthetic oligonucleotide
aaagatagcccgagcaactacaacgtatag

SEQ ID NO: 98301 - DNA, 30 bp, Artificial Sequence
  Synthetic oligonucleotide
atgagttttgagatggcgaaaggggtatag

SEQ ID NO: 98302 - DNA, 30 bp, Artificial Sequence
  Synthetic oligonucleotide
gcccaggcaagtgaattacacactgtatag

SEQ ID NO: 98303 - DNA, 30 bp, Artificial Sequence
  Synthetic oligonucleotide
gaatcattgtacgattcctaatcattatag

SEQ ID NO: 98304 - DNA, 30 bp, Artificial Sequence
  Synthetic oligonucleotide
gctaccgacttcacgtgcaagtggttatag

SEQ ID NO: 98305 - DNA, 30 bp, Artificial Sequence
  Synthetic oligonucleotide
gtattgggagctccgaaagggggcaactag

SEQ ID NO: 98306 - DNA, 30 bp, Artificial Sequence
  Synthetic oligonucleotide
ccatctcgagtatattgtttaaataactag

SEQ ID NO: 98307 - DNA, 30 bp, Artificial Sequence
  Synthetic oligonucleotide
cgcgagtgtgctcaacgagaccgacactag

SEQ ID NO: 98308 - DNA, 30 bp, Artificial Sequence
  Synthetic oligonucleotide
cccgcgtcatgccaagccattcgacactag

SEQ ID NO: 98309 - DNA, 30 bp, Artificial Sequence
  Synthetic oligonucleotide
tttaaccggagtgggcggtagaaccactag

SEQ ID NO: 98310 - DNA, 30 bp, Artificial Sequence
  Synthetic oligonucleotide
gagaagcgatcgattccgctcttgcactag

SEQ ID NO: 98311 - DNA, 30 bp, Artificial Sequence
  Synthetic oligonucleotide
cggaggattctctcacttatccgaacctag

SEQ ID NO: 98312 - DNA, 30 bp, Artificial Sequence
  Synthetic oligonucleotide
aggtccgaacaggacgcactaaatacctag

SEQ ID NO: 98313 - DNA, 30 bp, Artificial Sequence
  Synthetic oligonucleotide
caatgcgccccaaatctgaacattccctag

SEQ ID NO: 98314 - DNA, 30 bp, Artificial Sequence
  Synthetic oligonucleotide
aggcagcaatcatagtcttaccactcctag

SEQ ID NO: 98315 - DNA, 30 bp, Artificial Sequence
  Synthetic oligonucleotide
ggaaaaagaagccgaaagtatcgaagctag

SEQ ID NO: 98316 - DNA, 31 bp, Artificial Sequence
  Synthetic oligonucleotide
tacgctttaccgggcggttcagtggagctag

SEQ ID NO: 98317 - DNA, 30 bp, Artificial Sequence
  Synthetic oligonucleotide
ttgcgaatgggctgaaaatcagcaggctag

SEQ ID NO: 98318 - DNA, 30 bp, Artificial Sequence
  Synthetic oligonucleotide
agggaacggtgccctcctcacgacggctag

SEQ ID NO: 98319 - DNA, 30 bp, Artificial Sequence
  Synthetic oligonucleotide
ttacaattaggcgataggggtatcggctag

SEQ ID NO: 98320 - DNA, 30 bp, Artificial Sequence
  Synthetic oligonucleotide
gcaaccgcagggtacgtgatccactgctag

SEQ ID NO: 98321 - DNA, 30 bp, Artificial Sequence
  Synthetic oligonucleotide
gaaacatcggaaataactgctcgctgctag

SEQ ID NO: 98322 - DNA, 30 bp, Artificial Sequence
  Synthetic oligonucleotide
catcaacatgctcgacatagaacgatctag

SEQ ID NO: 98323 - DNA, 30 bp, Artificial Sequence
  Synthetic oligonucleotide
caaataaggaggagtatgtgcacactctag

SEQ ID NO: 98324 - DNA, 30 bp, Artificial Sequence
  Synthetic oligonucleotide
gctatagagtaaaattatataatcctctag

SEQ ID NO: 98325 - DNA, 30 bp, Artificial Sequence
  Synthetic oligonucleotide
gcgggctagagcgattagtggacagtctag

SEQ ID NO: 98326 - DNA, 30 bp, Artificial Sequence
  Synthetic oligonucleotide
ggaactaagtgaaatgaggtgcgggtctag

SEQ ID NO: 98327 - DNA, 30 bp, Artificial Sequence
  Synthetic oligonucleotide
cgggcgctgggcccatctcccgagttctag

SEQ ID NO: 98328 - DNA, 30 bp, Artificial Sequence
  Synthetic oligonucleotide
tggatgggttcgatatccacaaatttctag

SEQ ID NO: 98329 - DNA, 30 bp, Artificial Sequence
  Synthetic oligonucleotide
ggcttctggacgagagtaagtgcaaagtag

SEQ ID NO: 98330 - DNA, 30 bp, Artificial Sequence
  Synthetic oligonucleotide
cttagtttgtggatacgacggtcaaagtag

SEQ ID NO: 98331 - DNA, 30 bp, Artificial Sequence
  Synthetic oligonucleotide
cacaggacatctatctagattttaaagtag

SEQ ID NO: 98332 - DNA, 30 bp, Artificial Sequence
  Synthetic oligonucleotide
aggtagcgcacgaccgttaccgggaagtag

SEQ ID NO: 98333 - DNA, 30 bp, Artificial Sequence
  Synthetic oligonucleotide
taccagaagcggggccggaagtcccagtag

SEQ ID NO: 98334 - DNA, 30 bp, Artificial Sequence
  Synthetic oligonucleotide
aaacacgaaaaagactgcaagcggcagtag

SEQ ID NO: 98335 - DNA, 30 bp, Artificial Sequence
  Synthetic oligonucleotide
tgcagactgtaatcatccaaaggggagtag

SEQ ID NO: 98336 - DNA, 30 bp, Artificial Sequence
  Synthetic oligonucleotide
aaatatcgccctgcctcatttggggagtag

SEQ ID NO: 98337 - DNA, 30 bp, Artificial Sequence
  Synthetic oligonucleotide
atgacaatcacggttagccggagtgagtag

SEQ ID NO: 98338 - DNA, 30 bp, Artificial Sequence
  Synthetic oligonucleotide
tttctgcgtcaatgattctgccgtgagtag

SEQ ID NO: 98339 - DNA, 30 bp, Artificial Sequence
  Synthetic oligonucleotide
tctgaaaaaaactgactggtacactagtag

SEQ ID NO: 98340 - DNA, 30 bp, Artificial Sequence
  Synthetic oligonucleotide
gcccgtcgagttgctaatttctcttagtag

SEQ ID NO: 98341 - DNA, 30 bp, Artificial Sequence
  Synthetic oligonucleotide
cgaaagccgtaaaggcttcaggtttagtag

SEQ ID NO: 98342 - DNA, 30 bp, Artificial Sequence
  Synthetic oligonucleotide
cgtcgtacgcgagtccgtcctcgaacgtag

SEQ ID NO: 98343 - DNA, 30 bp, Artificial Sequence
  Synthetic oligonucleotide
cgtcttcaagagtctcattctataacgtag

SEQ ID NO: 98344 - DNA, 30 bp, Artificial Sequence
  Synthetic oligonucleotide
ggggcgtaagacgtggggttgactacgtag

SEQ ID NO: 98345 - DNA, 30 bp, Artificial Sequence
  Synthetic oligonucleotide
atgtaccagagaaattaccggtgaccgtag

SEQ ID NO: 98346 - DNA, 30 bp, Artificial Sequence
  Synthetic oligonucleotide
taagagagtaacttattcttgaagccgtag

SEQ ID NO: 98347 - DNA, 30 bp, Artificial Sequence
  Synthetic oligonucleotide
tcggactgatctacacagaaatagccgtag

SEQ ID NO: 98348 - DNA, 30 bp, Artificial Sequence
  Synthetic oligonucleotide
ggaaggcgccagcctgtaggaattccgtag

SEQ ID NO: 98349 - DNA, 30 bp, Artificial Sequence
  Synthetic oligonucleotide
gataacgttagtaccggatagatagcgtag

SEQ ID NO: 98350 - DNA, 30 bp, Artificial Sequence
  Synthetic oligonucleotide
ggccagttcaggactacagattgggcgtag

SEQ ID NO: 98351 - DNA, 30 bp, Artificial Sequence
  Synthetic oligonucleotide
ctagtggttttcacggaacttgcatcgtag

SEQ ID NO: 98352 - DNA, 30 bp, Artificial Sequence
  Synthetic oligonucleotide
ccaaccgggaatacactcagtgccaggtag

SEQ ID NO: 98353 - DNA, 30 bp, Artificial Sequence
  Synthetic oligonucleotide
ctgaggatcccaaaatttaagttcaggtag

SEQ ID NO: 98354 - DNA, 30 bp, Artificial Sequence
  Synthetic oligonucleotide
caacggtcgattgcgcttatctctcggtag

SEQ ID NO: 98355 - DNA, 30 bp, Artificial Sequence
  Synthetic oligonucleotide
acgtctaaaattgccgccttcgtagggtag

SEQ ID NO: 98356 - DNA, 30 bp, Artificial Sequence
  Synthetic oligonucleotide
tgaaaaggaatttggcgcactgtagggtag

SEQ ID NO: 98357 - DNA, 30 bp, Artificial Sequence
  Synthetic oligonucleotide
tcagaaaaggagcgctcatccggcgggtag

SEQ ID NO: 98358 - DNA, 30 bp, Artificial Sequence
  Synthetic oligonucleotide
catccgcataattacagcggcgatgggtag

SEQ ID NO: 98359 - DNA, 30 bp, Artificial Sequence
  Synthetic oligonucleotide
gagatcacgaagggacaatcgcttgggtag

SEQ ID NO: 98360 - DNA, 30 bp, Artificial Sequence
  Synthetic oligonucleotide
tagccggataggggttcaggattctggtag

SEQ ID NO: 98361 - DNA, 30 bp, Artificial Sequence
  Synthetic oligonucleotide
caacgaacgtcgagtcccgtccgttggtag

SEQ ID NO: 98362 - DNA, 30 bp, Artificial Sequence
  Synthetic oligonucleotide
cggtcagtgggaggaaggcgcctttggtag

SEQ ID NO: 98363 - DNA, 30 bp, Artificial Sequence
  Synthetic oligonucleotide
acgtctagtcggttcggcacgtacatgtag

SEQ ID NO: 98364 - DNA, 30 bp, Artificial Sequence
  Synthetic oligonucleotide
attgtaacaatgtcgataatgatgatgtag

SEQ ID NO: 98365 - DNA, 30 bp, Artificial Sequence
  Synthetic oligonucleotide
cgcgcaatgtgtaggatctcaaaactgtag

SEQ ID NO: 98366 - DNA, 30 bp, Artificial Sequence
  Synthetic oligonucleotide
gcttatcaacgacgtgggatgcgactgtag

SEQ ID NO: 98367 - DNA, 30 bp, Artificial Sequence
  Synthetic oligonucleotide
attggcaatatttcttcggtacggctgtag

SEQ ID NO: 98368 - DNA, 30 bp, Artificial Sequence
  Synthetic oligonucleotide
cgactagtctgtcaatttcaagaagtgtag

SEQ ID NO: 98369 - DNA, 30 bp, Artificial Sequence
  Synthetic oligonucleotide
tccgagcgaggatataaataacacttgtag

SEQ ID NO: 98370 - DNA, 30 bp, Artificial Sequence
  Synthetic oligonucleotide
atcggggggcggtaaaacagcccaaattag

SEQ ID NO: 98371 - DNA, 30 bp, Artificial Sequence
  Synthetic oligonucleotide
cggaatatacttgaagtggagcttcattag

SEQ ID NO: 98372 - DNA, 30 bp, Artificial Sequence
  Synthetic oligonucleotide
tcatcttaccagaggccaaatctggattag

SEQ ID NO: 98373 - DNA, 30 bp, Artificial Sequence
  Synthetic oligonucleotide
cagattgaaatgtatccaactactgattag

SEQ ID NO: 98374 - DNA, 30 bp, Artificial Sequence
  Synthetic oligonucleotide
aggatcgtaggggacgtcacgaactattag

SEQ ID NO: 98375 - DNA, 30 bp, Artificial Sequence
  Synthetic oligonucleotide
atgtcgccccgcctactccaagcctattag

SEQ ID NO: 98376 - DNA, 30 bp, Artificial Sequence
  Synthetic oligonucleotide
cgccttagcgcatataactcaccgtattag

SEQ ID NO: 98377 - DNA, 30 bp, Artificial Sequence
  Synthetic oligonucleotide
atatgccgaaatggtactgccccttattag

SEQ ID NO: 98378 - DNA, 30 bp, Artificial Sequence
  Synthetic oligonucleotide
aacggagtaggattagggtaagccacttag

SEQ ID NO: 98379 - DNA, 30 bp, Artificial Sequence
  Synthetic oligonucleotide
ataggagaatcctgcaagagtatcacttag

SEQ ID NO: 98380 - DNA, 30 bp, Artificial Sequence
  Synthetic oligonucleotide
gctaaaatcaaactaaaagacgatacttag

SEQ ID NO: 98381 - DNA, 30 bp, Artificial Sequence
  Synthetic oligonucleotide
gatcgtaagcggtagatccttgtaccttag

SEQ ID NO: 98382 - DNA, 30 bp, Artificial Sequence
  Synthetic oligonucleotide
tacatcaactgagtggtggtctgagcttag

SEQ ID NO: 98383 - DNA, 30 bp, Artificial Sequence
  Synthetic oligonucleotide
ggagagtgagtaacaatctgctactcttag

SEQ ID NO: 98384 - DNA, 30 bp, Artificial Sequence
  Synthetic oligonucleotide
ccccgcatctccaaattgagatcttcttag

SEQ ID NO: 98385 - DNA, 30 bp, Artificial Sequence
  Synthetic oligonucleotide
acactcaacggcgagctgctaaggagttag

SEQ ID NO: 98386 - DNA, 30 bp, Artificial Sequence
  Synthetic oligonucleotide
gtctgccaggatgggccgtacgggagttag

SEQ ID NO: 98387 - DNA, 30 bp, Artificial Sequence
  Synthetic oligonucleotide
ggacaatttggctgatgaggtgttagttag

SEQ ID NO: 98388 - DNA, 30 bp, Artificial Sequence
  Synthetic oligonucleotide
ggccaagcgcagaatgaggataaacgttag

SEQ ID NO: 98389 - DNA, 30 bp, Artificial Sequence
  Synthetic oligonucleotide
cgtttaaagcgagggacacttaaacgttag

SEQ ID NO: 98390 - DNA, 30 bp, Artificial Sequence
  Synthetic oligonucleotide
ggggcttcaaagtaatcaacgagccgttag

SEQ ID NO: 98391 - DNA, 30 bp, Artificial Sequence
  Synthetic oligonucleotide
ggaagtgttattgctgacaacgggcgttag

SEQ ID NO: 98392 - DNA, 30 bp, Artificial Sequence
  Synthetic oligonucleotide
cacgatatacttgattcaactgtaggttag

SEQ ID NO: 98393 - DNA, 30 bp, Artificial Sequence
  Synthetic oligonucleotide
taaacagatcgtcgagattagcatggttag

SEQ ID NO: 98394 - DNA, 30 bp, Artificial Sequence
  Synthetic oligonucleotide
agggacccctcttgatatcgttctggttag

SEQ ID NO: 98395 - DNA, 30 bp, Artificial Sequence
  Synthetic oligonucleotide
ctgaggcgacatgcaatcatttaatgttag

SEQ ID NO: 98396 - DNA, 30 bp, Artificial Sequence
  Synthetic oligonucleotide
atttgatggggcaaagctcgaaagtgttag

SEQ ID NO: 98397 - DNA, 30 bp, Artificial Sequence
  Synthetic oligonucleotide
cgtgagggctcgtctgtctagacgtgttag

SEQ ID NO: 98398 - DNA, 30 bp, Artificial Sequence
  Synthetic oligonucleotide
ctgtcaacgtggggatggggcgattgttag

SEQ ID NO: 98399 - DNA, 30 bp, Artificial Sequence
  Synthetic oligonucleotide
tagtcagcaccagttacaagaggttgttag

SEQ ID NO: 98400 - DNA, 30 bp, Artificial Sequence
  Synthetic oligonucleotide
cagcgccgggtgatatgttttaagctttag

SEQ ID NO: 98401 - DNA, 30 bp, Artificial Sequence
  Synthetic oligonucleotide
agagcagcctcgggggcggtctaagtttag

SEQ ID NO: 98402 - DNA, 30 bp, Artificial Sequence
  Synthetic oligonucleotide
tcacatccctaggatcatagatgggtttag

SEQ ID NO: 98403 - DNA, 30 bp, Artificial Sequence
  Synthetic oligonucleotide
cgagagacttttggatgcacctcaaaaacg

SEQ ID NO: 98404 - DNA, 30 bp, Artificial Sequence
  Synthetic oligonucleotide
cggcttgacgcacgcggaagcgaacaaacg

SEQ ID NO: 98405 - DNA, 30 bp, Artificial Sequence
  Synthetic oligonucleotide
ctatattttagcggctcagactaacaaacg

SEQ ID NO: 98406 - DNA, 30 bp, Artificial Sequence
  Synthetic oligonucleotide
taggcataacttgcgacgggaagacaaacg

SEQ ID NO: 98407 - DNA, 30 bp, Artificial Sequence
  Synthetic oligonucleotide
atggtacgagagttataatagtgccaaacg

SEQ ID NO: 98408 - DNA, 30 bp, Artificial Sequence
  Synthetic oligonucleotide
acaacgggcagtgctcacgcagttcaaacg

SEQ ID NO: 98409 - DNA, 30 bp, Artificial Sequence
  Synthetic oligonucleotide
aactggtcggtgcaaatcaccgcggaaacg

SEQ ID NO: 98410 - DNA, 30 bp, Artificial Sequence
  Synthetic oligonucleotide
cactggctgaataaggcgcacgcataaacg

SEQ ID NO: 98411 - DNA, 30 bp, Artificial Sequence
  Synthetic oligonucleotide
cacacgagatccatgagacacttataaacg

SEQ ID NO: 98412 - DNA, 30 bp, Artificial Sequence
  Synthetic oligonucleotide
gacacgcgaattggtcagaataactaaacg

SEQ ID NO: 98413 - DNA, 30 bp, Artificial Sequence
  Synthetic oligonucleotide
agggagctcgcaattaggtgggggtaaacg

SEQ ID NO: 98414 - DNA, 30 bp, Artificial Sequence
  Synthetic oligonucleotide
tcggttaaaaatcgtatccctgggtaaacg

SEQ ID NO: 98415 - DNA, 30 bp, Artificial Sequence
  Synthetic oligonucleotide
aggacagaaaatagtccaatcagttaaacg

SEQ ID NO: 98416 - DNA, 30 bp, Artificial Sequence
  Synthetic oligonucleotide
catcaagagacctgtaaaacccgcacaacg

SEQ ID NO: 98417 - DNA, 30 bp, Artificial Sequence
  Synthetic oligonucleotide
cgcccggcagaaggaagctctacgacaacg

SEQ ID NO: 98418 - DNA, 30 bp, Artificial Sequence
  Synthetic oligonucleotide
ggtctccaacagtcgaataacttaccaacg

SEQ ID NO: 98419 - DNA, 30 bp, Artificial Sequence
  Synthetic oligonucleotide
ccagggatgacctattattaatggccaacg

SEQ ID NO: 98420 - DNA, 30 bp, Artificial Sequence
  Synthetic oligonucleotide
gactgcctgcgtactatcacgatatcaacg

SEQ ID NO: 98421 - DNA, 30 bp, Artificial Sequence
  Synthetic oligonucleotide
aagctgatgagaaccagaggatgttcaacg

SEQ ID NO: 98422 - DNA, 30 bp, Artificial Sequence
  Synthetic oligonucleotide
cacaccgaaaggcacgggaagttttcaacg

SEQ ID NO: 98423 - DNA, 30 bp, Artificial Sequence
  Synthetic oligonucleotide
agaagctttcggaatgcaacctaaagaacg

SEQ ID NO: 98424 - DNA, 30 bp, Artificial Sequence
  Synthetic oligonucleotide
tattaacttacaataaaggtggtaagaacg

SEQ ID NO: 98425 - DNA, 31 bp, Artificial Sequence
  Synthetic oligonucleotide
tggtctagagtgcaattcttatgaccgaacg

SEQ ID NO: 98426 - DNA, 30 bp, Artificial Sequence
  Synthetic oligonucleotide
aaaaggcgtttaagggattctcagcgaacg

SEQ ID NO: 98427 - DNA, 30 bp, Artificial Sequence
  Synthetic oligonucleotide
cagccttatgcccccgtaaaagtgcgaacg

SEQ ID NO: 98428 - DNA, 30 bp, Artificial Sequence
  Synthetic oligonucleotide
agcgtgcgtgtcgtcgtgtgaaacggaacg

SEQ ID NO: 98429 - DNA, 30 bp, Artificial Sequence
  Synthetic oligonucleotide
aagtgtcagaccgcattgcgccttggaacg

SEQ ID NO: 98430 - DNA, 30 bp, Artificial Sequence
  Synthetic oligonucleotide
taacgcatgggagccttcgctcaatgaacg

SEQ ID NO: 98431 - DNA, 30 bp, Artificial Sequence
  Synthetic oligonucleotide
aacttgtagcttagtcgagcataatgaacg

SEQ ID NO: 98432 - DNA, 30 bp, Artificial Sequence
  Synthetic oligonucleotide
atcatagaggctgatgtccttcgaataacg

SEQ ID NO: 98433 - DNA, 30 bp, Artificial Sequence
  Synthetic oligonucleotide
cggcagcaagtggaaaacatagtaataacg

SEQ ID NO: 98434 - DNA, 30 bp, Artificial Sequence
  Synthetic oligonucleotide
gtagtcgccgtcatagttaagcacataacg

SEQ ID NO: 98435 - DNA, 30 bp, Artificial Sequence
  Synthetic oligonucleotide
tgatatgggtaaaaataagcggacataacg

SEQ ID NO: 98436 - DNA, 30 bp, Artificial Sequence
  Synthetic oligonucleotide
tggaacggtcgagtcactcggatcataacg

SEQ ID NO: 98437 - DNA, 30 bp, Artificial Sequence
  Synthetic oligonucleotide
atacgaaatttatctcatagccaactaacg

SEQ ID NO: 98438 - DNA, 30 bp, Artificial Sequence
  Synthetic oligonucleotide
ctcctatactatcagaagtgtcgactaacg

SEQ ID NO: 98439 - DNA, 30 bp, Artificial Sequence
  Synthetic oligonucleotide
gggagaccgacgacagttaaggccctaacg

SEQ ID NO: 98440 - DNA, 30 bp, Artificial Sequence
  Synthetic oligonucleotide
ggcgcgacaaagttacagtggtcgctaacg

SEQ ID NO: 98441 - DNA, 30 bp, Artificial Sequence
  Synthetic oligonucleotide
gcacaagcggcaactgatgggggtctaacg

SEQ ID NO: 98442 - DNA, 30 bp, Artificial Sequence
  Synthetic oligonucleotide
tagtctaagcctatcgggctctacgtaacg

SEQ ID NO: 98443 - DNA, 30 bp, Artificial Sequence
  Synthetic oligonucleotide
gtgtcgaggtagacctaatgacgtgtaacg

SEQ ID NO: 98444 - DNA, 30 bp, Artificial Sequence
  Synthetic oligonucleotide
cggacagaccttccagtcagagttgtaacg

SEQ ID NO: 98445 - DNA, 30 bp, Artificial Sequence
  Synthetic oligonucleotide
aagtcaggtagggaatcacggattttaacg

SEQ ID NO: 98446 - DNA, 30 bp, Artificial Sequence
  Synthetic oligonucleotide
gctgtacattagagagtattggctaacacg

SEQ ID NO: 98447 - DNA, 30 bp, Artificial Sequence
  Synthetic oligonucleotide
tgtaacgaagtagcaccgatcccccacacg

SEQ ID NO: 98448 - DNA, 30 bp, Artificial Sequence
  Synthetic oligonucleotide
cttggggagaaacagatcaacaagcacacg

SEQ ID NO: 98449 - DNA, 30 bp, Artificial Sequence
  Synthetic oligonucleotide
cggtgttgcgccatggttatttggcacacg

SEQ ID NO: 98450 - DNA, 30 bp, Artificial Sequence
  Synthetic oligonucleotide
agcctaacgccagatgaatgcacggacacg

SEQ ID NO: 98451 - DNA, 30 bp, Artificial Sequence
  Synthetic oligonucleotide
cataccaccaaacgtcgaaattcatacacg

SEQ ID NO: 98452 - DNA, 30 bp, Artificial Sequence
  Synthetic oligonucleotide
ggtaacggtgcgcacagacagctttacacg

SEQ ID NO: 98453 - DNA, 30 bp, Artificial Sequence
  Synthetic oligonucleotide
tagaattcaggttccattgctgaaaccacg

SEQ ID NO: 98454 - DNA, 30 bp, Artificial Sequence
  Synthetic oligonucleotide
cggagcgctttaagctgaaccccacccacg

SEQ ID NO: 98455 - DNA, 30 bp, Artificial Sequence
  Synthetic oligonucleotide
aaacgatctggttcagagaggtgacccacg

SEQ ID NO: 98456 - DNA, 30 bp, Artificial Sequence
  Synthetic oligonucleotide
ttaatgatacataagggacctccccccacg

SEQ ID NO: 98457 - DNA, 30 bp, Artificial Sequence
  Synthetic oligonucleotide
acatgaaatggcgttcttaagatagccacg

SEQ ID NO: 98458 - DNA, 30 bp, Artificial Sequence
  Synthetic oligonucleotide
tgatcagccctgagtcgatttggggccacg

SEQ ID NO: 98459 - DNA, 30 bp, Artificial Sequence
  Synthetic oligonucleotide
gtcatcacgtaaatcactccgccgtccacg

SEQ ID NO: 98460 - DNA, 30 bp, Artificial Sequence
  Synthetic oligonucleotide
gcatcatcccttaaataagtttacagcacg

SEQ ID NO: 98461 - DNA, 30 bp, Artificial Sequence
  Synthetic oligonucleotide
gaaccggctaacataatgtttgccagcacg

SEQ ID NO: 98462 - DNA, 30 bp, Artificial Sequence
  Synthetic oligonucleotide
cgacgaggctcatttcgggacatctgcacg

SEQ ID NO: 98463 - DNA, 30 bp, Artificial Sequence
  Synthetic oligonucleotide
tacattcgctcaaaatgaccattctgcacg

SEQ ID NO: 98464 - DNA, 30 bp, Artificial Sequence
  Synthetic oligonucleotide
gataccggccaaagagtatctggaatcacg

SEQ ID NO: 98465 - DNA, 30 bp, Artificial Sequence
  Synthetic oligonucleotide
caacattgctcacaaatatgcgcagtcacg

SEQ ID NO: 98466 - DNA, 30 bp, Artificial Sequence
  Synthetic oligonucleotide
tgatctgaagaaaacttctgaggagtcacg

SEQ ID NO: 98467 - DNA, 30 bp, Artificial Sequence
  Synthetic oligonucleotide
acgtacatggatagtcctcacagtgtcacg

SEQ ID NO: 98468 - DNA, 30 bp, Artificial Sequence
  Synthetic oligonucleotide
tctaagatggtaggctttgttgggttcacg

SEQ ID NO: 98469 - DNA, 30 bp, Artificial Sequence
  Synthetic oligonucleotide
gctcggtaattggtatcacaaatgttcacg

SEQ ID NO: 98470 - DNA, 30 bp, Artificial Sequence
  Synthetic oligonucleotide
tcgatatcacaggacaatggtctcaagacg

SEQ ID NO: 98471 - DNA, 30 bp, Artificial Sequence
  Synthetic oligonucleotide
aggaaacctaacccgtactcaacgaagacg

SEQ ID NO: 98472 - DNA, 30 bp, Artificial Sequence
  Synthetic oligonucleotide
gttacaggctcacacatctcacgacagacg

SEQ ID NO: 98473 - DNA, 30 bp, Artificial Sequence
  Synthetic oligonucleotide
acacatgcccttgctcgggaacatcagacg

SEQ ID NO: 98474 - DNA, 31 bp, Artificial Sequence
  Synthetic oligonucleotide
tcaaacctctctttccggcaaggttcagacg

SEQ ID NO: 98475 - DNA, 30 bp, Artificial Sequence
  Synthetic oligonucleotide
gtgcctaaaatcagatcggtggtagagacg

SEQ ID NO: 98476 - DNA, 30 bp, Artificial Sequence
  Synthetic oligonucleotide
gcgtttgagccgggcttgacaaactagacg

SEQ ID NO: 98477 - DNA, 30 bp, Artificial Sequence
  Synthetic oligonucleotide
gttccccgaacggatcgaggcacttagacg

SEQ ID NO: 98478 - DNA, 30 bp, Artificial Sequence
  Synthetic oligonucleotide
acaatggaaagtgtcggtaggtgcacgacg

SEQ ID NO: 98479 - DNA, 30 bp, Artificial Sequence
  Synthetic oligonucleotide
cgctgagttgtacttcaagctagcccgacg

SEQ ID NO: 98480 - DNA, 30 bp, Artificial Sequence
  Synthetic oligonucleotide
gtatgggatgagactcacatggttccgacg

SEQ ID NO: 98481 - DNA, 31 bp, Artificial Sequence
  Synthetic oligonucleotide
aagaattctccaatggaagaatggtgcgacg

SEQ ID NO: 98482 - DNA, 30 bp, Artificial Sequence
  Synthetic oligonucleotide
cttgagacaaaaattatgagaccctcgacg

SEQ ID NO: 98483 - DNA, 30 bp, Artificial Sequence
  Synthetic oligonucleotide
ctagtgagtcagccttaggcactctcgacg

SEQ ID NO: 98484 - DNA, 30 bp, Artificial Sequence
  Synthetic oligonucleotide
atacaagcggactcggtagtcgagtcgacg

SEQ ID NO: 98485 - DNA, 30 bp, Artificial Sequence
  Synthetic oligonucleotide
gggattcataattaggagggcaaacggacg

SEQ ID NO: 98486 - DNA, 30 bp, Artificial Sequence
  Synthetic oligonucleotide
gaggtcaaccaggaagaccgtgcgcggacg

SEQ ID NO: 98487 - DNA, 30 bp, Artificial Sequence
  Synthetic oligonucleotide
gcggggtgaaaggagactaagtcgcggacg

SEQ ID NO: 98488 - DNA, 30 bp, Artificial Sequence
  Synthetic oligonucleotide
ggaggaaaagcattcgagtgctgagggacg

SEQ ID NO: 98489 - DNA, 30 bp, Artificial Sequence
  Synthetic oligonucleotide
ccacgtgacacacgcgatctatctgggacg

SEQ ID NO: 98490 - DNA, 30 bp, Artificial Sequence
  Synthetic oligonucleotide
tatactattgacttgagtcacagaatgacg

SEQ ID NO: 98491 - DNA, 30 bp, Artificial Sequence
  Synthetic oligonucleotide
gtgatcctagcgagtacactatgcatgacg

SEQ ID NO: 98492 - DNA, 30 bp, Artificial Sequence
  Synthetic oligonucleotide
gcccgaaaagtagagacacggaggatgacg

SEQ ID NO: 98493 - DNA, 30 bp, Artificial Sequence
  Synthetic oligonucleotide
acgtgccggcgggctctgagcaaactgacg

SEQ ID NO: 98494 - DNA, 30 bp, Artificial Sequence
  Synthetic oligonucleotide
ccgggagcgcagttgcactagagcctgacg

SEQ ID NO: 98495 - DNA, 30 bp, Artificial Sequence
  Synthetic oligonucleotide
agcaatctgcggcatctggggatgctgacg

SEQ ID NO: 98496 - DNA, 30 bp, Artificial Sequence
  Synthetic oligonucleotide
aagattgcggtataaagtgcgatggtgacg

SEQ ID NO: 98497 - DNA, 30 bp, Artificial Sequence
  Synthetic oligonucleotide
acgatcaaggaacaaggagcgctattgacg

SEQ ID NO: 98498 - DNA, 30 bp, Artificial Sequence
  Synthetic oligonucleotide
cgttatgtgaccggatcggtaacgttgacg

SEQ ID NO: 98499 - DNA, 30 bp, Artificial Sequence
  Synthetic oligonucleotide
gaaaagtaggagaaaggaaagctaaatacg

SEQ ID NO: 98500 - DNA, 30 bp, Artificial Sequence
  Synthetic oligonucleotide
cggcattgtaccaagcttgtctacaatacg

SEQ ID NO: 98501 - DNA, 30 bp, Artificial Sequence
  Synthetic oligonucleotide
taacacgtgggaagacaatgtccgaatacg

SEQ ID NO: 98502 - DNA, 30 bp, Artificial Sequence
  Synthetic oligonucleotide
agcactcctgccagctaacttgctcatacg

SEQ ID NO: 98503 - DNA, 30 bp, Artificial Sequence
  Synthetic oligonucleotide
acgagtgtgtttggtacttatcaggatacg

SEQ ID NO: 98504 - DNA, 30 bp, Artificial Sequence
  Synthetic oligonucleotide
ttagagtaaactgtatcacccgtggatacg

SEQ ID NO: 98505 - DNA, 30 bp, Artificial Sequence
  Synthetic oligonucleotide
tccactgggcgacatcctgctgattatacg

SEQ ID NO: 98506 - DNA, 30 bp, Artificial Sequence
  Synthetic oligonucleotide
atgcgggggacggcgaaacgatgaactacg

SEQ ID NO: 98507 - DNA, 29 bp, Artificial Sequence
  Synthetic oligonucleotide
ctcatatcgggcggaaaacactgactacg

SEQ ID NO: 98508 - DNA, 30 bp, Artificial Sequence
  Synthetic oligonucleotide
gacccaggggcatggtgaggactgactacg

SEQ ID NO: 98509 - DNA, 30 bp, Artificial Sequence
  Synthetic oligonucleotide
gtgatacattgagcaatagtttaacctacg

SEQ ID NO: 98510 - DNA, 30 bp, Artificial Sequence
  Synthetic oligonucleotide
ctctgatggccaactgattacacacctacg

SEQ ID NO: 98511 - DNA, 30 bp, Artificial Sequence
  Synthetic oligonucleotide
gcgacggtaagcttaagacgaagggctacg

SEQ ID NO: 98512 - DNA, 30 bp, Artificial Sequence
  Synthetic oligonucleotide
cacatagtggcggtcgcgatccgggctacg

SEQ ID NO: 98513 - DNA, 30 bp, Artificial Sequence
  Synthetic oligonucleotide
aaagaccactagtgagcggtgcgggctacg

SEQ ID NO: 98514 - DNA, 30 bp, Artificial Sequence
  Synthetic oligonucleotide
accaacctcggaaaccatggctcatctacg

SEQ ID NO: 98515 - DNA, 30 bp, Artificial Sequence
  Synthetic oligonucleotide
gagacgattggactaagtagcatctctacg

SEQ ID NO: 98516 - DNA, 30 bp, Artificial Sequence
  Synthetic oligonucleotide
aggcgtatatgccaaaatgtgccttctacg

SEQ ID NO: 98517 - DNA, 30 bp, Artificial Sequence
  Synthetic oligonucleotide
caccctcttgcaaaggcgtggttaagtacg

SEQ ID NO: 98518 - DNA, 30 bp, Artificial Sequence
  Synthetic oligonucleotide
cgacgcgtagttgatccgagaagcagtacg

SEQ ID NO: 98519 - DNA, 30 bp, Artificial Sequence
  Synthetic oligonucleotide
cattttgcgaccagactgcttaagagtacg

SEQ ID NO: 98520 - DNA, 30 bp, Artificial Sequence
  Synthetic oligonucleotide
gcactgggttaggagtgattagggagtacg

SEQ ID NO: 98521 - DNA, 30 bp, Artificial Sequence
  Synthetic oligonucleotide
atgagagcgacgaaactaaagagccgtacg

SEQ ID NO: 98522 - DNA, 30 bp, Artificial Sequence
  Synthetic oligonucleotide
tggggggtgtgagcgcatttaaacggtacg

SEQ ID NO: 98523 - DNA, 30 bp, Artificial Sequence
  Synthetic oligonucleotide
caaggtcttcatgatcagcatctatgtacg

SEQ ID NO: 98524 - DNA, 30 bp, Artificial Sequence
  Synthetic oligonucleotide
cgggttcagtgggggagagcttcctgtacg

SEQ ID NO: 98525 - DNA, 30 bp, Artificial Sequence
  Synthetic oligonucleotide
gtcttacgaatatcgcgcatttcctgtacg

SEQ ID NO: 98526 - DNA, 30 bp, Artificial Sequence
  Synthetic oligonucleotide
aggtaacgggaattgggagaaaggcttacg

SEQ ID NO: 98527 - DNA, 30 bp, Artificial Sequence
  Synthetic oligonucleotide
cattccaactttacccggaacctgcttacg

SEQ ID NO: 98528 - DNA, 30 bp, Artificial Sequence
  Synthetic oligonucleotide
gtcaacactgcatcagcgatcttgcttacg

SEQ ID NO: 98529 - DNA, 30 bp, Artificial Sequence
  Synthetic oligonucleotide
caggcgagaatcggattggaagaagttacg

SEQ ID NO: 98530 - DNA, 30 bp, Artificial Sequence
  Synthetic oligonucleotide
gaagttggagcgtgggttgaaccagttacg

SEQ ID NO: 98531 - DNA, 30 bp, Artificial Sequence
  Synthetic oligonucleotide
agtgcgtgagcaagaagccattcagttacg

SEQ ID NO: 98532 - DNA, 30 bp, Artificial Sequence
  Synthetic oligonucleotide
aagtcagtgatgattgtatgagtggttacg

SEQ ID NO: 98533 - DNA, 30 bp, Artificial Sequence
  Synthetic oligonucleotide
gcttcagccatatgcctatttgatgttacg

SEQ ID NO: 98534 - DNA, 30 bp, Artificial Sequence
  Synthetic oligonucleotide
atctcaggaggggtagggcctgcatttacg

SEQ ID NO: 98535 - DNA, 30 bp, Artificial Sequence
  Synthetic oligonucleotide
gaccaaccgcgttggatacgtcggaaaccg

SEQ ID NO: 98536 - DNA, 30 bp, Artificial Sequence
  Synthetic oligonucleotide
cttgtgacagaatacctgtaacagcaaccg

SEQ ID NO: 98537 - DNA, 30 bp, Artificial Sequence
  Synthetic oligonucleotide
tcctattatggccaaagactcgccgaaccg

SEQ ID NO: 98538 - DNA, 30 bp, Artificial Sequence
  Synthetic oligonucleotide
tgggtcccataatttcgattgtgtgaaccg

SEQ ID NO: 98539 - DNA, 30 bp, Artificial Sequence
  Synthetic oligonucleotide
tagaaagaatagtgatcccggatctaaccg

SEQ ID NO: 98540 - DNA, 30 bp, Artificial Sequence
  Synthetic oligonucleotide
aagacagatgattttgggctcggaacaccg

SEQ ID NO: 98541 - DNA, 30 bp, Artificial Sequence
  Synthetic oligonucleotide
acaagtaatcacacggatgaacacacaccg

SEQ ID NO: 98542 - DNA, 30 bp, Artificial Sequence
  Synthetic oligonucleotide
acaccacttcaaccgagtcgggcaccaccg

SEQ ID NO: 98543 - DNA, 30 bp, Artificial Sequence
  Synthetic oligonucleotide
aaagcttcagacgttaagtagactccaccg

SEQ ID NO: 98544 - DNA, 30 bp, Artificial Sequence
  Synthetic oligonucleotide
gaggtacaatagctcaaatcgtcagcaccg

SEQ ID NO: 98545 - DNA, 30 bp, Artificial Sequence
  Synthetic oligonucleotide
agggtactacaggaccttctcgcggcaccg

SEQ ID NO: 98546 - DNA, 29 bp, Artificial Sequence
  Synthetic oligonucleotide
gcataccagggtatataatgtaatcaccg

SEQ ID NO: 98547 - DNA, 30 bp, Artificial Sequence
  Synthetic oligonucleotide
acggacagggcaggaggcgattcgtcaccg

SEQ ID NO: 98548 - DNA, 30 bp, Artificial Sequence
  Synthetic oligonucleotide
atcaatggatggaggggtctaccaagaccg

SEQ ID NO: 98549 - DNA, 30 bp, Artificial Sequence
  Synthetic oligonucleotide
gatcaagaatgcgtgtcgggctgaagaccg

SEQ ID NO: 98550 - DNA, 30 bp, Artificial Sequence
  Synthetic oligonucleotide
gtggcagcatcaagaccacattgaagaccg

SEQ ID NO: 98551 - DNA, 30 bp, Artificial Sequence
  Synthetic oligonucleotide
atcgagaaataccttacaaaatagagaccg

SEQ ID NO: 98552 - DNA, 30 bp, Artificial Sequence
  Synthetic oligonucleotide
atatcatatcctacttagcaaccgagaccg

SEQ ID NO: 98553 - DNA, 30 bp, Artificial Sequence
  Synthetic oligonucleotide
tacggaatgagtgctagcggttcacgaccg

SEQ ID NO: 98554 - DNA, 30 bp, Artificial Sequence
  Synthetic oligonucleotide
ctggccgtgctgtgtctagagtaccgaccg

SEQ ID NO: 98555 - DNA, 30 bp, Artificial Sequence
  Synthetic oligonucleotide
taaactaggacccacgacaggccccgaccg

SEQ ID NO: 98556 - DNA, 30 bp, Artificial Sequence
  Synthetic oligonucleotide
ttgttaactcggcaagcccactatcgaccg

SEQ ID NO: 98557 - DNA, 30 bp, Artificial Sequence
  Synthetic oligonucleotide
tatccaggttaaacagaacctgcaggaccg

SEQ ID NO: 98558 - DNA, 30 bp, Artificial Sequence
  Synthetic oligonucleotide
aacaaacaatagtaaccgggtttcggaccg

SEQ ID NO: 98559 - DNA, 30 bp, Artificial Sequence
  Synthetic oligonucleotide
cgtgtggcaccaagaactttattttgaccg

SEQ ID NO: 98560 - DNA, 30 bp, Artificial Sequence
  Synthetic oligonucleotide
ccagcgcgaacctctagtacaatcataccg

SEQ ID NO: 98561 - DNA, 30 bp, Artificial Sequence
  Synthetic oligonucleotide
cagaagggttaaaaaacgcgtagtataccg

SEQ ID NO: 98562 - DNA, 30 bp, Artificial Sequence
  Synthetic oligonucleotide
aatgaagtagggatctgtctaaacctaccg

SEQ ID NO: 98563 - DNA, 30 bp, Artificial Sequence
  Synthetic oligonucleotide
tgcccatagcaaacgtatgaacgcctaccg

SEQ ID NO: 98564 - DNA, 30 bp, Artificial Sequence
  Synthetic oligonucleotide
taatgtcgatctggcaattatgtagtaccg

SEQ ID NO: 98565 - DNA, 30 bp, Artificial Sequence
  Synthetic oligonucleotide
aaaggcaccaagagatactaggaattaccg

SEQ ID NO: 98566 - DNA, 31 bp, Artificial Sequence
  Synthetic oligonucleotide
ggaaccttgaaagcatgggcggccgttaccg

SEQ ID NO: 98567 - DNA, 30 bp, Artificial Sequence
  Synthetic oligonucleotide
ccgtatgacgaataaacacgacgaaacccg

SEQ ID NO: 98568 - DNA, 30 bp, Artificial Sequence
  Synthetic oligonucleotide
ctctataccagcatctatagactcaacccg

SEQ ID NO: 98569 - DNA, 30 bp, Artificial Sequence
  Synthetic oligonucleotide
cgcataatcaagacagctgcgcaacacccg

SEQ ID NO: 98570 - DNA, 30 bp, Artificial Sequence
  Synthetic oligonucleotide
tgacgttaaatcagacgactacaccacccg

SEQ ID NO: 98571 - DNA, 30 bp, Artificial Sequence
  Synthetic oligonucleotide
gaccgcgttggagacaagatacagtacccg

SEQ ID NO: 98572 - DNA, 30 bp, Artificial Sequence
  Synthetic oligonucleotide
agctacgtatgatagatggacctcaccccg

SEQ ID NO: 98573 - DNA, 30 bp, Artificial Sequence
  Synthetic oligonucleotide
tgtgatgcgatcccatcagtggctaccccg

SEQ ID NO: 98574 - DNA, 30 bp, Artificial Sequence
  Synthetic oligonucleotide
cctgcccaggaactgcgcaatcactccccg

SEQ ID NO: 98575 - DNA, 30 bp, Artificial Sequence
  Synthetic oligonucleotide
gaagtacgaaacagccccactgactccccg

SEQ ID NO: 98576 - DNA, 30 bp, Artificial Sequence
  Synthetic oligonucleotide
gtacgcgtgtcgatcagaacgtggtccccg

SEQ ID NO: 98577 - DNA, 30 bp, Artificial Sequence
  Synthetic oligonucleotide
cgtaggtgcaaacagtcgatactgcgcccg

SEQ ID NO: 98578 - DNA, 30 bp, Artificial Sequence
  Synthetic oligonucleotide
aaccaactctttaagggtaaggctcgcccg

SEQ ID NO: 98579 - DNA, 30 bp, Artificial Sequence
  Synthetic oligonucleotide
atgctttcagggtttcacggggctcgcccg

SEQ ID NO: 98580 - DNA, 30 bp, Artificial Sequence
  Synthetic oligonucleotide
gatcgccagaaagtgggagagaatggcccg

SEQ ID NO: 98581 - DNA, 30 bp, Artificial Sequence
  Synthetic oligonucleotide
cagaggtaggaacgtctgtgcagtggcccg

SEQ ID NO: 98582 - DNA, 30 bp, Artificial Sequence
  Synthetic oligonucleotide
tggacgttgtttgaacttttagattgcccg

SEQ ID NO: 98583 - DNA, 30 bp, Artificial Sequence
  Synthetic oligonucleotide
ggactgtaaaatgtaccctagacttgcccg

SEQ ID NO: 98584 - DNA, 30 bp, Artificial Sequence
  Synthetic oligonucleotide
caaggtattagacgatcaggtttcatcccg

SEQ ID NO: 98585 - DNA, 31 bp, Artificial Sequence
  Synthetic oligonucleotide
tgctctgctcttacttatttgtttcatcccg

SEQ ID NO: 98586 - DNA, 30 bp, Artificial Sequence
  Synthetic oligonucleotide
atgcactagtaaattgcatgtttactcccg

SEQ ID NO: 98587 - DNA, 30 bp, Artificial Sequence
  Synthetic oligonucleotide
ggctgggaactaacattagcaaacgtcccg

SEQ ID NO: 98588 - DNA, 30 bp, Artificial Sequence
  Synthetic oligonucleotide
gggcgagaggatctagctttgaatgtcccg

SEQ ID NO: 98589 - DNA, 30 bp, Artificial Sequence
  Synthetic oligonucleotide
gtggaacaaacgaaggatttggagaagccg

SEQ ID NO: 98590 - DNA, 30 bp, Artificial Sequence
  Synthetic oligonucleotide
tgtgatgacaacgcccgcagagaccagccg

SEQ ID NO: 98591 - DNA, 30 bp, Artificial Sequence
  Synthetic oligonucleotide
catacggggagctcgctttaagatcagccg

SEQ ID NO: 98592 - DNA, 30 bp, Artificial Sequence
  Synthetic oligonucleotide
ccggttaagtaactcctgtgtaaggagccg

SEQ ID NO: 98593 - DNA, 30 bp, Artificial Sequence
  Synthetic oligonucleotide
gcaacaggggccagccagcacacatagccg

SEQ ID NO: 98594 - DNA, 30 bp, Artificial Sequence
  Synthetic oligonucleotide
ttaagcagcagagtatgggagtactagccg

SEQ ID NO: 98595 - DNA, 30 bp, Artificial Sequence
  Synthetic oligonucleotide
acataccgatccacggttacaatctagccg

SEQ ID NO: 98596 - DNA, 30 bp, Artificial Sequence
  Synthetic oligonucleotide
ttcttatgcacagcattgcagaggacgccg

SEQ ID NO: 98597 - DNA, 30 bp, Artificial Sequence
  Synthetic oligonucleotide
ctcggtaacaggctggcgatgcctacgccg

SEQ ID NO: 98598 - DNA, 30 bp, Artificial Sequence
  Synthetic oligonucleotide
gtctgcaggttccatttgggtagtgcgccg

SEQ ID NO: 98599 - DNA, 30 bp, Artificial Sequence
  Synthetic oligonucleotide
ggagagtgataggtgttacagtcaaggccg

SEQ ID NO: 98600 - DNA, 30 bp, Artificial Sequence
  Synthetic oligonucleotide
taagggcattagtggttgtgagcgaggccg

SEQ ID NO: 98601 - DNA, 30 bp, Artificial Sequence
  Synthetic oligonucleotide
gctaatgtgggtatggtggaggcgaggccg

SEQ ID NO: 98602 - DNA, 30 bp, Artificial Sequence
  Synthetic oligonucleotide
ttcaggggacaattatcctccgggaggccg

SEQ ID NO: 98603 - DNA, 30 bp, Artificial Sequence
  Synthetic oligonucleotide
gacgttgtccgacatgtcgcctcggggccg

SEQ ID NO: 98604 - DNA, 30 bp, Artificial Sequence
  Synthetic oligonucleotide
gaaagatcctacctgccgaaacgtgggccg

SEQ ID NO: 98605 - DNA, 30 bp, Artificial Sequence
  Synthetic oligonucleotide
ggcgtaccggtacaatgaaaatgtgggccg

SEQ ID NO: 98606 - DNA, 30 bp, Artificial Sequence
  Synthetic oligonucleotide
gtgcggagtgatcaagtacgggatatgccg

SEQ ID NO: 98607 - DNA, 30 bp, Artificial Sequence
  Synthetic oligonucleotide
acgtcgctaaagtcagaataataactgccg

SEQ ID NO: 98608 - DNA, 30 bp, Artificial Sequence
  Synthetic oligonucleotide
cctagcgaacagtagtatataaagctgccg

SEQ ID NO: 98609 - DNA, 30 bp, Artificial Sequence
  Synthetic oligonucleotide
gctaatgatggtggttcggaggggctgccg

SEQ ID NO: 98610 - DNA, 30 bp, Artificial Sequence
  Synthetic oligonucleotide
ggccaatgagtcgcacgggggcgcgtgccg

SEQ ID NO: 98611 - DNA, 30 bp, Artificial Sequence
  Synthetic oligonucleotide
ggttcatgcatgttatgttcgaaggtgccg

SEQ ID NO: 98612 - DNA, 30 bp, Artificial Sequence
  Synthetic oligonucleotide
aatggacgagcgcgataacaatgcttgccg

SEQ ID NO: 98613 - DNA, 30 bp, Artificial Sequence
  Synthetic oligonucleotide
aggctgctcctcgtaatcggccccaatccg

SEQ ID NO: 98614 - DNA, 30 bp, Artificial Sequence
  Synthetic oligonucleotide
taactacggacgaggtattatacgaatccg

SEQ ID NO: 98615 - DNA, 30 bp, Artificial Sequence
  Synthetic oligonucleotide
gcttagttaagacatcacctcgaccatccg

SEQ ID NO: 98616 - DNA, 30 bp, Artificial Sequence
  Synthetic oligonucleotide
gaaatcgcggaattgtaaaaataagatccg

SEQ ID NO: 98617 - DNA, 30 bp, Artificial Sequence
  Synthetic oligonucleotide
agatcaaaagtgcagtgctaaagtgatccg

SEQ ID NO: 98618 - DNA, 30 bp, Artificial Sequence
  Synthetic oligonucleotide
ggcccttagaggaatccagcttaatatccg

SEQ ID NO: 98619 - DNA, 30 bp, Artificial Sequence
  Synthetic oligonucleotide
cgactctagtaacgtactaagtgttatccg

SEQ ID NO: 98620 - DNA, 30 bp, Artificial Sequence
  Synthetic oligonucleotide
ggggtacattacgaatacgcccggactccg

SEQ ID NO: 98621 - DNA, 30 bp, Artificial Sequence
  Synthetic oligonucleotide
tagactaaggcggaaggttgaaagcctccg

SEQ ID NO: 98622 - DNA, 30 bp, Artificial Sequence
  Synthetic oligonucleotide
agacggtactttgtacctatggctgctccg

SEQ ID NO: 98623 - DNA, 30 bp, Artificial Sequence
  Synthetic oligonucleotide
cgtacatttccaaagcgttgtatctctccg

SEQ ID NO: 98624 - DNA, 30 bp, Artificial Sequence
  Synthetic oligonucleotide
aggggtggcacactacgggcaaggtctccg

SEQ ID NO: 98625 - DNA, 30 bp, Artificial Sequence
  Synthetic oligonucleotide
gttcacaacagcccataacatatgtctccg

SEQ ID NO: 98626 - DNA, 30 bp, Artificial Sequence
  Synthetic oligonucleotide
atccaaacgacttgacatgcatcttctccg

SEQ ID NO: 98627 - DNA, 30 bp, Artificial Sequence
  Synthetic oligonucleotide
gttagtgcgtccagtagatcgctttctccg

SEQ ID NO: 98628 - DNA, 30 bp, Artificial Sequence
  Synthetic oligonucleotide
tcgccagaaaggcgcggcatagacagtccg

SEQ ID NO: 98629 - DNA, 30 bp, Artificial Sequence
  Synthetic oligonucleotide
ccttcggtaatgtctccgcgtttcagtccg

SEQ ID NO: 98630 - DNA, 30 bp, Artificial Sequence
  Synthetic oligonucleotide
gcccaggcgagaacgagatgcgcccgtccg

SEQ ID NO: 98631 - DNA, 30 bp, Artificial Sequence
  Synthetic oligonucleotide
cgcgcgacgtgcggcaaggggtggcgtccg

SEQ ID NO: 98632 - DNA, 30 bp, Artificial Sequence
  Synthetic oligonucleotide
ccgacatccgtacctacagtcatgcgtccg

SEQ ID NO: 98633 - DNA, 30 bp, Artificial Sequence
  Synthetic oligonucleotide
actatgctatagtccgctgaagatcgtccg

SEQ ID NO: 98634 - DNA, 30 bp, Artificial Sequence
  Synthetic oligonucleotide
agctctaacgtaagggtcttctatcgtccg

SEQ ID NO: 98635 - DNA, 30 bp, Artificial Sequence
  Synthetic oligonucleotide
aaaacgccaatataagacacaatgggtccg

SEQ ID NO: 98636 - DNA, 30 bp, Artificial Sequence
  Synthetic oligonucleotide
tcgaacaacacttacgctggtagctgtccg

SEQ ID NO: 98637 - DNA, 30 bp, Artificial Sequence
  Synthetic oligonucleotide
ctgggagagccatgaccctggttctgtccg

SEQ ID NO: 98638 - DNA, 30 bp, Artificial Sequence
  Synthetic oligonucleotide
gcgaagttgctaatttccccatcgattccg

SEQ ID NO: 98639 - DNA, 30 bp, Artificial Sequence
  Synthetic oligonucleotide
agcggctaggaaaatcaattcaaagttccg

SEQ ID NO: 98640 - DNA, 30 bp, Artificial Sequence
  Synthetic oligonucleotide
catggcaatggtaaataggatacagttccg

SEQ ID NO: 98641 - DNA, 30 bp, Artificial Sequence
  Synthetic oligonucleotide
ctgaatcacaaacgtgccgctatcgttccg

SEQ ID NO: 98642 - DNA, 30 bp, Artificial Sequence
  Synthetic oligonucleotide
gcacgctgacatcaccagcaacaatttccg

SEQ ID NO: 98643 - DNA, 31 bp, Artificial Sequence
  Synthetic oligonucleotide
cccaaagctcgaaccatcgggcagctttccg

SEQ ID NO: 98644 - DNA, 30 bp, Artificial Sequence
  Synthetic oligonucleotide
ccgagacagtggatgcctgggacgtttccg

SEQ ID NO: 98645 - DNA, 30 bp, Artificial Sequence
  Synthetic oligonucleotide
gtcataactaatacgatgggcaggtttccg

SEQ ID NO: 98646 - DNA, 30 bp, Artificial Sequence
  Synthetic oligonucleotide
ggggggtgtcctctccattcaaacaaagcg

SEQ ID NO: 98647 - DNA, 30 bp, Artificial Sequence
  Synthetic oligonucleotide
aaccggatagacagacactacaagaaagcg

SEQ ID NO: 98648 - DNA, 30 bp, Artificial Sequence
  Synthetic oligonucleotide
tagggcaaaaagacagcgtgcaggaaagcg

SEQ ID NO: 98649 - DNA, 30 bp, Artificial Sequence
  Synthetic oligonucleotide
tgatccgacaagcacgaacgacaacaagcg

SEQ ID NO: 98650 - DNA, 30 bp, Artificial Sequence
  Synthetic oligonucleotide
caaatagcaatggataaaaaaccccaagcg

SEQ ID NO: 98651 - DNA, 30 bp, Artificial Sequence
  Synthetic oligonucleotide
gggatggatctccaagcgttatgtcaagcg

SEQ ID NO: 98652 - DNA, 30 bp, Artificial Sequence
  Synthetic oligonucleotide
agaatggcatgtgattaggtgcaggaagcg

SEQ ID NO: 98653 - DNA, 30 bp, Artificial Sequence
  Synthetic oligonucleotide
aactagagtcaccccagagcacaataagcg

SEQ ID NO: 98654 - DNA, 30 bp, Artificial Sequence
  Synthetic oligonucleotide
gggtgccacgggtcagagtaggcataagcg

SEQ ID NO: 98655 - DNA, 30 bp, Artificial Sequence
  Synthetic oligonucleotide
ccacttatccaacctaacggtgattaagcg

SEQ ID NO: 98656 - DNA, 30 bp, Artificial Sequence
  Synthetic oligonucleotide
cgattatcgtaggcacgagcatatacagcg

SEQ ID NO: 98657 - DNA, 30 bp, Artificial Sequence
  Synthetic oligonucleotide
actccataattcaaagtgccgtcgccagcg

SEQ ID NO: 98658 - DNA, 30 bp, Artificial Sequence
  Synthetic oligonucleotide
tatttcctatcttctactatccatccagcg

SEQ ID NO: 98659 - DNA, 30 bp, Artificial Sequence
  Synthetic oligonucleotide
tcggagggaaagcgtgagtcattagcagcg

SEQ ID NO: 98660 - DNA, 30 bp, Artificial Sequence
  Synthetic oligonucleotide
atggggcagagtgtggccgattccgcagcg

SEQ ID NO: 98661 - DNA, 30 bp, Artificial Sequence
  Synthetic oligonucleotide
ggatggagggcaaagatctccatcgcagcg

SEQ ID NO: 98662 - DNA, 31 bp, Artificial Sequence
  Synthetic oligonucleotide
agtaaggctacgattccagcaggtatcagcg

SEQ ID NO: 98663 - DNA, 30 bp, Artificial Sequence
  Synthetic oligonucleotide
ggaagaaaatgacgtgaatgtacttcagcg

SEQ ID NO: 98664 - DNA, 30 bp, Artificial Sequence
  Synthetic oligonucleotide
caaacgacggctcgggagggtggttcagcg

SEQ ID NO: 98665 - DNA, 30 bp, Artificial Sequence
  Synthetic oligonucleotide
gaccacatacgatcataatctctaagagcg

SEQ ID NO: 98666 - DNA, 30 bp, Artificial Sequence
  Synthetic oligonucleotide
tagtggcagcctagtgtgccattaagagcg

SEQ ID NO: 98667 - DNA, 30 bp, Artificial Sequence
  Synthetic oligonucleotide
ggggctggggacgtcagcgtcgagagagcg

SEQ ID NO: 98668 - DNA, 30 bp, Artificial Sequence
  Synthetic oligonucleotide
cactacctattagcctgttgataacgagcg

SEQ ID NO: 98669 - DNA, 30 bp, Artificial Sequence
  Synthetic oligonucleotide
ggacaggcgcgggacaaactggaaggagcg

SEQ ID NO: 98670 - DNA, 30 bp, Artificial Sequence
  Synthetic oligonucleotide
tacggactgaaattccctctgataggagcg

SEQ ID NO: 98671 - DNA, 30 bp, Artificial Sequence
  Synthetic oligonucleotide
gtgcttgaagaagaattggtgaccggagcg

SEQ ID NO: 98672 - DNA, 30 bp, Artificial Sequence
  Synthetic oligonucleotide
tccaccgcgaagttgattcatcggggagcg

SEQ ID NO: 98673 - DNA, 30 bp, Artificial Sequence
  Synthetic oligonucleotide
acggaagactacaagtattgagcatgagcg

SEQ ID NO: 98674 - DNA, 30 bp, Artificial Sequence
  Synthetic oligonucleotide
tgcagggcgagggtgattatccgatgagcg

SEQ ID NO: 98675 - DNA, 30 bp, Artificial Sequence
  Synthetic oligonucleotide
tccgagcggcaaactggtatcctatgagcg

SEQ ID NO: 98676 - DNA, 30 bp, Artificial Sequence
  Synthetic oligonucleotide
ggttggggtgaagccgcgagacactgagcg

SEQ ID NO: 98677 - DNA, 30 bp, Artificial Sequence
  Synthetic oligonucleotide
tgagagcgatcctgcgtgttgtattgagcg

SEQ ID NO: 98678 - DNA, 30 bp, Artificial Sequence
  Synthetic oligonucleotide
tcgtacatcctttcttagatagagatagcg

SEQ ID NO: 98679 - DNA, 30 bp, Artificial Sequence
  Synthetic oligonucleotide
tcgaagatttggtattgtcaacgcctagcg

SEQ ID NO: 98680 - DNA, 30 bp, Artificial Sequence
  Synthetic oligonucleotide
cggtccaggggccagagcagggggctagcg

SEQ ID NO: 98681 - DNA, 30 bp, Artificial Sequence
  Synthetic oligonucleotide
cgagttcgataaaccgcgatcatagtagcg

SEQ ID NO: 98682 - DNA, 30 bp, Artificial Sequence
  Synthetic oligonucleotide
tacctgggaatacgttgagtactagtagcg

SEQ ID NO: 98683 - DNA, 29 bp, Artificial Sequence
  Synthetic oligonucleotide
ggatccaacagagttttatctaggtagcg

SEQ ID NO: 98684 - DNA, 30 bp, Artificial Sequence
  Synthetic oligonucleotide
cgcaatgctgaagaaattcagtatgtagcg

SEQ ID NO: 98685 - DNA, 30 bp, Artificial Sequence
  Synthetic oligonucleotide
ctcatgccaatctccacctaacaattagcg

SEQ ID NO: 98686 - DNA, 30 bp, Artificial Sequence
  Synthetic oligonucleotide
tctgagaactttaaatgaaacgagttagcg

SEQ ID NO: 98687 - DNA, 30 bp, Artificial Sequence
  Synthetic oligonucleotide
aggctatcataaccatgccaagtgttagcg

SEQ ID NO: 98688 - DNA, 30 bp, Artificial Sequence
  Synthetic oligonucleotide
acatggcagatcgggaagatgatacacgcg

SEQ ID NO: 98689 - DNA, 30 bp, Artificial Sequence
  Synthetic oligonucleotide
agaagaagtggtgcggctaagtgagacgcg

SEQ ID NO: 98690 - DNA, 30 bp, Artificial Sequence
  Synthetic oligonucleotide
caacagagggtgcctacctcggcgtacgcg

SEQ ID NO: 98691 - DNA, 30 bp, Artificial Sequence
  Synthetic oligonucleotide
cgtaccgtcatgacctgacttgttcccgcg

SEQ ID NO: 98692 - DNA, 30 bp, Artificial Sequence
  Synthetic oligonucleotide
tgaacagcaaaaaagttcagtggagccgcg

SEQ ID NO: 98693 - DNA, 30 bp, Artificial Sequence
  Synthetic oligonucleotide
gacatggcctacagttcattagcatccgcg

SEQ ID NO: 98694 - DNA, 30 bp, Artificial Sequence
  Synthetic oligonucleotide
aaagtctatctagggtatgatagatccgcg

SEQ ID NO: 98695 - DNA, 30 bp, Artificial Sequence
  Synthetic oligonucleotide
tgcaatccgtgatcttgatctcgatccgcg

SEQ ID NO: 98696 - DNA, 30 bp, Artificial Sequence
  Synthetic oligonucleotide
ccttgatacccggaagcagaactgtccgcg

SEQ ID NO: 98697 - DNA, 30 bp, Artificial Sequence
  Synthetic oligonucleotide
accaaagacgaggtcagtgatttttccgcg

SEQ ID NO: 98698 - DNA, 30 bp, Artificial Sequence
  Synthetic oligonucleotide
taaatctgagaagcttattgaggaagcgcg

SEQ ID NO: 98699 - DNA, 30 bp, Artificial Sequence
  Synthetic oligonucleotide
tatggaggaccccaccttatgggaagcgcg

SEQ ID NO: 98700 - DNA, 30 bp, Artificial Sequence
  Synthetic oligonucleotide
cgtagaggcctgggcggaagggatagcgcg

SEQ ID NO: 98701 - DNA, 30 bp, Artificial Sequence
  Synthetic oligonucleotide
tctccgaagaacagtattatttttagcgcg

SEQ ID NO: 98702 - DNA, 30 bp, Artificial Sequence
  Synthetic oligonucleotide
acaatagcctgccggaggccatcacgcgcg

SEQ ID NO: 98703 - DNA, 30 bp, Artificial Sequence
  Synthetic oligonucleotide
aggcactacacactatatcgtaatcgcgcg

SEQ ID NO: 98704 - DNA, 30 bp, Artificial Sequence
  Synthetic oligonucleotide
ttagcgaatttccccgagaggagaatcgcg

SEQ ID NO: 98705 - DNA, 30 bp, Artificial Sequence
  Synthetic oligonucleotide
gacgatccttagtgttacaaaaacatcgcg

SEQ ID NO: 98706 - DNA, 30 bp, Artificial Sequence
  Synthetic oligonucleotide
cgggagaattttagcaattccacgatcgcg

SEQ ID NO: 98707 - DNA, 30 bp, Artificial Sequence
  Synthetic oligonucleotide
ggatgtataggataggcggcgtgtatcgcg

SEQ ID NO: 98708 - DNA, 30 bp, Artificial Sequence
  Synthetic oligonucleotide
gaagctgatctcacagggcgagacctcgcg

SEQ ID NO: 98709 - DNA, 30 bp, Artificial Sequence
  Synthetic oligonucleotide
cccattcggacaccatctgatctgctcgcg

SEQ ID NO: 98710 - DNA, 30 bp, Artificial Sequence
  Synthetic oligonucleotide
gtttcgatcagttacaggaaaaatctcgcg

SEQ ID NO: 98711 - DNA, 30 bp, Artificial Sequence
  Synthetic oligonucleotide
agacaaatctgatgagcattagatctcgcg

SEQ ID NO: 98712 - DNA, 30 bp, Artificial Sequence
  Synthetic oligonucleotide
tgcacgttcgaagtacatgggtcggtcgcg

SEQ ID NO: 98713 - DNA, 30 bp, Artificial Sequence
  Synthetic oligonucleotide
acgtaagagatcaaaggtcattcggtcgcg

SEQ ID NO: 98714 - DNA, 30 bp, Artificial Sequence
  Synthetic oligonucleotide
cacggccagatgggacgggcatctttcgcg

SEQ ID NO: 98715 - DNA, 30 bp, Artificial Sequence
  Synthetic oligonucleotide
cgggccctatcaccctactcatggaaggcg

SEQ ID NO: 98716 - DNA, 30 bp, Artificial Sequence
  Synthetic oligonucleotide
cgaatcggtggtgatttaaacgaccaggcg

SEQ ID NO: 98717 - DNA, 30 bp, Artificial Sequence
  Synthetic oligonucleotide
catttgcgataaccctgtctgatccaggcg

SEQ ID NO: 98718 - DNA, 30 bp, Artificial Sequence
  Synthetic oligonucleotide
gcaatggaaccgagtattccaagtgaggcg

SEQ ID NO: 98719 - DNA, 30 bp, Artificial Sequence
  Synthetic oligonucleotide
ggatgtcaaactgcgtctgcctcataggcg

SEQ ID NO: 98720 - DNA, 30 bp, Artificial Sequence
  Synthetic oligonucleotide
tgcgaatgttggagggattcgggataggcg

SEQ ID NO: 98721 - DNA, 30 bp, Artificial Sequence
  Synthetic oligonucleotide
taggaactgcgtcatgaagagctataggcg

SEQ ID NO: 98722 - DNA, 30 bp, Artificial Sequence
  Synthetic oligonucleotide
taaggacctgagagatttctgcggtaggcg

SEQ ID NO: 98723 - DNA, 30 bp, Artificial Sequence
  Synthetic oligonucleotide
acatggctctagtttaactgcacaacggcg

SEQ ID NO: 98724 - DNA, 30 bp, Artificial Sequence
  Synthetic oligonucleotide
gttgagacgtacggtgatctcttaccggcg

SEQ ID NO: 98725 - DNA, 30 bp, Artificial Sequence
  Synthetic oligonucleotide
ggcagcgagtacacagggactatgccggcg

SEQ ID NO: 98726 - DNA, 30 bp, Artificial Sequence
  Synthetic oligonucleotide
tctacaacgaaaatgagtttgcgggcggcg

SEQ ID NO: 98727 - DNA, 30 bp, Artificial Sequence
  Synthetic oligonucleotide
cctatctcaaaaatcgtttcgctggcggcg

SEQ ID NO: 98728 - DNA, 30 bp, Artificial Sequence
  Synthetic oligonucleotide
taacagatggctggtcaaggctatgcggcg

SEQ ID NO: 98729 - DNA, 30 bp, Artificial Sequence
  Synthetic oligonucleotide
actctccatggaattaccgggacatcggcg

SEQ ID NO: 98730 - DNA, 30 bp, Artificial Sequence
  Synthetic oligonucleotide
aactgcaagtccacaaggcctaggtcggcg

SEQ ID NO: 98731 - DNA, 30 bp, Artificial Sequence
  Synthetic oligonucleotide
aggggaagggcactcaggcttccgcgggcg

SEQ ID NO: 98732 - DNA, 30 bp, Artificial Sequence
  Synthetic oligonucleotide
gtcgggtatcagcgaaacacatatcgggcg

SEQ ID NO: 98733 - DNA, 31 bp, Artificial Sequence
  Synthetic oligonucleotide
gcggtaattgtctacgttggaagcaggggcg

SEQ ID NO: 98734 - DNA, 30 bp, Artificial Sequence
  Synthetic oligonucleotide
accgaagacaatcagaaacgagacggggcg

SEQ ID NO: 98735 - DNA, 30 bp, Artificial Sequence
  Synthetic oligonucleotide
tgcgttaaggggtggagttgtactggggcg

SEQ ID NO: 98736 - DNA, 30 bp, Artificial Sequence
  Synthetic oligonucleotide
acaagcacgaggtacgtcggactctgggcg

SEQ ID NO: 98737 - DNA, 31 bp, Artificial Sequence
  Synthetic oligonucleotide
gcgaccgcttagtgtggtccggcaaatggcg

SEQ ID NO: 98738 - DNA, 30 bp, Artificial Sequence
  Synthetic oligonucleotide
tatagtaaggagagtcccctacagatggcg

SEQ ID NO: 98739 - DNA, 30 bp, Artificial Sequence
  Synthetic oligonucleotide
ctgggcatagttcctattgaggagatggcg

SEQ ID NO: 98740 - DNA, 30 bp, Artificial Sequence
  Synthetic oligonucleotide
attgaggtccacgatcaagagtcactggcg

SEQ ID NO: 98741 - DNA, 30 bp, Artificial Sequence
  Synthetic oligonucleotide
aagacagatattaccatggcgtcactggcg

SEQ ID NO: 98742 - DNA, 30 bp, Artificial Sequence
  Synthetic oligonucleotide
taaaagcacgttatccctcacgatctggcg

SEQ ID NO: 98743 - DNA, 30 bp, Artificial Sequence
  Synthetic oligonucleotide
caatgtttgctggggcatctaaacgtggcg

SEQ ID NO: 98744 - DNA, 30 bp, Artificial Sequence
  Synthetic oligonucleotide
aactgatcacgctttggcagaaccgtggcg

SEQ ID NO: 98745 - DNA, 30 bp, Artificial Sequence
  Synthetic oligonucleotide
cagagaatccgctaaactgatccggtggcg

SEQ ID NO: 98746 - DNA, 30 bp, Artificial Sequence
  Synthetic oligonucleotide
gatccacagcgtttgcgacacaaattggcg

SEQ ID NO: 98747 - DNA, 30 bp, Artificial Sequence
  Synthetic oligonucleotide
caatagtgaacctatgctgcgtagttggcg

SEQ ID NO: 98748 - DNA, 30 bp, Artificial Sequence
  Synthetic oligonucleotide
cagagcgtatcggcaggcttgtaaaatgcg

SEQ ID NO: 98749 - DNA, 30 bp, Artificial Sequence
  Synthetic oligonucleotide
gtgccaacaaagtggacccccgataatgcg

SEQ ID NO: 98750 - DNA, 30 bp, Artificial Sequence
  Synthetic oligonucleotide
ttgcaagtgggcagcgggtgaagtaatgcg

SEQ ID NO: 98751 - DNA, 30 bp, Artificial Sequence
  Synthetic oligonucleotide
tgagaggtaatacttcacaacattaatgcg

SEQ ID NO: 98752 - DNA, 30 bp, Artificial Sequence
  Synthetic oligonucleotide
gactatggacttcgatactaggctcatgcg

SEQ ID NO: 98753 - DNA, 30 bp, Artificial Sequence
  Synthetic oligonucleotide
tgaaacacgaatcggacagttgtatatgcg

SEQ ID NO: 98754 - DNA, 30 bp, Artificial Sequence
  Synthetic oligonucleotide
cgaggtatcgacaccgctaaaacaactgcg

SEQ ID NO: 98755 - DNA, 30 bp, Artificial Sequence
  Synthetic oligonucleotide
tgcaggtttagtgtataggtgggaactgcg

SEQ ID NO: 98756 - DNA, 30 bp, Artificial Sequence
  Synthetic oligonucleotide
ttttgctctgcaatggagtggggtactgcg

SEQ ID NO: 98757 - DNA, 30 bp, Artificial Sequence
  Synthetic oligonucleotide
atggtaaggccttaagccgcttaccctgcg

SEQ ID NO: 98758 - DNA, 30 bp, Artificial Sequence
  Synthetic oligonucleotide
acctcagctacgggctcaaaccagcctgcg

SEQ ID NO: 98759 - DNA, 30 bp, Artificial Sequence
  Synthetic oligonucleotide
tcggggtccgatttgactgtacctcctgcg

SEQ ID NO: 98760 - DNA, 30 bp, Artificial Sequence
  Synthetic oligonucleotide
aggacgattgatcctaacattgatgctgcg

SEQ ID NO: 98761 - DNA, 30 bp, Artificial Sequence
  Synthetic oligonucleotide
aagaaacaacctgcgcaggtctaaagtgcg

SEQ ID NO: 98762 - DNA, 30 bp, Artificial Sequence
  Synthetic oligonucleotide
caaaggcaatatagagaggatagaagtgcg

SEQ ID NO: 98763 - DNA, 30 bp, Artificial Sequence
  Synthetic oligonucleotide
gcttcgatcctcggcctgagctagagtgcg

SEQ ID NO: 98764 - DNA, 30 bp, Artificial Sequence
  Synthetic oligonucleotide
tctgaggcatttcatcttatcaggggtgcg

SEQ ID NO: 98765 - DNA, 30 bp, Artificial Sequence
  Synthetic oligonucleotide
ggttctgaaagcgccagaacaacttgtgcg

SEQ ID NO: 98766 - DNA, 30 bp, Artificial Sequence
  Synthetic oligonucleotide
aagtaggcaaagagcttagcgacaattgcg

SEQ ID NO: 98767 - DNA, 30 bp, Artificial Sequence
  Synthetic oligonucleotide
gtttggtacaggatggttctcgccattgcg

SEQ ID NO: 98768 - DNA, 30 bp, Artificial Sequence
  Synthetic oligonucleotide
ttcaaggcgcctcgggagaggaaacttgcg

SEQ ID NO: 98769 - DNA, 29 bp, Artificial Sequence
  Synthetic oligonucleotide
taccggcaattttatgtctcttgcttgcg

SEQ ID NO: 98770 - DNA, 30 bp, Artificial Sequence
  Synthetic oligonucleotide
atgagcagaaatcactacgaacctcttgcg

SEQ ID NO: 98771 - DNA, 30 bp, Artificial Sequence
  Synthetic oligonucleotide
tacgtaattcggatgacccaactctttgcg

SEQ ID NO: 98772 - DNA, 30 bp, Artificial Sequence
  Synthetic oligonucleotide
gcatacacttgccccgccatggaaaaatcg

SEQ ID NO: 98773 - DNA, 30 bp, Artificial Sequence
  Synthetic oligonucleotide
tagctgcgttgtctggcttcactaaaatcg

SEQ ID NO: 98774 - DNA, 30 bp, Artificial Sequence
  Synthetic oligonucleotide
ataatcttcagaccgaatacggcgaaatcg

SEQ ID NO: 98775 - DNA, 30 bp, Artificial Sequence
  Synthetic oligonucleotide
ggctatggaatatcggggctggtgaaatcg

SEQ ID NO: 98776 - DNA, 30 bp, Artificial Sequence
  Synthetic oligonucleotide
cattacgtggataaccgatcccttaaatcg

SEQ ID NO: 98777 - DNA, 30 bp, Artificial Sequence
  Synthetic oligonucleotide
acaagacagacctgttggcgtgcacaatcg

SEQ ID NO: 98778 - DNA, 30 bp, Artificial Sequence
  Synthetic oligonucleotide
caaccgtgttgaactggcgcaccccaatcg

SEQ ID NO: 98779 - DNA, 30 bp, Artificial Sequence
  Synthetic oligonucleotide
gataacgagatctaaaggacgtctcaatcg

SEQ ID NO: 98780 - DNA, 30 bp, Artificial Sequence
  Synthetic oligonucleotide
gtgggaccgattcagctgtgttgtcaatcg

SEQ ID NO: 98781 - DNA, 30 bp, Artificial Sequence
  Synthetic oligonucleotide
tttagtcaatgtgcaacccgaacagaatcg

SEQ ID NO: 98782 - DNA, 30 bp, Artificial Sequence
  Synthetic oligonucleotide
ctagcccgccaaattcacgttggcgaatcg

SEQ ID NO: 98783 - DNA, 30 bp, Artificial Sequence
  Synthetic oligonucleotide
ggtgccgggcgatccgccgcattataatcg

SEQ ID NO: 98784 - DNA, 30 bp, Artificial Sequence
  Synthetic oligonucleotide
ccgcggcacaaagtgagcatagagtaatcg

SEQ ID NO: 98785 - DNA, 30 bp, Artificial Sequence
  Synthetic oligonucleotide
cagcaatcgagcaagagacccaggtaatcg

SEQ ID NO: 98786 - DNA, 30 bp, Artificial Sequence
  Synthetic oligonucleotide
tatcatcatacagtgattgtacgaacatcg

SEQ ID NO: 98787 - DNA, 30 bp, Artificial Sequence
  Synthetic oligonucleotide
cgggaacaaaggtggacgtgagtcacatcg

SEQ ID NO: 98788 - DNA, 30 bp, Artificial Sequence
  Synthetic oligonucleotide
gggtcgagcgagggacgtgagtcgacatcg

SEQ ID NO: 98789 - DNA, 30 bp, Artificial Sequence
  Synthetic oligonucleotide
atttcaggtagcctgtttcttaatccatcg

SEQ ID NO: 98790 - DNA, 30 bp, Artificial Sequence
  Synthetic oligonucleotide
ctggttagaagggtgctaatgtcagcatcg

SEQ ID NO: 98791 - DNA, 30 bp, Artificial Sequence
  Synthetic oligonucleotide
agagtcaaggccaacagacgtaacgcatcg

SEQ ID NO: 98792 - DNA, 30 bp, Artificial Sequence
  Synthetic oligonucleotide
agatcatatgccgaaaatacttaggcatcg

SEQ ID NO: 98793 - DNA, 30 bp, Artificial Sequence
  Synthetic oligonucleotide
cggtttacagtgattgatggcatggcatcg

SEQ ID NO: 98794 - DNA, 30 bp, Artificial Sequence
  Synthetic oligonucleotide
gatatgtgtaagaagcggggtattgcatcg

SEQ ID NO: 98795 - DNA, 30 bp, Artificial Sequence
  Synthetic oligonucleotide
attcggtagtgacacgaaaggggaagatcg

SEQ ID NO: 98796 - DNA, 30 bp, Artificial Sequence
  Synthetic oligonucleotide
gtgagatactaataaacatgtgccagatcg

SEQ ID NO: 98797 - DNA, 30 bp, Artificial Sequence
  Synthetic oligonucleotide
tgtggaactgctctcctgcgattgagatcg

SEQ ID NO: 98798 - DNA, 30 bp, Artificial Sequence
  Synthetic oligonucleotide
caggatgaagtggatatctgccgtagatcg

SEQ ID NO: 98799 - DNA, 30 bp, Artificial Sequence
  Synthetic oligonucleotide
acgattctagctggatagtattatcgatcg

SEQ ID NO: 98800 - DNA, 30 bp, Artificial Sequence
  Synthetic oligonucleotide
accgtaccggatctgtagacatttcgatcg

SEQ ID NO: 98801 - DNA, 30 bp, Artificial Sequence
  Synthetic oligonucleotide
tcgcgcggtttaccaaatggaacgggatcg

SEQ ID NO: 98802 - DNA, 30 bp, Artificial Sequence
  Synthetic oligonucleotide
cgtgagaagaccccgattcattttggatcg

SEQ ID NO: 98803 - DNA, 30 bp, Artificial Sequence
  Synthetic oligonucleotide
aagccaaagtccagtaacttgtcgtgatcg

SEQ ID NO: 98804 - DNA, 30 bp, Artificial Sequence
  Synthetic oligonucleotide
tcgaaacccagtagcatcggaatttgatcg

SEQ ID NO: 98805 - DNA, 30 bp, Artificial Sequence
  Synthetic oligonucleotide
acagaccgaaaatgattaactaccatatcg

SEQ ID NO: 98806 - DNA, 30 bp, Artificial Sequence
  Synthetic oligonucleotide
aggaaagtttagaaggattatttactatcg

SEQ ID NO: 98807 - DNA, 30 bp, Artificial Sequence
  Synthetic oligonucleotide
cggtcggttaaactggtaagtgtcctatcg

SEQ ID NO: 98808 - DNA, 30 bp, Artificial Sequence
  Synthetic oligonucleotide
cgcgtgagttcttcggagtccagcgtatcg

SEQ ID NO: 98809 - DNA, 30 bp, Artificial Sequence
  Synthetic oligonucleotide
ccctggtgggcaagccgaggttgcgtatcg

SEQ ID NO: 98810 - DNA, 30 bp, Artificial Sequence
  Synthetic oligonucleotide
agacagattacaatcagaattctcgtatcg

SEQ ID NO: 98811 - DNA, 30 bp, Artificial Sequence
  Synthetic oligonucleotide
tcaacgggttattcttcattcacggtatcg

SEQ ID NO: 98812 - DNA, 30 bp, Artificial Sequence
  Synthetic oligonucleotide
gttcctgggacggtaaccaagtgggtatcg

SEQ ID NO: 98813 - DNA, 30 bp, Artificial Sequence
  Synthetic oligonucleotide
ctagcaacgggttaatgaccgtgattatcg

SEQ ID NO: 98814 - DNA, 30 bp, Artificial Sequence
  Synthetic oligonucleotide
cagacagcacctgtgctaaggataaactcg

SEQ ID NO: 98815 - DNA, 30 bp, Artificial Sequence
  Synthetic oligonucleotide
atggcgagcgggagctaacacaggaactcg

SEQ ID NO: 98816 - DNA, 30 bp, Artificial Sequence
  Synthetic oligonucleotide
gacctcactgagggtggacaacaccactcg

SEQ ID NO: 98817 - DNA, 30 bp, Artificial Sequence
  Synthetic oligonucleotide
actaaatacattcagtagtttatccactcg

SEQ ID NO: 98818 - DNA, 30 bp, Artificial Sequence
  Synthetic oligonucleotide
ccacggggtgcgtgtttctgaaaagactcg

SEQ ID NO: 98819 - DNA, 30 bp, Artificial Sequence
  Synthetic oligonucleotide
ggtgcctacgccaggctctacaaagactcg

SEQ ID NO: 98820 - DNA, 30 bp, Artificial Sequence
  Synthetic oligonucleotide
taagggcaggcgaacgaagtaagcgactcg

SEQ ID NO: 98821 - DNA, 30 bp, Artificial Sequence
  Synthetic oligonucleotide
actactcgtgaacacttgtctagtgactcg

SEQ ID NO: 98822 - DNA, 30 bp, Artificial Sequence
  Synthetic oligonucleotide
cacgacacttaacgagataactcaacctcg

SEQ ID NO: 98823 - DNA, 30 bp, Artificial Sequence
  Synthetic oligonucleotide
aggttatggtacgtcctaaggcacacctcg

SEQ ID NO: 98824 - DNA, 30 bp, Artificial Sequence
  Synthetic oligonucleotide
aaagcagttgaatttaaggttggcacctcg

SEQ ID NO: 98825 - DNA, 30 bp, Artificial Sequence
  Synthetic oligonucleotide
atgagattcaacgatgaccgaatgacctcg

SEQ ID NO: 98826 - DNA, 30 bp, Artificial Sequence
  Synthetic oligonucleotide
gaagtcagtacactcagtgcaagtacctcg

SEQ ID NO: 98827 - DNA, 30 bp, Artificial Sequence
  Synthetic oligonucleotide
agtgaataacgtcaatgaaagcgtacctcg

SEQ ID NO: 98828 - DNA, 30 bp, Artificial Sequence
  Synthetic oligonucleotide
gtcaaagggtactaatacattagggcctcg

SEQ ID NO: 98829 - DNA, 30 bp, Artificial Sequence
  Synthetic oligonucleotide
cgctcgtgggaggaagcaactttctcctcg

SEQ ID NO: 98830 - DNA, 30 bp, Artificial Sequence
  Synthetic oligonucleotide
aacttaacggaggtctactttcaaagctcg

SEQ ID NO: 98831 - DNA, 31 bp, Artificial Sequence
  Synthetic oligonucleotide
ctctgtgtaaaaacttgaatgtgtaagctcg

SEQ ID NO: 98832 - DNA, 28 bp, Artificial Sequence
  Synthetic oligonucleotide
ccgacgagtggggagtatagacagctcg

SEQ ID NO: 98833 - DNA, 30 bp, Artificial Sequence
  Synthetic oligonucleotide
catagacccggcgaacaaaaaagcagctcg

SEQ ID NO: 98834 - DNA, 30 bp, Artificial Sequence
  Synthetic oligonucleotide
gcgccggggtagtgatatctgtgcagctcg

SEQ ID NO: 98835 - DNA, 30 bp, Artificial Sequence
  Synthetic oligonucleotide
cctagaccccaaggcgctcaacatagctcg

SEQ ID NO: 98836 - DNA, 30 bp, Artificial Sequence
  Synthetic oligonucleotide
agcaaattaaacagggtatcatgtagctcg

SEQ ID NO: 98837 - DNA, 30 bp, Artificial Sequence
  Synthetic oligonucleotide
tctgctattcagagtccgtaaacccgctcg

SEQ ID NO: 98838 - DNA, 30 bp, Artificial Sequence
  Synthetic oligonucleotide
tgatacgcgcggcgaatgtctgctcgctcg

SEQ ID NO: 98839 - DNA, 30 bp, Artificial Sequence
  Synthetic oligonucleotide
aagataacggttgttaaagaagtgggctcg

SEQ ID NO: 98840 - DNA, 30 bp, Artificial Sequence
  Synthetic oligonucleotide
atggcctggcggcaaggctcttcatgctcg

SEQ ID NO: 98841 - DNA, 30 bp, Artificial Sequence
  Synthetic oligonucleotide
cgttgaacggcaacctatatacgatgctcg

SEQ ID NO: 98842 - DNA, 30 bp, Artificial Sequence
  Synthetic oligonucleotide
aactacatggccaagtgaagcgactgctcg

SEQ ID NO: 98843 - DNA, 30 bp, Artificial Sequence
  Synthetic oligonucleotide
taccttgtcggtttccgtcgatcgctctcg

SEQ ID NO: 98844 - DNA, 30 bp, Artificial Sequence
  Synthetic oligonucleotide
ccgtatcccggtttagtggagacagtctcg

SEQ ID NO: 98845 - DNA, 30 bp, Artificial Sequence
  Synthetic oligonucleotide
agtagcacgaatgaaataaggatcgtctcg

SEQ ID NO: 98846 - DNA, 30 bp, Artificial Sequence
  Synthetic oligonucleotide
tcctaattatcatagccctataaggtctcg

SEQ ID NO: 98847 - DNA, 30 bp, Artificial Sequence
  Synthetic oligonucleotide
ggacggtgtatcggcaccagttgcttctcg

SEQ ID NO: 98848 - DNA, 30 bp, Artificial Sequence
  Synthetic oligonucleotide
gggctttatagccggtaggtctcacagtcg

SEQ ID NO: 98849 - DNA, 30 bp, Artificial Sequence
  Synthetic oligonucleotide
tcacgtttcgtgcaagggaggatcgagtcg

SEQ ID NO: 98850 - DNA, 30 bp, Artificial Sequence
  Synthetic oligonucleotide
cattgatacgggtacgcggccagtgagtcg

SEQ ID NO: 98851 - DNA, 30 bp, Artificial Sequence
  Synthetic oligonucleotide
tgagattaaaccctctttgtttgtgagtcg

SEQ ID NO: 98852 - DNA, 30 bp, Artificial Sequence
  Synthetic oligonucleotide
taaggagaaaatgcgcccgggcaatagtcg

SEQ ID NO: 98853 - DNA, 30 bp, Artificial Sequence
  Synthetic oligonucleotide
tccacggggagaagggctcgtatatagtcg

SEQ ID NO: 98854 - DNA, 30 bp, Artificial Sequence
  Synthetic oligonucleotide
ttcgtggatgaacaagttccgatgtagtcg

SEQ ID NO: 98855 - DNA, 30 bp, Artificial Sequence
  Synthetic oligonucleotide
gaacccaggaatgcctggatgagttagtcg

SEQ ID NO: 98856 - DNA, 30 bp, Artificial Sequence
  Synthetic oligonucleotide
ataatcgatgcgccagtaaggataacgtcg

SEQ ID NO: 98857 - DNA, 30 bp, Artificial Sequence
  Synthetic oligonucleotide
ttagagttcagaaagctaaaacgtacgtcg

SEQ ID NO: 98858 - DNA, 30 bp, Artificial Sequence
  Synthetic oligonucleotide
tacgttacattatgtagacgaggaccgtcg

SEQ ID NO: 98859 - DNA, 30 bp, Artificial Sequence
  Synthetic oligonucleotide
ctacgccaatactttataaagaaagcgtcg

SEQ ID NO: 98860 - DNA, 30 bp, Artificial Sequence
  Synthetic oligonucleotide
cagaacccgagaggggcaccgagagcgtcg

SEQ ID NO: 98861 - DNA, 30 bp, Artificial Sequence
  Synthetic oligonucleotide
aggtcctgaggtgaactggtccgagcgtcg

SEQ ID NO: 98862 - DNA, 30 bp, Artificial Sequence
  Synthetic oligonucleotide
acaaacactgtccggctttaacgcgcgtcg

SEQ ID NO: 98863 - DNA, 30 bp, Artificial Sequence
  Synthetic oligonucleotide
ggtaatactaggtaccatagtcctgcgtcg

SEQ ID NO: 98864 - DNA, 30 bp, Artificial Sequence
  Synthetic oligonucleotide
ttatccataggagcagggtagcaatcgtcg

SEQ ID NO: 98865 - DNA, 30 bp, Artificial Sequence
  Synthetic oligonucleotide
gttggagacggcgcctttaagacatcgtcg

SEQ ID NO: 98866 - DNA, 30 bp, Artificial Sequence
  Synthetic oligonucleotide
tgtgaggacaacatgggatacggatcgtcg

SEQ ID NO: 98867 - DNA, 30 bp, Artificial Sequence
  Synthetic oligonucleotide
actgaacgcgagtgtaataacgtttcgtcg

SEQ ID NO: 98868 - DNA, 30 bp, Artificial Sequence
  Synthetic oligonucleotide
gacatgggccctcattgtgaagtaaggtcg

SEQ ID NO: 98869 - DNA, 30 bp, Artificial Sequence
  Synthetic oligonucleotide
gccgggaagatatttatatggtctaggtcg

SEQ ID NO: 98870 - DNA, 30 bp, Artificial Sequence
  Synthetic oligonucleotide
aattgccaggcattaattataggtaggtcg

SEQ ID NO: 98871 - DNA, 30 bp, Artificial Sequence
  Synthetic oligonucleotide
gcagggatcatgtcccatcactaccggtcg

SEQ ID NO: 98872 - DNA, 30 bp, Artificial Sequence
  Synthetic oligonucleotide
tctgaccgaacaattttagtggtagggtcg

SEQ ID NO: 98873 - DNA, 30 bp, Artificial Sequence
  Synthetic oligonucleotide
acgaggttccctcatggcgtcaccgggtcg

SEQ ID NO: 98874 - DNA, 30 bp, Artificial Sequence
  Synthetic oligonucleotide
gcttagtttgggttttcttagctcgggtcg

SEQ ID NO: 98875 - DNA, 30 bp, Artificial Sequence
  Synthetic oligonucleotide
cccgagatctgccaaggcaatgaatggtcg

SEQ ID NO: 98876 - DNA, 30 bp, Artificial Sequence
  Synthetic oligonucleotide
gccgtatgcgagttatgtcttggatggtcg

SEQ ID NO: 98877 - DNA, 30 bp, Artificial Sequence
  Synthetic oligonucleotide
cctgtggcgagatccgctacgacttggtcg

SEQ ID NO: 98878 - DNA, 30 bp, Artificial Sequence
  Synthetic oligonucleotide
tacctgactcaaaacacaatacgttggtcg

SEQ ID NO: 98879 - DNA, 30 bp, Artificial Sequence
  Synthetic oligonucleotide
acaaaataattcatgggaccctacatgtcg

SEQ ID NO: 98880 - DNA, 30 bp, Artificial Sequence
  Synthetic oligonucleotide
ttgttagatcgttttcaattaggagtgtcg

SEQ ID NO: 98881 - DNA, 30 bp, Artificial Sequence
  Synthetic oligonucleotide
agcttggatggtgaatgagccggtgtgtcg

SEQ ID NO: 98882 - DNA, 30 bp, Artificial Sequence
  Synthetic oligonucleotide
aatgactggacaaaccaacctaacttgtcg

SEQ ID NO: 98883 - DNA, 30 bp, Artificial Sequence
  Synthetic oligonucleotide
gacttaggccataattcgagaggcttgtcg

SEQ ID NO: 98884 - DNA, 30 bp, Artificial Sequence
  Synthetic oligonucleotide
cgttgggattgctgtccagtctagttgtcg

SEQ ID NO: 98885 - DNA, 31 bp, Artificial Sequence
  Synthetic oligonucleotide
gaggaacaaatacatggggggtctaaattcg

SEQ ID NO: 98886 - DNA, 30 bp, Artificial Sequence
  Synthetic oligonucleotide
atccggtatggaagagtactatacaattcg

SEQ ID NO: 98887 - DNA, 30 bp, Artificial Sequence
  Synthetic oligonucleotide
ggcgatcacgccgccgagtcggccaattcg

SEQ ID NO: 98888 - DNA, 30 bp, Artificial Sequence
  Synthetic oligonucleotide
tcttcagctagtagggccacccgcaattcg

SEQ ID NO: 98889 - DNA, 30 bp, Artificial Sequence
  Synthetic oligonucleotide
gaacgtcgttcaagagatatagcacattcg

SEQ ID NO: 98890 - DNA, 30 bp, Artificial Sequence
  Synthetic oligonucleotide
gaggagatattagaccgccggtcacattcg

SEQ ID NO: 98891 - DNA, 30 bp, Artificial Sequence
  Synthetic oligonucleotide
tagacttcgctagaaaatggcggccattcg

SEQ ID NO: 98892 - DNA, 30 bp, Artificial Sequence
  Synthetic oligonucleotide
taacggagacgtgtcgagtgaacgcattcg

SEQ ID NO: 98893 - DNA, 30 bp, Artificial Sequence
  Synthetic oligonucleotide
acaaccctacaggcttggtccccagattcg

SEQ ID NO: 98894 - DNA, 30 bp, Artificial Sequence
  Synthetic oligonucleotide
atagtgtcaacgattaacgggtccgattcg

SEQ ID NO: 98895 - DNA, 30 bp, Artificial Sequence
  Synthetic oligonucleotide
ctaaatttagacagattggcccatgattcg

SEQ ID NO: 98896 - DNA, 30 bp, Artificial Sequence
  Synthetic oligonucleotide
tagcgagagtttcgaatggatattgattcg

SEQ ID NO: 98897 - DNA, 30 bp, Artificial Sequence
  Synthetic oligonucleotide
tcgcgagtgcgatgctattcaacctattcg

SEQ ID NO: 98898 - DNA, 30 bp, Artificial Sequence
  Synthetic oligonucleotide
taaccattccgacagtgctgtttaacttcg

SEQ ID NO: 98899 - DNA, 30 bp, Artificial Sequence
  Synthetic oligonucleotide
gagctctgtggcgaacatcacctcacttcg

SEQ ID NO: 98900 - DNA, 30 bp, Artificial Sequence
  Synthetic oligonucleotide
aggcgtataagcagcgaagtagaaccttcg

SEQ ID NO: 98901 - DNA, 30 bp, Artificial Sequence
  Synthetic oligonucleotide
ggaatcgtggcttcccagcgtgacccttcg

SEQ ID NO: 98902 - DNA, 30 bp, Artificial Sequence
  Synthetic oligonucleotide
ctgtgggaacggatatacgggaccgcttcg

SEQ ID NO: 98903 - DNA, 30 bp, Artificial Sequence
  Synthetic oligonucleotide
accgcgcattaggtgctatctctcgcttcg

SEQ ID NO: 98904 - DNA, 30 bp, Artificial Sequence
  Synthetic oligonucleotide
caaacgggaagttgcgttttagcggcttcg

SEQ ID NO: 98905 - DNA, 30 bp, Artificial Sequence
  Synthetic oligonucleotide
cctttcggaagtgtttttcaaaaatcttcg

SEQ ID NO: 98906 - DNA, 30 bp, Artificial Sequence
  Synthetic oligonucleotide
tgagcttagacgtcagtgcctaactcttcg

SEQ ID NO: 98907 - DNA, 30 bp, Artificial Sequence
  Synthetic oligonucleotide
gcacaagctgttcaaggcagatcgtcttcg

SEQ ID NO: 98908 - DNA, 30 bp, Artificial Sequence
  Synthetic oligonucleotide
gcggtattaattccgcaaatgtagcgttcg

SEQ ID NO: 98909 - DNA, 30 bp, Artificial Sequence
  Synthetic oligonucleotide
tgcacgagttaaggtgtgcgaacgcgttcg

SEQ ID NO: 98910 - DNA, 30 bp, Artificial Sequence
  Synthetic oligonucleotide
gcgcaccaggtgcaatgtatttcaggttcg

SEQ ID NO: 98911 - DNA, 30 bp, Artificial Sequence
  Synthetic oligonucleotide
aacaggcgactaggtcacgttgccggttcg

SEQ ID NO: 98912 - DNA, 30 bp, Artificial Sequence
  Synthetic oligonucleotide
ctggctgcaatctagatgaattcatgttcg

SEQ ID NO: 98913 - DNA, 30 bp, Artificial Sequence
  Synthetic oligonucleotide
gaccaacgggcagtcggcaacttctgttcg

SEQ ID NO: 98914 - DNA, 30 bp, Artificial Sequence
  Synthetic oligonucleotide
cgataataggggttgtataaaaggtgttcg

SEQ ID NO: 98915 - DNA, 30 bp, Artificial Sequence
  Synthetic oligonucleotide
aagtaactgaaatgcactatgacttgttcg

SEQ ID NO: 98916 - DNA, 30 bp, Artificial Sequence
  Synthetic oligonucleotide
agattagcaagtatcttacgtgatatttcg

SEQ ID NO: 98917 - DNA, 30 bp, Artificial Sequence
  Synthetic oligonucleotide
caagaggtgatgcttagctaacgactttcg

SEQ ID NO: 98918 - DNA, 30 bp, Artificial Sequence
  Synthetic oligonucleotide
agctcctggaggtggcgaggcatcctttcg

SEQ ID NO: 98919 - DNA, 30 bp, Artificial Sequence
  Synthetic oligonucleotide
aggcggaaggaagggttagcctggctttcg

SEQ ID NO: 98920 - DNA, 30 bp, Artificial Sequence
  Synthetic oligonucleotide
gcgtctctagagcgtagacaccttctttcg

SEQ ID NO: 98921 - DNA, 30 bp, Artificial Sequence
  Synthetic oligonucleotide
aggcctgagactcttcacggtgaagtttcg

SEQ ID NO: 98922 - DNA, 30 bp, Artificial Sequence
  Synthetic oligonucleotide
gtcagacaagcccgattgcggataaaaagg

SEQ ID NO: 98923 - DNA, 31 bp, Artificial Sequence
  Synthetic oligonucleotide
gaaccggcggacatggggaccacccaaaagg

SEQ ID NO: 98924 - DNA, 30 bp, Artificial Sequence
  Synthetic oligonucleotide
tgtaaagctggggtttttcgtacgaaaagg

SEQ ID NO: 98925 - DNA, 30 bp, Artificial Sequence
  Synthetic oligonucleotide
ccgtttctaaggacgaacttttcgaaaagg

SEQ ID NO: 98926 - DNA, 30 bp, Artificial Sequence
  Synthetic oligonucleotide
acgagttgacgcgtgtccaagaggaaaagg

SEQ ID NO: 98927 - DNA, 30 bp, Artificial Sequence
  Synthetic oligonucleotide
agaatttaaaagcacaaacacgggaaaagg

SEQ ID NO: 98928 - DNA, 30 bp, Artificial Sequence
  Synthetic oligonucleotide
gacggttctaaacgatacgggctgaaaagg

SEQ ID NO: 98929 - DNA, 30 bp, Artificial Sequence
  Synthetic oligonucleotide
gccacatgaatctcaacaggtcttaaaagg

SEQ ID NO: 98930 - DNA, 30 bp, Artificial Sequence
  Synthetic oligonucleotide
acaggcagctacgaacaggcttgacaaagg

SEQ ID NO: 98931 - DNA, 30 bp, Artificial Sequence
  Synthetic oligonucleotide
ctctaccaaattgcggtcttcgagcaaagg

SEQ ID NO: 98932 - DNA, 30 bp, Artificial Sequence
  Synthetic oligonucleotide
gcgtcgtcggaagcagtctgtactcaaagg

SEQ ID NO: 98933 - DNA, 30 bp, Artificial Sequence
  Synthetic oligonucleotide
acgaacctggttcgatagaaatgtcaaagg

SEQ ID NO: 98934 - DNA, 30 bp, Artificial Sequence
  Synthetic oligonucleotide
ctagcgtgccaactgatcacgttagaaagg

SEQ ID NO: 98935 - DNA, 30 bp, Artificial Sequence
  Synthetic oligonucleotide
gtaaggaaagaacatatgtgtctcgaaagg

SEQ ID NO: 98936 - DNA, 30 bp, Artificial Sequence
  Synthetic oligonucleotide
cgcgcagcttacagaggaaaaacggaaagg

SEQ ID NO: 98937 - DNA, 30 bp, Artificial Sequence
  Synthetic oligonucleotide
acgcctatctagtccgaagccaattaaagg

SEQ ID NO: 98938 - DNA, 30 bp, Artificial Sequence
  Synthetic oligonucleotide
agataagaggcgaaggcatacatttaaagg

SEQ ID NO: 98939 - DNA, 30 bp, Artificial Sequence
  Synthetic oligonucleotide
aagggctcagcgtgctaccatggaacaagg

SEQ ID NO: 98940 - DNA, 30 bp, Artificial Sequence
  Synthetic oligonucleotide
ctgcgttgtagaaacagacggtgaacaagg

SEQ ID NO: 98941 - DNA, 30 bp, Artificial Sequence
  Synthetic oligonucleotide
tactccacaaaatataataaatggacaagg

SEQ ID NO: 98942 - DNA, 30 bp, Artificial Sequence
  Synthetic oligonucleotide
caaagcgattataaaagcatgatgacaagg

SEQ ID NO: 98943 - DNA, 30 bp, Artificial Sequence
  Synthetic oligonucleotide
agcggtccgagctaggacgaaaatacaagg

SEQ ID NO: 98944 - DNA, 30 bp, Artificial Sequence
  Synthetic oligonucleotide
gatgtcagttttcccgacagtcatacaagg

SEQ ID NO: 98945 - DNA, 30 bp, Artificial Sequence
  Synthetic oligonucleotide
accgtacgcttataggggatgtatacaagg

SEQ ID NO: 98946 - DNA, 30 bp, Artificial Sequence
  Synthetic oligonucleotide
agagtacgtgcgggttcacatagtacaagg

SEQ ID NO: 98947 - DNA, 30 bp, Artificial Sequence
  Synthetic oligonucleotide
gagcaacgaattctcctaggaaacccaagg

SEQ ID NO: 98948 - DNA, 30 bp, Artificial Sequence
  Synthetic oligonucleotide
accacatcaaacactccgtaaagcccaagg

SEQ ID NO: 98949 - DNA, 30 bp, Artificial Sequence
  Synthetic oligonucleotide
aggtggcagtcggggtcgctccgagcaagg

SEQ ID NO: 98950 - DNA, 30 bp, Artificial Sequence
  Synthetic oligonucleotide
cttaggaagtcatgagtattaaactcaagg

SEQ ID NO: 98951 - DNA, 30 bp, Artificial Sequence
  Synthetic oligonucleotide
agaggcatatcctagtgctgtgggtcaagg

SEQ ID NO: 98952 - DNA, 30 bp, Artificial Sequence
  Synthetic oligonucleotide
ttgcacggagtttgacgacaaaattcaagg

SEQ ID NO: 98953 - DNA, 31 bp, Artificial Sequence
  Synthetic oligonucleotide
aaaggtaaattcaccctctaggagttcaagg

SEQ ID NO: 98954 - DNA, 30 bp, Artificial Sequence
  Synthetic oligonucleotide
atgtgcactatattacggtagataagaagg

SEQ ID NO: 98955 - DNA, 30 bp, Artificial Sequence
  Synthetic oligonucleotide
ggggacccacagctatagcaatggagaagg

SEQ ID NO: 98956 - DNA, 30 bp, Artificial Sequence
  Synthetic oligonucleotide
cactaatgttcacgttattcagtgagaagg

SEQ ID NO: 98957 - DNA, 30 bp, Artificial Sequence
  Synthetic oligonucleotide
cgaatcctgaagaatgtttgttatagaagg

SEQ ID NO: 98958 - DNA, 30 bp, Artificial Sequence
  Synthetic oligonucleotide
tcgcccagctaacggaacatatctagaagg

SEQ ID NO: 98959 - DNA, 30 bp, Artificial Sequence
  Synthetic oligonucleotide
gacggaaatcattattcgacattccgaagg

SEQ ID NO: 98960 - DNA, 30 bp, Artificial Sequence
  Synthetic oligonucleotide
cgctatagggtccgactaccaccgcgaagg

SEQ ID NO: 98961 - DNA, 30 bp, Artificial Sequence
  Synthetic oligonucleotide
ttggaagatccaggtctagcgggaggaagg

SEQ ID NO: 98962 - DNA, 29 bp, Artificial Sequence
  Synthetic oligonucleotide
tatgcttgctcagaacaatatccggaagg

SEQ ID NO: 98963 - DNA, 30 bp, Artificial Sequence
  Synthetic oligonucleotide
gcattctgaccaaagctatccagcggaagg

SEQ ID NO: 98964 - DNA, 30 bp, Artificial Sequence
  Synthetic oligonucleotide
ccgaagacaaatcaaggtcccaagggaagg

SEQ ID NO: 98965 - DNA, 30 bp, Artificial Sequence
  Synthetic oligonucleotide
acgttcaaccgggagcaccgaaggggaagg

SEQ ID NO: 98966 - DNA, 30 bp, Artificial Sequence
  Synthetic oligonucleotide
cgaggagtatgacgttagtttcggggaagg

SEQ ID NO: 98967 - DNA, 30 bp, Artificial Sequence
  Synthetic oligonucleotide
agattgaacaacaatcacgaggggggaagg

SEQ ID NO: 98968 - DNA, 30 bp, Artificial Sequence
  Synthetic oligonucleotide
aaccaaataaaatatatgccatttggaagg

SEQ ID NO: 98969 - DNA, 30 bp, Artificial Sequence
  Synthetic oligonucleotide
catggtatggggaaaaggtaaatgtgaagg

SEQ ID NO: 98970 - DNA, 30 bp, Artificial Sequence
  Synthetic oligonucleotide
agatcggatcgcaaattgtgccaaataagg

SEQ ID NO: 98971 - DNA, 30 bp, Artificial Sequence
  Synthetic oligonucleotide
gtcgctcgggatctagttactcaaataagg

SEQ ID NO: 98972 - DNA, 30 bp, Artificial Sequence
  Synthetic oligonucleotide
taaggctaaggaagctcgccgccaataagg

SEQ ID NO: 98973 - DNA, 30 bp, Artificial Sequence
  Synthetic oligonucleotide
gctgatgctggtgttgtgtaatcgataagg

SEQ ID NO: 98974 - DNA, 30 bp, Artificial Sequence
  Synthetic oligonucleotide
gcagtcggtgatagttcagtggatataagg

SEQ ID NO: 98975 - DNA, 30 bp, Artificial Sequence
  Synthetic oligonucleotide
gaaaagactggtagattatgggtactaagg

SEQ ID NO: 98976 - DNA, 30 bp, Artificial Sequence
  Synthetic oligonucleotide
tggaggggtataacttgatttagcctaagg

SEQ ID NO: 98977 - DNA, 30 bp, Artificial Sequence
  Synthetic oligonucleotide
tgcgggtcgcccaaggtatagtgcctaagg

SEQ ID NO: 98978 - DNA, 30 bp, Artificial Sequence
  Synthetic oligonucleotide
ggtccgtgcttgttcaagattaatctaagg

SEQ ID NO: 98979 - DNA, 30 bp, Artificial Sequence
  Synthetic oligonucleotide
ttaaacgctgcggggattaggagggtaagg

SEQ ID NO: 98980 - DNA, 30 bp, Artificial Sequence
  Synthetic oligonucleotide
cggcgaacgaacagtccatctgctttaagg

SEQ ID NO: 98981 - DNA, 30 bp, Artificial Sequence
  Synthetic oligonucleotide
ccacgatcggaaagctcgaatgttttaagg

SEQ ID NO: 98982 - DNA, 30 bp, Artificial Sequence
  Synthetic oligonucleotide
atggaccggttcatcgcaggacgaaacagg

SEQ ID NO: 98983 - DNA, 30 bp, Artificial Sequence
  Synthetic oligonucleotide
tacatacatgataggtcggggcggaacagg

SEQ ID NO: 98984 - DNA, 30 bp, Artificial Sequence
  Synthetic oligonucleotide
gtcggttaaaatgctaatctgcataacagg

SEQ ID NO: 98985 - DNA, 30 bp, Artificial Sequence
  Synthetic oligonucleotide
gacgctaggggtgataaacaaattaacagg

SEQ ID NO: 98986 - DNA, 30 bp, Artificial Sequence
  Synthetic oligonucleotide
cgatttagtattgtgtcgacgtttaacagg

SEQ ID NO: 98987 - DNA, 30 bp, Artificial Sequence
  Synthetic oligonucleotide
gacgttgcttctgtaacagcggtacacagg

SEQ ID NO: 98988 - DNA, 30 bp, Artificial Sequence
  Synthetic oligonucleotide
ggttgggaagtgaacgatagtagccacagg

SEQ ID NO: 98989 - DNA, 30 bp, Artificial Sequence
  Synthetic oligonucleotide
caagtgtagcgctgaatttttatccacagg

SEQ ID NO: 98990 - DNA, 30 bp, Artificial Sequence
  Synthetic oligonucleotide
gccaagacgtgataagaaggcgtccacagg

SEQ ID NO: 98991 - DNA, 30 bp, Artificial Sequence
  Synthetic oligonucleotide
caatcaaatcccctacaataagtcgacagg

SEQ ID NO: 98992 - DNA, 30 bp, Artificial Sequence
  Synthetic oligonucleotide
ccaccgtgaccattactagcaaatgacagg

SEQ ID NO: 98993 - DNA, 30 bp, Artificial Sequence
  Synthetic oligonucleotide
caaacaaaccaccataccacatatgacagg

SEQ ID NO: 98994 - DNA, 30 bp, Artificial Sequence
  Synthetic oligonucleotide
tcagagcagtgttactcctcgcttgacagg

SEQ ID NO: 98995 - DNA, 30 bp, Artificial Sequence
  Synthetic oligonucleotide
aggcttgatctgctcacaatctttgacagg

SEQ ID NO: 98996 - DNA, 30 bp, Artificial Sequence
  Synthetic oligonucleotide
tcgggtactaactagttttctcaatacagg

SEQ ID NO: 98997 - DNA, 30 bp, Artificial Sequence
  Synthetic oligonucleotide
cgttcatattgagcctgtctcacatacagg

SEQ ID NO: 98998 - DNA, 30 bp, Artificial Sequence
  Synthetic oligonucleotide
tctcagggcaacattcttagaggatacagg

SEQ ID NO: 98999 - DNA, 30 bp, Artificial Sequence
  Synthetic oligonucleotide
tcagtacgaatagggaggcttgactacagg

SEQ ID NO: 99000 - DNA, 30 bp, Artificial Sequence
  Synthetic oligonucleotide
ggtgagaattggtgcgggcgggtgtacagg

SEQ ID NO: 99001 - DNA, 30 bp, Artificial Sequence
  Synthetic oligonucleotide
gagcctccaatggtaatataaaaaaccagg

SEQ ID NO: 99002 - DNA, 30 bp, Artificial Sequence
  Synthetic oligonucleotide
tagcgtcaggtacccgcggcccaaaccagg

SEQ ID NO: 99003 - DNA, 30 bp, Artificial Sequence
  Synthetic oligonucleotide
cgcgaaggttgttgccatgaaataaccagg

SEQ ID NO: 99004 - DNA, 30 bp, Artificial Sequence
  Synthetic oligonucleotide
cattatgggacagagcctaagttaaccagg

SEQ ID NO: 99005 - DNA, 30 bp, Artificial Sequence
  Synthetic oligonucleotide
aacgacgccataattacctcgaggaccagg

SEQ ID NO: 99006 - DNA, 30 bp, Artificial Sequence
  Synthetic oligonucleotide
tggcagtcagatcaggagaataataccagg

SEQ ID NO: 99007 - DNA, 30 bp, Artificial Sequence
  Synthetic oligonucleotide
ccgcaagacgatcgaattcgttataccagg

SEQ ID NO: 99008 - DNA, 30 bp, Artificial Sequence
  Synthetic oligonucleotide
ccatgcgacctttcgtccctcactaccagg

SEQ ID NO: 99009 - DNA, 30 bp, Artificial Sequence
  Synthetic oligonucleotide
aaacagttcagtactgagaattctaccagg

SEQ ID NO: 99010 - DNA, 30 bp, Artificial Sequence
  Synthetic oligonucleotide
ggactatgtacctacctaggttctaccagg

SEQ ID NO: 99011 - DNA, 30 bp, Artificial Sequence
  Synthetic oligonucleotide
ggactagacaatacgcacggtgtgcccagg

SEQ ID NO: 99012 - DNA, 30 bp, Artificial Sequence
  Synthetic oligonucleotide
cgggccctcggaacctgataggatcccagg

SEQ ID NO: 99013 - DNA, 30 bp, Artificial Sequence
  Synthetic oligonucleotide
ggatcaacgattcagcagtcttatcccagg

SEQ ID NO: 99014 - DNA, 30 bp, Artificial Sequence
  Synthetic oligonucleotide
cagctcattcgaacagccactagtcccagg

SEQ ID NO: 99015 - DNA, 30 bp, Artificial Sequence
  Synthetic oligonucleotide
gataactcatcgccgttccacgtggccagg

SEQ ID NO: 99016 - DNA, 30 bp, Artificial Sequence
  Synthetic oligonucleotide
cgggaaatctgtattgcacgtagtgccagg

SEQ ID NO: 99017 - DNA, 30 bp, Artificial Sequence
  Synthetic oligonucleotide
tcactctaagtaattgcagaatcgtccagg

SEQ ID NO: 99018 - DNA, 30 bp, Artificial Sequence
  Synthetic oligonucleotide
agagcgagcagagaagtttgctaaagcagg

SEQ ID NO: 99019 - DNA, 30 bp, Artificial Sequence
  Synthetic oligonucleotide
gttatgaacttggtgtaagaagggagcagg

SEQ ID NO: 99020 - DNA, 30 bp, Artificial Sequence
  Synthetic oligonucleotide
aaaatctacccagggaacgaggaccgcagg

SEQ ID NO: 99021 - DNA, 30 bp, Artificial Sequence
  Synthetic oligonucleotide
cgatacctcaatcaataagcgtatcgcagg

SEQ ID NO: 99022 - DNA, 30 bp, Artificial Sequence
  Synthetic oligonucleotide
ggttacgtctagaaccaataatgaggcagg

SEQ ID NO: 99023 - DNA, 30 bp, Artificial Sequence
  Synthetic oligonucleotide
gtattaacagcaagctcaaagcgcggcagg

SEQ ID NO: 99024 - DNA, 30 bp, Artificial Sequence
  Synthetic oligonucleotide
agcgactctacgtactacgggagtggcagg

SEQ ID NO: 99025 - DNA, 30 bp, Artificial Sequence
  Synthetic oligonucleotide
tcacttaaatcataccgcgtgcactgcagg

SEQ ID NO: 99026 - DNA, 30 bp, Artificial Sequence
  Synthetic oligonucleotide
cgtcgtaaagcgagtaggttggattgcagg

SEQ ID NO: 99027 - DNA, 30 bp, Artificial Sequence
  Synthetic oligonucleotide
tgctccactgaaaagactaacgaaatcagg

SEQ ID NO: 99028 - DNA, 30 bp, Artificial Sequence
  Synthetic oligonucleotide
ttcgtaggtcctctatccatgcccatcagg

SEQ ID NO: 99029 - DNA, 30 bp, Artificial Sequence
  Synthetic oligonucleotide
ctaacgggacgggggtatacctccatcagg

SEQ ID NO: 99030 - DNA, 30 bp, Artificial Sequence
  Synthetic oligonucleotide
actgtcaactcctagtcttatgggatcagg

SEQ ID NO: 99031 - DNA, 30 bp, Artificial Sequence
  Synthetic oligonucleotide
ttgtgcacatcaggcttcgggagtatcagg

SEQ ID NO: 99032 - DNA, 30 bp, Artificial Sequence
  Synthetic oligonucleotide
cggctggggcaacctagtgataggctcagg

SEQ ID NO: 99033 - DNA, 30 bp, Artificial Sequence
  Synthetic oligonucleotide
ggtcagtctgcgagtgcctccccagtcagg

SEQ ID NO: 99034 - DNA, 30 bp, Artificial Sequence
  Synthetic oligonucleotide
agatcgtaagtgcgctccgtgcgagtcagg

SEQ ID NO: 99035 - DNA, 30 bp, Artificial Sequence
  Synthetic oligonucleotide
cggaccctgtcagtaagctggatcgtcagg

SEQ ID NO: 99036 - DNA, 30 bp, Artificial Sequence
  Synthetic oligonucleotide
taccgttccggactatggtgctctgtcagg

SEQ ID NO: 99037 - DNA, 30 bp, Artificial Sequence
  Synthetic oligonucleotide
tgtcaaaatgggcacgtgaattgtgtcagg

SEQ ID NO: 99038 - DNA, 30 bp, Artificial Sequence
  Synthetic oligonucleotide
catataccgcccatcgccagtctaaagagg

SEQ ID NO: 99039 - DNA, 30 bp, Artificial Sequence
  Synthetic oligonucleotide
gtcagatagtatgagaagttcctcaagagg

SEQ ID NO: 99040 - DNA, 30 bp, Artificial Sequence
  Synthetic oligonucleotide
tgcagataaagccacgttcaaatgaagagg

SEQ ID NO: 99041 - DNA, 30 bp, Artificial Sequence
  Synthetic oligonucleotide
taaagggccatcgacaaccatggtaagagg

SEQ ID NO: 99042 - DNA, 30 bp, Artificial Sequence
  Synthetic oligonucleotide
cagaccgaagggcgttgttaaaatcagagg

SEQ ID NO: 99043 - DNA, 30 bp, Artificial Sequence
  Synthetic oligonucleotide
tcgcgagtcgttaacgcttagccctagagg

SEQ ID NO: 99044 - DNA, 30 bp, Artificial Sequence
  Synthetic oligonucleotide
gtaagttcgtaacgacgagaccattagagg

SEQ ID NO: 99045 - DNA, 30 bp, Artificial Sequence
  Synthetic oligonucleotide
attagcgttgtatcgcatcaagaaacgagg

SEQ ID NO: 99046 - DNA, 30 bp, Artificial Sequence
  Synthetic oligonucleotide
agaacttgcggctcaactagagacacgagg

SEQ ID NO: 99047 - DNA, 30 bp, Artificial Sequence
  Synthetic oligonucleotide
cccacgttcccgaattttatgcccacgagg

SEQ ID NO: 99048 - DNA, 31 bp, Artificial Sequence
  Synthetic oligonucleotide
ggcaggaaagtgaatgggtatttccacgagg

SEQ ID NO: 99049 - DNA, 30 bp, Artificial Sequence
  Synthetic oligonucleotide
gtaggtatacacggggtagggcggacgagg

SEQ ID NO: 99050 - DNA, 30 bp, Artificial Sequence
  Synthetic oligonucleotide
ccagtcagtcgcgacatggaaaatacgagg

SEQ ID NO: 99051 - DNA, 30 bp, Artificial Sequence
  Synthetic oligonucleotide
ggggaggcaaccacggatagcagtacgagg

SEQ ID NO: 99052 - DNA, 30 bp, Artificial Sequence
  Synthetic oligonucleotide
agaaagttttgcccatgccttgaaccgagg

SEQ ID NO: 99053 - DNA, 30 bp, Artificial Sequence
  Synthetic oligonucleotide
ttgagcagattggaacctgcgagcccgagg

SEQ ID NO: 99054 - DNA, 30 bp, Artificial Sequence
  Synthetic oligonucleotide
cagcaggggggaaatcacccagggccgagg

SEQ ID NO: 99055 - DNA, 30 bp, Artificial Sequence
  Synthetic oligonucleotide
ttggctactataaaagggcgcggagcgagg

SEQ ID NO: 99056 - DNA, 31 bp, Artificial Sequence
  Synthetic oligonucleotide
cagatgttacagaaaattagtactagcgagg

SEQ ID NO: 99057 - DNA, 30 bp, Artificial Sequence
  Synthetic oligonucleotide
ccggtcaaacatgacatcgagttagcgagg

SEQ ID NO: 99058 - DNA, 30 bp, Artificial Sequence
  Synthetic oligonucleotide
acggtgtgcaaagcggtggatggtgcgagg

SEQ ID NO: 99059 - DNA, 30 bp, Artificial Sequence
  Synthetic oligonucleotide
ttcatgcccgttatcgagtaatcatcgagg

SEQ ID NO: 99060 - DNA, 30 bp, Artificial Sequence
  Synthetic oligonucleotide
ttagccccaaccatcagcgtgacaaggagg

SEQ ID NO: 99061 - DNA, 30 bp, Artificial Sequence
  Synthetic oligonucleotide
catggtcggttattgtctgacgagaggagg

SEQ ID NO: 99062 - DNA, 30 bp, Artificial Sequence
  Synthetic oligonucleotide
acgccgccaagatttgacgggtggaggagg

SEQ ID NO: 99063 - DNA, 30 bp, Artificial Sequence
  Synthetic oligonucleotide
cctaagaggaaagaaatcgttactaggagg

SEQ ID NO: 99064 - DNA, 30 bp, Artificial Sequence
  Synthetic oligonucleotide
acaagcggctgtacgatgggtgctaggagg

SEQ ID NO: 99065 - DNA, 30 bp, Artificial Sequence
  Synthetic oligonucleotide
gtcaaagttcgcgatcaaatcgaccggagg

SEQ ID NO: 99066 - DNA, 30 bp, Artificial Sequence
  Synthetic oligonucleotide
ttgtctagcgtagccgttctgatccggagg

SEQ ID NO: 99067 - DNA, 30 bp, Artificial Sequence
  Synthetic oligonucleotide
cgacgaggtacgtgaagaacggggcggagg

SEQ ID NO: 99068 - DNA, 30 bp, Artificial Sequence
  Synthetic oligonucleotide
ccgccaccagggacaaaggccatgcggagg

SEQ ID NO: 99069 - DNA, 30 bp, Artificial Sequence
  Synthetic oligonucleotide
aggctattgtggttcacgtagatgcggagg

SEQ ID NO: 99070 - DNA, 30 bp, Artificial Sequence
  Synthetic oligonucleotide
cgagtcggtggagctcacgagcacgggagg

SEQ ID NO: 99071 - DNA, 30 bp, Artificial Sequence
  Synthetic oligonucleotide
ataagacagtctctataaggccgcgggagg

SEQ ID NO: 99072 - DNA, 30 bp, Artificial Sequence
  Synthetic oligonucleotide
tgaaatgattcggtttaagaaggcgggagg

SEQ ID NO: 99073 - DNA, 30 bp, Artificial Sequence
  Synthetic oligonucleotide
aatcgcagaccgtggtcaagctgcgggagg

SEQ ID NO: 99074 - DNA, 30 bp, Artificial Sequence
  Synthetic oligonucleotide
aagcctaagagtgtggccataatcgggagg

SEQ ID NO: 99075 - DNA, 30 bp, Artificial Sequence
  Synthetic oligonucleotide
accaatacgcgaggccaacatcatgggagg

SEQ ID NO: 99076 - DNA, 30 bp, Artificial Sequence
  Synthetic oligonucleotide
caggcagtagctgcggcctaaatatggagg

SEQ ID NO: 99077 - DNA, 30 bp, Artificial Sequence
  Synthetic oligonucleotide
gttgaattatatgaatccatgaactggagg

SEQ ID NO: 99078 - DNA, 30 bp, Artificial Sequence
  Synthetic oligonucleotide
aactacgctcaagcgctcattttgtggagg

SEQ ID NO: 99079 - DNA, 30 bp, Artificial Sequence
  Synthetic oligonucleotide
acaaattgctaggattaactccgcatgagg

SEQ ID NO: 99080 - DNA, 30 bp, Artificial Sequence
  Synthetic oligonucleotide
tggagcataaatcattccgtgtggatgagg

SEQ ID NO: 99081 - DNA, 30 bp, Artificial Sequence
  Synthetic oligonucleotide
gccgtatcataccgatggcaaaatatgagg

SEQ ID NO: 99082 - DNA, 30 bp, Artificial Sequence
  Synthetic oligonucleotide
cctggcctggaactatcaagtatgctgagg

SEQ ID NO: 99083 - DNA, 30 bp, Artificial Sequence
  Synthetic oligonucleotide
aggcctttgtagaaggtgacaagagtgagg

SEQ ID NO: 99084 - DNA, 30 bp, Artificial Sequence
  Synthetic oligonucleotide
aagacgtagggggtggcctaagtattgagg

SEQ ID NO: 99085 - DNA, 30 bp, Artificial Sequence
  Synthetic oligonucleotide
gcaacggtgaaagagaattcgctacatagg

SEQ ID NO: 99086 - DNA, 30 bp, Artificial Sequence
  Synthetic oligonucleotide
tacgtgccataagagttaaagcgtcatagg

SEQ ID NO: 99087 - DNA, 30 bp, Artificial Sequence
  Synthetic oligonucleotide
cccagggtagtcgccatgctaaaagatagg

SEQ ID NO: 99088 - DNA, 30 bp, Artificial Sequence
  Synthetic oligonucleotide
gccatcgatcctaaaacaattaacgatagg

SEQ ID NO: 99089 - DNA, 30 bp, Artificial Sequence
  Synthetic oligonucleotide
acagatcaccggcaaaacggggacactagg

SEQ ID NO: 99090 - DNA, 30 bp, Artificial Sequence
  Synthetic oligonucleotide
cgtgaacacatgtggcactcgtttcctagg

SEQ ID NO: 99091 - DNA, 31 bp, Artificial Sequence
  Synthetic oligonucleotide
gcaaagcatctgtaaaagttctaatgctagg

SEQ ID NO: 99092 - DNA, 30 bp, Artificial Sequence
  Synthetic oligonucleotide
tcagtatgttgataacaacgccgttctagg

SEQ ID NO: 99093 - DNA, 30 bp, Artificial Sequence
  Synthetic oligonucleotide
gagggcagtagcctgtgtggtacgggtagg

SEQ ID NO: 99094 - DNA, 30 bp, Artificial Sequence
  Synthetic oligonucleotide
gaccgggattcgtaagttctaaggggtagg

SEQ ID NO: 99095 - DNA, 30 bp, Artificial Sequence
  Synthetic oligonucleotide
tggccagtcaaatggaactacgaatgtagg

SEQ ID NO: 99096 - DNA, 30 bp, Artificial Sequence
  Synthetic oligonucleotide
ggctaaaaagcgggcggaacgcactgtagg

SEQ ID NO: 99097 - DNA, 30 bp, Artificial Sequence
  Synthetic oligonucleotide
aagcgaaacatgatccagtacgcctgtagg

SEQ ID NO: 99098 - DNA, 30 bp, Artificial Sequence
  Synthetic oligonucleotide
tgtatatgacggtgttccgaaggctgtagg

SEQ ID NO: 99099 - DNA, 30 bp, Artificial Sequence
  Synthetic oligonucleotide
agaagcataagagttgccttagagtgtagg

SEQ ID NO: 99100 - DNA, 30 bp, Artificial Sequence
  Synthetic oligonucleotide
gcgttgaagcaagccgattgggagtgtagg

SEQ ID NO: 99101 - DNA, 30 bp, Artificial Sequence
  Synthetic oligonucleotide
aggaatttgcagcgtagtacgaattgtagg

SEQ ID NO: 99102 - DNA, 30 bp, Artificial Sequence
  Synthetic oligonucleotide
ccaggaaaatctgaatataccccaattagg

SEQ ID NO: 99103 - DNA, 30 bp, Artificial Sequence
  Synthetic oligonucleotide
aagcaccgagcatgagtatcggggattagg

SEQ ID NO: 99104 - DNA, 30 bp, Artificial Sequence
  Synthetic oligonucleotide
cggcagatcggaccaagtcacggacttagg

SEQ ID NO: 99105 - DNA, 30 bp, Artificial Sequence
  Synthetic oligonucleotide
tgatataagagtagcctcatgctccttagg

SEQ ID NO: 99106 - DNA, 30 bp, Artificial Sequence
  Synthetic oligonucleotide
acgtcatcggactgggcatatcatcttagg

SEQ ID NO: 99107 - DNA, 30 bp, Artificial Sequence
  Synthetic oligonucleotide
ccgtcgtttaagttcaaaaccggagttagg

SEQ ID NO: 99108 - DNA, 30 bp, Artificial Sequence
  Synthetic oligonucleotide
agttagaagacgaagacttatatagttagg

SEQ ID NO: 99109 - DNA, 30 bp, Artificial Sequence
  Synthetic oligonucleotide
gcacaactcttgaacacactaatcgttagg

SEQ ID NO: 99110 - DNA, 30 bp, Artificial Sequence
  Synthetic oligonucleotide
ttacgccttagactggacgagttatttagg

SEQ ID NO: 99111 - DNA, 30 bp, Artificial Sequence
  Synthetic oligonucleotide
gcacgtataggatatcgagctatgtttagg

SEQ ID NO: 99112 - DNA, 30 bp, Artificial Sequence
  Synthetic oligonucleotide
gtcgagtaatcatctccccgactttttagg

SEQ ID NO: 99113 - DNA, 30 bp, Artificial Sequence
  Synthetic oligonucleotide
atgccccagcgcatcccggctacaaaacgg

SEQ ID NO: 99114 - DNA, 29 bp, Artificial Sequence
  Synthetic oligonucleotide
agtagagggggggacgcctctcgaaacgg

SEQ ID NO: 99115 - DNA, 30 bp, Artificial Sequence
  Synthetic oligonucleotide
tggacttgaggtgccatgctagggaaacgg

SEQ ID NO: 99116 - DNA, 30 bp, Artificial Sequence
  Synthetic oligonucleotide
tctatcagctactgtcggtcaaaacaacgg

SEQ ID NO: 99117 - DNA, 30 bp, Artificial Sequence
  Synthetic oligonucleotide
cgcattaacaaccgatcctaagaacaacgg

SEQ ID NO: 99118 - DNA, 30 bp, Artificial Sequence
  Synthetic oligonucleotide
gcgggtcacaggagaaagtacatgcaacgg

SEQ ID NO: 99119 - DNA, 30 bp, Artificial Sequence
  Synthetic oligonucleotide
ggagaccttctattgtacgatagggaacgg

SEQ ID NO: 99120 - DNA, 30 bp, Artificial Sequence
  Synthetic oligonucleotide
aactggtaatggtgagagaaactggaacgg

SEQ ID NO: 99121 - DNA, 30 bp, Artificial Sequence
  Synthetic oligonucleotide
aaaccaaacgccgaggacgatcttgaacgg

SEQ ID NO: 99122 - DNA, 30 bp, Artificial Sequence
  Synthetic oligonucleotide
cctacatcagccaagaacacgtcataacgg

SEQ ID NO: 99123 - DNA, 30 bp, Artificial Sequence
  Synthetic oligonucleotide
cggaagtaaagcggggggctgccaacacgg

SEQ ID NO: 99124 - DNA, 30 bp, Artificial Sequence
  Synthetic oligonucleotide
ccgtcgaacaaagcaccaagaactacacgg

SEQ ID NO: 99125 - DNA, 30 bp, Artificial Sequence
  Synthetic oligonucleotide
tgtgcgaggagcacgtacttacaaccacgg

SEQ ID NO: 99126 - DNA, 30 bp, Artificial Sequence
  Synthetic oligonucleotide
acggttagacgcggtataaacattagacgg

SEQ ID NO: 99127 - DNA, 30 bp, Artificial Sequence
  Synthetic oligonucleotide
tcgatgaaatcaacccagatggttagacgg

SEQ ID NO: 99128 - DNA, 30 bp, Artificial Sequence
  Synthetic oligonucleotide
agtaagtggtgacaccccatgaaccgacgg

SEQ ID NO: 99129 - DNA, 30 bp, Artificial Sequence
  Synthetic oligonucleotide
agacctccgtggccgagtagcgaaggacgg

SEQ ID NO: 99130 - DNA, 30 bp, Artificial Sequence
  Synthetic oligonucleotide
cgatcatgccccaagactccggggggacgg

SEQ ID NO: 99131 - DNA, 30 bp, Artificial Sequence
  Synthetic oligonucleotide
tcgaatactggaatgttaaaataatgacgg

SEQ ID NO: 99132 - DNA, 30 bp, Artificial Sequence
  Synthetic oligonucleotide
gacaaaacgttgggcaagtagagctgacgg

SEQ ID NO: 99133 - DNA, 30 bp, Artificial Sequence
  Synthetic oligonucleotide
gcaaaatggaaacaaaaggtagtttgacgg

SEQ ID NO: 99134 - DNA, 30 bp, Artificial Sequence
  Synthetic oligonucleotide
tgcgaatctattcgtagacggctgatacgg

SEQ ID NO: 99135 - DNA, 30 bp, Artificial Sequence
  Synthetic oligonucleotide
catagcatgttcaaatgcgctaccctacgg

SEQ ID NO: 99136 - DNA, 30 bp, Artificial Sequence
  Synthetic oligonucleotide
tacgtgctagatatggcacacaagctacgg

SEQ ID NO: 99137 - DNA, 30 bp, Artificial Sequence
  Synthetic oligonucleotide
acatgtggtgcaggcgatgtcaccgtacgg

SEQ ID NO: 99138 - DNA, 30 bp, Artificial Sequence
  Synthetic oligonucleotide
ggggactattgatagcctacgaaggtacgg

SEQ ID NO: 99139 - DNA, 30 bp, Artificial Sequence
  Synthetic oligonucleotide
gacagtttgctcaaggtgactagtgtacgg

SEQ ID NO: 99140 - DNA, 30 bp, Artificial Sequence
  Synthetic oligonucleotide
ttgagtggaagtttttaatagcacaaccgg

SEQ ID NO: 99141 - DNA, 30 bp, Artificial Sequence
  Synthetic oligonucleotide
aggtcaattttgtgtgattaagagaaccgg

SEQ ID NO: 99142 - DNA, 30 bp, Artificial Sequence
  Synthetic oligonucleotide
gtcagtcgccggacgtttgaaaggaaccgg

SEQ ID NO: 99143 - DNA, 30 bp, Artificial Sequence
  Synthetic oligonucleotide
gcagaagaattgtacgttgtaacacaccgg

SEQ ID NO: 99144 - DNA, 30 bp, Artificial Sequence
  Synthetic oligonucleotide
ggggattagcataccatcaaatcccaccgg

SEQ ID NO: 99145 - DNA, 30 bp, Artificial Sequence
  Synthetic oligonucleotide
cgcgctaactgcatcgtactgtgaacccgg

SEQ ID NO: 99146 - DNA, 30 bp, Artificial Sequence
  Synthetic oligonucleotide
ataaaaacagaatgtttgcgtgccacccgg

SEQ ID NO: 99147 - DNA, 30 bp, Artificial Sequence
  Synthetic oligonucleotide
tcaaagcagtaaaactattatttcccccgg

SEQ ID NO: 99148 - DNA, 30 bp, Artificial Sequence
  Synthetic oligonucleotide
aggaaattgtcaatgttcgactaatcccgg

SEQ ID NO: 99149 - DNA, 30 bp, Artificial Sequence
  Synthetic oligonucleotide
tcaactgtgcaacataatactgtatcccgg

SEQ ID NO: 99150 - DNA, 30 bp, Artificial Sequence
  Synthetic oligonucleotide
aacggtgagcgggaaggaccgccacgccgg

SEQ ID NO: 99151 - DNA, 30 bp, Artificial Sequence
  Synthetic oligonucleotide
gcattaagtcgagttgctaaagcacgccgg

SEQ ID NO: 99152 - DNA, 30 bp, Artificial Sequence
  Synthetic oligonucleotide
tccagaagcaagtcctgcacatctcgccgg

SEQ ID NO: 99153 - DNA, 30 bp, Artificial Sequence
  Synthetic oligonucleotide
cgagtccgggctgactgccgctaaggccgg

SEQ ID NO: 99154 - DNA, 30 bp, Artificial Sequence
  Synthetic oligonucleotide
gaggtggatgaaattcgaaccctcggccgg

SEQ ID NO: 99155 - DNA, 30 bp, Artificial Sequence
  Synthetic oligonucleotide
tcgaggccataacgcgcgtcacagggccgg

SEQ ID NO: 99156 - DNA, 30 bp, Artificial Sequence
  Synthetic oligonucleotide
tgattggctaatatatctacaacgggccgg

SEQ ID NO: 99157 - DNA, 30 bp, Artificial Sequence
  Synthetic oligonucleotide
cgacgaatcaagcatagagaaaggggccgg

SEQ ID NO: 99158 - DNA, 30 bp, Artificial Sequence
  Synthetic oligonucleotide
cggtgtttgcaagtaccagacaagtgccgg

SEQ ID NO: 99159 - DNA, 30 bp, Artificial Sequence
  Synthetic oligonucleotide
tgcgatatgccattcgtaggccgcatccgg

SEQ ID NO: 99160 - DNA, 30 bp, Artificial Sequence
  Synthetic oligonucleotide
gccttgacggtcgatccaagagagatccgg

SEQ ID NO: 99161 - DNA, 30 bp, Artificial Sequence
  Synthetic oligonucleotide
cggtcacctcgcaagccgggaacgatccgg

SEQ ID NO: 99162 - DNA, 30 bp, Artificial Sequence
  Synthetic oligonucleotide
acatcgagaacaaagtcgtgtggggtccgg

SEQ ID NO: 99163 - DNA, 30 bp, Artificial Sequence
  Synthetic oligonucleotide
agatgctagcaactataatctcaattccgg

SEQ ID NO: 99164 - DNA, 30 bp, Artificial Sequence
  Synthetic oligonucleotide
agtcaggtcgggctttaagatgaattccgg

SEQ ID NO: 99165 - DNA, 30 bp, Artificial Sequence
  Synthetic oligonucleotide
cacgagacacctcttcttaccaacttccgg

SEQ ID NO: 99166 - DNA, 30 bp, Artificial Sequence
  Synthetic oligonucleotide
tggacactagatgtaccgagttgtttccgg

SEQ ID NO: 99167 - DNA, 30 bp, Artificial Sequence
  Synthetic oligonucleotide
gttggaacgggtagtgcgtacgcaaagcgg

SEQ ID NO: 99168 - DNA, 28 bp, Artificial Sequence
  Synthetic oligonucleotide
tgagacgtgccataaagaatcaaagcgg

SEQ ID NO: 99169 - DNA, 31 bp, Artificial Sequence
  Synthetic oligonucleotide
gacgtagattaaggcgtacgcttgaaagcgg

SEQ ID NO: 99170 - DNA, 30 bp, Artificial Sequence
  Synthetic oligonucleotide
tcagggactggctgttgcacgcataagcgg

SEQ ID NO: 99171 - DNA, 30 bp, Artificial Sequence
  Synthetic oligonucleotide
ctctggacaaaaactatattaagagagcgg

SEQ ID NO: 99172 - DNA, 30 bp, Artificial Sequence
  Synthetic oligonucleotide
atttcaataagtcgcggagaacgagagcgg

SEQ ID NO: 99173 - DNA, 30 bp, Artificial Sequence
  Synthetic oligonucleotide
cgtctatctctgaagcacatagtggagcgg

SEQ ID NO: 99174 - DNA, 30 bp, Artificial Sequence
  Synthetic oligonucleotide
atgtcaaagcaacagcagattaagtagcgg

SEQ ID NO: 99175 - DNA, 30 bp, Artificial Sequence
  Synthetic oligonucleotide
ggaatagaataattgagtaaagcttagcgg

SEQ ID NO: 99176 - DNA, 30 bp, Artificial Sequence
  Synthetic oligonucleotide
cgtggtgtacttagtcgtaccataacgcgg

SEQ ID NO: 99177 - DNA, 30 bp, Artificial Sequence
  Synthetic oligonucleotide
gtgatatcattggcaatggtggtagcgcgg

SEQ ID NO: 99178 - DNA, 30 bp, Artificial Sequence
  Synthetic oligonucleotide
gagtcaaacgcgtcaagagtggcatcgcgg

SEQ ID NO: 99179 - DNA, 30 bp, Artificial Sequence
  Synthetic oligonucleotide
gaactgtcaaatgcatgtggcggatcgcgg

SEQ ID NO: 99180 - DNA, 31 bp, Artificial Sequence
  Synthetic oligonucleotide
agagggacgtcgtgatggtcacttatcgcgg

SEQ ID NO: 99181 - DNA, 30 bp, Artificial Sequence
  Synthetic oligonucleotide
gcggatgtttttgggaggtatgcctcgcgg

SEQ ID NO: 99182 - DNA, 30 bp, Artificial Sequence
  Synthetic oligonucleotide
agaacacaagcgtcacacaagctaaggcgg

SEQ ID NO: 99183 - DNA, 30 bp, Artificial Sequence
  Synthetic oligonucleotide
gccatgcaaacaattctaaataacaggcgg

SEQ ID NO: 99184 - DNA, 30 bp, Artificial Sequence
  Synthetic oligonucleotide
cataaaacatactaaggctgttggcggcgg

SEQ ID NO: 99185 - DNA, 30 bp, Artificial Sequence
  Synthetic oligonucleotide
tcgatgtgagactgtttcattgtcgggcgg

SEQ ID NO: 99186 - DNA, 30 bp, Artificial Sequence
  Synthetic oligonucleotide
cgcttgcgtgaaagacctttaggttggcgg

SEQ ID NO: 99187 - DNA, 30 bp, Artificial Sequence
  Synthetic oligonucleotide
acctgtaatgtctgctgggatggcatgcgg

SEQ ID NO: 99188 - DNA, 30 bp, Artificial Sequence
  Synthetic oligonucleotide
aagcggaacgagcgggttatgtccctgcgg

SEQ ID NO: 99189 - DNA, 30 bp, Artificial Sequence
  Synthetic oligonucleotide
acctaagcactatatggcagtcttctgcgg

SEQ ID NO: 99190 - DNA, 30 bp, Artificial Sequence
  Synthetic oligonucleotide
cacatgaaagcgaagcgtccccgtgtgcgg

SEQ ID NO: 99191 - DNA, 30 bp, Artificial Sequence
  Synthetic oligonucleotide
tacggtcgtagtgaagtcggagggaatcgg

SEQ ID NO: 99192 - DNA, 30 bp, Artificial Sequence
  Synthetic oligonucleotide
aagttccaatgaacaagtttcaataatcgg

SEQ ID NO: 99193 - DNA, 30 bp, Artificial Sequence
  Synthetic oligonucleotide
tacgcgtattgtcatgaaggaacacatcgg

SEQ ID NO: 99194 - DNA, 30 bp, Artificial Sequence
  Synthetic oligonucleotide
aagccttgactgtaaaataagtatcatcgg

SEQ ID NO: 99195 - DNA, 30 bp, Artificial Sequence
  Synthetic oligonucleotide
tctcatttagtgcgtacccgtaaggatcgg

SEQ ID NO: 99196 - DNA, 30 bp, Artificial Sequence
  Synthetic oligonucleotide
cacgggtccctgcgaatgcatggggatcgg

SEQ ID NO: 99197 - DNA, 30 bp, Artificial Sequence
  Synthetic oligonucleotide
cacgatagggtaagggtgaagggatatcgg

SEQ ID NO: 99198 - DNA, 30 bp, Artificial Sequence
  Synthetic oligonucleotide
gcagaagtcaagtgcttagccctatatcgg

SEQ ID NO: 99199 - DNA, 30 bp, Artificial Sequence
  Synthetic oligonucleotide
gggggtacagggtatgatgttctatatcgg

SEQ ID NO: 99200 - DNA, 30 bp, Artificial Sequence
  Synthetic oligonucleotide
tcggcttcactttgtgcaacctggtatcgg

SEQ ID NO: 99201 - DNA, 30 bp, Artificial Sequence
  Synthetic oligonucleotide
gcgagtctcagggccagttcacgaactcgg

SEQ ID NO: 99202 - DNA, 30 bp, Artificial Sequence
  Synthetic oligonucleotide
acaaaaagcaggatgagtgaggccactcgg

SEQ ID NO: 99203 - DNA, 30 bp, Artificial Sequence
  Synthetic oligonucleotide
tggttaccgatcctgttacacctcactcgg

SEQ ID NO: 99204 - DNA, 30 bp, Artificial Sequence
  Synthetic oligonucleotide
cggcacaattagcaggtttgtcaacctcgg

SEQ ID NO: 99205 - DNA, 30 bp, Artificial Sequence
  Synthetic oligonucleotide
gagactaggttcagaatacaatgacctcgg

SEQ ID NO: 99206 - DNA, 30 bp, Artificial Sequence
  Synthetic oligonucleotide
agctacaatggcatagacagtgagcctcgg

SEQ ID NO: 99207 - DNA, 30 bp, Artificial Sequence
  Synthetic oligonucleotide
ttaggaaaccaagactgaactctgcctcgg

SEQ ID NO: 99208 - DNA, 30 bp, Artificial Sequence
  Synthetic oligonucleotide
ggtggcatatctggtactctgcgatctcgg

SEQ ID NO: 99209 - DNA, 30 bp, Artificial Sequence
  Synthetic oligonucleotide
gcaaaatgtcagttagccacacacagtcgg

SEQ ID NO: 99210 - DNA, 30 bp, Artificial Sequence
  Synthetic oligonucleotide
cgaggtccgaaagttaccgaggagagtcgg

SEQ ID NO: 99211 - DNA, 30 bp, Artificial Sequence
  Synthetic oligonucleotide
gccttaactagtaaacgcggaaaaggtcgg

SEQ ID NO: 99212 - DNA, 30 bp, Artificial Sequence
  Synthetic oligonucleotide
ggaacatccagttaaatgcaggagattcgg

SEQ ID NO: 99213 - DNA, 30 bp, Artificial Sequence
  Synthetic oligonucleotide
tccgtagccgtcggtatcaacttgattcgg

SEQ ID NO: 99214 - DNA, 30 bp, Artificial Sequence
  Synthetic oligonucleotide
caggcgggataagtggatcaagctattcgg

SEQ ID NO: 99215 - DNA, 30 bp, Artificial Sequence
  Synthetic oligonucleotide
atcgcataagtgagcaagattccacttcgg

SEQ ID NO: 99216 - DNA, 30 bp, Artificial Sequence
  Synthetic oligonucleotide
actgtgagcggaagactaaggggacttcgg

SEQ ID NO: 99217 - DNA, 30 bp, Artificial Sequence
  Synthetic oligonucleotide
acactttgtaaggcatggtaaaactttcgg

SEQ ID NO: 99218 - DNA, 30 bp, Artificial Sequence
  Synthetic oligonucleotide
cattaagagcaaaaaagaaacccgtttcgg

SEQ ID NO: 99219 - DNA, 30 bp, Artificial Sequence
  Synthetic oligonucleotide
tcgttataatcctaaataggaagaaaaggg

SEQ ID NO: 99220 - DNA, 30 bp, Artificial Sequence
  Synthetic oligonucleotide
tactcaagaaacaggttagcacgcaaaggg

SEQ ID NO: 99221 - DNA, 30 bp, Artificial Sequence
  Synthetic oligonucleotide
attatctgcagcgtatggcaagtcaaaggg

SEQ ID NO: 99222 - DNA, 30 bp, Artificial Sequence
  Synthetic oligonucleotide
ctagcccacattgctagatcaggtaaaggg

SEQ ID NO: 99223 - DNA, 30 bp, Artificial Sequence
  Synthetic oligonucleotide
aaacatgggagggctcaacgaaaccaaggg

SEQ ID NO: 99224 - DNA, 30 bp, Artificial Sequence
  Synthetic oligonucleotide
ggcacacttatcttaacttatccccaaggg

SEQ ID NO: 99225 - DNA, 30 bp, Artificial Sequence
  Synthetic oligonucleotide
gtgatgctacggaggatgttgtcccaaggg

SEQ ID NO: 99226 - DNA, 30 bp, Artificial Sequence
  Synthetic oligonucleotide
tcgcggcactaaacctatatcactcaaggg

SEQ ID NO: 99227 - DNA, 30 bp, Artificial Sequence
  Synthetic oligonucleotide
ccatctcaggcctaccgaacgacagaaggg

SEQ ID NO: 99228 - DNA, 30 bp, Artificial Sequence
  Synthetic oligonucleotide
agtgtggagcattgcatccaaccagaaggg

SEQ ID NO: 99229 - DNA, 30 bp, Artificial Sequence
  Synthetic oligonucleotide
aaagaaagttgttgaataagaatagaaggg

SEQ ID NO: 99230 - DNA, 30 bp, Artificial Sequence
  Synthetic oligonucleotide
ttcgaccggcaaaacacgcgtctggaaggg

SEQ ID NO: 99231 - DNA, 30 bp, Artificial Sequence
  Synthetic oligonucleotide
ctacatactaaccaagttaagactgaaggg

SEQ ID NO: 99232 - DNA, 30 bp, Artificial Sequence
  Synthetic oligonucleotide
ctatgagagcgtaaactcacatgtgaaggg

SEQ ID NO: 99233 - DNA, 30 bp, Artificial Sequence
  Synthetic oligonucleotide
tgtggtggggcgtgacgtgaggttgaaggg

SEQ ID NO: 99234 - DNA, 30 bp, Artificial Sequence
  Synthetic oligonucleotide
tatagagattgctcagcgagagaataaggg

SEQ ID NO: 99235 - DNA, 30 bp, Artificial Sequence
  Synthetic oligonucleotide
cccaagctggactcgagtctattataaggg

SEQ ID NO: 99236 - DNA, 30 bp, Artificial Sequence
  Synthetic oligonucleotide
aagatgcacggccagaccttcagctaaggg

SEQ ID NO: 99237 - DNA, 30 bp, Artificial Sequence
  Synthetic oligonucleotide
gcacacgaatcaaccctggattgctaaggg

SEQ ID NO: 99238 - DNA, 30 bp, Artificial Sequence
  Synthetic oligonucleotide
acaaacggcgtccaactgctactctaaggg

SEQ ID NO: 99239 - DNA, 30 bp, Artificial Sequence
  Synthetic oligonucleotide
ataccccccataagcaacctaccttaaggg

SEQ ID NO: 99240 - DNA, 30 bp, Artificial Sequence
  Synthetic oligonucleotide
ggaagccttataccgattctttgaacaggg

SEQ ID NO: 99241 - DNA, 30 bp, Artificial Sequence
  Synthetic oligonucleotide
ggggtccgctggttactggttagcacaggg

SEQ ID NO: 99242 - DNA, 30 bp, Artificial Sequence
  Synthetic oligonucleotide
tggagtgtaggcatgagtacccgtccaggg

SEQ ID NO: 99243 - DNA, 30 bp, Artificial Sequence
  Synthetic oligonucleotide
cagtctccaaccgtaatgcgtagtgcaggg

SEQ ID NO: 99244 - DNA, 30 bp, Artificial Sequence
  Synthetic oligonucleotide
ggcgaaagtattttggaggtcacatcaggg

SEQ ID NO: 99245 - DNA, 30 bp, Artificial Sequence
  Synthetic oligonucleotide
gcaattccgtcaagagatgtactgtcaggg

SEQ ID NO: 99246 - DNA, 30 bp, Artificial Sequence
  Synthetic oligonucleotide
tcacgtgggaccaataataagggaagaggg

SEQ ID NO: 99247 - DNA, 30 bp, Artificial Sequence
  Synthetic oligonucleotide
cctcccataagtgcagtgactaggagaggg

SEQ ID NO: 99248 - DNA, 30 bp, Artificial Sequence
  Synthetic oligonucleotide
cgccattcgaattttagtaccagtagaggg

SEQ ID NO: 99249 - DNA, 30 bp, Artificial Sequence
  Synthetic oligonucleotide
ggtcagggcttgccttgtgatgttagaggg

SEQ ID NO: 99250 - DNA, 30 bp, Artificial Sequence
  Synthetic oligonucleotide
acttcggccaaaaggggtcacaaccgaggg

SEQ ID NO: 99251 - DNA, 30 bp, Artificial Sequence
  Synthetic oligonucleotide
taacaaagttgtgcctgatggccgcgaggg

SEQ ID NO: 99252 - DNA, 30 bp, Artificial Sequence
  Synthetic oligonucleotide
gcgcggattttagcggattgctggcgaggg

SEQ ID NO: 99253 - DNA, 30 bp, Artificial Sequence
  Synthetic oligonucleotide
aacctaattggcggatctgggactcgaggg

SEQ ID NO: 99254 - DNA, 30 bp, Artificial Sequence
  Synthetic oligonucleotide
ggaatcaccgtaccagatctgcctcgaggg

SEQ ID NO: 99255 - DNA, 30 bp, Artificial Sequence
  Synthetic oligonucleotide
cgagcaaatggaatggggagagccggaggg

SEQ ID NO: 99256 - DNA, 30 bp, Artificial Sequence
  Synthetic oligonucleotide
tgaccaggtagcaaacaacgcggcggaggg

SEQ ID NO: 99257 - DNA, 30 bp, Artificial Sequence
  Synthetic oligonucleotide
accggtacacctgggggagtagggggaggg

SEQ ID NO: 99258 - DNA, 30 bp, Artificial Sequence
  Synthetic oligonucleotide
ttgataaattcctataaattacattgaggg

SEQ ID NO: 99259 - DNA, 30 bp, Artificial Sequence
  Synthetic oligonucleotide
gtacacttgaataaagcatggtaaataggg

SEQ ID NO: 99260 - DNA, 30 bp, Artificial Sequence
  Synthetic oligonucleotide
cgttggtattccgacatcaagcgcataggg

SEQ ID NO: 99261 - DNA, 30 bp, Artificial Sequence
  Synthetic oligonucleotide
tctcgcatcgttcgtatgctactgataggg

SEQ ID NO: 99262 - DNA, 30 bp, Artificial Sequence
  Synthetic oligonucleotide
agtaaagggacgtaccagaaagatataggg

SEQ ID NO: 99263 - DNA, 30 bp, Artificial Sequence
  Synthetic oligonucleotide
tgcaagtgcccgaccgaacggcttataggg

SEQ ID NO: 99264 - DNA, 30 bp, Artificial Sequence
  Synthetic oligonucleotide
gtacggttggactcactaaatatgctaggg

SEQ ID NO: 99265 - DNA, 30 bp, Artificial Sequence
  Synthetic oligonucleotide
tgccagaaatgggtttttaaaactctaggg

SEQ ID NO: 99266 - DNA, 30 bp, Artificial Sequence
  Synthetic oligonucleotide
tgaataccatgagacatcgaaccagtaggg

SEQ ID NO: 99267 - DNA, 30 bp, Artificial Sequence
  Synthetic oligonucleotide
gtccgcgataatttctgatatcgagtaggg

SEQ ID NO: 99268 - DNA, 30 bp, Artificial Sequence
  Synthetic oligonucleotide
gctagttgtccgcgctactgaattgtaggg

SEQ ID NO: 99269 - DNA, 30 bp, Artificial Sequence
  Synthetic oligonucleotide
ggcttgttcatagattcgtgtattgtaggg

SEQ ID NO: 99270 - DNA, 30 bp, Artificial Sequence
  Synthetic oligonucleotide
agcatagtgcctcagggcatagctaacggg

SEQ ID NO: 99271 - DNA, 30 bp, Artificial Sequence
  Synthetic oligonucleotide
catgcgtaatggtcttaaatatgccacggg

SEQ ID NO: 99272 - DNA, 30 bp, Artificial Sequence
  Synthetic oligonucleotide
cggacacacaagtgtcttattgccgacggg

SEQ ID NO: 99273 - DNA, 30 bp, Artificial Sequence
  Synthetic oligonucleotide
tgcgtacgacaatcggaccagctggacggg

SEQ ID NO: 99274 - DNA, 30 bp, Artificial Sequence
  Synthetic oligonucleotide
ctagtgacgaggatcttcgagtaatacggg

SEQ ID NO: 99275 - DNA, 30 bp, Artificial Sequence
  Synthetic oligonucleotide
atgaacagaattaccttcgatgcgtacggg

SEQ ID NO: 99276 - DNA, 30 bp, Artificial Sequence
  Synthetic oligonucleotide
ttcgcagcgacatgtagctgcaaccccggg

SEQ ID NO: 99277 - DNA, 30 bp, Artificial Sequence
  Synthetic oligonucleotide
tagctttacctaacgttatggttcgccggg

SEQ ID NO: 99278 - DNA, 30 bp, Artificial Sequence
  Synthetic oligonucleotide
ctcgattccgctgattgttgcgtgtccggg

SEQ ID NO: 99279 - DNA, 30 bp, Artificial Sequence
  Synthetic oligonucleotide
ttgtgatacgggtataattcgataagcggg

SEQ ID NO: 99280 - DNA, 30 bp, Artificial Sequence
  Synthetic oligonucleotide
acgtatcaaggcaattatcggtgtcgcggg

SEQ ID NO: 99281 - DNA, 30 bp, Artificial Sequence
  Synthetic oligonucleotide
gtagaagggcactcagggtagagaatcggg

SEQ ID NO: 99282 - DNA, 30 bp, Artificial Sequence
  Synthetic oligonucleotide
ctgcactgatgggcaggttgcaagatcggg

SEQ ID NO: 99283 - DNA, 30 bp, Artificial Sequence
  Synthetic oligonucleotide
gcaacctaggccatggaaggtacgatcggg

SEQ ID NO: 99284 - DNA, 30 bp, Artificial Sequence
  Synthetic oligonucleotide
tcgaagcgttacatccgttaagctatcggg

SEQ ID NO: 99285 - DNA, 30 bp, Artificial Sequence
  Synthetic oligonucleotide
ctctccgttggagtaggaggagaactcggg

SEQ ID NO: 99286 - DNA, 30 bp, Artificial Sequence
  Synthetic oligonucleotide
aaccgtcctccagtcgttaaggtactcggg

SEQ ID NO: 99287 - DNA, 30 bp, Artificial Sequence
  Synthetic oligonucleotide
gctggagggtagttatgttcccgcctcggg

SEQ ID NO: 99288 - DNA, 30 bp, Artificial Sequence
  Synthetic oligonucleotide
gcaataagaaaggggaactggtctctcggg

SEQ ID NO: 99289 - DNA, 30 bp, Artificial Sequence
  Synthetic oligonucleotide
actgcctcggccaaagggcgggtcaagggg

SEQ ID NO: 99290 - DNA, 30 bp, Artificial Sequence
  Synthetic oligonucleotide
aatgtcggtgggacaaggactgtcaagggg

SEQ ID NO: 99291 - DNA, 30 bp, Artificial Sequence
  Synthetic oligonucleotide
taaccacattgcctcggcatgaagaagggg

SEQ ID NO: 99292 - DNA, 30 bp, Artificial Sequence
  Synthetic oligonucleotide
ttacactcgtttggaagagaagcgaagggg

SEQ ID NO: 99293 - DNA, 30 bp, Artificial Sequence
  Synthetic oligonucleotide
caggcggccatattctccacaaataagggg

SEQ ID NO: 99294 - DNA, 30 bp, Artificial Sequence
  Synthetic oligonucleotide
cacaggggaggcaataggctgtaggagggg

SEQ ID NO: 99295 - DNA, 30 bp, Artificial Sequence
  Synthetic oligonucleotide
acaagtctatgcaaaggtgatagggagggg

SEQ ID NO: 99296 - DNA, 30 bp, Artificial Sequence
  Synthetic oligonucleotide
tgaggttatttgggttaaggaaaatagggg

SEQ ID NO: 99297 - DNA, 30 bp, Artificial Sequence
  Synthetic oligonucleotide
ctgtgactataccagtgtcgtatatagggg

SEQ ID NO: 99298 - DNA, 30 bp, Artificial Sequence
  Synthetic oligonucleotide
aagtgtgacgtagatgaatccggctagggg

SEQ ID NO: 99299 - DNA, 30 bp, Artificial Sequence
  Synthetic oligonucleotide
tcaatctaacccacgacaaagatttagggg

SEQ ID NO: 99300 - DNA, 30 bp, Artificial Sequence
  Synthetic oligonucleotide
tgataacggagagcggcagcagagacgggg

SEQ ID NO: 99301 - DNA, 30 bp, Artificial Sequence
  Synthetic oligonucleotide
tcagtgtatgctgatagttacatcccgggg

SEQ ID NO: 99302 - DNA, 30 bp, Artificial Sequence
  Synthetic oligonucleotide
gtgatagagccgaaagtagtgcatccgggg

SEQ ID NO: 99303 - DNA, 30 bp, Artificial Sequence
  Synthetic oligonucleotide
ggtatttccaagtgaacagtctaagcgggg

SEQ ID NO: 99304 - DNA, 30 bp, Artificial Sequence
  Synthetic oligonucleotide
ctgaactgtatagttgtgcgcatcgcgggg

SEQ ID NO: 99305 - DNA, 30 bp, Artificial Sequence
  Synthetic oligonucleotide
tcgatgtggcgactttgattgtcctcgggg

SEQ ID NO: 99306 - DNA, 30 bp, Artificial Sequence
  Synthetic oligonucleotide
gaaccacgattctaagatggatagtcgggg

SEQ ID NO: 99307 - DNA, 30 bp, Artificial Sequence
  Synthetic oligonucleotide
cttaattcgcgatagcaaaggaaaaggggg

SEQ ID NO: 99308 - DNA, 30 bp, Artificial Sequence
  Synthetic oligonucleotide
atagtacttagcttgagcgcacgtaggggg

SEQ ID NO: 99309 - DNA, 31 bp, Artificial Sequence
  Synthetic oligonucleotide
tcatagaagggaatgatcacaaccacggggg

SEQ ID NO: 99310 - DNA, 30 bp, Artificial Sequence
  Synthetic oligonucleotide
aggttcactggggcgtggtgcgggcggggg

SEQ ID NO: 99311 - DNA, 30 bp, Artificial Sequence
  Synthetic oligonucleotide
tgcaacgcgaaaaggaactacgctcggggg

SEQ ID NO: 99312 - DNA, 30 bp, Artificial Sequence
  Synthetic oligonucleotide
aagtagcataattacaaagggggagggggg

SEQ ID NO: 99313 - DNA, 30 bp, Artificial Sequence
  Synthetic oligonucleotide
gaaacgttcctcgaagcctaattagggggg

SEQ ID NO: 99314 - DNA, 30 bp, Artificial Sequence
  Synthetic oligonucleotide
gtaaggactgcgcagtaaggttcggggggg

SEQ ID NO: 99315 - DNA, 30 bp, Artificial Sequence
  Synthetic oligonucleotide
tgcgcgaaaatcggggcgcggagggggggg

SEQ ID NO: 99316 - DNA, 30 bp, Artificial Sequence
  Synthetic oligonucleotide
agtaccaactggggttggtcagaatggggg

SEQ ID NO: 99317 - DNA, 31 bp, Artificial Sequence
  Synthetic oligonucleotide
gtaccggttccgagccatcatagtgtggggg

SEQ ID NO: 99318 - DNA, 30 bp, Artificial Sequence
  Synthetic oligonucleotide
tgtagcatgtgatagccgtgaccttggggg

SEQ ID NO: 99319 - DNA, 29 bp, Artificial Sequence
  Synthetic oligonucleotide
gtgtaagttgattgttctgcgcgatgggg

SEQ ID NO: 99320 - DNA, 30 bp, Artificial Sequence
  Synthetic oligonucleotide
gcgatgtatgaattggagacaaatctgggg

SEQ ID NO: 99321 - DNA, 30 bp, Artificial Sequence
  Synthetic oligonucleotide
cactggtcggcaagggcattaggagtgggg

SEQ ID NO: 99322 - DNA, 30 bp, Artificial Sequence
  Synthetic oligonucleotide
gaactcgaaggacagccttaaactgtgggg

SEQ ID NO: 99323 - DNA, 30 bp, Artificial Sequence
  Synthetic oligonucleotide
tgatttgtaaactcgcgccacgtattgggg

SEQ ID NO: 99324 - DNA, 30 bp, Artificial Sequence
  Synthetic oligonucleotide
tgccgactaaaccggcagtatggtttgggg

SEQ ID NO: 99325 - DNA, 30 bp, Artificial Sequence
  Synthetic oligonucleotide
ggataatgcacgaatatatattgcaatggg

SEQ ID NO: 99326 - DNA, 30 bp, Artificial Sequence
  Synthetic oligonucleotide
cagtcactagacttccgtccttaacatggg

SEQ ID NO: 99327 - DNA, 30 bp, Artificial Sequence
  Synthetic oligonucleotide
aagagatagcgattagaggtggtacatggg

SEQ ID NO: 99328 - DNA, 30 bp, Artificial Sequence
  Synthetic oligonucleotide
tcttgtctcatctgttggtagaaccatggg

SEQ ID NO: 99329 - DNA, 30 bp, Artificial Sequence
  Synthetic oligonucleotide
gtccgtgtctgaagtgatgaacatcatggg

SEQ ID NO: 99330 - DNA, 30 bp, Artificial Sequence
  Synthetic oligonucleotide
ccacacatccagagattgattgatcatggg

SEQ ID NO: 99331 - DNA, 30 bp, Artificial Sequence
  Synthetic oligonucleotide
gcgatcacaaattagtagggatcagatggg

SEQ ID NO: 99332 - DNA, 30 bp, Artificial Sequence
  Synthetic oligonucleotide
aagctagtaggccaaccaaaagacgatggg

SEQ ID NO: 99333 - DNA, 30 bp, Artificial Sequence
  Synthetic oligonucleotide
tcattgccaggataatgggtgcgggatggg

SEQ ID NO: 99334 - DNA, 30 bp, Artificial Sequence
  Synthetic oligonucleotide
ggtcgggtatcaagtgtatgtcatgatggg

SEQ ID NO: 99335 - DNA, 30 bp, Artificial Sequence
  Synthetic oligonucleotide
caggactttcactagtgtaccggatatggg

SEQ ID NO: 99336 - DNA, 30 bp, Artificial Sequence
  Synthetic oligonucleotide
aaccattggacaagatatgggtgatatggg

SEQ ID NO: 99337 - DNA, 30 bp, Artificial Sequence
  Synthetic oligonucleotide
caacaaggaggtccactagacatctatggg

SEQ ID NO: 99338 - DNA, 30 bp, Artificial Sequence
  Synthetic oligonucleotide
tcacgttttgcacgaaagctgaagactggg

SEQ ID NO: 99339 - DNA, 30 bp, Artificial Sequence
  Synthetic oligonucleotide
atcacagtcccgacactaaggtcgcctggg

SEQ ID NO: 99340 - DNA, 30 bp, Artificial Sequence
  Synthetic oligonucleotide
atgcgacggatggactagcgtaggcctggg

SEQ ID NO: 99341 - DNA, 30 bp, Artificial Sequence
  Synthetic oligonucleotide
ctcattaggcagtaaatagagatgcctggg

SEQ ID NO: 99342 - DNA, 30 bp, Artificial Sequence
  Synthetic oligonucleotide
aggccctttaatggaaggcaagccgctggg

SEQ ID NO: 99343 - DNA, 30 bp, Artificial Sequence
  Synthetic oligonucleotide
tttgacgcacaaggtgagtcactggctggg

SEQ ID NO: 99344 - DNA, 30 bp, Artificial Sequence
  Synthetic oligonucleotide
aaggtacgtgatacgtggaatactgctggg

SEQ ID NO: 99345 - DNA, 30 bp, Artificial Sequence
  Synthetic oligonucleotide
ctaaagaaaccaaccatccgagggtctggg

SEQ ID NO: 99346 - DNA, 30 bp, Artificial Sequence
  Synthetic oligonucleotide
ccggatgttgagttcgtgccctattctggg

SEQ ID NO: 99347 - DNA, 30 bp, Artificial Sequence
  Synthetic oligonucleotide
ctcacgtataaaaggggcggtgtaagtggg

SEQ ID NO: 99348 - DNA, 30 bp, Artificial Sequence
  Synthetic oligonucleotide
tgcatccccatcgagcagttcgagcgtggg

SEQ ID NO: 99349 - DNA, 30 bp, Artificial Sequence
  Synthetic oligonucleotide
cttcgtacacctcggatcgaaaggcgtggg

SEQ ID NO: 99350 - DNA, 30 bp, Artificial Sequence
  Synthetic oligonucleotide
tgccaaaatggtagagttcaagatcgtggg

SEQ ID NO: 99351 - DNA, 30 bp, Artificial Sequence
  Synthetic oligonucleotide
agtgagcagcaaaacgacgactaaggtggg

SEQ ID NO: 99352 - DNA, 30 bp, Artificial Sequence
  Synthetic oligonucleotide
atggtgatttacgtaatgagcaccggtggg

SEQ ID NO: 99353 - DNA, 30 bp, Artificial Sequence
  Synthetic oligonucleotide
tgggatgagaacacttgctttgcgtgtggg

SEQ ID NO: 99354 - DNA, 30 bp, Artificial Sequence
  Synthetic oligonucleotide
cgtagggaaggttctcagtcccgttgtggg

SEQ ID NO: 99355 - DNA, 30 bp, Artificial Sequence
  Synthetic oligonucleotide
tagcgtggacaggagaatgcgcaaattggg

SEQ ID NO: 99356 - DNA, 30 bp, Artificial Sequence
  Synthetic oligonucleotide
ccacggatgtactgaagaagcacacttggg

SEQ ID NO: 99357 - DNA, 30 bp, Artificial Sequence
  Synthetic oligonucleotide
ttaaaggcatatccgctcgagacacttggg

SEQ ID NO: 99358 - DNA, 30 bp, Artificial Sequence
  Synthetic oligonucleotide
gcgcggagtggggggaggcgggagcttggg

SEQ ID NO: 99359 - DNA, 30 bp, Artificial Sequence
  Synthetic oligonucleotide
tgccttgcggaaaaggaggtttatcttggg

SEQ ID NO: 99360 - DNA, 30 bp, Artificial Sequence
  Synthetic oligonucleotide
catcctccgcgggcgaatggtactcttggg

SEQ ID NO: 99361 - DNA, 30 bp, Artificial Sequence
  Synthetic oligonucleotide
gtacgaaaatatgattaagtatcagttggg

SEQ ID NO: 99362 - DNA, 30 bp, Artificial Sequence
  Synthetic oligonucleotide
agcttaagagaccatatcgaaatggttggg

SEQ ID NO: 99363 - DNA, 30 bp, Artificial Sequence
  Synthetic oligonucleotide
taaggacgatcaaagcgtgtgaaatttggg

SEQ ID NO: 99364 - DNA, 30 bp, Artificial Sequence
  Synthetic oligonucleotide
agtgggggcctacgccttaacgtgtttggg

SEQ ID NO: 99365 - DNA, 30 bp, Artificial Sequence
  Synthetic oligonucleotide
ttgcaggaaggattagtgcgaaaaaaatgg

SEQ ID NO: 99366 - DNA, 30 bp, Artificial Sequence
  Synthetic oligonucleotide
cgcggccggtcctcgatgaaacgaaaatgg

SEQ ID NO: 99367 - DNA, 30 bp, Artificial Sequence
  Synthetic oligonucleotide
tcagtacgggttatcaattacagcaaatgg

SEQ ID NO: 99368 - DNA, 30 bp, Artificial Sequence
  Synthetic oligonucleotide
gtatgggggtgaacttgtaatgagaaatgg

SEQ ID NO: 99369 - DNA, 30 bp, Artificial Sequence
  Synthetic oligonucleotide
agtcccaggtagacgatttcacaacaatgg

SEQ ID NO: 99370 - DNA, 30 bp, Artificial Sequence
  Synthetic oligonucleotide
ctggtacaccatcctgggagatgacaatgg

SEQ ID NO: 99371 - DNA, 30 bp, Artificial Sequence
  Synthetic oligonucleotide
tactgcgactgtcctttgtgtagcgaatgg

SEQ ID NO: 99372 - DNA, 30 bp, Artificial Sequence
  Synthetic oligonucleotide
tcatcaatggtggcttcgtgaatttaatgg

SEQ ID NO: 99373 - DNA, 30 bp, Artificial Sequence
  Synthetic oligonucleotide
tgagtatttcgagcgtgagcgtccacatgg

SEQ ID NO: 99374 - DNA, 30 bp, Artificial Sequence
  Synthetic oligonucleotide
cctgcgaacggaccaaagacccagacatgg

SEQ ID NO: 99375 - DNA, 30 bp, Artificial Sequence
  Synthetic oligonucleotide
tgtacccttagatatgcaataatgacatgg

SEQ ID NO: 99376 - DNA, 30 bp, Artificial Sequence
  Synthetic oligonucleotide
gcaatacagattatgcgtccatcaccatgg

SEQ ID NO: 99377 - DNA, 30 bp, Artificial Sequence
  Synthetic oligonucleotide
atcgttaagaagggcatcactaacgcatgg

SEQ ID NO: 99378 - DNA, 30 bp, Artificial Sequence
  Synthetic oligonucleotide
tattgtagtcaaaacccccacaccgcatgg

SEQ ID NO: 99379 - DNA, 30 bp, Artificial Sequence
  Synthetic oligonucleotide
ggacctctaagactgacgagtcgatcatgg

SEQ ID NO: 99380 - DNA, 31 bp, Artificial Sequence
  Synthetic oligonucleotide
tcacactgtgccaagccaatgcgagtcatgg

SEQ ID NO: 99381 - DNA, 30 bp, Artificial Sequence
  Synthetic oligonucleotide
cggaattcagatgctacgagtccgagatgg

SEQ ID NO: 99382 - DNA, 30 bp, Artificial Sequence
  Synthetic oligonucleotide
ataaaggacgtcgcaataggtcctagatgg

SEQ ID NO: 99383 - DNA, 30 bp, Artificial Sequence
  Synthetic oligonucleotide
tagcgggaagcgaaggtacattttagatgg

SEQ ID NO: 99384 - DNA, 30 bp, Artificial Sequence
  Synthetic oligonucleotide
tggggtgtcccctgcaccaagagacgatgg

SEQ ID NO: 99385 - DNA, 30 bp, Artificial Sequence
  Synthetic oligonucleotide
gacacaagcgtcagctagcggcccggatgg

SEQ ID NO: 99386 - DNA, 31 bp, Artificial Sequence
  Synthetic oligonucleotide
tacgccgaatttggaatacaaagtcggatgg

SEQ ID NO: 99387 - DNA, 30 bp, Artificial Sequence
  Synthetic oligonucleotide
tcttgtttccaactctatcaaaagggatgg

SEQ ID NO: 99388 - DNA, 30 bp, Artificial Sequence
  Synthetic oligonucleotide
tctgaccgaggaactaattcagaatgatgg

SEQ ID NO: 99389 - DNA, 30 bp, Artificial Sequence
  Synthetic oligonucleotide
gatcagattaatgtgctcaggaattgatgg

SEQ ID NO: 99390 - DNA, 30 bp, Artificial Sequence
  Synthetic oligonucleotide
tcatgtgggaattgtatgggtacttgatgg

SEQ ID NO: 99391 - DNA, 30 bp, Artificial Sequence
  Synthetic oligonucleotide
acacgttccacgtgggacgtatgttgatgg

SEQ ID NO: 99392 - DNA, 30 bp, Artificial Sequence
  Synthetic oligonucleotide
tgtagtgctgcgggaagcacccaaatatgg

SEQ ID NO: 99393 - DNA, 30 bp, Artificial Sequence
  Synthetic oligonucleotide
aggcaccgagcgtctcaactggcaatatgg

SEQ ID NO: 99394 - DNA, 30 bp, Artificial Sequence
  Synthetic oligonucleotide
gattgcgggtgatagcgcacatcaatatgg

SEQ ID NO: 99395 - DNA, 30 bp, Artificial Sequence
  Synthetic oligonucleotide
tcctggtgcgagtggataggagggatatgg

SEQ ID NO: 99396 - DNA, 30 bp, Artificial Sequence
  Synthetic oligonucleotide
tcgcagtgtagcagtaggttcgaactatgg

SEQ ID NO: 99397 - DNA, 30 bp, Artificial Sequence
  Synthetic oligonucleotide
tcagagctcatcagctgtgttcacctatgg

SEQ ID NO: 99398 - DNA, 30 bp, Artificial Sequence
  Synthetic oligonucleotide
acaatgatccgacccccggggtagctatgg

SEQ ID NO: 99399 - DNA, 30 bp, Artificial Sequence
  Synthetic oligonucleotide
gtaccatgggacgatcaggtaaggctatgg

SEQ ID NO: 99400 - DNA, 30 bp, Artificial Sequence
  Synthetic oligonucleotide
gcggtgggatgtcgctagaatttagtatgg

SEQ ID NO: 99401 - DNA, 30 bp, Artificial Sequence
  Synthetic oligonucleotide
agtgcaacggtttcatcctaacgcgtatgg

SEQ ID NO: 99402 - DNA, 30 bp, Artificial Sequence
  Synthetic oligonucleotide
cgaaaggatacaaccaacaaaggtgtatgg

SEQ ID NO: 99403 - DNA, 30 bp, Artificial Sequence
  Synthetic oligonucleotide
tcaggtctagcacgcctccgagcaaactgg

SEQ ID NO: 99404 - DNA, 30 bp, Artificial Sequence
  Synthetic oligonucleotide
atccgagggtgacacacgctatccaactgg

SEQ ID NO: 99405 - DNA, 30 bp, Artificial Sequence
  Synthetic oligonucleotide
gctgaaacggccgtcattgtgcaccactgg

SEQ ID NO: 99406 - DNA, 30 bp, Artificial Sequence
  Synthetic oligonucleotide
ccacttgtccacatcacggctccggactgg

SEQ ID NO: 99407 - DNA, 30 bp, Artificial Sequence
  Synthetic oligonucleotide
tagcacggcgaatgccggaatactgactgg

SEQ ID NO: 99408 - DNA, 30 bp, Artificial Sequence
  Synthetic oligonucleotide
cgtcatagggcgcgatcccatacatactgg

SEQ ID NO: 99409 - DNA, 30 bp, Artificial Sequence
  Synthetic oligonucleotide
agacaatatggggcacccacaggatactgg

SEQ ID NO: 99410 - DNA, 30 bp, Artificial Sequence
  Synthetic oligonucleotide
ggactagcattactactttctctctactgg

SEQ ID NO: 99411 - DNA, 30 bp, Artificial Sequence
  Synthetic oligonucleotide
cgtcgctggtaggaccaatccttgtactgg

SEQ ID NO: 99412 - DNA, 30 bp, Artificial Sequence
  Synthetic oligonucleotide
aggttccgtagcttgatcgagatcacctgg

SEQ ID NO: 99413 - DNA, 30 bp, Artificial Sequence
  Synthetic oligonucleotide
agtggaactagaggcgaacttattacctgg

SEQ ID NO: 99414 - DNA, 30 bp, Artificial Sequence
  Synthetic oligonucleotide
tacatcatccggccagataataaagcctgg

SEQ ID NO: 99415 - DNA, 30 bp, Artificial Sequence
  Synthetic oligonucleotide
cttcagaggtcttgctacgatcacgcctgg

SEQ ID NO: 99416 - DNA, 32 bp, Artificial Sequence
  Synthetic oligonucleotide
ctgcgacatagttgctaacccggtagagctgg

SEQ ID NO: 99417 - DNA, 30 bp, Artificial Sequence
  Synthetic oligonucleotide
aggcttagttccaaaccaggtagtcgctgg

SEQ ID NO: 99418 - DNA, 30 bp, Artificial Sequence
  Synthetic oligonucleotide
gacgcgaaatgtgttaacagtcaatgctgg

SEQ ID NO: 99419 - DNA, 30 bp, Artificial Sequence
  Synthetic oligonucleotide
gtcagagcgaacagtagcgagagttgctgg

SEQ ID NO: 99420 - DNA, 30 bp, Artificial Sequence
  Synthetic oligonucleotide
gaataggagcagtgcccggaggcaatctgg

SEQ ID NO: 99421 - DNA, 30 bp, Artificial Sequence
  Synthetic oligonucleotide
ggaacggaccgctcggacatgggaatctgg

SEQ ID NO: 99422 - DNA, 30 bp, Artificial Sequence
  Synthetic oligonucleotide
agcaaaatcaaccaaataacgagcatctgg

SEQ ID NO: 99423 - DNA, 30 bp, Artificial Sequence
  Synthetic oligonucleotide
atagcgtgggttgaaaccaatagtatctgg

SEQ ID NO: 99424 - DNA, 30 bp, Artificial Sequence
  Synthetic oligonucleotide
tctcgtgactaagggcatgacgatctctgg

SEQ ID NO: 99425 - DNA, 30 bp, Artificial Sequence
  Synthetic oligonucleotide
ggcctggggccgtagaccgcgtgagtctgg

SEQ ID NO: 99426 - DNA, 30 bp, Artificial Sequence
  Synthetic oligonucleotide
gttgaaccggtgatttaggtactcgtctgg

SEQ ID NO: 99427 - DNA, 30 bp, Artificial Sequence
  Synthetic oligonucleotide
ataaattggcacgtgatatgatgggtctgg

SEQ ID NO: 99428 - DNA, 30 bp, Artificial Sequence
  Synthetic oligonucleotide
agcgtgctaattaattatctgggtgtctgg

SEQ ID NO: 99429 - DNA, 30 bp, Artificial Sequence
  Synthetic oligonucleotide
ctaagtaaggtagactgccgtacattctgg

SEQ ID NO: 99430 - DNA, 30 bp, Artificial Sequence
  Synthetic oligonucleotide
aaagtatactccaaaagctgcgaaaagtgg

SEQ ID NO: 99431 - DNA, 30 bp, Artificial Sequence
  Synthetic oligonucleotide
aacggacctgctgcctcagcagtaaagtgg

SEQ ID NO: 99432 - DNA, 30 bp, Artificial Sequence
  Synthetic oligonucleotide
cgagagtccctctccgaaattaagaagtgg

SEQ ID NO: 99433 - DNA, 30 bp, Artificial Sequence
  Synthetic oligonucleotide
ggttcatgcttcgataggagtgggaagtgg

SEQ ID NO: 99434 - DNA, 30 bp, Artificial Sequence
  Synthetic oligonucleotide
cttaacgcttggggataaggtaataagtgg

SEQ ID NO: 99435 - DNA, 30 bp, Artificial Sequence
  Synthetic oligonucleotide
cacggaatgttagctatagagagacagtgg

SEQ ID NO: 99436 - DNA, 30 bp, Artificial Sequence
  Synthetic oligonucleotide
tgtatgatcgcatggagtgttagacagtgg

SEQ ID NO: 99437 - DNA, 30 bp, Artificial Sequence
  Synthetic oligonucleotide
aatcaaggacaaatcattcacacagagtgg

SEQ ID NO: 99438 - DNA, 30 bp, Artificial Sequence
  Synthetic oligonucleotide
gcgagggagtcggcgggaccgctatagtgg

SEQ ID NO: 99439 - DNA, 30 bp, Artificial Sequence
  Synthetic oligonucleotide
gggcatgacaacgcgcgcagatcctagtgg

SEQ ID NO: 99440 - DNA, 30 bp, Artificial Sequence
  Synthetic oligonucleotide
tcgctaagcaagtcaggggtaacttagtgg

SEQ ID NO: 99441 - DNA, 30 bp, Artificial Sequence
  Synthetic oligonucleotide
ctcgtgataaggtggagtagattttagtgg

SEQ ID NO: 99442 - DNA, 30 bp, Artificial Sequence
  Synthetic oligonucleotide
acttagtaatcaatgcaaaaaacgacgtgg

SEQ ID NO: 99443 - DNA, 30 bp, Artificial Sequence
  Synthetic oligonucleotide
cggggcatcgattggtgtctaagaccgtgg

SEQ ID NO: 99444 - DNA, 30 bp, Artificial Sequence
  Synthetic oligonucleotide
tcgtggttccgatggaggaagtgaccgtgg

SEQ ID NO: 99445 - DNA, 30 bp, Artificial Sequence
  Synthetic oligonucleotide
acgccgctgcgtgtgactgctgctccgtgg

SEQ ID NO: 99446 - DNA, 30 bp, Artificial Sequence
  Synthetic oligonucleotide
agtgtcgagaatctacccgcggaagcgtgg

SEQ ID NO: 99447 - DNA, 30 bp, Artificial Sequence
  Synthetic oligonucleotide
tcagccgagaagttcctcgtagccgcgtgg

SEQ ID NO: 99448 - DNA, 30 bp, Artificial Sequence
  Synthetic oligonucleotide
agctcaagttcgtctggccgactggcgtgg

SEQ ID NO: 99449 - DNA, 30 bp, Artificial Sequence
  Synthetic oligonucleotide
tgtagtcccgaggagtaaacaaatgcgtgg

SEQ ID NO: 99450 - DNA, 30 bp, Artificial Sequence
  Synthetic oligonucleotide
cgagcgacaaatcagtggataaatgcgtgg

SEQ ID NO: 99451 - DNA, 30 bp, Artificial Sequence
  Synthetic oligonucleotide
agggcttgaacgccgaatgtagactcgtgg

SEQ ID NO: 99452 - DNA, 30 bp, Artificial Sequence
  Synthetic oligonucleotide
actcatctgcttgatgtaatgtactcgtgg

SEQ ID NO: 99453 - DNA, 30 bp, Artificial Sequence
  Synthetic oligonucleotide
acattccaggaggaaatcgttgtctcgtgg

SEQ ID NO: 99454 - DNA, 30 bp, Artificial Sequence
  Synthetic oligonucleotide
tgtcaaatgaaactatagcgttagtcgtgg

SEQ ID NO: 99455 - DNA, 30 bp, Artificial Sequence
  Synthetic oligonucleotide
gggagtactatggttgatctgtgacggtgg

SEQ ID NO: 99456 - DNA, 30 bp, Artificial Sequence
  Synthetic oligonucleotide
ggaagccgaaacctattagaactacggtgg

SEQ ID NO: 99457 - DNA, 30 bp, Artificial Sequence
  Synthetic oligonucleotide
ctgatagagcactgttgtttatggcggtgg

SEQ ID NO: 99458 - DNA, 30 bp, Artificial Sequence
  Synthetic oligonucleotide
tgggctctgtatggaacgggagtcgggtgg

SEQ ID NO: 99459 - DNA, 30 bp, Artificial Sequence
  Synthetic oligonucleotide
cgtggagttggaggagagaaggtcgggtgg

SEQ ID NO: 99460 - DNA, 30 bp, Artificial Sequence
  Synthetic oligonucleotide
gttggtagactaatgtccagagaggggtgg

SEQ ID NO: 99461 - DNA, 30 bp, Artificial Sequence
  Synthetic oligonucleotide
tgagaagtatcggcctgtatcagggggtgg

SEQ ID NO: 99462 - DNA, 30 bp, Artificial Sequence
  Synthetic oligonucleotide
atatgcaaccataaacgaaatccgtggtgg

SEQ ID NO: 99463 - DNA, 30 bp, Artificial Sequence
  Synthetic oligonucleotide
cggagtcgttgtagtgcaacagcgtggtgg

SEQ ID NO: 99464 - DNA, 30 bp, Artificial Sequence
  Synthetic oligonucleotide
ggaggaagttatatcgacgagtaaatgtgg

SEQ ID NO: 99465 - DNA, 30 bp, Artificial Sequence
  Synthetic oligonucleotide
taaacagtatacgttggataaccgatgtgg

SEQ ID NO: 99466 - DNA, 30 bp, Artificial Sequence
  Synthetic oligonucleotide
ctgaatgctcggggctaacggaccctgtgg

SEQ ID NO: 99467 - DNA, 30 bp, Artificial Sequence
  Synthetic oligonucleotide
ctggaacatcacacaattgcgtccttgtgg

SEQ ID NO: 99468 - DNA, 30 bp, Artificial Sequence
  Synthetic oligonucleotide
aaaagaagctaactgacgcgtgagttgtgg

SEQ ID NO: 99469 - DNA, 30 bp, Artificial Sequence
  Synthetic oligonucleotide
gggagcacatgccgttaggcagaaaattgg

SEQ ID NO: 99470 - DNA, 30 bp, Artificial Sequence
  Synthetic oligonucleotide
caaccatatctgatcggtggggtgaattgg

SEQ ID NO: 99471 - DNA, 30 bp, Artificial Sequence
  Synthetic oligonucleotide
gatgataggcgggttagttctggtaattgg

SEQ ID NO: 99472 - DNA, 30 bp, Artificial Sequence
  Synthetic oligonucleotide
ccaccgtacaatcctcacaaggccgattgg

SEQ ID NO: 99473 - DNA, 30 bp, Artificial Sequence
  Synthetic oligonucleotide
gtaataacctgcgggacgtgccagtattgg

SEQ ID NO: 99474 - DNA, 30 bp, Artificial Sequence
  Synthetic oligonucleotide
cacgcagaattagtttgtccctgcccttgg

SEQ ID NO: 99475 - DNA, 30 bp, Artificial Sequence
  Synthetic oligonucleotide
gtggacccggaattgaaaagagagccttgg

SEQ ID NO: 99476 - DNA, 30 bp, Artificial Sequence
  Synthetic oligonucleotide
caaggaataacggagggaacgtttccttgg

SEQ ID NO: 99477 - DNA, 30 bp, Artificial Sequence
  Synthetic oligonucleotide
caagattccaattgcaagattgcggcttgg

SEQ ID NO: 99478 - DNA, 30 bp, Artificial Sequence
  Synthetic oligonucleotide
cacaagtgagaaatagcccactcatcttgg

SEQ ID NO: 99479 - DNA, 30 bp, Artificial Sequence
  Synthetic oligonucleotide
tctgtacagggtactgaagctaactcttgg

SEQ ID NO: 99480 - DNA, 30 bp, Artificial Sequence
  Synthetic oligonucleotide
tgtaggagagggattgaactactaagttgg

SEQ ID NO: 99481 - DNA, 30 bp, Artificial Sequence
  Synthetic oligonucleotide
tgagggggaatagtaacccgccgtcgttgg

SEQ ID NO: 99482 - DNA, 30 bp, Artificial Sequence
  Synthetic oligonucleotide
gttatccagatatcttggcggcgaggttgg

SEQ ID NO: 99483 - DNA, 30 bp, Artificial Sequence
  Synthetic oligonucleotide
gcaagaatggtgcaaacttagttgggttgg

SEQ ID NO: 99484 - DNA, 30 bp, Artificial Sequence
  Synthetic oligonucleotide
gcataacgatttcgatgggcacggtgttgg

SEQ ID NO: 99485 - DNA, 30 bp, Artificial Sequence
  Synthetic oligonucleotide
gtgcaattcgtgtggcggaccgtgtgttgg

SEQ ID NO: 99486 - DNA, 30 bp, Artificial Sequence
  Synthetic oligonucleotide
ccgaaagacacaatcgccctccacatttgg

SEQ ID NO: 99487 - DNA, 30 bp, Artificial Sequence
  Synthetic oligonucleotide
ggtgtggtacttacctgcaatgtcgtttgg

SEQ ID NO: 99488 - DNA, 30 bp, Artificial Sequence
  Synthetic oligonucleotide
ctgcaaagtccaatcggtgttcaggtttgg

SEQ ID NO: 99489 - DNA, 30 bp, Artificial Sequence
  Synthetic oligonucleotide
cgatcttttcacgagttttgattggtttgg

SEQ ID NO: 99490 - DNA, 30 bp, Artificial Sequence
  Synthetic oligonucleotide
caatgaggattaatggactgagctgtttgg

SEQ ID NO: 99491 - DNA, 30 bp, Artificial Sequence
  Synthetic oligonucleotide
ggattaaggagacacagactcaccaaaatg

SEQ ID NO: 99492 - DNA, 30 bp, Artificial Sequence
  Synthetic oligonucleotide
agctaattgttctgatgttagtccaaaatg

SEQ ID NO: 99493 - DNA, 30 bp, Artificial Sequence
  Synthetic oligonucleotide
cggactacaattattttaatacagaaaatg

SEQ ID NO: 99494 - DNA, 30 bp, Artificial Sequence
  Synthetic oligonucleotide
cgccggagagaataactgtatgataaaatg

SEQ ID NO: 99495 - DNA, 30 bp, Artificial Sequence
  Synthetic oligonucleotide
ccccattagggataacaagcttctaaaatg

SEQ ID NO: 99496 - DNA, 30 bp, Artificial Sequence
  Synthetic oligonucleotide
tgggaccgaacgcaagaaagaggccaaatg

SEQ ID NO: 99497 - DNA, 30 bp, Artificial Sequence
  Synthetic oligonucleotide
tgcgcactaggccgaactcgagagcaaatg

SEQ ID NO: 99498 - DNA, 30 bp, Artificial Sequence
  Synthetic oligonucleotide
gcgctaggctctaggtgcaaaaatcaaatg

SEQ ID NO: 99499 - DNA, 30 bp, Artificial Sequence
  Synthetic oligonucleotide
caacatgccggagcgggaaatgttcaaatg

SEQ ID NO: 99500 - DNA, 30 bp, Artificial Sequence
  Synthetic oligonucleotide
tggttcacctcaattaagcgggccgaaatg

SEQ ID NO: 99501 - DNA, 30 bp, Artificial Sequence
  Synthetic oligonucleotide
ggggtcatgattgcgcgatttgttgaaatg

SEQ ID NO: 99502 - DNA, 30 bp, Artificial Sequence
  Synthetic oligonucleotide
atgcttgcatgatgagatcttaactaaatg

SEQ ID NO: 99503 - DNA, 30 bp, Artificial Sequence
  Synthetic oligonucleotide
tcttccttaaagcgaggttcgagctaaatg

SEQ ID NO: 99504 - DNA, 30 bp, Artificial Sequence
  Synthetic oligonucleotide
gtgcggtctcgtttgtgaggatcgtaaatg

SEQ ID NO: 99505 - DNA, 30 bp, Artificial Sequence
  Synthetic oligonucleotide
catttgtactttaaaaaacctcgttaaatg

SEQ ID NO: 99506 - DNA, 30 bp, Artificial Sequence
  Synthetic oligonucleotide
cccagttagaatgtacagtgcatgacaatg

SEQ ID NO: 99507 - DNA, 30 bp, Artificial Sequence
  Synthetic oligonucleotide
agtggagatgtctcacgtataggtacaatg

SEQ ID NO: 99508 - DNA, 30 bp, Artificial Sequence
  Synthetic oligonucleotide
gggcacttccgttggcttgtggttacaatg

SEQ ID NO: 99509 - DNA, 30 bp, Artificial Sequence
  Synthetic oligonucleotide
aggcgtggagaggtagactgcacaccaatg

SEQ ID NO: 99510 - DNA, 30 bp, Artificial Sequence
  Synthetic oligonucleotide
aagtcaggggatacccatgttattccaatg

SEQ ID NO: 99511 - DNA, 30 bp, Artificial Sequence
  Synthetic oligonucleotide
ccaggtgagggctttcgccatcactcaatg

SEQ ID NO: 99512 - DNA, 30 bp, Artificial Sequence
  Synthetic oligonucleotide
atgaggcgctcgcataaggtatggtcaatg

SEQ ID NO: 99513 - DNA, 30 bp, Artificial Sequence
  Synthetic oligonucleotide
ggcataaccgcgcacttcgtacaaagaatg

SEQ ID NO: 99514 - DNA, 30 bp, Artificial Sequence
  Synthetic oligonucleotide
cgtatttcggggcaacttgaagaaagaatg

SEQ ID NO: 99515 - DNA, 30 bp, Artificial Sequence
  Synthetic oligonucleotide
ccatccgtataacaggcgggtgggagaatg

SEQ ID NO: 99516 - DNA, 30 bp, Artificial Sequence
  Synthetic oligonucleotide
catcaatatgtgttaaccgggttgagaatg

SEQ ID NO: 99517 - DNA, 30 bp, Artificial Sequence
  Synthetic oligonucleotide
gtggataggtgtagatacgggcatagaatg

SEQ ID NO: 99518 - DNA, 30 bp, Artificial Sequence
  Synthetic oligonucleotide
caagctagaggaacaagaagatcccgaatg

SEQ ID NO: 99519 - DNA, 30 bp, Artificial Sequence
  Synthetic oligonucleotide
gcaccaaggacactaagtatgagccgaatg

SEQ ID NO: 99520 - DNA, 30 bp, Artificial Sequence
  Synthetic oligonucleotide
aacatgaatttagttttagatgtccgaatg

SEQ ID NO: 99521 - DNA, 30 bp, Artificial Sequence
  Synthetic oligonucleotide
gagaattgtggtcaccacatatagcgaatg

SEQ ID NO: 99522 - DNA, 30 bp, Artificial Sequence
  Synthetic oligonucleotide
agttgcagcctacaagtggccgtgcgaatg

SEQ ID NO: 99523 - DNA, 30 bp, Artificial Sequence
  Synthetic oligonucleotide
caagcgcatgagtgctcacaatgtcgaatg

SEQ ID NO: 99524 - DNA, 30 bp, Artificial Sequence
  Synthetic oligonucleotide
agggacattgtgtcagatagtcgaggaatg

SEQ ID NO: 99525 - DNA, 30 bp, Artificial Sequence
  Synthetic oligonucleotide
cggagagcgtgacaatgtttatacggaatg

SEQ ID NO: 99526 - DNA, 30 bp, Artificial Sequence
  Synthetic oligonucleotide
aaggggtctaccactcgtcgttctggaatg

SEQ ID NO: 99527 - DNA, 30 bp, Artificial Sequence
  Synthetic oligonucleotide
taacggagtgtaagtactcgcggttgaatg

SEQ ID NO: 99528 - DNA, 30 bp, Artificial Sequence
  Synthetic oligonucleotide
agctagagagaacagttctaatacataatg

SEQ ID NO: 99529 - DNA, 30 bp, Artificial Sequence
  Synthetic oligonucleotide
ttaggacagacatgcggtacgtcgataatg

SEQ ID NO: 99530 - DNA, 30 bp, Artificial Sequence
  Synthetic oligonucleotide
acatgcatcagttgcctgggttcgataatg

SEQ ID NO: 99531 - DNA, 30 bp, Artificial Sequence
  Synthetic oligonucleotide
ccttaacagaattttatgcggcggataatg

SEQ ID NO: 99532 - DNA, 30 bp, Artificial Sequence
  Synthetic oligonucleotide
ctgctctggagagagccaaaagtgataatg

SEQ ID NO: 99533 - DNA, 30 bp, Artificial Sequence
  Synthetic oligonucleotide
gaaggccgccgaacgtgcgcagttataatg

SEQ ID NO: 99534 - DNA, 30 bp, Artificial Sequence
  Synthetic oligonucleotide
tagagaatggagttcgcagaataactaatg

SEQ ID NO: 99535 - DNA, 30 bp, Artificial Sequence
  Synthetic oligonucleotide
cggcccgagccactagccccaacactaatg

SEQ ID NO: 99536 - DNA, 30 bp, Artificial Sequence
  Synthetic oligonucleotide
ctgatggtgatcaatcggttatcgctaatg

SEQ ID NO: 99537 - DNA, 30 bp, Artificial Sequence
  Synthetic oligonucleotide
gacgggaaatatcggagagaaacagtaatg

SEQ ID NO: 99538 - DNA, 30 bp, Artificial Sequence
  Synthetic oligonucleotide
tacacccggcaatttggaggcggtgtaatg

SEQ ID NO: 99539 - DNA, 30 bp, Artificial Sequence
  Synthetic oligonucleotide
tagaccacacccgtaacttaccgattaatg

SEQ ID NO: 99540 - DNA, 30 bp, Artificial Sequence
  Synthetic oligonucleotide
tccaattgaagtaatagagttatattaatg

SEQ ID NO: 99541 - DNA, 30 bp, Artificial Sequence
  Synthetic oligonucleotide
ttagcatgaagtgtgtcacaaaacttaatg

SEQ ID NO: 99542 - DNA, 30 bp, Artificial Sequence
  Synthetic oligonucleotide
ttcggagcgtaagccgatatattcttaatg

SEQ ID NO: 99543 - DNA, 30 bp, Artificial Sequence
  Synthetic oligonucleotide
ggggttggaaaggaagccgctttcttaatg

SEQ ID NO: 99544 - DNA, 30 bp, Artificial Sequence
  Synthetic oligonucleotide
acagaaggagcttatcggcgtgataacatg

SEQ ID NO: 99545 - DNA, 30 bp, Artificial Sequence
  Synthetic oligonucleotide
gggttgtagtggaagccttcgcgagacatg

SEQ ID NO: 99546 - DNA, 30 bp, Artificial Sequence
  Synthetic oligonucleotide
cagattgatagtgagctcctacacgacatg

SEQ ID NO: 99547 - DNA, 30 bp, Artificial Sequence
  Synthetic oligonucleotide
cgtggtcaatcttgagatatagcggacatg

SEQ ID NO: 99548 - DNA, 30 bp, Artificial Sequence
  Synthetic oligonucleotide
ggctgttacttgcgtatgcgatccaccatg

SEQ ID NO: 99549 - DNA, 30 bp, Artificial Sequence
  Synthetic oligonucleotide
tagcctgcctaacttcagggaggacccatg

SEQ ID NO: 99550 - DNA, 30 bp, Artificial Sequence
  Synthetic oligonucleotide
ttgtaaaaaattacaatgatgatacccatg

SEQ ID NO: 99551 - DNA, 30 bp, Artificial Sequence
  Synthetic oligonucleotide
ctgggggccaataatggagttcatcccatg

SEQ ID NO: 99552 - DNA, 30 bp, Artificial Sequence
  Synthetic oligonucleotide
ccaccaatcttcagagtgccgtctcccatg

SEQ ID NO: 99553 - DNA, 30 bp, Artificial Sequence
  Synthetic oligonucleotide
aaataggcataattattcatgagagccatg

SEQ ID NO: 99554 - DNA, 30 bp, Artificial Sequence
  Synthetic oligonucleotide
caaccgggggacaaaatagataccgccatg

SEQ ID NO: 99555 - DNA, 30 bp, Artificial Sequence
  Synthetic oligonucleotide
aagtcgcgatagggtcttaaaagtgccatg

SEQ ID NO: 99556 - DNA, 30 bp, Artificial Sequence
  Synthetic oligonucleotide
agagcaatgtttagccttcactgtgccatg

SEQ ID NO: 99557 - DNA, 30 bp, Artificial Sequence
  Synthetic oligonucleotide
tgtaacaagggagatacattccttgccatg

SEQ ID NO: 99558 - DNA, 30 bp, Artificial Sequence
  Synthetic oligonucleotide
gcgaggtgaccgcgcgcaacgtgaagcatg

SEQ ID NO: 99559 - DNA, 30 bp, Artificial Sequence
  Synthetic oligonucleotide
cctgcttccggtaaggcgggcgagagcatg

SEQ ID NO: 99560 - DNA, 30 bp, Artificial Sequence
  Synthetic oligonucleotide
ggcttgtaaccaccttaacagaaacgcatg

SEQ ID NO: 99561 - DNA, 30 bp, Artificial Sequence
  Synthetic oligonucleotide
gtgatccatcggtacggatctagtcgcatg

SEQ ID NO: 99562 - DNA, 30 bp, Artificial Sequence
  Synthetic oligonucleotide
agttgagtccgtcgggccattgagggcatg

SEQ ID NO: 99563 - DNA, 30 bp, Artificial Sequence
  Synthetic oligonucleotide
tgctatcctcatcacttaggtaatggcatg

SEQ ID NO: 99564 - DNA, 30 bp, Artificial Sequence
  Synthetic oligonucleotide
ataagaaatggtcctgattgtgttggcatg

SEQ ID NO: 99565 - DNA, 30 bp, Artificial Sequence
  Synthetic oligonucleotide
gtaagtcaaggtacggttacattctgcatg

SEQ ID NO: 99566 - DNA, 30 bp, Artificial Sequence
  Synthetic oligonucleotide
gggtaacggtagaaacactgacgttgcatg

SEQ ID NO: 99567 - DNA, 30 bp, Artificial Sequence
  Synthetic oligonucleotide
atggggaacaccatcttcgtcgagatcatg

SEQ ID NO: 99568 - DNA, 30 bp, Artificial Sequence
  Synthetic oligonucleotide
atgttttaacgttaataatgaaggatcatg

SEQ ID NO: 99569 - DNA, 30 bp, Artificial Sequence
  Synthetic oligonucleotide
gccgtattaaggggggaggcgagtatcatg

SEQ ID NO: 99570 - DNA, 30 bp, Artificial Sequence
  Synthetic oligonucleotide
acgggactgcatatgctttagcgtatcatg

SEQ ID NO: 99571 - DNA, 30 bp, Artificial Sequence
  Synthetic oligonucleotide
tacaacggatgccatggcttcgtcctcatg

SEQ ID NO: 99572 - DNA, 30 bp, Artificial Sequence
  Synthetic oligonucleotide
aaggcgggacctaacacgaggtggctcatg

SEQ ID NO: 99573 - DNA, 30 bp, Artificial Sequence
  Synthetic oligonucleotide
ggtggaaaaggcaactcgagaggtctcatg

SEQ ID NO: 99574 - DNA, 30 bp, Artificial Sequence
  Synthetic oligonucleotide
atctaacaggcaaccgcgagttcagtcatg

SEQ ID NO: 99575 - DNA, 30 bp, Artificial Sequence
  Synthetic oligonucleotide
ggtaccggatggtagggatagggagtcatg

SEQ ID NO: 99576 - DNA, 30 bp, Artificial Sequence
  Synthetic oligonucleotide
aagtagggagcaatcatcaggctagtcatg

SEQ ID NO: 99577 - DNA, 30 bp, Artificial Sequence
  Synthetic oligonucleotide
tatgaacgacggggtacccgaatggtcatg

SEQ ID NO: 99578 - DNA, 30 bp, Artificial Sequence
  Synthetic oligonucleotide
aagaacccagtcaatgaatagtgtttcatg

SEQ ID NO: 99579 - DNA, 30 bp, Artificial Sequence
  Synthetic oligonucleotide
catgggagatttgtatagtaattcaagatg

SEQ ID NO: 99580 - DNA, 30 bp, Artificial Sequence
  Synthetic oligonucleotide
gcagctacgcgattcgctagcgagaagatg

SEQ ID NO: 99581 - DNA, 30 bp, Artificial Sequence
  Synthetic oligonucleotide
tttgatacacaccggttattaacacagatg

SEQ ID NO: 99582 - DNA, 30 bp, Artificial Sequence
  Synthetic oligonucleotide
cgttgcctatacccgaactgaagggagatg

SEQ ID NO: 99583 - DNA, 30 bp, Artificial Sequence
  Synthetic oligonucleotide
tgccactaacatcacgccaactgggagatg

SEQ ID NO: 99584 - DNA, 30 bp, Artificial Sequence
  Synthetic oligonucleotide
taaccaggattcatacagtaacttgagatg

SEQ ID NO: 99585 - DNA, 30 bp, Artificial Sequence
  Synthetic oligonucleotide
gacatagtcaggggtcggttacttgagatg

SEQ ID NO: 99586 - DNA, 30 bp, Artificial Sequence
  Synthetic oligonucleotide
tcacggaatgggcagtaataaaactagatg

SEQ ID NO: 99587 - DNA, 30 bp, Artificial Sequence
  Synthetic oligonucleotide
cccgactcacgatagtagctggattagatg

SEQ ID NO: 99588 - DNA, 31 bp, Artificial Sequence
  Synthetic oligonucleotide
attcgccagtgggtagggttaaccttagatg

SEQ ID NO: 99589 - DNA, 30 bp, Artificial Sequence
  Synthetic oligonucleotide
cgttgtttttaggtctgagctagttagatg

SEQ ID NO: 99590 - DNA, 30 bp, Artificial Sequence
  Synthetic oligonucleotide
cgaacggggagtgtacgcttgtaaacgatg

SEQ ID NO: 99591 - DNA, 30 bp, Artificial Sequence
  Synthetic oligonucleotide
gtttaggagtgttcggcagtcggaacgatg

SEQ ID NO: 99592 - DNA, 30 bp, Artificial Sequence
  Synthetic oligonucleotide
gcatgaacctattcttcagtgcggacgatg

SEQ ID NO: 99593 - DNA, 30 bp, Artificial Sequence
  Synthetic oligonucleotide
gcgtgtttccctgcgttacaatgagcgatg

SEQ ID NO: 99594 - DNA, 30 bp, Artificial Sequence
  Synthetic oligonucleotide
caaatgactcaaggcggccctaaatcgatg

SEQ ID NO: 99595 - DNA, 30 bp, Artificial Sequence
  Synthetic oligonucleotide
gtgtcggcactctatgagcgaccatcgatg

SEQ ID NO: 99596 - DNA, 30 bp, Artificial Sequence
  Synthetic oligonucleotide
tgccgcgttggtcagcggggcggatcgatg

SEQ ID NO: 99597 - DNA, 30 bp, Artificial Sequence
  Synthetic oligonucleotide
aagtggttgacacataaatgcacgtcgatg

SEQ ID NO: 99598 - DNA, 30 bp, Artificial Sequence
  Synthetic oligonucleotide
cacacctagcttcattcgtactgaaggatg

SEQ ID NO: 99599 - DNA, 30 bp, Artificial Sequence
  Synthetic oligonucleotide
ggtgtcaaggtaatcgatgcactcaggatg

SEQ ID NO: 99600 - DNA, 30 bp, Artificial Sequence
  Synthetic oligonucleotide
actctacaagatgtagtcagttagaggatg

SEQ ID NO: 99601 - DNA, 30 bp, Artificial Sequence
  Synthetic oligonucleotide
ctacatacgtatcattcacctagtaggatg

SEQ ID NO: 99602 - DNA, 30 bp, Artificial Sequence
  Synthetic oligonucleotide
aggaaaccttgtcaccatagaaaacggatg

SEQ ID NO: 99603 - DNA, 30 bp, Artificial Sequence
  Synthetic oligonucleotide
atacagaaacgaacgcttacgagacggatg

SEQ ID NO: 99604 - DNA, 30 bp, Artificial Sequence
  Synthetic oligonucleotide
atcaggtcattatgattgggggtgcggatg

SEQ ID NO: 99605 - DNA, 30 bp, Artificial Sequence
  Synthetic oligonucleotide
gatgatccattagtctccgctccagggatg

SEQ ID NO: 99606 - DNA, 30 bp, Artificial Sequence
  Synthetic oligonucleotide
cgataataacagacgctaatttcagggatg

SEQ ID NO: 99607 - DNA, 30 bp, Artificial Sequence
  Synthetic oligonucleotide
agtaacgttggagcagtgaagagagggatg

SEQ ID NO: 99608 - DNA, 30 bp, Artificial Sequence
  Synthetic oligonucleotide
agccgtaacttcctcgagacaggagggatg

SEQ ID NO: 99609 - DNA, 29 bp, Artificial Sequence
  Synthetic oligonucleotide
ggatggggttctgaggacctactgggatg

SEQ ID NO: 99610 - DNA, 30 bp, Artificial Sequence
  Synthetic oligonucleotide
tggaagcagtggaactggtgttcttggatg

SEQ ID NO: 99611 - DNA, 30 bp, Artificial Sequence
  Synthetic oligonucleotide
agggcgatcacgggttccgctgcaatgatg

SEQ ID NO: 99612 - DNA, 30 bp, Artificial Sequence
  Synthetic oligonucleotide
gatacgtacacaaaatgccccaggatgatg

SEQ ID NO: 99613 - DNA, 30 bp, Artificial Sequence
  Synthetic oligonucleotide
agcaaccatggatcgatgagaaaactgatg

SEQ ID NO: 99614 - DNA, 30 bp, Artificial Sequence
  Synthetic oligonucleotide
accaacataataccaccacaagcgctgatg

SEQ ID NO: 99615 - DNA, 30 bp, Artificial Sequence
  Synthetic oligonucleotide
cttggaagcgtgtgggaggaatttctgatg

SEQ ID NO: 99616 - DNA, 30 bp, Artificial Sequence
  Synthetic oligonucleotide
ttaaacaaacgttcaggattaaaggtgatg

SEQ ID NO: 99617 - DNA, 30 bp, Artificial Sequence
  Synthetic oligonucleotide
tcctaggtggaatcccttattgtggtgatg

SEQ ID NO: 99618 - DNA, 30 bp, Artificial Sequence
  Synthetic oligonucleotide
aaacatgcggatgactcccaaggtgtgatg

SEQ ID NO: 99619 - DNA, 30 bp, Artificial Sequence
  Synthetic oligonucleotide
gcacggaatcccgaactgtgttacttgatg

SEQ ID NO: 99620 - DNA, 30 bp, Artificial Sequence
  Synthetic oligonucleotide
ggccgggagctgtatttaattcggttgatg

SEQ ID NO: 99621 - DNA, 30 bp, Artificial Sequence
  Synthetic oligonucleotide
acgtttgcccccgaacagttaggtaatatg

SEQ ID NO: 99622 - DNA, 30 bp, Artificial Sequence
  Synthetic oligonucleotide
acagacaatgcggtctggagtatcgatatg

SEQ ID NO: 99623 - DNA, 30 bp, Artificial Sequence
  Synthetic oligonucleotide
cattcaccccacgtaagtgtcacggatatg

SEQ ID NO: 99624 - DNA, 30 bp, Artificial Sequence
  Synthetic oligonucleotide
agtgtgatacagtgttagtgtagggatatg

SEQ ID NO: 99625 - DNA, 30 bp, Artificial Sequence
  Synthetic oligonucleotide
gaggagctgctgtgaggtgtaagctatatg

SEQ ID NO: 99626 - DNA, 30 bp, Artificial Sequence
  Synthetic oligonucleotide
tacgcgagcatggtgcagccgtggtatatg

SEQ ID NO: 99627 - DNA, 30 bp, Artificial Sequence
  Synthetic oligonucleotide
agcgcggtcgggtgaccggaacttactatg

SEQ ID NO: 99628 - DNA, 30 bp, Artificial Sequence
  Synthetic oligonucleotide
cgagtatatccgtgttgccgagaccctatg

SEQ ID NO: 99629 - DNA, 30 bp, Artificial Sequence
  Synthetic oligonucleotide
cagccggcaggaggggcgtaaaaggctatg

SEQ ID NO: 99630 - DNA, 30 bp, Artificial Sequence
  Synthetic oligonucleotide
agggtacaacaaacttgaatgctggctatg

SEQ ID NO: 99631 - DNA, 30 bp, Artificial Sequence
  Synthetic oligonucleotide
agcagcgtaactcgaaatctcgtctctatg

SEQ ID NO: 99632 - DNA, 30 bp, Artificial Sequence
  Synthetic oligonucleotide
tgataactatcatagtttgaatgaagtatg

SEQ ID NO: 99633 - DNA, 30 bp, Artificial Sequence
  Synthetic oligonucleotide
ttgtagttcaaatgccaggccgcgagtatg

SEQ ID NO: 99634 - DNA, 30 bp, Artificial Sequence
  Synthetic oligonucleotide
gtgtatgccagtcctagcatgttgagtatg

SEQ ID NO: 99635 - DNA, 30 bp, Artificial Sequence
  Synthetic oligonucleotide
ctcaaatgacacgcgacaggtacacgtatg

SEQ ID NO: 99636 - DNA, 30 bp, Artificial Sequence
  Synthetic oligonucleotide
atgatatagccgtccaagcacagacgtatg

SEQ ID NO: 99637 - DNA, 30 bp, Artificial Sequence
  Synthetic oligonucleotide
tgagccattaagcactgcatacgacgtatg

SEQ ID NO: 99638 - DNA, 30 bp, Artificial Sequence
  Synthetic oligonucleotide
ttaaatgagccgatccccaacctacgtatg

SEQ ID NO: 99639 - DNA, 30 bp, Artificial Sequence
  Synthetic oligonucleotide
gccgaatcaattgcactaaaagtgcgtatg

SEQ ID NO: 99640 - DNA, 31 bp, Artificial Sequence
  Synthetic oligonucleotide
gttgggataagtcccactatgaaaaggtatg

SEQ ID NO: 99641 - DNA, 30 bp, Artificial Sequence
  Synthetic oligonucleotide
cgcggcaggctgtaagggtggctcggtatg

SEQ ID NO: 99642 - DNA, 30 bp, Artificial Sequence
  Synthetic oligonucleotide
caaagtgttactagtctcgcggtgggtatg

SEQ ID NO: 99643 - DNA, 29 bp, Artificial Sequence
  Synthetic oligonucleotide
cgctatggactgatgttcgcctctgtatg

SEQ ID NO: 99644 - DNA, 30 bp, Artificial Sequence
  Synthetic oligonucleotide
ggaatcatggcatcgaaccatgtgtgtatg

SEQ ID NO: 99645 - DNA, 30 bp, Artificial Sequence
  Synthetic oligonucleotide
cagaatgccgtcttcgtagacgaaattatg

SEQ ID NO: 99646 - DNA, 30 bp, Artificial Sequence
  Synthetic oligonucleotide
gggtgccaatgaaagcgaacgtgaattatg

SEQ ID NO: 99647 - DNA, 30 bp, Artificial Sequence
  Synthetic oligonucleotide
agaaaacatgcgtatgtgaataagcttatg

SEQ ID NO: 99648 - DNA, 30 bp, Artificial Sequence
  Synthetic oligonucleotide
gaacacggaccaggtgtcagacagcttatg

SEQ ID NO: 99649 - DNA, 30 bp, Artificial Sequence
  Synthetic oligonucleotide
gaatgtcagcattcgttacgggaagttatg

SEQ ID NO: 99650 - DNA, 30 bp, Artificial Sequence
  Synthetic oligonucleotide
ggtcgctacacagcgaagcatgtagttatg

SEQ ID NO: 99651 - DNA, 30 bp, Artificial Sequence
  Synthetic oligonucleotide
tctggtataaagtgtcgcaaccacgttatg

SEQ ID NO: 99652 - DNA, 30 bp, Artificial Sequence
  Synthetic oligonucleotide
gatccaaggcgtagagattaaggcgttatg

SEQ ID NO: 99653 - DNA, 30 bp, Artificial Sequence
  Synthetic oligonucleotide
aggaggggcttcgggcagactaaggttatg

SEQ ID NO: 99654 - DNA, 30 bp, Artificial Sequence
  Synthetic oligonucleotide
cggctttggacatgggattccagaaaactg

SEQ ID NO: 99655 - DNA, 30 bp, Artificial Sequence
  Synthetic oligonucleotide
cataataaaaaggatctgcgggcccaactg

SEQ ID NO: 99656 - DNA, 30 bp, Artificial Sequence
  Synthetic oligonucleotide
gagcactaagaccctcgaggctcccaactg

SEQ ID NO: 99657 - DNA, 30 bp, Artificial Sequence
  Synthetic oligonucleotide
gccgaaacactaacatatggccgccaactg

SEQ ID NO: 99658 - DNA, 30 bp, Artificial Sequence
  Synthetic oligonucleotide
cggtctactggagattgggcaatgcaactg

SEQ ID NO: 99659 - DNA, 30 bp, Artificial Sequence
  Synthetic oligonucleotide
gccgcgaccgccgacttttcttatcaactg

SEQ ID NO: 99660 - DNA, 30 bp, Artificial Sequence
  Synthetic oligonucleotide
cttcgttggctcatacatgctcgagaactg

SEQ ID NO: 99661 - DNA, 30 bp, Artificial Sequence
  Synthetic oligonucleotide
aggtatcgtccagggggacgtttagaactg

SEQ ID NO: 99662 - DNA, 30 bp, Artificial Sequence
  Synthetic oligonucleotide
atcgtctaaagagtaactccaggcgaactg

SEQ ID NO: 99663 - DNA, 30 bp, Artificial Sequence
  Synthetic oligonucleotide
aaacggcgactgagaatctgggctgaactg

SEQ ID NO: 99664 - DNA, 30 bp, Artificial Sequence
  Synthetic oligonucleotide
accacaccgtgcaatgtaggtaggtaactg

SEQ ID NO: 99665 - DNA, 30 bp, Artificial Sequence
  Synthetic oligonucleotide
gatagtgctcggctggtttgaagttaactg

SEQ ID NO: 99666 - DNA, 30 bp, Artificial Sequence
  Synthetic oligonucleotide
gttaggttcgagatatatagggtaacactg

SEQ ID NO: 99667 - DNA, 30 bp, Artificial Sequence
  Synthetic oligonucleotide
aaggcgataacttgggttcaagggacactg

SEQ ID NO: 99668 - DNA, 30 bp, Artificial Sequence
  Synthetic oligonucleotide
acgctaatgagaaaaggtcgtgccgcactg

SEQ ID NO: 99669 - DNA, 30 bp, Artificial Sequence
  Synthetic oligonucleotide
tcacgctaaatgtctaatacccgggcactg

SEQ ID NO: 99670 - DNA, 30 bp, Artificial Sequence
  Synthetic oligonucleotide
tgctatccttgccccatcgattgggcactg

SEQ ID NO: 99671 - DNA, 30 bp, Artificial Sequence
  Synthetic oligonucleotide
cggagactccatatataaatcaatgcactg

SEQ ID NO: 99672 - DNA, 30 bp, Artificial Sequence
  Synthetic oligonucleotide
tggtgcaatgcggtggggggagtcagactg

SEQ ID NO: 99673 - DNA, 30 bp, Artificial Sequence
  Synthetic oligonucleotide
tcagtgtaactgataagtgaaacgagactg

SEQ ID NO: 99674 - DNA, 30 bp, Artificial Sequence
  Synthetic oligonucleotide
gttgcgcataggatggggagaagtagactg

SEQ ID NO: 99675 - DNA, 30 bp, Artificial Sequence
  Synthetic oligonucleotide
aatggagccgatacctctctaatccgactg

SEQ ID NO: 99676 - DNA, 30 bp, Artificial Sequence
  Synthetic oligonucleotide
ctgcaaaaccctcggcctacctaaggactg

SEQ ID NO: 99677 - DNA, 30 bp, Artificial Sequence
  Synthetic oligonucleotide
taagaaagagcacagccagaaaagggactg

SEQ ID NO: 99678 - DNA, 30 bp, Artificial Sequence
  Synthetic oligonucleotide
tgcgttgaaggaaaaattcttggttgactg

SEQ ID NO: 99679 - DNA, 30 bp, Artificial Sequence
  Synthetic oligonucleotide
gagtaggatcgacctcctgagatttgactg

SEQ ID NO: 99680 - DNA, 31 bp, Artificial Sequence
  Synthetic oligonucleotide
tagggagatgaagtatgccaccgtttgactg

SEQ ID NO: 99681 - DNA, 30 bp, Artificial Sequence
  Synthetic oligonucleotide
aaatccaccggaagattggggaacatactg

SEQ ID NO: 99682 - DNA, 30 bp, Artificial Sequence
  Synthetic oligonucleotide
tactcgtcgtaaaccggatctctcatactg

SEQ ID NO: 99683 - DNA, 30 bp, Artificial Sequence
  Synthetic oligonucleotide
aatataagaatcccgtggaatgcgatactg

SEQ ID NO: 99684 - DNA, 30 bp, Artificial Sequence
  Synthetic oligonucleotide
atctggtgtacgacttatcctgaactactg

SEQ ID NO: 99685 - DNA, 30 bp, Artificial Sequence
  Synthetic oligonucleotide
ggtggcagtgttaccacgaaggcgctactg

SEQ ID NO: 99686 - DNA, 30 bp, Artificial Sequence
  Synthetic oligonucleotide
tccgtattaatgtaaggatagtaagtactg

SEQ ID NO: 99687 - DNA, 30 bp, Artificial Sequence
  Synthetic oligonucleotide
cctggctcctaagattaacaatttgtactg

SEQ ID NO: 99688 - DNA, 30 bp, Artificial Sequence
  Synthetic oligonucleotide
gggatcgtggagggggatctggtattactg

SEQ ID NO: 99689 - DNA, 30 bp, Artificial Sequence
  Synthetic oligonucleotide
gatgagtcggtcatctttgcagtcaacctg

SEQ ID NO: 99690 - DNA, 30 bp, Artificial Sequence
  Synthetic oligonucleotide
tcttaccggtagatacggcggtagaacctg

SEQ ID NO: 99691 - DNA, 30 bp, Artificial Sequence
  Synthetic oligonucleotide
ttcccgtaacttaaaaggcacatgaacctg

SEQ ID NO: 99692 - DNA, 30 bp, Artificial Sequence
  Synthetic oligonucleotide
gaacatctctgcggcgcgaattcccacctg

SEQ ID NO: 99693 - DNA, 30 bp, Artificial Sequence
  Synthetic oligonucleotide
tgacccagcgtgcctcaagaatgtcacctg

SEQ ID NO: 99694 - DNA, 30 bp, Artificial Sequence
  Synthetic oligonucleotide
atgacttacaagctagagctggcggacctg

SEQ ID NO: 99695 - DNA, 30 bp, Artificial Sequence
  Synthetic oligonucleotide
agacgaggcctaactgaagtcgcatacctg

SEQ ID NO: 99696 - DNA, 30 bp, Artificial Sequence
  Synthetic oligonucleotide
ttgtcacacgtatagctgcaagagtacctg

SEQ ID NO: 99697 - DNA, 30 bp, Artificial Sequence
  Synthetic oligonucleotide
cacaagctcactggctaaggcaggtacctg

SEQ ID NO: 99698 - DNA, 30 bp, Artificial Sequence
  Synthetic oligonucleotide
aggggtatagtagacgatctttattacctg

SEQ ID NO: 99699 - DNA, 30 bp, Artificial Sequence
  Synthetic oligonucleotide
cgtgagttctagccacagatacggaccctg

SEQ ID NO: 99700 - DNA, 30 bp, Artificial Sequence
  Synthetic oligonucleotide
ctagacggaaaccagatttgaaaccccctg

SEQ ID NO: 99701 - DNA, 30 bp, Artificial Sequence
  Synthetic oligonucleotide
agctccgacaaatcagcgctggcagccctg

SEQ ID NO: 99702 - DNA, 30 bp, Artificial Sequence
  Synthetic oligonucleotide
ccttatcagactgtaaggcttcacgccctg

SEQ ID NO: 99703 - DNA, 30 bp, Artificial Sequence
  Synthetic oligonucleotide
gcgcttcgcaatagcatttcccaatccctg

SEQ ID NO: 99704 - DNA, 30 bp, Artificial Sequence
  Synthetic oligonucleotide
tagcaaagccgtgtgcccagtgcatccctg

SEQ ID NO: 99705 - DNA, 30 bp, Artificial Sequence
  Synthetic oligonucleotide
acgggtgctgtaccaaaagtgaacagcctg

SEQ ID NO: 99706 - DNA, 31 bp, Artificial Sequence
  Synthetic oligonucleotide
ttaacatcactagaaccaaggtaggagcctg

SEQ ID NO: 99707 - DNA, 30 bp, Artificial Sequence
  Synthetic oligonucleotide
agagatgtccgccgatattccttgagcctg

SEQ ID NO: 99708 - DNA, 30 bp, Artificial Sequence
  Synthetic oligonucleotide
tgcgctccaacggggagcaaggtccgcctg

SEQ ID NO: 99709 - DNA, 30 bp, Artificial Sequence
  Synthetic oligonucleotide
atctacaagagcatatcagacgaaggcctg

SEQ ID NO: 99710 - DNA, 30 bp, Artificial Sequence
  Synthetic oligonucleotide
aggtagtatcacctgttccgtagaggcctg

SEQ ID NO: 99711 - DNA, 30 bp, Artificial Sequence
  Synthetic oligonucleotide
cctgcgttggctgcggcaataaagggcctg

SEQ ID NO: 99712 - DNA, 30 bp, Artificial Sequence
  Synthetic oligonucleotide
ggctctaggtacaccatatgcacatgcctg

SEQ ID NO: 99713 - DNA, 30 bp, Artificial Sequence
  Synthetic oligonucleotide
gctcacagatgagtcccaaaaccatgcctg

SEQ ID NO: 99714 - DNA, 30 bp, Artificial Sequence
  Synthetic oligonucleotide
cttatcgaagagcaggtttaccggtgcctg

SEQ ID NO: 99715 - DNA, 30 bp, Artificial Sequence
  Synthetic oligonucleotide
cttctagaataattgcgtgaatgaatcctg

SEQ ID NO: 99716 - DNA, 31 bp, Artificial Sequence
  Synthetic oligonucleotide
ccacaagaacaaagccgacgcccctatcctg

SEQ ID NO: 99717 - DNA, 30 bp, Artificial Sequence
  Synthetic oligonucleotide
agtcggaaggaatgtgagtcattcgtcctg

SEQ ID NO: 99718 - DNA, 30 bp, Artificial Sequence
  Synthetic oligonucleotide
acgactagaagactacgatcctcggtcctg

SEQ ID NO: 99719 - DNA, 30 bp, Artificial Sequence
  Synthetic oligonucleotide
agaatcaaacagacgagtcgggtggtcctg

SEQ ID NO: 99720 - DNA, 30 bp, Artificial Sequence
  Synthetic oligonucleotide
gagccacccaactgatccggacaattcctg

SEQ ID NO: 99721 - DNA, 30 bp, Artificial Sequence
  Synthetic oligonucleotide
agacggtaactaggtgcaagaggattcctg

SEQ ID NO: 99722 - DNA, 30 bp, Artificial Sequence
  Synthetic oligonucleotide
acctttcaactggtgtcggacatcttcctg

SEQ ID NO: 99723 - DNA, 30 bp, Artificial Sequence
  Synthetic oligonucleotide
cacctaggcttgtcggatacggtcttcctg

SEQ ID NO: 99724 - DNA, 30 bp, Artificial Sequence
  Synthetic oligonucleotide
gaggtctgttgatcccttatgaaaaagctg

SEQ ID NO: 99725 - DNA, 30 bp, Artificial Sequence
  Synthetic oligonucleotide
aggactttaagctagtgtgtggcaaagctg

SEQ ID NO: 99726 - DNA, 30 bp, Artificial Sequence
  Synthetic oligonucleotide
aaatagagaggccatcttatgataaagctg

SEQ ID NO: 99727 - DNA, 30 bp, Artificial Sequence
  Synthetic oligonucleotide
cagcgtaaggtctccctttccagtaagctg

SEQ ID NO: 99728 - DNA, 30 bp, Artificial Sequence
  Synthetic oligonucleotide
tgtgcactatgatacagtagattccagctg

SEQ ID NO: 99729 - DNA, 30 bp, Artificial Sequence
  Synthetic oligonucleotide
tgctatggatagcgcagggattgagagctg

SEQ ID NO: 99730 - DNA, 30 bp, Artificial Sequence
  Synthetic oligonucleotide
aggccaccggctatagtatacttggagctg

SEQ ID NO: 99731 - DNA, 30 bp, Artificial Sequence
  Synthetic oligonucleotide
acagtcaagatggcctcaggctttgagctg

SEQ ID NO: 99732 - DNA, 30 bp, Artificial Sequence
  Synthetic oligonucleotide
gacgtaataatggctgacacaacatagctg

SEQ ID NO: 99733 - DNA, 30 bp, Artificial Sequence
  Synthetic oligonucleotide
ctcgggtcaaccagagagatgcaaacgctg

SEQ ID NO: 99734 - DNA, 30 bp, Artificial Sequence
  Synthetic oligonucleotide
cggggggtatggcgtccgagacagccgctg

SEQ ID NO: 99735 - DNA, 30 bp, Artificial Sequence
  Synthetic oligonucleotide
ccgtccagtgcaatccagctctaagcgctg

SEQ ID NO: 99736 - DNA, 30 bp, Artificial Sequence
  Synthetic oligonucleotide
ctaggacggcgtccaaagacataggcgctg

SEQ ID NO: 99737 - DNA, 30 bp, Artificial Sequence
  Synthetic oligonucleotide
ggcggagagaccactgggatcacttcgctg

SEQ ID NO: 99738 - DNA, 30 bp, Artificial Sequence
  Synthetic oligonucleotide
atcaaaaagatgaaacacaacagttcgctg

SEQ ID NO: 99739 - DNA, 30 bp, Artificial Sequence
  Synthetic oligonucleotide
aggaacgtcttgggagtacggctaaggctg

SEQ ID NO: 99740 - DNA, 30 bp, Artificial Sequence
  Synthetic oligonucleotide
cccaggggtataatgtaagggtcagggctg

SEQ ID NO: 99741 - DNA, 30 bp, Artificial Sequence
  Synthetic oligonucleotide
ataggtgacgaggacccgtgtcgatggctg

SEQ ID NO: 99742 - DNA, 30 bp, Artificial Sequence
  Synthetic oligonucleotide
agagctagctgggatcatgctatctggctg

SEQ ID NO: 99743 - DNA, 30 bp, Artificial Sequence
  Synthetic oligonucleotide
cgttcctagggacaatattcggtctggctg

SEQ ID NO: 99744 - DNA, 30 bp, Artificial Sequence
  Synthetic oligonucleotide
cgggagagtcctaaaggtgggccaatgctg

SEQ ID NO: 99745 - DNA, 30 bp, Artificial Sequence
  Synthetic oligonucleotide
ttatacacatctcagtgggttacagtgctg

SEQ ID NO: 99746 - DNA, 30 bp, Artificial Sequence
  Synthetic oligonucleotide
atacatagtagcagaagccatgctgtgctg

SEQ ID NO: 99747 - DNA, 30 bp, Artificial Sequence
  Synthetic oligonucleotide
ccagaattcgttgaaccagttcgattgctg

SEQ ID NO: 99748 - DNA, 30 bp, Artificial Sequence
  Synthetic oligonucleotide
acgaggtacagaaccagcttgttgttgctg

SEQ ID NO: 99749 - DNA, 30 bp, Artificial Sequence
  Synthetic oligonucleotide
acggggtcaaagaccgggtagggcaatctg

SEQ ID NO: 99750 - DNA, 30 bp, Artificial Sequence
  Synthetic oligonucleotide
aggaaggataggcggacggtcacgaatctg

SEQ ID NO: 99751 - DNA, 30 bp, Artificial Sequence
  Synthetic oligonucleotide
ccctaccagtacgagttgggcatgaatctg

SEQ ID NO: 99752 - DNA, 30 bp, Artificial Sequence
  Synthetic oligonucleotide
ggttcgacaggataatatgcgaataatctg

SEQ ID NO: 99753 - DNA, 30 bp, Artificial Sequence
  Synthetic oligonucleotide
tgcaacttttcattcagttccaaacatctg

SEQ ID NO: 99754 - DNA, 30 bp, Artificial Sequence
  Synthetic oligonucleotide
gggttcatggacaaacaggctctacatctg

SEQ ID NO: 99755 - DNA, 30 bp, Artificial Sequence
  Synthetic oligonucleotide
tttgcgtaaggctaaggggattagcatctg

SEQ ID NO: 99756 - DNA, 30 bp, Artificial Sequence
  Synthetic oligonucleotide
tcactgtgcggtaatgaaataagtcatctg

SEQ ID NO: 99757 - DNA, 30 bp, Artificial Sequence
  Synthetic oligonucleotide
aaggagcatagcgcactcatacacgatctg

SEQ ID NO: 99758 - DNA, 30 bp, Artificial Sequence
  Synthetic oligonucleotide
gctgagctaacagagcatatgcaggatctg

SEQ ID NO: 99759 - DNA, 30 bp, Artificial Sequence
  Synthetic oligonucleotide
cgacgggcttgactcgggatgtcatatctg

SEQ ID NO: 99760 - DNA, 30 bp, Artificial Sequence
  Synthetic oligonucleotide
gacattgtcgggaaaagactagggtatctg

SEQ ID NO: 99761 - DNA, 30 bp, Artificial Sequence
  Synthetic oligonucleotide
gtgacatagtacatcgaagcgagcactctg

SEQ ID NO: 99762 - DNA, 30 bp, Artificial Sequence
  Synthetic oligonucleotide
ggggactccatagtgccacgggatactctg

SEQ ID NO: 99763 - DNA, 30 bp, Artificial Sequence
  Synthetic oligonucleotide
ttagaaactatgttccttcgccgtactctg

SEQ ID NO: 99764 - DNA, 30 bp, Artificial Sequence
  Synthetic oligonucleotide
gatgcccgactgccgcgtaaaccagctctg

SEQ ID NO: 99765 - DNA, 30 bp, Artificial Sequence
  Synthetic oligonucleotide
gaatggtgctcgatggttggttaatctctg

SEQ ID NO: 99766 - DNA, 30 bp, Artificial Sequence
  Synthetic oligonucleotide
gtcgtgtaatcggccacaagcggaagtctg

SEQ ID NO: 99767 - DNA, 30 bp, Artificial Sequence
  Synthetic oligonucleotide
agccagggtctattgcaactcttgcgtctg

SEQ ID NO: 99768 - DNA, 30 bp, Artificial Sequence
  Synthetic oligonucleotide
cgcaataggtgagcaaccgagcctcgtctg

SEQ ID NO: 99769 - DNA, 30 bp, Artificial Sequence
  Synthetic oligonucleotide
acagctgcgcttagtcaggagtcgtgtctg

SEQ ID NO: 99770 - DNA, 30 bp, Artificial Sequence
  Synthetic oligonucleotide
ctgctgatatggtacatgcgaggatttctg

SEQ ID NO: 99771 - DNA, 30 bp, Artificial Sequence
  Synthetic oligonucleotide
cagcgcgcgaaaggatagtgcaactttctg

SEQ ID NO: 99772 - DNA, 30 bp, Artificial Sequence
  Synthetic oligonucleotide
caagcggacttacacacgtgttcgtttctg

SEQ ID NO: 99773 - DNA, 30 bp, Artificial Sequence
  Synthetic oligonucleotide
cgatacatacggactttttccgaacaagtg

SEQ ID NO: 99774 - DNA, 30 bp, Artificial Sequence
  Synthetic oligonucleotide
gtggggccatggccagtgtagtatcaagtg

SEQ ID NO: 99775 - DNA, 30 bp, Artificial Sequence
  Synthetic oligonucleotide
atcgatgtgttaacagtagttcaagaagtg

SEQ ID NO: 99776 - DNA, 30 bp, Artificial Sequence
  Synthetic oligonucleotide
aaagaggttccccgtccgcatcttgaagtg

SEQ ID NO: 99777 - DNA, 30 bp, Artificial Sequence
  Synthetic oligonucleotide
gtatgaggataagcgaggcatggataagtg

SEQ ID NO: 99778 - DNA, 30 bp, Artificial Sequence
  Synthetic oligonucleotide
ccgggggaaagcaaacggtttcgtacagtg

SEQ ID NO: 99779 - DNA, 30 bp, Artificial Sequence
  Synthetic oligonucleotide
acacacgggagttcctagcttcgaccagtg

SEQ ID NO: 99780 - DNA, 30 bp, Artificial Sequence
  Synthetic oligonucleotide
aaggatagcatacttcagagtgagccagtg

SEQ ID NO: 99781 - DNA, 30 bp, Artificial Sequence
  Synthetic oligonucleotide
ggtcacacaacttacaaacaagtggcagtg

SEQ ID NO: 99782 - DNA, 30 bp, Artificial Sequence
  Synthetic oligonucleotide
tacatatcgttcacgagcggtgtggcagtg

SEQ ID NO: 99783 - DNA, 30 bp, Artificial Sequence
  Synthetic oligonucleotide
tgttaacgtccgctttgcgtaaatgcagtg

SEQ ID NO: 99784 - DNA, 30 bp, Artificial Sequence
  Synthetic oligonucleotide
gacagaagcggatcaattaaatgtgcagtg

SEQ ID NO: 99785 - DNA, 30 bp, Artificial Sequence
  Synthetic oligonucleotide
ggcctaaaatagtaggacttcgcatcagtg

SEQ ID NO: 99786 - DNA, 30 bp, Artificial Sequence
  Synthetic oligonucleotide
ccaaaagctaccactgaaattagatcagtg

SEQ ID NO: 99787 - DNA, 30 bp, Artificial Sequence
  Synthetic oligonucleotide
gcagtgccgaggtgcaagcatgtatcagtg

SEQ ID NO: 99788 - DNA, 30 bp, Artificial Sequence
  Synthetic oligonucleotide
gcatctgcaaaaggtaatcaagtttcagtg

SEQ ID NO: 99789 - DNA, 30 bp, Artificial Sequence
  Synthetic oligonucleotide
tgttgaacaatcaatcaaaagcagagagtg

SEQ ID NO: 99790 - DNA, 30 bp, Artificial Sequence
  Synthetic oligonucleotide
agattgctaaaatacagttagattcgagtg

SEQ ID NO: 99791 - DNA, 30 bp, Artificial Sequence
  Synthetic oligonucleotide
ccatagcaaatgaaagaacgcgttcgagtg

SEQ ID NO: 99792 - DNA, 30 bp, Artificial Sequence
  Synthetic oligonucleotide
cgtaggtcaagataataggacagcggagtg

SEQ ID NO: 99793 - DNA, 30 bp, Artificial Sequence
  Synthetic oligonucleotide
tttgagagggtgcttatcggctcgggagtg

SEQ ID NO: 99794 - DNA, 30 bp, Artificial Sequence
  Synthetic oligonucleotide
tcgaacttacagagataattatagtgagtg

SEQ ID NO: 99795 - DNA, 30 bp, Artificial Sequence
  Synthetic oligonucleotide
acagggcgagcgcatagatgagggtgagtg

SEQ ID NO: 99796 - DNA, 30 bp, Artificial Sequence
  Synthetic oligonucleotide
tgcgggtcgacgtcggagacctggatagtg

SEQ ID NO: 99797 - DNA, 30 bp, Artificial Sequence
  Synthetic oligonucleotide
tcgtctaaggggttaaccccgcgcctagtg

SEQ ID NO: 99798 - DNA, 30 bp, Artificial Sequence
  Synthetic oligonucleotide
agagcgatgcatgcgcataagtagctagtg

SEQ ID NO: 99799 - DNA, 30 bp, Artificial Sequence
  Synthetic oligonucleotide
cctacaagacataatgtggggcttctagtg

SEQ ID NO: 99800 - DNA, 30 bp, Artificial Sequence
  Synthetic oligonucleotide
ccaggtcctcaaaggggatgtctagtagtg

SEQ ID NO: 99801 - DNA, 30 bp, Artificial Sequence
  Synthetic oligonucleotide
gaggcgactaggggttcatatttagtagtg

SEQ ID NO: 99802 - DNA, 30 bp, Artificial Sequence
  Synthetic oligonucleotide
agcaggagaacgttagttggctaattagtg

SEQ ID NO: 99803 - DNA, 30 bp, Artificial Sequence
  Synthetic oligonucleotide
tagatgtctcgccgcgtttcaagcttagtg

SEQ ID NO: 99804 - DNA, 30 bp, Artificial Sequence
  Synthetic oligonucleotide
taaagaaagagtaatggattaaagttagtg

SEQ ID NO: 99805 - DNA, 30 bp, Artificial Sequence
  Synthetic oligonucleotide
gaagaacaacagatacgatgctgcaacgtg

SEQ ID NO: 99806 - DNA, 30 bp, Artificial Sequence
  Synthetic oligonucleotide
gatagcccaggaaaagtgttacggaacgtg

SEQ ID NO: 99807 - DNA, 30 bp, Artificial Sequence
  Synthetic oligonucleotide
cgactgtatggaagcaacaactagcacgtg

SEQ ID NO: 99808 - DNA, 30 bp, Artificial Sequence
  Synthetic oligonucleotide
tattagcagccgttaagaaacattcacgtg

SEQ ID NO: 99809 - DNA, 30 bp, Artificial Sequence
  Synthetic oligonucleotide
tctccctggcgataagaaccagacgacgtg

SEQ ID NO: 99810 - DNA, 30 bp, Artificial Sequence
  Synthetic oligonucleotide
gcgctactgggtattggaactactgacgtg

SEQ ID NO: 99811 - DNA, 30 bp, Artificial Sequence
  Synthetic oligonucleotide
cgtctatcttcggcttcagcctcatacgtg

SEQ ID NO: 99812 - DNA, 30 bp, Artificial Sequence
  Synthetic oligonucleotide
tctagacccgttggacggttacgatacgtg

SEQ ID NO: 99813 - DNA, 30 bp, Artificial Sequence
  Synthetic oligonucleotide
acggagagtagttcctgttaaatctacgtg

SEQ ID NO: 99814 - DNA, 30 bp, Artificial Sequence
  Synthetic oligonucleotide
gagagatgatcactacgatgaacttacgtg

SEQ ID NO: 99815 - DNA, 30 bp, Artificial Sequence
  Synthetic oligonucleotide
ttcgctatggtgaagacagtgtcaaccgtg

SEQ ID NO: 99816 - DNA, 30 bp, Artificial Sequence
  Synthetic oligonucleotide
acagtgtgttgaggttacggtcacgccgtg

SEQ ID NO: 99817 - DNA, 30 bp, Artificial Sequence
  Synthetic oligonucleotide
ggatcgccaaactccactgacccggccgtg

SEQ ID NO: 99818 - DNA, 30 bp, Artificial Sequence
  Synthetic oligonucleotide
caatcctagagcggatgatcgaaatccgtg

SEQ ID NO: 99819 - DNA, 30 bp, Artificial Sequence
  Synthetic oligonucleotide
atgttccgtaccagaagaacttactccgtg

SEQ ID NO: 99820 - DNA, 30 bp, Artificial Sequence
  Synthetic oligonucleotide
cgctcactgaccgaactcgcaaagtccgtg

SEQ ID NO: 99821 - DNA, 30 bp, Artificial Sequence
  Synthetic oligonucleotide
gaagtgcgaacacttccgtgtaaaagcgtg

SEQ ID NO: 99822 - DNA, 30 bp, Artificial Sequence
  Synthetic oligonucleotide
aaagcacaataatgaaaccacggtagcgtg

SEQ ID NO: 99823 - DNA, 30 bp, Artificial Sequence
  Synthetic oligonucleotide
tatccaggtacgattatcgcctaccgcgtg

SEQ ID NO: 99824 - DNA, 30 bp, Artificial Sequence
  Synthetic oligonucleotide
cgaggacgatcccggatcaaactccgcgtg

SEQ ID NO: 99825 - DNA, 29 bp, Artificial Sequence
  Synthetic oligonucleotide
tggagctgcggttatagaatactcgcgtg

SEQ ID NO: 99826 - DNA, 30 bp, Artificial Sequence
  Synthetic oligonucleotide
ggtggtacgtgcttcggttattctcgcgtg

SEQ ID NO: 99827 - DNA, 30 bp, Artificial Sequence
  Synthetic oligonucleotide
catccgagcttaggttatcttgttcgcgtg

SEQ ID NO: 99828 - DNA, 30 bp, Artificial Sequence
  Synthetic oligonucleotide
ccaatgcggacctggggcccagccggcgtg

SEQ ID NO: 99829 - DNA, 30 bp, Artificial Sequence
  Synthetic oligonucleotide
atatgaagaaatacctcgatagctggcgtg

SEQ ID NO: 99830 - DNA, 30 bp, Artificial Sequence
  Synthetic oligonucleotide
tagcaaaagcaaaggagttataactgcgtg

SEQ ID NO: 99831 - DNA, 30 bp, Artificial Sequence
  Synthetic oligonucleotide
ttgggcagaccgtgttttattgtttgcgtg

SEQ ID NO: 99832 - DNA, 30 bp, Artificial Sequence
  Synthetic oligonucleotide
tactaacccaagtgatcgcaccccatcgtg

SEQ ID NO: 99833 - DNA, 30 bp, Artificial Sequence
  Synthetic oligonucleotide
gtgcccggttaagagtagagatcgatcgtg

SEQ ID NO: 99834 - DNA, 30 bp, Artificial Sequence
  Synthetic oligonucleotide
ggacctgatgatctaagtgtcaacgtcgtg

SEQ ID NO: 99835 - DNA, 30 bp, Artificial Sequence
  Synthetic oligonucleotide
cagactagtagaaaaaccgccggcgtcgtg

SEQ ID NO: 99836 - DNA, 30 bp, Artificial Sequence
  Synthetic oligonucleotide
cttttgcgcggaaaaaggataaaggtcgtg

SEQ ID NO: 99837 - DNA, 30 bp, Artificial Sequence
  Synthetic oligonucleotide
ccaacgtcgcattggaagactcatgtcgtg

SEQ ID NO: 99838 - DNA, 30 bp, Artificial Sequence
  Synthetic oligonucleotide
cgctataaggggtcttatcacatcttcgtg

SEQ ID NO: 99839 - DNA, 30 bp, Artificial Sequence
  Synthetic oligonucleotide
agcagagggaatgcttgtcctcacaaggtg

SEQ ID NO: 99840 - DNA, 30 bp, Artificial Sequence
  Synthetic oligonucleotide
caattaggcatacctatcgaatgtaaggtg

SEQ ID NO: 99841 - DNA, 30 bp, Artificial Sequence
  Synthetic oligonucleotide
agcaatgtggtaattcagggatctgaggtg

SEQ ID NO: 99842 - DNA, 30 bp, Artificial Sequence
  Synthetic oligonucleotide
gtagtgcgagggtaaggtctaagtgaggtg

SEQ ID NO: 99843 - DNA, 30 bp, Artificial Sequence
  Synthetic oligonucleotide
acgtacgactctcatagagacgtataggtg

SEQ ID NO: 99844 - DNA, 30 bp, Artificial Sequence
  Synthetic oligonucleotide
cacgatctccgcggtccgccatagtaggtg

SEQ ID NO: 99845 - DNA, 30 bp, Artificial Sequence
  Synthetic oligonucleotide
tcagtaatacgaaactcatcccaaacggtg

SEQ ID NO: 99846 - DNA, 30 bp, Artificial Sequence
  Synthetic oligonucleotide
agatttcggggactagagtcaaatccggtg

SEQ ID NO: 99847 - DNA, 30 bp, Artificial Sequence
  Synthetic oligonucleotide
cgctgaaatatggcacgggtaccggcggtg

SEQ ID NO: 99848 - DNA, 30 bp, Artificial Sequence
  Synthetic oligonucleotide
aggccaggcggagaacatcagagggcggtg

SEQ ID NO: 99849 - DNA, 30 bp, Artificial Sequence
  Synthetic oligonucleotide
cggggtcaatttccagaaggaattgcggtg

SEQ ID NO: 99850 - DNA, 30 bp, Artificial Sequence
  Synthetic oligonucleotide
gcaggcagctgcatgctgctcaaatcggtg

SEQ ID NO: 99851 - DNA, 30 bp, Artificial Sequence
  Synthetic oligonucleotide
accaggaaagttcaagtagtaacatcggtg

SEQ ID NO: 99852 - DNA, 30 bp, Artificial Sequence
  Synthetic oligonucleotide
ggcttaggagcagcaatacatagctcggtg

SEQ ID NO: 99853 - DNA, 30 bp, Artificial Sequence
  Synthetic oligonucleotide
gtcagaaattatattacatcatcttcggtg

SEQ ID NO: 99854 - DNA, 30 bp, Artificial Sequence
  Synthetic oligonucleotide
ccatgaatctcagtgatagggctaagggtg

SEQ ID NO: 99855 - DNA, 30 bp, Artificial Sequence
  Synthetic oligonucleotide
cgtgcttcctaagtttgaccaggacgggtg

SEQ ID NO: 99856 - DNA, 30 bp, Artificial Sequence
  Synthetic oligonucleotide
ggttatagcatggatcagaaatgacgggtg

SEQ ID NO: 99857 - DNA, 30 bp, Artificial Sequence
  Synthetic oligonucleotide
gggcaatcggcaggttaattcaaccgggtg

SEQ ID NO: 99858 - DNA, 30 bp, Artificial Sequence
  Synthetic oligonucleotide
ttcgcgatgggaaccagatgttagcgggtg

SEQ ID NO: 99859 - DNA, 30 bp, Artificial Sequence
  Synthetic oligonucleotide
tagtgcagacagctcgggttatgaggggtg

SEQ ID NO: 99860 - DNA, 30 bp, Artificial Sequence
  Synthetic oligonucleotide
ggatgtgaagactacccgtgtatcggggtg

SEQ ID NO: 99861 - DNA, 30 bp, Artificial Sequence
  Synthetic oligonucleotide
tgcgcgcatgctttaccgaggtctggggtg

SEQ ID NO: 99862 - DNA, 30 bp, Artificial Sequence
  Synthetic oligonucleotide
gggataattaaactcggcgcacgttgggtg

SEQ ID NO: 99863 - DNA, 30 bp, Artificial Sequence
  Synthetic oligonucleotide
gtctcatatcggcatgtcgtcatttgggtg

SEQ ID NO: 99864 - DNA, 30 bp, Artificial Sequence
  Synthetic oligonucleotide
acgactccagaaggagaagcgaaaatggtg

SEQ ID NO: 99865 - DNA, 30 bp, Artificial Sequence
  Synthetic oligonucleotide
tgtaattcgcccggtgctcggctaatggtg

SEQ ID NO: 99866 - DNA, 30 bp, Artificial Sequence
  Synthetic oligonucleotide
ataggttgttcggctaacggccacatggtg

SEQ ID NO: 99867 - DNA, 30 bp, Artificial Sequence
  Synthetic oligonucleotide
tacgcgaggccggcccccaggaatatggtg

SEQ ID NO: 99868 - DNA, 30 bp, Artificial Sequence
  Synthetic oligonucleotide
tgagggccggataagcgaagtcgtatggtg

SEQ ID NO: 99869 - DNA, 30 bp, Artificial Sequence
  Synthetic oligonucleotide
ttagaggttatccaatacgagtcactggtg

SEQ ID NO: 99870 - DNA, 30 bp, Artificial Sequence
  Synthetic oligonucleotide
atggtgtcggttatttagtgcgccctggtg

SEQ ID NO: 99871 - DNA, 30 bp, Artificial Sequence
  Synthetic oligonucleotide
gggttagctgtggcctgggcttgcctggtg

SEQ ID NO: 99872 - DNA, 30 bp, Artificial Sequence
  Synthetic oligonucleotide
tcggaaggggttgtgaggtacagagtggtg

SEQ ID NO: 99873 - DNA, 30 bp, Artificial Sequence
  Synthetic oligonucleotide
cgcatctgaacatattctacttccgtggtg

SEQ ID NO: 99874 - DNA, 30 bp, Artificial Sequence
  Synthetic oligonucleotide
tggacatgtactgtatactattgcgtggtg

SEQ ID NO: 99875 - DNA, 30 bp, Artificial Sequence
  Synthetic oligonucleotide
ccacgctgttatttgccgcaaggcttggtg

SEQ ID NO: 99876 - DNA, 30 bp, Artificial Sequence
  Synthetic oligonucleotide
ggcacgcctagcctaagatgcaggttggtg

SEQ ID NO: 99877 - DNA, 30 bp, Artificial Sequence
  Synthetic oligonucleotide
gcccaatccggatgtagaaaagacaatgtg

SEQ ID NO: 99878 - DNA, 30 bp, Artificial Sequence
  Synthetic oligonucleotide
cgttactcccactccgagaagtataatgtg

SEQ ID NO: 99879 - DNA, 30 bp, Artificial Sequence
  Synthetic oligonucleotide
ttcaatagctacgcgacaaaataacatgtg

SEQ ID NO: 99880 - DNA, 30 bp, Artificial Sequence
  Synthetic oligonucleotide
aaatagaggacggaaaaattcccccatgtg

SEQ ID NO: 99881 - DNA, 30 bp, Artificial Sequence
  Synthetic oligonucleotide
taactgactaactcactgcgatgtcatgtg

SEQ ID NO: 99882 - DNA, 30 bp, Artificial Sequence
  Synthetic oligonucleotide
aacgataactctagcccttaatgagatgtg

SEQ ID NO: 99883 - DNA, 31 bp, Artificial Sequence
  Synthetic oligonucleotide
cgggaattattgccatgtccctaccgatgtg

SEQ ID NO: 99884 - DNA, 30 bp, Artificial Sequence
  Synthetic oligonucleotide
gctagtgttagctcccatagggaggatgtg

SEQ ID NO: 99885 - DNA, 30 bp, Artificial Sequence
  Synthetic oligonucleotide
gacttatgaaggcacgtcacctgggatgtg

SEQ ID NO: 99886 - DNA, 30 bp, Artificial Sequence
  Synthetic oligonucleotide
tcgcactggggtaccgccgcgtcaactgtg

SEQ ID NO: 99887 - DNA, 30 bp, Artificial Sequence
  Synthetic oligonucleotide
cagccagtcgtctaaagcaatgagcctgtg

SEQ ID NO: 99888 - DNA, 30 bp, Artificial Sequence
  Synthetic oligonucleotide
tacgtgatgggcaacatatgcacggctgtg

SEQ ID NO: 99889 - DNA, 30 bp, Artificial Sequence
  Synthetic oligonucleotide
gcgaatggtaacttccaggcataatctgtg

SEQ ID NO: 99890 - DNA, 30 bp, Artificial Sequence
  Synthetic oligonucleotide
gctcaaccgataaggaggtacaagagtgtg

SEQ ID NO: 99891 - DNA, 30 bp, Artificial Sequence
  Synthetic oligonucleotide
ggagcaaatagaaaggttaatgggagtgtg

SEQ ID NO: 99892 - DNA, 30 bp, Artificial Sequence
  Synthetic oligonucleotide
tcggtagggcgcctagctagcgatagtgtg

SEQ ID NO: 99893 - DNA, 30 bp, Artificial Sequence
  Synthetic oligonucleotide
cgggagtttgtggttggtgtagttagtgtg

SEQ ID NO: 99894 - DNA, 30 bp, Artificial Sequence
  Synthetic oligonucleotide
ggttaggcacgatcatggtggttgcgtgtg

SEQ ID NO: 99895 - DNA, 30 bp, Artificial Sequence
  Synthetic oligonucleotide
gggtatagcgcccagatgtgaacatgtgtg

SEQ ID NO: 99896 - DNA, 30 bp, Artificial Sequence
  Synthetic oligonucleotide
acaggcatgagcctacagtaatcgtgtgtg

SEQ ID NO: 99897 - DNA, 30 bp, Artificial Sequence
  Synthetic oligonucleotide
cacccaaggaatgtgggatgtgtgtgtgtg

SEQ ID NO: 99898 - DNA, 30 bp, Artificial Sequence
  Synthetic oligonucleotide
tacactacgaacgtcccggcatcttgtgtg

SEQ ID NO: 99899 - DNA, 30 bp, Artificial Sequence
  Synthetic oligonucleotide
taattatggaacagaccactccctattgtg

SEQ ID NO: 99900 - DNA, 30 bp, Artificial Sequence
  Synthetic oligonucleotide
ccgcatgacaaaactagtccaggtattgtg

SEQ ID NO: 99901 - DNA, 30 bp, Artificial Sequence
  Synthetic oligonucleotide
cacgagctaatttgtgtatggtaacttgtg

SEQ ID NO: 99902 - DNA, 30 bp, Artificial Sequence
  Synthetic oligonucleotide
ctggacatgggatatacgtcaccacttgtg

SEQ ID NO: 99903 - DNA, 30 bp, Artificial Sequence
  Synthetic oligonucleotide
caccaaacacagagcccgcaataagttgtg

SEQ ID NO: 99904 - DNA, 30 bp, Artificial Sequence
  Synthetic oligonucleotide
atcacattatatagggtggcatatgttgtg

SEQ ID NO: 99905 - DNA, 30 bp, Artificial Sequence
  Synthetic oligonucleotide
ataccaacggattgcgaaatggaatttgtg

SEQ ID NO: 99906 - DNA, 30 bp, Artificial Sequence
  Synthetic oligonucleotide
atacaaagtctcaccgacactaggtttgtg

SEQ ID NO: 99907 - DNA, 30 bp, Artificial Sequence
  Synthetic oligonucleotide
caatcataaagtctcgtcgtgcaaaaattg

SEQ ID NO: 99908 - DNA, 30 bp, Artificial Sequence
  Synthetic oligonucleotide
tccgggcggacctctggagcatccaaattg

SEQ ID NO: 99909 - DNA, 30 bp, Artificial Sequence
  Synthetic oligonucleotide
acaaggagtaaatattagggcgtcaaattg

SEQ ID NO: 99910 - DNA, 30 bp, Artificial Sequence
  Synthetic oligonucleotide
ccgacttttgtcatgacatgtgggaaattg

SEQ ID NO: 99911 - DNA, 30 bp, Artificial Sequence
  Synthetic oligonucleotide
tgagtgataaaccaagagagcgcagaattg

SEQ ID NO: 99912 - DNA, 30 bp, Artificial Sequence
  Synthetic oligonucleotide
gcatcgcctcgtattaatcagcgggaattg

SEQ ID NO: 99913 - DNA, 30 bp, Artificial Sequence
  Synthetic oligonucleotide
ccagaaagtatacgttcgagcatggaattg

SEQ ID NO: 99914 - DNA, 30 bp, Artificial Sequence
  Synthetic oligonucleotide
aggaaaggtgatgaaaccccttgttaattg

SEQ ID NO: 99915 - DNA, 30 bp, Artificial Sequence
  Synthetic oligonucleotide
cagtgcaatcgcacgagtacggaaccattg

SEQ ID NO: 99916 - DNA, 30 bp, Artificial Sequence
  Synthetic oligonucleotide
ttaaggagcagattcgatccggaaccattg

SEQ ID NO: 99917 - DNA, 30 bp, Artificial Sequence
  Synthetic oligonucleotide
tatcgatgaccggtagcgtgcataccattg

SEQ ID NO: 99918 - DNA, 30 bp, Artificial Sequence
  Synthetic oligonucleotide
tgtgcaccgggggcatgtcctacgccattg

SEQ ID NO: 99919 - DNA, 30 bp, Artificial Sequence
  Synthetic oligonucleotide
cgagacagtaacggttgcacaccagcattg

SEQ ID NO: 99920 - DNA, 30 bp, Artificial Sequence
  Synthetic oligonucleotide
tcaacaggcgctaatacttacccagcattg

SEQ ID NO: 99921 - DNA, 30 bp, Artificial Sequence
  Synthetic oligonucleotide
tattagcgcatagcgaggagttaggcattg

SEQ ID NO: 99922 - DNA, 30 bp, Artificial Sequence
  Synthetic oligonucleotide
tgtaaggggtaactcccgtaaccggcattg

SEQ ID NO: 99923 - DNA, 30 bp, Artificial Sequence
  Synthetic oligonucleotide
tatatcgcgccctattgaaggagtgcattg

SEQ ID NO: 99924 - DNA, 30 bp, Artificial Sequence
  Synthetic oligonucleotide
cgttggtgtgggctaaaagcgtgtgcattg

SEQ ID NO: 99925 - DNA, 30 bp, Artificial Sequence
  Synthetic oligonucleotide
gtatcacagcgtctaatctgtgcatcattg

SEQ ID NO: 99926 - DNA, 30 bp, Artificial Sequence
  Synthetic oligonucleotide
caagtccgcttgtttgcaacatagtcattg

SEQ ID NO: 99927 - DNA, 30 bp, Artificial Sequence
  Synthetic oligonucleotide
aacgaagtgaggcgagctaggctaagattg

SEQ ID NO: 99928 - DNA, 30 bp, Artificial Sequence
  Synthetic oligonucleotide
aaagcgcgtacttgatcagttttaagattg

SEQ ID NO: 99929 - DNA, 30 bp, Artificial Sequence
  Synthetic oligonucleotide
caaaatttagtcagtccgaaatggagattg

SEQ ID NO: 99930 - DNA, 30 bp, Artificial Sequence
  Synthetic oligonucleotide
gcagcatgggctgtgacaaggggtagattg

SEQ ID NO: 99931 - DNA, 30 bp, Artificial Sequence
  Synthetic oligonucleotide
tggcctatccgaataagaacatgtagattg

SEQ ID NO: 99932 - DNA, 30 bp, Artificial Sequence
  Synthetic oligonucleotide
gtccaagcgatacctaacatccaacgattg

SEQ ID NO: 99933 - DNA, 30 bp, Artificial Sequence
  Synthetic oligonucleotide
tcaagggaccaagtcctcacaaggggattg

SEQ ID NO: 99934 - DNA, 30 bp, Artificial Sequence
  Synthetic oligonucleotide
cgtgacaatttcagtttggcatctggattg

SEQ ID NO: 99935 - DNA, 30 bp, Artificial Sequence
  Synthetic oligonucleotide
cggacccagttgactaaagccttatgattg

SEQ ID NO: 99936 - DNA, 30 bp, Artificial Sequence
  Synthetic oligonucleotide
tacatcacttatgcgcctacattctgattg

SEQ ID NO: 99937 - DNA, 30 bp, Artificial Sequence
  Synthetic oligonucleotide
actaaattcacggctggaacaacgtgattg

SEQ ID NO: 99938 - DNA, 30 bp, Artificial Sequence
  Synthetic oligonucleotide
cccgagggaatgctctgcttgtgttgattg

SEQ ID NO: 99939 - DNA, 28 bp, Artificial Sequence
  Synthetic oligonucleotide
gattgctcaggtggagccagggatattg

SEQ ID NO: 99940 - DNA, 31 bp, Artificial Sequence
  Synthetic oligonucleotide
cggctcatacggatagagggactatatattg

SEQ ID NO: 99941 - DNA, 30 bp, Artificial Sequence
  Synthetic oligonucleotide
tcgaatatgactgcaataatgcacctattg

SEQ ID NO: 99942 - DNA, 30 bp, Artificial Sequence
  Synthetic oligonucleotide
ctagatgtaatacacacggtaccgctattg

SEQ ID NO: 99943 - DNA, 30 bp, Artificial Sequence
  Synthetic oligonucleotide
atcacgttgcgaataattcagactctattg

SEQ ID NO: 99944 - DNA, 30 bp, Artificial Sequence
  Synthetic oligonucleotide
ctaatccacgggagatctgcaatcgtattg

SEQ ID NO: 99945 - DNA, 30 bp, Artificial Sequence
  Synthetic oligonucleotide
acggtctggaaccacagctgatcggtattg

SEQ ID NO: 99946 - DNA, 30 bp, Artificial Sequence
  Synthetic oligonucleotide
tgaggaattatcacgaaccgtattgtattg

SEQ ID NO: 99947 - DNA, 30 bp, Artificial Sequence
  Synthetic oligonucleotide
agcgaattaaagaccatacccgatttattg

SEQ ID NO: 99948 - DNA, 30 bp, Artificial Sequence
  Synthetic oligonucleotide
ggatgactctgagcagaaaagtccaacttg

SEQ ID NO: 99949 - DNA, 30 bp, Artificial Sequence
  Synthetic oligonucleotide
tgttgaagcatgggaacgagggcgaacttg

SEQ ID NO: 99950 - DNA, 30 bp, Artificial Sequence
  Synthetic oligonucleotide
aggagaatctcatgatgtcatccagacttg

SEQ ID NO: 99951 - DNA, 29 bp, Artificial Sequence
  Synthetic oligonucleotide
ccaagaggaaactcgtgtgaacggacttg

SEQ ID NO: 99952 - DNA, 30 bp, Artificial Sequence
  Synthetic oligonucleotide
ctatgacgacgggacatctggacatacttg

SEQ ID NO: 99953 - DNA, 30 bp, Artificial Sequence
  Synthetic oligonucleotide
ccgacgtgcaaagtgtgctgactatacttg

SEQ ID NO: 99954 - DNA, 30 bp, Artificial Sequence
  Synthetic oligonucleotide
atacacgacaacagttgacacccaaccttg

SEQ ID NO: 99955 - DNA, 30 bp, Artificial Sequence
  Synthetic oligonucleotide
agaaacttgtcaatgcctaagtaacccttg

SEQ ID NO: 99956 - DNA, 30 bp, Artificial Sequence
  Synthetic oligonucleotide
gtcagtcgaacattgctaagtgtacccttg

SEQ ID NO: 99957 - DNA, 30 bp, Artificial Sequence
  Synthetic oligonucleotide
caccaggaaagccttaaatcgcgatccttg

SEQ ID NO: 99958 - DNA, 30 bp, Artificial Sequence
  Synthetic oligonucleotide
caatggaacagtgaaagtgcaaggtccttg

SEQ ID NO: 99959 - DNA, 30 bp, Artificial Sequence
  Synthetic oligonucleotide
tgtagtagtgtaacgggactaagcagcttg

SEQ ID NO: 99960 - DNA, 30 bp, Artificial Sequence
  Synthetic oligonucleotide
gactaatacaccaacggtggtatacgcttg

SEQ ID NO: 99961 - DNA, 30 bp, Artificial Sequence
  Synthetic oligonucleotide
aggcggtcgtgcaggctctcgcaaggcttg

SEQ ID NO: 99962 - DNA, 30 bp, Artificial Sequence
  Synthetic oligonucleotide
catctgtattccctaagttagtcaggcttg

SEQ ID NO: 99963 - DNA, 30 bp, Artificial Sequence
  Synthetic oligonucleotide
gggagacaacgatgttctactgtaggcttg

SEQ ID NO: 99964 - DNA, 30 bp, Artificial Sequence
  Synthetic oligonucleotide
agctgcggtcaagtttgcgggcatggcttg

SEQ ID NO: 99965 - DNA, 31 bp, Artificial Sequence
  Synthetic oligonucleotide
ccagaaatgagtaatatgtacaaaatgcttg

SEQ ID NO: 99966 - DNA, 30 bp, Artificial Sequence
  Synthetic oligonucleotide
ataggattctgatatgcaagtaggtgcttg

SEQ ID NO: 99967 - DNA, 30 bp, Artificial Sequence
  Synthetic oligonucleotide
tacacactgagggtgcaagggttgtgcttg

SEQ ID NO: 99968 - DNA, 30 bp, Artificial Sequence
  Synthetic oligonucleotide
acactaacctgtcacgaacagcgaatcttg

SEQ ID NO: 99969 - DNA, 30 bp, Artificial Sequence
  Synthetic oligonucleotide
ccttctcagtctcatatgtccaccatcttg

SEQ ID NO: 99970 - DNA, 30 bp, Artificial Sequence
  Synthetic oligonucleotide
aaggaggtctaccccttgatacgattcttg

SEQ ID NO: 99971 - DNA, 30 bp, Artificial Sequence
  Synthetic oligonucleotide
gccggtgattggatcgttgaggacaagttg

SEQ ID NO: 99972 - DNA, 30 bp, Artificial Sequence
  Synthetic oligonucleotide
gatcgagtctgatccttacacgaccagttg

SEQ ID NO: 99973 - DNA, 30 bp, Artificial Sequence
  Synthetic oligonucleotide
taggaaggaacaacaagatccggagagttg

SEQ ID NO: 99974 - DNA, 30 bp, Artificial Sequence
  Synthetic oligonucleotide
tccagtgcgttggtctggtccggtgagttg

SEQ ID NO: 99975 - DNA, 30 bp, Artificial Sequence
  Synthetic oligonucleotide
attcgcgctggattgtaatcatgtgagttg

SEQ ID NO: 99976 - DNA, 30 bp, Artificial Sequence
  Synthetic oligonucleotide
acccagggcaaaaccgatggcccatagttg

SEQ ID NO: 99977 - DNA, 30 bp, Artificial Sequence
  Synthetic oligonucleotide
caggaccacgaaaataacaatcggtagttg

SEQ ID NO: 99978 - DNA, 30 bp, Artificial Sequence
  Synthetic oligonucleotide
tggtcttgtaacagggcaccgaattagttg

SEQ ID NO: 99979 - DNA, 30 bp, Artificial Sequence
  Synthetic oligonucleotide
ctagatgatcacacgatggtgtagacgttg

SEQ ID NO: 99980 - DNA, 29 bp, Artificial Sequence
  Synthetic oligonucleotide
taccgtgcacggtacgtaacaggacgttg

SEQ ID NO: 99981 - DNA, 30 bp, Artificial Sequence
  Synthetic oligonucleotide
agtaacgatggatcgatgcgaagtacgttg

SEQ ID NO: 99982 - DNA, 30 bp, Artificial Sequence
  Synthetic oligonucleotide
cgccggatattgaaactggggagtacgttg

SEQ ID NO: 99983 - DNA, 30 bp, Artificial Sequence
  Synthetic oligonucleotide
tatggggaattcctgccgtgtgagccgttg

SEQ ID NO: 99984 - DNA, 30 bp, Artificial Sequence
  Synthetic oligonucleotide
agcgttagcaccgcagagcgtacagcgttg

SEQ ID NO: 99985 - DNA, 30 bp, Artificial Sequence
  Synthetic oligonucleotide
cggttgcgtgggtcaccacagggcgcgttg

SEQ ID NO: 99986 - DNA, 29 bp, Artificial Sequence
  Synthetic oligonucleotide
actagaatagaaaggggctttgggcgttg

SEQ ID NO: 99987 - DNA, 30 bp, Artificial Sequence
  Synthetic oligonucleotide
gcgacataggtcatcaagagactctcgttg

SEQ ID NO: 99988 - DNA, 30 bp, Artificial Sequence
  Synthetic oligonucleotide
tggcgggtctagggttcatagcaaaggttg

SEQ ID NO: 99989 - DNA, 30 bp, Artificial Sequence
  Synthetic oligonucleotide
tgatcgtcggatccctctgggcagaggttg

SEQ ID NO: 99990 - DNA, 30 bp, Artificial Sequence
  Synthetic oligonucleotide
cgtcagtgtgctgaggtactgcggcggttg

SEQ ID NO: 99991 - DNA, 30 bp, Artificial Sequence
  Synthetic oligonucleotide
ccaaaaggacacactgttagtattcggttg

SEQ ID NO: 99992 - DNA, 30 bp, Artificial Sequence
  Synthetic oligonucleotide
gagcgaggaccactcgttcttaaagggttg

SEQ ID NO: 99993 - DNA, 30 bp, Artificial Sequence
  Synthetic oligonucleotide
agttgaggacctgccccatggatagggttg

SEQ ID NO: 99994 - DNA, 30 bp, Artificial Sequence
  Synthetic oligonucleotide
tgcgttagagcgatcacaatcaacgggttg

SEQ ID NO: 99995 - DNA, 30 bp, Artificial Sequence
  Synthetic oligonucleotide
tgtcacttgagcaattggaccgaggggttg

SEQ ID NO: 99996 - DNA, 30 bp, Artificial Sequence
  Synthetic oligonucleotide
gaatgctaactatccgcggaatgtgggttg

SEQ ID NO: 99997 - DNA, 30 bp, Artificial Sequence
  Synthetic oligonucleotide
ggctattcaggcggaaaaatacaactgttg

SEQ ID NO: 99998 - DNA, 30 bp, Artificial Sequence
  Synthetic oligonucleotide
gattcaggatcgaaatggggtatactgttg

SEQ ID NO: 99999 - DNA, 30 bp, Artificial Sequence
  Synthetic oligonucleotide
tgattacggctccgactggtaacggtgttg

SEQ ID NO: 100000 - DNA, 30 bp, Artificial Sequence
  Synthetic oligonucleotide
ccggtgcaccttcttaaagtggaattgttg

SEQ ID NO: 100001 - DNA, 30 bp, Artificial Sequence
  Synthetic oligonucleotide
agcaggggaaaatttgccgctcgattgttg

SEQ ID NO: 100002 - DNA, 30 bp, Artificial Sequence
  Synthetic oligonucleotide
tagacatgaacgacagtccttcaaaatttg

SEQ ID NO: 100003 - DNA, 30 bp, Artificial Sequence
  Synthetic oligonucleotide
taactactacaatgatccaggtgaaatttg

SEQ ID NO: 100004 - DNA, 30 bp, Artificial Sequence
  Synthetic oligonucleotide
cctatcagcgtaaattgaggagttcatttg

SEQ ID NO: 100005 - DNA, 30 bp, Artificial Sequence
  Synthetic oligonucleotide
ttacgagcctcggaagaaatcgccgatttg

SEQ ID NO: 100006 - DNA, 30 bp, Artificial Sequence
  Synthetic oligonucleotide
acacgccgtctttgtcacactactgatttg

SEQ ID NO: 100007 - DNA, 30 bp, Artificial Sequence
  Synthetic oligonucleotide
ggctcgagcaaagttatgagttgatatttg

SEQ ID NO: 100008 - DNA, 30 bp, Artificial Sequence
  Synthetic oligonucleotide
cgtcgacgaatagtcgtcgttctatatttg

SEQ ID NO: 100009 - DNA, 30 bp, Artificial Sequence
  Synthetic oligonucleotide
ggaatgtgttgctagcttagtccctatttg

SEQ ID NO: 100010 - DNA, 30 bp, Artificial Sequence
  Synthetic oligonucleotide
cgggaacagccccccttacggcggtatttg

SEQ ID NO: 100011 - DNA, 30 bp, Artificial Sequence
  Synthetic oligonucleotide
aaaactcacaccaagtacacaccaactttg

SEQ ID NO: 100012 - DNA, 30 bp, Artificial Sequence
  Synthetic oligonucleotide
ctggggtagggtgccttactatgagctttg

SEQ ID NO: 100013 - DNA, 30 bp, Artificial Sequence
  Synthetic oligonucleotide
ggaatgaaggagacaccgacgatttctttg

SEQ ID NO: 100014 - DNA, 30 bp, Artificial Sequence
  Synthetic oligonucleotide
tccatacgaaccctccgggacagaagtttg

SEQ ID NO: 100015 - DNA, 30 bp, Artificial Sequence
  Synthetic oligonucleotide
catgcccccagtaccgctagcggaagtttg

SEQ ID NO: 100016 - DNA, 30 bp, Artificial Sequence
  Synthetic oligonucleotide
gttcgatgaaagtcaggggatcacagtttg

SEQ ID NO: 100017 - DNA, 30 bp, Artificial Sequence
  Synthetic oligonucleotide
gtgcatcaaccagacggtggccagagtttg

SEQ ID NO: 100018 - DNA, 30 bp, Artificial Sequence
  Synthetic oligonucleotide
caaccttcctagtgtagccgatcgagtttg

SEQ ID NO: 100019 - DNA, 30 bp, Artificial Sequence
  Synthetic oligonucleotide
tggcctaccgagaaccgacagtctagtttg

SEQ ID NO: 100020 - DNA, 30 bp, Artificial Sequence
  Synthetic oligonucleotide
agtaaggagtaaggatgtatagaacgtttg

SEQ ID NO: 100021 - DNA, 30 bp, Artificial Sequence
  Synthetic oligonucleotide
aaggcatagaaacataaatagcgccgtttg

SEQ ID NO: 100022 - DNA, 30 bp, Artificial Sequence
  Synthetic oligonucleotide
gatgagtagagcgcgagtaatggccgtttg

SEQ ID NO: 100023 - DNA, 30 bp, Artificial Sequence
  Synthetic oligonucleotide
tcaactcatcacacctcatgttggcgtttg

SEQ ID NO: 100024 - DNA, 30 bp, Artificial Sequence
  Synthetic oligonucleotide
acagggtgttcattcgggcttgttcgtttg

SEQ ID NO: 100025 - DNA, 30 bp, Artificial Sequence
  Synthetic oligonucleotide
tcagccgtcgctgccacggtaacatgtttg

SEQ ID NO: 100026 - DNA, 30 bp, Artificial Sequence
  Synthetic oligonucleotide
gattcagcggggacagatgtcaccattttg

SEQ ID NO: 100027 - DNA, 30 bp, Artificial Sequence
  Synthetic oligonucleotide
gaacgtagtgatggcgtcgtacatattttg

SEQ ID NO: 100028 - DNA, 30 bp, Artificial Sequence
  Synthetic oligonucleotide
cgattggacaatgtgcgcgttgcagttttg

SEQ ID NO: 100029 - DNA, 30 bp, Artificial Sequence
  Synthetic oligonucleotide
gttaaaccccagaaatgccgtcagtttttg

SEQ ID NO: 100030 - DNA, 30 bp, Artificial Sequence
  Synthetic oligonucleotide
gggtcaaagccctgctaggacatcaaaaat

SEQ ID NO: 100031 - DNA, 30 bp, Artificial Sequence
  Synthetic oligonucleotide
ttaaaggaggtggcgtaaagaccgaaaaat

SEQ ID NO: 100032 - DNA, 30 bp, Artificial Sequence
  Synthetic oligonucleotide
gttcagccgcgagtcccgagaagtaaaaat

SEQ ID NO: 100033 - DNA, 30 bp, Artificial Sequence
  Synthetic oligonucleotide
atcgtcatccgcggattggtagatcaaaat

SEQ ID NO: 100034 - DNA, 30 bp, Artificial Sequence
  Synthetic oligonucleotide
gcgacccttgagttgccagccaaagaaaat

SEQ ID NO: 100035 - DNA, 30 bp, Artificial Sequence
  Synthetic oligonucleotide
gcaaggtcaaggcccttgtgtcgagaaaat

SEQ ID NO: 100036 - DNA, 30 bp, Artificial Sequence
  Synthetic oligonucleotide
gttgaagcgacagagcgagcgtaggaaaat

SEQ ID NO: 100037 - DNA, 30 bp, Artificial Sequence
  Synthetic oligonucleotide
ttagagtagtcggtaacagctgtctaaaat

SEQ ID NO: 100038 - DNA, 30 bp, Artificial Sequence
  Synthetic oligonucleotide
gttgtggcaagcacgggacgccagtaaaat

SEQ ID NO: 100039 - DNA, 30 bp, Artificial Sequence
  Synthetic oligonucleotide
aaccgacgcgtattgtggaactattaaaat

SEQ ID NO: 100040 - DNA, 30 bp, Artificial Sequence
  Synthetic oligonucleotide
agaacggcttgtaattgcgtgccaacaaat

SEQ ID NO: 100041 - DNA, 30 bp, Artificial Sequence
  Synthetic oligonucleotide
aacgaggggccgaaagacagactcacaaat

SEQ ID NO: 100042 - DNA, 30 bp, Artificial Sequence
  Synthetic oligonucleotide
caggctgtccacatacacaccgccccaaat

SEQ ID NO: 100043 - DNA, 30 bp, Artificial Sequence
  Synthetic oligonucleotide
atcacgtcagactgcgttcgacaccgaaat

SEQ ID NO: 100044 - DNA, 30 bp, Artificial Sequence
  Synthetic oligonucleotide
actgtactcagtcaaatctctggccgaaat

SEQ ID NO: 100045 - DNA, 30 bp, Artificial Sequence
  Synthetic oligonucleotide
ggacgcggatggcatgagtagtcgcgaaat

SEQ ID NO: 100046 - DNA, 30 bp, Artificial Sequence
  Synthetic oligonucleotide
atgtggttaccaatgcaaccagatcgaaat

SEQ ID NO: 100047 - DNA, 30 bp, Artificial Sequence
  Synthetic oligonucleotide
gggtcgagcggtaatgtccatataggaaat

SEQ ID NO: 100048 - DNA, 30 bp, Artificial Sequence
  Synthetic oligonucleotide
agacgacggtgcgacaaggacagatgaaat

SEQ ID NO: 100049 - DNA, 30 bp, Artificial Sequence
  Synthetic oligonucleotide
ctacgtacaaagttaaggataggcataaat

SEQ ID NO: 100050 - DNA, 30 bp, Artificial Sequence
  Synthetic oligonucleotide
acgtgtttcccgggaggagaagacctaaat

SEQ ID NO: 100051 - DNA, 30 bp, Artificial Sequence
  Synthetic oligonucleotide
cacacggcgggtggtcaagtactcgtaaat

SEQ ID NO: 100052 - DNA, 30 bp, Artificial Sequence
  Synthetic oligonucleotide
atgcttgctgtcataaagaggggggtaaat

SEQ ID NO: 100053 - DNA, 30 bp, Artificial Sequence
  Synthetic oligonucleotide
cgttgcccccgggcaatgtagctggtaaat

SEQ ID NO: 100054 - DNA, 30 bp, Artificial Sequence
  Synthetic oligonucleotide
ggctaaaagacaggggttggaaatgtaaat

SEQ ID NO: 100055 - DNA, 30 bp, Artificial Sequence
  Synthetic oligonucleotide
gtcagggggacgagccgggagtcattaaat

SEQ ID NO: 100056 - DNA, 30 bp, Artificial Sequence
  Synthetic oligonucleotide
ggaggccgaaacagtgggtaagacttaaat

SEQ ID NO: 100057 - DNA, 30 bp, Artificial Sequence
  Synthetic oligonucleotide
acaccgtgcgaccgtgggcttgaaaacaat

SEQ ID NO: 100058 - DNA, 30 bp, Artificial Sequence
  Synthetic oligonucleotide
cgcttcagataccgccgcgagagaaacaat

SEQ ID NO: 100059 - DNA, 30 bp, Artificial Sequence
  Synthetic oligonucleotide
gtgcctggtacggataaaacgctaaacaat

SEQ ID NO: 100060 - DNA, 30 bp, Artificial Sequence
  Synthetic oligonucleotide
gggacaactctcaccggggactgacacaat

SEQ ID NO: 100061 - DNA, 30 bp, Artificial Sequence
  Synthetic oligonucleotide
tcgaggctggtgtaaccgtccgctcacaat

SEQ ID NO: 100062 - DNA, 30 bp, Artificial Sequence
  Synthetic oligonucleotide
gaaacagcgaacatattttccctcgacaat

SEQ ID NO: 100063 - DNA, 30 bp, Artificial Sequence
  Synthetic oligonucleotide
acgtcttgcagtggaacggtccagtacaat

SEQ ID NO: 100064 - DNA, 30 bp, Artificial Sequence
  Synthetic oligonucleotide
aagtgcctgtaccctatgcccagaaccaat

SEQ ID NO: 100065 - DNA, 30 bp, Artificial Sequence
  Synthetic oligonucleotide
gtagccctaccatagtaagatcgtcccaat

SEQ ID NO: 100066 - DNA, 30 bp, Artificial Sequence
  Synthetic oligonucleotide
cgttgggaacgacgtttgtcgtatgccaat

SEQ ID NO: 100067 - DNA, 30 bp, Artificial Sequence
  Synthetic oligonucleotide
tcagtcgacacatatagattacgtgccaat

SEQ ID NO: 100068 - DNA, 30 bp, Artificial Sequence
  Synthetic oligonucleotide
gccgattagggggaggtagctaactccaat

SEQ ID NO: 100069 - DNA, 30 bp, Artificial Sequence
  Synthetic oligonucleotide
ctctagggaaccaccgagacgacttccaat

SEQ ID NO: 100070 - DNA, 30 bp, Artificial Sequence
  Synthetic oligonucleotide
agatcgtcgtagtctccgcgcgaaagcaat

SEQ ID NO: 100071 - DNA, 30 bp, Artificial Sequence
  Synthetic oligonucleotide
agcatcgtagaggctattattgagagcaat

SEQ ID NO: 100072 - DNA, 30 bp, Artificial Sequence
  Synthetic oligonucleotide
tcagtcggatcttggttgatcctgcgcaat

SEQ ID NO: 100073 - DNA, 30 bp, Artificial Sequence
  Synthetic oligonucleotide
tagaatggcggcaggtagtttagtggcaat

SEQ ID NO: 100074 - DNA, 30 bp, Artificial Sequence
  Synthetic oligonucleotide
cggctccggattagagcagcgggatgcaat

SEQ ID NO: 100075 - DNA, 30 bp, Artificial Sequence
  Synthetic oligonucleotide
tgaggctccacgtcccttatcgtctgcaat

SEQ ID NO: 100076 - DNA, 30 bp, Artificial Sequence
  Synthetic oligonucleotide
tcgccagtgcgttaagaccttttctgcaat

SEQ ID NO: 100077 - DNA, 30 bp, Artificial Sequence
  Synthetic oligonucleotide
tcaagagtaggatctttagctaggtgcaat

SEQ ID NO: 100078 - DNA, 30 bp, Artificial Sequence
  Synthetic oligonucleotide
tggaccggaggagattgagttgggtgcaat

SEQ ID NO: 100079 - DNA, 30 bp, Artificial Sequence
  Synthetic oligonucleotide
tatggtcgaaatgaagtacgcggaatcaat

SEQ ID NO: 100080 - DNA, 30 bp, Artificial Sequence
  Synthetic oligonucleotide
atgtggatctggcgagatgtcatgatcaat

SEQ ID NO: 100081 - DNA, 30 bp, Artificial Sequence
  Synthetic oligonucleotide
ggtactggcataccgtaagttcttatcaat

SEQ ID NO: 100082 - DNA, 30 bp, Artificial Sequence
  Synthetic oligonucleotide
ttgcacgttctcgtggaagggcccctcaat

SEQ ID NO: 100083 - DNA, 30 bp, Artificial Sequence
  Synthetic oligonucleotide
atgaccaatcacagcagaccgggcctcaat

SEQ ID NO: 100084 - DNA, 30 bp, Artificial Sequence
  Synthetic oligonucleotide
tcaatatgtaagtttacccagagtctcaat

SEQ ID NO: 100085 - DNA, 30 bp, Artificial Sequence
  Synthetic oligonucleotide
aaagatgatactctgtaaaaaaccgtcaat

SEQ ID NO: 100086 - DNA, 30 bp, Artificial Sequence
  Synthetic oligonucleotide
aaatgcgtatgcgtcttgcagctcgtcaat

SEQ ID NO: 100087 - DNA, 30 bp, Artificial Sequence
  Synthetic oligonucleotide
aagcgctgactgtgtcaagtaggtgtcaat

SEQ ID NO: 100088 - DNA, 30 bp, Artificial Sequence
  Synthetic oligonucleotide
tccgagaaaagctcgggaaaaggtaagaat

SEQ ID NO: 100089 - DNA, 30 bp, Artificial Sequence
  Synthetic oligonucleotide
ccgtcaacgaataacggacggattaagaat

SEQ ID NO: 100090 - DNA, 30 bp, Artificial Sequence
  Synthetic oligonucleotide
agacgtttagtgtatgggactggacagaat

SEQ ID NO: 100091 - DNA, 30 bp, Artificial Sequence
  Synthetic oligonucleotide
gctcggcaggccaaagacgaagtacagaat

SEQ ID NO: 100092 - DNA, 30 bp, Artificial Sequence
  Synthetic oligonucleotide
tatgaaattatcacgcaaatacaccagaat

SEQ ID NO: 100093 - DNA, 30 bp, Artificial Sequence
  Synthetic oligonucleotide
atgcctggctaactacgttaattgcagaat

SEQ ID NO: 100094 - DNA, 30 bp, Artificial Sequence
  Synthetic oligonucleotide
gtgtgcacagggttaagccggcatcagaat

SEQ ID NO: 100095 - DNA, 30 bp, Artificial Sequence
  Synthetic oligonucleotide
acagcctgcgtctgctaccagccagagaat

SEQ ID NO: 100096 - DNA, 30 bp, Artificial Sequence
  Synthetic oligonucleotide
aggaacctgcaaacgtataatatcgagaat

SEQ ID NO: 100097 - DNA, 30 bp, Artificial Sequence
  Synthetic oligonucleotide
cgcccagagccaaccggggcgggatagaat

SEQ ID NO: 100098 - DNA, 30 bp, Artificial Sequence
  Synthetic oligonucleotide
cgtcggtcgcggaactatgaatagtagaat

SEQ ID NO: 100099 - DNA, 30 bp, Artificial Sequence
  Synthetic oligonucleotide
ggcgcgccgcagacgaaggtcgattagaat

SEQ ID NO: 100100 - DNA, 30 bp, Artificial Sequence
  Synthetic oligonucleotide
gctcaagttgaatagaaaggagcttagaat

SEQ ID NO: 100101 - DNA, 30 bp, Artificial Sequence
  Synthetic oligonucleotide
tcctggtcagacgaacgaatgtgcacgaat

SEQ ID NO: 100102 - DNA, 30 bp, Artificial Sequence
  Synthetic oligonucleotide
aaatctgacctgagaacataataaccgaat

SEQ ID NO: 100103 - DNA, 30 bp, Artificial Sequence
  Synthetic oligonucleotide
aaaacctgacttgatcaccgagacccgaat

SEQ ID NO: 100104 - DNA, 30 bp, Artificial Sequence
  Synthetic oligonucleotide
cgaagtgcttcaatcttcggcgccccgaat

SEQ ID NO: 100105 - DNA, 30 bp, Artificial Sequence
  Synthetic oligonucleotide
cgattccaccatcccgcttaaccgccgaat

SEQ ID NO: 100106 - DNA, 30 bp, Artificial Sequence
  Synthetic oligonucleotide
actagctaaacccccatgttcttgccgaat

SEQ ID NO: 100107 - DNA, 30 bp, Artificial Sequence
  Synthetic oligonucleotide
ggatatcaatacccccacacaggtccgaat

SEQ ID NO: 100108 - DNA, 30 bp, Artificial Sequence
  Synthetic oligonucleotide
ccgtattttagtgtcgatagggaagcgaat

SEQ ID NO: 100109 - DNA, 30 bp, Artificial Sequence
  Synthetic oligonucleotide
gtaaaggtcgaagtgggaggatcagcgaat

SEQ ID NO: 100110 - DNA, 30 bp, Artificial Sequence
  Synthetic oligonucleotide
gtaccgaaaatgttgagcgcacgagcgaat

SEQ ID NO: 100111 - DNA, 30 bp, Artificial Sequence
  Synthetic oligonucleotide
agaatggcaaaataacggtgcgatgcgaat

SEQ ID NO: 100112 - DNA, 30 bp, Artificial Sequence
  Synthetic oligonucleotide
tcaagcggttagattatactaggtgcgaat

SEQ ID NO: 100113 - DNA, 30 bp, Artificial Sequence
  Synthetic oligonucleotide
ggggagtcgtacatctggtgggactcgaat

SEQ ID NO: 100114 - DNA, 30 bp, Artificial Sequence
  Synthetic oligonucleotide
gagggggacggcggagtataagtctcgaat

SEQ ID NO: 100115 - DNA, 30 bp, Artificial Sequence
  Synthetic oligonucleotide
cgtgacgctcgggcttccagcaggtcgaat

SEQ ID NO: 100116 - DNA, 30 bp, Artificial Sequence
  Synthetic oligonucleotide
acaggcactcaggttgtgccacattcgaat

SEQ ID NO: 100117 - DNA, 30 bp, Artificial Sequence
  Synthetic oligonucleotide
cgtgcatcggcacgacaactggcaaggaat

SEQ ID NO: 100118 - DNA, 30 bp, Artificial Sequence
  Synthetic oligonucleotide
cagtggtgcacaaagaacggcaacaggaat

SEQ ID NO: 100119 - DNA, 30 bp, Artificial Sequence
  Synthetic oligonucleotide
atgatctgaccatgggcgacgatccggaat

SEQ ID NO: 100120 - DNA, 30 bp, Artificial Sequence
  Synthetic oligonucleotide
tcaggacgcaagttcgtgtggagtcggaat

SEQ ID NO: 100121 - DNA, 30 bp, Artificial Sequence
  Synthetic oligonucleotide
cggttgagttaattgtaggttagagggaat

SEQ ID NO: 100122 - DNA, 30 bp, Artificial Sequence
  Synthetic oligonucleotide
tcatccgtcacgcgacaaagggaggggaat

SEQ ID NO: 100123 - DNA, 30 bp, Artificial Sequence
  Synthetic oligonucleotide
accgtgaggaccaccggatcgggtgggaat

SEQ ID NO: 100124 - DNA, 30 bp, Artificial Sequence
  Synthetic oligonucleotide
aacggtgacacgatatatcagaattggaat

SEQ ID NO: 100125 - DNA, 30 bp, Artificial Sequence
  Synthetic oligonucleotide
tctgagaagtaagacctggagagcctgaat

SEQ ID NO: 100126 - DNA, 30 bp, Artificial Sequence
  Synthetic oligonucleotide
acgccacaaagattagggcccgagctgaat

SEQ ID NO: 100127 - DNA, 30 bp, Artificial Sequence
  Synthetic oligonucleotide
gaatcgaacaggtgaccgtgtagattgaat

SEQ ID NO: 100128 - DNA, 30 bp, Artificial Sequence
  Synthetic oligonucleotide
gctacaagatgtcacgaagatctattgaat

SEQ ID NO: 100129 - DNA, 30 bp, Artificial Sequence
  Synthetic oligonucleotide
gggcatgtaggggtgttctgccgcttgaat

SEQ ID NO: 100130 - DNA, 30 bp, Artificial Sequence
  Synthetic oligonucleotide
tgcctatgcagaggaaggtagcaaaataat

SEQ ID NO: 100131 - DNA, 30 bp, Artificial Sequence
  Synthetic oligonucleotide
atgacatccacaagagccacgacgaataat

SEQ ID NO: 100132 - DNA, 30 bp, Artificial Sequence
  Synthetic oligonucleotide
aaagtcgaccggatcggaggcgctaataat

SEQ ID NO: 100133 - DNA, 30 bp, Artificial Sequence
  Synthetic oligonucleotide
cgagatctttagatcaggactgctaataat

SEQ ID NO: 100134 - DNA, 30 bp, Artificial Sequence
  Synthetic oligonucleotide
caagtacccacaacacttgtagagcataat

SEQ ID NO: 100135 - DNA, 30 bp, Artificial Sequence
  Synthetic oligonucleotide
aactaggaagagcattatttagcgcataat

SEQ ID NO: 100136 - DNA, 30 bp, Artificial Sequence
  Synthetic oligonucleotide
cacccaaggtaacctcagctgctagataat

SEQ ID NO: 100137 - DNA, 30 bp, Artificial Sequence
  Synthetic oligonucleotide
cgtagtccgaccgagcctacagaatataat

SEQ ID NO: 100138 - DNA, 30 bp, Artificial Sequence
  Synthetic oligonucleotide
ggagcggagggccaatctgtgttaactaat

SEQ ID NO: 100139 - DNA, 30 bp, Artificial Sequence
  Synthetic oligonucleotide
tgagatgcgctggcacttggatccagtaat

SEQ ID NO: 100140 - DNA, 30 bp, Artificial Sequence
  Synthetic oligonucleotide
cacttggaacccaacagtgggaagcgtaat

SEQ ID NO: 100141 - DNA, 30 bp, Artificial Sequence
  Synthetic oligonucleotide
cctttgaaagtaagctccgcgatgcgtaat

SEQ ID NO: 100142 - DNA, 30 bp, Artificial Sequence
  Synthetic oligonucleotide
tatatcgaaaggaggattcgtgtgcgtaat

SEQ ID NO: 100143 - DNA, 30 bp, Artificial Sequence
  Synthetic oligonucleotide
aggaaccacgtgcgtcgtaaagttcgtaat

SEQ ID NO: 100144 - DNA, 30 bp, Artificial Sequence
  Synthetic oligonucleotide
gagcacgattacaacgagcgggtaggtaat

SEQ ID NO: 100145 - DNA, 30 bp, Artificial Sequence
  Synthetic oligonucleotide
ccggggggggatacaaattgggtcggtaat

SEQ ID NO: 100146 - DNA, 30 bp, Artificial Sequence
  Synthetic oligonucleotide
agatgtgagccgcatgtgatacgtggtaat

SEQ ID NO: 100147 - DNA, 30 bp, Artificial Sequence
  Synthetic oligonucleotide
ataaggcaatccggtgtacactcctgtaat

SEQ ID NO: 100148 - DNA, 30 bp, Artificial Sequence
  Synthetic oligonucleotide
acggctcacgtgaagattagttattgtaat

SEQ ID NO: 100149 - DNA, 30 bp, Artificial Sequence
  Synthetic oligonucleotide
taaactcgtgaacgcgagatacgtattaat

SEQ ID NO: 100150 - DNA, 30 bp, Artificial Sequence
  Synthetic oligonucleotide
ctgggatcctagacaacacgaattattaat

SEQ ID NO: 100151 - DNA, 30 bp, Artificial Sequence
  Synthetic oligonucleotide
aatggtaagagccatggggcgagagttaat

SEQ ID NO: 100152 - DNA, 30 bp, Artificial Sequence
  Synthetic oligonucleotide
tcgaggtgcgcgaatggaagacgagttaat

SEQ ID NO: 100153 - DNA, 30 bp, Artificial Sequence
  Synthetic oligonucleotide
aagggaccttcagaaagggtcagaaaacat

SEQ ID NO: 100154 - DNA, 30 bp, Artificial Sequence
  Synthetic oligonucleotide
caggggaatagtgtcgcgcgctccaaacat

SEQ ID NO: 100155 - DNA, 30 bp, Artificial Sequence
  Synthetic oligonucleotide
cgggcccggttgcaaaggagtgaacaacat

SEQ ID NO: 100156 - DNA, 30 bp, Artificial Sequence
  Synthetic oligonucleotide
gccggcatcctgtgccagcaatcagaacat

SEQ ID NO: 100157 - DNA, 30 bp, Artificial Sequence
  Synthetic oligonucleotide
gaagtaccgtaaaggcagatacaggaacat

SEQ ID NO: 100158 - DNA, 30 bp, Artificial Sequence
  Synthetic oligonucleotide
caaaggacagggtcgagcagaaggtaacat

SEQ ID NO: 100159 - DNA, 30 bp, Artificial Sequence
  Synthetic oligonucleotide
cggacaattttgccttcaatcgtgtaacat

SEQ ID NO: 100160 - DNA, 30 bp, Artificial Sequence
  Synthetic oligonucleotide
cgtctgcccgacgacgcatcccaaacacat

SEQ ID NO: 100161 - DNA, 30 bp, Artificial Sequence
  Synthetic oligonucleotide
gtgacatagagcaaagggatacagacacat

SEQ ID NO: 100162 - DNA, 30 bp, Artificial Sequence
  Synthetic oligonucleotide
ggcattgaatatcgcgtcgatcagccacat

SEQ ID NO: 100163 - DNA, 30 bp, Artificial Sequence
  Synthetic oligonucleotide
aggtaacggctatggaaagagggtccacat

SEQ ID NO: 100164 - DNA, 30 bp, Artificial Sequence
  Synthetic oligonucleotide
aacggttgctaatcgttaagggtagcacat

SEQ ID NO: 100165 - DNA, 30 bp, Artificial Sequence
  Synthetic oligonucleotide
cagtaccagaactgagaagtcagggcacat

SEQ ID NO: 100166 - DNA, 30 bp, Artificial Sequence
  Synthetic oligonucleotide
ggcccctgagagtacaatagacaatcacat

SEQ ID NO: 100167 - DNA, 30 bp, Artificial Sequence
  Synthetic oligonucleotide
tcgtgaatcggagctatacagcggcgacat

SEQ ID NO: 100168 - DNA, 30 bp, Artificial Sequence
  Synthetic oligonucleotide
attagaataaacgaaagaatactaggacat

SEQ ID NO: 100169 - DNA, 30 bp, Artificial Sequence
  Synthetic oligonucleotide
ggagggagactccttttaatgaagggacat

SEQ ID NO: 100170 - DNA, 30 bp, Artificial Sequence
  Synthetic oligonucleotide
atgtcatcgagatcgacagtccagggacat

SEQ ID NO: 100171 - DNA, 30 bp, Artificial Sequence
  Synthetic oligonucleotide
cgacacattctgttacgaacactttgacat

SEQ ID NO: 100172 - DNA, 30 bp, Artificial Sequence
  Synthetic oligonucleotide
ggaggattcacggttactttaaacatacat

SEQ ID NO: 100173 - DNA, 30 bp, Artificial Sequence
  Synthetic oligonucleotide
tgaagggttactcgtcaggtgaatatacat

SEQ ID NO: 100174 - DNA, 30 bp, Artificial Sequence
  Synthetic oligonucleotide
gcgttcacaagtgaaggggcaaaactacat

SEQ ID NO: 100175 - DNA, 30 bp, Artificial Sequence
  Synthetic oligonucleotide
cgatgacttcctaaaattcgtaacctacat

SEQ ID NO: 100176 - DNA, 30 bp, Artificial Sequence
  Synthetic oligonucleotide
caatcgtaccacggagtaggatacctacat

SEQ ID NO: 100177 - DNA, 30 bp, Artificial Sequence
  Synthetic oligonucleotide
ctggaagggaatatcgagaggaccctacat

SEQ ID NO: 100178 - DNA, 30 bp, Artificial Sequence
  Synthetic oligonucleotide
tgtatgaaaagacatggacatggtctacat

SEQ ID NO: 100179 - DNA, 30 bp, Artificial Sequence
  Synthetic oligonucleotide
ttgaccggggatcattatgcgactgtacat

SEQ ID NO: 100180 - DNA, 30 bp, Artificial Sequence
  Synthetic oligonucleotide
cctatccgggaagggtagcagcggaaccat

SEQ ID NO: 100181 - DNA, 30 bp, Artificial Sequence
  Synthetic oligonucleotide
agtctaaagtcaacggcacgacaagaccat

SEQ ID NO: 100182 - DNA, 30 bp, Artificial Sequence
  Synthetic oligonucleotide
catggcgtttctgaagcagtggcggaccat

SEQ ID NO: 100183 - DNA, 30 bp, Artificial Sequence
  Synthetic oligonucleotide
cccttacttgccgggacctgaaatgaccat

SEQ ID NO: 100184 - DNA, 30 bp, Artificial Sequence
  Synthetic oligonucleotide
accgcgtagatggacactttttcctaccat

SEQ ID NO: 100185 - DNA, 30 bp, Artificial Sequence
  Synthetic oligonucleotide
ttaggatggcaattcaaagtgctttaccat

SEQ ID NO: 100186 - DNA, 30 bp, Artificial Sequence
  Synthetic oligonucleotide
agtacaagaacagagcgggtttatacccat

SEQ ID NO: 100187 - DNA, 30 bp, Artificial Sequence
  Synthetic oligonucleotide
acactgcggtgacgagataaggcagcccat

SEQ ID NO: 100188 - DNA, 30 bp, Artificial Sequence
  Synthetic oligonucleotide
gcccaaaccaactagtcgtctaaaagccat

SEQ ID NO: 100189 - DNA, 30 bp, Artificial Sequence
  Synthetic oligonucleotide
aatggcagcccggtccagatcacaagccat

SEQ ID NO: 100190 - DNA, 30 bp, Artificial Sequence
  Synthetic oligonucleotide
cacgagagatacaaggggataataagccat

SEQ ID NO: 100191 - DNA, 30 bp, Artificial Sequence
  Synthetic oligonucleotide
ggagaagggagcgggggtcgcttgagccat

SEQ ID NO: 100192 - DNA, 30 bp, Artificial Sequence
  Synthetic oligonucleotide
tactagccgataggcaaacataggtgccat

SEQ ID NO: 100193 - DNA, 30 bp, Artificial Sequence
  Synthetic oligonucleotide
acacagataattcagataattgaagtccat

SEQ ID NO: 100194 - DNA, 30 bp, Artificial Sequence
  Synthetic oligonucleotide
gctcaagtcgaacaaagtagagcagtccat

SEQ ID NO: 100195 - DNA, 30 bp, Artificial Sequence
  Synthetic oligonucleotide
tgttgacgacggttaacttgccgattccat

SEQ ID NO: 100196 - DNA, 30 bp, Artificial Sequence
  Synthetic oligonucleotide
gaggttattcggataccactcaggttccat

SEQ ID NO: 100197 - DNA, 30 bp, Artificial Sequence
  Synthetic oligonucleotide
cggcgtgagcgttcttaaacgactttccat

SEQ ID NO: 100198 - DNA, 30 bp, Artificial Sequence
  Synthetic oligonucleotide
gtaattagaccagatgctggacggaagcat

SEQ ID NO: 100199 - DNA, 30 bp, Artificial Sequence
  Synthetic oligonucleotide
gagcgtacgttaccctagagggttcagcat

SEQ ID NO: 100200 - DNA, 30 bp, Artificial Sequence
  Synthetic oligonucleotide
tgcaccctcactcttaagggccccgagcat

SEQ ID NO: 100201 - DNA, 30 bp, Artificial Sequence
  Synthetic oligonucleotide
taggtgtatactacagtaatggaggagcat

SEQ ID NO: 100202 - DNA, 30 bp, Artificial Sequence
  Synthetic oligonucleotide
gcgagctagattcagggtcggggggagcat

SEQ ID NO: 100203 - DNA, 30 bp, Artificial Sequence
  Synthetic oligonucleotide
gctcggcaccgtgtaaattatccatagcat

SEQ ID NO: 100204 - DNA, 30 bp, Artificial Sequence
  Synthetic oligonucleotide
tagtggtcgcgtgagtctacaatctagcat

SEQ ID NO: 100205 - DNA, 30 bp, Artificial Sequence
  Synthetic oligonucleotide
atcaacaagtgcggacggaagatagcgcat

SEQ ID NO: 100206 - DNA, 30 bp, Artificial Sequence
  Synthetic oligonucleotide
accctcgtctggaacagcagcagggcgcat

SEQ ID NO: 100207 - DNA, 30 bp, Artificial Sequence
  Synthetic oligonucleotide
gaacagaagataaggttaaagcgatcgcat

SEQ ID NO: 100208 - DNA, 30 bp, Artificial Sequence
  Synthetic oligonucleotide
atccccgacatcgtctcatccagaaggcat

SEQ ID NO: 100209 - DNA, 30 bp, Artificial Sequence
  Synthetic oligonucleotide
tgaagagaagcggcggtatcccgaaggcat

SEQ ID NO: 100210 - DNA, 30 bp, Artificial Sequence
  Synthetic oligonucleotide
ctagctgcggactaaaagactggtaggcat

SEQ ID NO: 100211 - DNA, 30 bp, Artificial Sequence
  Synthetic oligonucleotide
cagtgagattcagggttagagttccggcat

SEQ ID NO: 100212 - DNA, 30 bp, Artificial Sequence
  Synthetic oligonucleotide
tcagccgtagttcggtggggccagcggcat

SEQ ID NO: 100213 - DNA, 30 bp, Artificial Sequence
  Synthetic oligonucleotide
tgaagaacacaaatgtcattcactcggcat

SEQ ID NO: 100214 - DNA, 30 bp, Artificial Sequence
  Synthetic oligonucleotide
aggcgttcagatgacgttcaggtggggcat

SEQ ID NO: 100215 - DNA, 30 bp, Artificial Sequence
  Synthetic oligonucleotide
ggaggtcctagattccgtacatcatggcat

SEQ ID NO: 100216 - DNA, 30 bp, Artificial Sequence
  Synthetic oligonucleotide
tagctgtaacttagtcgatccacctggcat

SEQ ID NO: 100217 - DNA, 30 bp, Artificial Sequence
  Synthetic oligonucleotide
acgggaaactgtgaatctcttgaaatgcat

SEQ ID NO: 100218 - DNA, 30 bp, Artificial Sequence
  Synthetic oligonucleotide
taggcaagacttcggtacgggaagatgcat

SEQ ID NO: 100219 - DNA, 30 bp, Artificial Sequence
  Synthetic oligonucleotide
gggcatgtcagtactgtcaaggctatgcat

SEQ ID NO: 100220 - DNA, 30 bp, Artificial Sequence
  Synthetic oligonucleotide
gatcgaacaacggcagagtggttcttgcat

SEQ ID NO: 100221 - DNA, 30 bp, Artificial Sequence
  Synthetic oligonucleotide
gagcttcgggatactcaagggaagttgcat

SEQ ID NO: 100222 - DNA, 30 bp, Artificial Sequence
  Synthetic oligonucleotide
ggacaacgtcagaacgtcacaccgaatcat

SEQ ID NO: 100223 - DNA, 30 bp, Artificial Sequence
  Synthetic oligonucleotide
acgtggcatcttatcattctgaggaatcat

SEQ ID NO: 100224 - DNA, 30 bp, Artificial Sequence
  Synthetic oligonucleotide
cctaaattcaacagcagcatcactaatcat

SEQ ID NO: 100225 - DNA, 30 bp, Artificial Sequence
  Synthetic oligonucleotide
agaaagccagtgatacatctcggagatcat

SEQ ID NO: 100226 - DNA, 30 bp, Artificial Sequence
  Synthetic oligonucleotide
gcgtgatgacacggccggtgactagatcat

SEQ ID NO: 100227 - DNA, 30 bp, Artificial Sequence
  Synthetic oligonucleotide
cgttactcgttaactcggcgggaggatcat

SEQ ID NO: 100228 - DNA, 30 bp, Artificial Sequence
  Synthetic oligonucleotide
ttgtgagtctgcccagcttaacgctatcat

SEQ ID NO: 100229 - DNA, 30 bp, Artificial Sequence
  Synthetic oligonucleotide
aagcggggagggaaccgggcttaaactcat

SEQ ID NO: 100230 - DNA, 30 bp, Artificial Sequence
  Synthetic oligonucleotide
acgtcgcgctcatgcagggtagccactcat

SEQ ID NO: 100231 - DNA, 30 bp, Artificial Sequence
  Synthetic oligonucleotide
gacgggacatacgaaatggcgccgcctcat

SEQ ID NO: 100232 - DNA, 30 bp, Artificial Sequence
  Synthetic oligonucleotide
tctagcaatttagcgaatggttaagctcat

SEQ ID NO: 100233 - DNA, 30 bp, Artificial Sequence
  Synthetic oligonucleotide
gaggtctaagggtaatgggacattgctcat

SEQ ID NO: 100234 - DNA, 30 bp, Artificial Sequence
  Synthetic oligonucleotide
acgtggtctgggtctgttggaacatctcat

SEQ ID NO: 100235 - DNA, 30 bp, Artificial Sequence
  Synthetic oligonucleotide
cagcagataaggcgcatgcccggatctcat

SEQ ID NO: 100236 - DNA, 30 bp, Artificial Sequence
  Synthetic oligonucleotide
gcgcgaaagctgggaagcataacaagtcat

SEQ ID NO: 100237 - DNA, 30 bp, Artificial Sequence
  Synthetic oligonucleotide
ttcgatagaatccgtgtggcctgacgtcat

SEQ ID NO: 100238 - DNA, 30 bp, Artificial Sequence
  Synthetic oligonucleotide
aaatggagtgatatattgggggtcggtcat

SEQ ID NO: 100239 - DNA, 30 bp, Artificial Sequence
  Synthetic oligonucleotide
tcctgcggcaacatgtcagaatcgggtcat

SEQ ID NO: 100240 - DNA, 30 bp, Artificial Sequence
  Synthetic oligonucleotide
gggcaatgtctgccattcaagtttggtcat

SEQ ID NO: 100241 - DNA, 30 bp, Artificial Sequence
  Synthetic oligonucleotide
gcacagtagtaatgagtctcggtgtgtcat

SEQ ID NO: 100242 - DNA, 30 bp, Artificial Sequence
  Synthetic oligonucleotide
taaggtcgatggcgcgaatagttagttcat

SEQ ID NO: 100243 - DNA, 30 bp, Artificial Sequence
  Synthetic oligonucleotide
gcgaaatagtgtccatcccaatagaaagat

SEQ ID NO: 100244 - DNA, 30 bp, Artificial Sequence
  Synthetic oligonucleotide
tggtcggacatttcagtgaatggtgaagat

SEQ ID NO: 100245 - DNA, 30 bp, Artificial Sequence
  Synthetic oligonucleotide
ccaaaatcacgtaaccctgtaacataagat

SEQ ID NO: 100246 - DNA, 30 bp, Artificial Sequence
  Synthetic oligonucleotide
ttcacgtcagaggccgaacccatataagat

SEQ ID NO: 100247 - DNA, 30 bp, Artificial Sequence
  Synthetic oligonucleotide
ggggcgtacccggcgagcgctaccacagat

SEQ ID NO: 100248 - DNA, 31 bp, Artificial Sequence
  Synthetic oligonucleotide
aagcatacaataagtcgaccaaagtacagat

SEQ ID NO: 100249 - DNA, 30 bp, Artificial Sequence
  Synthetic oligonucleotide
ctgaaccggcggatttatacaagtacagat

SEQ ID NO: 100250 - DNA, 30 bp, Artificial Sequence
  Synthetic oligonucleotide
gtcacgcgtaacacacgcctacgtacagat

SEQ ID NO: 100251 - DNA, 30 bp, Artificial Sequence
  Synthetic oligonucleotide
cttggaatctgacctatatgtaaaccagat

SEQ ID NO: 100252 - DNA, 30 bp, Artificial Sequence
  Synthetic oligonucleotide
tacagcttaagacaatggagcggcccagat

SEQ ID NO: 100253 - DNA, 30 bp, Artificial Sequence
  Synthetic oligonucleotide
tcgctggcgtttgcttagcattatccagat

SEQ ID NO: 100254 - DNA, 30 bp, Artificial Sequence
  Synthetic oligonucleotide
ccagggcttaaccagaagtccgccgcagat

SEQ ID NO: 100255 - DNA, 30 bp, Artificial Sequence
  Synthetic oligonucleotide
ttgcgagttcgaagaatactgtctgcagat

SEQ ID NO: 100256 - DNA, 31 bp, Artificial Sequence
  Synthetic oligonucleotide
aacacagaccctgtctcttgacaactcagat

SEQ ID NO: 100257 - DNA, 30 bp, Artificial Sequence
  Synthetic oligonucleotide
cttagtgaactacgatagagtatgtcagat

SEQ ID NO: 100258 - DNA, 30 bp, Artificial Sequence
  Synthetic oligonucleotide
cgctgcgaccagggaagagtattgtcagat

SEQ ID NO: 100259 - DNA, 30 bp, Artificial Sequence
  Synthetic oligonucleotide
agagcggggggcacataggaccgcagagat

SEQ ID NO: 100260 - DNA, 30 bp, Artificial Sequence
  Synthetic oligonucleotide
gcatattcgacagataaaaataggagagat

SEQ ID NO: 100261 - DNA, 30 bp, Artificial Sequence
  Synthetic oligonucleotide
ctatgacctggaagagtagtaaatcgagat

SEQ ID NO: 100262 - DNA, 30 bp, Artificial Sequence
  Synthetic oligonucleotide
acgtggataaccaaatcctgaagcggagat

SEQ ID NO: 100263 - DNA, 30 bp, Artificial Sequence
  Synthetic oligonucleotide
tcatcaccgtacctaaagaaactgggagat

SEQ ID NO: 100264 - DNA, 30 bp, Artificial Sequence
  Synthetic oligonucleotide
gcactagtaagccgtcgctaaaatggagat

SEQ ID NO: 100265 - DNA, 30 bp, Artificial Sequence
  Synthetic oligonucleotide
taaggcatgtagataaccccaataatagat

SEQ ID NO: 100266 - DNA, 30 bp, Artificial Sequence
  Synthetic oligonucleotide
ggataacagttcgcggtgatcacactagat

SEQ ID NO: 100267 - DNA, 30 bp, Artificial Sequence
  Synthetic oligonucleotide
caaaggcgattgtggggtggcgacctagat

SEQ ID NO: 100268 - DNA, 29 bp, Artificial Sequence
  Synthetic oligonucleotide
agagacatgcgaatatgacaggtgtagat

SEQ ID NO: 100269 - DNA, 30 bp, Artificial Sequence
  Synthetic oligonucleotide
tgcgtccggttggacgaagtgaatttagat

SEQ ID NO: 100270 - DNA, 30 bp, Artificial Sequence
  Synthetic oligonucleotide
aggagaacgtgttgtacggtcactttagat

SEQ ID NO: 100271 - DNA, 30 bp, Artificial Sequence
  Synthetic oligonucleotide
agttaaaatgagggttctcccgcaaacgat

SEQ ID NO: 100272 - DNA, 30 bp, Artificial Sequence
  Synthetic oligonucleotide
cgtgggttcaaatggttgtgggagaacgat

SEQ ID NO: 100273 - DNA, 30 bp, Artificial Sequence
  Synthetic oligonucleotide
accgacaaggattgggtataaactaacgat

SEQ ID NO: 100274 - DNA, 30 bp, Artificial Sequence
  Synthetic oligonucleotide
caagactgacgtacaatcaaccgccacgat

SEQ ID NO: 100275 - DNA, 30 bp, Artificial Sequence
  Synthetic oligonucleotide
ccaaggtaggatgcctaatggcgtcacgat

SEQ ID NO: 100276 - DNA, 30 bp, Artificial Sequence
  Synthetic oligonucleotide
acgggtcaggatcgtaggctaggtgacgat

SEQ ID NO: 100277 - DNA, 30 bp, Artificial Sequence
  Synthetic oligonucleotide
gcaagagacagggagagaccctttaccgat

SEQ ID NO: 100278 - DNA, 29 bp, Artificial Sequence
  Synthetic oligonucleotide
taaaccttcatcaaaagtaataaagcgat

SEQ ID NO: 100279 - DNA, 30 bp, Artificial Sequence
  Synthetic oligonucleotide
ggcctggaagcgatctagaactcaagcgat

SEQ ID NO: 100280 - DNA, 30 bp, Artificial Sequence
  Synthetic oligonucleotide
cgcactgcactcaataatagtggaagcgat

SEQ ID NO: 100281 - DNA, 30 bp, Artificial Sequence
  Synthetic oligonucleotide
tacaggaagtgagtgtgtacaataagcgat

SEQ ID NO: 100282 - DNA, 30 bp, Artificial Sequence
  Synthetic oligonucleotide
gtccgattgggcgaatgtcatgccagcgat

SEQ ID NO: 100283 - DNA, 30 bp, Artificial Sequence
  Synthetic oligonucleotide
gtcaatatcacccagtagctgaagagcgat

SEQ ID NO: 100284 - DNA, 30 bp, Artificial Sequence
  Synthetic oligonucleotide
gaaagacataggtgtctcgttgatcgcgat

SEQ ID NO: 100285 - DNA, 30 bp, Artificial Sequence
  Synthetic oligonucleotide
agctttgggttgtgagttccgcaaggcgat

SEQ ID NO: 100286 - DNA, 30 bp, Artificial Sequence
  Synthetic oligonucleotide
gcttgagaacagggaatcttaagaggcgat

SEQ ID NO: 100287 - DNA, 30 bp, Artificial Sequence
  Synthetic oligonucleotide
aaggctcattctcagggcaaagccggcgat

SEQ ID NO: 100288 - DNA, 30 bp, Artificial Sequence
  Synthetic oligonucleotide
caggaatctgtgccccatctgagcggcgat

SEQ ID NO: 100289 - DNA, 30 bp, Artificial Sequence
  Synthetic oligonucleotide
aatagccaaaggaaaaccgggacatgcgat

SEQ ID NO: 100290 - DNA, 30 bp, Artificial Sequence
  Synthetic oligonucleotide
ctgggtcagttaagaatatttgagtgcgat

SEQ ID NO: 100291 - DNA, 30 bp, Artificial Sequence
  Synthetic oligonucleotide
agcaggaggcggacgttacaatgtatcgat

SEQ ID NO: 100292 - DNA, 30 bp, Artificial Sequence
  Synthetic oligonucleotide
cgtggtatggataaggcttgcacgctcgat

SEQ ID NO: 100293 - DNA, 30 bp, Artificial Sequence
  Synthetic oligonucleotide
gacgactgtgtaattatggtatgggtcgat

SEQ ID NO: 100294 - DNA, 30 bp, Artificial Sequence
  Synthetic oligonucleotide
ccggataaaacttgtgtacagaatgtcgat

SEQ ID NO: 100295 - DNA, 30 bp, Artificial Sequence
  Synthetic oligonucleotide
ggctatcaacgcgcaggtgacaaattcgat

SEQ ID NO: 100296 - DNA, 30 bp, Artificial Sequence
  Synthetic oligonucleotide
tctgagctacaattggcacactcattcgat

SEQ ID NO: 100297 - DNA, 30 bp, Artificial Sequence
  Synthetic oligonucleotide
tcatggggcgctcatacgaataggttcgat

SEQ ID NO: 100298 - DNA, 30 bp, Artificial Sequence
  Synthetic oligonucleotide
acactggggaatacttagtcgactttcgat

SEQ ID NO: 100299 - DNA, 30 bp, Artificial Sequence
  Synthetic oligonucleotide
cgtagttactatgcgccagtccaaaaggat

SEQ ID NO: 100300 - DNA, 30 bp, Artificial Sequence
  Synthetic oligonucleotide
tcgagaaaatgtaggcggctgcaacaggat

SEQ ID NO: 100301 - DNA, 30 bp, Artificial Sequence
  Synthetic oligonucleotide
gtccacaaagaaatggaggaccagcaggat

SEQ ID NO: 100302 - DNA, 30 bp, Artificial Sequence
  Synthetic oligonucleotide
aggactgcatgctagcccccaaatcaggat

SEQ ID NO: 100303 - DNA, 30 bp, Artificial Sequence
  Synthetic oligonucleotide
cggatagtgctgagatgtatggtagaggat

SEQ ID NO: 100304 - DNA, 30 bp, Artificial Sequence
  Synthetic oligonucleotide
cctggacccgaaaacttcgttgaataggat

SEQ ID NO: 100305 - DNA, 30 bp, Artificial Sequence
  Synthetic oligonucleotide
agtcgtccaatgggcggcaaataataggat

SEQ ID NO: 100306 - DNA, 30 bp, Artificial Sequence
  Synthetic oligonucleotide
gataacagggaataccagtcgaattaggat

SEQ ID NO: 100307 - DNA, 30 bp, Artificial Sequence
  Synthetic oligonucleotide
acagagcaacagggacgcacggctacggat

SEQ ID NO: 100308 - DNA, 30 bp, Artificial Sequence
  Synthetic oligonucleotide
ccgataggagtagccctcagcggtacggat

SEQ ID NO: 100309 - DNA, 30 bp, Artificial Sequence
  Synthetic oligonucleotide
tgtagccagtgtgtctcgccccaaccggat

SEQ ID NO: 100310 - DNA, 30 bp, Artificial Sequence
  Synthetic oligonucleotide
tgaccaatgaaaccttaaagagtaccggat

SEQ ID NO: 100311 - DNA, 30 bp, Artificial Sequence
  Synthetic oligonucleotide
gtaaatgcgtgcgagttaaggctgccggat

SEQ ID NO: 100312 - DNA, 30 bp, Artificial Sequence
  Synthetic oligonucleotide
gtcacggctactgattgaagggttccggat

SEQ ID NO: 100313 - DNA, 30 bp, Artificial Sequence
  Synthetic oligonucleotide
accactcgtttagagggtttgaaagcggat

SEQ ID NO: 100314 - DNA, 30 bp, Artificial Sequence
  Synthetic oligonucleotide
cgggggggctagacttggtaattcgcggat

SEQ ID NO: 100315 - DNA, 30 bp, Artificial Sequence
  Synthetic oligonucleotide
gtaagatccaaccattaataccatgcggat

SEQ ID NO: 100316 - DNA, 30 bp, Artificial Sequence
  Synthetic oligonucleotide
tcatgtaacccccaagtagaccacagggat

SEQ ID NO: 100317 - DNA, 30 bp, Artificial Sequence
  Synthetic oligonucleotide
gttgagaggcatgcaacaatgagcagggat

SEQ ID NO: 100318 - DNA, 30 bp, Artificial Sequence
  Synthetic oligonucleotide
aagacagcaacaggcgtcgtctcgagggat

SEQ ID NO: 100319 - DNA, 30 bp, Artificial Sequence
  Synthetic oligonucleotide
ctacagcggaagtggtacgctcagcgggat

SEQ ID NO: 100320 - DNA, 30 bp, Artificial Sequence
  Synthetic oligonucleotide
catgatgacggccaacacgtttgaggggat

SEQ ID NO: 100321 - DNA, 30 bp, Artificial Sequence
  Synthetic oligonucleotide
gcgaatatagcggatatccagttatgggat

SEQ ID NO: 100322 - DNA, 30 bp, Artificial Sequence
  Synthetic oligonucleotide
tgcgcgggatacggtggaagggggtgggat

SEQ ID NO: 100323 - DNA, 30 bp, Artificial Sequence
  Synthetic oligonucleotide
gcagtggaatcgacctcgcggtggatggat

SEQ ID NO: 100324 - DNA, 30 bp, Artificial Sequence
  Synthetic oligonucleotide
aacgaacgggatcacttattggctatggat

SEQ ID NO: 100325 - DNA, 30 bp, Artificial Sequence
  Synthetic oligonucleotide
ggacgtcaacaaggttaagttacagtggat

SEQ ID NO: 100326 - DNA, 30 bp, Artificial Sequence
  Synthetic oligonucleotide
gcgtacactttgatacctctcgatgtggat

SEQ ID NO: 100327 - DNA, 30 bp, Artificial Sequence
  Synthetic oligonucleotide
cgggagatacgtcgaaccacgttcttggat

SEQ ID NO: 100328 - DNA, 30 bp, Artificial Sequence
  Synthetic oligonucleotide
gtaagccatatgaaacactccataaatgat

SEQ ID NO: 100329 - DNA, 30 bp, Artificial Sequence
  Synthetic oligonucleotide
gtggtgcaccgaaatcacatcccgcatgat

SEQ ID NO: 100330 - DNA, 30 bp, Artificial Sequence
  Synthetic oligonucleotide
atagaagtacaaagcacaggctcagatgat

SEQ ID NO: 100331 - DNA, 30 bp, Artificial Sequence
  Synthetic oligonucleotide
gaagttaggctgcgagaaataaaggatgat

SEQ ID NO: 100332 - DNA, 30 bp, Artificial Sequence
  Synthetic oligonucleotide
ccgactagtagggtgtggacatattatgat

SEQ ID NO: 100333 - DNA, 30 bp, Artificial Sequence
  Synthetic oligonucleotide
caatcaaagcgcacgtattgctcaactgat

SEQ ID NO: 100334 - DNA, 30 bp, Artificial Sequence
  Synthetic oligonucleotide
cgggtcagatacccctatctaagccctgat

SEQ ID NO: 100335 - DNA, 30 bp, Artificial Sequence
  Synthetic oligonucleotide
gcccgtatgttgagtaaattggcttctgat

SEQ ID NO: 100336 - DNA, 30 bp, Artificial Sequence
  Synthetic oligonucleotide
aatactggcggttgcggaatgcgaagtgat

SEQ ID NO: 100337 - DNA, 30 bp, Artificial Sequence
  Synthetic oligonucleotide
caacccgaagagaagcttgaacggagtgat

SEQ ID NO: 100338 - DNA, 30 bp, Artificial Sequence
  Synthetic oligonucleotide
cagagtctgtcgaaaagggaacagcgtgat

SEQ ID NO: 100339 - DNA, 30 bp, Artificial Sequence
  Synthetic oligonucleotide
tgttgtggttaagagtatgcattaggtgat

SEQ ID NO: 100340 - DNA, 30 bp, Artificial Sequence
  Synthetic oligonucleotide
gcgaagtctcaccatgtatcaaagggtgat

SEQ ID NO: 100341 - DNA, 30 bp, Artificial Sequence
  Synthetic oligonucleotide
tggcttgacgatttagtgcaatctggtgat

SEQ ID NO: 100342 - DNA, 30 bp, Artificial Sequence
  Synthetic oligonucleotide
ggcacatgacgggaagttgttgtctgtgat

SEQ ID NO: 100343 - DNA, 30 bp, Artificial Sequence
  Synthetic oligonucleotide
atgctacaaataatccatttaaggtgtgat

SEQ ID NO: 100344 - DNA, 30 bp, Artificial Sequence
  Synthetic oligonucleotide
cgcatagtacagttctaagatttaattgat

SEQ ID NO: 100345 - DNA, 30 bp, Artificial Sequence
  Synthetic oligonucleotide
atgagaagataataacgtggggacattgat

SEQ ID NO: 100346 - DNA, 30 bp, Artificial Sequence
  Synthetic oligonucleotide
tactaccttgagacaaggctgaagcttgat

SEQ ID NO: 100347 - DNA, 30 bp, Artificial Sequence
  Synthetic oligonucleotide
gcatagagcactaaaaccccgtgatttgat

SEQ ID NO: 100348 - DNA, 30 bp, Artificial Sequence
  Synthetic oligonucleotide
ttatacagcacgtcgcccaaacgtcaatat

SEQ ID NO: 100349 - DNA, 30 bp, Artificial Sequence
  Synthetic oligonucleotide
taagcgaatgatcagtattaacgtgaatat

SEQ ID NO: 100350 - DNA, 30 bp, Artificial Sequence
  Synthetic oligonucleotide
acatgctctgggaataactcgcccacatat

SEQ ID NO: 100351 - DNA, 30 bp, Artificial Sequence
  Synthetic oligonucleotide
caatcatactgggacgacacgcttacatat

SEQ ID NO: 100352 - DNA, 30 bp, Artificial Sequence
  Synthetic oligonucleotide
aaacggcgacctcacatagtactaccatat

SEQ ID NO: 100353 - DNA, 30 bp, Artificial Sequence
  Synthetic oligonucleotide
ggaatggttgtatgtgtgaggtaaggatat

SEQ ID NO: 100354 - DNA, 30 bp, Artificial Sequence
  Synthetic oligonucleotide
ctgcgtaatcaggtattaaggctaggatat

SEQ ID NO: 100355 - DNA, 30 bp, Artificial Sequence
  Synthetic oligonucleotide
acgacgtgtacaccctgggtaacgggatat

SEQ ID NO: 100356 - DNA, 30 bp, Artificial Sequence
  Synthetic oligonucleotide
agattgggatctgataatgatatgggatat

SEQ ID NO: 100357 - DNA, 30 bp, Artificial Sequence
  Synthetic oligonucleotide
tcggactctgggggatgaccgggatgatat

SEQ ID NO: 100358 - DNA, 30 bp, Artificial Sequence
  Synthetic oligonucleotide
tgccgacgtacaaagcgggctcattgatat

SEQ ID NO: 100359 - DNA, 30 bp, Artificial Sequence
  Synthetic oligonucleotide
gcttagggacccccattataacgtatatat

SEQ ID NO: 100360 - DNA, 30 bp, Artificial Sequence
  Synthetic oligonucleotide
acagttaccaaatcctgaaatgcactatat

SEQ ID NO: 100361 - DNA, 30 bp, Artificial Sequence
  Synthetic oligonucleotide
ggttggtgaagtggcgtaagttggctatat

SEQ ID NO: 100362 - DNA, 30 bp, Artificial Sequence
  Synthetic oligonucleotide
ggaccagcgcgaaggagcgatagagtatat

SEQ ID NO: 100363 - DNA, 30 bp, Artificial Sequence
  Synthetic oligonucleotide
aggtgactaacggctgacgacagaaactat

SEQ ID NO: 100364 - DNA, 30 bp, Artificial Sequence
  Synthetic oligonucleotide
agtaccgaaaagtttgcaaaaataaactat

SEQ ID NO: 100365 - DNA, 30 bp, Artificial Sequence
  Synthetic oligonucleotide
cgtaaattacaacggatatgttaacactat

SEQ ID NO: 100366 - DNA, 30 bp, Artificial Sequence
  Synthetic oligonucleotide
tgaggactgtgagtcccacccccacactat

SEQ ID NO: 100367 - DNA, 30 bp, Artificial Sequence
  Synthetic oligonucleotide
tgtggggaaggcgcaaaagactctcactat

SEQ ID NO: 100368 - DNA, 30 bp, Artificial Sequence
  Synthetic oligonucleotide
cacttgaaagtggaaaacagaggctactat

SEQ ID NO: 100369 - DNA, 30 bp, Artificial Sequence
  Synthetic oligonucleotide
aaccggagcacgggagtgacaccgtactat

SEQ ID NO: 100370 - DNA, 30 bp, Artificial Sequence
  Synthetic oligonucleotide
ccatttcagtggattcatcgagtggcctat

SEQ ID NO: 100371 - DNA, 30 bp, Artificial Sequence
  Synthetic oligonucleotide
cggaccgagcttgaggttcgcgtaagctat

SEQ ID NO: 100372 - DNA, 30 bp, Artificial Sequence
  Synthetic oligonucleotide
acgccgaggccatgtccgcctgtgagctat

SEQ ID NO: 100373 - DNA, 30 bp, Artificial Sequence
  Synthetic oligonucleotide
gcatttagtgcagaaaaaattaatagctat

SEQ ID NO: 100374 - DNA, 30 bp, Artificial Sequence
  Synthetic oligonucleotide
ttggagcatggtgtcacggtcgcacgctat

SEQ ID NO: 100375 - DNA, 30 bp, Artificial Sequence
  Synthetic oligonucleotide
accgtcggtcggcgccaggcgtagctctat

SEQ ID NO: 100376 - DNA, 30 bp, Artificial Sequence
  Synthetic oligonucleotide
tctggttggggtctccgtacagtcaagtat

SEQ ID NO: 100377 - DNA, 30 bp, Artificial Sequence
  Synthetic oligonucleotide
aggcgttggatacggactgctacacagtat

SEQ ID NO: 100378 - DNA, 30 bp, Artificial Sequence
  Synthetic oligonucleotide
aggggattaaaagctaccgtagatcagtat

SEQ ID NO: 100379 - DNA, 30 bp, Artificial Sequence
  Synthetic oligonucleotide
tcgtaaattgcataagaaaaggtagagtat

SEQ ID NO: 100380 - DNA, 30 bp, Artificial Sequence
  Synthetic oligonucleotide
aatggtagatataggtgagttattgagtat

SEQ ID NO: 100381 - DNA, 30 bp, Artificial Sequence
  Synthetic oligonucleotide
ccatagaacggaattagccaatactagtat

SEQ ID NO: 100382 - DNA, 30 bp, Artificial Sequence
  Synthetic oligonucleotide
gcacccaatgtgtacgaaaacacctagtat

SEQ ID NO: 100383 - DNA, 27 bp, Artificial Sequence
  Synthetic oligonucleotide
agtcatgggcatcggaatagaacgtat

SEQ ID NO: 100384 - DNA, 30 bp, Artificial Sequence
  Synthetic oligonucleotide
ccatgagcggaaaggggctggttgacgtat

SEQ ID NO: 100385 - DNA, 30 bp, Artificial Sequence
  Synthetic oligonucleotide
tgacttcgtagagatatgagatcaccgtat

SEQ ID NO: 100386 - DNA, 30 bp, Artificial Sequence
  Synthetic oligonucleotide
catggaaagttcagtaggacttagccgtat

SEQ ID NO: 100387 - DNA, 30 bp, Artificial Sequence
  Synthetic oligonucleotide
tacaacgggtcagccagtaagcgagcgtat

SEQ ID NO: 100388 - DNA, 29 bp, Artificial Sequence
  Synthetic oligonucleotide
aacaagggacgatatagtggtaatcgtat

SEQ ID NO: 100389 - DNA, 30 bp, Artificial Sequence
  Synthetic oligonucleotide
gttaggagaaagtgcgatcagaactcgtat

SEQ ID NO: 100390 - DNA, 30 bp, Artificial Sequence
  Synthetic oligonucleotide
ggtaggatagtccgtcattacggctcgtat

SEQ ID NO: 100391 - DNA, 30 bp, Artificial Sequence
  Synthetic oligonucleotide
ggagtggttggacaccaaggggcaaggtat

SEQ ID NO: 100392 - DNA, 30 bp, Artificial Sequence
  Synthetic oligonucleotide
tagaggtccaagccagtgctaagaaggtat

SEQ ID NO: 100393 - DNA, 30 bp, Artificial Sequence
  Synthetic oligonucleotide
gaagtattatgagaccaatgtaggaggtat

SEQ ID NO: 100394 - DNA, 30 bp, Artificial Sequence
  Synthetic oligonucleotide
ggaagggtggatgatcaaaatagccggtat

SEQ ID NO: 100395 - DNA, 30 bp, Artificial Sequence
  Synthetic oligonucleotide
tggacaccggtcagactgacgcctcggtat

SEQ ID NO: 100396 - DNA, 30 bp, Artificial Sequence
  Synthetic oligonucleotide
catagataaacatgttgtcatcaagggtat

SEQ ID NO: 100397 - DNA, 30 bp, Artificial Sequence
  Synthetic oligonucleotide
cgtaatgggctgtaacgaatagccgggtat

SEQ ID NO: 100398 - DNA, 30 bp, Artificial Sequence
  Synthetic oligonucleotide
ccaaatccgtgccccgaggaaaaggggtat

SEQ ID NO: 100399 - DNA, 30 bp, Artificial Sequence
  Synthetic oligonucleotide
gccaaaaatactcaaaggtgttgatggtat

SEQ ID NO: 100400 - DNA, 30 bp, Artificial Sequence
  Synthetic oligonucleotide
tacacgggagagtccaccagtcaaatgtat

SEQ ID NO: 100401 - DNA, 30 bp, Artificial Sequence
  Synthetic oligonucleotide
ccgaagatggaggcttcacattaaatgtat

SEQ ID NO: 100402 - DNA, 30 bp, Artificial Sequence
  Synthetic oligonucleotide
catgttgggtgcggcggagaaagaatgtat

SEQ ID NO: 100403 - DNA, 30 bp, Artificial Sequence
  Synthetic oligonucleotide
agttgagagtcggtacgagagcaactgtat

SEQ ID NO: 100404 - DNA, 30 bp, Artificial Sequence
  Synthetic oligonucleotide
gtgggagaattacgccgggaaccactgtat

SEQ ID NO: 100405 - DNA, 30 bp, Artificial Sequence
  Synthetic oligonucleotide
cacggaagcacaggcttggggataaattat

SEQ ID NO: 100406 - DNA, 30 bp, Artificial Sequence
  Synthetic oligonucleotide
gctcatggaacctacagtcttgggaattat

SEQ ID NO: 100407 - DNA, 30 bp, Artificial Sequence
  Synthetic oligonucleotide
cacacggagtccaaggattcagaacattat

SEQ ID NO: 100408 - DNA, 30 bp, Artificial Sequence
  Synthetic oligonucleotide
gcaccaaagatgtcacttccgcccgattat

SEQ ID NO: 100409 - DNA, 30 bp, Artificial Sequence
  Synthetic oligonucleotide
aaggttcaacgttcgggggcaaggtattat

SEQ ID NO: 100410 - DNA, 30 bp, Artificial Sequence
  Synthetic oligonucleotide
cgtgggcattttatcggaaagcgaacttat

SEQ ID NO: 100411 - DNA, 30 bp, Artificial Sequence
  Synthetic oligonucleotide
gctcacgaggaaacttcattattcacttat

SEQ ID NO: 100412 - DNA, 30 bp, Artificial Sequence
  Synthetic oligonucleotide
tccaggtagggtggtctataagggacttat

SEQ ID NO: 100413 - DNA, 30 bp, Artificial Sequence
  Synthetic oligonucleotide
taagcacagctaggtgggacgataagttat

SEQ ID NO: 100414 - DNA, 30 bp, Artificial Sequence
  Synthetic oligonucleotide
atactgagaggtcgaataagggcaggttat

SEQ ID NO: 100415 - DNA, 30 bp, Artificial Sequence
  Synthetic oligonucleotide
cgggagcgcagtggggcagggaactgttat

SEQ ID NO: 100416 - DNA, 30 bp, Artificial Sequence
  Synthetic oligonucleotide
ggacgtgcccccgcatttggaaagtgttat

SEQ ID NO: 100417 - DNA, 30 bp, Artificial Sequence
  Synthetic oligonucleotide
aaccaggggctgagcaacctccacctttat

SEQ ID NO: 100418 - DNA, 30 bp, Artificial Sequence
  Synthetic oligonucleotide
cggacgacaacctaattactatcgctttat

SEQ ID NO: 100419 - DNA, 30 bp, Artificial Sequence
  Synthetic oligonucleotide
cgtgcgatgagccgcatttttccattttat

SEQ ID NO: 100420 - DNA, 30 bp, Artificial Sequence
  Synthetic oligonucleotide
tcggtgtgaagggacgcgtcacacaaaact

SEQ ID NO: 100421 - DNA, 30 bp, Artificial Sequence
  Synthetic oligonucleotide
tacaacggggccctaccctagcaacaaact

SEQ ID NO: 100422 - DNA, 30 bp, Artificial Sequence
  Synthetic oligonucleotide
aagaggcttggtattccacaattgtaaact

SEQ ID NO: 100423 - DNA, 30 bp, Artificial Sequence
  Synthetic oligonucleotide
aaagatgtttcgtcacaaaagatttaaact

SEQ ID NO: 100424 - DNA, 30 bp, Artificial Sequence
  Synthetic oligonucleotide
acaggcttgatgctggaggataccacaact

SEQ ID NO: 100425 - DNA, 30 bp, Artificial Sequence
  Synthetic oligonucleotide
acccaaatgtgtgcggcgaacatcacaact

SEQ ID NO: 100426 - DNA, 30 bp, Artificial Sequence
  Synthetic oligonucleotide
gccgccacaaagagcaagatgacgacaact

SEQ ID NO: 100427 - DNA, 30 bp, Artificial Sequence
  Synthetic oligonucleotide
catatattcatatattgacagaggacaact

SEQ ID NO: 100428 - DNA, 30 bp, Artificial Sequence
  Synthetic oligonucleotide
tcagtggatatgtatatggaaattacaact

SEQ ID NO: 100429 - DNA, 30 bp, Artificial Sequence
  Synthetic oligonucleotide
ccaggggtttggagatcctgctgaccaact

SEQ ID NO: 100430 - DNA, 30 bp, Artificial Sequence
  Synthetic oligonucleotide
ttagtggacgaaggcgtgccgcggccaact

SEQ ID NO: 100431 - DNA, 30 bp, Artificial Sequence
  Synthetic oligonucleotide
ggcattgtaaacgagcctaccgaagcaact

SEQ ID NO: 100432 - DNA, 30 bp, Artificial Sequence
  Synthetic oligonucleotide
tatggcacatacagctacgaaagtgcaact

SEQ ID NO: 100433 - DNA, 30 bp, Artificial Sequence
  Synthetic oligonucleotide
ggtgcactgcaggattcgcgtccatcaact

SEQ ID NO: 100434 - DNA, 30 bp, Artificial Sequence
  Synthetic oligonucleotide
cgtttaataatgtaagagtgcacgtcaact

SEQ ID NO: 100435 - DNA, 30 bp, Artificial Sequence
  Synthetic oligonucleotide
agcaactgttggagtgcgagccggcgaact

SEQ ID NO: 100436 - DNA, 30 bp, Artificial Sequence
  Synthetic oligonucleotide
tcgaggcttgcgagggtctgggccggaact

SEQ ID NO: 100437 - DNA, 30 bp, Artificial Sequence
  Synthetic oligonucleotide
gttccaaaagcctgagatgtgagcggaact

SEQ ID NO: 100438 - DNA, 30 bp, Artificial Sequence
  Synthetic oligonucleotide
atgcactattcggaccataggatcggaact

SEQ ID NO: 100439 - DNA, 30 bp, Artificial Sequence
  Synthetic oligonucleotide
aggactcgaagcgaatctcgcaagggaact

SEQ ID NO: 100440 - DNA, 30 bp, Artificial Sequence
  Synthetic oligonucleotide
ggtcgtctgtcgactagctcaacgggaact

SEQ ID NO: 100441 - DNA, 30 bp, Artificial Sequence
  Synthetic oligonucleotide
acgcaacaacggtaagcgttaaggtgaact

SEQ ID NO: 100442 - DNA, 30 bp, Artificial Sequence
  Synthetic oligonucleotide
agcaaagctggaccctgacccaggtgaact

SEQ ID NO: 100443 - DNA, 30 bp, Artificial Sequence
  Synthetic oligonucleotide
caacataaacatattgaggaccggtgaact

SEQ ID NO: 100444 - DNA, 30 bp, Artificial Sequence
  Synthetic oligonucleotide
ttggtccgtaaacagcaaaagggaataact

SEQ ID NO: 100445 - DNA, 30 bp, Artificial Sequence
  Synthetic oligonucleotide
gagactccgccaacatgccttaccataact

SEQ ID NO: 100446 - DNA, 30 bp, Artificial Sequence
  Synthetic oligonucleotide
gtcggtagtctacagaagaattccctaact

SEQ ID NO: 100447 - DNA, 30 bp, Artificial Sequence
  Synthetic oligonucleotide
atatgccggcgatgctcaatcgtgcacact

SEQ ID NO: 100448 - DNA, 30 bp, Artificial Sequence
  Synthetic oligonucleotide
aggacctagcattatccactattagacact

SEQ ID NO: 100449 - DNA, 30 bp, Artificial Sequence
  Synthetic oligonucleotide
ggacatgtcccaacaccatgcacggacact

SEQ ID NO: 100450 - DNA, 30 bp, Artificial Sequence
  Synthetic oligonucleotide
ccgtaccaagttaacaacaacggatacact

SEQ ID NO: 100451 - DNA, 30 bp, Artificial Sequence
  Synthetic oligonucleotide
cacttgagcctggtctcgttctgcaccact

SEQ ID NO: 100452 - DNA, 30 bp, Artificial Sequence
  Synthetic oligonucleotide
taattggacgagcggggccatccgaccact

SEQ ID NO: 100453 - DNA, 30 bp, Artificial Sequence
  Synthetic oligonucleotide
cggcaagtaagcaggcagggttggaccact

SEQ ID NO: 100454 - DNA, 30 bp, Artificial Sequence
  Synthetic oligonucleotide
ggatagcacaagttgatgtatgatcccact

SEQ ID NO: 100455 - DNA, 30 bp, Artificial Sequence
  Synthetic oligonucleotide
tgccgccggttcaacacaggcaaagccact

SEQ ID NO: 100456 - DNA, 30 bp, Artificial Sequence
  Synthetic oligonucleotide
acgtagagaggcactcaccggtcggccact

SEQ ID NO: 100457 - DNA, 30 bp, Artificial Sequence
  Synthetic oligonucleotide
ctcgactcccctaaacatagacgtgccact

SEQ ID NO: 100458 - DNA, 30 bp, Artificial Sequence
  Synthetic oligonucleotide
tcctcatgggctggcaacattgcttccact

SEQ ID NO: 100459 - DNA, 30 bp, Artificial Sequence
  Synthetic oligonucleotide
gcggggctcatccaaacagccttcagcact

SEQ ID NO: 100460 - DNA, 30 bp, Artificial Sequence
  Synthetic oligonucleotide
aggagctgtaagcgttataggtctagcact

SEQ ID NO: 100461 - DNA, 30 bp, Artificial Sequence
  Synthetic oligonucleotide
ccatgcaacacagcacaaagccaccgcact

SEQ ID NO: 100462 - DNA, 30 bp, Artificial Sequence
  Synthetic oligonucleotide
cgagtatatcgtgtagtctacacaggcact

SEQ ID NO: 100463 - DNA, 30 bp, Artificial Sequence
  Synthetic oligonucleotide
catcattattgtggcggtagagctggcact

SEQ ID NO: 100464 - DNA, 30 bp, Artificial Sequence
  Synthetic oligonucleotide
tgatcagcgtcaggggctgaacgatgcact

SEQ ID NO: 100465 - DNA, 30 bp, Artificial Sequence
  Synthetic oligonucleotide
gcaggataggacacaatagctcgcatcact

SEQ ID NO: 100466 - DNA, 30 bp, Artificial Sequence
  Synthetic oligonucleotide
caggaaaaggacaagaaggtgtcagtcact

SEQ ID NO: 100467 - DNA, 30 bp, Artificial Sequence
  Synthetic oligonucleotide
agtgtaaacggtctcgctgcgtacgtcact

SEQ ID NO: 100468 - DNA, 30 bp, Artificial Sequence
  Synthetic oligonucleotide
tggattggcatatgggaaatacgtgtcact

SEQ ID NO: 100469 - DNA, 30 bp, Artificial Sequence
  Synthetic oligonucleotide
taggaatttagtttcaaagcgtgcttcact

SEQ ID NO: 100470 - DNA, 30 bp, Artificial Sequence
  Synthetic oligonucleotide
agcagctaggggactacagacgagttcact

SEQ ID NO: 100471 - DNA, 30 bp, Artificial Sequence
  Synthetic oligonucleotide
gtaacgtatgtgcggggagttatgttcact

SEQ ID NO: 100472 - DNA, 30 bp, Artificial Sequence
  Synthetic oligonucleotide
ggagtgccaattcgaggcgaagatttcact

SEQ ID NO: 100473 - DNA, 30 bp, Artificial Sequence
  Synthetic oligonucleotide
atggtagtagaggttggtagcaagaagact

SEQ ID NO: 100474 - DNA, 30 bp, Artificial Sequence
  Synthetic oligonucleotide
ggtgacgtcgtccgaacactctggcagact

SEQ ID NO: 100475 - DNA, 30 bp, Artificial Sequence
  Synthetic oligonucleotide
agccagggctcctaaccttagaacgagact

SEQ ID NO: 100476 - DNA, 30 bp, Artificial Sequence
  Synthetic oligonucleotide
ctgagaagaatgcttgactgggacgagact

SEQ ID NO: 100477 - DNA, 30 bp, Artificial Sequence
  Synthetic oligonucleotide
taacgatactgtaagtgttttggctagact

SEQ ID NO: 100478 - DNA, 30 bp, Artificial Sequence
  Synthetic oligonucleotide
acggactgcttactgcgattcccgtagact

SEQ ID NO: 100479 - DNA, 30 bp, Artificial Sequence
  Synthetic oligonucleotide
aggaagtggtcagaggaaggcagcacgact

SEQ ID NO: 100480 - DNA, 30 bp, Artificial Sequence
  Synthetic oligonucleotide
aagacaaatcagacctggatatggacgact

SEQ ID NO: 100481 - DNA, 30 bp, Artificial Sequence
  Synthetic oligonucleotide
agggagtatcataaaggacaacccccgact

SEQ ID NO: 100482 - DNA, 30 bp, Artificial Sequence
  Synthetic oligonucleotide
tggagagtgagaatattctttgtcccgact

SEQ ID NO: 100483 - DNA, 30 bp, Artificial Sequence
  Synthetic oligonucleotide
gaccaaattggatggtacattctagcgact

SEQ ID NO: 100484 - DNA, 30 bp, Artificial Sequence
  Synthetic oligonucleotide
ccatagaagagcgtgactggttcatcgact

SEQ ID NO: 100485 - DNA, 30 bp, Artificial Sequence
  Synthetic oligonucleotide
tatgacattcgcagaatggaatgctcgact

SEQ ID NO: 100486 - DNA, 30 bp, Artificial Sequence
  Synthetic oligonucleotide
cgcggaaaagcaccggcgtccaattcgact

SEQ ID NO: 100487 - DNA, 30 bp, Artificial Sequence
  Synthetic oligonucleotide
taacgatcagattgatgtaaaaaatggact

SEQ ID NO: 100488 - DNA, 30 bp, Artificial Sequence
  Synthetic oligonucleotide
agccaaacagaatcgtaccctcgatggact

SEQ ID NO: 100489 - DNA, 30 bp, Artificial Sequence
  Synthetic oligonucleotide
cgttttcaccctacctgttatgagtggact

SEQ ID NO: 100490 - DNA, 30 bp, Artificial Sequence
  Synthetic oligonucleotide
gggatctggatggagcgtagctacatgact

SEQ ID NO: 100491 - DNA, 30 bp, Artificial Sequence
  Synthetic oligonucleotide
taatgccagcctgaccatcgatacctgact

SEQ ID NO: 100492 - DNA, 30 bp, Artificial Sequence
  Synthetic oligonucleotide
cactatgggggagagcccgtgtctgtgact

SEQ ID NO: 100493 - DNA, 30 bp, Artificial Sequence
  Synthetic oligonucleotide
ctggagcgtctcgatagactgcgcaatact

SEQ ID NO: 100494 - DNA, 30 bp, Artificial Sequence
  Synthetic oligonucleotide
ttcgttatacgaaaacatgagatcgatact

SEQ ID NO: 100495 - DNA, 30 bp, Artificial Sequence
  Synthetic oligonucleotide
caggtggcggtcgaagttactattgatact

SEQ ID NO: 100496 - DNA, 30 bp, Artificial Sequence
  Synthetic oligonucleotide
cgtcacttatccttggataagttgtatact

SEQ ID NO: 100497 - DNA, 30 bp, Artificial Sequence
  Synthetic oligonucleotide
cgaggcgagcccaacgattgatattatact

SEQ ID NO: 100498 - DNA, 30 bp, Artificial Sequence
  Synthetic oligonucleotide
tgggcgtcgtagggaacaggacaaactact

SEQ ID NO: 100499 - DNA, 30 bp, Artificial Sequence
  Synthetic oligonucleotide
tggctcctgcagaatatctgtgacactact

SEQ ID NO: 100500 - DNA, 30 bp, Artificial Sequence
  Synthetic oligonucleotide
ggctacatcaatgagatggttcaacctact

SEQ ID NO: 100501 - DNA, 32 bp, Artificial Sequence
  Synthetic oligonucleotide
tactgaaaggacacctgggagagccagctact

SEQ ID NO: 100502 - DNA, 30 bp, Artificial Sequence
  Synthetic oligonucleotide
ggttcgtgcatagcgtaaactgcatctact

SEQ ID NO: 100503 - DNA, 30 bp, Artificial Sequence
  Synthetic oligonucleotide
ccggtgaaatgacttaagtggagctctact

SEQ ID NO: 100504 - DNA, 30 bp, Artificial Sequence
  Synthetic oligonucleotide
tcgagcgggtttttggggggagtgagtact

SEQ ID NO: 100505 - DNA, 30 bp, Artificial Sequence
  Synthetic oligonucleotide
ggcctcataataagttcgagtacgcgtact

SEQ ID NO: 100506 - DNA, 30 bp, Artificial Sequence
  Synthetic oligonucleotide
aaccgtagtggaacaagccaggctcgtact

SEQ ID NO: 100507 - DNA, 30 bp, Artificial Sequence
  Synthetic oligonucleotide
cttggacccacgccgtgatagtgaggtact

SEQ ID NO: 100508 - DNA, 30 bp, Artificial Sequence
  Synthetic oligonucleotide
aaacacgtaagtggcaagcgaaatggtact

SEQ ID NO: 100509 - DNA, 30 bp, Artificial Sequence
  Synthetic oligonucleotide
aaggtcgggaccgtgtgagtcaaatgtact

SEQ ID NO: 100510 - DNA, 30 bp, Artificial Sequence
  Synthetic oligonucleotide
ggcactctcaccccttagaagccatgtact

SEQ ID NO: 100511 - DNA, 30 bp, Artificial Sequence
  Synthetic oligonucleotide
gaaccaatgaaggagtcctgcagttgtact

SEQ ID NO: 100512 - DNA, 30 bp, Artificial Sequence
  Synthetic oligonucleotide
agagaccaacagtttcgtactataattact

SEQ ID NO: 100513 - DNA, 30 bp, Artificial Sequence
  Synthetic oligonucleotide
aaacggcttggttagctgatatatcttact

SEQ ID NO: 100514 - DNA, 30 bp, Artificial Sequence
  Synthetic oligonucleotide
gtgtccacaggtcatgccggacgagttact

SEQ ID NO: 100515 - DNA, 30 bp, Artificial Sequence
  Synthetic oligonucleotide
aggatgacacgacgcaaaagacgtgttact

SEQ ID NO: 100516 - DNA, 30 bp, Artificial Sequence
  Synthetic oligonucleotide
aagatcgaacgtggccacatgacctttact

SEQ ID NO: 100517 - DNA, 30 bp, Artificial Sequence
  Synthetic oligonucleotide
agagccgttgtcctacagtatgccaaacct

SEQ ID NO: 100518 - DNA, 30 bp, Artificial Sequence
  Synthetic oligonucleotide
ggtaacccgaagctgggtgagcgtcaacct

SEQ ID NO: 100519 - DNA, 30 bp, Artificial Sequence
  Synthetic oligonucleotide
acgcgaatctggcgttacgtcgccgaacct

SEQ ID NO: 100520 - DNA, 30 bp, Artificial Sequence
  Synthetic oligonucleotide
agaaggctgaatgcaaccacgtagtaacct

SEQ ID NO: 100521 - DNA, 30 bp, Artificial Sequence
  Synthetic oligonucleotide
tgtacacttcaccgcggttacaccacacct

SEQ ID NO: 100522 - DNA, 30 bp, Artificial Sequence
  Synthetic oligonucleotide
ctggaggggattcgcaactcacggacacct

SEQ ID NO: 100523 - DNA, 30 bp, Artificial Sequence
  Synthetic oligonucleotide
cgaaagcttatttcactttggggtccacct

SEQ ID NO: 100524 - DNA, 30 bp, Artificial Sequence
  Synthetic oligonucleotide
tgatcgattcttggcactattgtagcacct

SEQ ID NO: 100525 - DNA, 30 bp, Artificial Sequence
  Synthetic oligonucleotide
actggacattaagttgttatgtgggcacct

SEQ ID NO: 100526 - DNA, 30 bp, Artificial Sequence
  Synthetic oligonucleotide
agaccggatccgtagccacagttgtcacct

SEQ ID NO: 100527 - DNA, 30 bp, Artificial Sequence
  Synthetic oligonucleotide
gcacggcccagtgtccagggtgcttcacct

SEQ ID NO: 100528 - DNA, 30 bp, Artificial Sequence
  Synthetic oligonucleotide
ggtgcgcacgggcacatgaaatgaagacct

SEQ ID NO: 100529 - DNA, 30 bp, Artificial Sequence
  Synthetic oligonucleotide
agtgagcttctgtgactacatgacagacct

SEQ ID NO: 100530 - DNA, 30 bp, Artificial Sequence
  Synthetic oligonucleotide
cagggaaggactctcatggcgtgcagacct

SEQ ID NO: 100531 - DNA, 30 bp, Artificial Sequence
  Synthetic oligonucleotide
gggtccaggaagcgtcaaagctcgagacct

SEQ ID NO: 100532 - DNA, 30 bp, Artificial Sequence
  Synthetic oligonucleotide
ccaacagccattgtcagggcactacgacct

SEQ ID NO: 100533 - DNA, 30 bp, Artificial Sequence
  Synthetic oligonucleotide
aacgagtgatagaaaaattctcctcgacct

SEQ ID NO: 100534 - DNA, 30 bp, Artificial Sequence
  Synthetic oligonucleotide
ttcgggaaggtggagtcgcataggggacct

SEQ ID NO: 100535 - DNA, 30 bp, Artificial Sequence
  Synthetic oligonucleotide
cgcttgtcattataagttctcgagtgacct

SEQ ID NO: 100536 - DNA, 30 bp, Artificial Sequence
  Synthetic oligonucleotide
ctatccctcttgtaagcctccaggtgacct

SEQ ID NO: 100537 - DNA, 30 bp, Artificial Sequence
  Synthetic oligonucleotide
caaagccagataaggctccgtgggtgacct

SEQ ID NO: 100538 - DNA, 30 bp, Artificial Sequence
  Synthetic oligonucleotide
ggctcggcgaacacccgactgcaaatacct

SEQ ID NO: 100539 - DNA, 30 bp, Artificial Sequence
  Synthetic oligonucleotide
gttaatggccgggcaatgcgatgaatacct

SEQ ID NO: 100540 - DNA, 30 bp, Artificial Sequence
  Synthetic oligonucleotide
cgactttactagtatccgtctctgatacct

SEQ ID NO: 100541 - DNA, 30 bp, Artificial Sequence
  Synthetic oligonucleotide
taaacgatgacgaggtgttcgtccgtacct

SEQ ID NO: 100542 - DNA, 30 bp, Artificial Sequence
  Synthetic oligonucleotide
aatcgagaaccaatcgaaggcgcggtacct

SEQ ID NO: 100543 - DNA, 30 bp, Artificial Sequence
  Synthetic oligonucleotide
catgagtgttagtgcataagagcattacct

SEQ ID NO: 100544 - DNA, 30 bp, Artificial Sequence
  Synthetic oligonucleotide
agcgccggttacaataacggatgtcaccct

SEQ ID NO: 100545 - DNA, 30 bp, Artificial Sequence
  Synthetic oligonucleotide
agcagagtttcacccagggtcatcccccct

SEQ ID NO: 100546 - DNA, 30 bp, Artificial Sequence
  Synthetic oligonucleotide
tcggagacttgcgtggtccatattgcccct

SEQ ID NO: 100547 - DNA, 30 bp, Artificial Sequence
  Synthetic oligonucleotide
tgatgactgccgaggaaacgaaggagccct

SEQ ID NO: 100548 - DNA, 30 bp, Artificial Sequence
  Synthetic oligonucleotide
cctaatctaatcggggtccgaactagccct

SEQ ID NO: 100549 - DNA, 30 bp, Artificial Sequence
  Synthetic oligonucleotide
gaatagtgaatcgaaggcagaccacgccct

SEQ ID NO: 100550 - DNA, 30 bp, Artificial Sequence
  Synthetic oligonucleotide
tctagagggatggtaataagtcggtgccct

SEQ ID NO: 100551 - DNA, 30 bp, Artificial Sequence
  Synthetic oligonucleotide
tggtggtaattgaattgcgaatccttccct

SEQ ID NO: 100552 - DNA, 30 bp, Artificial Sequence
  Synthetic oligonucleotide
cccgggcccaaagaaaacacggacaagcct

SEQ ID NO: 100553 - DNA, 30 bp, Artificial Sequence
  Synthetic oligonucleotide
agaggactaagccagacgtgaaaatagcct

SEQ ID NO: 100554 - DNA, 30 bp, Artificial Sequence
  Synthetic oligonucleotide
acgtaaacagaagaagtaaatcaagcgcct

SEQ ID NO: 100555 - DNA, 30 bp, Artificial Sequence
  Synthetic oligonucleotide
gatcacaggacgataactattggggcgcct

SEQ ID NO: 100556 - DNA, 30 bp, Artificial Sequence
  Synthetic oligonucleotide
aatggtgacatagataaggactgtgcgcct

SEQ ID NO: 100557 - DNA, 30 bp, Artificial Sequence
  Synthetic oligonucleotide
aaagtggactgagcgtacacagagtcgcct

SEQ ID NO: 100558 - DNA, 30 bp, Artificial Sequence
  Synthetic oligonucleotide
tcacctcatgttactatgtgcgacaggcct

SEQ ID NO: 100559 - DNA, 30 bp, Artificial Sequence
  Synthetic oligonucleotide
aagctaggagagcacacgtaccctttgcct

SEQ ID NO: 100560 - DNA, 30 bp, Artificial Sequence
  Synthetic oligonucleotide
tctaagacagaaaacgataggcttaatcct

SEQ ID NO: 100561 - DNA, 30 bp, Artificial Sequence
  Synthetic oligonucleotide
agatcaggaatgtactgtgcactacatcct

SEQ ID NO: 100562 - DNA, 30 bp, Artificial Sequence
  Synthetic oligonucleotide
cagaaggtcctgaatgggactcggcatcct

SEQ ID NO: 100563 - DNA, 30 bp, Artificial Sequence
  Synthetic oligonucleotide
caaatgatatcacgtgggagctgcactcct

SEQ ID NO: 100564 - DNA, 30 bp, Artificial Sequence
  Synthetic oligonucleotide
acccacctgggctacagtagagctactcct

SEQ ID NO: 100565 - DNA, 30 bp, Artificial Sequence
  Synthetic oligonucleotide
cgagagaaagaccgtagggattaccctcct

SEQ ID NO: 100566 - DNA, 30 bp, Artificial Sequence
  Synthetic oligonucleotide
tacgggcccgaatcacttgtcgagtctcct

SEQ ID NO: 100567 - DNA, 30 bp, Artificial Sequence
  Synthetic oligonucleotide
gtcggcaacctggagggctatccgagtcct

SEQ ID NO: 100568 - DNA, 30 bp, Artificial Sequence
  Synthetic oligonucleotide
acggtagacctccagctgaagattcgtcct

SEQ ID NO: 100569 - DNA, 30 bp, Artificial Sequence
  Synthetic oligonucleotide
ccttccgaagaactagaacggtggggtcct

SEQ ID NO: 100570 - DNA, 30 bp, Artificial Sequence
  Synthetic oligonucleotide
tgcacgacgatgatcagtgaacaatttcct

SEQ ID NO: 100571 - DNA, 30 bp, Artificial Sequence
  Synthetic oligonucleotide
gcgttggagaacgcaaaagagtggtttcct

SEQ ID NO: 100572 - DNA, 30 bp, Artificial Sequence
  Synthetic oligonucleotide
atcgaacaaaagactagcattgacaaagct

SEQ ID NO: 100573 - DNA, 30 bp, Artificial Sequence
  Synthetic oligonucleotide
agcgagttcagtatatgagttcataaagct

SEQ ID NO: 100574 - DNA, 30 bp, Artificial Sequence
  Synthetic oligonucleotide
aagggggccgatggccaatggcttaaagct

SEQ ID NO: 100575 - DNA, 30 bp, Artificial Sequence
  Synthetic oligonucleotide
ccacatgattaacccactacgtaacaagct

SEQ ID NO: 100576 - DNA, 30 bp, Artificial Sequence
  Synthetic oligonucleotide
acagggctcgtaatcgtcatgcctcaagct

SEQ ID NO: 100577 - DNA, 30 bp, Artificial Sequence
  Synthetic oligonucleotide
tgctcacactgggggcaactggtggaagct

SEQ ID NO: 100578 - DNA, 30 bp, Artificial Sequence
  Synthetic oligonucleotide
actggacttgccatacagggcccataagct

SEQ ID NO: 100579 - DNA, 30 bp, Artificial Sequence
  Synthetic oligonucleotide
gatctgggccagtcccaatttagttaagct

SEQ ID NO: 100580 - DNA, 30 bp, Artificial Sequence
  Synthetic oligonucleotide
ctgggagagactatataacaaagaacagct

SEQ ID NO: 100581 - DNA, 30 bp, Artificial Sequence
  Synthetic oligonucleotide
tgtcccattggtcgaacaatccgcacagct

SEQ ID NO: 100582 - DNA, 30 bp, Artificial Sequence
  Synthetic oligonucleotide
gggtttatccgctattcccagctcacagct

SEQ ID NO: 100583 - DNA, 30 bp, Artificial Sequence
  Synthetic oligonucleotide
gcgttaaacacgaacgcgttgcgtccagct

SEQ ID NO: 100584 - DNA, 30 bp, Artificial Sequence
  Synthetic oligonucleotide
cagaaatgccgaaggcaacagaactcagct

SEQ ID NO: 100585 - DNA, 30 bp, Artificial Sequence
  Synthetic oligonucleotide
gtgttggagcggacattttcaccctcagct

SEQ ID NO: 100586 - DNA, 30 bp, Artificial Sequence
  Synthetic oligonucleotide
cgaacaaaacattggatattgcatagagct

SEQ ID NO: 100587 - DNA, 30 bp, Artificial Sequence
  Synthetic oligonucleotide
ccagtaacgggtctactcaggcagggagct

SEQ ID NO: 100588 - DNA, 30 bp, Artificial Sequence
  Synthetic oligonucleotide
ggaatgagtacattcaaaacgcgaatagct

SEQ ID NO: 100589 - DNA, 30 bp, Artificial Sequence
  Synthetic oligonucleotide
aagtataagaataatgcgtaagccatagct

SEQ ID NO: 100590 - DNA, 30 bp, Artificial Sequence
  Synthetic oligonucleotide
cctctgaagtaaaactccaactggctagct

SEQ ID NO: 100591 - DNA, 30 bp, Artificial Sequence
  Synthetic oligonucleotide
aatggaagtgtcctaatatggattgtagct

SEQ ID NO: 100592 - DNA, 30 bp, Artificial Sequence
  Synthetic oligonucleotide
accctccggtcacaacatgggagattagct

SEQ ID NO: 100593 - DNA, 30 bp, Artificial Sequence
  Synthetic oligonucleotide
gctgcgggcccacatcgaaactgcttagct

SEQ ID NO: 100594 - DNA, 30 bp, Artificial Sequence
  Synthetic oligonucleotide
aagtggcaggattatgcgcaatgaaacgct

SEQ ID NO: 100595 - DNA, 30 bp, Artificial Sequence
  Synthetic oligonucleotide
gagacgtggagggacaaggtgcttaacgct

SEQ ID NO: 100596 - DNA, 30 bp, Artificial Sequence
  Synthetic oligonucleotide
atgtatcgaattcgactaagaaatcacgct

SEQ ID NO: 100597 - DNA, 30 bp, Artificial Sequence
  Synthetic oligonucleotide
agcatctaaacggcctaggggcacgacgct

SEQ ID NO: 100598 - DNA, 31 bp, Artificial Sequence
  Synthetic oligonucleotide
tgattgtctcaaacgtgggtagggaaccgct

SEQ ID NO: 100599 - DNA, 30 bp, Artificial Sequence
  Synthetic oligonucleotide
agtaacggtatggcctgaatcgtgaccgct

SEQ ID NO: 100600 - DNA, 30 bp, Artificial Sequence
  Synthetic oligonucleotide
caaaaccaataacggaattatgtgaccgct

SEQ ID NO: 100601 - DNA, 30 bp, Artificial Sequence
  Synthetic oligonucleotide
atgctcgccatacgagaacggcataccgct

SEQ ID NO: 100602 - DNA, 30 bp, Artificial Sequence
  Synthetic oligonucleotide
cccgaaaaagagaggcgaaaatcagccgct

SEQ ID NO: 100603 - DNA, 30 bp, Artificial Sequence
  Synthetic oligonucleotide
tgtcgttgctgcgtacttggcgctgccgct

SEQ ID NO: 100604 - DNA, 30 bp, Artificial Sequence
  Synthetic oligonucleotide
agaatggagaaacaagattaacattccgct

SEQ ID NO: 100605 - DNA, 30 bp, Artificial Sequence
  Synthetic oligonucleotide
tgcatgtgttacacgacatatagttccgct

SEQ ID NO: 100606 - DNA, 30 bp, Artificial Sequence
  Synthetic oligonucleotide
ataaagaggccaatgaacatctgttccgct

SEQ ID NO: 100607 - DNA, 30 bp, Artificial Sequence
  Synthetic oligonucleotide
aatgataatgttgaaataaaaaaacgcgct

SEQ ID NO: 100608 - DNA, 30 bp, Artificial Sequence
  Synthetic oligonucleotide
tagaaaagtgcgatcagccttccacgcgct

SEQ ID NO: 100609 - DNA, 30 bp, Artificial Sequence
  Synthetic oligonucleotide
cctgatacgggtgtacgattttagcgcgct

SEQ ID NO: 100610 - DNA, 30 bp, Artificial Sequence
  Synthetic oligonucleotide
cgtttacttgtgtgtgagactcatggcgct

SEQ ID NO: 100611 - DNA, 30 bp, Artificial Sequence
  Synthetic oligonucleotide
gtcatagaggcagtcattactgttggcgct

SEQ ID NO: 100612 - DNA, 30 bp, Artificial Sequence
  Synthetic oligonucleotide
gtcagagggtttgtacaactcagactcgct

SEQ ID NO: 100613 - DNA, 30 bp, Artificial Sequence
  Synthetic oligonucleotide
tcaagtgttcagagcgcattaaacgtcgct

SEQ ID NO: 100614 - DNA, 30 bp, Artificial Sequence
  Synthetic oligonucleotide
tgtcacaggggatatagccaaatggtcgct

SEQ ID NO: 100615 - DNA, 30 bp, Artificial Sequence
  Synthetic oligonucleotide
attcccgacaaaagtacagaaatccaggct

SEQ ID NO: 100616 - DNA, 30 bp, Artificial Sequence
  Synthetic oligonucleotide
gcggtaaggataacggacaaatggcaggct

SEQ ID NO: 100617 - DNA, 30 bp, Artificial Sequence
  Synthetic oligonucleotide
taggtggcggagttaaacatcgcagaggct

SEQ ID NO: 100618 - DNA, 30 bp, Artificial Sequence
  Synthetic oligonucleotide
ccgtgatagtctgtttctcaacaataggct

SEQ ID NO: 100619 - DNA, 30 bp, Artificial Sequence
  Synthetic oligonucleotide
agaggctaaggatacggatacttttaggct

SEQ ID NO: 100620 - DNA, 30 bp, Artificial Sequence
  Synthetic oligonucleotide
tggtgaacattcctggagtcgaagccggct

SEQ ID NO: 100621 - DNA, 30 bp, Artificial Sequence
  Synthetic oligonucleotide
tgtggaatgaaagcacgaactaacgcggct

SEQ ID NO: 100622 - DNA, 30 bp, Artificial Sequence
  Synthetic oligonucleotide
gccagaaatgagccaaacgtacgtagggct

SEQ ID NO: 100623 - DNA, 30 bp, Artificial Sequence
  Synthetic oligonucleotide
agcccataccatgcaagggaccaacgggct

SEQ ID NO: 100624 - DNA, 30 bp, Artificial Sequence
  Synthetic oligonucleotide
caatacaaactaagaaactcaacacgggct

SEQ ID NO: 100625 - DNA, 30 bp, Artificial Sequence
  Synthetic oligonucleotide
cgtcgaagactcggatccaaaaaccgggct

SEQ ID NO: 100626 - DNA, 30 bp, Artificial Sequence
  Synthetic oligonucleotide
gacgatggctcagactgtagtcgccgggct

SEQ ID NO: 100627 - DNA, 30 bp, Artificial Sequence
  Synthetic oligonucleotide
gcgattagtaagtgtttagcactgcgggct

SEQ ID NO: 100628 - DNA, 30 bp, Artificial Sequence
  Synthetic oligonucleotide
cgtgcagagtcaatcgaccccactcgggct

SEQ ID NO: 100629 - DNA, 30 bp, Artificial Sequence
  Synthetic oligonucleotide
aagggccgtccttaggaataaactggggct

SEQ ID NO: 100630 - DNA, 30 bp, Artificial Sequence
  Synthetic oligonucleotide
tagaacgggatcatataggtgtaatgggct

SEQ ID NO: 100631 - DNA, 30 bp, Artificial Sequence
  Synthetic oligonucleotide
gacataaaagcgagttcctaaaagtgggct

SEQ ID NO: 100632 - DNA, 31 bp, Artificial Sequence
  Synthetic oligonucleotide
tacgacttggtgccttggaatgcagatggct

SEQ ID NO: 100633 - DNA, 30 bp, Artificial Sequence
  Synthetic oligonucleotide
aaaccggcactaccgggaaaatagctggct

SEQ ID NO: 100634 - DNA, 30 bp, Artificial Sequence
  Synthetic oligonucleotide
tggggggttggtgaagccaagtctctggct

SEQ ID NO: 100635 - DNA, 30 bp, Artificial Sequence
  Synthetic oligonucleotide
atcagtgccacaggagaccagggtgtggct

SEQ ID NO: 100636 - DNA, 30 bp, Artificial Sequence
  Synthetic oligonucleotide
gcgctatttcaagggagagagacacatgct

SEQ ID NO: 100637 - DNA, 30 bp, Artificial Sequence
  Synthetic oligonucleotide
aggggagtactgatcgctgaataccatgct

SEQ ID NO: 100638 - DNA, 30 bp, Artificial Sequence
  Synthetic oligonucleotide
acatggataaatcggcgatcggaatatgct

SEQ ID NO: 100639 - DNA, 30 bp, Artificial Sequence
  Synthetic oligonucleotide
atcggcaggatgataaataggtccgctgct

SEQ ID NO: 100640 - DNA, 30 bp, Artificial Sequence
  Synthetic oligonucleotide
acgtgagttataatatgccggaaggctgct

SEQ ID NO: 100641 - DNA, 30 bp, Artificial Sequence
  Synthetic oligonucleotide
aaaatgcaagagggcgtaagcttggctgct

SEQ ID NO: 100642 - DNA, 30 bp, Artificial Sequence
  Synthetic oligonucleotide
acactcaaaggtgctccggagattgctgct

SEQ ID NO: 100643 - DNA, 30 bp, Artificial Sequence
  Synthetic oligonucleotide
gcgactggaatcatcgccctaaaatctgct

SEQ ID NO: 100644 - DNA, 30 bp, Artificial Sequence
  Synthetic oligonucleotide
caggatatcgactcaaagatgcctagtgct

SEQ ID NO: 100645 - DNA, 30 bp, Artificial Sequence
  Synthetic oligonucleotide
ttagaagatattcaggaggcatcacgtgct

SEQ ID NO: 100646 - DNA, 30 bp, Artificial Sequence
  Synthetic oligonucleotide
gatgggaggtgagtcttaaccagccgtgct

SEQ ID NO: 100647 - DNA, 30 bp, Artificial Sequence
  Synthetic oligonucleotide
acggctggcagtcaatagtgtacgcgtgct

SEQ ID NO: 100648 - DNA, 30 bp, Artificial Sequence
  Synthetic oligonucleotide
tgcacggagtcgtctttaaagcgcggtgct

SEQ ID NO: 100649 - DNA, 30 bp, Artificial Sequence
  Synthetic oligonucleotide
gtaacggtagtccgagcacgatccattgct

SEQ ID NO: 100650 - DNA, 30 bp, Artificial Sequence
  Synthetic oligonucleotide
gcttggtcgcgacatcccccacgagttgct

SEQ ID NO: 100651 - DNA, 30 bp, Artificial Sequence
  Synthetic oligonucleotide
acggatcagactccaagtgaacagtttgct

SEQ ID NO: 100652 - DNA, 30 bp, Artificial Sequence
  Synthetic oligonucleotide
caagccgcgattggttgagaacgggaatct

SEQ ID NO: 100653 - DNA, 30 bp, Artificial Sequence
  Synthetic oligonucleotide
gtcatgatgacaccgtcaacgacaacatct

SEQ ID NO: 100654 - DNA, 30 bp, Artificial Sequence
  Synthetic oligonucleotide
aaaaatgggaaagaaagggtcatgacatct

SEQ ID NO: 100655 - DNA, 30 bp, Artificial Sequence
  Synthetic oligonucleotide
aagacctgagctaacgtccgggtgacatct

SEQ ID NO: 100656 - DNA, 30 bp, Artificial Sequence
  Synthetic oligonucleotide
ttggatcatcagtatgacatataaccatct

SEQ ID NO: 100657 - DNA, 30 bp, Artificial Sequence
  Synthetic oligonucleotide
caataggacgggggtcgatcgtgtccatct

SEQ ID NO: 100658 - DNA, 30 bp, Artificial Sequence
  Synthetic oligonucleotide
cggcgattacaccggaacttcaaggcatct

SEQ ID NO: 100659 - DNA, 30 bp, Artificial Sequence
  Synthetic oligonucleotide
tattgtgccaacaacaatgtccctgcatct

SEQ ID NO: 100660 - DNA, 30 bp, Artificial Sequence
  Synthetic oligonucleotide
tgagtcgacttgttaaatttaggcagatct

SEQ ID NO: 100661 - DNA, 30 bp, Artificial Sequence
  Synthetic oligonucleotide
agtcacataccaaggcatcgagcgagatct

SEQ ID NO: 100662 - DNA, 30 bp, Artificial Sequence
  Synthetic oligonucleotide
ctcatagagacaagggcatagtgtagatct

SEQ ID NO: 100663 - DNA, 30 bp, Artificial Sequence
  Synthetic oligonucleotide
cggcgtaggcgacagggacttaaacgatct

SEQ ID NO: 100664 - DNA, 30 bp, Artificial Sequence
  Synthetic oligonucleotide
gactcataacagtcacaacacgggcgatct

SEQ ID NO: 100665 - DNA, 30 bp, Artificial Sequence
  Synthetic oligonucleotide
cgctgtgttctggttcaggcggatggatct

SEQ ID NO: 100666 - DNA, 30 bp, Artificial Sequence
  Synthetic oligonucleotide
tagagaagaagcaacggttaggagtgatct

SEQ ID NO: 100667 - DNA, 30 bp, Artificial Sequence
  Synthetic oligonucleotide
aagcatcggacatgggtcctaagtctatct

SEQ ID NO: 100668 - DNA, 30 bp, Artificial Sequence
  Synthetic oligonucleotide
ctagactcgatggattcggggggtctatct

SEQ ID NO: 100669 - DNA, 30 bp, Artificial Sequence
  Synthetic oligonucleotide
tgggaggaacctaaatagtatagcttatct

SEQ ID NO: 100670 - DNA, 30 bp, Artificial Sequence
  Synthetic oligonucleotide
ggttgcacagtgtacaacaaccttcactct

SEQ ID NO: 100671 - DNA, 30 bp, Artificial Sequence
  Synthetic oligonucleotide
cctcgtacactggaggtagtggaggactct

SEQ ID NO: 100672 - DNA, 30 bp, Artificial Sequence
  Synthetic oligonucleotide
aggcagatatcgtctgacttccttacctct

SEQ ID NO: 100673 - DNA, 30 bp, Artificial Sequence
  Synthetic oligonucleotide
agacaacctgacaatgaggaacacccctct

SEQ ID NO: 100674 - DNA, 30 bp, Artificial Sequence
  Synthetic oligonucleotide
gagggtgacaattcaaggcgggtgcgctct

SEQ ID NO: 100675 - DNA, 30 bp, Artificial Sequence
  Synthetic oligonucleotide
gcgagaacccgcaggtgaggagatggctct

SEQ ID NO: 100676 - DNA, 30 bp, Artificial Sequence
  Synthetic oligonucleotide
cctcacgagtactggaacaaggctggctct

SEQ ID NO: 100677 - DNA, 30 bp, Artificial Sequence
  Synthetic oligonucleotide
acatggtcttggacccattcacaatgctct

SEQ ID NO: 100678 - DNA, 30 bp, Artificial Sequence
  Synthetic oligonucleotide
cagcctggaagggtgactacgtaatgctct

SEQ ID NO: 100679 - DNA, 31 bp, Artificial Sequence
  Synthetic oligonucleotide
cgcaggagcgggagacgttggtatgtgctct

SEQ ID NO: 100680 - DNA, 30 bp, Artificial Sequence
  Synthetic oligonucleotide
agaaacgatcggccgaagttcaaagtctct

SEQ ID NO: 100681 - DNA, 30 bp, Artificial Sequence
  Synthetic oligonucleotide
cgaacgcggtatggcttcacggtcgtctct

SEQ ID NO: 100682 - DNA, 30 bp, Artificial Sequence
  Synthetic oligonucleotide
gcggcagactgaggtgcgttgtttttctct

SEQ ID NO: 100683 - DNA, 31 bp, Artificial Sequence
  Synthetic oligonucleotide
ccgcgccaatttcttaaggtcaaggaagtct

SEQ ID NO: 100684 - DNA, 30 bp, Artificial Sequence
  Synthetic oligonucleotide
cgcaccgagagtcgcaacccagtgaagtct

SEQ ID NO: 100685 - DNA, 30 bp, Artificial Sequence
  Synthetic oligonucleotide
aacagcacaggacctccccacgctaagtct

SEQ ID NO: 100686 - DNA, 30 bp, Artificial Sequence
  Synthetic oligonucleotide
agatagctaaccaccgatcaggtccagtct

SEQ ID NO: 100687 - DNA, 30 bp, Artificial Sequence
  Synthetic oligonucleotide
agagaccagatgctaacagccagcgagtct

SEQ ID NO: 100688 - DNA, 30 bp, Artificial Sequence
  Synthetic oligonucleotide
aggatactaaacaaaatcagagtggagtct

SEQ ID NO: 100689 - DNA, 30 bp, Artificial Sequence
  Synthetic oligonucleotide
aacgtaacgggctccgtgaatcatgagtct

SEQ ID NO: 100690 - DNA, 30 bp, Artificial Sequence
  Synthetic oligonucleotide
tgaaggcgcctgaacacagacccgtagtct

SEQ ID NO: 100691 - DNA, 30 bp, Artificial Sequence
  Synthetic oligonucleotide
aggagctaaggaacggtacttcggtagtct

SEQ ID NO: 100692 - DNA, 30 bp, Artificial Sequence
  Synthetic oligonucleotide
ccccttcagtacaagtgcaaaaaaacgtct

SEQ ID NO: 100693 - DNA, 30 bp, Artificial Sequence
  Synthetic oligonucleotide
tcagcacgctgaattagccatgttccgtct

SEQ ID NO: 100694 - DNA, 30 bp, Artificial Sequence
  Synthetic oligonucleotide
accccgaagaacaggggcgtgagcgcgtct

SEQ ID NO: 100695 - DNA, 30 bp, Artificial Sequence
  Synthetic oligonucleotide
tgtggggggataaaggacgaacactcgtct

SEQ ID NO: 100696 - DNA, 30 bp, Artificial Sequence
  Synthetic oligonucleotide
aacaaccggaaataagaggcaatcaggtct

SEQ ID NO: 100697 - DNA, 30 bp, Artificial Sequence
  Synthetic oligonucleotide
acacccagtatcggtcgggctaaacggtct

SEQ ID NO: 100698 - DNA, 30 bp, Artificial Sequence
  Synthetic oligonucleotide
gcacccagtggctaaggagagatagggtct

SEQ ID NO: 100699 - DNA, 30 bp, Artificial Sequence
  Synthetic oligonucleotide
cggaaatcgggggaatagggtggttggtct

SEQ ID NO: 100700 - DNA, 30 bp, Artificial Sequence
  Synthetic oligonucleotide
aacaagcgaaggcggggacacagtatgtct

SEQ ID NO: 100701 - DNA, 30 bp, Artificial Sequence
  Synthetic oligonucleotide
aactccatggactaacacttaaccctgtct

SEQ ID NO: 100702 - DNA, 30 bp, Artificial Sequence
  Synthetic oligonucleotide
agagccagaggcaggtcctggaaggtgtct

SEQ ID NO: 100703 - DNA, 30 bp, Artificial Sequence
  Synthetic oligonucleotide
ccctgaaccaccaatcccactgtattgtct

SEQ ID NO: 100704 - DNA, 30 bp, Artificial Sequence
  Synthetic oligonucleotide
ttggtcaaacaaagcagagggaacttgtct

SEQ ID NO: 100705 - DNA, 30 bp, Artificial Sequence
  Synthetic oligonucleotide
ttaggactgaggtgccaagaactgttgtct

SEQ ID NO: 100706 - DNA, 30 bp, Artificial Sequence
  Synthetic oligonucleotide
tgcaaatagaaaacaagaaaaattttgtct

SEQ ID NO: 100707 - DNA, 30 bp, Artificial Sequence
  Synthetic oligonucleotide
tgtagccaggtaaaacaggacacgaattct

SEQ ID NO: 100708 - DNA, 30 bp, Artificial Sequence
  Synthetic oligonucleotide
ggccaggcataacaccaatagatgaattct

SEQ ID NO: 100709 - DNA, 30 bp, Artificial Sequence
  Synthetic oligonucleotide
atgtctcctaagggacgaagcgcacattct

SEQ ID NO: 100710 - DNA, 30 bp, Artificial Sequence
  Synthetic oligonucleotide
agcgttagcaagcctgtagaggtgcattct

SEQ ID NO: 100711 - DNA, 30 bp, Artificial Sequence
  Synthetic oligonucleotide
cgacgtatcagatggacgtactcggattct

SEQ ID NO: 100712 - DNA, 30 bp, Artificial Sequence
  Synthetic oligonucleotide
tagcacacccccgaaaacgaagggtattct

SEQ ID NO: 100713 - DNA, 30 bp, Artificial Sequence
  Synthetic oligonucleotide
gtgctgtaaatagactggggaacttattct

SEQ ID NO: 100714 - DNA, 30 bp, Artificial Sequence
  Synthetic oligonucleotide
cagacccaatcaggtccggaagtaacttct

SEQ ID NO: 100715 - DNA, 30 bp, Artificial Sequence
  Synthetic oligonucleotide
tctacatgatcccacgagtttagaagttct

SEQ ID NO: 100716 - DNA, 30 bp, Artificial Sequence
  Synthetic oligonucleotide
attgactagggcgcggggagtgttggttct

SEQ ID NO: 100717 - DNA, 30 bp, Artificial Sequence
  Synthetic oligonucleotide
cggtaatagagagttatcaatatgatttct

SEQ ID NO: 100718 - DNA, 30 bp, Artificial Sequence
  Synthetic oligonucleotide
cactgagacaaactctacagattactttct

SEQ ID NO: 100719 - DNA, 30 bp, Artificial Sequence
  Synthetic oligonucleotide
ccaggaacgaataatcgtacctacctttct

SEQ ID NO: 100720 - DNA, 30 bp, Artificial Sequence
  Synthetic oligonucleotide
gactcggaaacgctagggtaaaggaaaagt

SEQ ID NO: 100721 - DNA, 30 bp, Artificial Sequence
  Synthetic oligonucleotide
aatagagaccgacagcgacgagtgaaaagt

SEQ ID NO: 100722 - DNA, 30 bp, Artificial Sequence
  Synthetic oligonucleotide
acgggttccgcaagaccaagagcgcaaagt

SEQ ID NO: 100723 - DNA, 30 bp, Artificial Sequence
  Synthetic oligonucleotide
cgacatccataagggtcaggatttcaaagt

SEQ ID NO: 100724 - DNA, 30 bp, Artificial Sequence
  Synthetic oligonucleotide
ccaaccaatgaggtgcgggacggctaaagt

SEQ ID NO: 100725 - DNA, 30 bp, Artificial Sequence
  Synthetic oligonucleotide
gcaccatgttagggagagcatcgttaaagt

SEQ ID NO: 100726 - DNA, 30 bp, Artificial Sequence
  Synthetic oligonucleotide
tctaaatttggtccgccattcgaaacaagt

SEQ ID NO: 100727 - DNA, 30 bp, Artificial Sequence
  Synthetic oligonucleotide
aaggcatctgtagagacgggcgtgacaagt

SEQ ID NO: 100728 - DNA, 30 bp, Artificial Sequence
  Synthetic oligonucleotide
acagataattatactcagtgtctggcaagt

SEQ ID NO: 100729 - DNA, 30 bp, Artificial Sequence
  Synthetic oligonucleotide
tgtgatatggaaacgaatgtacttgcaagt

SEQ ID NO: 100730 - DNA, 30 bp, Artificial Sequence
  Synthetic oligonucleotide
gtggtggtcaggacccgcaggaaatcaagt

SEQ ID NO: 100731 - DNA, 30 bp, Artificial Sequence
  Synthetic oligonucleotide
ttaaccatcccttatcgataggaaagaagt

SEQ ID NO: 100732 - DNA, 30 bp, Artificial Sequence
  Synthetic oligonucleotide
ctcgtaggctaccgtctggcatgaagaagt

SEQ ID NO: 100733 - DNA, 30 bp, Artificial Sequence
  Synthetic oligonucleotide
ggtgagcgaatgtacagaaaaaacagaagt

SEQ ID NO: 100734 - DNA, 30 bp, Artificial Sequence
  Synthetic oligonucleotide
tccgagtaaaatcaccgatcgtacagaagt

SEQ ID NO: 100735 - DNA, 30 bp, Artificial Sequence
  Synthetic oligonucleotide
accatagtggtgtagatgggccagagaagt

SEQ ID NO: 100736 - DNA, 30 bp, Artificial Sequence
  Synthetic oligonucleotide
tctactttaactaagtgtcgaggccgaagt

SEQ ID NO: 100737 - DNA, 30 bp, Artificial Sequence
  Synthetic oligonucleotide
agatcaaggaaaagaatacgcaatcgaagt

SEQ ID NO: 100738 - DNA, 30 bp, Artificial Sequence
  Synthetic oligonucleotide
ctggcaaagtaatgattctgcaacggaagt

SEQ ID NO: 100739 - DNA, 30 bp, Artificial Sequence
  Synthetic oligonucleotide
ctaggtcgtgggagtatgggcggcggaagt

SEQ ID NO: 100740 - DNA, 30 bp, Artificial Sequence
  Synthetic oligonucleotide
gcgaatggcgaatggacgtacctgtgaagt

SEQ ID NO: 100741 - DNA, 30 bp, Artificial Sequence
  Synthetic oligonucleotide
attcagggtacgagcatgtaaacaataagt

SEQ ID NO: 100742 - DNA, 30 bp, Artificial Sequence
  Synthetic oligonucleotide
tctcagtcgtacattaaaatcaggataagt

SEQ ID NO: 100743 - DNA, 30 bp, Artificial Sequence
  Synthetic oligonucleotide
ttcggatcgagaactggggactgtataagt

SEQ ID NO: 100744 - DNA, 30 bp, Artificial Sequence
  Synthetic oligonucleotide
gccaaagttaaatggggacccaaactaagt

SEQ ID NO: 100745 - DNA, 30 bp, Artificial Sequence
  Synthetic oligonucleotide
ctatcagtcagttaatcacttggcctaagt

SEQ ID NO: 100746 - DNA, 30 bp, Artificial Sequence
  Synthetic oligonucleotide
cttcgagatacgaaggtcatatcgctaagt

SEQ ID NO: 100747 - DNA, 30 bp, Artificial Sequence
  Synthetic oligonucleotide
tgagacacatcgacccgtacagaattaagt

SEQ ID NO: 100748 - DNA, 30 bp, Artificial Sequence
  Synthetic oligonucleotide
acagccaaccacctcttaccgacacacagt

SEQ ID NO: 100749 - DNA, 30 bp, Artificial Sequence
  Synthetic oligonucleotide
tgggaacgtgagccatgcggcatgtacagt

SEQ ID NO: 100750 - DNA, 30 bp, Artificial Sequence
  Synthetic oligonucleotide
tcaatccacgtggtatatgatataaccagt

SEQ ID NO: 100751 - DNA, 30 bp, Artificial Sequence
  Synthetic oligonucleotide
ccagaaagtggcttgtagatataccccagt

SEQ ID NO: 100752 - DNA, 30 bp, Artificial Sequence
  Synthetic oligonucleotide
gatgaattatcagttattccgaagcccagt

SEQ ID NO: 100753 - DNA, 30 bp, Artificial Sequence
  Synthetic oligonucleotide
tgaatgaccatcttatccaccacaagcagt

SEQ ID NO: 100754 - DNA, 30 bp, Artificial Sequence
  Synthetic oligonucleotide
ataacatggccacctcctcacccaagcagt

SEQ ID NO: 100755 - DNA, 30 bp, Artificial Sequence
  Synthetic oligonucleotide
ttgtcagaagtggagatgtcagccagcagt

SEQ ID NO: 100756 - DNA, 30 bp, Artificial Sequence
  Synthetic oligonucleotide
cgtacacggatgggtgagagttcacgcagt

SEQ ID NO: 100757 - DNA, 30 bp, Artificial Sequence
  Synthetic oligonucleotide
gcatagggaatgcaaacagatagaggcagt

SEQ ID NO: 100758 - DNA, 30 bp, Artificial Sequence
  Synthetic oligonucleotide
caacagaggtacgaagttgtactaggcagt

SEQ ID NO: 100759 - DNA, 30 bp, Artificial Sequence
  Synthetic oligonucleotide
atactaagcattatcgaagcaatgtgcagt

SEQ ID NO: 100760 - DNA, 30 bp, Artificial Sequence
  Synthetic oligonucleotide
ggtccacgttccccctaagcgaagctcagt

SEQ ID NO: 100761 - DNA, 30 bp, Artificial Sequence
  Synthetic oligonucleotide
gcaatccacgagcctggcgtgacagtcagt

SEQ ID NO: 100762 - DNA, 30 bp, Artificial Sequence
  Synthetic oligonucleotide
agtaatagagcaccgatcagaagggtcagt

SEQ ID NO: 100763 - DNA, 30 bp, Artificial Sequence
  Synthetic oligonucleotide
gagttgccgaagagtgtaggagcattcagt

SEQ ID NO: 100764 - DNA, 30 bp, Artificial Sequence
  Synthetic oligonucleotide
caggatcggagaaaagttacgcttttcagt

SEQ ID NO: 100765 - DNA, 30 bp, Artificial Sequence
  Synthetic oligonucleotide
caggatgaaatagggcattgggaaaagagt

SEQ ID NO: 100766 - DNA, 30 bp, Artificial Sequence
  Synthetic oligonucleotide
aatgggatactggcccactagattaagagt

SEQ ID NO: 100767 - DNA, 30 bp, Artificial Sequence
  Synthetic oligonucleotide
tcctattaagggccggtgcgcaaacagagt

SEQ ID NO: 100768 - DNA, 30 bp, Artificial Sequence
  Synthetic oligonucleotide
catttcccgccaatagaagaatgacagagt

SEQ ID NO: 100769 - DNA, 30 bp, Artificial Sequence
  Synthetic oligonucleotide
tagaccaagaggcatgtacgagcggagagt

SEQ ID NO: 100770 - DNA, 30 bp, Artificial Sequence
  Synthetic oligonucleotide
atccgattccttcaggaaagaagtgagagt

SEQ ID NO: 100771 - DNA, 30 bp, Artificial Sequence
  Synthetic oligonucleotide
aaacagggttatcgagccgtcacctagagt

SEQ ID NO: 100772 - DNA, 30 bp, Artificial Sequence
  Synthetic oligonucleotide
taaagttgcgcgtgaagccaacagtagagt

SEQ ID NO: 100773 - DNA, 30 bp, Artificial Sequence
  Synthetic oligonucleotide
ttgtacagattaatgctcacgtaaacgagt

SEQ ID NO: 100774 - DNA, 30 bp, Artificial Sequence
  Synthetic oligonucleotide
cggtatgatgcaagtagctatgcgacgagt

SEQ ID NO: 100775 - DNA, 30 bp, Artificial Sequence
  Synthetic oligonucleotide
cggcgcggcctgtccgcatcatctacgagt

SEQ ID NO: 100776 - DNA, 30 bp, Artificial Sequence
  Synthetic oligonucleotide
agcgtcgaatagggtttcgtagggccgagt

SEQ ID NO: 100777 - DNA, 30 bp, Artificial Sequence
  Synthetic oligonucleotide
attgatggcatctacagtttgagtccgagt

SEQ ID NO: 100778 - DNA, 30 bp, Artificial Sequence
  Synthetic oligonucleotide
ggggcgagaatttttgcatccattccgagt

SEQ ID NO: 100779 - DNA, 30 bp, Artificial Sequence
  Synthetic oligonucleotide
ttcggtcgcgagggctgtcacagatcgagt

SEQ ID NO: 100780 - DNA, 30 bp, Artificial Sequence
  Synthetic oligonucleotide
agtgtgaattcgatacgaattgcctcgagt

SEQ ID NO: 100781 - DNA, 30 bp, Artificial Sequence
  Synthetic oligonucleotide
ggcaagcacgacagtgtctagaagtcgagt

SEQ ID NO: 100782 - DNA, 30 bp, Artificial Sequence
  Synthetic oligonucleotide
tagatgtttacagcaggtatcgggaggagt

SEQ ID NO: 100783 - DNA, 30 bp, Artificial Sequence
  Synthetic oligonucleotide
gtaaatgggcgcatacatggagtgaggagt

SEQ ID NO: 100784 - DNA, 30 bp, Artificial Sequence
  Synthetic oligonucleotide
cgtaacacttttgagatttaattacggagt

SEQ ID NO: 100785 - DNA, 30 bp, Artificial Sequence
  Synthetic oligonucleotide
caatgtataaacttcccaatagatcggagt

SEQ ID NO: 100786 - DNA, 30 bp, Artificial Sequence
  Synthetic oligonucleotide
gcacagacgtcgatctgtgatacagggagt

SEQ ID NO: 100787 - DNA, 30 bp, Artificial Sequence
  Synthetic oligonucleotide
ggggagaaaagcgtggcacaagacgggagt

SEQ ID NO: 100788 - DNA, 30 bp, Artificial Sequence
  Synthetic oligonucleotide
acgccgactggacagcctgagtcggggagt

SEQ ID NO: 100789 - DNA, 30 bp, Artificial Sequence
  Synthetic oligonucleotide
aatacaaccccgtaccgatcgcggtggagt

SEQ ID NO: 100790 - DNA, 30 bp, Artificial Sequence
  Synthetic oligonucleotide
ggctgcaaggatgtccataaagggtggagt

SEQ ID NO: 100791 - DNA, 30 bp, Artificial Sequence
  Synthetic oligonucleotide
gtccgttgtaagtagcaatgtgggtggagt

SEQ ID NO: 100792 - DNA, 30 bp, Artificial Sequence
  Synthetic oligonucleotide
tggcctggacataaagatatgtggtggagt

SEQ ID NO: 100793 - DNA, 30 bp, Artificial Sequence
  Synthetic oligonucleotide
gtcgatcgcgttctcggttttgtttggagt

SEQ ID NO: 100794 - DNA, 30 bp, Artificial Sequence
  Synthetic oligonucleotide
tgcccaacatgagccccggattctatgagt

SEQ ID NO: 100795 - DNA, 30 bp, Artificial Sequence
  Synthetic oligonucleotide
cgtgtcagggccgggctcaggtgtatgagt

SEQ ID NO: 100796 - DNA, 30 bp, Artificial Sequence
  Synthetic oligonucleotide
cgttatctcggtatgtatgcgaatctgagt

SEQ ID NO: 100797 - DNA, 30 bp, Artificial Sequence
  Synthetic oligonucleotide
tacggcggactcgtggctgccccagtgagt

SEQ ID NO: 100798 - DNA, 30 bp, Artificial Sequence
  Synthetic oligonucleotide
aaagcctgatgagtcccagcgggattgagt

SEQ ID NO: 100799 - DNA, 30 bp, Artificial Sequence
  Synthetic oligonucleotide
ggtcacattcgcgacaggcgcatattgagt

SEQ ID NO: 100800 - DNA, 30 bp, Artificial Sequence
  Synthetic oligonucleotide
agggcggttccgtaggtctgtgtattgagt

SEQ ID NO: 100801 - DNA, 30 bp, Artificial Sequence
  Synthetic oligonucleotide
agagcacgtttcgacggcagagcgttgagt

SEQ ID NO: 100802 - DNA, 30 bp, Artificial Sequence
  Synthetic oligonucleotide
aagggtacccgattagcttcgaccaatagt

SEQ ID NO: 100803 - DNA, 30 bp, Artificial Sequence
  Synthetic oligonucleotide
atccggacgccggtcgaggaggccaatagt

SEQ ID NO: 100804 - DNA, 30 bp, Artificial Sequence
  Synthetic oligonucleotide
ctgggagtttacaggggaggtgagaatagt

SEQ ID NO: 100805 - DNA, 30 bp, Artificial Sequence
  Synthetic oligonucleotide
ggcgcccgttgtgcatagtaagctcatagt

SEQ ID NO: 100806 - DNA, 31 bp, Artificial Sequence
  Synthetic oligonucleotide
cggagcaagaagagcaacacttccagatagt

SEQ ID NO: 100807 - DNA, 30 bp, Artificial Sequence
  Synthetic oligonucleotide
acttaggcaggcctgggaccatcagatagt

SEQ ID NO: 100808 - DNA, 30 bp, Artificial Sequence
  Synthetic oligonucleotide
tcaaatacaaagcggacacggccatatagt

SEQ ID NO: 100809 - DNA, 30 bp, Artificial Sequence
  Synthetic oligonucleotide
gggtcgtacttggaaacacccaatactagt

SEQ ID NO: 100810 - DNA, 30 bp, Artificial Sequence
  Synthetic oligonucleotide
ggaactcaaagggatcgacgcccacctagt

SEQ ID NO: 100811 - DNA, 30 bp, Artificial Sequence
  Synthetic oligonucleotide
atgacccattgtacgagttgagctcctagt

SEQ ID NO: 100812 - DNA, 30 bp, Artificial Sequence
  Synthetic oligonucleotide
cttgactaaaggaggccgagcgtatctagt

SEQ ID NO: 100813 - DNA, 30 bp, Artificial Sequence
  Synthetic oligonucleotide
aacataagcctactgctaagtcgaagtagt

SEQ ID NO: 100814 - DNA, 30 bp, Artificial Sequence
  Synthetic oligonucleotide
tacgtaaaccgtcgtgtcagatctcgtagt

SEQ ID NO: 100815 - DNA, 30 bp, Artificial Sequence
  Synthetic oligonucleotide
atagtctctggtgaattctcgtctcgtagt

SEQ ID NO: 100816 - DNA, 30 bp, Artificial Sequence
  Synthetic oligonucleotide
gtctacaccagtaaaggcacgagcggtagt

SEQ ID NO: 100817 - DNA, 30 bp, Artificial Sequence
  Synthetic oligonucleotide
ccaggactagcccggatttgcattggtagt

SEQ ID NO: 100818 - DNA, 30 bp, Artificial Sequence
  Synthetic oligonucleotide
gggtgtatcataccgagagtcagctgtagt

SEQ ID NO: 100819 - DNA, 30 bp, Artificial Sequence
  Synthetic oligonucleotide
tccaaagcgggcccccatagtcaaattagt

SEQ ID NO: 100820 - DNA, 30 bp, Artificial Sequence
  Synthetic oligonucleotide
atccacagctcagacaagtgcagaattagt

SEQ ID NO: 100821 - DNA, 30 bp, Artificial Sequence
  Synthetic oligonucleotide
tgcgtcggtaagacgcgcacactaattagt

SEQ ID NO: 100822 - DNA, 30 bp, Artificial Sequence
  Synthetic oligonucleotide
gaacgcggaacgggatctgaaaagattagt

SEQ ID NO: 100823 - DNA, 30 bp, Artificial Sequence
  Synthetic oligonucleotide
gcgtgatacatagaattttcttagattagt

SEQ ID NO: 100824 - DNA, 30 bp, Artificial Sequence
  Synthetic oligonucleotide
gaacagttcacaaatcgagtcagccttagt

SEQ ID NO: 100825 - DNA, 30 bp, Artificial Sequence
  Synthetic oligonucleotide
agtgcgcccagacaggattgactccttagt

SEQ ID NO: 100826 - DNA, 30 bp, Artificial Sequence
  Synthetic oligonucleotide
gagagtaatgccgaagccaaaggagttagt

SEQ ID NO: 100827 - DNA, 30 bp, Artificial Sequence
  Synthetic oligonucleotide
agatgactcatgtggataaacctgtttagt

SEQ ID NO: 100828 - DNA, 30 bp, Artificial Sequence
  Synthetic oligonucleotide
catctccagtttcatgccaaggaacaacgt

SEQ ID NO: 100829 - DNA, 30 bp, Artificial Sequence
  Synthetic oligonucleotide
agaacaagccccgaaccccacaccgcacgt

SEQ ID NO: 100830 - DNA, 30 bp, Artificial Sequence
  Synthetic oligonucleotide
ggagagaggctgggaatatggaaatcacgt

SEQ ID NO: 100831 - DNA, 30 bp, Artificial Sequence
  Synthetic oligonucleotide
ctagctacagaaccattgcacatatcacgt

SEQ ID NO: 100832 - DNA, 30 bp, Artificial Sequence
  Synthetic oligonucleotide
tcctgcgtagctagcccccattactcacgt

SEQ ID NO: 100833 - DNA, 30 bp, Artificial Sequence
  Synthetic oligonucleotide
cacattgtggcagtgatatgaagaagacgt

SEQ ID NO: 100834 - DNA, 30 bp, Artificial Sequence
  Synthetic oligonucleotide
acgtacgatgagagatccttgtgtagacgt

SEQ ID NO: 100835 - DNA, 30 bp, Artificial Sequence
  Synthetic oligonucleotide
ggatgcgcagtaggtgaactaagaggacgt

SEQ ID NO: 100836 - DNA, 30 bp, Artificial Sequence
  Synthetic oligonucleotide
aggggtacaccaaaagcgcggtacggacgt

SEQ ID NO: 100837 - DNA, 30 bp, Artificial Sequence
  Synthetic oligonucleotide
gagcgagggctttagaagcatggtggacgt

SEQ ID NO: 100838 - DNA, 30 bp, Artificial Sequence
  Synthetic oligonucleotide
gcctatagtaataccagagactttggacgt

SEQ ID NO: 100839 - DNA, 30 bp, Artificial Sequence
  Synthetic oligonucleotide
aggcaggcgtggcacaggggagcatgacgt

SEQ ID NO: 100840 - DNA, 30 bp, Artificial Sequence
  Synthetic oligonucleotide
tgaatcaggataaccgcagatttatgacgt

SEQ ID NO: 100841 - DNA, 30 bp, Artificial Sequence
  Synthetic oligonucleotide
tagtccgggcgaatcaggccactgtgacgt

SEQ ID NO: 100842 - DNA, 30 bp, Artificial Sequence
  Synthetic oligonucleotide
tactcaagtagccaacggtgattttgacgt

SEQ ID NO: 100843 - DNA, 30 bp, Artificial Sequence
  Synthetic oligonucleotide
tgtgcgcagggttgaatatcaacactacgt

SEQ ID NO: 100844 - DNA, 30 bp, Artificial Sequence
  Synthetic oligonucleotide
cgggattcttacaatggacttatagtacgt

SEQ ID NO: 100845 - DNA, 30 bp, Artificial Sequence
  Synthetic oligonucleotide
gcctttaggcagggtggcagaaaggtacgt

SEQ ID NO: 100846 - DNA, 30 bp, Artificial Sequence
  Synthetic oligonucleotide
agggtaaagacagagagcccttgcttacgt

SEQ ID NO: 100847 - DNA, 30 bp, Artificial Sequence
  Synthetic oligonucleotide
ggatacgcgctgggactgcaggggttacgt

SEQ ID NO: 100848 - DNA, 30 bp, Artificial Sequence
  Synthetic oligonucleotide
ataccagcgataagggaaggaggtttacgt

SEQ ID NO: 100849 - DNA, 31 bp, Artificial Sequence
  Synthetic oligonucleotide
atgctccattgcaaagctggcagtacaccgt

SEQ ID NO: 100850 - DNA, 30 bp, Artificial Sequence
  Synthetic oligonucleotide
ttgaagagggcatcagacccagaggaccgt

SEQ ID NO: 100851 - DNA, 30 bp, Artificial Sequence
  Synthetic oligonucleotide
cgacgcaacagatcaagtccgatataccgt

SEQ ID NO: 100852 - DNA, 30 bp, Artificial Sequence
  Synthetic oligonucleotide
cggagggtggactagcatttgaaaacccgt

SEQ ID NO: 100853 - DNA, 30 bp, Artificial Sequence
  Synthetic oligonucleotide
cgactcgaggcgtgttcatcgccaacccgt

SEQ ID NO: 100854 - DNA, 30 bp, Artificial Sequence
  Synthetic oligonucleotide
taggaagggccttcatcaatggcaacccgt

SEQ ID NO: 100855 - DNA, 30 bp, Artificial Sequence
  Synthetic oligonucleotide
aaacagaactatgaaataacatcaacccgt

SEQ ID NO: 100856 - DNA, 30 bp, Artificial Sequence
  Synthetic oligonucleotide
ccctgactaatgggcataggctccccccgt

SEQ ID NO: 100857 - DNA, 30 bp, Artificial Sequence
  Synthetic oligonucleotide
aaagtacagcgctccttaccattagcccgt

SEQ ID NO: 100858 - DNA, 30 bp, Artificial Sequence
  Synthetic oligonucleotide
catagtcacagactgtataagatggcccgt

SEQ ID NO: 100859 - DNA, 30 bp, Artificial Sequence
  Synthetic oligonucleotide
atgtcctcgcgttcaagggcacattcccgt

SEQ ID NO: 100860 - DNA, 30 bp, Artificial Sequence
  Synthetic oligonucleotide
gaatcgtgaactcataatcagtttggccgt

SEQ ID NO: 100861 - DNA, 30 bp, Artificial Sequence
  Synthetic oligonucleotide
ctagttatgcctctgaatagcttatgccgt

SEQ ID NO: 100862 - DNA, 30 bp, Artificial Sequence
  Synthetic oligonucleotide
gttgaccaccttaacgactcccagtgccgt

SEQ ID NO: 100863 - DNA, 30 bp, Artificial Sequence
  Synthetic oligonucleotide
tgagtaaatgaggtgcactaagtgtgccgt

SEQ ID NO: 100864 - DNA, 30 bp, Artificial Sequence
  Synthetic oligonucleotide
cagcgagatggataagattaacgaatccgt

SEQ ID NO: 100865 - DNA, 30 bp, Artificial Sequence
  Synthetic oligonucleotide
gattgcaatattagcttaacttatgtccgt

SEQ ID NO: 100866 - DNA, 30 bp, Artificial Sequence
  Synthetic oligonucleotide
agggattcgagaaatcgatcacttgtccgt

SEQ ID NO: 100867 - DNA, 30 bp, Artificial Sequence
  Synthetic oligonucleotide
gtcgatgacatgataaccgcctcgttccgt

SEQ ID NO: 100868 - DNA, 30 bp, Artificial Sequence
  Synthetic oligonucleotide
gtgcacatcaatatcatgggatacaagcgt

SEQ ID NO: 100869 - DNA, 30 bp, Artificial Sequence
  Synthetic oligonucleotide
gtgaacgtcggtccaaatctgagcaagcgt

SEQ ID NO: 100870 - DNA, 30 bp, Artificial Sequence
  Synthetic oligonucleotide
cacgagcatacgggacgtaagggcaagcgt

SEQ ID NO: 100871 - DNA, 30 bp, Artificial Sequence
  Synthetic oligonucleotide
catacatacgcatgttactaagtgcagcgt

SEQ ID NO: 100872 - DNA, 30 bp, Artificial Sequence
  Synthetic oligonucleotide
agagcaaagcggtccaaggcctctcagcgt

SEQ ID NO: 100873 - DNA, 30 bp, Artificial Sequence
  Synthetic oligonucleotide
gatgggtgggtgatccgacatcaagagcgt

SEQ ID NO: 100874 - DNA, 30 bp, Artificial Sequence
  Synthetic oligonucleotide
acaactaaggtagcctaagcgatagagcgt

SEQ ID NO: 100875 - DNA, 30 bp, Artificial Sequence
  Synthetic oligonucleotide
agataagcggagatttattaacaggagcgt

SEQ ID NO: 100876 - DNA, 30 bp, Artificial Sequence
  Synthetic oligonucleotide
ggttcacataaggtaaagctggatgagcgt

SEQ ID NO: 100877 - DNA, 30 bp, Artificial Sequence
  Synthetic oligonucleotide
tcccttacagccgacaatcaggaatagcgt

SEQ ID NO: 100878 - DNA, 30 bp, Artificial Sequence
  Synthetic oligonucleotide
cagtcccaagacataaaagttcgtacgcgt

SEQ ID NO: 100879 - DNA, 30 bp, Artificial Sequence
  Synthetic oligonucleotide
accagaggtggaaattccaaggcagcgcgt

SEQ ID NO: 100880 - DNA, 30 bp, Artificial Sequence
  Synthetic oligonucleotide
ccgagagttatgtctactcttctagcgcgt

SEQ ID NO: 100881 - DNA, 30 bp, Artificial Sequence
  Synthetic oligonucleotide
ataccacagtggatacgggatgaggcgcgt

SEQ ID NO: 100882 - DNA, 30 bp, Artificial Sequence
  Synthetic oligonucleotide
tgaggtaagcaagttgtgacccatgcgcgt

SEQ ID NO: 100883 - DNA, 30 bp, Artificial Sequence
  Synthetic oligonucleotide
acacggcagtgaatccctattgctgcgcgt

SEQ ID NO: 100884 - DNA, 30 bp, Artificial Sequence
  Synthetic oligonucleotide
gtaaggcatatcggtctcaccggaaggcgt

SEQ ID NO: 100885 - DNA, 30 bp, Artificial Sequence
  Synthetic oligonucleotide
gcggtgcacgagcgcgtatgtgggcggcgt

SEQ ID NO: 100886 - DNA, 30 bp, Artificial Sequence
  Synthetic oligonucleotide
aacaacaagaacaacacacaatgagggcgt

SEQ ID NO: 100887 - DNA, 30 bp, Artificial Sequence
  Synthetic oligonucleotide
gccaaaaaatcgtgcggagggatggggcgt

SEQ ID NO: 100888 - DNA, 30 bp, Artificial Sequence
  Synthetic oligonucleotide
gtcactacaagaatcatcgatcaatggcgt

SEQ ID NO: 100889 - DNA, 30 bp, Artificial Sequence
  Synthetic oligonucleotide
tgcgtatttagggctttcaaagcgtggcgt

SEQ ID NO: 100890 - DNA, 30 bp, Artificial Sequence
  Synthetic oligonucleotide
cgcgggcggtaacacgtgcaatcaatgcgt

SEQ ID NO: 100891 - DNA, 30 bp, Artificial Sequence
  Synthetic oligonucleotide
ctatgtgtgatcaaatggctgggtatgcgt

SEQ ID NO: 100892 - DNA, 30 bp, Artificial Sequence
  Synthetic oligonucleotide
gaacctgatctgcgttagggagggctgcgt

SEQ ID NO: 100893 - DNA, 30 bp, Artificial Sequence
  Synthetic oligonucleotide
acaccaggtgagggaaaagtagtattgcgt

SEQ ID NO: 100894 - DNA, 30 bp, Artificial Sequence
  Synthetic oligonucleotide
gaaactggggtcggcataatggtcgatcgt

SEQ ID NO: 100895 - DNA, 30 bp, Artificial Sequence
  Synthetic oligonucleotide
gcgcaaggcagatccagggcaacggatcgt

SEQ ID NO: 100896 - DNA, 30 bp, Artificial Sequence
  Synthetic oligonucleotide
aacgccagtctcaccagttcaagatatcgt

SEQ ID NO: 100897 - DNA, 30 bp, Artificial Sequence
  Synthetic oligonucleotide
ccggccgaacagtaaagggtcctctatcgt

SEQ ID NO: 100898 - DNA, 30 bp, Artificial Sequence
  Synthetic oligonucleotide
atcgcattctcagaatgagatcggtatcgt

SEQ ID NO: 100899 - DNA, 30 bp, Artificial Sequence
  Synthetic oligonucleotide
accgcatcatatgcgcaggtatgttatcgt

SEQ ID NO: 100900 - DNA, 30 bp, Artificial Sequence
  Synthetic oligonucleotide
ttaaaacgcagagtgatccaatcgactcgt

SEQ ID NO: 100901 - DNA, 30 bp, Artificial Sequence
  Synthetic oligonucleotide
gtgatggatggtaggaggggcttcgctcgt

SEQ ID NO: 100902 - DNA, 30 bp, Artificial Sequence
  Synthetic oligonucleotide
cagatagtatcagcggcgacttctgctcgt

SEQ ID NO: 100903 - DNA, 30 bp, Artificial Sequence
  Synthetic oligonucleotide
ggtgacaacaccatgaacggcaactctcgt

SEQ ID NO: 100904 - DNA, 30 bp, Artificial Sequence
  Synthetic oligonucleotide
aaggggacctctacgtgtggaaagagtcgt

SEQ ID NO: 100905 - DNA, 30 bp, Artificial Sequence
  Synthetic oligonucleotide
tatcgcaaggggttaccgtctaatagtcgt

SEQ ID NO: 100906 - DNA, 30 bp, Artificial Sequence
  Synthetic oligonucleotide
tggtagggtaagcgtgggaaggagcgtcgt

SEQ ID NO: 100907 - DNA, 30 bp, Artificial Sequence
  Synthetic oligonucleotide
ctcaagtaatcaaggaacacactcggtcgt

SEQ ID NO: 100908 - DNA, 30 bp, Artificial Sequence
  Synthetic oligonucleotide
taggacgggaggctatccatgttcggtcgt

SEQ ID NO: 100909 - DNA, 30 bp, Artificial Sequence
  Synthetic oligonucleotide
gtgtcgttcaaacaagagccgcatggtcgt

SEQ ID NO: 100910 - DNA, 30 bp, Artificial Sequence
  Synthetic oligonucleotide
cagggaaggaaggttattagtataattcgt

SEQ ID NO: 100911 - DNA, 30 bp, Artificial Sequence
  Synthetic oligonucleotide
cgaaatgtacctatgttcagtgggattcgt

SEQ ID NO: 100912 - DNA, 30 bp, Artificial Sequence
  Synthetic oligonucleotide
tgaatgctatcgtgttagagcgaacttcgt

SEQ ID NO: 100913 - DNA, 30 bp, Artificial Sequence
  Synthetic oligonucleotide
actatagctagcggaccggggactgttcgt

SEQ ID NO: 100914 - DNA, 30 bp, Artificial Sequence
  Synthetic oligonucleotide
atcgagttcgtgcggacaatatgatttcgt

SEQ ID NO: 100915 - DNA, 30 bp, Artificial Sequence
  Synthetic oligonucleotide
tgtgtatcgcttatagatcctcaacaaggt

SEQ ID NO: 100916 - DNA, 30 bp, Artificial Sequence
  Synthetic oligonucleotide
aataaaagaagcgatcgtccgaggcaaggt

SEQ ID NO: 100917 - DNA, 30 bp, Artificial Sequence
  Synthetic oligonucleotide
tagaatggagctgtaggactgcccgaaggt

SEQ ID NO: 100918 - DNA, 30 bp, Artificial Sequence
  Synthetic oligonucleotide
tcaggcgagcgcttcataaaaagcgaaggt

SEQ ID NO: 100919 - DNA, 30 bp, Artificial Sequence
  Synthetic oligonucleotide
atgtgctgttatcacggtgagtcggaaggt

SEQ ID NO: 100920 - DNA, 30 bp, Artificial Sequence
  Synthetic oligonucleotide
ataagctggtgcggatgtaccatggaaggt

SEQ ID NO: 100921 - DNA, 30 bp, Artificial Sequence
  Synthetic oligonucleotide
ctgtatgtcagaaactagacggcgacaggt

SEQ ID NO: 100922 - DNA, 30 bp, Artificial Sequence
  Synthetic oligonucleotide
ccgggggtgtgacacaatacgcctccaggt

SEQ ID NO: 100923 - DNA, 30 bp, Artificial Sequence
  Synthetic oligonucleotide
tggttacgtacggacagctttgctccaggt

SEQ ID NO: 100924 - DNA, 30 bp, Artificial Sequence
  Synthetic oligonucleotide
cgagacatccccaagctatgcaaagcaggt

SEQ ID NO: 100925 - DNA, 30 bp, Artificial Sequence
  Synthetic oligonucleotide
atctcctgggggggccacaaaatagcaggt

SEQ ID NO: 100926 - DNA, 30 bp, Artificial Sequence
  Synthetic oligonucleotide
tagtcgtcaacacgcgtgcgccctgcaggt

SEQ ID NO: 100927 - DNA, 30 bp, Artificial Sequence
  Synthetic oligonucleotide
gagggggtttactaagacattgcatcaggt

SEQ ID NO: 100928 - DNA, 30 bp, Artificial Sequence
  Synthetic oligonucleotide
aatcgggtcacattttggggacagtcaggt

SEQ ID NO: 100929 - DNA, 30 bp, Artificial Sequence
  Synthetic oligonucleotide
gagcggatcaatgctcgagagttttcaggt

SEQ ID NO: 100930 - DNA, 30 bp, Artificial Sequence
  Synthetic oligonucleotide
cagcgattcttgcgacatcagaaaagaggt

SEQ ID NO: 100931 - DNA, 30 bp, Artificial Sequence
  Synthetic oligonucleotide
tcgcctacgtgggacaatacgcaaagaggt

SEQ ID NO: 100932 - DNA, 30 bp, Artificial Sequence
  Synthetic oligonucleotide
cgtcttctagctccgaggcgtgccagaggt

SEQ ID NO: 100933 - DNA, 30 bp, Artificial Sequence
  Synthetic oligonucleotide
gaggaccactgttgtaggcatgtgagaggt

SEQ ID NO: 100934 - DNA, 30 bp, Artificial Sequence
  Synthetic oligonucleotide
ctacaacagtcagttcaaacttgtagaggt

SEQ ID NO: 100935 - DNA, 30 bp, Artificial Sequence
  Synthetic oligonucleotide
acgaagcgaagacaggcgtttgcaggaggt

SEQ ID NO: 100936 - DNA, 30 bp, Artificial Sequence
  Synthetic oligonucleotide
ggcgtgcaggtagcataaaggcggggaggt

SEQ ID NO: 100937 - DNA, 30 bp, Artificial Sequence
  Synthetic oligonucleotide
tcgatgggacgtctaaagtacagtggaggt

SEQ ID NO: 100938 - DNA, 30 bp, Artificial Sequence
  Synthetic oligonucleotide
aggaaaagagctcgtcagataaaaataggt

SEQ ID NO: 100939 - DNA, 30 bp, Artificial Sequence
  Synthetic oligonucleotide
ggccaggacataggtagtcacaagctaggt

SEQ ID NO: 100940 - DNA, 30 bp, Artificial Sequence
  Synthetic oligonucleotide
aagccagcgtgttatggtagcacggtaggt

SEQ ID NO: 100941 - DNA, 30 bp, Artificial Sequence
  Synthetic oligonucleotide
tcgaagggataatgtgaatactcctacggt

SEQ ID NO: 100942 - DNA, 30 bp, Artificial Sequence
  Synthetic oligonucleotide
aggattgatagtatcatcgttggctacggt

SEQ ID NO: 100943 - DNA, 30 bp, Artificial Sequence
  Synthetic oligonucleotide
tgaacgctacggcgtgcaggctagtacggt

SEQ ID NO: 100944 - DNA, 30 bp, Artificial Sequence
  Synthetic oligonucleotide
gcctccaacaacaatcaagagtccaccggt

SEQ ID NO: 100945 - DNA, 30 bp, Artificial Sequence
  Synthetic oligonucleotide
cgaggaaggagtctcgagcgtgagcccggt

SEQ ID NO: 100946 - DNA, 30 bp, Artificial Sequence
  Synthetic oligonucleotide
ggggagaagtaaactatgcttgggcccggt

SEQ ID NO: 100947 - DNA, 30 bp, Artificial Sequence
  Synthetic oligonucleotide
taatctctggcctggatactctgtagcggt

SEQ ID NO: 100948 - DNA, 30 bp, Artificial Sequence
  Synthetic oligonucleotide
tatgcccacgttacccacggcaaccgcggt

SEQ ID NO: 100949 - DNA, 30 bp, Artificial Sequence
  Synthetic oligonucleotide
cacacaagggagccccaatgcaaaggcggt

SEQ ID NO: 100950 - DNA, 30 bp, Artificial Sequence
  Synthetic oligonucleotide
cggcaatgtagcaagtaacatcctggcggt

SEQ ID NO: 100951 - DNA, 30 bp, Artificial Sequence
  Synthetic oligonucleotide
acggcagccagcaaagccaatcgtggcggt

SEQ ID NO: 100952 - DNA, 30 bp, Artificial Sequence
  Synthetic oligonucleotide
agggacactgtttccatcacggcttgcggt

SEQ ID NO: 100953 - DNA, 30 bp, Artificial Sequence
  Synthetic oligonucleotide
gcgaggcggagagtcttggtgtacgtcggt

SEQ ID NO: 100954 - DNA, 30 bp, Artificial Sequence
  Synthetic oligonucleotide
tgggactgcggaagaatctacacattcggt

SEQ ID NO: 100955 - DNA, 30 bp, Artificial Sequence
  Synthetic oligonucleotide
gtagcggcagactcacgggggacaaagggt

SEQ ID NO: 100956 - DNA, 30 bp, Artificial Sequence
  Synthetic oligonucleotide
caagtatctatagggatagtgagaaagggt

SEQ ID NO: 100957 - DNA, 31 bp, Artificial Sequence
  Synthetic oligonucleotide
ccggatcaaacgagcggatgatcaacagggt

SEQ ID NO: 100958 - DNA, 30 bp, Artificial Sequence
  Synthetic oligonucleotide
aagcatcagtctaccccgtctaactagggt

SEQ ID NO: 100959 - DNA, 30 bp, Artificial Sequence
  Synthetic oligonucleotide
aggactaaaatagtaagtaatagttagggt

SEQ ID NO: 100960 - DNA, 30 bp, Artificial Sequence
  Synthetic oligonucleotide
aaggcgtactacagtgtccggctttagggt

SEQ ID NO: 100961 - DNA, 30 bp, Artificial Sequence
  Synthetic oligonucleotide
gtggggatctaaactgcgaccagtccgggt

SEQ ID NO: 100962 - DNA, 30 bp, Artificial Sequence
  Synthetic oligonucleotide
cagtagtactgagctaggccgcgatcgggt

SEQ ID NO: 100963 - DNA, 30 bp, Artificial Sequence
  Synthetic oligonucleotide
taacattagctacgaaccagtgactcgggt

SEQ ID NO: 100964 - DNA, 30 bp, Artificial Sequence
  Synthetic oligonucleotide
gtccatacaagtagagtcctaataaggggt

SEQ ID NO: 100965 - DNA, 30 bp, Artificial Sequence
  Synthetic oligonucleotide
gcgcatgatacacattctacggggcggggt

SEQ ID NO: 100966 - DNA, 30 bp, Artificial Sequence
  Synthetic oligonucleotide
cacgttggaaagaagaacccaaattggggt

SEQ ID NO: 100967 - DNA, 30 bp, Artificial Sequence
  Synthetic oligonucleotide
cgactgaaacagcatggataaaaaatgggt

SEQ ID NO: 100968 - DNA, 30 bp, Artificial Sequence
  Synthetic oligonucleotide
caacggaggaggggaggatatccaatgggt

SEQ ID NO: 100969 - DNA, 30 bp, Artificial Sequence
  Synthetic oligonucleotide
gagcccatacaggaatctaggacactgggt

SEQ ID NO: 100970 - DNA, 30 bp, Artificial Sequence
  Synthetic oligonucleotide
atatcgggaactgcaaggaagtgtctgggt

SEQ ID NO: 100971 - DNA, 30 bp, Artificial Sequence
  Synthetic oligonucleotide
accagctcacctagttagagcggtgtgggt

SEQ ID NO: 100972 - DNA, 30 bp, Artificial Sequence
  Synthetic oligonucleotide
caaccaaaggtaagccatcatattttgggt

SEQ ID NO: 100973 - DNA, 30 bp, Artificial Sequence
  Synthetic oligonucleotide
actaataagccagtgcaaggtttgaatggt

SEQ ID NO: 100974 - DNA, 30 bp, Artificial Sequence
  Synthetic oligonucleotide
ctcgaataccataaacggatgagacatggt

SEQ ID NO: 100975 - DNA, 30 bp, Artificial Sequence
  Synthetic oligonucleotide
ggtttagaagcactaagcatagcgcatggt

SEQ ID NO: 100976 - DNA, 30 bp, Artificial Sequence
  Synthetic oligonucleotide
ggatacctataggaggataaaagatatggt

SEQ ID NO: 100977 - DNA, 30 bp, Artificial Sequence
  Synthetic oligonucleotide
acacggcacgatttatgactaatgtatggt

SEQ ID NO: 100978 - DNA, 30 bp, Artificial Sequence
  Synthetic oligonucleotide
gggtgggagcacctcagagcggaaactggt

SEQ ID NO: 100979 - DNA, 30 bp, Artificial Sequence
  Synthetic oligonucleotide
agatcgaacggaaagtacagttagactggt

SEQ ID NO: 100980 - DNA, 30 bp, Artificial Sequence
  Synthetic oligonucleotide
cggacactgaacagggcaataaggcctggt

SEQ ID NO: 100981 - DNA, 30 bp, Artificial Sequence
  Synthetic oligonucleotide
agcctaatgtagagaggggatggggctggt

SEQ ID NO: 100982 - DNA, 30 bp, Artificial Sequence
  Synthetic oligonucleotide
tacggcgagggcacagagttagatgctggt

SEQ ID NO: 100983 - DNA, 30 bp, Artificial Sequence
  Synthetic oligonucleotide
aggagtaggcaattcctgccatgtgctggt

SEQ ID NO: 100984 - DNA, 30 bp, Artificial Sequence
  Synthetic oligonucleotide
cggagactcgatctcagacaatggcgtggt

SEQ ID NO: 100985 - DNA, 30 bp, Artificial Sequence
  Synthetic oligonucleotide
gcgtatactttcatgtattaacgaggtggt

SEQ ID NO: 100986 - DNA, 30 bp, Artificial Sequence
  Synthetic oligonucleotide
gaggcgaaagtatattctatagtaattggt

SEQ ID NO: 100987 - DNA, 30 bp, Artificial Sequence
  Synthetic oligonucleotide
cgcaaaacaagtgttgtaattttgattggt

SEQ ID NO: 100988 - DNA, 30 bp, Artificial Sequence
  Synthetic oligonucleotide
ctggggcgcaagggggcaggtaatcttggt

SEQ ID NO: 100989 - DNA, 30 bp, Artificial Sequence
  Synthetic oligonucleotide
tagaccggtttagggttgctgagcgttggt

SEQ ID NO: 100990 - DNA, 30 bp, Artificial Sequence
  Synthetic oligonucleotide
aacctaagctcggaaggagtagcggttggt

SEQ ID NO: 100991 - DNA, 30 bp, Artificial Sequence
  Synthetic oligonucleotide
agcgccgaatttcaaagaggtattgttggt

SEQ ID NO: 100992 - DNA, 30 bp, Artificial Sequence
  Synthetic oligonucleotide
tggaactaactagaacagaaacttgttggt

SEQ ID NO: 100993 - DNA, 30 bp, Artificial Sequence
  Synthetic oligonucleotide
gcggaagagcgcaggggcgatcgatttggt

SEQ ID NO: 100994 - DNA, 30 bp, Artificial Sequence
  Synthetic oligonucleotide
cgatgccttggtcaccccaatcgaaaatgt

SEQ ID NO: 100995 - DNA, 30 bp, Artificial Sequence
  Synthetic oligonucleotide
tacgtcaagattgcatcagtacttaaatgt

SEQ ID NO: 100996 - DNA, 30 bp, Artificial Sequence
  Synthetic oligonucleotide
caagcacgaagccaggttaagactcaatgt

SEQ ID NO: 100997 - DNA, 30 bp, Artificial Sequence
  Synthetic oligonucleotide
gagacgatgacgatcctactgtaagaatgt

SEQ ID NO: 100998 - DNA, 30 bp, Artificial Sequence
  Synthetic oligonucleotide
cctgctcttcaagcaagggcgccagaatgt

SEQ ID NO: 100999 - DNA, 30 bp, Artificial Sequence
  Synthetic oligonucleotide
agggggcatgaacacgtgatgaccgaatgt

SEQ ID NO: 101000 - DNA, 30 bp, Artificial Sequence
  Synthetic oligonucleotide
aatagaaggaaccgtccaccttcggaatgt

SEQ ID NO: 101001 - DNA, 30 bp, Artificial Sequence
  Synthetic oligonucleotide
gtgaaggaccagaggagaggttcctaatgt

SEQ ID NO: 101002 - DNA, 30 bp, Artificial Sequence
  Synthetic oligonucleotide
cacagaggatcttgagcgctcgtaacatgt

SEQ ID NO: 101003 - DNA, 30 bp, Artificial Sequence
  Synthetic oligonucleotide
atcacgagtaagatgcaatttaaaccatgt

SEQ ID NO: 101004 - DNA, 30 bp, Artificial Sequence
  Synthetic oligonucleotide
tcgtcatgtatgcaattcagccagccatgt

SEQ ID NO: 101005 - DNA, 30 bp, Artificial Sequence
  Synthetic oligonucleotide
ccagggcagtccgacgggctaaatccatgt

SEQ ID NO: 101006 - DNA, 30 bp, Artificial Sequence
  Synthetic oligonucleotide
tgggacatgaaacgtataacacacgcatgt

SEQ ID NO: 101007 - DNA, 30 bp, Artificial Sequence
  Synthetic oligonucleotide
gcgagctgggcacatctatctcgtgcatgt

SEQ ID NO: 101008 - DNA, 30 bp, Artificial Sequence
  Synthetic oligonucleotide
gggctgcgcatctgaaagcggcagtcatgt

SEQ ID NO: 101009 - DNA, 30 bp, Artificial Sequence
  Synthetic oligonucleotide
aggcgattgttagaaagaaactattcatgt

SEQ ID NO: 101010 - DNA, 30 bp, Artificial Sequence
  Synthetic oligonucleotide
agaacgggatcggcgtcacactacagatgt

SEQ ID NO: 101011 - DNA, 30 bp, Artificial Sequence
  Synthetic oligonucleotide
ggttaagccatcttaagcaatcctagatgt

SEQ ID NO: 101012 - DNA, 30 bp, Artificial Sequence
  Synthetic oligonucleotide
tagccgatccaaggtaggtaagcacgatgt

SEQ ID NO: 101013 - DNA, 30 bp, Artificial Sequence
  Synthetic oligonucleotide
aagccacggaacggtggagacaaaatatgt

SEQ ID NO: 101014 - DNA, 30 bp, Artificial Sequence
  Synthetic oligonucleotide
gcttaatatatggcgactaaagctatatgt

SEQ ID NO: 101015 - DNA, 30 bp, Artificial Sequence
  Synthetic oligonucleotide
ttcagaagtacacgactcgatgttatatgt

SEQ ID NO: 101016 - DNA, 30 bp, Artificial Sequence
  Synthetic oligonucleotide
atgagtgtgagcccggagtctttgctatgt

SEQ ID NO: 101017 - DNA, 30 bp, Artificial Sequence
  Synthetic oligonucleotide
acttgcgaataccgggtttggtgagtatgt

SEQ ID NO: 101018 - DNA, 30 bp, Artificial Sequence
  Synthetic oligonucleotide
tgtcgaccggttagcaggaagtgtttatgt

SEQ ID NO: 101019 - DNA, 30 bp, Artificial Sequence
  Synthetic oligonucleotide
caggcgtcccgtctggccatttaaaactgt

SEQ ID NO: 101020 - DNA, 30 bp, Artificial Sequence
  Synthetic oligonucleotide
cccttagacttagtataaaatctcaactgt

SEQ ID NO: 101021 - DNA, 30 bp, Artificial Sequence
  Synthetic oligonucleotide
gctgtagaaagaaggaagtacccacactgt

SEQ ID NO: 101022 - DNA, 30 bp, Artificial Sequence
  Synthetic oligonucleotide
tgtacacagaacgcaccggaagacgactgt

SEQ ID NO: 101023 - DNA, 30 bp, Artificial Sequence
  Synthetic oligonucleotide
attattagcgcgatcaatatcagggactgt

SEQ ID NO: 101024 - DNA, 30 bp, Artificial Sequence
  Synthetic oligonucleotide
acaagactgtgggacgtcttaggatactgt

SEQ ID NO: 101025 - DNA, 30 bp, Artificial Sequence
  Synthetic oligonucleotide
gcgagccagacgcaaattcgggggtactgt

SEQ ID NO: 101026 - DNA, 30 bp, Artificial Sequence
  Synthetic oligonucleotide
ccaaccaccacatacataaaccgagcctgt

SEQ ID NO: 101027 - DNA, 35 bp, Artificial Sequence
  Synthetic oligonucleotide
gcaccgaacaagctggcaccccggaagaatcctgt

SEQ ID NO: 101028 - DNA, 30 bp, Artificial Sequence
  Synthetic oligonucleotide
gcagtatgaaggataaagttaatccgctgt

SEQ ID NO: 101029 - DNA, 30 bp, Artificial Sequence
  Synthetic oligonucleotide
agagggtgctatttacagaaacagggctgt

SEQ ID NO: 101030 - DNA, 30 bp, Artificial Sequence
  Synthetic oligonucleotide
gtttctaaaggagtgtagtagtcaatctgt

SEQ ID NO: 101031 - DNA, 30 bp, Artificial Sequence
  Synthetic oligonucleotide
cagatctacaatatcagaggcgcgatctgt

SEQ ID NO: 101032 - DNA, 30 bp, Artificial Sequence
  Synthetic oligonucleotide
tgtaaactcgcctggacttcgcaactctgt

SEQ ID NO: 101033 - DNA, 30 bp, Artificial Sequence
  Synthetic oligonucleotide
ttcacggaacggctgactaagcgaaagtgt

SEQ ID NO: 101034 - DNA, 30 bp, Artificial Sequence
  Synthetic oligonucleotide
cgggctagtctgccggaagtatccaagtgt

SEQ ID NO: 101035 - DNA, 30 bp, Artificial Sequence
  Synthetic oligonucleotide
gcacgctaatcgcgagtcattgtcaagtgt

SEQ ID NO: 101036 - DNA, 30 bp, Artificial Sequence
  Synthetic oligonucleotide
gggaccacaaagaatattaggcaacagtgt

SEQ ID NO: 101037 - DNA, 30 bp, Artificial Sequence
  Synthetic oligonucleotide
tagggagaaatcctagttgaagaacagtgt

SEQ ID NO: 101038 - DNA, 30 bp, Artificial Sequence
  Synthetic oligonucleotide
gtcgtactcggtatataaagagtgcagtgt

SEQ ID NO: 101039 - DNA, 30 bp, Artificial Sequence
  Synthetic oligonucleotide
cctcgaatggccatactgttagcagagtgt

SEQ ID NO: 101040 - DNA, 30 bp, Artificial Sequence
  Synthetic oligonucleotide
ctgacgcgcgcccagtcttttcccgagtgt

SEQ ID NO: 101041 - DNA, 30 bp, Artificial Sequence
  Synthetic oligonucleotide
ccataggtgaccaggaaatgcgactagtgt

SEQ ID NO: 101042 - DNA, 30 bp, Artificial Sequence
  Synthetic oligonucleotide
agcatgttacgctgacatatccatacgtgt

SEQ ID NO: 101043 - DNA, 30 bp, Artificial Sequence
  Synthetic oligonucleotide
tgataccgagcgaaaaggcacggtacgtgt

SEQ ID NO: 101044 - DNA, 30 bp, Artificial Sequence
  Synthetic oligonucleotide
gtacgccagtagattgactttgtagcgtgt

SEQ ID NO: 101045 - DNA, 30 bp, Artificial Sequence
  Synthetic oligonucleotide
gaacgaggccgagcacaccaggccgcgtgt

SEQ ID NO: 101046 - DNA, 30 bp, Artificial Sequence
  Synthetic oligonucleotide
ggaacagtgactaggggaatgtcatcgtgt

SEQ ID NO: 101047 - DNA, 30 bp, Artificial Sequence
  Synthetic oligonucleotide
gcataggcgcgatctggaaaggtctcgtgt

SEQ ID NO: 101048 - DNA, 30 bp, Artificial Sequence
  Synthetic oligonucleotide
ccgcccctatgcagagagaccatgtcgtgt

SEQ ID NO: 101049 - DNA, 30 bp, Artificial Sequence
  Synthetic oligonucleotide
aaaaactaaattcacgtaagttccaggtgt

SEQ ID NO: 101050 - DNA, 30 bp, Artificial Sequence
  Synthetic oligonucleotide
aagtcaacaaaaagggtagacctacggtgt

SEQ ID NO: 101051 - DNA, 30 bp, Artificial Sequence
  Synthetic oligonucleotide
agttgctatgtagaagggactaaccggtgt

SEQ ID NO: 101052 - DNA, 30 bp, Artificial Sequence
  Synthetic oligonucleotide
cagtactcgatactactgaattagcggtgt

SEQ ID NO: 101053 - DNA, 30 bp, Artificial Sequence
  Synthetic oligonucleotide
aacgttatcacttaagcttggaaagggtgt

SEQ ID NO: 101054 - DNA, 30 bp, Artificial Sequence
  Synthetic oligonucleotide
agctagtaggaacggtcaggtccagggtgt

SEQ ID NO: 101055 - DNA, 30 bp, Artificial Sequence
  Synthetic oligonucleotide
cttaagcaggttcaaagtcctggcgggtgt

SEQ ID NO: 101056 - DNA, 30 bp, Artificial Sequence
  Synthetic oligonucleotide
caggattcaacatacgggtacacgatgtgt

SEQ ID NO: 101057 - DNA, 30 bp, Artificial Sequence
  Synthetic oligonucleotide
tagactgtagagagcaacatctcgctgtgt

SEQ ID NO: 101058 - DNA, 30 bp, Artificial Sequence
  Synthetic oligonucleotide
cgactcggccggtcgttgcaaagagtgtgt

SEQ ID NO: 101059 - DNA, 30 bp, Artificial Sequence
  Synthetic oligonucleotide
acagcgaacacctgaacaagcccgttgtgt

SEQ ID NO: 101060 - DNA, 30 bp, Artificial Sequence
  Synthetic oligonucleotide
tactctaggagagttcagcgtaaaaattgt

SEQ ID NO: 101061 - DNA, 30 bp, Artificial Sequence
  Synthetic oligonucleotide
acgtcattagactactagcagagacattgt

SEQ ID NO: 101062 - DNA, 30 bp, Artificial Sequence
  Synthetic oligonucleotide
ggtaaccacctctaaatggggacccattgt

SEQ ID NO: 101063 - DNA, 30 bp, Artificial Sequence
  Synthetic oligonucleotide
taaggggcaataccaggtgcaggggattgt

SEQ ID NO: 101064 - DNA, 30 bp, Artificial Sequence
  Synthetic oligonucleotide
acgtttaggggctttaatccatagtattgt

SEQ ID NO: 101065 - DNA, 30 bp, Artificial Sequence
  Synthetic oligonucleotide
cgctacggtttcaggtatcaagtcgcttgt

SEQ ID NO: 101066 - DNA, 30 bp, Artificial Sequence
  Synthetic oligonucleotide
atcaaaagtgcggtgatcagaacaagttgt

SEQ ID NO: 101067 - DNA, 30 bp, Artificial Sequence
  Synthetic oligonucleotide
cagtagcagcgcggaaccagtgtcagttgt

SEQ ID NO: 101068 - DNA, 30 bp, Artificial Sequence
  Synthetic oligonucleotide
aattggcctaaaaggtaactggcacgttgt

SEQ ID NO: 101069 - DNA, 30 bp, Artificial Sequence
  Synthetic oligonucleotide
aaagatggccagatttagcagaggcgttgt

SEQ ID NO: 101070 - DNA, 30 bp, Artificial Sequence
  Synthetic oligonucleotide
ctaaaaaagtatatttgcgtacgtcgttgt

SEQ ID NO: 101071 - DNA, 30 bp, Artificial Sequence
  Synthetic oligonucleotide
gcgggtcatgtcggttaacaatgtcgttgt

SEQ ID NO: 101072 - DNA, 30 bp, Artificial Sequence
  Synthetic oligonucleotide
acgctctatcaacacctaggtggctgttgt

SEQ ID NO: 101073 - DNA, 30 bp, Artificial Sequence
  Synthetic oligonucleotide
gtaagcaaattcagcatatcacaactttgt

SEQ ID NO: 101074 - DNA, 30 bp, Artificial Sequence
  Synthetic oligonucleotide
ctagctaggccaggcctgtgccgactttgt

SEQ ID NO: 101075 - DNA, 30 bp, Artificial Sequence
  Synthetic oligonucleotide
ccatggtaacatgtggcaggtactctttgt

SEQ ID NO: 101076 - DNA, 30 bp, Artificial Sequence
  Synthetic oligonucleotide
cagaagacttgatgagtcggctgagtttgt

SEQ ID NO: 101077 - DNA, 30 bp, Artificial Sequence
  Synthetic oligonucleotide
tagcgtcaacggcgtaatcgcggaaaaatt

SEQ ID NO: 101078 - DNA, 30 bp, Artificial Sequence
  Synthetic oligonucleotide
agatggggacttgattcagcctgaaaaatt

SEQ ID NO: 101079 - DNA, 30 bp, Artificial Sequence
  Synthetic oligonucleotide
gaaacacggacaatcgtctcgtataaaatt

SEQ ID NO: 101080 - DNA, 30 bp, Artificial Sequence
  Synthetic oligonucleotide
ccgtcgaatgcgaggttttcgaaacaaatt

SEQ ID NO: 101081 - DNA, 30 bp, Artificial Sequence
  Synthetic oligonucleotide
cgtctaggtcatatattgtgaaatcaaatt

SEQ ID NO: 101082 - DNA, 30 bp, Artificial Sequence
  Synthetic oligonucleotide
gttgcgaacaacggcttacgtaacgaaatt

SEQ ID NO: 101083 - DNA, 30 bp, Artificial Sequence
  Synthetic oligonucleotide
ggcggttaatgatatagcggaacaacaatt

SEQ ID NO: 101084 - DNA, 30 bp, Artificial Sequence
  Synthetic oligonucleotide
cataaaacaaatgcaacgaaccacacaatt

SEQ ID NO: 101085 - DNA, 30 bp, Artificial Sequence
  Synthetic oligonucleotide
ttctggaccgccaaaccgaaaactacaatt

SEQ ID NO: 101086 - DNA, 30 bp, Artificial Sequence
  Synthetic oligonucleotide
caatgctgccaagaactgcatgttacaatt

SEQ ID NO: 101087 - DNA, 30 bp, Artificial Sequence
  Synthetic oligonucleotide
ctggaatcgatcccgtctgtgtgaccaatt

SEQ ID NO: 101088 - DNA, 30 bp, Artificial Sequence
  Synthetic oligonucleotide
aggaacgtgagacaggatggtttagcaatt

SEQ ID NO: 101089 - DNA, 30 bp, Artificial Sequence
  Synthetic oligonucleotide
gcactacaacatacagcaacatgctcaatt

SEQ ID NO: 101090 - DNA, 30 bp, Artificial Sequence
  Synthetic oligonucleotide
gtcactacagtgatggttcatcggagaatt

SEQ ID NO: 101091 - DNA, 30 bp, Artificial Sequence
  Synthetic oligonucleotide
aacgtttggggctcgacaagtgtgagaatt

SEQ ID NO: 101092 - DNA, 30 bp, Artificial Sequence
  Synthetic oligonucleotide
gtggaggcgaagacgcttactcgtagaatt

SEQ ID NO: 101093 - DNA, 30 bp, Artificial Sequence
  Synthetic oligonucleotide
aagggggacgttacgacaagaatccgaatt

SEQ ID NO: 101094 - DNA, 30 bp, Artificial Sequence
  Synthetic oligonucleotide
cggctgagactctccggaaaatcgcgaatt

SEQ ID NO: 101095 - DNA, 30 bp, Artificial Sequence
  Synthetic oligonucleotide
atacagaaggcaggcgcctgaccgataatt

SEQ ID NO: 101096 - DNA, 30 bp, Artificial Sequence
  Synthetic oligonucleotide
gtaggggacatgggtaacgccgtagtaatt

SEQ ID NO: 101097 - DNA, 30 bp, Artificial Sequence
  Synthetic oligonucleotide
cactggcgtcataagttgcgacctgtaatt

SEQ ID NO: 101098 - DNA, 30 bp, Artificial Sequence
  Synthetic oligonucleotide
ccgtcagacctggtcttgacaaaacacatt

SEQ ID NO: 101099 - DNA, 30 bp, Artificial Sequence
  Synthetic oligonucleotide
atgaggtcagattggacctacgtgcacatt

SEQ ID NO: 101100 - DNA, 30 bp, Artificial Sequence
  Synthetic oligonucleotide
cgatccggatgataataggaataagacatt

SEQ ID NO: 101101 - DNA, 30 bp, Artificial Sequence
  Synthetic oligonucleotide
cctaaaggcatcggttcaggaagatacatt

SEQ ID NO: 101102 - DNA, 30 bp, Artificial Sequence
  Synthetic oligonucleotide
cgcacgtggagccgagcgctacactacatt

SEQ ID NO: 101103 - DNA, 30 bp, Artificial Sequence
  Synthetic oligonucleotide
gggatcgccatcgttgagcccgtcaccatt

SEQ ID NO: 101104 - DNA, 30 bp, Artificial Sequence
  Synthetic oligonucleotide
tgggatcgaacaggacgtgaccataccatt

SEQ ID NO: 101105 - DNA, 30 bp, Artificial Sequence
  Synthetic oligonucleotide
aatccgaggatagaagctggatgctccatt

SEQ ID NO: 101106 - DNA, 30 bp, Artificial Sequence
  Synthetic oligonucleotide
ggcttgcgacacactaaagcatcgtccatt

SEQ ID NO: 101107 - DNA, 30 bp, Artificial Sequence
  Synthetic oligonucleotide
gtgcaacatgtgggcggaaggtgtagcatt

SEQ ID NO: 101108 - DNA, 30 bp, Artificial Sequence
  Synthetic oligonucleotide
atgaggaacagagagtcgattctccgcatt

SEQ ID NO: 101109 - DNA, 30 bp, Artificial Sequence
  Synthetic oligonucleotide
tggcagacggtgcccgtaagtgtatgcatt

SEQ ID NO: 101110 - DNA, 30 bp, Artificial Sequence
  Synthetic oligonucleotide
cggggacaaacctatgcagccgagatcatt

SEQ ID NO: 101111 - DNA, 30 bp, Artificial Sequence
  Synthetic oligonucleotide
cgagtcgctttgtaaggaatcttgatcatt

SEQ ID NO: 101112 - DNA, 30 bp, Artificial Sequence
  Synthetic oligonucleotide
tagctaggcgggcagaagggcagtatcatt

SEQ ID NO: 101113 - DNA, 30 bp, Artificial Sequence
  Synthetic oligonucleotide
cggtcgtagcagatggacaggaatctcatt

SEQ ID NO: 101114 - DNA, 30 bp, Artificial Sequence
  Synthetic oligonucleotide
tggcgccaaaaggcaaatatgtaattcatt

SEQ ID NO: 101115 - DNA, 30 bp, Artificial Sequence
  Synthetic oligonucleotide
ccgaatatctacgagggtggcgtacagatt

SEQ ID NO: 101116 - DNA, 30 bp, Artificial Sequence
  Synthetic oligonucleotide
agtggtggattcgtcgcgtacgagcagatt

SEQ ID NO: 101117 - DNA, 30 bp, Artificial Sequence
  Synthetic oligonucleotide
catacgatgatgtcttaagatgaatagatt

SEQ ID NO: 101118 - DNA, 30 bp, Artificial Sequence
  Synthetic oligonucleotide
ttggctagctagtctctgcaaatttagatt

SEQ ID NO: 101119 - DNA, 30 bp, Artificial Sequence
  Synthetic oligonucleotide
cgtacaggaaagtccatcataaacacgatt

SEQ ID NO: 101120 - DNA, 30 bp, Artificial Sequence
  Synthetic oligonucleotide
gctgtacacaataattggtcatgaccgatt

SEQ ID NO: 101121 - DNA, 30 bp, Artificial Sequence
  Synthetic oligonucleotide
atagtcgtgtcgacgatcggtgccccgatt

SEQ ID NO: 101122 - DNA, 30 bp, Artificial Sequence
  Synthetic oligonucleotide
gattagaggcaaggggagtaggcgccgatt

SEQ ID NO: 101123 - DNA, 30 bp, Artificial Sequence
  Synthetic oligonucleotide
tagacacaaatagctataggcagagcgatt

SEQ ID NO: 101124 - DNA, 30 bp, Artificial Sequence
  Synthetic oligonucleotide
gtccgcgttgcgaggaaaattgataggatt

SEQ ID NO: 101125 - DNA, 30 bp, Artificial Sequence
  Synthetic oligonucleotide
gccgggacattacatgaacgttatcggatt

SEQ ID NO: 101126 - DNA, 30 bp, Artificial Sequence
  Synthetic oligonucleotide
tcgcgcgggactgcgacagcattcgggatt

SEQ ID NO: 101127 - DNA, 30 bp, Artificial Sequence
  Synthetic oligonucleotide
tcgaacgcgggtgggaattgagcctggatt

SEQ ID NO: 101128 - DNA, 30 bp, Artificial Sequence
  Synthetic oligonucleotide
ttgagctgaatttaagcgataacgtggatt

SEQ ID NO: 101129 - DNA, 30 bp, Artificial Sequence
  Synthetic oligonucleotide
tggaggcatcagagttcaggggattggatt

SEQ ID NO: 101130 - DNA, 30 bp, Artificial Sequence
  Synthetic oligonucleotide
ctatgtcggcaattgaggaggtccatgatt

SEQ ID NO: 101131 - DNA, 30 bp, Artificial Sequence
  Synthetic oligonucleotide
tagaatcgggagactgggtcctgcttgatt

SEQ ID NO: 101132 - DNA, 30 bp, Artificial Sequence
  Synthetic oligonucleotide
gaggagagtgatctggcgtgtgaaaatatt

SEQ ID NO: 101133 - DNA, 30 bp, Artificial Sequence
  Synthetic oligonucleotide
atgtctgccattatatagaagcgtaatatt

SEQ ID NO: 101134 - DNA, 30 bp, Artificial Sequence
  Synthetic oligonucleotide
caacacaaacatgccaacgactgtaatatt

SEQ ID NO: 101135 - DNA, 30 bp, Artificial Sequence
  Synthetic oligonucleotide
cgtcaaaatcacagacgggtatccactatt

SEQ ID NO: 101136 - DNA, 30 bp, Artificial Sequence
  Synthetic oligonucleotide
caatgagaactgcatactaagggacctatt

SEQ ID NO: 101137 - DNA, 30 bp, Artificial Sequence
  Synthetic oligonucleotide
caagcgccaagtggtgtgaccaaagctatt

SEQ ID NO: 101138 - DNA, 30 bp, Artificial Sequence
  Synthetic oligonucleotide
cgacagacttttggatgataagtgtctatt

SEQ ID NO: 101139 - DNA, 30 bp, Artificial Sequence
  Synthetic oligonucleotide
tgtgagcgctgaggcgtatgacagagtatt

SEQ ID NO: 101140 - DNA, 30 bp, Artificial Sequence
  Synthetic oligonucleotide
gtggggaactccatactccgagggcgtatt

SEQ ID NO: 101141 - DNA, 30 bp, Artificial Sequence
  Synthetic oligonucleotide
tggggtataatgccaggcagaactcgtatt

SEQ ID NO: 101142 - DNA, 30 bp, Artificial Sequence
  Synthetic oligonucleotide
atcaaagatacaggccaggtaggcggtatt

SEQ ID NO: 101143 - DNA, 30 bp, Artificial Sequence
  Synthetic oligonucleotide
cgttccgtggctcgatacactgagggtatt

SEQ ID NO: 101144 - DNA, 30 bp, Artificial Sequence
  Synthetic oligonucleotide
tcagtaggagcacacagaaggaggggtatt

SEQ ID NO: 101145 - DNA, 30 bp, Artificial Sequence
  Synthetic oligonucleotide
tgcaaagagattgagcgctggcggggtatt

SEQ ID NO: 101146 - DNA, 30 bp, Artificial Sequence
  Synthetic oligonucleotide
atcggataagggagcgttcatggatgtatt

SEQ ID NO: 101147 - DNA, 30 bp, Artificial Sequence
  Synthetic oligonucleotide
agtggcctggagagctcggtcatgtgtatt

SEQ ID NO: 101148 - DNA, 30 bp, Artificial Sequence
  Synthetic oligonucleotide
tacacggaagcagtggcacgtggagttatt

SEQ ID NO: 101149 - DNA, 30 bp, Artificial Sequence
  Synthetic oligonucleotide
cgcatgctttcggagggcgtacacgttatt

SEQ ID NO: 101150 - DNA, 30 bp, Artificial Sequence
  Synthetic oligonucleotide
acgacataatagaaacattaaatcgttatt

SEQ ID NO: 101151 - DNA, 30 bp, Artificial Sequence
  Synthetic oligonucleotide
cagagaaacgtcatgcaaaaatcgtttatt

SEQ ID NO: 101152 - DNA, 30 bp, Artificial Sequence
  Synthetic oligonucleotide
gaaccgggtagcgaacggcttagaaaactt

SEQ ID NO: 101153 - DNA, 30 bp, Artificial Sequence
  Synthetic oligonucleotide
cactacgggcgtccactagcggagaaactt

SEQ ID NO: 101154 - DNA, 30 bp, Artificial Sequence
  Synthetic oligonucleotide
aaagcggcgatgacgtgcgaacctaaactt

SEQ ID NO: 101155 - DNA, 30 bp, Artificial Sequence
  Synthetic oligonucleotide
tatgattcgactgatttgagtgggcaactt

SEQ ID NO: 101156 - DNA, 30 bp, Artificial Sequence
  Synthetic oligonucleotide
ggaggaagcaggttttggaacatgcaactt

SEQ ID NO: 101157 - DNA, 30 bp, Artificial Sequence
  Synthetic oligonucleotide
gtacaagtcggtcaaagcggatgggaactt

SEQ ID NO: 101158 - DNA, 30 bp, Artificial Sequence
  Synthetic oligonucleotide
actggaggcgcaggtcgcgcgcaataactt

SEQ ID NO: 101159 - DNA, 30 bp, Artificial Sequence
  Synthetic oligonucleotide
gttgaacacaagaggtaattctaaacactt

SEQ ID NO: 101160 - DNA, 30 bp, Artificial Sequence
  Synthetic oligonucleotide
aagcgaaactttggcccgcataatacactt

SEQ ID NO: 101161 - DNA, 30 bp, Artificial Sequence
  Synthetic oligonucleotide
ccatgcacacctagaagcgggtgagcactt

SEQ ID NO: 101162 - DNA, 30 bp, Artificial Sequence
  Synthetic oligonucleotide
ccatgccatacggacatctacgtggcactt

SEQ ID NO: 101163 - DNA, 30 bp, Artificial Sequence
  Synthetic oligonucleotide
ataactaggtccacctaccattattcactt

SEQ ID NO: 101164 - DNA, 30 bp, Artificial Sequence
  Synthetic oligonucleotide
tagagatttataaacgttacgtgtcgactt

SEQ ID NO: 101165 - DNA, 30 bp, Artificial Sequence
  Synthetic oligonucleotide
tctgtccagctctaaaggcaaccgggactt

SEQ ID NO: 101166 - DNA, 30 bp, Artificial Sequence
  Synthetic oligonucleotide
caatgaagggaatgagaaaaatgactactt

SEQ ID NO: 101167 - DNA, 30 bp, Artificial Sequence
  Synthetic oligonucleotide
tatacggtaaacccaattgagtgtgtactt

SEQ ID NO: 101168 - DNA, 30 bp, Artificial Sequence
  Synthetic oligonucleotide
gaatcgatccataagtactcaagcaacctt

SEQ ID NO: 101169 - DNA, 30 bp, Artificial Sequence
  Synthetic oligonucleotide
agcgtatcacgttcagggaaatggaacctt

SEQ ID NO: 101170 - DNA, 30 bp, Artificial Sequence
  Synthetic oligonucleotide
gctcgccgagtatacaaaacgtgtcacctt

SEQ ID NO: 101171 - DNA, 30 bp, Artificial Sequence
  Synthetic oligonucleotide
atgaagaacaagtatgctagcagagacctt

SEQ ID NO: 101172 - DNA, 30 bp, Artificial Sequence
  Synthetic oligonucleotide
acgctagtaactccggacatgcgagacctt

SEQ ID NO: 101173 - DNA, 30 bp, Artificial Sequence
  Synthetic oligonucleotide
cataaatcggggggtttcagatcctacctt

SEQ ID NO: 101174 - DNA, 30 bp, Artificial Sequence
  Synthetic oligonucleotide
acaaggtgtcgtccgctaatgttcaccctt

SEQ ID NO: 101175 - DNA, 30 bp, Artificial Sequence
  Synthetic oligonucleotide
tacgaaaggctgaacataagttagggcctt

SEQ ID NO: 101176 - DNA, 30 bp, Artificial Sequence
  Synthetic oligonucleotide
ctacaaatcgggaaaggaataatatgcctt

SEQ ID NO: 101177 - DNA, 30 bp, Artificial Sequence
  Synthetic oligonucleotide
gcgcgaccctcgtccgaattgtaactcctt

SEQ ID NO: 101178 - DNA, 30 bp, Artificial Sequence
  Synthetic oligonucleotide
gcgagtcactattacaattattccctcctt

SEQ ID NO: 101179 - DNA, 32 bp, Artificial Sequence
  Synthetic oligonucleotide
acgcaaaatcacagaatttgtccaccgtcctt

SEQ ID NO: 101180 - DNA, 30 bp, Artificial Sequence
  Synthetic oligonucleotide
acgaaagtaattacactcgtgattgtcctt

SEQ ID NO: 101181 - DNA, 30 bp, Artificial Sequence
  Synthetic oligonucleotide
aggtcgcattctaaattaccgtacaagctt

SEQ ID NO: 101182 - DNA, 30 bp, Artificial Sequence
  Synthetic oligonucleotide
gcgaccgcgcggagaagaaattcacagctt

SEQ ID NO: 101183 - DNA, 30 bp, Artificial Sequence
  Synthetic oligonucleotide
ggagtaagaagtaagtacagtcatcagctt

SEQ ID NO: 101184 - DNA, 30 bp, Artificial Sequence
  Synthetic oligonucleotide
ttgcatcacgagaaaaaataccctgagctt

SEQ ID NO: 101185 - DNA, 30 bp, Artificial Sequence
  Synthetic oligonucleotide
tcgaaaactgaacaggggaatagtgagctt

SEQ ID NO: 101186 - DNA, 30 bp, Artificial Sequence
  Synthetic oligonucleotide
gatggcgatgggaggatcatcatgtagctt

SEQ ID NO: 101187 - DNA, 30 bp, Artificial Sequence
  Synthetic oligonucleotide
ttgcgaaccagtatagtcgatgattagctt

SEQ ID NO: 101188 - DNA, 30 bp, Artificial Sequence
  Synthetic oligonucleotide
gacgcaagaggctagggatcaataacgctt

SEQ ID NO: 101189 - DNA, 30 bp, Artificial Sequence
  Synthetic oligonucleotide
gcatcgatggataggcatggatcgacgctt

SEQ ID NO: 101190 - DNA, 30 bp, Artificial Sequence
  Synthetic oligonucleotide
agcctcgtgaaaaaaggaagattagcgctt

SEQ ID NO: 101191 - DNA, 30 bp, Artificial Sequence
  Synthetic oligonucleotide
ttagggtgagaaggaggtgatctggcgctt

SEQ ID NO: 101192 - DNA, 30 bp, Artificial Sequence
  Synthetic oligonucleotide
cggaaagacatctcggacgcggatgcgctt

SEQ ID NO: 101193 - DNA, 30 bp, Artificial Sequence
  Synthetic oligonucleotide
cgatccatagtgaccggctcatactcgctt

SEQ ID NO: 101194 - DNA, 30 bp, Artificial Sequence
  Synthetic oligonucleotide
acgtaggtggtcatagatgcatgttcgctt

SEQ ID NO: 101195 - DNA, 30 bp, Artificial Sequence
  Synthetic oligonucleotide
gcacaccggtaaaaggagcgacataggctt

SEQ ID NO: 101196 - DNA, 30 bp, Artificial Sequence
  Synthetic oligonucleotide
tcgctttgatcactgaacaggggccggctt

SEQ ID NO: 101197 - DNA, 30 bp, Artificial Sequence
  Synthetic oligonucleotide
cattccacggcactagtcagaaacatgctt

SEQ ID NO: 101198 - DNA, 30 bp, Artificial Sequence
  Synthetic oligonucleotide
aggatcaacgcgtgatgctgacacaatctt

SEQ ID NO: 101199 - DNA, 30 bp, Artificial Sequence
  Synthetic oligonucleotide
ctccaacggagaatgggtgtgacgaatctt

SEQ ID NO: 101200 - DNA, 30 bp, Artificial Sequence
  Synthetic oligonucleotide
aggagttaatagacaagcgtcaataatctt

SEQ ID NO: 101201 - DNA, 30 bp, Artificial Sequence
  Synthetic oligonucleotide
agaacttgcaagcggcaactggggcatctt

SEQ ID NO: 101202 - DNA, 30 bp, Artificial Sequence
  Synthetic oligonucleotide
aggatatatccttatatccgattgcatctt

SEQ ID NO: 101203 - DNA, 30 bp, Artificial Sequence
  Synthetic oligonucleotide
cgtaggggctccggtagggcttgttatctt

SEQ ID NO: 101204 - DNA, 30 bp, Artificial Sequence
  Synthetic oligonucleotide
gcgataagcagatatgtgttactttatctt

SEQ ID NO: 101205 - DNA, 30 bp, Artificial Sequence
  Synthetic oligonucleotide
ggtcgtaagctcgacgatagggaatctctt

SEQ ID NO: 101206 - DNA, 30 bp, Artificial Sequence
  Synthetic oligonucleotide
ggacaagtgggcactgtacccgattctctt

SEQ ID NO: 101207 - DNA, 30 bp, Artificial Sequence
  Synthetic oligonucleotide
tatggccaccgagggcgagttaatagtctt

SEQ ID NO: 101208 - DNA, 30 bp, Artificial Sequence
  Synthetic oligonucleotide
tagcgtgggtaatgtcccgaaggctgtctt

SEQ ID NO: 101209 - DNA, 30 bp, Artificial Sequence
  Synthetic oligonucleotide
ctcggtccttccgaaataaagggtgttctt

SEQ ID NO: 101210 - DNA, 30 bp, Artificial Sequence
  Synthetic oligonucleotide
cgtccgaaactaaccttcacgatatttctt

SEQ ID NO: 101211 - DNA, 30 bp, Artificial Sequence
  Synthetic oligonucleotide
tagggtatgtgttatagatagcgtaaagtt

SEQ ID NO: 101212 - DNA, 30 bp, Artificial Sequence
  Synthetic oligonucleotide
agctggatgggctatgttcaccttaaagtt

SEQ ID NO: 101213 - DNA, 30 bp, Artificial Sequence
  Synthetic oligonucleotide
tgcgaacacggttggagaaagaaccaagtt

SEQ ID NO: 101214 - DNA, 30 bp, Artificial Sequence
  Synthetic oligonucleotide
aggtgacgcttagcggcgggtaatcaagtt

SEQ ID NO: 101215 - DNA, 30 bp, Artificial Sequence
  Synthetic oligonucleotide
tgagataaagagaagccctccagagaagtt

SEQ ID NO: 101216 - DNA, 30 bp, Artificial Sequence
  Synthetic oligonucleotide
cctacatggtaatagacactagcggaagtt

SEQ ID NO: 101217 - DNA, 30 bp, Artificial Sequence
  Synthetic oligonucleotide
cgcaacacgcgaggaaaggagctctaagtt

SEQ ID NO: 101218 - DNA, 30 bp, Artificial Sequence
  Synthetic oligonucleotide
tggtagagggcggctaagaagtcttaagtt

SEQ ID NO: 101219 - DNA, 30 bp, Artificial Sequence
  Synthetic oligonucleotide
agataccccagggataggcacttaacagtt

SEQ ID NO: 101220 - DNA, 30 bp, Artificial Sequence
  Synthetic oligonucleotide
actcgctgtggcatggatatcggtccagtt

SEQ ID NO: 101221 - DNA, 30 bp, Artificial Sequence
  Synthetic oligonucleotide
caggctgttttcacgcgcatccgagcagtt

SEQ ID NO: 101222 - DNA, 30 bp, Artificial Sequence
  Synthetic oligonucleotide
actggtgttaacacaaggggagtggcagtt

SEQ ID NO: 101223 - DNA, 30 bp, Artificial Sequence
  Synthetic oligonucleotide
cggaagtgacggtggattcatcgctcagtt

SEQ ID NO: 101224 - DNA, 30 bp, Artificial Sequence
  Synthetic oligonucleotide
ctggacagactcatacgacttgcgagagtt

SEQ ID NO: 101225 - DNA, 30 bp, Artificial Sequence
  Synthetic oligonucleotide
atactaaaggacaacaaatttcgtagagtt

SEQ ID NO: 101226 - DNA, 30 bp, Artificial Sequence
  Synthetic oligonucleotide
gcatgcgaattctggacggcattgggagtt

SEQ ID NO: 101227 - DNA, 30 bp, Artificial Sequence
  Synthetic oligonucleotide
cgggtcacgtgtagaagtatacaatgagtt

SEQ ID NO: 101228 - DNA, 30 bp, Artificial Sequence
  Synthetic oligonucleotide
caccatcgggatgtattcgttgtctgagtt

SEQ ID NO: 101229 - DNA, 30 bp, Artificial Sequence
  Synthetic oligonucleotide
gcctgccaatttacgagtcaaatttgagtt

SEQ ID NO: 101230 - DNA, 30 bp, Artificial Sequence
  Synthetic oligonucleotide
ggacacaaaagcggattatgaggcatagtt

SEQ ID NO: 101231 - DNA, 30 bp, Artificial Sequence
  Synthetic oligonucleotide
cggacatagcaatagacaacgctcctagtt

SEQ ID NO: 101232 - DNA, 30 bp, Artificial Sequence
  Synthetic oligonucleotide
ccatgctcgacagaggaagagcagctagtt

SEQ ID NO: 101233 - DNA, 29 bp, Artificial Sequence
  Synthetic oligonucleotide
tgcaaggtcagtcatcaactacgctagtt

SEQ ID NO: 101234 - DNA, 30 bp, Artificial Sequence
  Synthetic oligonucleotide
gcataaggaagagatgggccggtgctagtt

SEQ ID NO: 101235 - DNA, 30 bp, Artificial Sequence
  Synthetic oligonucleotide
tcagaggaagaactataaatgcgagtagtt

SEQ ID NO: 101236 - DNA, 30 bp, Artificial Sequence
  Synthetic oligonucleotide
tttaggagcctagcccggaaaggagtagtt

SEQ ID NO: 101237 - DNA, 30 bp, Artificial Sequence
  Synthetic oligonucleotide
cacaaggaggtataacgggagtgtaacgtt

SEQ ID NO: 101238 - DNA, 30 bp, Artificial Sequence
  Synthetic oligonucleotide
cccaaagcgtgataaaagaataccaccgtt

SEQ ID NO: 101239 - DNA, 30 bp, Artificial Sequence
  Synthetic oligonucleotide
ttccaggggcgactcccgctacatgccgtt

SEQ ID NO: 101240 - DNA, 30 bp, Artificial Sequence
  Synthetic oligonucleotide
taagggtgccatatctaatggtctgccgtt

SEQ ID NO: 101241 - DNA, 30 bp, Artificial Sequence
  Synthetic oligonucleotide
cggactacccgccattaggtgacccgcgtt

SEQ ID NO: 101242 - DNA, 30 bp, Artificial Sequence
  Synthetic oligonucleotide
tcactatggactaggtatttgtgccgcgtt

SEQ ID NO: 101243 - DNA, 30 bp, Artificial Sequence
  Synthetic oligonucleotide
aagcggcatgggttgggtgtttatcgcgtt

SEQ ID NO: 101244 - DNA, 30 bp, Artificial Sequence
  Synthetic oligonucleotide
ttgaagactacactccaggatcaaggcgtt

SEQ ID NO: 101245 - DNA, 30 bp, Artificial Sequence
  Synthetic oligonucleotide
agagtgtggacaggacgtataaatggcgtt

SEQ ID NO: 101246 - DNA, 30 bp, Artificial Sequence
  Synthetic oligonucleotide
cacagtatcggagggtgtaataaatgcgtt

SEQ ID NO: 101247 - DNA, 30 bp, Artificial Sequence
  Synthetic oligonucleotide
ccagcaattgtggacaactgacactgcgtt

SEQ ID NO: 101248 - DNA, 30 bp, Artificial Sequence
  Synthetic oligonucleotide
ctctgatgaaagagcggaaagggaatcgtt

SEQ ID NO: 101249 - DNA, 30 bp, Artificial Sequence
  Synthetic oligonucleotide
agactcactacaaaacatatcgatttcgtt

SEQ ID NO: 101250 - DNA, 30 bp, Artificial Sequence
  Synthetic oligonucleotide
gtgcagcggaggggttgcgcattcaaggtt

SEQ ID NO: 101251 - DNA, 30 bp, Artificial Sequence
  Synthetic oligonucleotide
cctgtgaatgagcgaatagcgtgtaaggtt

SEQ ID NO: 101252 - DNA, 30 bp, Artificial Sequence
  Synthetic oligonucleotide
ctaatacagatcaaaccaactggagaggtt

SEQ ID NO: 101253 - DNA, 30 bp, Artificial Sequence
  Synthetic oligonucleotide
ctcgaggggtgtggtgttcgattggaggtt

SEQ ID NO: 101254 - DNA, 30 bp, Artificial Sequence
  Synthetic oligonucleotide
cctcggaacgccgggatagattaataggtt

SEQ ID NO: 101255 - DNA, 30 bp, Artificial Sequence
  Synthetic oligonucleotide
gtgagtagagtgccgcgtagaccttaggtt

SEQ ID NO: 101256 - DNA, 31 bp, Artificial Sequence
  Synthetic oligonucleotide
gcacaaaatcgacggccgagcacaaccggtt

SEQ ID NO: 101257 - DNA, 30 bp, Artificial Sequence
  Synthetic oligonucleotide
tacgcgatcacaaagccgatcggaccggtt

SEQ ID NO: 101258 - DNA, 30 bp, Artificial Sequence
  Synthetic oligonucleotide
gtacgtttgcggtatcataagtggccggtt

SEQ ID NO: 101259 - DNA, 30 bp, Artificial Sequence
  Synthetic oligonucleotide
cacgagtaccgcctcgagtgcctcgcggtt

SEQ ID NO: 101260 - DNA, 30 bp, Artificial Sequence
  Synthetic oligonucleotide
gtcacgtgtacagagggagagcgggcggtt

SEQ ID NO: 101261 - DNA, 30 bp, Artificial Sequence
  Synthetic oligonucleotide
tcagagcaggctcggtaatgagcgtcggtt

SEQ ID NO: 101262 - DNA, 31 bp, Artificial Sequence
  Synthetic oligonucleotide
tgccggagcggccacgaagcacacaagggtt

SEQ ID NO: 101263 - DNA, 30 bp, Artificial Sequence
  Synthetic oligonucleotide
cacgaagtccagtcctctcacgcatgggtt

SEQ ID NO: 101264 - DNA, 30 bp, Artificial Sequence
  Synthetic oligonucleotide
gttcgggccaagcatctgtaggcctgggtt

SEQ ID NO: 101265 - DNA, 30 bp, Artificial Sequence
  Synthetic oligonucleotide
acagctcggtgagaacacgatcgtatggtt

SEQ ID NO: 101266 - DNA, 30 bp, Artificial Sequence
  Synthetic oligonucleotide
gtcagagtataataagcgcgttaaaatgtt

SEQ ID NO: 101267 - DNA, 30 bp, Artificial Sequence
  Synthetic oligonucleotide
tcaatcgccctgctagtaactcctcatgtt

SEQ ID NO: 101268 - DNA, 30 bp, Artificial Sequence
  Synthetic oligonucleotide
attcgtgcgcgagaacccgaggcaagtgtt

SEQ ID NO: 101269 - DNA, 30 bp, Artificial Sequence
  Synthetic oligonucleotide
acctaaagtcgccctcaaagtctaagtgtt

SEQ ID NO: 101270 - DNA, 30 bp, Artificial Sequence
  Synthetic oligonucleotide
caaaggaaaccagagcgggagaccagtgtt

SEQ ID NO: 101271 - DNA, 31 bp, Artificial Sequence
  Synthetic oligonucleotide
ggtaaaagtatgcagagaagatcagagtgtt

SEQ ID NO: 101272 - DNA, 30 bp, Artificial Sequence
  Synthetic oligonucleotide
ggatgttggccggtgcacagcttacgtgtt

SEQ ID NO: 101273 - DNA, 30 bp, Artificial Sequence
  Synthetic oligonucleotide
cctacggaggggatatacctatgtggtgtt

SEQ ID NO: 101274 - DNA, 30 bp, Artificial Sequence
  Synthetic oligonucleotide
cactagcaactatggcggttgggacttgtt

SEQ ID NO: 101275 - DNA, 30 bp, Artificial Sequence
  Synthetic oligonucleotide
agttgcccgatacatcacagtggagttgtt

SEQ ID NO: 101276 - DNA, 29 bp, Artificial Sequence
  Synthetic oligonucleotide
tggaaggcatacaatgagtagaggttgtt

SEQ ID NO: 101277 - DNA, 30 bp, Artificial Sequence
  Synthetic oligonucleotide
ttgaaggccaggtgacgatgcgatgttgtt

SEQ ID NO: 101278 - DNA, 30 bp, Artificial Sequence
  Synthetic oligonucleotide
ggccgtagagggatggatacataataattt

SEQ ID NO: 101279 - DNA, 30 bp, Artificial Sequence
  Synthetic oligonucleotide
ggacagagtcgtgcagtcgacaggtaattt

SEQ ID NO: 101280 - DNA, 30 bp, Artificial Sequence
  Synthetic oligonucleotide
tttagcacaagcacgaggattaccacattt

SEQ ID NO: 101281 - DNA, 30 bp, Artificial Sequence
  Synthetic oligonucleotide
gtgacagagatcatccaatcactcccattt

SEQ ID NO: 101282 - DNA, 30 bp, Artificial Sequence
  Synthetic oligonucleotide
ttggtcgctgtacgttcttccctggcattt

SEQ ID NO: 101283 - DNA, 30 bp, Artificial Sequence
  Synthetic oligonucleotide
cgtcgttacagagcccgcgtaaatgcattt

SEQ ID NO: 101284 - DNA, 30 bp, Artificial Sequence
  Synthetic oligonucleotide
gaaccgacgtcggacatggtgaaatcattt

SEQ ID NO: 101285 - DNA, 30 bp, Artificial Sequence
  Synthetic oligonucleotide
agatgctattcaggcacaggatactcattt

SEQ ID NO: 101286 - DNA, 30 bp, Artificial Sequence
  Synthetic oligonucleotide
ctagggggagcctgctgactagggtcattt

SEQ ID NO: 101287 - DNA, 30 bp, Artificial Sequence
  Synthetic oligonucleotide
caccaatagggtggatggtcattgtcattt

SEQ ID NO: 101288 - DNA, 30 bp, Artificial Sequence
  Synthetic oligonucleotide
aaccaagggatggaactaagtgctcgattt

SEQ ID NO: 101289 - DNA, 30 bp, Artificial Sequence
  Synthetic oligonucleotide
agggagcactggtctcaacagatatgattt

SEQ ID NO: 101290 - DNA, 30 bp, Artificial Sequence
  Synthetic oligonucleotide
atgggctaagaaagtggcggaacctgattt

SEQ ID NO: 101291 - DNA, 30 bp, Artificial Sequence
  Synthetic oligonucleotide
cgtcaatgtgcatgtgtgtaaatagtattt

SEQ ID NO: 101292 - DNA, 30 bp, Artificial Sequence
  Synthetic oligonucleotide
cgtaaggttaggcacggaggtattttattt

SEQ ID NO: 101293 - DNA, 30 bp, Artificial Sequence
  Synthetic oligonucleotide
tcgtacaggccgggcgagggacagaacttt

SEQ ID NO: 101294 - DNA, 30 bp, Artificial Sequence
  Synthetic oligonucleotide
tacgtggtaatccccacaaaacagcacttt

SEQ ID NO: 101295 - DNA, 30 bp, Artificial Sequence
  Synthetic oligonucleotide
acgccatagtgccaatcgctttacgacttt

SEQ ID NO: 101296 - DNA, 30 bp, Artificial Sequence
  Synthetic oligonucleotide
tagagcagacagaccttcgatttctacttt

SEQ ID NO: 101297 - DNA, 30 bp, Artificial Sequence
  Synthetic oligonucleotide
cccaccaagaatagagaggctcagcgcttt

SEQ ID NO: 101298 - DNA, 30 bp, Artificial Sequence
  Synthetic oligonucleotide
gggtgcttgtaatacgaacagaaaggcttt

SEQ ID NO: 101299 - DNA, 30 bp, Artificial Sequence
  Synthetic oligonucleotide
ggacagggaatatttgaacattacggcttt

SEQ ID NO: 101300 - DNA, 30 bp, Artificial Sequence
  Synthetic oligonucleotide
gggcacagcggtgtgaatacagggtgcttt

SEQ ID NO: 101301 - DNA, 30 bp, Artificial Sequence
  Synthetic oligonucleotide
ccgagcagtggtggttgcagagtgttcttt

SEQ ID NO: 101302 - DNA, 30 bp, Artificial Sequence
  Synthetic oligonucleotide
gctgtgaggcaacgacctaaagtcaagttt

SEQ ID NO: 101303 - DNA, 30 bp, Artificial Sequence
  Synthetic oligonucleotide
tcagccaacagctgcctgaggtggaagttt

SEQ ID NO: 101304 - DNA, 30 bp, Artificial Sequence
  Synthetic oligonucleotide
agggcccagtcgaatatctcgagtaagttt

SEQ ID NO: 101305 - DNA, 30 bp, Artificial Sequence
  Synthetic oligonucleotide
gcgactacaaatctacaaagacttaagttt

SEQ ID NO: 101306 - DNA, 30 bp, Artificial Sequence
  Synthetic oligonucleotide
aggagtcaggattagctgtaatttgagttt

SEQ ID NO: 101307 - DNA, 30 bp, Artificial Sequence
  Synthetic oligonucleotide
gggacagtctgaaagtttaccaaatagttt

SEQ ID NO: 101308 - DNA, 30 bp, Artificial Sequence
  Synthetic oligonucleotide
ttcgcaagtgaaaaatcggggacatagttt

SEQ ID NO: 101309 - DNA, 30 bp, Artificial Sequence
  Synthetic oligonucleotide
gtaaatggacggctgtcagtcgaaacgttt

SEQ ID NO: 101310 - DNA, 30 bp, Artificial Sequence
  Synthetic oligonucleotide
cgtccggagtatcatccatacaacacgttt

SEQ ID NO: 101311 - DNA, 30 bp, Artificial Sequence
  Synthetic oligonucleotide
ctgtcgcgcgtggatcacatcaacccgttt

SEQ ID NO: 101312 - DNA, 30 bp, Artificial Sequence
  Synthetic oligonucleotide
tggagagttattagatcaccgatagcgttt

SEQ ID NO: 101313 - DNA, 30 bp, Artificial Sequence
  Synthetic oligonucleotide
agaaagctcttgcgacaagatatctcgttt

SEQ ID NO: 101314 - DNA, 30 bp, Artificial Sequence
  Synthetic oligonucleotide
gcgggatcttggtcttctatagtctcgttt

SEQ ID NO: 101315 - DNA, 30 bp, Artificial Sequence
  Synthetic oligonucleotide
cggcaccactagaccgtcacggaccggttt

SEQ ID NO: 101316 - DNA, 30 bp, Artificial Sequence
  Synthetic oligonucleotide
acaggaacagcgcagatcttatagcggttt

SEQ ID NO: 101317 - DNA, 30 bp, Artificial Sequence
  Synthetic oligonucleotide
cgacaaacggtagtgcgctctactcggttt

SEQ ID NO: 101318 - DNA, 30 bp, Artificial Sequence
  Synthetic oligonucleotide
tgggtggttaccagagtatgcaacgggttt

SEQ ID NO: 101319 - DNA, 30 bp, Artificial Sequence
  Synthetic oligonucleotide
cgtcggagatgacgtgatgttagctggttt

SEQ ID NO: 101320 - DNA, 30 bp, Artificial Sequence
  Synthetic oligonucleotide
ctgcgagctaggttaggcgattagtggttt

SEQ ID NO: 101321 - DNA, 30 bp, Artificial Sequence
  Synthetic oligonucleotide
attgaaagactaaagaaaaatacgtggttt

SEQ ID NO: 101322 - DNA, 30 bp, Artificial Sequence
  Synthetic oligonucleotide
agggggtattggctggcacccataatgttt

SEQ ID NO: 101323 - DNA, 31 bp, Artificial Sequence
  Synthetic oligonucleotide
aaggtcacataggggattaacatagatgttt

SEQ ID NO: 101324 - DNA, 30 bp, Artificial Sequence
  Synthetic oligonucleotide
cgctcgcgtcaccggacaaaggcaaatttt

SEQ ID NO: 101325 - DNA, 30 bp, Artificial Sequence
  Synthetic oligonucleotide
gtatcgagctaccccatcaaggaagatttt

SEQ ID NO: 101326 - DNA, 30 bp, Artificial Sequence
  Synthetic oligonucleotide
tccacaactggagacaaatgcgacgatttt

SEQ ID NO: 101327 - DNA, 30 bp, Artificial Sequence
  Synthetic oligonucleotide
gcgtgagcgttacttaaagaactgagtttt

SEQ ID NO: 101328 - DNA, 30 bp, Artificial Sequence
  Synthetic oligonucleotide
tgacgatctatttgcactttccatagtttt

SEQ ID NO: 101329 - DNA, 30 bp, Artificial Sequence
  Synthetic oligonucleotide
agacgagtgagactgagggtacgaaaaaaa

SEQ ID NO: 101330 - DNA, 30 bp, Artificial Sequence
  Synthetic oligonucleotide
ggcacgtacaatttcaacagtagcaaaaaa

SEQ ID NO: 101331 - DNA, 30 bp, Artificial Sequence
  Synthetic oligonucleotide
ggagtaccgaacgtaagataccggaaaaaa

SEQ ID NO: 101332 - DNA, 30 bp, Artificial Sequence
  Synthetic oligonucleotide
gggaatgtcgcgctagtgccggcacaaaaa

SEQ ID NO: 101333 - DNA, 30 bp, Artificial Sequence
  Synthetic oligonucleotide
tcgggtgatcggaccagcaatgtacaaaaa

SEQ ID NO: 101334 - DNA, 30 bp, Artificial Sequence
  Synthetic oligonucleotide
gtactagactcgatttcagacggccaaaaa

SEQ ID NO: 101335 - DNA, 30 bp, Artificial Sequence
  Synthetic oligonucleotide
cacactacgctgtagtcactgaagcaaaaa

SEQ ID NO: 101336 - DNA, 30 bp, Artificial Sequence
  Synthetic oligonucleotide
acaccagttcttcagtatcagccggaaaaa

SEQ ID NO: 101337 - DNA, 30 bp, Artificial Sequence
  Synthetic oligonucleotide
cgaagctccaaccagaatattacctaaaaa

SEQ ID NO: 101338 - DNA, 30 bp, Artificial Sequence
  Synthetic oligonucleotide
ccttcaggttgtgctacgggtaggtaaaaa

SEQ ID NO: 101339 - DNA, 30 bp, Artificial Sequence
  Synthetic oligonucleotide
aagggcgtacttataatacacatgtaaaaa

SEQ ID NO: 101340 - DNA, 30 bp, Artificial Sequence
  Synthetic oligonucleotide
cgtggctccagatccatgactaaaacaaaa

SEQ ID NO: 101341 - DNA, 30 bp, Artificial Sequence
  Synthetic oligonucleotide
tcagaataatacacctttccgcccacaaaa

SEQ ID NO: 101342 - DNA, 30 bp, Artificial Sequence
  Synthetic oligonucleotide
ggtacattaggaatgtagatgattacaaaa

SEQ ID NO: 101343 - DNA, 30 bp, Artificial Sequence
  Synthetic oligonucleotide
gcgggaaagataggaagcccatttacaaaa

SEQ ID NO: 101344 - DNA, 30 bp, Artificial Sequence
  Synthetic oligonucleotide
gcaaacgtcagtgatcggtcaaacccaaaa

SEQ ID NO: 101345 - DNA, 30 bp, Artificial Sequence
  Synthetic oligonucleotide
cgcgaagtagctcggccaagctacccaaaa

SEQ ID NO: 101346 - DNA, 30 bp, Artificial Sequence
  Synthetic oligonucleotide
gtgcaccactcagaggattaatcgccaaaa

SEQ ID NO: 101347 - DNA, 30 bp, Artificial Sequence
  Synthetic oligonucleotide
tctgggcaccagaacaggaatgaagcaaaa

SEQ ID NO: 101348 - DNA, 30 bp, Artificial Sequence
  Synthetic oligonucleotide
taaatgcgcagctgtaaatcatatgcaaaa

SEQ ID NO: 101349 - DNA, 30 bp, Artificial Sequence
  Synthetic oligonucleotide
tcataattcagaaggagaagtcctgcaaaa

SEQ ID NO: 101350 - DNA, 30 bp, Artificial Sequence
  Synthetic oligonucleotide
cctccctacataaaacattgtcctgcaaaa

SEQ ID NO: 101351 - DNA, 30 bp, Artificial Sequence
  Synthetic oligonucleotide
tcatcataatggatgatatcctctgcaaaa

SEQ ID NO: 101352 - DNA, 30 bp, Artificial Sequence
  Synthetic oligonucleotide
taactagggatgctgggagctgactcaaaa

SEQ ID NO: 101353 - DNA, 30 bp, Artificial Sequence
  Synthetic oligonucleotide
cagttaggaagtcgagtgtaggcctcaaaa

SEQ ID NO: 101354 - DNA, 30 bp, Artificial Sequence
  Synthetic oligonucleotide
cgatacaattactgagtgcgcggctcaaaa

SEQ ID NO: 101355 - DNA, 30 bp, Artificial Sequence
  Synthetic oligonucleotide
gatacagccgtcgaaggaaattgctcaaaa

SEQ ID NO: 101356 - DNA, 30 bp, Artificial Sequence
  Synthetic oligonucleotide
aggaacgagttggactgcaattggtcaaaa

SEQ ID NO: 101357 - DNA, 30 bp, Artificial Sequence
  Synthetic oligonucleotide
ctaggggaaactgttggtatttggtcaaaa

SEQ ID NO: 101358 - DNA, 30 bp, Artificial Sequence
  Synthetic oligonucleotide
ggaaaagtaacctttcgaatatattcaaaa

SEQ ID NO: 101359 - DNA, 30 bp, Artificial Sequence
  Synthetic oligonucleotide
atgacaggaatctctaggctatattcaaaa

SEQ ID NO: 101360 - DNA, 30 bp, Artificial Sequence
  Synthetic oligonucleotide
ccaggattatggcaagcgacgtgttcaaaa

SEQ ID NO: 101361 - DNA, 30 bp, Artificial Sequence
  Synthetic oligonucleotide
agcgaactggttgcaatagctggaagaaaa

SEQ ID NO: 101362 - DNA, 30 bp, Artificial Sequence
  Synthetic oligonucleotide
ggataagtaccatatgcgatcaggagaaaa

SEQ ID NO: 101363 - DNA, 30 bp, Artificial Sequence
  Synthetic oligonucleotide
ctccattaagatcacaccaacagtagaaaa

SEQ ID NO: 101364 - DNA, 30 bp, Artificial Sequence
  Synthetic oligonucleotide
ccaccaataaggtaagagaagggtagaaaa

SEQ ID NO: 101365 - DNA, 30 bp, Artificial Sequence
  Synthetic oligonucleotide
tagggcatcctgagggccttggagcgaaaa

SEQ ID NO: 101366 - DNA, 30 bp, Artificial Sequence
  Synthetic oligonucleotide
tcggactagcccagtaaatttcggcgaaaa

SEQ ID NO: 101367 - DNA, 30 bp, Artificial Sequence
  Synthetic oligonucleotide
cgaatgggaacacctctatgactgcgaaaa

SEQ ID NO: 101368 - DNA, 30 bp, Artificial Sequence
  Synthetic oligonucleotide
cgcgttactgagtaagactaatccggaaaa

SEQ ID NO: 101369 - DNA, 30 bp, Artificial Sequence
  Synthetic oligonucleotide
atcagcgagcattgaaatgatgcctgaaaa

SEQ ID NO: 101370 - DNA, 30 bp, Artificial Sequence
  Synthetic oligonucleotide
cttcgaagacaaaattcggtgatcataaaa

SEQ ID NO: 101371 - DNA, 30 bp, Artificial Sequence
  Synthetic oligonucleotide
cagggttgcggggaaagacaagcactaaaa

SEQ ID NO: 101372 - DNA, 30 bp, Artificial Sequence
  Synthetic oligonucleotide
tagcgggtccagagctcttacctactaaaa

SEQ ID NO: 101373 - DNA, 30 bp, Artificial Sequence
  Synthetic oligonucleotide
tgagtgcgataaaatacgggcgtcctaaaa

SEQ ID NO: 101374 - DNA, 30 bp, Artificial Sequence
  Synthetic oligonucleotide
ccaacgtctttccgactagattccgtaaaa

SEQ ID NO: 101375 - DNA, 30 bp, Artificial Sequence
  Synthetic oligonucleotide
cccggcacgtgcaacaacgtacaggtaaaa

SEQ ID NO: 101376 - DNA, 30 bp, Artificial Sequence
  Synthetic oligonucleotide
aaagggccgacactaactgtagcggtaaaa

SEQ ID NO: 101377 - DNA, 30 bp, Artificial Sequence
  Synthetic oligonucleotide
gcttacggccgagggtccatctatgtaaaa

SEQ ID NO: 101378 - DNA, 30 bp, Artificial Sequence
  Synthetic oligonucleotide
agcaccatacgcaggaccaatggattaaaa

SEQ ID NO: 101379 - DNA, 30 bp, Artificial Sequence
  Synthetic oligonucleotide
tcaactatcttggaaccatgtctcttaaaa

SEQ ID NO: 101380 - DNA, 30 bp, Artificial Sequence
  Synthetic oligonucleotide
ggcaatgtcctgagggtgtggggcaacaaa

SEQ ID NO: 101381 - DNA, 30 bp, Artificial Sequence
  Synthetic oligonucleotide
caaacgtggtcaatgttggtggcgaacaaa

SEQ ID NO: 101382 - DNA, 30 bp, Artificial Sequence
  Synthetic oligonucleotide
ggcggatatgaatgagtttcaaggaacaaa

SEQ ID NO: 101383 - DNA, 30 bp, Artificial Sequence
  Synthetic oligonucleotide
acggtaatcttgataattaaatgtaacaaa

SEQ ID NO: 101384 - DNA, 30 bp, Artificial Sequence
  Synthetic oligonucleotide
aaaagaaatcagggttagccatcgcacaaa

SEQ ID NO: 101385 - DNA, 30 bp, Artificial Sequence
  Synthetic oligonucleotide
ggagtacctgttatcggaatcggcgacaaa

SEQ ID NO: 101386 - DNA, 30 bp, Artificial Sequence
  Synthetic oligonucleotide
cgttgggctcaagttgattgcagggacaaa

SEQ ID NO: 101387 - DNA, 30 bp, Artificial Sequence
  Synthetic oligonucleotide
ctgaagtgtgtgtgatcaatgctggacaaa

SEQ ID NO: 101388 - DNA, 30 bp, Artificial Sequence
  Synthetic oligonucleotide
ggctcaggacgggaatggacttgatacaaa

SEQ ID NO: 101389 - DNA, 30 bp, Artificial Sequence
  Synthetic oligonucleotide
gggaccagagatcacacttccaagaccaaa

SEQ ID NO: 101390 - DNA, 30 bp, Artificial Sequence
  Synthetic oligonucleotide
ccaagcactggagatgcccctcctaccaaa

SEQ ID NO: 101391 - DNA, 30 bp, Artificial Sequence
  Synthetic oligonucleotide
gggaaaaagatgacgtctgggtcacccaaa

SEQ ID NO: 101392 - DNA, 30 bp, Artificial Sequence
  Synthetic oligonucleotide
agctgaggttaatggtggcgccgacccaaa

SEQ ID NO: 101393 - DNA, 30 bp, Artificial Sequence
  Synthetic oligonucleotide
acactcgagctcatcttcgtaccccccaaa

SEQ ID NO: 101394 - DNA, 30 bp, Artificial Sequence
  Synthetic oligonucleotide
ctaacactgcggcacaatacgtcccccaaa

SEQ ID NO: 101395 - DNA, 30 bp, Artificial Sequence
  Synthetic oligonucleotide
agctacgggtccggccctaatccgcccaaa

SEQ ID NO: 101396 - DNA, 30 bp, Artificial Sequence
  Synthetic oligonucleotide
gaccttagaagccgactccgaccagccaaa

SEQ ID NO: 101397 - DNA, 30 bp, Artificial Sequence
  Synthetic oligonucleotide
taatccgcgagggttgggtgttcagccaaa

SEQ ID NO: 101398 - DNA, 30 bp, Artificial Sequence
  Synthetic oligonucleotide
tatacacagttacatcccgtcctagccaaa

SEQ ID NO: 101399 - DNA, 30 bp, Artificial Sequence
  Synthetic oligonucleotide
cgtacggcatcctactatgtaaaggccaaa

SEQ ID NO: 101400 - DNA, 30 bp, Artificial Sequence
  Synthetic oligonucleotide
tcggcctcgaagtcgggagtcctggccaaa

SEQ ID NO: 101401 - DNA, 30 bp, Artificial Sequence
  Synthetic oligonucleotide
ctggctacgggagtgcttatctatgccaaa

SEQ ID NO: 101402 - DNA, 30 bp, Artificial Sequence
  Synthetic oligonucleotide
gaacgtcgaatggttcaattgtgtgccaaa

SEQ ID NO: 101403 - DNA, 30 bp, Artificial Sequence
  Synthetic oligonucleotide
ggatcacccagatccacagagtaatccaaa

SEQ ID NO: 101404 - DNA, 30 bp, Artificial Sequence
  Synthetic oligonucleotide
gtaataacgctactaagtgccccatccaaa

SEQ ID NO: 101405 - DNA, 31 bp, Artificial Sequence
  Synthetic oligonucleotide
accggggtcactcgacaaagtaggatccaaa

SEQ ID NO: 101406 - DNA, 30 bp, Artificial Sequence
  Synthetic oligonucleotide
aaagtgcttacggggccaggcgtatccaaa

SEQ ID NO: 101407 - DNA, 30 bp, Artificial Sequence
  Synthetic oligonucleotide
tcaacaattaaagcgcgcgacagctccaaa

SEQ ID NO: 101408 - DNA, 31 bp, Artificial Sequence
  Synthetic oligonucleotide
gaaaaattgccacaataaaacgtggtccaaa

SEQ ID NO: 101409 - DNA, 30 bp, Artificial Sequence
  Synthetic oligonucleotide
aaggaaaggatgattggaacgcctagcaaa

SEQ ID NO: 101410 - DNA, 30 bp, Artificial Sequence
  Synthetic oligonucleotide
tcgcgattaggtatctcggcgtttagcaaa

SEQ ID NO: 101411 - DNA, 30 bp, Artificial Sequence
  Synthetic oligonucleotide
gtgtaaaataggatgtgctgcggtcgcaaa

SEQ ID NO: 101412 - DNA, 30 bp, Artificial Sequence
  Synthetic oligonucleotide
ataccaacggaagtctggaaagaaggcaaa

SEQ ID NO: 101413 - DNA, 30 bp, Artificial Sequence
  Synthetic oligonucleotide
gcccccatctgaataatcgtactaggcaaa

SEQ ID NO: 101414 - DNA, 30 bp, Artificial Sequence
  Synthetic oligonucleotide
ctcgtcggaatatcggaaaagaacggcaaa

SEQ ID NO: 101415 - DNA, 30 bp, Artificial Sequence
  Synthetic oligonucleotide
agccactattcacaagagtaatatggcaaa

SEQ ID NO: 101416 - DNA, 31 bp, Artificial Sequence
  Synthetic oligonucleotide
acgcgccattacctccgagaactttggcaaa

SEQ ID NO: 101417 - DNA, 30 bp, Artificial Sequence
  Synthetic oligonucleotide
cgcgtagggcgttcatacggggcgtgcaaa

SEQ ID NO: 101418 - DNA, 30 bp, Artificial Sequence
  Synthetic oligonucleotide
ttctgtaagaagtaacaatcacgcatcaaa

SEQ ID NO: 101419 - DNA, 30 bp, Artificial Sequence
  Synthetic oligonucleotide
gcaaacgaagttggagtaggctcgatcaaa

SEQ ID NO: 101420 - DNA, 30 bp, Artificial Sequence
  Synthetic oligonucleotide
caaacttagtagtagaaggggattatcaaa

SEQ ID NO: 101421 - DNA, 30 bp, Artificial Sequence
  Synthetic oligonucleotide
cacgggacacatctactgcgagttatcaaa

SEQ ID NO: 101422 - DNA, 30 bp, Artificial Sequence
  Synthetic oligonucleotide
cgcggaccaaattaacggatgcaactcaaa

SEQ ID NO: 101423 - DNA, 30 bp, Artificial Sequence
  Synthetic oligonucleotide
ccttcaaacatgagggtggtaccggtcaaa

SEQ ID NO: 101424 - DNA, 30 bp, Artificial Sequence
  Synthetic oligonucleotide
ccaaccatacttgcattcctacgggtcaaa

SEQ ID NO: 101425 - DNA, 30 bp, Artificial Sequence
  Synthetic oligonucleotide
aatgagataatcgcgcgtgagagtgtcaaa

SEQ ID NO: 101426 - DNA, 30 bp, Artificial Sequence
  Synthetic oligonucleotide
ccattaacaaggtggctgagcgttgtcaaa

SEQ ID NO: 101427 - DNA, 30 bp, Artificial Sequence
  Synthetic oligonucleotide
gtcgtaagataatcacattgatgattcaaa

SEQ ID NO: 101428 - DNA, 31 bp, Artificial Sequence
  Synthetic oligonucleotide
acgagagtgcagtcgtcttaaattattcaaa

SEQ ID NO: 101429 - DNA, 30 bp, Artificial Sequence
  Synthetic oligonucleotide
tgcgggagtcaaccctgtaaaaggttcaaa

SEQ ID NO: 101430 - DNA, 30 bp, Artificial Sequence
  Synthetic oligonucleotide
ctaagaacacccgagaacgtgaacaagaaa

SEQ ID NO: 101431 - DNA, 30 bp, Artificial Sequence
  Synthetic oligonucleotide
gaataacaccgagtatgtgaggacaagaaa

SEQ ID NO: 101432 - DNA, 30 bp, Artificial Sequence
  Synthetic oligonucleotide
caacaagaagggaggtttgggatcaagaaa

SEQ ID NO: 101433 - DNA, 30 bp, Artificial Sequence
  Synthetic oligonucleotide
ggaaggccattgatcgcaactctcaagaaa

SEQ ID NO: 101434 - DNA, 30 bp, Artificial Sequence
  Synthetic oligonucleotide
tactaaatcagagccgaattggataagaaa

SEQ ID NO: 101435 - DNA, 30 bp, Artificial Sequence
  Synthetic oligonucleotide
aggaatcttggccttagcaatagacagaaa

SEQ ID NO: 101436 - DNA, 30 bp, Artificial Sequence
  Synthetic oligonucleotide
gtgacgatgagcgaaataagtggacagaaa

SEQ ID NO: 101437 - DNA, 30 bp, Artificial Sequence
  Synthetic oligonucleotide
acgatcgccccgtctgagcccgcccagaaa

SEQ ID NO: 101438 - DNA, 30 bp, Artificial Sequence
  Synthetic oligonucleotide
cattaactggatcacagacagggccagaaa

SEQ ID NO: 101439 - DNA, 30 bp, Artificial Sequence
  Synthetic oligonucleotide
gtggcggcaactggaaagttctagcagaaa

SEQ ID NO: 101440 - DNA, 30 bp, Artificial Sequence
  Synthetic oligonucleotide
acgttgttatgactgaggggattgcagaaa

SEQ ID NO: 101441 - DNA, 30 bp, Artificial Sequence
  Synthetic oligonucleotide
tccgatatagctatccagtccggtcagaaa

SEQ ID NO: 101442 - DNA, 30 bp, Artificial Sequence
  Synthetic oligonucleotide
acaggaaaagtaacacctaaatttcagaaa

SEQ ID NO: 101443 - DNA, 30 bp, Artificial Sequence
  Synthetic oligonucleotide
agagtgtttgtcgagtctcatactgagaaa

SEQ ID NO: 101444 - DNA, 30 bp, Artificial Sequence
  Synthetic oligonucleotide
agctccagaatgcgccgaagcacctagaaa

SEQ ID NO: 101445 - DNA, 30 bp, Artificial Sequence
  Synthetic oligonucleotide
cagtcacgttaaaactccaaacagtagaaa

SEQ ID NO: 101446 - DNA, 31 bp, Artificial Sequence
  Synthetic oligonucleotide
gggtcagaaaaggcgttcgaaacccacgaaa

SEQ ID NO: 101447 - DNA, 30 bp, Artificial Sequence
  Synthetic oligonucleotide
aacggtcgacgagtgaacttagtcacgaaa

SEQ ID NO: 101448 - DNA, 30 bp, Artificial Sequence
  Synthetic oligonucleotide
ggctataccattccagcccggaggacgaaa

SEQ ID NO: 101449 - DNA, 30 bp, Artificial Sequence
  Synthetic oligonucleotide
tacggtaatacacaagatcgtagcccgaaa

SEQ ID NO: 101450 - DNA, 30 bp, Artificial Sequence
  Synthetic oligonucleotide
taaagggtgaatgtctggatggtgccgaaa

SEQ ID NO: 101451 - DNA, 30 bp, Artificial Sequence
  Synthetic oligonucleotide
ctagaagtgaataagcaggtaaatccgaaa

SEQ ID NO: 101452 - DNA, 30 bp, Artificial Sequence
  Synthetic oligonucleotide
aacacacaactgtagtggcgcgatccgaaa

SEQ ID NO: 101453 - DNA, 30 bp, Artificial Sequence
  Synthetic oligonucleotide
ggaggacaaagtatgcctgtgatggcgaaa

SEQ ID NO: 101454 - DNA, 30 bp, Artificial Sequence
  Synthetic oligonucleotide
cacttggaatgatatgttgtctgtgcgaaa

SEQ ID NO: 101455 - DNA, 30 bp, Artificial Sequence
  Synthetic oligonucleotide
gtggggcaatttcgtcagaaacaatcgaaa

SEQ ID NO: 101456 - DNA, 30 bp, Artificial Sequence
  Synthetic oligonucleotide
tccaagcaatgtatttaggattgatcgaaa

SEQ ID NO: 101457 - DNA, 31 bp, Artificial Sequence
  Synthetic oligonucleotide
ttgaggcggggcattgacatagctttcgaaa

SEQ ID NO: 101458 - DNA, 30 bp, Artificial Sequence
  Synthetic oligonucleotide
attcaatgcggggggtaagacatcaggaaa

SEQ ID NO: 101459 - DNA, 30 bp, Artificial Sequence
  Synthetic oligonucleotide
cacgagaaaacaaccttcaccgtgcggaaa

SEQ ID NO: 101460 - DNA, 30 bp, Artificial Sequence
  Synthetic oligonucleotide
agggtgcttgatgtgtagttatacgggaaa

SEQ ID NO: 101461 - DNA, 30 bp, Artificial Sequence
  Synthetic oligonucleotide
aacggggggttctcctgtagtatcgggaaa

SEQ ID NO: 101462 - DNA, 30 bp, Artificial Sequence
  Synthetic oligonucleotide
gatgtgaatcgggttggttgtatggggaaa

SEQ ID NO: 101463 - DNA, 30 bp, Artificial Sequence
  Synthetic oligonucleotide
gggcagtcaccgcgccgcacgagtgggaaa

SEQ ID NO: 101464 - DNA, 30 bp, Artificial Sequence
  Synthetic oligonucleotide
tcaatgatacgcttccgggatcgatggaaa

SEQ ID NO: 101465 - DNA, 30 bp, Artificial Sequence
  Synthetic oligonucleotide
cctaagcgtaaaaaagtccagccctggaaa

SEQ ID NO: 101466 - DNA, 30 bp, Artificial Sequence
  Synthetic oligonucleotide
caagacggatcgcaaaaactaagaatgaaa

SEQ ID NO: 101467 - DNA, 30 bp, Artificial Sequence
  Synthetic oligonucleotide
tgcggcacacgctcatcatccctgatgaaa

SEQ ID NO: 101468 - DNA, 30 bp, Artificial Sequence
  Synthetic oligonucleotide
cgaggctaggcgtctctaaccattatgaaa

SEQ ID NO: 101469 - DNA, 30 bp, Artificial Sequence
  Synthetic oligonucleotide
gtgcattggcaccagaagatgagactgaaa

SEQ ID NO: 101470 - DNA, 30 bp, Artificial Sequence
  Synthetic oligonucleotide
ttcccagggaccagacgggcgaacctgaaa

SEQ ID NO: 101471 - DNA, 30 bp, Artificial Sequence
  Synthetic oligonucleotide
acggcagtgttcagctttgggtaagtgaaa

SEQ ID NO: 101472 - DNA, 30 bp, Artificial Sequence
  Synthetic oligonucleotide
cggtcctgaccagatggatttggagtgaaa

SEQ ID NO: 101473 - DNA, 30 bp, Artificial Sequence
  Synthetic oligonucleotide
caattgatcggcattttacgacaggtgaaa

SEQ ID NO: 101474 - DNA, 30 bp, Artificial Sequence
  Synthetic oligonucleotide
catagtaggcctcagaacatacgggtgaaa

SEQ ID NO: 101475 - DNA, 30 bp, Artificial Sequence
  Synthetic oligonucleotide
aggtaaacaacgaaagccaaaggggtgaaa

SEQ ID NO: 101476 - DNA, 30 bp, Artificial Sequence
  Synthetic oligonucleotide
attaggtacgagagggtggtttttgtgaaa

SEQ ID NO: 101477 - DNA, 30 bp, Artificial Sequence
  Synthetic oligonucleotide
tggaatctaatcgtggctagcgaattgaaa

SEQ ID NO: 101478 - DNA, 30 bp, Artificial Sequence
  Synthetic oligonucleotide
atatgttcaggtagttcaggaccattgaaa

SEQ ID NO: 101479 - DNA, 30 bp, Artificial Sequence
  Synthetic oligonucleotide
ggtgtaaagacgggcgacacggccttgaaa

SEQ ID NO: 101480 - DNA, 30 bp, Artificial Sequence
  Synthetic oligonucleotide
atctcggatagaagctgaggattcttgaaa

SEQ ID NO: 101481 - DNA, 30 bp, Artificial Sequence
  Synthetic oligonucleotide
ggagctgatgcatagtatcagctaaataaa

SEQ ID NO: 101482 - DNA, 30 bp, Artificial Sequence
  Synthetic oligonucleotide
atggtgcataacaaccaattaggacataaa

SEQ ID NO: 101483 - DNA, 30 bp, Artificial Sequence
  Synthetic oligonucleotide
aagcggaggaccgaccagtcttgacataaa

SEQ ID NO: 101484 - DNA, 30 bp, Artificial Sequence
  Synthetic oligonucleotide
ccgggcgcacagggtgcagagcacgataaa

SEQ ID NO: 101485 - DNA, 30 bp, Artificial Sequence
  Synthetic oligonucleotide
ttgcccaaagcaagtgccactagcgataaa

SEQ ID NO: 101486 - DNA, 30 bp, Artificial Sequence
  Synthetic oligonucleotide
aacaagcaagcctgtatcgcaaaggataaa

SEQ ID NO: 101487 - DNA, 30 bp, Artificial Sequence
  Synthetic oligonucleotide
ccttccgaggcatataagcgccttgataaa

SEQ ID NO: 101488 - DNA, 30 bp, Artificial Sequence
  Synthetic oligonucleotide
gcgatcgcgcaagaggagtgcatatataaa

SEQ ID NO: 101489 - DNA, 30 bp, Artificial Sequence
  Synthetic oligonucleotide
taagcgtcaccggacagacttaattataaa

SEQ ID NO: 101490 - DNA, 30 bp, Artificial Sequence
  Synthetic oligonucleotide
ggtaggtggaggtggtaggcccctactaaa

SEQ ID NO: 101491 - DNA, 30 bp, Artificial Sequence
  Synthetic oligonucleotide
tcataatgctacagtccggttgcacctaaa

SEQ ID NO: 101492 - DNA, 30 bp, Artificial Sequence
  Synthetic oligonucleotide
aggctcaggagtaaagtcgttctacctaaa

SEQ ID NO: 101493 - DNA, 30 bp, Artificial Sequence
  Synthetic oligonucleotide
agcgtgtcgcatgagaacaagtttcctaaa

SEQ ID NO: 101494 - DNA, 30 bp, Artificial Sequence
  Synthetic oligonucleotide
caagcgaggagggttgtttgaatagctaaa

SEQ ID NO: 101495 - DNA, 30 bp, Artificial Sequence
  Synthetic oligonucleotide
tgcgtttaaatgaagtagagtacggctaaa

SEQ ID NO: 101496 - DNA, 30 bp, Artificial Sequence
  Synthetic oligonucleotide
gagaaacgttaactatatgtggtatctaaa

SEQ ID NO: 101497 - DNA, 30 bp, Artificial Sequence
  Synthetic oligonucleotide
cccatgcgatggaaacgaatgagctctaaa

SEQ ID NO: 101498 - DNA, 30 bp, Artificial Sequence
  Synthetic oligonucleotide
agacgaatatattcgttaggagcgtctaaa

SEQ ID NO: 101499 - DNA, 30 bp, Artificial Sequence
  Synthetic oligonucleotide
ggacatcgtgcgtcgaactgacggtctaaa

SEQ ID NO: 101500 - DNA, 30 bp, Artificial Sequence
  Synthetic oligonucleotide
agataataggcgaccgtggagataagtaaa

SEQ ID NO: 101501 - DNA, 30 bp, Artificial Sequence
  Synthetic oligonucleotide
gtgtctgaaacatgtagccaatccagtaaa

SEQ ID NO: 101502 - DNA, 30 bp, Artificial Sequence
  Synthetic oligonucleotide
ccgttcaaaggaaaaagcctctaacgtaaa

SEQ ID NO: 101503 - DNA, 30 bp, Artificial Sequence
  Synthetic oligonucleotide
atgcctgatgtcattggtaggttccgtaaa

SEQ ID NO: 101504 - DNA, 30 bp, Artificial Sequence
  Synthetic oligonucleotide
tcgtagtcggttgggatgcgaacgcgtaaa

SEQ ID NO: 101505 - DNA, 30 bp, Artificial Sequence
  Synthetic oligonucleotide
acatcggttctggatggggaccggcgtaaa

SEQ ID NO: 101506 - DNA, 30 bp, Artificial Sequence
  Synthetic oligonucleotide
cacgaccagagggagtcatactatcgtaaa

SEQ ID NO: 101507 - DNA, 30 bp, Artificial Sequence
  Synthetic oligonucleotide
actcaatgatgttaaggctagagaggtaaa

SEQ ID NO: 101508 - DNA, 30 bp, Artificial Sequence
  Synthetic oligonucleotide
ttggttcccaaaagagatggatgaggtaaa

SEQ ID NO: 101509 - DNA, 30 bp, Artificial Sequence
  Synthetic oligonucleotide
tggaggaccgttgccgacagatacggtaaa

SEQ ID NO: 101510 - DNA, 30 bp, Artificial Sequence
  Synthetic oligonucleotide
agcatctgcggtagaatcgaaggcggtaaa

SEQ ID NO: 101511 - DNA, 30 bp, Artificial Sequence
  Synthetic oligonucleotide
ttacaagccgagtacctgtgtcagggtaaa

SEQ ID NO: 101512 - DNA, 30 bp, Artificial Sequence
  Synthetic oligonucleotide
tgaagttgaaagttcatgcaccaatgtaaa

SEQ ID NO: 101513 - DNA, 30 bp, Artificial Sequence
  Synthetic oligonucleotide
gtggataagggttgaggtctcaactgtaaa

SEQ ID NO: 101514 - DNA, 30 bp, Artificial Sequence
  Synthetic oligonucleotide
aataaggcactagagtgcgcatcctgtaaa

SEQ ID NO: 101515 - DNA, 30 bp, Artificial Sequence
  Synthetic oligonucleotide
ggtccggtgagatcgtttcaaaggtgtaaa

SEQ ID NO: 101516 - DNA, 30 bp, Artificial Sequence
  Synthetic oligonucleotide
aagaagcagtgccagatcgacggccttaaa

SEQ ID NO: 101517 - DNA, 30 bp, Artificial Sequence
  Synthetic oligonucleotide
gctgaaggactcatataaactctgcttaaa

SEQ ID NO: 101518 - DNA, 30 bp, Artificial Sequence
  Synthetic oligonucleotide
acaacactacttcactgtgatcacgttaaa

SEQ ID NO: 101519 - DNA, 30 bp, Artificial Sequence
  Synthetic oligonucleotide
acgtcgtctgtccgtgaccatgtatttaaa

SEQ ID NO: 101520 - DNA, 30 bp, Artificial Sequence
  Synthetic oligonucleotide
tcatcccagagactgtccccgatgtttaaa

SEQ ID NO: 101521 - DNA, 30 bp, Artificial Sequence
  Synthetic oligonucleotide
acggtagtttgcctggatcacttgtttaaa

SEQ ID NO: 101522 - DNA, 30 bp, Artificial Sequence
  Synthetic oligonucleotide
aggtaggagggaaatctattaacaaaacaa

SEQ ID NO: 101523 - DNA, 30 bp, Artificial Sequence
  Synthetic oligonucleotide
ccgcacattcacgcaaacttcatccaacaa

SEQ ID NO: 101524 - DNA, 30 bp, Artificial Sequence
  Synthetic oligonucleotide
ggatagcagcaactgggtgcgcgagaacaa

SEQ ID NO: 101525 - DNA, 30 bp, Artificial Sequence
  Synthetic oligonucleotide
agcgcatcggtgcacactactatagaacaa

SEQ ID NO: 101526 - DNA, 30 bp, Artificial Sequence
  Synthetic oligonucleotide
acgagactgtatccagcgtgctgcgaacaa

SEQ ID NO: 101527 - DNA, 30 bp, Artificial Sequence
  Synthetic oligonucleotide
catacacaccgtcgctatatatcggaacaa

SEQ ID NO: 101528 - DNA, 30 bp, Artificial Sequence
  Synthetic oligonucleotide
gtaccctcgtcgactatggtgcttgaacaa

SEQ ID NO: 101529 - DNA, 30 bp, Artificial Sequence
  Synthetic oligonucleotide
tacgtaagcagagcaaagcttagataacaa

SEQ ID NO: 101530 - DNA, 30 bp, Artificial Sequence
  Synthetic oligonucleotide
acaggtcaggaaccgccgtatcgataacaa

SEQ ID NO: 101531 - DNA, 30 bp, Artificial Sequence
  Synthetic oligonucleotide
ggaacctagtacagcaaggggagaacacaa

SEQ ID NO: 101532 - DNA, 30 bp, Artificial Sequence
  Synthetic oligonucleotide
cgacaaaactgttaccaatcgacgccacaa

SEQ ID NO: 101533 - DNA, 30 bp, Artificial Sequence
  Synthetic oligonucleotide
tcatctgccaaatatttgtatcggccacaa

SEQ ID NO: 101534 - DNA, 30 bp, Artificial Sequence
  Synthetic oligonucleotide
catggtagggagatcatcaacgtcgcacaa

SEQ ID NO: 101535 - DNA, 30 bp, Artificial Sequence
  Synthetic oligonucleotide
taacgttgtacgggaagaagacgggcacaa

SEQ ID NO: 101536 - DNA, 30 bp, Artificial Sequence
  Synthetic oligonucleotide
cgtcccgaactgtggtaagtaagctcacaa

SEQ ID NO: 101537 - DNA, 30 bp, Artificial Sequence
  Synthetic oligonucleotide
cgtgacaatgtcatagccccccgctcacaa

SEQ ID NO: 101538 - DNA, 30 bp, Artificial Sequence
  Synthetic oligonucleotide
gatatcaagggatatatggacagttcacaa

SEQ ID NO: 101539 - DNA, 30 bp, Artificial Sequence
  Synthetic oligonucleotide
gtaggaatggctcatattggactttcacaa

SEQ ID NO: 101540 - DNA, 30 bp, Artificial Sequence
  Synthetic oligonucleotide
cgggcagcccgtcgtgagaccagcagacaa

SEQ ID NO: 101541 - DNA, 29 bp, Artificial Sequence
  Synthetic oligonucleotide
aaacctagtccagggcactaaggagacaa

SEQ ID NO: 101542 - DNA, 30 bp, Artificial Sequence
  Synthetic oligonucleotide
tgagaatcggtagttagctcggggagacaa

SEQ ID NO: 101543 - DNA, 30 bp, Artificial Sequence
  Synthetic oligonucleotide
atgagagtcgcatcgcattaaactagacaa

SEQ ID NO: 101544 - DNA, 30 bp, Artificial Sequence
  Synthetic oligonucleotide
tttgtaacaatccatggaacgtgacgacaa

SEQ ID NO: 101545 - DNA, 30 bp, Artificial Sequence
  Synthetic oligonucleotide
gaataggcaaaagagcgactgaaccgacaa

SEQ ID NO: 101546 - DNA, 30 bp, Artificial Sequence
  Synthetic oligonucleotide
gcaacttgagagaagcgcaactcccgacaa

SEQ ID NO: 101547 - DNA, 30 bp, Artificial Sequence
  Synthetic oligonucleotide
actcaagcctcattgtaaccgccgcgacaa

SEQ ID NO: 101548 - DNA, 30 bp, Artificial Sequence
  Synthetic oligonucleotide
acctcgtataggttgcaccaccaaggacaa

SEQ ID NO: 101549 - DNA, 30 bp, Artificial Sequence
  Synthetic oligonucleotide
ttgctatcaagccacgatgttagaggacaa

SEQ ID NO: 101550 - DNA, 30 bp, Artificial Sequence
  Synthetic oligonucleotide
cgtaaacagatcctgattacaagcggacaa

SEQ ID NO: 101551 - DNA, 30 bp, Artificial Sequence
  Synthetic oligonucleotide
ctgtcattaagaactcgtgggaagggacaa

SEQ ID NO: 101552 - DNA, 30 bp, Artificial Sequence
  Synthetic oligonucleotide
aactcacaccactggaaaaaatggggacaa

SEQ ID NO: 101553 - DNA, 30 bp, Artificial Sequence
  Synthetic oligonucleotide
atggtagactatggctacaaatctggacaa

SEQ ID NO: 101554 - DNA, 30 bp, Artificial Sequence
  Synthetic oligonucleotide
gcaagtcctccagaatgatgaattggacaa

SEQ ID NO: 101555 - DNA, 30 bp, Artificial Sequence
  Synthetic oligonucleotide
gaaaggacggaacgacactcaggctgacaa

SEQ ID NO: 101556 - DNA, 30 bp, Artificial Sequence
  Synthetic oligonucleotide
taggctgaaatggtatgaaccccgtgacaa

SEQ ID NO: 101557 - DNA, 30 bp, Artificial Sequence
  Synthetic oligonucleotide
acgggcagataccgggagtgggggatacaa

SEQ ID NO: 101558 - DNA, 30 bp, Artificial Sequence
  Synthetic oligonucleotide
ccgcgaagtttatagttagtagtgatacaa

SEQ ID NO: 101559 - DNA, 30 bp, Artificial Sequence
  Synthetic oligonucleotide
aacgaacggttcctgtctgattcgctacaa

SEQ ID NO: 101560 - DNA, 30 bp, Artificial Sequence
  Synthetic oligonucleotide
tactaatccgtaactaggagacgagtacaa

SEQ ID NO: 101561 - DNA, 30 bp, Artificial Sequence
  Synthetic oligonucleotide
aaggaaattattgatcgattaagggtacaa

SEQ ID NO: 101562 - DNA, 30 bp, Artificial Sequence
  Synthetic oligonucleotide
tagctgagacacatccatttaagggtacaa

SEQ ID NO: 101563 - DNA, 30 bp, Artificial Sequence
  Synthetic oligonucleotide
ttaaccggcgagtgaaacgattttgtacaa

SEQ ID NO: 101564 - DNA, 30 bp, Artificial Sequence
  Synthetic oligonucleotide
acaggataccggaccaggaccatcttacaa

SEQ ID NO: 101565 - DNA, 30 bp, Artificial Sequence
  Synthetic oligonucleotide
aggcggcctgaaataggggtgagtaaccaa

SEQ ID NO: 101566 - DNA, 30 bp, Artificial Sequence
  Synthetic oligonucleotide
agaggagccaacgttcatagacttaaccaa

SEQ ID NO: 101567 - DNA, 30 bp, Artificial Sequence
  Synthetic oligonucleotide
cggaatgctggagacgcaaagtgacaccaa

SEQ ID NO: 101568 - DNA, 30 bp, Artificial Sequence
  Synthetic oligonucleotide
aattgacgagggctagggaaccctcaccaa

SEQ ID NO: 101569 - DNA, 30 bp, Artificial Sequence
  Synthetic oligonucleotide
tgtggctcgcgattatcaggtacgtaccaa

SEQ ID NO: 101570 - DNA, 30 bp, Artificial Sequence
  Synthetic oligonucleotide
tgacgggacgcgtggaaatgcaattaccaa

SEQ ID NO: 101571 - DNA, 30 bp, Artificial Sequence
  Synthetic oligonucleotide
accatacacaaaatcaccacagacccccaa

SEQ ID NO: 101572 - DNA, 30 bp, Artificial Sequence
  Synthetic oligonucleotide
gctgtgggaaagggcggttaattgccccaa

SEQ ID NO: 101573 - DNA, 30 bp, Artificial Sequence
  Synthetic oligonucleotide
gatgtgacgaaaatttacaactaggcccaa

SEQ ID NO: 101574 - DNA, 30 bp, Artificial Sequence
  Synthetic oligonucleotide
gtgcgtagggtgcgatcgaggatcagccaa

SEQ ID NO: 101575 - DNA, 30 bp, Artificial Sequence
  Synthetic oligonucleotide
gagcaaaacggttctcgacaaacgagccaa

SEQ ID NO: 101576 - DNA, 30 bp, Artificial Sequence
  Synthetic oligonucleotide
acgcactgatgagagagtcactgacgccaa

SEQ ID NO: 101577 - DNA, 30 bp, Artificial Sequence
  Synthetic oligonucleotide
gaacagcaaccacgtatttgctttcgccaa

SEQ ID NO: 101578 - DNA, 30 bp, Artificial Sequence
  Synthetic oligonucleotide
agcctcaatgtcccctgggcggaaggccaa

SEQ ID NO: 101579 - DNA, 30 bp, Artificial Sequence
  Synthetic oligonucleotide
atagagggacacggcatttaaaacggccaa

SEQ ID NO: 101580 - DNA, 30 bp, Artificial Sequence
  Synthetic oligonucleotide
agaaaacgtttaggtcaatcaccgggccaa

SEQ ID NO: 101581 - DNA, 30 bp, Artificial Sequence
  Synthetic oligonucleotide
caacctacaagctggaatcctatgggccaa

SEQ ID NO: 101582 - DNA, 30 bp, Artificial Sequence
  Synthetic oligonucleotide
ccgtggggcaagctccagtagaatggccaa

SEQ ID NO: 101583 - DNA, 30 bp, Artificial Sequence
  Synthetic oligonucleotide
aggctatgaagcgaagccgtcggtggccaa

SEQ ID NO: 101584 - DNA, 30 bp, Artificial Sequence
  Synthetic oligonucleotide
aggatatttatatgtcaactctgctgccaa

SEQ ID NO: 101585 - DNA, 30 bp, Artificial Sequence
  Synthetic oligonucleotide
caaaagcgtgtgctactggcagagtgccaa

SEQ ID NO: 101586 - DNA, 30 bp, Artificial Sequence
  Synthetic oligonucleotide
acgcgctgaggcctccactaaggaatccaa

SEQ ID NO: 101587 - DNA, 30 bp, Artificial Sequence
  Synthetic oligonucleotide
cgcgagttgctaactgtgagaatcatccaa

SEQ ID NO: 101588 - DNA, 30 bp, Artificial Sequence
  Synthetic oligonucleotide
cagcctagctgttcgcctgatagcctccaa

SEQ ID NO: 101589 - DNA, 30 bp, Artificial Sequence
  Synthetic oligonucleotide
ccacgaaaaccgagcggtgttaagctccaa

SEQ ID NO: 101590 - DNA, 30 bp, Artificial Sequence
  Synthetic oligonucleotide
ggtatctgggatgtaggtgtttcgctccaa

SEQ ID NO: 101591 - DNA, 30 bp, Artificial Sequence
  Synthetic oligonucleotide
ctaagactgacggatcgtgaaggagtccaa

SEQ ID NO: 101592 - DNA, 31 bp, Artificial Sequence
  Synthetic oligonucleotide
gcaaacttttcaattgcgctattccgtccaa

SEQ ID NO: 101593 - DNA, 30 bp, Artificial Sequence
  Synthetic oligonucleotide
ctgataactcacggaatatcttgcgtccaa

SEQ ID NO: 101594 - DNA, 30 bp, Artificial Sequence
  Synthetic oligonucleotide
taggcagactctgggtaaagcacggtccaa

SEQ ID NO: 101595 - DNA, 30 bp, Artificial Sequence
  Synthetic oligonucleotide
ccgcccgcaatcgaggggacttcggtccaa

SEQ ID NO: 101596 - DNA, 30 bp, Artificial Sequence
  Synthetic oligonucleotide
tacgaccaaaatgtaccaacgttggtccaa

SEQ ID NO: 101597 - DNA, 30 bp, Artificial Sequence
  Synthetic oligonucleotide
agagtagcgccatcgagtcagcatgtccaa

SEQ ID NO: 101598 - DNA, 30 bp, Artificial Sequence
  Synthetic oligonucleotide
ggcgtattctaaacggagtacgacttccaa

SEQ ID NO: 101599 - DNA, 30 bp, Artificial Sequence
  Synthetic oligonucleotide
aacagagctcctcccatcatgaagttccaa

SEQ ID NO: 101600 - DNA, 30 bp, Artificial Sequence
  Synthetic oligonucleotide
cgaattctttgagcagtagcgtgtttccaa

SEQ ID NO: 101601 - DNA, 30 bp, Artificial Sequence
  Synthetic oligonucleotide
gatcaattgcaggaatgttaaggcaagcaa

SEQ ID NO: 101602 - DNA, 30 bp, Artificial Sequence
  Synthetic oligonucleotide
cgtcttcgtgttgatttcacgtcacagcaa

SEQ ID NO: 101603 - DNA, 30 bp, Artificial Sequence
  Synthetic oligonucleotide
ctgacatcgcacgttgggcactcccagcaa

SEQ ID NO: 101604 - DNA, 30 bp, Artificial Sequence
  Synthetic oligonucleotide
gatgtacatgctagacttgggaaagagcaa

SEQ ID NO: 101605 - DNA, 30 bp, Artificial Sequence
  Synthetic oligonucleotide
cttaatccaagggagtttcgaaccgagcaa

SEQ ID NO: 101606 - DNA, 30 bp, Artificial Sequence
  Synthetic oligonucleotide
aatcaagtccggggtatgggggaggagcaa

SEQ ID NO: 101607 - DNA, 30 bp, Artificial Sequence
  Synthetic oligonucleotide
catagaaaaccaaatcaggaaccggagcaa

SEQ ID NO: 101608 - DNA, 30 bp, Artificial Sequence
  Synthetic oligonucleotide
ggaggtaaaattgagagttcaaaatagcaa

SEQ ID NO: 101609 - DNA, 30 bp, Artificial Sequence
  Synthetic oligonucleotide
ctacgattgaagggtacacaactatagcaa

SEQ ID NO: 101610 - DNA, 30 bp, Artificial Sequence
  Synthetic oligonucleotide
aggctcagacggggcacgcgcgcgtagcaa

SEQ ID NO: 101611 - DNA, 30 bp, Artificial Sequence
  Synthetic oligonucleotide
aactcggaacaccaacgctatgcgtagcaa

SEQ ID NO: 101612 - DNA, 30 bp, Artificial Sequence
  Synthetic oligonucleotide
acttactcttgcatcccctgagtttagcaa

SEQ ID NO: 101613 - DNA, 30 bp, Artificial Sequence
  Synthetic oligonucleotide
ggatgagatggttattcgagtacaacgcaa

SEQ ID NO: 101614 - DNA, 30 bp, Artificial Sequence
  Synthetic oligonucleotide
agcagataaacgcggtccaggtatacgcaa

SEQ ID NO: 101615 - DNA, 30 bp, Artificial Sequence
  Synthetic oligonucleotide
tatcgcgcgacgatcaagatgtgtacgcaa

SEQ ID NO: 101616 - DNA, 30 bp, Artificial Sequence
  Synthetic oligonucleotide
tgtagatattcggactccggagttacgcaa

SEQ ID NO: 101617 - DNA, 30 bp, Artificial Sequence
  Synthetic oligonucleotide
gtctagccttgcaagttaaatgtgccgcaa

SEQ ID NO: 101618 - DNA, 30 bp, Artificial Sequence
  Synthetic oligonucleotide
atgactacttccatcctactttatccgcaa

SEQ ID NO: 101619 - DNA, 30 bp, Artificial Sequence
  Synthetic oligonucleotide
cggttaggtaaggtccccttctctccgcaa

SEQ ID NO: 101620 - DNA, 30 bp, Artificial Sequence
  Synthetic oligonucleotide
gcggggatggcgacagatttttatgcgcaa

SEQ ID NO: 101621 - DNA, 30 bp, Artificial Sequence
  Synthetic oligonucleotide
aacgctgaagaattcaccaagacatcgcaa

SEQ ID NO: 101622 - DNA, 30 bp, Artificial Sequence
  Synthetic oligonucleotide
ttagcatatcaaggcgaaacagggtcgcaa

SEQ ID NO: 101623 - DNA, 31 bp, Artificial Sequence
  Synthetic oligonucleotide
cttcgggtaagagtacgaatgccattcgcaa

SEQ ID NO: 101624 - DNA, 30 bp, Artificial Sequence
  Synthetic oligonucleotide
actgacatgtccagtccgagtgtttcgcaa

SEQ ID NO: 101625 - DNA, 30 bp, Artificial Sequence
  Synthetic oligonucleotide
aggtaagctagttgctatgtgaaaaggcaa

SEQ ID NO: 101626 - DNA, 30 bp, Artificial Sequence
  Synthetic oligonucleotide
gggggggtggtcgcgctatcatgaaggcaa

SEQ ID NO: 101627 - DNA, 30 bp, Artificial Sequence
  Synthetic oligonucleotide
atacaaaacgtattccccgcttttaggcaa

SEQ ID NO: 101628 - DNA, 30 bp, Artificial Sequence
  Synthetic oligonucleotide
ttagcagcgttgtagtcgaaaaacgggcaa

SEQ ID NO: 101629 - DNA, 30 bp, Artificial Sequence
  Synthetic oligonucleotide
aacggatcggatatgacagcgtctgggcaa

SEQ ID NO: 101630 - DNA, 30 bp, Artificial Sequence
  Synthetic oligonucleotide
cggtccaaaattattcactgccgtgggcaa

SEQ ID NO: 101631 - DNA, 30 bp, Artificial Sequence
  Synthetic oligonucleotide
taaacgggctagttgtgatggcaatggcaa

SEQ ID NO: 101632 - DNA, 30 bp, Artificial Sequence
  Synthetic oligonucleotide
gagctcacccagcgcccagtgacctggcaa

SEQ ID NO: 101633 - DNA, 30 bp, Artificial Sequence
  Synthetic oligonucleotide
gtggaactgaaaaatgcaaggatgtggcaa

SEQ ID NO: 101634 - DNA, 30 bp, Artificial Sequence
  Synthetic oligonucleotide
ctatgcgggaacgatcacctactttggcaa

SEQ ID NO: 101635 - DNA, 30 bp, Artificial Sequence
  Synthetic oligonucleotide
acaattgaagacatcccctgcagcctgcaa

SEQ ID NO: 101636 - DNA, 30 bp, Artificial Sequence
  Synthetic oligonucleotide
cttgcaatgagaagacgataatgtctgcaa

SEQ ID NO: 101637 - DNA, 30 bp, Artificial Sequence
  Synthetic oligonucleotide
tgatgtcagtgtagatgagccggagtgcaa

SEQ ID NO: 101638 - DNA, 30 bp, Artificial Sequence
  Synthetic oligonucleotide
accgtggaatacaacatcgcgggcgtgcaa

SEQ ID NO: 101639 - DNA, 30 bp, Artificial Sequence
  Synthetic oligonucleotide
tatcaccggcataaattataactggtgcaa

SEQ ID NO: 101640 - DNA, 30 bp, Artificial Sequence
  Synthetic oligonucleotide
acttcccgtgggtacgggtttaatgtgcaa

SEQ ID NO: 101641 - DNA, 30 bp, Artificial Sequence
  Synthetic oligonucleotide
cagtatgaaaaaattgtgcgcactgtgcaa

SEQ ID NO: 101642 - DNA, 30 bp, Artificial Sequence
  Synthetic oligonucleotide
gacaggcactagttcctctaagcgttgcaa

SEQ ID NO: 101643 - DNA, 30 bp, Artificial Sequence
  Synthetic oligonucleotide
aaaggtcgttgggtcctggggaaaaatcaa

SEQ ID NO: 101644 - DNA, 30 bp, Artificial Sequence
  Synthetic oligonucleotide
caaatgccaatatcataccaagcgaatcaa

SEQ ID NO: 101645 - DNA, 30 bp, Artificial Sequence
  Synthetic oligonucleotide
cgaggagtatcgattctcagtaataatcaa

SEQ ID NO: 101646 - DNA, 30 bp, Artificial Sequence
  Synthetic oligonucleotide
acgaaactttcaaacagtagtatacatcaa

SEQ ID NO: 101647 - DNA, 30 bp, Artificial Sequence
  Synthetic oligonucleotide
acagcatgcagtgggtagatattacatcaa

SEQ ID NO: 101648 - DNA, 30 bp, Artificial Sequence
  Synthetic oligonucleotide
aaggaactccaaacgttgacgccggatcaa

SEQ ID NO: 101649 - DNA, 30 bp, Artificial Sequence
  Synthetic oligonucleotide
cagagagacttcaagtgtcctcgtgatcaa

SEQ ID NO: 101650 - DNA, 30 bp, Artificial Sequence
  Synthetic oligonucleotide
ggcgatgatcgtttagttcaaccctatcaa

SEQ ID NO: 101651 - DNA, 30 bp, Artificial Sequence
  Synthetic oligonucleotide
caaccatgatgaggacatgttcggtatcaa

SEQ ID NO: 101652 - DNA, 30 bp, Artificial Sequence
  Synthetic oligonucleotide
ggaagtgctcccttgtagatgttgtatcaa

SEQ ID NO: 101653 - DNA, 30 bp, Artificial Sequence
  Synthetic oligonucleotide
aggatggcaataaacggatgtgggactcaa

SEQ ID NO: 101654 - DNA, 30 bp, Artificial Sequence
  Synthetic oligonucleotide
taaaacgtccccgagacttaggatactcaa

SEQ ID NO: 101655 - DNA, 30 bp, Artificial Sequence
  Synthetic oligonucleotide
acttgtctacagtcagatacgacccctcaa

SEQ ID NO: 101656 - DNA, 30 bp, Artificial Sequence
  Synthetic oligonucleotide
ccggacgcatagcacgtttacattcctcaa

SEQ ID NO: 101657 - DNA, 30 bp, Artificial Sequence
  Synthetic oligonucleotide
acgttagatcggtaacatgtcggcagtcaa

SEQ ID NO: 101658 - DNA, 30 bp, Artificial Sequence
  Synthetic oligonucleotide
atgagtaaacgacaaagccggggcagtcaa

SEQ ID NO: 101659 - DNA, 30 bp, Artificial Sequence
  Synthetic oligonucleotide
ggcgcgatggtttcaacagtctagagtcaa

SEQ ID NO: 101660 - DNA, 30 bp, Artificial Sequence
  Synthetic oligonucleotide
tgggctgaccccccagctcgacaccgtcaa

SEQ ID NO: 101661 - DNA, 30 bp, Artificial Sequence
  Synthetic oligonucleotide
gcaccgggggaacccggaaaattgcgtcaa

SEQ ID NO: 101662 - DNA, 30 bp, Artificial Sequence
  Synthetic oligonucleotide
agtaaagcacaagcactgagtcttcgtcaa

SEQ ID NO: 101663 - DNA, 30 bp, Artificial Sequence
  Synthetic oligonucleotide
cactaaaactttacatgtgacgtaggtcaa

SEQ ID NO: 101664 - DNA, 30 bp, Artificial Sequence
  Synthetic oligonucleotide
cagagtcccacccagtatgcgaccggtcaa

SEQ ID NO: 101665 - DNA, 30 bp, Artificial Sequence
  Synthetic oligonucleotide
acctcactgagagcctgctctatgggtcaa

SEQ ID NO: 101666 - DNA, 31 bp, Artificial Sequence
  Synthetic oligonucleotide
tacacgcatgagcttattaggtagtggtcaa

SEQ ID NO: 101667 - DNA, 30 bp, Artificial Sequence
  Synthetic oligonucleotide
tataggcatggaagagcaggcgactgtcaa

SEQ ID NO: 101668 - DNA, 30 bp, Artificial Sequence
  Synthetic oligonucleotide
cggttcacatcgtactgtagaccctgtcaa

SEQ ID NO: 101669 - DNA, 30 bp, Artificial Sequence
  Synthetic oligonucleotide
cgttgttctgacaagtagtggctctgtcaa

SEQ ID NO: 101670 - DNA, 30 bp, Artificial Sequence
  Synthetic oligonucleotide
gcgcagtagtggacaatattccagtgtcaa

SEQ ID NO: 101671 - DNA, 30 bp, Artificial Sequence
  Synthetic oligonucleotide
tcgcggtcaaacaaacggaagcggtgtcaa

SEQ ID NO: 101672 - DNA, 30 bp, Artificial Sequence
  Synthetic oligonucleotide
tagcatcggcagtctaagtcgctcgttcaa

SEQ ID NO: 101673 - DNA, 30 bp, Artificial Sequence
  Synthetic oligonucleotide
tcggtagcgaaaagtgaaattctcgttcaa

SEQ ID NO: 101674 - DNA, 30 bp, Artificial Sequence
  Synthetic oligonucleotide
cgcaagagttacagttcagctcgtgttcaa

SEQ ID NO: 101675 - DNA, 30 bp, Artificial Sequence
  Synthetic oligonucleotide
agagggcgacttccatcaaacgattttcaa

SEQ ID NO: 101676 - DNA, 30 bp, Artificial Sequence
  Synthetic oligonucleotide
cggggggagtagtgtggggctgattttcaa

SEQ ID NO: 101677 - DNA, 31 bp, Artificial Sequence
  Synthetic oligonucleotide
atgaattacagagcgactgtcccgttttcaa

SEQ ID NO: 101678 - DNA, 30 bp, Artificial Sequence
  Synthetic oligonucleotide
gtaaggccagcgatatctaagaccaaagaa

SEQ ID NO: 101679 - DNA, 30 bp, Artificial Sequence
  Synthetic oligonucleotide
gtaacgtgattcgtcacttgaaagaaagaa

SEQ ID NO: 101680 - DNA, 30 bp, Artificial Sequence
  Synthetic oligonucleotide
ggagttgaggccggcaggacaacacaagaa

SEQ ID NO: 101681 - DNA, 30 bp, Artificial Sequence
  Synthetic oligonucleotide
cgactggtttcagagtgtgattcacaagaa

SEQ ID NO: 101682 - DNA, 30 bp, Artificial Sequence
  Synthetic oligonucleotide
cacttgtgaaagagcgaaacgagacaagaa

SEQ ID NO: 101683 - DNA, 30 bp, Artificial Sequence
  Synthetic oligonucleotide
ggcatgtgaatttataacagtgctcaagaa

SEQ ID NO: 101684 - DNA, 30 bp, Artificial Sequence
  Synthetic oligonucleotide
catacgggctatgtagttgtacacgaagaa

SEQ ID NO: 101685 - DNA, 30 bp, Artificial Sequence
  Synthetic oligonucleotide
agtaggcgcctgacgtgtaagcgtgaagaa

SEQ ID NO: 101686 - DNA, 30 bp, Artificial Sequence
  Synthetic oligonucleotide
cgattcggtcagcgaattataatttaagaa

SEQ ID NO: 101687 - DNA, 30 bp, Artificial Sequence
  Synthetic oligonucleotide
tactaatccgggcggaaggacacgacagaa

SEQ ID NO: 101688 - DNA, 30 bp, Artificial Sequence
  Synthetic oligonucleotide
cgtaatacttctttccatgtgagaccagaa

SEQ ID NO: 101689 - DNA, 30 bp, Artificial Sequence
  Synthetic oligonucleotide
ggaaatggaggttcatgcacgctaccagaa

SEQ ID NO: 101690 - DNA, 30 bp, Artificial Sequence
  Synthetic oligonucleotide
gaaggaggaatcattcgggtcaccgcagaa

SEQ ID NO: 101691 - DNA, 30 bp, Artificial Sequence
  Synthetic oligonucleotide
cggtatgtgcgtttaagattcttggcagaa

SEQ ID NO: 101692 - DNA, 30 bp, Artificial Sequence
  Synthetic oligonucleotide
aggtcctataccgttgatccagactcagaa

SEQ ID NO: 101693 - DNA, 30 bp, Artificial Sequence
  Synthetic oligonucleotide
ctaacaataattcgcaataccaagtcagaa

SEQ ID NO: 101694 - DNA, 30 bp, Artificial Sequence
  Synthetic oligonucleotide
ggggacaactttaagcagaaatattcagaa

SEQ ID NO: 101695 - DNA, 30 bp, Artificial Sequence
  Synthetic oligonucleotide
ttggccttcccttgaaaaaagatcagagaa

SEQ ID NO: 101696 - DNA, 30 bp, Artificial Sequence
  Synthetic oligonucleotide
acataaaaggggttcgacgccaatagagaa

SEQ ID NO: 101697 - DNA, 30 bp, Artificial Sequence
  Synthetic oligonucleotide
catgagagataacgatgataggtacgagaa

SEQ ID NO: 101698 - DNA, 30 bp, Artificial Sequence
  Synthetic oligonucleotide
ctgagccttgcctcatacaccccgcgagaa

SEQ ID NO: 101699 - DNA, 30 bp, Artificial Sequence
  Synthetic oligonucleotide
gtgcatcatacgtaacgtaaggtgcgagaa

SEQ ID NO: 101700 - DNA, 30 bp, Artificial Sequence
  Synthetic oligonucleotide
tatcgcgaagcatggtctcagggaggagaa

SEQ ID NO: 101701 - DNA, 30 bp, Artificial Sequence
  Synthetic oligonucleotide
aacgacaccggacgttgaggcgcgggagaa

SEQ ID NO: 101702 - DNA, 30 bp, Artificial Sequence
  Synthetic oligonucleotide
catcttaaagcctaacgaggcaatggagaa

SEQ ID NO: 101703 - DNA, 30 bp, Artificial Sequence
  Synthetic oligonucleotide
gaggacaacgcatactatggtgcatgagaa

SEQ ID NO: 101704 - DNA, 30 bp, Artificial Sequence
  Synthetic oligonucleotide
gtagaatgtctaaagagatacggatgagaa

SEQ ID NO: 101705 - DNA, 30 bp, Artificial Sequence
  Synthetic oligonucleotide
gctacacgcggtaatagggggcattgagaa

SEQ ID NO: 101706 - DNA, 30 bp, Artificial Sequence
  Synthetic oligonucleotide
tagtcggtccaaaaatcagaagagatagaa

SEQ ID NO: 101707 - DNA, 30 bp, Artificial Sequence
  Synthetic oligonucleotide
ggggcacaaatgaagcgctactttatagaa

SEQ ID NO: 101708 - DNA, 30 bp, Artificial Sequence
  Synthetic oligonucleotide
aaatcagcggtggaagacttggtgctagaa

SEQ ID NO: 101709 - DNA, 30 bp, Artificial Sequence
  Synthetic oligonucleotide
atcactaatcatcaaggcaatgtggtagaa

SEQ ID NO: 101710 - DNA, 30 bp, Artificial Sequence
  Synthetic oligonucleotide
gtgaacccaaatccccaggatgtggtagaa

SEQ ID NO: 101711 - DNA, 30 bp, Artificial Sequence
  Synthetic oligonucleotide
gtcaacaaaacgtatcacaatttggtagaa

SEQ ID NO: 101712 - DNA, 30 bp, Artificial Sequence
  Synthetic oligonucleotide
gataacctcattggggtgacagttgtagaa

SEQ ID NO: 101713 - DNA, 30 bp, Artificial Sequence
  Synthetic oligonucleotide
catgcggggttatgatccgtgcgattagaa

SEQ ID NO: 101714 - DNA, 30 bp, Artificial Sequence
  Synthetic oligonucleotide
tgcacgcgttgtttagtatgattattagaa

SEQ ID NO: 101715 - DNA, 30 bp, Artificial Sequence
  Synthetic oligonucleotide
gattaggcatacggggtgggtgtcttagaa

SEQ ID NO: 101716 - DNA, 30 bp, Artificial Sequence
  Synthetic oligonucleotide
cctgtccttctaggccagacaagcaacgaa

SEQ ID NO: 101717 - DNA, 30 bp, Artificial Sequence
  Synthetic oligonucleotide
acgctaattggccccgtcatgaatcacgaa

SEQ ID NO: 101718 - DNA, 30 bp, Artificial Sequence
  Synthetic oligonucleotide
gcgagttcgtaagacagtatttcagacgaa

SEQ ID NO: 101719 - DNA, 30 bp, Artificial Sequence
  Synthetic oligonucleotide
gctcgaaatgccactaataggcctgacgaa

SEQ ID NO: 101720 - DNA, 30 bp, Artificial Sequence
  Synthetic oligonucleotide
aacaggagcctaagtattaaacgatacgaa

SEQ ID NO: 101721 - DNA, 30 bp, Artificial Sequence
  Synthetic oligonucleotide
acgagggaatgaacgaccgtgagctacgaa

SEQ ID NO: 101722 - DNA, 30 bp, Artificial Sequence
  Synthetic oligonucleotide
ggtataaatagagattagtaagattacgaa

SEQ ID NO: 101723 - DNA, 30 bp, Artificial Sequence
  Synthetic oligonucleotide
gtctgtgagatgcattgtgcctaaaccgaa

SEQ ID NO: 101724 - DNA, 30 bp, Artificial Sequence
  Synthetic oligonucleotide
agggtaccccgtgtcgtctaactaaccgaa

SEQ ID NO: 101725 - DNA, 30 bp, Artificial Sequence
  Synthetic oligonucleotide
atcggagagtaccggcgccacctaaccgaa

SEQ ID NO: 101726 - DNA, 30 bp, Artificial Sequence
  Synthetic oligonucleotide
aatgaggcgacggctgcgcgaaggaccgaa

SEQ ID NO: 101727 - DNA, 30 bp, Artificial Sequence
  Synthetic oligonucleotide
cctgtggcaggaccatagtgagcacccgaa

SEQ ID NO: 101728 - DNA, 30 bp, Artificial Sequence
  Synthetic oligonucleotide
gcaggcgaaaagaagctaaccgccgccgaa

SEQ ID NO: 101729 - DNA, 30 bp, Artificial Sequence
  Synthetic oligonucleotide
gtgttagaggaatggtttataattgccgaa

SEQ ID NO: 101730 - DNA, 30 bp, Artificial Sequence
  Synthetic oligonucleotide
cgtaagccataatggcggaaaatatccgaa

SEQ ID NO: 101731 - DNA, 30 bp, Artificial Sequence
  Synthetic oligonucleotide
taaacaaaagaggcggataggggaagcgaa

SEQ ID NO: 101732 - DNA, 30 bp, Artificial Sequence
  Synthetic oligonucleotide
gaggtgggaaacgagcttaaaataagcgaa

SEQ ID NO: 101733 - DNA, 30 bp, Artificial Sequence
  Synthetic oligonucleotide
cggcaccacatatttgcgtcgtccagcgaa

SEQ ID NO: 101734 - DNA, 30 bp, Artificial Sequence
  Synthetic oligonucleotide
gggctgggctaagttaaacctagccgcgaa

SEQ ID NO: 101735 - DNA, 30 bp, Artificial Sequence
  Synthetic oligonucleotide
cctaacggacaccgggtaaggtcgcgcgaa

SEQ ID NO: 101736 - DNA, 30 bp, Artificial Sequence
  Synthetic oligonucleotide
ctacggcaatgcaggcaaacctctcgcgaa

SEQ ID NO: 101737 - DNA, 30 bp, Artificial Sequence
  Synthetic oligonucleotide
gctgctgtgcgtaacgcaactctcggcgaa

SEQ ID NO: 101738 - DNA, 30 bp, Artificial Sequence
  Synthetic oligonucleotide
cggcctgattgaggtggaaatcgatgcgaa

SEQ ID NO: 101739 - DNA, 30 bp, Artificial Sequence
  Synthetic oligonucleotide
gggctatatacggtgtgtgcgctatgcgaa

SEQ ID NO: 101740 - DNA, 30 bp, Artificial Sequence
  Synthetic oligonucleotide
ggagccatatgggctggtgatctgtgcgaa

SEQ ID NO: 101741 - DNA, 30 bp, Artificial Sequence
  Synthetic oligonucleotide
tgcatgtagaatttatcttggcattgcgaa

SEQ ID NO: 101742 - DNA, 30 bp, Artificial Sequence
  Synthetic oligonucleotide
gtatgcttatacaaatatcctacttgcgaa

SEQ ID NO: 101743 - DNA, 30 bp, Artificial Sequence
  Synthetic oligonucleotide
tgggactaagctagacgtctaggttgcgaa

SEQ ID NO: 101744 - DNA, 30 bp, Artificial Sequence
  Synthetic oligonucleotide
cggcgcaatcggaagttgcgcagaatcgaa

SEQ ID NO: 101745 - DNA, 30 bp, Artificial Sequence
  Synthetic oligonucleotide
gctggactgtattgagaacaacgcatcgaa

SEQ ID NO: 101746 - DNA, 30 bp, Artificial Sequence
  Synthetic oligonucleotide
ctgagctgaaagagggctgtctgcatcgaa

SEQ ID NO: 101747 - DNA, 30 bp, Artificial Sequence
  Synthetic oligonucleotide
acttaaaatgtaagggacttaaggatcgaa

SEQ ID NO: 101748 - DNA, 30 bp, Artificial Sequence
  Synthetic oligonucleotide
tgtaagtagctggaagatagtatcctcgaa

SEQ ID NO: 101749 - DNA, 30 bp, Artificial Sequence
  Synthetic oligonucleotide
gccaatgtgcagtgaagccattgagtcgaa

SEQ ID NO: 101750 - DNA, 30 bp, Artificial Sequence
  Synthetic oligonucleotide
ttggagacagacccaaggtctacggtcgaa

SEQ ID NO: 101751 - DNA, 30 bp, Artificial Sequence
  Synthetic oligonucleotide
gccggaacgtaacgaatctagcgggtcgaa

SEQ ID NO: 101752 - DNA, 30 bp, Artificial Sequence
  Synthetic oligonucleotide
ggggtgagctagtactctgtgaacttcgaa

SEQ ID NO: 101753 - DNA, 30 bp, Artificial Sequence
  Synthetic oligonucleotide
ttggtgagggtagctataaagacgttcgaa

SEQ ID NO: 101754 - DNA, 30 bp, Artificial Sequence
  Synthetic oligonucleotide
aacaaatggcttggctacggcattttcgaa

SEQ ID NO: 101755 - DNA, 30 bp, Artificial Sequence
  Synthetic oligonucleotide
ggacttttcgaggatccacagaagaaggaa

SEQ ID NO: 101756 - DNA, 30 bp, Artificial Sequence
  Synthetic oligonucleotide
agcaagtcctcgggcaaaagtccgaaggaa

SEQ ID NO: 101757 - DNA, 30 bp, Artificial Sequence
  Synthetic oligonucleotide
tcgcaggggaggtgcacactctaacaggaa

SEQ ID NO: 101758 - DNA, 30 bp, Artificial Sequence
  Synthetic oligonucleotide
ctgtataatccccgtgatcaaagccaggaa

SEQ ID NO: 101759 - DNA, 30 bp, Artificial Sequence
  Synthetic oligonucleotide
ctcaagggacgagacacgtgatagcaggaa

SEQ ID NO: 101760 - DNA, 30 bp, Artificial Sequence
  Synthetic oligonucleotide
cgaaggcagtcggggaaagacgggcaggaa

SEQ ID NO: 101761 - DNA, 30 bp, Artificial Sequence
  Synthetic oligonucleotide
ccacagtgcgcacgtacatacggcgaggaa

SEQ ID NO: 101762 - DNA, 30 bp, Artificial Sequence
  Synthetic oligonucleotide
tccaggcattacaggctcatgaaggaggaa

SEQ ID NO: 101763 - DNA, 30 bp, Artificial Sequence
  Synthetic oligonucleotide
gtataacgccaaagggggcggcgggaggaa

SEQ ID NO: 101764 - DNA, 30 bp, Artificial Sequence
  Synthetic oligonucleotide
gctaaaacttgaaaattgttagtataggaa

SEQ ID NO: 101765 - DNA, 30 bp, Artificial Sequence
  Synthetic oligonucleotide
ctgttccggtcctgatatacaatgtaggaa

SEQ ID NO: 101766 - DNA, 30 bp, Artificial Sequence
  Synthetic oligonucleotide
gataaatgggaatatgcacctggttaggaa

SEQ ID NO: 101767 - DNA, 30 bp, Artificial Sequence
  Synthetic oligonucleotide
ccgcctagacgtatttcgaacagcacggaa

SEQ ID NO: 101768 - DNA, 30 bp, Artificial Sequence
  Synthetic oligonucleotide
ccactaggatcctagcaattggtcacggaa

SEQ ID NO: 101769 - DNA, 30 bp, Artificial Sequence
  Synthetic oligonucleotide
ggctaaactggacagcttcaccagacggaa

SEQ ID NO: 101770 - DNA, 30 bp, Artificial Sequence
  Synthetic oligonucleotide
gttcaaacgccaccgtgccagggtacggaa

SEQ ID NO: 101771 - DNA, 30 bp, Artificial Sequence
  Synthetic oligonucleotide
tgagctagaaagtctgttccgtgaccggaa

SEQ ID NO: 101772 - DNA, 30 bp, Artificial Sequence
  Synthetic oligonucleotide
gcgttgatgaagacgaaaccacgagcggaa

SEQ ID NO: 101773 - DNA, 30 bp, Artificial Sequence
  Synthetic oligonucleotide
gaatctagtagaaggaattctagcgcggaa

SEQ ID NO: 101774 - DNA, 30 bp, Artificial Sequence
  Synthetic oligonucleotide
gagccgagaggtacgaggctcccggcggaa

SEQ ID NO: 101775 - DNA, 30 bp, Artificial Sequence
  Synthetic oligonucleotide
aggaccagcagaccgtcttggatctcggaa

SEQ ID NO: 101776 - DNA, 30 bp, Artificial Sequence
  Synthetic oligonucleotide
tagtgctggagccggctacttccttcggaa

SEQ ID NO: 101777 - DNA, 30 bp, Artificial Sequence
  Synthetic oligonucleotide
ggtggaccatgcgagagctttatttcggaa

SEQ ID NO: 101778 - DNA, 30 bp, Artificial Sequence
  Synthetic oligonucleotide
acgacggggcgtgtcggccctatcagggaa

SEQ ID NO: 101779 - DNA, 30 bp, Artificial Sequence
  Synthetic oligonucleotide
caggtcagggtaactacggttcgccgggaa

SEQ ID NO: 101780 - DNA, 30 bp, Artificial Sequence
  Synthetic oligonucleotide
gcctgtgagaagtttcatccgaaaggggaa

SEQ ID NO: 101781 - DNA, 30 bp, Artificial Sequence
  Synthetic oligonucleotide
agatgagctcccaaaggtgataaaggggaa

SEQ ID NO: 101782 - DNA, 30 bp, Artificial Sequence
  Synthetic oligonucleotide
cgatgcgttaatgcggtccttcagggggaa

SEQ ID NO: 101783 - DNA, 30 bp, Artificial Sequence
  Synthetic oligonucleotide
ataggagtctaaataaaatcccggggggaa

SEQ ID NO: 101784 - DNA, 30 bp, Artificial Sequence
  Synthetic oligonucleotide
cgatccacggaaccagaaactctgggggaa

SEQ ID NO: 101785 - DNA, 30 bp, Artificial Sequence
  Synthetic oligonucleotide
acgacagcggcttcgagatcggatggggaa

SEQ ID NO: 101786 - DNA, 30 bp, Artificial Sequence
  Synthetic oligonucleotide
gatgtatggcgaaaaaagctattatgggaa

SEQ ID NO: 101787 - DNA, 31 bp, Artificial Sequence
  Synthetic oligonucleotide
gaaggctggctcagcgcgggggccctgggaa

SEQ ID NO: 101788 - DNA, 30 bp, Artificial Sequence
  Synthetic oligonucleotide
tattaaaggcaaagcacatgtctgtgggaa

SEQ ID NO: 101789 - DNA, 30 bp, Artificial Sequence
  Synthetic oligonucleotide
agctcagatctataaaaggctgtactggaa

SEQ ID NO: 101790 - DNA, 30 bp, Artificial Sequence
  Synthetic oligonucleotide
ccgtactgacaatttggcctaaaagtggaa

SEQ ID NO: 101791 - DNA, 30 bp, Artificial Sequence
  Synthetic oligonucleotide
acgcgaccctatggtgtggtaaccgtggaa

SEQ ID NO: 101792 - DNA, 30 bp, Artificial Sequence
  Synthetic oligonucleotide
tgtccgggcacagtatattggtccgtggaa

SEQ ID NO: 101793 - DNA, 30 bp, Artificial Sequence
  Synthetic oligonucleotide
tttaggcgcgggttaagtagagtggtggaa

SEQ ID NO: 101794 - DNA, 30 bp, Artificial Sequence
  Synthetic oligonucleotide
aagattagacggttaagtggcggtttggaa

SEQ ID NO: 101795 - DNA, 30 bp, Artificial Sequence
  Synthetic oligonucleotide
aagcaagtcgtactctgattactaaatgaa

SEQ ID NO: 101796 - DNA, 30 bp, Artificial Sequence
  Synthetic oligonucleotide
tcgggccaaatgaaataggcgaagaatgaa

SEQ ID NO: 101797 - DNA, 30 bp, Artificial Sequence
  Synthetic oligonucleotide
tccatgacgagaaactcgtctaaccatgaa

SEQ ID NO: 101798 - DNA, 30 bp, Artificial Sequence
  Synthetic oligonucleotide
cactgggtccgtaccatcggcagccatgaa

SEQ ID NO: 101799 - DNA, 30 bp, Artificial Sequence
  Synthetic oligonucleotide
tcctatgtaaaactttccgagtggcatgaa

SEQ ID NO: 101800 - DNA, 30 bp, Artificial Sequence
  Synthetic oligonucleotide
atcgatgttagtgcgtgtgatatagatgaa

SEQ ID NO: 101801 - DNA, 30 bp, Artificial Sequence
  Synthetic oligonucleotide
acgacccgaaatgggactatcagggatgaa

SEQ ID NO: 101802 - DNA, 30 bp, Artificial Sequence
  Synthetic oligonucleotide
ccgagtcacgcaagtgttatagttgatgaa

SEQ ID NO: 101803 - DNA, 30 bp, Artificial Sequence
  Synthetic oligonucleotide
cgggctcacacgagatctaggaaatatgaa

SEQ ID NO: 101804 - DNA, 30 bp, Artificial Sequence
  Synthetic oligonucleotide
tagtaaggtcattaggggcttataactgaa

SEQ ID NO: 101805 - DNA, 30 bp, Artificial Sequence
  Synthetic oligonucleotide
ggagacgccgaagctttatgccccactgaa

SEQ ID NO: 101806 - DNA, 30 bp, Artificial Sequence
  Synthetic oligonucleotide
cgtacagagaaaaatcaccttccgactgaa

SEQ ID NO: 101807 - DNA, 30 bp, Artificial Sequence
  Synthetic oligonucleotide
cgtaacactcactcgtgtggcattactgaa

SEQ ID NO: 101808 - DNA, 30 bp, Artificial Sequence
  Synthetic oligonucleotide
tccagaatggtttggcgcgcatggcctgaa

SEQ ID NO: 101809 - DNA, 30 bp, Artificial Sequence
  Synthetic oligonucleotide
agggtagggttttcggccaacgcgtctgaa

SEQ ID NO: 101810 - DNA, 30 bp, Artificial Sequence
  Synthetic oligonucleotide
cggacttgtcgagtgatgacaggaagtgaa

SEQ ID NO: 101811 - DNA, 30 bp, Artificial Sequence
  Synthetic oligonucleotide
ccagagaaccattgtatatttaacagtgaa

SEQ ID NO: 101812 - DNA, 30 bp, Artificial Sequence
  Synthetic oligonucleotide
ggacctccttacctgatattgtatagtgaa

SEQ ID NO: 101813 - DNA, 30 bp, Artificial Sequence
  Synthetic oligonucleotide
acgtgcaagggttctacttgtgaacgtgaa

SEQ ID NO: 101814 - DNA, 30 bp, Artificial Sequence
  Synthetic oligonucleotide
ttggtctcaggtgcatcagttcatcgtgaa

SEQ ID NO: 101815 - DNA, 30 bp, Artificial Sequence
  Synthetic oligonucleotide
gaaatgcacaggtagcggacttaaggtgaa

SEQ ID NO: 101816 - DNA, 30 bp, Artificial Sequence
  Synthetic oligonucleotide
tagggattcatatcagctagactaggtgaa

SEQ ID NO: 101817 - DNA, 30 bp, Artificial Sequence
  Synthetic oligonucleotide
gttaaacggtcggcattgccccacggtgaa

SEQ ID NO: 101818 - DNA, 30 bp, Artificial Sequence
  Synthetic oligonucleotide
ctataacaagcgtctcgcaccagcggtgaa

SEQ ID NO: 101819 - DNA, 30 bp, Artificial Sequence
  Synthetic oligonucleotide
tccactctagacccaagtggtgagggtgaa

SEQ ID NO: 101820 - DNA, 30 bp, Artificial Sequence
  Synthetic oligonucleotide
agtagcttgaatattcgcgtgtagggtgaa

SEQ ID NO: 101821 - DNA, 30 bp, Artificial Sequence
  Synthetic oligonucleotide
gcttagataacaatattccggaatggtgaa

SEQ ID NO: 101822 - DNA, 30 bp, Artificial Sequence
  Synthetic oligonucleotide
gctatgagtgaatggtcatcatgtggtgaa

SEQ ID NO: 101823 - DNA, 30 bp, Artificial Sequence
  Synthetic oligonucleotide
caacttagagtgggtagcacactgtgtgaa

SEQ ID NO: 101824 - DNA, 30 bp, Artificial Sequence
  Synthetic oligonucleotide
cacggaacattctccaggctgtgaattgaa

SEQ ID NO: 101825 - DNA, 30 bp, Artificial Sequence
  Synthetic oligonucleotide
cggacaacccatagaggctggaacattgaa

SEQ ID NO: 101826 - DNA, 30 bp, Artificial Sequence
  Synthetic oligonucleotide
gcaggaagttgcttcgtaggggcgattgaa

SEQ ID NO: 101827 - DNA, 30 bp, Artificial Sequence
  Synthetic oligonucleotide
tccacgatcgtggtacattggcttattgaa

SEQ ID NO: 101828 - DNA, 30 bp, Artificial Sequence
  Synthetic oligonucleotide
ctcctggaggaacatcgactagcacttgaa

SEQ ID NO: 101829 - DNA, 30 bp, Artificial Sequence
  Synthetic oligonucleotide
atgactaagctggctcttggaatagttgaa

SEQ ID NO: 101830 - DNA, 30 bp, Artificial Sequence
  Synthetic oligonucleotide
ataaccgaagggtatcgaaatccggttgaa

SEQ ID NO: 101831 - DNA, 30 bp, Artificial Sequence
  Synthetic oligonucleotide
atccgctcaggtctggaagagggggttgaa

SEQ ID NO: 101832 - DNA, 30 bp, Artificial Sequence
  Synthetic oligonucleotide
gcaaacacacagcacctaatgattgttgaa

SEQ ID NO: 101833 - DNA, 30 bp, Artificial Sequence
  Synthetic oligonucleotide
caatggatccggagtacgccagaatttgaa

SEQ ID NO: 101834 - DNA, 30 bp, Artificial Sequence
  Synthetic oligonucleotide
tctatggagattacaaagaggcattttgaa

SEQ ID NO: 101835 - DNA, 30 bp, Artificial Sequence
  Synthetic oligonucleotide
gcgagcataccgcaaaaggatagaaaataa

SEQ ID NO: 101836 - DNA, 30 bp, Artificial Sequence
  Synthetic oligonucleotide
tccaagagccccatcgatgtgactaaataa

SEQ ID NO: 101837 - DNA, 30 bp, Artificial Sequence
  Synthetic oligonucleotide
cgctgatgaagggcatacgttagtaaataa

SEQ ID NO: 101838 - DNA, 30 bp, Artificial Sequence
  Synthetic oligonucleotide
tccctcagacaaaccaattaccaacaataa

SEQ ID NO: 101839 - DNA, 30 bp, Artificial Sequence
  Synthetic oligonucleotide
ggactcattactggtggcgagccgcaataa

SEQ ID NO: 101840 - DNA, 30 bp, Artificial Sequence
  Synthetic oligonucleotide
cacgcgcgggcgggagcagtagggcaataa

SEQ ID NO: 101841 - DNA, 30 bp, Artificial Sequence
  Synthetic oligonucleotide
gctcatcaaacgaacaagaccgccgaataa

SEQ ID NO: 101842 - DNA, 30 bp, Artificial Sequence
  Synthetic oligonucleotide
gaacacgtgcttttaaaggcactcgaataa

SEQ ID NO: 101843 - DNA, 30 bp, Artificial Sequence
  Synthetic oligonucleotide
agcaaggtggcaagaggcacctgaacataa

SEQ ID NO: 101844 - DNA, 30 bp, Artificial Sequence
  Synthetic oligonucleotide
aaacgagataaaatattatacttaacataa

SEQ ID NO: 101845 - DNA, 30 bp, Artificial Sequence
  Synthetic oligonucleotide
ttgtacagccaagtgacgtctaatacataa

SEQ ID NO: 101846 - DNA, 30 bp, Artificial Sequence
  Synthetic oligonucleotide
cgatcttggacaaccagcctggggccataa

SEQ ID NO: 101847 - DNA, 28 bp, Artificial Sequence
  Synthetic oligonucleotide
acgggcgcataagcttagctggccataa

SEQ ID NO: 101848 - DNA, 30 bp, Artificial Sequence
  Synthetic oligonucleotide
ggaacaggtgtcaccggcccagtcgcataa

SEQ ID NO: 101849 - DNA, 30 bp, Artificial Sequence
  Synthetic oligonucleotide
gtaacataataggaacattcggatgcataa

SEQ ID NO: 101850 - DNA, 30 bp, Artificial Sequence
  Synthetic oligonucleotide
taatatgaacgacacaaaaatgcgtcataa

SEQ ID NO: 101851 - DNA, 30 bp, Artificial Sequence
  Synthetic oligonucleotide
gataaggtagcgctcgttactaggtcataa

SEQ ID NO: 101852 - DNA, 30 bp, Artificial Sequence
  Synthetic oligonucleotide
gcagactaaaagaggcgggcacggagataa

SEQ ID NO: 101853 - DNA, 30 bp, Artificial Sequence
  Synthetic oligonucleotide
atatggtcctgtttaggagtgactagataa

SEQ ID NO: 101854 - DNA, 30 bp, Artificial Sequence
  Synthetic oligonucleotide
ggaaggggtaatgctcaaaagaaccgataa

SEQ ID NO: 101855 - DNA, 30 bp, Artificial Sequence
  Synthetic oligonucleotide
aaggatcgtgatagatagtcaggccgataa

SEQ ID NO: 101856 - DNA, 30 bp, Artificial Sequence
  Synthetic oligonucleotide
ctcacgtccaaggataattacattcgataa

SEQ ID NO: 101857 - DNA, 30 bp, Artificial Sequence
  Synthetic oligonucleotide
ggagcagtattcgaggcacgtgcgggataa

SEQ ID NO: 101858 - DNA, 30 bp, Artificial Sequence
  Synthetic oligonucleotide
catgctagatccttacgaataattggataa

SEQ ID NO: 101859 - DNA, 30 bp, Artificial Sequence
  Synthetic oligonucleotide
aaaaacgagttgagccttattcgatgataa

SEQ ID NO: 101860 - DNA, 30 bp, Artificial Sequence
  Synthetic oligonucleotide
ccaatgtaactggcaatggcaatatgataa

SEQ ID NO: 101861 - DNA, 30 bp, Artificial Sequence
  Synthetic oligonucleotide
aaatcgttgtggaccaaagcaccgtgataa

SEQ ID NO: 101862 - DNA, 30 bp, Artificial Sequence
  Synthetic oligonucleotide
acattaattaaacggattgctcgaatataa

SEQ ID NO: 101863 - DNA, 30 bp, Artificial Sequence
  Synthetic oligonucleotide
gcccactaactctagggcaaccaactataa

SEQ ID NO: 101864 - DNA, 30 bp, Artificial Sequence
  Synthetic oligonucleotide
ggtgtgtcaaacgatagatcatcgctataa

SEQ ID NO: 101865 - DNA, 30 bp, Artificial Sequence
  Synthetic oligonucleotide
cccgaccggctaaaaggagaacctctataa

SEQ ID NO: 101866 - DNA, 30 bp, Artificial Sequence
  Synthetic oligonucleotide
ctgcgacctctatacactatcaaagtataa

SEQ ID NO: 101867 - DNA, 30 bp, Artificial Sequence
  Synthetic oligonucleotide
cagacgtgctcagtccaggggagagtataa

SEQ ID NO: 101868 - DNA, 30 bp, Artificial Sequence
  Synthetic oligonucleotide
ccactcacgaaagctgcacgtatggtataa

SEQ ID NO: 101869 - DNA, 30 bp, Artificial Sequence
  Synthetic oligonucleotide
tggtacaggaggtgtcatcatggcttataa

SEQ ID NO: 101870 - DNA, 30 bp, Artificial Sequence
  Synthetic oligonucleotide
cgctaagtactggtacagagcagaaactaa

SEQ ID NO: 101871 - DNA, 30 bp, Artificial Sequence
  Synthetic oligonucleotide
gcgcccgcgattacactgggtataaactaa

SEQ ID NO: 101872 - DNA, 30 bp, Artificial Sequence
  Synthetic oligonucleotide
gtgtatggaatggtgtggaagccgaactaa

SEQ ID NO: 101873 - DNA, 30 bp, Artificial Sequence
  Synthetic oligonucleotide
agctttcggcggaattcgcacctagactaa

SEQ ID NO: 101874 - DNA, 30 bp, Artificial Sequence
  Synthetic oligonucleotide
caacagggcgtaacctcagagaaatactaa

SEQ ID NO: 101875 - DNA, 30 bp, Artificial Sequence
  Synthetic oligonucleotide
atacgctcgggatgccaaagagtaacctaa

SEQ ID NO: 101876 - DNA, 30 bp, Artificial Sequence
  Synthetic oligonucleotide
tccgtgctcaaatgttcaattgccacctaa

SEQ ID NO: 101877 - DNA, 30 bp, Artificial Sequence
  Synthetic oligonucleotide
ggcgtagcgagccattacgcacgagcctaa

SEQ ID NO: 101878 - DNA, 30 bp, Artificial Sequence
  Synthetic oligonucleotide
actgcaagcacggtcaaaagtaccgcctaa

SEQ ID NO: 101879 - DNA, 30 bp, Artificial Sequence
  Synthetic oligonucleotide
gactagatcagagagacaacatatagctaa

SEQ ID NO: 101880 - DNA, 30 bp, Artificial Sequence
  Synthetic oligonucleotide
gatcaaggacatgggatatagactagctaa

SEQ ID NO: 101881 - DNA, 30 bp, Artificial Sequence
  Synthetic oligonucleotide
caaggggaggattgactattttggatctaa

SEQ ID NO: 101882 - DNA, 30 bp, Artificial Sequence
  Synthetic oligonucleotide
acgaatggtcaaccagaggtcataaagtaa

SEQ ID NO: 101883 - DNA, 30 bp, Artificial Sequence
  Synthetic oligonucleotide
tgagcctataatgtaaaaggtaacaagtaa

SEQ ID NO: 101884 - DNA, 30 bp, Artificial Sequence
  Synthetic oligonucleotide
aagaagaagggaacttagtgatggaagtaa

SEQ ID NO: 101885 - DNA, 30 bp, Artificial Sequence
  Synthetic oligonucleotide
tattgcgcgggggacggcaatcataagtaa

SEQ ID NO: 101886 - DNA, 30 bp, Artificial Sequence
  Synthetic oligonucleotide
cacatttgcccaaagggcggtcaagagtaa

SEQ ID NO: 101887 - DNA, 30 bp, Artificial Sequence
  Synthetic oligonucleotide
ctggcgggcgccactaaaccatgagagtaa

SEQ ID NO: 101888 - DNA, 30 bp, Artificial Sequence
  Synthetic oligonucleotide
tcctatgatatcatgaatgggagcgagtaa

SEQ ID NO: 101889 - DNA, 30 bp, Artificial Sequence
  Synthetic oligonucleotide
cattacgtactaaattgagacacggagtaa

SEQ ID NO: 101890 - DNA, 30 bp, Artificial Sequence
  Synthetic oligonucleotide
gaggtggtaaagatgacctgtgcggagtaa

SEQ ID NO: 101891 - DNA, 30 bp, Artificial Sequence
  Synthetic oligonucleotide
catccgagtaccgtaaagtccactgagtaa

SEQ ID NO: 101892 - DNA, 30 bp, Artificial Sequence
  Synthetic oligonucleotide
acgtaagcacctacccgtcagatatagtaa

SEQ ID NO: 101893 - DNA, 30 bp, Artificial Sequence
  Synthetic oligonucleotide
cctcggcaaaggtttgttaagtactagtaa

SEQ ID NO: 101894 - DNA, 30 bp, Artificial Sequence
  Synthetic oligonucleotide
tggagtgcctgaaccgagctggagtagtaa

SEQ ID NO: 101895 - DNA, 30 bp, Artificial Sequence
  Synthetic oligonucleotide
aaacgtaggacctggaagcttcaaacgtaa

SEQ ID NO: 101896 - DNA, 30 bp, Artificial Sequence
  Synthetic oligonucleotide
ctataagggtaaactcattcacgaacgtaa

SEQ ID NO: 101897 - DNA, 30 bp, Artificial Sequence
  Synthetic oligonucleotide
agggcacggctggcgcgagaaaccacgtaa

SEQ ID NO: 101898 - DNA, 30 bp, Artificial Sequence
  Synthetic oligonucleotide
taagtggaatctaagggatcggcgacgtaa

SEQ ID NO: 101899 - DNA, 30 bp, Artificial Sequence
  Synthetic oligonucleotide
gaaaatatcagagaccgagaggggacgtaa

SEQ ID NO: 101900 - DNA, 30 bp, Artificial Sequence
  Synthetic oligonucleotide
gcctcgtagaattgcaccttcaatacgtaa

SEQ ID NO: 101901 - DNA, 30 bp, Artificial Sequence
  Synthetic oligonucleotide
tacggatggcagttcctcacatccccgtaa

SEQ ID NO: 101902 - DNA, 30 bp, Artificial Sequence
  Synthetic oligonucleotide
attggcaaactaatccaatgtcgagcgtaa

SEQ ID NO: 101903 - DNA, 30 bp, Artificial Sequence
  Synthetic oligonucleotide
cgacaccacatggggtattggtgagcgtaa

SEQ ID NO: 101904 - DNA, 30 bp, Artificial Sequence
  Synthetic oligonucleotide
acgagggctcctttcactatgggggcgtaa

SEQ ID NO: 101905 - DNA, 30 bp, Artificial Sequence
  Synthetic oligonucleotide
gaaataaccaaatgcggtactggtgcgtaa

SEQ ID NO: 101906 - DNA, 30 bp, Artificial Sequence
  Synthetic oligonucleotide
atgccctaataatgtaccgttcggtcgtaa

SEQ ID NO: 101907 - DNA, 30 bp, Artificial Sequence
  Synthetic oligonucleotide
tagttccaccagcgtgacctcgtttcgtaa

SEQ ID NO: 101908 - DNA, 30 bp, Artificial Sequence
  Synthetic oligonucleotide
acacaacatctcaccagaaatgcaaggtaa

SEQ ID NO: 101909 - DNA, 30 bp, Artificial Sequence
  Synthetic oligonucleotide
ggtaaatgagtatacattggtagaaggtaa

SEQ ID NO: 101910 - DNA, 30 bp, Artificial Sequence
  Synthetic oligonucleotide
ctaggcgctggcatcgttaaatacaggtaa

SEQ ID NO: 101911 - DNA, 30 bp, Artificial Sequence
  Synthetic oligonucleotide
gggatgaagtgcgtagttatccccaggtaa

SEQ ID NO: 101912 - DNA, 30 bp, Artificial Sequence
  Synthetic oligonucleotide
ccgattatgactgtggttcgaatagggtaa

SEQ ID NO: 101913 - DNA, 30 bp, Artificial Sequence
  Synthetic oligonucleotide
caatacataggtatacttcacatcgggtaa

SEQ ID NO: 101914 - DNA, 30 bp, Artificial Sequence
  Synthetic oligonucleotide
gtcatgctatttcgtaactgcttggggtaa

SEQ ID NO: 101915 - DNA, 30 bp, Artificial Sequence
  Synthetic oligonucleotide
agtacggctgcccaaaaaaaacctgggtaa

SEQ ID NO: 101916 - DNA, 30 bp, Artificial Sequence
  Synthetic oligonucleotide
gtgcaggttatgcgaatggtgttatggtaa

SEQ ID NO: 101917 - DNA, 30 bp, Artificial Sequence
  Synthetic oligonucleotide
taacgggcatgctttagggttgcgtggtaa

SEQ ID NO: 101918 - DNA, 30 bp, Artificial Sequence
  Synthetic oligonucleotide
atcgagccgcaattggcatgtaattggtaa

SEQ ID NO: 101919 - DNA, 30 bp, Artificial Sequence
  Synthetic oligonucleotide
caacgttcatgtgaactgtagcattggtaa

SEQ ID NO: 101920 - DNA, 30 bp, Artificial Sequence
  Synthetic oligonucleotide
gtacttcacttcacccataaccaaatgtaa

SEQ ID NO: 101921 - DNA, 30 bp, Artificial Sequence
  Synthetic oligonucleotide
tccacggcaaaaatggcatactccatgtaa

SEQ ID NO: 101922 - DNA, 30 bp, Artificial Sequence
  Synthetic oligonucleotide
ccaagcgcatgtagccggcaacgcctgtaa

SEQ ID NO: 101923 - DNA, 30 bp, Artificial Sequence
  Synthetic oligonucleotide
gggtttagacttccagggtcgtaagtgtaa

SEQ ID NO: 101924 - DNA, 30 bp, Artificial Sequence
  Synthetic oligonucleotide
gaggtgagtaccaatgtcattggagtgtaa

SEQ ID NO: 101925 - DNA, 30 bp, Artificial Sequence
  Synthetic oligonucleotide
aaatgatggatcgtggtgaatagcgtgtaa

SEQ ID NO: 101926 - DNA, 30 bp, Artificial Sequence
  Synthetic oligonucleotide
aatcacccagagttgcaaacagaattgtaa

SEQ ID NO: 101927 - DNA, 30 bp, Artificial Sequence
  Synthetic oligonucleotide
caaggaacgtccgcccgacatcggttgtaa

SEQ ID NO: 101928 - DNA, 30 bp, Artificial Sequence
  Synthetic oligonucleotide
agacagaggatacactttaagagaaattaa

SEQ ID NO: 101929 - DNA, 30 bp, Artificial Sequence
  Synthetic oligonucleotide
ggacgtggccttgacctaggggacaattaa

SEQ ID NO: 101930 - DNA, 30 bp, Artificial Sequence
  Synthetic oligonucleotide
gcttagctaagatccaggaccaataattaa

SEQ ID NO: 101931 - DNA, 30 bp, Artificial Sequence
  Synthetic oligonucleotide
aggcgattaaaagcagcgggcaagcattaa

SEQ ID NO: 101932 - DNA, 30 bp, Artificial Sequence
  Synthetic oligonucleotide
aaccgtgcatggcacgggtcacaagattaa

SEQ ID NO: 101933 - DNA, 30 bp, Artificial Sequence
  Synthetic oligonucleotide
cattcaacggtcaacgaaccaccggattaa

SEQ ID NO: 101934 - DNA, 30 bp, Artificial Sequence
  Synthetic oligonucleotide
ctattcgacaatgtcaaaccctgggattaa

SEQ ID NO: 101935 - DNA, 30 bp, Artificial Sequence
  Synthetic oligonucleotide
ggtagtaacgtgtagtagggaaaatattaa

SEQ ID NO: 101936 - DNA, 30 bp, Artificial Sequence
  Synthetic oligonucleotide
accagcgcagtccgtcccgtacgatattaa

SEQ ID NO: 101937 - DNA, 30 bp, Artificial Sequence
  Synthetic oligonucleotide
caggatcgaacagggctttactaagcttaa

SEQ ID NO: 101938 - DNA, 30 bp, Artificial Sequence
  Synthetic oligonucleotide
ttcgtgaatggagtaagagtggccgcttaa

SEQ ID NO: 101939 - DNA, 30 bp, Artificial Sequence
  Synthetic oligonucleotide
ccgtggttgaggaatgtacagcatgcttaa

SEQ ID NO: 101940 - DNA, 31 bp, Artificial Sequence
  Synthetic oligonucleotide
ctaaaaggcaaccccttttgatggctcttaa

SEQ ID NO: 101941 - DNA, 30 bp, Artificial Sequence
  Synthetic oligonucleotide
agttaaaagcgactacgcctggcgtcttaa

SEQ ID NO: 101942 - DNA, 30 bp, Artificial Sequence
  Synthetic oligonucleotide
cgattgagcttgcgagtaactacttcttaa

SEQ ID NO: 101943 - DNA, 30 bp, Artificial Sequence
  Synthetic oligonucleotide
aacgcgtggtggacactatgtagaagttaa

SEQ ID NO: 101944 - DNA, 30 bp, Artificial Sequence
  Synthetic oligonucleotide
aaagttcggaccagggaaaagggaagttaa

SEQ ID NO: 101945 - DNA, 30 bp, Artificial Sequence
  Synthetic oligonucleotide
agatgagtggctcggcataagctacgttaa

SEQ ID NO: 101946 - DNA, 30 bp, Artificial Sequence
  Synthetic oligonucleotide
tcttacgtatgaaggagatgaccaggttaa

SEQ ID NO: 101947 - DNA, 30 bp, Artificial Sequence
  Synthetic oligonucleotide
tgccaaagtccttgtataggaaacggttaa

SEQ ID NO: 101948 - DNA, 30 bp, Artificial Sequence
  Synthetic oligonucleotide
gctgaagtgcgagacagccctggcggttaa

SEQ ID NO: 101949 - DNA, 30 bp, Artificial Sequence
  Synthetic oligonucleotide
tcatctaaggtgccaaatcggatcggttaa

SEQ ID NO: 101950 - DNA, 30 bp, Artificial Sequence
  Synthetic oligonucleotide
tgagataatatggcgtttaatatcggttaa

SEQ ID NO: 101951 - DNA, 30 bp, Artificial Sequence
  Synthetic oligonucleotide
gcaggtggggaaatgtggtcaaaatgttaa

SEQ ID NO: 101952 - DNA, 30 bp, Artificial Sequence
  Synthetic oligonucleotide
gacgcacaaaaacggattcactggtgttaa

SEQ ID NO: 101953 - DNA, 30 bp, Artificial Sequence
  Synthetic oligonucleotide
gaacatcagccgggaattctgccaatttaa

SEQ ID NO: 101954 - DNA, 30 bp, Artificial Sequence
  Synthetic oligonucleotide
ccagagtcgtcaggatgtttatccttttaa

SEQ ID NO: 101955 - DNA, 30 bp, Artificial Sequence
  Synthetic oligonucleotide
tgtaactgagtgcccgatagaccaaaaaca

SEQ ID NO: 101956 - DNA, 30 bp, Artificial Sequence
  Synthetic oligonucleotide
atccaccataactccgcacaactcaaaaca

SEQ ID NO: 101957 - DNA, 30 bp, Artificial Sequence
  Synthetic oligonucleotide
acgtcatagacgcggagaaatctcaaaaca

SEQ ID NO: 101958 - DNA, 30 bp, Artificial Sequence
  Synthetic oligonucleotide
agttaggatgtcaaagagacaaataaaaca

SEQ ID NO: 101959 - DNA, 30 bp, Artificial Sequence
  Synthetic oligonucleotide
tgatagaccaattattagtatcataaaaca

SEQ ID NO: 101960 - DNA, 30 bp, Artificial Sequence
  Synthetic oligonucleotide
ataaatcgggtccacactcgtgctaaaaca

SEQ ID NO: 101961 - DNA, 30 bp, Artificial Sequence
  Synthetic oligonucleotide
aacgtacgaaggtgtgtaaccaaacaaaca

SEQ ID NO: 101962 - DNA, 30 bp, Artificial Sequence
  Synthetic oligonucleotide
ggacaagagatagttttcggactacaaaca

SEQ ID NO: 101963 - DNA, 30 bp, Artificial Sequence
  Synthetic oligonucleotide
gtaactcagctcatatggtcagtgcaaaca

SEQ ID NO: 101964 - DNA, 30 bp, Artificial Sequence
  Synthetic oligonucleotide
acagcgcttttctaggaatgaagtcaaaca

SEQ ID NO: 101965 - DNA, 30 bp, Artificial Sequence
  Synthetic oligonucleotide
cataagcctgttaagacaccaagcgaaaca

SEQ ID NO: 101966 - DNA, 30 bp, Artificial Sequence
  Synthetic oligonucleotide
acggccgcctgattacacgccggcgaaaca

SEQ ID NO: 101967 - DNA, 30 bp, Artificial Sequence
  Synthetic oligonucleotide
cgggaaatttctcactgcgccccataaaca

SEQ ID NO: 101968 - DNA, 30 bp, Artificial Sequence
  Synthetic oligonucleotide
ataaggatcggattcgccgaattgtaaaca

SEQ ID NO: 101969 - DNA, 30 bp, Artificial Sequence
  Synthetic oligonucleotide
atgtaacgtggtggaacaagtaatacaaca

SEQ ID NO: 101970 - DNA, 30 bp, Artificial Sequence
  Synthetic oligonucleotide
taccggggtagccatcgaaaacatacaaca

SEQ ID NO: 101971 - DNA, 30 bp, Artificial Sequence
  Synthetic oligonucleotide
acgtgataaatgagtacacagtatacaaca

SEQ ID NO: 101972 - DNA, 30 bp, Artificial Sequence
  Synthetic oligonucleotide
ggacggagcggataaccgtacatgccaaca

SEQ ID NO: 101973 - DNA, 30 bp, Artificial Sequence
  Synthetic oligonucleotide
gctaatcgaagaatataaacacttccaaca

SEQ ID NO: 101974 - DNA, 30 bp, Artificial Sequence
  Synthetic oligonucleotide
aaagcccactgggtatcattacgggcaaca

SEQ ID NO: 101975 - DNA, 30 bp, Artificial Sequence
  Synthetic oligonucleotide
ggatataagcagttggcgccccatgcaaca

SEQ ID NO: 101976 - DNA, 30 bp, Artificial Sequence
  Synthetic oligonucleotide
tatggaatctaaattcaatcgtgtgcaaca

SEQ ID NO: 101977 - DNA, 30 bp, Artificial Sequence
  Synthetic oligonucleotide
tagaagcttggaaacacatttgactcaaca

SEQ ID NO: 101978 - DNA, 30 bp, Artificial Sequence
  Synthetic oligonucleotide
ggctatgagttagcgagacttccgtcaaca

SEQ ID NO: 101979 - DNA, 30 bp, Artificial Sequence
  Synthetic oligonucleotide
tgtgactgagctgagtacacctcttcaaca

SEQ ID NO: 101980 - DNA, 30 bp, Artificial Sequence
  Synthetic oligonucleotide
gtaaaagacacgacctcctaaagaagaaca

SEQ ID NO: 101981 - DNA, 30 bp, Artificial Sequence
  Synthetic oligonucleotide
cacagccgactgcgtctgaggcccagaaca

SEQ ID NO: 101982 - DNA, 30 bp, Artificial Sequence
  Synthetic oligonucleotide
cttaggatgtgtcggccgaggatacgaaca

SEQ ID NO: 101983 - DNA, 30 bp, Artificial Sequence
  Synthetic oligonucleotide
acactctcaaaacgccttcgggagcgaaca

SEQ ID NO: 101984 - DNA, 30 bp, Artificial Sequence
  Synthetic oligonucleotide
cgggatgagcaaccgaggggccggcgaaca

SEQ ID NO: 101985 - DNA, 30 bp, Artificial Sequence
  Synthetic oligonucleotide
cacagcagattagccgatgtaaaaggaaca

SEQ ID NO: 101986 - DNA, 30 bp, Artificial Sequence
  Synthetic oligonucleotide
agcaactcgacaacgtagttgcaaggaaca

SEQ ID NO: 101987 - DNA, 30 bp, Artificial Sequence
  Synthetic oligonucleotide
actacgaggagagccccatttgcaggaaca

SEQ ID NO: 101988 - DNA, 30 bp, Artificial Sequence
  Synthetic oligonucleotide
cacaggtcgatctgtaatgctgctggaaca

SEQ ID NO: 101989 - DNA, 30 bp, Artificial Sequence
  Synthetic oligonucleotide
acttgggagggagcgccggggcaatgaaca

SEQ ID NO: 101990 - DNA, 30 bp, Artificial Sequence
  Synthetic oligonucleotide
atccagaaagcggccgtgttagcatgaaca

SEQ ID NO: 101991 - DNA, 30 bp, Artificial Sequence
  Synthetic oligonucleotide
atgtaggaaggtaacgcacaaggatgaaca

SEQ ID NO: 101992 - DNA, 30 bp, Artificial Sequence
  Synthetic oligonucleotide
gattcgaatatccgatgatccacgtgaaca

SEQ ID NO: 101993 - DNA, 30 bp, Artificial Sequence
  Synthetic oligonucleotide
tcctgccagagcccgtagaaggggtgaaca

SEQ ID NO: 101994 - DNA, 30 bp, Artificial Sequence
  Synthetic oligonucleotide
tgatgggcagggcggttaatacatataaca

SEQ ID NO: 101995 - DNA, 30 bp, Artificial Sequence
  Synthetic oligonucleotide
gtagcatactaccggatagcagaactaaca

SEQ ID NO: 101996 - DNA, 30 bp, Artificial Sequence
  Synthetic oligonucleotide
tgctctacagtccaggcaatagccctaaca

SEQ ID NO: 101997 - DNA, 30 bp, Artificial Sequence
  Synthetic oligonucleotide
gtcgcggagaccacgatcagaggggtaaca

SEQ ID NO: 101998 - DNA, 30 bp, Artificial Sequence
  Synthetic oligonucleotide
aaggcgggggtagctatttgattggtaaca

SEQ ID NO: 101999 - DNA, 30 bp, Artificial Sequence
  Synthetic oligonucleotide
caggaaatcggtagcaagcagttggtaaca

SEQ ID NO: 102000 - DNA, 30 bp, Artificial Sequence
  Synthetic oligonucleotide
aagcggcaaaaggtttagggacatttaaca

SEQ ID NO: 102001 - DNA, 30 bp, Artificial Sequence
  Synthetic oligonucleotide
tagtacgaaaagggtgcgccggatttaaca

SEQ ID NO: 102002 - DNA, 30 bp, Artificial Sequence
  Synthetic oligonucleotide
aggacagtacaggggacgcatagtttaaca

SEQ ID NO: 102003 - DNA, 30 bp, Artificial Sequence
  Synthetic oligonucleotide
taacacggcgccggtgatccatttttaaca

SEQ ID NO: 102004 - DNA, 30 bp, Artificial Sequence
  Synthetic oligonucleotide
tgatagcttatgcttcgagaaagcaacaca

SEQ ID NO: 102005 - DNA, 30 bp, Artificial Sequence
  Synthetic oligonucleotide
gcttggcctggcggaccttaaaagaacaca

SEQ ID NO: 102006 - DNA, 30 bp, Artificial Sequence
  Synthetic oligonucleotide
gggcgttatgaatgaagttgatgtcacaca

SEQ ID NO: 102007 - DNA, 30 bp, Artificial Sequence
  Synthetic oligonucleotide
atacgcgctaattgcccaatccttcacaca

SEQ ID NO: 102008 - DNA, 30 bp, Artificial Sequence
  Synthetic oligonucleotide
taagataggtgactgaatagggcagacaca

SEQ ID NO: 102009 - DNA, 30 bp, Artificial Sequence
  Synthetic oligonucleotide
gaggggagaagactgggtaagaggtacaca

SEQ ID NO: 102010 - DNA, 30 bp, Artificial Sequence
  Synthetic oligonucleotide
agaggcagtcgcactgtccgtccgaccaca

SEQ ID NO: 102011 - DNA, 30 bp, Artificial Sequence
  Synthetic oligonucleotide
cagtaggccggcgtattaccctggaccaca

SEQ ID NO: 102012 - DNA, 30 bp, Artificial Sequence
  Synthetic oligonucleotide
aagatcatccgtgttgccgtaatccccaca

SEQ ID NO: 102013 - DNA, 30 bp, Artificial Sequence
  Synthetic oligonucleotide
aaacgcgatatggagggaggtgagcccaca

SEQ ID NO: 102014 - DNA, 30 bp, Artificial Sequence
  Synthetic oligonucleotide
ccagatcacctgacacaaggtgcgcccaca

SEQ ID NO: 102015 - DNA, 30 bp, Artificial Sequence
  Synthetic oligonucleotide
gcggcacgaacgtcttacaatcggcccaca

SEQ ID NO: 102016 - DNA, 30 bp, Artificial Sequence
  Synthetic oligonucleotide
cgatgtttattggacactccgtaagccaca

SEQ ID NO: 102017 - DNA, 30 bp, Artificial Sequence
  Synthetic oligonucleotide
atccgcgcatcaaataatttggctgccaca

SEQ ID NO: 102018 - DNA, 30 bp, Artificial Sequence
  Synthetic oligonucleotide
actcacgctaagtgcgacgccctatccaca

SEQ ID NO: 102019 - DNA, 30 bp, Artificial Sequence
  Synthetic oligonucleotide
aggttggctagagaagagtatggctccaca

SEQ ID NO: 102020 - DNA, 30 bp, Artificial Sequence
  Synthetic oligonucleotide
attagtaggcctacaaagcgattgtccaca

SEQ ID NO: 102021 - DNA, 30 bp, Artificial Sequence
  Synthetic oligonucleotide
agctaataacgatcttcagctcgaagcaca

SEQ ID NO: 102022 - DNA, 30 bp, Artificial Sequence
  Synthetic oligonucleotide
aagaaacttacggagatataaataagcaca

SEQ ID NO: 102023 - DNA, 30 bp, Artificial Sequence
  Synthetic oligonucleotide
gcctttgggaaatggcaatggccgagcaca

SEQ ID NO: 102024 - DNA, 30 bp, Artificial Sequence
  Synthetic oligonucleotide
cacaaacttgttactatttctatgagcaca

SEQ ID NO: 102025 - DNA, 30 bp, Artificial Sequence
  Synthetic oligonucleotide
gcgtacttgggcataaggttggtacgcaca

SEQ ID NO: 102026 - DNA, 30 bp, Artificial Sequence
  Synthetic oligonucleotide
ggactaaatatgcccatgggctgtcgcaca

SEQ ID NO: 102027 - DNA, 30 bp, Artificial Sequence
  Synthetic oligonucleotide
acgctatttaggtagcgttatctaggcaca

SEQ ID NO: 102028 - DNA, 30 bp, Artificial Sequence
  Synthetic oligonucleotide
cggatgtcgtcgcaacccagggccggcaca

SEQ ID NO: 102029 - DNA, 30 bp, Artificial Sequence
  Synthetic oligonucleotide
gttagggctttaaaacgttcactgggcaca

SEQ ID NO: 102030 - DNA, 30 bp, Artificial Sequence
  Synthetic oligonucleotide
ctgacacaacgatagtgtattctgggcaca

SEQ ID NO: 102031 - DNA, 30 bp, Artificial Sequence
  Synthetic oligonucleotide
taagcgataaatctggttatagatggcaca

SEQ ID NO: 102032 - DNA, 30 bp, Artificial Sequence
  Synthetic oligonucleotide
actggagcgcactctaaggttgactgcaca

SEQ ID NO: 102033 - DNA, 30 bp, Artificial Sequence
  Synthetic oligonucleotide
gactgtatgtcgatacgttgatactgcaca

SEQ ID NO: 102034 - DNA, 30 bp, Artificial Sequence
  Synthetic oligonucleotide
gcccacatggcctggtggtgaaggtgcaca

SEQ ID NO: 102035 - DNA, 30 bp, Artificial Sequence
  Synthetic oligonucleotide
cagcaaagcataggaagcaatatgatcaca

SEQ ID NO: 102036 - DNA, 30 bp, Artificial Sequence
  Synthetic oligonucleotide
ccgctaccggttacggggaagcgtatcaca

SEQ ID NO: 102037 - DNA, 30 bp, Artificial Sequence
  Synthetic oligonucleotide
gtgccacccccctaccaagcatttatcaca

SEQ ID NO: 102038 - DNA, 29 bp, Artificial Sequence
  Synthetic oligonucleotide
acggattatcgagggttcgcttggtcaca

SEQ ID NO: 102039 - DNA, 30 bp, Artificial Sequence
  Synthetic oligonucleotide
cctttcatacagaaagtcgcacagttcaca

SEQ ID NO: 102040 - DNA, 30 bp, Artificial Sequence
  Synthetic oligonucleotide
cacaggggaaagctgaagggtcagttcaca

SEQ ID NO: 102041 - DNA, 30 bp, Artificial Sequence
  Synthetic oligonucleotide
caagggccaaagccaatggaacatttcaca

SEQ ID NO: 102042 - DNA, 30 bp, Artificial Sequence
  Synthetic oligonucleotide
gggctaatccatcccaaccccgacaagaca

SEQ ID NO: 102043 - DNA, 30 bp, Artificial Sequence
  Synthetic oligonucleotide
catatggtgaccatggtaaggctcaagaca

SEQ ID NO: 102044 - DNA, 30 bp, Artificial Sequence
  Synthetic oligonucleotide
acatacatttcggttaaggcccagaagaca

SEQ ID NO: 102045 - DNA, 30 bp, Artificial Sequence
  Synthetic oligonucleotide
gggcctaactgcaataatggggagaagaca

SEQ ID NO: 102046 - DNA, 30 bp, Artificial Sequence
  Synthetic oligonucleotide
gatacgtccaggtgatgttccggtaagaca

SEQ ID NO: 102047 - DNA, 30 bp, Artificial Sequence
  Synthetic oligonucleotide
atgtacactgatacatggcagcttaagaca

SEQ ID NO: 102048 - DNA, 30 bp, Artificial Sequence
  Synthetic oligonucleotide
agggctgacgttacatctttaagccagaca

SEQ ID NO: 102049 - DNA, 30 bp, Artificial Sequence
  Synthetic oligonucleotide
ccatccttatgaaattcgaactgtcagaca

SEQ ID NO: 102050 - DNA, 30 bp, Artificial Sequence
  Synthetic oligonucleotide
gccaacgtaagtagcgtatcgtgtcagaca

SEQ ID NO: 102051 - DNA, 30 bp, Artificial Sequence
  Synthetic oligonucleotide
gatccattggataccgttgctacagagaca

SEQ ID NO: 102052 - DNA, 30 bp, Artificial Sequence
  Synthetic oligonucleotide
ccggaatttccttcgaatgctcgcgagaca

SEQ ID NO: 102053 - DNA, 30 bp, Artificial Sequence
  Synthetic oligonucleotide
agagcaagtactgcgttctatggcgagaca

SEQ ID NO: 102054 - DNA, 30 bp, Artificial Sequence
  Synthetic oligonucleotide
gagtaggatgatattgtaaagaaggagaca

SEQ ID NO: 102055 - DNA, 30 bp, Artificial Sequence
  Synthetic oligonucleotide
gtgttagatggtgagaatgtggaggagaca

SEQ ID NO: 102056 - DNA, 30 bp, Artificial Sequence
  Synthetic oligonucleotide
cacgatgatgtgtgcctaaagggtgagaca

SEQ ID NO: 102057 - DNA, 30 bp, Artificial Sequence
  Synthetic oligonucleotide
aattaactcgggcacgtagagtactagaca

SEQ ID NO: 102058 - DNA, 30 bp, Artificial Sequence
  Synthetic oligonucleotide
tgcgtatctaagtccagggccgtctagaca

SEQ ID NO: 102059 - DNA, 30 bp, Artificial Sequence
  Synthetic oligonucleotide
gggcataacagcaactcaaaaatgacgaca

SEQ ID NO: 102060 - DNA, 30 bp, Artificial Sequence
  Synthetic oligonucleotide
ataaccatagaatagatgcttgtgacgaca

SEQ ID NO: 102061 - DNA, 30 bp, Artificial Sequence
  Synthetic oligonucleotide
ggcgaggaaaacggagggaaatgtacgaca

SEQ ID NO: 102062 - DNA, 30 bp, Artificial Sequence
  Synthetic oligonucleotide
tgttagccgtacagcgggtcgaggccgaca

SEQ ID NO: 102063 - DNA, 30 bp, Artificial Sequence
  Synthetic oligonucleotide
gcgtaaaccaaagtattcgagactgcgaca

SEQ ID NO: 102064 - DNA, 30 bp, Artificial Sequence
  Synthetic oligonucleotide
ggtgccatggtatattatcggtctgcgaca

SEQ ID NO: 102065 - DNA, 30 bp, Artificial Sequence
  Synthetic oligonucleotide
atgcaacgtaatttagaaggaaaatcgaca

SEQ ID NO: 102066 - DNA, 30 bp, Artificial Sequence
  Synthetic oligonucleotide
attctgcaaggaccaagaaatctctcgaca

SEQ ID NO: 102067 - DNA, 30 bp, Artificial Sequence
  Synthetic oligonucleotide
gtaggaaatctcaaaggcctaacgtcgaca

SEQ ID NO: 102068 - DNA, 30 bp, Artificial Sequence
  Synthetic oligonucleotide
acacaactattcccgctgacgatgtcgaca

SEQ ID NO: 102069 - DNA, 30 bp, Artificial Sequence
  Synthetic oligonucleotide
caatccgtggcgatagcacacagaaggaca

SEQ ID NO: 102070 - DNA, 30 bp, Artificial Sequence
  Synthetic oligonucleotide
tatccgcgtaagaggcaaagtgacaggaca

SEQ ID NO: 102071 - DNA, 30 bp, Artificial Sequence
  Synthetic oligonucleotide
gcgtgaaaggcacagctcctacaacggaca

SEQ ID NO: 102072 - DNA, 30 bp, Artificial Sequence
  Synthetic oligonucleotide
gcgcgaagagtgccatatctaggacggaca

SEQ ID NO: 102073 - DNA, 30 bp, Artificial Sequence
  Synthetic oligonucleotide
agtaatgtgcagcgcacgatgctacggaca

SEQ ID NO: 102074 - DNA, 30 bp, Artificial Sequence
  Synthetic oligonucleotide
ggaccgtgaaactcgaggcgatggcggaca

SEQ ID NO: 102075 - DNA, 30 bp, Artificial Sequence
  Synthetic oligonucleotide
gacggtaggacccgcctgaaatgagggaca

SEQ ID NO: 102076 - DNA, 30 bp, Artificial Sequence
  Synthetic oligonucleotide
agatcatttagtgtttttgtgttagggaca

SEQ ID NO: 102077 - DNA, 30 bp, Artificial Sequence
  Synthetic oligonucleotide
ctcggcgtgttgcaaacaacgtacgggaca

SEQ ID NO: 102078 - DNA, 30 bp, Artificial Sequence
  Synthetic oligonucleotide
gactgtaggaataaccatcacggtgggaca

SEQ ID NO: 102079 - DNA, 30 bp, Artificial Sequence
  Synthetic oligonucleotide
tatagtgcgggataagactacagttggaca

SEQ ID NO: 102080 - DNA, 30 bp, Artificial Sequence
  Synthetic oligonucleotide
tggactaaagcgtcgcctgtaaacctgaca

SEQ ID NO: 102081 - DNA, 31 bp, Artificial Sequence
  Synthetic oligonucleotide
gctagatcagctaagaaagtcactcctgaca

SEQ ID NO: 102082 - DNA, 30 bp, Artificial Sequence
  Synthetic oligonucleotide
cctataagactcacacagaaatagctgaca

SEQ ID NO: 102083 - DNA, 30 bp, Artificial Sequence
  Synthetic oligonucleotide
gtaaaggtcagacaggcaacagttctgaca

SEQ ID NO: 102084 - DNA, 30 bp, Artificial Sequence
  Synthetic oligonucleotide
ggagaggtaggtagacatcgacaagtgaca

SEQ ID NO: 102085 - DNA, 30 bp, Artificial Sequence
  Synthetic oligonucleotide
cagtagggtaaaccacgtcttagcgtgaca

SEQ ID NO: 102086 - DNA, 30 bp, Artificial Sequence
  Synthetic oligonucleotide
gaaaccaacgaggagcggatgtccttgaca

SEQ ID NO: 102087 - DNA, 30 bp, Artificial Sequence
  Synthetic oligonucleotide
tgtctagcgagaccgcaatggagcttgaca

SEQ ID NO: 102088 - DNA, 30 bp, Artificial Sequence
  Synthetic oligonucleotide
gcccgaagccttgctacaggggtgttgaca

SEQ ID NO: 102089 - DNA, 30 bp, Artificial Sequence
  Synthetic oligonucleotide
agacggcaaattcgatccgccgcgaataca

SEQ ID NO: 102090 - DNA, 30 bp, Artificial Sequence
  Synthetic oligonucleotide
agcatatctagggaagaagagcgtaataca

SEQ ID NO: 102091 - DNA, 30 bp, Artificial Sequence
  Synthetic oligonucleotide
cgaatagtgatctccaacgtctgccataca

SEQ ID NO: 102092 - DNA, 30 bp, Artificial Sequence
  Synthetic oligonucleotide
agggtggcaccgagaagttgacgagataca

SEQ ID NO: 102093 - DNA, 30 bp, Artificial Sequence
  Synthetic oligonucleotide
acatgataaaagggcgtaattcacgataca

SEQ ID NO: 102094 - DNA, 30 bp, Artificial Sequence
  Synthetic oligonucleotide
ctctcggtaagggggcaatcgatcgataca

SEQ ID NO: 102095 - DNA, 30 bp, Artificial Sequence
  Synthetic oligonucleotide
agataagtacctcatgtggtatactataca

SEQ ID NO: 102096 - DNA, 30 bp, Artificial Sequence
  Synthetic oligonucleotide
gtaacgcttaggtggctcgacgggtataca

SEQ ID NO: 102097 - DNA, 30 bp, Artificial Sequence
  Synthetic oligonucleotide
tggacaaggagatcactaataggtactaca

SEQ ID NO: 102098 - DNA, 30 bp, Artificial Sequence
  Synthetic oligonucleotide
gctaatgcatgaaccgaattcgttactaca

SEQ ID NO: 102099 - DNA, 30 bp, Artificial Sequence
  Synthetic oligonucleotide
acgcgatagtcagggctacgtgggcctaca

SEQ ID NO: 102100 - DNA, 30 bp, Artificial Sequence
  Synthetic oligonucleotide
gccgagtcaaccgagcccgaacacgctaca

SEQ ID NO: 102101 - DNA, 30 bp, Artificial Sequence
  Synthetic oligonucleotide
tcaaacacatgaggtcttgtggtcgctaca

SEQ ID NO: 102102 - DNA, 30 bp, Artificial Sequence
  Synthetic oligonucleotide
atttggatgcgtagggcaaggtatgctaca

SEQ ID NO: 102103 - DNA, 30 bp, Artificial Sequence
  Synthetic oligonucleotide
actggaggtccgtaagagttcactgctaca

SEQ ID NO: 102104 - DNA, 31 bp, Artificial Sequence
  Synthetic oligonucleotide
actatccgccccagatggctgaacgagtaca

SEQ ID NO: 102105 - DNA, 30 bp, Artificial Sequence
  Synthetic oligonucleotide
tgcgtactggcaatggccaccagacgtaca

SEQ ID NO: 102106 - DNA, 30 bp, Artificial Sequence
  Synthetic oligonucleotide
aggacccatcacggacaacttgcccgtaca

SEQ ID NO: 102107 - DNA, 30 bp, Artificial Sequence
  Synthetic oligonucleotide
aacgggacggtcggtctcaatagcggtaca

SEQ ID NO: 102108 - DNA, 30 bp, Artificial Sequence
  Synthetic oligonucleotide
tatgggatcgtacccactgtacatggtaca

SEQ ID NO: 102109 - DNA, 30 bp, Artificial Sequence
  Synthetic oligonucleotide
tagggggagtccgtgtcgaacgggtgtaca

SEQ ID NO: 102110 - DNA, 30 bp, Artificial Sequence
  Synthetic oligonucleotide
ataggggcgtgagatagagactgaattaca

SEQ ID NO: 102111 - DNA, 30 bp, Artificial Sequence
  Synthetic oligonucleotide
cggatcaggaggacttatcgggagattaca

SEQ ID NO: 102112 - DNA, 30 bp, Artificial Sequence
  Synthetic oligonucleotide
tggcaatcactcaccccacgcgtacttaca

SEQ ID NO: 102113 - DNA, 30 bp, Artificial Sequence
  Synthetic oligonucleotide
tagggctaaaatcctaatgtaaccgttaca

SEQ ID NO: 102114 - DNA, 30 bp, Artificial Sequence
  Synthetic oligonucleotide
gatgtgttggcaccactagaaggaaaacca

SEQ ID NO: 102115 - DNA, 30 bp, Artificial Sequence
  Synthetic oligonucleotide
cgtcaattgagattcacaggccggaaacca

SEQ ID NO: 102116 - DNA, 30 bp, Artificial Sequence
  Synthetic oligonucleotide
cagagagtctatcaaaagttcagtcaacca

SEQ ID NO: 102117 - DNA, 30 bp, Artificial Sequence
  Synthetic oligonucleotide
gtcttatactaggtcggtaaccgtcaacca

SEQ ID NO: 102118 - DNA, 30 bp, Artificial Sequence
  Synthetic oligonucleotide
tagacagatcgcctccgagggggagaacca

SEQ ID NO: 102119 - DNA, 30 bp, Artificial Sequence
  Synthetic oligonucleotide
agagagttagcagggaccttcgaataacca

SEQ ID NO: 102120 - DNA, 30 bp, Artificial Sequence
  Synthetic oligonucleotide
gtatcaatggacgctgaaaagatctaacca

SEQ ID NO: 102121 - DNA, 30 bp, Artificial Sequence
  Synthetic oligonucleotide
ccatcgtggcctgatatcactcggtaacca

SEQ ID NO: 102122 - DNA, 30 bp, Artificial Sequence
  Synthetic oligonucleotide
ggactctatacaagtgctaacaacacacca

SEQ ID NO: 102123 - DNA, 30 bp, Artificial Sequence
  Synthetic oligonucleotide
gtgcaatcggatcagcgcacctctacacca

SEQ ID NO: 102124 - DNA, 30 bp, Artificial Sequence
  Synthetic oligonucleotide
aagggatagagatctaaatagaaaccacca

SEQ ID NO: 102125 - DNA, 30 bp, Artificial Sequence
  Synthetic oligonucleotide
aatggcgccgacagtccgtcacagccacca

SEQ ID NO: 102126 - DNA, 30 bp, Artificial Sequence
  Synthetic oligonucleotide
ggtcattaataagggagcatcaaagcacca

SEQ ID NO: 102127 - DNA, 30 bp, Artificial Sequence
  Synthetic oligonucleotide
tgacacacgtgcagcagactctaggcacca

SEQ ID NO: 102128 - DNA, 30 bp, Artificial Sequence
  Synthetic oligonucleotide
ccggcgtcgttaagtcttgagaagtcacca

SEQ ID NO: 102129 - DNA, 31 bp, Artificial Sequence
  Synthetic oligonucleotide
cgatttataaactgcaggcgagacgtcacca

SEQ ID NO: 102130 - DNA, 30 bp, Artificial Sequence
  Synthetic oligonucleotide
tcgtggcctctcgtcaagaagcacagacca

SEQ ID NO: 102131 - DNA, 30 bp, Artificial Sequence
  Synthetic oligonucleotide
gctccacataaaacatcggcgttgcgacca

SEQ ID NO: 102132 - DNA, 30 bp, Artificial Sequence
  Synthetic oligonucleotide
aggcaacaatgtatgggtaagccaggacca

SEQ ID NO: 102133 - DNA, 30 bp, Artificial Sequence
  Synthetic oligonucleotide
ccagggcaatcgtcttcgcgacgaggacca

SEQ ID NO: 102134 - DNA, 30 bp, Artificial Sequence
  Synthetic oligonucleotide
accttaaagattagacaattatggggacca

SEQ ID NO: 102135 - DNA, 30 bp, Artificial Sequence
  Synthetic oligonucleotide
cggctgtgccacatcaggcggggatgacca

SEQ ID NO: 102136 - DNA, 30 bp, Artificial Sequence
  Synthetic oligonucleotide
ctaagcccgggagcctaagggtactgacca

SEQ ID NO: 102137 - DNA, 30 bp, Artificial Sequence
  Synthetic oligonucleotide
caacgtggcactccgaaagaacggtgacca

SEQ ID NO: 102138 - DNA, 30 bp, Artificial Sequence
  Synthetic oligonucleotide
ctgtccctgtatgtaacactggtgtgacca

SEQ ID NO: 102139 - DNA, 30 bp, Artificial Sequence
  Synthetic oligonucleotide
ggaggattaagctgtccaatcaaaatacca

SEQ ID NO: 102140 - DNA, 30 bp, Artificial Sequence
  Synthetic oligonucleotide
acagtaaactatcgattctttgcaatacca

SEQ ID NO: 102141 - DNA, 30 bp, Artificial Sequence
  Synthetic oligonucleotide
gtaaaggtcgagttagcggatagaatacca

SEQ ID NO: 102142 - DNA, 30 bp, Artificial Sequence
  Synthetic oligonucleotide
gagagactcggggagaccataccgatacca

SEQ ID NO: 102143 - DNA, 30 bp, Artificial Sequence
  Synthetic oligonucleotide
gactaccaaccaacgaaggattacctacca

SEQ ID NO: 102144 - DNA, 30 bp, Artificial Sequence
  Synthetic oligonucleotide
ggtgtgctttgcctgagtgcatatctacca

SEQ ID NO: 102145 - DNA, 30 bp, Artificial Sequence
  Synthetic oligonucleotide
aagagggtggcgagacagtttggcgtacca

SEQ ID NO: 102146 - DNA, 30 bp, Artificial Sequence
  Synthetic oligonucleotide
tgcagaactctgcaggaacatagggtacca

SEQ ID NO: 102147 - DNA, 30 bp, Artificial Sequence
  Synthetic oligonucleotide
gtggggaagtaataggaggcagatgtacca

SEQ ID NO: 102148 - DNA, 30 bp, Artificial Sequence
  Synthetic oligonucleotide
tcattgctcatcgcgagaagctcattacca

SEQ ID NO: 102149 - DNA, 30 bp, Artificial Sequence
  Synthetic oligonucleotide
gtcacgggaccgctagggcgctggttacca

SEQ ID NO: 102150 - DNA, 30 bp, Artificial Sequence
  Synthetic oligonucleotide
aacactgagagagcgtagtacagtttacca

SEQ ID NO: 102151 - DNA, 30 bp, Artificial Sequence
  Synthetic oligonucleotide
gagggaggacttaggcacgtttacaaccca

SEQ ID NO: 102152 - DNA, 30 bp, Artificial Sequence
  Synthetic oligonucleotide
ctttgagttcaatgggaaagagccaaccca

SEQ ID NO: 102153 - DNA, 30 bp, Artificial Sequence
  Synthetic oligonucleotide
accggtgcgctaaaaaaaaaccataaccca

SEQ ID NO: 102154 - DNA, 30 bp, Artificial Sequence
  Synthetic oligonucleotide
aggtaaacaggtcatccttacagccaccca

SEQ ID NO: 102155 - DNA, 30 bp, Artificial Sequence
  Synthetic oligonucleotide
tcggtaagtatgggagtcaagacagaccca

SEQ ID NO: 102156 - DNA, 30 bp, Artificial Sequence
  Synthetic oligonucleotide
cggactgattggacgcaattacaggaccca

SEQ ID NO: 102157 - DNA, 30 bp, Artificial Sequence
  Synthetic oligonucleotide
tcttatgaccacatcttgataagggaccca

SEQ ID NO: 102158 - DNA, 30 bp, Artificial Sequence
  Synthetic oligonucleotide
ggtcccaagcctgtcaccatggcaacccca

SEQ ID NO: 102159 - DNA, 30 bp, Artificial Sequence
  Synthetic oligonucleotide
ttaacaatcgaagggtgtagcgcgccccca

SEQ ID NO: 102160 - DNA, 30 bp, Artificial Sequence
  Synthetic oligonucleotide
cggattgccatcgcggtgctataatcccca

SEQ ID NO: 102161 - DNA, 30 bp, Artificial Sequence
  Synthetic oligonucleotide
gggaggctacaagcgcgcaaggggtcccca

SEQ ID NO: 102162 - DNA, 30 bp, Artificial Sequence
  Synthetic oligonucleotide
gggcgggcagttatgtctctagtaagccca

SEQ ID NO: 102163 - DNA, 30 bp, Artificial Sequence
  Synthetic oligonucleotide
agtaggccatccaaagacaagaatagccca

SEQ ID NO: 102164 - DNA, 30 bp, Artificial Sequence
  Synthetic oligonucleotide
actgtgtaggtcaaagagcagcttcgccca

SEQ ID NO: 102165 - DNA, 30 bp, Artificial Sequence
  Synthetic oligonucleotide
tcacagcccgctcaatagattgttcgccca

SEQ ID NO: 102166 - DNA, 30 bp, Artificial Sequence
  Synthetic oligonucleotide
ctagtggaagattaacgggatggcggccca

SEQ ID NO: 102167 - DNA, 30 bp, Artificial Sequence
  Synthetic oligonucleotide
ggtagaggaccttaagagtaggagggccca

SEQ ID NO: 102168 - DNA, 30 bp, Artificial Sequence
  Synthetic oligonucleotide
actactactcaagctgccgtgtcgggccca

SEQ ID NO: 102169 - DNA, 30 bp, Artificial Sequence
  Synthetic oligonucleotide
cgctcctcaaggaccgacccctatggccca

SEQ ID NO: 102170 - DNA, 30 bp, Artificial Sequence
  Synthetic oligonucleotide
cccgtggtttcacacgaacttatctgccca

SEQ ID NO: 102171 - DNA, 30 bp, Artificial Sequence
  Synthetic oligonucleotide
tagctgttgcggattcgtagtttgtgccca

SEQ ID NO: 102172 - DNA, 30 bp, Artificial Sequence
  Synthetic oligonucleotide
cgttcataaagcagggacgcgttaatccca

SEQ ID NO: 102173 - DNA, 30 bp, Artificial Sequence
  Synthetic oligonucleotide
agcggttagcaggttgtgcgtcgcatccca

SEQ ID NO: 102174 - DNA, 29 bp, Artificial Sequence
  Synthetic oligonucleotide
tcggctcagcgaatggcagcatcatccca

SEQ ID NO: 102175 - DNA, 30 bp, Artificial Sequence
  Synthetic oligonucleotide
agttgaggtccagtaatcataaagatccca

SEQ ID NO: 102176 - DNA, 31 bp, Artificial Sequence
  Synthetic oligonucleotide
acggtgtaccaagggtgcccgtgagatccca

SEQ ID NO: 102177 - DNA, 30 bp, Artificial Sequence
  Synthetic oligonucleotide
cacctgaacgagaatgtgaaacatatccca

SEQ ID NO: 102178 - DNA, 30 bp, Artificial Sequence
  Synthetic oligonucleotide
ggatacagtcgatagacacagaggctccca

SEQ ID NO: 102179 - DNA, 30 bp, Artificial Sequence
  Synthetic oligonucleotide
ccgctatcaacggtagtagagcttctccca

SEQ ID NO: 102180 - DNA, 30 bp, Artificial Sequence
  Synthetic oligonucleotide
ccacaattcttacccatgggtataaagcca

SEQ ID NO: 102181 - DNA, 30 bp, Artificial Sequence
  Synthetic oligonucleotide
ctccaggtatgcatctaatcagtaaagcca

SEQ ID NO: 102182 - DNA, 30 bp, Artificial Sequence
  Synthetic oligonucleotide
cataaaggggtcagcaattgcaacaagcca

SEQ ID NO: 102183 - DNA, 30 bp, Artificial Sequence
  Synthetic oligonucleotide
caataccatcggtccaatactgggaagcca

SEQ ID NO: 102184 - DNA, 30 bp, Artificial Sequence
  Synthetic oligonucleotide
tcgtagatacatatgggaggtgcacagcca

SEQ ID NO: 102185 - DNA, 30 bp, Artificial Sequence
  Synthetic oligonucleotide
gtggcttgtggaggattaacccagcagcca

SEQ ID NO: 102186 - DNA, 30 bp, Artificial Sequence
  Synthetic oligonucleotide
attcgtcggtattgacatcgggaagagcca

SEQ ID NO: 102187 - DNA, 30 bp, Artificial Sequence
  Synthetic oligonucleotide
atcgggaacgggcctcagcaactcgagcca

SEQ ID NO: 102188 - DNA, 30 bp, Artificial Sequence
  Synthetic oligonucleotide
tgcacgcggagcgggttactcagatagcca

SEQ ID NO: 102189 - DNA, 30 bp, Artificial Sequence
  Synthetic oligonucleotide
tcatcctttagggtaggctgggttacgcca

SEQ ID NO: 102190 - DNA, 30 bp, Artificial Sequence
  Synthetic oligonucleotide
gtagctgggaacttgatcggtcgcccgcca

SEQ ID NO: 102191 - DNA, 30 bp, Artificial Sequence
  Synthetic oligonucleotide
cgatgtggcgtctatattacgtggtcgcca

SEQ ID NO: 102192 - DNA, 31 bp, Artificial Sequence
  Synthetic oligonucleotide
acggttgatgctcgtgagaaatggtaggcca

SEQ ID NO: 102193 - DNA, 30 bp, Artificial Sequence
  Synthetic oligonucleotide
caagcagcggatctctccatgcaacggcca

SEQ ID NO: 102194 - DNA, 30 bp, Artificial Sequence
  Synthetic oligonucleotide
ggggcaagagaatcctcctcccgagggcca

SEQ ID NO: 102195 - DNA, 30 bp, Artificial Sequence
  Synthetic oligonucleotide
caacaaacgtgagtgagtaggtcttggcca

SEQ ID NO: 102196 - DNA, 30 bp, Artificial Sequence
  Synthetic oligonucleotide
gtgtaaaaaattacgggttcctacatgcca

SEQ ID NO: 102197 - DNA, 30 bp, Artificial Sequence
  Synthetic oligonucleotide
gctagctattgagggtagggaatcatgcca

SEQ ID NO: 102198 - DNA, 30 bp, Artificial Sequence
  Synthetic oligonucleotide
catcagctagaaggcgcgtacgggatgcca

SEQ ID NO: 102199 - DNA, 30 bp, Artificial Sequence
  Synthetic oligonucleotide
tgtcgtcaaaaacaaagtaaaaccctgcca

SEQ ID NO: 102200 - DNA, 30 bp, Artificial Sequence
  Synthetic oligonucleotide
cccaaggatacaggtgtgcaggtgctgcca

SEQ ID NO: 102201 - DNA, 30 bp, Artificial Sequence
  Synthetic oligonucleotide
atgcgtgttatacagtagggcactgtgcca

SEQ ID NO: 102202 - DNA, 30 bp, Artificial Sequence
  Synthetic oligonucleotide
gacaatacatctggaggcgaccttaatcca

SEQ ID NO: 102203 - DNA, 30 bp, Artificial Sequence
  Synthetic oligonucleotide
acatagatcaaacacggaaggctccatcca

SEQ ID NO: 102204 - DNA, 30 bp, Artificial Sequence
  Synthetic oligonucleotide
atcaagggcctaatgctaaaggcatatcca

SEQ ID NO: 102205 - DNA, 30 bp, Artificial Sequence
  Synthetic oligonucleotide
tcagagtaacttcagcgaggggtttatcca

SEQ ID NO: 102206 - DNA, 30 bp, Artificial Sequence
  Synthetic oligonucleotide
aaggagaacattttgacatatacgactcca

SEQ ID NO: 102207 - DNA, 30 bp, Artificial Sequence
  Synthetic oligonucleotide
tggtgtgtgtgggtaagaacctgccctcca

SEQ ID NO: 102208 - DNA, 30 bp, Artificial Sequence
  Synthetic oligonucleotide
gggccctcagtagaaagaagccctcctcca

SEQ ID NO: 102209 - DNA, 30 bp, Artificial Sequence
  Synthetic oligonucleotide
gtttctgcatccgaatcgtgacaagctcca

SEQ ID NO: 102210 - DNA, 30 bp, Artificial Sequence
  Synthetic oligonucleotide
tggctaggacgaccgactttcgacgctcca

SEQ ID NO: 102211 - DNA, 30 bp, Artificial Sequence
  Synthetic oligonucleotide
ggcaaatgctcaaatgattatattgctcca

SEQ ID NO: 102212 - DNA, 30 bp, Artificial Sequence
  Synthetic oligonucleotide
ccctgcaacgctctccacaagatatctcca

SEQ ID NO: 102213 - DNA, 30 bp, Artificial Sequence
  Synthetic oligonucleotide
catccaactgggtaaggtatgtcgtctcca

SEQ ID NO: 102214 - DNA, 30 bp, Artificial Sequence
  Synthetic oligonucleotide
cctcgggcgaacatcgctatagattctcca

SEQ ID NO: 102215 - DNA, 30 bp, Artificial Sequence
  Synthetic oligonucleotide
tcggcgagggcaggctgaaggacgagtcca

SEQ ID NO: 102216 - DNA, 30 bp, Artificial Sequence
  Synthetic oligonucleotide
cccgccacctctgaacaaggagggagtcca

SEQ ID NO: 102217 - DNA, 30 bp, Artificial Sequence
  Synthetic oligonucleotide
cgtaaccgtcgaactcttctctttagtcca

SEQ ID NO: 102218 - DNA, 30 bp, Artificial Sequence
  Synthetic oligonucleotide
tagtggtaaactcccggcggaaaaggtcca

SEQ ID NO: 102219 - DNA, 30 bp, Artificial Sequence
  Synthetic oligonucleotide
acatatccacaaacacctccggcatgtcca

SEQ ID NO: 102220 - DNA, 30 bp, Artificial Sequence
  Synthetic oligonucleotide
aagcagaaacccgaatgggaagtgtgtcca

SEQ ID NO: 102221 - DNA, 30 bp, Artificial Sequence
  Synthetic oligonucleotide
gggcgccgtacaaagtgatctaacgttcca

SEQ ID NO: 102222 - DNA, 30 bp, Artificial Sequence
  Synthetic oligonucleotide
ggtaatcaggctagtccctggcgaaaagca

SEQ ID NO: 102223 - DNA, 30 bp, Artificial Sequence
  Synthetic oligonucleotide
ggtggtaagatgtgcataccggcgaaagca

SEQ ID NO: 102224 - DNA, 30 bp, Artificial Sequence
  Synthetic oligonucleotide
cagggttgcgggttctcgacgaaacaagca

SEQ ID NO: 102225 - DNA, 30 bp, Artificial Sequence
  Synthetic oligonucleotide
caattgtcagttgcacgagtactacaagca

SEQ ID NO: 102226 - DNA, 29 bp, Artificial Sequence
  Synthetic oligonucleotide
gactaagaaaaaacctcaacaagcaagca

SEQ ID NO: 102227 - DNA, 30 bp, Artificial Sequence
  Synthetic oligonucleotide
gtgccatagcgggagccataatgcgaagca

SEQ ID NO: 102228 - DNA, 30 bp, Artificial Sequence
  Synthetic oligonucleotide
catgatattcttggctggatatgggaagca

SEQ ID NO: 102229 - DNA, 30 bp, Artificial Sequence
  Synthetic oligonucleotide
acgattgtcctatgtcgtcagtgataagca

SEQ ID NO: 102230 - DNA, 30 bp, Artificial Sequence
  Synthetic oligonucleotide
gggtcgggaaggacatacccagtataagca

SEQ ID NO: 102231 - DNA, 30 bp, Artificial Sequence
  Synthetic oligonucleotide
gaggtacttaaagccagacaagtgtaagca

SEQ ID NO: 102232 - DNA, 30 bp, Artificial Sequence
  Synthetic oligonucleotide
agtcagttcgccaagcgggccacttaagca

SEQ ID NO: 102233 - DNA, 30 bp, Artificial Sequence
  Synthetic oligonucleotide
atctgcacggagtaatcaatcttttaagca

SEQ ID NO: 102234 - DNA, 30 bp, Artificial Sequence
  Synthetic oligonucleotide
ataccgagagtgtcctttgtcttaacagca

SEQ ID NO: 102235 - DNA, 30 bp, Artificial Sequence
  Synthetic oligonucleotide
taggtatgcccggcgagtagacgaccagca

SEQ ID NO: 102236 - DNA, 30 bp, Artificial Sequence
  Synthetic oligonucleotide
tcggacgcatagaaatattcattaccagca

SEQ ID NO: 102237 - DNA, 30 bp, Artificial Sequence
  Synthetic oligonucleotide
taacgtgtgtccaccaacaagcgggcagca

SEQ ID NO: 102238 - DNA, 30 bp, Artificial Sequence
  Synthetic oligonucleotide
ccctctgaccggaccccacctcgatcagca

SEQ ID NO: 102239 - DNA, 30 bp, Artificial Sequence
  Synthetic oligonucleotide
cagaggttgtatgatacaggatcttcagca

SEQ ID NO: 102240 - DNA, 30 bp, Artificial Sequence
  Synthetic oligonucleotide
acagcgttggggatggcaccgctaagagca

SEQ ID NO: 102241 - DNA, 30 bp, Artificial Sequence
  Synthetic oligonucleotide
cctgtgttcgatttcgccccgagcagagca

SEQ ID NO: 102242 - DNA, 30 bp, Artificial Sequence
  Synthetic oligonucleotide
gggttcggacagagacactgtgtcagagca

SEQ ID NO: 102243 - DNA, 30 bp, Artificial Sequence
  Synthetic oligonucleotide
atagtggtaaccggactcgtggagagagca

SEQ ID NO: 102244 - DNA, 30 bp, Artificial Sequence
  Synthetic oligonucleotide
atctacttgccaacaagtccgtgacgagca

SEQ ID NO: 102245 - DNA, 30 bp, Artificial Sequence
  Synthetic oligonucleotide
gtcataaaatgtgtgccgggaaagcgagca

SEQ ID NO: 102246 - DNA, 30 bp, Artificial Sequence
  Synthetic oligonucleotide
atgcctcgtaaggattagggggggcgagca

SEQ ID NO: 102247 - DNA, 30 bp, Artificial Sequence
  Synthetic oligonucleotide
ttcgggcataatgaccctaagcctcgagca

SEQ ID NO: 102248 - DNA, 30 bp, Artificial Sequence
  Synthetic oligonucleotide
gcgcccagcatgagacagttcgaatgagca

SEQ ID NO: 102249 - DNA, 30 bp, Artificial Sequence
  Synthetic oligonucleotide
tacctagtaccaaaggtaccgtcatgagca

SEQ ID NO: 102250 - DNA, 30 bp, Artificial Sequence
  Synthetic oligonucleotide
acataattccggccaacgtgcctatgagca

SEQ ID NO: 102251 - DNA, 30 bp, Artificial Sequence
  Synthetic oligonucleotide
aatcaatgggaccgtatctgagtatgagca

SEQ ID NO: 102252 - DNA, 30 bp, Artificial Sequence
  Synthetic oligonucleotide
acaccagccgtggttcgatcatactgagca

SEQ ID NO: 102253 - DNA, 30 bp, Artificial Sequence
  Synthetic oligonucleotide
tgaggacgaaacacgacgtacgtgtgagca

SEQ ID NO: 102254 - DNA, 30 bp, Artificial Sequence
  Synthetic oligonucleotide
ttaggtctcaacgagcctaaagtttgagca

SEQ ID NO: 102255 - DNA, 30 bp, Artificial Sequence
  Synthetic oligonucleotide
cgatacattaactgctaacctgcaatagca

SEQ ID NO: 102256 - DNA, 30 bp, Artificial Sequence
  Synthetic oligonucleotide
gatcagggaataataaactcagccatagca

SEQ ID NO: 102257 - DNA, 30 bp, Artificial Sequence
  Synthetic oligonucleotide
gccagaaatcgctcgcgtggcgaactagca

SEQ ID NO: 102258 - DNA, 30 bp, Artificial Sequence
  Synthetic oligonucleotide
ggaagagttggtgacgccccgtatctagca

SEQ ID NO: 102259 - DNA, 30 bp, Artificial Sequence
  Synthetic oligonucleotide
ggtcctcaagggtctccatgaattctagca

SEQ ID NO: 102260 - DNA, 30 bp, Artificial Sequence
  Synthetic oligonucleotide
gtattgagctggcctggatcgtgagtagca

SEQ ID NO: 102261 - DNA, 30 bp, Artificial Sequence
  Synthetic oligonucleotide
gcagcggtgaactgagctgtcgtggtagca

SEQ ID NO: 102262 - DNA, 30 bp, Artificial Sequence
  Synthetic oligonucleotide
caagtcaacacaggcctgaacctcttagca

SEQ ID NO: 102263 - DNA, 30 bp, Artificial Sequence
  Synthetic oligonucleotide
ggaaacccaagaggagttactgttttagca

SEQ ID NO: 102264 - DNA, 30 bp, Artificial Sequence
  Synthetic oligonucleotide
aataatgcaaacgtaaactacaacaacgca

SEQ ID NO: 102265 - DNA, 30 bp, Artificial Sequence
  Synthetic oligonucleotide
gcggcccatgatgcaagagaagataacgca

SEQ ID NO: 102266 - DNA, 30 bp, Artificial Sequence
  Synthetic oligonucleotide
ctggttatgggagtcgcgaggaaccacgca

SEQ ID NO: 102267 - DNA, 30 bp, Artificial Sequence
  Synthetic oligonucleotide
ctcgaggtggcgacagccataacccacgca

SEQ ID NO: 102268 - DNA, 30 bp, Artificial Sequence
  Synthetic oligonucleotide
agttgagaaacagaccgataaagtcacgca

SEQ ID NO: 102269 - DNA, 30 bp, Artificial Sequence
  Synthetic oligonucleotide
ggtagtagtgcatggggtcatcggtacgca

SEQ ID NO: 102270 - DNA, 30 bp, Artificial Sequence
  Synthetic oligonucleotide
tctacgatcgacacaacaactcgaaccgca

SEQ ID NO: 102271 - DNA, 30 bp, Artificial Sequence
  Synthetic oligonucleotide
acctccgtgacagggctaaggcagaccgca

SEQ ID NO: 102272 - DNA, 30 bp, Artificial Sequence
  Synthetic oligonucleotide
tggcttgaaaaggggctgggaccgaccgca

SEQ ID NO: 102273 - DNA, 30 bp, Artificial Sequence
  Synthetic oligonucleotide
gtaaaagaaccaagatgcgttaataccgca

SEQ ID NO: 102274 - DNA, 30 bp, Artificial Sequence
  Synthetic oligonucleotide
aaccaccacactatccgcactaaacccgca

SEQ ID NO: 102275 - DNA, 30 bp, Artificial Sequence
  Synthetic oligonucleotide
tagtccggttaggctctcgagtaacccgca

SEQ ID NO: 102276 - DNA, 30 bp, Artificial Sequence
  Synthetic oligonucleotide
cctatgtactccaaaacggggtgacccgca

SEQ ID NO: 102277 - DNA, 30 bp, Artificial Sequence
  Synthetic oligonucleotide
agtacggtctgaaaatgacagttggccgca

SEQ ID NO: 102278 - DNA, 30 bp, Artificial Sequence
  Synthetic oligonucleotide
gcgaaggcgttaacacattcaatcagcgca

SEQ ID NO: 102279 - DNA, 30 bp, Artificial Sequence
  Synthetic oligonucleotide
tagacgccagaggtaatatggatcagcgca

SEQ ID NO: 102280 - DNA, 30 bp, Artificial Sequence
  Synthetic oligonucleotide
ctaattagaccttcggctatacagagcgca

SEQ ID NO: 102281 - DNA, 30 bp, Artificial Sequence
  Synthetic oligonucleotide
cgtgaactaccgctactgaaatggagcgca

SEQ ID NO: 102282 - DNA, 30 bp, Artificial Sequence
  Synthetic oligonucleotide
agtagtactgctgcaagaactcatagcgca

SEQ ID NO: 102283 - DNA, 30 bp, Artificial Sequence
  Synthetic oligonucleotide
ggagagctgtgtaatggcgtctagcgcgca

SEQ ID NO: 102284 - DNA, 30 bp, Artificial Sequence
  Synthetic oligonucleotide
cttactaaacttacgttgcgagtgcgcgca

SEQ ID NO: 102285 - DNA, 30 bp, Artificial Sequence
  Synthetic oligonucleotide
ctgccacagctgttgtcaacactgggcgca

SEQ ID NO: 102286 - DNA, 30 bp, Artificial Sequence
  Synthetic oligonucleotide
ctcagaacaagtgagacccgcattggcgca

SEQ ID NO: 102287 - DNA, 30 bp, Artificial Sequence
  Synthetic oligonucleotide
ccttcgtcaaatcggaagtacagaatcgca

SEQ ID NO: 102288 - DNA, 30 bp, Artificial Sequence
  Synthetic oligonucleotide
aacggcgcaacgtagttatcctccatcgca

SEQ ID NO: 102289 - DNA, 30 bp, Artificial Sequence
  Synthetic oligonucleotide
tattcgaaagagaggggtcagaagatcgca

SEQ ID NO: 102290 - DNA, 30 bp, Artificial Sequence
  Synthetic oligonucleotide
gttaggcactagttaaagccattgatcgca

SEQ ID NO: 102291 - DNA, 30 bp, Artificial Sequence
  Synthetic oligonucleotide
atgcttagtaccaggacactcgtactcgca

SEQ ID NO: 102292 - DNA, 30 bp, Artificial Sequence
  Synthetic oligonucleotide
gggactgcgatcctttgtggtgccgtcgca

SEQ ID NO: 102293 - DNA, 30 bp, Artificial Sequence
  Synthetic oligonucleotide
cgtgatgttacagtgaccgtaaaggtcgca

SEQ ID NO: 102294 - DNA, 30 bp, Artificial Sequence
  Synthetic oligonucleotide
gatgggagctgtagcggctgtgctgtcgca

SEQ ID NO: 102295 - DNA, 30 bp, Artificial Sequence
  Synthetic oligonucleotide
tcgagtccgatcgataacgattctgtcgca

SEQ ID NO: 102296 - DNA, 30 bp, Artificial Sequence
  Synthetic oligonucleotide
gtggcgaaacactagagcagaccgttcgca

SEQ ID NO: 102297 - DNA, 30 bp, Artificial Sequence
  Synthetic oligonucleotide
acgaagaacgaagagggatctaggttcgca

SEQ ID NO: 102298 - DNA, 30 bp, Artificial Sequence
  Synthetic oligonucleotide
tgtgagaagcagcgcgacaatcgaaaggca

SEQ ID NO: 102299 - DNA, 30 bp, Artificial Sequence
  Synthetic oligonucleotide
ccgccagcagcgggctgatatcgcaaggca

SEQ ID NO: 102300 - DNA, 30 bp, Artificial Sequence
  Synthetic oligonucleotide
caaaggctcacaccagaaatttttaaggca

SEQ ID NO: 102301 - DNA, 30 bp, Artificial Sequence
  Synthetic oligonucleotide
tgctgtggataataatgcacacaccaggca

SEQ ID NO: 102302 - DNA, 30 bp, Artificial Sequence
  Synthetic oligonucleotide
actaagttcctgagtagggatagtcaggca

SEQ ID NO: 102303 - DNA, 30 bp, Artificial Sequence
  Synthetic oligonucleotide
tgggcaaagcacgacagatagtgtcaggca

SEQ ID NO: 102304 - DNA, 30 bp, Artificial Sequence
  Synthetic oligonucleotide
gacccaaaacgttgtggaggtgaagaggca

SEQ ID NO: 102305 - DNA, 30 bp, Artificial Sequence
  Synthetic oligonucleotide
tagtgacttatattagaagccagggaggca

SEQ ID NO: 102306 - DNA, 30 bp, Artificial Sequence
  Synthetic oligonucleotide
taccagaatacgaccgcgaggacaacggca

SEQ ID NO: 102307 - DNA, 30 bp, Artificial Sequence
  Synthetic oligonucleotide
gatgttaaaaatactatatcctagccggca

SEQ ID NO: 102308 - DNA, 30 bp, Artificial Sequence
  Synthetic oligonucleotide
atacttaagtggctataagcactgccggca

SEQ ID NO: 102309 - DNA, 30 bp, Artificial Sequence
  Synthetic oligonucleotide
atgcacgcttggtgagctgtctgtccggca

SEQ ID NO: 102310 - DNA, 30 bp, Artificial Sequence
  Synthetic oligonucleotide
tatcccgggggaatgcttctccaagcggca

SEQ ID NO: 102311 - DNA, 30 bp, Artificial Sequence
  Synthetic oligonucleotide
ttgcgcacggattgttaccggacagcggca

SEQ ID NO: 102312 - DNA, 30 bp, Artificial Sequence
  Synthetic oligonucleotide
catgcgcaatcaagaactgacggggcggca

SEQ ID NO: 102313 - DNA, 30 bp, Artificial Sequence
  Synthetic oligonucleotide
gagtccatcggaatctccagtttggcggca

SEQ ID NO: 102314 - DNA, 30 bp, Artificial Sequence
  Synthetic oligonucleotide
agttgttcaaggggatcatcgtcatcggca

SEQ ID NO: 102315 - DNA, 30 bp, Artificial Sequence
  Synthetic oligonucleotide
tgagagctctagcggtcaggcaaaagggca

SEQ ID NO: 102316 - DNA, 30 bp, Artificial Sequence
  Synthetic oligonucleotide
aaggcattaaaacttatcgttcaaagggca

SEQ ID NO: 102317 - DNA, 30 bp, Artificial Sequence
  Synthetic oligonucleotide
taagcagaaaatgtgagccaaataagggca

SEQ ID NO: 102318 - DNA, 30 bp, Artificial Sequence
  Synthetic oligonucleotide
tcccgctgttccgggaaggggatcagggca

SEQ ID NO: 102319 - DNA, 30 bp, Artificial Sequence
  Synthetic oligonucleotide
gtgcttaggattccactaggaaggcgggca

SEQ ID NO: 102320 - DNA, 30 bp, Artificial Sequence
  Synthetic oligonucleotide
gcggggcgccaaaacggcgagatcggggca

SEQ ID NO: 102321 - DNA, 30 bp, Artificial Sequence
  Synthetic oligonucleotide
cgaataaacaattggcggatttatggggca

SEQ ID NO: 102322 - DNA, 30 bp, Artificial Sequence
  Synthetic oligonucleotide
cggtgtgtgttagaaggatggcactgggca

SEQ ID NO: 102323 - DNA, 30 bp, Artificial Sequence
  Synthetic oligonucleotide
ggcgaaggttggaaggtccccgactgggca

SEQ ID NO: 102324 - DNA, 30 bp, Artificial Sequence
  Synthetic oligonucleotide
atagtggacagcggagctgacgagtgggca

SEQ ID NO: 102325 - DNA, 30 bp, Artificial Sequence
  Synthetic oligonucleotide
catggacccataaattcgctttcgtgggca

SEQ ID NO: 102326 - DNA, 30 bp, Artificial Sequence
  Synthetic oligonucleotide
actcgggaggttacagttactgtttgggca

SEQ ID NO: 102327 - DNA, 30 bp, Artificial Sequence
  Synthetic oligonucleotide
tctaggcctagatgtatatctccaatggca

SEQ ID NO: 102328 - DNA, 30 bp, Artificial Sequence
  Synthetic oligonucleotide
tcacgctaggcacgacgagagcggatggca

SEQ ID NO: 102329 - DNA, 30 bp, Artificial Sequence
  Synthetic oligonucleotide
ttcgacacatagaagtgctgccctatggca

SEQ ID NO: 102330 - DNA, 30 bp, Artificial Sequence
  Synthetic oligonucleotide
cagaagggcttaggctggttagcactggca

SEQ ID NO: 102331 - DNA, 30 bp, Artificial Sequence
  Synthetic oligonucleotide
atgtcaaatgaaaggctagcgatactggca

SEQ ID NO: 102332 - DNA, 30 bp, Artificial Sequence
  Synthetic oligonucleotide
atgaatttacatgaaaaagaaaaagtggca

SEQ ID NO: 102333 - DNA, 30 bp, Artificial Sequence
  Synthetic oligonucleotide
ccggttgctggagcgaaggatccagtggca

SEQ ID NO: 102334 - DNA, 30 bp, Artificial Sequence
  Synthetic oligonucleotide
cgtgggacatcataccctgttaccgtggca

SEQ ID NO: 102335 - DNA, 30 bp, Artificial Sequence
  Synthetic oligonucleotide
tgcgttgtcatggagtacacgaaattggca

SEQ ID NO: 102336 - DNA, 30 bp, Artificial Sequence
  Synthetic oligonucleotide
gtggagaagtaaccaatagtaaagttggca

SEQ ID NO: 102337 - DNA, 30 bp, Artificial Sequence
  Synthetic oligonucleotide
gacacgatagatctgcgaaaatggttggca

SEQ ID NO: 102338 - DNA, 30 bp, Artificial Sequence
  Synthetic oligonucleotide
atctgtcgggaaatcccaagccgaaatgca

SEQ ID NO: 102339 - DNA, 30 bp, Artificial Sequence
  Synthetic oligonucleotide
aatgcgagatcacgcggagcgtccaatgca

SEQ ID NO: 102340 - DNA, 30 bp, Artificial Sequence
  Synthetic oligonucleotide
gggtcgttctaatccgggtgcgtcaatgca

SEQ ID NO: 102341 - DNA, 30 bp, Artificial Sequence
  Synthetic oligonucleotide
ccaggggcgaactcatgcgaaacgaatgca

SEQ ID NO: 102342 - DNA, 30 bp, Artificial Sequence
  Synthetic oligonucleotide
aaacggtttctgagacacgacaggaatgca

SEQ ID NO: 102343 - DNA, 30 bp, Artificial Sequence
  Synthetic oligonucleotide
tcaaaggacaagaatattttagtgaatgca

SEQ ID NO: 102344 - DNA, 30 bp, Artificial Sequence
  Synthetic oligonucleotide
acaatgtcttggagatagtcatggcatgca

SEQ ID NO: 102345 - DNA, 30 bp, Artificial Sequence
  Synthetic oligonucleotide
aggcgacgtgttcaaagtttcattcatgca

SEQ ID NO: 102346 - DNA, 30 bp, Artificial Sequence
  Synthetic oligonucleotide
tgtcgtgactaggttaatggcagatatgca

SEQ ID NO: 102347 - DNA, 30 bp, Artificial Sequence
  Synthetic oligonucleotide
cctcggttcggggtaaccgcacggtatgca

SEQ ID NO: 102348 - DNA, 30 bp, Artificial Sequence
  Synthetic oligonucleotide
gatgaccaggataatagccgtagaactgca

SEQ ID NO: 102349 - DNA, 30 bp, Artificial Sequence
  Synthetic oligonucleotide
catcgtatactacgaaccggtagagctgca

SEQ ID NO: 102350 - DNA, 30 bp, Artificial Sequence
  Synthetic oligonucleotide
aacggaagacctccctataacgacagtgca

SEQ ID NO: 102351 - DNA, 30 bp, Artificial Sequence
  Synthetic oligonucleotide
ttagggctgcggacccatccccgcagtgca

SEQ ID NO: 102352 - DNA, 30 bp, Artificial Sequence
  Synthetic oligonucleotide
ttctaggtcgtatttctgctaaagagtgca

SEQ ID NO: 102353 - DNA, 30 bp, Artificial Sequence
  Synthetic oligonucleotide
tcatctggccagaccgccgctcatagtgca

SEQ ID NO: 102354 - DNA, 30 bp, Artificial Sequence
  Synthetic oligonucleotide
tgagaggataataacgaatgcatacgtgca

SEQ ID NO: 102355 - DNA, 30 bp, Artificial Sequence
  Synthetic oligonucleotide
ccacaatcttatgcgttggtgtgaggtgca

SEQ ID NO: 102356 - DNA, 30 bp, Artificial Sequence
  Synthetic oligonucleotide
taagtagcacgctgaatccagtgtggtgca

SEQ ID NO: 102357 - DNA, 30 bp, Artificial Sequence
  Synthetic oligonucleotide
cctcgttaccgcccgagatccattattgca

SEQ ID NO: 102358 - DNA, 30 bp, Artificial Sequence
  Synthetic oligonucleotide
acggaacgcatttagggtggttttattgca

SEQ ID NO: 102359 - DNA, 30 bp, Artificial Sequence
  Synthetic oligonucleotide
tccgaaatagaaactcacaatggacttgca

SEQ ID NO: 102360 - DNA, 30 bp, Artificial Sequence
  Synthetic oligonucleotide
gcacgagtagtctcttagtgcgactttgca

SEQ ID NO: 102361 - DNA, 30 bp, Artificial Sequence
  Synthetic oligonucleotide
cgaagcgtaaaatgtacagagtccaaatca

SEQ ID NO: 102362 - DNA, 30 bp, Artificial Sequence
  Synthetic oligonucleotide
ttggctcttcgataagattagcagaaatca

SEQ ID NO: 102363 - DNA, 30 bp, Artificial Sequence
  Synthetic oligonucleotide
ctgttgtccagtcatagaagctagaaatca

SEQ ID NO: 102364 - DNA, 30 bp, Artificial Sequence
  Synthetic oligonucleotide
ttgggcaaacagtagtgtccgggacaatca

SEQ ID NO: 102365 - DNA, 30 bp, Artificial Sequence
  Synthetic oligonucleotide
cgcccagtgcataatccatattgacaatca

SEQ ID NO: 102366 - DNA, 30 bp, Artificial Sequence
  Synthetic oligonucleotide
gacgaaatgccccatacccggaaccaatca

SEQ ID NO: 102367 - DNA, 30 bp, Artificial Sequence
  Synthetic oligonucleotide
tcgagaaagggagcatcgtactcagaatca

SEQ ID NO: 102368 - DNA, 30 bp, Artificial Sequence
  Synthetic oligonucleotide
aacaggcgctagggctgagcatccgaatca

SEQ ID NO: 102369 - DNA, 30 bp, Artificial Sequence
  Synthetic oligonucleotide
cgcctgtagatgggcaagtatggcgaatca

SEQ ID NO: 102370 - DNA, 30 bp, Artificial Sequence
  Synthetic oligonucleotide
gcaagattcacgattaacatccaggaatca

SEQ ID NO: 102371 - DNA, 30 bp, Artificial Sequence
  Synthetic oligonucleotide
ctttcatacatgagcgtgcatcgggaatca

SEQ ID NO: 102372 - DNA, 30 bp, Artificial Sequence
  Synthetic oligonucleotide
gtcgaaaatccattcaatgcttgtgaatca

SEQ ID NO: 102373 - DNA, 30 bp, Artificial Sequence
  Synthetic oligonucleotide
cggatatgagtgattgagaagacataatca

SEQ ID NO: 102374 - DNA, 30 bp, Artificial Sequence
  Synthetic oligonucleotide
tagtcttcgagatatggagggtcgtaatca

SEQ ID NO: 102375 - DNA, 30 bp, Artificial Sequence
  Synthetic oligonucleotide
cgtaaacagctgtccaagaagaaaacatca

SEQ ID NO: 102376 - DNA, 30 bp, Artificial Sequence
  Synthetic oligonucleotide
tctctgagcgattaaacggtaagaacatca

SEQ ID NO: 102377 - DNA, 30 bp, Artificial Sequence
  Synthetic oligonucleotide
agcgggaacgtccctgctgatagaacatca

SEQ ID NO: 102378 - DNA, 30 bp, Artificial Sequence
  Synthetic oligonucleotide
cttacggactacgagctgagtcgaacatca

SEQ ID NO: 102379 - DNA, 30 bp, Artificial Sequence
  Synthetic oligonucleotide
ggaccattagagtctagccaaactacatca

SEQ ID NO: 102380 - DNA, 30 bp, Artificial Sequence
  Synthetic oligonucleotide
tgccattcatatgttactagtgctccatca

SEQ ID NO: 102381 - DNA, 30 bp, Artificial Sequence
  Synthetic oligonucleotide
aacaaccatccttattccccgattccatca

SEQ ID NO: 102382 - DNA, 30 bp, Artificial Sequence
  Synthetic oligonucleotide
tggtcgtagacttatgatcttaccgcatca

SEQ ID NO: 102383 - DNA, 30 bp, Artificial Sequence
  Synthetic oligonucleotide
cccaagacctgaataggatgacaggcatca

SEQ ID NO: 102384 - DNA, 30 bp, Artificial Sequence
  Synthetic oligonucleotide
gcactcagtactgggttaccgggtgcatca

SEQ ID NO: 102385 - DNA, 30 bp, Artificial Sequence
  Synthetic oligonucleotide
tggagtctagttcagttgggaaaatcatca

SEQ ID NO: 102386 - DNA, 30 bp, Artificial Sequence
  Synthetic oligonucleotide
ttaattggacagattaatagataatcatca

SEQ ID NO: 102387 - DNA, 30 bp, Artificial Sequence
  Synthetic oligonucleotide
acctcaaggtcgagaaggttggagtcatca

SEQ ID NO: 102388 - DNA, 30 bp, Artificial Sequence
  Synthetic oligonucleotide
tctcggtgtagacctgagtgagaaagatca

SEQ ID NO: 102389 - DNA, 30 bp, Artificial Sequence
  Synthetic oligonucleotide
aggagagaggccgggctgaagtgaagatca

SEQ ID NO: 102390 - DNA, 30 bp, Artificial Sequence
  Synthetic oligonucleotide
ggcaaggaaccgactaattcagtgagatca

SEQ ID NO: 102391 - DNA, 31 bp, Artificial Sequence
  Synthetic oligonucleotide
gcaccggattcggtcacgatgataacgatca

SEQ ID NO: 102392 - DNA, 30 bp, Artificial Sequence
  Synthetic oligonucleotide
tatgaacgggtcaataaagcactacgatca

SEQ ID NO: 102393 - DNA, 30 bp, Artificial Sequence
  Synthetic oligonucleotide
tatgctgagctacgttgtggctacggatca

SEQ ID NO: 102394 - DNA, 30 bp, Artificial Sequence
  Synthetic oligonucleotide
ccgaatgatgcctacgttgagggcggatca

SEQ ID NO: 102395 - DNA, 30 bp, Artificial Sequence
  Synthetic oligonucleotide
agaccctggtcggttaaggtaggatgatca

SEQ ID NO: 102396 - DNA, 31 bp, Artificial Sequence
  Synthetic oligonucleotide
cgtagtgtcgctgtgctactgagactgatca

SEQ ID NO: 102397 - DNA, 30 bp, Artificial Sequence
  Synthetic oligonucleotide
ttacgacaacgatggggaccgaagtgatca

SEQ ID NO: 102398 - DNA, 30 bp, Artificial Sequence
  Synthetic oligonucleotide
ggggtgactcgaattgattaatagtgatca

SEQ ID NO: 102399 - DNA, 30 bp, Artificial Sequence
  Synthetic oligonucleotide
gaaccagcggaaaaccgatcaagcatatca

SEQ ID NO: 102400 - DNA, 30 bp, Artificial Sequence
  Synthetic oligonucleotide
acgcgccggtgccatagcctgtgtatatca

SEQ ID NO: 102401 - DNA, 30 bp, Artificial Sequence
  Synthetic oligonucleotide
cttaacccagaggaacaggaatgactatca

SEQ ID NO: 102402 - DNA, 30 bp, Artificial Sequence
  Synthetic oligonucleotide
ctaaggacctatagctagcggcatgtatca

SEQ ID NO: 102403 - DNA, 30 bp, Artificial Sequence
  Synthetic oligonucleotide
gccaacatgtcaaggagtatgcagttatca

SEQ ID NO: 102404 - DNA, 30 bp, Artificial Sequence
  Synthetic oligonucleotide
ctgcgtattggctgtccgtgttcgttatca

SEQ ID NO: 102405 - DNA, 30 bp, Artificial Sequence
  Synthetic oligonucleotide
tggtcccataaacaattggactacaactca

SEQ ID NO: 102406 - DNA, 30 bp, Artificial Sequence
  Synthetic oligonucleotide
cgattgcgtcaagacgatccgtagaactca

SEQ ID NO: 102407 - DNA, 30 bp, Artificial Sequence
  Synthetic oligonucleotide
acgtaagcttcgaagccagtgacacactca

SEQ ID NO: 102408 - DNA, 30 bp, Artificial Sequence
  Synthetic oligonucleotide
cggaggacagtaaaaggttaggaccactca

SEQ ID NO: 102409 - DNA, 30 bp, Artificial Sequence
  Synthetic oligonucleotide
gagcgaaagctcactaccagtgcagactca

SEQ ID NO: 102410 - DNA, 30 bp, Artificial Sequence
  Synthetic oligonucleotide
gatactaaatagaacatcctcagagactca

SEQ ID NO: 102411 - DNA, 30 bp, Artificial Sequence
  Synthetic oligonucleotide
agggccgatatggttcatggaaaggactca

SEQ ID NO: 102412 - DNA, 30 bp, Artificial Sequence
  Synthetic oligonucleotide
ctaaaatcagattcgcgagcttaggactca

SEQ ID NO: 102413 - DNA, 30 bp, Artificial Sequence
  Synthetic oligonucleotide
gagacgatggaatcgatacacggcgcctca

SEQ ID NO: 102414 - DNA, 29 bp, Artificial Sequence
  Synthetic oligonucleotide
ccgaaccgcgccgaacctcgacggcctca

SEQ ID NO: 102415 - DNA, 30 bp, Artificial Sequence
  Synthetic oligonucleotide
ccggacgtacggtgcggaacaggctcctca

SEQ ID NO: 102416 - DNA, 30 bp, Artificial Sequence
  Synthetic oligonucleotide
catggcacactcgttggagggccgtcctca

SEQ ID NO: 102417 - DNA, 30 bp, Artificial Sequence
  Synthetic oligonucleotide
gacgttgacttaaagcgaatttcgtcctca

SEQ ID NO: 102418 - DNA, 30 bp, Artificial Sequence
  Synthetic oligonucleotide
tccgtaggacgcgccagacatccaagctca

SEQ ID NO: 102419 - DNA, 30 bp, Artificial Sequence
  Synthetic oligonucleotide
ggctcggaatcagcatgaatcgggggctca

SEQ ID NO: 102420 - DNA, 30 bp, Artificial Sequence
  Synthetic oligonucleotide
ggagcgatttcgggtaatcgagatggctca

SEQ ID NO: 102421 - DNA, 30 bp, Artificial Sequence
  Synthetic oligonucleotide
ccggctaaaacaggcgtaacactgtgctca

SEQ ID NO: 102422 - DNA, 30 bp, Artificial Sequence
  Synthetic oligonucleotide
aggtctcagtcaacaggcgcatcagtctca

SEQ ID NO: 102423 - DNA, 30 bp, Artificial Sequence
  Synthetic oligonucleotide
accagtggggcagtgaacccgcaggtctca

SEQ ID NO: 102424 - DNA, 30 bp, Artificial Sequence
  Synthetic oligonucleotide
ttaagcggtgagatggacccatgtgtctca

SEQ ID NO: 102425 - DNA, 30 bp, Artificial Sequence
  Synthetic oligonucleotide
ccaaaaggctcatgggagctagttgtctca

SEQ ID NO: 102426 - DNA, 30 bp, Artificial Sequence
  Synthetic oligonucleotide
tggagatcgggctacccaaactacttctca

SEQ ID NO: 102427 - DNA, 30 bp, Artificial Sequence
  Synthetic oligonucleotide
cagaagcattgtcccattccaatacagtca

SEQ ID NO: 102428 - DNA, 30 bp, Artificial Sequence
  Synthetic oligonucleotide
agaattagtccatcgtctgcagaagagtca

SEQ ID NO: 102429 - DNA, 30 bp, Artificial Sequence
  Synthetic oligonucleotide
agccaagtatgatggatgtaccgggagtca

SEQ ID NO: 102430 - DNA, 30 bp, Artificial Sequence
  Synthetic oligonucleotide
aatgcataccgatgaaggcacaggtagtca

SEQ ID NO: 102431 - DNA, 30 bp, Artificial Sequence
  Synthetic oligonucleotide
cagacaagaaagtctcggagacggtagtca

SEQ ID NO: 102432 - DNA, 30 bp, Artificial Sequence
  Synthetic oligonucleotide
ttgttcgcgtacaccgggtaaaaaacgtca

SEQ ID NO: 102433 - DNA, 30 bp, Artificial Sequence
  Synthetic oligonucleotide
gccagagaaggtcttcggtgagtcccgtca

SEQ ID NO: 102434 - DNA, 30 bp, Artificial Sequence
  Synthetic oligonucleotide
gatcccgaggttggttagcgaagtccgtca

SEQ ID NO: 102435 - DNA, 30 bp, Artificial Sequence
  Synthetic oligonucleotide
tgatcttaccaaagtggagtttgtgcgtca

SEQ ID NO: 102436 - DNA, 30 bp, Artificial Sequence
  Synthetic oligonucleotide
ggtgggtgttgagttcggtggcttgcgtca

SEQ ID NO: 102437 - DNA, 30 bp, Artificial Sequence
  Synthetic oligonucleotide
gggtaggtcttccagcagtggaattcgtca

SEQ ID NO: 102438 - DNA, 30 bp, Artificial Sequence
  Synthetic oligonucleotide
gtggagtagtgtgacgggaggccgaggtca

SEQ ID NO: 102439 - DNA, 30 bp, Artificial Sequence
  Synthetic oligonucleotide
cctatcagcgccagggcccatgcacggtca

SEQ ID NO: 102440 - DNA, 30 bp, Artificial Sequence
  Synthetic oligonucleotide
acgtcgagcgggcgggcttatgctcggtca

SEQ ID NO: 102441 - DNA, 30 bp, Artificial Sequence
  Synthetic oligonucleotide
ctaaaacgccaggtcaaacagacagggtca

SEQ ID NO: 102442 - DNA, 30 bp, Artificial Sequence
  Synthetic oligonucleotide
caaaggggcaaataaatgagtaccgggtca

SEQ ID NO: 102443 - DNA, 30 bp, Artificial Sequence
  Synthetic oligonucleotide
aaggccttagtagcataggcgatggggtca

SEQ ID NO: 102444 - DNA, 30 bp, Artificial Sequence
  Synthetic oligonucleotide
cttggaaaattaataagactagacatgtca

SEQ ID NO: 102445 - DNA, 30 bp, Artificial Sequence
  Synthetic oligonucleotide
ccatgcatcagagcacatgctgacatgtca

SEQ ID NO: 102446 - DNA, 30 bp, Artificial Sequence
  Synthetic oligonucleotide
cttgacggacaaagagagccagatatgtca

SEQ ID NO: 102447 - DNA, 30 bp, Artificial Sequence
  Synthetic oligonucleotide
tgcggtaatatcgcaaaaattgctatgtca

SEQ ID NO: 102448 - DNA, 30 bp, Artificial Sequence
  Synthetic oligonucleotide
gtcccatccaccaagggccacatactgtca

SEQ ID NO: 102449 - DNA, 30 bp, Artificial Sequence
  Synthetic oligonucleotide
ccaaaccaaaacaaaggtattgtgctgtca

SEQ ID NO: 102450 - DNA, 30 bp, Artificial Sequence
  Synthetic oligonucleotide
tgcccggcgtagatgggaggccatgtgtca

SEQ ID NO: 102451 - DNA, 30 bp, Artificial Sequence
  Synthetic oligonucleotide
gctagtttaacagtcacaacgtcgttgtca

SEQ ID NO: 102452 - DNA, 30 bp, Artificial Sequence
  Synthetic oligonucleotide
catgctccgtcaaagttcgccgaaaattca

SEQ ID NO: 102453 - DNA, 30 bp, Artificial Sequence
  Synthetic oligonucleotide
ttaaagcaagaggctaacacctaaaattca

SEQ ID NO: 102454 - DNA, 30 bp, Artificial Sequence
  Synthetic oligonucleotide
agggtatacacgccttattgggaacattca

SEQ ID NO: 102455 - DNA, 30 bp, Artificial Sequence
  Synthetic oligonucleotide
cgatgtagtccacggaattctctacattca

SEQ ID NO: 102456 - DNA, 30 bp, Artificial Sequence
  Synthetic oligonucleotide
aacaaagccagtagtcctggcccccattca

SEQ ID NO: 102457 - DNA, 30 bp, Artificial Sequence
  Synthetic oligonucleotide
tgtgtgtcaatctagtgccacagccattca

SEQ ID NO: 102458 - DNA, 30 bp, Artificial Sequence
  Synthetic oligonucleotide
ggcttagttcaactcattaaacggcattca

SEQ ID NO: 102459 - DNA, 30 bp, Artificial Sequence
  Synthetic oligonucleotide
cactcgctaaacgggtccggagtgcattca

SEQ ID NO: 102460 - DNA, 30 bp, Artificial Sequence
  Synthetic oligonucleotide
ataatgaaacaagcgcagtagtgtcattca

SEQ ID NO: 102461 - DNA, 30 bp, Artificial Sequence
  Synthetic oligonucleotide
gtgtataagaaaagtcttccatctgattca

SEQ ID NO: 102462 - DNA, 30 bp, Artificial Sequence
  Synthetic oligonucleotide
ggccctttcgaccaaaaaacaattgattca

SEQ ID NO: 102463 - DNA, 30 bp, Artificial Sequence
  Synthetic oligonucleotide
agctgggaatccgaatacgcggattattca

SEQ ID NO: 102464 - DNA, 30 bp, Artificial Sequence
  Synthetic oligonucleotide
tttaaggatagcaattaagcaggaccttca

SEQ ID NO: 102465 - DNA, 30 bp, Artificial Sequence
  Synthetic oligonucleotide
tcggttggtgaactgcgctggaacagttca

SEQ ID NO: 102466 - DNA, 30 bp, Artificial Sequence
  Synthetic oligonucleotide
tagggcggtgaactttcaaaacgcagttca

SEQ ID NO: 102467 - DNA, 30 bp, Artificial Sequence
  Synthetic oligonucleotide
cgagtagctgcaataactctctaacgttca

SEQ ID NO: 102468 - DNA, 30 bp, Artificial Sequence
  Synthetic oligonucleotide
tgccagccgcgaggggagcatatccgttca

SEQ ID NO: 102469 - DNA, 30 bp, Artificial Sequence
  Synthetic oligonucleotide
ggagtaaacgagcataccaactagcgttca

SEQ ID NO: 102470 - DNA, 30 bp, Artificial Sequence
  Synthetic oligonucleotide
cttggattctaaggggtgtgacggcgttca

SEQ ID NO: 102471 - DNA, 30 bp, Artificial Sequence
  Synthetic oligonucleotide
cgcccaactgagtacaaagcggacggttca

SEQ ID NO: 102472 - DNA, 30 bp, Artificial Sequence
  Synthetic oligonucleotide
tcgcggatgcgcttcaggatccccggttca

SEQ ID NO: 102473 - DNA, 30 bp, Artificial Sequence
  Synthetic oligonucleotide
accggggcaaatgtgcaatgccctggttca

SEQ ID NO: 102474 - DNA, 30 bp, Artificial Sequence
  Synthetic oligonucleotide
ctaaggcgcggttagcgtaggtttggttca

SEQ ID NO: 102475 - DNA, 30 bp, Artificial Sequence
  Synthetic oligonucleotide
gtgatcacgattaagtggacacgactttca

SEQ ID NO: 102476 - DNA, 30 bp, Artificial Sequence
  Synthetic oligonucleotide
gatgcaaatacaagacagacaaaggtttca

SEQ ID NO: 102477 - DNA, 30 bp, Artificial Sequence
  Synthetic oligonucleotide
atacgaatcatgattacttcgaacaaaaga

SEQ ID NO: 102478 - DNA, 30 bp, Artificial Sequence
  Synthetic oligonucleotide
taaacgggggactggtcgacggacaaaaga

SEQ ID NO: 102479 - DNA, 30 bp, Artificial Sequence
  Synthetic oligonucleotide
aggagctagaaactggattacaataaaaga

SEQ ID NO: 102480 - DNA, 30 bp, Artificial Sequence
  Synthetic oligonucleotide
gccacggggtgatacgggtttggtaaaaga

SEQ ID NO: 102481 - DNA, 30 bp, Artificial Sequence
  Synthetic oligonucleotide
cgtggcgtgaggttgtgttcggatcaaaga

SEQ ID NO: 102482 - DNA, 30 bp, Artificial Sequence
  Synthetic oligonucleotide
gggatgtagtcttacaacaggcaagaaaga

SEQ ID NO: 102483 - DNA, 30 bp, Artificial Sequence
  Synthetic oligonucleotide
ccacaaaaggatgccacggttacagaaaga

SEQ ID NO: 102484 - DNA, 30 bp, Artificial Sequence
  Synthetic oligonucleotide
catttgcctctacactggcctcgagaaaga

SEQ ID NO: 102485 - DNA, 30 bp, Artificial Sequence
  Synthetic oligonucleotide
ataaaatgttttgccggagggagggaaaga

SEQ ID NO: 102486 - DNA, 30 bp, Artificial Sequence
  Synthetic oligonucleotide
acgtgtgtacccctaaagtaccattaaaga

SEQ ID NO: 102487 - DNA, 30 bp, Artificial Sequence
  Synthetic oligonucleotide
acgaggcaacataaccagacccattaaaga

SEQ ID NO: 102488 - DNA, 30 bp, Artificial Sequence
  Synthetic oligonucleotide
gaagacaaatggcgcatacctgattaaaga

SEQ ID NO: 102489 - DNA, 30 bp, Artificial Sequence
  Synthetic oligonucleotide
aggcgcgacggagcgtcggcgtgttaaaga

SEQ ID NO: 102490 - DNA, 30 bp, Artificial Sequence
  Synthetic oligonucleotide
gaaaacgtacaataaagacattaaacaaga

SEQ ID NO: 102491 - DNA, 30 bp, Artificial Sequence
  Synthetic oligonucleotide
tggagatcttacaacaagattagaacaaga

SEQ ID NO: 102492 - DNA, 30 bp, Artificial Sequence
  Synthetic oligonucleotide
gtagacacagggcactaaatattaacaaga

SEQ ID NO: 102493 - DNA, 30 bp, Artificial Sequence
  Synthetic oligonucleotide
agtctggacagataggagaaagacacaaga

SEQ ID NO: 102494 - DNA, 30 bp, Artificial Sequence
  Synthetic oligonucleotide
ttcctgagctggtcaatgagacgaccaaga

SEQ ID NO: 102495 - DNA, 30 bp, Artificial Sequence
  Synthetic oligonucleotide
taaccactggtcggtcgaaatttaccaaga

SEQ ID NO: 102496 - DNA, 30 bp, Artificial Sequence
  Synthetic oligonucleotide
gcggagaaactcctctgtaggtccccaaga

SEQ ID NO: 102497 - DNA, 30 bp, Artificial Sequence
  Synthetic oligonucleotide
tgtccgttgacataatggacgggcccaaga

SEQ ID NO: 102498 - DNA, 30 bp, Artificial Sequence
  Synthetic oligonucleotide
tattaggcgggattcgcaatgtcgccaaga

SEQ ID NO: 102499 - DNA, 30 bp, Artificial Sequence
  Synthetic oligonucleotide
ggcgtggtatcgttaaatgaccatccaaga

SEQ ID NO: 102500 - DNA, 30 bp, Artificial Sequence
  Synthetic oligonucleotide
cctccaggcagtcccacggagaaagcaaga

SEQ ID NO: 102501 - DNA, 30 bp, Artificial Sequence
  Synthetic oligonucleotide
gtgcatcgctaatattagtaactaagaaga

SEQ ID NO: 102502 - DNA, 30 bp, Artificial Sequence
  Synthetic oligonucleotide
ctagattggtcaaaccaatgctggagaaga

SEQ ID NO: 102503 - DNA, 30 bp, Artificial Sequence
  Synthetic oligonucleotide
cagatttacgccatcagaggtgctagaaga

SEQ ID NO: 102504 - DNA, 30 bp, Artificial Sequence
  Synthetic oligonucleotide
tggctttgacaatgaaagtctggccgaaga

SEQ ID NO: 102505 - DNA, 30 bp, Artificial Sequence
  Synthetic oligonucleotide
cggacacatccagaagtagtcgtccgaaga

SEQ ID NO: 102506 - DNA, 30 bp, Artificial Sequence
  Synthetic oligonucleotide
aaaaatgtgcgtgatcgctaggggcgaaga

SEQ ID NO: 102507 - DNA, 30 bp, Artificial Sequence
  Synthetic oligonucleotide
ttaaggcgcatgtttcgaacgcgaggaaga

SEQ ID NO: 102508 - DNA, 30 bp, Artificial Sequence
  Synthetic oligonucleotide
aacaagtaagagtaattttggggaggaaga

SEQ ID NO: 102509 - DNA, 30 bp, Artificial Sequence
  Synthetic oligonucleotide
cctcaggtaagtcgcacgtttgtcggaaga

SEQ ID NO: 102510 - DNA, 30 bp, Artificial Sequence
  Synthetic oligonucleotide
tattggacgaaaaacgtatgtcggggaaga

SEQ ID NO: 102511 - DNA, 30 bp, Artificial Sequence
  Synthetic oligonucleotide
gtaaatgggaacgctggtgaggggggaaga

SEQ ID NO: 102512 - DNA, 30 bp, Artificial Sequence
  Synthetic oligonucleotide
ttcgtggtgggcagcaattggcttggaaga

SEQ ID NO: 102513 - DNA, 30 bp, Artificial Sequence
  Synthetic oligonucleotide
atcgcccgtcaataatctcggtaatgaaga

SEQ ID NO: 102514 - DNA, 30 bp, Artificial Sequence
  Synthetic oligonucleotide
tgtaacaaatattatacaaagtactgaaga

SEQ ID NO: 102515 - DNA, 30 bp, Artificial Sequence
  Synthetic oligonucleotide
ctaggcttgataggggttatcaattgaaga

SEQ ID NO: 102516 - DNA, 30 bp, Artificial Sequence
  Synthetic oligonucleotide
gtttgttgggttgtgggggcgtgaataaga

SEQ ID NO: 102517 - DNA, 30 bp, Artificial Sequence
  Synthetic oligonucleotide
ctagagaagtaagcattttaacgtataaga

SEQ ID NO: 102518 - DNA, 30 bp, Artificial Sequence
  Synthetic oligonucleotide
ctcgctagtcagcactaaggtggtataaga

SEQ ID NO: 102519 - DNA, 30 bp, Artificial Sequence
  Synthetic oligonucleotide
atgttgctttggtagtcgatacttataaga

SEQ ID NO: 102520 - DNA, 30 bp, Artificial Sequence
  Synthetic oligonucleotide
gaagcgggaaggtatatccctgtactaaga

SEQ ID NO: 102521 - DNA, 30 bp, Artificial Sequence
  Synthetic oligonucleotide
atgcaaagagtaggtattgcgatcctaaga

SEQ ID NO: 102522 - DNA, 30 bp, Artificial Sequence
  Synthetic oligonucleotide
aggaaacagtgttcagtgttcgcgctaaga

SEQ ID NO: 102523 - DNA, 30 bp, Artificial Sequence
  Synthetic oligonucleotide
acaatcgtattgcgagctgaagggctaaga

SEQ ID NO: 102524 - DNA, 30 bp, Artificial Sequence
  Synthetic oligonucleotide
cctcgcagagcatgccgaatgtttctaaga

SEQ ID NO: 102525 - DNA, 30 bp, Artificial Sequence
  Synthetic oligonucleotide
gtagctcgagtacttcaaaaattcgtaaga

SEQ ID NO: 102526 - DNA, 30 bp, Artificial Sequence
  Synthetic oligonucleotide
cggcatttaaaaggagtgatcgaggtaaga

SEQ ID NO: 102527 - DNA, 30 bp, Artificial Sequence
  Synthetic oligonucleotide
ggagagattttaggtcgattaagtttaaga

SEQ ID NO: 102528 - DNA, 30 bp, Artificial Sequence
  Synthetic oligonucleotide
aaatcgggattagcggcagaccacaacaga

SEQ ID NO: 102529 - DNA, 30 bp, Artificial Sequence
  Synthetic oligonucleotide
ttgggggactattacagttcctgcaacaga

SEQ ID NO: 102530 - DNA, 30 bp, Artificial Sequence
  Synthetic oligonucleotide
cggcactatccatagtttgggtcacacaga

SEQ ID NO: 102531 - DNA, 30 bp, Artificial Sequence
  Synthetic oligonucleotide
gcttcgacagatcgcttacgatactacaga

SEQ ID NO: 102532 - DNA, 30 bp, Artificial Sequence
  Synthetic oligonucleotide
cacccggtactgagccgtgcgaccaccaga

SEQ ID NO: 102533 - DNA, 30 bp, Artificial Sequence
  Synthetic oligonucleotide
tggctaacttaggcaagatagtgcaccaga

SEQ ID NO: 102534 - DNA, 30 bp, Artificial Sequence
  Synthetic oligonucleotide
ttacagagtgtggcgacataagttaccaga

SEQ ID NO: 102535 - DNA, 30 bp, Artificial Sequence
  Synthetic oligonucleotide
tggtcagctttaacagataaccgacccaga

SEQ ID NO: 102536 - DNA, 30 bp, Artificial Sequence
  Synthetic oligonucleotide
acttcatggatgtcacaaacgtcgcccaga

SEQ ID NO: 102537 - DNA, 30 bp, Artificial Sequence
  Synthetic oligonucleotide
caatcaatatgttagatggaggatcccaga

SEQ ID NO: 102538 - DNA, 30 bp, Artificial Sequence
  Synthetic oligonucleotide
tgctagaggccgcgccagcacagagccaga

SEQ ID NO: 102539 - DNA, 30 bp, Artificial Sequence
  Synthetic oligonucleotide
ctgagctcaaatgggggtgcccgagccaga

SEQ ID NO: 102540 - DNA, 30 bp, Artificial Sequence
  Synthetic oligonucleotide
cgcgatagtaaggtgaagcaccaggccaga

SEQ ID NO: 102541 - DNA, 30 bp, Artificial Sequence
  Synthetic oligonucleotide
gaccggaacgagactaattacttggccaga

SEQ ID NO: 102542 - DNA, 30 bp, Artificial Sequence
  Synthetic oligonucleotide
agcgctaaatctagagcaatcctctccaga

SEQ ID NO: 102543 - DNA, 30 bp, Artificial Sequence
  Synthetic oligonucleotide
tcatatcgagtgcgttgggagttctccaga

SEQ ID NO: 102544 - DNA, 30 bp, Artificial Sequence
  Synthetic oligonucleotide
tgggctctgatcggcaaaaatgcttccaga

SEQ ID NO: 102545 - DNA, 30 bp, Artificial Sequence
  Synthetic oligonucleotide
cggcctgtggcagtagttgtcgccagcaga

SEQ ID NO: 102546 - DNA, 30 bp, Artificial Sequence
  Synthetic oligonucleotide
gacaaaaggtcggatacttagtcgcgcaga

SEQ ID NO: 102547 - DNA, 31 bp, Artificial Sequence
  Synthetic oligonucleotide
gagagatggggcggcgtaagctcaaggcaga

SEQ ID NO: 102548 - DNA, 30 bp, Artificial Sequence
  Synthetic oligonucleotide
gcgaggcggtctggaatcgccgccggcaga

SEQ ID NO: 102549 - DNA, 30 bp, Artificial Sequence
  Synthetic oligonucleotide
aaccgaatctggttgctgattgagggcaga

SEQ ID NO: 102550 - DNA, 30 bp, Artificial Sequence
  Synthetic oligonucleotide
gagtagggggagacttatagagggggcaga

SEQ ID NO: 102551 - DNA, 30 bp, Artificial Sequence
  Synthetic oligonucleotide
tagctcgccgggaaaaaactgtactgcaga

SEQ ID NO: 102552 - DNA, 30 bp, Artificial Sequence
  Synthetic oligonucleotide
cattaatttggggcaaaggcaatctgcaga

SEQ ID NO: 102553 - DNA, 30 bp, Artificial Sequence
  Synthetic oligonucleotide
agttacagaggagcagcctttcagtgcaga

SEQ ID NO: 102554 - DNA, 30 bp, Artificial Sequence
  Synthetic oligonucleotide
catagagggttcttgggttaagacatcaga

SEQ ID NO: 102555 - DNA, 30 bp, Artificial Sequence
  Synthetic oligonucleotide
acagcctgtacatagtgaacgtagatcaga

SEQ ID NO: 102556 - DNA, 30 bp, Artificial Sequence
  Synthetic oligonucleotide
ttcagggtttcataagagtcgcgtatcaga

SEQ ID NO: 102557 - DNA, 30 bp, Artificial Sequence
  Synthetic oligonucleotide
ggcggtggacttccagacccctgtatcaga

SEQ ID NO: 102558 - DNA, 30 bp, Artificial Sequence
  Synthetic oligonucleotide
agggacaacgtatcagtaaggatcctcaga

SEQ ID NO: 102559 - DNA, 30 bp, Artificial Sequence
  Synthetic oligonucleotide
ggctcacggcgttattgagcgcatctcaga

SEQ ID NO: 102560 - DNA, 30 bp, Artificial Sequence
  Synthetic oligonucleotide
gattaattccaagctccaagagccgtcaga

SEQ ID NO: 102561 - DNA, 30 bp, Artificial Sequence
  Synthetic oligonucleotide
tcttcatgatgagcttggggaaaggtcaga

SEQ ID NO: 102562 - DNA, 30 bp, Artificial Sequence
  Synthetic oligonucleotide
agaagttcttcatgttaaccaggattcaga

SEQ ID NO: 102563 - DNA, 30 bp, Artificial Sequence
  Synthetic oligonucleotide
gtacgtagtagtcgtctagatgccttcaga

SEQ ID NO: 102564 - DNA, 30 bp, Artificial Sequence
  Synthetic oligonucleotide
ggtgcgcttaccggaataggaactttcaga

SEQ ID NO: 102565 - DNA, 30 bp, Artificial Sequence
  Synthetic oligonucleotide
cctcaggggcgttacggtggttcaaagaga

SEQ ID NO: 102566 - DNA, 30 bp, Artificial Sequence
  Synthetic oligonucleotide
gagaaatgattcggcaggtggcctaagaga

SEQ ID NO: 102567 - DNA, 30 bp, Artificial Sequence
  Synthetic oligonucleotide
gcacgataccccatggtgggtcgtaagaga

SEQ ID NO: 102568 - DNA, 30 bp, Artificial Sequence
  Synthetic oligonucleotide
tgtgagaaaagaacgcgtccgtgtaagaga

SEQ ID NO: 102569 - DNA, 30 bp, Artificial Sequence
  Synthetic oligonucleotide
taaagctgtcaaggcataccgcaacagaga

SEQ ID NO: 102570 - DNA, 30 bp, Artificial Sequence
  Synthetic oligonucleotide
tgaagagagttatagttcgacacacagaga

SEQ ID NO: 102571 - DNA, 30 bp, Artificial Sequence
  Synthetic oligonucleotide
ctaagccgtgtgcagcaagacgcccagaga

SEQ ID NO: 102572 - DNA, 30 bp, Artificial Sequence
  Synthetic oligonucleotide
ggtaagatagggacatcatcaagtcagaga

SEQ ID NO: 102573 - DNA, 30 bp, Artificial Sequence
  Synthetic oligonucleotide
cgccgtatcggacccatccgacacgagaga

SEQ ID NO: 102574 - DNA, 30 bp, Artificial Sequence
  Synthetic oligonucleotide
ctaataaaggaagggccttagaccgagaga

SEQ ID NO: 102575 - DNA, 30 bp, Artificial Sequence
  Synthetic oligonucleotide
tccggtgcgttggcgtgtatggaggagaga

SEQ ID NO: 102576 - DNA, 30 bp, Artificial Sequence
  Synthetic oligonucleotide
aataaacaacaccgtaagtgcgatgagaga

SEQ ID NO: 102577 - DNA, 30 bp, Artificial Sequence
  Synthetic oligonucleotide
cggacaaccctctattgtatgactgagaga

SEQ ID NO: 102578 - DNA, 30 bp, Artificial Sequence
  Synthetic oligonucleotide
agccgtcccagtcatttacagggatagaga

SEQ ID NO: 102579 - DNA, 30 bp, Artificial Sequence
  Synthetic oligonucleotide
acggcaactggtcccaccttccgctagaga

SEQ ID NO: 102580 - DNA, 30 bp, Artificial Sequence
  Synthetic oligonucleotide
agtctccagtgctggaatgtccaaacgaga

SEQ ID NO: 102581 - DNA, 30 bp, Artificial Sequence
  Synthetic oligonucleotide
gtctataaagggacattgcatcgcacgaga

SEQ ID NO: 102582 - DNA, 30 bp, Artificial Sequence
  Synthetic oligonucleotide
tgggcagtgaggaagaaaatgaatacgaga

SEQ ID NO: 102583 - DNA, 30 bp, Artificial Sequence
  Synthetic oligonucleotide
gtgctcgactgagagggctaacgagcgaga

SEQ ID NO: 102584 - DNA, 30 bp, Artificial Sequence
  Synthetic oligonucleotide
cggacctttgtgactcaaatcacggcgaga

SEQ ID NO: 102585 - DNA, 30 bp, Artificial Sequence
  Synthetic oligonucleotide
aaatcggatatgagacaaaaccggtcgaga

SEQ ID NO: 102586 - DNA, 30 bp, Artificial Sequence
  Synthetic oligonucleotide
agacgtctcgaggtacaagagatgtcgaga

SEQ ID NO: 102587 - DNA, 30 bp, Artificial Sequence
  Synthetic oligonucleotide
cgcgacattttgacgagaataacaaggaga

SEQ ID NO: 102588 - DNA, 30 bp, Artificial Sequence
  Synthetic oligonucleotide
agaccattgtggaacggcgagccaaggaga

SEQ ID NO: 102589 - DNA, 30 bp, Artificial Sequence
  Synthetic oligonucleotide
tcgggaatacaaacacataagttaaggaga

SEQ ID NO: 102590 - DNA, 30 bp, Artificial Sequence
  Synthetic oligonucleotide
cgcggattcaaccatgcgagccacaggaga

SEQ ID NO: 102591 - DNA, 30 bp, Artificial Sequence
  Synthetic oligonucleotide
ggccgaccgtttggcgcatagtgtaggaga

SEQ ID NO: 102592 - DNA, 30 bp, Artificial Sequence
  Synthetic oligonucleotide
aggtcctgcgtgaagggcagatcacggaga

SEQ ID NO: 102593 - DNA, 30 bp, Artificial Sequence
  Synthetic oligonucleotide
gggagaggtgtctcacctggagtacggaga

SEQ ID NO: 102594 - DNA, 30 bp, Artificial Sequence
  Synthetic oligonucleotide
ctgtatacatgcgcacggtcactggggaga

SEQ ID NO: 102595 - DNA, 30 bp, Artificial Sequence
  Synthetic oligonucleotide
gcgatatccgaagagcaagcaactgggaga

SEQ ID NO: 102596 - DNA, 30 bp, Artificial Sequence
  Synthetic oligonucleotide
ttatgatacgttatgagcgatacgtggaga

SEQ ID NO: 102597 - DNA, 30 bp, Artificial Sequence
  Synthetic oligonucleotide
agataccagaaccttgtgttcgattggaga

SEQ ID NO: 102598 - DNA, 30 bp, Artificial Sequence
  Synthetic oligonucleotide
tgcaaggaaatcttaggtgtttaaatgaga

SEQ ID NO: 102599 - DNA, 30 bp, Artificial Sequence
  Synthetic oligonucleotide
gtggcgggcgggcctgtggcagtaatgaga

SEQ ID NO: 102600 - DNA, 30 bp, Artificial Sequence
  Synthetic oligonucleotide
caaataattggagcaccgaggatcatgaga

SEQ ID NO: 102601 - DNA, 30 bp, Artificial Sequence
  Synthetic oligonucleotide
accggcagtacggttttagcctagatgaga

SEQ ID NO: 102602 - DNA, 30 bp, Artificial Sequence
  Synthetic oligonucleotide
catgctaacacgcactgttcgtaggtgaga

SEQ ID NO: 102603 - DNA, 30 bp, Artificial Sequence
  Synthetic oligonucleotide
taccgaagtttcatcagcggaagggtgaga

SEQ ID NO: 102604 - DNA, 30 bp, Artificial Sequence
  Synthetic oligonucleotide
accgtgtattgagaatgaatgtgcttgaga

SEQ ID NO: 102605 - DNA, 30 bp, Artificial Sequence
  Synthetic oligonucleotide
tatgaaacggctaggtattggtggaataga

SEQ ID NO: 102606 - DNA, 30 bp, Artificial Sequence
  Synthetic oligonucleotide
tattacggcgagtacgaatgacttaataga

SEQ ID NO: 102607 - DNA, 30 bp, Artificial Sequence
  Synthetic oligonucleotide
gttaggcttcccgtacatctcgaccataga

SEQ ID NO: 102608 - DNA, 30 bp, Artificial Sequence
  Synthetic oligonucleotide
ctcgttcgagtagaatgcgtggggcataga

SEQ ID NO: 102609 - DNA, 30 bp, Artificial Sequence
  Synthetic oligonucleotide
gtttggaatatcaggagacggacggataga

SEQ ID NO: 102610 - DNA, 30 bp, Artificial Sequence
  Synthetic oligonucleotide
tctcgacgagcagtgaacattagggataga

SEQ ID NO: 102611 - DNA, 30 bp, Artificial Sequence
  Synthetic oligonucleotide
tcggtaccagtgtacactcgctatgataga

SEQ ID NO: 102612 - DNA, 30 bp, Artificial Sequence
  Synthetic oligonucleotide
acagcagtggcgggttttaatctatataga

SEQ ID NO: 102613 - DNA, 30 bp, Artificial Sequence
  Synthetic oligonucleotide
gcttctgcctcatgggaaaacacttataga

SEQ ID NO: 102614 - DNA, 30 bp, Artificial Sequence
  Synthetic oligonucleotide
gcgggatcaagccgcaatatgccaactaga

SEQ ID NO: 102615 - DNA, 30 bp, Artificial Sequence
  Synthetic oligonucleotide
cgtggcaggctgcaccagttgagcactaga

SEQ ID NO: 102616 - DNA, 30 bp, Artificial Sequence
  Synthetic oligonucleotide
acgcgcggaccatgacaggcaggtactaga

SEQ ID NO: 102617 - DNA, 30 bp, Artificial Sequence
  Synthetic oligonucleotide
ggtgtttaaggcgtccctccacatcctaga

SEQ ID NO: 102618 - DNA, 30 bp, Artificial Sequence
  Synthetic oligonucleotide
ggcatcggctaaacaggcgggaaagctaga

SEQ ID NO: 102619 - DNA, 30 bp, Artificial Sequence
  Synthetic oligonucleotide
agggctaatacccgtataaaatggtctaga

SEQ ID NO: 102620 - DNA, 30 bp, Artificial Sequence
  Synthetic oligonucleotide
caagtgaccgggagaccaagagaaagtaga

SEQ ID NO: 102621 - DNA, 30 bp, Artificial Sequence
  Synthetic oligonucleotide
tgatggcttctaagggaaacgccaagtaga

SEQ ID NO: 102622 - DNA, 30 bp, Artificial Sequence
  Synthetic oligonucleotide
ccacacagacgtaatgtcctgccaagtaga

SEQ ID NO: 102623 - DNA, 30 bp, Artificial Sequence
  Synthetic oligonucleotide
ccgtaggaatgatctatgacctagagtaga

SEQ ID NO: 102624 - DNA, 30 bp, Artificial Sequence
  Synthetic oligonucleotide
taaagctccgatccaaggtacgcgagtaga

SEQ ID NO: 102625 - DNA, 30 bp, Artificial Sequence
  Synthetic oligonucleotide
gtgttggaaatcgatagagcataaggtaga

SEQ ID NO: 102626 - DNA, 30 bp, Artificial Sequence
  Synthetic oligonucleotide
tcttctgaaggtgatcccaatccgtgtaga

SEQ ID NO: 102627 - DNA, 30 bp, Artificial Sequence
  Synthetic oligonucleotide
gtgcagcgggacgtcttttgctaaattaga

SEQ ID NO: 102628 - DNA, 30 bp, Artificial Sequence
  Synthetic oligonucleotide
aatgagaatgtggaacgccgacatcttaga

SEQ ID NO: 102629 - DNA, 30 bp, Artificial Sequence
  Synthetic oligonucleotide
actgtaggccgtttaagtagcaaagttaga

SEQ ID NO: 102630 - DNA, 30 bp, Artificial Sequence
  Synthetic oligonucleotide
caatagtagtttcgcctacccggagttaga

SEQ ID NO: 102631 - DNA, 30 bp, Artificial Sequence
  Synthetic oligonucleotide
tctcacacctatagtttctagaatgttaga

SEQ ID NO: 102632 - DNA, 30 bp, Artificial Sequence
  Synthetic oligonucleotide
agcgaattctggtcgcgatgtgaaaaacga

SEQ ID NO: 102633 - DNA, 30 bp, Artificial Sequence
  Synthetic oligonucleotide
agcaaagctaacacagcgtaagtcaaacga

SEQ ID NO: 102634 - DNA, 30 bp, Artificial Sequence
  Synthetic oligonucleotide
actgggaggaggagacattgtcctaaacga

SEQ ID NO: 102635 - DNA, 30 bp, Artificial Sequence
  Synthetic oligonucleotide
gggaagtcgatatggcatgatgtccaacga

SEQ ID NO: 102636 - DNA, 30 bp, Artificial Sequence
  Synthetic oligonucleotide
gcagaagtgcattagagcgccacgcaacga

SEQ ID NO: 102637 - DNA, 30 bp, Artificial Sequence
  Synthetic oligonucleotide
aagaagattagtctagagcggagtcaacga

SEQ ID NO: 102638 - DNA, 30 bp, Artificial Sequence
  Synthetic oligonucleotide
catttcgcggagtacctaaagattcaacga

SEQ ID NO: 102639 - DNA, 30 bp, Artificial Sequence
  Synthetic oligonucleotide
aaacgactaggggttagggctttgtaacga

SEQ ID NO: 102640 - DNA, 30 bp, Artificial Sequence
  Synthetic oligonucleotide
gcatacgccgggtacatgcacatttaacga

SEQ ID NO: 102641 - DNA, 30 bp, Artificial Sequence
  Synthetic oligonucleotide
atcatcctcaacagcgcatagactacacga

SEQ ID NO: 102642 - DNA, 30 bp, Artificial Sequence
  Synthetic oligonucleotide
ataggtatattcatgggaatcggaccacga

SEQ ID NO: 102643 - DNA, 30 bp, Artificial Sequence
  Synthetic oligonucleotide
ccaaacacttgggggacattataggcacga

SEQ ID NO: 102644 - DNA, 30 bp, Artificial Sequence
  Synthetic oligonucleotide
atgtaaattaatatctggccaccgtcacga

SEQ ID NO: 102645 - DNA, 30 bp, Artificial Sequence
  Synthetic oligonucleotide
gggtttggtcgagtagacagctattcacga

SEQ ID NO: 102646 - DNA, 29 bp, Artificial Sequence
  Synthetic oligonucleotide
ttgtgtatcaatcacgtggctagagacga

SEQ ID NO: 102647 - DNA, 30 bp, Artificial Sequence
  Synthetic oligonucleotide
ctaatagtgaaggaggctgaacctagacga

SEQ ID NO: 102648 - DNA, 30 bp, Artificial Sequence
  Synthetic oligonucleotide
atctcatgacaataaatatatacgcgacga

SEQ ID NO: 102649 - DNA, 30 bp, Artificial Sequence
  Synthetic oligonucleotide
gcgcatgtatataggagagtagactgacga

SEQ ID NO: 102650 - DNA, 30 bp, Artificial Sequence
  Synthetic oligonucleotide
gaccgtcaagcattcgggtactggtgacga

SEQ ID NO: 102651 - DNA, 30 bp, Artificial Sequence
  Synthetic oligonucleotide
gtcgacagtctaaatcgccacccgatacga

SEQ ID NO: 102652 - DNA, 30 bp, Artificial Sequence
  Synthetic oligonucleotide
gggaagtattttaaggctatggcgatacga

SEQ ID NO: 102653 - DNA, 31 bp, Artificial Sequence
  Synthetic oligonucleotide
gccggagtcaatggggaatgtttcgatacga

SEQ ID NO: 102654 - DNA, 30 bp, Artificial Sequence
  Synthetic oligonucleotide
gtccatctaaaaagcatgctccggatacga

SEQ ID NO: 102655 - DNA, 30 bp, Artificial Sequence
  Synthetic oligonucleotide
gcgggggtggaagtcacggtgctgctacga

SEQ ID NO: 102656 - DNA, 30 bp, Artificial Sequence
  Synthetic oligonucleotide
cataaaatgtggggaaagctctcagtacga

SEQ ID NO: 102657 - DNA, 30 bp, Artificial Sequence
  Synthetic oligonucleotide
tggggtcgtacaaacagatcggccgtacga

SEQ ID NO: 102658 - DNA, 30 bp, Artificial Sequence
  Synthetic oligonucleotide
cgcggttgtgctgaagtgcccggcgtacga

SEQ ID NO: 102659 - DNA, 30 bp, Artificial Sequence
  Synthetic oligonucleotide
caagctgaagacctaacgacaactgtacga

SEQ ID NO: 102660 - DNA, 30 bp, Artificial Sequence
  Synthetic oligonucleotide
gaggccagccaggaatccgacggcttacga

SEQ ID NO: 102661 - DNA, 30 bp, Artificial Sequence
  Synthetic oligonucleotide
aagagcaagcgaatcttgaaccatttacga

SEQ ID NO: 102662 - DNA, 30 bp, Artificial Sequence
  Synthetic oligonucleotide
tattacattcaagctaaaaaggccaaccga

SEQ ID NO: 102663 - DNA, 30 bp, Artificial Sequence
  Synthetic oligonucleotide
ggtaaacacgcgcggcagctcacgcaccga

SEQ ID NO: 102664 - DNA, 30 bp, Artificial Sequence
  Synthetic oligonucleotide
gcatgaatacaagagcgtcccggtcaccga

SEQ ID NO: 102665 - DNA, 30 bp, Artificial Sequence
  Synthetic oligonucleotide
gcgtctaccactgaaagtcatatggaccga

SEQ ID NO: 102666 - DNA, 30 bp, Artificial Sequence
  Synthetic oligonucleotide
gaaaagatgagctccccactatggtaccga

SEQ ID NO: 102667 - DNA, 30 bp, Artificial Sequence
  Synthetic oligonucleotide
gtaagttaccatcaagtttgagtgtaccga

SEQ ID NO: 102668 - DNA, 30 bp, Artificial Sequence
  Synthetic oligonucleotide
gtcgccgttgtcgagagtgatagaacccga

SEQ ID NO: 102669 - DNA, 30 bp, Artificial Sequence
  Synthetic oligonucleotide
atccggcatattacgccatagaccacccga

SEQ ID NO: 102670 - DNA, 30 bp, Artificial Sequence
  Synthetic oligonucleotide
ggagtagccaaagatttcgcggccacccga

SEQ ID NO: 102671 - DNA, 30 bp, Artificial Sequence
  Synthetic oligonucleotide
tggcacctgtgcttgcgaaactgaccccga

SEQ ID NO: 102672 - DNA, 30 bp, Artificial Sequence
  Synthetic oligonucleotide
agagcaaaatgacaagcacgagacccccga

SEQ ID NO: 102673 - DNA, 30 bp, Artificial Sequence
  Synthetic oligonucleotide
attgttaaagacaaaccgtcggaggcccga

SEQ ID NO: 102674 - DNA, 30 bp, Artificial Sequence
  Synthetic oligonucleotide
gggtgtggaaatgtgattgcaagtgcccga

SEQ ID NO: 102675 - DNA, 30 bp, Artificial Sequence
  Synthetic oligonucleotide
aacatccgggggtgggatccactttcccga

SEQ ID NO: 102676 - DNA, 30 bp, Artificial Sequence
  Synthetic oligonucleotide
tatactgccgaaacggcgagtcgcagccga

SEQ ID NO: 102677 - DNA, 30 bp, Artificial Sequence
  Synthetic oligonucleotide
tcgcgcggatatatagccagattacgccga

SEQ ID NO: 102678 - DNA, 30 bp, Artificial Sequence
  Synthetic oligonucleotide
tcagattaaattcgaactcaagaaggccga

SEQ ID NO: 102679 - DNA, 30 bp, Artificial Sequence
  Synthetic oligonucleotide
tctagtcgtcaccaggcgagaccaggccga

SEQ ID NO: 102680 - DNA, 30 bp, Artificial Sequence
  Synthetic oligonucleotide
cgggtgttgtccctccgcgtggccggccga

SEQ ID NO: 102681 - DNA, 30 bp, Artificial Sequence
  Synthetic oligonucleotide
ggtagattacgtccaagagaacctggccga

SEQ ID NO: 102682 - DNA, 30 bp, Artificial Sequence
  Synthetic oligonucleotide
atggggtgctctttgatatgaagtggccga

SEQ ID NO: 102683 - DNA, 30 bp, Artificial Sequence
  Synthetic oligonucleotide
cgggggtgtaatgagagattgtgtggccga

SEQ ID NO: 102684 - DNA, 30 bp, Artificial Sequence
  Synthetic oligonucleotide
gcggataacaaggctatgatttactgccga

SEQ ID NO: 102685 - DNA, 30 bp, Artificial Sequence
  Synthetic oligonucleotide
caacgtcattaggaattgtgatgctgccga

SEQ ID NO: 102686 - DNA, 30 bp, Artificial Sequence
  Synthetic oligonucleotide
caatgcacttctgagaataattgttgccga

SEQ ID NO: 102687 - DNA, 30 bp, Artificial Sequence
  Synthetic oligonucleotide
actgtatagcgagatagatagcgcatccga

SEQ ID NO: 102688 - DNA, 30 bp, Artificial Sequence
  Synthetic oligonucleotide
acagacggtgatttgccgacgacactccga

SEQ ID NO: 102689 - DNA, 30 bp, Artificial Sequence
  Synthetic oligonucleotide
cgactcggtaaaaggactctagtcctccga

SEQ ID NO: 102690 - DNA, 31 bp, Artificial Sequence
  Synthetic oligonucleotide
aggtaacaggagggcattcagctggctccga

SEQ ID NO: 102691 - DNA, 30 bp, Artificial Sequence
  Synthetic oligonucleotide
gcttctattaccggcagatggaacgtccga

SEQ ID NO: 102692 - DNA, 30 bp, Artificial Sequence
  Synthetic oligonucleotide
atgaggcaaccagagttatcactcgtccga

SEQ ID NO: 102693 - DNA, 30 bp, Artificial Sequence
  Synthetic oligonucleotide
tcatccagtgttgcaaagagacctgtccga

SEQ ID NO: 102694 - DNA, 30 bp, Artificial Sequence
  Synthetic oligonucleotide
gggaaattgacgggtcgaattatcttccga

SEQ ID NO: 102695 - DNA, 30 bp, Artificial Sequence
  Synthetic oligonucleotide
atagcataaggcagggaacacgtcttccga

SEQ ID NO: 102696 - DNA, 30 bp, Artificial Sequence
  Synthetic oligonucleotide
gggaatattctagcgtgatatagaaagcga

SEQ ID NO: 102697 - DNA, 30 bp, Artificial Sequence
  Synthetic oligonucleotide
accccggctccaacatgaaaggcagagcga

SEQ ID NO: 102698 - DNA, 30 bp, Artificial Sequence
  Synthetic oligonucleotide
aggcgctccagaccggaggaccagtagcga

SEQ ID NO: 102699 - DNA, 30 bp, Artificial Sequence
  Synthetic oligonucleotide
tgtacctggctcaagggtgtaatttagcga

SEQ ID NO: 102700 - DNA, 30 bp, Artificial Sequence
  Synthetic oligonucleotide
gcagcaatgaaattcttcacaaaaacgcga

SEQ ID NO: 102701 - DNA, 30 bp, Artificial Sequence
  Synthetic oligonucleotide
cacgcaaacgagcgcacgtgggaaacgcga

SEQ ID NO: 102702 - DNA, 30 bp, Artificial Sequence
  Synthetic oligonucleotide
gcctaatttcgttgttcagagtcgacgcga

SEQ ID NO: 102703 - DNA, 30 bp, Artificial Sequence
  Synthetic oligonucleotide
cagacgaacaacggctggcgtagcgcgcga

SEQ ID NO: 102704 - DNA, 30 bp, Artificial Sequence
  Synthetic oligonucleotide
ggcgatttaaatatacgacattaggcgcga

SEQ ID NO: 102705 - DNA, 30 bp, Artificial Sequence
  Synthetic oligonucleotide
tcatccattgcgaaatgccatcttgcgcga

SEQ ID NO: 102706 - DNA, 30 bp, Artificial Sequence
  Synthetic oligonucleotide
ggtttgaacggatggggaggggcaaggcga

SEQ ID NO: 102707 - DNA, 30 bp, Artificial Sequence
  Synthetic oligonucleotide
gaccgtgagcaggctagtattctccggcga

SEQ ID NO: 102708 - DNA, 30 bp, Artificial Sequence
  Synthetic oligonucleotide
tacgggtcctaccaggatggtttgcggcga

SEQ ID NO: 102709 - DNA, 30 bp, Artificial Sequence
  Synthetic oligonucleotide
ctggaacccactcggacgaagcctcggcga

SEQ ID NO: 102710 - DNA, 30 bp, Artificial Sequence
  Synthetic oligonucleotide
ggcaaggagggcatccatgcaggagggcga

SEQ ID NO: 102711 - DNA, 30 bp, Artificial Sequence
  Synthetic oligonucleotide
aggtagcatgtcctgtgataatgcgggcga

SEQ ID NO: 102712 - DNA, 30 bp, Artificial Sequence
  Synthetic oligonucleotide
tgccaatagcagatgagctgatgtgggcga

SEQ ID NO: 102713 - DNA, 30 bp, Artificial Sequence
  Synthetic oligonucleotide
agagcagtgaagcatccgttgataatgcga

SEQ ID NO: 102714 - DNA, 30 bp, Artificial Sequence
  Synthetic oligonucleotide
tcgtatactcagagttacagttacatgcga

SEQ ID NO: 102715 - DNA, 30 bp, Artificial Sequence
  Synthetic oligonucleotide
acagatgcttagggtgtaacctctatgcga

SEQ ID NO: 102716 - DNA, 30 bp, Artificial Sequence
  Synthetic oligonucleotide
acgcttgcgaccaaactaaggattatgcga

SEQ ID NO: 102717 - DNA, 30 bp, Artificial Sequence
  Synthetic oligonucleotide
actgttcgagtatactctgcttgactgcga

SEQ ID NO: 102718 - DNA, 30 bp, Artificial Sequence
  Synthetic oligonucleotide
ccggccagtctactgatccagcgagtgcga

SEQ ID NO: 102719 - DNA, 30 bp, Artificial Sequence
  Synthetic oligonucleotide
tatcgactggattagtctccgcacgtgcga

SEQ ID NO: 102720 - DNA, 30 bp, Artificial Sequence
  Synthetic oligonucleotide
ataatattgaggactggacatggcgtgcga

SEQ ID NO: 102721 - DNA, 30 bp, Artificial Sequence
  Synthetic oligonucleotide
gcactctgcgactgtcgggcttgggtgcga

SEQ ID NO: 102722 - DNA, 30 bp, Artificial Sequence
  Synthetic oligonucleotide
tgtacgcgatacgttcaacagtgattgcga

SEQ ID NO: 102723 - DNA, 30 bp, Artificial Sequence
  Synthetic oligonucleotide
gcctgctttaacgggccaccaattttgcga

SEQ ID NO: 102724 - DNA, 30 bp, Artificial Sequence
  Synthetic oligonucleotide
ccttcaaaaaaagtgtggacaccgaatcga

SEQ ID NO: 102725 - DNA, 30 bp, Artificial Sequence
  Synthetic oligonucleotide
tcacgttgtgggtagtcgtcgcttaatcga

SEQ ID NO: 102726 - DNA, 30 bp, Artificial Sequence
  Synthetic oligonucleotide
gaggactaagtgtgttaacatttacatcga

SEQ ID NO: 102727 - DNA, 30 bp, Artificial Sequence
  Synthetic oligonucleotide
ggagggtttctttgtaagttaatccatcga

SEQ ID NO: 102728 - DNA, 30 bp, Artificial Sequence
  Synthetic oligonucleotide
agactagcttcatggaataaccggcatcga

SEQ ID NO: 102729 - DNA, 30 bp, Artificial Sequence
  Synthetic oligonucleotide
gcctgactccgttacaaagatccagatcga

SEQ ID NO: 102730 - DNA, 30 bp, Artificial Sequence
  Synthetic oligonucleotide
ggaactaaagagactgtaatccgagatcga

SEQ ID NO: 102731 - DNA, 30 bp, Artificial Sequence
  Synthetic oligonucleotide
agggggatggccgtcggtatgtgtgatcga

SEQ ID NO: 102732 - DNA, 30 bp, Artificial Sequence
  Synthetic oligonucleotide
ccgctcagatgaattacaggtggatatcga

SEQ ID NO: 102733 - DNA, 30 bp, Artificial Sequence
  Synthetic oligonucleotide
cagaaacaggctatatgaccaatatatcga

SEQ ID NO: 102734 - DNA, 30 bp, Artificial Sequence
  Synthetic oligonucleotide
atatatagtagggcacggattcggtatcga

SEQ ID NO: 102735 - DNA, 30 bp, Artificial Sequence
  Synthetic oligonucleotide
gtacacaggcgtcagggaaaagccactcga

SEQ ID NO: 102736 - DNA, 30 bp, Artificial Sequence
  Synthetic oligonucleotide
caagacgggtgagttatctgaacgactcga

SEQ ID NO: 102737 - DNA, 30 bp, Artificial Sequence
  Synthetic oligonucleotide
cgttcactagtaagaatcatctaacctcga

SEQ ID NO: 102738 - DNA, 30 bp, Artificial Sequence
  Synthetic oligonucleotide
gcatccgtgtcataagatcgaattcctcga

SEQ ID NO: 102739 - DNA, 30 bp, Artificial Sequence
  Synthetic oligonucleotide
gctcgatgaggcgcgatactgcgagctcga

SEQ ID NO: 102740 - DNA, 30 bp, Artificial Sequence
  Synthetic oligonucleotide
acggcaagggcgggggcaaccaggtctcga

SEQ ID NO: 102741 - DNA, 30 bp, Artificial Sequence
  Synthetic oligonucleotide
cattctagatttgttagcttgatgtctcga

SEQ ID NO: 102742 - DNA, 30 bp, Artificial Sequence
  Synthetic oligonucleotide
aatggcatacggtgtaaagtagattctcga

SEQ ID NO: 102743 - DNA, 30 bp, Artificial Sequence
  Synthetic oligonucleotide
tcgtgccaagtgtcgtcatctgattctcga

SEQ ID NO: 102744 - DNA, 30 bp, Artificial Sequence
  Synthetic oligonucleotide
agattggtgatcaaatgacagtgttctcga

SEQ ID NO: 102745 - DNA, 30 bp, Artificial Sequence
  Synthetic oligonucleotide
cctcgcataatagattcaaggcacagtcga

SEQ ID NO: 102746 - DNA, 30 bp, Artificial Sequence
  Synthetic oligonucleotide
ctgtaacattgtgaatgcccaccgagtcga

SEQ ID NO: 102747 - DNA, 30 bp, Artificial Sequence
  Synthetic oligonucleotide
gccattactcagacaacggaacagcgtcga

SEQ ID NO: 102748 - DNA, 30 bp, Artificial Sequence
  Synthetic oligonucleotide
gtgtacagatcctgggcgtggtatggtcga

SEQ ID NO: 102749 - DNA, 30 bp, Artificial Sequence
  Synthetic oligonucleotide
tgtggaaactagggagctacagaatgtcga

SEQ ID NO: 102750 - DNA, 30 bp, Artificial Sequence
  Synthetic oligonucleotide
atcaaacgaagatgcgaacacccctgtcga

SEQ ID NO: 102751 - DNA, 30 bp, Artificial Sequence
  Synthetic oligonucleotide
catgagcacgagttcaacaagcagattcga

SEQ ID NO: 102752 - DNA, 30 bp, Artificial Sequence
  Synthetic oligonucleotide
gaattgggctaatgggcgacggatattcga

SEQ ID NO: 102753 - DNA, 30 bp, Artificial Sequence
  Synthetic oligonucleotide
ggaaagtaaactgtataaatgcgtattcga

SEQ ID NO: 102754 - DNA, 30 bp, Artificial Sequence
  Synthetic oligonucleotide
tgcttaacaagcgttgtggagctacttcga

SEQ ID NO: 102755 - DNA, 30 bp, Artificial Sequence
  Synthetic oligonucleotide
ggccacattagtcccgaggagggagttcga

SEQ ID NO: 102756 - DNA, 30 bp, Artificial Sequence
  Synthetic oligonucleotide
taccctcatgtgccaaagtagctcgttcga

SEQ ID NO: 102757 - DNA, 30 bp, Artificial Sequence
  Synthetic oligonucleotide
accaattcctataaatgaaaaatgtttcga

SEQ ID NO: 102758 - DNA, 30 bp, Artificial Sequence
  Synthetic oligonucleotide
cagagtgttcggagcattgaggaaaaagga

SEQ ID NO: 102759 - DNA, 30 bp, Artificial Sequence
  Synthetic oligonucleotide
cgaaagtatttgatcatgtggtcaaaagga

SEQ ID NO: 102760 - DNA, 30 bp, Artificial Sequence
  Synthetic oligonucleotide
gtgaagcccaggcgatgccgttgcaaagga

SEQ ID NO: 102761 - DNA, 30 bp, Artificial Sequence
  Synthetic oligonucleotide
ctgatcccacagcattggcgtcggaaagga

SEQ ID NO: 102762 - DNA, 30 bp, Artificial Sequence
  Synthetic oligonucleotide
ggcctcgaaagataaagatatgataaagga

SEQ ID NO: 102763 - DNA, 31 bp, Artificial Sequence
  Synthetic oligonucleotide
tggaacgtggggcaagctgaactataaagga

SEQ ID NO: 102764 - DNA, 30 bp, Artificial Sequence
  Synthetic oligonucleotide
gctccgctaaggatcaagatttcacaagga

SEQ ID NO: 102765 - DNA, 30 bp, Artificial Sequence
  Synthetic oligonucleotide
accgctcgacccttcagaagaaggcaagga

SEQ ID NO: 102766 - DNA, 30 bp, Artificial Sequence
  Synthetic oligonucleotide
attcgcgtagcgtgcgatttacctcaagga

SEQ ID NO: 102767 - DNA, 30 bp, Artificial Sequence
  Synthetic oligonucleotide
agtggcgtataagtgagaaatgttcaagga

SEQ ID NO: 102768 - DNA, 30 bp, Artificial Sequence
  Synthetic oligonucleotide
taatcaccgtgcccttagcccaattaagga

SEQ ID NO: 102769 - DNA, 30 bp, Artificial Sequence
  Synthetic oligonucleotide
gcgcgagttgaatagggctttgcaacagga

SEQ ID NO: 102770 - DNA, 30 bp, Artificial Sequence
  Synthetic oligonucleotide
aaccaatgtcatcaaatcacgctaacagga

SEQ ID NO: 102771 - DNA, 30 bp, Artificial Sequence
  Synthetic oligonucleotide
cgttgctgcattaaactcctagtcacagga

SEQ ID NO: 102772 - DNA, 30 bp, Artificial Sequence
  Synthetic oligonucleotide
ggggttaggcaaatctgaagactagcagga

SEQ ID NO: 102773 - DNA, 30 bp, Artificial Sequence
  Synthetic oligonucleotide
tcatcggtgtcgctccaggggttggcagga

SEQ ID NO: 102774 - DNA, 30 bp, Artificial Sequence
  Synthetic oligonucleotide
tcaggtagtcttcaataattttatgcagga

SEQ ID NO: 102775 - DNA, 30 bp, Artificial Sequence
  Synthetic oligonucleotide
cagtccctcatcgatgataaccaatcagga

SEQ ID NO: 102776 - DNA, 30 bp, Artificial Sequence
  Synthetic oligonucleotide
tcaacatgattcaaggttgtcatatcagga

SEQ ID NO: 102777 - DNA, 30 bp, Artificial Sequence
  Synthetic oligonucleotide
gtgcacgcattgagcggttaattatcagga

SEQ ID NO: 102778 - DNA, 30 bp, Artificial Sequence
  Synthetic oligonucleotide
gaactcgaggattaaaggagataccgagga

SEQ ID NO: 102779 - DNA, 30 bp, Artificial Sequence
  Synthetic oligonucleotide
atatgcacgaatgcgcatactctgcgagga

SEQ ID NO: 102780 - DNA, 30 bp, Artificial Sequence
  Synthetic oligonucleotide
gctatcgtaggagcgacaggagcaggagga

SEQ ID NO: 102781 - DNA, 30 bp, Artificial Sequence
  Synthetic oligonucleotide
gactgaccaaagtagtccactgcaggagga

SEQ ID NO: 102782 - DNA, 30 bp, Artificial Sequence
  Synthetic oligonucleotide
gttgaattatatgtcaacagcttaggagga

SEQ ID NO: 102783 - DNA, 30 bp, Artificial Sequence
  Synthetic oligonucleotide
gggtaaaaaatgtatcctgcgtttggagga

SEQ ID NO: 102784 - DNA, 30 bp, Artificial Sequence
  Synthetic oligonucleotide
ttcgggtcacctccatgaatccaaatagga

SEQ ID NO: 102785 - DNA, 30 bp, Artificial Sequence
  Synthetic oligonucleotide
gaacggatgggcaggggcgttagaatagga

SEQ ID NO: 102786 - DNA, 30 bp, Artificial Sequence
  Synthetic oligonucleotide
cacgtggccaataggtctggattcatagga

SEQ ID NO: 102787 - DNA, 30 bp, Artificial Sequence
  Synthetic oligonucleotide
gcaatcagataagagagcacgttcatagga

SEQ ID NO: 102788 - DNA, 30 bp, Artificial Sequence
  Synthetic oligonucleotide
aaaggcggtggttataaagggggactagga

SEQ ID NO: 102789 - DNA, 30 bp, Artificial Sequence
  Synthetic oligonucleotide
actgagagtgtgattcaatttggtctagga

SEQ ID NO: 102790 - DNA, 30 bp, Artificial Sequence
  Synthetic oligonucleotide
atgtacaataagactctaacttgggtagga

SEQ ID NO: 102791 - DNA, 30 bp, Artificial Sequence
  Synthetic oligonucleotide
tatgaaagagtgtaagaaacccatgtagga

SEQ ID NO: 102792 - DNA, 30 bp, Artificial Sequence
  Synthetic oligonucleotide
gtaagaaacgagttactactcattgtagga

SEQ ID NO: 102793 - DNA, 30 bp, Artificial Sequence
  Synthetic oligonucleotide
aagggagccatctcgacaggagcgttagga

SEQ ID NO: 102794 - DNA, 31 bp, Artificial Sequence
  Synthetic oligonucleotide
cacataagataggcgaacacacgtaaacgga

SEQ ID NO: 102795 - DNA, 30 bp, Artificial Sequence
  Synthetic oligonucleotide
cgggcgagctcaaggccccgtaacaacgga

SEQ ID NO: 102796 - DNA, 30 bp, Artificial Sequence
  Synthetic oligonucleotide
gccggacggtgaggaagatcgaacgacgga

SEQ ID NO: 102797 - DNA, 30 bp, Artificial Sequence
  Synthetic oligonucleotide
caaatcaggtgcataataactgccgacgga

SEQ ID NO: 102798 - DNA, 30 bp, Artificial Sequence
  Synthetic oligonucleotide
ttcgataacgcgtcacagggcgcatacgga

SEQ ID NO: 102799 - DNA, 30 bp, Artificial Sequence
  Synthetic oligonucleotide
ccaataatattacctgataaaacctacgga

SEQ ID NO: 102800 - DNA, 30 bp, Artificial Sequence
  Synthetic oligonucleotide
gggcgggagcccacgatgcctttctacgga

SEQ ID NO: 102801 - DNA, 30 bp, Artificial Sequence
  Synthetic oligonucleotide
cagggttgtggccagagagagagttacgga

SEQ ID NO: 102802 - DNA, 30 bp, Artificial Sequence
  Synthetic oligonucleotide
gggggtggggcggttccacttaaaaccgga

SEQ ID NO: 102803 - DNA, 30 bp, Artificial Sequence
  Synthetic oligonucleotide
tacacgccctacatctgtcattcgaccgga

SEQ ID NO: 102804 - DNA, 30 bp, Artificial Sequence
  Synthetic oligonucleotide
gtaagctaagctctgttaaagatggccgga

SEQ ID NO: 102805 - DNA, 30 bp, Artificial Sequence
  Synthetic oligonucleotide
ggcgtcgcgcccactgaagattgtgccgga

SEQ ID NO: 102806 - DNA, 30 bp, Artificial Sequence
  Synthetic oligonucleotide
cctacccataaagattcgctaacatccgga

SEQ ID NO: 102807 - DNA, 30 bp, Artificial Sequence
  Synthetic oligonucleotide
tgctccgtgcactaccctaccgagtccgga

SEQ ID NO: 102808 - DNA, 30 bp, Artificial Sequence
  Synthetic oligonucleotide
ggcccaaaatttgcctcacggatgtccgga

SEQ ID NO: 102809 - DNA, 30 bp, Artificial Sequence
  Synthetic oligonucleotide
atctcagaaagaccagtggttcgaagcgga

SEQ ID NO: 102810 - DNA, 30 bp, Artificial Sequence
  Synthetic oligonucleotide
cgggaatgagtagtcccgtgaccgagcgga

SEQ ID NO: 102811 - DNA, 30 bp, Artificial Sequence
  Synthetic oligonucleotide
cgattctaagatgagcgtacgcgacgcgga

SEQ ID NO: 102812 - DNA, 30 bp, Artificial Sequence
  Synthetic oligonucleotide
gtcactgacataataacctattaccgcgga

SEQ ID NO: 102813 - DNA, 30 bp, Artificial Sequence
  Synthetic oligonucleotide
atgtagcctacgttccacgacagtcgcgga

SEQ ID NO: 102814 - DNA, 30 bp, Artificial Sequence
  Synthetic oligonucleotide
tacgttcaggctgccgtgttgataggcgga

SEQ ID NO: 102815 - DNA, 30 bp, Artificial Sequence
  Synthetic oligonucleotide
cagtgccaaaattggcggttaatcggcgga

SEQ ID NO: 102816 - DNA, 30 bp, Artificial Sequence
  Synthetic oligonucleotide
agcgcttgcgaatatttggaaaggggcgga

SEQ ID NO: 102817 - DNA, 30 bp, Artificial Sequence
  Synthetic oligonucleotide
ggacgtgcaggcaaacatggcggcatcgga

SEQ ID NO: 102818 - DNA, 30 bp, Artificial Sequence
  Synthetic oligonucleotide
gggtccaccagctgatttcgacctctcgga

SEQ ID NO: 102819 - DNA, 30 bp, Artificial Sequence
  Synthetic oligonucleotide
atacagcttgcgttaccatcggaagtcgga

SEQ ID NO: 102820 - DNA, 30 bp, Artificial Sequence
  Synthetic oligonucleotide
gccatggtgctggcgggtatcggagtcgga

SEQ ID NO: 102821 - DNA, 30 bp, Artificial Sequence
  Synthetic oligonucleotide
agtgtttaaatccgatgattggacgtcgga

SEQ ID NO: 102822 - DNA, 30 bp, Artificial Sequence
  Synthetic oligonucleotide
caaaaagtattctctaaaacacctgtcgga

SEQ ID NO: 102823 - DNA, 30 bp, Artificial Sequence
  Synthetic oligonucleotide
cgaccctcagacttttgttaacgattcgga

SEQ ID NO: 102824 - DNA, 30 bp, Artificial Sequence
  Synthetic oligonucleotide
gggggaacgccacgaatcccacggttcgga

SEQ ID NO: 102825 - DNA, 30 bp, Artificial Sequence
  Synthetic oligonucleotide
gaaagggctgtacgcgaaaggtccaaggga

SEQ ID NO: 102826 - DNA, 30 bp, Artificial Sequence
  Synthetic oligonucleotide
aaagcccacctgagggattgtgggaaggga

SEQ ID NO: 102827 - DNA, 30 bp, Artificial Sequence
  Synthetic oligonucleotide
caagttagctaagtcgatagcacacaggga

SEQ ID NO: 102828 - DNA, 30 bp, Artificial Sequence
  Synthetic oligonucleotide
caaatgtcgcacgctgactacagagaggga

SEQ ID NO: 102829 - DNA, 30 bp, Artificial Sequence
  Synthetic oligonucleotide
cctttccgtgtttatctgggttaggaggga

SEQ ID NO: 102830 - DNA, 30 bp, Artificial Sequence
  Synthetic oligonucleotide
ggcgatacgctaccggtttacacggaggga

SEQ ID NO: 102831 - DNA, 30 bp, Artificial Sequence
  Synthetic oligonucleotide
gtctgccggaataagaataaattggaggga

SEQ ID NO: 102832 - DNA, 30 bp, Artificial Sequence
  Synthetic oligonucleotide
ttatgatccgaaatatgagcgtatgaggga

SEQ ID NO: 102833 - DNA, 30 bp, Artificial Sequence
  Synthetic oligonucleotide
catgacaggccgtatcttcgtctataggga

SEQ ID NO: 102834 - DNA, 30 bp, Artificial Sequence
  Synthetic oligonucleotide
tcatgtaataatggatctgtctcctaggga

SEQ ID NO: 102835 - DNA, 30 bp, Artificial Sequence
  Synthetic oligonucleotide
ccttgaagtgctcgcggaccatagacggga

SEQ ID NO: 102836 - DNA, 30 bp, Artificial Sequence
  Synthetic oligonucleotide
cgggtgttaacaacaaaagtactgacggga

SEQ ID NO: 102837 - DNA, 30 bp, Artificial Sequence
  Synthetic oligonucleotide
gggagcctcgtctagagtggctagccggga

SEQ ID NO: 102838 - DNA, 30 bp, Artificial Sequence
  Synthetic oligonucleotide
cgacattcgttgtgatgatcatggccggga

SEQ ID NO: 102839 - DNA, 30 bp, Artificial Sequence
  Synthetic oligonucleotide
ttgactaggggcttcccctccggtccggga

SEQ ID NO: 102840 - DNA, 30 bp, Artificial Sequence
  Synthetic oligonucleotide
aaggtgaggggggcggacacgtaagcggga

SEQ ID NO: 102841 - DNA, 30 bp, Artificial Sequence
  Synthetic oligonucleotide
cgtaaagcagggcaatctcaagccgcggga

SEQ ID NO: 102842 - DNA, 30 bp, Artificial Sequence
  Synthetic oligonucleotide
ggacacgttgccgtaaggaccccgtcggga

SEQ ID NO: 102843 - DNA, 30 bp, Artificial Sequence
  Synthetic oligonucleotide
aggtccgtcaacaccgccccttcgtcggga

SEQ ID NO: 102844 - DNA, 30 bp, Artificial Sequence
  Synthetic oligonucleotide
gactagcagggtgcgaacacactgtcggga

SEQ ID NO: 102845 - DNA, 30 bp, Artificial Sequence
  Synthetic oligonucleotide
tctgactcggcgaaaacggcctatagggga

SEQ ID NO: 102846 - DNA, 30 bp, Artificial Sequence
  Synthetic oligonucleotide
ggtgttcacacatagtacagggaacgggga

SEQ ID NO: 102847 - DNA, 30 bp, Artificial Sequence
  Synthetic oligonucleotide
atgttcacgaactgtgcagctgcaggggga

SEQ ID NO: 102848 - DNA, 37 bp, Artificial Sequence
  Synthetic oligonucleotide
aagataatacattcatggtatcggggatcggggggga

SEQ ID NO: 102849 - DNA, 40 bp, Artificial Sequence
  Synthetic oligonucleotide
aagataatacatacatggtatggtcggggatcggggggga

SEQ ID NO: 102850 - DNA, 36 bp, Artificial Sequence
  Synthetic oligonucleotide
aagataattcatggtatggtcggggatcggggggga

SEQ ID NO: 102851 - DNA, 40 bp, Artificial Sequence
  Synthetic oligonucleotide
aagatactacattcatggtatggtcggggatcggggggga

SEQ ID NO: 102852 - DNA, 40 bp, Artificial Sequence
  Synthetic oligonucleotide
aagataataccttcatggtatggtcggggatcggggggga

SEQ ID NO: 102853 - DNA, 30 bp, Artificial Sequence
  Synthetic oligonucleotide
gtctctcaaaaagtggaagggtatggggga

SEQ ID NO: 102854 - DNA, 30 bp, Artificial Sequence
  Synthetic oligonucleotide
ctagacttccaccggtgaagagctggggga

SEQ ID NO: 102855 - DNA, 30 bp, Artificial Sequence
  Synthetic oligonucleotide
cagatcattggaaaacgcaccagtggggga

SEQ ID NO: 102856 - DNA, 30 bp, Artificial Sequence
  Synthetic oligonucleotide
aaagtaggacgcgttggccaaaaatgggga

SEQ ID NO: 102857 - DNA, 30 bp, Artificial Sequence
  Synthetic oligonucleotide
ggaagattcgcgtagaatttgtcctgggga

SEQ ID NO: 102858 - DNA, 30 bp, Artificial Sequence
  Synthetic oligonucleotide
cgaaactatcccaggtcgcgatattgggga

SEQ ID NO: 102859 - DNA, 40 bp, Artificial Sequence
  Synthetic oligonucleotide
aaaaataactgtccgtaaataagaggcgattcgaatggga

SEQ ID NO: 102860 - DNA, 30 bp, Artificial Sequence
  Synthetic oligonucleotide
ctttggaaacagtggagaccaggtatggga

SEQ ID NO: 102861 - DNA, 30 bp, Artificial Sequence
  Synthetic oligonucleotide
cgaaaaacgcttgaaacacatgcactggga

SEQ ID NO: 102862 - DNA, 29 bp, Artificial Sequence
  Synthetic oligonucleotide
ttggggatacttggcttaccgtagtggga

SEQ ID NO: 102863 - DNA, 30 bp, Artificial Sequence
  Synthetic oligonucleotide
atggccgagttggtactagggtgggtggga

SEQ ID NO: 102864 - DNA, 30 bp, Artificial Sequence
  Synthetic oligonucleotide
caaccttcgtgttttacagggctggtggga

SEQ ID NO: 102865 - DNA, 30 bp, Artificial Sequence
  Synthetic oligonucleotide
gccgcctagcaagtaatcagaggtgtggga

SEQ ID NO: 102866 - DNA, 30 bp, Artificial Sequence
  Synthetic oligonucleotide
tcgtaacagacactatggagcggattggga

SEQ ID NO: 102867 - DNA, 30 bp, Artificial Sequence
  Synthetic oligonucleotide
ctacgggtcgattcaaaggaactcttggga

SEQ ID NO: 102868 - DNA, 30 bp, Artificial Sequence
  Synthetic oligonucleotide
tggacagaatcgagaaatcgggcgttggga

SEQ ID NO: 102869 - DNA, 30 bp, Artificial Sequence
  Synthetic oligonucleotide
agagctagcaataggtcgtaccggttggga

SEQ ID NO: 102870 - DNA, 30 bp, Artificial Sequence
  Synthetic oligonucleotide
atgaccggggatccggacatggggttggga

SEQ ID NO: 102871 - DNA, 30 bp, Artificial Sequence
  Synthetic oligonucleotide
gtatgagtcacaggatctacgtggttggga

SEQ ID NO: 102872 - DNA, 30 bp, Artificial Sequence
  Synthetic oligonucleotide
ctgcgcgaataagggtcggtcactttggga

SEQ ID NO: 102873 - DNA, 30 bp, Artificial Sequence
  Synthetic oligonucleotide
gtgctgtcttacagcgaataagtggatgga

SEQ ID NO: 102874 - DNA, 30 bp, Artificial Sequence
  Synthetic oligonucleotide
gagatcagtaagctctccgttgtgtatgga

SEQ ID NO: 102875 - DNA, 30 bp, Artificial Sequence
  Synthetic oligonucleotide
acgagagcatatatctaggccgacactgga

SEQ ID NO: 102876 - DNA, 29 bp, Artificial Sequence
  Synthetic oligonucleotide
tgagtagaatagcccgcgccagccctgga

SEQ ID NO: 102877 - DNA, 30 bp, Artificial Sequence
  Synthetic oligonucleotide
atgctatatggtagactaaaaccagctgga

SEQ ID NO: 102878 - DNA, 29 bp, Artificial Sequence
  Synthetic oligonucleotide
gagggggaagcaaactaaagagtgctgga

SEQ ID NO: 102879 - DNA, 30 bp, Artificial Sequence
  Synthetic oligonucleotide
cgtgtgctaacccaagccacgtgttctgga

SEQ ID NO: 102880 - DNA, 30 bp, Artificial Sequence
  Synthetic oligonucleotide
ggaccccaagtgccctaggatctaagtgga

SEQ ID NO: 102881 - DNA, 30 bp, Artificial Sequence
  Synthetic oligonucleotide
acgagatctgagctcatcaagatgagtgga

SEQ ID NO: 102882 - DNA, 30 bp, Artificial Sequence
  Synthetic oligonucleotide
cggcggttaagtgagcaaatacatagtgga

SEQ ID NO: 102883 - DNA, 30 bp, Artificial Sequence
  Synthetic oligonucleotide
agccggtccaaagctcccatctggcgtgga

SEQ ID NO: 102884 - DNA, 30 bp, Artificial Sequence
  Synthetic oligonucleotide
cggcatagtataatccatactgttcgtgga

SEQ ID NO: 102885 - DNA, 30 bp, Artificial Sequence
  Synthetic oligonucleotide
ccatccgttgatcagagtgaagaaggtgga

SEQ ID NO: 102886 - DNA, 30 bp, Artificial Sequence
  Synthetic oligonucleotide
tacagtatggtacataaggcaataggtgga

SEQ ID NO: 102887 - DNA, 30 bp, Artificial Sequence
  Synthetic oligonucleotide
atatacgcaaaaggggcatggcagggtgga

SEQ ID NO: 102888 - DNA, 30 bp, Artificial Sequence
  Synthetic oligonucleotide
ttatggatgtgaacaaaagatggaattgga

SEQ ID NO: 102889 - DNA, 30 bp, Artificial Sequence
  Synthetic oligonucleotide
gcgcacggtgcgtggcaggctgttattgga

SEQ ID NO: 102890 - DNA, 30 bp, Artificial Sequence
  Synthetic oligonucleotide
gttgggtcacgcgaggcgagttaacttgga

SEQ ID NO: 102891 - DNA, 30 bp, Artificial Sequence
  Synthetic oligonucleotide
tcgcactcgcttcacatcccgcatcttgga

SEQ ID NO: 102892 - DNA, 30 bp, Artificial Sequence
  Synthetic oligonucleotide
tcacgctcagagtggtttttggagtttgga

SEQ ID NO: 102893 - DNA, 30 bp, Artificial Sequence
  Synthetic oligonucleotide
cggacagctataagccagtcggtgtttgga

SEQ ID NO: 102894 - DNA, 30 bp, Artificial Sequence
  Synthetic oligonucleotide
ccgacaatagcgagcacgccttcccaatga

SEQ ID NO: 102895 - DNA, 30 bp, Artificial Sequence
  Synthetic oligonucleotide
aaattggcatcggtagacgggactgaatga

SEQ ID NO: 102896 - DNA, 30 bp, Artificial Sequence
  Synthetic oligonucleotide
tcaaccgcatggtggcgatagaactaatga

SEQ ID NO: 102897 - DNA, 30 bp, Artificial Sequence
  Synthetic oligonucleotide
tgttcattcaaacacatgaccggctaatga

SEQ ID NO: 102898 - DNA, 30 bp, Artificial Sequence
  Synthetic oligonucleotide
gacctcaatgcatgtgtataaaggtaatga

SEQ ID NO: 102899 - DNA, 30 bp, Artificial Sequence
  Synthetic oligonucleotide
cgcaaacgggattgtttattttcttaatga

SEQ ID NO: 102900 - DNA, 30 bp, Artificial Sequence
  Synthetic oligonucleotide
agggccaatgctgacatagatagttaatga

SEQ ID NO: 102901 - DNA, 30 bp, Artificial Sequence
  Synthetic oligonucleotide
ccgagcaagccaaaagggatctcaacatga

SEQ ID NO: 102902 - DNA, 30 bp, Artificial Sequence
  Synthetic oligonucleotide
cgggacgagacccggccagcaagaacatga

SEQ ID NO: 102903 - DNA, 30 bp, Artificial Sequence
  Synthetic oligonucleotide
accctcagcgactaaggaacttagacatga

SEQ ID NO: 102904 - DNA, 30 bp, Artificial Sequence
  Synthetic oligonucleotide
aacgtcactaacgtttactaaggtacatga

SEQ ID NO: 102905 - DNA, 30 bp, Artificial Sequence
  Synthetic oligonucleotide
aacctagcaggtatctcgaagtaaccatga

SEQ ID NO: 102906 - DNA, 30 bp, Artificial Sequence
  Synthetic oligonucleotide
tgtctcaacacgtccaacaccaggccatga

SEQ ID NO: 102907 - DNA, 30 bp, Artificial Sequence
  Synthetic oligonucleotide
aagtacataccagtcagagtttccgcatga

SEQ ID NO: 102908 - DNA, 30 bp, Artificial Sequence
  Synthetic oligonucleotide
cactaatggctgaaactttggttaagatga

SEQ ID NO: 102909 - DNA, 29 bp, Artificial Sequence
  Synthetic oligonucleotide
agtccgagagggggaagactttaagatga

SEQ ID NO: 102910 - DNA, 30 bp, Artificial Sequence
  Synthetic oligonucleotide
taactcaatgagaatgatccaatgagatga

SEQ ID NO: 102911 - DNA, 30 bp, Artificial Sequence
  Synthetic oligonucleotide
gcctaattacggtattgcggaactagatga

SEQ ID NO: 102912 - DNA, 30 bp, Artificial Sequence
  Synthetic oligonucleotide
ggggttgcgaaactgggttgagaacgatga

SEQ ID NO: 102913 - DNA, 30 bp, Artificial Sequence
  Synthetic oligonucleotide
ggtgaaaggtggtatcaagaaaagcgatga

SEQ ID NO: 102914 - DNA, 30 bp, Artificial Sequence
  Synthetic oligonucleotide
tccgtcacgtattgtcgattgctaggatga

SEQ ID NO: 102915 - DNA, 30 bp, Artificial Sequence
  Synthetic oligonucleotide
ttatgcctaaagtcaataagaaggggatga

SEQ ID NO: 102916 - DNA, 30 bp, Artificial Sequence
  Synthetic oligonucleotide
ccgttccgaacagttctgcgggggatatga

SEQ ID NO: 102917 - DNA, 30 bp, Artificial Sequence
  Synthetic oligonucleotide
gaaaggaatgtaccaaaacaatgactatga

SEQ ID NO: 102918 - DNA, 30 bp, Artificial Sequence
  Synthetic oligonucleotide
ctggccaaaaatctcggtgtaacgctatga

SEQ ID NO: 102919 - DNA, 30 bp, Artificial Sequence
  Synthetic oligonucleotide
gtgcagattgaattcacggtgccagtatga

SEQ ID NO: 102920 - DNA, 30 bp, Artificial Sequence
  Synthetic oligonucleotide
gaggcttagaccaatgtacggcgggtatga

SEQ ID NO: 102921 - DNA, 30 bp, Artificial Sequence
  Synthetic oligonucleotide
tgcgtggaacaatagtgtaatggaaactga

SEQ ID NO: 102922 - DNA, 30 bp, Artificial Sequence
  Synthetic oligonucleotide
agcgttgcataatagttctcgtggcactga

SEQ ID NO: 102923 - DNA, 30 bp, Artificial Sequence
  Synthetic oligonucleotide
agggataagacaatctgatttcacgactga

SEQ ID NO: 102924 - DNA, 30 bp, Artificial Sequence
  Synthetic oligonucleotide
ggggaagccctagttcgcgacggtgactga

SEQ ID NO: 102925 - DNA, 30 bp, Artificial Sequence
  Synthetic oligonucleotide
cgagcgctaagggctactatccaatactga

SEQ ID NO: 102926 - DNA, 30 bp, Artificial Sequence
  Synthetic oligonucleotide
gacccaccccagtagaaaaggcgatactga

SEQ ID NO: 102927 - DNA, 30 bp, Artificial Sequence
  Synthetic oligonucleotide
gcgctagagagggccgtatcaacctactga

SEQ ID NO: 102928 - DNA, 30 bp, Artificial Sequence
  Synthetic oligonucleotide
agagacgtagacggcttcaagagttactga

SEQ ID NO: 102929 - DNA, 30 bp, Artificial Sequence
  Synthetic oligonucleotide
ttcgattgagtgaacgagtttggttactga

SEQ ID NO: 102930 - DNA, 30 bp, Artificial Sequence
  Synthetic oligonucleotide
gttaaaccggcagcattatgcgacacctga

SEQ ID NO: 102931 - DNA, 30 bp, Artificial Sequence
  Synthetic oligonucleotide
ccgccggcatccctagcggtatctacctga

SEQ ID NO: 102932 - DNA, 30 bp, Artificial Sequence
  Synthetic oligonucleotide
gtcacagaaaaattcagggttggcgcctga

SEQ ID NO: 102933 - DNA, 30 bp, Artificial Sequence
  Synthetic oligonucleotide
agacgcactaaattcatgtgaaaaagctga

SEQ ID NO: 102934 - DNA, 30 bp, Artificial Sequence
  Synthetic oligonucleotide
gggcagatagtcagttggcaaaggggctga

SEQ ID NO: 102935 - DNA, 30 bp, Artificial Sequence
  Synthetic oligonucleotide
tggtgcctgttttgcgagtgggttggctga

SEQ ID NO: 102936 - DNA, 31 bp, Artificial Sequence
  Synthetic oligonucleotide
cgtaaggtgtatgggtgggtccgcctgctga

SEQ ID NO: 102937 - DNA, 30 bp, Artificial Sequence
  Synthetic oligonucleotide
taaggtatcttaatagatgtctctatctga

SEQ ID NO: 102938 - DNA, 30 bp, Artificial Sequence
  Synthetic oligonucleotide
gggcatagataggttatggaacagctctga

SEQ ID NO: 102939 - DNA, 30 bp, Artificial Sequence
  Synthetic oligonucleotide
cataggcagattgccagggagtagctctga

SEQ ID NO: 102940 - DNA, 30 bp, Artificial Sequence
  Synthetic oligonucleotide
caatatgtgtaatcgacctgttcagtctga

SEQ ID NO: 102941 - DNA, 30 bp, Artificial Sequence
  Synthetic oligonucleotide
tccgtaatttgacgaacgatgagtgtctga

SEQ ID NO: 102942 - DNA, 30 bp, Artificial Sequence
  Synthetic oligonucleotide
gatggggtccggtccgttgtatgtgtctga

SEQ ID NO: 102943 - DNA, 30 bp, Artificial Sequence
  Synthetic oligonucleotide
acgtgaaccgttgtagagttggttgtctga

SEQ ID NO: 102944 - DNA, 30 bp, Artificial Sequence
  Synthetic oligonucleotide
tactcaggaggacactttgagaccaagtga

SEQ ID NO: 102945 - DNA, 30 bp, Artificial Sequence
  Synthetic oligonucleotide
gtaatacccacaaacgcactgctcaagtga

SEQ ID NO: 102946 - DNA, 30 bp, Artificial Sequence
  Synthetic oligonucleotide
cagtgccaagacatgggcacgcctaagtga

SEQ ID NO: 102947 - DNA, 30 bp, Artificial Sequence
  Synthetic oligonucleotide
aacgagcactcaatagctgagacacagtga

SEQ ID NO: 102948 - DNA, 30 bp, Artificial Sequence
  Synthetic oligonucleotide
tacgcagcgagcgttagccaacaccagtga

SEQ ID NO: 102949 - DNA, 30 bp, Artificial Sequence
  Synthetic oligonucleotide
catgctttgttcagaggagctgggcagtga

SEQ ID NO: 102950 - DNA, 30 bp, Artificial Sequence
  Synthetic oligonucleotide
gcgcgacaggtgagtaacgctcgagagtga

SEQ ID NO: 102951 - DNA, 30 bp, Artificial Sequence
  Synthetic oligonucleotide
ggaacctgaaatggaacagtagacgagtga

SEQ ID NO: 102952 - DNA, 30 bp, Artificial Sequence
  Synthetic oligonucleotide
tagatttcggaagacgaataattcgagtga

SEQ ID NO: 102953 - DNA, 30 bp, Artificial Sequence
  Synthetic oligonucleotide
tatggggcatctggagttacgcgtgagtga

SEQ ID NO: 102954 - DNA, 30 bp, Artificial Sequence
  Synthetic oligonucleotide
aagcccaccacatcaggtagctcatagtga

SEQ ID NO: 102955 - DNA, 30 bp, Artificial Sequence
  Synthetic oligonucleotide
gtggacccaaggtccgaccaggcgtagtga

SEQ ID NO: 102956 - DNA, 30 bp, Artificial Sequence
  Synthetic oligonucleotide
aggccaaccaaacgttgtacgtggtagtga

SEQ ID NO: 102957 - DNA, 30 bp, Artificial Sequence
  Synthetic oligonucleotide
gtcgttaaataacgaaccaatacgacgtga

SEQ ID NO: 102958 - DNA, 30 bp, Artificial Sequence
  Synthetic oligonucleotide
cggtctcggagttattgatcaaatacgtga

SEQ ID NO: 102959 - DNA, 30 bp, Artificial Sequence
  Synthetic oligonucleotide
gagatggagtaacaatcccctcctacgtga

SEQ ID NO: 102960 - DNA, 30 bp, Artificial Sequence
  Synthetic oligonucleotide
cgccgatcgaagacacaggtatgtacgtga

SEQ ID NO: 102961 - DNA, 30 bp, Artificial Sequence
  Synthetic oligonucleotide
gtgttctgatgggactacgattgtacgtga

SEQ ID NO: 102962 - DNA, 30 bp, Artificial Sequence
  Synthetic oligonucleotide
gggattatcgcggtgtgaacatgaccgtga

SEQ ID NO: 102963 - DNA, 30 bp, Artificial Sequence
  Synthetic oligonucleotide
ttgtgattagtaacgatgcgagagccgtga

SEQ ID NO: 102964 - DNA, 30 bp, Artificial Sequence
  Synthetic oligonucleotide
ccagaggagctacggctttcagaagcgtga

SEQ ID NO: 102965 - DNA, 30 bp, Artificial Sequence
  Synthetic oligonucleotide
cgagtatgatatgtggatgaaaccgcgtga

SEQ ID NO: 102966 - DNA, 30 bp, Artificial Sequence
  Synthetic oligonucleotide
ccgtgaacgctaattgcaagggttgcgtga

SEQ ID NO: 102967 - DNA, 30 bp, Artificial Sequence
  Synthetic oligonucleotide
tggaggaatcatgtggcgcgctgatcgtga

SEQ ID NO: 102968 - DNA, 30 bp, Artificial Sequence
  Synthetic oligonucleotide
gttggtcatcactgatatcggatctcgtga

SEQ ID NO: 102969 - DNA, 30 bp, Artificial Sequence
  Synthetic oligonucleotide
cgattagctagctgtaaacgtcagtcgtga

SEQ ID NO: 102970 - DNA, 30 bp, Artificial Sequence
  Synthetic oligonucleotide
gggttgattagaggtatggactcgtcgtga

SEQ ID NO: 102971 - DNA, 30 bp, Artificial Sequence
  Synthetic oligonucleotide
acgagatgctaatttagaggccggtcgtga

SEQ ID NO: 102972 - DNA, 30 bp, Artificial Sequence
  Synthetic oligonucleotide
gagggcgatagtctgagtgccccaaggtga

SEQ ID NO: 102973 - DNA, 30 bp, Artificial Sequence
  Synthetic oligonucleotide
acgaaggttagctagcgtccaattaggtga

SEQ ID NO: 102974 - DNA, 30 bp, Artificial Sequence
  Synthetic oligonucleotide
gagaatggcttaggtatgacacaacggtga

SEQ ID NO: 102975 - DNA, 30 bp, Artificial Sequence
  Synthetic oligonucleotide
cgcattaggataggcggaaggcgtcggtga

SEQ ID NO: 102976 - DNA, 30 bp, Artificial Sequence
  Synthetic oligonucleotide
ttaacgagcgtcgaactcgttggagggtga

SEQ ID NO: 102977 - DNA, 30 bp, Artificial Sequence
  Synthetic oligonucleotide
cacgttgagctaaagaatgatctagggtga

SEQ ID NO: 102978 - DNA, 30 bp, Artificial Sequence
  Synthetic oligonucleotide
ggactgtaattgcaggtgacataggggtga

SEQ ID NO: 102979 - DNA, 30 bp, Artificial Sequence
  Synthetic oligonucleotide
tagcgtggctgggaagtagtatgatggtga

SEQ ID NO: 102980 - DNA, 30 bp, Artificial Sequence
  Synthetic oligonucleotide
aatcggctaaggttgatcgtgtggtggtga

SEQ ID NO: 102981 - DNA, 30 bp, Artificial Sequence
  Synthetic oligonucleotide
aagattagaagtccggtatttaacatgtga

SEQ ID NO: 102982 - DNA, 30 bp, Artificial Sequence
  Synthetic oligonucleotide
atgcgatgtaccgagtataatattatgtga

SEQ ID NO: 102983 - DNA, 30 bp, Artificial Sequence
  Synthetic oligonucleotide
cgaaccattgtcggctacgggaacctgtga

SEQ ID NO: 102984 - DNA, 30 bp, Artificial Sequence
  Synthetic oligonucleotide
ccagggagtcattttagtgagctgctgtga

SEQ ID NO: 102985 - DNA, 30 bp, Artificial Sequence
  Synthetic oligonucleotide
agccgctaccgtggcatattgatggtgtga

SEQ ID NO: 102986 - DNA, 30 bp, Artificial Sequence
  Synthetic oligonucleotide
cggtgtggcaaattagggtgagctgtgtga

SEQ ID NO: 102987 - DNA, 30 bp, Artificial Sequence
  Synthetic oligonucleotide
cgttcgcgttctgggataaaattattgtga

SEQ ID NO: 102988 - DNA, 30 bp, Artificial Sequence
  Synthetic oligonucleotide
ggtacgtcaggatgtcgtgtacttttgtga

SEQ ID NO: 102989 - DNA, 30 bp, Artificial Sequence
  Synthetic oligonucleotide
aaacagggggtactgattacgcaaaattga

SEQ ID NO: 102990 - DNA, 30 bp, Artificial Sequence
  Synthetic oligonucleotide
acgggctattgaataaccgtcgcaaattga

SEQ ID NO: 102991 - DNA, 30 bp, Artificial Sequence
  Synthetic oligonucleotide
ttcggatacaacccgcgtaaaccgaattga

SEQ ID NO: 102992 - DNA, 30 bp, Artificial Sequence
  Synthetic oligonucleotide
gtgatgggagctaagctcggaagacattga

SEQ ID NO: 102993 - DNA, 30 bp, Artificial Sequence
  Synthetic oligonucleotide
tgagcctagcgtattttggccactcattga

SEQ ID NO: 102994 - DNA, 30 bp, Artificial Sequence
  Synthetic oligonucleotide
gaagacaacaatgctcagcgtaacgattga

SEQ ID NO: 102995 - DNA, 30 bp, Artificial Sequence
  Synthetic oligonucleotide
ccgacatgagataggtctacccctgattga

SEQ ID NO: 102996 - DNA, 30 bp, Artificial Sequence
  Synthetic oligonucleotide
ccaccaatcggccaaaaacacgaatattga

SEQ ID NO: 102997 - DNA, 30 bp, Artificial Sequence
  Synthetic oligonucleotide
gcgcgcagaaaggatatcggtcagtattga

SEQ ID NO: 102998 - DNA, 30 bp, Artificial Sequence
  Synthetic oligonucleotide
ggttaagctgattgcgaatacaccccttga

SEQ ID NO: 102999 - DNA, 30 bp, Artificial Sequence
  Synthetic oligonucleotide
attagacgcgcgacaataaaaggagcttga

SEQ ID NO: 103000 - DNA, 30 bp, Artificial Sequence
  Synthetic oligonucleotide
cgtcggaatgtttcccccaggtatgcttga

SEQ ID NO: 103001 - DNA, 30 bp, Artificial Sequence
  Synthetic oligonucleotide
gtgacgatgtaagcgaactccgtaagttga

SEQ ID NO: 103002 - DNA, 30 bp, Artificial Sequence
  Synthetic oligonucleotide
tcgtatggaaagtgacaaacaaccagttga

SEQ ID NO: 103003 - DNA, 30 bp, Artificial Sequence
  Synthetic oligonucleotide
aagactatcagtagaggtctggccagttga

SEQ ID NO: 103004 - DNA, 30 bp, Artificial Sequence
  Synthetic oligonucleotide
aagtacagaggcaattccagaggcagttga

SEQ ID NO: 103005 - DNA, 30 bp, Artificial Sequence
  Synthetic oligonucleotide
tcgtcttatgcaagaatgttggtcagttga

SEQ ID NO: 103006 - DNA, 30 bp, Artificial Sequence
  Synthetic oligonucleotide
agagtgacatggaaggcttgttttagttga

SEQ ID NO: 103007 - DNA, 30 bp, Artificial Sequence
  Synthetic oligonucleotide
tgctaaatttacaccgtagcggaccgttga

SEQ ID NO: 103008 - DNA, 30 bp, Artificial Sequence
  Synthetic oligonucleotide
gcaacgacctgggtcaaagtggggcgttga

SEQ ID NO: 103009 - DNA, 30 bp, Artificial Sequence
  Synthetic oligonucleotide
tagattaccaatggcctgccccatcgttga

SEQ ID NO: 103010 - DNA, 30 bp, Artificial Sequence
  Synthetic oligonucleotide
caagcgcaagtggggaacggtcatggttga

SEQ ID NO: 103011 - DNA, 30 bp, Artificial Sequence
  Synthetic oligonucleotide
ggtaaagaacagctttaaagagggatttga

SEQ ID NO: 103012 - DNA, 30 bp, Artificial Sequence
  Synthetic oligonucleotide
atacggggaccactgacaatgttcgtttga

SEQ ID NO: 103013 - DNA, 30 bp, Artificial Sequence
  Synthetic oligonucleotide
gatacatgcgaagtggcccatcatgtttga

SEQ ID NO: 103014 - DNA, 30 bp, Artificial Sequence
  Synthetic oligonucleotide
ctagtagacagggtgtcaaacttgttttga

SEQ ID NO: 103015 - DNA, 30 bp, Artificial Sequence
  Synthetic oligonucleotide
taaatgagatgatgcggcgaaaaacaaata

SEQ ID NO: 103016 - DNA, 30 bp, Artificial Sequence
  Synthetic oligonucleotide
ttgcttgagagagtcgtaatagcacaaata

SEQ ID NO: 103017 - DNA, 30 bp, Artificial Sequence
  Synthetic oligonucleotide
gggatatccgagcttagcggtcgacaaata

SEQ ID NO: 103018 - DNA, 30 bp, Artificial Sequence
  Synthetic oligonucleotide
cgtgtacagacaaatagcggcctacaaata

SEQ ID NO: 103019 - DNA, 30 bp, Artificial Sequence
  Synthetic oligonucleotide
gttggggtaagaccggatcggtcccaaata

SEQ ID NO: 103020 - DNA, 30 bp, Artificial Sequence
  Synthetic oligonucleotide
acgcaatgaggccgcgggccatcgcaaata

SEQ ID NO: 103021 - DNA, 30 bp, Artificial Sequence
  Synthetic oligonucleotide
cccaaggcgagctaatagggtctggaaata

SEQ ID NO: 103022 - DNA, 30 bp, Artificial Sequence
  Synthetic oligonucleotide
atacctaactttcatacggcatgataaata

SEQ ID NO: 103023 - DNA, 30 bp, Artificial Sequence
  Synthetic oligonucleotide
cacaagctcagcaatccatgttggacaata

SEQ ID NO: 103024 - DNA, 30 bp, Artificial Sequence
  Synthetic oligonucleotide
ggggactcggtttagtggaaaaatccaata

SEQ ID NO: 103025 - DNA, 30 bp, Artificial Sequence
  Synthetic oligonucleotide
aacaatccgtcatcccattgttcagcaata

SEQ ID NO: 103026 - DNA, 30 bp, Artificial Sequence
  Synthetic oligonucleotide
ccggatgctcgtgggcccagacttgcaata

SEQ ID NO: 103027 - DNA, 30 bp, Artificial Sequence
  Synthetic oligonucleotide
tagaacgggcattcccaacaccttgcaata

SEQ ID NO: 103028 - DNA, 30 bp, Artificial Sequence
  Synthetic oligonucleotide
ggttgtatacaacctttcgtactctcaata

SEQ ID NO: 103029 - DNA, 30 bp, Artificial Sequence
  Synthetic oligonucleotide
cgcactcggtttgaaggactgatcagaata

SEQ ID NO: 103030 - DNA, 30 bp, Artificial Sequence
  Synthetic oligonucleotide
gacggggcaggaggaaatatgtgtagaata

SEQ ID NO: 103031 - DNA, 30 bp, Artificial Sequence
  Synthetic oligonucleotide
atggggtcggtcccactcgcccctcgaata

SEQ ID NO: 103032 - DNA, 30 bp, Artificial Sequence
  Synthetic oligonucleotide
accagagtattggtcgggagacccggaata

SEQ ID NO: 103033 - DNA, 30 bp, Artificial Sequence
  Synthetic oligonucleotide
gtaggaggttcatactgctagatcggaata

SEQ ID NO: 103034 - DNA, 30 bp, Artificial Sequence
  Synthetic oligonucleotide
caaacgtgtgggtactattgtgcgggaata

SEQ ID NO: 103035 - DNA, 30 bp, Artificial Sequence
  Synthetic oligonucleotide
cacagtgtggattaacggaacagtctaata

SEQ ID NO: 103036 - DNA, 30 bp, Artificial Sequence
  Synthetic oligonucleotide
accgtcggcgtgcatctgtgtcaagtaata

SEQ ID NO: 103037 - DNA, 30 bp, Artificial Sequence
  Synthetic oligonucleotide
ccaggacagacattgtactgaaaggtaata

SEQ ID NO: 103038 - DNA, 30 bp, Artificial Sequence
  Synthetic oligonucleotide
aagtagagaaactatgcggttggattaata

SEQ ID NO: 103039 - DNA, 30 bp, Artificial Sequence
  Synthetic oligonucleotide
ggcagtcacgtccagacgcttggcaacata

SEQ ID NO: 103040 - DNA, 30 bp, Artificial Sequence
  Synthetic oligonucleotide
gtacgtattaaagtctgcaagggtcacata

SEQ ID NO: 103041 - DNA, 30 bp, Artificial Sequence
  Synthetic oligonucleotide
gatgtaggtggtaattagccgggtgacata

SEQ ID NO: 103042 - DNA, 30 bp, Artificial Sequence
  Synthetic oligonucleotide
ctttagaatagagtgggctggacatacata

SEQ ID NO: 103043 - DNA, 30 bp, Artificial Sequence
  Synthetic oligonucleotide
tgatggcccaacgggacgtttgagtacata

SEQ ID NO: 103044 - DNA, 30 bp, Artificial Sequence
  Synthetic oligonucleotide
gtcgattatacaggatctctaacaaccata

SEQ ID NO: 103045 - DNA, 30 bp, Artificial Sequence
  Synthetic oligonucleotide
tcgtctggaaggatggtataatgaaccata

SEQ ID NO: 103046 - DNA, 30 bp, Artificial Sequence
  Synthetic oligonucleotide
cacgttcacgtataattaagattccccata

SEQ ID NO: 103047 - DNA, 30 bp, Artificial Sequence
  Synthetic oligonucleotide
cgatgacctaaacggggtcattcggccata

SEQ ID NO: 103048 - DNA, 30 bp, Artificial Sequence
  Synthetic oligonucleotide
atgtaggatactgtcgtgtaatgtgccata

SEQ ID NO: 103049 - DNA, 30 bp, Artificial Sequence
  Synthetic oligonucleotide
aaggtctgagcatagtaactagttgccata

SEQ ID NO: 103050 - DNA, 30 bp, Artificial Sequence
  Synthetic oligonucleotide
gggcaccgcgatcggtgtctctttgccata

SEQ ID NO: 103051 - DNA, 30 bp, Artificial Sequence
  Synthetic oligonucleotide
ggagagagaattgcatttgtatactccata

SEQ ID NO: 103052 - DNA, 30 bp, Artificial Sequence
  Synthetic oligonucleotide
aggctggtcagtacgggctcaaattccata

SEQ ID NO: 103053 - DNA, 30 bp, Artificial Sequence
  Synthetic oligonucleotide
acagactcataattacgggtgtagagcata

SEQ ID NO: 103054 - DNA, 30 bp, Artificial Sequence
  Synthetic oligonucleotide
gaactagagaaccacgacaatacgagcata

SEQ ID NO: 103055 - DNA, 30 bp, Artificial Sequence
  Synthetic oligonucleotide
tagaaggtatataaatggacagcgagcata

SEQ ID NO: 103056 - DNA, 30 bp, Artificial Sequence
  Synthetic oligonucleotide
gatgtcgtcctggaccacaccttgagcata

SEQ ID NO: 103057 - DNA, 30 bp, Artificial Sequence
  Synthetic oligonucleotide
cagcaaggtactgagacgtgcaaccgcata

SEQ ID NO: 103058 - DNA, 30 bp, Artificial Sequence
  Synthetic oligonucleotide
tggcactttagccgttgacaatagggcata

SEQ ID NO: 103059 - DNA, 30 bp, Artificial Sequence
  Synthetic oligonucleotide
ccaccgaacagccctagcgtgaggggcata

SEQ ID NO: 103060 - DNA, 30 bp, Artificial Sequence
  Synthetic oligonucleotide
acaacatagccaaattgcgggcactgcata

SEQ ID NO: 103061 - DNA, 30 bp, Artificial Sequence
  Synthetic oligonucleotide
aatgcgaggtatacaagtaaccagtgcata

SEQ ID NO: 103062 - DNA, 30 bp, Artificial Sequence
  Synthetic oligonucleotide
ccgctcgccgagcaaacatctgaaatcata

SEQ ID NO: 103063 - DNA, 30 bp, Artificial Sequence
  Synthetic oligonucleotide
tgcacactgtggtcatgaaacttcatcata

SEQ ID NO: 103064 - DNA, 30 bp, Artificial Sequence
  Synthetic oligonucleotide
cggtccgagcccgaatggggaaaactcata

SEQ ID NO: 103065 - DNA, 30 bp, Artificial Sequence
  Synthetic oligonucleotide
ggatagtagaggtagacactgggactcata

SEQ ID NO: 103066 - DNA, 30 bp, Artificial Sequence
  Synthetic oligonucleotide
cgatgtggataaggggggaactacctcata

SEQ ID NO: 103067 - DNA, 30 bp, Artificial Sequence
  Synthetic oligonucleotide
agtacagttacacttcccaaagtgctcata

SEQ ID NO: 103068 - DNA, 31 bp, Artificial Sequence
  Synthetic oligonucleotide
cgggagctaggaatactcgcatcacgtcata

SEQ ID NO: 103069 - DNA, 30 bp, Artificial Sequence
  Synthetic oligonucleotide
attacacaagcagtggattaaaggttcata

SEQ ID NO: 103070 - DNA, 30 bp, Artificial Sequence
  Synthetic oligonucleotide
tcgtgttcaatatatacaagaattaagata

SEQ ID NO: 103071 - DNA, 30 bp, Artificial Sequence
  Synthetic oligonucleotide
gaagcgttagaggccctgtgagaccagata

SEQ ID NO: 103072 - DNA, 30 bp, Artificial Sequence
  Synthetic oligonucleotide
ctgtagtcgggcacacgcctccgccagata

SEQ ID NO: 103073 - DNA, 30 bp, Artificial Sequence
  Synthetic oligonucleotide
atgccagaaaaagtggcagacgtgcagata

SEQ ID NO: 103074 - DNA, 30 bp, Artificial Sequence
  Synthetic oligonucleotide
tgacagtgagcatgacactgataatagata

SEQ ID NO: 103075 - DNA, 30 bp, Artificial Sequence
  Synthetic oligonucleotide
ggggctcctcacagcctcaccaaaacgata

SEQ ID NO: 103076 - DNA, 30 bp, Artificial Sequence
  Synthetic oligonucleotide
gatcaagagacccctaccatcgacacgata

SEQ ID NO: 103077 - DNA, 30 bp, Artificial Sequence
  Synthetic oligonucleotide
tcaagtccttataacgctgagctgacgata

SEQ ID NO: 103078 - DNA, 30 bp, Artificial Sequence
  Synthetic oligonucleotide
agcagtaccgccaccgtgcgataaccgata

SEQ ID NO: 103079 - DNA, 30 bp, Artificial Sequence
  Synthetic oligonucleotide
gatacaggaaaaccatgcatcagaccgata

SEQ ID NO: 103080 - DNA, 30 bp, Artificial Sequence
  Synthetic oligonucleotide
taggataaacgaattaacggagccgcgata

SEQ ID NO: 103081 - DNA, 30 bp, Artificial Sequence
  Synthetic oligonucleotide
tgacagcaaatggaccataaccgcgcgata

SEQ ID NO: 103082 - DNA, 30 bp, Artificial Sequence
  Synthetic oligonucleotide
cactaaaaacctgcaatagcgggcgcgata

SEQ ID NO: 103083 - DNA, 30 bp, Artificial Sequence
  Synthetic oligonucleotide
caatgccgcgtaaatatggagtgtgcgata

SEQ ID NO: 103084 - DNA, 30 bp, Artificial Sequence
  Synthetic oligonucleotide
acacactgggttaaataaagttgatcgata

SEQ ID NO: 103085 - DNA, 30 bp, Artificial Sequence
  Synthetic oligonucleotide
aggtcgcgtttcgcgtgctaagcaaggata

SEQ ID NO: 103086 - DNA, 30 bp, Artificial Sequence
  Synthetic oligonucleotide
agaacgtcggatatatgtccaatgaggata

SEQ ID NO: 103087 - DNA, 30 bp, Artificial Sequence
  Synthetic oligonucleotide
cagcacctaattacaatgcttcaacggata

SEQ ID NO: 103088 - DNA, 30 bp, Artificial Sequence
  Synthetic oligonucleotide
ttcctgaggtgcaaagtgatggtacggata

SEQ ID NO: 103089 - DNA, 30 bp, Artificial Sequence
  Synthetic oligonucleotide
actgccgctaggaccaaagtgcaggggata

SEQ ID NO: 103090 - DNA, 30 bp, Artificial Sequence
  Synthetic oligonucleotide
cacacctatgtaggtactggcattgggata

SEQ ID NO: 103091 - DNA, 30 bp, Artificial Sequence
  Synthetic oligonucleotide
caagatgcatacaatacgaccgaatggata

SEQ ID NO: 103092 - DNA, 30 bp, Artificial Sequence
  Synthetic oligonucleotide
gattgggaactttgataacaatcctggata

SEQ ID NO: 103093 - DNA, 30 bp, Artificial Sequence
  Synthetic oligonucleotide
gtaaggcgaatctgatctaaaatctggata

SEQ ID NO: 103094 - DNA, 30 bp, Artificial Sequence
  Synthetic oligonucleotide
aatagagctatagattggcatgcgctgata

SEQ ID NO: 103095 - DNA, 30 bp, Artificial Sequence
  Synthetic oligonucleotide
gtgcgctgtcaaggatctgcctgtctgata

SEQ ID NO: 103096 - DNA, 30 bp, Artificial Sequence
  Synthetic oligonucleotide
gcagccaggaggtaactaggcgcagtgata

SEQ ID NO: 103097 - DNA, 30 bp, Artificial Sequence
  Synthetic oligonucleotide
gccaacccgtggcatgattatagcgtgata

SEQ ID NO: 103098 - DNA, 30 bp, Artificial Sequence
  Synthetic oligonucleotide
cctaacaggttcagggtggcgtagttgata

SEQ ID NO: 103099 - DNA, 30 bp, Artificial Sequence
  Synthetic oligonucleotide
agcaaactaagattagagggttacaatata

SEQ ID NO: 103100 - DNA, 30 bp, Artificial Sequence
  Synthetic oligonucleotide
atattccgaggtcaatagggatgcaatata

SEQ ID NO: 103101 - DNA, 30 bp, Artificial Sequence
  Synthetic oligonucleotide
aaaaggtgataaacaggggcgtcgaatata

SEQ ID NO: 103102 - DNA, 30 bp, Artificial Sequence
  Synthetic oligonucleotide
cgcacctcaggagcaccaactctgaatata

SEQ ID NO: 103103 - DNA, 30 bp, Artificial Sequence
  Synthetic oligonucleotide
aacggggagtcgtatagctacagtaatata

SEQ ID NO: 103104 - DNA, 30 bp, Artificial Sequence
  Synthetic oligonucleotide
taggtgagtgcacaagcatagcgacatata

SEQ ID NO: 103105 - DNA, 30 bp, Artificial Sequence
  Synthetic oligonucleotide
acattacggggcaccaatgagactcatata

SEQ ID NO: 103106 - DNA, 30 bp, Artificial Sequence
  Synthetic oligonucleotide
tcatgaagacaggaagcagcttacgatata

SEQ ID NO: 103107 - DNA, 30 bp, Artificial Sequence
  Synthetic oligonucleotide
tacagagaatctaaaaaattgcaggatata

SEQ ID NO: 103108 - DNA, 30 bp, Artificial Sequence
  Synthetic oligonucleotide
tatcgtccgtgcgtgcggacaaagtatata

SEQ ID NO: 103109 - DNA, 30 bp, Artificial Sequence
  Synthetic oligonucleotide
ggggaactacatccatcggaaaggactata

SEQ ID NO: 103110 - DNA, 30 bp, Artificial Sequence
  Synthetic oligonucleotide
cgggtgggcgtgtatttgcacctgactata

SEQ ID NO: 103111 - DNA, 30 bp, Artificial Sequence
  Synthetic oligonucleotide
acattccaaactggtagaagcggtcctata

SEQ ID NO: 103112 - DNA, 30 bp, Artificial Sequence
  Synthetic oligonucleotide
ggccgacagtaaagtggaggttgtcctata

SEQ ID NO: 103113 - DNA, 30 bp, Artificial Sequence
  Synthetic oligonucleotide
aaggtttggcgtctcgacccggaagctata

SEQ ID NO: 103114 - DNA, 30 bp, Artificial Sequence
  Synthetic oligonucleotide
gcaagaagggctcgtcagatatatgctata

SEQ ID NO: 103115 - DNA, 30 bp, Artificial Sequence
  Synthetic oligonucleotide
agggaataggacacagtgagtacaagtata

SEQ ID NO: 103116 - DNA, 30 bp, Artificial Sequence
  Synthetic oligonucleotide
aggggtgctacgagttgggctcctagtata

SEQ ID NO: 103117 - DNA, 30 bp, Artificial Sequence
  Synthetic oligonucleotide
aagattaaacccgtgcgatgtgtgcgtata

SEQ ID NO: 103118 - DNA, 30 bp, Artificial Sequence
  Synthetic oligonucleotide
tgggggtaagtggctacgcgtgcaggtata

SEQ ID NO: 103119 - DNA, 30 bp, Artificial Sequence
  Synthetic oligonucleotide
ccgtactgcgataataactcggtaggtata

SEQ ID NO: 103120 - DNA, 30 bp, Artificial Sequence
  Synthetic oligonucleotide
atcaggtggaaacaagaaatagattgtata

SEQ ID NO: 103121 - DNA, 30 bp, Artificial Sequence
  Synthetic oligonucleotide
cctgggtgcgcgaaacgatcaccttgtata

SEQ ID NO: 103122 - DNA, 30 bp, Artificial Sequence
  Synthetic oligonucleotide
tgatcgaggtccgcgtggcagagaattata

SEQ ID NO: 103123 - DNA, 30 bp, Artificial Sequence
  Synthetic oligonucleotide
aatggaaagagtgggacggcgtcgcttata

SEQ ID NO: 103124 - DNA, 30 bp, Artificial Sequence
  Synthetic oligonucleotide
caaaccaggcatggtacgggaaatgttata

SEQ ID NO: 103125 - DNA, 30 bp, Artificial Sequence
  Synthetic oligonucleotide
acgggccgaatcataggatgagttgttata

SEQ ID NO: 103126 - DNA, 30 bp, Artificial Sequence
  Synthetic oligonucleotide
ggtggagggatcttcggaagtgtaaaacta

SEQ ID NO: 103127 - DNA, 30 bp, Artificial Sequence
  Synthetic oligonucleotide
cttaacgcgacggggggtgaaaataaacta

SEQ ID NO: 103128 - DNA, 30 bp, Artificial Sequence
  Synthetic oligonucleotide
tgggtgcgcataaatgatgtaattaaacta

SEQ ID NO: 103129 - DNA, 30 bp, Artificial Sequence
  Synthetic oligonucleotide
tgtgaaaccgcataaaggtgactccaacta

SEQ ID NO: 103130 - DNA, 30 bp, Artificial Sequence
  Synthetic oligonucleotide
gggcaaccattctcgaggcaattccaacta

SEQ ID NO: 103131 - DNA, 30 bp, Artificial Sequence
  Synthetic oligonucleotide
ttactcagagagacgcaaacaacgcaacta

SEQ ID NO: 103132 - DNA, 30 bp, Artificial Sequence
  Synthetic oligonucleotide
gagctagcgttatgagtgccacgagaacta

SEQ ID NO: 103133 - DNA, 30 bp, Artificial Sequence
  Synthetic oligonucleotide
tgatccagggagccaatgacctaggaacta

SEQ ID NO: 103134 - DNA, 30 bp, Artificial Sequence
  Synthetic oligonucleotide
aggggaggaacggccatgcctatctaacta

SEQ ID NO: 103135 - DNA, 30 bp, Artificial Sequence
  Synthetic oligonucleotide
ctgttaaacatgctatctcaaccaacacta

SEQ ID NO: 103136 - DNA, 30 bp, Artificial Sequence
  Synthetic oligonucleotide
gcggtgttgtctgcaatgtctaccacacta

SEQ ID NO: 103137 - DNA, 30 bp, Artificial Sequence
  Synthetic oligonucleotide
aaacatgaccaggggcgagtgtatacacta

SEQ ID NO: 103138 - DNA, 30 bp, Artificial Sequence
  Synthetic oligonucleotide
ggctgtcagtaaacaacggtacgtacacta

SEQ ID NO: 103139 - DNA, 30 bp, Artificial Sequence
  Synthetic oligonucleotide
gcgaaagttaatgctagttgacttacacta

SEQ ID NO: 103140 - DNA, 30 bp, Artificial Sequence
  Synthetic oligonucleotide
caaagagcaaggcgcactgcactcccacta

SEQ ID NO: 103141 - DNA, 30 bp, Artificial Sequence
  Synthetic oligonucleotide
catcaggctgtcttacaatcggaagcacta

SEQ ID NO: 103142 - DNA, 30 bp, Artificial Sequence
  Synthetic oligonucleotide
ttggggaagggctgattagagctagcacta

SEQ ID NO: 103143 - DNA, 30 bp, Artificial Sequence
  Synthetic oligonucleotide
cgcaaatcgactgacagcttcggatcacta

SEQ ID NO: 103144 - DNA, 30 bp, Artificial Sequence
  Synthetic oligonucleotide
aagggggatgggcgtaggtacggctcacta

SEQ ID NO: 103145 - DNA, 30 bp, Artificial Sequence
  Synthetic oligonucleotide
tgaaacccgcaatagcgtgtagagtcacta

SEQ ID NO: 103146 - DNA, 30 bp, Artificial Sequence
  Synthetic oligonucleotide
ggggcgcataattgtccggaaaattcacta

SEQ ID NO: 103147 - DNA, 29 bp, Artificial Sequence
  Synthetic oligonucleotide
acagaaggtggtcaaagaaatattcacta

SEQ ID NO: 103148 - DNA, 30 bp, Artificial Sequence
  Synthetic oligonucleotide
gttaaaagaagaaggcgtacgttgagacta

SEQ ID NO: 103149 - DNA, 30 bp, Artificial Sequence
  Synthetic oligonucleotide
cgcatgtaagactcaacgtgacgtagacta

SEQ ID NO: 103150 - DNA, 30 bp, Artificial Sequence
  Synthetic oligonucleotide
gacccggggagcagattaccaggccgacta

SEQ ID NO: 103151 - DNA, 30 bp, Artificial Sequence
  Synthetic oligonucleotide
tggcgaagtgggctcatgccagcaggacta

SEQ ID NO: 103152 - DNA, 30 bp, Artificial Sequence
  Synthetic oligonucleotide
taacaccaggagatcactcactccggacta

SEQ ID NO: 103153 - DNA, 30 bp, Artificial Sequence
  Synthetic oligonucleotide
gggctgaagtcacatgtaagtactggacta

SEQ ID NO: 103154 - DNA, 30 bp, Artificial Sequence
  Synthetic oligonucleotide
atgggtcctgagtgctgctcctgatgacta

SEQ ID NO: 103155 - DNA, 30 bp, Artificial Sequence
  Synthetic oligonucleotide
cgtagggcaaacctctcgccgttctgacta

SEQ ID NO: 103156 - DNA, 30 bp, Artificial Sequence
  Synthetic oligonucleotide
tcccgacaggagtggagtcccgcaatacta

SEQ ID NO: 103157 - DNA, 30 bp, Artificial Sequence
  Synthetic oligonucleotide
tcgccaagtggataaaagagggcaatacta

SEQ ID NO: 103158 - DNA, 30 bp, Artificial Sequence
  Synthetic oligonucleotide
aatcgcattcttgccctcatacgaatacta

SEQ ID NO: 103159 - DNA, 30 bp, Artificial Sequence
  Synthetic oligonucleotide
tgtaatgagctgtataggaaggccatacta

SEQ ID NO: 103160 - DNA, 30 bp, Artificial Sequence
  Synthetic oligonucleotide
ccaaaagtgtatcacgaaatctctatacta

SEQ ID NO: 103161 - DNA, 30 bp, Artificial Sequence
  Synthetic oligonucleotide
gcctttggtaagataaaacgaggactacta

SEQ ID NO: 103162 - DNA, 30 bp, Artificial Sequence
  Synthetic oligonucleotide
ggcaccacgcgtaattccctcgatctacta

SEQ ID NO: 103163 - DNA, 30 bp, Artificial Sequence
  Synthetic oligonucleotide
agaggcaagaccattcgggatcgcgtacta

SEQ ID NO: 103164 - DNA, 30 bp, Artificial Sequence
  Synthetic oligonucleotide
gagcaattgatacgggcgaacggaaaccta

SEQ ID NO: 103165 - DNA, 30 bp, Artificial Sequence
  Synthetic oligonucleotide
caggcctgaaagatccggttaggagaccta

SEQ ID NO: 103166 - DNA, 30 bp, Artificial Sequence
  Synthetic oligonucleotide
tcggggaaaatctcgggagagggcgaccta

SEQ ID NO: 103167 - DNA, 30 bp, Artificial Sequence
  Synthetic oligonucleotide
acgtacaggaatgtcataagcacggaccta

SEQ ID NO: 103168 - DNA, 30 bp, Artificial Sequence
  Synthetic oligonucleotide
tttcggggtcgaaaacataacccggaccta

SEQ ID NO: 103169 - DNA, 30 bp, Artificial Sequence
  Synthetic oligonucleotide
tcgtactgggtagggaccggcttggaccta

SEQ ID NO: 103170 - DNA, 30 bp, Artificial Sequence
  Synthetic oligonucleotide
gggccctgtttaccccagaagtgctaccta

SEQ ID NO: 103171 - DNA, 30 bp, Artificial Sequence
  Synthetic oligonucleotide
aggaccgattaaccggctggacttacccta

SEQ ID NO: 103172 - DNA, 30 bp, Artificial Sequence
  Synthetic oligonucleotide
gcatcggtcagtgcgcaaggtcaaccccta

SEQ ID NO: 103173 - DNA, 30 bp, Artificial Sequence
  Synthetic oligonucleotide
ggacattcactcgtttgggcgtcaccccta

SEQ ID NO: 103174 - DNA, 30 bp, Artificial Sequence
  Synthetic oligonucleotide
catgatgacgtgtgtctgagcgtgccccta

SEQ ID NO: 103175 - DNA, 30 bp, Artificial Sequence
  Synthetic oligonucleotide
agtagggccaacggcgagaaggtagcccta

SEQ ID NO: 103176 - DNA, 30 bp, Artificial Sequence
  Synthetic oligonucleotide
agctcccattgcgagaccgaatccgcccta

SEQ ID NO: 103177 - DNA, 30 bp, Artificial Sequence
  Synthetic oligonucleotide
acgggcgcgagtctggaatcaagggcccta

SEQ ID NO: 103178 - DNA, 30 bp, Artificial Sequence
  Synthetic oligonucleotide
tgaaaaaaacgagtgggtatgtcctcccta

SEQ ID NO: 103179 - DNA, 30 bp, Artificial Sequence
  Synthetic oligonucleotide
aagcgatgtcctccgttttcgatgtcccta

SEQ ID NO: 103180 - DNA, 30 bp, Artificial Sequence
  Synthetic oligonucleotide
cgcattgacactctcatctgtaacagccta

SEQ ID NO: 103181 - DNA, 30 bp, Artificial Sequence
  Synthetic oligonucleotide
ggtaccccgcggtgttgactcaagcgccta

SEQ ID NO: 103182 - DNA, 30 bp, Artificial Sequence
  Synthetic oligonucleotide
atcggaagttgcgccccaagtgatggccta

SEQ ID NO: 103183 - DNA, 30 bp, Artificial Sequence
  Synthetic oligonucleotide
agtcgggcccgaggccaagcaaaatgccta

SEQ ID NO: 103184 - DNA, 30 bp, Artificial Sequence
  Synthetic oligonucleotide
agttagttatatagcccaaagaagtgccta

SEQ ID NO: 103185 - DNA, 30 bp, Artificial Sequence
  Synthetic oligonucleotide
tcgtccagtaaagcgcattaacgttgccta

SEQ ID NO: 103186 - DNA, 30 bp, Artificial Sequence
  Synthetic oligonucleotide
ggagacaaggtgagatcattggaaatccta

SEQ ID NO: 103187 - DNA, 30 bp, Artificial Sequence
  Synthetic oligonucleotide
gtggagtggagtatgtaatccggcatccta

SEQ ID NO: 103188 - DNA, 30 bp, Artificial Sequence
  Synthetic oligonucleotide
tggacggcggtcaccagatctccgatccta

SEQ ID NO: 103189 - DNA, 30 bp, Artificial Sequence
  Synthetic oligonucleotide
taactcaaaggacttctccaaagtatccta

SEQ ID NO: 103190 - DNA, 30 bp, Artificial Sequence
  Synthetic oligonucleotide
tcggcaatccaccgtttatcagtcttccta

SEQ ID NO: 103191 - DNA, 30 bp, Artificial Sequence
  Synthetic oligonucleotide
caacagtaggtaacacgtggtctgttccta

SEQ ID NO: 103192 - DNA, 30 bp, Artificial Sequence
  Synthetic oligonucleotide
tacagaaggtgtggcataagtacgaagcta

SEQ ID NO: 103193 - DNA, 30 bp, Artificial Sequence
  Synthetic oligonucleotide
caactaactgcaaaacgacagtcgaagcta

SEQ ID NO: 103194 - DNA, 30 bp, Artificial Sequence
  Synthetic oligonucleotide
tggtagataggccagtgttcaaggaagcta

SEQ ID NO: 103195 - DNA, 30 bp, Artificial Sequence
  Synthetic oligonucleotide
ggctggagcgttatactcgggcttaagcta

SEQ ID NO: 103196 - DNA, 30 bp, Artificial Sequence
  Synthetic oligonucleotide
tcgccatatcgttcaacagtcgttcagcta

SEQ ID NO: 103197 - DNA, 30 bp, Artificial Sequence
  Synthetic oligonucleotide
tgagatagccctaacaaaggctgcgagcta

SEQ ID NO: 103198 - DNA, 30 bp, Artificial Sequence
  Synthetic oligonucleotide
ccaggggaatcctcaatacataaggagcta

SEQ ID NO: 103199 - DNA, 30 bp, Artificial Sequence
  Synthetic oligonucleotide
aggaagtgccttgagaagcactcggagcta

SEQ ID NO: 103200 - DNA, 30 bp, Artificial Sequence
  Synthetic oligonucleotide
ctggtccagcatccaatcacaaatgagcta

SEQ ID NO: 103201 - DNA, 30 bp, Artificial Sequence
  Synthetic oligonucleotide
caggcataaactgctagagctggtgagcta

SEQ ID NO: 103202 - DNA, 30 bp, Artificial Sequence
  Synthetic oligonucleotide
gatagtaaagcaggaatctatcaaacgcta

SEQ ID NO: 103203 - DNA, 30 bp, Artificial Sequence
  Synthetic oligonucleotide
gtagctcaccgtaactaataccctacgcta

SEQ ID NO: 103204 - DNA, 30 bp, Artificial Sequence
  Synthetic oligonucleotide
ctggcaagaaccaacacgtgacctccgcta

SEQ ID NO: 103205 - DNA, 30 bp, Artificial Sequence
  Synthetic oligonucleotide
aggctcaacccctccacgggcgaagcgcta

SEQ ID NO: 103206 - DNA, 30 bp, Artificial Sequence
  Synthetic oligonucleotide
cagaaatatggattagcacgccctgcgcta

SEQ ID NO: 103207 - DNA, 30 bp, Artificial Sequence
  Synthetic oligonucleotide
cacacgaattgaccttgatagctatcgcta

SEQ ID NO: 103208 - DNA, 30 bp, Artificial Sequence
  Synthetic oligonucleotide
tttggggacgtgtattacaatagcaggcta

SEQ ID NO: 103209 - DNA, 30 bp, Artificial Sequence
  Synthetic oligonucleotide
ttagcgggggttagcgtgggcgaacggcta

SEQ ID NO: 103210 - DNA, 30 bp, Artificial Sequence
  Synthetic oligonucleotide
acgtaggctcggatggactgaagagggcta

SEQ ID NO: 103211 - DNA, 30 bp, Artificial Sequence
  Synthetic oligonucleotide
tacatcgatcggtcactccatcgggggcta

SEQ ID NO: 103212 - DNA, 30 bp, Artificial Sequence
  Synthetic oligonucleotide
actatggtgagacgattctgtgatgggcta

SEQ ID NO: 103213 - DNA, 30 bp, Artificial Sequence
  Synthetic oligonucleotide
tagggagctgtatgcgcgtcgaaaatgcta

SEQ ID NO: 103214 - DNA, 30 bp, Artificial Sequence
  Synthetic oligonucleotide
attagaacgaattcggtacaagagatgcta

SEQ ID NO: 103215 - DNA, 30 bp, Artificial Sequence
  Synthetic oligonucleotide
acgtggcgtttcagcaatggcattatgcta

SEQ ID NO: 103216 - DNA, 30 bp, Artificial Sequence
  Synthetic oligonucleotide
gcgagtgagcactcatccatatagctgcta

SEQ ID NO: 103217 - DNA, 30 bp, Artificial Sequence
  Synthetic oligonucleotide
atgcggctgaatcgcttcaagccagtgcta

SEQ ID NO: 103218 - DNA, 30 bp, Artificial Sequence
  Synthetic oligonucleotide
acaagatcagtgggattggtaacggtgcta

SEQ ID NO: 103219 - DNA, 30 bp, Artificial Sequence
  Synthetic oligonucleotide
caccgactgaagcccgttttggaattgcta

SEQ ID NO: 103220 - DNA, 30 bp, Artificial Sequence
  Synthetic oligonucleotide
cgagggttcaagacacaagcgttaaatcta

SEQ ID NO: 103221 - DNA, 30 bp, Artificial Sequence
  Synthetic oligonucleotide
cgctcaccgctaagagcgcgtgtcaatcta

SEQ ID NO: 103222 - DNA, 30 bp, Artificial Sequence
  Synthetic oligonucleotide
ctggctcgtgcgcaacaaaacattaatcta

SEQ ID NO: 103223 - DNA, 30 bp, Artificial Sequence
  Synthetic oligonucleotide
taagctgcctcgaacgtctaagattatcta

SEQ ID NO: 103224 - DNA, 30 bp, Artificial Sequence
  Synthetic oligonucleotide
caatgtcttgaccatcttaacgaaactcta

SEQ ID NO: 103225 - DNA, 30 bp, Artificial Sequence
  Synthetic oligonucleotide
tggaaaagtcctccctagaagtgaactcta

SEQ ID NO: 103226 - DNA, 30 bp, Artificial Sequence
  Synthetic oligonucleotide
acggtgagcggtctaggacgaaacactcta

SEQ ID NO: 103227 - DNA, 30 bp, Artificial Sequence
  Synthetic oligonucleotide
tcgatagaacgtgcatgctgtaggactcta

SEQ ID NO: 103228 - DNA, 30 bp, Artificial Sequence
  Synthetic oligonucleotide
caacgtgatccttcatgactatgccctcta

SEQ ID NO: 103229 - DNA, 30 bp, Artificial Sequence
  Synthetic oligonucleotide
aaagtaagaaaactaagacgccaagctcta

SEQ ID NO: 103230 - DNA, 30 bp, Artificial Sequence
  Synthetic oligonucleotide
aggcaagtactattaagattagcagctcta

SEQ ID NO: 103231 - DNA, 30 bp, Artificial Sequence
  Synthetic oligonucleotide
gatgggccgtatgggaataaaaccgctcta

SEQ ID NO: 103232 - DNA, 29 bp, Artificial Sequence
  Synthetic oligonucleotide
tggcactcggacggccggattgcgctcta

SEQ ID NO: 103233 - DNA, 30 bp, Artificial Sequence
  Synthetic oligonucleotide
catcatcgaaagatctatatgggtgctcta

SEQ ID NO: 103234 - DNA, 30 bp, Artificial Sequence
  Synthetic oligonucleotide
cgtcgggaaaaacagggctaggaatctcta

SEQ ID NO: 103235 - DNA, 30 bp, Artificial Sequence
  Synthetic oligonucleotide
tggtagccaaggaagttacaaaatagtcta

SEQ ID NO: 103236 - DNA, 30 bp, Artificial Sequence
  Synthetic oligonucleotide
tcgttcaagcgccgagaaggaacgggtcta

SEQ ID NO: 103237 - DNA, 30 bp, Artificial Sequence
  Synthetic oligonucleotide
cgcggagaagtgcacgctgcagctggtcta

SEQ ID NO: 103238 - DNA, 30 bp, Artificial Sequence
  Synthetic oligonucleotide
aagccgcgcaaaactccagttaccgttcta

SEQ ID NO: 103239 - DNA, 30 bp, Artificial Sequence
  Synthetic oligonucleotide
ccccccaaggacaaaaacagggatgttcta

SEQ ID NO: 103240 - DNA, 30 bp, Artificial Sequence
  Synthetic oligonucleotide
ggcggtgtagtgcatagccgacattttcta

SEQ ID NO: 103241 - DNA, 30 bp, Artificial Sequence
  Synthetic oligonucleotide
tcgacattagagactgagtgtacttttcta

SEQ ID NO: 103242 - DNA, 30 bp, Artificial Sequence
  Synthetic oligonucleotide
tgttggcgcacgactaaagttgtaaaagta

SEQ ID NO: 103243 - DNA, 30 bp, Artificial Sequence
  Synthetic oligonucleotide
cacgcgggattcacgtcgtaatgcaaagta

SEQ ID NO: 103244 - DNA, 30 bp, Artificial Sequence
  Synthetic oligonucleotide
tacttgaggaggagcgtcgattgcgaagta

SEQ ID NO: 103245 - DNA, 30 bp, Artificial Sequence
  Synthetic oligonucleotide
cacgaaatatcgcgttcctacgagtaagta

SEQ ID NO: 103246 - DNA, 30 bp, Artificial Sequence
  Synthetic oligonucleotide
gtaacgagtgattttacatatgattaagta

SEQ ID NO: 103247 - DNA, 30 bp, Artificial Sequence
  Synthetic oligonucleotide
gggaaaactaactcagtgggggcttaagta

SEQ ID NO: 103248 - DNA, 30 bp, Artificial Sequence
  Synthetic oligonucleotide
actgcctataatatcgtggttatttaagta

SEQ ID NO: 103249 - DNA, 30 bp, Artificial Sequence
  Synthetic oligonucleotide
agctagggacgcgcacctcggtcaacagta

SEQ ID NO: 103250 - DNA, 30 bp, Artificial Sequence
  Synthetic oligonucleotide
agggagttattgttagacgtggcgacagta

SEQ ID NO: 103251 - DNA, 30 bp, Artificial Sequence
  Synthetic oligonucleotide
ctttcataacagagagaccgcaatacagta

SEQ ID NO: 103252 - DNA, 30 bp, Artificial Sequence
  Synthetic oligonucleotide
cttgcagttccacagggtgtcgttacagta

SEQ ID NO: 103253 - DNA, 30 bp, Artificial Sequence
  Synthetic oligonucleotide
cgtcccgcgagcgcttcagagtaaccagta

SEQ ID NO: 103254 - DNA, 30 bp, Artificial Sequence
  Synthetic oligonucleotide
ccttacaagacacagtcgatatcaccagta

SEQ ID NO: 103255 - DNA, 30 bp, Artificial Sequence
  Synthetic oligonucleotide
taatagtgcttagaattgtgagtgccagta

SEQ ID NO: 103256 - DNA, 30 bp, Artificial Sequence
  Synthetic oligonucleotide
ggtcattggtaagtgttaaccagggcagta

SEQ ID NO: 103257 - DNA, 30 bp, Artificial Sequence
  Synthetic oligonucleotide
ctcttaaagaggagagggatgcgggcagta

SEQ ID NO: 103258 - DNA, 30 bp, Artificial Sequence
  Synthetic oligonucleotide
tcctatagcgttggcactatgtaatcagta

SEQ ID NO: 103259 - DNA, 30 bp, Artificial Sequence
  Synthetic oligonucleotide
gctagggcaagccccaatgagatgtcagta

SEQ ID NO: 103260 - DNA, 30 bp, Artificial Sequence
  Synthetic oligonucleotide
agtgcgtgatgatgaggatctttcagagta

SEQ ID NO: 103261 - DNA, 30 bp, Artificial Sequence
  Synthetic oligonucleotide
gcaggttcaagggcaagcgtcaatagagta

SEQ ID NO: 103262 - DNA, 30 bp, Artificial Sequence
  Synthetic oligonucleotide
agtggcaaactgtaaggattcagtagagta

SEQ ID NO: 103263 - DNA, 30 bp, Artificial Sequence
  Synthetic oligonucleotide
cacaagtcttatcagaaagagtttagagta

SEQ ID NO: 103264 - DNA, 30 bp, Artificial Sequence
  Synthetic oligonucleotide
acttcggaattcggcaggttaggtcgagta

SEQ ID NO: 103265 - DNA, 30 bp, Artificial Sequence
  Synthetic oligonucleotide
ataactttcgagtgaactccaacaggagta

SEQ ID NO: 103266 - DNA, 30 bp, Artificial Sequence
  Synthetic oligonucleotide
tagagattgaaatctacgatcgtaggagta

SEQ ID NO: 103267 - DNA, 30 bp, Artificial Sequence
  Synthetic oligonucleotide
cgacttgcccctcatgattcggtcggagta

SEQ ID NO: 103268 - DNA, 30 bp, Artificial Sequence
  Synthetic oligonucleotide
cctagtgagaggaactgtcattctggagta

SEQ ID NO: 103269 - DNA, 30 bp, Artificial Sequence
  Synthetic oligonucleotide
tagattttgagaggatcagtaggtggagta

SEQ ID NO: 103270 - DNA, 30 bp, Artificial Sequence
  Synthetic oligonucleotide
ccatgaggaagactacaaccgtattgagta

SEQ ID NO: 103271 - DNA, 30 bp, Artificial Sequence
  Synthetic oligonucleotide
aaaggtatagcgtaataagactcttgagta

SEQ ID NO: 103272 - DNA, 30 bp, Artificial Sequence
  Synthetic oligonucleotide
agaaaccgaaggacggatcgccagatagta

SEQ ID NO: 103273 - DNA, 30 bp, Artificial Sequence
  Synthetic oligonucleotide
cttcggcgaattgtggtgaaacgcttagta

SEQ ID NO: 103274 - DNA, 30 bp, Artificial Sequence
  Synthetic oligonucleotide
ctatgttcacatctacccaagaagttagta

SEQ ID NO: 103275 - DNA, 30 bp, Artificial Sequence
  Synthetic oligonucleotide
ggtcgaatcgtagagtttagcataaacgta

SEQ ID NO: 103276 - DNA, 30 bp, Artificial Sequence
  Synthetic oligonucleotide
gcaggtctattctaaatgccaaacaacgta

SEQ ID NO: 103277 - DNA, 30 bp, Artificial Sequence
  Synthetic oligonucleotide
cgaggcctgcaccccttaatctataacgta

SEQ ID NO: 103278 - DNA, 30 bp, Artificial Sequence
  Synthetic oligonucleotide
cgctaacaaatgtataagtttaggcacgta

SEQ ID NO: 103279 - DNA, 30 bp, Artificial Sequence
  Synthetic oligonucleotide
gagcgagccgtatgatgattccaagacgta

SEQ ID NO: 103280 - DNA, 30 bp, Artificial Sequence
  Synthetic oligonucleotide
ggctcaagcagtataggtaccgtgtacgta

SEQ ID NO: 103281 - DNA, 30 bp, Artificial Sequence
  Synthetic oligonucleotide
tcgagttgaatgagcttaggcaataccgta

SEQ ID NO: 103282 - DNA, 30 bp, Artificial Sequence
  Synthetic oligonucleotide
caagctgattagggcgtggtacgtaccgta

SEQ ID NO: 103283 - DNA, 30 bp, Artificial Sequence
  Synthetic oligonucleotide
gtaaagctaggggcctggggagaaagcgta

SEQ ID NO: 103284 - DNA, 30 bp, Artificial Sequence
  Synthetic oligonucleotide
aagcggtaatgagtctgacgataaagcgta

SEQ ID NO: 103285 - DNA, 30 bp, Artificial Sequence
  Synthetic oligonucleotide
tgctacaaaaagcatatcatgggcagcgta

SEQ ID NO: 103286 - DNA, 30 bp, Artificial Sequence
  Synthetic oligonucleotide
cgatgcccttcacagccgagggggagcgta

SEQ ID NO: 103287 - DNA, 30 bp, Artificial Sequence
  Synthetic oligonucleotide
actggtgatcagtcgtaattgtggcgcgta

SEQ ID NO: 103288 - DNA, 30 bp, Artificial Sequence
  Synthetic oligonucleotide
ataggaacattcatcgtactaagaggcgta

SEQ ID NO: 103289 - DNA, 30 bp, Artificial Sequence
  Synthetic oligonucleotide
aggctcggccggctgctcgtaaacggcgta

SEQ ID NO: 103290 - DNA, 30 bp, Artificial Sequence
  Synthetic oligonucleotide
ctcgttaacatcgtatttcgctagggcgta

SEQ ID NO: 103291 - DNA, 30 bp, Artificial Sequence
  Synthetic oligonucleotide
tgtgtcagccacaaaaactcaatgggcgta

SEQ ID NO: 103292 - DNA, 30 bp, Artificial Sequence
  Synthetic oligonucleotide
ataaggtaccggtaaaagtggtagtgcgta

SEQ ID NO: 103293 - DNA, 30 bp, Artificial Sequence
  Synthetic oligonucleotide
tgcggatcagtattgtatgcaagaatcgta

SEQ ID NO: 103294 - DNA, 30 bp, Artificial Sequence
  Synthetic oligonucleotide
acaagaagaagtttcgtaattactatcgta

SEQ ID NO: 103295 - DNA, 30 bp, Artificial Sequence
  Synthetic oligonucleotide
cgttctaaaatcatgggcggtagcctcgta

SEQ ID NO: 103296 - DNA, 30 bp, Artificial Sequence
  Synthetic oligonucleotide
agagttagcaccctactcgtaaagctcgta

SEQ ID NO: 103297 - DNA, 30 bp, Artificial Sequence
  Synthetic oligonucleotide
aagctgcacagctgggtcgttcggctcgta

SEQ ID NO: 103298 - DNA, 30 bp, Artificial Sequence
  Synthetic oligonucleotide
aagtgttcatggtaacacacttccgtcgta

SEQ ID NO: 103299 - DNA, 30 bp, Artificial Sequence
  Synthetic oligonucleotide
gcactgcatctagagcatacagtggtcgta

SEQ ID NO: 103300 - DNA, 30 bp, Artificial Sequence
  Synthetic oligonucleotide
cggtgaacgatagccgtatgggtggtcgta

SEQ ID NO: 103301 - DNA, 30 bp, Artificial Sequence
  Synthetic oligonucleotide
ggtccgaatcgagtacatattacattcgta

SEQ ID NO: 103302 - DNA, 30 bp, Artificial Sequence
  Synthetic oligonucleotide
ctgtggccccgattgacggttcgattcgta

SEQ ID NO: 103303 - DNA, 29 bp, Artificial Sequence
  Synthetic oligonucleotide
agctgagctcctattattcttcaaaggta

SEQ ID NO: 103304 - DNA, 30 bp, Artificial Sequence
  Synthetic oligonucleotide
gtaagtctgtgtaatttactggagaaggta

SEQ ID NO: 103305 - DNA, 30 bp, Artificial Sequence
  Synthetic oligonucleotide
ggtgcgtggttataattactttggaaggta

SEQ ID NO: 103306 - DNA, 30 bp, Artificial Sequence
  Synthetic oligonucleotide
cgggaacggtttattctgcaaagtaaggta

SEQ ID NO: 103307 - DNA, 30 bp, Artificial Sequence
  Synthetic oligonucleotide
taacagaactcccgtctctctcgccaggta

SEQ ID NO: 103308 - DNA, 30 bp, Artificial Sequence
  Synthetic oligonucleotide
tgcgtgcagatccctagctagcagcaggta

SEQ ID NO: 103309 - DNA, 30 bp, Artificial Sequence
  Synthetic oligonucleotide
aacgtgaaaaagcgggcgtcgaggcaggta

SEQ ID NO: 103310 - DNA, 30 bp, Artificial Sequence
  Synthetic oligonucleotide
aatgaccgctagtgactgaatgaagaggta

SEQ ID NO: 103311 - DNA, 30 bp, Artificial Sequence
  Synthetic oligonucleotide
ggcaatgcccgactcgtgcgatccgaggta

SEQ ID NO: 103312 - DNA, 30 bp, Artificial Sequence
  Synthetic oligonucleotide
caccgccccgtcgcataatgacgtgaggta

SEQ ID NO: 103313 - DNA, 30 bp, Artificial Sequence
  Synthetic oligonucleotide
cacgagaataatgctatctccttgacggta

SEQ ID NO: 103314 - DNA, 30 bp, Artificial Sequence
  Synthetic oligonucleotide
cattaccgcgaacgtggacaataaccggta

SEQ ID NO: 103315 - DNA, 30 bp, Artificial Sequence
  Synthetic oligonucleotide
gtcacgtcgtgtccaacgggtaacccggta

SEQ ID NO: 103316 - DNA, 30 bp, Artificial Sequence
  Synthetic oligonucleotide
aggagaaagttgttcaggcaaaccccggta

SEQ ID NO: 103317 - DNA, 30 bp, Artificial Sequence
  Synthetic oligonucleotide
aattaccgtatgtcgagggtctgagcggta

SEQ ID NO: 103318 - DNA, 30 bp, Artificial Sequence
  Synthetic oligonucleotide
gaactagaagccgagagctttaacgcggta

SEQ ID NO: 103319 - DNA, 30 bp, Artificial Sequence
  Synthetic oligonucleotide
tgatgcggtgaagagactcgtgccgcggta

SEQ ID NO: 103320 - DNA, 30 bp, Artificial Sequence
  Synthetic oligonucleotide
acgcgctgaaggcccgattcattcgcggta

SEQ ID NO: 103321 - DNA, 30 bp, Artificial Sequence
  Synthetic oligonucleotide
atgataaagaggtaggtacattgtgcggta

SEQ ID NO: 103322 - DNA, 30 bp, Artificial Sequence
  Synthetic oligonucleotide
aaagggttgtcaattcgcgcaagatcggta

SEQ ID NO: 103323 - DNA, 30 bp, Artificial Sequence
  Synthetic oligonucleotide
cggccgtgagaataggagaatgactcggta

SEQ ID NO: 103324 - DNA, 30 bp, Artificial Sequence
  Synthetic oligonucleotide
tggggcataaggtgctgtgtgtgctcggta

SEQ ID NO: 103325 - DNA, 30 bp, Artificial Sequence
  Synthetic oligonucleotide
agttacataagtctgggttagctctcggta

SEQ ID NO: 103326 - DNA, 30 bp, Artificial Sequence
  Synthetic oligonucleotide
cgcagagtggggttatcagatctttcggta

SEQ ID NO: 103327 - DNA, 30 bp, Artificial Sequence
  Synthetic oligonucleotide
ggccggacacaccatcgcaataaaagggta

SEQ ID NO: 103328 - DNA, 30 bp, Artificial Sequence
  Synthetic oligonucleotide
gggggagcaccagggaaaaagtaaagggta

SEQ ID NO: 103329 - DNA, 30 bp, Artificial Sequence
  Synthetic oligonucleotide
ttgtcgacacgaactttaactaacagggta

SEQ ID NO: 103330 - DNA, 30 bp, Artificial Sequence
  Synthetic oligonucleotide
agatgtcaggatcaagctacttccagggta

SEQ ID NO: 103331 - DNA, 30 bp, Artificial Sequence
  Synthetic oligonucleotide
acctggtgtcgaaaggcttgagtgagggta

SEQ ID NO: 103332 - DNA, 30 bp, Artificial Sequence
  Synthetic oligonucleotide
ggcggctgaatattagagttcgatagggta

SEQ ID NO: 103333 - DNA, 30 bp, Artificial Sequence
  Synthetic oligonucleotide
cgagcgacgtagcagcgaaaagtacgggta

SEQ ID NO: 103334 - DNA, 30 bp, Artificial Sequence
  Synthetic oligonucleotide
cagcgattagagcttccgtccgatcgggta

SEQ ID NO: 103335 - DNA, 30 bp, Artificial Sequence
  Synthetic oligonucleotide
tgctagaagcaaaaaagaaacctaggggta

SEQ ID NO: 103336 - DNA, 30 bp, Artificial Sequence
  Synthetic oligonucleotide
accgcaaaacttgagtttcacagtggggta

SEQ ID NO: 103337 - DNA, 30 bp, Artificial Sequence
  Synthetic oligonucleotide
tagcttcacacaacatggattgcatgggta

SEQ ID NO: 103338 - DNA, 30 bp, Artificial Sequence
  Synthetic oligonucleotide
cggcacttaacaggcatcacgctatgggta

SEQ ID NO: 103339 - DNA, 30 bp, Artificial Sequence
  Synthetic oligonucleotide
ttcaacaaacttagtgcgtactcgtgggta

SEQ ID NO: 103340 - DNA, 30 bp, Artificial Sequence
  Synthetic oligonucleotide
gatgtctcggacgagtaactaagcatggta

SEQ ID NO: 103341 - DNA, 30 bp, Artificial Sequence
  Synthetic oligonucleotide
cctattgcggaacctgtggccagtatggta

SEQ ID NO: 103342 - DNA, 30 bp, Artificial Sequence
  Synthetic oligonucleotide
tcatgtgggtttaagagaatatccctggta

SEQ ID NO: 103343 - DNA, 30 bp, Artificial Sequence
  Synthetic oligonucleotide
tcgcgccattgcggggagctagttctggta

SEQ ID NO: 103344 - DNA, 30 bp, Artificial Sequence
  Synthetic oligonucleotide
caaaatggcaaacgcaaaagaatagtggta

SEQ ID NO: 103345 - DNA, 30 bp, Artificial Sequence
  Synthetic oligonucleotide
ggacaaggtctggtgggtaccatggtggta

SEQ ID NO: 103346 - DNA, 30 bp, Artificial Sequence
  Synthetic oligonucleotide
accttgggcaactagtaagggcgtgtggta

SEQ ID NO: 103347 - DNA, 30 bp, Artificial Sequence
  Synthetic oligonucleotide
tatgagttgttaaacagcaggcgattggta

SEQ ID NO: 103348 - DNA, 30 bp, Artificial Sequence
  Synthetic oligonucleotide
cgttaggtcgactcggcggtgacgttggta

SEQ ID NO: 103349 - DNA, 30 bp, Artificial Sequence
  Synthetic oligonucleotide
gcgtggattcacagactagaccctttggta

SEQ ID NO: 103350 - DNA, 30 bp, Artificial Sequence
  Synthetic oligonucleotide
gagccaggagaagtgcggacaagtttggta

SEQ ID NO: 103351 - DNA, 30 bp, Artificial Sequence
  Synthetic oligonucleotide
ccttgccaccatgaccggatgccgaatgta

SEQ ID NO: 103352 - DNA, 30 bp, Artificial Sequence
  Synthetic oligonucleotide
tgtggctccccaacgcattaaaagcatgta

SEQ ID NO: 103353 - DNA, 30 bp, Artificial Sequence
  Synthetic oligonucleotide
ttgaaagtgcagtggggttatccagatgta

SEQ ID NO: 103354 - DNA, 30 bp, Artificial Sequence
  Synthetic oligonucleotide
ccggtgataacagactgggtccgatatgta

SEQ ID NO: 103355 - DNA, 30 bp, Artificial Sequence
  Synthetic oligonucleotide
tgacaagggtagagtgcaagcatctatgta

SEQ ID NO: 103356 - DNA, 30 bp, Artificial Sequence
  Synthetic oligonucleotide
ccatgtgataataattcacggcacactgta

SEQ ID NO: 103357 - DNA, 30 bp, Artificial Sequence
  Synthetic oligonucleotide
cgtctcgacaaccgtaacaaaccacctgta

SEQ ID NO: 103358 - DNA, 30 bp, Artificial Sequence
  Synthetic oligonucleotide
ccaatgataagccattactctatagctgta

SEQ ID NO: 103359 - DNA, 30 bp, Artificial Sequence
  Synthetic oligonucleotide
gggacaagaacggtgagggtatcggctgta

SEQ ID NO: 103360 - DNA, 30 bp, Artificial Sequence
  Synthetic oligonucleotide
cggcaagaccacgggctgcgactgcgtgta

SEQ ID NO: 103361 - DNA, 30 bp, Artificial Sequence
  Synthetic oligonucleotide
gtgcaacgctgggttatttggcatcgtgta

SEQ ID NO: 103362 - DNA, 30 bp, Artificial Sequence
  Synthetic oligonucleotide
tgctcacgagtggacaggcacaatggtgta

SEQ ID NO: 103363 - DNA, 30 bp, Artificial Sequence
  Synthetic oligonucleotide
tggctggctatggaacatgtcggttgtgta

SEQ ID NO: 103364 - DNA, 31 bp, Artificial Sequence
  Synthetic oligonucleotide
ctcagactaacgcatgcgatgtcgaattgta

SEQ ID NO: 103365 - DNA, 30 bp, Artificial Sequence
  Synthetic oligonucleotide
gtgagaacagtccaggacatggatattgta

SEQ ID NO: 103366 - DNA, 30 bp, Artificial Sequence
  Synthetic oligonucleotide
acaagggggcaacaaattcggctatttgta

SEQ ID NO: 103367 - DNA, 30 bp, Artificial Sequence
  Synthetic oligonucleotide
ggttggccaacagatacttataactttgta

SEQ ID NO: 103368 - DNA, 30 bp, Artificial Sequence
  Synthetic oligonucleotide
aggtgccatgtatctataactgcacaatta

SEQ ID NO: 103369 - DNA, 30 bp, Artificial Sequence
  Synthetic oligonucleotide
ccgaggatcctcaagtcaccagtacaatta

SEQ ID NO: 103370 - DNA, 30 bp, Artificial Sequence
  Synthetic oligonucleotide
taacgcggtgaggatattgacgaagaatta

SEQ ID NO: 103371 - DNA, 30 bp, Artificial Sequence
  Synthetic oligonucleotide
ctgaagttgtcatgcacgtgttaagaatta

SEQ ID NO: 103372 - DNA, 30 bp, Artificial Sequence
  Synthetic oligonucleotide
gtgtcgatggattcggattgtatagaatta

SEQ ID NO: 103373 - DNA, 30 bp, Artificial Sequence
  Synthetic oligonucleotide
ataaactacgactacggctggcacgaatta

SEQ ID NO: 103374 - DNA, 30 bp, Artificial Sequence
  Synthetic oligonucleotide
gtgccgggcgcaccgagggtacccgaatta

SEQ ID NO: 103375 - DNA, 30 bp, Artificial Sequence
  Synthetic oligonucleotide
ggtgaataagctcgcgggccggaaacatta

SEQ ID NO: 103376 - DNA, 30 bp, Artificial Sequence
  Synthetic oligonucleotide
ccctgaccctgtagtcctgaggacccatta

SEQ ID NO: 103377 - DNA, 30 bp, Artificial Sequence
  Synthetic oligonucleotide
cgtgccaaagtcccggatcctagcagatta

SEQ ID NO: 103378 - DNA, 30 bp, Artificial Sequence
  Synthetic oligonucleotide
tataacatgggagggagcggatatagatta

SEQ ID NO: 103379 - DNA, 30 bp, Artificial Sequence
  Synthetic oligonucleotide
tccaaaataaggcatccatcaactagatta

SEQ ID NO: 103380 - DNA, 30 bp, Artificial Sequence
  Synthetic oligonucleotide
ccgagccacaatatgtaaaggccacgatta

SEQ ID NO: 103381 - DNA, 30 bp, Artificial Sequence
  Synthetic oligonucleotide
ctaggaaatgcttcgcaacccgtacgatta

SEQ ID NO: 103382 - DNA, 30 bp, Artificial Sequence
  Synthetic oligonucleotide
cacacaataagaataaagctgttccgatta

SEQ ID NO: 103383 - DNA, 30 bp, Artificial Sequence
  Synthetic oligonucleotide
gcggctttgcgccgagtgcaagggcgatta

SEQ ID NO: 103384 - DNA, 31 bp, Artificial Sequence
  Synthetic oligonucleotide
tcagaactaaggctaggtggggtgaggatta

SEQ ID NO: 103385 - DNA, 30 bp, Artificial Sequence
  Synthetic oligonucleotide
caaacccgtactgtccgaaatgagggatta

SEQ ID NO: 103386 - DNA, 30 bp, Artificial Sequence
  Synthetic oligonucleotide
acctcgggcaagatacgtttgaactgatta

SEQ ID NO: 103387 - DNA, 30 bp, Artificial Sequence
  Synthetic oligonucleotide
gggcagtgtggcgggtaccgaccctgatta

SEQ ID NO: 103388 - DNA, 30 bp, Artificial Sequence
  Synthetic oligonucleotide
cgacccgaagccggccctgcgacactatta

SEQ ID NO: 103389 - DNA, 30 bp, Artificial Sequence
  Synthetic oligonucleotide
tatcagactacggctagggaagtactatta

SEQ ID NO: 103390 - DNA, 30 bp, Artificial Sequence
  Synthetic oligonucleotide
aacaatgacaatgcaaggcattccctatta

SEQ ID NO: 103391 - DNA, 30 bp, Artificial Sequence
  Synthetic oligonucleotide
agcgagattgcggtataaatcgagctatta

SEQ ID NO: 103392 - DNA, 30 bp, Artificial Sequence
  Synthetic oligonucleotide
agaccgagaagagaaaaaatacccgtatta

SEQ ID NO: 103393 - DNA, 30 bp, Artificial Sequence
  Synthetic oligonucleotide
acacagtgtgattgcgactgggtggtatta

SEQ ID NO: 103394 - DNA, 30 bp, Artificial Sequence
  Synthetic oligonucleotide
acgtgaaccctggttttcattgcattatta

SEQ ID NO: 103395 - DNA, 30 bp, Artificial Sequence
  Synthetic oligonucleotide
tacaggtgaattgcgtagatttgattatta

SEQ ID NO: 103396 - DNA, 30 bp, Artificial Sequence
  Synthetic oligonucleotide
catgttgtgggccgttccgaaaagttatta

SEQ ID NO: 103397 - DNA, 30 bp, Artificial Sequence
  Synthetic oligonucleotide
cgatatgtgaatgtcctggctttaaactta

SEQ ID NO: 103398 - DNA, 30 bp, Artificial Sequence
  Synthetic oligonucleotide
gtcggtacatgaaaatttgcaacgaactta

SEQ ID NO: 103399 - DNA, 30 bp, Artificial Sequence
  Synthetic oligonucleotide
caagtagaatgaggtgtctgattgaactta

SEQ ID NO: 103400 - DNA, 30 bp, Artificial Sequence
  Synthetic oligonucleotide
cgatgtagaggataagaaggggaagactta

SEQ ID NO: 103401 - DNA, 30 bp, Artificial Sequence
  Synthetic oligonucleotide
acttatgcgtgagctgtaacgtgggactta

SEQ ID NO: 103402 - DNA, 30 bp, Artificial Sequence
  Synthetic oligonucleotide
taacacgagcgggctgcgcagcctgactta

SEQ ID NO: 103403 - DNA, 30 bp, Artificial Sequence
  Synthetic oligonucleotide
tttaggtatgaaaacatctgcgcgtactta

SEQ ID NO: 103404 - DNA, 30 bp, Artificial Sequence
  Synthetic oligonucleotide
aaaaggatacccagggttgtagtgacctta

SEQ ID NO: 103405 - DNA, 30 bp, Artificial Sequence
  Synthetic oligonucleotide
agtgttcgtaaacggaacccaaagccctta

SEQ ID NO: 103406 - DNA, 30 bp, Artificial Sequence
  Synthetic oligonucleotide
cacttggatgtaaaagataatgaagcctta

SEQ ID NO: 103407 - DNA, 30 bp, Artificial Sequence
  Synthetic oligonucleotide
cgtccccatgtggtagaaaaacgggcctta

SEQ ID NO: 103408 - DNA, 30 bp, Artificial Sequence
  Synthetic oligonucleotide
cacaaacggatgaggcattcagagtcctta

SEQ ID NO: 103409 - DNA, 30 bp, Artificial Sequence
  Synthetic oligonucleotide
cgatactccgcggtggaatagtacagctta

SEQ ID NO: 103410 - DNA, 30 bp, Artificial Sequence
  Synthetic oligonucleotide
gcaaggggagggattaaactaaatcgctta

SEQ ID NO: 103411 - DNA, 30 bp, Artificial Sequence
  Synthetic oligonucleotide
agttgcgcctataagtgtgcggggggctta

SEQ ID NO: 103412 - DNA, 30 bp, Artificial Sequence
  Synthetic oligonucleotide
tttgtgaatcgatcgtaaaaaggatgctta

SEQ ID NO: 103413 - DNA, 30 bp, Artificial Sequence
  Synthetic oligonucleotide
aacatatcggcctgaagacattcgtgctta

SEQ ID NO: 103414 - DNA, 30 bp, Artificial Sequence
  Synthetic oligonucleotide
atatgtggactcaacgaagcggaactctta

SEQ ID NO: 103415 - DNA, 30 bp, Artificial Sequence
  Synthetic oligonucleotide
aggactggtttactccagtctaaagtctta

SEQ ID NO: 103416 - DNA, 30 bp, Artificial Sequence
  Synthetic oligonucleotide
ttacgtgaagcgagacgcttcgaagtctta

SEQ ID NO: 103417 - DNA, 30 bp, Artificial Sequence
  Synthetic oligonucleotide
caaacagaacggtgagtctagttggtctta

SEQ ID NO: 103418 - DNA, 30 bp, Artificial Sequence
  Synthetic oligonucleotide
gacaacttaacaacatgggcggatttctta

SEQ ID NO: 103419 - DNA, 30 bp, Artificial Sequence
  Synthetic oligonucleotide
cgtggcctgcatcagcagtattcaaagtta

SEQ ID NO: 103420 - DNA, 30 bp, Artificial Sequence
  Synthetic oligonucleotide
aacagaccggacggacactgtgccaagtta

SEQ ID NO: 103421 - DNA, 30 bp, Artificial Sequence
  Synthetic oligonucleotide
ataggggcacaaagaatatgaggcaagtta

SEQ ID NO: 103422 - DNA, 30 bp, Artificial Sequence
  Synthetic oligonucleotide
tggtaccactggaagatgaagaggaagtta

SEQ ID NO: 103423 - DNA, 30 bp, Artificial Sequence
  Synthetic oligonucleotide
gggcaaaaccgggtgcgcagctggcagtta

SEQ ID NO: 103424 - DNA, 30 bp, Artificial Sequence
  Synthetic oligonucleotide
tgaggactgtaacattctcataaggagtta

SEQ ID NO: 103425 - DNA, 30 bp, Artificial Sequence
  Synthetic oligonucleotide
gagaggttgataaatcaacagcgggagtta

SEQ ID NO: 103426 - DNA, 30 bp, Artificial Sequence
  Synthetic oligonucleotide
agcttacgatgatagacgaaagtggagtta

SEQ ID NO: 103427 - DNA, 30 bp, Artificial Sequence
  Synthetic oligonucleotide
agacaggtgagatgactttacttatagtta

SEQ ID NO: 103428 - DNA, 30 bp, Artificial Sequence
  Synthetic oligonucleotide
cggtgaccaactagtgggcggtactagtta

SEQ ID NO: 103429 - DNA, 30 bp, Artificial Sequence
  Synthetic oligonucleotide
tgcaggggctcgatccccaagcagtagtta

SEQ ID NO: 103430 - DNA, 30 bp, Artificial Sequence
  Synthetic oligonucleotide
cgtggacgcccgaggcactaccgcccgtta

SEQ ID NO: 103431 - DNA, 30 bp, Artificial Sequence
  Synthetic oligonucleotide
agagaaagttattaccgtggaaatccgtta

SEQ ID NO: 103432 - DNA, 30 bp, Artificial Sequence
  Synthetic oligonucleotide
gaggcgttgaaaaaagataacgaagcgtta

SEQ ID NO: 103433 - DNA, 30 bp, Artificial Sequence
  Synthetic oligonucleotide
gaagagttgacctgagatcatggagcgtta

SEQ ID NO: 103434 - DNA, 30 bp, Artificial Sequence
  Synthetic oligonucleotide
gggaaaaggtaataaccctgcgtcgcgtta

SEQ ID NO: 103435 - DNA, 30 bp, Artificial Sequence
  Synthetic oligonucleotide
cgactattggtctggagtaaataggcgtta

SEQ ID NO: 103436 - DNA, 30 bp, Artificial Sequence
  Synthetic oligonucleotide
ggcgaggtctgcctctaatgagaatcgtta

SEQ ID NO: 103437 - DNA, 30 bp, Artificial Sequence
  Synthetic oligonucleotide
ccatgtcattcgcgtctaggaggctcgtta

SEQ ID NO: 103438 - DNA, 30 bp, Artificial Sequence
  Synthetic oligonucleotide
gacgggatatctggcgttcagcgttcgtta

SEQ ID NO: 103439 - DNA, 30 bp, Artificial Sequence
  Synthetic oligonucleotide
cccacaacagcgcaatggtgtaaaaggtta

SEQ ID NO: 103440 - DNA, 30 bp, Artificial Sequence
  Synthetic oligonucleotide
tacgtacctttccgagcgtcctaaaggtta

SEQ ID NO: 103441 - DNA, 30 bp, Artificial Sequence
  Synthetic oligonucleotide
acacgggccgcttcgtctgagaccaggtta

SEQ ID NO: 103442 - DNA, 30 bp, Artificial Sequence
  Synthetic oligonucleotide
acaatcagaatacggttagcatctcggtta

SEQ ID NO: 103443 - DNA, 30 bp, Artificial Sequence
  Synthetic oligonucleotide
aagaaccaaggtaaccccaaaagagggtta

SEQ ID NO: 103444 - DNA, 30 bp, Artificial Sequence
  Synthetic oligonucleotide
gcgtgtgtagttagatgatctagcgggtta

SEQ ID NO: 103445 - DNA, 30 bp, Artificial Sequence
  Synthetic oligonucleotide
cgggatccgatgtgtctaaggactgggtta

SEQ ID NO: 103446 - DNA, 30 bp, Artificial Sequence
  Synthetic oligonucleotide
cagaaggttcgagcacacctggcatggtta

SEQ ID NO: 103447 - DNA, 30 bp, Artificial Sequence
  Synthetic oligonucleotide
ttatgtgacttactaggaatgggctggtta

SEQ ID NO: 103448 - DNA, 30 bp, Artificial Sequence
  Synthetic oligonucleotide
gggtggtatggtcgtgataagcattggtta

SEQ ID NO: 103449 - DNA, 30 bp, Artificial Sequence
  Synthetic oligonucleotide
aaaaagtaggccagaaatgaagaaatgtta

SEQ ID NO: 103450 - DNA, 30 bp, Artificial Sequence
  Synthetic oligonucleotide
cgcgcctggtggggcgaaagtctcctgtta

SEQ ID NO: 103451 - DNA, 30 bp, Artificial Sequence
  Synthetic oligonucleotide
acgttccgcaattgagctaactggctgtta

SEQ ID NO: 103452 - DNA, 30 bp, Artificial Sequence
  Synthetic oligonucleotide
ggcgttcttgcgtcggaatagagagtgtta

SEQ ID NO: 103453 - DNA, 30 bp, Artificial Sequence
  Synthetic oligonucleotide
aggtaacccaaacaccggtgagaggtgtta

SEQ ID NO: 103454 - DNA, 30 bp, Artificial Sequence
  Synthetic oligonucleotide
attgcggactacggatggatatagttgtta

SEQ ID NO: 103455 - DNA, 30 bp, Artificial Sequence
  Synthetic oligonucleotide
acgggagactgtaggtaaataaacaattta

SEQ ID NO: 103456 - DNA, 30 bp, Artificial Sequence
  Synthetic oligonucleotide
gcaagctcaaacaacccctgacacaattta

SEQ ID NO: 103457 - DNA, 30 bp, Artificial Sequence
  Synthetic oligonucleotide
atgggacttgacaccctggcttgagattta

SEQ ID NO: 103458 - DNA, 30 bp, Artificial Sequence
  Synthetic oligonucleotide
acgacggggaagatagatcagatagattta

SEQ ID NO: 103459 - DNA, 30 bp, Artificial Sequence
  Synthetic oligonucleotide
tactaatagggtccaaatgaactagattta

SEQ ID NO: 103460 - DNA, 30 bp, Artificial Sequence
  Synthetic oligonucleotide
cgcgcggggcaaaattctgtgggtgattta

SEQ ID NO: 103461 - DNA, 29 bp, Artificial Sequence
  Synthetic oligonucleotide
agaaccagtgcgggtagggatgaacttta

SEQ ID NO: 103462 - DNA, 30 bp, Artificial Sequence
  Synthetic oligonucleotide
gggagacggagtgttgaaatgcgcagttta

SEQ ID NO: 103463 - DNA, 30 bp, Artificial Sequence
  Synthetic oligonucleotide
caggactccttcaatgaaaaaatgagttta

SEQ ID NO: 103464 - DNA, 30 bp, Artificial Sequence
  Synthetic oligonucleotide
ttagatgacggtgggcggcacttcggttta

SEQ ID NO: 103465 - DNA, 30 bp, Artificial Sequence
  Synthetic oligonucleotide
ccgagttatgagatgaggatataatgttta

SEQ ID NO: 103466 - DNA, 30 bp, Artificial Sequence
  Synthetic oligonucleotide
tcgtcaagtccacaattggctatggtttta

SEQ ID NO: 103467 - DNA, 30 bp, Artificial Sequence
  Synthetic oligonucleotide
taagcgatctgagcaaacaagtcagaaaac

SEQ ID NO: 103468 - DNA, 30 bp, Artificial Sequence
  Synthetic oligonucleotide
atcggtattgtcaaagaagcgcaataaaac

SEQ ID NO: 103469 - DNA, 30 bp, Artificial Sequence
  Synthetic oligonucleotide
gattccaaaatgggacaatgcttaacaaac

SEQ ID NO: 103470 - DNA, 30 bp, Artificial Sequence
  Synthetic oligonucleotide
cgttccagctgggtggcaagaggcacaaac

SEQ ID NO: 103471 - DNA, 30 bp, Artificial Sequence
  Synthetic oligonucleotide
gtcaatagtcacgtgggcaacccgacaaac

SEQ ID NO: 103472 - DNA, 30 bp, Artificial Sequence
  Synthetic oligonucleotide
atatgagtcgaagaaaatgaggtaccaaac

SEQ ID NO: 103473 - DNA, 30 bp, Artificial Sequence
  Synthetic oligonucleotide
aagcgtgtcacagtggacataacgtcaaac

SEQ ID NO: 103474 - DNA, 30 bp, Artificial Sequence
  Synthetic oligonucleotide
ctaaaaacggggtgggtctctgggagaaac

SEQ ID NO: 103475 - DNA, 30 bp, Artificial Sequence
  Synthetic oligonucleotide
gccgaattacaagtgtgctgcggtcgaaac

SEQ ID NO: 103476 - DNA, 30 bp, Artificial Sequence
  Synthetic oligonucleotide
ggagcaagcacaagtatgggaggaggaaac

SEQ ID NO: 103477 - DNA, 30 bp, Artificial Sequence
  Synthetic oligonucleotide
actcatgtaaaggggaccggtgggggaaac

SEQ ID NO: 103478 - DNA, 30 bp, Artificial Sequence
  Synthetic oligonucleotide
gtttgtggcgtagcaaagaaggatggaaac

SEQ ID NO: 103479 - DNA, 30 bp, Artificial Sequence
  Synthetic oligonucleotide
acgtgacaatcacggggtgcgattggaaac

SEQ ID NO: 103480 - DNA, 30 bp, Artificial Sequence
  Synthetic oligonucleotide
acgtctaagcacatgttacattccctaaac

SEQ ID NO: 103481 - DNA, 30 bp, Artificial Sequence
  Synthetic oligonucleotide
gacagtaaaatacgctaccgggcggtaaac

SEQ ID NO: 103482 - DNA, 30 bp, Artificial Sequence
  Synthetic oligonucleotide
tgcaataacaaattcagcttatagttaaac

SEQ ID NO: 103483 - DNA, 30 bp, Artificial Sequence
  Synthetic oligonucleotide
tccgccgcaacaagcatgcgcactaacaac

SEQ ID NO: 103484 - DNA, 31 bp, Artificial Sequence
  Synthetic oligonucleotide
gcgtggttcctgccaaacaaaacgacacaac

SEQ ID NO: 103485 - DNA, 30 bp, Artificial Sequence
  Synthetic oligonucleotide
agacacccgtgtcagtagtggcaccacaac

SEQ ID NO: 103486 - DNA, 30 bp, Artificial Sequence
  Synthetic oligonucleotide
tgttcaggaaccggtaaacaactgcacaac

SEQ ID NO: 103487 - DNA, 30 bp, Artificial Sequence
  Synthetic oligonucleotide
tcagactcgtcgtgccaatgcaatcacaac

SEQ ID NO: 103488 - DNA, 30 bp, Artificial Sequence
  Synthetic oligonucleotide
gtgtggccactcacgtctgttgaagacaac

SEQ ID NO: 103489 - DNA, 30 bp, Artificial Sequence
  Synthetic oligonucleotide
cgtcgaaggggtccccctgggcgtgacaac

SEQ ID NO: 103490 - DNA, 30 bp, Artificial Sequence
  Synthetic oligonucleotide
gagatcggaaaagaaccgacataatacaac

SEQ ID NO: 103491 - DNA, 30 bp, Artificial Sequence
  Synthetic oligonucleotide
ggtaaccgtgggtaggaagaagagtacaac

SEQ ID NO: 103492 - DNA, 30 bp, Artificial Sequence
  Synthetic oligonucleotide
agtccacattcagtggtcagtgtttacaac

SEQ ID NO: 103493 - DNA, 30 bp, Artificial Sequence
  Synthetic oligonucleotide
agcacactaaggtccactttcaccaccaac

SEQ ID NO: 103494 - DNA, 30 bp, Artificial Sequence
  Synthetic oligonucleotide
aagtaaaatcatgctctcaccaggaccaac

SEQ ID NO: 103495 - DNA, 30 bp, Artificial Sequence
  Synthetic oligonucleotide
agatgctgcaaccagtccaatgttcccaac

SEQ ID NO: 103496 - DNA, 29 bp, Artificial Sequence
  Synthetic oligonucleotide
agatgacacaatgagagtcgggtgccaac

SEQ ID NO: 103497 - DNA, 30 bp, Artificial Sequence
  Synthetic oligonucleotide
cgcggaacacacaggagattaatatccaac

SEQ ID NO: 103498 - DNA, 30 bp, Artificial Sequence
  Synthetic oligonucleotide
tcggtatgtctgaatgatacgccctccaac

SEQ ID NO: 103499 - DNA, 30 bp, Artificial Sequence
  Synthetic oligonucleotide
gtggaagtgggtcatgttagttagtccaac

SEQ ID NO: 103500 - DNA, 30 bp, Artificial Sequence
  Synthetic oligonucleotide
aggcaagggtgtgcacatatttaaagcaac

SEQ ID NO: 103501 - DNA, 30 bp, Artificial Sequence
  Synthetic oligonucleotide
gaacgtgatatggcgaagtagatcagcaac

SEQ ID NO: 103502 - DNA, 30 bp, Artificial Sequence
  Synthetic oligonucleotide
tcgtaaagccggacactaattacgcgcaac

SEQ ID NO: 103503 - DNA, 30 bp, Artificial Sequence
  Synthetic oligonucleotide
caaatgtgtgacacccctagaaacggcaac

SEQ ID NO: 103504 - DNA, 30 bp, Artificial Sequence
  Synthetic oligonucleotide
tgggaggtaaatatgtcagtgtgatgcaac

SEQ ID NO: 103505 - DNA, 30 bp, Artificial Sequence
  Synthetic oligonucleotide
aatggtgggaggccgtgtcctgactgcaac

SEQ ID NO: 103506 - DNA, 30 bp, Artificial Sequence
  Synthetic oligonucleotide
aaaagatgatggagaaggactagctgcaac

SEQ ID NO: 103507 - DNA, 30 bp, Artificial Sequence
  Synthetic oligonucleotide
gatgtatacgttataggaccaggagtcaac

SEQ ID NO: 103508 - DNA, 30 bp, Artificial Sequence
  Synthetic oligonucleotide
gggagagacccaatatgtacttagttcaac

SEQ ID NO: 103509 - DNA, 30 bp, Artificial Sequence
  Synthetic oligonucleotide
tcaagtggttgcgactgggcaataaagaac

SEQ ID NO: 103510 - DNA, 30 bp, Artificial Sequence
  Synthetic oligonucleotide
tggagtggggaggcgcgagtatagcagaac

SEQ ID NO: 103511 - DNA, 30 bp, Artificial Sequence
  Synthetic oligonucleotide
ctacacggcaacgaacattagggtcagaac

SEQ ID NO: 103512 - DNA, 30 bp, Artificial Sequence
  Synthetic oligonucleotide
cctagggatcaacgggaggaaacagagaac

SEQ ID NO: 103513 - DNA, 30 bp, Artificial Sequence
  Synthetic oligonucleotide
gcgacgcggcgcaaatctagactagagaac

SEQ ID NO: 103514 - DNA, 30 bp, Artificial Sequence
  Synthetic oligonucleotide
ataactgtaccaacggcaaggggcgagaac

SEQ ID NO: 103515 - DNA, 30 bp, Artificial Sequence
  Synthetic oligonucleotide
cgatcatcaaccggaattgaagcatagaac

SEQ ID NO: 103516 - DNA, 30 bp, Artificial Sequence
  Synthetic oligonucleotide
actagtttagttgatacgtgtaggtagaac

SEQ ID NO: 103517 - DNA, 30 bp, Artificial Sequence
  Synthetic oligonucleotide
acgtaacttcttcttccgacaatttagaac

SEQ ID NO: 103518 - DNA, 30 bp, Artificial Sequence
  Synthetic oligonucleotide
gagaacttggtggagcacctgaccacgaac

SEQ ID NO: 103519 - DNA, 30 bp, Artificial Sequence
  Synthetic oligonucleotide
gtgagcagtaagttaggagcatatacgaac

SEQ ID NO: 103520 - DNA, 30 bp, Artificial Sequence
  Synthetic oligonucleotide
ttgttaaaggactggccgggttatacgaac

SEQ ID NO: 103521 - DNA, 30 bp, Artificial Sequence
  Synthetic oligonucleotide
tgaatgcaaatcagagctagacgtacgaac

SEQ ID NO: 103522 - DNA, 30 bp, Artificial Sequence
  Synthetic oligonucleotide
aagggactccttccgctaattcgtacgaac

SEQ ID NO: 103523 - DNA, 30 bp, Artificial Sequence
  Synthetic oligonucleotide
caacaggatcggcgtcactcagtaccgaac

SEQ ID NO: 103524 - DNA, 30 bp, Artificial Sequence
  Synthetic oligonucleotide
tcatacccgtttgaatttgcaagggcgaac

SEQ ID NO: 103525 - DNA, 30 bp, Artificial Sequence
  Synthetic oligonucleotide
tcaggaaactgagcataactctgggcgaac

SEQ ID NO: 103526 - DNA, 30 bp, Artificial Sequence
  Synthetic oligonucleotide
ctcacgcctggagagctccaagttgcgaac

SEQ ID NO: 103527 - DNA, 30 bp, Artificial Sequence
  Synthetic oligonucleotide
tgatcgcacagcaaggtggcacgctcgaac

SEQ ID NO: 103528 - DNA, 30 bp, Artificial Sequence
  Synthetic oligonucleotide
gaactgccctcaaccacatgcacttcgaac

SEQ ID NO: 103529 - DNA, 30 bp, Artificial Sequence
  Synthetic oligonucleotide
agtctgatggcgtccgtgagcgaaaggaac

SEQ ID NO: 103530 - DNA, 30 bp, Artificial Sequence
  Synthetic oligonucleotide
cctgtggctaatgacagcaatgcaaggaac

SEQ ID NO: 103531 - DNA, 30 bp, Artificial Sequence
  Synthetic oligonucleotide
gatcagagtaatctagtgttcctcaggaac

SEQ ID NO: 103532 - DNA, 30 bp, Artificial Sequence
  Synthetic oligonucleotide
aaacggtgacacattagtcggatgcggaac

SEQ ID NO: 103533 - DNA, 30 bp, Artificial Sequence
  Synthetic oligonucleotide
tcaaaccgaccatcatttagaaatcggaac

SEQ ID NO: 103534 - DNA, 30 bp, Artificial Sequence
  Synthetic oligonucleotide
gagctaatcacttaggcacggggagggaac

SEQ ID NO: 103535 - DNA, 30 bp, Artificial Sequence
  Synthetic oligonucleotide
tactcaaatatactcgaagacccggggaac

SEQ ID NO: 103536 - DNA, 30 bp, Artificial Sequence
  Synthetic oligonucleotide
aggcccgaagctcccagccctgtaatgaac

SEQ ID NO: 103537 - DNA, 30 bp, Artificial Sequence
  Synthetic oligonucleotide
cgcttccagatagaggttgacgtgatgaac

SEQ ID NO: 103538 - DNA, 30 bp, Artificial Sequence
  Synthetic oligonucleotide
gctgtactatactggggaaatatggtgaac

SEQ ID NO: 103539 - DNA, 30 bp, Artificial Sequence
  Synthetic oligonucleotide
atcccaacgaagatgagagtatacaataac

SEQ ID NO: 103540 - DNA, 30 bp, Artificial Sequence
  Synthetic oligonucleotide
tgtatgaggacccgatgctcggagaataac

SEQ ID NO: 103541 - DNA, 30 bp, Artificial Sequence
  Synthetic oligonucleotide
ggatatagagggaatggagccaggaataac

SEQ ID NO: 103542 - DNA, 30 bp, Artificial Sequence
  Synthetic oligonucleotide
agtaataaactaacttaggtatggcataac

SEQ ID NO: 103543 - DNA, 30 bp, Artificial Sequence
  Synthetic oligonucleotide
cacgaaatagcatttgtgcgaaatcataac

SEQ ID NO: 103544 - DNA, 30 bp, Artificial Sequence
  Synthetic oligonucleotide
ggtgataatttcggggtgcgagctcataac

SEQ ID NO: 103545 - DNA, 30 bp, Artificial Sequence
  Synthetic oligonucleotide
agaagataatcaagccggtccgttcataac

SEQ ID NO: 103546 - DNA, 30 bp, Artificial Sequence
  Synthetic oligonucleotide
agctcggctcggagcgagtcggtatataac

SEQ ID NO: 103547 - DNA, 30 bp, Artificial Sequence
  Synthetic oligonucleotide
aagaggtccagatagtttgtacccactaac

SEQ ID NO: 103548 - DNA, 30 bp, Artificial Sequence
  Synthetic oligonucleotide
ggacgggacctccgagggtttgtcactaac

SEQ ID NO: 103549 - DNA, 30 bp, Artificial Sequence
  Synthetic oligonucleotide
atgggaaccatagtcagcaagttcactaac

SEQ ID NO: 103550 - DNA, 30 bp, Artificial Sequence
  Synthetic oligonucleotide
cccagatcaattgcatagccaagcgctaac

SEQ ID NO: 103551 - DNA, 30 bp, Artificial Sequence
  Synthetic oligonucleotide
cggccgcaaattcggatgtataattctaac

SEQ ID NO: 103552 - DNA, 30 bp, Artificial Sequence
  Synthetic oligonucleotide
aggacaattgacaggcacaatgcaagtaac

SEQ ID NO: 103553 - DNA, 30 bp, Artificial Sequence
  Synthetic oligonucleotide
cagagagcacctcacgatagaggtagtaac

SEQ ID NO: 103554 - DNA, 30 bp, Artificial Sequence
  Synthetic oligonucleotide
taggacaaaggatcacatctacgacgtaac

SEQ ID NO: 103555 - DNA, 30 bp, Artificial Sequence
  Synthetic oligonucleotide
gacaaaagaccaaaacggaaagcccgtaac

SEQ ID NO: 103556 - DNA, 30 bp, Artificial Sequence
  Synthetic oligonucleotide
gaggacattcgctcatagtggctgcgtaac

SEQ ID NO: 103557 - DNA, 30 bp, Artificial Sequence
  Synthetic oligonucleotide
gtgtcacagtcgtatgttactgtaggtaac

SEQ ID NO: 103558 - DNA, 30 bp, Artificial Sequence
  Synthetic oligonucleotide
cgcgaaccattaaatgtcgcgaccggtaac

SEQ ID NO: 103559 - DNA, 30 bp, Artificial Sequence
  Synthetic oligonucleotide
cagcgaacatggggttcctataggtgtaac

SEQ ID NO: 103560 - DNA, 30 bp, Artificial Sequence
  Synthetic oligonucleotide
tcggtaggtaagcagcttacttggtgtaac

SEQ ID NO: 103561 - DNA, 30 bp, Artificial Sequence
  Synthetic oligonucleotide
ggtaaccaccgcgtagttagggcaattaac

SEQ ID NO: 103562 - DNA, 30 bp, Artificial Sequence
  Synthetic oligonucleotide
cagggtaccaccagaagtacacgcattaac

SEQ ID NO: 103563 - DNA, 30 bp, Artificial Sequence
  Synthetic oligonucleotide
cgttaccgtccactctaaataaaccttaac

SEQ ID NO: 103564 - DNA, 30 bp, Artificial Sequence
  Synthetic oligonucleotide
gacatggctgtgcacgcattgaagcttaac

SEQ ID NO: 103565 - DNA, 30 bp, Artificial Sequence
  Synthetic oligonucleotide
cgtatatacccatcgtggtacaaagttaac

SEQ ID NO: 103566 - DNA, 30 bp, Artificial Sequence
  Synthetic oligonucleotide
acgttcagcggtggtaatgtgccaaaacac

SEQ ID NO: 103567 - DNA, 30 bp, Artificial Sequence
  Synthetic oligonucleotide
tctgagtgcaagtagggggatgttaaacac

SEQ ID NO: 103568 - DNA, 30 bp, Artificial Sequence
  Synthetic oligonucleotide
tccgggcgctgaatactgccacgacaacac

SEQ ID NO: 103569 - DNA, 30 bp, Artificial Sequence
  Synthetic oligonucleotide
cacaggggtatgaacatgggttggcaacac

SEQ ID NO: 103570 - DNA, 30 bp, Artificial Sequence
  Synthetic oligonucleotide
ttaatgacttggttcaaagacaaagaacac

SEQ ID NO: 103571 - DNA, 30 bp, Artificial Sequence
  Synthetic oligonucleotide
gcataggacttccctggatttcctgaacac

SEQ ID NO: 103572 - DNA, 30 bp, Artificial Sequence
  Synthetic oligonucleotide
ggagaaggtaagttagggcgcattgcacac

SEQ ID NO: 103573 - DNA, 30 bp, Artificial Sequence
  Synthetic oligonucleotide
gcgtacaatcgcagtctgaatatgtcacac

SEQ ID NO: 103574 - DNA, 30 bp, Artificial Sequence
  Synthetic oligonucleotide
agaggctttatcggtcacccaaaaagacac

SEQ ID NO: 103575 - DNA, 30 bp, Artificial Sequence
  Synthetic oligonucleotide
gaggagcaataacggcgagggataagacac

SEQ ID NO: 103576 - DNA, 30 bp, Artificial Sequence
  Synthetic oligonucleotide
aaccacgcgttgcttgaagatgtaagacac

SEQ ID NO: 103577 - DNA, 30 bp, Artificial Sequence
  Synthetic oligonucleotide
tcacctaacgagagctaggaatacagacac

SEQ ID NO: 103578 - DNA, 30 bp, Artificial Sequence
  Synthetic oligonucleotide
aacataggtggtcttatcgtccccagacac

SEQ ID NO: 103579 - DNA, 30 bp, Artificial Sequence
  Synthetic oligonucleotide
gacacattgcggggtgcagtccaacgacac

SEQ ID NO: 103580 - DNA, 31 bp, Artificial Sequence
  Synthetic oligonucleotide
tcttcaagacatctcggtcgaaacacgacac

SEQ ID NO: 103581 - DNA, 30 bp, Artificial Sequence
  Synthetic oligonucleotide
aatcggtaaataccctagccattgcgacac

SEQ ID NO: 103582 - DNA, 30 bp, Artificial Sequence
  Synthetic oligonucleotide
tgtaggccacacatgcggttacgaggacac

SEQ ID NO: 103583 - DNA, 30 bp, Artificial Sequence
  Synthetic oligonucleotide
gccatgccgagtacgacaaaatggggacac

SEQ ID NO: 103584 - DNA, 30 bp, Artificial Sequence
  Synthetic oligonucleotide
acacacggaaggaggcctcttatgggacac

SEQ ID NO: 103585 - DNA, 30 bp, Artificial Sequence
  Synthetic oligonucleotide
atcgatgaggacccaatccgctcctgacac

SEQ ID NO: 103586 - DNA, 30 bp, Artificial Sequence
  Synthetic oligonucleotide
agtaggggttaaggccacggctcctgacac

SEQ ID NO: 103587 - DNA, 30 bp, Artificial Sequence
  Synthetic oligonucleotide
tcttgtccaagtagaccgttgcgcatacac

SEQ ID NO: 103588 - DNA, 30 bp, Artificial Sequence
  Synthetic oligonucleotide
atggattgaaaagaagttctttagatacac

SEQ ID NO: 103589 - DNA, 30 bp, Artificial Sequence
  Synthetic oligonucleotide
acctatcaaactcgtcacggagggatacac

SEQ ID NO: 103590 - DNA, 30 bp, Artificial Sequence
  Synthetic oligonucleotide
taggagctacacgttgcaaatcgactacac

SEQ ID NO: 103591 - DNA, 30 bp, Artificial Sequence
  Synthetic oligonucleotide
ccggacgcttaaaccagcatcatactacac

SEQ ID NO: 103592 - DNA, 25 bp, Artificial Sequence
  Synthetic oligonucleotide
aaccgtaatagacatttaagtacac

SEQ ID NO: 103593 - DNA, 30 bp, Artificial Sequence
  Synthetic oligonucleotide
tggtctagtacccaccgatcaaccgtacac

SEQ ID NO: 103594 - DNA, 30 bp, Artificial Sequence
  Synthetic oligonucleotide
gtcaggtagagagaatggttacgcgtacac

SEQ ID NO: 103595 - DNA, 30 bp, Artificial Sequence
  Synthetic oligonucleotide
ctacgatgatcaggtatgaaatgtgtacac

SEQ ID NO: 103596 - DNA, 30 bp, Artificial Sequence
  Synthetic oligonucleotide
tcggtctgggggatgtgcccatgtgtacac

SEQ ID NO: 103597 - DNA, 30 bp, Artificial Sequence
  Synthetic oligonucleotide
tgggccaggaagagggaatggtcattacac

SEQ ID NO: 103598 - DNA, 30 bp, Artificial Sequence
  Synthetic oligonucleotide
tgcgttaagaaaattggagtgcgtaaccac

SEQ ID NO: 103599 - DNA, 30 bp, Artificial Sequence
  Synthetic oligonucleotide
cgcttcgcgagaactagcgtcggtcaccac

SEQ ID NO: 103600 - DNA, 30 bp, Artificial Sequence
  Synthetic oligonucleotide
taggacgtaaccgactggttaccagaccac

SEQ ID NO: 103601 - DNA, 30 bp, Artificial Sequence
  Synthetic oligonucleotide
gcgtgtccgctaactccgaggaaggaccac

SEQ ID NO: 103602 - DNA, 30 bp, Artificial Sequence
  Synthetic oligonucleotide
ggctatccgggcacggcaaagaggacccac

SEQ ID NO: 103603 - DNA, 30 bp, Artificial Sequence
  Synthetic oligonucleotide
aacagggagggtgcagaagtggtaccccac

SEQ ID NO: 103604 - DNA, 30 bp, Artificial Sequence
  Synthetic oligonucleotide
taaatgtcacagctcataactagcccccac

SEQ ID NO: 103605 - DNA, 30 bp, Artificial Sequence
  Synthetic oligonucleotide
tacgggacgggcaagactctggccgcccac

SEQ ID NO: 103606 - DNA, 30 bp, Artificial Sequence
  Synthetic oligonucleotide
agaggacgggatttccctcatgcggcccac

SEQ ID NO: 103607 - DNA, 30 bp, Artificial Sequence
  Synthetic oligonucleotide
tcgggcggactgtgcatgaggtttgcccac

SEQ ID NO: 103608 - DNA, 30 bp, Artificial Sequence
  Synthetic oligonucleotide
ggtgcgcatacaagcagaaattaaagccac

SEQ ID NO: 103609 - DNA, 30 bp, Artificial Sequence
  Synthetic oligonucleotide
catcgttgcataagggtgattagcagccac

SEQ ID NO: 103610 - DNA, 30 bp, Artificial Sequence
  Synthetic oligonucleotide
ccgcaaaattagcagggggctaagagccac

SEQ ID NO: 103611 - DNA, 30 bp, Artificial Sequence
  Synthetic oligonucleotide
tctccaataaactacgtaccaacacgccac

SEQ ID NO: 103612 - DNA, 30 bp, Artificial Sequence
  Synthetic oligonucleotide
agaacagaactaagagataaagcacgccac

SEQ ID NO: 103613 - DNA, 30 bp, Artificial Sequence
  Synthetic oligonucleotide
cgtgagcaactgacgaaggtcaggcgccac

SEQ ID NO: 103614 - DNA, 30 bp, Artificial Sequence
  Synthetic oligonucleotide
cggtcagctcattggttagcgagtcgccac

SEQ ID NO: 103615 - DNA, 30 bp, Artificial Sequence
  Synthetic oligonucleotide
cagcaaagcgagagtcagggcgccggccac

SEQ ID NO: 103616 - DNA, 30 bp, Artificial Sequence
  Synthetic oligonucleotide
tgtctgtccaacgtcgtgtatctcggccac

SEQ ID NO: 103617 - DNA, 30 bp, Artificial Sequence
  Synthetic oligonucleotide
agctcatcaaatacgaatggatcatgccac

SEQ ID NO: 103618 - DNA, 30 bp, Artificial Sequence
  Synthetic oligonucleotide
cttgctgggaaatacaaaagctcgtgccac

SEQ ID NO: 103619 - DNA, 30 bp, Artificial Sequence
  Synthetic oligonucleotide
gaggggagtcatctaccttaggtaatccac

SEQ ID NO: 103620 - DNA, 30 bp, Artificial Sequence
  Synthetic oligonucleotide
gataagactgcttaccgtccgaccatccac

SEQ ID NO: 103621 - DNA, 30 bp, Artificial Sequence
  Synthetic oligonucleotide
ccagggccagcacaaaggatcttcatccac

SEQ ID NO: 103622 - DNA, 30 bp, Artificial Sequence
  Synthetic oligonucleotide
gtcatccggattcaagaccagctactccac

SEQ ID NO: 103623 - DNA, 30 bp, Artificial Sequence
  Synthetic oligonucleotide
tcacctacttcaaccacagtgttgctccac

SEQ ID NO: 103624 - DNA, 30 bp, Artificial Sequence
  Synthetic oligonucleotide
ggcactcgggttcgattcgatatagtccac

SEQ ID NO: 103625 - DNA, 30 bp, Artificial Sequence
  Synthetic oligonucleotide
ggcaaggaacgaatataatggattgtccac

SEQ ID NO: 103626 - DNA, 30 bp, Artificial Sequence
  Synthetic oligonucleotide
tagagcatggtcacgagtgctataaagcac

SEQ ID NO: 103627 - DNA, 30 bp, Artificial Sequence
  Synthetic oligonucleotide
acaggcgactcggacaacgggcctaagcac

SEQ ID NO: 103628 - DNA, 30 bp, Artificial Sequence
  Synthetic oligonucleotide
taagtacgagtacgttatagaatagagcac

SEQ ID NO: 103629 - DNA, 30 bp, Artificial Sequence
  Synthetic oligonucleotide
caatatgagatctactacggacccgagcac

SEQ ID NO: 103630 - DNA, 30 bp, Artificial Sequence
  Synthetic oligonucleotide
tgtacactgagatggctaaggtctgagcac

SEQ ID NO: 103631 - DNA, 30 bp, Artificial Sequence
  Synthetic oligonucleotide
gtattcagatgttcgagacagacctagcac

SEQ ID NO: 103632 - DNA, 30 bp, Artificial Sequence
  Synthetic oligonucleotide
atgtcagggccagcaaataatcaaacgcac

SEQ ID NO: 103633 - DNA, 30 bp, Artificial Sequence
  Synthetic oligonucleotide
actaggaaatttgtccaattgtgcacgcac

SEQ ID NO: 103634 - DNA, 30 bp, Artificial Sequence
  Synthetic oligonucleotide
caactccgaagtgtcatcagtggtacgcac

SEQ ID NO: 103635 - DNA, 30 bp, Artificial Sequence
  Synthetic oligonucleotide
atgcgcgaaccgtttgacaaataagcgcac

SEQ ID NO: 103636 - DNA, 30 bp, Artificial Sequence
  Synthetic oligonucleotide
gccgttgggtagttgaagataggagcgcac

SEQ ID NO: 103637 - DNA, 30 bp, Artificial Sequence
  Synthetic oligonucleotide
cgcgatacgtagggttccacttaatcgcac

SEQ ID NO: 103638 - DNA, 30 bp, Artificial Sequence
  Synthetic oligonucleotide
gaacggcaatggaatagtatagactcgcac

SEQ ID NO: 103639 - DNA, 30 bp, Artificial Sequence
  Synthetic oligonucleotide
ggattggcctaggtagagcctgtgtcgcac

SEQ ID NO: 103640 - DNA, 30 bp, Artificial Sequence
  Synthetic oligonucleotide
gctaaatatgctggttctgtagaaaggcac

SEQ ID NO: 103641 - DNA, 30 bp, Artificial Sequence
  Synthetic oligonucleotide
cctcacttaactccggagggattacggcac

SEQ ID NO: 103642 - DNA, 30 bp, Artificial Sequence
  Synthetic oligonucleotide
ggtaacgggcataccggagtgtgccggcac

SEQ ID NO: 103643 - DNA, 30 bp, Artificial Sequence
  Synthetic oligonucleotide
cgtcccaccgtacatcggtaaggagggcac

SEQ ID NO: 103644 - DNA, 30 bp, Artificial Sequence
  Synthetic oligonucleotide
tctgtactcgtcagaaggatcgtagggcac

SEQ ID NO: 103645 - DNA, 30 bp, Artificial Sequence
  Synthetic oligonucleotide
gtctccaatggatctagtggggcggggcac

SEQ ID NO: 103646 - DNA, 30 bp, Artificial Sequence
  Synthetic oligonucleotide
cgctatcacttgattgtggaccaatggcac

SEQ ID NO: 103647 - DNA, 30 bp, Artificial Sequence
  Synthetic oligonucleotide
ttgaaccaagaactcagaaaagggtggcac

SEQ ID NO: 103648 - DNA, 30 bp, Artificial Sequence
  Synthetic oligonucleotide
cgtagcacaaacgctacaaatgggatgcac

SEQ ID NO: 103649 - DNA, 30 bp, Artificial Sequence
  Synthetic oligonucleotide
tggcctcaggctatcaaataatcactgcac

SEQ ID NO: 103650 - DNA, 30 bp, Artificial Sequence
  Synthetic oligonucleotide
tcgtcgcgccacccacgtagacgtctgcac

SEQ ID NO: 103651 - DNA, 30 bp, Artificial Sequence
  Synthetic oligonucleotide
tggaccgactggaatcttacctgcgtgcac

SEQ ID NO: 103652 - DNA, 30 bp, Artificial Sequence
  Synthetic oligonucleotide
ggggtgggcacagactacatgcatttgcac

SEQ ID NO: 103653 - DNA, 30 bp, Artificial Sequence
  Synthetic oligonucleotide
gctacgggcgcctccacgagactaaatcac

SEQ ID NO: 103654 - DNA, 30 bp, Artificial Sequence
  Synthetic oligonucleotide
tcacatacttcgccttgattagaacatcac

SEQ ID NO: 103655 - DNA, 30 bp, Artificial Sequence
  Synthetic oligonucleotide
cagggtagcagtcacgacactcgccatcac

SEQ ID NO: 103656 - DNA, 30 bp, Artificial Sequence
  Synthetic oligonucleotide
catgcgaggggcactagcacactagatcac

SEQ ID NO: 103657 - DNA, 30 bp, Artificial Sequence
  Synthetic oligonucleotide
gtgcgggcataatcgttcagggtagatcac

SEQ ID NO: 103658 - DNA, 30 bp, Artificial Sequence
  Synthetic oligonucleotide
cgagggtaaagctgcagtcttgccgatcac

SEQ ID NO: 103659 - DNA, 30 bp, Artificial Sequence
  Synthetic oligonucleotide
ggacgctggtatggaaagttaagcgatcac

SEQ ID NO: 103660 - DNA, 30 bp, Artificial Sequence
  Synthetic oligonucleotide
ctagtatattcacaaggattagattatcac

SEQ ID NO: 103661 - DNA, 30 bp, Artificial Sequence
  Synthetic oligonucleotide
cttgggagaagagccaggattacaactcac

SEQ ID NO: 103662 - DNA, 30 bp, Artificial Sequence
  Synthetic oligonucleotide
atcaggtagtggtaaagaaaatgtactcac

SEQ ID NO: 103663 - DNA, 30 bp, Artificial Sequence
  Synthetic oligonucleotide
cgttctctgtatctgcgaaaacgacctcac

SEQ ID NO: 103664 - DNA, 30 bp, Artificial Sequence
  Synthetic oligonucleotide
ttcatccgtgcggccaatctcctagctcac

SEQ ID NO: 103665 - DNA, 30 bp, Artificial Sequence
  Synthetic oligonucleotide
gggacaccaataaccatcaaaacatctcac

SEQ ID NO: 103666 - DNA, 30 bp, Artificial Sequence
  Synthetic oligonucleotide
atcggatgagataggagaaagtccagtcac

SEQ ID NO: 103667 - DNA, 30 bp, Artificial Sequence
  Synthetic oligonucleotide
cggtcatggcatccacctgacggtagtcac

SEQ ID NO: 103668 - DNA, 30 bp, Artificial Sequence
  Synthetic oligonucleotide
cgacgcttagtcgatccgagacaacgtcac

SEQ ID NO: 103669 - DNA, 30 bp, Artificial Sequence
  Synthetic oligonucleotide
taactaagtaacacttcgtaacaaggtcac

SEQ ID NO: 103670 - DNA, 30 bp, Artificial Sequence
  Synthetic oligonucleotide
cgagtgtgcttctcgctccgagtaggtcac

SEQ ID NO: 103671 - DNA, 30 bp, Artificial Sequence
  Synthetic oligonucleotide
tcgaaacttgagatagccgttaaatgtcac

SEQ ID NO: 103672 - DNA, 30 bp, Artificial Sequence
  Synthetic oligonucleotide
cagccagagtagcatgaagttcaatgtcac

SEQ ID NO: 103673 - DNA, 30 bp, Artificial Sequence
  Synthetic oligonucleotide
aggtgacggtgactcagtgtaacatgtcac

SEQ ID NO: 103674 - DNA, 30 bp, Artificial Sequence
  Synthetic oligonucleotide
tacgggtaaacactagcagtggtatgtcac

SEQ ID NO: 103675 - DNA, 30 bp, Artificial Sequence
  Synthetic oligonucleotide
cgcggcaatagcccaaatcgcgactgtcac

SEQ ID NO: 103676 - DNA, 30 bp, Artificial Sequence
  Synthetic oligonucleotide
cagagggtctaattacgaaatctctgtcac

SEQ ID NO: 103677 - DNA, 30 bp, Artificial Sequence
  Synthetic oligonucleotide
tgtctcagaccgtcgaattcaaggtgtcac

SEQ ID NO: 103678 - DNA, 30 bp, Artificial Sequence
  Synthetic oligonucleotide
gcgtgagattcagccattattgcgcttcac

SEQ ID NO: 103679 - DNA, 30 bp, Artificial Sequence
  Synthetic oligonucleotide
tggggggcaaacgagccaggccaggttcac

SEQ ID NO: 103680 - DNA, 34 bp, Artificial Sequence
  Synthetic oligonucleotide
gatactagaccaccatgtgtccatcagaaaagac

SEQ ID NO: 103681 - DNA, 30 bp, Artificial Sequence
  Synthetic oligonucleotide
tttggcgatcagtgaattacaaacaaagac

SEQ ID NO: 103682 - DNA, 30 bp, Artificial Sequence
  Synthetic oligonucleotide
gagagagggtttatcctattcgagaaagac

SEQ ID NO: 103683 - DNA, 30 bp, Artificial Sequence
  Synthetic oligonucleotide
cgaagtgcgttaacaagtctcaggaaagac

SEQ ID NO: 103684 - DNA, 30 bp, Artificial Sequence
  Synthetic oligonucleotide
atccaccgccagggaaagactgtgaaagac

SEQ ID NO: 103685 - DNA, 30 bp, Artificial Sequence
  Synthetic oligonucleotide
atcggcaaaagaggacgcaggatagaagac

SEQ ID NO: 103686 - DNA, 30 bp, Artificial Sequence
  Synthetic oligonucleotide
agatggcgtagtctaggaaaagtcgaagac

SEQ ID NO: 103687 - DNA, 30 bp, Artificial Sequence
  Synthetic oligonucleotide
taggcacatcgaaccagtagattataagac

SEQ ID NO: 103688 - DNA, 30 bp, Artificial Sequence
  Synthetic oligonucleotide
gacttacacatggaccgctaagaaacagac

SEQ ID NO: 103689 - DNA, 30 bp, Artificial Sequence
  Synthetic oligonucleotide
tacatgagaacgtgggccaatgtaccagac

SEQ ID NO: 103690 - DNA, 30 bp, Artificial Sequence
  Synthetic oligonucleotide
tatgactacgtggccataacgagcccagac

SEQ ID NO: 103691 - DNA, 30 bp, Artificial Sequence
  Synthetic oligonucleotide
aaagcgaacacactgacttgttcgccagac

SEQ ID NO: 103692 - DNA, 30 bp, Artificial Sequence
  Synthetic oligonucleotide
aatgtcggggtagatcaagtaggtccagac

SEQ ID NO: 103693 - DNA, 30 bp, Artificial Sequence
  Synthetic oligonucleotide
tgttcgcgatgccagggccacattccagac

SEQ ID NO: 103694 - DNA, 30 bp, Artificial Sequence
  Synthetic oligonucleotide
tgcaccgagttaatgcatgggctagcagac

SEQ ID NO: 103695 - DNA, 30 bp, Artificial Sequence
  Synthetic oligonucleotide
gctgccaacacgaactggggaagtgcagac

SEQ ID NO: 103696 - DNA, 30 bp, Artificial Sequence
  Synthetic oligonucleotide
agagtgattccgtcgaacggaacgtcagac

SEQ ID NO: 103697 - DNA, 30 bp, Artificial Sequence
  Synthetic oligonucleotide
ggggtagtccaggatatttatgcgtcagac

SEQ ID NO: 103698 - DNA, 30 bp, Artificial Sequence
  Synthetic oligonucleotide
cctttgttaagaaggtggagagcaagagac

SEQ ID NO: 103699 - DNA, 30 bp, Artificial Sequence
  Synthetic oligonucleotide
atagtaaccggggtctgcctaatgagagac

SEQ ID NO: 103700 - DNA, 30 bp, Artificial Sequence
  Synthetic oligonucleotide
actatcatggaaagggctaccactagagac

SEQ ID NO: 103701 - DNA, 30 bp, Artificial Sequence
  Synthetic oligonucleotide
ggatagacctctcgagtaagcagacgagac

SEQ ID NO: 103702 - DNA, 30 bp, Artificial Sequence
  Synthetic oligonucleotide
caaggacgcactatcacccaccatcgagac

SEQ ID NO: 103703 - DNA, 30 bp, Artificial Sequence
  Synthetic oligonucleotide
ctaggaagatttttgataaggaaaggagac

SEQ ID NO: 103704 - DNA, 30 bp, Artificial Sequence
  Synthetic oligonucleotide
ccataggaactaagaccactaactggagac

SEQ ID NO: 103705 - DNA, 30 bp, Artificial Sequence
  Synthetic oligonucleotide
gtcagtaagtcgcataccgggagctgagac

SEQ ID NO: 103706 - DNA, 30 bp, Artificial Sequence
  Synthetic oligonucleotide
agacggctttcttaaaggccacagtgagac

SEQ ID NO: 103707 - DNA, 30 bp, Artificial Sequence
  Synthetic oligonucleotide
acgaaagcatgcatccagtccgcaatagac

SEQ ID NO: 103708 - DNA, 30 bp, Artificial Sequence
  Synthetic oligonucleotide
cgactctgcgatggcgtgaatgtactagac

SEQ ID NO: 103709 - DNA, 30 bp, Artificial Sequence
  Synthetic oligonucleotide
agaactctattggggcgagttaaagtagac

SEQ ID NO: 103710 - DNA, 30 bp, Artificial Sequence
  Synthetic oligonucleotide
ccaggataacacacatgtgcgctagtagac

SEQ ID NO: 103711 - DNA, 30 bp, Artificial Sequence
  Synthetic oligonucleotide
agtgaaacttaatcttcagagaccaacgac

SEQ ID NO: 103712 - DNA, 30 bp, Artificial Sequence
  Synthetic oligonucleotide
aatggtcggccgaaggtcgaaaggaacgac

SEQ ID NO: 103713 - DNA, 30 bp, Artificial Sequence
  Synthetic oligonucleotide
accggcaagctcgagaaatctgataacgac

SEQ ID NO: 103714 - DNA, 30 bp, Artificial Sequence
  Synthetic oligonucleotide
gaatcactcggcggtgcgcgaatgcacgac

SEQ ID NO: 103715 - DNA, 30 bp, Artificial Sequence
  Synthetic oligonucleotide
acaacaattcggaaaagcatggaagacgac

SEQ ID NO: 103716 - DNA, 30 bp, Artificial Sequence
  Synthetic oligonucleotide
aggtcacaagtcgaacagaaagacgacgac

SEQ ID NO: 103717 - DNA, 30 bp, Artificial Sequence
  Synthetic oligonucleotide
gtcacggtttgacgtcagactgaggacgac

SEQ ID NO: 103718 - DNA, 30 bp, Artificial Sequence
  Synthetic oligonucleotide
agctggaatagtcattccatctgggacgac

SEQ ID NO: 103719 - DNA, 30 bp, Artificial Sequence
  Synthetic oligonucleotide
gatgacgggcatattgacgatagtgacgac

SEQ ID NO: 103720 - DNA, 30 bp, Artificial Sequence
  Synthetic oligonucleotide
attagcttggactcgctattcgagtacgac

SEQ ID NO: 103721 - DNA, 29 bp, Artificial Sequence
  Synthetic oligonucleotide
gccgagatcattaatacccttataccgac

SEQ ID NO: 103722 - DNA, 30 bp, Artificial Sequence
  Synthetic oligonucleotide
cggcagttgaagactccaggaaaacccgac

SEQ ID NO: 103723 - DNA, 30 bp, Artificial Sequence
  Synthetic oligonucleotide
caaagcggtggtcacctccgaagagccgac

SEQ ID NO: 103724 - DNA, 30 bp, Artificial Sequence
  Synthetic oligonucleotide
aatgggcatagtttcactatagcggccgac

SEQ ID NO: 103725 - DNA, 30 bp, Artificial Sequence
  Synthetic oligonucleotide
ccggcaacacccctagatctatgggccgac

SEQ ID NO: 103726 - DNA, 30 bp, Artificial Sequence
  Synthetic oligonucleotide
accgatagcgccaaagtacacgctgccgac

SEQ ID NO: 103727 - DNA, 30 bp, Artificial Sequence
  Synthetic oligonucleotide
tccagggcgtgggacaatatgtttgccgac

SEQ ID NO: 103728 - DNA, 30 bp, Artificial Sequence
  Synthetic oligonucleotide
tgcatccagactaacgagacaaggtccgac

SEQ ID NO: 103729 - DNA, 30 bp, Artificial Sequence
  Synthetic oligonucleotide
tccgggatgtttgccgacatggggtccgac

SEQ ID NO: 103730 - DNA, 30 bp, Artificial Sequence
  Synthetic oligonucleotide
gcacgagcttgccgaacttatagttccgac

SEQ ID NO: 103731 - DNA, 30 bp, Artificial Sequence
  Synthetic oligonucleotide
tgatgacatgcggagtgtagtcgttccgac

SEQ ID NO: 103732 - DNA, 30 bp, Artificial Sequence
  Synthetic oligonucleotide
agatcgttagagttccggtgcggtagcgac

SEQ ID NO: 103733 - DNA, 30 bp, Artificial Sequence
  Synthetic oligonucleotide
gggaattggcctataaagaggaacggcgac

SEQ ID NO: 103734 - DNA, 30 bp, Artificial Sequence
  Synthetic oligonucleotide
tgtcctaagcccgtattggtcaggggcgac

SEQ ID NO: 103735 - DNA, 30 bp, Artificial Sequence
  Synthetic oligonucleotide
tggggaggatcttggaagatagatggcgac

SEQ ID NO: 103736 - DNA, 30 bp, Artificial Sequence
  Synthetic oligonucleotide
cgtgccgtctgtaaaaattgtgtgtgcgac

SEQ ID NO: 103737 - DNA, 30 bp, Artificial Sequence
  Synthetic oligonucleotide
cctcgttagtgaccccgagaagcttgcgac

SEQ ID NO: 103738 - DNA, 30 bp, Artificial Sequence
  Synthetic oligonucleotide
ccgtgatacctcaattaagccaacatcgac

SEQ ID NO: 103739 - DNA, 30 bp, Artificial Sequence
  Synthetic oligonucleotide
gtatcgccatattcattaaagagcatcgac

SEQ ID NO: 103740 - DNA, 30 bp, Artificial Sequence
  Synthetic oligonucleotide
aagcacgtgcgccgacgacgagccctcgac

SEQ ID NO: 103741 - DNA, 30 bp, Artificial Sequence
  Synthetic oligonucleotide
aatgtttaggaacagtagtagcgcgtcgac

SEQ ID NO: 103742 - DNA, 30 bp, Artificial Sequence
  Synthetic oligonucleotide
gaacaaatgtgagggttggaccctgtcgac

SEQ ID NO: 103743 - DNA, 30 bp, Artificial Sequence
  Synthetic oligonucleotide
gcgttaacgtggagcagaacaaagttcgac

SEQ ID NO: 103744 - DNA, 30 bp, Artificial Sequence
  Synthetic oligonucleotide
aaaagcaactggtgcaaataggtgttcgac

SEQ ID NO: 103745 - DNA, 30 bp, Artificial Sequence
  Synthetic oligonucleotide
cgagtttagcggcgagttggcacgaaggac

SEQ ID NO: 103746 - DNA, 30 bp, Artificial Sequence
  Synthetic oligonucleotide
gttggagtctagaatttaaaccgtgaggac

SEQ ID NO: 103747 - DNA, 30 bp, Artificial Sequence
  Synthetic oligonucleotide
tagaaggcaggcacggaaatcgtttaggac

SEQ ID NO: 103748 - DNA, 30 bp, Artificial Sequence
  Synthetic oligonucleotide
gggcgactgatcaatagtagctacacggac

SEQ ID NO: 103749 - DNA, 30 bp, Artificial Sequence
  Synthetic oligonucleotide
tcatcgtaggctcgttaatgttgaccggac

SEQ ID NO: 103750 - DNA, 30 bp, Artificial Sequence
  Synthetic oligonucleotide
ccgtgagacactagtagagccggcccggac

SEQ ID NO: 103751 - DNA, 30 bp, Artificial Sequence
  Synthetic oligonucleotide
attattaaggaaaactagcatcctgcggac

SEQ ID NO: 103752 - DNA, 30 bp, Artificial Sequence
  Synthetic oligonucleotide
tgagatctaacgcatgggcaatgtgcggac

SEQ ID NO: 103753 - DNA, 30 bp, Artificial Sequence
  Synthetic oligonucleotide
catgccggcccccacagacgagttgcggac

SEQ ID NO: 103754 - DNA, 30 bp, Artificial Sequence
  Synthetic oligonucleotide
agtagccaaatgatatagcgttcatcggac

SEQ ID NO: 103755 - DNA, 30 bp, Artificial Sequence
  Synthetic oligonucleotide
cttaccacacttcccaacaatgagtcggac

SEQ ID NO: 103756 - DNA, 30 bp, Artificial Sequence
  Synthetic oligonucleotide
tatggaccgctgtacacggagacaagggac

SEQ ID NO: 103757 - DNA, 30 bp, Artificial Sequence
  Synthetic oligonucleotide
taacaggaaatgcgttactttcacagggac

SEQ ID NO: 103758 - DNA, 30 bp, Artificial Sequence
  Synthetic oligonucleotide
ggggcgcatggccgatacctagtcagggac

SEQ ID NO: 103759 - DNA, 30 bp, Artificial Sequence
  Synthetic oligonucleotide
cgggctaaagacgcgacagacgagagggac

SEQ ID NO: 103760 - DNA, 30 bp, Artificial Sequence
  Synthetic oligonucleotide
gatcaacgtcaacacacgggggatagggac

SEQ ID NO: 103761 - DNA, 30 bp, Artificial Sequence
  Synthetic oligonucleotide
agcactggtatcgttatagttactcgggac

SEQ ID NO: 103762 - DNA, 30 bp, Artificial Sequence
  Synthetic oligonucleotide
cgtcccaccttactaagcttagccggggac

SEQ ID NO: 103763 - DNA, 30 bp, Artificial Sequence
  Synthetic oligonucleotide
tcgggagacagcgtgcaatcgtagggggac

SEQ ID NO: 103764 - DNA, 30 bp, Artificial Sequence
  Synthetic oligonucleotide
tgggtccataatgtatgagcaaatggggac

SEQ ID NO: 103765 - DNA, 30 bp, Artificial Sequence
  Synthetic oligonucleotide
gatccgacgagaatacggagtcgtggggac

SEQ ID NO: 103766 - DNA, 30 bp, Artificial Sequence
  Synthetic oligonucleotide
gttggattgcgggcgtatcttgccatggac

SEQ ID NO: 103767 - DNA, 30 bp, Artificial Sequence
  Synthetic oligonucleotide
gagctgtacgcgaactcaaaagttctggac

SEQ ID NO: 103768 - DNA, 30 bp, Artificial Sequence
  Synthetic oligonucleotide
ctagaccgcaggataatgtagcaagtggac

SEQ ID NO: 103769 - DNA, 30 bp, Artificial Sequence
  Synthetic oligonucleotide
tccagtaacgtaattacactaaatgtggac

SEQ ID NO: 103770 - DNA, 30 bp, Artificial Sequence
  Synthetic oligonucleotide
tgggacataagaaacacggcgagtttggac

SEQ ID NO: 103771 - DNA, 30 bp, Artificial Sequence
  Synthetic oligonucleotide
cgaacacgcaagttatttttgaaaaatgac

SEQ ID NO: 103772 - DNA, 30 bp, Artificial Sequence
  Synthetic oligonucleotide
cggacaatgtattaaggccgggcaaatgac

SEQ ID NO: 103773 - DNA, 30 bp, Artificial Sequence
  Synthetic oligonucleotide
tcggcttggcagactcatcctcgaaatgac

SEQ ID NO: 103774 - DNA, 30 bp, Artificial Sequence
  Synthetic oligonucleotide
aagtgaagagcaagttgctaaattaatgac

SEQ ID NO: 103775 - DNA, 30 bp, Artificial Sequence
  Synthetic oligonucleotide
ggaaggggtcagaagattacaggccatgac

SEQ ID NO: 103776 - DNA, 30 bp, Artificial Sequence
  Synthetic oligonucleotide
ggttagaagggaccgtacggaatctatgac

SEQ ID NO: 103777 - DNA, 30 bp, Artificial Sequence
  Synthetic oligonucleotide
gctgcaaggtggcaataactcatctatgac

SEQ ID NO: 103778 - DNA, 30 bp, Artificial Sequence
  Synthetic oligonucleotide
agcggctagtgtccctggtctacgtatgac

SEQ ID NO: 103779 - DNA, 30 bp, Artificial Sequence
  Synthetic oligonucleotide
gtatatgattctgagccaaaagggtatgac

SEQ ID NO: 103780 - DNA, 30 bp, Artificial Sequence
  Synthetic oligonucleotide
agaggtgtccgacgccaacaagagactgac

SEQ ID NO: 103781 - DNA, 30 bp, Artificial Sequence
  Synthetic oligonucleotide
agggagtcgagcgcacataatgatactgac

SEQ ID NO: 103782 - DNA, 30 bp, Artificial Sequence
  Synthetic oligonucleotide
agaaccggacatactctggctattactgac

SEQ ID NO: 103783 - DNA, 30 bp, Artificial Sequence
  Synthetic oligonucleotide
ccgatttgtaaggtcgaataatatcctgac

SEQ ID NO: 103784 - DNA, 30 bp, Artificial Sequence
  Synthetic oligonucleotide
cgattgtgcggacataaaccgcttcctgac

SEQ ID NO: 103785 - DNA, 30 bp, Artificial Sequence
  Synthetic oligonucleotide
actggcaacggcgcgctacgtcgagctgac

SEQ ID NO: 103786 - DNA, 30 bp, Artificial Sequence
  Synthetic oligonucleotide
ggatcataatatgcaaggctagccgctgac

SEQ ID NO: 103787 - DNA, 30 bp, Artificial Sequence
  Synthetic oligonucleotide
agcacgtgtaaggcgtctgaaatatctgac

SEQ ID NO: 103788 - DNA, 30 bp, Artificial Sequence
  Synthetic oligonucleotide
tacagtacctagagtatctggctgtctgac

SEQ ID NO: 103789 - DNA, 30 bp, Artificial Sequence
  Synthetic oligonucleotide
cgtattccggtaatcatcgcgcacagtgac

SEQ ID NO: 103790 - DNA, 30 bp, Artificial Sequence
  Synthetic oligonucleotide
ccaatgctgtagtaatacaagatacgtgac

SEQ ID NO: 103791 - DNA, 30 bp, Artificial Sequence
  Synthetic oligonucleotide
ttcagcagtttaatttaagagaagcgtgac

SEQ ID NO: 103792 - DNA, 30 bp, Artificial Sequence
  Synthetic oligonucleotide
tgtctaaaaggtgggttaggttgtcgtgac

SEQ ID NO: 103793 - DNA, 30 bp, Artificial Sequence
  Synthetic oligonucleotide
ttaccggcgagaggcctcagagaaggtgac

SEQ ID NO: 103794 - DNA, 30 bp, Artificial Sequence
  Synthetic oligonucleotide
tcttgtcacattgcaaaactatacggtgac

SEQ ID NO: 103795 - DNA, 30 bp, Artificial Sequence
  Synthetic oligonucleotide
tgataacgttaatccgatggttagggtgac

SEQ ID NO: 103796 - DNA, 30 bp, Artificial Sequence
  Synthetic oligonucleotide
tcataaggggaagctcatacatggggtgac

SEQ ID NO: 103797 - DNA, 30 bp, Artificial Sequence
  Synthetic oligonucleotide
ggccgggtgaacgttagatagtggtgtgac

SEQ ID NO: 103798 - DNA, 30 bp, Artificial Sequence
  Synthetic oligonucleotide
tacagggaagtgttatcaaagtgacttgac

SEQ ID NO: 103799 - DNA, 30 bp, Artificial Sequence
  Synthetic oligonucleotide
ttgcatagtaagtgggaagaattgtttgac

SEQ ID NO: 103800 - DNA, 30 bp, Artificial Sequence
  Synthetic oligonucleotide
gtcatgaggctgaggaaccggcgaaaatac

SEQ ID NO: 103801 - DNA, 30 bp, Artificial Sequence
  Synthetic oligonucleotide
gataggagacgggacagtgagacgaaatac

SEQ ID NO: 103802 - DNA, 30 bp, Artificial Sequence
  Synthetic oligonucleotide
tgtgaggcatctaacgggtacaaacaatac

SEQ ID NO: 103803 - DNA, 30 bp, Artificial Sequence
  Synthetic oligonucleotide
cagccaaaaaagtgctccgggtgacaatac

SEQ ID NO: 103804 - DNA, 30 bp, Artificial Sequence
  Synthetic oligonucleotide
tatcgattggcaccacgaagcggggaatac

SEQ ID NO: 103805 - DNA, 30 bp, Artificial Sequence
  Synthetic oligonucleotide
ctgagggccgcaaacaccacagctgaatac

SEQ ID NO: 103806 - DNA, 31 bp, Artificial Sequence
  Synthetic oligonucleotide
ctgccgccgcgtggagacgaattcttaatac

SEQ ID NO: 103807 - DNA, 30 bp, Artificial Sequence
  Synthetic oligonucleotide
gtggggcgaatggaattgtcgataacatac

SEQ ID NO: 103808 - DNA, 30 bp, Artificial Sequence
  Synthetic oligonucleotide
catgaaccgtgagacacaggcttcccatac

SEQ ID NO: 103809 - DNA, 30 bp, Artificial Sequence
  Synthetic oligonucleotide
gggataagaccggcggccaaagcagcatac

SEQ ID NO: 103810 - DNA, 30 bp, Artificial Sequence
  Synthetic oligonucleotide
ctagggcataggtgagagttaggcgcatac

SEQ ID NO: 103811 - DNA, 30 bp, Artificial Sequence
  Synthetic oligonucleotide
cctagggtcaggtaaacgcgtatggcatac

SEQ ID NO: 103812 - DNA, 30 bp, Artificial Sequence
  Synthetic oligonucleotide
actgatctctgcttaacatcacgatcatac

SEQ ID NO: 103813 - DNA, 30 bp, Artificial Sequence
  Synthetic oligonucleotide
taaaaacagcagcgaaatgacaaacgatac

SEQ ID NO: 103814 - DNA, 30 bp, Artificial Sequence
  Synthetic oligonucleotide
cagcactgagtttttaatattaagcgatac

SEQ ID NO: 103815 - DNA, 30 bp, Artificial Sequence
  Synthetic oligonucleotide
gtgggctgttagtatagatgcgaaggatac

SEQ ID NO: 103816 - DNA, 30 bp, Artificial Sequence
  Synthetic oligonucleotide
gcagatgtagcgattcgtaaagcaggatac

SEQ ID NO: 103817 - DNA, 30 bp, Artificial Sequence
  Synthetic oligonucleotide
atatacgaacgcgagtccatgcacggatac

SEQ ID NO: 103818 - DNA, 30 bp, Artificial Sequence
  Synthetic oligonucleotide
aaggtctcggaaatatcttactatggatac

SEQ ID NO: 103819 - DNA, 30 bp, Artificial Sequence
  Synthetic oligonucleotide
tcggtggaagtgccgccagtttatggatac

SEQ ID NO: 103820 - DNA, 30 bp, Artificial Sequence
  Synthetic oligonucleotide
gtgggatgctagggtagcggtgttatatac

SEQ ID NO: 103821 - DNA, 30 bp, Artificial Sequence
  Synthetic oligonucleotide
aggaggcattggtcgggacataacctatac

SEQ ID NO: 103822 - DNA, 30 bp, Artificial Sequence
  Synthetic oligonucleotide
aagtgatatcccaggatgggcgatgtatac

SEQ ID NO: 103823 - DNA, 30 bp, Artificial Sequence
  Synthetic oligonucleotide
ctagagatgaaagtccaaatcacacactac

SEQ ID NO: 103824 - DNA, 30 bp, Artificial Sequence
  Synthetic oligonucleotide
acttggttcgttgtatctagcgggcactac

SEQ ID NO: 103825 - DNA, 30 bp, Artificial Sequence
  Synthetic oligonucleotide
gttcgacgagtaggaaaggactttgactac

SEQ ID NO: 103826 - DNA, 30 bp, Artificial Sequence
  Synthetic oligonucleotide
agcgatttaggtgataagttctaatactac

SEQ ID NO: 103827 - DNA, 30 bp, Artificial Sequence
  Synthetic oligonucleotide
tcgtggatacaagtgtcgaagtcatactac

SEQ ID NO: 103828 - DNA, 30 bp, Artificial Sequence
  Synthetic oligonucleotide
atatcgagatgaggataatacaaagcctac

SEQ ID NO: 103829 - DNA, 30 bp, Artificial Sequence
  Synthetic oligonucleotide
acacctggactagtggagcctagctcctac

SEQ ID NO: 103830 - DNA, 30 bp, Artificial Sequence
  Synthetic oligonucleotide
ccagtacgtgagtttagtaatctaagctac

SEQ ID NO: 103831 - DNA, 30 bp, Artificial Sequence
  Synthetic oligonucleotide
tcgaattacctcaacacaatatatagctac

SEQ ID NO: 103832 - DNA, 30 bp, Artificial Sequence
  Synthetic oligonucleotide
aacgccctggctaagatcgaaaaatgctac

SEQ ID NO: 103833 - DNA, 30 bp, Artificial Sequence
  Synthetic oligonucleotide
cgaatattattcagaagcatgctgtgctac

SEQ ID NO: 103834 - DNA, 30 bp, Artificial Sequence
  Synthetic oligonucleotide
gacaacgaaagcgaccataatacttgctac

SEQ ID NO: 103835 - DNA, 30 bp, Artificial Sequence
  Synthetic oligonucleotide
tagtcaaggtcaacctgtgtggcaatctac

SEQ ID NO: 103836 - DNA, 30 bp, Artificial Sequence
  Synthetic oligonucleotide
aacggagtggtgtacgtttaccggatctac

SEQ ID NO: 103837 - DNA, 30 bp, Artificial Sequence
  Synthetic oligonucleotide
tcaatggtaaaatccaataaaagagtctac

SEQ ID NO: 103838 - DNA, 30 bp, Artificial Sequence
  Synthetic oligonucleotide
gccgagagtcatcctcaacacaaattctac

SEQ ID NO: 103839 - DNA, 30 bp, Artificial Sequence
  Synthetic oligonucleotide
cgtactggatattgcgagctccaaaagtac

SEQ ID NO: 103840 - DNA, 30 bp, Artificial Sequence
  Synthetic oligonucleotide
ttgccactctaccaccaattcggaaagtac

SEQ ID NO: 103841 - DNA, 30 bp, Artificial Sequence
  Synthetic oligonucleotide
cagggcgcacctatccaggcgtggaagtac

SEQ ID NO: 103842 - DNA, 30 bp, Artificial Sequence
  Synthetic oligonucleotide
gaactcacaaaaggaatagtatgtcagtac

SEQ ID NO: 103843 - DNA, 30 bp, Artificial Sequence
  Synthetic oligonucleotide
tgagagaaatgtgctagtattcaatagtac

SEQ ID NO: 103844 - DNA, 30 bp, Artificial Sequence
  Synthetic oligonucleotide
tcggaatacgagagcctttagcactagtac

SEQ ID NO: 103845 - DNA, 30 bp, Artificial Sequence
  Synthetic oligonucleotide
tggcaaggttaatctatccgtgtctagtac

SEQ ID NO: 103846 - DNA, 30 bp, Artificial Sequence
  Synthetic oligonucleotide
ggtattgagagcaatggtaaaccgtagtac

SEQ ID NO: 103847 - DNA, 30 bp, Artificial Sequence
  Synthetic oligonucleotide
cacggagattaccaactgcaagtaacgtac

SEQ ID NO: 103848 - DNA, 30 bp, Artificial Sequence
  Synthetic oligonucleotide
cgtaggctccatagaacacaatatacgtac

SEQ ID NO: 103849 - DNA, 30 bp, Artificial Sequence
  Synthetic oligonucleotide
ggcgaagcactatctgcttatccgccgtac

SEQ ID NO: 103850 - DNA, 30 bp, Artificial Sequence
  Synthetic oligonucleotide
gtggtcgaaaaccagctcgcagttccgtac

SEQ ID NO: 103851 - DNA, 30 bp, Artificial Sequence
  Synthetic oligonucleotide
agtgccaaccctgtcactgcgttcgcgtac

SEQ ID NO: 103852 - DNA, 29 bp, Artificial Sequence
  Synthetic oligonucleotide
tgtttggtatgagtggtagggtggcgtac

SEQ ID NO: 103853 - DNA, 30 bp, Artificial Sequence
  Synthetic oligonucleotide
catctgtccagaaaactaatgttggcgtac

SEQ ID NO: 103854 - DNA, 30 bp, Artificial Sequence
  Synthetic oligonucleotide
cactaggggcaccaggtaatggttgcgtac

SEQ ID NO: 103855 - DNA, 30 bp, Artificial Sequence
  Synthetic oligonucleotide
ggagatacgcgagttacgtgaaaaaggtac

SEQ ID NO: 103856 - DNA, 30 bp, Artificial Sequence
  Synthetic oligonucleotide
gcgaaaattgcggggtcaccgtagaggtac

SEQ ID NO: 103857 - DNA, 30 bp, Artificial Sequence
  Synthetic oligonucleotide
gattgagaggacatcgagatagataggtac

SEQ ID NO: 103858 - DNA, 30 bp, Artificial Sequence
  Synthetic oligonucleotide
ggccaacggcctctatgggcgaaagggtac

SEQ ID NO: 103859 - DNA, 30 bp, Artificial Sequence
  Synthetic oligonucleotide
gaaggagcgctgtggcaactgttctggtac

SEQ ID NO: 103860 - DNA, 30 bp, Artificial Sequence
  Synthetic oligonucleotide
aatccccatcaatagcgggctataatgtac

SEQ ID NO: 103861 - DNA, 30 bp, Artificial Sequence
  Synthetic oligonucleotide
tgtagtgagtacgtagagcggcagatgtac

SEQ ID NO: 103862 - DNA, 30 bp, Artificial Sequence
  Synthetic oligonucleotide
aacttggggaggtgcgcgatttggatgtac

SEQ ID NO: 103863 - DNA, 30 bp, Artificial Sequence
  Synthetic oligonucleotide
gagctatgaggacaattagggttgttgtac

SEQ ID NO: 103864 - DNA, 30 bp, Artificial Sequence
  Synthetic oligonucleotide
cgggaccatctgtatgtgaataagaattac

SEQ ID NO: 103865 - DNA, 30 bp, Artificial Sequence
  Synthetic oligonucleotide
atcggataagcaacgttactctagcattac

SEQ ID NO: 103866 - DNA, 30 bp, Artificial Sequence
  Synthetic oligonucleotide
gtcaatggactagagtcgtatagtcattac

SEQ ID NO: 103867 - DNA, 30 bp, Artificial Sequence
  Synthetic oligonucleotide
cggcacacgaacgtgaggcccaagtattac

SEQ ID NO: 103868 - DNA, 30 bp, Artificial Sequence
  Synthetic oligonucleotide
aacgtcgaaatcactgttagggtcacttac

SEQ ID NO: 103869 - DNA, 30 bp, Artificial Sequence
  Synthetic oligonucleotide
tgatcggcggcgggatatggctatgcttac

SEQ ID NO: 103870 - DNA, 30 bp, Artificial Sequence
  Synthetic oligonucleotide
acattgaaccatcgtattatatcgtcttac

SEQ ID NO: 103871 - DNA, 30 bp, Artificial Sequence
  Synthetic oligonucleotide
cacttactgtcaaccaatgagtcttcttac

SEQ ID NO: 103872 - DNA, 30 bp, Artificial Sequence
  Synthetic oligonucleotide
aggcctgattggaatgcaagtgtaagttac

SEQ ID NO: 103873 - DNA, 30 bp, Artificial Sequence
  Synthetic oligonucleotide
taggtaaaatgccgattcagttgcagttac

SEQ ID NO: 103874 - DNA, 30 bp, Artificial Sequence
  Synthetic oligonucleotide
gattcaagagagcagaccaatttcagttac

SEQ ID NO: 103875 - DNA, 30 bp, Artificial Sequence
  Synthetic oligonucleotide
acgggatcagatccgatcaacatacgttac

SEQ ID NO: 103876 - DNA, 30 bp, Artificial Sequence
  Synthetic oligonucleotide
cattgagactgtggcattgctaagcgttac

SEQ ID NO: 103877 - DNA, 30 bp, Artificial Sequence
  Synthetic oligonucleotide
gctccggcttaactctccccacactgttac

SEQ ID NO: 103878 - DNA, 30 bp, Artificial Sequence
  Synthetic oligonucleotide
gtttaacgtgtcgggtcatcggtgtgttac

SEQ ID NO: 103879 - DNA, 30 bp, Artificial Sequence
  Synthetic oligonucleotide
cgataattagagcttggatacttgatttac

SEQ ID NO: 103880 - DNA, 30 bp, Artificial Sequence
  Synthetic oligonucleotide
ctcataattaatacgacaccctgtaaaacc

SEQ ID NO: 103881 - DNA, 30 bp, Artificial Sequence
  Synthetic oligonucleotide
agcggtgggatggtttcaaacatgcaaacc

SEQ ID NO: 103882 - DNA, 30 bp, Artificial Sequence
  Synthetic oligonucleotide
tcctaaagttagcttatgctaaaagaaacc

SEQ ID NO: 103883 - DNA, 30 bp, Artificial Sequence
  Synthetic oligonucleotide
gcacacgaggaaactctcgtgtacgaaacc

SEQ ID NO: 103884 - DNA, 30 bp, Artificial Sequence
  Synthetic oligonucleotide
ctcggtgtgggtaaatagggagcataaacc

SEQ ID NO: 103885 - DNA, 30 bp, Artificial Sequence
  Synthetic oligonucleotide
atcatggcgagcgtgactttggcctaaacc

SEQ ID NO: 103886 - DNA, 30 bp, Artificial Sequence
  Synthetic oligonucleotide
cagctagctgcgtccgtgtgcaattaaacc

SEQ ID NO: 103887 - DNA, 30 bp, Artificial Sequence
  Synthetic oligonucleotide
cacgtcgtaatcggcgaaaagtgcacaacc

SEQ ID NO: 103888 - DNA, 30 bp, Artificial Sequence
  Synthetic oligonucleotide
gtacgtccagagcctgacagcgtgacaacc

SEQ ID NO: 103889 - DNA, 30 bp, Artificial Sequence
  Synthetic oligonucleotide
gatgctactagttaagccgggagtccaacc

SEQ ID NO: 103890 - DNA, 30 bp, Artificial Sequence
  Synthetic oligonucleotide
catttaagaagagtggctacaggggcaacc

SEQ ID NO: 103891 - DNA, 30 bp, Artificial Sequence
  Synthetic oligonucleotide
tctcggctaggggaccaatttcgtgcaacc

SEQ ID NO: 103892 - DNA, 30 bp, Artificial Sequence
  Synthetic oligonucleotide
ttggttcatggtcttgataggagctcaacc

SEQ ID NO: 103893 - DNA, 30 bp, Artificial Sequence
  Synthetic oligonucleotide
ttagatagggagcaaccaacactgtcaacc

SEQ ID NO: 103894 - DNA, 30 bp, Artificial Sequence
  Synthetic oligonucleotide
gtcaagtaaataggtaaaaagtggagaacc

SEQ ID NO: 103895 - DNA, 30 bp, Artificial Sequence
  Synthetic oligonucleotide
ccgttggagacaaatacgccttaacgaacc

SEQ ID NO: 103896 - DNA, 30 bp, Artificial Sequence
  Synthetic oligonucleotide
gtttgggagaaagtgacccccacacgaacc

SEQ ID NO: 103897 - DNA, 30 bp, Artificial Sequence
  Synthetic oligonucleotide
tctcggataaagttacggtaaagtataacc

SEQ ID NO: 103898 - DNA, 30 bp, Artificial Sequence
  Synthetic oligonucleotide
cgttagccactatatgttaagattataacc

SEQ ID NO: 103899 - DNA, 30 bp, Artificial Sequence
  Synthetic oligonucleotide
gagcgtagacaaaatagcatagaactaacc

SEQ ID NO: 103900 - DNA, 30 bp, Artificial Sequence
  Synthetic oligonucleotide
acacagaaagacggtacctaaagactaacc

SEQ ID NO: 103901 - DNA, 30 bp, Artificial Sequence
  Synthetic oligonucleotide
cgagacagagacaagaggtacgtgctaacc

SEQ ID NO: 103902 - DNA, 30 bp, Artificial Sequence
  Synthetic oligonucleotide
gcgtaccaagaacagttcattgcggtaacc

SEQ ID NO: 103903 - DNA, 30 bp, Artificial Sequence
  Synthetic oligonucleotide
catagataggatccaaagccttcaaacacc

SEQ ID NO: 103904 - DNA, 30 bp, Artificial Sequence
  Synthetic oligonucleotide
ccggtacaaacccctggtcaccacaacacc

SEQ ID NO: 103905 - DNA, 30 bp, Artificial Sequence
  Synthetic oligonucleotide
actgacaagaggatagtggttgtcaacacc

SEQ ID NO: 103906 - DNA, 30 bp, Artificial Sequence
  Synthetic oligonucleotide
catagggctgggctggaacctcggaacacc

SEQ ID NO: 103907 - DNA, 30 bp, Artificial Sequence
  Synthetic oligonucleotide
cgaggattaccaagggggattggtaacacc

SEQ ID NO: 103908 - DNA, 30 bp, Artificial Sequence
  Synthetic oligonucleotide
gggatagcgaaattgcggagatgtaacacc

SEQ ID NO: 103909 - DNA, 30 bp, Artificial Sequence
  Synthetic oligonucleotide
tcggatacgcggataggacgggaacacacc

SEQ ID NO: 103910 - DNA, 30 bp, Artificial Sequence
  Synthetic oligonucleotide
ctagggctggaaggattagcatctcacacc

SEQ ID NO: 103911 - DNA, 30 bp, Artificial Sequence
  Synthetic oligonucleotide
gatcgtctgtacatgcgtgagttcgacacc

SEQ ID NO: 103912 - DNA, 30 bp, Artificial Sequence
  Synthetic oligonucleotide
ctgagaagctaattgatatagatctacacc

SEQ ID NO: 103913 - DNA, 30 bp, Artificial Sequence
  Synthetic oligonucleotide
cgggggtggcaaggatcttgtataaccacc

SEQ ID NO: 103914 - DNA, 30 bp, Artificial Sequence
  Synthetic oligonucleotide
catggtccgtcatgcgattgtgcgaccacc

SEQ ID NO: 103915 - DNA, 30 bp, Artificial Sequence
  Synthetic oligonucleotide
gcctatcccgagttcattatacataccacc

SEQ ID NO: 103916 - DNA, 30 bp, Artificial Sequence
  Synthetic oligonucleotide
ttatactacgttcgagggccctaccccacc

SEQ ID NO: 103917 - DNA, 30 bp, Artificial Sequence
  Synthetic oligonucleotide
taaacacggaagcaacaaattgcggccacc

SEQ ID NO: 103918 - DNA, 30 bp, Artificial Sequence
  Synthetic oligonucleotide
gcctaacataggcgggctagcagatccacc

SEQ ID NO: 103919 - DNA, 30 bp, Artificial Sequence
  Synthetic oligonucleotide
tacggagccaccagtactgataattccacc

SEQ ID NO: 103920 - DNA, 30 bp, Artificial Sequence
  Synthetic oligonucleotide
cgatgcgaacggattggccctgtttccacc

SEQ ID NO: 103921 - DNA, 30 bp, Artificial Sequence
  Synthetic oligonucleotide
acaacgataactcactgttttctcggcacc

SEQ ID NO: 103922 - DNA, 30 bp, Artificial Sequence
  Synthetic oligonucleotide
acgacaaatacttttgaatctcaaatcacc

SEQ ID NO: 103923 - DNA, 30 bp, Artificial Sequence
  Synthetic oligonucleotide
agatagccgctcctatgaactagaatcacc

SEQ ID NO: 103924 - DNA, 30 bp, Artificial Sequence
  Synthetic oligonucleotide
taggcataggttactctaaaggcgatcacc

SEQ ID NO: 103925 - DNA, 31 bp, Artificial Sequence
  Synthetic oligonucleotide
cccgctatgggctagaccataatagctcacc

SEQ ID NO: 103926 - DNA, 30 bp, Artificial Sequence
  Synthetic oligonucleotide
gctgaactccgtgactaacgatccttcacc

SEQ ID NO: 103927 - DNA, 30 bp, Artificial Sequence
  Synthetic oligonucleotide
tacttatacataatggtgccaagaaagacc

SEQ ID NO: 103928 - DNA, 30 bp, Artificial Sequence
  Synthetic oligonucleotide
gtgtcccaagcatcggccgaatataagacc

SEQ ID NO: 103929 - DNA, 30 bp, Artificial Sequence
  Synthetic oligonucleotide
ttaggagactcagcttttcaacagcagacc

SEQ ID NO: 103930 - DNA, 30 bp, Artificial Sequence
  Synthetic oligonucleotide
tgtgaagagcggttatgccaccagcagacc

SEQ ID NO: 103931 - DNA, 30 bp, Artificial Sequence
  Synthetic oligonucleotide
ttgtgccgtcatgatccagggtagtagacc

SEQ ID NO: 103932 - DNA, 30 bp, Artificial Sequence
  Synthetic oligonucleotide
tctcacaatggatccactcaagtgtagacc

SEQ ID NO: 103933 - DNA, 30 bp, Artificial Sequence
  Synthetic oligonucleotide
acaaaatcctggctttagaacaaaacgacc

SEQ ID NO: 103934 - DNA, 30 bp, Artificial Sequence
  Synthetic oligonucleotide
ggattagacactgcgcgacccaagccgacc

SEQ ID NO: 103935 - DNA, 30 bp, Artificial Sequence
  Synthetic oligonucleotide
ctaatccggaaggatgccttggggccgacc

SEQ ID NO: 103936 - DNA, 30 bp, Artificial Sequence
  Synthetic oligonucleotide
ctcttaccaactagctagcggctagcgacc

SEQ ID NO: 103937 - DNA, 30 bp, Artificial Sequence
  Synthetic oligonucleotide
cgttgaagatctaaccgtacgtatgcgacc

SEQ ID NO: 103938 - DNA, 30 bp, Artificial Sequence
  Synthetic oligonucleotide
ttggtgtggaaaaccgagggttatgcgacc

SEQ ID NO: 103939 - DNA, 30 bp, Artificial Sequence
  Synthetic oligonucleotide
ttaaaacataaaggatgtccaggatcgacc

SEQ ID NO: 103940 - DNA, 30 bp, Artificial Sequence
  Synthetic oligonucleotide
atcatcccggataaataacggacgtcgacc

SEQ ID NO: 103941 - DNA, 30 bp, Artificial Sequence
  Synthetic oligonucleotide
cactctgagatctaaaatacaacaaggacc

SEQ ID NO: 103942 - DNA, 30 bp, Artificial Sequence
  Synthetic oligonucleotide
gtagcctcacgatgaaaccccaccaggacc

SEQ ID NO: 103943 - DNA, 30 bp, Artificial Sequence
  Synthetic oligonucleotide
agcttacttgatagcaaaactagagggacc

SEQ ID NO: 103944 - DNA, 30 bp, Artificial Sequence
  Synthetic oligonucleotide
tacgttcaacaatttcctagcgtcgggacc

SEQ ID NO: 103945 - DNA, 30 bp, Artificial Sequence
  Synthetic oligonucleotide
cggtatcatgggatttatacgacttggacc

SEQ ID NO: 103946 - DNA, 30 bp, Artificial Sequence
  Synthetic oligonucleotide
gggtgcaaaaaatctcgacgatcttggacc

SEQ ID NO: 103947 - DNA, 30 bp, Artificial Sequence
  Synthetic oligonucleotide
aaccagggctcagtgcgaggcggcatgacc

SEQ ID NO: 103948 - DNA, 30 bp, Artificial Sequence
  Synthetic oligonucleotide
agaggtccggtcgagtcagacgggatgacc

SEQ ID NO: 103949 - DNA, 30 bp, Artificial Sequence
  Synthetic oligonucleotide
gatgcggatttaaggcgacacggtatgacc

SEQ ID NO: 103950 - DNA, 30 bp, Artificial Sequence
  Synthetic oligonucleotide
tgagtacagagcactttatttacagtgacc

SEQ ID NO: 103951 - DNA, 30 bp, Artificial Sequence
  Synthetic oligonucleotide
tccaaggatcgctctgaactggacgtgacc

SEQ ID NO: 103952 - DNA, 30 bp, Artificial Sequence
  Synthetic oligonucleotide
gaaagtgcagatcgtgccgtcatggtgacc

SEQ ID NO: 103953 - DNA, 30 bp, Artificial Sequence
  Synthetic oligonucleotide
tcttacttagactggataccttctgtgacc

SEQ ID NO: 103954 - DNA, 30 bp, Artificial Sequence
  Synthetic oligonucleotide
acacgatacctgtggacaggtctattgacc

SEQ ID NO: 103955 - DNA, 30 bp, Artificial Sequence
  Synthetic oligonucleotide
cgcgtgagaccttgtgatttgagaaatacc

SEQ ID NO: 103956 - DNA, 30 bp, Artificial Sequence
  Synthetic oligonucleotide
aggtgcttcataggagcaatttaacatacc

SEQ ID NO: 103957 - DNA, 30 bp, Artificial Sequence
  Synthetic oligonucleotide
ctcgcaatttgcaacgcccaccagcatacc

SEQ ID NO: 103958 - DNA, 30 bp, Artificial Sequence
  Synthetic oligonucleotide
agactaattgcgccaatctggcagcatacc

SEQ ID NO: 103959 - DNA, 30 bp, Artificial Sequence
  Synthetic oligonucleotide
acgggatcctctgtaaaacaagagcatacc

SEQ ID NO: 103960 - DNA, 30 bp, Artificial Sequence
  Synthetic oligonucleotide
tgcgcgatcacctcctaatcctacgatacc

SEQ ID NO: 103961 - DNA, 30 bp, Artificial Sequence
  Synthetic oligonucleotide
atggtagatagcttcaaaattcccgatacc

SEQ ID NO: 103962 - DNA, 30 bp, Artificial Sequence
  Synthetic oligonucleotide
acacctgttacattagtgcaggtgactacc

SEQ ID NO: 103963 - DNA, 30 bp, Artificial Sequence
  Synthetic oligonucleotide
cggataaaatgttgtaagggcagtactacc

SEQ ID NO: 103964 - DNA, 30 bp, Artificial Sequence
  Synthetic oligonucleotide
cagcgatacgcacatacccgactagctacc

SEQ ID NO: 103965 - DNA, 30 bp, Artificial Sequence
  Synthetic oligonucleotide
tacaattctataagacaaacttaggctacc

SEQ ID NO: 103966 - DNA, 30 bp, Artificial Sequence
  Synthetic oligonucleotide
ggtggggtgaaatcgtagggtagcagtacc

SEQ ID NO: 103967 - DNA, 35 bp, Artificial Sequence
  Synthetic oligonucleotide
aagcattataatgacattcatgcgcgaatagtacc

SEQ ID NO: 103968 - DNA, 30 bp, Artificial Sequence
  Synthetic oligonucleotide
tatcggtaagacaaacgtgtacgaggtacc

SEQ ID NO: 103969 - DNA, 30 bp, Artificial Sequence
  Synthetic oligonucleotide
tcattggcaaagtgcagttgcacgggtacc

SEQ ID NO: 103970 - DNA, 30 bp, Artificial Sequence
  Synthetic oligonucleotide
taatatcgcggaggagcgcggacatgtacc

SEQ ID NO: 103971 - DNA, 30 bp, Artificial Sequence
  Synthetic oligonucleotide
caaatgaggggtaagtggctgctatttacc

SEQ ID NO: 103972 - DNA, 30 bp, Artificial Sequence
  Synthetic oligonucleotide
gtgctgggcgatccctacatcagaaaaccc

SEQ ID NO: 103973 - DNA, 30 bp, Artificial Sequence
  Synthetic oligonucleotide
ggcatacccgggggacagccgtacaaaccc

SEQ ID NO: 103974 - DNA, 30 bp, Artificial Sequence
  Synthetic oligonucleotide
taggatgttcggatggacatttcgcaaccc

SEQ ID NO: 103975 - DNA, 30 bp, Artificial Sequence
  Synthetic oligonucleotide
ttgcagcgacaataaaaggcggatcaaccc

SEQ ID NO: 103976 - DNA, 30 bp, Artificial Sequence
  Synthetic oligonucleotide
atgctacaactaccggccgagcacgaaccc

SEQ ID NO: 103977 - DNA, 30 bp, Artificial Sequence
  Synthetic oligonucleotide
agggtcgaaaaggccaagattggcgaaccc

SEQ ID NO: 103978 - DNA, 30 bp, Artificial Sequence
  Synthetic oligonucleotide
cgctcatcccgcaatcatcccgaataaccc

SEQ ID NO: 103979 - DNA, 30 bp, Artificial Sequence
  Synthetic oligonucleotide
tggataccatcaaggtagggcggcacaccc

SEQ ID NO: 103980 - DNA, 30 bp, Artificial Sequence
  Synthetic oligonucleotide
gtatatttacgtaacttttaagaagcaccc

SEQ ID NO: 103981 - DNA, 30 bp, Artificial Sequence
  Synthetic oligonucleotide
agccaggtttgggagaaagtcagcgcaccc

SEQ ID NO: 103982 - DNA, 30 bp, Artificial Sequence
  Synthetic oligonucleotide
gtcaatagtcaatatggaaataagagaccc

SEQ ID NO: 103983 - DNA, 30 bp, Artificial Sequence
  Synthetic oligonucleotide
ggacagtcgcaaaagaaagggaaacgaccc

SEQ ID NO: 103984 - DNA, 30 bp, Artificial Sequence
  Synthetic oligonucleotide
gagatcatatgattaaccctcgaacgaccc

SEQ ID NO: 103985 - DNA, 30 bp, Artificial Sequence
  Synthetic oligonucleotide
atatggccgtcgagagctgtcctgcgaccc

SEQ ID NO: 103986 - DNA, 30 bp, Artificial Sequence
  Synthetic oligonucleotide
cattcgctaggacgaggtaacaccggaccc

SEQ ID NO: 103987 - DNA, 30 bp, Artificial Sequence
  Synthetic oligonucleotide
agggtacacaacgtgtagatcatgggaccc

SEQ ID NO: 103988 - DNA, 30 bp, Artificial Sequence
  Synthetic oligonucleotide
agggtcagggattacagacgactatgaccc

SEQ ID NO: 103989 - DNA, 30 bp, Artificial Sequence
  Synthetic oligonucleotide
cacgggggtacccccagaaacttgtgaccc

SEQ ID NO: 103990 - DNA, 30 bp, Artificial Sequence
  Synthetic oligonucleotide
cgttctgtgttggatggcggagattgaccc

SEQ ID NO: 103991 - DNA, 30 bp, Artificial Sequence
  Synthetic oligonucleotide
cagttggtaaagagatcccctatgctaccc

SEQ ID NO: 103992 - DNA, 30 bp, Artificial Sequence
  Synthetic oligonucleotide
tttcaagcatcgactcgccaccgtctaccc

SEQ ID NO: 103993 - DNA, 30 bp, Artificial Sequence
  Synthetic oligonucleotide
caggaaccatgggatagcaagctggtaccc

SEQ ID NO: 103994 - DNA, 30 bp, Artificial Sequence
  Synthetic oligonucleotide
ctattcactaaacagtaacgatatgtaccc

SEQ ID NO: 103995 - DNA, 30 bp, Artificial Sequence
  Synthetic oligonucleotide
agaagatggcgtgattctttttaacacccc

SEQ ID NO: 103996 - DNA, 30 bp, Artificial Sequence
  Synthetic oligonucleotide
tggagtcgagacctcgatccaattcacccc

SEQ ID NO: 103997 - DNA, 30 bp, Artificial Sequence
  Synthetic oligonucleotide
cctgggaaccacggcagacatgtggacccc

SEQ ID NO: 103998 - DNA, 30 bp, Artificial Sequence
  Synthetic oligonucleotide
tcagcgagaccgagttaagaagaatccccc

SEQ ID NO: 103999 - DNA, 30 bp, Artificial Sequence
  Synthetic oligonucleotide
ttgagagacttggtaggaaacagatccccc

SEQ ID NO: 104000 - DNA, 30 bp, Artificial Sequence
  Synthetic oligonucleotide
cgcgcggtcaatctgcaactgagctccccc

SEQ ID NO: 104001 - DNA, 30 bp, Artificial Sequence
  Synthetic oligonucleotide
actgcacaagtccgggtcaccacaagcccc

SEQ ID NO: 104002 - DNA, 30 bp, Artificial Sequence
  Synthetic oligonucleotide
acaatcatcgcacaaagaaaatgtcgcccc

SEQ ID NO: 104003 - DNA, 30 bp, Artificial Sequence
  Synthetic oligonucleotide
tcaagggtcgaaataagagcatagggcccc

SEQ ID NO: 104004 - DNA, 30 bp, Artificial Sequence
  Synthetic oligonucleotide
aagaggtcgtcgtgactagaaaatggcccc

SEQ ID NO: 104005 - DNA, 29 bp, Artificial Sequence
  Synthetic oligonucleotide
gcgcgctaatatacgagtgagcatgcccc

SEQ ID NO: 104006 - DNA, 30 bp, Artificial Sequence
  Synthetic oligonucleotide
tacacatctgtaggatatgcggtttgcccc

SEQ ID NO: 104007 - DNA, 30 bp, Artificial Sequence
  Synthetic oligonucleotide
gcggacagctatccaagaggtctcatcccc

SEQ ID NO: 104008 - DNA, 30 bp, Artificial Sequence
  Synthetic oligonucleotide
taagaaggtcaagacacaagggccctcccc

SEQ ID NO: 104009 - DNA, 30 bp, Artificial Sequence
  Synthetic oligonucleotide
tcgtatgtggcacatgtcccagggctcccc

SEQ ID NO: 104010 - DNA, 30 bp, Artificial Sequence
  Synthetic oligonucleotide
tactggcaccagaacgaaatgagtctcccc

SEQ ID NO: 104011 - DNA, 30 bp, Artificial Sequence
  Synthetic oligonucleotide
acggagctaattaagatactcagcgtcccc

SEQ ID NO: 104012 - DNA, 30 bp, Artificial Sequence
  Synthetic oligonucleotide
tcacgaggaaacaagcgccacctggtcccc

SEQ ID NO: 104013 - DNA, 30 bp, Artificial Sequence
  Synthetic oligonucleotide
agcagtcagaaccagtaacaaagattcccc

SEQ ID NO: 104014 - DNA, 30 bp, Artificial Sequence
  Synthetic oligonucleotide
cggggtctggggaaacttcgttccaagccc

SEQ ID NO: 104015 - DNA, 30 bp, Artificial Sequence
  Synthetic oligonucleotide
aggtgaagaacacactaggtagctaagccc

SEQ ID NO: 104016 - DNA, 30 bp, Artificial Sequence
  Synthetic oligonucleotide
tgcgtgatcatctcagcgcggagacagccc

SEQ ID NO: 104017 - DNA, 30 bp, Artificial Sequence
  Synthetic oligonucleotide
atacctaaccacctaaaactgacagagccc

SEQ ID NO: 104018 - DNA, 30 bp, Artificial Sequence
  Synthetic oligonucleotide
tcttgcattaacaagcttcttcgggagccc

SEQ ID NO: 104019 - DNA, 30 bp, Artificial Sequence
  Synthetic oligonucleotide
taaggttcgtaacactatccaaaaacgccc

SEQ ID NO: 104020 - DNA, 30 bp, Artificial Sequence
  Synthetic oligonucleotide
agctcctctaggtactaagatccgccgccc

SEQ ID NO: 104021 - DNA, 30 bp, Artificial Sequence
  Synthetic oligonucleotide
atgttaatgagaggacggcagtatccgccc

SEQ ID NO: 104022 - DNA, 30 bp, Artificial Sequence
  Synthetic oligonucleotide
atagccttcgtgatagctgaaccagcgccc

SEQ ID NO: 104023 - DNA, 30 bp, Artificial Sequence
  Synthetic oligonucleotide
atgcatgactgggaatgatgatgagcgccc

SEQ ID NO: 104024 - DNA, 30 bp, Artificial Sequence
  Synthetic oligonucleotide
gggagtcgcaatgacaggatactaaggccc

SEQ ID NO: 104025 - DNA, 30 bp, Artificial Sequence
  Synthetic oligonucleotide
caactaatggggcatgagattaaccggccc

SEQ ID NO: 104026 - DNA, 30 bp, Artificial Sequence
  Synthetic oligonucleotide
tcattaaaatagtgaaatgcctagcggccc

SEQ ID NO: 104027 - DNA, 30 bp, Artificial Sequence
  Synthetic oligonucleotide
cacgtcaagattttaatcgatagttggccc

SEQ ID NO: 104028 - DNA, 30 bp, Artificial Sequence
  Synthetic oligonucleotide
gttgcaacccgcatcccaatgcatatgccc

SEQ ID NO: 104029 - DNA, 30 bp, Artificial Sequence
  Synthetic oligonucleotide
tggcttaggtgtggtacaacacaactgccc

SEQ ID NO: 104030 - DNA, 30 bp, Artificial Sequence
  Synthetic oligonucleotide
gaagctagcgaagcgtaacatatattgccc

SEQ ID NO: 104031 - DNA, 30 bp, Artificial Sequence
  Synthetic oligonucleotide
cgtgcgtgaacctcccgccaagcgaatccc

SEQ ID NO: 104032 - DNA, 30 bp, Artificial Sequence
  Synthetic oligonucleotide
ggattacgtgagttatgccggcaatatccc

SEQ ID NO: 104033 - DNA, 30 bp, Artificial Sequence
  Synthetic oligonucleotide
agggcgcctcgaatgtggtagacgcctccc

SEQ ID NO: 104034 - DNA, 30 bp, Artificial Sequence
  Synthetic oligonucleotide
gctgatatcacaaagcacccccgcgctccc

SEQ ID NO: 104035 - DNA, 30 bp, Artificial Sequence
  Synthetic oligonucleotide
acggcggtagagggcagccaatacagtccc

SEQ ID NO: 104036 - DNA, 30 bp, Artificial Sequence
  Synthetic oligonucleotide
gtcagtcaagcggacaccaccgaacgtccc

SEQ ID NO: 104037 - DNA, 30 bp, Artificial Sequence
  Synthetic oligonucleotide
ctaatagtgcgtaactccgatatacgtccc

SEQ ID NO: 104038 - DNA, 30 bp, Artificial Sequence
  Synthetic oligonucleotide
gaaaatcgacggtctagataacaaggtccc

SEQ ID NO: 104039 - DNA, 30 bp, Artificial Sequence
  Synthetic oligonucleotide
ccactaatcacgagatcggcgtactgtccc

SEQ ID NO: 104040 - DNA, 30 bp, Artificial Sequence
  Synthetic oligonucleotide
cggccgcgaaaggtgcctaatgttattccc

SEQ ID NO: 104041 - DNA, 30 bp, Artificial Sequence
  Synthetic oligonucleotide
tcgtcaccacgaatgttgtcgatccttccc

SEQ ID NO: 104042 - DNA, 30 bp, Artificial Sequence
  Synthetic oligonucleotide
tcctgcggcgtgaagtcgcacctatttccc

SEQ ID NO: 104043 - DNA, 30 bp, Artificial Sequence
  Synthetic oligonucleotide
agagtgggtagttggaactattactttccc

SEQ ID NO: 104044 - DNA, 30 bp, Artificial Sequence
  Synthetic oligonucleotide
atacggtgtgccaccaacacgagaaaagcc

SEQ ID NO: 104045 - DNA, 30 bp, Artificial Sequence
  Synthetic oligonucleotide
acgagggaaaataataggaagacgaaagcc

SEQ ID NO: 104046 - DNA, 30 bp, Artificial Sequence
  Synthetic oligonucleotide
gagaggtctactaaagatcagccggaagcc

SEQ ID NO: 104047 - DNA, 30 bp, Artificial Sequence
  Synthetic oligonucleotide
acatggaagatactattttaatgtgaagcc

SEQ ID NO: 104048 - DNA, 30 bp, Artificial Sequence
  Synthetic oligonucleotide
gctactgaaaacaccgagagaaagtaagcc

SEQ ID NO: 104049 - DNA, 30 bp, Artificial Sequence
  Synthetic oligonucleotide
cttataacatgtaagtttaacaagccagcc

SEQ ID NO: 104050 - DNA, 30 bp, Artificial Sequence
  Synthetic oligonucleotide
cttaagaacaccctcggtggccgagcagcc

SEQ ID NO: 104051 - DNA, 30 bp, Artificial Sequence
  Synthetic oligonucleotide
agatgagttggaagaggagtattttcagcc

SEQ ID NO: 104052 - DNA, 30 bp, Artificial Sequence
  Synthetic oligonucleotide
gactgaggaattcttaatgagatgagagcc

SEQ ID NO: 104053 - DNA, 30 bp, Artificial Sequence
  Synthetic oligonucleotide
tttccggaacacaaggcaaacggtagagcc

SEQ ID NO: 104054 - DNA, 30 bp, Artificial Sequence
  Synthetic oligonucleotide
gacggtcacagaaggtttagctcaggagcc

SEQ ID NO: 104055 - DNA, 30 bp, Artificial Sequence
  Synthetic oligonucleotide
cgattctgggactattacttactaggagcc

SEQ ID NO: 104056 - DNA, 30 bp, Artificial Sequence
  Synthetic oligonucleotide
tggggtaagaaaagtggaccgtagggagcc

SEQ ID NO: 104057 - DNA, 30 bp, Artificial Sequence
  Synthetic oligonucleotide
tacgattaaagagccccgaccacatgagcc

SEQ ID NO: 104058 - DNA, 30 bp, Artificial Sequence
  Synthetic oligonucleotide
tcaagcatgagttgaatggcaccatgagcc

SEQ ID NO: 104059 - DNA, 30 bp, Artificial Sequence
  Synthetic oligonucleotide
tggatggccacactcttactggcatgagcc

SEQ ID NO: 104060 - DNA, 30 bp, Artificial Sequence
  Synthetic oligonucleotide
cttcgtttggcagaaacaaacggatgagcc

SEQ ID NO: 104061 - DNA, 30 bp, Artificial Sequence
  Synthetic oligonucleotide
agcgtaagcagcagtagggcgcagtgagcc

SEQ ID NO: 104062 - DNA, 30 bp, Artificial Sequence
  Synthetic oligonucleotide
gtgtggataagcccgctacaacccatagcc

SEQ ID NO: 104063 - DNA, 30 bp, Artificial Sequence
  Synthetic oligonucleotide
tggcctaaattagctggacttagactagcc

SEQ ID NO: 104064 - DNA, 30 bp, Artificial Sequence
  Synthetic oligonucleotide
gatatgatctagaagatccagagcgtagcc

SEQ ID NO: 104065 - DNA, 30 bp, Artificial Sequence
  Synthetic oligonucleotide
gcagtatctgcacagaatagtctcgtagcc

SEQ ID NO: 104066 - DNA, 30 bp, Artificial Sequence
  Synthetic oligonucleotide
tgcgcagtttattagcgagcacgggtagcc

SEQ ID NO: 104067 - DNA, 30 bp, Artificial Sequence
  Synthetic oligonucleotide
cggcaaaacagtctcttacggggattagcc

SEQ ID NO: 104068 - DNA, 30 bp, Artificial Sequence
  Synthetic oligonucleotide
tgtgcacgatatatccggctcccgttagcc

SEQ ID NO: 104069 - DNA, 30 bp, Artificial Sequence
  Synthetic oligonucleotide
tccacagaatatagactcccacgaaacgcc

SEQ ID NO: 104070 - DNA, 30 bp, Artificial Sequence
  Synthetic oligonucleotide
gaccgtaacatgaggtttaatactcacgcc

SEQ ID NO: 104071 - DNA, 30 bp, Artificial Sequence
  Synthetic oligonucleotide
tgttgtagtcctggactgatgtgtcacgcc

SEQ ID NO: 104072 - DNA, 30 bp, Artificial Sequence
  Synthetic oligonucleotide
ggagttgaacatccatgtggtaaatacgcc

SEQ ID NO: 104073 - DNA, 30 bp, Artificial Sequence
  Synthetic oligonucleotide
ggaaccttttaagatgagtgaagcaccgcc

SEQ ID NO: 104074 - DNA, 30 bp, Artificial Sequence
  Synthetic oligonucleotide
cgcggggcatctaaagacaggaggaccgcc

SEQ ID NO: 104075 - DNA, 30 bp, Artificial Sequence
  Synthetic oligonucleotide
tggttaatcagcagtgataggcgacccgcc

SEQ ID NO: 104076 - DNA, 30 bp, Artificial Sequence
  Synthetic oligonucleotide
ctatcgcttagaggccaatgtcaccccgcc

SEQ ID NO: 104077 - DNA, 30 bp, Artificial Sequence
  Synthetic oligonucleotide
gcgatgatcaaaacagcgggacgccccgcc

SEQ ID NO: 104078 - DNA, 30 bp, Artificial Sequence
  Synthetic oligonucleotide
tcggagcgtagccagacttgtacatccgcc

SEQ ID NO: 104079 - DNA, 30 bp, Artificial Sequence
  Synthetic oligonucleotide
taatagacacagcggattagaaggtccgcc

SEQ ID NO: 104080 - DNA, 30 bp, Artificial Sequence
  Synthetic oligonucleotide
aagggaatgagacccttgtgggcttccgcc

SEQ ID NO: 104081 - DNA, 30 bp, Artificial Sequence
  Synthetic oligonucleotide
gagcttacacttgaagaactgagaagcgcc

SEQ ID NO: 104082 - DNA, 30 bp, Artificial Sequence
  Synthetic oligonucleotide
attaaaaagtgcatgtacggaaagcgcgcc

SEQ ID NO: 104083 - DNA, 30 bp, Artificial Sequence
  Synthetic oligonucleotide
gagagggggtagtcgataaagtgatgcgcc

SEQ ID NO: 104084 - DNA, 30 bp, Artificial Sequence
  Synthetic oligonucleotide
cgagcctgcttccagtgaaaaccgtgcgcc

SEQ ID NO: 104085 - DNA, 30 bp, Artificial Sequence
  Synthetic oligonucleotide
tagcgtcgcgtctggtcaccgtcaatcgcc

SEQ ID NO: 104086 - DNA, 30 bp, Artificial Sequence
  Synthetic oligonucleotide
ctgcgaggaaagtggttccaagccatcgcc

SEQ ID NO: 104087 - DNA, 30 bp, Artificial Sequence
  Synthetic oligonucleotide
atgcgttgtagagacaatacggttatcgcc

SEQ ID NO: 104088 - DNA, 30 bp, Artificial Sequence
  Synthetic oligonucleotide
cttcaaataactgtgatcataaccgtcgcc

SEQ ID NO: 104089 - DNA, 30 bp, Artificial Sequence
  Synthetic oligonucleotide
ggtacgacttaacaatccatggaggtcgcc

SEQ ID NO: 104090 - DNA, 30 bp, Artificial Sequence
  Synthetic oligonucleotide
caggtccgatgagaagaatgggagaaggcc

SEQ ID NO: 104091 - DNA, 30 bp, Artificial Sequence
  Synthetic oligonucleotide
accgatacaagctgccggcatgatcaggcc

SEQ ID NO: 104092 - DNA, 30 bp, Artificial Sequence
  Synthetic oligonucleotide
agaaaagggggggctaaactcacagaggcc

SEQ ID NO: 104093 - DNA, 30 bp, Artificial Sequence
  Synthetic oligonucleotide
tagccagtcaagtgtcgcgcaaccgaggcc

SEQ ID NO: 104094 - DNA, 30 bp, Artificial Sequence
  Synthetic oligonucleotide
aatgagaaggacacctttaacgtcgaggcc

SEQ ID NO: 104095 - DNA, 30 bp, Artificial Sequence
  Synthetic oligonucleotide
gcgtacattcgagtttcggcttactaggcc

SEQ ID NO: 104096 - DNA, 30 bp, Artificial Sequence
  Synthetic oligonucleotide
gactgcggctgagaacgtgcaatttaggcc

SEQ ID NO: 104097 - DNA, 30 bp, Artificial Sequence
  Synthetic oligonucleotide
ccagaacctattgtgcatcagtgtacggcc

SEQ ID NO: 104098 - DNA, 30 bp, Artificial Sequence
  Synthetic oligonucleotide
ttggcaatgcgctaggaagatggaagggcc

SEQ ID NO: 104099 - DNA, 30 bp, Artificial Sequence
  Synthetic oligonucleotide
taccagaactcatactcatgaaacagggcc

SEQ ID NO: 104100 - DNA, 30 bp, Artificial Sequence
  Synthetic oligonucleotide
ccgatacgctacaacaaagaatggagggcc

SEQ ID NO: 104101 - DNA, 30 bp, Artificial Sequence
  Synthetic oligonucleotide
tctcgataatctgacttcggggtgagggcc

SEQ ID NO: 104102 - DNA, 30 bp, Artificial Sequence
  Synthetic oligonucleotide
gacgacaatgcgtagggcgagaagggggcc

SEQ ID NO: 104103 - DNA, 30 bp, Artificial Sequence
  Synthetic oligonucleotide
agttagaggtacgaccctctcgcatgggcc

SEQ ID NO: 104104 - DNA, 30 bp, Artificial Sequence
  Synthetic oligonucleotide
agctagtccccatcccgtgcgacaatggcc

SEQ ID NO: 104105 - DNA, 30 bp, Artificial Sequence
  Synthetic oligonucleotide
acttgaataggtgggctgattgagatggcc

SEQ ID NO: 104106 - DNA, 30 bp, Artificial Sequence
  Synthetic oligonucleotide
cataaaagcgcatcgtatgaaaccctggcc

SEQ ID NO: 104107 - DNA, 30 bp, Artificial Sequence
  Synthetic oligonucleotide
gaccctcgagtactaagagcaagtttggcc

SEQ ID NO: 104108 - DNA, 30 bp, Artificial Sequence
  Synthetic oligonucleotide
ggttgaaattggaggggcggagtgcatgcc

SEQ ID NO: 104109 - DNA, 30 bp, Artificial Sequence
  Synthetic oligonucleotide
gtcagtgcaacgtcggtagaccgtcatgcc

SEQ ID NO: 104110 - DNA, 30 bp, Artificial Sequence
  Synthetic oligonucleotide
cagtcacgcgtacgggagcaaccagatgcc

SEQ ID NO: 104111 - DNA, 30 bp, Artificial Sequence
  Synthetic oligonucleotide
ccaatgctaaaaggttgcttgagggatgcc

SEQ ID NO: 104112 - DNA, 30 bp, Artificial Sequence
  Synthetic oligonucleotide
aacttaactagacctcgcccgagatatgcc

SEQ ID NO: 104113 - DNA, 30 bp, Artificial Sequence
  Synthetic oligonucleotide
actgtgactcagtacaaacgtgcacctgcc

SEQ ID NO: 104114 - DNA, 30 bp, Artificial Sequence
  Synthetic oligonucleotide
ggcggaggtatcctccactatgtccctgcc

SEQ ID NO: 104115 - DNA, 30 bp, Artificial Sequence
  Synthetic oligonucleotide
acatggcacttcatataattcaaggctgcc

SEQ ID NO: 104116 - DNA, 30 bp, Artificial Sequence
  Synthetic oligonucleotide
ggtacatggaaagcctgcaacgtaggtgcc

SEQ ID NO: 104117 - DNA, 30 bp, Artificial Sequence
  Synthetic oligonucleotide
agggttgctaagatcgctatatggtgtgcc

SEQ ID NO: 104118 - DNA, 30 bp, Artificial Sequence
  Synthetic oligonucleotide
gccattcacaggcaatgctaaagttgtgcc

SEQ ID NO: 104119 - DNA, 30 bp, Artificial Sequence
  Synthetic oligonucleotide
tgaacgtctaatgggatataccacattgcc

SEQ ID NO: 104120 - DNA, 30 bp, Artificial Sequence
  Synthetic oligonucleotide
acgtgcttgcgcaccatatcccgcattgcc

SEQ ID NO: 104121 - DNA, 30 bp, Artificial Sequence
  Synthetic oligonucleotide
caaagcaattttagctgagggaggattgcc

SEQ ID NO: 104122 - DNA, 30 bp, Artificial Sequence
  Synthetic oligonucleotide
tatggaccaagatggaactgtctcgttgcc

SEQ ID NO: 104123 - DNA, 30 bp, Artificial Sequence
  Synthetic oligonucleotide
ctggaccgctaggaaagtgaggctgttgcc

SEQ ID NO: 104124 - DNA, 30 bp, Artificial Sequence
  Synthetic oligonucleotide
caaaccagatcctagccggaccacaaatcc

SEQ ID NO: 104125 - DNA, 30 bp, Artificial Sequence
  Synthetic oligonucleotide
gacaagtggatagagtgaagaagcaaatcc

SEQ ID NO: 104126 - DNA, 30 bp, Artificial Sequence
  Synthetic oligonucleotide
ggtctggggcgaagccgccgaactgaatcc

SEQ ID NO: 104127 - DNA, 30 bp, Artificial Sequence
  Synthetic oligonucleotide
agtcgagactcgtgattagggtgataatcc

SEQ ID NO: 104128 - DNA, 30 bp, Artificial Sequence
  Synthetic oligonucleotide
gtggttccaggtatactctagaaaacatcc

SEQ ID NO: 104129 - DNA, 30 bp, Artificial Sequence
  Synthetic oligonucleotide
gaaaaagcctaactttgtcgactgacatcc

SEQ ID NO: 104130 - DNA, 30 bp, Artificial Sequence
  Synthetic oligonucleotide
accattagcaggcggacactattcgcatcc

SEQ ID NO: 104131 - DNA, 30 bp, Artificial Sequence
  Synthetic oligonucleotide
ggttccagaaccaatgacccagagggatcc

SEQ ID NO: 104132 - DNA, 30 bp, Artificial Sequence
  Synthetic oligonucleotide
agaacgcttttagtcaacaatacaatatcc

SEQ ID NO: 104133 - DNA, 30 bp, Artificial Sequence
  Synthetic oligonucleotide
ccagaacgacttatgttcatagctatatcc

SEQ ID NO: 104134 - DNA, 30 bp, Artificial Sequence
  Synthetic oligonucleotide
tgggtcagaactctcattcgtgagctatcc

SEQ ID NO: 104135 - DNA, 30 bp, Artificial Sequence
  Synthetic oligonucleotide
gataaatgacaaacgaacaagtgggtatcc

SEQ ID NO: 104136 - DNA, 30 bp, Artificial Sequence
  Synthetic oligonucleotide
cactacgagcatgaggaaccaccattatcc

SEQ ID NO: 104137 - DNA, 30 bp, Artificial Sequence
  Synthetic oligonucleotide
tgggtctgaaagtgaaatttgggagactcc

SEQ ID NO: 104138 - DNA, 30 bp, Artificial Sequence
  Synthetic oligonucleotide
taagtagaagcatgaggatcgattgactcc

SEQ ID NO: 104139 - DNA, 30 bp, Artificial Sequence
  Synthetic oligonucleotide
agacatgtggatatggctggtatatactcc

SEQ ID NO: 104140 - DNA, 30 bp, Artificial Sequence
  Synthetic oligonucleotide
tgggcgcatctaataactaggctatactcc

SEQ ID NO: 104141 - DNA, 30 bp, Artificial Sequence
  Synthetic oligonucleotide
agcagagtttacgaggccacgggctactcc

SEQ ID NO: 104142 - DNA, 30 bp, Artificial Sequence
  Synthetic oligonucleotide
cgagatcacgatacgtaggttgagccctcc

SEQ ID NO: 104143 - DNA, 30 bp, Artificial Sequence
  Synthetic oligonucleotide
catccaccaatagcttcacaagtgccctcc

SEQ ID NO: 104144 - DNA, 30 bp, Artificial Sequence
  Synthetic oligonucleotide
atcaggccaaagttgcgtcgtaacgcctcc

SEQ ID NO: 104145 - DNA, 30 bp, Artificial Sequence
  Synthetic oligonucleotide
ctggctgtgcgtcaaggtacttgggcctcc

SEQ ID NO: 104146 - DNA, 30 bp, Artificial Sequence
  Synthetic oligonucleotide
cattaacaaagcgcgtagcaatcatcctcc

SEQ ID NO: 104147 - DNA, 30 bp, Artificial Sequence
  Synthetic oligonucleotide
cccgaggtgatagagttagcccatcgctcc

SEQ ID NO: 104148 - DNA, 30 bp, Artificial Sequence
  Synthetic oligonucleotide
acgagctagataggtggcgatccatgctcc

SEQ ID NO: 104149 - DNA, 30 bp, Artificial Sequence
  Synthetic oligonucleotide
gtaaataggggcaggacagaggcatgctcc

SEQ ID NO: 104150 - DNA, 30 bp, Artificial Sequence
  Synthetic oligonucleotide
gcttgctttcttaagtgcattacttgctcc

SEQ ID NO: 104151 - DNA, 30 bp, Artificial Sequence
  Synthetic oligonucleotide
gattgtacggggaatatagttcacatctcc

SEQ ID NO: 104152 - DNA, 30 bp, Artificial Sequence
  Synthetic oligonucleotide
tgcaccatgtgataaccacgtctggtctcc

SEQ ID NO: 104153 - DNA, 30 bp, Artificial Sequence
  Synthetic oligonucleotide
atgtaacaacgaatccctggcgaacagtcc

SEQ ID NO: 104154 - DNA, 30 bp, Artificial Sequence
  Synthetic oligonucleotide
ggataatgcaccagggcaagatcgcagtcc

SEQ ID NO: 104155 - DNA, 30 bp, Artificial Sequence
  Synthetic oligonucleotide
gtcccaggttggcacatgtgcgcatagtcc

SEQ ID NO: 104156 - DNA, 30 bp, Artificial Sequence
  Synthetic oligonucleotide
gaaaagtaacgtgcgtaaagccactagtcc

SEQ ID NO: 104157 - DNA, 30 bp, Artificial Sequence
  Synthetic oligonucleotide
ggatagggaaagataagagaggggtagtcc

SEQ ID NO: 104158 - DNA, 30 bp, Artificial Sequence
  Synthetic oligonucleotide
cgaacttatcaagtagtcttaaacacgtcc

SEQ ID NO: 104159 - DNA, 30 bp, Artificial Sequence
  Synthetic oligonucleotide
ttcgccgggacaatataagagaagacgtcc

SEQ ID NO: 104160 - DNA, 30 bp, Artificial Sequence
  Synthetic oligonucleotide
taagggtctgggctgaagataatgacgtcc

SEQ ID NO: 104161 - DNA, 30 bp, Artificial Sequence
  Synthetic oligonucleotide
gtagaatcagtactttgcgtgctaccgtcc

SEQ ID NO: 104162 - DNA, 30 bp, Artificial Sequence
  Synthetic oligonucleotide
taactggagataagtatcatgttgccgtcc

SEQ ID NO: 104163 - DNA, 30 bp, Artificial Sequence
  Synthetic oligonucleotide
gggcgaaagaaagcataggatgatccgtcc

SEQ ID NO: 104164 - DNA, 30 bp, Artificial Sequence
  Synthetic oligonucleotide
cattaagtcaagtgaaaaaccgaacggtcc

SEQ ID NO: 104165 - DNA, 30 bp, Artificial Sequence
  Synthetic oligonucleotide
cacttgtaaaccttagtagtatgagggtcc

SEQ ID NO: 104166 - DNA, 30 bp, Artificial Sequence
  Synthetic oligonucleotide
tcctcggcctagtacaaaccaagggggtcc

SEQ ID NO: 104167 - DNA, 30 bp, Artificial Sequence
  Synthetic oligonucleotide
ggtagtcaatgccggtcatggaggtggtcc

SEQ ID NO: 104168 - DNA, 30 bp, Artificial Sequence
  Synthetic oligonucleotide
acataggaccgtcatctgagtgacatgtcc

SEQ ID NO: 104169 - DNA, 30 bp, Artificial Sequence
  Synthetic oligonucleotide
agatggaactgggcaagccgtggggtgtcc

SEQ ID NO: 104170 - DNA, 30 bp, Artificial Sequence
  Synthetic oligonucleotide
aagtaggcgggcgacgaccttgaaaattcc

SEQ ID NO: 104171 - DNA, 30 bp, Artificial Sequence
  Synthetic oligonucleotide
agaacaaatctacgggcccgcaataattcc

SEQ ID NO: 104172 - DNA, 30 bp, Artificial Sequence
  Synthetic oligonucleotide
ccacgccattgatgggggtgtggacattcc

SEQ ID NO: 104173 - DNA, 30 bp, Artificial Sequence
  Synthetic oligonucleotide
caggacgagtaacaatagtcagtacattcc

SEQ ID NO: 104174 - DNA, 30 bp, Artificial Sequence
  Synthetic oligonucleotide
gtacagaagtagcttgggcgaggccattcc

SEQ ID NO: 104175 - DNA, 30 bp, Artificial Sequence
  Synthetic oligonucleotide
catattagagcaaggaacgtataagattcc

SEQ ID NO: 104176 - DNA, 30 bp, Artificial Sequence
  Synthetic oligonucleotide
ggaccgcaaacaccaagcaagagtgattcc

SEQ ID NO: 104177 - DNA, 30 bp, Artificial Sequence
  Synthetic oligonucleotide
ccaggtgggtaaataatacgcaatacttcc

SEQ ID NO: 104178 - DNA, 30 bp, Artificial Sequence
  Synthetic oligonucleotide
ttatacacattacaaaaaaactatacttcc

SEQ ID NO: 104179 - DNA, 30 bp, Artificial Sequence
  Synthetic oligonucleotide
gatacaagtagccatgatataatagcttcc

SEQ ID NO: 104180 - DNA, 30 bp, Artificial Sequence
  Synthetic oligonucleotide
tagacctaggcactcgatcaccaacgttcc

SEQ ID NO: 104181 - DNA, 30 bp, Artificial Sequence
  Synthetic oligonucleotide
atccgagggtcagtaaactggcgtggttcc

SEQ ID NO: 104182 - DNA, 30 bp, Artificial Sequence
  Synthetic oligonucleotide
cataggcatgttagaactacaagcgtttcc

SEQ ID NO: 104183 - DNA, 30 bp, Artificial Sequence
  Synthetic oligonucleotide
ttgtcaaaaacgttaaacaaactattttcc

SEQ ID NO: 104184 - DNA, 30 bp, Artificial Sequence
  Synthetic oligonucleotide
ggacaaatcaaccgatgagttaacttttcc

SEQ ID NO: 104185 - DNA, 30 bp, Artificial Sequence
  Synthetic oligonucleotide
tcaagcaatagaggttgggtcgtaaaaagc

SEQ ID NO: 104186 - DNA, 30 bp, Artificial Sequence
  Synthetic oligonucleotide
tcgaaattatatcgatgaggaccgaaaagc

SEQ ID NO: 104187 - DNA, 30 bp, Artificial Sequence
  Synthetic oligonucleotide
aagtttggctcacacgtcgactgtaaaagc

SEQ ID NO: 104188 - DNA, 30 bp, Artificial Sequence
  Synthetic oligonucleotide
aagatcacttaaggagcgcgcatacaaagc

SEQ ID NO: 104189 - DNA, 30 bp, Artificial Sequence
  Synthetic oligonucleotide
aagacacttatggaaaagcaatctcaaagc

SEQ ID NO: 104190 - DNA, 30 bp, Artificial Sequence
  Synthetic oligonucleotide
tgccgcataggtggccatgcaagcgaaagc

SEQ ID NO: 104191 - DNA, 30 bp, Artificial Sequence
  Synthetic oligonucleotide
agccgccaacatgtgtgtgagtgggaaagc

SEQ ID NO: 104192 - DNA, 30 bp, Artificial Sequence
  Synthetic oligonucleotide
ctgattagtaccgaatgaccggatgaaagc

SEQ ID NO: 104193 - DNA, 30 bp, Artificial Sequence
  Synthetic oligonucleotide
agaacggcctgtagttgccgaattgaaagc

SEQ ID NO: 104194 - DNA, 30 bp, Artificial Sequence
  Synthetic oligonucleotide
agtcaaacggccactagtcctgtctaaagc

SEQ ID NO: 104195 - DNA, 30 bp, Artificial Sequence
  Synthetic oligonucleotide
tgatccgagtggggttgagggaacacaagc

SEQ ID NO: 104196 - DNA, 30 bp, Artificial Sequence
  Synthetic oligonucleotide
tgaagcagagtcgaacactcgcttacaagc

SEQ ID NO: 104197 - DNA, 30 bp, Artificial Sequence
  Synthetic oligonucleotide
actctgaaaatgggggtgtcttacccaagc

SEQ ID NO: 104198 - DNA, 30 bp, Artificial Sequence
  Synthetic oligonucleotide
tgctcgggtcaggtatgcttcgggccaagc

SEQ ID NO: 104199 - DNA, 30 bp, Artificial Sequence
  Synthetic oligonucleotide
agccaagaaagtattaacagggtgccaagc

SEQ ID NO: 104200 - DNA, 30 bp, Artificial Sequence
  Synthetic oligonucleotide
tgagaacggattgattagaaacctccaagc

SEQ ID NO: 104201 - DNA, 30 bp, Artificial Sequence
  Synthetic oligonucleotide
ggtgaaagaagtgagcgaacctgagcaagc

SEQ ID NO: 104202 - DNA, 30 bp, Artificial Sequence
  Synthetic oligonucleotide
cggtgaagacgatgacataaaagcgcaagc

SEQ ID NO: 104203 - DNA, 30 bp, Artificial Sequence
  Synthetic oligonucleotide
cgcaaggcaatgaagcagcgtggggcaagc

SEQ ID NO: 104204 - DNA, 30 bp, Artificial Sequence
  Synthetic oligonucleotide
aaacgtgagcacgaatttacaatgtcaagc

SEQ ID NO: 104205 - DNA, 30 bp, Artificial Sequence
  Synthetic oligonucleotide
atggcgatccaggttatgatcttcagaagc

SEQ ID NO: 104206 - DNA, 30 bp, Artificial Sequence
  Synthetic oligonucleotide
cgcgacgatggggttagaattataggaagc

SEQ ID NO: 104207 - DNA, 30 bp, Artificial Sequence
  Synthetic oligonucleotide
attcgatgccggcgtcggaaacatggaagc

SEQ ID NO: 104208 - DNA, 30 bp, Artificial Sequence
  Synthetic oligonucleotide
ccggtaagaccatgaataggagctggaagc

SEQ ID NO: 104209 - DNA, 30 bp, Artificial Sequence
  Synthetic oligonucleotide
cattggaattggattaacagagtttgaagc

SEQ ID NO: 104210 - DNA, 30 bp, Artificial Sequence
  Synthetic oligonucleotide
ctgcagcgaccgcgctggtggtaaataagc

SEQ ID NO: 104211 - DNA, 30 bp, Artificial Sequence
  Synthetic oligonucleotide
acacaagagccgtgaaggttctcaataagc

SEQ ID NO: 104212 - DNA, 30 bp, Artificial Sequence
  Synthetic oligonucleotide
aacttagaattctaggacgatagaataagc

SEQ ID NO: 104213 - DNA, 30 bp, Artificial Sequence
  Synthetic oligonucleotide
ccatcttgagggtcgcggtgcgcgataagc

SEQ ID NO: 104214 - DNA, 30 bp, Artificial Sequence
  Synthetic oligonucleotide
ggtgtcctcgtatcgatgtacaatataagc

SEQ ID NO: 104215 - DNA, 30 bp, Artificial Sequence
  Synthetic oligonucleotide
cattagtaaatagggatcatttcactaagc

SEQ ID NO: 104216 - DNA, 30 bp, Artificial Sequence
  Synthetic oligonucleotide
tcaaatgagcagagtttcaaaatcctaagc

SEQ ID NO: 104217 - DNA, 30 bp, Artificial Sequence
  Synthetic oligonucleotide
ttcgagacccacggttgttagtggctaagc

SEQ ID NO: 104218 - DNA, 30 bp, Artificial Sequence
  Synthetic oligonucleotide
agagaaactagaccagcagtggtgctaagc

SEQ ID NO: 104219 - DNA, 30 bp, Artificial Sequence
  Synthetic oligonucleotide
ggaggggacttgattaattcgcgagtaagc

SEQ ID NO: 104220 - DNA, 30 bp, Artificial Sequence
  Synthetic oligonucleotide
taataggaagattagggcagtcacgtaagc

SEQ ID NO: 104221 - DNA, 30 bp, Artificial Sequence
  Synthetic oligonucleotide
gtgacttacatgtaacttagggtcttaagc

SEQ ID NO: 104222 - DNA, 30 bp, Artificial Sequence
  Synthetic oligonucleotide
gtagtgaaccatgcaggtaattcaaacagc

SEQ ID NO: 104223 - DNA, 30 bp, Artificial Sequence
  Synthetic oligonucleotide
acgtgccgctaaacattacaatgaaacagc

SEQ ID NO: 104224 - DNA, 30 bp, Artificial Sequence
  Synthetic oligonucleotide
acttgtttgggtggcgaaaacatcaacagc

SEQ ID NO: 104225 - DNA, 30 bp, Artificial Sequence
  Synthetic oligonucleotide
ccaatattagcttagtgttgagagcacagc

SEQ ID NO: 104226 - DNA, 30 bp, Artificial Sequence
  Synthetic oligonucleotide
tcgtagagccgacgtataacgctagacagc

SEQ ID NO: 104227 - DNA, 30 bp, Artificial Sequence
  Synthetic oligonucleotide
taagactccggactcccctataacgacagc

SEQ ID NO: 104228 - DNA, 30 bp, Artificial Sequence
  Synthetic oligonucleotide
gtggaaaacggagatcctccacacgacagc

SEQ ID NO: 104229 - DNA, 30 bp, Artificial Sequence
  Synthetic oligonucleotide
ctaaattaattccacgataagaaggacagc

SEQ ID NO: 104230 - DNA, 30 bp, Artificial Sequence
  Synthetic oligonucleotide
gtctaccgggcatcgaatggaaatgacagc

SEQ ID NO: 104231 - DNA, 30 bp, Artificial Sequence
  Synthetic oligonucleotide
catctttaagggtaggatggggagtacagc

SEQ ID NO: 104232 - DNA, 30 bp, Artificial Sequence
  Synthetic oligonucleotide
agcgcgaacgaatgtactacaaggtacagc

SEQ ID NO: 104233 - DNA, 30 bp, Artificial Sequence
  Synthetic oligonucleotide
ttgatcgttagattggaggctgaacccagc

SEQ ID NO: 104234 - DNA, 30 bp, Artificial Sequence
  Synthetic oligonucleotide
acctggacgtacaagtagatacgacccagc

SEQ ID NO: 104235 - DNA, 30 bp, Artificial Sequence
  Synthetic oligonucleotide
taacggcgtcaagcttcatttctatccagc

SEQ ID NO: 104236 - DNA, 30 bp, Artificial Sequence
  Synthetic oligonucleotide
gcgccttgtaaggctcatttccaaagcagc

SEQ ID NO: 104237 - DNA, 30 bp, Artificial Sequence
  Synthetic oligonucleotide
ggagtcccccccgtggcgtacatgagcagc

SEQ ID NO: 104238 - DNA, 30 bp, Artificial Sequence
  Synthetic oligonucleotide
tccaggtcaataggcttcatttatagcagc

SEQ ID NO: 104239 - DNA, 30 bp, Artificial Sequence
  Synthetic oligonucleotide
tgcgacccatgtaagcccttgtgaggcagc

SEQ ID NO: 104240 - DNA, 30 bp, Artificial Sequence
  Synthetic oligonucleotide
actatcgggcaaacggcgtaaccctgcagc

SEQ ID NO: 104241 - DNA, 30 bp, Artificial Sequence
  Synthetic oligonucleotide
aaggaataagccaccaagtttaagatcagc

SEQ ID NO: 104242 - DNA, 29 bp, Artificial Sequence
  Synthetic oligonucleotide
tatttgtagggcggccgtggtggatcagc

SEQ ID NO: 104243 - DNA, 31 bp, Artificial Sequence
  Synthetic oligonucleotide
cactaactcaaagcaattttcttggatcagc

SEQ ID NO: 104244 - DNA, 30 bp, Artificial Sequence
  Synthetic oligonucleotide
tggtaatgttccacacggcacttcctcagc

SEQ ID NO: 104245 - DNA, 30 bp, Artificial Sequence
  Synthetic oligonucleotide
tcgaggcagttcctacaaaattgtctcagc

SEQ ID NO: 104246 - DNA, 30 bp, Artificial Sequence
  Synthetic oligonucleotide
agacggcacgtaagttccagaatcgtcagc

SEQ ID NO: 104247 - DNA, 30 bp, Artificial Sequence
  Synthetic oligonucleotide
catttccactaatctcgtaactttgtcagc

SEQ ID NO: 104248 - DNA, 30 bp, Artificial Sequence
  Synthetic oligonucleotide
ggccatttctgatgtgctcaatcgttcagc

SEQ ID NO: 104249 - DNA, 30 bp, Artificial Sequence
  Synthetic oligonucleotide
ctagtggagcctaagaaaaggggcaagagc

SEQ ID NO: 104250 - DNA, 30 bp, Artificial Sequence
  Synthetic oligonucleotide
gagagtaagcccggtggggtgtttaagagc

SEQ ID NO: 104251 - DNA, 30 bp, Artificial Sequence
  Synthetic oligonucleotide
cgtcgaaagtagagtagcgcccgacagagc

SEQ ID NO: 104252 - DNA, 30 bp, Artificial Sequence
  Synthetic oligonucleotide
tgaacacgcctgaaaaagtggcaccagagc

SEQ ID NO: 104253 - DNA, 30 bp, Artificial Sequence
  Synthetic oligonucleotide
gtaggggccaacctctgcgggtgccagagc

SEQ ID NO: 104254 - DNA, 30 bp, Artificial Sequence
  Synthetic oligonucleotide
acatcggatatctaaaactccacagagagc

SEQ ID NO: 104255 - DNA, 30 bp, Artificial Sequence
  Synthetic oligonucleotide
gggaacgcgggatgccgtgcgatggagagc

SEQ ID NO: 104256 - DNA, 30 bp, Artificial Sequence
  Synthetic oligonucleotide
aaaaggaagtggtgaacaaatgttgagagc

SEQ ID NO: 104257 - DNA, 30 bp, Artificial Sequence
  Synthetic oligonucleotide
tgcggtgggtggaatactctgctctagagc

SEQ ID NO: 104258 - DNA, 30 bp, Artificial Sequence
  Synthetic oligonucleotide
gtctgtatccaacgaaacttagcaccgagc

SEQ ID NO: 104259 - DNA, 30 bp, Artificial Sequence
  Synthetic oligonucleotide
gctatgaggtgaaagtctcgactgccgagc

SEQ ID NO: 104260 - DNA, 30 bp, Artificial Sequence
  Synthetic oligonucleotide
acggaccattcttttgctagttcctcgagc

SEQ ID NO: 104261 - DNA, 30 bp, Artificial Sequence
  Synthetic oligonucleotide
aggtataaataatgcccaacgagctcgagc

SEQ ID NO: 104262 - DNA, 30 bp, Artificial Sequence
  Synthetic oligonucleotide
ccggaccaattgcaagggactgagtcgagc

SEQ ID NO: 104263 - DNA, 30 bp, Artificial Sequence
  Synthetic oligonucleotide
caaacggatcaccggttcggagcttcgagc

SEQ ID NO: 104264 - DNA, 30 bp, Artificial Sequence
  Synthetic oligonucleotide
tagtagcgaaagcaaaagaccacaaggagc

SEQ ID NO: 104265 - DNA, 30 bp, Artificial Sequence
  Synthetic oligonucleotide
ggtcgcgaggaaatttccagtagaaggagc

SEQ ID NO: 104266 - DNA, 30 bp, Artificial Sequence
  Synthetic oligonucleotide
gtgagataatcggtggctgggcttaggagc

SEQ ID NO: 104267 - DNA, 30 bp, Artificial Sequence
  Synthetic oligonucleotide
taatgggttgccagtgacccggaccggagc

SEQ ID NO: 104268 - DNA, 30 bp, Artificial Sequence
  Synthetic oligonucleotide
acatacgagacaataacatcgcggcggagc

SEQ ID NO: 104269 - DNA, 30 bp, Artificial Sequence
  Synthetic oligonucleotide
gcaatggacaatgaaggctccaatcggagc

SEQ ID NO: 104270 - DNA, 30 bp, Artificial Sequence
  Synthetic oligonucleotide
ctgcatggttcatggggtgatcactggagc

SEQ ID NO: 104271 - DNA, 30 bp, Artificial Sequence
  Synthetic oligonucleotide
agagagcactatggataccgaatttggagc

SEQ ID NO: 104272 - DNA, 30 bp, Artificial Sequence
  Synthetic oligonucleotide
cggagccctcaagtgccgacctgaatgagc

SEQ ID NO: 104273 - DNA, 30 bp, Artificial Sequence
  Synthetic oligonucleotide
ctggtaggatcaggcgcttcgtccatgagc

SEQ ID NO: 104274 - DNA, 30 bp, Artificial Sequence
  Synthetic oligonucleotide
tgtatagtttagcgtgcaaaagatatgagc

SEQ ID NO: 104275 - DNA, 30 bp, Artificial Sequence
  Synthetic oligonucleotide
gaaagaggaattgaagaaacgggtatgagc

SEQ ID NO: 104276 - DNA, 30 bp, Artificial Sequence
  Synthetic oligonucleotide
gagcaattggctaagaacaatgtactgagc

SEQ ID NO: 104277 - DNA, 30 bp, Artificial Sequence
  Synthetic oligonucleotide
acattgtaagctcatggtggaatgctgagc

SEQ ID NO: 104278 - DNA, 30 bp, Artificial Sequence
  Synthetic oligonucleotide
ggtgccagttcatacgcaataccagtgagc

SEQ ID NO: 104279 - DNA, 30 bp, Artificial Sequence
  Synthetic oligonucleotide
tctggttaaataacgagacgtagagtgagc

SEQ ID NO: 104280 - DNA, 30 bp, Artificial Sequence
  Synthetic oligonucleotide
ctaagtattgttgcaattaatctagtgagc

SEQ ID NO: 104281 - DNA, 30 bp, Artificial Sequence
  Synthetic oligonucleotide
aggttcgcctaccaggatccagaattgagc

SEQ ID NO: 104282 - DNA, 30 bp, Artificial Sequence
  Synthetic oligonucleotide
gcagagccgagataagcggacgcattgagc

SEQ ID NO: 104283 - DNA, 30 bp, Artificial Sequence
  Synthetic oligonucleotide
caactatagcaacccgaccttgccttgagc

SEQ ID NO: 104284 - DNA, 30 bp, Artificial Sequence
  Synthetic oligonucleotide
tcgcgttacgtagggcgaatttggcatagc

SEQ ID NO: 104285 - DNA, 30 bp, Artificial Sequence
  Synthetic oligonucleotide
agcaggacgacttttgagttctgagatagc

SEQ ID NO: 104286 - DNA, 31 bp, Artificial Sequence
  Synthetic oligonucleotide
cgggtactggcacacattatgctcatatagc

SEQ ID NO: 104287 - DNA, 30 bp, Artificial Sequence
  Synthetic oligonucleotide
tagataaactgtatcgactgcgccactagc

SEQ ID NO: 104288 - DNA, 30 bp, Artificial Sequence
  Synthetic oligonucleotide
gcacgttcgctgtttgtaacgaatactagc

SEQ ID NO: 104289 - DNA, 30 bp, Artificial Sequence
  Synthetic oligonucleotide
tgaatgcccgaggagatcaggtccgctagc

SEQ ID NO: 104290 - DNA, 30 bp, Artificial Sequence
  Synthetic oligonucleotide
tgggaatgcatagacagcggcgaaagtagc

SEQ ID NO: 104291 - DNA, 30 bp, Artificial Sequence
  Synthetic oligonucleotide
gcagataaggactaatgggactgaagtagc

SEQ ID NO: 104292 - DNA, 30 bp, Artificial Sequence
  Synthetic oligonucleotide
acactagccgttttccgcgaatgtagtagc

SEQ ID NO: 104293 - DNA, 30 bp, Artificial Sequence
  Synthetic oligonucleotide
tggcgtcggtgtctgcaggcggcacgtagc

SEQ ID NO: 104294 - DNA, 30 bp, Artificial Sequence
  Synthetic oligonucleotide
ttatccaccagttgactcgtatgaggtagc

SEQ ID NO: 104295 - DNA, 30 bp, Artificial Sequence
  Synthetic oligonucleotide
atcccaacatcggaatcatatataggtagc

SEQ ID NO: 104296 - DNA, 30 bp, Artificial Sequence
  Synthetic oligonucleotide
gcataacagatgaaaggaacagcgggtagc

SEQ ID NO: 104297 - DNA, 30 bp, Artificial Sequence
  Synthetic oligonucleotide
acggcatgtatgacgatggatcgcattagc

SEQ ID NO: 104298 - DNA, 30 bp, Artificial Sequence
  Synthetic oligonucleotide
aactttaaatcaaatcagaaaatcattagc

SEQ ID NO: 104299 - DNA, 30 bp, Artificial Sequence
  Synthetic oligonucleotide
taggtaatcctagacccccgcgatattagc

SEQ ID NO: 104300 - DNA, 30 bp, Artificial Sequence
  Synthetic oligonucleotide
ccaaggtattggcactgcgtggagcttagc

SEQ ID NO: 104301 - DNA, 30 bp, Artificial Sequence
  Synthetic oligonucleotide
cattactggataaatactacgcacgttagc

SEQ ID NO: 104302 - DNA, 30 bp, Artificial Sequence
  Synthetic oligonucleotide
agggaagcacaaccttccgaggtggttagc

SEQ ID NO: 104303 - DNA, 30 bp, Artificial Sequence
  Synthetic oligonucleotide
gcgacaagacagcctggtctacaaaaacgc

SEQ ID NO: 104304 - DNA, 30 bp, Artificial Sequence
  Synthetic oligonucleotide
tcgtcatgtatggcaattaggccgaaacgc

SEQ ID NO: 104305 - DNA, 30 bp, Artificial Sequence
  Synthetic oligonucleotide
aaggtacggattcgcccaaatttcgaacgc

SEQ ID NO: 104306 - DNA, 30 bp, Artificial Sequence
  Synthetic oligonucleotide
gcaagggggtagacagctccctgggaacgc

SEQ ID NO: 104307 - DNA, 30 bp, Artificial Sequence
  Synthetic oligonucleotide
acgggcctgcagtgagagcgagtggaacgc

SEQ ID NO: 104308 - DNA, 30 bp, Artificial Sequence
  Synthetic oligonucleotide
cagaggacataaatagtcaaacaataacgc

SEQ ID NO: 104309 - DNA, 30 bp, Artificial Sequence
  Synthetic oligonucleotide
tcaccatggagctgagctacggagtaacgc

SEQ ID NO: 104310 - DNA, 30 bp, Artificial Sequence
  Synthetic oligonucleotide
tgggaccggtaaattgtttccgagccacgc

SEQ ID NO: 104311 - DNA, 30 bp, Artificial Sequence
  Synthetic oligonucleotide
tcgcgtatatctaggcgcgcgactccacgc

SEQ ID NO: 104312 - DNA, 31 bp, Artificial Sequence
  Synthetic oligonucleotide
gggaaaatctttgcaatcagagccagcacgc

SEQ ID NO: 104313 - DNA, 30 bp, Artificial Sequence
  Synthetic oligonucleotide
ttggaaagcctcgattacggaaatgcacgc

SEQ ID NO: 104314 - DNA, 30 bp, Artificial Sequence
  Synthetic oligonucleotide
ttgcatctagcaatgagaacggggcgacgc

SEQ ID NO: 104315 - DNA, 30 bp, Artificial Sequence
  Synthetic oligonucleotide
atgaacccgcgggaggatcatcgaatacgc

SEQ ID NO: 104316 - DNA, 31 bp, Artificial Sequence
  Synthetic oligonucleotide
ccactcgctctaccggaccgaaaagctacgc

SEQ ID NO: 104317 - DNA, 30 bp, Artificial Sequence
  Synthetic oligonucleotide
agtgatcaaagagatcatgacactctacgc

SEQ ID NO: 104318 - DNA, 30 bp, Artificial Sequence
  Synthetic oligonucleotide
cagaaaccagcatgcgaatcgcccgtacgc

SEQ ID NO: 104319 - DNA, 30 bp, Artificial Sequence
  Synthetic oligonucleotide
ggtatacgaaagtgatgtgcgacgttacgc

SEQ ID NO: 104320 - DNA, 30 bp, Artificial Sequence
  Synthetic oligonucleotide
cagcaatatacagaacaaagacaaaaccgc

SEQ ID NO: 104321 - DNA, 30 bp, Artificial Sequence
  Synthetic oligonucleotide
gtagactatgtgggccgtacacacaaccgc

SEQ ID NO: 104322 - DNA, 30 bp, Artificial Sequence
  Synthetic oligonucleotide
tgtatcgtagatgggtgagcacctaaccgc

SEQ ID NO: 104323 - DNA, 30 bp, Artificial Sequence
  Synthetic oligonucleotide
gattgaggctcgctatgaactcgacaccgc

SEQ ID NO: 104324 - DNA, 30 bp, Artificial Sequence
  Synthetic oligonucleotide
acgcaactagtaattgttagatctcaccgc

SEQ ID NO: 104325 - DNA, 30 bp, Artificial Sequence
  Synthetic oligonucleotide
ccgtaaatgtagggggtcagcagtcaccgc

SEQ ID NO: 104326 - DNA, 30 bp, Artificial Sequence
  Synthetic oligonucleotide
catattgcgtaaaaccacgacggttaccgc

SEQ ID NO: 104327 - DNA, 30 bp, Artificial Sequence
  Synthetic oligonucleotide
tccaagaacctcaacggatgtgtttaccgc

SEQ ID NO: 104328 - DNA, 30 bp, Artificial Sequence
  Synthetic oligonucleotide
ggaaagtcatcgcgcttcatgaacacccgc

SEQ ID NO: 104329 - DNA, 30 bp, Artificial Sequence
  Synthetic oligonucleotide
agggcgttcacatgacccctgtgcccccgc

SEQ ID NO: 104330 - DNA, 30 bp, Artificial Sequence
  Synthetic oligonucleotide
tgtctagggccggaactctagcagccccgc

SEQ ID NO: 104331 - DNA, 30 bp, Artificial Sequence
  Synthetic oligonucleotide
cctttaggcaagaaataaggtcggccccgc

SEQ ID NO: 104332 - DNA, 30 bp, Artificial Sequence
  Synthetic oligonucleotide
ccccagacaaaatcagggatccgagcccgc

SEQ ID NO: 104333 - DNA, 30 bp, Artificial Sequence
  Synthetic oligonucleotide
tagaagtgaaacgaagcagattcacgccgc

SEQ ID NO: 104334 - DNA, 30 bp, Artificial Sequence
  Synthetic oligonucleotide
caatcgtggatgggtgttgctcatggccgc

SEQ ID NO: 104335 - DNA, 30 bp, Artificial Sequence
  Synthetic oligonucleotide
tggtgcgggcccgtaagcgcataatgccgc

SEQ ID NO: 104336 - DNA, 30 bp, Artificial Sequence
  Synthetic oligonucleotide
cgtccttactttagtgggacaccgtgccgc

SEQ ID NO: 104337 - DNA, 30 bp, Artificial Sequence
  Synthetic oligonucleotide
tttgcgcatcaagcaaaaggcgggtgccgc

SEQ ID NO: 104338 - DNA, 30 bp, Artificial Sequence
  Synthetic oligonucleotide
gtacaaaattactcgcttcgaactatccgc

SEQ ID NO: 104339 - DNA, 30 bp, Artificial Sequence
  Synthetic oligonucleotide
gcccattgtaaggcgacggaataactccgc

SEQ ID NO: 104340 - DNA, 30 bp, Artificial Sequence
  Synthetic oligonucleotide
gggccatgaatctgcagaatatcactccgc

SEQ ID NO: 104341 - DNA, 30 bp, Artificial Sequence
  Synthetic oligonucleotide
gtcgcatatggcgacttggcggtcctccgc

SEQ ID NO: 104342 - DNA, 30 bp, Artificial Sequence
  Synthetic oligonucleotide
tccacggtttagaaagtcggcaagctccgc

SEQ ID NO: 104343 - DNA, 30 bp, Artificial Sequence
  Synthetic oligonucleotide
ttgttcaacgatgaacaaggtctagtccgc

SEQ ID NO: 104344 - DNA, 30 bp, Artificial Sequence
  Synthetic oligonucleotide
tacttctaaatggaagcacgccaggtccgc

SEQ ID NO: 104345 - DNA, 30 bp, Artificial Sequence
  Synthetic oligonucleotide
tgccgtggcaaagggacgcacattgtccgc

SEQ ID NO: 104346 - DNA, 30 bp, Artificial Sequence
  Synthetic oligonucleotide
cgctgctaggtcggaggttaataaaagcgc

SEQ ID NO: 104347 - DNA, 30 bp, Artificial Sequence
  Synthetic oligonucleotide
gctcacacacatccgatacggataaagcgc

SEQ ID NO: 104348 - DNA, 30 bp, Artificial Sequence
  Synthetic oligonucleotide
tgttggtgagtcgagggcgtgtatcagcgc

SEQ ID NO: 104349 - DNA, 30 bp, Artificial Sequence
  Synthetic oligonucleotide
ctaggttggttgaaccgtacgtaatagcgc

SEQ ID NO: 104350 - DNA, 30 bp, Artificial Sequence
  Synthetic oligonucleotide
aggacggtttgggagttcgacgccccgcgc

SEQ ID NO: 104351 - DNA, 30 bp, Artificial Sequence
  Synthetic oligonucleotide
attggctccgttgaatcgcgttagccgcgc

SEQ ID NO: 104352 - DNA, 30 bp, Artificial Sequence
  Synthetic oligonucleotide
cctctaaacctcggtgcccaatcgccgcgc

SEQ ID NO: 104353 - DNA, 30 bp, Artificial Sequence
  Synthetic oligonucleotide
gatgtctgagtttaggtctaagggccgcgc

SEQ ID NO: 104354 - DNA, 30 bp, Artificial Sequence
  Synthetic oligonucleotide
atcaccgattgaggatcatcggtatcgcgc

SEQ ID NO: 104355 - DNA, 30 bp, Artificial Sequence
  Synthetic oligonucleotide
ctcatgtgggcgaccgaaaccatttcgcgc

SEQ ID NO: 104356 - DNA, 30 bp, Artificial Sequence
  Synthetic oligonucleotide
agtagagataatcgctgatgtgcacggcgc

SEQ ID NO: 104357 - DNA, 30 bp, Artificial Sequence
  Synthetic oligonucleotide
agatcgcgatcatttaccaatctacggcgc

SEQ ID NO: 104358 - DNA, 30 bp, Artificial Sequence
  Synthetic oligonucleotide
gtgtcgtaggaaggacgggtaatggggcgc

SEQ ID NO: 104359 - DNA, 30 bp, Artificial Sequence
  Synthetic oligonucleotide
ggaagcgatttgagagcggtcgtggggcgc

SEQ ID NO: 104360 - DNA, 30 bp, Artificial Sequence
  Synthetic oligonucleotide
gggcggcaaataatgaggaaaatatggcgc

SEQ ID NO: 104361 - DNA, 30 bp, Artificial Sequence
  Synthetic oligonucleotide
catgccgagagttcggccagcctcatgcgc

SEQ ID NO: 104362 - DNA, 30 bp, Artificial Sequence
  Synthetic oligonucleotide
aagatgcgagggtgaaggagtatgatgcgc

SEQ ID NO: 104363 - DNA, 30 bp, Artificial Sequence
  Synthetic oligonucleotide
cgaacttcgaacaagtgggtcggtatgcgc

SEQ ID NO: 104364 - DNA, 30 bp, Artificial Sequence
  Synthetic oligonucleotide
gcgtgtgggtattatttctgtaacctgcgc

SEQ ID NO: 104365 - DNA, 30 bp, Artificial Sequence
  Synthetic oligonucleotide
aattgctaacgtataggagttgaagtgcgc

SEQ ID NO: 104366 - DNA, 30 bp, Artificial Sequence
  Synthetic oligonucleotide
gtcaggatgtgaattcgtacgtcagtgcgc

SEQ ID NO: 104367 - DNA, 30 bp, Artificial Sequence
  Synthetic oligonucleotide
ctgtcgacatactgggagtacgtcgtgcgc

SEQ ID NO: 104368 - DNA, 30 bp, Artificial Sequence
  Synthetic oligonucleotide
agtgttcactcgctataaaagacaaatcgc

SEQ ID NO: 104369 - DNA, 30 bp, Artificial Sequence
  Synthetic oligonucleotide
ggcgggtccgcaattcacgtaagaaatcgc

SEQ ID NO: 104370 - DNA, 30 bp, Artificial Sequence
  Synthetic oligonucleotide
ggcgctgggaatcctgtcacacgcaatcgc

SEQ ID NO: 104371 - DNA, 30 bp, Artificial Sequence
  Synthetic oligonucleotide
actaacggcgaatctatcttgtataatcgc

SEQ ID NO: 104372 - DNA, 30 bp, Artificial Sequence
  Synthetic oligonucleotide
ccgaatactcccgggtgcagacctaatcgc

SEQ ID NO: 104373 - DNA, 30 bp, Artificial Sequence
  Synthetic oligonucleotide
ggaacgtccacagtcatggcgctacatcgc

SEQ ID NO: 104374 - DNA, 30 bp, Artificial Sequence
  Synthetic oligonucleotide
tgagccgtagactatagcaaatgccatcgc

SEQ ID NO: 104375 - DNA, 30 bp, Artificial Sequence
  Synthetic oligonucleotide
ggaattgcggctacgtcacgtgggcatcgc

SEQ ID NO: 104376 - DNA, 30 bp, Artificial Sequence
  Synthetic oligonucleotide
cagggtcggtgttgcataccttctcatcgc

SEQ ID NO: 104377 - DNA, 30 bp, Artificial Sequence
  Synthetic oligonucleotide
actaaggtcgtagaatcagaacaagatcgc

SEQ ID NO: 104378 - DNA, 30 bp, Artificial Sequence
  Synthetic oligonucleotide
tgccgggagcgacggccaggcggagatcgc

SEQ ID NO: 104379 - DNA, 30 bp, Artificial Sequence
  Synthetic oligonucleotide
tggggtgtggcgatcacgagcttaactcgc

SEQ ID NO: 104380 - DNA, 30 bp, Artificial Sequence
  Synthetic oligonucleotide
cctagttgggcttactcgtaagcatctcgc

SEQ ID NO: 104381 - DNA, 30 bp, Artificial Sequence
  Synthetic oligonucleotide
agactctgagcggattggacgcactctcgc

SEQ ID NO: 104382 - DNA, 30 bp, Artificial Sequence
  Synthetic oligonucleotide
gagttcgaaataagagggcacaaacgtcgc

SEQ ID NO: 104383 - DNA, 30 bp, Artificial Sequence
  Synthetic oligonucleotide
tcggcgtcaacactgtctaaacaacgtcgc

SEQ ID NO: 104384 - DNA, 30 bp, Artificial Sequence
  Synthetic oligonucleotide
acccagggttgcgcggaccaacacggtcgc

SEQ ID NO: 104385 - DNA, 30 bp, Artificial Sequence
  Synthetic oligonucleotide
acccagaggacacacatcacgttatgtcgc

SEQ ID NO: 104386 - DNA, 30 bp, Artificial Sequence
  Synthetic oligonucleotide
aatgagtaggtcacctcggtgtgctgtcgc

SEQ ID NO: 104387 - DNA, 30 bp, Artificial Sequence
  Synthetic oligonucleotide
gcgttaactgaaaactcacgtaagtgtcgc

SEQ ID NO: 104388 - DNA, 30 bp, Artificial Sequence
  Synthetic oligonucleotide
tatcataggataacggatcgtaacattcgc

SEQ ID NO: 104389 - DNA, 30 bp, Artificial Sequence
  Synthetic oligonucleotide
gtgtgtccttaatgatgatatggccttcgc

SEQ ID NO: 104390 - DNA, 30 bp, Artificial Sequence
  Synthetic oligonucleotide
gagcccgacctacaatttagcgcaaaaggc

SEQ ID NO: 104391 - DNA, 30 bp, Artificial Sequence
  Synthetic oligonucleotide
agctgacaagccgggatcggcagaaaaggc

SEQ ID NO: 104392 - DNA, 30 bp, Artificial Sequence
  Synthetic oligonucleotide
acatagaatcatcagcaaggtgttaaaggc

SEQ ID NO: 104393 - DNA, 30 bp, Artificial Sequence
  Synthetic oligonucleotide
tcaataatggcgtaagataaggaacaaggc

SEQ ID NO: 104394 - DNA, 30 bp, Artificial Sequence
  Synthetic oligonucleotide
ggcgtgccaacttcaggggaagcagaaggc

SEQ ID NO: 104395 - DNA, 30 bp, Artificial Sequence
  Synthetic oligonucleotide
gagcgtaatccaggtacctccatcgaaggc

SEQ ID NO: 104396 - DNA, 30 bp, Artificial Sequence
  Synthetic oligonucleotide
acaggtttctagttagcgcaaccggaaggc

SEQ ID NO: 104397 - DNA, 30 bp, Artificial Sequence
  Synthetic oligonucleotide
caattcattaagcgctagacctctgaaggc

SEQ ID NO: 104398 - DNA, 30 bp, Artificial Sequence
  Synthetic oligonucleotide
agggagactacaaaccactaccaataaggc

SEQ ID NO: 104399 - DNA, 30 bp, Artificial Sequence
  Synthetic oligonucleotide
ccaacccagctgatgtaaattagataaggc

SEQ ID NO: 104400 - DNA, 30 bp, Artificial Sequence
  Synthetic oligonucleotide
agggtacacgccaggcgcgcttagtaaggc

SEQ ID NO: 104401 - DNA, 30 bp, Artificial Sequence
  Synthetic oligonucleotide
ttcgagaagagggtcgacggattgtaaggc

SEQ ID NO: 104402 - DNA, 30 bp, Artificial Sequence
  Synthetic oligonucleotide
acgttgcggttagaaatagtatattaaggc

SEQ ID NO: 104403 - DNA, 30 bp, Artificial Sequence
  Synthetic oligonucleotide
actggtaagagcatcacgatgggaacaggc

SEQ ID NO: 104404 - DNA, 30 bp, Artificial Sequence
  Synthetic oligonucleotide
aacgaattggttcgcggtctagtgacaggc

SEQ ID NO: 104405 - DNA, 30 bp, Artificial Sequence
  Synthetic oligonucleotide
ataggctaaggtcatggcctgagcccaggc

SEQ ID NO: 104406 - DNA, 30 bp, Artificial Sequence
  Synthetic oligonucleotide
actgcgtagacttaagaatgtgatgcaggc

SEQ ID NO: 104407 - DNA, 30 bp, Artificial Sequence
  Synthetic oligonucleotide
atatgtagaggcggacacgcacagtcaggc

SEQ ID NO: 104408 - DNA, 30 bp, Artificial Sequence
  Synthetic oligonucleotide
gctaaaagaacgcgtcacactccgtcaggc

SEQ ID NO: 104409 - DNA, 30 bp, Artificial Sequence
  Synthetic oligonucleotide
ccaacggtttacattgttccagtgtcaggc

SEQ ID NO: 104410 - DNA, 30 bp, Artificial Sequence
  Synthetic oligonucleotide
ctcggattaccgctctatgaaggttcaggc

SEQ ID NO: 104411 - DNA, 30 bp, Artificial Sequence
  Synthetic oligonucleotide
aaaggcacgctgcgaacgaaagtgagaggc

SEQ ID NO: 104412 - DNA, 30 bp, Artificial Sequence
  Synthetic oligonucleotide
attgtgacccggaatccgagccaacgaggc

SEQ ID NO: 104413 - DNA, 30 bp, Artificial Sequence
  Synthetic oligonucleotide
aaagcgtcggtcaatgtagtgtgacgaggc

SEQ ID NO: 104414 - DNA, 30 bp, Artificial Sequence
  Synthetic oligonucleotide
ccataggctacttgatacatggcaggaggc

SEQ ID NO: 104415 - DNA, 30 bp, Artificial Sequence
  Synthetic oligonucleotide
tgtaggcgctaaatcacggcgatcggaggc

SEQ ID NO: 104416 - DNA, 30 bp, Artificial Sequence
  Synthetic oligonucleotide
gtgtagagcgtagtaggtgaggtcggaggc

SEQ ID NO: 104417 - DNA, 30 bp, Artificial Sequence
  Synthetic oligonucleotide
ggtgaggctggggtgggtgaagagggaggc

SEQ ID NO: 104418 - DNA, 30 bp, Artificial Sequence
  Synthetic oligonucleotide
ggtaagtaagacgccactcagactggaggc

SEQ ID NO: 104419 - DNA, 30 bp, Artificial Sequence
  Synthetic oligonucleotide
attaccaatgcacacattttatcaataggc

SEQ ID NO: 104420 - DNA, 30 bp, Artificial Sequence
  Synthetic oligonucleotide
gaggagacacaagacgaagttataataggc

SEQ ID NO: 104421 - DNA, 30 bp, Artificial Sequence
  Synthetic oligonucleotide
cttcgagaggtaacgtgtttggcgataggc

SEQ ID NO: 104422 - DNA, 30 bp, Artificial Sequence
  Synthetic oligonucleotide
actaaccaaggagtcatccgatcgataggc

SEQ ID NO: 104423 - DNA, 30 bp, Artificial Sequence
  Synthetic oligonucleotide
aacgtatctccgttactctaagcactaggc

SEQ ID NO: 104424 - DNA, 30 bp, Artificial Sequence
  Synthetic oligonucleotide
ccaggctacgatttagggaattgactaggc

SEQ ID NO: 104425 - DNA, 30 bp, Artificial Sequence
  Synthetic oligonucleotide
caccacaagcacttaggcgaaaagctaggc

SEQ ID NO: 104426 - DNA, 30 bp, Artificial Sequence
  Synthetic oligonucleotide
agaagtaataaagatatctgtagtctaggc

SEQ ID NO: 104427 - DNA, 30 bp, Artificial Sequence
  Synthetic oligonucleotide
caagagaccaccccggtagaaggcgtaggc

SEQ ID NO: 104428 - DNA, 30 bp, Artificial Sequence
  Synthetic oligonucleotide
tccaggcactattgagtagtgagtgtaggc

SEQ ID NO: 104429 - DNA, 30 bp, Artificial Sequence
  Synthetic oligonucleotide
aagcagtaccggctcaccgtaaagttaggc

SEQ ID NO: 104430 - DNA, 30 bp, Artificial Sequence
  Synthetic oligonucleotide
agcaagaaaccccgctggaaacggttaggc

SEQ ID NO: 104431 - DNA, 30 bp, Artificial Sequence
  Synthetic oligonucleotide
gatctagctaagcagagggccggatacggc

SEQ ID NO: 104432 - DNA, 30 bp, Artificial Sequence
  Synthetic oligonucleotide
gtgtaaccagagtaggtttgcctcaccggc

SEQ ID NO: 104433 - DNA, 30 bp, Artificial Sequence
  Synthetic oligonucleotide
atctacgccccacataaaggatgccccggc

SEQ ID NO: 104434 - DNA, 30 bp, Artificial Sequence
  Synthetic oligonucleotide
acgtactggcaaaatatactcatgcccggc

SEQ ID NO: 104435 - DNA, 30 bp, Artificial Sequence
  Synthetic oligonucleotide
caaagtgcttagcgagtttgagctcccggc

SEQ ID NO: 104436 - DNA, 30 bp, Artificial Sequence
  Synthetic oligonucleotide
tccatgggtttgctcggcacgattcccggc

SEQ ID NO: 104437 - DNA, 30 bp, Artificial Sequence
  Synthetic oligonucleotide
cagggttgagaaaacgctggggaggccggc

SEQ ID NO: 104438 - DNA, 30 bp, Artificial Sequence
  Synthetic oligonucleotide
accataccttaacatgcgtttcgggccggc

SEQ ID NO: 104439 - DNA, 30 bp, Artificial Sequence
  Synthetic oligonucleotide
cagccttgctgcgaacagaagatggccggc

SEQ ID NO: 104440 - DNA, 30 bp, Artificial Sequence
  Synthetic oligonucleotide
ccatgaaacgcggtgaaaacaggtagcggc

SEQ ID NO: 104441 - DNA, 30 bp, Artificial Sequence
  Synthetic oligonucleotide
cgatctcaagagtctttatggaaaggcggc

SEQ ID NO: 104442 - DNA, 30 bp, Artificial Sequence
  Synthetic oligonucleotide
actgggacagacgtcgcggaaaaatgcggc

SEQ ID NO: 104443 - DNA, 30 bp, Artificial Sequence
  Synthetic oligonucleotide
aacattaggacccgctgaaagaacatcggc

SEQ ID NO: 104444 - DNA, 30 bp, Artificial Sequence
  Synthetic oligonucleotide
ttatccgtgctgcaacacctaggactcggc

SEQ ID NO: 104445 - DNA, 30 bp, Artificial Sequence
  Synthetic oligonucleotide
ggactgagaactaggaagcctgtgctcggc

SEQ ID NO: 104446 - DNA, 30 bp, Artificial Sequence
  Synthetic oligonucleotide
taatggcaaaatcttgtgtgcccagtcggc

SEQ ID NO: 104447 - DNA, 30 bp, Artificial Sequence
  Synthetic oligonucleotide
acggtgcacctcataccctaatcagtcggc

SEQ ID NO: 104448 - DNA, 30 bp, Artificial Sequence
  Synthetic oligonucleotide
tccacacacacttcgtcgaacgatttcggc

SEQ ID NO: 104449 - DNA, 30 bp, Artificial Sequence
  Synthetic oligonucleotide
atcgcgtgggagaagccgcacccgaagggc

SEQ ID NO: 104450 - DNA, 30 bp, Artificial Sequence
  Synthetic oligonucleotide
taagatcgggatgctagcaaacctaagggc

SEQ ID NO: 104451 - DNA, 30 bp, Artificial Sequence
  Synthetic oligonucleotide
agcgcggtaagcatcgagtagcgtaagggc

SEQ ID NO: 104452 - DNA, 30 bp, Artificial Sequence
  Synthetic oligonucleotide
aagcctcatggtggttgggatgtacagggc

SEQ ID NO: 104453 - DNA, 30 bp, Artificial Sequence
  Synthetic oligonucleotide
ccatacaagaggggggattccaggcagggc

SEQ ID NO: 104454 - DNA, 31 bp, Artificial Sequence
  Synthetic oligonucleotide
aagttaggatgggctagaagccgaagagggc

SEQ ID NO: 104455 - DNA, 30 bp, Artificial Sequence
  Synthetic oligonucleotide
tcggttaccaggcgctgtagaaacgagggc

SEQ ID NO: 104456 - DNA, 30 bp, Artificial Sequence
  Synthetic oligonucleotide
tgtccctactagtatggtgatgcggagggc

SEQ ID NO: 104457 - DNA, 30 bp, Artificial Sequence
  Synthetic oligonucleotide
cgtataaacctgtatgcccccatctagggc

SEQ ID NO: 104458 - DNA, 30 bp, Artificial Sequence
  Synthetic oligonucleotide
ccatccagttaaatcagagcgccttagggc

SEQ ID NO: 104459 - DNA, 30 bp, Artificial Sequence
  Synthetic oligonucleotide
attgcgatccggagaggcactcttccgggc

SEQ ID NO: 104460 - DNA, 30 bp, Artificial Sequence
  Synthetic oligonucleotide
gactcgtatgatatacaaaattgagcgggc

SEQ ID NO: 104461 - DNA, 30 bp, Artificial Sequence
  Synthetic oligonucleotide
cggtatggtcgccgtgctgatcgatcgggc

SEQ ID NO: 104462 - DNA, 30 bp, Artificial Sequence
  Synthetic oligonucleotide
tgagatgagcacgtgggacaggtttcgggc

SEQ ID NO: 104463 - DNA, 30 bp, Artificial Sequence
  Synthetic oligonucleotide
ggcaatagtacggaaaacaccccaaggggc

SEQ ID NO: 104464 - DNA, 30 bp, Artificial Sequence
  Synthetic oligonucleotide
agttatccggcatcgtggcgaggcaggggc

SEQ ID NO: 104465 - DNA, 30 bp, Artificial Sequence
  Synthetic oligonucleotide
tgggagtaaggatctgcttaccagcggggc

SEQ ID NO: 104466 - DNA, 30 bp, Artificial Sequence
  Synthetic oligonucleotide
catcttagggagctgtcgaccgtgcggggc

SEQ ID NO: 104467 - DNA, 30 bp, Artificial Sequence
  Synthetic oligonucleotide
tagttgtgcattactacatctgctcggggc

SEQ ID NO: 104468 - DNA, 30 bp, Artificial Sequence
  Synthetic oligonucleotide
cacaaggactgcaggtacgggttcgggggc

SEQ ID NO: 104469 - DNA, 30 bp, Artificial Sequence
  Synthetic oligonucleotide
taaggagcgcacggtatctgacgaatgggc

SEQ ID NO: 104470 - DNA, 30 bp, Artificial Sequence
  Synthetic oligonucleotide
atggaagacttgagccgagcgggcctgggc

SEQ ID NO: 104471 - DNA, 30 bp, Artificial Sequence
  Synthetic oligonucleotide
gggcagagttgtgcaagctgaatcctgggc

SEQ ID NO: 104472 - DNA, 30 bp, Artificial Sequence
  Synthetic oligonucleotide
cggggtaaatcaaagcgcgcatgagtgggc

SEQ ID NO: 104473 - DNA, 30 bp, Artificial Sequence
  Synthetic oligonucleotide
actatggtccggcgagttctcgtagtgggc

SEQ ID NO: 104474 - DNA, 30 bp, Artificial Sequence
  Synthetic oligonucleotide
accgagggcagcctagttactacggtgggc

SEQ ID NO: 104475 - DNA, 30 bp, Artificial Sequence
  Synthetic oligonucleotide
tagttgtacgagcgtgaactacgggtgggc

SEQ ID NO: 104476 - DNA, 30 bp, Artificial Sequence
  Synthetic oligonucleotide
tggaactgggggctcatgatgatacatggc

SEQ ID NO: 104477 - DNA, 30 bp, Artificial Sequence
  Synthetic oligonucleotide
acgaaaatccgcgtggaacgtttacatggc

SEQ ID NO: 104478 - DNA, 30 bp, Artificial Sequence
  Synthetic oligonucleotide
agacaaaggcggtctgcaactaggcatggc

SEQ ID NO: 104479 - DNA, 30 bp, Artificial Sequence
  Synthetic oligonucleotide
agtttaatcacacagaaagtgactcatggc

SEQ ID NO: 104480 - DNA, 30 bp, Artificial Sequence
  Synthetic oligonucleotide
ctacatggtgtgcaaaccgcataagatggc

SEQ ID NO: 104481 - DNA, 30 bp, Artificial Sequence
  Synthetic oligonucleotide
tctacgcggttcacgcaggactaagatggc

SEQ ID NO: 104482 - DNA, 30 bp, Artificial Sequence
  Synthetic oligonucleotide
tacggccgacttgacctcgttatgtatggc

SEQ ID NO: 104483 - DNA, 30 bp, Artificial Sequence
  Synthetic oligonucleotide
tgaatagcgcgactggattgagacactggc

SEQ ID NO: 104484 - DNA, 30 bp, Artificial Sequence
  Synthetic oligonucleotide
tcgtgagatgtaattctaggccgcactggc

SEQ ID NO: 104485 - DNA, 30 bp, Artificial Sequence
  Synthetic oligonucleotide
cggagttgttaacgtagatacggacctggc

SEQ ID NO: 104486 - DNA, 30 bp, Artificial Sequence
  Synthetic oligonucleotide
cagtgaccgctcaagagaggatggcctggc

SEQ ID NO: 104487 - DNA, 30 bp, Artificial Sequence
  Synthetic oligonucleotide
tattacgaacctattcgttactagcgtggc

SEQ ID NO: 104488 - DNA, 30 bp, Artificial Sequence
  Synthetic oligonucleotide
acggtagtatacacatatggtccgcgtggc

SEQ ID NO: 104489 - DNA, 30 bp, Artificial Sequence
  Synthetic oligonucleotide
taccatataggtaaacacgaccggtgtggc

SEQ ID NO: 104490 - DNA, 30 bp, Artificial Sequence
  Synthetic oligonucleotide
ggatgggctatattgatctaggtcattggc

SEQ ID NO: 104491 - DNA, 30 bp, Artificial Sequence
  Synthetic oligonucleotide
gcgtggatagggagcagtagttccgttggc

SEQ ID NO: 104492 - DNA, 30 bp, Artificial Sequence
  Synthetic oligonucleotide
cgtgagtcacagagagttgagagcgttggc

SEQ ID NO: 104493 - DNA, 30 bp, Artificial Sequence
  Synthetic oligonucleotide
cggtatagctacgaagaggaactcgttggc

SEQ ID NO: 104494 - DNA, 30 bp, Artificial Sequence
  Synthetic oligonucleotide
ggcgaggattattcgtgccggaaatttggc

SEQ ID NO: 104495 - DNA, 30 bp, Artificial Sequence
  Synthetic oligonucleotide
gtggtgtagaagaagggtggaaattttggc

SEQ ID NO: 104496 - DNA, 30 bp, Artificial Sequence
  Synthetic oligonucleotide
aaatggaacctacagagtgatgctaaatgc

SEQ ID NO: 104497 - DNA, 30 bp, Artificial Sequence
  Synthetic oligonucleotide
gtgctcgcgcctaagaccggataacaatgc

SEQ ID NO: 104498 - DNA, 30 bp, Artificial Sequence
  Synthetic oligonucleotide
cttgtgggctacggtagtgcgcgcgaatgc

SEQ ID NO: 104499 - DNA, 30 bp, Artificial Sequence
  Synthetic oligonucleotide
acaccggtggttggtaatggattggaatgc

SEQ ID NO: 104500 - DNA, 30 bp, Artificial Sequence
  Synthetic oligonucleotide
gcgaggagggacaatacgagctaataatgc

SEQ ID NO: 104501 - DNA, 30 bp, Artificial Sequence
  Synthetic oligonucleotide
caaaccgatgtctgataggcgcccacatgc

SEQ ID NO: 104502 - DNA, 30 bp, Artificial Sequence
  Synthetic oligonucleotide
ccgccccataaggatcagtaacgtacatgc

SEQ ID NO: 104503 - DNA, 30 bp, Artificial Sequence
  Synthetic oligonucleotide
aacgcatcttcgatagcggttgatccatgc

SEQ ID NO: 104504 - DNA, 30 bp, Artificial Sequence
  Synthetic oligonucleotide
tgcttagaccgaggccactatcttccatgc

SEQ ID NO: 104505 - DNA, 31 bp, Artificial Sequence
  Synthetic oligonucleotide
agacccaaggcgcataaaacagattagatgc

SEQ ID NO: 104506 - DNA, 30 bp, Artificial Sequence
  Synthetic oligonucleotide
caggacgaagcaaatagcaactaccgatgc

SEQ ID NO: 104507 - DNA, 30 bp, Artificial Sequence
  Synthetic oligonucleotide
tggtggaggaatgtgctctttcagcgatgc

SEQ ID NO: 104508 - DNA, 30 bp, Artificial Sequence
  Synthetic oligonucleotide
cgtccaaccggtatacggatctgtcgatgc

SEQ ID NO: 104509 - DNA, 30 bp, Artificial Sequence
  Synthetic oligonucleotide
catgaatgtcaagctcccggccaaggatgc

SEQ ID NO: 104510 - DNA, 30 bp, Artificial Sequence
  Synthetic oligonucleotide
ctaaggttggccgccctgactaagctatgc

SEQ ID NO: 104511 - DNA, 30 bp, Artificial Sequence
  Synthetic oligonucleotide
tcctgaatccaaagcgaacgcagagtatgc

SEQ ID NO: 104512 - DNA, 30 bp, Artificial Sequence
  Synthetic oligonucleotide
acctagatcgtgagcgtaaatctagtatgc

SEQ ID NO: 104513 - DNA, 30 bp, Artificial Sequence
  Synthetic oligonucleotide
tgaaccagaataggagtgatttcggtatgc

SEQ ID NO: 104514 - DNA, 30 bp, Artificial Sequence
  Synthetic oligonucleotide
ggtcaacccgagggctgtcgggatgtatgc

SEQ ID NO: 104515 - DNA, 30 bp, Artificial Sequence
  Synthetic oligonucleotide
agggccgcgaaggtgaggctcacattatgc

SEQ ID NO: 104516 - DNA, 30 bp, Artificial Sequence
  Synthetic oligonucleotide
caatcaccccaggtctaggggactaactgc

SEQ ID NO: 104517 - DNA, 30 bp, Artificial Sequence
  Synthetic oligonucleotide
tcgtgcacaaacacatagtgatctaactgc

SEQ ID NO: 104518 - DNA, 30 bp, Artificial Sequence
  Synthetic oligonucleotide
tggttctcagtgaatgatcaacagcactgc

SEQ ID NO: 104519 - DNA, 30 bp, Artificial Sequence
  Synthetic oligonucleotide
ggcggataaatcaaacactagtcgcactgc

SEQ ID NO: 104520 - DNA, 30 bp, Artificial Sequence
  Synthetic oligonucleotide
cgttatctgactaagaagtgctatcactgc

SEQ ID NO: 104521 - DNA, 30 bp, Artificial Sequence
  Synthetic oligonucleotide
tggaccaagatagcacccggctaagactgc

SEQ ID NO: 104522 - DNA, 30 bp, Artificial Sequence
  Synthetic oligonucleotide
agggcaacccccccatcagcgagaacctgc

SEQ ID NO: 104523 - DNA, 30 bp, Artificial Sequence
  Synthetic oligonucleotide
atgagaccaccttttacatacgttacctgc

SEQ ID NO: 104524 - DNA, 30 bp, Artificial Sequence
  Synthetic oligonucleotide
gctacacacgcgtttgacatacgaccctgc

SEQ ID NO: 104525 - DNA, 30 bp, Artificial Sequence
  Synthetic oligonucleotide
tcaaggacctggggatccaagactgcctgc

SEQ ID NO: 104526 - DNA, 30 bp, Artificial Sequence
  Synthetic oligonucleotide
caaaataaaatattgggccaaaacagctgc

SEQ ID NO: 104527 - DNA, 30 bp, Artificial Sequence
  Synthetic oligonucleotide
acccgaccaatggtatgaaggaagagctgc

SEQ ID NO: 104528 - DNA, 30 bp, Artificial Sequence
  Synthetic oligonucleotide
gcggtggtggtcaagcagaattctagctgc

SEQ ID NO: 104529 - DNA, 30 bp, Artificial Sequence
  Synthetic oligonucleotide
tgaagagtattggataatttcgccggctgc

SEQ ID NO: 104530 - DNA, 30 bp, Artificial Sequence
  Synthetic oligonucleotide
gctggaaaaggctcgatcttggcgggctgc

SEQ ID NO: 104531 - DNA, 30 bp, Artificial Sequence
  Synthetic oligonucleotide
cgagagtaggggtacggtgtgatctgctgc

SEQ ID NO: 104532 - DNA, 30 bp, Artificial Sequence
  Synthetic oligonucleotide
ttagtgaaaaccgtcggaacaaggtgctgc

SEQ ID NO: 104533 - DNA, 30 bp, Artificial Sequence
  Synthetic oligonucleotide
taaaccatcaagtggtgggaggccatctgc

SEQ ID NO: 104534 - DNA, 30 bp, Artificial Sequence
  Synthetic oligonucleotide
cggactgatggggttaatagccagatctgc

SEQ ID NO: 104535 - DNA, 30 bp, Artificial Sequence
  Synthetic oligonucleotide
agcagaggtcaggtgtgcttagggatctgc

SEQ ID NO: 104536 - DNA, 30 bp, Artificial Sequence
  Synthetic oligonucleotide
cgtcaacaatagcctggagctacagtctgc

SEQ ID NO: 104537 - DNA, 30 bp, Artificial Sequence
  Synthetic oligonucleotide
cagcgcataacgcccagggcacaccagtgc

SEQ ID NO: 104538 - DNA, 30 bp, Artificial Sequence
  Synthetic oligonucleotide
cacatatgtccgggccagtcagtcgagtgc

SEQ ID NO: 104539 - DNA, 30 bp, Artificial Sequence
  Synthetic oligonucleotide
agttggccagtgaacgatttaggtgagtgc

SEQ ID NO: 104540 - DNA, 30 bp, Artificial Sequence
  Synthetic oligonucleotide
gaatgaggaaaatctaagacaggctagtgc

SEQ ID NO: 104541 - DNA, 30 bp, Artificial Sequence
  Synthetic oligonucleotide
cccagtggtgggcagaatgaccgaacgtgc

SEQ ID NO: 104542 - DNA, 30 bp, Artificial Sequence
  Synthetic oligonucleotide
cggacaatcgttgtgtgtccatcgacgtgc

SEQ ID NO: 104543 - DNA, 30 bp, Artificial Sequence
  Synthetic oligonucleotide
aacgcttggtataaggcaccgaggacgtgc

SEQ ID NO: 104544 - DNA, 30 bp, Artificial Sequence
  Synthetic oligonucleotide
ctagcagtaagagaaaatgtactcccgtgc

SEQ ID NO: 104545 - DNA, 30 bp, Artificial Sequence
  Synthetic oligonucleotide
aggcaaggccctgccgggcttaaagcgtgc

SEQ ID NO: 104546 - DNA, 30 bp, Artificial Sequence
  Synthetic oligonucleotide
gcaagggacacgtcttgttggggcgcgtgc

SEQ ID NO: 104547 - DNA, 30 bp, Artificial Sequence
  Synthetic oligonucleotide
tagcgagagtgagagctggtcgtggcgtgc

SEQ ID NO: 104548 - DNA, 30 bp, Artificial Sequence
  Synthetic oligonucleotide
tcaggtggtgtacagcgggttggatcgtgc

SEQ ID NO: 104549 - DNA, 30 bp, Artificial Sequence
  Synthetic oligonucleotide
ctttacgtgcggtacatattgtcgtcgtgc

SEQ ID NO: 104550 - DNA, 30 bp, Artificial Sequence
  Synthetic oligonucleotide
gtaattataacaaattaaatccgccggtgc

SEQ ID NO: 104551 - DNA, 30 bp, Artificial Sequence
  Synthetic oligonucleotide
agaatgtttctgtggcgtccaggccggtgc

SEQ ID NO: 104552 - DNA, 30 bp, Artificial Sequence
  Synthetic oligonucleotide
ccactcaacaacactttgaacagcgggtgc

SEQ ID NO: 104553 - DNA, 30 bp, Artificial Sequence
  Synthetic oligonucleotide
cgagtcacatcgactgcgttggatgggtgc

SEQ ID NO: 104554 - DNA, 30 bp, Artificial Sequence
  Synthetic oligonucleotide
cgtgacggagataacaagccaactgggtgc

SEQ ID NO: 104555 - DNA, 30 bp, Artificial Sequence
  Synthetic oligonucleotide
aggcctaataggcagcctacgagtgggtgc

SEQ ID NO: 104556 - DNA, 30 bp, Artificial Sequence
  Synthetic oligonucleotide
ggaggcttgtaggcacgaggtacttggtgc

SEQ ID NO: 104557 - DNA, 30 bp, Artificial Sequence
  Synthetic oligonucleotide
tacggatctaacacccgagcggcttggtgc

SEQ ID NO: 104558 - DNA, 30 bp, Artificial Sequence
  Synthetic oligonucleotide
caggtgcttttcagcggaaataaaatgtgc

SEQ ID NO: 104559 - DNA, 30 bp, Artificial Sequence
  Synthetic oligonucleotide
ggtctgtgtccagtaaaggatgagatgtgc

SEQ ID NO: 104560 - DNA, 31 bp, Artificial Sequence
  Synthetic oligonucleotide
gcgaacgagtaactaaagagtgttgatgtgc

SEQ ID NO: 104561 - DNA, 30 bp, Artificial Sequence
  Synthetic oligonucleotide
gttacattggtaggcataggttggctgtgc

SEQ ID NO: 104562 - DNA, 30 bp, Artificial Sequence
  Synthetic oligonucleotide
caagggtatccgtttatcaaaaaggtgtgc

SEQ ID NO: 104563 - DNA, 30 bp, Artificial Sequence
  Synthetic oligonucleotide
gggagaaaactgacaatgctgtgcttgtgc

SEQ ID NO: 104564 - DNA, 30 bp, Artificial Sequence
  Synthetic oligonucleotide
gtaaatagctgcgaaggcataaggaattgc

SEQ ID NO: 104565 - DNA, 30 bp, Artificial Sequence
  Synthetic oligonucleotide
gctggggccgccattaggtaacggaattgc

SEQ ID NO: 104566 - DNA, 30 bp, Artificial Sequence
  Synthetic oligonucleotide
aggcatgactacgagtaaaacatgaattgc

SEQ ID NO: 104567 - DNA, 30 bp, Artificial Sequence
  Synthetic oligonucleotide
ccacagggcacggtatgtagaatacattgc

SEQ ID NO: 104568 - DNA, 30 bp, Artificial Sequence
  Synthetic oligonucleotide
ttagaccttagagcatgctctcgccattgc

SEQ ID NO: 104569 - DNA, 30 bp, Artificial Sequence
  Synthetic oligonucleotide
cgtaaatgagggtgtcacgtttagcattgc

SEQ ID NO: 104570 - DNA, 30 bp, Artificial Sequence
  Synthetic oligonucleotide
ccggagcgcgcgtctctaaggcttcattgc

SEQ ID NO: 104571 - DNA, 30 bp, Artificial Sequence
  Synthetic oligonucleotide
agactggacgccaaaacaacaagagattgc

SEQ ID NO: 104572 - DNA, 30 bp, Artificial Sequence
  Synthetic oligonucleotide
taaaagtgccaggtgggagagcaatattgc

SEQ ID NO: 104573 - DNA, 30 bp, Artificial Sequence
  Synthetic oligonucleotide
tcggccaagcgactccggataagctattgc

SEQ ID NO: 104574 - DNA, 30 bp, Artificial Sequence
  Synthetic oligonucleotide
gaagatcgaatatctttcgatccgtattgc

SEQ ID NO: 104575 - DNA, 30 bp, Artificial Sequence
  Synthetic oligonucleotide
gtacctaatgatgcctcgctttgcgcttgc

SEQ ID NO: 104576 - DNA, 30 bp, Artificial Sequence
  Synthetic oligonucleotide
tcgcaaaataccgtccccaaggaggcttgc

SEQ ID NO: 104577 - DNA, 30 bp, Artificial Sequence
  Synthetic oligonucleotide
aggttcaacaaagggaatcgagatgcttgc

SEQ ID NO: 104578 - DNA, 30 bp, Artificial Sequence
  Synthetic oligonucleotide
ggagcgtcaataacttgtgtgaaaagttgc

SEQ ID NO: 104579 - DNA, 30 bp, Artificial Sequence
  Synthetic oligonucleotide
cgggaatcgcagaagaatgatttaagttgc

SEQ ID NO: 104580 - DNA, 30 bp, Artificial Sequence
  Synthetic oligonucleotide
ggtgggcgaagcccggttacggagagttgc

SEQ ID NO: 104581 - DNA, 30 bp, Artificial Sequence
  Synthetic oligonucleotide
cagctaatgaaatatcgggttaggagttgc

SEQ ID NO: 104582 - DNA, 30 bp, Artificial Sequence
  Synthetic oligonucleotide
gcgtccaaaattttcgacatcttgagttgc

SEQ ID NO: 104583 - DNA, 30 bp, Artificial Sequence
  Synthetic oligonucleotide
gggacggttaccatactctagcgtagttgc

SEQ ID NO: 104584 - DNA, 30 bp, Artificial Sequence
  Synthetic oligonucleotide
cgtccgacatggtggtcagtcgacggttgc

SEQ ID NO: 104585 - DNA, 30 bp, Artificial Sequence
  Synthetic oligonucleotide
aaccggtcctatcaagcgcagtctggttgc

SEQ ID NO: 104586 - DNA, 30 bp, Artificial Sequence
  Synthetic oligonucleotide
tgcgttccggctcgaacacaagcaatttgc

SEQ ID NO: 104587 - DNA, 30 bp, Artificial Sequence
  Synthetic oligonucleotide
agagttgacccgcggatcgaaatgatttgc

SEQ ID NO: 104588 - DNA, 30 bp, Artificial Sequence
  Synthetic oligonucleotide
ataagttccgcggaggacaagagtatttgc

SEQ ID NO: 104589 - DNA, 30 bp, Artificial Sequence
  Synthetic oligonucleotide
acggtaggtgttccaatgttcgttatttgc

SEQ ID NO: 104590 - DNA, 30 bp, Artificial Sequence
  Synthetic oligonucleotide
tcgttcctggtaaacaagcggaccgtttgc

SEQ ID NO: 104591 - DNA, 30 bp, Artificial Sequence
  Synthetic oligonucleotide
gataagagaagcgtgtgaaaaagattttgc

SEQ ID NO: 104592 - DNA, 30 bp, Artificial Sequence
  Synthetic oligonucleotide
taataatccccagggtaagggaggaaaatc

SEQ ID NO: 104593 - DNA, 30 bp, Artificial Sequence
  Synthetic oligonucleotide
aaggtcgctgcatgggcaagtgataaaatc

SEQ ID NO: 104594 - DNA, 30 bp, Artificial Sequence
  Synthetic oligonucleotide
tcccgtccgaaacgggtcatacaccaaatc

SEQ ID NO: 104595 - DNA, 30 bp, Artificial Sequence
  Synthetic oligonucleotide
acttcagtgaagtgtgcaacgcaagaaatc

SEQ ID NO: 104596 - DNA, 30 bp, Artificial Sequence
  Synthetic oligonucleotide
ggaatgttaacctttaaccagccagaaatc

SEQ ID NO: 104597 - DNA, 30 bp, Artificial Sequence
  Synthetic oligonucleotide
gaatgtggtgaggtgtgaccttcggaaatc

SEQ ID NO: 104598 - DNA, 30 bp, Artificial Sequence
  Synthetic oligonucleotide
cgtatcacgcgtctgctcgaaggtgaaatc

SEQ ID NO: 104599 - DNA, 30 bp, Artificial Sequence
  Synthetic oligonucleotide
agacagataccgagagggggctcataaatc

SEQ ID NO: 104600 - DNA, 30 bp, Artificial Sequence
  Synthetic oligonucleotide
ggtaaactggggccgacgaagccaacaatc

SEQ ID NO: 104601 - DNA, 30 bp, Artificial Sequence
  Synthetic oligonucleotide
ctctcgtcctcttaaggtggctacacaatc

SEQ ID NO: 104602 - DNA, 30 bp, Artificial Sequence
  Synthetic oligonucleotide
agcgcgtcgaaccggggctagtccacaatc

SEQ ID NO: 104603 - DNA, 30 bp, Artificial Sequence
  Synthetic oligonucleotide
catagttacgggggaatagagacaccaatc

SEQ ID NO: 104604 - DNA, 30 bp, Artificial Sequence
  Synthetic oligonucleotide
cgattatcgagcagtgtgtgggagccaatc

SEQ ID NO: 104605 - DNA, 30 bp, Artificial Sequence
  Synthetic oligonucleotide
cgagtacgaaagtcagcgggtggagcaatc

SEQ ID NO: 104606 - DNA, 30 bp, Artificial Sequence
  Synthetic oligonucleotide
aagagagggacacattccttcggcgcaatc

SEQ ID NO: 104607 - DNA, 30 bp, Artificial Sequence
  Synthetic oligonucleotide
gcaccttaactcctccaggtatcggcaatc

SEQ ID NO: 104608 - DNA, 30 bp, Artificial Sequence
  Synthetic oligonucleotide
tggactgcgcgacggccagggtgtgcaatc

SEQ ID NO: 104609 - DNA, 30 bp, Artificial Sequence
  Synthetic oligonucleotide
tcataggatcggcaaagttccgactcaatc

SEQ ID NO: 104610 - DNA, 30 bp, Artificial Sequence
  Synthetic oligonucleotide
tggagaatagggactttaaggcgctcaatc

SEQ ID NO: 104611 - DNA, 30 bp, Artificial Sequence
  Synthetic oligonucleotide
agatctccatacgtacagagtggctcaatc

SEQ ID NO: 104612 - DNA, 30 bp, Artificial Sequence
  Synthetic oligonucleotide
gggtctccatgtgtaaaaagtctaagaatc

SEQ ID NO: 104613 - DNA, 30 bp, Artificial Sequence
  Synthetic oligonucleotide
caacatcgcttggggctactagccagaatc

SEQ ID NO: 104614 - DNA, 30 bp, Artificial Sequence
  Synthetic oligonucleotide
agtgcaaatatagcctgtctggccggaatc

SEQ ID NO: 104615 - DNA, 30 bp, Artificial Sequence
  Synthetic oligonucleotide
aggataggaagctcacacccaagcggaatc

SEQ ID NO: 104616 - DNA, 30 bp, Artificial Sequence
  Synthetic oligonucleotide
gaaactgtggattggacagtccggggaatc

SEQ ID NO: 104617 - DNA, 29 bp, Artificial Sequence
  Synthetic oligonucleotide
gaacgatgaatgtgcctgatgactgaatc

SEQ ID NO: 104618 - DNA, 30 bp, Artificial Sequence
  Synthetic oligonucleotide
tcagggttgtggattagttgtgtctgaatc

SEQ ID NO: 104619 - DNA, 30 bp, Artificial Sequence
  Synthetic oligonucleotide
aggggagacgagacaatcatgtcgataatc

SEQ ID NO: 104620 - DNA, 30 bp, Artificial Sequence
  Synthetic oligonucleotide
atgcaaacggaccatacgtgagaagtaatc

SEQ ID NO: 104621 - DNA, 30 bp, Artificial Sequence
  Synthetic oligonucleotide
agcggcctaatgttcctaaccggattaatc

SEQ ID NO: 104622 - DNA, 30 bp, Artificial Sequence
  Synthetic oligonucleotide
cttcgattggctgattatctagaaaacatc

SEQ ID NO: 104623 - DNA, 30 bp, Artificial Sequence
  Synthetic oligonucleotide
atgatatattaccagaaaaccaacaacatc

SEQ ID NO: 104624 - DNA, 30 bp, Artificial Sequence
  Synthetic oligonucleotide
gaagctcagtgcataaaggagtctaacatc

SEQ ID NO: 104625 - DNA, 30 bp, Artificial Sequence
  Synthetic oligonucleotide
acgacacaccttttagggtcggcacacatc

SEQ ID NO: 104626 - DNA, 30 bp, Artificial Sequence
  Synthetic oligonucleotide
cgttatggttctgtgaacatgatacacatc

SEQ ID NO: 104627 - DNA, 30 bp, Artificial Sequence
  Synthetic oligonucleotide
tgtgtgggaagacgagtaacctcatacatc

SEQ ID NO: 104628 - DNA, 30 bp, Artificial Sequence
  Synthetic oligonucleotide
aaagagggaaaataggtagtgggctacatc

SEQ ID NO: 104629 - DNA, 30 bp, Artificial Sequence
  Synthetic oligonucleotide
gggtaaatttgcgcttggcggccacccatc

SEQ ID NO: 104630 - DNA, 30 bp, Artificial Sequence
  Synthetic oligonucleotide
tcacaggccgagggcgggactgtctccatc

SEQ ID NO: 104631 - DNA, 30 bp, Artificial Sequence
  Synthetic oligonucleotide
acctgcgcgatataatacaggagttccatc

SEQ ID NO: 104632 - DNA, 30 bp, Artificial Sequence
  Synthetic oligonucleotide
attagcaccgaataaccgtgccgttccatc

SEQ ID NO: 104633 - DNA, 30 bp, Artificial Sequence
  Synthetic oligonucleotide
taagggtagcaatacgaggaatcaagcatc

SEQ ID NO: 104634 - DNA, 30 bp, Artificial Sequence
  Synthetic oligonucleotide
gtcagcgagcacaatgggtcgataagcatc

SEQ ID NO: 104635 - DNA, 30 bp, Artificial Sequence
  Synthetic oligonucleotide
aaacggcccgagaagaagagcatcagcatc

SEQ ID NO: 104636 - DNA, 30 bp, Artificial Sequence
  Synthetic oligonucleotide
ctgcaaatcgagaggggtagggcacgcatc

SEQ ID NO: 104637 - DNA, 30 bp, Artificial Sequence
  Synthetic oligonucleotide
ccgcgactgcgccgctcgaaggatggcatc

SEQ ID NO: 104638 - DNA, 30 bp, Artificial Sequence
  Synthetic oligonucleotide
caatcgtggtaatcattgagtggatgcatc

SEQ ID NO: 104639 - DNA, 30 bp, Artificial Sequence
  Synthetic oligonucleotide
gtctcgcggagcctaatgaagacgtgcatc

SEQ ID NO: 104640 - DNA, 30 bp, Artificial Sequence
  Synthetic oligonucleotide
gtcataagcttcatagatcgtgaaatcatc

SEQ ID NO: 104641 - DNA, 30 bp, Artificial Sequence
  Synthetic oligonucleotide
gggcatatccggagatctattgtcctcatc

SEQ ID NO: 104642 - DNA, 30 bp, Artificial Sequence
  Synthetic oligonucleotide
catggcaactatttaccagatagcgtcatc

SEQ ID NO: 104643 - DNA, 30 bp, Artificial Sequence
  Synthetic oligonucleotide
gacgtgggggtccggcgaggccaattcatc

SEQ ID NO: 104644 - DNA, 30 bp, Artificial Sequence
  Synthetic oligonucleotide
catttgcaaataatacaccttcctaagatc

SEQ ID NO: 104645 - DNA, 30 bp, Artificial Sequence
  Synthetic oligonucleotide
atgcgtcgttagaataatcttccacagatc

SEQ ID NO: 104646 - DNA, 30 bp, Artificial Sequence
  Synthetic oligonucleotide
gctgtgagagcggtaagggaataccagatc

SEQ ID NO: 104647 - DNA, 30 bp, Artificial Sequence
  Synthetic oligonucleotide
cgtggaatggtcagagactttcagcagatc

SEQ ID NO: 104648 - DNA, 30 bp, Artificial Sequence
  Synthetic oligonucleotide
acgacttctagtcgtacggagtagcagatc

SEQ ID NO: 104649 - DNA, 30 bp, Artificial Sequence
  Synthetic oligonucleotide
tggagtccacgttcagggggagcgcagatc

SEQ ID NO: 104650 - DNA, 30 bp, Artificial Sequence
  Synthetic oligonucleotide
cgtatgcgcggggtctattaaacagagatc

SEQ ID NO: 104651 - DNA, 30 bp, Artificial Sequence
  Synthetic oligonucleotide
tgtgggaccctagccagcgggatggagatc

SEQ ID NO: 104652 - DNA, 30 bp, Artificial Sequence
  Synthetic oligonucleotide
gtgacgtgaatttaatcggcagacacgatc

SEQ ID NO: 104653 - DNA, 30 bp, Artificial Sequence
  Synthetic oligonucleotide
tggttaaactcagagcctagacaggcgatc

SEQ ID NO: 104654 - DNA, 30 bp, Artificial Sequence
  Synthetic oligonucleotide
tcagcgagcgctacgggcgtcaggtcgatc

SEQ ID NO: 104655 - DNA, 30 bp, Artificial Sequence
  Synthetic oligonucleotide
gctcaaccccgagagacatatgggcggatc

SEQ ID NO: 104656 - DNA, 30 bp, Artificial Sequence
  Synthetic oligonucleotide
ttgatggggggcgccgcgatatctcggatc

SEQ ID NO: 104657 - DNA, 30 bp, Artificial Sequence
  Synthetic oligonucleotide
ctatagggctgttcgaacaccactgggatc

SEQ ID NO: 104658 - DNA, 30 bp, Artificial Sequence
  Synthetic oligonucleotide
gggcatagcgactgaagcctaaagtggatc

SEQ ID NO: 104659 - DNA, 30 bp, Artificial Sequence
  Synthetic oligonucleotide
aaaaaagaaagaccgcctagcgaaatgatc

SEQ ID NO: 104660 - DNA, 30 bp, Artificial Sequence
  Synthetic oligonucleotide
cagactcaggagacgtgcaagtgactgatc

SEQ ID NO: 104661 - DNA, 30 bp, Artificial Sequence
  Synthetic oligonucleotide
aaccagacgacacatcagaacgggctgatc

SEQ ID NO: 104662 - DNA, 30 bp, Artificial Sequence
  Synthetic oligonucleotide
gcctgaaggttggtaaacatcccggtgatc

SEQ ID NO: 104663 - DNA, 30 bp, Artificial Sequence
  Synthetic oligonucleotide
aataaggacaatcgatcaactgacaatatc

SEQ ID NO: 104664 - DNA, 30 bp, Artificial Sequence
  Synthetic oligonucleotide
gtagaactaggcgatactcagtgacatatc

SEQ ID NO: 104665 - DNA, 30 bp, Artificial Sequence
  Synthetic oligonucleotide
ataggcagggtctaataagcacattatatc

SEQ ID NO: 104666 - DNA, 30 bp, Artificial Sequence
  Synthetic oligonucleotide
atcactagttccacggaaggtcagcctatc

SEQ ID NO: 104667 - DNA, 30 bp, Artificial Sequence
  Synthetic oligonucleotide
agaatacaagactgaggatacaatcgtatc

SEQ ID NO: 104668 - DNA, 30 bp, Artificial Sequence
  Synthetic oligonucleotide
gctcgaggcacatcaggcggtgaaggtatc

SEQ ID NO: 104669 - DNA, 30 bp, Artificial Sequence
  Synthetic oligonucleotide
gtccgaaggtagccttccctgaaatgtatc

SEQ ID NO: 104670 - DNA, 30 bp, Artificial Sequence
  Synthetic oligonucleotide
tcgggcagggagatttatgtggcaattatc

SEQ ID NO: 104671 - DNA, 30 bp, Artificial Sequence
  Synthetic oligonucleotide
tacgttgggagcggtcctggctagattatc

SEQ ID NO: 104672 - DNA, 30 bp, Artificial Sequence
  Synthetic oligonucleotide
tcgcgatgggacggcccccttacagttatc

SEQ ID NO: 104673 - DNA, 30 bp, Artificial Sequence
  Synthetic oligonucleotide
gcggcggaaaagtagccaagtaccgttatc

SEQ ID NO: 104674 - DNA, 31 bp, Artificial Sequence
  Synthetic oligonucleotide
gcgtggtttacgcaaaaaggattaggttatc

SEQ ID NO: 104675 - DNA, 30 bp, Artificial Sequence
  Synthetic oligonucleotide
cgttcccgatttccacgtaatcccaaactc

SEQ ID NO: 104676 - DNA, 30 bp, Artificial Sequence
  Synthetic oligonucleotide
tagcgatgacgtacttaatcactgaaactc

SEQ ID NO: 104677 - DNA, 30 bp, Artificial Sequence
  Synthetic oligonucleotide
acatgcttgggggcgagactttgacaactc

SEQ ID NO: 104678 - DNA, 30 bp, Artificial Sequence
  Synthetic oligonucleotide
tcgaacagcataacgtgacattaccaactc

SEQ ID NO: 104679 - DNA, 30 bp, Artificial Sequence
  Synthetic oligonucleotide
aagaaaccgtctaaagaagcattccaactc

SEQ ID NO: 104680 - DNA, 30 bp, Artificial Sequence
  Synthetic oligonucleotide
actgtaaaaacatctgtggagggggaactc

SEQ ID NO: 104681 - DNA, 30 bp, Artificial Sequence
  Synthetic oligonucleotide
ctaccaaacatcgacgggggctgataactc

SEQ ID NO: 104682 - DNA, 30 bp, Artificial Sequence
  Synthetic oligonucleotide
gcactagggtcggtcttgtctacttaactc

SEQ ID NO: 104683 - DNA, 30 bp, Artificial Sequence
  Synthetic oligonucleotide
cccgaccgtaacagccaaaacaactcactc

SEQ ID NO: 104684 - DNA, 30 bp, Artificial Sequence
  Synthetic oligonucleotide
cagctcgtatggagcgtaggatacagactc

SEQ ID NO: 104685 - DNA, 30 bp, Artificial Sequence
  Synthetic oligonucleotide
gcgtcgacgatgcgacagccacaccgactc

SEQ ID NO: 104686 - DNA, 30 bp, Artificial Sequence
  Synthetic oligonucleotide
gctaccattatagggagtaagggctgactc

SEQ ID NO: 104687 - DNA, 30 bp, Artificial Sequence
  Synthetic oligonucleotide
accctcataaaaggatccaagtggtgactc

SEQ ID NO: 104688 - DNA, 30 bp, Artificial Sequence
  Synthetic oligonucleotide
atgccatagaatgaggaagtacattgactc

SEQ ID NO: 104689 - DNA, 30 bp, Artificial Sequence
  Synthetic oligonucleotide
gagaggtagaggcatactaaatcttgactc

SEQ ID NO: 104690 - DNA, 30 bp, Artificial Sequence
  Synthetic oligonucleotide
acgagggactaatcaagtgctccgatactc

SEQ ID NO: 104691 - DNA, 30 bp, Artificial Sequence
  Synthetic oligonucleotide
atcgttcaggtggtgggccaatttatactc

SEQ ID NO: 104692 - DNA, 30 bp, Artificial Sequence
  Synthetic oligonucleotide
tatggaggaacggtcttatacgggctactc

SEQ ID NO: 104693 - DNA, 30 bp, Artificial Sequence
  Synthetic oligonucleotide
aatgggaaataaacggcaaccatggtactc

SEQ ID NO: 104694 - DNA, 30 bp, Artificial Sequence
  Synthetic oligonucleotide
agaatccggagttatcagctgaatgtactc

SEQ ID NO: 104695 - DNA, 30 bp, Artificial Sequence
  Synthetic oligonucleotide
agcgagcggcaactaaacaactaattactc

SEQ ID NO: 104696 - DNA, 30 bp, Artificial Sequence
  Synthetic oligonucleotide
tgaactcgggcgaatctgttccagttactc

SEQ ID NO: 104697 - DNA, 30 bp, Artificial Sequence
  Synthetic oligonucleotide
ccaatcaccggactctcggtacaaaacctc

SEQ ID NO: 104698 - DNA, 30 bp, Artificial Sequence
  Synthetic oligonucleotide
acggacgttagtaagacgtcctaaaacctc

SEQ ID NO: 104699 - DNA, 30 bp, Artificial Sequence
  Synthetic oligonucleotide
ctggtagctgtcatagaaggtagaaacctc

SEQ ID NO: 104700 - DNA, 30 bp, Artificial Sequence
  Synthetic oligonucleotide
catcaacgaggcactatatagggtaacctc

SEQ ID NO: 104701 - DNA, 30 bp, Artificial Sequence
  Synthetic oligonucleotide
cggtagctgccacctatcaaaagccacctc

SEQ ID NO: 104702 - DNA, 30 bp, Artificial Sequence
  Synthetic oligonucleotide
acggtagccggtgctttgggcgaggacctc

SEQ ID NO: 104703 - DNA, 30 bp, Artificial Sequence
  Synthetic oligonucleotide
cgactatgagaaagagcttaaccctccctc

SEQ ID NO: 104704 - DNA, 30 bp, Artificial Sequence
  Synthetic oligonucleotide
gcaattaagcagaactccgaccctggcctc

SEQ ID NO: 104705 - DNA, 30 bp, Artificial Sequence
  Synthetic oligonucleotide
gcatacgtcacgaacgcgtgtctatgcctc

SEQ ID NO: 104706 - DNA, 30 bp, Artificial Sequence
  Synthetic oligonucleotide
tcatcatcgtccgggtcatctaacatcctc

SEQ ID NO: 104707 - DNA, 30 bp, Artificial Sequence
  Synthetic oligonucleotide
caggtcgtaattaaatactgtatgatcctc

SEQ ID NO: 104708 - DNA, 30 bp, Artificial Sequence
  Synthetic oligonucleotide
gagctactccttgcgaaacccgcgctcctc

SEQ ID NO: 104709 - DNA, 30 bp, Artificial Sequence
  Synthetic oligonucleotide
gtacgggcccgaagaactcatacattcctc

SEQ ID NO: 104710 - DNA, 30 bp, Artificial Sequence
  Synthetic oligonucleotide
tcgaattgtggctcggcggtggtcaagctc

SEQ ID NO: 104711 - DNA, 30 bp, Artificial Sequence
  Synthetic oligonucleotide
tataagcaacacaggttaaaggtcgagctc

SEQ ID NO: 104712 - DNA, 31 bp, Artificial Sequence
  Synthetic oligonucleotide
ctgccaccctaggcatcaccgtaattagctc

SEQ ID NO: 104713 - DNA, 30 bp, Artificial Sequence
  Synthetic oligonucleotide
gggagccctccgaacccgccgaatccgctc

SEQ ID NO: 104714 - DNA, 30 bp, Artificial Sequence
  Synthetic oligonucleotide
cgttaaccgccgtcctctcacacagcgctc

SEQ ID NO: 104715 - DNA, 30 bp, Artificial Sequence
  Synthetic oligonucleotide
gaatagttcagaggacaggtcaacgcgctc

SEQ ID NO: 104716 - DNA, 30 bp, Artificial Sequence
  Synthetic oligonucleotide
aatgggaggaatgtacgattcacggcgctc

SEQ ID NO: 104717 - DNA, 30 bp, Artificial Sequence
  Synthetic oligonucleotide
tgattcaataaggggtgacgaccatcgctc

SEQ ID NO: 104718 - DNA, 30 bp, Artificial Sequence
  Synthetic oligonucleotide
tctagacgaacctggaaaaggtcctcgctc

SEQ ID NO: 104719 - DNA, 30 bp, Artificial Sequence
  Synthetic oligonucleotide
ggtggtgccgtgcgcgacacagagtcgctc

SEQ ID NO: 104720 - DNA, 30 bp, Artificial Sequence
  Synthetic oligonucleotide
gatcaggcttaggactcgagagggcggctc

SEQ ID NO: 104721 - DNA, 30 bp, Artificial Sequence
  Synthetic oligonucleotide
gcgctaacggagttcttatctagagggctc

SEQ ID NO: 104722 - DNA, 30 bp, Artificial Sequence
  Synthetic oligonucleotide
aagccgaaggacgtaagatgacatgggctc

SEQ ID NO: 104723 - DNA, 40 bp, Artificial Sequence
  Synthetic oligonucleotide
atgggggtatacatgtaatagagctggaggtacatggctc

SEQ ID NO: 104724 - DNA, 30 bp, Artificial Sequence
  Synthetic oligonucleotide
cgaggagaattattccaaaataggtggctc

SEQ ID NO: 104725 - DNA, 30 bp, Artificial Sequence
  Synthetic oligonucleotide
cggtaaaaggtttaaagcttgaattggctc

SEQ ID NO: 104726 - DNA, 30 bp, Artificial Sequence
  Synthetic oligonucleotide
tctcggggcgtagctgtgtactgttggctc

SEQ ID NO: 104727 - DNA, 30 bp, Artificial Sequence
  Synthetic oligonucleotide
aacgaaccgtgaccatgcataagcatgctc

SEQ ID NO: 104728 - DNA, 30 bp, Artificial Sequence
  Synthetic oligonucleotide
ccaaccgatgggacgaccaaaaaactgctc

SEQ ID NO: 104729 - DNA, 30 bp, Artificial Sequence
  Synthetic oligonucleotide
gtactaatgacgagtacaaagtagctgctc

SEQ ID NO: 104730 - DNA, 30 bp, Artificial Sequence
  Synthetic oligonucleotide
gaaacaagtccttaataagtggaagtgctc

SEQ ID NO: 104731 - DNA, 30 bp, Artificial Sequence
  Synthetic oligonucleotide
cgttacacaccctggtcaaacggggtgctc

SEQ ID NO: 104732 - DNA, 30 bp, Artificial Sequence
  Synthetic oligonucleotide
acgcatggctaatatattcgttgcaatctc

SEQ ID NO: 104733 - DNA, 30 bp, Artificial Sequence
  Synthetic oligonucleotide
aacaaacagtgaaatcgcatcatgaatctc

SEQ ID NO: 104734 - DNA, 30 bp, Artificial Sequence
  Synthetic oligonucleotide
tggcgtagttaacacaaacggttgaatctc

SEQ ID NO: 104735 - DNA, 31 bp, Artificial Sequence
  Synthetic oligonucleotide
gtgttgaatcgcaatcaatcacaataatctc

SEQ ID NO: 104736 - DNA, 30 bp, Artificial Sequence
  Synthetic oligonucleotide
tggtaaacctgagagaaaccggctgatctc

SEQ ID NO: 104737 - DNA, 30 bp, Artificial Sequence
  Synthetic oligonucleotide
ccgcggactgttcaagagagggtatatctc

SEQ ID NO: 104738 - DNA, 30 bp, Artificial Sequence
  Synthetic oligonucleotide
ggtgattctcgtgatgtgaggttgtatctc

SEQ ID NO: 104739 - DNA, 30 bp, Artificial Sequence
  Synthetic oligonucleotide
tgctccataaccatcgttccgggtactctc

SEQ ID NO: 104740 - DNA, 30 bp, Artificial Sequence
  Synthetic oligonucleotide
aaacgtaactgacctttcaaatatcctctc

SEQ ID NO: 104741 - DNA, 30 bp, Artificial Sequence
  Synthetic oligonucleotide
cgaagcttttgtcccagtaccaccgctctc

SEQ ID NO: 104742 - DNA, 30 bp, Artificial Sequence
  Synthetic oligonucleotide
aggaatcgggaagattaagtagggtctctc

SEQ ID NO: 104743 - DNA, 30 bp, Artificial Sequence
  Synthetic oligonucleotide
ggggtcggtccagtacgaggaagttctctc

SEQ ID NO: 104744 - DNA, 30 bp, Artificial Sequence
  Synthetic oligonucleotide
ccagaagccagctgtaaattcggaagtctc

SEQ ID NO: 104745 - DNA, 30 bp, Artificial Sequence
  Synthetic oligonucleotide
acttacaacatttgaacagcagatcgtctc

SEQ ID NO: 104746 - DNA, 30 bp, Artificial Sequence
  Synthetic oligonucleotide
ccggcgactcttaagggtgataaaggtctc

SEQ ID NO: 104747 - DNA, 30 bp, Artificial Sequence
  Synthetic oligonucleotide
tgtacacaggctagtcaaatcaggggtctc

SEQ ID NO: 104748 - DNA, 30 bp, Artificial Sequence
  Synthetic oligonucleotide
gcggaatgccctagaggacagcggggtctc

SEQ ID NO: 104749 - DNA, 30 bp, Artificial Sequence
  Synthetic oligonucleotide
actccagtgggtctgcagggaaactgtctc

SEQ ID NO: 104750 - DNA, 30 bp, Artificial Sequence
  Synthetic oligonucleotide
tcgtaggtcacagtatgcgtattctgtctc

SEQ ID NO: 104751 - DNA, 30 bp, Artificial Sequence
  Synthetic oligonucleotide
aagtcaggacgacacaggcccgattgtctc

SEQ ID NO: 104752 - DNA, 31 bp, Artificial Sequence
  Synthetic oligonucleotide
acacgcaggttgctaacagaaacgttgtctc

SEQ ID NO: 104753 - DNA, 30 bp, Artificial Sequence
  Synthetic oligonucleotide
aggtaacagggtgcggaaatcccaattctc

SEQ ID NO: 104754 - DNA, 30 bp, Artificial Sequence
  Synthetic oligonucleotide
aggctctaagttgttaacagaacagttctc

SEQ ID NO: 104755 - DNA, 30 bp, Artificial Sequence
  Synthetic oligonucleotide
aacacgtaccagggagagcaggaatttctc

SEQ ID NO: 104756 - DNA, 30 bp, Artificial Sequence
  Synthetic oligonucleotide
aatgggcactaccggttatcgcaaaaagtc

SEQ ID NO: 104757 - DNA, 30 bp, Artificial Sequence
  Synthetic oligonucleotide
aaataacactgaccttgagtgcaaaaagtc

SEQ ID NO: 104758 - DNA, 30 bp, Artificial Sequence
  Synthetic oligonucleotide
ccagcccgcattacgaataaagttaaagtc

SEQ ID NO: 104759 - DNA, 30 bp, Artificial Sequence
  Synthetic oligonucleotide
gtgaacttagatacagagtagggacaagtc

SEQ ID NO: 104760 - DNA, 30 bp, Artificial Sequence
  Synthetic oligonucleotide
attaggtagcgtacatttaggttcgaagtc

SEQ ID NO: 104761 - DNA, 30 bp, Artificial Sequence
  Synthetic oligonucleotide
gtcagaccgaatcccaatctgaatgaagtc

SEQ ID NO: 104762 - DNA, 30 bp, Artificial Sequence
  Synthetic oligonucleotide
agaccatgatgtgggtcggtgtcgtaagtc

SEQ ID NO: 104763 - DNA, 30 bp, Artificial Sequence
  Synthetic oligonucleotide
gcgagcattatattctatccgaccacagtc

SEQ ID NO: 104764 - DNA, 30 bp, Artificial Sequence
  Synthetic oligonucleotide
gaccactaaatgaggtacatggtgccagtc

SEQ ID NO: 104765 - DNA, 30 bp, Artificial Sequence
  Synthetic oligonucleotide
ccgataacgtgttaagcgcaataggcagtc

SEQ ID NO: 104766 - DNA, 30 bp, Artificial Sequence
  Synthetic oligonucleotide
tgcttatcttaaccaccatccactgcagtc

SEQ ID NO: 104767 - DNA, 30 bp, Artificial Sequence
  Synthetic oligonucleotide
cagaagagatactagagatagactgcagtc

SEQ ID NO: 104768 - DNA, 30 bp, Artificial Sequence
  Synthetic oligonucleotide
aggggaggagtttgcttaggtgcctcagtc

SEQ ID NO: 104769 - DNA, 30 bp, Artificial Sequence
  Synthetic oligonucleotide
gcgaatccaagacgggctccagaacgagtc

SEQ ID NO: 104770 - DNA, 30 bp, Artificial Sequence
  Synthetic oligonucleotide
tctgactatgattcaactcagggccgagtc

SEQ ID NO: 104771 - DNA, 30 bp, Artificial Sequence
  Synthetic oligonucleotide
acattggttaggggcccgcgtgagcgagtc

SEQ ID NO: 104772 - DNA, 30 bp, Artificial Sequence
  Synthetic oligonucleotide
aacgcggtggtctatggcagtgctcgagtc

SEQ ID NO: 104773 - DNA, 30 bp, Artificial Sequence
  Synthetic oligonucleotide
caacgggctccacgcgtttaatgtcgagtc

SEQ ID NO: 104774 - DNA, 30 bp, Artificial Sequence
  Synthetic oligonucleotide
tcgcaaactgattaacgctatctaggagtc

SEQ ID NO: 104775 - DNA, 30 bp, Artificial Sequence
  Synthetic oligonucleotide
aatcggctccgatatgctatcaatggagtc

SEQ ID NO: 104776 - DNA, 30 bp, Artificial Sequence
  Synthetic oligonucleotide
atcgatagtgtgggtagagttgcctgagtc

SEQ ID NO: 104777 - DNA, 30 bp, Artificial Sequence
  Synthetic oligonucleotide
tagcgggtggtatcatggtgaacaatagtc

SEQ ID NO: 104778 - DNA, 30 bp, Artificial Sequence
  Synthetic oligonucleotide
ggggtacatacactcttctggcacatagtc

SEQ ID NO: 104779 - DNA, 30 bp, Artificial Sequence
  Synthetic oligonucleotide
gcgcgtgtggagatgcccatagccatagtc

SEQ ID NO: 104780 - DNA, 30 bp, Artificial Sequence
  Synthetic oligonucleotide
tggattaggagccgaagaggggtactagtc

SEQ ID NO: 104781 - DNA, 30 bp, Artificial Sequence
  Synthetic oligonucleotide
ctaacagtccattgtctaattgatctagtc

SEQ ID NO: 104782 - DNA, 30 bp, Artificial Sequence
  Synthetic oligonucleotide
agtcacgagaataatcaacgaacagtagtc

SEQ ID NO: 104783 - DNA, 30 bp, Artificial Sequence
  Synthetic oligonucleotide
attacaaatatcatgactggttccgtagtc

SEQ ID NO: 104784 - DNA, 30 bp, Artificial Sequence
  Synthetic oligonucleotide
tcctaggtacaatagattagtctcgtagtc

SEQ ID NO: 104785 - DNA, 30 bp, Artificial Sequence
  Synthetic oligonucleotide
ctcgatattggttcaaatagcaaggtagtc

SEQ ID NO: 104786 - DNA, 30 bp, Artificial Sequence
  Synthetic oligonucleotide
gcgtctgtcagtaagtcaggcgtggtagtc

SEQ ID NO: 104787 - DNA, 30 bp, Artificial Sequence
  Synthetic oligonucleotide
tctaccgaacacgacgagaattcaaacgtc

SEQ ID NO: 104788 - DNA, 30 bp, Artificial Sequence
  Synthetic oligonucleotide
acgaagttagcccatagggtgataaacgtc

SEQ ID NO: 104789 - DNA, 30 bp, Artificial Sequence
  Synthetic oligonucleotide
ccgctcgtgtggatagctcataagaacgtc

SEQ ID NO: 104790 - DNA, 30 bp, Artificial Sequence
  Synthetic oligonucleotide
gcaatgtcccatatcgagggcacgaacgtc

SEQ ID NO: 104791 - DNA, 30 bp, Artificial Sequence
  Synthetic oligonucleotide
tgggggaagtcattgagggctatgaacgtc

SEQ ID NO: 104792 - DNA, 30 bp, Artificial Sequence
  Synthetic oligonucleotide
aatttagtcgtactaccaagcgtgaacgtc

SEQ ID NO: 104793 - DNA, 30 bp, Artificial Sequence
  Synthetic oligonucleotide
gagaaaagtgttgaatacagaaggcacgtc

SEQ ID NO: 104794 - DNA, 30 bp, Artificial Sequence
  Synthetic oligonucleotide
gcttgctaatcattcgactaagacgacgtc

SEQ ID NO: 104795 - DNA, 30 bp, Artificial Sequence
  Synthetic oligonucleotide
gcggtctaaacggtctcagcgagggacgtc

SEQ ID NO: 104796 - DNA, 30 bp, Artificial Sequence
  Synthetic oligonucleotide
acattgttagctctgtttctatcatacgtc

SEQ ID NO: 104797 - DNA, 30 bp, Artificial Sequence
  Synthetic oligonucleotide
tgtatgtccacaacccgctaccataccgtc

SEQ ID NO: 104798 - DNA, 30 bp, Artificial Sequence
  Synthetic oligonucleotide
aggtggcgaacaaagtgttagcgtaccgtc

SEQ ID NO: 104799 - DNA, 30 bp, Artificial Sequence
  Synthetic oligonucleotide
ggtgccaagagatagtatagtttacccgtc

SEQ ID NO: 104800 - DNA, 30 bp, Artificial Sequence
  Synthetic oligonucleotide
ggaagaggtaccgaccaggacaatcccgtc

SEQ ID NO: 104801 - DNA, 30 bp, Artificial Sequence
  Synthetic oligonucleotide
taaacaaggcgcagactatgggcagccgtc

SEQ ID NO: 104802 - DNA, 30 bp, Artificial Sequence
  Synthetic oligonucleotide
gagcaaggtgatagtttactaaaggccgtc

SEQ ID NO: 104803 - DNA, 30 bp, Artificial Sequence
  Synthetic oligonucleotide
cggagcttattcacccgtttcgaggccgtc

SEQ ID NO: 104804 - DNA, 30 bp, Artificial Sequence
  Synthetic oligonucleotide
ggagagcctatagagaagcggagctccgtc

SEQ ID NO: 104805 - DNA, 30 bp, Artificial Sequence
  Synthetic oligonucleotide
cttcgcaacgcatcgcaaaaatggtccgtc

SEQ ID NO: 104806 - DNA, 30 bp, Artificial Sequence
  Synthetic oligonucleotide
tgttgagtggcagagaccaatcttagcgtc

SEQ ID NO: 104807 - DNA, 30 bp, Artificial Sequence
  Synthetic oligonucleotide
aaacggtgtgggtagaccaatccacgcgtc

SEQ ID NO: 104808 - DNA, 30 bp, Artificial Sequence
  Synthetic oligonucleotide
atgcaactcatcggacggcggtcccgcgtc

SEQ ID NO: 104809 - DNA, 30 bp, Artificial Sequence
  Synthetic oligonucleotide
actacatatcttgctgtatcgggtcgcgtc

SEQ ID NO: 104810 - DNA, 30 bp, Artificial Sequence
  Synthetic oligonucleotide
ggcacgagttaacgatgtgttcacggcgtc

SEQ ID NO: 104811 - DNA, 30 bp, Artificial Sequence
  Synthetic oligonucleotide
tggtggcaaagcaaaagtgcaaggggcgtc

SEQ ID NO: 104812 - DNA, 30 bp, Artificial Sequence
  Synthetic oligonucleotide
cggtacgtgcacttttcggaaaactgcgtc

SEQ ID NO: 104813 - DNA, 30 bp, Artificial Sequence
  Synthetic oligonucleotide
cttttcgatacggcaagggttagctgcgtc

SEQ ID NO: 104814 - DNA, 30 bp, Artificial Sequence
  Synthetic oligonucleotide
tctctaagaggtatgtgcccgggaatcgtc

SEQ ID NO: 104815 - DNA, 30 bp, Artificial Sequence
  Synthetic oligonucleotide
tgcggcgctgttaccaatgggctcgtcgtc

SEQ ID NO: 104816 - DNA, 30 bp, Artificial Sequence
  Synthetic oligonucleotide
aggatgctaggctctcccaaaggggtcgtc

SEQ ID NO: 104817 - DNA, 30 bp, Artificial Sequence
  Synthetic oligonucleotide
catctgcaacgagtcggggaggtggtcgtc

SEQ ID NO: 104818 - DNA, 30 bp, Artificial Sequence
  Synthetic oligonucleotide
aagcggtgacggggtgttaccaactaggtc

SEQ ID NO: 104819 - DNA, 30 bp, Artificial Sequence
  Synthetic oligonucleotide
atgcgggggccaccggcctgtgcgtaggtc

SEQ ID NO: 104820 - DNA, 30 bp, Artificial Sequence
  Synthetic oligonucleotide
agcgtaatgcgtaatatcattcactcggtc

SEQ ID NO: 104821 - DNA, 30 bp, Artificial Sequence
  Synthetic oligonucleotide
cggacgaaagccggataaggggtcagggtc

SEQ ID NO: 104822 - DNA, 30 bp, Artificial Sequence
  Synthetic oligonucleotide
tgatgtggttctacggaaacatagagggtc

SEQ ID NO: 104823 - DNA, 30 bp, Artificial Sequence
  Synthetic oligonucleotide
ggcccacatggaaatatcagttcgcgggtc

SEQ ID NO: 104824 - DNA, 30 bp, Artificial Sequence
  Synthetic oligonucleotide
cgtctctaaaaaccccattgcagtcgggtc

SEQ ID NO: 104825 - DNA, 30 bp, Artificial Sequence
  Synthetic oligonucleotide
gagcggggatcatggtcagcatcgggggtc

SEQ ID NO: 104826 - DNA, 30 bp, Artificial Sequence
  Synthetic oligonucleotide
cccgttaggacgcgagggagttcatgggtc

SEQ ID NO: 104827 - DNA, 30 bp, Artificial Sequence
  Synthetic oligonucleotide
cgtgaaccgggctcagtgtagtgatgggtc

SEQ ID NO: 104828 - DNA, 30 bp, Artificial Sequence
  Synthetic oligonucleotide
actcagtactcgaacatacaggcctgggtc

SEQ ID NO: 104829 - DNA, 30 bp, Artificial Sequence
  Synthetic oligonucleotide
acagaagttaaagaacagaaaacgtgggtc

SEQ ID NO: 104830 - DNA, 30 bp, Artificial Sequence
  Synthetic oligonucleotide
gaaccaaatgctagataggatgatctggtc

SEQ ID NO: 104831 - DNA, 30 bp, Artificial Sequence
  Synthetic oligonucleotide
aggtatctcgtcaacgaagaaaacttggtc

SEQ ID NO: 104832 - DNA, 31 bp, Artificial Sequence
  Synthetic oligonucleotide
tcacctacgggggctcggtatgtacaatgtc

SEQ ID NO: 104833 - DNA, 30 bp, Artificial Sequence
  Synthetic oligonucleotide
ctggaaggaaacttttctcttgttaatgtc

SEQ ID NO: 104834 - DNA, 30 bp, Artificial Sequence
  Synthetic oligonucleotide
gttcgttcccaaggagtgcgagtacatgtc

SEQ ID NO: 104835 - DNA, 29 bp, Artificial Sequence
  Synthetic oligonucleotide
gtacaatacaagatgagagaaaccatgtc

SEQ ID NO: 104836 - DNA, 30 bp, Artificial Sequence
  Synthetic oligonucleotide
tcattcagtagactgtgagattgccatgtc

SEQ ID NO: 104837 - DNA, 30 bp, Artificial Sequence
  Synthetic oligonucleotide
aagcggtcaatgagcataaaagtagatgtc

SEQ ID NO: 104838 - DNA, 30 bp, Artificial Sequence
  Synthetic oligonucleotide
tatcgcacctctattcaagctggggatgtc

SEQ ID NO: 104839 - DNA, 30 bp, Artificial Sequence
  Synthetic oligonucleotide
tacgtctctgtatcgatggccgaatatgtc

SEQ ID NO: 104840 - DNA, 30 bp, Artificial Sequence
  Synthetic oligonucleotide
gcggagacccaacgcgtctttaactatgtc

SEQ ID NO: 104841 - DNA, 30 bp, Artificial Sequence
  Synthetic oligonucleotide
taacgaagtggcactttagcgagctatgtc

SEQ ID NO: 104842 - DNA, 30 bp, Artificial Sequence
  Synthetic oligonucleotide
acgcagacttcggatgataggagaactgtc

SEQ ID NO: 104843 - DNA, 30 bp, Artificial Sequence
  Synthetic oligonucleotide
ggagggaacgatgggtgttagcgaactgtc

SEQ ID NO: 104844 - DNA, 30 bp, Artificial Sequence
  Synthetic oligonucleotide
ggtcaatggtgtacgttatagcatcctgtc

SEQ ID NO: 104845 - DNA, 30 bp, Artificial Sequence
  Synthetic oligonucleotide
ttcacaccagagcgagcgctcagtgctgtc

SEQ ID NO: 104846 - DNA, 30 bp, Artificial Sequence
  Synthetic oligonucleotide
ataccaacaagcggaactcaacttgctgtc

SEQ ID NO: 104847 - DNA, 30 bp, Artificial Sequence
  Synthetic oligonucleotide
tgtgccgcacatgcatatagcgaatctgtc

SEQ ID NO: 104848 - DNA, 30 bp, Artificial Sequence
  Synthetic oligonucleotide
taggatacggtaaccacgctggatagtgtc

SEQ ID NO: 104849 - DNA, 30 bp, Artificial Sequence
  Synthetic oligonucleotide
cggagttcgagatgcccgatccggcgtgtc

SEQ ID NO: 104850 - DNA, 30 bp, Artificial Sequence
  Synthetic oligonucleotide
gcggagccgactaaggacatccctcgtgtc

SEQ ID NO: 104851 - DNA, 30 bp, Artificial Sequence
  Synthetic oligonucleotide
cgtgttagttgtgtaaacatcggttgtgtc

SEQ ID NO: 104852 - DNA, 30 bp, Artificial Sequence
  Synthetic oligonucleotide
cagacattaggaaataagtaccggattgtc

SEQ ID NO: 104853 - DNA, 30 bp, Artificial Sequence
  Synthetic oligonucleotide
gtcggcaatagataatacgaacaggttgtc

SEQ ID NO: 104854 - DNA, 30 bp, Artificial Sequence
  Synthetic oligonucleotide
cacgaaggaacttgttcgattcgaaaattc

SEQ ID NO: 104855 - DNA, 30 bp, Artificial Sequence
  Synthetic oligonucleotide
gcgaggtggaggtgaccttagttaaaattc

SEQ ID NO: 104856 - DNA, 30 bp, Artificial Sequence
  Synthetic oligonucleotide
taatagttacgatccgaatgtgcgaaattc

SEQ ID NO: 104857 - DNA, 30 bp, Artificial Sequence
  Synthetic oligonucleotide
acacacgaagtagagtttaagtggaaattc

SEQ ID NO: 104858 - DNA, 30 bp, Artificial Sequence
  Synthetic oligonucleotide
ccgacaatgtacgtagtctccaaacaattc

SEQ ID NO: 104859 - DNA, 30 bp, Artificial Sequence
  Synthetic oligonucleotide
gggcggaagagcaggaccttagtacaattc

SEQ ID NO: 104860 - DNA, 30 bp, Artificial Sequence
  Synthetic oligonucleotide
acctggtaaacccaatcactcaggcaattc

SEQ ID NO: 104861 - DNA, 30 bp, Artificial Sequence
  Synthetic oligonucleotide
catgcggatatgaaaagtactggtgaattc

SEQ ID NO: 104862 - DNA, 30 bp, Artificial Sequence
  Synthetic oligonucleotide
taggcaacaataccattacttgattaattc

SEQ ID NO: 104863 - DNA, 30 bp, Artificial Sequence
  Synthetic oligonucleotide
aaagagcgtagcggcttagatggatcattc

SEQ ID NO: 104864 - DNA, 30 bp, Artificial Sequence
  Synthetic oligonucleotide
ttcctgagtgaagtcaaagactaccgattc

SEQ ID NO: 104865 - DNA, 30 bp, Artificial Sequence
  Synthetic oligonucleotide
tagcttgaacaacagataaagttgggattc

SEQ ID NO: 104866 - DNA, 30 bp, Artificial Sequence
  Synthetic oligonucleotide
atcaaatgagatcgtggtccgaagtgattc

SEQ ID NO: 104867 - DNA, 30 bp, Artificial Sequence
  Synthetic oligonucleotide
atagcaaaaatcgtggaggagccaatattc

SEQ ID NO: 104868 - DNA, 30 bp, Artificial Sequence
  Synthetic oligonucleotide
gatgggctaaaggtgtcaaacctcctattc

SEQ ID NO: 104869 - DNA, 30 bp, Artificial Sequence
  Synthetic oligonucleotide
ccacgtcctggcgattcattgatagtattc

SEQ ID NO: 104870 - DNA, 30 bp, Artificial Sequence
  Synthetic oligonucleotide
gtctgattggattatcacgtgttggtattc

SEQ ID NO: 104871 - DNA, 30 bp, Artificial Sequence
  Synthetic oligonucleotide
cctgatcacgccaaccgtgactgcttattc

SEQ ID NO: 104872 - DNA, 30 bp, Artificial Sequence
  Synthetic oligonucleotide
gaaagacaatgggtggacacatcgttattc

SEQ ID NO: 104873 - DNA, 30 bp, Artificial Sequence
  Synthetic oligonucleotide
caacggcattattgacgtggaggatacttc

SEQ ID NO: 104874 - DNA, 30 bp, Artificial Sequence
  Synthetic oligonucleotide
atttcggtaacgactaaaatgagtaccttc

SEQ ID NO: 104875 - DNA, 30 bp, Artificial Sequence
  Synthetic oligonucleotide
accaggataagcatgctggctgggagcttc

SEQ ID NO: 104876 - DNA, 30 bp, Artificial Sequence
  Synthetic oligonucleotide
cgagttacgttgcccgtcatatcacgcttc

SEQ ID NO: 104877 - DNA, 30 bp, Artificial Sequence
  Synthetic oligonucleotide
atcatataacaattaagaagataatgcttc

SEQ ID NO: 104878 - DNA, 30 bp, Artificial Sequence
  Synthetic oligonucleotide
tgaacggttgggcaagctgatcggtgcttc

SEQ ID NO: 104879 - DNA, 30 bp, Artificial Sequence
  Synthetic oligonucleotide
atgcgtccagttagttagtcgagttgcttc

SEQ ID NO: 104880 - DNA, 30 bp, Artificial Sequence
  Synthetic oligonucleotide
catcggatattctgaactcccgtaatcttc

SEQ ID NO: 104881 - DNA, 30 bp, Artificial Sequence
  Synthetic oligonucleotide
aggttcgcctgcgcattcagtcaagtcttc

SEQ ID NO: 104882 - DNA, 30 bp, Artificial Sequence
  Synthetic oligonucleotide
cggaaaggagtatcggctgcatccgtcttc

SEQ ID NO: 104883 - DNA, 30 bp, Artificial Sequence
  Synthetic oligonucleotide
tatgagggtagaaattggtgccatgtcttc

SEQ ID NO: 104884 - DNA, 30 bp, Artificial Sequence
  Synthetic oligonucleotide
aacaatgaatgggttaaaacggatgtcttc

SEQ ID NO: 104885 - DNA, 30 bp, Artificial Sequence
  Synthetic oligonucleotide
agtgtacaggtcgctaatcgaagtgtcttc

SEQ ID NO: 104886 - DNA, 30 bp, Artificial Sequence
  Synthetic oligonucleotide
cacgtcgagcggatgccagcgtcaaagttc

SEQ ID NO: 104887 - DNA, 30 bp, Artificial Sequence
  Synthetic oligonucleotide
gcgagggcgttcctaggcaacgaacagttc

SEQ ID NO: 104888 - DNA, 30 bp, Artificial Sequence
  Synthetic oligonucleotide
ggaaccaatggccatgacgccagacagttc

SEQ ID NO: 104889 - DNA, 30 bp, Artificial Sequence
  Synthetic oligonucleotide
aaagtcgatacgtgattagtgccatagttc

SEQ ID NO: 104890 - DNA, 30 bp, Artificial Sequence
  Synthetic oligonucleotide
tagtggtcgcatactaatatgaagacgttc

SEQ ID NO: 104891 - DNA, 30 bp, Artificial Sequence
  Synthetic oligonucleotide
ggaccacaactctatatcgattagccgttc

SEQ ID NO: 104892 - DNA, 30 bp, Artificial Sequence
  Synthetic oligonucleotide
tacccactataagagatcctgaaagcgttc

SEQ ID NO: 104893 - DNA, 30 bp, Artificial Sequence
  Synthetic oligonucleotide
ggcagagtctcagggatccgaaacgcgttc

SEQ ID NO: 104894 - DNA, 30 bp, Artificial Sequence
  Synthetic oligonucleotide
attgggaccgataacgacggaagggcgttc

SEQ ID NO: 104895 - DNA, 30 bp, Artificial Sequence
  Synthetic oligonucleotide
acgtaaagggcggccgatacgaatgcgttc

SEQ ID NO: 104896 - DNA, 30 bp, Artificial Sequence
  Synthetic oligonucleotide
ggagcatgcttagttaggtgttgaaggttc

SEQ ID NO: 104897 - DNA, 30 bp, Artificial Sequence
  Synthetic oligonucleotide
ggtgctgatcgagagggcacatgcgggttc

SEQ ID NO: 104898 - DNA, 30 bp, Artificial Sequence
  Synthetic oligonucleotide
acggtagcgtccgaaaggctctagatgttc

SEQ ID NO: 104899 - DNA, 30 bp, Artificial Sequence
  Synthetic oligonucleotide
cactaagccagcagattgttatatatgttc

SEQ ID NO: 104900 - DNA, 31 bp, Artificial Sequence
  Synthetic oligonucleotide
actacgagtagataataatttcattctgttc

SEQ ID NO: 104901 - DNA, 30 bp, Artificial Sequence
  Synthetic oligonucleotide
agcatccaaggcgccatgaatccggtgttc

SEQ ID NO: 104902 - DNA, 30 bp, Artificial Sequence
  Synthetic oligonucleotide
cgaagtccttaaaattatcacttcaatttc

SEQ ID NO: 104903 - DNA, 30 bp, Artificial Sequence
  Synthetic oligonucleotide
gtaggctcaggggattagtgaattaatttc

SEQ ID NO: 104904 - DNA, 30 bp, Artificial Sequence
  Synthetic oligonucleotide
gctggacagccaaacatcctatttaatttc

SEQ ID NO: 104905 - DNA, 30 bp, Artificial Sequence
  Synthetic oligonucleotide
tgtccaaaatcgatcgcaaatcagcatttc

SEQ ID NO: 104906 - DNA, 30 bp, Artificial Sequence
  Synthetic oligonucleotide
ctcataaccaacggtatctgggtgcatttc

SEQ ID NO: 104907 - DNA, 30 bp, Artificial Sequence
  Synthetic oligonucleotide
aggtggcgaccaggattcccagaggatttc

SEQ ID NO: 104908 - DNA, 30 bp, Artificial Sequence
  Synthetic oligonucleotide
gggatggagaccggacgacattactatttc

SEQ ID NO: 104909 - DNA, 30 bp, Artificial Sequence
  Synthetic oligonucleotide
cgaagtagagttgtgcgcacagcgtatttc

SEQ ID NO: 104910 - DNA, 30 bp, Artificial Sequence
  Synthetic oligonucleotide
tctggcgacgaatactagatcctttatttc

SEQ ID NO: 104911 - DNA, 30 bp, Artificial Sequence
  Synthetic oligonucleotide
ggaacgactgtcggtatacgggggcctttc

SEQ ID NO: 104912 - DNA, 30 bp, Artificial Sequence
  Synthetic oligonucleotide
ctgagcacactaggataaacacgatctttc

SEQ ID NO: 104913 - DNA, 30 bp, Artificial Sequence
  Synthetic oligonucleotide
aggcgggagtcactcaatcaccccagtttc

SEQ ID NO: 104914 - DNA, 30 bp, Artificial Sequence
  Synthetic oligonucleotide
aaggatatcacgacaccggcttaacgtttc

SEQ ID NO: 104915 - DNA, 30 bp, Artificial Sequence
  Synthetic oligonucleotide
tgacacaggagggtgactaacccaggtttc

SEQ ID NO: 104916 - DNA, 31 bp, Artificial Sequence
  Synthetic oligonucleotide
ttgggcgaagccgagctgaagagaaattttc

SEQ ID NO: 104917 - DNA, 30 bp, Artificial Sequence
  Synthetic oligonucleotide
gggagagccgtatagtggtagctggttttc

SEQ ID NO: 104918 - DNA, 30 bp, Artificial Sequence
  Synthetic oligonucleotide
gtgttcatgagggggtcggttcggcaaaag

SEQ ID NO: 104919 - DNA, 30 bp, Artificial Sequence
  Synthetic oligonucleotide
aaaggtgcgcgtaccgtctaaccagaaaag

SEQ ID NO: 104920 - DNA, 30 bp, Artificial Sequence
  Synthetic oligonucleotide
tgacgctgctgctccagcaatgaggaaaag

SEQ ID NO: 104921 - DNA, 30 bp, Artificial Sequence
  Synthetic oligonucleotide
tgtacccttaggtaggggaccctggaaaag

SEQ ID NO: 104922 - DNA, 30 bp, Artificial Sequence
  Synthetic oligonucleotide
ggtatgagagtgtcacgtatgactgaaaag

SEQ ID NO: 104923 - DNA, 30 bp, Artificial Sequence
  Synthetic oligonucleotide
gctaagtacaggtgtgagcaaagtgaaaag

SEQ ID NO: 104924 - DNA, 30 bp, Artificial Sequence
  Synthetic oligonucleotide
aaaacaacgcttatcgagtgactgtaaaag

SEQ ID NO: 104925 - DNA, 30 bp, Artificial Sequence
  Synthetic oligonucleotide
gtccgcctcgtgccagttaactaaacaaag

SEQ ID NO: 104926 - DNA, 30 bp, Artificial Sequence
  Synthetic oligonucleotide
atgcgttgttgagtttataaatgcacaaag

SEQ ID NO: 104927 - DNA, 30 bp, Artificial Sequence
  Synthetic oligonucleotide
aggcacctagactgatggcgttatacaaag

SEQ ID NO: 104928 - DNA, 30 bp, Artificial Sequence
  Synthetic oligonucleotide
gtagtgcgccatgaagcgaacctcccaaag

SEQ ID NO: 104929 - DNA, 30 bp, Artificial Sequence
  Synthetic oligonucleotide
gttaggtaacccagtgaaagcgagccaaag

SEQ ID NO: 104930 - DNA, 30 bp, Artificial Sequence
  Synthetic oligonucleotide
tatggggcagctaacaatcaaatgccaaag

SEQ ID NO: 104931 - DNA, 30 bp, Artificial Sequence
  Synthetic oligonucleotide
tgtggcgattaggacacgagatttccaaag

SEQ ID NO: 104932 - DNA, 30 bp, Artificial Sequence
  Synthetic oligonucleotide
taaaggtgcttatgtacatggttagcaaag

SEQ ID NO: 104933 - DNA, 30 bp, Artificial Sequence
  Synthetic oligonucleotide
gctgatcgagaagtggatcggtgcgcaaag

SEQ ID NO: 104934 - DNA, 30 bp, Artificial Sequence
  Synthetic oligonucleotide
ttcggacagtctagatggggctgggcaaag

SEQ ID NO: 104935 - DNA, 30 bp, Artificial Sequence
  Synthetic oligonucleotide
gtaacggccggacccgaccgaggtgcaaag

SEQ ID NO: 104936 - DNA, 30 bp, Artificial Sequence
  Synthetic oligonucleotide
agggtgtgtatctgctctgtgaactcaaag

SEQ ID NO: 104937 - DNA, 30 bp, Artificial Sequence
  Synthetic oligonucleotide
catgtgcggtctcggcacaacgacagaaag

SEQ ID NO: 104938 - DNA, 30 bp, Artificial Sequence
  Synthetic oligonucleotide
cgtttagggacaacggtttggagcagaaag

SEQ ID NO: 104939 - DNA, 30 bp, Artificial Sequence
  Synthetic oligonucleotide
ggatattggaaaccattctgagctagaaag

SEQ ID NO: 104940 - DNA, 30 bp, Artificial Sequence
  Synthetic oligonucleotide
tcggctattattatgacatgttcccgaaag

SEQ ID NO: 104941 - DNA, 30 bp, Artificial Sequence
  Synthetic oligonucleotide
ttcataagttaccggtgccacacaggaaag

SEQ ID NO: 104942 - DNA, 30 bp, Artificial Sequence
  Synthetic oligonucleotide
agtcgatctgggaacagccgtagaggaaag

SEQ ID NO: 104943 - DNA, 30 bp, Artificial Sequence
  Synthetic oligonucleotide
tgtggagagataaaattggagagcggaaag

SEQ ID NO: 104944 - DNA, 30 bp, Artificial Sequence
  Synthetic oligonucleotide
gtgcagtatataccgagaaaagtcggaaag

SEQ ID NO: 104945 - DNA, 29 bp, Artificial Sequence
  Synthetic oligonucleotide
taggtatcctccatcccaggaagggaaag

SEQ ID NO: 104946 - DNA, 30 bp, Artificial Sequence
  Synthetic oligonucleotide
acaagtttgcgacatcgcatatggggaaag

SEQ ID NO: 104947 - DNA, 30 bp, Artificial Sequence
  Synthetic oligonucleotide
ccaattcgtagctttagcgcgttgggaaag

SEQ ID NO: 104948 - DNA, 30 bp, Artificial Sequence
  Synthetic oligonucleotide
cgcggaagcgctggggcattttaatgaaag

SEQ ID NO: 104949 - DNA, 30 bp, Artificial Sequence
  Synthetic oligonucleotide
ggtcacatactctgaatgcatacaataaag

SEQ ID NO: 104950 - DNA, 30 bp, Artificial Sequence
  Synthetic oligonucleotide
ttaatatccggctcttagggcacgataaag

SEQ ID NO: 104951 - DNA, 30 bp, Artificial Sequence
  Synthetic oligonucleotide
ctagaatgcggtagcgggtcaaggataaag

SEQ ID NO: 104952 - DNA, 30 bp, Artificial Sequence
  Synthetic oligonucleotide
gtaagagcgtaaccaacaacgcatataaag

SEQ ID NO: 104953 - DNA, 30 bp, Artificial Sequence
  Synthetic oligonucleotide
gagaaagaccgggaggacgtctttataaag

SEQ ID NO: 104954 - DNA, 30 bp, Artificial Sequence
  Synthetic oligonucleotide
cattcggtgttagcgaatatcgccctaaag

SEQ ID NO: 104955 - DNA, 30 bp, Artificial Sequence
  Synthetic oligonucleotide
atgcgcgagcatctctgtgagtggctaaag

SEQ ID NO: 104956 - DNA, 30 bp, Artificial Sequence
  Synthetic oligonucleotide
cctgctggtttaatacgtttgatgctaaag

SEQ ID NO: 104957 - DNA, 30 bp, Artificial Sequence
  Synthetic oligonucleotide
gcctcactatcaacccatcatactctaaag

SEQ ID NO: 104958 - DNA, 30 bp, Artificial Sequence
  Synthetic oligonucleotide
acgcatatgcgcacgatgcaccctctaaag

SEQ ID NO: 104959 - DNA, 30 bp, Artificial Sequence
  Synthetic oligonucleotide
tggacttgggactgcatgctttaagtaaag

SEQ ID NO: 104960 - DNA, 30 bp, Artificial Sequence
  Synthetic oligonucleotide
gtgactgtcgaaacgaaggctggagtaaag

SEQ ID NO: 104961 - DNA, 30 bp, Artificial Sequence
  Synthetic oligonucleotide
ccaaccccgtaatgggacactgtagtaaag

SEQ ID NO: 104962 - DNA, 30 bp, Artificial Sequence
  Synthetic oligonucleotide
ccggtgtcaacgaaggatcgcatggtaaag

SEQ ID NO: 104963 - DNA, 30 bp, Artificial Sequence
  Synthetic oligonucleotide
gtacattcggtacggggtcgccatgtaaag

SEQ ID NO: 104964 - DNA, 30 bp, Artificial Sequence
  Synthetic oligonucleotide
gctttatgtggcaacgactattaattaaag

SEQ ID NO: 104965 - DNA, 30 bp, Artificial Sequence
  Synthetic oligonucleotide
cgttgtagttggaacggtagctgattaaag

SEQ ID NO: 104966 - DNA, 30 bp, Artificial Sequence
  Synthetic oligonucleotide
ttatcaaacggtccgaatcagctattaaag

SEQ ID NO: 104967 - DNA, 30 bp, Artificial Sequence
  Synthetic oligonucleotide
cgagacccggtcatggttgcgctcttaaag

SEQ ID NO: 104968 - DNA, 29 bp, Artificial Sequence
  Synthetic oligonucleotide
gctgagggggagtgatctttcggttaaag

SEQ ID NO: 104969 - DNA, 30 bp, Artificial Sequence
  Synthetic oligonucleotide
cgccatgcgagtgcgcatcagagtttaaag

SEQ ID NO: 104970 - DNA, 30 bp, Artificial Sequence
  Synthetic oligonucleotide
ccaaaaaaaaggtattgcatcctaaacaag

SEQ ID NO: 104971 - DNA, 30 bp, Artificial Sequence
  Synthetic oligonucleotide
tacgggtgaaacggttctacaggcaacaag

SEQ ID NO: 104972 - DNA, 30 bp, Artificial Sequence
  Synthetic oligonucleotide
gtactagtgccattcccaacattcaacaag

SEQ ID NO: 104973 - DNA, 30 bp, Artificial Sequence
  Synthetic oligonucleotide
aactgtcgtaacacacgacttacgaacaag

SEQ ID NO: 104974 - DNA, 30 bp, Artificial Sequence
  Synthetic oligonucleotide
tgtacttcaaaaacctaataaagccacaag

SEQ ID NO: 104975 - DNA, 30 bp, Artificial Sequence
  Synthetic oligonucleotide
cttattccatccgagtggacatgccacaag

SEQ ID NO: 104976 - DNA, 30 bp, Artificial Sequence
  Synthetic oligonucleotide
cacaaattctcgcaacgtcacgtccacaag

SEQ ID NO: 104977 - DNA, 30 bp, Artificial Sequence
  Synthetic oligonucleotide
agcagttgctccgtaactctgatgcacaag

SEQ ID NO: 104978 - DNA, 30 bp, Artificial Sequence
  Synthetic oligonucleotide
ttacgggcgtcctccagcgccaatcacaag

SEQ ID NO: 104979 - DNA, 30 bp, Artificial Sequence
  Synthetic oligonucleotide
cttgaatcgctttgactcacgtcagacaag

SEQ ID NO: 104980 - DNA, 30 bp, Artificial Sequence
  Synthetic oligonucleotide
gtggcgtatagacaacgttctggtgacaag

SEQ ID NO: 104981 - DNA, 30 bp, Artificial Sequence
  Synthetic oligonucleotide
tcacgcagtatcagggcattcagctacaag

SEQ ID NO: 104982 - DNA, 30 bp, Artificial Sequence
  Synthetic oligonucleotide
tccctccaattatcacaatcgtgaaccaag

SEQ ID NO: 104983 - DNA, 30 bp, Artificial Sequence
  Synthetic oligonucleotide
taatatggctgtatagggaaacccaccaag

SEQ ID NO: 104984 - DNA, 30 bp, Artificial Sequence
  Synthetic oligonucleotide
ggtggtgcgagcccacattcgatcaccaag

SEQ ID NO: 104985 - DNA, 30 bp, Artificial Sequence
  Synthetic oligonucleotide
gtggcgcagaagtcgaagggatcgaccaag

SEQ ID NO: 104986 - DNA, 30 bp, Artificial Sequence
  Synthetic oligonucleotide
acctaactacaacgaaaggccatgaccaag

SEQ ID NO: 104987 - DNA, 30 bp, Artificial Sequence
  Synthetic oligonucleotide
gtgtggctcgacgctcgtcgccttaccaag

SEQ ID NO: 104988 - DNA, 30 bp, Artificial Sequence
  Synthetic oligonucleotide
tgggcgtcgggctatcaagtgggagccaag

SEQ ID NO: 104989 - DNA, 30 bp, Artificial Sequence
  Synthetic oligonucleotide
tgtgacagctgagcgtcagaatacgccaag

SEQ ID NO: 104990 - DNA, 30 bp, Artificial Sequence
  Synthetic oligonucleotide
ccggaaggatacttgatggaaagtgccaag

SEQ ID NO: 104991 - DNA, 30 bp, Artificial Sequence
  Synthetic oligonucleotide
gcatgagttagtctggaattagcttccaag

SEQ ID NO: 104992 - DNA, 30 bp, Artificial Sequence
  Synthetic oligonucleotide
atcattgatcacgaaagcaatgcttccaag

SEQ ID NO: 104993 - DNA, 30 bp, Artificial Sequence
  Synthetic oligonucleotide
ctgggaccgccgttacggtagttccgcaag

SEQ ID NO: 104994 - DNA, 30 bp, Artificial Sequence
  Synthetic oligonucleotide
ctgttagtgactgtggtaggcataggcaag

SEQ ID NO: 104995 - DNA, 30 bp, Artificial Sequence
  Synthetic oligonucleotide
tgaccctgtatcgtctggtaggggggcaag

SEQ ID NO: 104996 - DNA, 30 bp, Artificial Sequence
  Synthetic oligonucleotide
ctggcaagtaacgttaacgctcgtggcaag

SEQ ID NO: 104997 - DNA, 30 bp, Artificial Sequence
  Synthetic oligonucleotide
ggagacaaggctaaaggatgcggtggcaag

SEQ ID NO: 104998 - DNA, 30 bp, Artificial Sequence
  Synthetic oligonucleotide
taggtaaaagacttcgacaacggatgcaag

SEQ ID NO: 104999 - DNA, 30 bp, Artificial Sequence
  Synthetic oligonucleotide
aagaaccgggcctgtcctaactaaatcaag

SEQ ID NO: 105000 - DNA, 30 bp, Artificial Sequence
  Synthetic oligonucleotide
ccgagactcatcgtaaacgccgcaatcaag

SEQ ID NO: 105001 - DNA, 30 bp, Artificial Sequence
  Synthetic oligonucleotide
tgacgcggcgaaggggtgtcgttaatcaag

SEQ ID NO: 105002 - DNA, 30 bp, Artificial Sequence
  Synthetic oligonucleotide
aagaaccagatctttagccctaggatcaag

SEQ ID NO: 105003 - DNA, 30 bp, Artificial Sequence
  Synthetic oligonucleotide
agcgtacggggacggagtctgtggatcaag

SEQ ID NO: 105004 - DNA, 30 bp, Artificial Sequence
  Synthetic oligonucleotide
ccgttcgtgttaggacgagttcgtatcaag

SEQ ID NO: 105005 - DNA, 30 bp, Artificial Sequence
  Synthetic oligonucleotide
atagattgttcgaagagccgggaactcaag

SEQ ID NO: 105006 - DNA, 30 bp, Artificial Sequence
  Synthetic oligonucleotide
aataccggtgaatagatgacagatctcaag

SEQ ID NO: 105007 - DNA, 30 bp, Artificial Sequence
  Synthetic oligonucleotide
cgaaaaagattactgatggggcttctcaag

SEQ ID NO: 105008 - DNA, 30 bp, Artificial Sequence
  Synthetic oligonucleotide
tggtgtatactgtagtctacgaatgtcaag

SEQ ID NO: 105009 - DNA, 30 bp, Artificial Sequence
  Synthetic oligonucleotide
agcatacggtgtcgggccgtttgattcaag

SEQ ID NO: 105010 - DNA, 30 bp, Artificial Sequence
  Synthetic oligonucleotide
ggggacagttaaagttctgcaagcttcaag

SEQ ID NO: 105011 - DNA, 30 bp, Artificial Sequence
  Synthetic oligonucleotide
cgacgccctagactcggtgttaagttcaag

SEQ ID NO: 105012 - DNA, 30 bp, Artificial Sequence
  Synthetic oligonucleotide
aaagctaccctgctcataacccccaagaag

SEQ ID NO: 105013 - DNA, 30 bp, Artificial Sequence
  Synthetic oligonucleotide
agacccattctgaaaaaaacggcgaagaag

SEQ ID NO: 105014 - DNA, 30 bp, Artificial Sequence
  Synthetic oligonucleotide
gaacgctccaacgttttccgtgcgaagaag

SEQ ID NO: 105015 - DNA, 30 bp, Artificial Sequence
  Synthetic oligonucleotide
gagataacaggagtcgcaataatgaagaag

SEQ ID NO: 105016 - DNA, 30 bp, Artificial Sequence
  Synthetic oligonucleotide
atgcagtaaggtcagccaatatgtaagaag

SEQ ID NO: 105017 - DNA, 30 bp, Artificial Sequence
  Synthetic oligonucleotide
taataaaatctgcacgtcatgtatcagaag

SEQ ID NO: 105018 - DNA, 30 bp, Artificial Sequence
  Synthetic oligonucleotide
tgggcgacgagcttatcgcgtctagagaag

SEQ ID NO: 105019 - DNA, 30 bp, Artificial Sequence
  Synthetic oligonucleotide
ttacaagataagggcaattacgccgagaag

SEQ ID NO: 105020 - DNA, 30 bp, Artificial Sequence
  Synthetic oligonucleotide
tacaggcgcatgtagtgaaagggggagaag

SEQ ID NO: 105021 - DNA, 30 bp, Artificial Sequence
  Synthetic oligonucleotide
agtatcgaagatacagtaattaaatagaag

SEQ ID NO: 105022 - DNA, 30 bp, Artificial Sequence
  Synthetic oligonucleotide
gcgtcaagtttgggtttcagtcgatagaag

SEQ ID NO: 105023 - DNA, 30 bp, Artificial Sequence
  Synthetic oligonucleotide
gggtggcaccttcggaatgcagactagaag

SEQ ID NO: 105024 - DNA, 30 bp, Artificial Sequence
  Synthetic oligonucleotide
aatgtgcgtaggtttcgcattagctagaag

SEQ ID NO: 105025 - DNA, 30 bp, Artificial Sequence
  Synthetic oligonucleotide
tctgcgatggagtaacttttattctagaag

SEQ ID NO: 105026 - DNA, 30 bp, Artificial Sequence
  Synthetic oligonucleotide
caatatgggaggggtgttcgccagtagaag

SEQ ID NO: 105027 - DNA, 30 bp, Artificial Sequence
  Synthetic oligonucleotide
cgggagtacgacgagagccattcgacgaag

SEQ ID NO: 105028 - DNA, 30 bp, Artificial Sequence
  Synthetic oligonucleotide
gaaacccatggaactacagtggcgccgaag

SEQ ID NO: 105029 - DNA, 30 bp, Artificial Sequence
  Synthetic oligonucleotide
agatgggagtaaagatgttcatcagcgaag

SEQ ID NO: 105030 - DNA, 30 bp, Artificial Sequence
  Synthetic oligonucleotide
ggaaacagcaagcgtaacataatagcgaag

SEQ ID NO: 105031 - DNA, 30 bp, Artificial Sequence
  Synthetic oligonucleotide
ccggatacgacatagtcggacaatgcgaag

SEQ ID NO: 105032 - DNA, 30 bp, Artificial Sequence
  Synthetic oligonucleotide
gttgggttttgagatttaagacagtcgaag

SEQ ID NO: 105033 - DNA, 30 bp, Artificial Sequence
  Synthetic oligonucleotide
gaggtgaaatgggcaattatggagtcgaag

SEQ ID NO: 105034 - DNA, 30 bp, Artificial Sequence
  Synthetic oligonucleotide
ccataatcagccactgtgcacgggtcgaag

SEQ ID NO: 105035 - DNA, 30 bp, Artificial Sequence
  Synthetic oligonucleotide
cgcacaaatgataacttggcagcaaggaag

SEQ ID NO: 105036 - DNA, 30 bp, Artificial Sequence
  Synthetic oligonucleotide
cctcagtaatatagaaaacttggaaggaag

SEQ ID NO: 105037 - DNA, 30 bp, Artificial Sequence
  Synthetic oligonucleotide
aaatgtagtaccagggtcgcctccaggaag

SEQ ID NO: 105038 - DNA, 30 bp, Artificial Sequence
  Synthetic oligonucleotide
ctggttgttatgataaagattgggaggaag

SEQ ID NO: 105039 - DNA, 30 bp, Artificial Sequence
  Synthetic oligonucleotide
ttcgtacataatgctgggcgaactaggaag

SEQ ID NO: 105040 - DNA, 30 bp, Artificial Sequence
  Synthetic oligonucleotide
tgtaacattggggatcccgggcaacggaag

SEQ ID NO: 105041 - DNA, 30 bp, Artificial Sequence
  Synthetic oligonucleotide
atcatgatagtccatatctgagtacggaag

SEQ ID NO: 105042 - DNA, 30 bp, Artificial Sequence
  Synthetic oligonucleotide
tgcacgcaatacgacagagcaagccggaag

SEQ ID NO: 105043 - DNA, 30 bp, Artificial Sequence
  Synthetic oligonucleotide
ctcggggaacatacctaggactcgcggaag

SEQ ID NO: 105044 - DNA, 30 bp, Artificial Sequence
  Synthetic oligonucleotide
ggggaggaagaacctctccaagggcggaag

SEQ ID NO: 105045 - DNA, 29 bp, Artificial Sequence
  Synthetic oligonucleotide
cccgtgaaggaacatgcgtctcagggaag

SEQ ID NO: 105046 - DNA, 30 bp, Artificial Sequence
  Synthetic oligonucleotide
cgcttgtgggttgaaagaaaaggggggaag

SEQ ID NO: 105047 - DNA, 30 bp, Artificial Sequence
  Synthetic oligonucleotide
atagtatcagctggcccagtttgggggaag

SEQ ID NO: 105048 - DNA, 30 bp, Artificial Sequence
  Synthetic oligonucleotide
tcggctgaagaacagcctgccgcctggaag

SEQ ID NO: 105049 - DNA, 30 bp, Artificial Sequence
  Synthetic oligonucleotide
gaggagacatccacagggttatcctggaag

SEQ ID NO: 105050 - DNA, 30 bp, Artificial Sequence
  Synthetic oligonucleotide
cgcacgaccacgccaagtgcttgctggaag

SEQ ID NO: 105051 - DNA, 30 bp, Artificial Sequence
  Synthetic oligonucleotide
gtgaccgggatctctgtagtattctggaag

SEQ ID NO: 105052 - DNA, 30 bp, Artificial Sequence
  Synthetic oligonucleotide
ggaagatacacatggtgacatttctggaag

SEQ ID NO: 105053 - DNA, 30 bp, Artificial Sequence
  Synthetic oligonucleotide
gcctttagcaacacggaaaatcggtggaag

SEQ ID NO: 105054 - DNA, 29 bp, Artificial Sequence
  Synthetic oligonucleotide
tgccggctctagccgtaaataattggaag

SEQ ID NO: 105055 - DNA, 30 bp, Artificial Sequence
  Synthetic oligonucleotide
ggttgaaagccctaccctgggagttggaag

SEQ ID NO: 105056 - DNA, 30 bp, Artificial Sequence
  Synthetic oligonucleotide
gacaaggcccagatactcaatgcaatgaag

SEQ ID NO: 105057 - DNA, 31 bp, Artificial Sequence
  Synthetic oligonucleotide
ggcgtctagggggacgtgacatagaatgaag

SEQ ID NO: 105058 - DNA, 30 bp, Artificial Sequence
  Synthetic oligonucleotide
taaaaataaagtggggagcaactaatgaag

SEQ ID NO: 105059 - DNA, 30 bp, Artificial Sequence
  Synthetic oligonucleotide
cgcgaacactggctaaccgggttaatgaag

SEQ ID NO: 105060 - DNA, 30 bp, Artificial Sequence
  Synthetic oligonucleotide
agtaagatcatgtttatcgccctgatgaag

SEQ ID NO: 105061 - DNA, 30 bp, Artificial Sequence
  Synthetic oligonucleotide
cacgtgaatcgcgtagcgggcctaaataag

SEQ ID NO: 105062 - DNA, 30 bp, Artificial Sequence
  Synthetic oligonucleotide
ttaggatctagagccgaatgcaacaataag

SEQ ID NO: 105063 - DNA, 30 bp, Artificial Sequence
  Synthetic oligonucleotide
aacgtagggaaccatcggcctctcaataag

SEQ ID NO: 105064 - DNA, 30 bp, Artificial Sequence
  Synthetic oligonucleotide
tcgtgaagaccgaacacggggattaataag

SEQ ID NO: 105065 - DNA, 30 bp, Artificial Sequence
  Synthetic oligonucleotide
tagtgatgccggcgcccgtgacttaataag

SEQ ID NO: 105066 - DNA, 30 bp, Artificial Sequence
  Synthetic oligonucleotide
ccttcctagggcgtactgagtccacataag

SEQ ID NO: 105067 - DNA, 30 bp, Artificial Sequence
  Synthetic oligonucleotide
acgaggggggggttcaaattttgacataag

SEQ ID NO: 105068 - DNA, 30 bp, Artificial Sequence
  Synthetic oligonucleotide
cccggaaaccagtaactttggttacataag

SEQ ID NO: 105069 - DNA, 30 bp, Artificial Sequence
  Synthetic oligonucleotide
cggcaagtcattgacagatacccagataag

SEQ ID NO: 105070 - DNA, 30 bp, Artificial Sequence
  Synthetic oligonucleotide
gtggcgctgtaggtcggtgcaaaggataag

SEQ ID NO: 105071 - DNA, 30 bp, Artificial Sequence
  Synthetic oligonucleotide
ggacgatcgggggtcaaatcagaggataag

SEQ ID NO: 105072 - DNA, 30 bp, Artificial Sequence
  Synthetic oligonucleotide
ggcacgttacgtcatcaaaatccggataag

SEQ ID NO: 105073 - DNA, 30 bp, Artificial Sequence
  Synthetic oligonucleotide
catgactcaggctggatgtattgggataag

SEQ ID NO: 105074 - DNA, 30 bp, Artificial Sequence
  Synthetic oligonucleotide
aggtaactaggattaatctctgattataag

SEQ ID NO: 105075 - DNA, 30 bp, Artificial Sequence
  Synthetic oligonucleotide
ccggactgcaaaccgtggttcgtttataag

SEQ ID NO: 105076 - DNA, 30 bp, Artificial Sequence
  Synthetic oligonucleotide
taacgatgccataccatcctagtcactaag

SEQ ID NO: 105077 - DNA, 30 bp, Artificial Sequence
  Synthetic oligonucleotide
cgaaggatagtctatactgagaggactaag

SEQ ID NO: 105078 - DNA, 30 bp, Artificial Sequence
  Synthetic oligonucleotide
ggcatcaggagatccgactaggggactaag

SEQ ID NO: 105079 - DNA, 30 bp, Artificial Sequence
  Synthetic oligonucleotide
tgtaaatgatgtcagcgaatactgactaag

SEQ ID NO: 105080 - DNA, 30 bp, Artificial Sequence
  Synthetic oligonucleotide
gaaactagtaataaatggaaacctactaag

SEQ ID NO: 105081 - DNA, 30 bp, Artificial Sequence
  Synthetic oligonucleotide
gtcgttaaagaccattgaggttgtactaag

SEQ ID NO: 105082 - DNA, 30 bp, Artificial Sequence
  Synthetic oligonucleotide
gagcccaagggtatccacaaaccacctaag

SEQ ID NO: 105083 - DNA, 30 bp, Artificial Sequence
  Synthetic oligonucleotide
caggttatgtaatgatccgcgccacctaag

SEQ ID NO: 105084 - DNA, 30 bp, Artificial Sequence
  Synthetic oligonucleotide
tcactcgaaagagaagtatttccacctaag

SEQ ID NO: 105085 - DNA, 30 bp, Artificial Sequence
  Synthetic oligonucleotide
tctgtagcattcggaaacgtgtaccctaag

SEQ ID NO: 105086 - DNA, 30 bp, Artificial Sequence
  Synthetic oligonucleotide
tagtgagtgccacaggcctacaatcctaag

SEQ ID NO: 105087 - DNA, 30 bp, Artificial Sequence
  Synthetic oligonucleotide
ctaaagagtgccaaccataaatccgctaag

SEQ ID NO: 105088 - DNA, 30 bp, Artificial Sequence
  Synthetic oligonucleotide
gtggggcgagacatactccaaaaggctaag

SEQ ID NO: 105089 - DNA, 30 bp, Artificial Sequence
  Synthetic oligonucleotide
ttacagactcgtttgctcgaggaggctaag

SEQ ID NO: 105090 - DNA, 30 bp, Artificial Sequence
  Synthetic oligonucleotide
cccactgaattcccatcagttcctgctaag

SEQ ID NO: 105091 - DNA, 30 bp, Artificial Sequence
  Synthetic oligonucleotide
ttcgggacatgaccaataaggcgctctaag

SEQ ID NO: 105092 - DNA, 30 bp, Artificial Sequence
  Synthetic oligonucleotide
tgttgacaatatagtgacgactaaagtaag

SEQ ID NO: 105093 - DNA, 30 bp, Artificial Sequence
  Synthetic oligonucleotide
acgcgacagcagaactacgcgctaagtaag

SEQ ID NO: 105094 - DNA, 30 bp, Artificial Sequence
  Synthetic oligonucleotide
ggtataggaagtgacaaacccttcagtaag

SEQ ID NO: 105095 - DNA, 30 bp, Artificial Sequence
  Synthetic oligonucleotide
cacgacataacagcagggccggggagtaag

SEQ ID NO: 105096 - DNA, 30 bp, Artificial Sequence
  Synthetic oligonucleotide
aacaaggactgtacgtcagcgatccgtaag

SEQ ID NO: 105097 - DNA, 30 bp, Artificial Sequence
  Synthetic oligonucleotide
agtccgacatatagtgcaatgggtcgtaag

SEQ ID NO: 105098 - DNA, 30 bp, Artificial Sequence
  Synthetic oligonucleotide
caatgttaggatacttggacttaaggtaag

SEQ ID NO: 105099 - DNA, 30 bp, Artificial Sequence
  Synthetic oligonucleotide
acggggtgtatcatccacgatagaggtaag

SEQ ID NO: 105100 - DNA, 30 bp, Artificial Sequence
  Synthetic oligonucleotide
cttgaactacccagattactggtaggtaag

SEQ ID NO: 105101 - DNA, 30 bp, Artificial Sequence
  Synthetic oligonucleotide
acaactctatgatgaaaggggttcggtaag

SEQ ID NO: 105102 - DNA, 30 bp, Artificial Sequence
  Synthetic oligonucleotide
acctggtgaagcctgccgagcgcaattaag

SEQ ID NO: 105103 - DNA, 30 bp, Artificial Sequence
  Synthetic oligonucleotide
caatgttctctgaggcactagtgaattaag

SEQ ID NO: 105104 - DNA, 30 bp, Artificial Sequence
  Synthetic oligonucleotide
ccccgactggaccagttggaataccttaag

SEQ ID NO: 105105 - DNA, 30 bp, Artificial Sequence
  Synthetic oligonucleotide
aagattacgggccggctttacaagcttaag

SEQ ID NO: 105106 - DNA, 30 bp, Artificial Sequence
  Synthetic oligonucleotide
ggggctgtttatgccgacgaaacgcttaag

SEQ ID NO: 105107 - DNA, 30 bp, Artificial Sequence
  Synthetic oligonucleotide
aacctacatccaaggcatgacgaagttaag

SEQ ID NO: 105108 - DNA, 30 bp, Artificial Sequence
  Synthetic oligonucleotide
gacggcgatgttgatggagtcacgtttaag

SEQ ID NO: 105109 - DNA, 30 bp, Artificial Sequence
  Synthetic oligonucleotide
gtagcaggccacgagcgtgcgctgtttaag

SEQ ID NO: 105110 - DNA, 30 bp, Artificial Sequence
  Synthetic oligonucleotide
atcgacgaatataacgaggtgtgaaaacag

SEQ ID NO: 105111 - DNA, 30 bp, Artificial Sequence
  Synthetic oligonucleotide
gacgtacgatgacgtctttttcgcaaacag

SEQ ID NO: 105112 - DNA, 30 bp, Artificial Sequence
  Synthetic oligonucleotide
cgtatcgacttcgtctatgtggggaaacag

SEQ ID NO: 105113 - DNA, 30 bp, Artificial Sequence
  Synthetic oligonucleotide
ctccaaagcttggcatgagctggtaaacag

SEQ ID NO: 105114 - DNA, 30 bp, Artificial Sequence
  Synthetic oligonucleotide
taagatatcagttggaaacttgagcaacag

SEQ ID NO: 105115 - DNA, 30 bp, Artificial Sequence
  Synthetic oligonucleotide
tcgtaaaacgttattatggtgtccgaacag

SEQ ID NO: 105116 - DNA, 30 bp, Artificial Sequence
  Synthetic oligonucleotide
gtatcggacgaaagttcacattccgaacag

SEQ ID NO: 105117 - DNA, 30 bp, Artificial Sequence
  Synthetic oligonucleotide
tcccctcaatgaaggtaaatgcgggaacag

SEQ ID NO: 105118 - DNA, 30 bp, Artificial Sequence
  Synthetic oligonucleotide
gataggacagggttagttttcactgaacag

SEQ ID NO: 105119 - DNA, 30 bp, Artificial Sequence
  Synthetic oligonucleotide
ttaaacaacggcggcgtcacgcctgaacag

SEQ ID NO: 105120 - DNA, 30 bp, Artificial Sequence
  Synthetic oligonucleotide
cctgccatagttctggtgtgtgcataacag

SEQ ID NO: 105121 - DNA, 30 bp, Artificial Sequence
  Synthetic oligonucleotide
gatatgccaaaattgtggtgtggataacag

SEQ ID NO: 105122 - DNA, 30 bp, Artificial Sequence
  Synthetic oligonucleotide
cgccgagggttggtcggaatgcgcacacag

SEQ ID NO: 105123 - DNA, 30 bp, Artificial Sequence
  Synthetic oligonucleotide
tcgcggtcatttgagtcgagagagacacag

SEQ ID NO: 105124 - DNA, 30 bp, Artificial Sequence
  Synthetic oligonucleotide
cctatcgcacgaaacagggtgttgacacag

SEQ ID NO: 105125 - DNA, 30 bp, Artificial Sequence
  Synthetic oligonucleotide
cggtacatgcgagcggtttcgtatacacag

SEQ ID NO: 105126 - DNA, 30 bp, Artificial Sequence
  Synthetic oligonucleotide
ccttaacttaaagccttatatgtaccacag

SEQ ID NO: 105127 - DNA, 30 bp, Artificial Sequence
  Synthetic oligonucleotide
attcgtaaatagtctcctatattaccacag

SEQ ID NO: 105128 - DNA, 30 bp, Artificial Sequence
  Synthetic oligonucleotide
gtgatatagattgattggggttctccacag

SEQ ID NO: 105129 - DNA, 30 bp, Artificial Sequence
  Synthetic oligonucleotide
cgtgatggaattaccgcgagcaaagcacag

SEQ ID NO: 105130 - DNA, 30 bp, Artificial Sequence
  Synthetic oligonucleotide
tagagcggctgtccaagttcgttagcacag

SEQ ID NO: 105131 - DNA, 30 bp, Artificial Sequence
  Synthetic oligonucleotide
gggtaatgtcgttgggcgagagaggcacag

SEQ ID NO: 105132 - DNA, 30 bp, Artificial Sequence
  Synthetic oligonucleotide
aggtggtaccacgcccagggaaattcacag

SEQ ID NO: 105133 - DNA, 30 bp, Artificial Sequence
  Synthetic oligonucleotide
tgcaggcgcgacggaataacgcccagacag

SEQ ID NO: 105134 - DNA, 30 bp, Artificial Sequence
  Synthetic oligonucleotide
gaaaaattaggttagcctagtaagagacag

SEQ ID NO: 105135 - DNA, 30 bp, Artificial Sequence
  Synthetic oligonucleotide
tggtacgtcctaatcatcagccagagacag

SEQ ID NO: 105136 - DNA, 30 bp, Artificial Sequence
  Synthetic oligonucleotide
caatttgacaaacctaacagaaatagacag

SEQ ID NO: 105137 - DNA, 30 bp, Artificial Sequence
  Synthetic oligonucleotide
gagaaccggtactctattatttaacgacag

SEQ ID NO: 105138 - DNA, 30 bp, Artificial Sequence
  Synthetic oligonucleotide
gaacataaaccgagacgaatcgtgcgacag

SEQ ID NO: 105139 - DNA, 30 bp, Artificial Sequence
  Synthetic oligonucleotide
ccaataatctgaaataaagacttgcgacag

SEQ ID NO: 105140 - DNA, 30 bp, Artificial Sequence
  Synthetic oligonucleotide
acattactcaggaccagtaacattcgacag

SEQ ID NO: 105141 - DNA, 30 bp, Artificial Sequence
  Synthetic oligonucleotide
gaacagagcaaggacgtcaagtaatgacag

SEQ ID NO: 105142 - DNA, 30 bp, Artificial Sequence
  Synthetic oligonucleotide
tataacacaggtggaggaaagatatgacag

SEQ ID NO: 105143 - DNA, 30 bp, Artificial Sequence
  Synthetic oligonucleotide
acagaagtcgattggactgtttcgtgacag

SEQ ID NO: 105144 - DNA, 30 bp, Artificial Sequence
  Synthetic oligonucleotide
acgacgcacggtgtgtgtgtgagaatacag

SEQ ID NO: 105145 - DNA, 30 bp, Artificial Sequence
  Synthetic oligonucleotide
gccagcggcatccaaggtgatggcatacag

SEQ ID NO: 105146 - DNA, 30 bp, Artificial Sequence
  Synthetic oligonucleotide
tggcatgaaattccgctcagtgctatacag

SEQ ID NO: 105147 - DNA, 30 bp, Artificial Sequence
  Synthetic oligonucleotide
cggcttcatacgggggtcggtaaactacag

SEQ ID NO: 105148 - DNA, 30 bp, Artificial Sequence
  Synthetic oligonucleotide
cttaacaggagtattaacccggacctacag

SEQ ID NO: 105149 - DNA, 30 bp, Artificial Sequence
  Synthetic oligonucleotide
cgcccgaaggaggtactaggttacctacag

SEQ ID NO: 105150 - DNA, 30 bp, Artificial Sequence
  Synthetic oligonucleotide
tccgtggtaggttgccagttgtgcctacag

SEQ ID NO: 105151 - DNA, 30 bp, Artificial Sequence
  Synthetic oligonucleotide
aagtgaaatttatcagtagacaatgtacag

SEQ ID NO: 105152 - DNA, 30 bp, Artificial Sequence
  Synthetic oligonucleotide
aacgattcatgggcataggaacaattacag

SEQ ID NO: 105153 - DNA, 30 bp, Artificial Sequence
  Synthetic oligonucleotide
tgaggtgggccctagacgatggaaaaccag

SEQ ID NO: 105154 - DNA, 30 bp, Artificial Sequence
  Synthetic oligonucleotide
aggctttagctcccaggaaatggaaaccag

SEQ ID NO: 105155 - DNA, 30 bp, Artificial Sequence
  Synthetic oligonucleotide
atttcgggtcaagtacaatgagagaaccag

SEQ ID NO: 105156 - DNA, 30 bp, Artificial Sequence
  Synthetic oligonucleotide
ggagttagggtagcgaacagccaacaccag

SEQ ID NO: 105157 - DNA, 30 bp, Artificial Sequence
  Synthetic oligonucleotide
cctgatccctaaatcatccagagacaccag

SEQ ID NO: 105158 - DNA, 30 bp, Artificial Sequence
  Synthetic oligonucleotide
tggttagcagaaatcgcaccccagcaccag

SEQ ID NO: 105159 - DNA, 30 bp, Artificial Sequence
  Synthetic oligonucleotide
ggacctgtagtatatagtctcggtcaccag

SEQ ID NO: 105160 - DNA, 30 bp, Artificial Sequence
  Synthetic oligonucleotide
tggttgggcaggcaagggcatgaagaccag

SEQ ID NO: 105161 - DNA, 30 bp, Artificial Sequence
  Synthetic oligonucleotide
tgcgttacgggcgactgaacagcagaccag

SEQ ID NO: 105162 - DNA, 30 bp, Artificial Sequence
  Synthetic oligonucleotide
gacagtgcgcgcgagggggtcggtgaccag

SEQ ID NO: 105163 - DNA, 30 bp, Artificial Sequence
  Synthetic oligonucleotide
tgaagattcaatctcgttacgggataccag

SEQ ID NO: 105164 - DNA, 30 bp, Artificial Sequence
  Synthetic oligonucleotide
gagcaaaactcgcgatgtttattataccag

SEQ ID NO: 105165 - DNA, 30 bp, Artificial Sequence
  Synthetic oligonucleotide
cacgtctgtaatcctcttttcacctaccag

SEQ ID NO: 105166 - DNA, 30 bp, Artificial Sequence
  Synthetic oligonucleotide
agtcgtccttctagcctagtagcctaccag

SEQ ID NO: 105167 - DNA, 30 bp, Artificial Sequence
  Synthetic oligonucleotide
cgtacacgtttgcttgcgcattgctaccag

SEQ ID NO: 105168 - DNA, 30 bp, Artificial Sequence
  Synthetic oligonucleotide
cgtaccacggaaatatatgtacattaccag

SEQ ID NO: 105169 - DNA, 30 bp, Artificial Sequence
  Synthetic oligonucleotide
actattacgtaaagtaataaaataacccag

SEQ ID NO: 105170 - DNA, 30 bp, Artificial Sequence
  Synthetic oligonucleotide
atcgacgtctttcgaaaagtaggcacccag

SEQ ID NO: 105171 - DNA, 30 bp, Artificial Sequence
  Synthetic oligonucleotide
gggaggccggagatagactgtttcacccag

SEQ ID NO: 105172 - DNA, 30 bp, Artificial Sequence
  Synthetic oligonucleotide
ccttacaccaaaagaagtgacacaccccag

SEQ ID NO: 105173 - DNA, 30 bp, Artificial Sequence
  Synthetic oligonucleotide
ggcgacgttaggcaaatcaataacccccag

SEQ ID NO: 105174 - DNA, 30 bp, Artificial Sequence
  Synthetic oligonucleotide
tatatgtgactacgtaaatcgggagcccag

SEQ ID NO: 105175 - DNA, 30 bp, Artificial Sequence
  Synthetic oligonucleotide
atatcgaaaggaaggtcacggtaatcccag

SEQ ID NO: 105176 - DNA, 30 bp, Artificial Sequence
  Synthetic oligonucleotide
aaacggccactggcgtgcagtcgatcccag

SEQ ID NO: 105177 - DNA, 30 bp, Artificial Sequence
  Synthetic oligonucleotide
gcagcgaagtattcgctcaaattgtcccag

SEQ ID NO: 105178 - DNA, 30 bp, Artificial Sequence
  Synthetic oligonucleotide
tcataatcgatacgttgaacgatgagccag

SEQ ID NO: 105179 - DNA, 30 bp, Artificial Sequence
  Synthetic oligonucleotide
accatcagaaagtctcgctgtagtagccag

SEQ ID NO: 105180 - DNA, 30 bp, Artificial Sequence
  Synthetic oligonucleotide
agccagagcgtaagctgggttgttagccag

SEQ ID NO: 105181 - DNA, 30 bp, Artificial Sequence
  Synthetic oligonucleotide
cgggaaaagcagagcggtgggtctcgccag

SEQ ID NO: 105182 - DNA, 30 bp, Artificial Sequence
  Synthetic oligonucleotide
tcaactttcaagaatgcggttccaggccag

SEQ ID NO: 105183 - DNA, 30 bp, Artificial Sequence
  Synthetic oligonucleotide
aaagcaccgtattccctacctaagatccag

SEQ ID NO: 105184 - DNA, 30 bp, Artificial Sequence
  Synthetic oligonucleotide
tttcgattagtagaatagctcaatatccag

SEQ ID NO: 105185 - DNA, 30 bp, Artificial Sequence
  Synthetic oligonucleotide
cacgcccggctgtatcccgatagactccag

SEQ ID NO: 105186 - DNA, 30 bp, Artificial Sequence
  Synthetic oligonucleotide
agctaggtcgtaatgcggtcgccgctccag

SEQ ID NO: 105187 - DNA, 30 bp, Artificial Sequence
  Synthetic oligonucleotide
taatagagtgttccagtgagtgatctccag

SEQ ID NO: 105188 - DNA, 30 bp, Artificial Sequence
  Synthetic oligonucleotide
ttagggctctcctgtaataagagcgtccag

SEQ ID NO: 105189 - DNA, 30 bp, Artificial Sequence
  Synthetic oligonucleotide
tagcaatcataggtgccaggcatggtccag

SEQ ID NO: 105190 - DNA, 30 bp, Artificial Sequence
  Synthetic oligonucleotide
cgagcatgacgccatgtgggtgtgttccag

SEQ ID NO: 105191 - DNA, 30 bp, Artificial Sequence
  Synthetic oligonucleotide
caggacaattacaatataatataaaagcag

SEQ ID NO: 105192 - DNA, 30 bp, Artificial Sequence
  Synthetic oligonucleotide
gacctcaaacggcggggcctcgtgaagcag

SEQ ID NO: 105193 - DNA, 30 bp, Artificial Sequence
  Synthetic oligonucleotide
acaggattcatacagcacgcgtaacagcag

SEQ ID NO: 105194 - DNA, 30 bp, Artificial Sequence
  Synthetic oligonucleotide
gactcaaagatgggaatagtacgccagcag

SEQ ID NO: 105195 - DNA, 30 bp, Artificial Sequence
  Synthetic oligonucleotide
tcaactgcatactaagtggtacgccagcag

SEQ ID NO: 105196 - DNA, 30 bp, Artificial Sequence
  Synthetic oligonucleotide
caaagaggagtaagtccgccatgccagcag

SEQ ID NO: 105197 - DNA, 30 bp, Artificial Sequence
  Synthetic oligonucleotide
tagttgtaagggtagtattttctccagcag

SEQ ID NO: 105198 - DNA, 30 bp, Artificial Sequence
  Synthetic oligonucleotide
acagattttcaccaccataaatgtcagcag

SEQ ID NO: 105199 - DNA, 30 bp, Artificial Sequence
  Synthetic oligonucleotide
gttcaaaaagaaactttgcggtgagagcag

SEQ ID NO: 105200 - DNA, 30 bp, Artificial Sequence
  Synthetic oligonucleotide
aaagccccggacttggagagctttgagcag

SEQ ID NO: 105201 - DNA, 30 bp, Artificial Sequence
  Synthetic oligonucleotide
gccccgacctataccataaactaatagcag

SEQ ID NO: 105202 - DNA, 30 bp, Artificial Sequence
  Synthetic oligonucleotide
ggttaggtcgtataaggacattgatagcag

SEQ ID NO: 105203 - DNA, 30 bp, Artificial Sequence
  Synthetic oligonucleotide
aggtcgtgcgaaccaagagactatacgcag

SEQ ID NO: 105204 - DNA, 30 bp, Artificial Sequence
  Synthetic oligonucleotide
atcacagaacgggaattcgaccccccgcag

SEQ ID NO: 105205 - DNA, 30 bp, Artificial Sequence
  Synthetic oligonucleotide
gaatcgtgactcgtagtcagtcaagcgcag

SEQ ID NO: 105206 - DNA, 30 bp, Artificial Sequence
  Synthetic oligonucleotide
gggatgatgctgcataagtgttctgcgcag

SEQ ID NO: 105207 - DNA, 30 bp, Artificial Sequence
  Synthetic oligonucleotide
agagcgttacggatcctctaatattcgcag

SEQ ID NO: 105208 - DNA, 30 bp, Artificial Sequence
  Synthetic oligonucleotide
cacacatctcctggggtaaaaggttcgcag

SEQ ID NO: 105209 - DNA, 30 bp, Artificial Sequence
  Synthetic oligonucleotide
taaacacaacggaacgcactagacaggcag

SEQ ID NO: 105210 - DNA, 30 bp, Artificial Sequence
  Synthetic oligonucleotide
actatataccgggcaaagcagggagggcag

SEQ ID NO: 105211 - DNA, 30 bp, Artificial Sequence
  Synthetic oligonucleotide
aagagacttgaaggctggattttagggcag

SEQ ID NO: 105212 - DNA, 30 bp, Artificial Sequence
  Synthetic oligonucleotide
gactagaacttagcttcaccgtgggggcag

SEQ ID NO: 105213 - DNA, 30 bp, Artificial Sequence
  Synthetic oligonucleotide
aagtacctcgcatatatgagaaaatggcag

SEQ ID NO: 105214 - DNA, 30 bp, Artificial Sequence
  Synthetic oligonucleotide
cataatacgcgtgcggatcttttatggcag

SEQ ID NO: 105215 - DNA, 30 bp, Artificial Sequence
  Synthetic oligonucleotide
ggaggggcaactgcgcttgccaactggcag

SEQ ID NO: 105216 - DNA, 30 bp, Artificial Sequence
  Synthetic oligonucleotide
gcgaggtcattcgcggcaatctagtggcag

SEQ ID NO: 105217 - DNA, 30 bp, Artificial Sequence
  Synthetic oligonucleotide
atcttccaattacgctttatagggtggcag

SEQ ID NO: 105218 - DNA, 31 bp, Artificial Sequence
  Synthetic oligonucleotide
ccctagaccctggtgattggcacccatgcag

SEQ ID NO: 105219 - DNA, 30 bp, Artificial Sequence
  Synthetic oligonucleotide
gcacatgcggcatcaccaatagctatgcag

SEQ ID NO: 105220 - DNA, 30 bp, Artificial Sequence
  Synthetic oligonucleotide
ggcatgacgttgggtcttgctaccgtgcag

SEQ ID NO: 105221 - DNA, 30 bp, Artificial Sequence
  Synthetic oligonucleotide
tcgatctgtagctcagtgatcttggtgcag

SEQ ID NO: 105222 - DNA, 30 bp, Artificial Sequence
  Synthetic oligonucleotide
cagttgaggggtacataatcccttgtgcag

SEQ ID NO: 105223 - DNA, 30 bp, Artificial Sequence
  Synthetic oligonucleotide
ccgaatacggcaacacagttacacttgcag

SEQ ID NO: 105224 - DNA, 30 bp, Artificial Sequence
  Synthetic oligonucleotide
caaaacgggacttccgacaaaaagttgcag

SEQ ID NO: 105225 - DNA, 30 bp, Artificial Sequence
  Synthetic oligonucleotide
tcccgctcggctccggaagggaagttgcag

SEQ ID NO: 105226 - DNA, 30 bp, Artificial Sequence
  Synthetic oligonucleotide
cgggcatgaagaaaaagggttaggttgcag

SEQ ID NO: 105227 - DNA, 30 bp, Artificial Sequence
  Synthetic oligonucleotide
aaatggcggcctaacgtctgttgtttgcag

SEQ ID NO: 105228 - DNA, 30 bp, Artificial Sequence
  Synthetic oligonucleotide
agcgtaaatcgccaagggagtataaatcag

SEQ ID NO: 105229 - DNA, 30 bp, Artificial Sequence
  Synthetic oligonucleotide
gcacgtacctggacttaaagtgccaatcag

SEQ ID NO: 105230 - DNA, 30 bp, Artificial Sequence
  Synthetic oligonucleotide
tgctatccccacaggatttgatataatcag

SEQ ID NO: 105231 - DNA, 30 bp, Artificial Sequence
  Synthetic oligonucleotide
gggctatagtgagccaagccactacatcag

SEQ ID NO: 105232 - DNA, 30 bp, Artificial Sequence
  Synthetic oligonucleotide
ggagctacaactagtgcaaagcagcatcag

SEQ ID NO: 105233 - DNA, 30 bp, Artificial Sequence
  Synthetic oligonucleotide
tcagtagcctcggttgtgcattaagatcag

SEQ ID NO: 105234 - DNA, 30 bp, Artificial Sequence
  Synthetic oligonucleotide
aacagtaccattacatggaaccgggatcag

SEQ ID NO: 105235 - DNA, 30 bp, Artificial Sequence
  Synthetic oligonucleotide
tactacccttggcctggccgtgctgatcag

SEQ ID NO: 105236 - DNA, 30 bp, Artificial Sequence
  Synthetic oligonucleotide
cttatagcagatctccgttaaggtgatcag

SEQ ID NO: 105237 - DNA, 30 bp, Artificial Sequence
  Synthetic oligonucleotide
ccgcccatcgggatcaggtttcttgatcag

SEQ ID NO: 105238 - DNA, 30 bp, Artificial Sequence
  Synthetic oligonucleotide
tgaggcactgcagacaaacagcggtatcag

SEQ ID NO: 105239 - DNA, 30 bp, Artificial Sequence
  Synthetic oligonucleotide
agttcaggtacgtagttgtgcgggtatcag

SEQ ID NO: 105240 - DNA, 30 bp, Artificial Sequence
  Synthetic oligonucleotide
tgaaaatagatgaggggaataaaaactcag

SEQ ID NO: 105241 - DNA, 28 bp, Artificial Sequence
  Synthetic oligonucleotide
ttgacgaccagggtatttcgcaactcag

SEQ ID NO: 105242 - DNA, 30 bp, Artificial Sequence
  Synthetic oligonucleotide
aaggcgtcaaaaatgccgacgtcgactcag

SEQ ID NO: 105243 - DNA, 30 bp, Artificial Sequence
  Synthetic oligonucleotide
gaatacccggcagggatggttgatactcag

SEQ ID NO: 105244 - DNA, 30 bp, Artificial Sequence
  Synthetic oligonucleotide
aatccgggtttgtggcaagttgcccctcag

SEQ ID NO: 105245 - DNA, 30 bp, Artificial Sequence
  Synthetic oligonucleotide
tatcaagctgtcgaaaacaattagcctcag

SEQ ID NO: 105246 - DNA, 30 bp, Artificial Sequence
  Synthetic oligonucleotide
tatgttgacctgctagccagaaacgctcag

SEQ ID NO: 105247 - DNA, 30 bp, Artificial Sequence
  Synthetic oligonucleotide
ttatgaccttcctatcctaccacggctcag

SEQ ID NO: 105248 - DNA, 30 bp, Artificial Sequence
  Synthetic oligonucleotide
actcgacagtgatcatgagtatgtgctcag

SEQ ID NO: 105249 - DNA, 30 bp, Artificial Sequence
  Synthetic oligonucleotide
aggaatccaacgggactgaacgagtctcag

SEQ ID NO: 105250 - DNA, 30 bp, Artificial Sequence
  Synthetic oligonucleotide
ctaggttccatatcgcccgaccccagtcag

SEQ ID NO: 105251 - DNA, 30 bp, Artificial Sequence
  Synthetic oligonucleotide
gcgaactagtgaacgcgttcccatcgtcag

SEQ ID NO: 105252 - DNA, 30 bp, Artificial Sequence
  Synthetic oligonucleotide
cgtgcttgtctaaatatggtgggtcgtcag

SEQ ID NO: 105253 - DNA, 30 bp, Artificial Sequence
  Synthetic oligonucleotide
caatagcatcatcccctcttcattcgtcag

SEQ ID NO: 105254 - DNA, 30 bp, Artificial Sequence
  Synthetic oligonucleotide
ggttaagtatcaatgggttgaccaggtcag

SEQ ID NO: 105255 - DNA, 30 bp, Artificial Sequence
  Synthetic oligonucleotide
tcaattaatgtaaacgcgctattaggtcag

SEQ ID NO: 105256 - DNA, 30 bp, Artificial Sequence
  Synthetic oligonucleotide
aagagtcatagtggatgttcaccgtgtcag

SEQ ID NO: 105257 - DNA, 30 bp, Artificial Sequence
  Synthetic oligonucleotide
catgaaagtatgttacagagaccgtgtcag

SEQ ID NO: 105258 - DNA, 30 bp, Artificial Sequence
  Synthetic oligonucleotide
ttcacgatcgggcttcacataggaattcag

SEQ ID NO: 105259 - DNA, 30 bp, Artificial Sequence
  Synthetic oligonucleotide
ccggcttgatgaaggacagcttacattcag

SEQ ID NO: 105260 - DNA, 30 bp, Artificial Sequence
  Synthetic oligonucleotide
tacaggacaaaggcccgcgcagggattcag

SEQ ID NO: 105261 - DNA, 30 bp, Artificial Sequence
  Synthetic oligonucleotide
gctagcacccagttggaggatctacttcag

SEQ ID NO: 105262 - DNA, 30 bp, Artificial Sequence
  Synthetic oligonucleotide
agagggcaattaacaagggcatgtcttcag

SEQ ID NO: 105263 - DNA, 30 bp, Artificial Sequence
  Synthetic oligonucleotide
tgagtccgaagaaatcgagaccaagttcag

SEQ ID NO: 105264 - DNA, 30 bp, Artificial Sequence
  Synthetic oligonucleotide
ggcatggaagcacattgaaacacagttcag

SEQ ID NO: 105265 - DNA, 30 bp, Artificial Sequence
  Synthetic oligonucleotide
actagatcagtccttaacataacggttcag

SEQ ID NO: 105266 - DNA, 30 bp, Artificial Sequence
  Synthetic oligonucleotide
gtgagtcgcgggcgagcatgtgcgtttcag

SEQ ID NO: 105267 - DNA, 30 bp, Artificial Sequence
  Synthetic oligonucleotide
acagggaataacgttatagagctaaaagag

SEQ ID NO: 105268 - DNA, 30 bp, Artificial Sequence
  Synthetic oligonucleotide
cccttgcgtagctcccgcgcgtgcaaagag

SEQ ID NO: 105269 - DNA, 30 bp, Artificial Sequence
  Synthetic oligonucleotide
cactgtgcgcatagctcttcgtgcaaagag

SEQ ID NO: 105270 - DNA, 30 bp, Artificial Sequence
  Synthetic oligonucleotide
ctaaaggtttccgacaactgcatgaaagag

SEQ ID NO: 105271 - DNA, 30 bp, Artificial Sequence
  Synthetic oligonucleotide
ctgagagcttgagttatcgtttgtaaagag

SEQ ID NO: 105272 - DNA, 30 bp, Artificial Sequence
  Synthetic oligonucleotide
tccggcgaatgagctggatcagaacaagag

SEQ ID NO: 105273 - DNA, 30 bp, Artificial Sequence
  Synthetic oligonucleotide
acaaacacccattcagataacacccaagag

SEQ ID NO: 105274 - DNA, 30 bp, Artificial Sequence
  Synthetic oligonucleotide
ctcgaactaattcgaagctgaaggcaagag

SEQ ID NO: 105275 - DNA, 30 bp, Artificial Sequence
  Synthetic oligonucleotide
gatgaaactaatcaacattcacatcaagag

SEQ ID NO: 105276 - DNA, 30 bp, Artificial Sequence
  Synthetic oligonucleotide
acgggtgccttacggggacatcttcaagag

SEQ ID NO: 105277 - DNA, 30 bp, Artificial Sequence
  Synthetic oligonucleotide
tatgacggttgatcccccccacgcgaagag

SEQ ID NO: 105278 - DNA, 30 bp, Artificial Sequence
  Synthetic oligonucleotide
aaggtcggtaatgatcgacaaggcgaagag

SEQ ID NO: 105279 - DNA, 30 bp, Artificial Sequence
  Synthetic oligonucleotide
ttagcagacccagaggagaacacggaagag

SEQ ID NO: 105280 - DNA, 30 bp, Artificial Sequence
  Synthetic oligonucleotide
agtcactcggtgagggaggattcggaagag

SEQ ID NO: 105281 - DNA, 30 bp, Artificial Sequence
  Synthetic oligonucleotide
gtagtgtgggtttgaacgatgagggaagag

SEQ ID NO: 105282 - DNA, 30 bp, Artificial Sequence
  Synthetic oligonucleotide
gaaaaatgatctggtctcgcgctggaagag

SEQ ID NO: 105283 - DNA, 30 bp, Artificial Sequence
  Synthetic oligonucleotide
cggggaagctacccatggacttaataagag

SEQ ID NO: 105284 - DNA, 30 bp, Artificial Sequence
  Synthetic oligonucleotide
cacaaccggcaatgctagcttgcataagag

SEQ ID NO: 105285 - DNA, 30 bp, Artificial Sequence
  Synthetic oligonucleotide
cccgctgcagacatggtaagtgactaagag

SEQ ID NO: 105286 - DNA, 30 bp, Artificial Sequence
  Synthetic oligonucleotide
attggtcacttggcgtctgcaaggtaagag

SEQ ID NO: 105287 - DNA, 30 bp, Artificial Sequence
  Synthetic oligonucleotide
acgaatagcctcaaatgttcatgagcagag

SEQ ID NO: 105288 - DNA, 30 bp, Artificial Sequence
  Synthetic oligonucleotide
ggggtggaacctgaatgccggttagcagag

SEQ ID NO: 105289 - DNA, 30 bp, Artificial Sequence
  Synthetic oligonucleotide
tggcataagatataatagtattcggcagag

SEQ ID NO: 105290 - DNA, 30 bp, Artificial Sequence
  Synthetic oligonucleotide
actttgtaatagctgcctgcccaatcagag

SEQ ID NO: 105291 - DNA, 30 bp, Artificial Sequence
  Synthetic oligonucleotide
gcaaagcaatcagtaccgttggcatcagag

SEQ ID NO: 105292 - DNA, 30 bp, Artificial Sequence
  Synthetic oligonucleotide
atgtgcaccacaagcgtaggtcacagagag

SEQ ID NO: 105293 - DNA, 30 bp, Artificial Sequence
  Synthetic oligonucleotide
ctcggctgataagatgagggttacagagag

SEQ ID NO: 105294 - DNA, 30 bp, Artificial Sequence
  Synthetic oligonucleotide
acacggttactcgtagccaacgggagagag

SEQ ID NO: 105295 - DNA, 30 bp, Artificial Sequence
  Synthetic oligonucleotide
cctcaataggcatcgaatagtcatagagag

SEQ ID NO: 105296 - DNA, 30 bp, Artificial Sequence
  Synthetic oligonucleotide
gtgagtgaacaccggtcacagaagcgagag

SEQ ID NO: 105297 - DNA, 30 bp, Artificial Sequence
  Synthetic oligonucleotide
aaaggaacaattcttcaaggaaggcgagag

SEQ ID NO: 105298 - DNA, 30 bp, Artificial Sequence
  Synthetic oligonucleotide
acaagccggtcctttgccggacatcgagag

SEQ ID NO: 105299 - DNA, 30 bp, Artificial Sequence
  Synthetic oligonucleotide
gagtaacggacgaaacatgatggaggagag

SEQ ID NO: 105300 - DNA, 30 bp, Artificial Sequence
  Synthetic oligonucleotide
aggagaaggccgctggtacatataggagag

SEQ ID NO: 105301 - DNA, 30 bp, Artificial Sequence
  Synthetic oligonucleotide
ggagggggcaaacggctaggcaaatgagag

SEQ ID NO: 105302 - DNA, 30 bp, Artificial Sequence
  Synthetic oligonucleotide
cggcatgtggtttaaggtcttctatgagag

SEQ ID NO: 105303 - DNA, 30 bp, Artificial Sequence
  Synthetic oligonucleotide
ggtggctgggattcgttacgtacctgagag

SEQ ID NO: 105304 - DNA, 30 bp, Artificial Sequence
  Synthetic oligonucleotide
acggcgtagaataacctaaccatctgagag

SEQ ID NO: 105305 - DNA, 30 bp, Artificial Sequence
  Synthetic oligonucleotide
cggagtgagaccgcatagtagcattgagag

SEQ ID NO: 105306 - DNA, 30 bp, Artificial Sequence
  Synthetic oligonucleotide
ctcaatcgcgggagtacgagattttgagag

SEQ ID NO: 105307 - DNA, 30 bp, Artificial Sequence
  Synthetic oligonucleotide
cggctacccctatgatagaaccggatagag

SEQ ID NO: 105308 - DNA, 30 bp, Artificial Sequence
  Synthetic oligonucleotide
ataaaaggagacgaatttcctctactagag

SEQ ID NO: 105309 - DNA, 30 bp, Artificial Sequence
  Synthetic oligonucleotide
cgcacgagcgtttagggtgataacctagag

SEQ ID NO: 105310 - DNA, 30 bp, Artificial Sequence
  Synthetic oligonucleotide
tgtcagggcatatcgcgattgtcgctagag

SEQ ID NO: 105311 - DNA, 30 bp, Artificial Sequence
  Synthetic oligonucleotide
gagtggacttactgagggagttggctagag

SEQ ID NO: 105312 - DNA, 30 bp, Artificial Sequence
  Synthetic oligonucleotide
cagacacttgagctcattgtgatgctagag

SEQ ID NO: 105313 - DNA, 31 bp, Artificial Sequence
  Synthetic oligonucleotide
tggataaggagtcgcgtatcatcatctagag

SEQ ID NO: 105314 - DNA, 30 bp, Artificial Sequence
  Synthetic oligonucleotide
actgtgagtatatatcgataaagcgtagag

SEQ ID NO: 105315 - DNA, 30 bp, Artificial Sequence
  Synthetic oligonucleotide
actgcttgcgcataataagcacttgtagag

SEQ ID NO: 105316 - DNA, 30 bp, Artificial Sequence
  Synthetic oligonucleotide
gctgaatgtgaactactttttgttgtagag

SEQ ID NO: 105317 - DNA, 30 bp, Artificial Sequence
  Synthetic oligonucleotide
ggataattaggtatgtgagtcatattagag

SEQ ID NO: 105318 - DNA, 30 bp, Artificial Sequence
  Synthetic oligonucleotide
agcattcagagtactatactatacttagag

SEQ ID NO: 105319 - DNA, 30 bp, Artificial Sequence
  Synthetic oligonucleotide
cgttatttacctttctaccgggagttagag

SEQ ID NO: 105320 - DNA, 30 bp, Artificial Sequence
  Synthetic oligonucleotide
ccgacttgagaagattcatcatagttagag

SEQ ID NO: 105321 - DNA, 30 bp, Artificial Sequence
  Synthetic oligonucleotide
tggttccgagggaaagggcatcggttagag

SEQ ID NO: 105322 - DNA, 30 bp, Artificial Sequence
  Synthetic oligonucleotide
aacgttagaccggctacaaaagccaacgag

SEQ ID NO: 105323 - DNA, 30 bp, Artificial Sequence
  Synthetic oligonucleotide
gagataccttggcgcgaacgatggaacgag

SEQ ID NO: 105324 - DNA, 30 bp, Artificial Sequence
  Synthetic oligonucleotide
gggacaaatgtcaagttgatcgtgaacgag

SEQ ID NO: 105325 - DNA, 30 bp, Artificial Sequence
  Synthetic oligonucleotide
agctaaaacacttgggtccggagtaacgag

SEQ ID NO: 105326 - DNA, 30 bp, Artificial Sequence
  Synthetic oligonucleotide
gggggcacacctgcactgacagggcacgag

SEQ ID NO: 105327 - DNA, 30 bp, Artificial Sequence
  Synthetic oligonucleotide
acgagtatagtacctgaagtacaagacgag

SEQ ID NO: 105328 - DNA, 30 bp, Artificial Sequence
  Synthetic oligonucleotide
ggagcttagtcaaggaataactaagacgag

SEQ ID NO: 105329 - DNA, 30 bp, Artificial Sequence
  Synthetic oligonucleotide
gcgcctttggacacaaaaatttaagacgag

SEQ ID NO: 105330 - DNA, 30 bp, Artificial Sequence
  Synthetic oligonucleotide
tagtatatgggaacggttcatcgagacgag

SEQ ID NO: 105331 - DNA, 30 bp, Artificial Sequence
  Synthetic oligonucleotide
ggatgtaatgccaatgacaatagcgacgag

SEQ ID NO: 105332 - DNA, 30 bp, Artificial Sequence
  Synthetic oligonucleotide
gcgcgactcaggacgaaacgcaaggacgag

SEQ ID NO: 105333 - DNA, 30 bp, Artificial Sequence
  Synthetic oligonucleotide
cgtcttccagcggctatgaacttggacgag

SEQ ID NO: 105334 - DNA, 30 bp, Artificial Sequence
  Synthetic oligonucleotide
gtgccctattgaggcggggataatgacgag

SEQ ID NO: 105335 - DNA, 30 bp, Artificial Sequence
  Synthetic oligonucleotide
gcggagacggggattggaatgtcctacgag

SEQ ID NO: 105336 - DNA, 30 bp, Artificial Sequence
  Synthetic oligonucleotide
tcctcaatacttacgttctacgtctacgag

SEQ ID NO: 105337 - DNA, 30 bp, Artificial Sequence
  Synthetic oligonucleotide
aggagtcaactcctagttgttaattacgag

SEQ ID NO: 105338 - DNA, 30 bp, Artificial Sequence
  Synthetic oligonucleotide
aggcaatcacttggaaaatcggcttacgag

SEQ ID NO: 105339 - DNA, 30 bp, Artificial Sequence
  Synthetic oligonucleotide
ctccagctcggtgaagtggacaaacccgag

SEQ ID NO: 105340 - DNA, 30 bp, Artificial Sequence
  Synthetic oligonucleotide
ccgggccatcgtctgctgtccacacccgag

SEQ ID NO: 105341 - DNA, 30 bp, Artificial Sequence
  Synthetic oligonucleotide
gcgagagtataaactctactcccccccgag

SEQ ID NO: 105342 - DNA, 30 bp, Artificial Sequence
  Synthetic oligonucleotide
tggggggctttaaatgcgtagcagcccgag

SEQ ID NO: 105343 - DNA, 30 bp, Artificial Sequence
  Synthetic oligonucleotide
tgcggacgagagggcggctttaaagccgag

SEQ ID NO: 105344 - DNA, 30 bp, Artificial Sequence
  Synthetic oligonucleotide
acgagtcacactacttctccctaggccgag

SEQ ID NO: 105345 - DNA, 30 bp, Artificial Sequence
  Synthetic oligonucleotide
ccttgcgtgtcctaggtgtcctgtgccgag

SEQ ID NO: 105346 - DNA, 30 bp, Artificial Sequence
  Synthetic oligonucleotide
gtgaagggttccatgattgtatttgccgag

SEQ ID NO: 105347 - DNA, 30 bp, Artificial Sequence
  Synthetic oligonucleotide
actagccggttgcgcattggttaatccgag

SEQ ID NO: 105348 - DNA, 30 bp, Artificial Sequence
  Synthetic oligonucleotide
taggagccgttattacgtgctgagtccgag

SEQ ID NO: 105349 - DNA, 30 bp, Artificial Sequence
  Synthetic oligonucleotide
tgctgtaacgcacgaaaattttcgtccgag

SEQ ID NO: 105350 - DNA, 30 bp, Artificial Sequence
  Synthetic oligonucleotide
ctggggatgtggggttggggccacagcgag

SEQ ID NO: 105351 - DNA, 30 bp, Artificial Sequence
  Synthetic oligonucleotide
ctatcggggcgtacgaggtagcagagcgag

SEQ ID NO: 105352 - DNA, 30 bp, Artificial Sequence
  Synthetic oligonucleotide
gtaattagaatgtctaaaaagaaccgcgag

SEQ ID NO: 105353 - DNA, 30 bp, Artificial Sequence
  Synthetic oligonucleotide
cggtcgaaagtcacggtaagagtccgcgag

SEQ ID NO: 105354 - DNA, 30 bp, Artificial Sequence
  Synthetic oligonucleotide
cgaccacccaagggacacattcggcgcgag

SEQ ID NO: 105355 - DNA, 30 bp, Artificial Sequence
  Synthetic oligonucleotide
aaataaggattaggaaggaactatcgcgag

SEQ ID NO: 105356 - DNA, 30 bp, Artificial Sequence
  Synthetic oligonucleotide
ggaccctacgctggcataaagtatcgcgag

SEQ ID NO: 105357 - DNA, 30 bp, Artificial Sequence
  Synthetic oligonucleotide
aaggccttttggcgaggagcaggaggcgag

SEQ ID NO: 105358 - DNA, 30 bp, Artificial Sequence
  Synthetic oligonucleotide
acacggcggagcggatcagggggcggcgag

SEQ ID NO: 105359 - DNA, 30 bp, Artificial Sequence
  Synthetic oligonucleotide
acccggtatagccgcgtaaatatcggcgag

SEQ ID NO: 105360 - DNA, 30 bp, Artificial Sequence
  Synthetic oligonucleotide
aaatgtggtcgaatgaggtgaattggcgag

SEQ ID NO: 105361 - DNA, 30 bp, Artificial Sequence
  Synthetic oligonucleotide
cttgcatcttattaaaacaccgttggcgag

SEQ ID NO: 105362 - DNA, 30 bp, Artificial Sequence
  Synthetic oligonucleotide
tgaacaatcagatgctgagcgaaatgcgag

SEQ ID NO: 105363 - DNA, 30 bp, Artificial Sequence
  Synthetic oligonucleotide
gaattgtacaggctagcgcgcccatgcgag

SEQ ID NO: 105364 - DNA, 30 bp, Artificial Sequence
  Synthetic oligonucleotide
tcgatttagagtcgatctggtctctgcgag

SEQ ID NO: 105365 - DNA, 30 bp, Artificial Sequence
  Synthetic oligonucleotide
gatttgctcttggataagaacaggtgcgag

SEQ ID NO: 105366 - DNA, 30 bp, Artificial Sequence
  Synthetic oligonucleotide
tctgacatatgtatggcaaggcaaatcgag

SEQ ID NO: 105367 - DNA, 30 bp, Artificial Sequence
  Synthetic oligonucleotide
aaaagggaaatatgggcaataagcatcgag

SEQ ID NO: 105368 - DNA, 30 bp, Artificial Sequence
  Synthetic oligonucleotide
ttgagagataccttgttgacgccgatcgag

SEQ ID NO: 105369 - DNA, 30 bp, Artificial Sequence
  Synthetic oligonucleotide
ataccacacgtaaagggtgatgctatcgag

SEQ ID NO: 105370 - DNA, 30 bp, Artificial Sequence
  Synthetic oligonucleotide
aattaggacccttcacgaatgcgtctcgag

SEQ ID NO: 105371 - DNA, 30 bp, Artificial Sequence
  Synthetic oligonucleotide
ggttatacgaatcaggatgggattctcgag

SEQ ID NO: 105372 - DNA, 30 bp, Artificial Sequence
  Synthetic oligonucleotide
taaatcaacaactctataaggggcgtcgag

SEQ ID NO: 105373 - DNA, 30 bp, Artificial Sequence
  Synthetic oligonucleotide
tagactctcgaactcgagagctgggtcgag

SEQ ID NO: 105374 - DNA, 30 bp, Artificial Sequence
  Synthetic oligonucleotide
caggtaaaaagacatcgtaagtatgtcgag

SEQ ID NO: 105375 - DNA, 30 bp, Artificial Sequence
  Synthetic oligonucleotide
tgattgtcttagacgcgttcagctgtcgag

SEQ ID NO: 105376 - DNA, 30 bp, Artificial Sequence
  Synthetic oligonucleotide
tggacctcacttcgcacgacggagttcgag

SEQ ID NO: 105377 - DNA, 30 bp, Artificial Sequence
  Synthetic oligonucleotide
gtactgttcatgctaaatacttcaaaggag

SEQ ID NO: 105378 - DNA, 30 bp, Artificial Sequence
  Synthetic oligonucleotide
gttctttgtatggagaaacaggacaaggag

SEQ ID NO: 105379 - DNA, 30 bp, Artificial Sequence
  Synthetic oligonucleotide
tgtggtggttacgcgttcatcaccaaggag

SEQ ID NO: 105380 - DNA, 30 bp, Artificial Sequence
  Synthetic oligonucleotide
tgctgtgagggggagcctaatgagaaggag

SEQ ID NO: 105381 - DNA, 30 bp, Artificial Sequence
  Synthetic oligonucleotide
gaggtattgtatacatgcagccggaaggag

SEQ ID NO: 105382 - DNA, 30 bp, Artificial Sequence
  Synthetic oligonucleotide
atgcataagtgcgtaaaacctttgaaggag

SEQ ID NO: 105383 - DNA, 30 bp, Artificial Sequence
  Synthetic oligonucleotide
tgcggcccctgaatgacacagactaaggag

SEQ ID NO: 105384 - DNA, 30 bp, Artificial Sequence
  Synthetic oligonucleotide
aaaagactgggtaggagagaaggacaggag

SEQ ID NO: 105385 - DNA, 30 bp, Artificial Sequence
  Synthetic oligonucleotide
gacgtcgcattagggccgattgaccaggag

SEQ ID NO: 105386 - DNA, 30 bp, Artificial Sequence
  Synthetic oligonucleotide
tatgtacaaggttgcaacaagtaccaggag

SEQ ID NO: 105387 - DNA, 30 bp, Artificial Sequence
  Synthetic oligonucleotide
cattctaggtaggtacaacgtaatcaggag

SEQ ID NO: 105388 - DNA, 30 bp, Artificial Sequence
  Synthetic oligonucleotide
gtagaactggtcctaaggatagaagaggag

SEQ ID NO: 105389 - DNA, 30 bp, Artificial Sequence
  Synthetic oligonucleotide
tcaggtaaatgaacgccatgtctcgaggag

SEQ ID NO: 105390 - DNA, 30 bp, Artificial Sequence
  Synthetic oligonucleotide
acgcaaccccattccgaggcctcggaggag

SEQ ID NO: 105391 - DNA, 30 bp, Artificial Sequence
  Synthetic oligonucleotide
cgttggcatggctttgatactctataggag

SEQ ID NO: 105392 - DNA, 30 bp, Artificial Sequence
  Synthetic oligonucleotide
ccaaacgtgcaaatctttccccactaggag

SEQ ID NO: 105393 - DNA, 30 bp, Artificial Sequence
  Synthetic oligonucleotide
gaagtacggggattgtcaccggcctaggag

SEQ ID NO: 105394 - DNA, 30 bp, Artificial Sequence
  Synthetic oligonucleotide
aggtcctaagacgcccggttgagctaggag

SEQ ID NO: 105395 - DNA, 30 bp, Artificial Sequence
  Synthetic oligonucleotide
gtccgtgaacctctcatagtcttgtaggag

SEQ ID NO: 105396 - DNA, 30 bp, Artificial Sequence
  Synthetic oligonucleotide
ggacgaaacagtgctctgtaaaaaacggag

SEQ ID NO: 105397 - DNA, 30 bp, Artificial Sequence
  Synthetic oligonucleotide
catcatcgcgccggagttaaatacacggag

SEQ ID NO: 105398 - DNA, 30 bp, Artificial Sequence
  Synthetic oligonucleotide
tcgatgcgtcctcagtgcgcgtccacggag

SEQ ID NO: 105399 - DNA, 30 bp, Artificial Sequence
  Synthetic oligonucleotide
tagagccccacagtcgagaaactcacggag

SEQ ID NO: 105400 - DNA, 30 bp, Artificial Sequence
  Synthetic oligonucleotide
agccaaaaatcgtagctatcagcaccggag

SEQ ID NO: 105401 - DNA, 30 bp, Artificial Sequence
  Synthetic oligonucleotide
taggtcaccgctctcattcccgacccggag

SEQ ID NO: 105402 - DNA, 30 bp, Artificial Sequence
  Synthetic oligonucleotide
ttttgaaggaactgatcagcggagccggag

SEQ ID NO: 105403 - DNA, 30 bp, Artificial Sequence
  Synthetic oligonucleotide
cagtctgcaaagagaccttcgagcgcggag

SEQ ID NO: 105404 - DNA, 30 bp, Artificial Sequence
  Synthetic oligonucleotide
tgcatataaatcgatatccgcaaggcggag

SEQ ID NO: 105405 - DNA, 30 bp, Artificial Sequence
  Synthetic oligonucleotide
agggaaccaagagtggggtacatggcggag

SEQ ID NO: 105406 - DNA, 30 bp, Artificial Sequence
  Synthetic oligonucleotide
tgagacatggtctcagatatatatgcggag

SEQ ID NO: 105407 - DNA, 30 bp, Artificial Sequence
  Synthetic oligonucleotide
gggaggcgggaagtagaccgtagaagggag

SEQ ID NO: 105408 - DNA, 30 bp, Artificial Sequence
  Synthetic oligonucleotide
gtagctgttgcttgaaattatcccagggag

SEQ ID NO: 105409 - DNA, 30 bp, Artificial Sequence
  Synthetic oligonucleotide
ctcaactatcatcgtacctcactgagggag

SEQ ID NO: 105410 - DNA, 30 bp, Artificial Sequence
  Synthetic oligonucleotide
ttcacatttggatctcaggagttacgggag

SEQ ID NO: 105411 - DNA, 30 bp, Artificial Sequence
  Synthetic oligonucleotide
tggcaaaaacgatccggggggtttcgggag

SEQ ID NO: 105412 - DNA, 30 bp, Artificial Sequence
  Synthetic oligonucleotide
aaggcgtgtgacgttggctcattgggggag

SEQ ID NO: 105413 - DNA, 30 bp, Artificial Sequence
  Synthetic oligonucleotide
gtcattgggaatccaggcaaaattggggag

SEQ ID NO: 105414 - DNA, 30 bp, Artificial Sequence
  Synthetic oligonucleotide
cccctcgtggttcgaaggggttaatgggag

SEQ ID NO: 105415 - DNA, 30 bp, Artificial Sequence
  Synthetic oligonucleotide
gtggaaggctaagggtccttgttgtgggag

SEQ ID NO: 105416 - DNA, 30 bp, Artificial Sequence
  Synthetic oligonucleotide
gaaacactaacttttgtacagctaatggag

SEQ ID NO: 105417 - DNA, 30 bp, Artificial Sequence
  Synthetic oligonucleotide
ggtacaaggcagtatggccacgacatggag

SEQ ID NO: 105418 - DNA, 30 bp, Artificial Sequence
  Synthetic oligonucleotide
atgcatctattgaatagggctagcatggag

SEQ ID NO: 105419 - DNA, 30 bp, Artificial Sequence
  Synthetic oligonucleotide
cgaattaactacagaatagcggcgatggag

SEQ ID NO: 105420 - DNA, 30 bp, Artificial Sequence
  Synthetic oligonucleotide
tgcttttggatggggatagagtgtatggag

SEQ ID NO: 105421 - DNA, 30 bp, Artificial Sequence
  Synthetic oligonucleotide
tggcgttctgatggccggggtgttatggag

SEQ ID NO: 105422 - DNA, 30 bp, Artificial Sequence
  Synthetic oligonucleotide
gcgaatagcaaagggaccacggcactggag

SEQ ID NO: 105423 - DNA, 30 bp, Artificial Sequence
  Synthetic oligonucleotide
gagatgagcggttccaacagatgtctggag

SEQ ID NO: 105424 - DNA, 30 bp, Artificial Sequence
  Synthetic oligonucleotide
atggttgcacataaggccgtcattctggag

SEQ ID NO: 105425 - DNA, 30 bp, Artificial Sequence
  Synthetic oligonucleotide
cgtaggcagacaaccgatcaacgagtggag

SEQ ID NO: 105426 - DNA, 30 bp, Artificial Sequence
  Synthetic oligonucleotide
cgacaggtcaccagcgggcaatctgtggag

SEQ ID NO: 105427 - DNA, 30 bp, Artificial Sequence
  Synthetic oligonucleotide
caagcgacaaggatgtatctagccttggag

SEQ ID NO: 105428 - DNA, 30 bp, Artificial Sequence
  Synthetic oligonucleotide
gttaacatcattataagaccggggttggag

SEQ ID NO: 105429 - DNA, 30 bp, Artificial Sequence
  Synthetic oligonucleotide
gtgttctccaccgagcgccagtcaaatgag

SEQ ID NO: 105430 - DNA, 30 bp, Artificial Sequence
  Synthetic oligonucleotide
tggtgagcacagcatgttcacttaaatgag

SEQ ID NO: 105431 - DNA, 30 bp, Artificial Sequence
  Synthetic oligonucleotide
gtaattgatgcccggtacatatacaatgag

SEQ ID NO: 105432 - DNA, 30 bp, Artificial Sequence
  Synthetic oligonucleotide
taaccaagaccaccccaaatgaagaatgag

SEQ ID NO: 105433 - DNA, 30 bp, Artificial Sequence
  Synthetic oligonucleotide
gtcgtgggaatccaacgaataggcgatgag

SEQ ID NO: 105434 - DNA, 30 bp, Artificial Sequence
  Synthetic oligonucleotide
agtaaagaagaaggttttaatagtgatgag

SEQ ID NO: 105435 - DNA, 30 bp, Artificial Sequence
  Synthetic oligonucleotide
catagttttgcaggtacgacgtgtgatgag

SEQ ID NO: 105436 - DNA, 30 bp, Artificial Sequence
  Synthetic oligonucleotide
tcgtggacaacttggtagtaattatatgag

SEQ ID NO: 105437 - DNA, 30 bp, Artificial Sequence
  Synthetic oligonucleotide
aacggtcccacaaatgtgcgccggtatgag

SEQ ID NO: 105438 - DNA, 30 bp, Artificial Sequence
  Synthetic oligonucleotide
tctacgcggatacgcgatgtctattatgag

SEQ ID NO: 105439 - DNA, 30 bp, Artificial Sequence
  Synthetic oligonucleotide
tcgatctatctgtgactggcaagaactgag

SEQ ID NO: 105440 - DNA, 30 bp, Artificial Sequence
  Synthetic oligonucleotide
gagacccggttgacatgggaccgaactgag

SEQ ID NO: 105441 - DNA, 30 bp, Artificial Sequence
  Synthetic oligonucleotide
ggtctattagtgcgtactaagctaactgag

SEQ ID NO: 105442 - DNA, 30 bp, Artificial Sequence
  Synthetic oligonucleotide
tcaggatgccccaacagggactctcctgag

SEQ ID NO: 105443 - DNA, 30 bp, Artificial Sequence
  Synthetic oligonucleotide
ttgtacactaataccacataatgtcctgag

SEQ ID NO: 105444 - DNA, 30 bp, Artificial Sequence
  Synthetic oligonucleotide
ccaggcaaaagcatttgttcacacgctgag

SEQ ID NO: 105445 - DNA, 30 bp, Artificial Sequence
  Synthetic oligonucleotide
ggtgtcagatcagagggcgacagggctgag

SEQ ID NO: 105446 - DNA, 30 bp, Artificial Sequence
  Synthetic oligonucleotide
gcgtgcggcgaggtcgagcagtgggctgag

SEQ ID NO: 105447 - DNA, 30 bp, Artificial Sequence
  Synthetic oligonucleotide
acgctgattaatgggtaccgaaatgctgag

SEQ ID NO: 105448 - DNA, 30 bp, Artificial Sequence
  Synthetic oligonucleotide
gtcttatcgggctcgatcggacgtgctgag

SEQ ID NO: 105449 - DNA, 30 bp, Artificial Sequence
  Synthetic oligonucleotide
cagctaagctaacttgcaagcgaatctgag

SEQ ID NO: 105450 - DNA, 30 bp, Artificial Sequence
  Synthetic oligonucleotide
gtattacccccgtagtttcagccaagtgag

SEQ ID NO: 105451 - DNA, 30 bp, Artificial Sequence
  Synthetic oligonucleotide
tgaccaacactcgatggaccagtgagtgag

SEQ ID NO: 105452 - DNA, 30 bp, Artificial Sequence
  Synthetic oligonucleotide
aggtactagactcaaaagctgaatagtgag

SEQ ID NO: 105453 - DNA, 30 bp, Artificial Sequence
  Synthetic oligonucleotide
aagtgcgtctggggcgattctcctagtgag

SEQ ID NO: 105454 - DNA, 30 bp, Artificial Sequence
  Synthetic oligonucleotide
gggcatctgagcacctaaaaggttagtgag

SEQ ID NO: 105455 - DNA, 30 bp, Artificial Sequence
  Synthetic oligonucleotide
cccatccaccacaataaacttacgcgtgag

SEQ ID NO: 105456 - DNA, 30 bp, Artificial Sequence
  Synthetic oligonucleotide
aggggcgctcagcgttacaatcggcgtgag

SEQ ID NO: 105457 - DNA, 30 bp, Artificial Sequence
  Synthetic oligonucleotide
gggtttaacggatccaatgagttgcgtgag

SEQ ID NO: 105458 - DNA, 30 bp, Artificial Sequence
  Synthetic oligonucleotide
gagatggggacgaaacttgggtaaggtgag

SEQ ID NO: 105459 - DNA, 30 bp, Artificial Sequence
  Synthetic oligonucleotide
gtctctcggacaaaggcggtctcaggtgag

SEQ ID NO: 105460 - DNA, 30 bp, Artificial Sequence
  Synthetic oligonucleotide
agataaaaaacgccgcaagccataggtgag

SEQ ID NO: 105461 - DNA, 30 bp, Artificial Sequence
  Synthetic oligonucleotide
gatagatatggttccaggccatatggtgag

SEQ ID NO: 105462 - DNA, 30 bp, Artificial Sequence
  Synthetic oligonucleotide
catatatgcgcacacattcggcgtggtgag

SEQ ID NO: 105463 - DNA, 30 bp, Artificial Sequence
  Synthetic oligonucleotide
ctgacggtcagagggccgttctagtgtgag

SEQ ID NO: 105464 - DNA, 30 bp, Artificial Sequence
  Synthetic oligonucleotide
cgaagtgcaaacgggtttctggtgtgtgag

SEQ ID NO: 105465 - DNA, 30 bp, Artificial Sequence
  Synthetic oligonucleotide
ttataggcaaaagaaacaaagttgtgtgag

SEQ ID NO: 105466 - DNA, 30 bp, Artificial Sequence
  Synthetic oligonucleotide
cggaatacccgccgagaactggcaattgag

SEQ ID NO: 105467 - DNA, 30 bp, Artificial Sequence
  Synthetic oligonucleotide
agttggtcaacgctggcacgtggaattgag

SEQ ID NO: 105468 - DNA, 30 bp, Artificial Sequence
  Synthetic oligonucleotide
cagacaaagtctcctgcgctaaagattgag

SEQ ID NO: 105469 - DNA, 30 bp, Artificial Sequence
  Synthetic oligonucleotide
tgtgagggcccctcttcctttcagattgag

SEQ ID NO: 105470 - DNA, 30 bp, Artificial Sequence
  Synthetic oligonucleotide
atcggattggggcaatgtggacctattgag

SEQ ID NO: 105471 - DNA, 30 bp, Artificial Sequence
  Synthetic oligonucleotide
agtgatgtttacgttccagccttacttgag

SEQ ID NO: 105472 - DNA, 30 bp, Artificial Sequence
  Synthetic oligonucleotide
cacggaccagccgggtatgcgtaccttgag

SEQ ID NO: 105473 - DNA, 30 bp, Artificial Sequence
  Synthetic oligonucleotide
cagcgaggcccggggcaagtcttccttgag

SEQ ID NO: 105474 - DNA, 30 bp, Artificial Sequence
  Synthetic oligonucleotide
tgtggtacatgcgttgggcacgatcttgag

SEQ ID NO: 105475 - DNA, 30 bp, Artificial Sequence
  Synthetic oligonucleotide
gtcggatcaaattatcctaactaagttgag

SEQ ID NO: 105476 - DNA, 30 bp, Artificial Sequence
  Synthetic oligonucleotide
acacatgagaagttactactatgggttgag

SEQ ID NO: 105477 - DNA, 31 bp, Artificial Sequence
  Synthetic oligonucleotide
ctgtgacccgtagggataatacacctttgag

SEQ ID NO: 105478 - DNA, 30 bp, Artificial Sequence
  Synthetic oligonucleotide
tccgcactacgcattacaaagttgtttgag

SEQ ID NO: 105479 - DNA, 30 bp, Artificial Sequence
  Synthetic oligonucleotide
gcttaacgatgagcgtttatgtcaaaatag

SEQ ID NO: 105480 - DNA, 31 bp, Artificial Sequence
  Synthetic oligonucleotide
cttcttgcgtgtggtcgggggaagcaaatag

SEQ ID NO: 105481 - DNA, 30 bp, Artificial Sequence
  Synthetic oligonucleotide
actttacgatgtaaggtattagctaaatag

SEQ ID NO: 105482 - DNA, 30 bp, Artificial Sequence
  Synthetic oligonucleotide
gctccatacctatagctaacatttaaatag

SEQ ID NO: 105483 - DNA, 30 bp, Artificial Sequence
  Synthetic oligonucleotide
acagagtcgtaagttttttactaacaatag

SEQ ID NO: 105484 - DNA, 30 bp, Artificial Sequence
  Synthetic oligonucleotide
caggtgtcatccaacagatggtggcaatag

SEQ ID NO: 105485 - DNA, 30 bp, Artificial Sequence
  Synthetic oligonucleotide
atatctctcggcgaggtttcttgagaatag

SEQ ID NO: 105486 - DNA, 31 bp, Artificial Sequence
  Synthetic oligonucleotide
gccacagtcgtaggataaacagtctgaatag

SEQ ID NO: 105487 - DNA, 30 bp, Artificial Sequence
  Synthetic oligonucleotide
tactatgtgtacaccggaacgggataatag

SEQ ID NO: 105488 - DNA, 30 bp, Artificial Sequence
  Synthetic oligonucleotide
gggtcgtccgcgacggacagatactaatag

SEQ ID NO: 105489 - DNA, 30 bp, Artificial Sequence
  Synthetic oligonucleotide
gtgcatgggcgtgcatctgagatctaatag

SEQ ID NO: 105490 - DNA, 30 bp, Artificial Sequence
  Synthetic oligonucleotide
gaggcgagaatgtttcatgggatgtaatag

SEQ ID NO: 105491 - DNA, 30 bp, Artificial Sequence
  Synthetic oligonucleotide
cagaacatcggcagggctaagcattaatag

SEQ ID NO: 105492 - DNA, 30 bp, Artificial Sequence
  Synthetic oligonucleotide
atagttgacaagtgggcagccggaacatag

SEQ ID NO: 105493 - DNA, 30 bp, Artificial Sequence
  Synthetic oligonucleotide
ctacaggatatactcacggctaatacatag

SEQ ID NO: 105494 - DNA, 30 bp, Artificial Sequence
  Synthetic oligonucleotide
tgacctttactacattggtcaagtacatag

SEQ ID NO: 105495 - DNA, 30 bp, Artificial Sequence
  Synthetic oligonucleotide
tctacccagtctacgtaaaggaaaccatag

SEQ ID NO: 105496 - DNA, 30 bp, Artificial Sequence
  Synthetic oligonucleotide
aaggccgggtaaaacgttacaaatccatag

SEQ ID NO: 105497 - DNA, 30 bp, Artificial Sequence
  Synthetic oligonucleotide
cgtcgtgtcaatagttagacatttccatag

SEQ ID NO: 105498 - DNA, 30 bp, Artificial Sequence
  Synthetic oligonucleotide
gttgaggaacatggggaaccgaaagcatag

SEQ ID NO: 105499 - DNA, 30 bp, Artificial Sequence
  Synthetic oligonucleotide
caagaggtagagtagggcgtcacagcatag

SEQ ID NO: 105500 - DNA, 30 bp, Artificial Sequence
  Synthetic oligonucleotide
gtctcgtgtaagattcctatgccagcatag

SEQ ID NO: 105501 - DNA, 30 bp, Artificial Sequence
  Synthetic oligonucleotide
gcccatgggcaagtgagcacacgagcatag

SEQ ID NO: 105502 - DNA, 30 bp, Artificial Sequence
  Synthetic oligonucleotide
ggaaggcagtgcacgcaagcgaacgcatag

SEQ ID NO: 105503 - DNA, 30 bp, Artificial Sequence
  Synthetic oligonucleotide
agtcatgaagtcgggtaggtgaaggcatag

SEQ ID NO: 105504 - DNA, 30 bp, Artificial Sequence
  Synthetic oligonucleotide
ctctttctaaatcggaggaaaacatcatag

SEQ ID NO: 105505 - DNA, 30 bp, Artificial Sequence
  Synthetic oligonucleotide
gttcgaaaaaagttcggatcaatatcatag

SEQ ID NO: 105506 - DNA, 30 bp, Artificial Sequence
  Synthetic oligonucleotide
atattagtgccgtcaggcgaacgctcatag

SEQ ID NO: 105507 - DNA, 30 bp, Artificial Sequence
  Synthetic oligonucleotide
ctacagtggttacgaagacgtgtgtcatag

SEQ ID NO: 105508 - DNA, 30 bp, Artificial Sequence
  Synthetic oligonucleotide
ctcgcaggagcgtcgaaagatgattcatag

SEQ ID NO: 105509 - DNA, 30 bp, Artificial Sequence
  Synthetic oligonucleotide
gacagtagaccttttagtgaggacagatag

SEQ ID NO: 105510 - DNA, 30 bp, Artificial Sequence
  Synthetic oligonucleotide
cagagtaccaggggcatgatttagagatag

SEQ ID NO: 105511 - DNA, 30 bp, Artificial Sequence
  Synthetic oligonucleotide
tagcatgcgtataagaggcgctgtagatag

SEQ ID NO: 105512 - DNA, 30 bp, Artificial Sequence
  Synthetic oligonucleotide
gaacgattctcgctctattcaggacgatag

SEQ ID NO: 105513 - DNA, 30 bp, Artificial Sequence
  Synthetic oligonucleotide
ttgggtgacacttggggtaagatccgatag

SEQ ID NO: 105514 - DNA, 30 bp, Artificial Sequence
  Synthetic oligonucleotide
ccaaagtaaaagcaggatagggcgcgatag

SEQ ID NO: 105515 - DNA, 30 bp, Artificial Sequence
  Synthetic oligonucleotide
ttgtcggcttcccgcgtggacataggatag

SEQ ID NO: 105516 - DNA, 30 bp, Artificial Sequence
  Synthetic oligonucleotide
gtcgaaggacaagactcgacgttcggatag

SEQ ID NO: 105517 - DNA, 30 bp, Artificial Sequence
  Synthetic oligonucleotide
aagaagtccttcggcattataacgggatag

SEQ ID NO: 105518 - DNA, 30 bp, Artificial Sequence
  Synthetic oligonucleotide
ctgtgagtaaccgggggacaatcgggatag

SEQ ID NO: 105519 - DNA, 30 bp, Artificial Sequence
  Synthetic oligonucleotide
ttggagagtggtctacccaattgtggatag

SEQ ID NO: 105520 - DNA, 30 bp, Artificial Sequence
  Synthetic oligonucleotide
gcagatatacagatcgaaagtgttggatag

SEQ ID NO: 105521 - DNA, 30 bp, Artificial Sequence
  Synthetic oligonucleotide
acagtacgaaccctatggagggtatgatag

SEQ ID NO: 105522 - DNA, 30 bp, Artificial Sequence
  Synthetic oligonucleotide
gcatcttcatcgatgtaatagctctgatag

SEQ ID NO: 105523 - DNA, 30 bp, Artificial Sequence
  Synthetic oligonucleotide
agggaccagtcactatcgcacacgctatag

SEQ ID NO: 105524 - DNA, 30 bp, Artificial Sequence
  Synthetic oligonucleotide
atcaggtacttcaggatctgaatgctatag

SEQ ID NO: 105525 - DNA, 30 bp, Artificial Sequence
  Synthetic oligonucleotide
agcgtggttttgatgtaactatatctatag

SEQ ID NO: 105526 - DNA, 30 bp, Artificial Sequence
  Synthetic oligonucleotide
aggctataagtaggatgaattcctctatag

SEQ ID NO: 105527 - DNA, 30 bp, Artificial Sequence
  Synthetic oligonucleotide
agattcggtcggaatatacgaaatgtatag

SEQ ID NO: 105528 - DNA, 30 bp, Artificial Sequence
  Synthetic oligonucleotide
ttcgctaagtcccaaaaccaccatgtatag

SEQ ID NO: 105529 - DNA, 30 bp, Artificial Sequence
  Synthetic oligonucleotide
acgaatcccgcatgtatgaagattgtatag

SEQ ID NO: 105530 - DNA, 30 bp, Artificial Sequence
  Synthetic oligonucleotide
ttctcagagggatacagggagcgcttatag

SEQ ID NO: 105531 - DNA, 30 bp, Artificial Sequence
  Synthetic oligonucleotide
gttaggatgccgatgttaaaatcgttatag

SEQ ID NO: 105532 - DNA, 30 bp, Artificial Sequence
  Synthetic oligonucleotide
atgatgccaatcgtcagttttgtgaactag

SEQ ID NO: 105533 - DNA, 30 bp, Artificial Sequence
  Synthetic oligonucleotide
ttattgcgcggatggtaggacctgcactag

SEQ ID NO: 105534 - DNA, 30 bp, Artificial Sequence
  Synthetic oligonucleotide
aggcaacgttcatctattttagttcactag

SEQ ID NO: 105535 - DNA, 30 bp, Artificial Sequence
  Synthetic oligonucleotide
gcaacacgaaatcaagtcacgacagactag

SEQ ID NO: 105536 - DNA, 30 bp, Artificial Sequence
  Synthetic oligonucleotide
ccaacctaacaagagtcacaggatgactag

SEQ ID NO: 105537 - DNA, 30 bp, Artificial Sequence
  Synthetic oligonucleotide
tctaaaagatagatttggaaggcctactag

SEQ ID NO: 105538 - DNA, 30 bp, Artificial Sequence
  Synthetic oligonucleotide
agatagaatagcagaataacaatgtactag

SEQ ID NO: 105539 - DNA, 30 bp, Artificial Sequence
  Synthetic oligonucleotide
aactagctggtcctcgacacattgtactag

SEQ ID NO: 105540 - DNA, 30 bp, Artificial Sequence
  Synthetic oligonucleotide
atgcaggacggatgcgtgaggcattactag

SEQ ID NO: 105541 - DNA, 30 bp, Artificial Sequence
  Synthetic oligonucleotide
aggtaactatcatagcaaatgtgaacctag

SEQ ID NO: 105542 - DNA, 30 bp, Artificial Sequence
  Synthetic oligonucleotide
tacaatttggactatctagcacgtacctag

SEQ ID NO: 105543 - DNA, 30 bp, Artificial Sequence
  Synthetic oligonucleotide
cataagaaatgacgtcctttatcgccctag

SEQ ID NO: 105544 - DNA, 30 bp, Artificial Sequence
  Synthetic oligonucleotide
cagcggtaaaaaccgtttgggtgagcctag

SEQ ID NO: 105545 - DNA, 30 bp, Artificial Sequence
  Synthetic oligonucleotide
gccagatagatatcagtataggaggcctag

SEQ ID NO: 105546 - DNA, 30 bp, Artificial Sequence
  Synthetic oligonucleotide
cctccgaatatcccttcaccttgtgcctag

SEQ ID NO: 105547 - DNA, 30 bp, Artificial Sequence
  Synthetic oligonucleotide
aactagagttccggtccacaaaactcctag

SEQ ID NO: 105548 - DNA, 30 bp, Artificial Sequence
  Synthetic oligonucleotide
ttgtcggtgaaacatcgaaatccgagctag

SEQ ID NO: 105549 - DNA, 30 bp, Artificial Sequence
  Synthetic oligonucleotide
acgtgttcagagtacgctaatagtagctag

SEQ ID NO: 105550 - DNA, 30 bp, Artificial Sequence
  Synthetic oligonucleotide
gtctcggggagctgacctcatgttagctag

SEQ ID NO: 105551 - DNA, 30 bp, Artificial Sequence
  Synthetic oligonucleotide
ccgtcgcctccgtaattcgattgtcgctag

SEQ ID NO: 105552 - DNA, 30 bp, Artificial Sequence
  Synthetic oligonucleotide
ctcgagatttgtagtgcaccgcaaggctag

SEQ ID NO: 105553 - DNA, 30 bp, Artificial Sequence
  Synthetic oligonucleotide
tcggcctatacccgtgtcaggggcggctag

SEQ ID NO: 105554 - DNA, 30 bp, Artificial Sequence
  Synthetic oligonucleotide
tgacagggaagacaagtttgtgtcggctag

SEQ ID NO: 105555 - DNA, 30 bp, Artificial Sequence
  Synthetic oligonucleotide
cgcggatcataataggtcgcccagtgctag

SEQ ID NO: 105556 - DNA, 30 bp, Artificial Sequence
  Synthetic oligonucleotide
tccctacaatcatgtctacgttggtgctag

SEQ ID NO: 105557 - DNA, 30 bp, Artificial Sequence
  Synthetic oligonucleotide
taagaagatgagaggattccaaagctctag

SEQ ID NO: 105558 - DNA, 30 bp, Artificial Sequence
  Synthetic oligonucleotide
ccgacctgaacccagctatgccgtctctag

SEQ ID NO: 105559 - DNA, 30 bp, Artificial Sequence
  Synthetic oligonucleotide
gggcaaatatggttagtagttgccgtctag

SEQ ID NO: 105560 - DNA, 30 bp, Artificial Sequence
  Synthetic oligonucleotide
ggcttcattgaagaagtggtttccgtctag

SEQ ID NO: 105561 - DNA, 30 bp, Artificial Sequence
  Synthetic oligonucleotide
tcaaccgcaagatacggcggtggcgtctag

SEQ ID NO: 105562 - DNA, 30 bp, Artificial Sequence
  Synthetic oligonucleotide
agattgcgttttggtattcctagggtctag

SEQ ID NO: 105563 - DNA, 30 bp, Artificial Sequence
  Synthetic oligonucleotide
taagatatccagtggacacgtacgttctag

SEQ ID NO: 105564 - DNA, 30 bp, Artificial Sequence
  Synthetic oligonucleotide
gtacacctgcaataagtgtttcggttctag

SEQ ID NO: 105565 - DNA, 30 bp, Artificial Sequence
  Synthetic oligonucleotide
cgatttggggatgatcacgtgctgttctag

SEQ ID NO: 105566 - DNA, 30 bp, Artificial Sequence
  Synthetic oligonucleotide
agcggatggtggactcgcagagcaaagtag

SEQ ID NO: 105567 - DNA, 30 bp, Artificial Sequence
  Synthetic oligonucleotide
atcattggtagctacggttgcatgaagtag

SEQ ID NO: 105568 - DNA, 30 bp, Artificial Sequence
  Synthetic oligonucleotide
tcgccggtgttagtgcgttgaactaagtag

SEQ ID NO: 105569 - DNA, 30 bp, Artificial Sequence
  Synthetic oligonucleotide
cgtaatcggcaacgctcggtctaacagtag

SEQ ID NO: 105570 - DNA, 30 bp, Artificial Sequence
  Synthetic oligonucleotide
tgccctttggcgacacgtaattaacagtag

SEQ ID NO: 105571 - DNA, 30 bp, Artificial Sequence
  Synthetic oligonucleotide
tcaataacggcgatctagataacacagtag

SEQ ID NO: 105572 - DNA, 30 bp, Artificial Sequence
  Synthetic oligonucleotide
tagaaatacatcgaagtgatacgacagtag

SEQ ID NO: 105573 - DNA, 30 bp, Artificial Sequence
  Synthetic oligonucleotide
gacctccggcaaaggtgtgtggcccagtag

SEQ ID NO: 105574 - DNA, 30 bp, Artificial Sequence
  Synthetic oligonucleotide
attaacccgttatgttatatgggccagtag

SEQ ID NO: 105575 - DNA, 30 bp, Artificial Sequence
  Synthetic oligonucleotide
ttacgcggtgtacagagaatatgccagtag

SEQ ID NO: 105576 - DNA, 30 bp, Artificial Sequence
  Synthetic oligonucleotide
tacggtcttcaaagaacgttatgccagtag

SEQ ID NO: 105577 - DNA, 30 bp, Artificial Sequence
  Synthetic oligonucleotide
ttcactggataggcatccaggccgcagtag

SEQ ID NO: 105578 - DNA, 30 bp, Artificial Sequence
  Synthetic oligonucleotide
agggggaaaatccctcaactagttcagtag

SEQ ID NO: 105579 - DNA, 30 bp, Artificial Sequence
  Synthetic oligonucleotide
cgggcgccatatcacttacatgttcagtag

SEQ ID NO: 105580 - DNA, 30 bp, Artificial Sequence
  Synthetic oligonucleotide
tgtgggaatgcgcatgtagtgttagagtag

SEQ ID NO: 105581 - DNA, 30 bp, Artificial Sequence
  Synthetic oligonucleotide
tacgttggcgccaggctagcgtaggagtag

SEQ ID NO: 105582 - DNA, 30 bp, Artificial Sequence
  Synthetic oligonucleotide
agaataactaggtctgttcagactgagtag

SEQ ID NO: 105583 - DNA, 30 bp, Artificial Sequence
  Synthetic oligonucleotide
tgcctaaggcctgagcggcgtcttgagtag

SEQ ID NO: 105584 - DNA, 30 bp, Artificial Sequence
  Synthetic oligonucleotide
aacggaatctgtcacccttccatatagtag

SEQ ID NO: 105585 - DNA, 30 bp, Artificial Sequence
  Synthetic oligonucleotide
agacggggatttacaccatccgattagtag

SEQ ID NO: 105586 - DNA, 30 bp, Artificial Sequence
  Synthetic oligonucleotide
gttgaatcgcgaccttgccctaaaacgtag

SEQ ID NO: 105587 - DNA, 30 bp, Artificial Sequence
  Synthetic oligonucleotide
gctcccagtaagttccacagtgacacgtag

SEQ ID NO: 105588 - DNA, 30 bp, Artificial Sequence
  Synthetic oligonucleotide
tatcccctagatacgagctgagcaccgtag

SEQ ID NO: 105589 - DNA, 30 bp, Artificial Sequence
  Synthetic oligonucleotide
gcctaattgagctttcgaagtaatccgtag

SEQ ID NO: 105590 - DNA, 30 bp, Artificial Sequence
  Synthetic oligonucleotide
tctatgcgcacgaaggctcaaactccgtag

SEQ ID NO: 105591 - DNA, 30 bp, Artificial Sequence
  Synthetic oligonucleotide
ggaaggagcctgacatgtgatatagcgtag

SEQ ID NO: 105592 - DNA, 30 bp, Artificial Sequence
  Synthetic oligonucleotide
ctgtcattaataccccgggtgccggcgtag

SEQ ID NO: 105593 - DNA, 30 bp, Artificial Sequence
  Synthetic oligonucleotide
ttagtatagctaagtccctgaagatcgtag

SEQ ID NO: 105594 - DNA, 30 bp, Artificial Sequence
  Synthetic oligonucleotide
accagtgcatgggtgagtagcgtatcgtag

SEQ ID NO: 105595 - DNA, 30 bp, Artificial Sequence
  Synthetic oligonucleotide
tatgtatgctatggtacgaaatagaggtag

SEQ ID NO: 105596 - DNA, 30 bp, Artificial Sequence
  Synthetic oligonucleotide
agcttcacaaacgaatggacccataggtag

SEQ ID NO: 105597 - DNA, 30 bp, Artificial Sequence
  Synthetic oligonucleotide
taacattttattagaagcatacgtcggtag

SEQ ID NO: 105598 - DNA, 30 bp, Artificial Sequence
  Synthetic oligonucleotide
attacgtccggttttgatagaacggggtag

SEQ ID NO: 105599 - DNA, 30 bp, Artificial Sequence
  Synthetic oligonucleotide
taacaaactgaggttccccgtgttgggtag

SEQ ID NO: 105600 - DNA, 30 bp, Artificial Sequence
  Synthetic oligonucleotide
cgtaacccgcggccagtgcacatatggtag

SEQ ID NO: 105601 - DNA, 30 bp, Artificial Sequence
  Synthetic oligonucleotide
gaagacgggcacgcaaatgaagagtggtag

SEQ ID NO: 105602 - DNA, 30 bp, Artificial Sequence
  Synthetic oligonucleotide
aatgttaacaaaggatgtaataattggtag

SEQ ID NO: 105603 - DNA, 30 bp, Artificial Sequence
  Synthetic oligonucleotide
tctattaaggggctcgaagctcgttggtag

SEQ ID NO: 105604 - DNA, 30 bp, Artificial Sequence
  Synthetic oligonucleotide
cggtagcaacttagagtggaatggatgtag

SEQ ID NO: 105605 - DNA, 30 bp, Artificial Sequence
  Synthetic oligonucleotide
tggatcaggctctattgccccatgatgtag

SEQ ID NO: 105606 - DNA, 30 bp, Artificial Sequence
  Synthetic oligonucleotide
acgacacgaatgtcctgtggctatatgtag

SEQ ID NO: 105607 - DNA, 30 bp, Artificial Sequence
  Synthetic oligonucleotide
tggggtggatgtttgtttggggctatgtag

SEQ ID NO: 105608 - DNA, 30 bp, Artificial Sequence
  Synthetic oligonucleotide
ttgatcctccctaatagccttcctctgtag

SEQ ID NO: 105609 - DNA, 30 bp, Artificial Sequence
  Synthetic oligonucleotide
tcatcccatggtaaatggtgacgtctgtag

SEQ ID NO: 105610 - DNA, 30 bp, Artificial Sequence
  Synthetic oligonucleotide
cgcacgcataagagtgcgacattggtgtag

SEQ ID NO: 105611 - DNA, 30 bp, Artificial Sequence
  Synthetic oligonucleotide
aaacgtcgtgatagacttagaaatgtgtag

SEQ ID NO: 105612 - DNA, 30 bp, Artificial Sequence
  Synthetic oligonucleotide
ggcgcctaaccggctgctgcttataattag

SEQ ID NO: 105613 - DNA, 30 bp, Artificial Sequence
  Synthetic oligonucleotide
atgggtatgaatctcatcttgtagcattag

SEQ ID NO: 105614 - DNA, 30 bp, Artificial Sequence
  Synthetic oligonucleotide
ggtgcgcatagtcatcaaagttatcattag

SEQ ID NO: 105615 - DNA, 30 bp, Artificial Sequence
  Synthetic oligonucleotide
acgtaaactattcgctcaggtcaggattag

SEQ ID NO: 105616 - DNA, 30 bp, Artificial Sequence
  Synthetic oligonucleotide
tgaagccagttggaagcctaaggtgattag

SEQ ID NO: 105617 - DNA, 30 bp, Artificial Sequence
  Synthetic oligonucleotide
ttggagtgctagtgaggaagatcgtattag

SEQ ID NO: 105618 - DNA, 30 bp, Artificial Sequence
  Synthetic oligonucleotide
tttagggacaaacaaacttaccggtattag

SEQ ID NO: 105619 - DNA, 30 bp, Artificial Sequence
  Synthetic oligonucleotide
tggcaacgtagatcagaagcaagttattag

SEQ ID NO: 105620 - DNA, 30 bp, Artificial Sequence
  Synthetic oligonucleotide
agcgttgaaatcacgtactggtgaccttag

SEQ ID NO: 105621 - DNA, 30 bp, Artificial Sequence
  Synthetic oligonucleotide
cctcggttaggcgtaattgtaataccttag

SEQ ID NO: 105622 - DNA, 30 bp, Artificial Sequence
  Synthetic oligonucleotide
gacgaagatagcagggggtcgtgtccttag

SEQ ID NO: 105623 - DNA, 30 bp, Artificial Sequence
  Synthetic oligonucleotide
cgcgtacaacgtgcagcggaaacaagttag

SEQ ID NO: 105624 - DNA, 30 bp, Artificial Sequence
  Synthetic oligonucleotide
accgactgtagttcgcttgaagccagttag

SEQ ID NO: 105625 - DNA, 30 bp, Artificial Sequence
  Synthetic oligonucleotide
tttcgggatcaaatcgttctgaagagttag

SEQ ID NO: 105626 - DNA, 30 bp, Artificial Sequence
  Synthetic oligonucleotide
cgtgctatctcaaaattgcaacggagttag

SEQ ID NO: 105627 - DNA, 30 bp, Artificial Sequence
  Synthetic oligonucleotide
caggagttagcttatcgggatgttagttag

SEQ ID NO: 105628 - DNA, 30 bp, Artificial Sequence
  Synthetic oligonucleotide
tggtcgagtactgacccctcccgacgttag

SEQ ID NO: 105629 - DNA, 30 bp, Artificial Sequence
  Synthetic oligonucleotide
ttcaacagagacctaccaaggacccgttag

SEQ ID NO: 105630 - DNA, 30 bp, Artificial Sequence
  Synthetic oligonucleotide
tagagttcgattgctccgctatagggttag

SEQ ID NO: 105631 - DNA, 31 bp, Artificial Sequence
  Synthetic oligonucleotide
gacacccaaaatcaaggtatctcggggttag

SEQ ID NO: 105632 - DNA, 30 bp, Artificial Sequence
  Synthetic oligonucleotide
tggatgttccattcagggatttggggttag

SEQ ID NO: 105633 - DNA, 30 bp, Artificial Sequence
  Synthetic oligonucleotide
ctgagtaaatgcaactagaggtcttgttag

SEQ ID NO: 105634 - DNA, 30 bp, Artificial Sequence
  Synthetic oligonucleotide
ggttatcgtggtcactgtgctggttgttag

SEQ ID NO: 105635 - DNA, 30 bp, Artificial Sequence
  Synthetic oligonucleotide
tcattcgaagggcgagtaaaacgaatttag

SEQ ID NO: 105636 - DNA, 30 bp, Artificial Sequence
  Synthetic oligonucleotide
ggtgtgagccggagttccgtaactatttag

SEQ ID NO: 105637 - DNA, 30 bp, Artificial Sequence
  Synthetic oligonucleotide
gaccaacagtataagtcctcgcgtatttag

SEQ ID NO: 105638 - DNA, 30 bp, Artificial Sequence
  Synthetic oligonucleotide
agcaggtttgctcgatgggggccagtttag

SEQ ID NO: 105639 - DNA, 30 bp, Artificial Sequence
  Synthetic oligonucleotide
agaccaagattctagacacgccgggtttag

SEQ ID NO: 105640 - DNA, 30 bp, Artificial Sequence
  Synthetic oligonucleotide
ggacagtgcacgattcatacgaatgtttag

SEQ ID NO: 105641 - DNA, 30 bp, Artificial Sequence
  Synthetic oligonucleotide
tgaaagaaacattgcttcgatctcttttag

SEQ ID NO: 105642 - DNA, 30 bp, Artificial Sequence
  Synthetic oligonucleotide
gttcacacgggtcatggggaaagtttttag

SEQ ID NO: 105643 - DNA, 30 bp, Artificial Sequence
  Synthetic oligonucleotide
cacaaaagcttccgtctccacacaaaaacg

SEQ ID NO: 105644 - DNA, 30 bp, Artificial Sequence
  Synthetic oligonucleotide
cacgcacgaacctggctaccagcaaaaacg

SEQ ID NO: 105645 - DNA, 30 bp, Artificial Sequence
  Synthetic oligonucleotide
cgtgacgtaggaccaacctgcagtaaaacg

SEQ ID NO: 105646 - DNA, 30 bp, Artificial Sequence
  Synthetic oligonucleotide
aagcttggcatacacattcaaacagaaacg

SEQ ID NO: 105647 - DNA, 30 bp, Artificial Sequence
  Synthetic oligonucleotide
ggccgtcgaaaggacagcctaatggaaacg

SEQ ID NO: 105648 - DNA, 30 bp, Artificial Sequence
  Synthetic oligonucleotide
ggcttgctcctagctcaactaaaataaacg

SEQ ID NO: 105649 - DNA, 30 bp, Artificial Sequence
  Synthetic oligonucleotide
gacggagagggggcctcttaaagataaacg

SEQ ID NO: 105650 - DNA, 30 bp, Artificial Sequence
  Synthetic oligonucleotide
gcaaagccctgtagtcaaccgggataaacg

SEQ ID NO: 105651 - DNA, 30 bp, Artificial Sequence
  Synthetic oligonucleotide
gttaacatgttaggcaggttacaaacaacg

SEQ ID NO: 105652 - DNA, 30 bp, Artificial Sequence
  Synthetic oligonucleotide
cgtttaacgatcggtaagaacacaacaacg

SEQ ID NO: 105653 - DNA, 30 bp, Artificial Sequence
  Synthetic oligonucleotide
agagcggtgtaagttcgtaatacaacaacg

SEQ ID NO: 105654 - DNA, 30 bp, Artificial Sequence
  Synthetic oligonucleotide
cttatcagggataagggttgggcgacaacg

SEQ ID NO: 105655 - DNA, 30 bp, Artificial Sequence
  Synthetic oligonucleotide
actaatctacaaaggccatcagggacaacg

SEQ ID NO: 105656 - DNA, 30 bp, Artificial Sequence
  Synthetic oligonucleotide
agtcggttagccgatctatcgcgtacaacg

SEQ ID NO: 105657 - DNA, 30 bp, Artificial Sequence
  Synthetic oligonucleotide
cggaaccatccattgggtcaaggtacaacg

SEQ ID NO: 105658 - DNA, 30 bp, Artificial Sequence
  Synthetic oligonucleotide
taaaagcaatcgagtttccaaagaccaacg

SEQ ID NO: 105659 - DNA, 30 bp, Artificial Sequence
  Synthetic oligonucleotide
cgacttgacaatggaaccaccaagccaacg

SEQ ID NO: 105660 - DNA, 30 bp, Artificial Sequence
  Synthetic oligonucleotide
gggatctaaagctgatatgtaactccaacg

SEQ ID NO: 105661 - DNA, 30 bp, Artificial Sequence
  Synthetic oligonucleotide
gagacaacaccgcgtttcaaaacagcaacg

SEQ ID NO: 105662 - DNA, 30 bp, Artificial Sequence
  Synthetic oligonucleotide
tgatcagcgatacaatgacacaaggcaacg

SEQ ID NO: 105663 - DNA, 30 bp, Artificial Sequence
  Synthetic oligonucleotide
gattcggggagatattgggcaagtgcaacg

SEQ ID NO: 105664 - DNA, 30 bp, Artificial Sequence
  Synthetic oligonucleotide
cgctatcgatttatggcctgaggtgcaacg

SEQ ID NO: 105665 - DNA, 30 bp, Artificial Sequence
  Synthetic oligonucleotide
tgcgcacatgacacaaaatgcgcgtcaacg

SEQ ID NO: 105666 - DNA, 30 bp, Artificial Sequence
  Synthetic oligonucleotide
agaatatgggtatattgagcaaggtcaacg

SEQ ID NO: 105667 - DNA, 30 bp, Artificial Sequence
  Synthetic oligonucleotide
agtacccagggaccggttcagctaagaacg

SEQ ID NO: 105668 - DNA, 30 bp, Artificial Sequence
  Synthetic oligonucleotide
atatacccacgcttatgagagctgagaacg

SEQ ID NO: 105669 - DNA, 30 bp, Artificial Sequence
  Synthetic oligonucleotide
cccaacgtgtaccaagttaaacaccgaacg

SEQ ID NO: 105670 - DNA, 30 bp, Artificial Sequence
  Synthetic oligonucleotide
tcagcagcccaaatgggaccagtccgaacg

SEQ ID NO: 105671 - DNA, 30 bp, Artificial Sequence
  Synthetic oligonucleotide
tgagaaaggttgcgtagacacgccggaacg

SEQ ID NO: 105672 - DNA, 30 bp, Artificial Sequence
  Synthetic oligonucleotide
cgccggaaagttaagataagcctgggaacg

SEQ ID NO: 105673 - DNA, 30 bp, Artificial Sequence
  Synthetic oligonucleotide
tatcacgaaccagagactaacgctggaacg

SEQ ID NO: 105674 - DNA, 30 bp, Artificial Sequence
  Synthetic oligonucleotide
ctaggggtggggtaccacacaagatgaacg

SEQ ID NO: 105675 - DNA, 30 bp, Artificial Sequence
  Synthetic oligonucleotide
aagagcctgggagggtgcataacgtgaacg

SEQ ID NO: 105676 - DNA, 30 bp, Artificial Sequence
  Synthetic oligonucleotide
gcttcaaaaaagttcaaacaggtgtgaacg

SEQ ID NO: 105677 - DNA, 30 bp, Artificial Sequence
  Synthetic oligonucleotide
ggaatgcaaccaggatctctaccttgaacg

SEQ ID NO: 105678 - DNA, 30 bp, Artificial Sequence
  Synthetic oligonucleotide
caacttatagaccgaatatccgggataacg

SEQ ID NO: 105679 - DNA, 30 bp, Artificial Sequence
  Synthetic oligonucleotide
ttcatagacgagtttcaagagttgataacg

SEQ ID NO: 105680 - DNA, 30 bp, Artificial Sequence
  Synthetic oligonucleotide
ccgaatgccaatcactggagtacactaacg

SEQ ID NO: 105681 - DNA, 30 bp, Artificial Sequence
  Synthetic oligonucleotide
ccacggattaaaaggacaacatcactaacg

SEQ ID NO: 105682 - DNA, 30 bp, Artificial Sequence
  Synthetic oligonucleotide
agtaaccgataaccttcaaggctgctaacg

SEQ ID NO: 105683 - DNA, 30 bp, Artificial Sequence
  Synthetic oligonucleotide
ccaaagtgtttatggtgatcgaacttaacg

SEQ ID NO: 105684 - DNA, 30 bp, Artificial Sequence
  Synthetic oligonucleotide
cctggcatactgccaaacgcgcccttaacg

SEQ ID NO: 105685 - DNA, 30 bp, Artificial Sequence
  Synthetic oligonucleotide
gccaacttaatgaaagtccatgaaaacacg

SEQ ID NO: 105686 - DNA, 30 bp, Artificial Sequence
  Synthetic oligonucleotide
gataaggaggttggcttgccgaagaacacg

SEQ ID NO: 105687 - DNA, 30 bp, Artificial Sequence
  Synthetic oligonucleotide
aaggaatcgacttgcagcccctagaacacg

SEQ ID NO: 105688 - DNA, 30 bp, Artificial Sequence
  Synthetic oligonucleotide
catatctacgggtggaaagggcaacacacg

SEQ ID NO: 105689 - DNA, 30 bp, Artificial Sequence
  Synthetic oligonucleotide
actaactgcggagtagttagtaaccacacg

SEQ ID NO: 105690 - DNA, 30 bp, Artificial Sequence
  Synthetic oligonucleotide
catccagtattcgatccccggatccacacg

SEQ ID NO: 105691 - DNA, 30 bp, Artificial Sequence
  Synthetic oligonucleotide
ggattatcggtaaatcatttgcggcacacg

SEQ ID NO: 105692 - DNA, 30 bp, Artificial Sequence
  Synthetic oligonucleotide
gacctaaacgcatagaataagtatcacacg

SEQ ID NO: 105693 - DNA, 30 bp, Artificial Sequence
  Synthetic oligonucleotide
accagtaggctcgtttcgaaatcatacacg

SEQ ID NO: 105694 - DNA, 30 bp, Artificial Sequence
  Synthetic oligonucleotide
gggatagacaatgggtcgggagtctacacg

SEQ ID NO: 105695 - DNA, 30 bp, Artificial Sequence
  Synthetic oligonucleotide
ttatgagggtgccaattgggtgtgtacacg

SEQ ID NO: 105696 - DNA, 30 bp, Artificial Sequence
  Synthetic oligonucleotide
actgataaacgttgtacacaatcgcccacg

SEQ ID NO: 105697 - DNA, 30 bp, Artificial Sequence
  Synthetic oligonucleotide
gggtaccgaaaggtttcattaagatccacg

SEQ ID NO: 105698 - DNA, 30 bp, Artificial Sequence
  Synthetic oligonucleotide
atgttccttaacagggaaacttgatccacg

SEQ ID NO: 105699 - DNA, 30 bp, Artificial Sequence
  Synthetic oligonucleotide
atgcagcagtaatctggagtatgcagcacg

SEQ ID NO: 105700 - DNA, 30 bp, Artificial Sequence
  Synthetic oligonucleotide
aactaagtgccgttaagacagcggagcacg

SEQ ID NO: 105701 - DNA, 30 bp, Artificial Sequence
  Synthetic oligonucleotide
tcgacattatacgggctttcgggtagcacg

SEQ ID NO: 105702 - DNA, 30 bp, Artificial Sequence
  Synthetic oligonucleotide
taattgttgcatggggagcctgggggcacg

SEQ ID NO: 105703 - DNA, 30 bp, Artificial Sequence
  Synthetic oligonucleotide
cacagagatacacaggcagcgatgggcacg

SEQ ID NO: 105704 - DNA, 30 bp, Artificial Sequence
  Synthetic oligonucleotide
agcatgtacaattgtcctggtgaatgcacg

SEQ ID NO: 105705 - DNA, 30 bp, Artificial Sequence
  Synthetic oligonucleotide
aaaagtaataggggcacataattatgcacg

SEQ ID NO: 105706 - DNA, 30 bp, Artificial Sequence
  Synthetic oligonucleotide
cagtatagagcggtcaacacatgctgcacg

SEQ ID NO: 105707 - DNA, 30 bp, Artificial Sequence
  Synthetic oligonucleotide
aggtacactgagactgatatgctaatcacg

SEQ ID NO: 105708 - DNA, 30 bp, Artificial Sequence
  Synthetic oligonucleotide
atcaatctgtcactctctgggaaactcacg

SEQ ID NO: 105709 - DNA, 30 bp, Artificial Sequence
  Synthetic oligonucleotide
gttgctgccttccacacacactgcctcacg

SEQ ID NO: 105710 - DNA, 30 bp, Artificial Sequence
  Synthetic oligonucleotide
aacgcaagtaaaaggtcaacacctgtcacg

SEQ ID NO: 105711 - DNA, 30 bp, Artificial Sequence
  Synthetic oligonucleotide
ttaaacgaaacagcgcgcccgcccttcacg

SEQ ID NO: 105712 - DNA, 30 bp, Artificial Sequence
  Synthetic oligonucleotide
ttaaagtgagaggtgcgatattagttcacg

SEQ ID NO: 105713 - DNA, 30 bp, Artificial Sequence
  Synthetic oligonucleotide
caactctcgaatggctcaaacctaaagacg

SEQ ID NO: 105714 - DNA, 30 bp, Artificial Sequence
  Synthetic oligonucleotide
gcaagaatcgctcaggggtcttccaagacg

SEQ ID NO: 105715 - DNA, 28 bp, Artificial Sequence
  Synthetic oligonucleotide
cagcacacatataacactacgcaagacg

SEQ ID NO: 105716 - DNA, 30 bp, Artificial Sequence
  Synthetic oligonucleotide
ctatgatcgtgtcaaggccagggcaagacg

SEQ ID NO: 105717 - DNA, 30 bp, Artificial Sequence
  Synthetic oligonucleotide
tcaagggtcggctcgtacgcattgaagacg

SEQ ID NO: 105718 - DNA, 30 bp, Artificial Sequence
  Synthetic oligonucleotide
atgtcgggatcgggtgggccagtacagacg

SEQ ID NO: 105719 - DNA, 30 bp, Artificial Sequence
  Synthetic oligonucleotide
ccggcccataaggcgtttcgacttcagacg

SEQ ID NO: 105720 - DNA, 30 bp, Artificial Sequence
  Synthetic oligonucleotide
aggacgtgccacgagattcatgacgagacg

SEQ ID NO: 105721 - DNA, 30 bp, Artificial Sequence
  Synthetic oligonucleotide
gtagttaatcaagtgccccagctcgagacg

SEQ ID NO: 105722 - DNA, 30 bp, Artificial Sequence
  Synthetic oligonucleotide
cctaaacgtgtctggaagggtcaatagacg

SEQ ID NO: 105723 - DNA, 30 bp, Artificial Sequence
  Synthetic oligonucleotide
gcgcagcgtccaacttcggtacactagacg

SEQ ID NO: 105724 - DNA, 30 bp, Artificial Sequence
  Synthetic oligonucleotide
gggaaggttgtcacaaacaagatttagacg

SEQ ID NO: 105725 - DNA, 30 bp, Artificial Sequence
  Synthetic oligonucleotide
actagaagaggtactaatatgcgtacgacg

SEQ ID NO: 105726 - DNA, 30 bp, Artificial Sequence
  Synthetic oligonucleotide
aagcccgatctgaagaacagaagaccgacg

SEQ ID NO: 105727 - DNA, 30 bp, Artificial Sequence
  Synthetic oligonucleotide
ggatagtggagacatgccatctacccgacg

SEQ ID NO: 105728 - DNA, 30 bp, Artificial Sequence
  Synthetic oligonucleotide
aaggatccgctaaaccccttagagccgacg

SEQ ID NO: 105729 - DNA, 30 bp, Artificial Sequence
  Synthetic oligonucleotide
ggcttagctcaactacagggggaggcgacg

SEQ ID NO: 105730 - DNA, 30 bp, Artificial Sequence
  Synthetic oligonucleotide
aatcatagcaccggccgcacaagtgcgacg

SEQ ID NO: 105731 - DNA, 30 bp, Artificial Sequence
  Synthetic oligonucleotide
ggggcggcactgagaagcatcaaatcgacg

SEQ ID NO: 105732 - DNA, 30 bp, Artificial Sequence
  Synthetic oligonucleotide
gacacccggcgaacagtgaagtaatcgacg

SEQ ID NO: 105733 - DNA, 29 bp, Artificial Sequence
  Synthetic oligonucleotide
tctaagatttctacacagacagctcgacg

SEQ ID NO: 105734 - DNA, 30 bp, Artificial Sequence
  Synthetic oligonucleotide
actacacactcatggagaacctggtcgacg

SEQ ID NO: 105735 - DNA, 30 bp, Artificial Sequence
  Synthetic oligonucleotide
tgctccgcgtaatctcgcttgggacggacg

SEQ ID NO: 105736 - DNA, 30 bp, Artificial Sequence
  Synthetic oligonucleotide
atcgaatctatggaaggatctatacggacg

SEQ ID NO: 105737 - DNA, 30 bp, Artificial Sequence
  Synthetic oligonucleotide
ggggtatacgcacggggcaccgaccggacg

SEQ ID NO: 105738 - DNA, 30 bp, Artificial Sequence
  Synthetic oligonucleotide
agagaccgcggagtccaaaaaaggcggacg

SEQ ID NO: 105739 - DNA, 30 bp, Artificial Sequence
  Synthetic oligonucleotide
cgtgagttatagctgtaaaaggccgggacg

SEQ ID NO: 105740 - DNA, 30 bp, Artificial Sequence
  Synthetic oligonucleotide
cacttgccacccaagatcgtgcgtgggacg

SEQ ID NO: 105741 - DNA, 30 bp, Artificial Sequence
  Synthetic oligonucleotide
ccacatttagctcaaaaaggagtctggacg

SEQ ID NO: 105742 - DNA, 30 bp, Artificial Sequence
  Synthetic oligonucleotide
cataaccgcggaacattatggatttggacg

SEQ ID NO: 105743 - DNA, 30 bp, Artificial Sequence
  Synthetic oligonucleotide
cgtacccaggggcggattcgccacatgacg

SEQ ID NO: 105744 - DNA, 30 bp, Artificial Sequence
  Synthetic oligonucleotide
cgaaaccgttagtaccaagatcacatgacg

SEQ ID NO: 105745 - DNA, 30 bp, Artificial Sequence
  Synthetic oligonucleotide
ggcggcagttaccgatccaccgatatgacg

SEQ ID NO: 105746 - DNA, 30 bp, Artificial Sequence
  Synthetic oligonucleotide
acttggtcggtggagcaatgcaaggtgacg

SEQ ID NO: 105747 - DNA, 30 bp, Artificial Sequence
  Synthetic oligonucleotide
tggggcaggagcgcaaggggttctgtgacg

SEQ ID NO: 105748 - DNA, 30 bp, Artificial Sequence
  Synthetic oligonucleotide
cgcgcccagctggtgcatatacagttgacg

SEQ ID NO: 105749 - DNA, 30 bp, Artificial Sequence
  Synthetic oligonucleotide
tgtgcgggcgttaactgggcgatcaatacg

SEQ ID NO: 105750 - DNA, 30 bp, Artificial Sequence
  Synthetic oligonucleotide
agttactagccattacggagttagaatacg

SEQ ID NO: 105751 - DNA, 30 bp, Artificial Sequence
  Synthetic oligonucleotide
cacggttattgcggtctacttatgaatacg

SEQ ID NO: 105752 - DNA, 30 bp, Artificial Sequence
  Synthetic oligonucleotide
gggcccgtcctgttatagcaaatccatacg

SEQ ID NO: 105753 - DNA, 30 bp, Artificial Sequence
  Synthetic oligonucleotide
tgcaggtctggtgatcctcgagcgcatacg

SEQ ID NO: 105754 - DNA, 30 bp, Artificial Sequence
  Synthetic oligonucleotide
gagctcaggcgtgaaaataatgtgcatacg

SEQ ID NO: 105755 - DNA, 30 bp, Artificial Sequence
  Synthetic oligonucleotide
atcactagccttgatggatgagctcatacg

SEQ ID NO: 105756 - DNA, 30 bp, Artificial Sequence
  Synthetic oligonucleotide
tgtgagatcgggcccgagcataaagatacg

SEQ ID NO: 105757 - DNA, 30 bp, Artificial Sequence
  Synthetic oligonucleotide
tcgcacagtgtccgatattgttacgatacg

SEQ ID NO: 105758 - DNA, 30 bp, Artificial Sequence
  Synthetic oligonucleotide
tactcgagggtagaaggagtgctggatacg

SEQ ID NO: 105759 - DNA, 30 bp, Artificial Sequence
  Synthetic oligonucleotide
gcagattatagaccactacccgcatatacg

SEQ ID NO: 105760 - DNA, 30 bp, Artificial Sequence
  Synthetic oligonucleotide
gagcgcgaagtgggtaactccggatatacg

SEQ ID NO: 105761 - DNA, 30 bp, Artificial Sequence
  Synthetic oligonucleotide
tatcacacggtcgtgggctgactatatacg

SEQ ID NO: 105762 - DNA, 30 bp, Artificial Sequence
  Synthetic oligonucleotide
aaaagcaaatatgagcaaggctactatacg

SEQ ID NO: 105763 - DNA, 30 bp, Artificial Sequence
  Synthetic oligonucleotide
ggtggagaattaagaggaccttcctatacg

SEQ ID NO: 105764 - DNA, 30 bp, Artificial Sequence
  Synthetic oligonucleotide
aatacagggtagggcacctattagtatacg

SEQ ID NO: 105765 - DNA, 30 bp, Artificial Sequence
  Synthetic oligonucleotide
gcggctaccgatgttctagtcccgtatacg

SEQ ID NO: 105766 - DNA, 30 bp, Artificial Sequence
  Synthetic oligonucleotide
ttaacggtaagctgaccttcaacttatacg

SEQ ID NO: 105767 - DNA, 30 bp, Artificial Sequence
  Synthetic oligonucleotide
gattgagcgagggttcgctatacaactacg

SEQ ID NO: 105768 - DNA, 30 bp, Artificial Sequence
  Synthetic oligonucleotide
tgacctgttccacaccgataaagaactacg

SEQ ID NO: 105769 - DNA, 30 bp, Artificial Sequence
  Synthetic oligonucleotide
gtagaatcaggctcgtctgtcgacactacg

SEQ ID NO: 105770 - DNA, 30 bp, Artificial Sequence
  Synthetic oligonucleotide
tcgtcccagtgataggggatatagactacg

SEQ ID NO: 105771 - DNA, 30 bp, Artificial Sequence
  Synthetic oligonucleotide
accaatcgtaacatagtaagccttactacg

SEQ ID NO: 105772 - DNA, 30 bp, Artificial Sequence
  Synthetic oligonucleotide
atgtttatgagtgggtggagaaaacctacg

SEQ ID NO: 105773 - DNA, 30 bp, Artificial Sequence
  Synthetic oligonucleotide
gataaacgagcttgggaatatgcgcctacg

SEQ ID NO: 105774 - DNA, 30 bp, Artificial Sequence
  Synthetic oligonucleotide
tgcgggacagtggattcatgtgcagctacg

SEQ ID NO: 105775 - DNA, 30 bp, Artificial Sequence
  Synthetic oligonucleotide
ccttggtgcctcaaatttagggtatctacg

SEQ ID NO: 105776 - DNA, 30 bp, Artificial Sequence
  Synthetic oligonucleotide
ccgacccagggaaccaagtggacctctacg

SEQ ID NO: 105777 - DNA, 30 bp, Artificial Sequence
  Synthetic oligonucleotide
aagaaggaccagaaacacgatggttctacg

SEQ ID NO: 105778 - DNA, 30 bp, Artificial Sequence
  Synthetic oligonucleotide
atcgccttacgtgtggtcctatcaagtacg

SEQ ID NO: 105779 - DNA, 30 bp, Artificial Sequence
  Synthetic oligonucleotide
gtgtgtacgcctgggtgcgcggacagtacg

SEQ ID NO: 105780 - DNA, 30 bp, Artificial Sequence
  Synthetic oligonucleotide
gacccgggcatggtgacactaccgagtacg

SEQ ID NO: 105781 - DNA, 30 bp, Artificial Sequence
  Synthetic oligonucleotide
ttgatcaaaggagattctgagggtagtacg

SEQ ID NO: 105782 - DNA, 30 bp, Artificial Sequence
  Synthetic oligonucleotide
gtggttgttgtacgaagtacaggacgtacg

SEQ ID NO: 105783 - DNA, 30 bp, Artificial Sequence
  Synthetic oligonucleotide
cgagttcctcccgtagtgaaatcccgtacg

SEQ ID NO: 105784 - DNA, 30 bp, Artificial Sequence
  Synthetic oligonucleotide
cacgttgtggagaaggcactttttcgtacg

SEQ ID NO: 105785 - DNA, 30 bp, Artificial Sequence
  Synthetic oligonucleotide
cccgttatgtgggtctcaagcctaggtacg

SEQ ID NO: 105786 - DNA, 30 bp, Artificial Sequence
  Synthetic oligonucleotide
aatcgggaggagatccgtgttctaggtacg

SEQ ID NO: 105787 - DNA, 30 bp, Artificial Sequence
  Synthetic oligonucleotide
ggggctcgtcactggaagccctcctgtacg

SEQ ID NO: 105788 - DNA, 30 bp, Artificial Sequence
  Synthetic oligonucleotide
gggcataggtcctgactggtgttctgtacg

SEQ ID NO: 105789 - DNA, 30 bp, Artificial Sequence
  Synthetic oligonucleotide
cgtaaaggcgagggcgcgtataagtgtacg

SEQ ID NO: 105790 - DNA, 30 bp, Artificial Sequence
  Synthetic oligonucleotide
tcctctagaaggggtcgccggctgtgtacg

SEQ ID NO: 105791 - DNA, 30 bp, Artificial Sequence
  Synthetic oligonucleotide
taaagcgtcgatgtaattggttcttgtacg

SEQ ID NO: 105792 - DNA, 30 bp, Artificial Sequence
  Synthetic oligonucleotide
aggaccaagaataatatggtagtacttacg

SEQ ID NO: 105793 - DNA, 30 bp, Artificial Sequence
  Synthetic oligonucleotide
tcagggatagtggaattggacattcttacg

SEQ ID NO: 105794 - DNA, 30 bp, Artificial Sequence
  Synthetic oligonucleotide
tgtagtagattcgtgctcacacaagttacg

SEQ ID NO: 105795 - DNA, 30 bp, Artificial Sequence
  Synthetic oligonucleotide
acagaaacgtggtatatgattctagttacg

SEQ ID NO: 105796 - DNA, 30 bp, Artificial Sequence
  Synthetic oligonucleotide
tacaaccgccatacaggatctctcgttacg

SEQ ID NO: 105797 - DNA, 30 bp, Artificial Sequence
  Synthetic oligonucleotide
actagtcctgtgcccacaagggtgtttacg

SEQ ID NO: 105798 - DNA, 30 bp, Artificial Sequence
  Synthetic oligonucleotide
atcgggtacggaccgcgtctctaaaaaccg

SEQ ID NO: 105799 - DNA, 30 bp, Artificial Sequence
  Synthetic oligonucleotide
aggagtatcataatacggctgagaaaaccg

SEQ ID NO: 105800 - DNA, 30 bp, Artificial Sequence
  Synthetic oligonucleotide
ataagccccatctcccaattactaaaaccg

SEQ ID NO: 105801 - DNA, 30 bp, Artificial Sequence
  Synthetic oligonucleotide
aaggcaaaggacacgcactttatacaaccg

SEQ ID NO: 105802 - DNA, 30 bp, Artificial Sequence
  Synthetic oligonucleotide
tagttacggctgtgggacccaattcaaccg

SEQ ID NO: 105803 - DNA, 30 bp, Artificial Sequence
  Synthetic oligonucleotide
acatacacggggcacagttaaatggaaccg

SEQ ID NO: 105804 - DNA, 30 bp, Artificial Sequence
  Synthetic oligonucleotide
agccagatgtggaaccagatcactgaaccg

SEQ ID NO: 105805 - DNA, 30 bp, Artificial Sequence
  Synthetic oligonucleotide
acgtccgttggcagggctcttgcataaccg

SEQ ID NO: 105806 - DNA, 30 bp, Artificial Sequence
  Synthetic oligonucleotide
agtaaatacccgcgcaaaaaggtctaaccg

SEQ ID NO: 105807 - DNA, 30 bp, Artificial Sequence
  Synthetic oligonucleotide
tcactgcagaatatctggcagcgaacaccg

SEQ ID NO: 105808 - DNA, 30 bp, Artificial Sequence
  Synthetic oligonucleotide
tcttgaaatcggatgcaaattggaacaccg

SEQ ID NO: 105809 - DNA, 30 bp, Artificial Sequence
  Synthetic oligonucleotide
atgtcgagagatagaaacatgataacaccg

SEQ ID NO: 105810 - DNA, 30 bp, Artificial Sequence
  Synthetic oligonucleotide
cgggtacggagtagactcagatagccaccg

SEQ ID NO: 105811 - DNA, 30 bp, Artificial Sequence
  Synthetic oligonucleotide
cttaacagaggttagcaaaagcccgcaccg

SEQ ID NO: 105812 - DNA, 30 bp, Artificial Sequence
  Synthetic oligonucleotide
gtgcagattaccgggaagtattatgcaccg

SEQ ID NO: 105813 - DNA, 30 bp, Artificial Sequence
  Synthetic oligonucleotide
cgaaagatagcttggtggacttttgcaccg

SEQ ID NO: 105814 - DNA, 30 bp, Artificial Sequence
  Synthetic oligonucleotide
tatcgtgagactcacctatacgaatcaccg

SEQ ID NO: 105815 - DNA, 30 bp, Artificial Sequence
  Synthetic oligonucleotide
gccatgcaagataagaacgcttaatcaccg

SEQ ID NO: 105816 - DNA, 30 bp, Artificial Sequence
  Synthetic oligonucleotide
tgtagttgactcgattgacaggcatcaccg

SEQ ID NO: 105817 - DNA, 30 bp, Artificial Sequence
  Synthetic oligonucleotide
actaaggcaaggaaatcatgtagatcaccg

SEQ ID NO: 105818 - DNA, 30 bp, Artificial Sequence
  Synthetic oligonucleotide
tgctctccggactacgaacctaactcaccg

SEQ ID NO: 105819 - DNA, 30 bp, Artificial Sequence
  Synthetic oligonucleotide
gactgaaatctggaacgagtgatctcaccg

SEQ ID NO: 105820 - DNA, 30 bp, Artificial Sequence
  Synthetic oligonucleotide
tattgcaaggatgacactaatttctcaccg

SEQ ID NO: 105821 - DNA, 30 bp, Artificial Sequence
  Synthetic oligonucleotide
tagataagtgcccaatagacaccgtcaccg

SEQ ID NO: 105822 - DNA, 30 bp, Artificial Sequence
  Synthetic oligonucleotide
acagtagcgcatgtccatttatattcaccg

SEQ ID NO: 105823 - DNA, 30 bp, Artificial Sequence
  Synthetic oligonucleotide
attgcatcttgcatatctagtaccagaccg

SEQ ID NO: 105824 - DNA, 30 bp, Artificial Sequence
  Synthetic oligonucleotide
tctttataaggtaaataccaagggagaccg

SEQ ID NO: 105825 - DNA, 30 bp, Artificial Sequence
  Synthetic oligonucleotide
cgaaagctcttacgtgcgcactaccgaccg

SEQ ID NO: 105826 - DNA, 30 bp, Artificial Sequence
  Synthetic oligonucleotide
agttgacatgcatgggtatggggatgaccg

SEQ ID NO: 105827 - DNA, 30 bp, Artificial Sequence
  Synthetic oligonucleotide
cgagatatgtggtcctcttcttactgaccg

SEQ ID NO: 105828 - DNA, 30 bp, Artificial Sequence
  Synthetic oligonucleotide
tcatgccatagagaaggctgttcgataccg

SEQ ID NO: 105829 - DNA, 30 bp, Artificial Sequence
  Synthetic oligonucleotide
aggcactgtacgactcgtgtcgggataccg

SEQ ID NO: 105830 - DNA, 30 bp, Artificial Sequence
  Synthetic oligonucleotide
ggatgagtctactgggggcgggcgctaccg

SEQ ID NO: 105831 - DNA, 30 bp, Artificial Sequence
  Synthetic oligonucleotide
tgtcggtagtaactggatcttccagtaccg

SEQ ID NO: 105832 - DNA, 30 bp, Artificial Sequence
  Synthetic oligonucleotide
ccactcacgccgaccggggaggaggtaccg

SEQ ID NO: 105833 - DNA, 30 bp, Artificial Sequence
  Synthetic oligonucleotide
tggggggcagataggatggaccgattaccg

SEQ ID NO: 105834 - DNA, 30 bp, Artificial Sequence
  Synthetic oligonucleotide
atgatctcggtgaataaaacaaacttaccg

SEQ ID NO: 105835 - DNA, 30 bp, Artificial Sequence
  Synthetic oligonucleotide
ggagcgtaattttcctcgcgatctttaccg

SEQ ID NO: 105836 - DNA, 30 bp, Artificial Sequence
  Synthetic oligonucleotide
ggacaaccaagtctccgacacagtttaccg

SEQ ID NO: 105837 - DNA, 30 bp, Artificial Sequence
  Synthetic oligonucleotide
tatgctaccagggtagcggtcccaaacccg

SEQ ID NO: 105838 - DNA, 30 bp, Artificial Sequence
  Synthetic oligonucleotide
gtaatatgtaatctgtaaagaatgaacccg

SEQ ID NO: 105839 - DNA, 30 bp, Artificial Sequence
  Synthetic oligonucleotide
tgcacggcgaagaggacgagcggtaacccg

SEQ ID NO: 105840 - DNA, 30 bp, Artificial Sequence
  Synthetic oligonucleotide
ggctgacttcataaaacataacttaacccg

SEQ ID NO: 105841 - DNA, 30 bp, Artificial Sequence
  Synthetic oligonucleotide
agactcgtaagagcgaaattctttaacccg

SEQ ID NO: 105842 - DNA, 30 bp, Artificial Sequence
  Synthetic oligonucleotide
tccatcactttgttctaggtgagacacccg

SEQ ID NO: 105843 - DNA, 30 bp, Artificial Sequence
  Synthetic oligonucleotide
cacgtataaatgcccttaactagccacccg

SEQ ID NO: 105844 - DNA, 30 bp, Artificial Sequence
  Synthetic oligonucleotide
caagatatgatactcatccaagtccacccg

SEQ ID NO: 105845 - DNA, 30 bp, Artificial Sequence
  Synthetic oligonucleotide
ttcgacgatcaaaagttttaacggcacccg

SEQ ID NO: 105846 - DNA, 30 bp, Artificial Sequence
  Synthetic oligonucleotide
ccgcctgaagagcaagaagttagctacccg

SEQ ID NO: 105847 - DNA, 30 bp, Artificial Sequence
  Synthetic oligonucleotide
cccacgtagacctacgtgtggataaccccg

SEQ ID NO: 105848 - DNA, 30 bp, Artificial Sequence
  Synthetic oligonucleotide
agacggaacagtaaatgaagggttaccccg

SEQ ID NO: 105849 - DNA, 30 bp, Artificial Sequence
  Synthetic oligonucleotide
aagcacacttgcccaagatactaatccccg

SEQ ID NO: 105850 - DNA, 30 bp, Artificial Sequence
  Synthetic oligonucleotide
gcatgcggacagtaggggatagctagcccg

SEQ ID NO: 105851 - DNA, 30 bp, Artificial Sequence
  Synthetic oligonucleotide
gcgtaatatacagaactgatttaacgcccg

SEQ ID NO: 105852 - DNA, 30 bp, Artificial Sequence
  Synthetic oligonucleotide
cacaaaacgtaagatgaacgggtaggcccg

SEQ ID NO: 105853 - DNA, 30 bp, Artificial Sequence
  Synthetic oligonucleotide
agagactgaatgggcgaccgagccggcccg

SEQ ID NO: 105854 - DNA, 30 bp, Artificial Sequence
  Synthetic oligonucleotide
catgggattgggagcccgttaagcggcccg

SEQ ID NO: 105855 - DNA, 30 bp, Artificial Sequence
  Synthetic oligonucleotide
tgtgaaccttcatacacgcatgttggcccg

SEQ ID NO: 105856 - DNA, 30 bp, Artificial Sequence
  Synthetic oligonucleotide
ggtgatacactaccgtccgaacagtgcccg

SEQ ID NO: 105857 - DNA, 30 bp, Artificial Sequence
  Synthetic oligonucleotide
cgccttgggcactctgaatcgggcatcccg

SEQ ID NO: 105858 - DNA, 30 bp, Artificial Sequence
  Synthetic oligonucleotide
atggccttcctatgttcggctacgatcccg

SEQ ID NO: 105859 - DNA, 30 bp, Artificial Sequence
  Synthetic oligonucleotide
gggcttacggaattcagatacactatcccg

SEQ ID NO: 105860 - DNA, 30 bp, Artificial Sequence
  Synthetic oligonucleotide
gaatcctgcgtagcaacaggaggcttcccg

SEQ ID NO: 105861 - DNA, 30 bp, Artificial Sequence
  Synthetic oligonucleotide
agagctatgcgacttacggcctgtttcccg

SEQ ID NO: 105862 - DNA, 30 bp, Artificial Sequence
  Synthetic oligonucleotide
attggatgactgttaggatctaacaagccg

SEQ ID NO: 105863 - DNA, 30 bp, Artificial Sequence
  Synthetic oligonucleotide
gcaggcatctatgccgatcggctcaagccg

SEQ ID NO: 105864 - DNA, 30 bp, Artificial Sequence
  Synthetic oligonucleotide
gggaatgtagtattttaacttaaagagccg

SEQ ID NO: 105865 - DNA, 30 bp, Artificial Sequence
  Synthetic oligonucleotide
ggcgtcgtcgccaacggacagcgcgagccg

SEQ ID NO: 105866 - DNA, 30 bp, Artificial Sequence
  Synthetic oligonucleotide
tttacgaaggatcacgtagtaagggagccg

SEQ ID NO: 105867 - DNA, 30 bp, Artificial Sequence
  Synthetic oligonucleotide
gggaaaaggtttcctgcggagactgagccg

SEQ ID NO: 105868 - DNA, 30 bp, Artificial Sequence
  Synthetic oligonucleotide
tggcctcagtgaatttgctatagtgagccg

SEQ ID NO: 105869 - DNA, 30 bp, Artificial Sequence
  Synthetic oligonucleotide
ctaaaacctcttattgagggttggtagccg

SEQ ID NO: 105870 - DNA, 30 bp, Artificial Sequence
  Synthetic oligonucleotide
ccatatgctttcctcagaaccgtgtagccg

SEQ ID NO: 105871 - DNA, 30 bp, Artificial Sequence
  Synthetic oligonucleotide
attaataaagataataaaggggcgccgccg

SEQ ID NO: 105872 - DNA, 30 bp, Artificial Sequence
  Synthetic oligonucleotide
cttgaaaaggccgccgagcctagggcgccg

SEQ ID NO: 105873 - DNA, 30 bp, Artificial Sequence
  Synthetic oligonucleotide
gttgatctggcattgcgagaaacatcgccg

SEQ ID NO: 105874 - DNA, 30 bp, Artificial Sequence
  Synthetic oligonucleotide
cgttgtgtcatctaataagtcacctcgccg

SEQ ID NO: 105875 - DNA, 30 bp, Artificial Sequence
  Synthetic oligonucleotide
acacaccattcgtcccttgccgaccggccg

SEQ ID NO: 105876 - DNA, 30 bp, Artificial Sequence
  Synthetic oligonucleotide
atgcgcacatcattttactaatatcggccg

SEQ ID NO: 105877 - DNA, 30 bp, Artificial Sequence
  Synthetic oligonucleotide
ctcaacgtgatccgcaattagccagggccg

SEQ ID NO: 105878 - DNA, 30 bp, Artificial Sequence
  Synthetic oligonucleotide
tcgtctaggactgggcaatgtcgctggccg

SEQ ID NO: 105879 - DNA, 30 bp, Artificial Sequence
  Synthetic oligonucleotide
cgttaagcggtactgcgtttcaacatgccg

SEQ ID NO: 105880 - DNA, 30 bp, Artificial Sequence
  Synthetic oligonucleotide
ggtaacgcgtgtactatagggtacatgccg

SEQ ID NO: 105881 - DNA, 30 bp, Artificial Sequence
  Synthetic oligonucleotide
gatgtcaacaatgcgtttgtcaatatgccg

SEQ ID NO: 105882 - DNA, 30 bp, Artificial Sequence
  Synthetic oligonucleotide
gctaatggtacaaagttaggaggtctgccg

SEQ ID NO: 105883 - DNA, 30 bp, Artificial Sequence
  Synthetic oligonucleotide
attcggatcggccgtccactgactaatccg

SEQ ID NO: 105884 - DNA, 30 bp, Artificial Sequence
  Synthetic oligonucleotide
cacgccatatatgtgtgggaagaacatccg

SEQ ID NO: 105885 - DNA, 30 bp, Artificial Sequence
  Synthetic oligonucleotide
cgaaaatatttaacatgagcggaacatccg

SEQ ID NO: 105886 - DNA, 30 bp, Artificial Sequence
  Synthetic oligonucleotide
tcctcacgatgcaagttatgatgagatccg

SEQ ID NO: 105887 - DNA, 30 bp, Artificial Sequence
  Synthetic oligonucleotide
agggctctcgcgaagaagtgtatttatccg

SEQ ID NO: 105888 - DNA, 30 bp, Artificial Sequence
  Synthetic oligonucleotide
gctcatagaatgatggttcgtcgaactccg

SEQ ID NO: 105889 - DNA, 30 bp, Artificial Sequence
  Synthetic oligonucleotide
atagggagccagatagctacaaacactccg

SEQ ID NO: 105890 - DNA, 30 bp, Artificial Sequence
  Synthetic oligonucleotide
cctaactaccaactattttgaaaacctccg

SEQ ID NO: 105891 - DNA, 30 bp, Artificial Sequence
  Synthetic oligonucleotide
gtgaggtttccgtcatcgacataatctccg

SEQ ID NO: 105892 - DNA, 30 bp, Artificial Sequence
  Synthetic oligonucleotide
ggtgaacaagtaaaatctatcaggtctccg

SEQ ID NO: 105893 - DNA, 30 bp, Artificial Sequence
  Synthetic oligonucleotide
cgcgtttactataagtctctctgaagtccg

SEQ ID NO: 105894 - DNA, 30 bp, Artificial Sequence
  Synthetic oligonucleotide
cctaaaatactgatgcaccattcgagtccg

SEQ ID NO: 105895 - DNA, 30 bp, Artificial Sequence
  Synthetic oligonucleotide
gactgcagtgatagcgggagggggagtccg

SEQ ID NO: 105896 - DNA, 30 bp, Artificial Sequence
  Synthetic oligonucleotide
aaccaaactactaaccgtttacgtagtccg

SEQ ID NO: 105897 - DNA, 30 bp, Artificial Sequence
  Synthetic oligonucleotide
tagagaacacaattggattggcgacgtccg

SEQ ID NO: 105898 - DNA, 30 bp, Artificial Sequence
  Synthetic oligonucleotide
cgatgtttacagaactgggtattccgtccg

SEQ ID NO: 105899 - DNA, 30 bp, Artificial Sequence
  Synthetic oligonucleotide
gacacaccgagtgtaggagagtaaggtccg

SEQ ID NO: 105900 - DNA, 30 bp, Artificial Sequence
  Synthetic oligonucleotide
aatagggtcgcgaatggtgatacatgtccg

SEQ ID NO: 105901 - DNA, 30 bp, Artificial Sequence
  Synthetic oligonucleotide
gcgtttaaccttgaagaaggcccatgtccg

SEQ ID NO: 105902 - DNA, 30 bp, Artificial Sequence
  Synthetic oligonucleotide
ggagccacagagctccgtgagatgtgtccg

SEQ ID NO: 105903 - DNA, 30 bp, Artificial Sequence
  Synthetic oligonucleotide
ggaaatgacgattaaggcgcgatttgtccg

SEQ ID NO: 105904 - DNA, 30 bp, Artificial Sequence
  Synthetic oligonucleotide
tgcaattgcgtatccagggcaagcattccg

SEQ ID NO: 105905 - DNA, 30 bp, Artificial Sequence
  Synthetic oligonucleotide
tctcatggacacccaggattggtacttccg

SEQ ID NO: 105906 - DNA, 30 bp, Artificial Sequence
  Synthetic oligonucleotide
cggactcacgggcgcactttaaaccttccg

SEQ ID NO: 105907 - DNA, 30 bp, Artificial Sequence
  Synthetic oligonucleotide
cacctccgaggtcctcgtcccattcttccg

SEQ ID NO: 105908 - DNA, 30 bp, Artificial Sequence
  Synthetic oligonucleotide
ttgagatcgactacgcggtcagtcgttccg

SEQ ID NO: 105909 - DNA, 30 bp, Artificial Sequence
  Synthetic oligonucleotide
ggttaacacggatgtgctgatgtggttccg

SEQ ID NO: 105910 - DNA, 30 bp, Artificial Sequence
  Synthetic oligonucleotide
aagaatctattccgagtccagtaaaaagcg

SEQ ID NO: 105911 - DNA, 30 bp, Artificial Sequence
  Synthetic oligonucleotide
cgttgtttccttcagtgcatgcttaaagcg

SEQ ID NO: 105912 - DNA, 30 bp, Artificial Sequence
  Synthetic oligonucleotide
gagatgtaggtataatgccttttccaagcg

SEQ ID NO: 105913 - DNA, 30 bp, Artificial Sequence
  Synthetic oligonucleotide
ttctcatggataacaggattgcctcaagcg

SEQ ID NO: 105914 - DNA, 30 bp, Artificial Sequence
  Synthetic oligonucleotide
caggtaaattaacaatcagtaagcgaagcg

SEQ ID NO: 105915 - DNA, 30 bp, Artificial Sequence
  Synthetic oligonucleotide
acgttagaacggtcaagctgatgataagcg

SEQ ID NO: 105916 - DNA, 30 bp, Artificial Sequence
  Synthetic oligonucleotide
ccacaagagatattcgaggcaacctaagcg

SEQ ID NO: 105917 - DNA, 30 bp, Artificial Sequence
  Synthetic oligonucleotide
ggtgggagttagagtatacgctggtaagcg

SEQ ID NO: 105918 - DNA, 30 bp, Artificial Sequence
  Synthetic oligonucleotide
cctctacggacagattggcatgtttaagcg

SEQ ID NO: 105919 - DNA, 30 bp, Artificial Sequence
  Synthetic oligonucleotide
tcctcaggtcgggcgccatagctaacagcg

SEQ ID NO: 105920 - DNA, 30 bp, Artificial Sequence
  Synthetic oligonucleotide
tgtcacttgacaaaggatacagttacagcg

SEQ ID NO: 105921 - DNA, 30 bp, Artificial Sequence
  Synthetic oligonucleotide
agctaacatattttaggcacgacaccagcg

SEQ ID NO: 105922 - DNA, 30 bp, Artificial Sequence
  Synthetic oligonucleotide
actagtggcgtgcggtgaaaaaaagcagcg

SEQ ID NO: 105923 - DNA, 30 bp, Artificial Sequence
  Synthetic oligonucleotide
ccagaggagagtaccacggagtgagcagcg

SEQ ID NO: 105924 - DNA, 30 bp, Artificial Sequence
  Synthetic oligonucleotide
gtacgtctcattcgcaggataaaggcagcg

SEQ ID NO: 105925 - DNA, 30 bp, Artificial Sequence
  Synthetic oligonucleotide
gtgttccgtgttggctagtaaggatcagcg

SEQ ID NO: 105926 - DNA, 30 bp, Artificial Sequence
  Synthetic oligonucleotide
aagcgggtgaatctacaagtactctcagcg

SEQ ID NO: 105927 - DNA, 30 bp, Artificial Sequence
  Synthetic oligonucleotide
aaatcgcgagtcggtaatgtgagttcagcg

SEQ ID NO: 105928 - DNA, 30 bp, Artificial Sequence
  Synthetic oligonucleotide
cagtcgtaacgcgacccggaggagagagcg

SEQ ID NO: 105929 - DNA, 30 bp, Artificial Sequence
  Synthetic oligonucleotide
acttgtccgtcggggttctggccgagagcg

SEQ ID NO: 105930 - DNA, 30 bp, Artificial Sequence
  Synthetic oligonucleotide
caatagctccgtgaaggctcggggcgagcg

SEQ ID NO: 105931 - DNA, 30 bp, Artificial Sequence
  Synthetic oligonucleotide
aacgttactgaacggggctcagatcgagcg

SEQ ID NO: 105932 - DNA, 30 bp, Artificial Sequence
  Synthetic oligonucleotide
taaggcgtcgacaatactgcgtagggagcg

SEQ ID NO: 105933 - DNA, 30 bp, Artificial Sequence
  Synthetic oligonucleotide
taatgagaagtagtgcgacgttgtggagcg

SEQ ID NO: 105934 - DNA, 30 bp, Artificial Sequence
  Synthetic oligonucleotide
attggaataacctatttgataagctgagcg

SEQ ID NO: 105935 - DNA, 30 bp, Artificial Sequence
  Synthetic oligonucleotide
ttgaagacacacggcattcctatgtgagcg

SEQ ID NO: 105936 - DNA, 30 bp, Artificial Sequence
  Synthetic oligonucleotide
gtatgagactcgtatggctcagtgtgagcg

SEQ ID NO: 105937 - DNA, 30 bp, Artificial Sequence
  Synthetic oligonucleotide
ataccgaaacgtaaatcgggttgtatagcg

SEQ ID NO: 105938 - DNA, 30 bp, Artificial Sequence
  Synthetic oligonucleotide
cgggaaagaatttttaggcgttttatagcg

SEQ ID NO: 105939 - DNA, 30 bp, Artificial Sequence
  Synthetic oligonucleotide
ctcgcgccgtaagcaataactcagctagcg

SEQ ID NO: 105940 - DNA, 30 bp, Artificial Sequence
  Synthetic oligonucleotide
acggtataggtaccagggctatctctagcg

SEQ ID NO: 105941 - DNA, 30 bp, Artificial Sequence
  Synthetic oligonucleotide
agtcacgtttaatagataattacagtagcg

SEQ ID NO: 105942 - DNA, 30 bp, Artificial Sequence
  Synthetic oligonucleotide
aggaaggatataaataatatttcagtagcg

SEQ ID NO: 105943 - DNA, 30 bp, Artificial Sequence
  Synthetic oligonucleotide
ggcgaattcccccggatcaaactagtagcg

SEQ ID NO: 105944 - DNA, 30 bp, Artificial Sequence
  Synthetic oligonucleotide
aagccatggctctcaggcaaacccgtagcg

SEQ ID NO: 105945 - DNA, 30 bp, Artificial Sequence
  Synthetic oligonucleotide
tatccgagacaggggtgtatgtgggtagcg

SEQ ID NO: 105946 - DNA, 30 bp, Artificial Sequence
  Synthetic oligonucleotide
actgagtctggggatagagtgtcgttagcg

SEQ ID NO: 105947 - DNA, 30 bp, Artificial Sequence
  Synthetic oligonucleotide
caggtctgtgtaccgatgcgtacaaacgcg

SEQ ID NO: 105948 - DNA, 30 bp, Artificial Sequence
  Synthetic oligonucleotide
ttgtaaactgaggagttgaatacgaacgcg

SEQ ID NO: 105949 - DNA, 30 bp, Artificial Sequence
  Synthetic oligonucleotide
tctcgaaatactccgacatctgcgcacgcg

SEQ ID NO: 105950 - DNA, 30 bp, Artificial Sequence
  Synthetic oligonucleotide
gagcgaactacgatcgaatgctatcacgcg

SEQ ID NO: 105951 - DNA, 30 bp, Artificial Sequence
  Synthetic oligonucleotide
tcgcgtcagctccgttaataaactcacgcg

SEQ ID NO: 105952 - DNA, 30 bp, Artificial Sequence
  Synthetic oligonucleotide
acagcaaggcccgtaaacaaagcctacgcg

SEQ ID NO: 105953 - DNA, 30 bp, Artificial Sequence
  Synthetic oligonucleotide
gcatacatttacctacaaaatgcaaccgcg

SEQ ID NO: 105954 - DNA, 30 bp, Artificial Sequence
  Synthetic oligonucleotide
agaacagctgggttgttcgggatcaccgcg

SEQ ID NO: 105955 - DNA, 30 bp, Artificial Sequence
  Synthetic oligonucleotide
ataacgtagttcaaacatgcattctccgcg

SEQ ID NO: 105956 - DNA, 30 bp, Artificial Sequence
  Synthetic oligonucleotide
ctacacaaaggtaagtgtgctcgaagcgcg

SEQ ID NO: 105957 - DNA, 30 bp, Artificial Sequence
  Synthetic oligonucleotide
actagtacataagtggcgtcgctcagcgcg

SEQ ID NO: 105958 - DNA, 29 bp, Artificial Sequence
  Synthetic oligonucleotide
attaggcaccgagacggactcagagcgcg

SEQ ID NO: 105959 - DNA, 30 bp, Artificial Sequence
  Synthetic oligonucleotide
ggcgtactatcgattcattacgctagcgcg

SEQ ID NO: 105960 - DNA, 30 bp, Artificial Sequence
  Synthetic oligonucleotide
gagcgggcgtaagtcagacaaaagggcgcg

SEQ ID NO: 105961 - DNA, 30 bp, Artificial Sequence
  Synthetic oligonucleotide
gacaggtgcccaagtgatgctaagggcgcg

SEQ ID NO: 105962 - DNA, 30 bp, Artificial Sequence
  Synthetic oligonucleotide
cattcggattgtggattgcgtccgggcgcg

SEQ ID NO: 105963 - DNA, 30 bp, Artificial Sequence
  Synthetic oligonucleotide
ctaagcactagtacacttcggtcgggcgcg

SEQ ID NO: 105964 - DNA, 30 bp, Artificial Sequence
  Synthetic oligonucleotide
gtggatatagctacgccgattatgggcgcg

SEQ ID NO: 105965 - DNA, 30 bp, Artificial Sequence
  Synthetic oligonucleotide
cgtaagtcttttgcgtgttcaaatggcgcg

SEQ ID NO: 105966 - DNA, 30 bp, Artificial Sequence
  Synthetic oligonucleotide
taatccccgattgctaaaaagtactgcgcg

SEQ ID NO: 105967 - DNA, 30 bp, Artificial Sequence
  Synthetic oligonucleotide
cagctaaccacagtgaggcgggacatcgcg

SEQ ID NO: 105968 - DNA, 30 bp, Artificial Sequence
  Synthetic oligonucleotide
ttgttgggtggctagatatatcccatcgcg

SEQ ID NO: 105969 - DNA, 30 bp, Artificial Sequence
  Synthetic oligonucleotide
ctaaaggccaactacctctaatgcatcgcg

SEQ ID NO: 105970 - DNA, 30 bp, Artificial Sequence
  Synthetic oligonucleotide
agcgacagcacagtactagggagtatcgcg

SEQ ID NO: 105971 - DNA, 30 bp, Artificial Sequence
  Synthetic oligonucleotide
cctgctaaggtatggatggtagccctcgcg

SEQ ID NO: 105972 - DNA, 30 bp, Artificial Sequence
  Synthetic oligonucleotide
agaagatgaaggagaacgtgttccgtcgcg

SEQ ID NO: 105973 - DNA, 30 bp, Artificial Sequence
  Synthetic oligonucleotide
tagtttgagctgggccaaccgaccttcgcg

SEQ ID NO: 105974 - DNA, 30 bp, Artificial Sequence
  Synthetic oligonucleotide
tttcgtgcgaagaaggaatgtgggttcgcg

SEQ ID NO: 105975 - DNA, 30 bp, Artificial Sequence
  Synthetic oligonucleotide
cgtccactgatctgaaaaccatggttcgcg

SEQ ID NO: 105976 - DNA, 31 bp, Artificial Sequence
  Synthetic oligonucleotide
gaaactgggaaaagctcgacctcgcaaggcg

SEQ ID NO: 105977 - DNA, 30 bp, Artificial Sequence
  Synthetic oligonucleotide
tgtaatggagttaaagcgtattgcgaggcg

SEQ ID NO: 105978 - DNA, 30 bp, Artificial Sequence
  Synthetic oligonucleotide
ctagacgggtcatacatctggagggaggcg

SEQ ID NO: 105979 - DNA, 30 bp, Artificial Sequence
  Synthetic oligonucleotide
ctcgtgaatattgctcctgccgatgaggcg

SEQ ID NO: 105980 - DNA, 30 bp, Artificial Sequence
  Synthetic oligonucleotide
ctataccatacaaagagacttggtgaggcg

SEQ ID NO: 105981 - DNA, 30 bp, Artificial Sequence
  Synthetic oligonucleotide
ttgggacgtttgtattgcgcgcaataggcg

SEQ ID NO: 105982 - DNA, 30 bp, Artificial Sequence
  Synthetic oligonucleotide
taacaatgttaatttcacaaggaataggcg

SEQ ID NO: 105983 - DNA, 30 bp, Artificial Sequence
  Synthetic oligonucleotide
atggaaatgattcatacgcattactaggcg

SEQ ID NO: 105984 - DNA, 30 bp, Artificial Sequence
  Synthetic oligonucleotide
atctcacatgcgcaggttacccggacggcg

SEQ ID NO: 105985 - DNA, 30 bp, Artificial Sequence
  Synthetic oligonucleotide
cgaaactctcagcgcgggtccgtaccggcg

SEQ ID NO: 105986 - DNA, 30 bp, Artificial Sequence
  Synthetic oligonucleotide
gctggatgggtgcaacatacagccccggcg

SEQ ID NO: 105987 - DNA, 30 bp, Artificial Sequence
  Synthetic oligonucleotide
ggcgggaaagatgctgcgcccaatccggcg

SEQ ID NO: 105988 - DNA, 31 bp, Artificial Sequence
  Synthetic oligonucleotide
tgagaggacacgtccgactgttattccggcg

SEQ ID NO: 105989 - DNA, 30 bp, Artificial Sequence
  Synthetic oligonucleotide
tcggataatcattattaccttaaagcggcg

SEQ ID NO: 105990 - DNA, 30 bp, Artificial Sequence
  Synthetic oligonucleotide
aattgaaatcgtaacagcagatttgcggcg

SEQ ID NO: 105991 - DNA, 30 bp, Artificial Sequence
  Synthetic oligonucleotide
ctggcatgtgcaaacggatcttactcggcg

SEQ ID NO: 105992 - DNA, 30 bp, Artificial Sequence
  Synthetic oligonucleotide
gtgctcaagggcccgtgctattcaagggcg

SEQ ID NO: 105993 - DNA, 30 bp, Artificial Sequence
  Synthetic oligonucleotide
cgaattgatgaccttgtgctgtgcagggcg

SEQ ID NO: 105994 - DNA, 30 bp, Artificial Sequence
  Synthetic oligonucleotide
cagagactagctagcacacacatcagggcg

SEQ ID NO: 105995 - DNA, 30 bp, Artificial Sequence
  Synthetic oligonucleotide
cctcgacataggcagagggtatttagggcg

SEQ ID NO: 105996 - DNA, 30 bp, Artificial Sequence
  Synthetic oligonucleotide
aggcataatctgaagtttcctccacgggcg

SEQ ID NO: 105997 - DNA, 30 bp, Artificial Sequence
  Synthetic oligonucleotide
cacaaagggattgtctccgagttgcgggcg

SEQ ID NO: 105998 - DNA, 30 bp, Artificial Sequence
  Synthetic oligonucleotide
taccggttcagttcactcggacatcgggcg

SEQ ID NO: 105999 - DNA, 30 bp, Artificial Sequence
  Synthetic oligonucleotide
cgaactcatgcggctcaaccagtaggggcg

SEQ ID NO: 106000 - DNA, 30 bp, Artificial Sequence
  Synthetic oligonucleotide
gagaagagaggtatcgacgccgccggggcg

SEQ ID NO: 106001 - DNA, 30 bp, Artificial Sequence
  Synthetic oligonucleotide
aaaagagaagtagtgagctcggtcggggcg

SEQ ID NO: 106002 - DNA, 30 bp, Artificial Sequence
  Synthetic oligonucleotide
gcattaactcggagtctgctgccgggggcg

SEQ ID NO: 106003 - DNA, 30 bp, Artificial Sequence
  Synthetic oligonucleotide
ttaggcaccttcaacgatgaccatggggcg

SEQ ID NO: 106004 - DNA, 30 bp, Artificial Sequence
  Synthetic oligonucleotide
atgataaccatatggagattacggtgggcg

SEQ ID NO: 106005 - DNA, 30 bp, Artificial Sequence
  Synthetic oligonucleotide
ttgggttgtcttgtacacaactattgggcg

SEQ ID NO: 106006 - DNA, 30 bp, Artificial Sequence
  Synthetic oligonucleotide
caggcgaatgtaggtgaaagccagctggcg

SEQ ID NO: 106007 - DNA, 30 bp, Artificial Sequence
  Synthetic oligonucleotide
tgtgccaaggtcgattttagtctgctggcg

SEQ ID NO: 106008 - DNA, 30 bp, Artificial Sequence
  Synthetic oligonucleotide
cagggcgctacgggtagtacatttctggcg

SEQ ID NO: 106009 - DNA, 30 bp, Artificial Sequence
  Synthetic oligonucleotide
cccgtcgtggattgaggctagcaagtggcg

SEQ ID NO: 106010 - DNA, 30 bp, Artificial Sequence
  Synthetic oligonucleotide
atgggctagcttttgaaggttttagtggcg

SEQ ID NO: 106011 - DNA, 30 bp, Artificial Sequence
  Synthetic oligonucleotide
tggaggttagcgggatagcggatcgtggcg

SEQ ID NO: 106012 - DNA, 30 bp, Artificial Sequence
  Synthetic oligonucleotide
gcgccgatctctattggctgcgttgtggcg

SEQ ID NO: 106013 - DNA, 30 bp, Artificial Sequence
  Synthetic oligonucleotide
taccactgtcgggagacctgttttgtggcg

SEQ ID NO: 106014 - DNA, 30 bp, Artificial Sequence
  Synthetic oligonucleotide
tttggcgcaaatacagttacagtattggcg

SEQ ID NO: 106015 - DNA, 30 bp, Artificial Sequence
  Synthetic oligonucleotide
gcacccgatgagttacgctgtatcttggcg

SEQ ID NO: 106016 - DNA, 30 bp, Artificial Sequence
  Synthetic oligonucleotide
agaagcgggctgggtacgtgtcatttggcg

SEQ ID NO: 106017 - DNA, 30 bp, Artificial Sequence
  Synthetic oligonucleotide
caaacacatccggatagatgtctaaatgcg

SEQ ID NO: 106018 - DNA, 30 bp, Artificial Sequence
  Synthetic oligonucleotide
ttccacgaaagcctcaacccaagtaatgcg

SEQ ID NO: 106019 - DNA, 30 bp, Artificial Sequence
  Synthetic oligonucleotide
acgtgtcacctgttgacctgaatacatgcg

SEQ ID NO: 106020 - DNA, 30 bp, Artificial Sequence
  Synthetic oligonucleotide
gtaaatggctgtgcattcgttgaccatgcg

SEQ ID NO: 106021 - DNA, 30 bp, Artificial Sequence
  Synthetic oligonucleotide
agtcaatgctacttggcgcacaaagatgcg

SEQ ID NO: 106022 - DNA, 30 bp, Artificial Sequence
  Synthetic oligonucleotide
cgtaggactgcggaataaagtcccgatgcg

SEQ ID NO: 106023 - DNA, 30 bp, Artificial Sequence
  Synthetic oligonucleotide
ccgtaaagatatgcgccacaggaatatgcg

SEQ ID NO: 106024 - DNA, 30 bp, Artificial Sequence
  Synthetic oligonucleotide
gcgcccgaacaaaaaggagtcgattatgcg

SEQ ID NO: 106025 - DNA, 30 bp, Artificial Sequence
  Synthetic oligonucleotide
accgtgaatatggtaacctgagcttatgcg

SEQ ID NO: 106026 - DNA, 30 bp, Artificial Sequence
  Synthetic oligonucleotide
gcgataattcaaaagagttgggccactgcg

SEQ ID NO: 106027 - DNA, 30 bp, Artificial Sequence
  Synthetic oligonucleotide
tagtttatgccacttatcccagagactgcg

SEQ ID NO: 106028 - DNA, 30 bp, Artificial Sequence
  Synthetic oligonucleotide
gagcttgaagaagaatttgcggaccctgcg

SEQ ID NO: 106029 - DNA, 30 bp, Artificial Sequence
  Synthetic oligonucleotide
acagatgcgtagaccgggctgtgagctgcg

SEQ ID NO: 106030 - DNA, 30 bp, Artificial Sequence
  Synthetic oligonucleotide
gaggcatagcggtttgagatgaacgctgcg

SEQ ID NO: 106031 - DNA, 30 bp, Artificial Sequence
  Synthetic oligonucleotide
ctcagaatagtgctccgtaagatggctgcg

SEQ ID NO: 106032 - DNA, 30 bp, Artificial Sequence
  Synthetic oligonucleotide
ggttaaaggcagttcggatttgtaagtgcg

SEQ ID NO: 106033 - DNA, 30 bp, Artificial Sequence
  Synthetic oligonucleotide
aaacaggggcgaagtctctataaaggtgcg

SEQ ID NO: 106034 - DNA, 30 bp, Artificial Sequence
  Synthetic oligonucleotide
tcctgtagacccgcgttggaacggggtgcg

SEQ ID NO: 106035 - DNA, 30 bp, Artificial Sequence
  Synthetic oligonucleotide
ggtgggaaggtacgatggcaccggggtgcg

SEQ ID NO: 106036 - DNA, 30 bp, Artificial Sequence
  Synthetic oligonucleotide
ggtcagtgcgccttaaatataagtggtgcg

SEQ ID NO: 106037 - DNA, 30 bp, Artificial Sequence
  Synthetic oligonucleotide
attcgattccctgcaacaaaataatgtgcg

SEQ ID NO: 106038 - DNA, 30 bp, Artificial Sequence
  Synthetic oligonucleotide
tcgacctagagacccttggccaactgtgcg

SEQ ID NO: 106039 - DNA, 30 bp, Artificial Sequence
  Synthetic oligonucleotide
cggtaggtaggtcatttgccaaagtgtgcg

SEQ ID NO: 106040 - DNA, 30 bp, Artificial Sequence
  Synthetic oligonucleotide
gccgaggatgagagctctgattagtgtgcg

SEQ ID NO: 106041 - DNA, 30 bp, Artificial Sequence
  Synthetic oligonucleotide
gacgaggatgagaaaagtcccattattgcg

SEQ ID NO: 106042 - DNA, 30 bp, Artificial Sequence
  Synthetic oligonucleotide
aacatgaagaggcgttcagggtaagttgcg

SEQ ID NO: 106043 - DNA, 30 bp, Artificial Sequence
  Synthetic oligonucleotide
atcgaccgtgttgtacctacaagcgttgcg

SEQ ID NO: 106044 - DNA, 30 bp, Artificial Sequence
  Synthetic oligonucleotide
tgggaagtgcaaatagaatacatggttgcg

SEQ ID NO: 106045 - DNA, 30 bp, Artificial Sequence
  Synthetic oligonucleotide
agatacaggaggggatggtgggtatttgcg

SEQ ID NO: 106046 - DNA, 30 bp, Artificial Sequence
  Synthetic oligonucleotide
gcttggccagcgtaattgggcatgaaatcg

SEQ ID NO: 106047 - DNA, 30 bp, Artificial Sequence
  Synthetic oligonucleotide
tgatcgtcgggtatagacactctccaatcg

SEQ ID NO: 106048 - DNA, 30 bp, Artificial Sequence
  Synthetic oligonucleotide
agatgagaggcgctggatcggcggcaatcg

SEQ ID NO: 106049 - DNA, 30 bp, Artificial Sequence
  Synthetic oligonucleotide
gcgccaggactataatagttgcttcaatcg

SEQ ID NO: 106050 - DNA, 30 bp, Artificial Sequence
  Synthetic oligonucleotide
agatgtgcagcgtccgaacaccgcgaatcg

SEQ ID NO: 106051 - DNA, 30 bp, Artificial Sequence
  Synthetic oligonucleotide
caagggtggtatcggagcccatcggaatcg

SEQ ID NO: 106052 - DNA, 30 bp, Artificial Sequence
  Synthetic oligonucleotide
agtgtggattccgggaatgtactggaatcg

SEQ ID NO: 106053 - DNA, 30 bp, Artificial Sequence
  Synthetic oligonucleotide
gaagatccccttatatgaaaatatgaatcg

SEQ ID NO: 106054 - DNA, 30 bp, Artificial Sequence
  Synthetic oligonucleotide
caggacgtcaggtgccactagaactaatcg

SEQ ID NO: 106055 - DNA, 30 bp, Artificial Sequence
  Synthetic oligonucleotide
ggcattctagacccgtgtcaaatgtaatcg

SEQ ID NO: 106056 - DNA, 30 bp, Artificial Sequence
  Synthetic oligonucleotide
acgccgatagcatagtcagacagttaatcg

SEQ ID NO: 106057 - DNA, 30 bp, Artificial Sequence
  Synthetic oligonucleotide
ctggaatagacgaactcgtgcgcaacatcg

SEQ ID NO: 106058 - DNA, 30 bp, Artificial Sequence
  Synthetic oligonucleotide
agcgttagtttaagaggaaagtacacatcg

SEQ ID NO: 106059 - DNA, 30 bp, Artificial Sequence
  Synthetic oligonucleotide
gtgtagtaatgcactcaggttaccacatcg

SEQ ID NO: 106060 - DNA, 30 bp, Artificial Sequence
  Synthetic oligonucleotide
catgaatctttagccaagtcagaaccatcg

SEQ ID NO: 106061 - DNA, 30 bp, Artificial Sequence
  Synthetic oligonucleotide
aaaatcgttatgacgtcgttggtaccatcg

SEQ ID NO: 106062 - DNA, 30 bp, Artificial Sequence
  Synthetic oligonucleotide
ggacggaaagagaatacaagcgccgcatcg

SEQ ID NO: 106063 - DNA, 30 bp, Artificial Sequence
  Synthetic oligonucleotide
gaacccaggtggtgcgccctggaggcatcg

SEQ ID NO: 106064 - DNA, 30 bp, Artificial Sequence
  Synthetic oligonucleotide
agaccaaaccgtcacccggccaattcatcg

SEQ ID NO: 106065 - DNA, 30 bp, Artificial Sequence
  Synthetic oligonucleotide
atgctatgcgggaacatatctgctcgatcg

SEQ ID NO: 106066 - DNA, 30 bp, Artificial Sequence
  Synthetic oligonucleotide
tagatagttttgaataactagataggatcg

SEQ ID NO: 106067 - DNA, 30 bp, Artificial Sequence
  Synthetic oligonucleotide
aagtcttaacgggactaacggtgatgatcg

SEQ ID NO: 106068 - DNA, 30 bp, Artificial Sequence
  Synthetic oligonucleotide
aagtttagtgacatgaagccagcctgatcg

SEQ ID NO: 106069 - DNA, 30 bp, Artificial Sequence
  Synthetic oligonucleotide
cctcgggttatgcggggtaattgctgatcg

SEQ ID NO: 106070 - DNA, 30 bp, Artificial Sequence
  Synthetic oligonucleotide
acacctacgggaaaaggaaagcagtgatcg

SEQ ID NO: 106071 - DNA, 30 bp, Artificial Sequence
  Synthetic oligonucleotide
tcaaactattggtcagtcaacccgtgatcg

SEQ ID NO: 106072 - DNA, 30 bp, Artificial Sequence
  Synthetic oligonucleotide
tcgaatctagctatggagacggaaatatcg

SEQ ID NO: 106073 - DNA, 30 bp, Artificial Sequence
  Synthetic oligonucleotide
tgagtaccctctggctcaaggggcatatcg

SEQ ID NO: 106074 - DNA, 30 bp, Artificial Sequence
  Synthetic oligonucleotide
caacgatattcataaactctaatactatcg

SEQ ID NO: 106075 - DNA, 30 bp, Artificial Sequence
  Synthetic oligonucleotide
ctaaatgtgaagggacactgaatagtatcg

SEQ ID NO: 106076 - DNA, 30 bp, Artificial Sequence
  Synthetic oligonucleotide
gacctaagctaatgctgacaagtggtatcg

SEQ ID NO: 106077 - DNA, 30 bp, Artificial Sequence
  Synthetic oligonucleotide
acgttagccgggtgaaatcagcatttatcg

SEQ ID NO: 106078 - DNA, 30 bp, Artificial Sequence
  Synthetic oligonucleotide
aaagttagcccgcctagggagaggaactcg

SEQ ID NO: 106079 - DNA, 30 bp, Artificial Sequence
  Synthetic oligonucleotide
actgtggaggtatagtacgtgtagcactcg

SEQ ID NO: 106080 - DNA, 30 bp, Artificial Sequence
  Synthetic oligonucleotide
tagatagaggcattatgtagccggcactcg

SEQ ID NO: 106081 - DNA, 30 bp, Artificial Sequence
  Synthetic oligonucleotide
aaggacttagaggacgtccacgggcactcg

SEQ ID NO: 106082 - DNA, 30 bp, Artificial Sequence
  Synthetic oligonucleotide
attccatatgaaggatcagtcctgcactcg

SEQ ID NO: 106083 - DNA, 30 bp, Artificial Sequence
  Synthetic oligonucleotide
ttgaagatgcccacataaacgggtcactcg

SEQ ID NO: 106084 - DNA, 30 bp, Artificial Sequence
  Synthetic oligonucleotide
gacagatgtagtaaccaatcgccagactcg

SEQ ID NO: 106085 - DNA, 30 bp, Artificial Sequence
  Synthetic oligonucleotide
cgacaagggtacgctcgctttggagactcg

SEQ ID NO: 106086 - DNA, 30 bp, Artificial Sequence
  Synthetic oligonucleotide
gtccccatgttcataatctaccaggactcg

SEQ ID NO: 106087 - DNA, 30 bp, Artificial Sequence
  Synthetic oligonucleotide
tggtacaactatctcgatttctcctactcg

SEQ ID NO: 106088 - DNA, 30 bp, Artificial Sequence
  Synthetic oligonucleotide
cgcgtttcaacgtcgtgactgcgctactcg

SEQ ID NO: 106089 - DNA, 30 bp, Artificial Sequence
  Synthetic oligonucleotide
gtctatacccgcatacaagcaatgtactcg

SEQ ID NO: 106090 - DNA, 30 bp, Artificial Sequence
  Synthetic oligonucleotide
cagtattcaccacatgatagaggttactcg

SEQ ID NO: 106091 - DNA, 30 bp, Artificial Sequence
  Synthetic oligonucleotide
ccgaccgtgaggacgaacgccgaaacctcg

SEQ ID NO: 106092 - DNA, 30 bp, Artificial Sequence
  Synthetic oligonucleotide
cgagttagccctgggcgagatagaacctcg

SEQ ID NO: 106093 - DNA, 30 bp, Artificial Sequence
  Synthetic oligonucleotide
gcatagaaacgtcgtagttaatgcacctcg

SEQ ID NO: 106094 - DNA, 30 bp, Artificial Sequence
  Synthetic oligonucleotide
gagccttaaacaacgtccattgtcccctcg

SEQ ID NO: 106095 - DNA, 30 bp, Artificial Sequence
  Synthetic oligonucleotide
aaagtgctcgttaagttctcgacatcctcg

SEQ ID NO: 106096 - DNA, 30 bp, Artificial Sequence
  Synthetic oligonucleotide
caacaagcccgcatttaaaagttatcctcg

SEQ ID NO: 106097 - DNA, 30 bp, Artificial Sequence
  Synthetic oligonucleotide
aacgggatcaacgacctgtgattaagctcg

SEQ ID NO: 106098 - DNA, 30 bp, Artificial Sequence
  Synthetic oligonucleotide
agtccactacacctcattaagctcagctcg

SEQ ID NO: 106099 - DNA, 30 bp, Artificial Sequence
  Synthetic oligonucleotide
agataatgcgtagattgggtaggacgctcg

SEQ ID NO: 106100 - DNA, 30 bp, Artificial Sequence
  Synthetic oligonucleotide
ggaaccacagtcgagagatccagaggctcg

SEQ ID NO: 106101 - DNA, 30 bp, Artificial Sequence
  Synthetic oligonucleotide
caccgcggctaagatacccacacctgctcg

SEQ ID NO: 106102 - DNA, 30 bp, Artificial Sequence
  Synthetic oligonucleotide
ccactacgaatccaggtgatatgctgctcg

SEQ ID NO: 106103 - DNA, 30 bp, Artificial Sequence
  Synthetic oligonucleotide
cctcgaaaaagctttcacttttgttgctcg

SEQ ID NO: 106104 - DNA, 30 bp, Artificial Sequence
  Synthetic oligonucleotide
ggaggacgcccttgagcgtcacacatctcg

SEQ ID NO: 106105 - DNA, 30 bp, Artificial Sequence
  Synthetic oligonucleotide
taggatatacaggtggttgtttacatctcg

SEQ ID NO: 106106 - DNA, 30 bp, Artificial Sequence
  Synthetic oligonucleotide
ttgcctgattaggcttcctcaaagatctcg

SEQ ID NO: 106107 - DNA, 30 bp, Artificial Sequence
  Synthetic oligonucleotide
agaatgcgacaacatattcgtgttatctcg

SEQ ID NO: 106108 - DNA, 30 bp, Artificial Sequence
  Synthetic oligonucleotide
aacgttaaagtgaccatgggtgaactctcg

SEQ ID NO: 106109 - DNA, 30 bp, Artificial Sequence
  Synthetic oligonucleotide
aacgcgagatcacagccgtctacactctcg

SEQ ID NO: 106110 - DNA, 30 bp, Artificial Sequence
  Synthetic oligonucleotide
ggggcgtcgtcgatcaaacgacagctctcg

SEQ ID NO: 106111 - DNA, 30 bp, Artificial Sequence
  Synthetic oligonucleotide
tgagtgctcgtgtaaccaaaaagagtctcg

SEQ ID NO: 106112 - DNA, 30 bp, Artificial Sequence
  Synthetic oligonucleotide
gtttgtacaagaatatacgaatccgtctcg

SEQ ID NO: 106113 - DNA, 30 bp, Artificial Sequence
  Synthetic oligonucleotide
gttactagaacagatcacggggagttctcg

SEQ ID NO: 106114 - DNA, 30 bp, Artificial Sequence
  Synthetic oligonucleotide
aacgctaaacccgggtcgtacaacgagtcg

SEQ ID NO: 106115 - DNA, 30 bp, Artificial Sequence
  Synthetic oligonucleotide
cgcttacattgccgttctctgtccgagtcg

SEQ ID NO: 106116 - DNA, 30 bp, Artificial Sequence
  Synthetic oligonucleotide
ctgtaaagaattatgaccttgcctgagtcg

SEQ ID NO: 106117 - DNA, 30 bp, Artificial Sequence
  Synthetic oligonucleotide
tattgtcaaaaagactaaacaggaacgtcg

SEQ ID NO: 106118 - DNA, 30 bp, Artificial Sequence
  Synthetic oligonucleotide
gtcagattcaaattacctcgagggacgtcg

SEQ ID NO: 106119 - DNA, 30 bp, Artificial Sequence
  Synthetic oligonucleotide
catttgcggtgtaaatgattatgaccgtcg

SEQ ID NO: 106120 - DNA, 30 bp, Artificial Sequence
  Synthetic oligonucleotide
atgcagaattaggtcgccgaacgcgcgtcg

SEQ ID NO: 106121 - DNA, 30 bp, Artificial Sequence
  Synthetic oligonucleotide
agcgaggattatctttgtacccaatcgtcg

SEQ ID NO: 106122 - DNA, 29 bp, Artificial Sequence
  Synthetic oligonucleotide
cgtcaccatctcaaatgaggcactcgtcg

SEQ ID NO: 106123 - DNA, 30 bp, Artificial Sequence
  Synthetic oligonucleotide
caccaccgggtcagatgccaagcctcgtcg

SEQ ID NO: 106124 - DNA, 31 bp, Artificial Sequence
  Synthetic oligonucleotide
ttcggttgtctcatacgtcacaagaaggtcg

SEQ ID NO: 106125 - DNA, 30 bp, Artificial Sequence
  Synthetic oligonucleotide
aatggccatgacgaaggtcatgccaggtcg

SEQ ID NO: 106126 - DNA, 30 bp, Artificial Sequence
  Synthetic oligonucleotide
catgcttcagtgagtattggttggaggtcg

SEQ ID NO: 106127 - DNA, 30 bp, Artificial Sequence
  Synthetic oligonucleotide
gtgtaagctaagtactagcagcttaggtcg

SEQ ID NO: 106128 - DNA, 30 bp, Artificial Sequence
  Synthetic oligonucleotide
tatattaagtccacggcaaaatttaggtcg

SEQ ID NO: 106129 - DNA, 30 bp, Artificial Sequence
  Synthetic oligonucleotide
actgcgtgcttgcattcgattaagcggtcg

SEQ ID NO: 106130 - DNA, 30 bp, Artificial Sequence
  Synthetic oligonucleotide
ttactatcaatatagcatcgcccgcggtcg

SEQ ID NO: 106131 - DNA, 30 bp, Artificial Sequence
  Synthetic oligonucleotide
cgaactgactgtccttatagggctcggtcg

SEQ ID NO: 106132 - DNA, 30 bp, Artificial Sequence
  Synthetic oligonucleotide
ctagacgagagtatagtttagatcgggtcg

SEQ ID NO: 106133 - DNA, 30 bp, Artificial Sequence
  Synthetic oligonucleotide
tgacagtagcgtgcggtcgacgaggggtcg

SEQ ID NO: 106134 - DNA, 30 bp, Artificial Sequence
  Synthetic oligonucleotide
gccccgactaggaaaacgcaaagaatgtcg

SEQ ID NO: 106135 - DNA, 30 bp, Artificial Sequence
  Synthetic oligonucleotide
cactcacttaatggggtaatctgaatgtcg

SEQ ID NO: 106136 - DNA, 30 bp, Artificial Sequence
  Synthetic oligonucleotide
gaaggacatgcgtaccggttaattatgtcg

SEQ ID NO: 106137 - DNA, 30 bp, Artificial Sequence
  Synthetic oligonucleotide
actcattcaacggtcaatacataactgtcg

SEQ ID NO: 106138 - DNA, 30 bp, Artificial Sequence
  Synthetic oligonucleotide
aagattttaggtgttcaaatagcactgtcg

SEQ ID NO: 106139 - DNA, 30 bp, Artificial Sequence
  Synthetic oligonucleotide
tgtagactagctataggaagaatactgtcg

SEQ ID NO: 106140 - DNA, 30 bp, Artificial Sequence
  Synthetic oligonucleotide
tttcggtgacgatcggccatcaccctgtcg

SEQ ID NO: 106141 - DNA, 30 bp, Artificial Sequence
  Synthetic oligonucleotide
gaaacgcctaatggtcaccttttgctgtcg

SEQ ID NO: 106142 - DNA, 29 bp, Artificial Sequence
  Synthetic oligonucleotide
cgtacgatatcaattggacgaatctgtcg

SEQ ID NO: 106143 - DNA, 30 bp, Artificial Sequence
  Synthetic oligonucleotide
gctgtagtccggacctaccgttgagtgtcg

SEQ ID NO: 106144 - DNA, 30 bp, Artificial Sequence
  Synthetic oligonucleotide
agctacagggctctcaggggcaccgtgtcg

SEQ ID NO: 106145 - DNA, 30 bp, Artificial Sequence
  Synthetic oligonucleotide
caagcagattactcggctaacaccttgtcg

SEQ ID NO: 106146 - DNA, 30 bp, Artificial Sequence
  Synthetic oligonucleotide
tgacggttgaccctaactgttcggcattcg

SEQ ID NO: 106147 - DNA, 30 bp, Artificial Sequence
  Synthetic oligonucleotide
tctggaaggctcaaggggcggattcattcg

SEQ ID NO: 106148 - DNA, 30 bp, Artificial Sequence
  Synthetic oligonucleotide
gctctcaggatgtgcatacatgcggattcg

SEQ ID NO: 106149 - DNA, 30 bp, Artificial Sequence
  Synthetic oligonucleotide
atacgaggtggctagcccgggtaatattcg

SEQ ID NO: 106150 - DNA, 30 bp, Artificial Sequence
  Synthetic oligonucleotide
gacgggggttgatggtattgacgggcttcg

SEQ ID NO: 106151 - DNA, 30 bp, Artificial Sequence
  Synthetic oligonucleotide
gggcaattcctgggagctaaaaaaagttcg

SEQ ID NO: 106152 - DNA, 30 bp, Artificial Sequence
  Synthetic oligonucleotide
gtagagttgcaaggagaatggcacagttcg

SEQ ID NO: 106153 - DNA, 30 bp, Artificial Sequence
  Synthetic oligonucleotide
caggacagtcttctacgaacaatcagttcg

SEQ ID NO: 106154 - DNA, 30 bp, Artificial Sequence
  Synthetic oligonucleotide
gctcgaccgaggagtcgcatggtcagttcg

SEQ ID NO: 106155 - DNA, 30 bp, Artificial Sequence
  Synthetic oligonucleotide
tatcggactggcagacagcaatggagttcg

SEQ ID NO: 106156 - DNA, 30 bp, Artificial Sequence
  Synthetic oligonucleotide
gtaccatcccaatcatatgtgcgtcgttcg

SEQ ID NO: 106157 - DNA, 30 bp, Artificial Sequence
  Synthetic oligonucleotide
aaagacttaagtcatgaccgtaggtgttcg

SEQ ID NO: 106158 - DNA, 30 bp, Artificial Sequence
  Synthetic oligonucleotide
tccagtaccggaccaccaatcaattgttcg

SEQ ID NO: 106159 - DNA, 30 bp, Artificial Sequence
  Synthetic oligonucleotide
gggcgccaactagcgcacgggactatttcg

SEQ ID NO: 106160 - DNA, 30 bp, Artificial Sequence
  Synthetic oligonucleotide
gatcaaccgggcggcaaatcctagctttcg

SEQ ID NO: 106161 - DNA, 30 bp, Artificial Sequence
  Synthetic oligonucleotide
ggcgagatgaagggctacagctagctttcg

SEQ ID NO: 106162 - DNA, 30 bp, Artificial Sequence
  Synthetic oligonucleotide
aggacagttacaagtcatccatacgtttcg

SEQ ID NO: 106163 - DNA, 30 bp, Artificial Sequence
  Synthetic oligonucleotide
acgaattaagtggttagtagactcttttcg

SEQ ID NO: 106164 - DNA, 30 bp, Artificial Sequence
  Synthetic oligonucleotide
tcgtgcaccgtgtgtattaaggtgttttcg

SEQ ID NO: 106165 - DNA, 31 bp, Artificial Sequence
  Synthetic oligonucleotide
tcagccctctatatcggacatgtgtttttcg

SEQ ID NO: 106166 - DNA, 30 bp, Artificial Sequence
  Synthetic oligonucleotide
aagtccagatccgaacaccgcatcaaaagg

SEQ ID NO: 106167 - DNA, 30 bp, Artificial Sequence
  Synthetic oligonucleotide
accaggttagggctagtaaataataaaagg

SEQ ID NO: 106168 - DNA, 30 bp, Artificial Sequence
  Synthetic oligonucleotide
gtgaggcgacgtattgactattataaaagg

SEQ ID NO: 106169 - DNA, 30 bp, Artificial Sequence
  Synthetic oligonucleotide
cggaaagcgatgcggagttggtgacaaagg

SEQ ID NO: 106170 - DNA, 30 bp, Artificial Sequence
  Synthetic oligonucleotide
ctgctacatgaaattgtttttgtacaaagg

SEQ ID NO: 106171 - DNA, 30 bp, Artificial Sequence
  Synthetic oligonucleotide
taacgtaattcaattctcacgctggaaagg

SEQ ID NO: 106172 - DNA, 30 bp, Artificial Sequence
  Synthetic oligonucleotide
tacttagcattcctacactaacactaaagg

SEQ ID NO: 106173 - DNA, 30 bp, Artificial Sequence
  Synthetic oligonucleotide
agcttaatcttaggctgaatagtgtaaagg

SEQ ID NO: 106174 - DNA, 30 bp, Artificial Sequence
  Synthetic oligonucleotide
aagggggtgttacctcttaacggttaaagg

SEQ ID NO: 106175 - DNA, 30 bp, Artificial Sequence
  Synthetic oligonucleotide
acgagcactcagaggatggatatttaaagg

SEQ ID NO: 106176 - DNA, 30 bp, Artificial Sequence
  Synthetic oligonucleotide
atggcactctggtgtaagcccaaaacaagg

SEQ ID NO: 106177 - DNA, 30 bp, Artificial Sequence
  Synthetic oligonucleotide
agcgacggtcaatccgcggcggaaacaagg

SEQ ID NO: 106178 - DNA, 30 bp, Artificial Sequence
  Synthetic oligonucleotide
ctgggtgaaaggtgaaatgctaagccaagg

SEQ ID NO: 106179 - DNA, 30 bp, Artificial Sequence
  Synthetic oligonucleotide
cgcgaccatcacaaataatctggtccaagg

SEQ ID NO: 106180 - DNA, 30 bp, Artificial Sequence
  Synthetic oligonucleotide
gacacggttgagacttcaccaaatgcaagg

SEQ ID NO: 106181 - DNA, 30 bp, Artificial Sequence
  Synthetic oligonucleotide
tgtgtgggacgttgcggcccatatgcaagg

SEQ ID NO: 106182 - DNA, 30 bp, Artificial Sequence
  Synthetic oligonucleotide
cacgtttcgtaggcattaggtggtgcaagg

SEQ ID NO: 106183 - DNA, 30 bp, Artificial Sequence
  Synthetic oligonucleotide
atgagagttggacccgtaaatgaatcaagg

SEQ ID NO: 106184 - DNA, 30 bp, Artificial Sequence
  Synthetic oligonucleotide
aaaccggttcatctcaaggcggagtcaagg

SEQ ID NO: 106185 - DNA, 30 bp, Artificial Sequence
  Synthetic oligonucleotide
tcgacagcgagtggggataacttaagaagg

SEQ ID NO: 106186 - DNA, 30 bp, Artificial Sequence
  Synthetic oligonucleotide
gccaccgcgcccaagcatggtgccagaagg

SEQ ID NO: 106187 - DNA, 30 bp, Artificial Sequence
  Synthetic oligonucleotide
tacccaaaagaaccgatggcatggcgaagg

SEQ ID NO: 106188 - DNA, 30 bp, Artificial Sequence
  Synthetic oligonucleotide
cattcaatcatcgctttccgggacggaagg

SEQ ID NO: 106189 - DNA, 30 bp, Artificial Sequence
  Synthetic oligonucleotide
gtcatcgatccatatcgtttcggcggaagg

SEQ ID NO: 106190 - DNA, 30 bp, Artificial Sequence
  Synthetic oligonucleotide
gctacaaagttaggcttgtgtctcggaagg

SEQ ID NO: 106191 - DNA, 30 bp, Artificial Sequence
  Synthetic oligonucleotide
cgctcaggagtgcaagccgggttatgaagg

SEQ ID NO: 106192 - DNA, 30 bp, Artificial Sequence
  Synthetic oligonucleotide
cactggtaagtgaatttctctccctgaagg

SEQ ID NO: 106193 - DNA, 30 bp, Artificial Sequence
  Synthetic oligonucleotide
ccaccagtgccatgcattagagcgtgaagg

SEQ ID NO: 106194 - DNA, 30 bp, Artificial Sequence
  Synthetic oligonucleotide
gctatcttagcctctttggagatgtgaagg

SEQ ID NO: 106195 - DNA, 30 bp, Artificial Sequence
  Synthetic oligonucleotide
tttacgttggccatgtataacaaaataagg

SEQ ID NO: 106196 - DNA, 30 bp, Artificial Sequence
  Synthetic oligonucleotide
ctgtccaccatcacgaccctcgtcctaagg

SEQ ID NO: 106197 - DNA, 30 bp, Artificial Sequence
  Synthetic oligonucleotide
aacgcaacctcgacgaagccggatctaagg

SEQ ID NO: 106198 - DNA, 30 bp, Artificial Sequence
  Synthetic oligonucleotide
cgtctaaatccttgcaacgtgcgcgtaagg

SEQ ID NO: 106199 - DNA, 30 bp, Artificial Sequence
  Synthetic oligonucleotide
gtgcaattaaagatccgtgctatcgtaagg

SEQ ID NO: 106200 - DNA, 30 bp, Artificial Sequence
  Synthetic oligonucleotide
atgttatgccgcaatcagaagaatgtaagg

SEQ ID NO: 106201 - DNA, 30 bp, Artificial Sequence
  Synthetic oligonucleotide
tggcaacccggttcgtaagagagattaagg

SEQ ID NO: 106202 - DNA, 30 bp, Artificial Sequence
  Synthetic oligonucleotide
aatcgaggaggagggaggtaagggttaagg

SEQ ID NO: 106203 - DNA, 30 bp, Artificial Sequence
  Synthetic oligonucleotide
acagtcaccgatattgacttggggaacagg

SEQ ID NO: 106204 - DNA, 30 bp, Artificial Sequence
  Synthetic oligonucleotide
ctgcctcgtaggattcgatctttgaacagg

SEQ ID NO: 106205 - DNA, 30 bp, Artificial Sequence
  Synthetic oligonucleotide
agtggccacgtgtcatgctcgcgtaacagg

SEQ ID NO: 106206 - DNA, 30 bp, Artificial Sequence
  Synthetic oligonucleotide
tcctcctatacgcaccggaggcgtaacagg

SEQ ID NO: 106207 - DNA, 30 bp, Artificial Sequence
  Synthetic oligonucleotide
cgtgtgcgaggttatgcaacttttaacagg

SEQ ID NO: 106208 - DNA, 30 bp, Artificial Sequence
  Synthetic oligonucleotide
attaagccgtagggaaactcaagcgacagg

SEQ ID NO: 106209 - DNA, 30 bp, Artificial Sequence
  Synthetic oligonucleotide
ggtgcaaactggggaaacccataatacagg

SEQ ID NO: 106210 - DNA, 30 bp, Artificial Sequence
  Synthetic oligonucleotide
tctataaactgtgcttacactacatacagg

SEQ ID NO: 106211 - DNA, 30 bp, Artificial Sequence
  Synthetic oligonucleotide
gtctgtgcgtctaggcggtattcgtacagg

SEQ ID NO: 106212 - DNA, 30 bp, Artificial Sequence
  Synthetic oligonucleotide
actagacttaattaatgcctgccttacagg

SEQ ID NO: 106213 - DNA, 30 bp, Artificial Sequence
  Synthetic oligonucleotide
gggatccttaacgtgtaatttcgaaccagg

SEQ ID NO: 106214 - DNA, 30 bp, Artificial Sequence
  Synthetic oligonucleotide
agcgtaaccccagtgttgtggggaaccagg

SEQ ID NO: 106215 - DNA, 29 bp, Artificial Sequence
  Synthetic oligonucleotide
gggatgatcaatggtcacttcagaccagg

SEQ ID NO: 106216 - DNA, 30 bp, Artificial Sequence
  Synthetic oligonucleotide
gagatcacgttcgtcctgcgatggaccagg

SEQ ID NO: 106217 - DNA, 30 bp, Artificial Sequence
  Synthetic oligonucleotide
caagggatacgggacatccaaatgaccagg

SEQ ID NO: 106218 - DNA, 30 bp, Artificial Sequence
  Synthetic oligonucleotide
cccgcggcaattaaaatatgccaccccagg

SEQ ID NO: 106219 - DNA, 30 bp, Artificial Sequence
  Synthetic oligonucleotide
atgaaaggtggcgtgcgcgagtcagccagg

SEQ ID NO: 106220 - DNA, 30 bp, Artificial Sequence
  Synthetic oligonucleotide
ggccgataaccgtagacttggaacgccagg

SEQ ID NO: 106221 - DNA, 30 bp, Artificial Sequence
  Synthetic oligonucleotide
ggtgtcgcgcgagggggccgccacgccagg

SEQ ID NO: 106222 - DNA, 30 bp, Artificial Sequence
  Synthetic oligonucleotide
accaaagataaaggatataaaaaggccagg

SEQ ID NO: 106223 - DNA, 30 bp, Artificial Sequence
  Synthetic oligonucleotide
gagcgggtgaaagcctttctgtcggccagg

SEQ ID NO: 106224 - DNA, 30 bp, Artificial Sequence
  Synthetic oligonucleotide
accggcagtcattactaagtgagggccagg

SEQ ID NO: 106225 - DNA, 30 bp, Artificial Sequence
  Synthetic oligonucleotide
agaacggtgtatgtttgacggctatccagg

SEQ ID NO: 106226 - DNA, 30 bp, Artificial Sequence
  Synthetic oligonucleotide
caagacggccaccgtgtcagggtatccagg

SEQ ID NO: 106227 - DNA, 30 bp, Artificial Sequence
  Synthetic oligonucleotide
agtcctgtccagaatcaatacaggtccagg

SEQ ID NO: 106228 - DNA, 30 bp, Artificial Sequence
  Synthetic oligonucleotide
tggcgaactgtcgaagtttacgccagcagg

SEQ ID NO: 106229 - DNA, 30 bp, Artificial Sequence
  Synthetic oligonucleotide
ggaaaataagaagtaagcatggtcagcagg

SEQ ID NO: 106230 - DNA, 30 bp, Artificial Sequence
  Synthetic oligonucleotide
tcaaggcaataagaaagtgatcatagcagg

SEQ ID NO: 106231 - DNA, 30 bp, Artificial Sequence
  Synthetic oligonucleotide
acgtgggtaggatcgagcgtttgtagcagg

SEQ ID NO: 106232 - DNA, 30 bp, Artificial Sequence
  Synthetic oligonucleotide
caattactgttgtaattcgtaactggcagg

SEQ ID NO: 106233 - DNA, 30 bp, Artificial Sequence
  Synthetic oligonucleotide
catcggtacctaattgtaaaacgtggcagg

SEQ ID NO: 106234 - DNA, 30 bp, Artificial Sequence
  Synthetic oligonucleotide
aggtcctccgctttagcgggaattggcagg

SEQ ID NO: 106235 - DNA, 30 bp, Artificial Sequence
  Synthetic oligonucleotide
ccgggagagagatacagtccattatgcagg

SEQ ID NO: 106236 - DNA, 30 bp, Artificial Sequence
  Synthetic oligonucleotide
gcctttaaccacgatatacccagctgcagg

SEQ ID NO: 106237 - DNA, 30 bp, Artificial Sequence
  Synthetic oligonucleotide
cagagtaagacgcgcgcaatagagatcagg

SEQ ID NO: 106238 - DNA, 30 bp, Artificial Sequence
  Synthetic oligonucleotide
cgtgatacctagggctcttacaggatcagg

SEQ ID NO: 106239 - DNA, 30 bp, Artificial Sequence
  Synthetic oligonucleotide
cttgaaaagattgccgataggtgtatcagg

SEQ ID NO: 106240 - DNA, 30 bp, Artificial Sequence
  Synthetic oligonucleotide
tggctaaggccacggatctcgcacctcagg

SEQ ID NO: 106241 - DNA, 30 bp, Artificial Sequence
  Synthetic oligonucleotide
cgacccgtcgcgaaggcttaggaattcagg

SEQ ID NO: 106242 - DNA, 30 bp, Artificial Sequence
  Synthetic oligonucleotide
tagggggaggttcctgtttgaaacttcagg

SEQ ID NO: 106243 - DNA, 30 bp, Artificial Sequence
  Synthetic oligonucleotide
cgcggtccgtgtatcgaactagccttcagg

SEQ ID NO: 106244 - DNA, 30 bp, Artificial Sequence
  Synthetic oligonucleotide
ggcgaggatcaaaaaggtactctgttcagg

SEQ ID NO: 106245 - DNA, 30 bp, Artificial Sequence
  Synthetic oligonucleotide
ccctgaaaagccgccgggcaaagaaagagg

SEQ ID NO: 106246 - DNA, 30 bp, Artificial Sequence
  Synthetic oligonucleotide
agtacgacttattgtttagtatgaaagagg

SEQ ID NO: 106247 - DNA, 30 bp, Artificial Sequence
  Synthetic oligonucleotide
gaatcaaggacttgccaccagtgaaagagg

SEQ ID NO: 106248 - DNA, 31 bp, Artificial Sequence
  Synthetic oligonucleotide
tctgcatcgtgtaaaagtcgtaagcaagagg

SEQ ID NO: 106249 - DNA, 30 bp, Artificial Sequence
  Synthetic oligonucleotide
cagggagggtcggagttggttacgaagagg

SEQ ID NO: 106250 - DNA, 30 bp, Artificial Sequence
  Synthetic oligonucleotide
tgtactagaatcgcgataagagggaagagg

SEQ ID NO: 106251 - DNA, 30 bp, Artificial Sequence
  Synthetic oligonucleotide
gttcaacgtaatcaatacgcatggaagagg

SEQ ID NO: 106252 - DNA, 30 bp, Artificial Sequence
  Synthetic oligonucleotide
tgggagtccattgataaaagcaataagagg

SEQ ID NO: 106253 - DNA, 30 bp, Artificial Sequence
  Synthetic oligonucleotide
tagaatggtagcaatagggtatataagagg

SEQ ID NO: 106254 - DNA, 30 bp, Artificial Sequence
  Synthetic oligonucleotide
tgccgctcgcatatgaaattaaaggagagg

SEQ ID NO: 106255 - DNA, 31 bp, Artificial Sequence
  Synthetic oligonucleotide
gtcggttcgaacggagggcaggcactagagg

SEQ ID NO: 106256 - DNA, 30 bp, Artificial Sequence
  Synthetic oligonucleotide
ggacgggacgccaaagtggagtactagagg

SEQ ID NO: 106257 - DNA, 30 bp, Artificial Sequence
  Synthetic oligonucleotide
ggcgatcagagagcactgaaaacgtagagg

SEQ ID NO: 106258 - DNA, 30 bp, Artificial Sequence
  Synthetic oligonucleotide
ataacatacacggagaatcggatttagagg

SEQ ID NO: 106259 - DNA, 30 bp, Artificial Sequence
  Synthetic oligonucleotide
accaggcagatagacgcaattcacacgagg

SEQ ID NO: 106260 - DNA, 29 bp, Artificial Sequence
  Synthetic oligonucleotide
agggcgtaggcaacaatttgcatacgagg

SEQ ID NO: 106261 - DNA, 30 bp, Artificial Sequence
  Synthetic oligonucleotide
gatagcatagatcgtagcctgactacgagg

SEQ ID NO: 106262 - DNA, 30 bp, Artificial Sequence
  Synthetic oligonucleotide
atgctccaatcctaaaccttggacccgagg

SEQ ID NO: 106263 - DNA, 30 bp, Artificial Sequence
  Synthetic oligonucleotide
cagttcaacacgaggctacaactgccgagg

SEQ ID NO: 106264 - DNA, 30 bp, Artificial Sequence
  Synthetic oligonucleotide
taaatgtcctattgacacacgggcgcgagg

SEQ ID NO: 106265 - DNA, 30 bp, Artificial Sequence
  Synthetic oligonucleotide
aagccgcagatcatgtgcggtacggcgagg

SEQ ID NO: 106266 - DNA, 30 bp, Artificial Sequence
  Synthetic oligonucleotide
ggtagcatacacgatcagccttgggcgagg

SEQ ID NO: 106267 - DNA, 30 bp, Artificial Sequence
  Synthetic oligonucleotide
agggataggccattggccaaaatggcgagg

SEQ ID NO: 106268 - DNA, 30 bp, Artificial Sequence
  Synthetic oligonucleotide
gcacttagtcttaaagatggctcgtcgagg

SEQ ID NO: 106269 - DNA, 30 bp, Artificial Sequence
  Synthetic oligonucleotide
ttcccaaaccggtgggcgatcctgtcgagg

SEQ ID NO: 106270 - DNA, 30 bp, Artificial Sequence
  Synthetic oligonucleotide
tcgcgggagatcttgagtggtacttcgagg

SEQ ID NO: 106271 - DNA, 30 bp, Artificial Sequence
  Synthetic oligonucleotide
tgataaggcctgtaaagtgttaaaaggagg

SEQ ID NO: 106272 - DNA, 30 bp, Artificial Sequence
  Synthetic oligonucleotide
ccaaacgatctgattcacgtgcaaaggagg

SEQ ID NO: 106273 - DNA, 30 bp, Artificial Sequence
  Synthetic oligonucleotide
ggagcgtgtcaaagacggcggagaaggagg

SEQ ID NO: 106274 - DNA, 30 bp, Artificial Sequence
  Synthetic oligonucleotide
attatgagcggcgaccagacggaacggagg

SEQ ID NO: 106275 - DNA, 30 bp, Artificial Sequence
  Synthetic oligonucleotide
cgtggagcgacgtgatccattagacggagg

SEQ ID NO: 106276 - DNA, 30 bp, Artificial Sequence
  Synthetic oligonucleotide
ggatggtctaacttttatttcttacggagg

SEQ ID NO: 106277 - DNA, 30 bp, Artificial Sequence
  Synthetic oligonucleotide
gaccttggtacacatctaacgtgtcggagg

SEQ ID NO: 106278 - DNA, 30 bp, Artificial Sequence
  Synthetic oligonucleotide
cccaggtggggatgcaagctgattcggagg

SEQ ID NO: 106279 - DNA, 30 bp, Artificial Sequence
  Synthetic oligonucleotide
tcagtgcccgttcagttctgtgttcggagg

SEQ ID NO: 106280 - DNA, 30 bp, Artificial Sequence
  Synthetic oligonucleotide
agggacatctgaggttcatccgtggggagg

SEQ ID NO: 106281 - DNA, 30 bp, Artificial Sequence
  Synthetic oligonucleotide
taagaagcttagtgcgtaaacgcatggagg

SEQ ID NO: 106282 - DNA, 30 bp, Artificial Sequence
  Synthetic oligonucleotide
ggcggagtgatgacctcatgggtctggagg

SEQ ID NO: 106283 - DNA, 30 bp, Artificial Sequence
  Synthetic oligonucleotide
tcaaatagcggaaggaaattctattggagg

SEQ ID NO: 106284 - DNA, 30 bp, Artificial Sequence
  Synthetic oligonucleotide
ctcgaccgaagccgactcatctgttggagg

SEQ ID NO: 106285 - DNA, 30 bp, Artificial Sequence
  Synthetic oligonucleotide
ttgaaatgccgaatttaccgtaatctgagg

SEQ ID NO: 106286 - DNA, 30 bp, Artificial Sequence
  Synthetic oligonucleotide
cattgtcaaaagtattccacaaacgtgagg

SEQ ID NO: 106287 - DNA, 30 bp, Artificial Sequence
  Synthetic oligonucleotide
acgaagagaccaaaacccagtgaattgagg

SEQ ID NO: 106288 - DNA, 30 bp, Artificial Sequence
  Synthetic oligonucleotide
agtggattttccaaccacaagaacttgagg

SEQ ID NO: 106289 - DNA, 30 bp, Artificial Sequence
  Synthetic oligonucleotide
cgaagcatgtgcgatgggggaggcttgagg

SEQ ID NO: 106290 - DNA, 30 bp, Artificial Sequence
  Synthetic oligonucleotide
agaagggaatgttatgagtgaaggttgagg

SEQ ID NO: 106291 - DNA, 30 bp, Artificial Sequence
  Synthetic oligonucleotide
aatgccgctttaactctgggagctttgagg

SEQ ID NO: 106292 - DNA, 30 bp, Artificial Sequence
  Synthetic oligonucleotide
aaacgtggacattaaggtatacgtttgagg

SEQ ID NO: 106293 - DNA, 30 bp, Artificial Sequence
  Synthetic oligonucleotide
gatatgcggtgcagaatactccaaaatagg

SEQ ID NO: 106294 - DNA, 30 bp, Artificial Sequence
  Synthetic oligonucleotide
agtgacaccaagtagtatttaggaaatagg

SEQ ID NO: 106295 - DNA, 30 bp, Artificial Sequence
  Synthetic oligonucleotide
gtgggtcttggtccccagtgaataaatagg

SEQ ID NO: 106296 - DNA, 30 bp, Artificial Sequence
  Synthetic oligonucleotide
tgtgggagtactcaaccaagcgcgaatagg

SEQ ID NO: 106297 - DNA, 30 bp, Artificial Sequence
  Synthetic oligonucleotide
aagtacgttgtcccgcacgtgaataatagg

SEQ ID NO: 106298 - DNA, 30 bp, Artificial Sequence
  Synthetic oligonucleotide
tacgagagtcgtgaataggttcgacatagg

SEQ ID NO: 106299 - DNA, 30 bp, Artificial Sequence
  Synthetic oligonucleotide
gacgaacatgccggacggacaatacatagg

SEQ ID NO: 106300 - DNA, 30 bp, Artificial Sequence
  Synthetic oligonucleotide
gcgatgttaatctgcaaacgagagcatagg

SEQ ID NO: 106301 - DNA, 30 bp, Artificial Sequence
  Synthetic oligonucleotide
cgaatgggttttacggaaaatgggcatagg

SEQ ID NO: 106302 - DNA, 30 bp, Artificial Sequence
  Synthetic oligonucleotide
agagctacgcgcttgcccattaatcatagg

SEQ ID NO: 106303 - DNA, 30 bp, Artificial Sequence
  Synthetic oligonucleotide
atctatgaagggcgtcacggttgtcatagg

SEQ ID NO: 106304 - DNA, 30 bp, Artificial Sequence
  Synthetic oligonucleotide
cgtcggaaaatcgcttgattaattcatagg

SEQ ID NO: 106305 - DNA, 30 bp, Artificial Sequence
  Synthetic oligonucleotide
cttcaaaagaccagacttcactttcatagg

SEQ ID NO: 106306 - DNA, 30 bp, Artificial Sequence
  Synthetic oligonucleotide
tacggagatacgtatgaggtaaaagatagg

SEQ ID NO: 106307 - DNA, 30 bp, Artificial Sequence
  Synthetic oligonucleotide
ccggagtgaactaaaatctaaaccgatagg

SEQ ID NO: 106308 - DNA, 30 bp, Artificial Sequence
  Synthetic oligonucleotide
ccgataaagaaaatgtttcaagaggatagg

SEQ ID NO: 106309 - DNA, 30 bp, Artificial Sequence
  Synthetic oligonucleotide
gctgagcgagatttggagaccagggatagg

SEQ ID NO: 106310 - DNA, 30 bp, Artificial Sequence
  Synthetic oligonucleotide
cctggacactacagtattatcatggatagg

SEQ ID NO: 106311 - DNA, 30 bp, Artificial Sequence
  Synthetic oligonucleotide
attcatgcctaccagaatgaaagaactagg

SEQ ID NO: 106312 - DNA, 30 bp, Artificial Sequence
  Synthetic oligonucleotide
ccggacgttgtgacgggggtgggacctagg

SEQ ID NO: 106313 - DNA, 30 bp, Artificial Sequence
  Synthetic oligonucleotide
cttcagcaaattgcaagcgtactacctagg

SEQ ID NO: 106314 - DNA, 30 bp, Artificial Sequence
  Synthetic oligonucleotide
tcaagaccgcgtcgctacgatgatcctagg

SEQ ID NO: 106315 - DNA, 30 bp, Artificial Sequence
  Synthetic oligonucleotide
tggtactatgatcggaatttggaagctagg

SEQ ID NO: 106316 - DNA, 30 bp, Artificial Sequence
  Synthetic oligonucleotide
tgtgaatcacggtagactacgagagctagg

SEQ ID NO: 106317 - DNA, 30 bp, Artificial Sequence
  Synthetic oligonucleotide
atgtggtgctcatgatggcgaaatgctagg

SEQ ID NO: 106318 - DNA, 30 bp, Artificial Sequence
  Synthetic oligonucleotide
cattgtgggtccgtgtgtagctttgctagg

SEQ ID NO: 106319 - DNA, 30 bp, Artificial Sequence
  Synthetic oligonucleotide
cgtacgtgcaaccgaaaagatgtacgtagg

SEQ ID NO: 106320 - DNA, 30 bp, Artificial Sequence
  Synthetic oligonucleotide
caaagacatgttcgctaggagccccgtagg

SEQ ID NO: 106321 - DNA, 30 bp, Artificial Sequence
  Synthetic oligonucleotide
aggcgattgtcgcgagaccataccggtagg

SEQ ID NO: 106322 - DNA, 30 bp, Artificial Sequence
  Synthetic oligonucleotide
taggacacatcatgtatgcttgggtgtagg

SEQ ID NO: 106323 - DNA, 31 bp, Artificial Sequence
  Synthetic oligonucleotide
ggcctgtggaattaaaacatctctgtgtagg

SEQ ID NO: 106324 - DNA, 30 bp, Artificial Sequence
  Synthetic oligonucleotide
cggcgcagatgcgtccgctacctgattagg

SEQ ID NO: 106325 - DNA, 30 bp, Artificial Sequence
  Synthetic oligonucleotide
ggaatgggagcatccggttcggatattagg

SEQ ID NO: 106326 - DNA, 30 bp, Artificial Sequence
  Synthetic oligonucleotide
cctacaagtgttataggtcgctctattagg

SEQ ID NO: 106327 - DNA, 30 bp, Artificial Sequence
  Synthetic oligonucleotide
tttcgagggaaaaggtataactgacttagg

SEQ ID NO: 106328 - DNA, 30 bp, Artificial Sequence
  Synthetic oligonucleotide
agcgcattccgtgacactatggtggttagg

SEQ ID NO: 106329 - DNA, 30 bp, Artificial Sequence
  Synthetic oligonucleotide
atgtacatcccaacatggggccggtttagg

SEQ ID NO: 106330 - DNA, 30 bp, Artificial Sequence
  Synthetic oligonucleotide
tcaacaagaaaaggctcagcgcggtttagg

SEQ ID NO: 106331 - DNA, 30 bp, Artificial Sequence
  Synthetic oligonucleotide
gcgctacagaaacccgtgggttattttagg

SEQ ID NO: 106332 - DNA, 30 bp, Artificial Sequence
  Synthetic oligonucleotide
ctgtaatagatcggcgagataaccaaacgg

SEQ ID NO: 106333 - DNA, 30 bp, Artificial Sequence
  Synthetic oligonucleotide
cggcattacgcgagaaggctagggaaacgg

SEQ ID NO: 106334 - DNA, 30 bp, Artificial Sequence
  Synthetic oligonucleotide
tacccttgggaatcctgaaccgggaaacgg

SEQ ID NO: 106335 - DNA, 30 bp, Artificial Sequence
  Synthetic oligonucleotide
tcgtaataactacatgttcggatgaaacgg

SEQ ID NO: 106336 - DNA, 30 bp, Artificial Sequence
  Synthetic oligonucleotide
tacagagaaaaatcagacggaggtaaacgg

SEQ ID NO: 106337 - DNA, 30 bp, Artificial Sequence
  Synthetic oligonucleotide
ggataccattgcgagtatattagacaacgg

SEQ ID NO: 106338 - DNA, 30 bp, Artificial Sequence
  Synthetic oligonucleotide
caccaccagcaacgacattggtctcaacgg

SEQ ID NO: 106339 - DNA, 30 bp, Artificial Sequence
  Synthetic oligonucleotide
aagggataaggcaggcggttgtctgaacgg

SEQ ID NO: 106340 - DNA, 30 bp, Artificial Sequence
  Synthetic oligonucleotide
tctaaaaaatggcacgtagttcgaacacgg

SEQ ID NO: 106341 - DNA, 30 bp, Artificial Sequence
  Synthetic oligonucleotide
tacacacatagccacattattaccacacgg

SEQ ID NO: 106342 - DNA, 30 bp, Artificial Sequence
  Synthetic oligonucleotide
gaaaggctaacagcataaatacctacacgg

SEQ ID NO: 106343 - DNA, 30 bp, Artificial Sequence
  Synthetic oligonucleotide
ccaaattccagaggtcaaatcaaatcacgg

SEQ ID NO: 106344 - DNA, 30 bp, Artificial Sequence
  Synthetic oligonucleotide
gttgcgaagatgtaagaagcattatcacgg

SEQ ID NO: 106345 - DNA, 30 bp, Artificial Sequence
  Synthetic oligonucleotide
agggttatgctggcacaacggcattcacgg

SEQ ID NO: 106346 - DNA, 31 bp, Artificial Sequence
  Synthetic oligonucleotide
gaaagtaacaaataagacacaggaaagacgg

SEQ ID NO: 106347 - DNA, 30 bp, Artificial Sequence
  Synthetic oligonucleotide
agaatccataaggcaacggctggaagacgg

SEQ ID NO: 106348 - DNA, 30 bp, Artificial Sequence
  Synthetic oligonucleotide
acatacatgaggtcgtggacgtagagacgg

SEQ ID NO: 106349 - DNA, 30 bp, Artificial Sequence
  Synthetic oligonucleotide
cagaacaagataggctaggcggccggacgg

SEQ ID NO: 106350 - DNA, 30 bp, Artificial Sequence
  Synthetic oligonucleotide
caaggatatgtgcgtgcacatgaatgacgg

SEQ ID NO: 106351 - DNA, 30 bp, Artificial Sequence
  Synthetic oligonucleotide
ggagggcgtaggtgactggtgagctgacgg

SEQ ID NO: 106352 - DNA, 30 bp, Artificial Sequence
  Synthetic oligonucleotide
aggggcgtggtaaatgagtcttcgtgacgg

SEQ ID NO: 106353 - DNA, 30 bp, Artificial Sequence
  Synthetic oligonucleotide
aggtttgccacacaatgtactcggtgacgg

SEQ ID NO: 106354 - DNA, 30 bp, Artificial Sequence
  Synthetic oligonucleotide
ttggccgcaataagatgaataaccatacgg

SEQ ID NO: 106355 - DNA, 30 bp, Artificial Sequence
  Synthetic oligonucleotide
tcagagaaacagaagcctcttcgcatacgg

SEQ ID NO: 106356 - DNA, 30 bp, Artificial Sequence
  Synthetic oligonucleotide
gacgaatggggtcagttcgcgagtatacgg

SEQ ID NO: 106357 - DNA, 30 bp, Artificial Sequence
  Synthetic oligonucleotide
cgtctagtaaacatcagtgggtacctacgg

SEQ ID NO: 106358 - DNA, 30 bp, Artificial Sequence
  Synthetic oligonucleotide
ttagtgggttcgtgtcccaacagagtacgg

SEQ ID NO: 106359 - DNA, 30 bp, Artificial Sequence
  Synthetic oligonucleotide
tgcggtaggacagcaagaggtaaggtacgg

SEQ ID NO: 106360 - DNA, 30 bp, Artificial Sequence
  Synthetic oligonucleotide
gtagaattagtcatattgcagtgggtacgg

SEQ ID NO: 106361 - DNA, 30 bp, Artificial Sequence
  Synthetic oligonucleotide
ggggatgtagaagactgtgaccttgtacgg

SEQ ID NO: 106362 - DNA, 30 bp, Artificial Sequence
  Synthetic oligonucleotide
gctgccggaatacaatcgtattagttacgg

SEQ ID NO: 106363 - DNA, 30 bp, Artificial Sequence
  Synthetic oligonucleotide
ttcatggctcaaaagagtggactgaaccgg

SEQ ID NO: 106364 - DNA, 30 bp, Artificial Sequence
  Synthetic oligonucleotide
agctggcgttcaatacccaatcgagaccgg

SEQ ID NO: 106365 - DNA, 30 bp, Artificial Sequence
  Synthetic oligonucleotide
gcgcacaatacccgctccgagcaataccgg

SEQ ID NO: 106366 - DNA, 30 bp, Artificial Sequence
  Synthetic oligonucleotide
gtcttgattgggcacatccgtgggtaccgg

SEQ ID NO: 106367 - DNA, 30 bp, Artificial Sequence
  Synthetic oligonucleotide
tgggtttgtgacaacgggagcatcccccgg

SEQ ID NO: 106368 - DNA, 30 bp, Artificial Sequence
  Synthetic oligonucleotide
atggggacgagccaaccgtatttcccccgg

SEQ ID NO: 106369 - DNA, 30 bp, Artificial Sequence
  Synthetic oligonucleotide
ctcaattagcgaagggatagttcagcccgg

SEQ ID NO: 106370 - DNA, 30 bp, Artificial Sequence
  Synthetic oligonucleotide
caaaagcatgcgccatgtatcggagcccgg

SEQ ID NO: 106371 - DNA, 30 bp, Artificial Sequence
  Synthetic oligonucleotide
cgtggaggtcaaacagtgggatgagcccgg

SEQ ID NO: 106372 - DNA, 30 bp, Artificial Sequence
  Synthetic oligonucleotide
gcgtgtatgcttgcataccaaatagcccgg

SEQ ID NO: 106373 - DNA, 30 bp, Artificial Sequence
  Synthetic oligonucleotide
gttgtaagggctacatcccatgcgtcccgg

SEQ ID NO: 106374 - DNA, 30 bp, Artificial Sequence
  Synthetic oligonucleotide
tcatggtatagacttactagcagttcccgg

SEQ ID NO: 106375 - DNA, 30 bp, Artificial Sequence
  Synthetic oligonucleotide
cacggctatcgttcaggtttatgttcccgg

SEQ ID NO: 106376 - DNA, 30 bp, Artificial Sequence
  Synthetic oligonucleotide
catcaagtgtctacacaacttgaccgccgg

SEQ ID NO: 106377 - DNA, 30 bp, Artificial Sequence
  Synthetic oligonucleotide
ccaggggttattcagcgctcgggtcgccgg

SEQ ID NO: 106378 - DNA, 31 bp, Artificial Sequence
  Synthetic oligonucleotide
cacgtggggtcagggcgcttcgcgaggccgg

SEQ ID NO: 106379 - DNA, 30 bp, Artificial Sequence
  Synthetic oligonucleotide
acaccgggatttagccacgtaacgggccgg

SEQ ID NO: 106380 - DNA, 30 bp, Artificial Sequence
  Synthetic oligonucleotide
gaggcttgcggcgtaccattatcttgccgg

SEQ ID NO: 106381 - DNA, 30 bp, Artificial Sequence
  Synthetic oligonucleotide
acccatagacgggtatctggcatcatccgg

SEQ ID NO: 106382 - DNA, 30 bp, Artificial Sequence
  Synthetic oligonucleotide
ctagggttaggatatcttactagtatccgg

SEQ ID NO: 106383 - DNA, 30 bp, Artificial Sequence
  Synthetic oligonucleotide
ttgtagatctatcagagttctaagctccgg

SEQ ID NO: 106384 - DNA, 30 bp, Artificial Sequence
  Synthetic oligonucleotide
aacggtaggtaacaggcacttttggtccgg

SEQ ID NO: 106385 - DNA, 30 bp, Artificial Sequence
  Synthetic oligonucleotide
tcaacctgtggaacttaacacaccttccgg

SEQ ID NO: 106386 - DNA, 30 bp, Artificial Sequence
  Synthetic oligonucleotide
ccgggataccacaaccccaaataagagcgg

SEQ ID NO: 106387 - DNA, 30 bp, Artificial Sequence
  Synthetic oligonucleotide
tgacggcaatctagacgtacaagagagcgg

SEQ ID NO: 106388 - DNA, 30 bp, Artificial Sequence
  Synthetic oligonucleotide
ccaaaattctggtaatcggtcctagagcgg

SEQ ID NO: 106389 - DNA, 30 bp, Artificial Sequence
  Synthetic oligonucleotide
acaggcatccaactcggtagtggcgagcgg

SEQ ID NO: 106390 - DNA, 30 bp, Artificial Sequence
  Synthetic oligonucleotide
atcgacggtccaagaccccagagggagcgg

SEQ ID NO: 106391 - DNA, 30 bp, Artificial Sequence
  Synthetic oligonucleotide
cgaacagctcacatccaaacgtttgagcgg

SEQ ID NO: 106392 - DNA, 30 bp, Artificial Sequence
  Synthetic oligonucleotide
acataatgactcggcgcttaggtgccgcgg

SEQ ID NO: 106393 - DNA, 30 bp, Artificial Sequence
  Synthetic oligonucleotide
tccgaaagtagtgtaaacatgctagcgcgg

SEQ ID NO: 106394 - DNA, 30 bp, Artificial Sequence
  Synthetic oligonucleotide
cttccggagccaagtcagcaccacgcgcgg

SEQ ID NO: 106395 - DNA, 30 bp, Artificial Sequence
  Synthetic oligonucleotide
atgcgggtacttgtaggactggctgcgcgg

SEQ ID NO: 106396 - DNA, 30 bp, Artificial Sequence
  Synthetic oligonucleotide
aaagcgttccgtcagccacgtcaatcgcgg

SEQ ID NO: 106397 - DNA, 30 bp, Artificial Sequence
  Synthetic oligonucleotide
tgtagaggcgagaactatgacagatcgcgg

SEQ ID NO: 106398 - DNA, 30 bp, Artificial Sequence
  Synthetic oligonucleotide
aatagttatgagggctagataaactcgcgg

SEQ ID NO: 106399 - DNA, 30 bp, Artificial Sequence
  Synthetic oligonucleotide
taggagaacctggtgggttacgtgtcgcgg

SEQ ID NO: 106400 - DNA, 30 bp, Artificial Sequence
  Synthetic oligonucleotide
agaacttgtactatagggttagcgaggcgg

SEQ ID NO: 106401 - DNA, 30 bp, Artificial Sequence
  Synthetic oligonucleotide
aactagcagattaccacgttggtgaggcgg

SEQ ID NO: 106402 - DNA, 30 bp, Artificial Sequence
  Synthetic oligonucleotide
cgtggagttggggtcgatctacatgggcgg

SEQ ID NO: 106403 - DNA, 31 bp, Artificial Sequence
  Synthetic oligonucleotide
ctcgcgatatcttgaaaagtaacttgggcgg

SEQ ID NO: 106404 - DNA, 30 bp, Artificial Sequence
  Synthetic oligonucleotide
gtgagctgagacagaaagtcatcctggcgg

SEQ ID NO: 106405 - DNA, 30 bp, Artificial Sequence
  Synthetic oligonucleotide
agtttggacatgcagaaggatacaatgcgg

SEQ ID NO: 106406 - DNA, 30 bp, Artificial Sequence
  Synthetic oligonucleotide
ccgccaacaagctgcacgattatgatgcgg

SEQ ID NO: 106407 - DNA, 30 bp, Artificial Sequence
  Synthetic oligonucleotide
tcctacgataccttcgaacgggacgtgcgg

SEQ ID NO: 106408 - DNA, 30 bp, Artificial Sequence
  Synthetic oligonucleotide
gaggcggggaggatcctgatcaaggtgcgg

SEQ ID NO: 106409 - DNA, 30 bp, Artificial Sequence
  Synthetic oligonucleotide
tctcattctacattgatcagttatgtgcgg

SEQ ID NO: 106410 - DNA, 30 bp, Artificial Sequence
  Synthetic oligonucleotide
tccacgaaaatcatcatgggcgaaaatcgg

SEQ ID NO: 106411 - DNA, 30 bp, Artificial Sequence
  Synthetic oligonucleotide
atccgcgcgagtcgtaccgggtgtaatcgg

SEQ ID NO: 106412 - DNA, 30 bp, Artificial Sequence
  Synthetic oligonucleotide
ccgagcaggtcccgttatcccaaacatcgg

SEQ ID NO: 106413 - DNA, 30 bp, Artificial Sequence
  Synthetic oligonucleotide
tgaacggttcactcaccgtcaatacatcgg

SEQ ID NO: 106414 - DNA, 30 bp, Artificial Sequence
  Synthetic oligonucleotide
gaaacacaggttatatgaagtcatcatcgg

SEQ ID NO: 106415 - DNA, 30 bp, Artificial Sequence
  Synthetic oligonucleotide
acggatggcccgtcgcgtaacgtcgatcgg

SEQ ID NO: 106416 - DNA, 30 bp, Artificial Sequence
  Synthetic oligonucleotide
agtgaaagttgagcgtctaccgtcgatcgg

SEQ ID NO: 106417 - DNA, 30 bp, Artificial Sequence
  Synthetic oligonucleotide
gaaggcgggatagggtatggaaaatatcgg

SEQ ID NO: 106418 - DNA, 30 bp, Artificial Sequence
  Synthetic oligonucleotide
tcggtcgacctcacagttcagtaatatcgg

SEQ ID NO: 106419 - DNA, 30 bp, Artificial Sequence
  Synthetic oligonucleotide
tatccagcggctagcacttacggatatcgg

SEQ ID NO: 106420 - DNA, 30 bp, Artificial Sequence
  Synthetic oligonucleotide
atgcacgcgaggagctaagatcggtatcgg

SEQ ID NO: 106421 - DNA, 30 bp, Artificial Sequence
  Synthetic oligonucleotide
atatcagtgggacatcgtccaagttatcgg

SEQ ID NO: 106422 - DNA, 30 bp, Artificial Sequence
  Synthetic oligonucleotide
tcattgcaggatgcgttagcgcaaactcgg

SEQ ID NO: 106423 - DNA, 30 bp, Artificial Sequence
  Synthetic oligonucleotide
agaggaacggttctgaattcaatcactcgg

SEQ ID NO: 106424 - DNA, 30 bp, Artificial Sequence
  Synthetic oligonucleotide
agcggctaaagacccttccttctgactcgg

SEQ ID NO: 106425 - DNA, 30 bp, Artificial Sequence
  Synthetic oligonucleotide
tgggggaataattagcggtcaagtactcgg

SEQ ID NO: 106426 - DNA, 30 bp, Artificial Sequence
  Synthetic oligonucleotide
cgtattgtaccatactctgggtagcctcgg

SEQ ID NO: 106427 - DNA, 30 bp, Artificial Sequence
  Synthetic oligonucleotide
ctcaggggaaaaagtgtaagtctgcctcgg

SEQ ID NO: 106428 - DNA, 30 bp, Artificial Sequence
  Synthetic oligonucleotide
cgcgtgagacggcaaatacccccagctcgg

SEQ ID NO: 106429 - DNA, 30 bp, Artificial Sequence
  Synthetic oligonucleotide
gcgaataggtagtgcagggggctagctcgg

SEQ ID NO: 106430 - DNA, 30 bp, Artificial Sequence
  Synthetic oligonucleotide
cgaccgacaaagtagcatactgatgctcgg

SEQ ID NO: 106431 - DNA, 30 bp, Artificial Sequence
  Synthetic oligonucleotide
gtctggctcacgattatgagattgtctcgg

SEQ ID NO: 106432 - DNA, 30 bp, Artificial Sequence
  Synthetic oligonucleotide
acgcgagccggaagttcactggccagtcgg

SEQ ID NO: 106433 - DNA, 30 bp, Artificial Sequence
  Synthetic oligonucleotide
gacgaacttaaggccgatgcatccagtcgg

SEQ ID NO: 106434 - DNA, 30 bp, Artificial Sequence
  Synthetic oligonucleotide
gaacgtctgacctggtaaagaaaccgtcgg

SEQ ID NO: 106435 - DNA, 30 bp, Artificial Sequence
  Synthetic oligonucleotide
aagggattatgtaataactacgtgcgtcgg

SEQ ID NO: 106436 - DNA, 30 bp, Artificial Sequence
  Synthetic oligonucleotide
gcatgaagcattcgattgtcggattgtcgg

SEQ ID NO: 106437 - DNA, 30 bp, Artificial Sequence
  Synthetic oligonucleotide
agctggaagtcctcttgtagcgccattcgg

SEQ ID NO: 106438 - DNA, 30 bp, Artificial Sequence
  Synthetic oligonucleotide
tagcgttatagggcgaggccacgcattcgg

SEQ ID NO: 106439 - DNA, 30 bp, Artificial Sequence
  Synthetic oligonucleotide
accgcggtagggtgtcacagatggattcgg

SEQ ID NO: 106440 - DNA, 31 bp, Artificial Sequence
  Synthetic oligonucleotide
aggttagtcatgtgcgcgtgagactattcgg

SEQ ID NO: 106441 - DNA, 30 bp, Artificial Sequence
  Synthetic oligonucleotide
gctaggggagcaggtgtacaaaaccttcgg

SEQ ID NO: 106442 - DNA, 30 bp, Artificial Sequence
  Synthetic oligonucleotide
agcgtgagataacgtaaggtagatcttcgg

SEQ ID NO: 106443 - DNA, 30 bp, Artificial Sequence
  Synthetic oligonucleotide
cgattttgtagaccttatctgacagttcgg

SEQ ID NO: 106444 - DNA, 30 bp, Artificial Sequence
  Synthetic oligonucleotide
cgtgtgcttatccgttcaattcaggttcgg

SEQ ID NO: 106445 - DNA, 30 bp, Artificial Sequence
  Synthetic oligonucleotide
ccactaaatgttcaagtcgaaagtgttcgg

SEQ ID NO: 106446 - DNA, 30 bp, Artificial Sequence
  Synthetic oligonucleotide
tactaccaagtcagacgttcgaaatttcgg

SEQ ID NO: 106447 - DNA, 30 bp, Artificial Sequence
  Synthetic oligonucleotide
ggaagtgccagcgtcacggaattctttcgg

SEQ ID NO: 106448 - DNA, 30 bp, Artificial Sequence
  Synthetic oligonucleotide
tggtctcaggtggcacgtagacaaaaaggg

SEQ ID NO: 106449 - DNA, 30 bp, Artificial Sequence
  Synthetic oligonucleotide
aatccagccgaggcattgggttcaaaaggg

SEQ ID NO: 106450 - DNA, 30 bp, Artificial Sequence
  Synthetic oligonucleotide
tgagtgctgcctaggattaagtataaaggg

SEQ ID NO: 106451 - DNA, 30 bp, Artificial Sequence
  Synthetic oligonucleotide
cgaggggacagcatgtattagacccaaggg

SEQ ID NO: 106452 - DNA, 30 bp, Artificial Sequence
  Synthetic oligonucleotide
atagacgatttctgctcataagagcaaggg

SEQ ID NO: 106453 - DNA, 30 bp, Artificial Sequence
  Synthetic oligonucleotide
gctctccgagacaaggacatgtgtcaaggg

SEQ ID NO: 106454 - DNA, 30 bp, Artificial Sequence
  Synthetic oligonucleotide
ggcgtacagttacgcgaaccacgcgaaggg

SEQ ID NO: 106455 - DNA, 30 bp, Artificial Sequence
  Synthetic oligonucleotide
agtctgaaaacgtcgacagagttcgaaggg

SEQ ID NO: 106456 - DNA, 30 bp, Artificial Sequence
  Synthetic oligonucleotide
caggagactcatactcagtctcgggaaggg

SEQ ID NO: 106457 - DNA, 30 bp, Artificial Sequence
  Synthetic oligonucleotide
aatacgcgagaccgtgtgtcttatgaaggg

SEQ ID NO: 106458 - DNA, 30 bp, Artificial Sequence
  Synthetic oligonucleotide
agataggcatattttgcattcatataaggg

SEQ ID NO: 106459 - DNA, 30 bp, Artificial Sequence
  Synthetic oligonucleotide
agggagatttcgttctctttcagctaaggg

SEQ ID NO: 106460 - DNA, 30 bp, Artificial Sequence
  Synthetic oligonucleotide
ggcacgccttgagcaggcctctccacaggg

SEQ ID NO: 106461 - DNA, 30 bp, Artificial Sequence
  Synthetic oligonucleotide
atgcgattggggcgcatttgccgcacaggg

SEQ ID NO: 106462 - DNA, 30 bp, Artificial Sequence
  Synthetic oligonucleotide
acaattactggtaagcgccgtacgacaggg

SEQ ID NO: 106463 - DNA, 30 bp, Artificial Sequence
  Synthetic oligonucleotide
cagtgatctagatggaactcacgtacaggg

SEQ ID NO: 106464 - DNA, 30 bp, Artificial Sequence
  Synthetic oligonucleotide
agcacttgtgaccttgattattaaccaggg

SEQ ID NO: 106465 - DNA, 30 bp, Artificial Sequence
  Synthetic oligonucleotide
gtgtcaggggaatggggtgttaacccaggg

SEQ ID NO: 106466 - DNA, 30 bp, Artificial Sequence
  Synthetic oligonucleotide
aaccatgctcgcccgagcatgcacccaggg

SEQ ID NO: 106467 - DNA, 30 bp, Artificial Sequence
  Synthetic oligonucleotide
cgggcaatcgattggcagggagagccaggg

SEQ ID NO: 106468 - DNA, 30 bp, Artificial Sequence
  Synthetic oligonucleotide
acagtcgtgctagctcaccgcatcgcaggg

SEQ ID NO: 106469 - DNA, 30 bp, Artificial Sequence
  Synthetic oligonucleotide
atagggatgaggcaacatatgagggcaggg

SEQ ID NO: 106470 - DNA, 30 bp, Artificial Sequence
  Synthetic oligonucleotide
ggtataatactctaagcctgtgtggcaggg

SEQ ID NO: 106471 - DNA, 30 bp, Artificial Sequence
  Synthetic oligonucleotide
accttccggcctaagagcgctacgtcaggg

SEQ ID NO: 106472 - DNA, 30 bp, Artificial Sequence
  Synthetic oligonucleotide
tcaagaacaaagatgcttaaattttcaggg

SEQ ID NO: 106473 - DNA, 30 bp, Artificial Sequence
  Synthetic oligonucleotide
agggattaggagagtatgttggtgagaggg

SEQ ID NO: 106474 - DNA, 30 bp, Artificial Sequence
  Synthetic oligonucleotide
acctctcaatgagcgaaaactgctagaggg

SEQ ID NO: 106475 - DNA, 30 bp, Artificial Sequence
  Synthetic oligonucleotide
ccacgatggtgtaagcggtgactacgaggg

SEQ ID NO: 106476 - DNA, 30 bp, Artificial Sequence
  Synthetic oligonucleotide
tcttgagcggtcttggcccttgtacgaggg

SEQ ID NO: 106477 - DNA, 30 bp, Artificial Sequence
  Synthetic oligonucleotide
gcgtcaattgcttataagacagcccgaggg

SEQ ID NO: 106478 - DNA, 30 bp, Artificial Sequence
  Synthetic oligonucleotide
tccaaggcccaagtccgtggttagcgaggg

SEQ ID NO: 106479 - DNA, 30 bp, Artificial Sequence
  Synthetic oligonucleotide
tctttactggctgcaatctgcattcgaggg

SEQ ID NO: 106480 - DNA, 30 bp, Artificial Sequence
  Synthetic oligonucleotide
atcacggaaacatgttcgcattaaggaggg

SEQ ID NO: 106481 - DNA, 30 bp, Artificial Sequence
  Synthetic oligonucleotide
gcgcatactacagtccagtacaatggaggg

SEQ ID NO: 106482 - DNA, 30 bp, Artificial Sequence
  Synthetic oligonucleotide
aactgaaattagcccagatccggatgaggg

SEQ ID NO: 106483 - DNA, 30 bp, Artificial Sequence
  Synthetic oligonucleotide
gcgatgtaggaatgagtaggcgcaataggg

SEQ ID NO: 106484 - DNA, 30 bp, Artificial Sequence
  Synthetic oligonucleotide
tatggacctcagatagcactacagataggg

SEQ ID NO: 106485 - DNA, 31 bp, Artificial Sequence
  Synthetic oligonucleotide
tgcttagagttttgaaaaacccgagataggg

SEQ ID NO: 106486 - DNA, 30 bp, Artificial Sequence
  Synthetic oligonucleotide
gggatcagcaatatccggtgtaaagtaggg

SEQ ID NO: 106487 - DNA, 30 bp, Artificial Sequence
  Synthetic oligonucleotide
atattgcaatcaattcatgcccgggtaggg

SEQ ID NO: 106488 - DNA, 30 bp, Artificial Sequence
  Synthetic oligonucleotide
cgaagcgtcaatctggagcaacatgtaggg

SEQ ID NO: 106489 - DNA, 30 bp, Artificial Sequence
  Synthetic oligonucleotide
tacaggtaggagcttcgaatgcaattaggg

SEQ ID NO: 106490 - DNA, 30 bp, Artificial Sequence
  Synthetic oligonucleotide
agggccatatttggcaggtcaaggttaggg

SEQ ID NO: 106491 - DNA, 30 bp, Artificial Sequence
  Synthetic oligonucleotide
gacgtgtgatcgggctgtctcgtgttaggg

SEQ ID NO: 106492 - DNA, 30 bp, Artificial Sequence
  Synthetic oligonucleotide
tagtcaccgacacttggcggaagcaacggg

SEQ ID NO: 106493 - DNA, 30 bp, Artificial Sequence
  Synthetic oligonucleotide
caggcacgagatgttagaaaccgcaacggg

SEQ ID NO: 106494 - DNA, 30 bp, Artificial Sequence
  Synthetic oligonucleotide
atacagagccctgcattcattaagcacggg

SEQ ID NO: 106495 - DNA, 30 bp, Artificial Sequence
  Synthetic oligonucleotide
taagttcgattaaaaactaagtgagacggg

SEQ ID NO: 106496 - DNA, 30 bp, Artificial Sequence
  Synthetic oligonucleotide
cggacggtacttaagaaagcctacgacggg

SEQ ID NO: 106497 - DNA, 30 bp, Artificial Sequence
  Synthetic oligonucleotide
gtaaagtggtacttgtacaatgcggacggg

SEQ ID NO: 106498 - DNA, 30 bp, Artificial Sequence
  Synthetic oligonucleotide
cgtataacaaacagtatgaggatgtacggg

SEQ ID NO: 106499 - DNA, 30 bp, Artificial Sequence
  Synthetic oligonucleotide
ggagtaggattcacggattcatattacggg

SEQ ID NO: 106500 - DNA, 30 bp, Artificial Sequence
  Synthetic oligonucleotide
tggctcgcaatataccaactaggttacggg

SEQ ID NO: 106501 - DNA, 29 bp, Artificial Sequence
  Synthetic oligonucleotide
tcgattggattgacaaaaagtcaaccggg

SEQ ID NO: 106502 - DNA, 30 bp, Artificial Sequence
  Synthetic oligonucleotide
gcttataagaattcacataagataaccggg

SEQ ID NO: 106503 - DNA, 30 bp, Artificial Sequence
  Synthetic oligonucleotide
ataacgtagatcgtgaagcgtgagaccggg

SEQ ID NO: 106504 - DNA, 30 bp, Artificial Sequence
  Synthetic oligonucleotide
gcgcaaaacaaatcggattggggtaccggg

SEQ ID NO: 106505 - DNA, 30 bp, Artificial Sequence
  Synthetic oligonucleotide
atacagccgaaggatacatagcgtcccggg

SEQ ID NO: 106506 - DNA, 30 bp, Artificial Sequence
  Synthetic oligonucleotide
gcggggtcctaagctttaatcagagccggg

SEQ ID NO: 106507 - DNA, 30 bp, Artificial Sequence
  Synthetic oligonucleotide
cactggtgagatttactcaacggagccggg

SEQ ID NO: 106508 - DNA, 30 bp, Artificial Sequence
  Synthetic oligonucleotide
catccgtaaagacactacctcactgccggg

SEQ ID NO: 106509 - DNA, 30 bp, Artificial Sequence
  Synthetic oligonucleotide
aatcgtcatacttactcggtacttgccggg

SEQ ID NO: 106510 - DNA, 30 bp, Artificial Sequence
  Synthetic oligonucleotide
accagcgatgtccaacggaacacatccggg

SEQ ID NO: 106511 - DNA, 30 bp, Artificial Sequence
  Synthetic oligonucleotide
ggggcataaatatatcccagaccgtccggg

SEQ ID NO: 106512 - DNA, 30 bp, Artificial Sequence
  Synthetic oligonucleotide
aggacgtcggtgtgcattgacctttccggg

SEQ ID NO: 106513 - DNA, 30 bp, Artificial Sequence
  Synthetic oligonucleotide
taaccattgggtttatactacaaaagcggg

SEQ ID NO: 106514 - DNA, 30 bp, Artificial Sequence
  Synthetic oligonucleotide
gcagaaggtggacgcagatgacaaagcggg

SEQ ID NO: 106515 - DNA, 30 bp, Artificial Sequence
  Synthetic oligonucleotide
atgagacttatacacacgagtggaagcggg

SEQ ID NO: 106516 - DNA, 30 bp, Artificial Sequence
  Synthetic oligonucleotide
ggataaaaatgcaagttgcaagccagcggg

SEQ ID NO: 106517 - DNA, 30 bp, Artificial Sequence
  Synthetic oligonucleotide
ctgaaccacaaatcatttttgatcagcggg

SEQ ID NO: 106518 - DNA, 30 bp, Artificial Sequence
  Synthetic oligonucleotide
tgtaggggtctaaacagttgtaagagcggg

SEQ ID NO: 106519 - DNA, 30 bp, Artificial Sequence
  Synthetic oligonucleotide
ccatcaatctcgtcgccttcaaggggcggg

SEQ ID NO: 106520 - DNA, 30 bp, Artificial Sequence
  Synthetic oligonucleotide
cgtagcgttttggatatttgattgggcggg

SEQ ID NO: 106521 - DNA, 30 bp, Artificial Sequence
  Synthetic oligonucleotide
gggtagagtaagcggtaaggccagtgcggg

SEQ ID NO: 106522 - DNA, 30 bp, Artificial Sequence
  Synthetic oligonucleotide
tcttatttagattgaccaggtgaaatcggg

SEQ ID NO: 106523 - DNA, 30 bp, Artificial Sequence
  Synthetic oligonucleotide
gggttacataagagtctctctagcatcggg

SEQ ID NO: 106524 - DNA, 30 bp, Artificial Sequence
  Synthetic oligonucleotide
acagaaatcagccgtggcgtgatgatcggg

SEQ ID NO: 106525 - DNA, 30 bp, Artificial Sequence
  Synthetic oligonucleotide
aaccagtggagactcgcgtagaatatcggg

SEQ ID NO: 106526 - DNA, 30 bp, Artificial Sequence
  Synthetic oligonucleotide
tccctggccaacagttctatacaggtcggg

SEQ ID NO: 106527 - DNA, 30 bp, Artificial Sequence
  Synthetic oligonucleotide
tcgaatgaacaagagcagaatgcattcggg

SEQ ID NO: 106528 - DNA, 30 bp, Artificial Sequence
  Synthetic oligonucleotide
ctactcttgtgctactgggatcacttcggg

SEQ ID NO: 106529 - DNA, 30 bp, Artificial Sequence
  Synthetic oligonucleotide
cattatcagtacaattcgatggtcttcggg

SEQ ID NO: 106530 - DNA, 30 bp, Artificial Sequence
  Synthetic oligonucleotide
ctcagatgtatgtaaagatccaacaagggg

SEQ ID NO: 106531 - DNA, 30 bp, Artificial Sequence
  Synthetic oligonucleotide
attatcagtgtggccctgagggacaagggg

SEQ ID NO: 106532 - DNA, 30 bp, Artificial Sequence
  Synthetic oligonucleotide
caccggggtgtctgacctgttagcaagggg

SEQ ID NO: 106533 - DNA, 30 bp, Artificial Sequence
  Synthetic oligonucleotide
tatcaaagaggtgataaatcgggcaagggg

SEQ ID NO: 106534 - DNA, 30 bp, Artificial Sequence
  Synthetic oligonucleotide
tagtgaaatcagggtagagtagggaagggg

SEQ ID NO: 106535 - DNA, 30 bp, Artificial Sequence
  Synthetic oligonucleotide
ttcgcggtgagattatttcgtctgaagggg

SEQ ID NO: 106536 - DNA, 30 bp, Artificial Sequence
  Synthetic oligonucleotide
gcgacagtgcgggacttcgtgcataagggg

SEQ ID NO: 106537 - DNA, 30 bp, Artificial Sequence
  Synthetic oligonucleotide
gcgcagggcatttcatatataacacagggg

SEQ ID NO: 106538 - DNA, 30 bp, Artificial Sequence
  Synthetic oligonucleotide
gatgtacgaatagcgactcactgccagggg

SEQ ID NO: 106539 - DNA, 30 bp, Artificial Sequence
  Synthetic oligonucleotide
gacggaagacgaatggggtgattccagggg

SEQ ID NO: 106540 - DNA, 30 bp, Artificial Sequence
  Synthetic oligonucleotide
gcatccgacgagccagtgcaatctcagggg

SEQ ID NO: 106541 - DNA, 30 bp, Artificial Sequence
  Synthetic oligonucleotide
ccagatgatggaattaaacgtagcgagggg

SEQ ID NO: 106542 - DNA, 30 bp, Artificial Sequence
  Synthetic oligonucleotide
tttgacaacattcgtcagcttgtcgagggg

SEQ ID NO: 106543 - DNA, 30 bp, Artificial Sequence
  Synthetic oligonucleotide
ggctcgtttacaccataggtggaatagggg

SEQ ID NO: 106544 - DNA, 30 bp, Artificial Sequence
  Synthetic oligonucleotide
tacgcaatcaacaagattgggctatagggg

SEQ ID NO: 106545 - DNA, 30 bp, Artificial Sequence
  Synthetic oligonucleotide
atggtatgatatcggttcagatcctagggg

SEQ ID NO: 106546 - DNA, 30 bp, Artificial Sequence
  Synthetic oligonucleotide
tcggagacttgatggaggaggcgctagggg

SEQ ID NO: 106547 - DNA, 30 bp, Artificial Sequence
  Synthetic oligonucleotide
catcctgtgagtagcggctgtggctagggg

SEQ ID NO: 106548 - DNA, 30 bp, Artificial Sequence
  Synthetic oligonucleotide
tagcccactaagaagcgtggagtgtagggg

SEQ ID NO: 106549 - DNA, 30 bp, Artificial Sequence
  Synthetic oligonucleotide
gctgataagtagacaataatctacacgggg

SEQ ID NO: 106550 - DNA, 30 bp, Artificial Sequence
  Synthetic oligonucleotide
gattaaaggatagagccccaaaggacgggg

SEQ ID NO: 106551 - DNA, 30 bp, Artificial Sequence
  Synthetic oligonucleotide
tacgaccaaggcaaatgtcacagcccgggg

SEQ ID NO: 106552 - DNA, 30 bp, Artificial Sequence
  Synthetic oligonucleotide
gggggagaatgctactgtgcgaatccgggg

SEQ ID NO: 106553 - DNA, 30 bp, Artificial Sequence
  Synthetic oligonucleotide
gacaggctgaccatgttatgcatggcgggg

SEQ ID NO: 106554 - DNA, 30 bp, Artificial Sequence
  Synthetic oligonucleotide
cctgtcactctcttttcgttgtctgcgggg

SEQ ID NO: 106555 - DNA, 30 bp, Artificial Sequence
  Synthetic oligonucleotide
aggcggaaaggggaggaaccattaaggggg

SEQ ID NO: 106556 - DNA, 30 bp, Artificial Sequence
  Synthetic oligonucleotide
gggcggagggaagttcggtggaggaggggg

SEQ ID NO: 106557 - DNA, 30 bp, Artificial Sequence
  Synthetic oligonucleotide
atcctgcatggtaagtcatacgtgaggggg

SEQ ID NO: 106558 - DNA, 30 bp, Artificial Sequence
  Synthetic oligonucleotide
aggaggatgcaaccggggccttgtaggggg

SEQ ID NO: 106559 - DNA, 30 bp, Artificial Sequence
  Synthetic oligonucleotide
aaacattgagtagccggaacagcgcggggg

SEQ ID NO: 106560 - DNA, 30 bp, Artificial Sequence
  Synthetic oligonucleotide
atcgtcgtggagcacttatcgccagggggg

SEQ ID NO: 106561 - DNA, 30 bp, Artificial Sequence
  Synthetic oligonucleotide
ctgtaaagggaccacatacaatgggggggg

SEQ ID NO: 106562 - DNA, 30 bp, Artificial Sequence
  Synthetic oligonucleotide
taatgcatgagatcgccggtctggtggggg

SEQ ID NO: 106563 - DNA, 30 bp, Artificial Sequence
  Synthetic oligonucleotide
gtcatatgacagggcagattaggttggggg

SEQ ID NO: 106564 - DNA, 30 bp, Artificial Sequence
  Synthetic oligonucleotide
attcgtcggtctaacgggccgtaaatgggg

SEQ ID NO: 106565 - DNA, 30 bp, Artificial Sequence
  Synthetic oligonucleotide
tagggtaaaccggccaacggtgcaatgggg

SEQ ID NO: 106566 - DNA, 30 bp, Artificial Sequence
  Synthetic oligonucleotide
cgatgccttttagaatgtacttatatgggg

SEQ ID NO: 106567 - DNA, 30 bp, Artificial Sequence
  Synthetic oligonucleotide
aggtcgaaattgtggacacgggcactgggg

SEQ ID NO: 106568 - DNA, 30 bp, Artificial Sequence
  Synthetic oligonucleotide
ccaacctcacctggtccgtaggctctgggg

SEQ ID NO: 106569 - DNA, 30 bp, Artificial Sequence
  Synthetic oligonucleotide
actccacaagtctagccagttggagtgggg

SEQ ID NO: 106570 - DNA, 30 bp, Artificial Sequence
  Synthetic oligonucleotide
tgatacagtttccaattactatgagtgggg

SEQ ID NO: 106571 - DNA, 30 bp, Artificial Sequence
  Synthetic oligonucleotide
tccaatatattgcatggcatgtatgtgggg

SEQ ID NO: 106572 - DNA, 30 bp, Artificial Sequence
  Synthetic oligonucleotide
tgatagggatccgctattcgatgaaatggg

SEQ ID NO: 106573 - DNA, 30 bp, Artificial Sequence
  Synthetic oligonucleotide
ttgccaagagatcggtcagggataaatggg

SEQ ID NO: 106574 - DNA, 30 bp, Artificial Sequence
  Synthetic oligonucleotide
tactgacgggcaacgacctgcctcaatggg

SEQ ID NO: 106575 - DNA, 30 bp, Artificial Sequence
  Synthetic oligonucleotide
ttgccacgagtcatgcgtagattcaatggg

SEQ ID NO: 106576 - DNA, 30 bp, Artificial Sequence
  Synthetic oligonucleotide
cagtattggaaaggttaccgggataatggg

SEQ ID NO: 106577 - DNA, 30 bp, Artificial Sequence
  Synthetic oligonucleotide
gcctggggagagcgattagatgtacatggg

SEQ ID NO: 106578 - DNA, 30 bp, Artificial Sequence
  Synthetic oligonucleotide
tttgagcacggaacagacggatggcatggg

SEQ ID NO: 106579 - DNA, 30 bp, Artificial Sequence
  Synthetic oligonucleotide
gtatgtacttcggaggagccttcagatggg

SEQ ID NO: 106580 - DNA, 30 bp, Artificial Sequence
  Synthetic oligonucleotide
cgccctccgtcgagcgctacaggagatggg

SEQ ID NO: 106581 - DNA, 30 bp, Artificial Sequence
  Synthetic oligonucleotide
gaagtgcggcatgtgtaagactgggatggg

SEQ ID NO: 106582 - DNA, 31 bp, Artificial Sequence
  Synthetic oligonucleotide
gcgaataggaaaaggtagatcttggtatggg

SEQ ID NO: 106583 - DNA, 30 bp, Artificial Sequence
  Synthetic oligonucleotide
gccgtgcgggttcgttacgtttgttatggg

SEQ ID NO: 106584 - DNA, 30 bp, Artificial Sequence
  Synthetic oligonucleotide
gtacagcccgaagggatgaccatttatggg

SEQ ID NO: 106585 - DNA, 30 bp, Artificial Sequence
  Synthetic oligonucleotide
tacgcctgcgatgatagtgcaaggactggg

SEQ ID NO: 106586 - DNA, 30 bp, Artificial Sequence
  Synthetic oligonucleotide
gggcattgaagtcttgggctcgctactggg

SEQ ID NO: 106587 - DNA, 30 bp, Artificial Sequence
  Synthetic oligonucleotide
aacgaatggcgtcgcatacgaacccctggg

SEQ ID NO: 106588 - DNA, 30 bp, Artificial Sequence
  Synthetic oligonucleotide
cattaaggataaaagttgtcttcccctggg

SEQ ID NO: 106589 - DNA, 30 bp, Artificial Sequence
  Synthetic oligonucleotide
aattcgacccattaacgattagcggctggg

SEQ ID NO: 106590 - DNA, 30 bp, Artificial Sequence
  Synthetic oligonucleotide
ctcctcaagctggggacaatggaatctggg

SEQ ID NO: 106591 - DNA, 30 bp, Artificial Sequence
  Synthetic oligonucleotide
tctcggtctggcaagtcatggtagtctggg

SEQ ID NO: 106592 - DNA, 30 bp, Artificial Sequence
  Synthetic oligonucleotide
agtctaacaggtcggaagtattcgtctggg

SEQ ID NO: 106593 - DNA, 30 bp, Artificial Sequence
  Synthetic oligonucleotide
tcaccacgagtatagagtacaccaagtggg

SEQ ID NO: 106594 - DNA, 30 bp, Artificial Sequence
  Synthetic oligonucleotide
gatacaagcagacttgggtctactagtggg

SEQ ID NO: 106595 - DNA, 30 bp, Artificial Sequence
  Synthetic oligonucleotide
catggaaacgggccataggcacctagtggg

SEQ ID NO: 106596 - DNA, 30 bp, Artificial Sequence
  Synthetic oligonucleotide
gcgctggcagtttggtcaacgagccgtggg

SEQ ID NO: 106597 - DNA, 30 bp, Artificial Sequence
  Synthetic oligonucleotide
cgcgatcggagtggtcttggactgcgtggg

SEQ ID NO: 106598 - DNA, 30 bp, Artificial Sequence
  Synthetic oligonucleotide
atgtcaatccatcctcgcaatcttcgtggg

SEQ ID NO: 106599 - DNA, 30 bp, Artificial Sequence
  Synthetic oligonucleotide
aaacgaggaggggtccctctctcctgtggg

SEQ ID NO: 106600 - DNA, 30 bp, Artificial Sequence
  Synthetic oligonucleotide
caacgtctagcgacatgtaagcggattggg

SEQ ID NO: 106601 - DNA, 30 bp, Artificial Sequence
  Synthetic oligonucleotide
gcatatgcgggggtacgcttggatattggg

SEQ ID NO: 106602 - DNA, 30 bp, Artificial Sequence
  Synthetic oligonucleotide
gcacatcaagtatacatccgacaagttggg

SEQ ID NO: 106603 - DNA, 30 bp, Artificial Sequence
  Synthetic oligonucleotide
taagcattctgataaaaacaggaagttggg

SEQ ID NO: 106604 - DNA, 30 bp, Artificial Sequence
  Synthetic oligonucleotide
gacgactagcgggttagattacacgttggg

SEQ ID NO: 106605 - DNA, 30 bp, Artificial Sequence
  Synthetic oligonucleotide
gcgtgcgcggggctttacagctacaaatgg

SEQ ID NO: 106606 - DNA, 30 bp, Artificial Sequence
  Synthetic oligonucleotide
aagcgatcattccttggccgggccaaatgg

SEQ ID NO: 106607 - DNA, 30 bp, Artificial Sequence
  Synthetic oligonucleotide
atacaaagcccggtgccctatgggaaatgg

SEQ ID NO: 106608 - DNA, 30 bp, Artificial Sequence
  Synthetic oligonucleotide
tctgaaggaaacattcgccttcaccaatgg

SEQ ID NO: 106609 - DNA, 30 bp, Artificial Sequence
  Synthetic oligonucleotide
tgtttggtatggccaacgcgacagcaatgg

SEQ ID NO: 106610 - DNA, 30 bp, Artificial Sequence
  Synthetic oligonucleotide
gagaagtaatcggagatttcaaggcaatgg

SEQ ID NO: 106611 - DNA, 30 bp, Artificial Sequence
  Synthetic oligonucleotide
tcaagggtaaggtggggcccaaaagaatgg

SEQ ID NO: 106612 - DNA, 30 bp, Artificial Sequence
  Synthetic oligonucleotide
catacttaggtaacgtcggtaaaataatgg

SEQ ID NO: 106613 - DNA, 30 bp, Artificial Sequence
  Synthetic oligonucleotide
acggctgacgggggttgtacataataatgg

SEQ ID NO: 106614 - DNA, 30 bp, Artificial Sequence
  Synthetic oligonucleotide
acttgacgagatgcttgtaaactgtaatgg

SEQ ID NO: 106615 - DNA, 30 bp, Artificial Sequence
  Synthetic oligonucleotide
gcaaacctgaatcacgaccaaaaaacatgg

SEQ ID NO: 106616 - DNA, 30 bp, Artificial Sequence
  Synthetic oligonucleotide
gtaggaactgcaagatatgcgtggacatgg

SEQ ID NO: 106617 - DNA, 30 bp, Artificial Sequence
  Synthetic oligonucleotide
tggaagatgtcttttttgcgcggaccatgg

SEQ ID NO: 106618 - DNA, 30 bp, Artificial Sequence
  Synthetic oligonucleotide
cggacgacccatacggtacattccccatgg

SEQ ID NO: 106619 - DNA, 30 bp, Artificial Sequence
  Synthetic oligonucleotide
aggtgatatattgtcatcgatgatccatgg

SEQ ID NO: 106620 - DNA, 30 bp, Artificial Sequence
  Synthetic oligonucleotide
caaagttaattaataaagctgcgcgcatgg

SEQ ID NO: 106621 - DNA, 30 bp, Artificial Sequence
  Synthetic oligonucleotide
tcgggaggagtagactaaatctgatcatgg

SEQ ID NO: 106622 - DNA, 30 bp, Artificial Sequence
  Synthetic oligonucleotide
cataaacaacgaatatgatggaactcatgg

SEQ ID NO: 106623 - DNA, 30 bp, Artificial Sequence
  Synthetic oligonucleotide
acagtgggacggtccagggcagggtcatgg

SEQ ID NO: 106624 - DNA, 30 bp, Artificial Sequence
  Synthetic oligonucleotide
tgtgaagaaggacattaatgaatgtcatgg

SEQ ID NO: 106625 - DNA, 30 bp, Artificial Sequence
  Synthetic oligonucleotide
tcaagcggtatgttgcgactcaatagatgg

SEQ ID NO: 106626 - DNA, 30 bp, Artificial Sequence
  Synthetic oligonucleotide
ggaagtggatagtaaaccgtccgtagatgg

SEQ ID NO: 106627 - DNA, 30 bp, Artificial Sequence
  Synthetic oligonucleotide
gttaattcactgaacagctcgacccgatgg

SEQ ID NO: 106628 - DNA, 30 bp, Artificial Sequence
  Synthetic oligonucleotide
ccggaagaaccagggaggtaaaagcgatgg

SEQ ID NO: 106629 - DNA, 30 bp, Artificial Sequence
  Synthetic oligonucleotide
agcaggcaactgaatgatttagatcgatgg

SEQ ID NO: 106630 - DNA, 30 bp, Artificial Sequence
  Synthetic oligonucleotide
tcacagtggtcagtccagcgtcttcgatgg

SEQ ID NO: 106631 - DNA, 30 bp, Artificial Sequence
  Synthetic oligonucleotide
tctgttccaggggcaatatggcgtggatgg

SEQ ID NO: 106632 - DNA, 30 bp, Artificial Sequence
  Synthetic oligonucleotide
cattgccgaacagaatgtcatccatgatgg

SEQ ID NO: 106633 - DNA, 30 bp, Artificial Sequence
  Synthetic oligonucleotide
cgataacttctaacggtttgtaggtgatgg

SEQ ID NO: 106634 - DNA, 30 bp, Artificial Sequence
  Synthetic oligonucleotide
gacccgaaggcctgtgacggacaaatatgg

SEQ ID NO: 106635 - DNA, 30 bp, Artificial Sequence
  Synthetic oligonucleotide
catctacaagtattaatagacggaatatgg

SEQ ID NO: 106636 - DNA, 30 bp, Artificial Sequence
  Synthetic oligonucleotide
gggaagcaaaagggttatctacagatatgg

SEQ ID NO: 106637 - DNA, 30 bp, Artificial Sequence
  Synthetic oligonucleotide
aatgccctagggaaagtgtaggaactatgg

SEQ ID NO: 106638 - DNA, 30 bp, Artificial Sequence
  Synthetic oligonucleotide
cgcttggttaaatgtctaagtaagctatgg

SEQ ID NO: 106639 - DNA, 30 bp, Artificial Sequence
  Synthetic oligonucleotide
tagcccaaatggtaaaaagtccctgtatgg

SEQ ID NO: 106640 - DNA, 30 bp, Artificial Sequence
  Synthetic oligonucleotide
ccgtgggattcctaggaaagatgtgtatgg

SEQ ID NO: 106641 - DNA, 30 bp, Artificial Sequence
  Synthetic oligonucleotide
caaatgaacgtatagttaagctttgtatgg

SEQ ID NO: 106642 - DNA, 30 bp, Artificial Sequence
  Synthetic oligonucleotide
tgtcccgggtacgaagtagagaccttatgg

SEQ ID NO: 106643 - DNA, 30 bp, Artificial Sequence
  Synthetic oligonucleotide
ggaacagtgaatacgattgcaatcttatgg

SEQ ID NO: 106644 - DNA, 30 bp, Artificial Sequence
  Synthetic oligonucleotide
gacctaaaggcaatatcgatagtcaactgg

SEQ ID NO: 106645 - DNA, 30 bp, Artificial Sequence
  Synthetic oligonucleotide
atggctaggtctaccaacctttataactgg

SEQ ID NO: 106646 - DNA, 30 bp, Artificial Sequence
  Synthetic oligonucleotide
aaggcgtatggcaacatgaacgctcactgg

SEQ ID NO: 106647 - DNA, 30 bp, Artificial Sequence
  Synthetic oligonucleotide
acttaggagtcgtctcacgctatagactgg

SEQ ID NO: 106648 - DNA, 30 bp, Artificial Sequence
  Synthetic oligonucleotide
tgagcgcggtagggcaagaagttagactgg

SEQ ID NO: 106649 - DNA, 30 bp, Artificial Sequence
  Synthetic oligonucleotide
ctaatggcctgatatcaggttccgtactgg

SEQ ID NO: 106650 - DNA, 30 bp, Artificial Sequence
  Synthetic oligonucleotide
ctaggaggctcgactttgcggtattactgg

SEQ ID NO: 106651 - DNA, 30 bp, Artificial Sequence
  Synthetic oligonucleotide
taggaggagttgatgtgaagcggaacctgg

SEQ ID NO: 106652 - DNA, 30 bp, Artificial Sequence
  Synthetic oligonucleotide
ctccgggaaataatgatcactgcgacctgg

SEQ ID NO: 106653 - DNA, 30 bp, Artificial Sequence
  Synthetic oligonucleotide
agatcacgatcaccgttcatacacgcctgg

SEQ ID NO: 106654 - DNA, 30 bp, Artificial Sequence
  Synthetic oligonucleotide
ggagtgataccgtacaaaacccaggcctgg

SEQ ID NO: 106655 - DNA, 30 bp, Artificial Sequence
  Synthetic oligonucleotide
cctgggtttgctaccagagcttccagctgg

SEQ ID NO: 106656 - DNA, 30 bp, Artificial Sequence
  Synthetic oligonucleotide
atgacgtaccggggagcatacactagctgg

SEQ ID NO: 106657 - DNA, 30 bp, Artificial Sequence
  Synthetic oligonucleotide
taaaaaacgacgaactagaaggttagctgg

SEQ ID NO: 106658 - DNA, 30 bp, Artificial Sequence
  Synthetic oligonucleotide
gttactgggggaaggaattaatcaggctgg

SEQ ID NO: 106659 - DNA, 31 bp, Artificial Sequence
  Synthetic oligonucleotide
tccacccagtatatcccgtcgaagaggctgg

SEQ ID NO: 106660 - DNA, 30 bp, Artificial Sequence
  Synthetic oligonucleotide
gagcgatgttcgtatttaatatccggctgg

SEQ ID NO: 106661 - DNA, 30 bp, Artificial Sequence
  Synthetic oligonucleotide
ccgacgggcgggaaccggacaatcggctgg

SEQ ID NO: 106662 - DNA, 30 bp, Artificial Sequence
  Synthetic oligonucleotide
ccaagagaactttacgtggccaagggctgg

SEQ ID NO: 106663 - DNA, 30 bp, Artificial Sequence
  Synthetic oligonucleotide
tgggccctgccacgccttactcactgctgg

SEQ ID NO: 106664 - DNA, 30 bp, Artificial Sequence
  Synthetic oligonucleotide
acggaggattggttttcacccgagtgctgg

SEQ ID NO: 106665 - DNA, 30 bp, Artificial Sequence
  Synthetic oligonucleotide
ttgctgatcatatgtaagatctagtgctgg

SEQ ID NO: 106666 - DNA, 30 bp, Artificial Sequence
  Synthetic oligonucleotide
actttagcgcacgtgtgtcctcattgctgg

SEQ ID NO: 106667 - DNA, 30 bp, Artificial Sequence
  Synthetic oligonucleotide
atagcgatagacagctgtatgggttgctgg

SEQ ID NO: 106668 - DNA, 30 bp, Artificial Sequence
  Synthetic oligonucleotide
tcattgcagattcctatggacataatctgg

SEQ ID NO: 106669 - DNA, 30 bp, Artificial Sequence
  Synthetic oligonucleotide
ccggctatcgggcgcgatcgtcgcatctgg

SEQ ID NO: 106670 - DNA, 30 bp, Artificial Sequence
  Synthetic oligonucleotide
tggcgtaaacggcaatacgcactgatctgg

SEQ ID NO: 106671 - DNA, 30 bp, Artificial Sequence
  Synthetic oligonucleotide
ctacgtcacaacttctgtaaacgtatctgg

SEQ ID NO: 106672 - DNA, 30 bp, Artificial Sequence
  Synthetic oligonucleotide
gtaacgcgtgcttgctgcgaaacactctgg

SEQ ID NO: 106673 - DNA, 30 bp, Artificial Sequence
  Synthetic oligonucleotide
cgaagagagcttatcaaggcatcactctgg

SEQ ID NO: 106674 - DNA, 30 bp, Artificial Sequence
  Synthetic oligonucleotide
gacacgagcagtaaggatagtggcctctgg

SEQ ID NO: 106675 - DNA, 30 bp, Artificial Sequence
  Synthetic oligonucleotide
caacgtaagcaaaaggcacatttgctctgg

SEQ ID NO: 106676 - DNA, 30 bp, Artificial Sequence
  Synthetic oligonucleotide
taatatcatagggcgggtgatatgttctgg

SEQ ID NO: 106677 - DNA, 30 bp, Artificial Sequence
  Synthetic oligonucleotide
ttagcctcggctctctgctaagccaagtgg

SEQ ID NO: 106678 - DNA, 30 bp, Artificial Sequence
  Synthetic oligonucleotide
aaacacggaacgtatggccaggaacagtgg

SEQ ID NO: 106679 - DNA, 30 bp, Artificial Sequence
  Synthetic oligonucleotide
taggctagtcattcgggcaacgcacagtgg

SEQ ID NO: 106680 - DNA, 30 bp, Artificial Sequence
  Synthetic oligonucleotide
tcaaagcggaacgtgggcggcttacagtgg

SEQ ID NO: 106681 - DNA, 30 bp, Artificial Sequence
  Synthetic oligonucleotide
ccgccaatcgaatatacaaattaccagtgg

SEQ ID NO: 106682 - DNA, 30 bp, Artificial Sequence
  Synthetic oligonucleotide
gtcatcctaatctttcaatggctccagtgg

SEQ ID NO: 106683 - DNA, 30 bp, Artificial Sequence
  Synthetic oligonucleotide
cgtaagacttgtcagctaacacgcgagtgg

SEQ ID NO: 106684 - DNA, 30 bp, Artificial Sequence
  Synthetic oligonucleotide
cgcacttcaggtagatacccggttgagtgg

SEQ ID NO: 106685 - DNA, 30 bp, Artificial Sequence
  Synthetic oligonucleotide
agttccgagcgcctagtaagggactagtgg

SEQ ID NO: 106686 - DNA, 30 bp, Artificial Sequence
  Synthetic oligonucleotide
cgctaacggttgcgacttgcgccttagtgg

SEQ ID NO: 106687 - DNA, 30 bp, Artificial Sequence
  Synthetic oligonucleotide
gaagcgacaccggcaaatgtaagttagtgg

SEQ ID NO: 106688 - DNA, 30 bp, Artificial Sequence
  Synthetic oligonucleotide
ctgtcttcgttgaggtcgccggtgccgtgg

SEQ ID NO: 106689 - DNA, 30 bp, Artificial Sequence
  Synthetic oligonucleotide
gtcggaactcgctatgatattattccgtgg

SEQ ID NO: 106690 - DNA, 30 bp, Artificial Sequence
  Synthetic oligonucleotide
tgacgtagacctggattacaaatagcgtgg

SEQ ID NO: 106691 - DNA, 30 bp, Artificial Sequence
  Synthetic oligonucleotide
gggggcttgctattccggtccagatcgtgg

SEQ ID NO: 106692 - DNA, 30 bp, Artificial Sequence
  Synthetic oligonucleotide
gagtctgatccacactgccacaactcgtgg

SEQ ID NO: 106693 - DNA, 30 bp, Artificial Sequence
  Synthetic oligonucleotide
cgtggctacatacgcctgtataaaaggtgg

SEQ ID NO: 106694 - DNA, 30 bp, Artificial Sequence
  Synthetic oligonucleotide
caaagcggatgtgacactattttaaggtgg

SEQ ID NO: 106695 - DNA, 31 bp, Artificial Sequence
  Synthetic oligonucleotide
gcagatagcggttatgatgtaatggaggtgg

SEQ ID NO: 106696 - DNA, 30 bp, Artificial Sequence
  Synthetic oligonucleotide
gtgtggcgttgtacaagggcgaataggtgg

SEQ ID NO: 106697 - DNA, 30 bp, Artificial Sequence
  Synthetic oligonucleotide
ggatgactcgaatagggggcggataggtgg

SEQ ID NO: 106698 - DNA, 30 bp, Artificial Sequence
  Synthetic oligonucleotide
tcgatccgcttttagacaatgaggcggtgg

SEQ ID NO: 106699 - DNA, 30 bp, Artificial Sequence
  Synthetic oligonucleotide
cgggtcgggattaggaaaacagttcggtgg

SEQ ID NO: 106700 - DNA, 30 bp, Artificial Sequence
  Synthetic oligonucleotide
tcgccgtgcgagccacgtacaacagggtgg

SEQ ID NO: 106701 - DNA, 30 bp, Artificial Sequence
  Synthetic oligonucleotide
tcttaaggaaacaatggccgtcgagggtgg

SEQ ID NO: 106702 - DNA, 30 bp, Artificial Sequence
  Synthetic oligonucleotide
gcgtggtgtgtggctcagaccagtgggtgg

SEQ ID NO: 106703 - DNA, 30 bp, Artificial Sequence
  Synthetic oligonucleotide
ctaggagactggagtatcgagattgggtgg

SEQ ID NO: 106704 - DNA, 30 bp, Artificial Sequence
  Synthetic oligonucleotide
agccacgaacaggccggccactcgtggtgg

SEQ ID NO: 106705 - DNA, 30 bp, Artificial Sequence
  Synthetic oligonucleotide
gaggattgctgtagttgattaataatgtgg

SEQ ID NO: 106706 - DNA, 30 bp, Artificial Sequence
  Synthetic oligonucleotide
ttcgacaccggaggcggggcgtaactgtgg

SEQ ID NO: 106707 - DNA, 30 bp, Artificial Sequence
  Synthetic oligonucleotide
cgattaacaattggcgtgagggaggtgtgg

SEQ ID NO: 106708 - DNA, 30 bp, Artificial Sequence
  Synthetic oligonucleotide
agatgcatggcgggttggaggtatgtgtgg

SEQ ID NO: 106709 - DNA, 30 bp, Artificial Sequence
  Synthetic oligonucleotide
acttggaacaatctttagcgaggcttgtgg

SEQ ID NO: 106710 - DNA, 30 bp, Artificial Sequence
  Synthetic oligonucleotide
agttcggcaatacactcatccagtttgtgg

SEQ ID NO: 106711 - DNA, 30 bp, Artificial Sequence
  Synthetic oligonucleotide
gggagtgatgcctacatgtatgttttgtgg

SEQ ID NO: 106712 - DNA, 30 bp, Artificial Sequence
  Synthetic oligonucleotide
tcgcttaggaccagatttagtaacaattgg

SEQ ID NO: 106713 - DNA, 30 bp, Artificial Sequence
  Synthetic oligonucleotide
taaaatagtcaaataaggatcactaattgg

SEQ ID NO: 106714 - DNA, 30 bp, Artificial Sequence
  Synthetic oligonucleotide
tcctcgctatagaagttcagtcaacattgg

SEQ ID NO: 106715 - DNA, 30 bp, Artificial Sequence
  Synthetic oligonucleotide
gtacggaatggaagacttgttagccattgg

SEQ ID NO: 106716 - DNA, 30 bp, Artificial Sequence
  Synthetic oligonucleotide
atcagcaacgagtcggagaaatctcattgg

SEQ ID NO: 106717 - DNA, 30 bp, Artificial Sequence
  Synthetic oligonucleotide
taccacgaggcgagaagggcgtgatattgg

SEQ ID NO: 106718 - DNA, 28 bp, Artificial Sequence
  Synthetic oligonucleotide
ctaacgatttgtgaaaattggctattgg

SEQ ID NO: 106719 - DNA, 30 bp, Artificial Sequence
  Synthetic oligonucleotide
agctcatccgcaagaatcgacaagtattgg

SEQ ID NO: 106720 - DNA, 30 bp, Artificial Sequence
  Synthetic oligonucleotide
gggaacaatcatgatccctgctacacttgg

SEQ ID NO: 106721 - DNA, 30 bp, Artificial Sequence
  Synthetic oligonucleotide
cctttgaggcatgtgcggctatggacttgg

SEQ ID NO: 106722 - DNA, 30 bp, Artificial Sequence
  Synthetic oligonucleotide
gggtgccgttctgtaagctgtccggcttgg

SEQ ID NO: 106723 - DNA, 30 bp, Artificial Sequence
  Synthetic oligonucleotide
gacatcgatcaaggctaattgcctgcttgg

SEQ ID NO: 106724 - DNA, 30 bp, Artificial Sequence
  Synthetic oligonucleotide
ttacacggaatggtccgttagacgtcttgg

SEQ ID NO: 106725 - DNA, 30 bp, Artificial Sequence
  Synthetic oligonucleotide
cgaacggtgccgtaaataacagcttcttgg

SEQ ID NO: 106726 - DNA, 30 bp, Artificial Sequence
  Synthetic oligonucleotide
tttgtcggcgatcaagatactacaagttgg

SEQ ID NO: 106727 - DNA, 30 bp, Artificial Sequence
  Synthetic oligonucleotide
gtacgcctatttgtaattgcgctaagttgg

SEQ ID NO: 106728 - DNA, 30 bp, Artificial Sequence
  Synthetic oligonucleotide
gtggaattggttggtgccgctctacgttgg

SEQ ID NO: 106729 - DNA, 30 bp, Artificial Sequence
  Synthetic oligonucleotide
agctacgcttatactgtaggcacccgttgg

SEQ ID NO: 106730 - DNA, 30 bp, Artificial Sequence
  Synthetic oligonucleotide
cataaacggaacgtatgggagtcgcgttgg

SEQ ID NO: 106731 - DNA, 30 bp, Artificial Sequence
  Synthetic oligonucleotide
tttgaaaagggaagcgagcacaacggttgg

SEQ ID NO: 106732 - DNA, 30 bp, Artificial Sequence
  Synthetic oligonucleotide
taacaacagcctaatgtaattggtggttgg

SEQ ID NO: 106733 - DNA, 30 bp, Artificial Sequence
  Synthetic oligonucleotide
cggagtacgcctccacgatcggtctgttgg

SEQ ID NO: 106734 - DNA, 30 bp, Artificial Sequence
  Synthetic oligonucleotide
ctattcaacagcggcactagcgagatttgg

SEQ ID NO: 106735 - DNA, 30 bp, Artificial Sequence
  Synthetic oligonucleotide
cgtagttaaggtgataggtagggtctttgg

SEQ ID NO: 106736 - DNA, 30 bp, Artificial Sequence
  Synthetic oligonucleotide
ggacacgtatcctgggtagtccttctttgg

SEQ ID NO: 106737 - DNA, 30 bp, Artificial Sequence
  Synthetic oligonucleotide
aaggtattttaaaatagatctacggtttgg

SEQ ID NO: 106738 - DNA, 30 bp, Artificial Sequence
  Synthetic oligonucleotide
tgtagtcgatgattatgcataaatgtttgg

SEQ ID NO: 106739 - DNA, 30 bp, Artificial Sequence
  Synthetic oligonucleotide
tgatcgtaactcgtggacagttgattttgg

SEQ ID NO: 106740 - DNA, 30 bp, Artificial Sequence
  Synthetic oligonucleotide
cagagatgaatctggaatgcagaaaaaatg

SEQ ID NO: 106741 - DNA, 30 bp, Artificial Sequence
  Synthetic oligonucleotide
taccgaaatctacattatcgcgtcaaaatg

SEQ ID NO: 106742 - DNA, 30 bp, Artificial Sequence
  Synthetic oligonucleotide
agggcacagtgcccagacagatctaaaatg

SEQ ID NO: 106743 - DNA, 30 bp, Artificial Sequence
  Synthetic oligonucleotide
gcgttgcagggatactctttgtgacaaatg

SEQ ID NO: 106744 - DNA, 29 bp, Artificial Sequence
  Synthetic oligonucleotide
gcttatcaaatgggcgagcgtaccaaatg

SEQ ID NO: 106745 - DNA, 30 bp, Artificial Sequence
  Synthetic oligonucleotide
cggaaagtgaccgcaaacgcgcgtcaaatg

SEQ ID NO: 106746 - DNA, 30 bp, Artificial Sequence
  Synthetic oligonucleotide
gccatgggttacaaatgtattaacgaaatg

SEQ ID NO: 106747 - DNA, 30 bp, Artificial Sequence
  Synthetic oligonucleotide
cttatacacacagaccgacataaggaaatg

SEQ ID NO: 106748 - DNA, 30 bp, Artificial Sequence
  Synthetic oligonucleotide
tacgcgcggctacctcgagacggtgaaatg

SEQ ID NO: 106749 - DNA, 30 bp, Artificial Sequence
  Synthetic oligonucleotide
ggctgaggagggatgggaatgtttgaaatg

SEQ ID NO: 106750 - DNA, 30 bp, Artificial Sequence
  Synthetic oligonucleotide
caccgcctcgcgtttaagcaccactaaatg

SEQ ID NO: 106751 - DNA, 30 bp, Artificial Sequence
  Synthetic oligonucleotide
gtcgaataggatcttagggttgtttaaatg

SEQ ID NO: 106752 - DNA, 30 bp, Artificial Sequence
  Synthetic oligonucleotide
ccgtgaaagttctccatgagctacacaatg

SEQ ID NO: 106753 - DNA, 30 bp, Artificial Sequence
  Synthetic oligonucleotide
cgaggaacgggaaaggtggtagccacaatg

SEQ ID NO: 106754 - DNA, 30 bp, Artificial Sequence
  Synthetic oligonucleotide
ctaactacgagctgatcggaaaaaccaatg

SEQ ID NO: 106755 - DNA, 30 bp, Artificial Sequence
  Synthetic oligonucleotide
atggtcgggttataaagcagacacccaatg

SEQ ID NO: 106756 - DNA, 30 bp, Artificial Sequence
  Synthetic oligonucleotide
caagactggcatatctggataagtccaatg

SEQ ID NO: 106757 - DNA, 30 bp, Artificial Sequence
  Synthetic oligonucleotide
cccggaccagccaaacatttatcagcaatg

SEQ ID NO: 106758 - DNA, 30 bp, Artificial Sequence
  Synthetic oligonucleotide
gcttcgctcgctgccaagggtgactcaatg

SEQ ID NO: 106759 - DNA, 30 bp, Artificial Sequence
  Synthetic oligonucleotide
tattgccaaacacctactgttgcctcaatg

SEQ ID NO: 106760 - DNA, 30 bp, Artificial Sequence
  Synthetic oligonucleotide
cggggaaacctcgtgcgagtggacagaatg

SEQ ID NO: 106761 - DNA, 30 bp, Artificial Sequence
  Synthetic oligonucleotide
tacgagagagatagcccacgactcagaatg

SEQ ID NO: 106762 - DNA, 30 bp, Artificial Sequence
  Synthetic oligonucleotide
cggtcgaagggctaatttgccaggagaatg

SEQ ID NO: 106763 - DNA, 30 bp, Artificial Sequence
  Synthetic oligonucleotide
cctgcggtgcgtaagagcctaatgagaatg

SEQ ID NO: 106764 - DNA, 30 bp, Artificial Sequence
  Synthetic oligonucleotide
gtgaggaaagaaatctggggggttagaatg

SEQ ID NO: 106765 - DNA, 30 bp, Artificial Sequence
  Synthetic oligonucleotide
tcggagggggagatcttaacaagccgaatg

SEQ ID NO: 106766 - DNA, 30 bp, Artificial Sequence
  Synthetic oligonucleotide
gaggtggaagtcatgtattgtctctgaatg

SEQ ID NO: 106767 - DNA, 30 bp, Artificial Sequence
  Synthetic oligonucleotide
tcgtcataatggtcgagggagcagtgaatg

SEQ ID NO: 106768 - DNA, 30 bp, Artificial Sequence
  Synthetic oligonucleotide
ccgtgagctaactgggactgtgcaataatg

SEQ ID NO: 106769 - DNA, 30 bp, Artificial Sequence
  Synthetic oligonucleotide
attggcgtggactggatgtcacgcataatg

SEQ ID NO: 106770 - DNA, 30 bp, Artificial Sequence
  Synthetic oligonucleotide
ggttaaaatacgaatgcccaaaggataatg

SEQ ID NO: 106771 - DNA, 30 bp, Artificial Sequence
  Synthetic oligonucleotide
tgtcagtgatcacaggggaccaggataatg

SEQ ID NO: 106772 - DNA, 30 bp, Artificial Sequence
  Synthetic oligonucleotide
gaaatagcgacttgtgactgtcacctaatg

SEQ ID NO: 106773 - DNA, 30 bp, Artificial Sequence
  Synthetic oligonucleotide
cgggggtcagcagaatccgctttcctaatg

SEQ ID NO: 106774 - DNA, 30 bp, Artificial Sequence
  Synthetic oligonucleotide
gtcgtcctaaccaagcgacaagagctaatg

SEQ ID NO: 106775 - DNA, 30 bp, Artificial Sequence
  Synthetic oligonucleotide
gctgacaatgggtctcgcccagcattaatg

SEQ ID NO: 106776 - DNA, 30 bp, Artificial Sequence
  Synthetic oligonucleotide
aggccattacagatgaatcaaaagttaatg

SEQ ID NO: 106777 - DNA, 30 bp, Artificial Sequence
  Synthetic oligonucleotide
gataagtgtagccgatgatcgaaaaacatg

SEQ ID NO: 106778 - DNA, 30 bp, Artificial Sequence
  Synthetic oligonucleotide
aatacaatctgacaataagggttaaacatg

SEQ ID NO: 106779 - DNA, 30 bp, Artificial Sequence
  Synthetic oligonucleotide
cgcggggcataagaccggtccgagaacatg

SEQ ID NO: 106780 - DNA, 30 bp, Artificial Sequence
  Synthetic oligonucleotide
ccgccggtctataatggaacatcacacatg

SEQ ID NO: 106781 - DNA, 30 bp, Artificial Sequence
  Synthetic oligonucleotide
ctgcgtatactagttgattcatgcgacatg

SEQ ID NO: 106782 - DNA, 30 bp, Artificial Sequence
  Synthetic oligonucleotide
cgtatgcacggctacctgattctggacatg

SEQ ID NO: 106783 - DNA, 30 bp, Artificial Sequence
  Synthetic oligonucleotide
ggtcaattgggcgaggatagttagtacatg

SEQ ID NO: 106784 - DNA, 30 bp, Artificial Sequence
  Synthetic oligonucleotide
cttgtagcccatacacaggtgcgaaccatg

SEQ ID NO: 106785 - DNA, 30 bp, Artificial Sequence
  Synthetic oligonucleotide
cgcgattccagttgagccgttgtcaccatg

SEQ ID NO: 106786 - DNA, 30 bp, Artificial Sequence
  Synthetic oligonucleotide
ataagcacaacatcgtgctcagataccatg

SEQ ID NO: 106787 - DNA, 30 bp, Artificial Sequence
  Synthetic oligonucleotide
gtactcgtaacgtgaaattttgctaccatg

SEQ ID NO: 106788 - DNA, 30 bp, Artificial Sequence
  Synthetic oligonucleotide
tgtcagtcgaccaggtataggcagcccatg

SEQ ID NO: 106789 - DNA, 30 bp, Artificial Sequence
  Synthetic oligonucleotide
tcgtactttcggacaagggactttcccatg

SEQ ID NO: 106790 - DNA, 30 bp, Artificial Sequence
  Synthetic oligonucleotide
gcgggcttgtactgcgggggacccgccatg

SEQ ID NO: 106791 - DNA, 30 bp, Artificial Sequence
  Synthetic oligonucleotide
cgtatttctgtctgagcctaataatccatg

SEQ ID NO: 106792 - DNA, 30 bp, Artificial Sequence
  Synthetic oligonucleotide
cgatagggtactgcgtgcaatagatccatg

SEQ ID NO: 106793 - DNA, 30 bp, Artificial Sequence
  Synthetic oligonucleotide
aagaaattagacaccgaagcaccttccatg

SEQ ID NO: 106794 - DNA, 30 bp, Artificial Sequence
  Synthetic oligonucleotide
agggatgaccgacaggctcccgaaagcatg

SEQ ID NO: 106795 - DNA, 30 bp, Artificial Sequence
  Synthetic oligonucleotide
ataaggataagctgcgaccaggctcgcatg

SEQ ID NO: 106796 - DNA, 30 bp, Artificial Sequence
  Synthetic oligonucleotide
cagtcgaccccacaactactattaggcatg

SEQ ID NO: 106797 - DNA, 30 bp, Artificial Sequence
  Synthetic oligonucleotide
gaaaggcaaacggacgacatcttcggcatg

SEQ ID NO: 106798 - DNA, 30 bp, Artificial Sequence
  Synthetic oligonucleotide
gaatggataggcatgaccgacccgggcatg

SEQ ID NO: 106799 - DNA, 30 bp, Artificial Sequence
  Synthetic oligonucleotide
catcctagtctccatcggttagctggcatg

SEQ ID NO: 106800 - DNA, 30 bp, Artificial Sequence
  Synthetic oligonucleotide
acacagcactagagaacgctatcatgcatg

SEQ ID NO: 106801 - DNA, 30 bp, Artificial Sequence
  Synthetic oligonucleotide
tgagtccatacgatcagggatgtaatcatg

SEQ ID NO: 106802 - DNA, 30 bp, Artificial Sequence
  Synthetic oligonucleotide
tggaggtcggaagaaactctaggactcatg

SEQ ID NO: 106803 - DNA, 31 bp, Artificial Sequence
  Synthetic oligonucleotide
cagtcacaggatcagtattaaggacctcatg

SEQ ID NO: 106804 - DNA, 30 bp, Artificial Sequence
  Synthetic oligonucleotide
atctgcgatggtactgccctacccctcatg

SEQ ID NO: 106805 - DNA, 30 bp, Artificial Sequence
  Synthetic oligonucleotide
gcgggctagcgctctagactgagagtcatg

SEQ ID NO: 106806 - DNA, 31 bp, Artificial Sequence
  Synthetic oligonucleotide
accaggcaaaacaccgcacccgccggtcatg

SEQ ID NO: 106807 - DNA, 30 bp, Artificial Sequence
  Synthetic oligonucleotide
gcttaaaaggcaagtgtccccagattcatg

SEQ ID NO: 106808 - DNA, 30 bp, Artificial Sequence
  Synthetic oligonucleotide
aggccttcggtctggtggagggcaaagatg

SEQ ID NO: 106809 - DNA, 30 bp, Artificial Sequence
  Synthetic oligonucleotide
aaagggttggcaggcaccgtttcaaagatg

SEQ ID NO: 106810 - DNA, 30 bp, Artificial Sequence
  Synthetic oligonucleotide
tggatatggtccgcaggtaatgagaagatg

SEQ ID NO: 106811 - DNA, 30 bp, Artificial Sequence
  Synthetic oligonucleotide
aggtcggccaattcattcatctctaagatg

SEQ ID NO: 106812 - DNA, 30 bp, Artificial Sequence
  Synthetic oligonucleotide
caagacgctgagaaacaaaccgcgcagatg

SEQ ID NO: 106813 - DNA, 30 bp, Artificial Sequence
  Synthetic oligonucleotide
gacgatgctgacaatgattgtaggcagatg

SEQ ID NO: 106814 - DNA, 30 bp, Artificial Sequence
  Synthetic oligonucleotide
ttcttcagcggtctatagaactcagagatg

SEQ ID NO: 106815 - DNA, 30 bp, Artificial Sequence
  Synthetic oligonucleotide
cgactttcaagtcgccggtggtgggagatg

SEQ ID NO: 106816 - DNA, 30 bp, Artificial Sequence
  Synthetic oligonucleotide
caagagatgctcggcgcgcgctctgagatg

SEQ ID NO: 106817 - DNA, 30 bp, Artificial Sequence
  Synthetic oligonucleotide
agcagggcggtaattggttgttcatagatg

SEQ ID NO: 106818 - DNA, 30 bp, Artificial Sequence
  Synthetic oligonucleotide
agatgcacttgtgacagtatatactagatg

SEQ ID NO: 106819 - DNA, 30 bp, Artificial Sequence
  Synthetic oligonucleotide
attcaagaaactcaaatcaaagacacgatg

SEQ ID NO: 106820 - DNA, 29 bp, Artificial Sequence
  Synthetic oligonucleotide
cactgaatctgtcttttccgacgacgatg

SEQ ID NO: 106821 - DNA, 30 bp, Artificial Sequence
  Synthetic oligonucleotide
catgctgtaggggggtttcaagaaccgatg

SEQ ID NO: 106822 - DNA, 30 bp, Artificial Sequence
  Synthetic oligonucleotide
tggtgatgtggacgataagtttgaccgatg

SEQ ID NO: 106823 - DNA, 30 bp, Artificial Sequence
  Synthetic oligonucleotide
cgggagaacgctccaaaggggactccgatg

SEQ ID NO: 106824 - DNA, 30 bp, Artificial Sequence
  Synthetic oligonucleotide
ccttacactggggactgaacacttccgatg

SEQ ID NO: 106825 - DNA, 30 bp, Artificial Sequence
  Synthetic oligonucleotide
gtctgaagactggcgctccaccacgcgatg

SEQ ID NO: 106826 - DNA, 30 bp, Artificial Sequence
  Synthetic oligonucleotide
atgagcaatgaggacgggcatgaggcgatg

SEQ ID NO: 106827 - DNA, 30 bp, Artificial Sequence
  Synthetic oligonucleotide
ctatggaggtccaagtaatttttggcgatg

SEQ ID NO: 106828 - DNA, 30 bp, Artificial Sequence
  Synthetic oligonucleotide
ccaaaaccttgatccgtcactctatcgatg

SEQ ID NO: 106829 - DNA, 30 bp, Artificial Sequence
  Synthetic oligonucleotide
accaagcggggtttattgctggcctcgatg

SEQ ID NO: 106830 - DNA, 30 bp, Artificial Sequence
  Synthetic oligonucleotide
ctagggcagagaaacgcaactttttcgatg

SEQ ID NO: 106831 - DNA, 30 bp, Artificial Sequence
  Synthetic oligonucleotide
atgcggcgcaagccccatagcgtcaggatg

SEQ ID NO: 106832 - DNA, 30 bp, Artificial Sequence
  Synthetic oligonucleotide
cctgatgtcattctgccaaggtgtaggatg

SEQ ID NO: 106833 - DNA, 30 bp, Artificial Sequence
  Synthetic oligonucleotide
gcttgcgtcatctgagtatattgtaggatg

SEQ ID NO: 106834 - DNA, 30 bp, Artificial Sequence
  Synthetic oligonucleotide
ctggataagcggattggcaccatacggatg

SEQ ID NO: 106835 - DNA, 30 bp, Artificial Sequence
  Synthetic oligonucleotide
ccaggcctgaagcttgcgttgatacggatg

SEQ ID NO: 106836 - DNA, 30 bp, Artificial Sequence
  Synthetic oligonucleotide
aaagaaatggggctcattgttgcagggatg

SEQ ID NO: 106837 - DNA, 29 bp, Artificial Sequence
  Synthetic oligonucleotide
aggtgtacactgaccggagccgagggatg

SEQ ID NO: 106838 - DNA, 30 bp, Artificial Sequence
  Synthetic oligonucleotide
atcgaccgattagtacacagagaggggatg

SEQ ID NO: 106839 - DNA, 30 bp, Artificial Sequence
  Synthetic oligonucleotide
tctgatcaaggtaccgcggactcgtggatg

SEQ ID NO: 106840 - DNA, 30 bp, Artificial Sequence
  Synthetic oligonucleotide
caaggattgcttgcgcgtcgaatgtggatg

SEQ ID NO: 106841 - DNA, 30 bp, Artificial Sequence
  Synthetic oligonucleotide
gaccacgtagagcgatcctataccatgatg

SEQ ID NO: 106842 - DNA, 30 bp, Artificial Sequence
  Synthetic oligonucleotide
caagtttcagacctgactccagtgatgatg

SEQ ID NO: 106843 - DNA, 30 bp, Artificial Sequence
  Synthetic oligonucleotide
cgtgtggcaacggtatattgtgtactgatg

SEQ ID NO: 106844 - DNA, 30 bp, Artificial Sequence
  Synthetic oligonucleotide
cagggtgtcgctgggcgttagagcctgatg

SEQ ID NO: 106845 - DNA, 30 bp, Artificial Sequence
  Synthetic oligonucleotide
tgaagggtacgcctcggtccttggctgatg

SEQ ID NO: 106846 - DNA, 30 bp, Artificial Sequence
  Synthetic oligonucleotide
tgatttgaaaggtcgggatgaccagtgatg

SEQ ID NO: 106847 - DNA, 30 bp, Artificial Sequence
  Synthetic oligonucleotide
gcacagtgagccgaagtgctcaaattgatg

SEQ ID NO: 106848 - DNA, 30 bp, Artificial Sequence
  Synthetic oligonucleotide
ccagactgttggggacgtgaacacttgatg

SEQ ID NO: 106849 - DNA, 30 bp, Artificial Sequence
  Synthetic oligonucleotide
cgtcctggggaaggagctggtccaaatatg

SEQ ID NO: 106850 - DNA, 30 bp, Artificial Sequence
  Synthetic oligonucleotide
atgcggaaaatcgcatgggagggaaatatg

SEQ ID NO: 106851 - DNA, 30 bp, Artificial Sequence
  Synthetic oligonucleotide
gttggcgagctggctttagactgcaatatg

SEQ ID NO: 106852 - DNA, 30 bp, Artificial Sequence
  Synthetic oligonucleotide
acaagggcatatcaagagcaacctaatatg

SEQ ID NO: 106853 - DNA, 30 bp, Artificial Sequence
  Synthetic oligonucleotide
gccaatcgcacattaaccccgtaagatatg

SEQ ID NO: 106854 - DNA, 30 bp, Artificial Sequence
  Synthetic oligonucleotide
ggtgaaactgctaagtgtatacgcgatatg

SEQ ID NO: 106855 - DNA, 30 bp, Artificial Sequence
  Synthetic oligonucleotide
ggctctgctcgaaagtactattaggatatg

SEQ ID NO: 106856 - DNA, 30 bp, Artificial Sequence
  Synthetic oligonucleotide
tcgatctgtcgctacgtttcaagtgatatg

SEQ ID NO: 106857 - DNA, 30 bp, Artificial Sequence
  Synthetic oligonucleotide
gaggagctggccgggtttgaaaaatatatg

SEQ ID NO: 106858 - DNA, 30 bp, Artificial Sequence
  Synthetic oligonucleotide
gactgatatgggcagtaggcttcatatatg

SEQ ID NO: 106859 - DNA, 30 bp, Artificial Sequence
  Synthetic oligonucleotide
ggcttcgaacatatcatcgcttattatatg

SEQ ID NO: 106860 - DNA, 30 bp, Artificial Sequence
  Synthetic oligonucleotide
acatggaacgtactataggaatgagctatg

SEQ ID NO: 106861 - DNA, 30 bp, Artificial Sequence
  Synthetic oligonucleotide
acacaatcaactggaccggtccactctatg

SEQ ID NO: 106862 - DNA, 30 bp, Artificial Sequence
  Synthetic oligonucleotide
tatggagggcaacccgattcgagacgtatg

SEQ ID NO: 106863 - DNA, 30 bp, Artificial Sequence
  Synthetic oligonucleotide
ctgataatgtaccgatttaggcggggtatg

SEQ ID NO: 106864 - DNA, 30 bp, Artificial Sequence
  Synthetic oligonucleotide
tagcttagcaattcagtttttttgggtatg

SEQ ID NO: 106865 - DNA, 30 bp, Artificial Sequence
  Synthetic oligonucleotide
aggatatgctagattctcatcgcaattatg

SEQ ID NO: 106866 - DNA, 30 bp, Artificial Sequence
  Synthetic oligonucleotide
gtgcaagaagcctatgtaacatggattatg

SEQ ID NO: 106867 - DNA, 30 bp, Artificial Sequence
  Synthetic oligonucleotide
ggacgagatgtattcatgcgctggattatg

SEQ ID NO: 106868 - DNA, 30 bp, Artificial Sequence
  Synthetic oligonucleotide
ctaggaaacatgactagtgcacctattatg

SEQ ID NO: 106869 - DNA, 30 bp, Artificial Sequence
  Synthetic oligonucleotide
tgcaaataggcttgttaacgaagtattatg

SEQ ID NO: 106870 - DNA, 30 bp, Artificial Sequence
  Synthetic oligonucleotide
taccaagaacctaggccaaccagtattatg

SEQ ID NO: 106871 - DNA, 30 bp, Artificial Sequence
  Synthetic oligonucleotide
ctttggcaaagaacggttatctaccttatg

SEQ ID NO: 106872 - DNA, 30 bp, Artificial Sequence
  Synthetic oligonucleotide
cctaagctaaagaactattttggccttatg

SEQ ID NO: 106873 - DNA, 30 bp, Artificial Sequence
  Synthetic oligonucleotide
ctgggctgtgaaaaacctacagggcttatg

SEQ ID NO: 106874 - DNA, 31 bp, Artificial Sequence
  Synthetic oligonucleotide
ccgagcctacgtaggtgtacgagctcttatg

SEQ ID NO: 106875 - DNA, 30 bp, Artificial Sequence
  Synthetic oligonucleotide
aacgacctacgttctgggatgtgtcttatg

SEQ ID NO: 106876 - DNA, 30 bp, Artificial Sequence
  Synthetic oligonucleotide
ccttaatcgtgaaagccgcgggaggttatg

SEQ ID NO: 106877 - DNA, 30 bp, Artificial Sequence
  Synthetic oligonucleotide
cactagtacgaagggcgggctagggttatg

SEQ ID NO: 106878 - DNA, 30 bp, Artificial Sequence
  Synthetic oligonucleotide
tacagaaagggtcatgtgcccgttgttatg

SEQ ID NO: 106879 - DNA, 30 bp, Artificial Sequence
  Synthetic oligonucleotide
ttgtgtcgttacggcgaacctggctttatg

SEQ ID NO: 106880 - DNA, 30 bp, Artificial Sequence
  Synthetic oligonucleotide
agcgcggggaaccaattatacagttttatg

SEQ ID NO: 106881 - DNA, 30 bp, Artificial Sequence
  Synthetic oligonucleotide
tacgtgttggtatcgtcgccacaaaaactg

SEQ ID NO: 106882 - DNA, 30 bp, Artificial Sequence
  Synthetic oligonucleotide
acatggcccggataacgggtccagaaactg

SEQ ID NO: 106883 - DNA, 30 bp, Artificial Sequence
  Synthetic oligonucleotide
ggtctgaaacgacattagctgtcgaaactg

SEQ ID NO: 106884 - DNA, 30 bp, Artificial Sequence
  Synthetic oligonucleotide
cttttctagagaaccgaatcgaaacaactg

SEQ ID NO: 106885 - DNA, 30 bp, Artificial Sequence
  Synthetic oligonucleotide
gcgacaatttcgttgtacctcgaacaactg

SEQ ID NO: 106886 - DNA, 30 bp, Artificial Sequence
  Synthetic oligonucleotide
tacattcgcgcatatagaaggtcacaactg

SEQ ID NO: 106887 - DNA, 30 bp, Artificial Sequence
  Synthetic oligonucleotide
aagattgactagcctccgccaaaccaactg

SEQ ID NO: 106888 - DNA, 30 bp, Artificial Sequence
  Synthetic oligonucleotide
accaacggaacgatgggagagactcaactg

SEQ ID NO: 106889 - DNA, 30 bp, Artificial Sequence
  Synthetic oligonucleotide
ggttgaaccatcacgtccgacatagaactg

SEQ ID NO: 106890 - DNA, 30 bp, Artificial Sequence
  Synthetic oligonucleotide
gcgaaagtaacacagctacttctagaactg

SEQ ID NO: 106891 - DNA, 30 bp, Artificial Sequence
  Synthetic oligonucleotide
cgagtgatatagtgagtccggtgggaactg

SEQ ID NO: 106892 - DNA, 30 bp, Artificial Sequence
  Synthetic oligonucleotide
cgtaactatcacgtatgcgagatggaactg

SEQ ID NO: 106893 - DNA, 30 bp, Artificial Sequence
  Synthetic oligonucleotide
agcgatatactccgcccggggatggaactg

SEQ ID NO: 106894 - DNA, 30 bp, Artificial Sequence
  Synthetic oligonucleotide
agactagagggttaggatgagttggaactg

SEQ ID NO: 106895 - DNA, 30 bp, Artificial Sequence
  Synthetic oligonucleotide
atgttaaacaacttgtttaaattataactg

SEQ ID NO: 106896 - DNA, 30 bp, Artificial Sequence
  Synthetic oligonucleotide
agagttgcggagttttcacggatctaactg

SEQ ID NO: 106897 - DNA, 30 bp, Artificial Sequence
  Synthetic oligonucleotide
ctcggtcaaatagggaccggcatgacactg

SEQ ID NO: 106898 - DNA, 30 bp, Artificial Sequence
  Synthetic oligonucleotide
gagatgcgaactggtgagcctaatacactg

SEQ ID NO: 106899 - DNA, 30 bp, Artificial Sequence
  Synthetic oligonucleotide
ccagttggagatagtgataacagcgcactg

SEQ ID NO: 106900 - DNA, 30 bp, Artificial Sequence
  Synthetic oligonucleotide
gaatgaaggggggaccgaactgcaagactg

SEQ ID NO: 106901 - DNA, 30 bp, Artificial Sequence
  Synthetic oligonucleotide
tacgtaggaccatataccggcggaagactg

SEQ ID NO: 106902 - DNA, 30 bp, Artificial Sequence
  Synthetic oligonucleotide
atgtgttcggccaatcttggcatgagactg

SEQ ID NO: 106903 - DNA, 30 bp, Artificial Sequence
  Synthetic oligonucleotide
agcgtgctaggtaaaaaccgtaaccgactg

SEQ ID NO: 106904 - DNA, 30 bp, Artificial Sequence
  Synthetic oligonucleotide
tcgttcttacctcgcgccgcggtcggactg

SEQ ID NO: 106905 - DNA, 30 bp, Artificial Sequence
  Synthetic oligonucleotide
cagtatattgcgtgccgtgggcggggactg

SEQ ID NO: 106906 - DNA, 30 bp, Artificial Sequence
  Synthetic oligonucleotide
cattaagtagtgatattattgtggggactg

SEQ ID NO: 106907 - DNA, 30 bp, Artificial Sequence
  Synthetic oligonucleotide
aaacgccatcatcaggtgacccgctgactg

SEQ ID NO: 106908 - DNA, 30 bp, Artificial Sequence
  Synthetic oligonucleotide
taagggagaccgcactcgaagttgtgactg

SEQ ID NO: 106909 - DNA, 30 bp, Artificial Sequence
  Synthetic oligonucleotide
tcgcccaaactgatgatcaatctttgactg

SEQ ID NO: 106910 - DNA, 30 bp, Artificial Sequence
  Synthetic oligonucleotide
tgcgaggtactcgatggcatggtttgactg

SEQ ID NO: 106911 - DNA, 30 bp, Artificial Sequence
  Synthetic oligonucleotide
catcttatatacgccaccccaaagatactg

SEQ ID NO: 106912 - DNA, 30 bp, Artificial Sequence
  Synthetic oligonucleotide
taagccgggaggagaggtacaggtatactg

SEQ ID NO: 106913 - DNA, 30 bp, Artificial Sequence
  Synthetic oligonucleotide
caacgtgtgggctctctaggagtactactg

SEQ ID NO: 106914 - DNA, 30 bp, Artificial Sequence
  Synthetic oligonucleotide
cctcaaatgaaatggaattccattctactg

SEQ ID NO: 106915 - DNA, 30 bp, Artificial Sequence
  Synthetic oligonucleotide
atgtaacttggacatttttctgtcgtactg

SEQ ID NO: 106916 - DNA, 30 bp, Artificial Sequence
  Synthetic oligonucleotide
gcgatttaaggaggggtcgtaggggtactg

SEQ ID NO: 106917 - DNA, 30 bp, Artificial Sequence
  Synthetic oligonucleotide
aaacgtcaaaggctactccgatctgtactg

SEQ ID NO: 106918 - DNA, 30 bp, Artificial Sequence
  Synthetic oligonucleotide
gcgtccgaaggttatcagaatggtgtactg

SEQ ID NO: 106919 - DNA, 30 bp, Artificial Sequence
  Synthetic oligonucleotide
ggcaggcctcaaatgcgctttttgttactg

SEQ ID NO: 106920 - DNA, 30 bp, Artificial Sequence
  Synthetic oligonucleotide
agccgcggcatttacgaacgaaaaaacctg

SEQ ID NO: 106921 - DNA, 30 bp, Artificial Sequence
  Synthetic oligonucleotide
tcacaactagaagcagggatatacaacctg

SEQ ID NO: 106922 - DNA, 30 bp, Artificial Sequence
  Synthetic oligonucleotide
ccgtattagaacggaacaggtacgaacctg

SEQ ID NO: 106923 - DNA, 30 bp, Artificial Sequence
  Synthetic oligonucleotide
gaccttgtaagaacaaacgtaaggcacctg

SEQ ID NO: 106924 - DNA, 30 bp, Artificial Sequence
  Synthetic oligonucleotide
gttggtgatgctcaagagatcttagacctg

SEQ ID NO: 106925 - DNA, 31 bp, Artificial Sequence
  Synthetic oligonucleotide
ttcgacgccctaagatcaataggtcgacctg

SEQ ID NO: 106926 - DNA, 30 bp, Artificial Sequence
  Synthetic oligonucleotide
tactgtggatttgtaaggtctacatacctg

SEQ ID NO: 106927 - DNA, 30 bp, Artificial Sequence
  Synthetic oligonucleotide
tgggatccagcttcaaaagcgaactacctg

SEQ ID NO: 106928 - DNA, 30 bp, Artificial Sequence
  Synthetic oligonucleotide
cgaagtcctcttacgggcagtcactacctg

SEQ ID NO: 106929 - DNA, 30 bp, Artificial Sequence
  Synthetic oligonucleotide
aggggccagtgtttctgcgtatggaccctg

SEQ ID NO: 106930 - DNA, 30 bp, Artificial Sequence
  Synthetic oligonucleotide
agtggactacagttgttttcgatgaccctg

SEQ ID NO: 106931 - DNA, 30 bp, Artificial Sequence
  Synthetic oligonucleotide
tacactgtggggtcgaaccgggttaccctg

SEQ ID NO: 106932 - DNA, 30 bp, Artificial Sequence
  Synthetic oligonucleotide
tagtcgattaaaaccatttcaccgcccctg

SEQ ID NO: 106933 - DNA, 30 bp, Artificial Sequence
  Synthetic oligonucleotide
ttacaaccaaaagtagcgttacactccctg

SEQ ID NO: 106934 - DNA, 30 bp, Artificial Sequence
  Synthetic oligonucleotide
aatcataggcaggaaagccccagcagcctg

SEQ ID NO: 106935 - DNA, 30 bp, Artificial Sequence
  Synthetic oligonucleotide
ataaccccctgcacggtacaagtcagcctg

SEQ ID NO: 106936 - DNA, 30 bp, Artificial Sequence
  Synthetic oligonucleotide
acctggaccatgttgcaattagttagcctg

SEQ ID NO: 106937 - DNA, 30 bp, Artificial Sequence
  Synthetic oligonucleotide
aacgacttgcgtcagcctattaaacgcctg

SEQ ID NO: 106938 - DNA, 30 bp, Artificial Sequence
  Synthetic oligonucleotide
cgcgccattcgaccaccgataaaccgcctg

SEQ ID NO: 106939 - DNA, 30 bp, Artificial Sequence
  Synthetic oligonucleotide
aagataaacgtctaaaacaataagcgcctg

SEQ ID NO: 106940 - DNA, 30 bp, Artificial Sequence
  Synthetic oligonucleotide
tgaaacctcatatcacatcagtcaggcctg

SEQ ID NO: 106941 - DNA, 30 bp, Artificial Sequence
  Synthetic oligonucleotide
gcggatgttagaagtgaggcgggaggcctg

SEQ ID NO: 106942 - DNA, 30 bp, Artificial Sequence
  Synthetic oligonucleotide
accacttgagtggacctgaatgatggcctg

SEQ ID NO: 106943 - DNA, 30 bp, Artificial Sequence
  Synthetic oligonucleotide
aatgcctcggtctacgggaacgagtgcctg

SEQ ID NO: 106944 - DNA, 30 bp, Artificial Sequence
  Synthetic oligonucleotide
ttcacaactaatatctgcgagccgtgcctg

SEQ ID NO: 106945 - DNA, 30 bp, Artificial Sequence
  Synthetic oligonucleotide
ctagcctcaaccacgtattgctcgtgcctg

SEQ ID NO: 106946 - DNA, 30 bp, Artificial Sequence
  Synthetic oligonucleotide
ctcgcctgtgagaactgaatgacttgcctg

SEQ ID NO: 106947 - DNA, 30 bp, Artificial Sequence
  Synthetic oligonucleotide
ggaagcattatccttacgaacgtttgcctg

SEQ ID NO: 106948 - DNA, 30 bp, Artificial Sequence
  Synthetic oligonucleotide
ggatagtaactgacatgtcgataactcctg

SEQ ID NO: 106949 - DNA, 30 bp, Artificial Sequence
  Synthetic oligonucleotide
tatcgcggttgctaaaagagggatctcctg

SEQ ID NO: 106950 - DNA, 30 bp, Artificial Sequence
  Synthetic oligonucleotide
gcctataacctctaggtcaatacgttcctg

SEQ ID NO: 106951 - DNA, 30 bp, Artificial Sequence
  Synthetic oligonucleotide
ggagaatggatacggaactctgtgttcctg

SEQ ID NO: 106952 - DNA, 30 bp, Artificial Sequence
  Synthetic oligonucleotide
aggtctgctacgcatgagaacattttcctg

SEQ ID NO: 106953 - DNA, 30 bp, Artificial Sequence
  Synthetic oligonucleotide
cgggaccaattgacattgccgtttttcctg

SEQ ID NO: 106954 - DNA, 31 bp, Artificial Sequence
  Synthetic oligonucleotide
tgtgtgcaccaaaataccctatgtgaagctg

SEQ ID NO: 106955 - DNA, 30 bp, Artificial Sequence
  Synthetic oligonucleotide
tcctttcttaagtacactaaatataagctg

SEQ ID NO: 106956 - DNA, 30 bp, Artificial Sequence
  Synthetic oligonucleotide
gaatatgcacttggccgtggataacagctg

SEQ ID NO: 106957 - DNA, 30 bp, Artificial Sequence
  Synthetic oligonucleotide
gataactgcgatcacgaactgtaacagctg

SEQ ID NO: 106958 - DNA, 30 bp, Artificial Sequence
  Synthetic oligonucleotide
aacaatctcaagagcatggaacaagagctg

SEQ ID NO: 106959 - DNA, 30 bp, Artificial Sequence
  Synthetic oligonucleotide
agctgcaacagttgggtggcgctagagctg

SEQ ID NO: 106960 - DNA, 30 bp, Artificial Sequence
  Synthetic oligonucleotide
gtgtacccccacagagctatcctggagctg

SEQ ID NO: 106961 - DNA, 30 bp, Artificial Sequence
  Synthetic oligonucleotide
acttacgcactaaccaattccactgagctg

SEQ ID NO: 106962 - DNA, 30 bp, Artificial Sequence
  Synthetic oligonucleotide
tgataccggtcctgtgtcgacgaaacgctg

SEQ ID NO: 106963 - DNA, 30 bp, Artificial Sequence
  Synthetic oligonucleotide
acgcccaaacatggtatttggactccgctg

SEQ ID NO: 106964 - DNA, 30 bp, Artificial Sequence
  Synthetic oligonucleotide
cttaggtcgatgtagaggcgcgggtcgctg

SEQ ID NO: 106965 - DNA, 30 bp, Artificial Sequence
  Synthetic oligonucleotide
gaagatatcacagggaatgtaccaaggctg

SEQ ID NO: 106966 - DNA, 30 bp, Artificial Sequence
  Synthetic oligonucleotide
cgacttttagcgtccgatcattacaggctg

SEQ ID NO: 106967 - DNA, 30 bp, Artificial Sequence
  Synthetic oligonucleotide
ggaaattcggaaacatgtacccagaggctg

SEQ ID NO: 106968 - DNA, 30 bp, Artificial Sequence
  Synthetic oligonucleotide
agtagtctgatccggcgtgagcagaggctg

SEQ ID NO: 106969 - DNA, 30 bp, Artificial Sequence
  Synthetic oligonucleotide
caagagtcttgcccaagcaactcgaggctg

SEQ ID NO: 106970 - DNA, 30 bp, Artificial Sequence
  Synthetic oligonucleotide
acaagttttgaatcgagtgtcatacggctg

SEQ ID NO: 106971 - DNA, 30 bp, Artificial Sequence
  Synthetic oligonucleotide
ggtcattgaccattctccgacaagcggctg

SEQ ID NO: 106972 - DNA, 30 bp, Artificial Sequence
  Synthetic oligonucleotide
ctttcagcccaagaagattagaagcggctg

SEQ ID NO: 106973 - DNA, 30 bp, Artificial Sequence
  Synthetic oligonucleotide
ggagccgaggtcacggacaccgatcggctg

SEQ ID NO: 106974 - DNA, 30 bp, Artificial Sequence
  Synthetic oligonucleotide
aagggaaatttctgattgcgagcagggctg

SEQ ID NO: 106975 - DNA, 30 bp, Artificial Sequence
  Synthetic oligonucleotide
tcgccgtggagcaatgaaggtacggggctg

SEQ ID NO: 106976 - DNA, 30 bp, Artificial Sequence
  Synthetic oligonucleotide
caaggtatttgtaagacaagtcaatggctg

SEQ ID NO: 106977 - DNA, 30 bp, Artificial Sequence
  Synthetic oligonucleotide
cagtgctattgctaataatgcgtatggctg

SEQ ID NO: 106978 - DNA, 30 bp, Artificial Sequence
  Synthetic oligonucleotide
tggagcgaagcctcttgggggagctggctg

SEQ ID NO: 106979 - DNA, 30 bp, Artificial Sequence
  Synthetic oligonucleotide
atagcacgggtcatttgattcgagtggctg

SEQ ID NO: 106980 - DNA, 30 bp, Artificial Sequence
  Synthetic oligonucleotide
tcttgatgtgtccagtggggcaggtggctg

SEQ ID NO: 106981 - DNA, 30 bp, Artificial Sequence
  Synthetic oligonucleotide
tgacaatcccccaccatcatgctaatgctg

SEQ ID NO: 106982 - DNA, 30 bp, Artificial Sequence
  Synthetic oligonucleotide
cgccccgaccggggaaattgtaatatgctg

SEQ ID NO: 106983 - DNA, 30 bp, Artificial Sequence
  Synthetic oligonucleotide
cgtcttaaagctcagtaaggacagctgctg

SEQ ID NO: 106984 - DNA, 30 bp, Artificial Sequence
  Synthetic oligonucleotide
gatgggcccattaacggagttgtagtgctg

SEQ ID NO: 106985 - DNA, 30 bp, Artificial Sequence
  Synthetic oligonucleotide
agttacagtttgaatatagcattagtgctg

SEQ ID NO: 106986 - DNA, 30 bp, Artificial Sequence
  Synthetic oligonucleotide
ggggtctcgcgttctagacgaggcgtgctg

SEQ ID NO: 106987 - DNA, 30 bp, Artificial Sequence
  Synthetic oligonucleotide
tgcacggtcgagaactatacctaggtgctg

SEQ ID NO: 106988 - DNA, 30 bp, Artificial Sequence
  Synthetic oligonucleotide
agtgcactatcatcccacaagaaaaatctg

SEQ ID NO: 106989 - DNA, 30 bp, Artificial Sequence
  Synthetic oligonucleotide
gggaaccaattctatagtaatagcaatctg

SEQ ID NO: 106990 - DNA, 30 bp, Artificial Sequence
  Synthetic oligonucleotide
atggtagaacaggcgagagttttgcatctg

SEQ ID NO: 106991 - DNA, 30 bp, Artificial Sequence
  Synthetic oligonucleotide
acgcagcgggtggtttagttaaaagatctg

SEQ ID NO: 106992 - DNA, 30 bp, Artificial Sequence
  Synthetic oligonucleotide
ctacgcgtattggttgtcgtgcgggatctg

SEQ ID NO: 106993 - DNA, 30 bp, Artificial Sequence
  Synthetic oligonucleotide
ccgcaagcgaagctagcagtcgaatatctg

SEQ ID NO: 106994 - DNA, 30 bp, Artificial Sequence
  Synthetic oligonucleotide
ggacgcgtcggcctcgcggatcagtatctg

SEQ ID NO: 106995 - DNA, 30 bp, Artificial Sequence
  Synthetic oligonucleotide
aagaggttcagacatgtcatggattatctg

SEQ ID NO: 106996 - DNA, 30 bp, Artificial Sequence
  Synthetic oligonucleotide
cacttaggatcggtgatacgagctactctg
